United States Patent Application Publication US 2022/0213167 A1 - sequence listing, part 14

SEQ ID NO: 284055 - protein, 14 aa, Homo sapiens
  CDR3 for alpha chain variable domain of TCR clone 142028 (TRAV2, TRAJ9)
CSVEDRSGGFKTIF

SEQ ID NO: 284056 - protein, 15 aa, Homo sapiens
  CDR3 for beta chain variable domain of TCR clone 142028 (TRBV7-2, TRBJ2-1)
CASSSGLAGGNEQFF

SEQ ID NO: 284057 - protein, 12 aa, Homo sapiens
  CDR3 for alpha chain variable domain of TCR clone 142029 (TRAV12-3, TRAJ17)
CALTLTGNKLTI

SEQ ID NO: 284058 - protein, 15 aa, Homo sapiens
  CDR3 for beta chain variable domain of TCR clone 142029 (TRBV20-1, TRBJ2-7)
CSARDRVSGMDEQYF

SEQ ID NO: 284059 - protein, 13 aa, Homo sapiens
  CDR3 for alpha chain variable domain of TCR clone 142030 (TRAV21, TRAJ20)
CAVGLRVDYKLSF

SEQ ID NO: 284060 - protein, 18 aa, Homo sapiens
  CDR3 for beta chain variable domain of TCR clone 142030 (TRBV7-6, TRBJ2-1)
CASSPRTSGMSSYNVQFF

SEQ ID NO: 284061 - protein, 14 aa, Homo sapiens
  CDR3 for alpha chain variable domain of TCR clone 142031 (TRAV21, TRAJ28)
CAVGSGAGSYQLTI

SEQ ID NO: 284062 - protein, 14 aa, Homo sapiens
  CDR3 for beta chain variable domain of TCR clone 142031 (TRBV18, TRBJ1-4)
CASSPGPNGEKLFF

SEQ ID NO: 284063 - protein, 12 aa, Homo sapiens
  CDR3 for alpha chain variable domain of TCR clone 142032 (TRAV12-3, TRAJ17)
CAMTLTGNRLTF

SEQ ID NO: 284064 - protein, 16 aa, Homo sapiens
  CDR3 for beta chain variable domain of TCR clone 142032 (TRBV12-4, TRBJ2-5)
CASSFFVRGRQETQYF

SEQ ID NO: 284065 - protein, 12 aa, Homo sapiens
  CDR3 for alpha chain variable domain of TCR clone 142033 (TRAV12-3, TRAJ21)
CAMFNNFNKFYF

SEQ ID NO: 284066 - protein, 16 aa, Homo sapiens
  CDR3 for beta chain variable domain of TCR clone 142033 (TRBV7-9, TRBJ1-2)
CASSLAPLRAAYGYTL

SEQ ID NO: 284067 - protein, 12 aa, Homo sapiens
  CDR3 for alpha chain variable domain of TCR clone 142034 (TRAV12-3, TRAJ17)
CAMTLTGNELTF

SEQ ID NO: 284068 - protein, 13 aa, Homo sapiens
  CDR3 for beta chain variable domain of TCR clone 142034 (TRBV12-4, TRBJ1-2)
CASSLRQGKGYTF

SEQ ID NO: 284069 - protein, 14 aa, Homo sapiens
  CDR3 for alpha chain variable domain of TCR clone 142035 (TRAV1-2, TRAJ8)
CAVREDTGFQKLVF

SEQ ID NO: 284070 - protein, 15 aa, Homo sapiens
  CDR3 for beta chain variable domain of TCR clone 142035 (TRBV7-9, TRBJ1-4)
CASSALTGGNEKLFF

SEQ ID NO: 284071 - protein, 15 aa, Homo sapiens
  CDR3 for alpha chain variable domain of TCR clone 142036 (TRAV12-1, TRAJ9)
CVVSFGDTGGFKTIF

SEQ ID NO: 284072 - protein, 19 aa, Homo sapiens
  CDR3 for beta chain variable domain of TCR clone 142036 (TRBV25-1, TRBJ2-2)
CATLVYRVDRGRKTGELFF

SEQ ID NO: 284073 - protein, 15 aa, Homo sapiens
  CDR3 for alpha chain variable domain of TCR clone 142037 (TRAV29/DV5, TRAJ53)
CAASASGGGNYKLTF

SEQ ID NO: 284074 - protein, 19 aa, Homo sapiens
  CDR3 for beta chain variable domain of TCR clone 142037 (TRBV5-1, TRBJ2-3)
CASSLWLAGGITTTDTQYF

SEQ ID NO: 284075 - protein, 15 aa, Homo sapiens
  CDR3 for alpha chain variable domain of TCR clone 142038 (TRAV1-1, TRAJ23)
CAVREGDNQGGKLIF

SEQ ID NO: 284076 - protein, 15 aa, Homo sapiens
  CDR3 for beta chain variable domain of TCR clone 142038 (TRBV2, TRBJ2-1)
CASSELAGSYNEQFF

SEQ ID NO: 284077 - protein, 11 aa, Homo sapiens
  CDR3 for alpha chain variable domain of TCR clone 142039 (TRAV2, TRAJ13)
CASGGYQKVTF

SEQ ID NO: 284078 - protein, 15 aa, Homo sapiens
  CDR3 for beta chain variable domain of TCR clone 142039 (TRBV6-1, TRBJ2-6)
CASSSRPSGANVLTF

SEQ ID NO: 284079 - protein, 14 aa, Homo sapiens
  CDR3 for alpha chain variable domain of TCR clone 142040 (TRAV21, TRAJ38)
CAVMGAGNNRKLIW

SEQ ID NO: 284080 - protein, 13 aa, Homo sapiens
  CDR3 for beta chain variable domain of TCR clone 142040 (TRBV7-3, TRBJ2-5)
CASSIGFSETQYF

SEQ ID NO: 284081 - protein, 22 aa, Homo sapiens
  CDR3 for alpha chain variable domain of TCR clone 142041 (TRAV8-6, TRAJ6)
CAVTLGEEATYLHLEEEPALLF

SEQ ID NO: 284082 - protein, 15 aa, Homo sapiens
  CDR3 for beta chain variable domain of TCR clone 142041 (TRBV7-2, TRBJ1-1)
CASSPQGGANTESFF

SEQ ID NO: 284083 - protein, 12 aa, Homo sapiens
  CDR3 for alpha chain variable domain of TCR clone 142042 (TRAV3, TRAJ43)
CCERGRNNDMRF

SEQ ID NO: 284084 - protein, 14 aa, Homo sapiens
  CDR3 for beta chain variable domain of TCR clone 142042 (TRBV4-1, TRBJ2-2)
CASSQAVNTGELFF

SEQ ID NO: 284085 - protein, 14 aa, Homo sapiens
  CDR3 for alpha chain variable domain of TCR clone 142043 (TRAV12-1, TRAJ38)
CGELKAANNRKLIW

SEQ ID NO: 284086 - protein, 12 aa, Homo sapiens
  CDR3 for beta chain variable domain of TCR clone 142043 (TRBV24-1, TRBJ1-1)
CATLYPDTEAFF

SEQ ID NO: 284087 - protein, 13 aa, Homo sapiens
  CDR3 for alpha chain variable domain of TCR clone 142044 (TRAV20, TRAJ57)
CAGPQGGSEKLVF

SEQ ID NO: 284088 - protein, 16 aa, Homo sapiens
  CDR3 for beta chain variable domain of TCR clone 142044 (TRBV7-3, TRBJ2-2)
CAGSLKRGTLSGELFF

SEQ ID NO: 284089 - protein, 14 aa, Homo sapiens
  CDR3 for alpha chain variable domain of TCR clone 142045 (TRAV1-2, TRAJ8)
CAVREDTGFQKLVF

SEQ ID NO: 284090 - protein, 17 aa, Homo sapiens
  CDR3 for beta chain variable domain of TCR clone 142045 (TRBV11-2, TRBJ2-1)
CASSLDHPGVEYNEQFF

SEQ ID NO: 284091 - protein, 15 aa, Homo sapiens
  CDR3 for alpha chain variable domain of TCR clone 142046 (TRAV23/DV6, TRAJ18)
CAASHAGPTLGRLYF

SEQ ID NO: 284092 - protein, 16 aa, Homo sapiens
  CDR3 for beta chain variable domain of TCR clone 142046 (TRBV12-4, TRBJ2-1)
CASSAVGQGNGDEQFF

SEQ ID NO: 284093 - protein, 13 aa, Homo sapiens
  CDR3 for alpha chain variable domain of TCR clone 142047 (TRAV12-3, TRAJ39)
CAMIDNAGNMLTF

SEQ ID NO: 284094 - protein, 13 aa, Homo sapiens
  CDR3 for beta chain variable domain of TCR clone 142047 (TRBV7-9, TRBJ2-5)
CASLPSGRETQYF

SEQ ID NO: 284095 - protein, 12 aa, Homo sapiens
  CDR3 for alpha chain variable domain of TCR clone 142048 (TRAV13-1, TRAJ43)
CAAGRFNNDMRF

SEQ ID NO: 284096 - protein, 14 aa, Homo sapiens
  CDR3 for beta chain variable domain of TCR clone 142048 (TRBV6-3, TRBJ2-5)
CASRRDGGEETQYV

SEQ ID NO: 284097 - protein, 12 aa, Homo sapiens
  CDR3 for alpha chain variable domain of TCR clone 142049 (TRAV8-3, TRAJ26)
CAGDNYGQNFVF

SEQ ID NO: 284098 - protein, 13 aa, Homo sapiens
  CDR3 for beta chain variable domain of TCR clone 142049 (TRBV19, TRBJ2-7)
CASSPRQSYEQYF

SEQ ID NO: 284099 - protein, 16 aa, Homo sapiens
  CDR3 for alpha chain variable domain of TCR clone 142050 (TRAV22, TRAJ45)
CAVERGKRGGADGLTF

SEQ ID NO: 284100 - protein, 14 aa, Homo sapiens
  CDR3 for beta chain variable domain of TCR clone 142050 (TRBV7-2, TRBJ2-5)
CASSLFGREETQYF

SEQ ID NO: 284101 - protein, 15 aa, Homo sapiens
  CDR3 for alpha chain variable domain of TCR clone 142051 (TRAV23/DV6, TRAJ44)
CAASGGTGTASKLTF

SEQ ID NO: 284102 - protein, 15 aa, Homo sapiens
  CDR3 for beta chain variable domain of TCR clone 142051 (TRBV5-1, TRBJ1-1)
CASSVDRLGNTEAFF

SEQ ID NO: 284103 - protein, 14 aa, Homo sapiens
  CDR3 for alpha chain variable domain of TCR clone 142052 (TRAV2, TRAJ9)
CAVDPNTGGFKTIF

SEQ ID NO: 284104 - protein, 13 aa, Homo sapiens
  CDR3 for beta chain variable domain of TCR clone 142052 (TRBV20-1, TRBJ2-1)
CSASAGTSNEQFF

SEQ ID NO: 284105 - protein, 17 aa, Homo sapiens
  CDR3 for alpha chain variable domain of TCR clone 142053 (TRAV26-1, TRAJ53)
CIVRVDESGGSNYKLTF

SEQ ID NO: 284106 - protein, 15 aa, Homo sapiens
  CDR3 for beta chain variable domain of TCR clone 142053 (TRBV11-2, TRBJ2-2)
CASSSDRVNAGELFF

SEQ ID NO: 284107 - protein, 17 aa, Homo sapiens
  CDR3 for alpha chain variable domain of TCR clone 142054 (TRAV26-1, TRAJ27)
CIVSTPWINTNAGISTF

SEQ ID NO: 284108 - protein, 16 aa, Homo sapiens
  CDR3 for beta chain variable domain of TCR clone 142054 (TRBV7-9, TRBJ2-1)
CASSLDPGLAIDEQFF

SEQ ID NO: 284109 - protein, 12 aa, Homo sapiens
  CDR3 for alpha chain variable domain of TCR clone 142055 (TRAV17, TRAJ57)
CATDGGSEKLVF

SEQ ID NO: 284110 - protein, 15 aa, Homo sapiens
  CDR3 for beta chain variable domain of TCR clone 142055 (TRBV10-3, TRBJ2-1)
CAISDVQDRAYEQFF

SEQ ID NO: 284111 - protein, 12 aa, Homo sapiens
  CDR3 for alpha chain variable domain of TCR clone 142056 (TRAV22, TRAJ22)
CAPGGSARQLTF

SEQ ID NO: 284112 - protein, 16 aa, Homo sapiens
  CDR3 for beta chain variable domain of TCR clone 142056 (TRBV29-1, TRBJ2-5)
CSVEGLAGDYQETQYF

SEQ ID NO: 284113 - protein, 14 aa, Homo sapiens
  CDR3 for alpha chain variable domain of TCR clone 142057 (TRAV9-2, TRAJ39)
CALYIYNAGNMLTF

SEQ ID NO: 284114 - protein, 12 aa, Homo sapiens
  CDR3 for beta chain variable domain of TCR clone 142057 (TRBV11-2, TRBJ2-2)
CASSLGGGDLFF

SEQ ID NO: 284115 - protein, 12 aa, Homo sapiens
  CDR3 for alpha chain variable domain of TCR clone 142058 (TRAV17, TRAJ12)
CATLRSSYKLIF

SEQ ID NO: 284116 - protein, 12 aa, Homo sapiens
  CDR3 for beta chain variable domain of TCR clone 142058 (TRBV6-3, TRBJ2-7)
CASSLTPYEQYF

SEQ ID NO: 284117 - protein, 13 aa, Homo sapiens
  CDR3 for alpha chain variable domain of TCR clone 142059 (TRAV1-2, TRAJ9)
CAVLNTGGFKTIF

SEQ ID NO: 284118 - protein, 13 aa, Homo sapiens
  CDR3 for beta chain variable domain of TCR clone 142059 (TRBV7-9, TRBJ2-5)
CASLSPGQETQYF

SEQ ID NO: 284119 - protein, 12 aa, Homo sapiens
  CDR3 for alpha chain variable domain of TCR clone 142060 (TRAV3, TRAJ20)
CAVRDPDYKLSF

SEQ ID NO: 284120 - protein, 11 aa, Homo sapiens
  CDR3 for beta chain variable domain of TCR clone 142060 (TRBV11-2, TRBJ2-2)
CASSLPGELFF

SEQ ID NO: 284121 - protein, 12 aa, Homo sapiens
  CDR3 for alpha chain variable domain of TCR clone 142061 (TRAV17, TRAJ53)
CATEGSNYKLTF

SEQ ID NO: 284122 - protein, 13 aa, Homo sapiens
  CDR3 for beta chain variable domain of TCR clone 142061 (TRBV5-1, TRBJ2-1)
CASSLGSYNEQFF

SEQ ID NO: 284123 - protein, 13 aa, Homo sapiens
  CDR3 for alpha chain variable domain of TCR clone 142062 (TRAV27, TRAJ41)
CAGEGNSGYALNF

SEQ ID NO: 284124 - protein, 11 aa, Homo sapiens
  CDR3 for beta chain variable domain of TCR clone 142062 (TRBV7-2, TRBJ1-1)
CASSFLTGTTE

SEQ ID NO: 284125 - protein, 14 aa, Homo sapiens
  CDR3 for alpha chain variable domain of TCR clone 142063 (TRAV2, TRAJ9)
CSVEDRSGGFKTIF

SEQ ID NO: 284126 - protein, 14 aa, Homo sapiens
  CDR3 for beta chain variable domain of TCR clone 142063 (TRBV7-2, TRBJ2-7)
CASRSQGAAYEQYF

SEQ ID NO: 284127 - protein, 14 aa, Homo sapiens
  CDR3 for alpha chain variable domain of TCR clone 142064 (TRAV23/DV6, TRAJ8)
CAASKNTGFQKLVF

SEQ ID NO: 284128 - protein, 17 aa, Homo sapiens
  CDR3 for beta chain variable domain of TCR clone 142064 (TRBV10-3, TRBJ2-6)
CAISESTAPSGANVLTF

SEQ ID NO: 284129 - protein, 13 aa, Homo sapiens
  CDR3 for alpha chain variable domain of TCR clone 142065 (TRAV13-2, TRAJ13)
CAERPGGYQKVTC

SEQ ID NO: 284130 - protein, 19 aa, Homo sapiens
  CDR3 for beta chain variable domain of TCR clone 142065 (TRBV4-1, TRBJ2-1)
CASSQGPLPGLGSRNEQFF

SEQ ID NO: 284131 - protein, 16 aa, Homo sapiens
  CDR3 for alpha chain variable domain of TCR clone 142066 (TRAV26-2, TRAJ45)
CTTASPIGGGADGLTF

SEQ ID NO: 284132 - protein, 20 aa, Homo sapiens
  CDR3 for beta chain variable domain of TCR clone 142066 (TRBV28, TRBJ2-1)
CARTPIGRSPGLAGGNEQFF

SEQ ID NO: 284133 - protein, 15 aa, Homo sapiens
  CDR3 for alpha chain variable domain of TCR clone 142067 (TRAV3, TRAJ27)
CAVRDRLTNAGKSTF

SEQ ID NO: 284134 - protein, 15 aa, Homo sapiens
  CDR3 for beta chain variable domain of TCR clone 142067 (TRBV28, TRBJ2-1)
CASSIIAGGRSEQFF

SEQ ID NO: 284135 - protein, 16 aa, Homo sapiens
  CDR3 for alpha chain variable domain of TCR clone 142068 (TRAV1-2, TRAJ27)
CAVREPQTPMQANQPL

SEQ ID NO: 284136 - protein, 13 aa, Homo sapiens
  CDR3 for beta chain variable domain of TCR clone 142068 (TRBV6-1, TRBJ1-2)
CASSAREGYGYTI

SEQ ID NO: 284137 - protein, 12 aa, Homo sapiens
  CDR3 for alpha chain variable domain of TCR clone 142069 (TRAV3, TRAJ20)
CAVRDPDSKLSF

SEQ ID NO: 284138 - protein, 15 aa, Homo sapiens
  CDR3 for beta chain variable domain of TCR clone 142069 (TRBV9, TRBJ1-6)
CASSVAGTGDSPLHF

SEQ ID NO: 284139 - protein, 14 aa, Homo sapiens
  CDR3 for alpha chain variable domain of TCR clone 142070 (TRAV3, TRAJ6)
CAVRDPWGSYIPPF

SEQ ID NO: 284140 - protein, 15 aa, Homo sapiens
  CDR3 for beta chain variable domain of TCR clone 142070 (TRBV19, TRBJ1-6)
CASSTQGAVGSPLHF

SEQ ID NO: 284141 - protein, 15 aa, Homo sapiens
  CDR3 for alpha chain variable domain of TCR clone 142071 (TRAV38-1, TRAJ37)
CAFIHGSGNTGKLIF

SEQ ID NO: 284142 - protein, 12 aa, Homo sapiens
  CDR3 for beta chain variable domain of TCR clone 142071 (TRBV7-9, TRBJ2-7)
CASSVGGYEQYF

SEQ ID NO: 284143 - protein, 13 aa, Homo sapiens
  CDR3 for alpha chain variable domain of TCR clone 142072 (TRAV1-2, TRAJ9)
CAALNTGGFKTIF

SEQ ID NO: 284144 - protein, 13 aa, Homo sapiens
  CDR3 for beta chain variable domain of TCR clone 142072 (TRBV7-7, TRBJ1-1)
CASSLGANTEAFF

SEQ ID NO: 284145 - protein, 10 aa, Homo sapiens
  CDR3 for alpha chain variable domain of TCR clone 142073 (TRAV12-3, TRAJ49)
CAMNDDQFYF

SEQ ID NO: 284146 - protein, 13 aa, Homo sapiens
  CDR3 for beta chain variable domain of TCR clone 142073 (TRBV10-3, TRBJ1-2)
CAINADLNYGYTF

SEQ ID NO: 284147 - protein, 15 aa, Homo sapiens
  CDR3 for alpha chain variable domain of TCR clone 142074 (TRAV8-4, TRAJ12)
CAVSDRVDSSYKLIF

SEQ ID NO: 284148 - protein, 15 aa, Homo sapiens
  CDR3 for beta chain variable domain of TCR clone 142074 (TRBV11-3, TRBJ2-1)
CASSLAGQTYNEQIF

SEQ ID NO: 284149 - protein, 15 aa, Homo sapiens
  CDR3 for alpha chain variable domain of TCR clone 142075 (TRAV23/DV6, TRAJ57)
CAASLLRGGSEKLVF

SEQ ID NO: 284150 - protein, 15 aa, Homo sapiens
  CDR3 for beta chain variable domain of TCR clone 142075 (TRBV5-1, TRBJ1-3)
CASSLEGGSGNTIYF

SEQ ID NO: 284151 - protein, 14 aa, Homo sapiens
  CDR3 for alpha chain variable domain of TCR clone 142076 (TRAV17, TRAJ54)
CATDANQGAQKLVF

SEQ ID NO: 284152 - protein, 14 aa, Homo sapiens
  CDR3 for beta chain variable domain of TCR clone 142076 (TRBV4-2, TRBJ2-1)
CASGLDRAYNAQFF

SEQ ID NO: 284153 - protein, 13 aa, Homo sapiens
  CDR3 for alpha chain variable domain of TCR clone 142077 (TRAV12-2, TRAJ53)
CAGVGGSNYKLTF

SEQ ID NO: 284154 - protein, 15 aa, Homo sapiens
  CDR3 for beta chain variable domain of TCR clone 142077 (TRBV19, TRBJ1-2)
CASSVGQVLNYGYTF

SEQ ID NO: 284155 - protein, 15 aa, Homo sapiens
  CDR3 for alpha chain variable domain of TCR clone 142078 (TRAV13-1, TRAJ44)
CAASRNTGTASKLTF

SEQ ID NO: 284156 - protein, 14 aa, Homo sapiens
  CDR3 for beta chain variable domain of TCR clone 142078 (TRBV11-2, TRBJ1-2)
CASSLYRGNYGDTF

SEQ ID NO: 284157 - protein, 16 aa, Homo sapiens
  CDR3 for alpha chain variable domain of TCR clone 142079 (TRAV17, TRAJ28)
CATDEYSGAGSYQLTF

SEQ ID NO: 284158 - protein, 13 aa, Homo sapiens
  CDR3 for beta chain variable domain of TCR clone 142079 (TRBV12-4, TRBJ1-2)
CASSLRQGKGYTF

SEQ ID NO: 284159 - protein, 14 aa, Homo sapiens
  CDR3 for alpha chain variable domain of TCR clone 142080 (TRAV8-3, TRAJ35)
CAVAPQGFGNVLLC

SEQ ID NO: 284160 - protein, 15 aa, Homo sapiens
  CDR3 for beta chain variable domain of TCR clone 142080 (TRBV6-1, TRBJ2-2)
CASSAGQGYTGELFF

SEQ ID NO: 284161 - protein, 16 aa, Homo sapiens
  CDR3 for alpha chain variable domain of TCR clone 142081 (TRAV12-1, TRAJ13)
CVVNLEVSGGYQKVTF

SEQ ID NO: 284162 - protein, 22 aa, Homo sapiens
  CDR3 for beta chain variable domain of TCR clone 142081 (TRBV24-1, TRBJ2-6)
CATSDQSLWGQRPDFRGRQQAD

SEQ ID NO: 284163 - protein, 14 aa, Homo sapiens
  CDR3 for alpha chain variable domain of TCR clone 142082 (TRAV8-6, TRAJ54)
CAVSPALGAQKLVF

SEQ ID NO: 284164 - protein, 14 aa, Homo sapiens
  CDR3 for beta chain variable domain of TCR clone 142082 (TRBV19, TRBJ2-1)
CASPTFVLSGEQFF

SEQ ID NO: 284165 - protein, 15 aa, Homo sapiens
  CDR3 for alpha chain variable domain of TCR clone 142083 (TRAV3, TRAJ5)
CAVRDLDTGRRALTF

SEQ ID NO: 284166 - protein, 14 aa, Homo sapiens
  CDR3 for beta chain variable domain of TCR clone 142083 (TRBV25-1, TRGJ1)
CASSGGGQPEKLFF

SEQ ID NO: 284167 - protein, 15 aa, Homo sapiens
  CDR3 for alpha chain variable domain of TCR clone 142084 (TRAV26-1, TRAJ9)
CIVRESNTGGFRTIF

SEQ ID NO: 284168 - protein, 11 aa, Homo sapiens
  CDR3 for beta chain variable domain of TCR clone 142084 (TRBV7-2, TRBJ2-3)
CASSSSDTQYF

SEQ ID NO: 284169 - protein, 14 aa, Homo sapiens
  CDR3 for alpha chain variable domain of TCR clone 142085 (TRAV29/DV5, TRAJ36)
CAARRKTGANNLFF

SEQ ID NO: 284170 - protein, 15 aa, Homo sapiens
  CDR3 for beta chain variable domain of TCR clone 142085 (TRBV7-3, TRBJ2-2)
CASSETGQGTGELFL

SEQ ID NO: 284171 - protein, 11 aa, Homo sapiens
  CDR3 for alpha chain variable domain of TCR clone 142086 (TRAV12-2, TRAJ29)
CAVTLPSPLVF

SEQ ID NO: 284172 - protein, 16 aa, Homo sapiens
  CDR3 for beta chain variable domain of TCR clone 142086 (TRBV19, TRBJ1-5)
CASSIDRGGPRQPQHF

SEQ ID NO: 284173 - protein, 13 aa, Homo sapiens
  CDR3 for alpha chain variable domain of TCR clone 142087 (TRAV17, TRAJ22)
CAHHSGSARQLTL

SEQ ID NO: 284174 - protein, 14 aa, Homo sapiens
  CDR3 for beta chain variable domain of TCR clone 142087 (TRBV16, TRBJ1-1)
CASSQAGPNTEAFF

SEQ ID NO: 284175 - protein, 14 aa, Homo sapiens
  CDR3 for alpha chain variable domain of TCR clone 142088 (TRAV16, TRAJ31)
CSKWRRGDNARLMF

SEQ ID NO: 284176 - protein, 11 aa, Homo sapiens
  CDR3 for beta chain variable domain of TCR clone 142088 (TRBV29-1, TRBJ2-5)
CSEDRTGTQYF

SEQ ID NO: 284177 - protein, 11 aa, Homo sapiens
  CDR3 for alpha chain variable domain of TCR clone 142089 (TRAV12-3, TRAJ43)
CAMSVSNDIRF

SEQ ID NO: 284178 - protein, 13 aa, Homo sapiens
  CDR3 for beta chain variable domain of TCR clone 142089 (TRBV7-9, TRBJ1-2)
CASSLKQNYGYTF

SEQ ID NO: 284179 - protein, 14 aa, Homo sapiens
  CDR3 for alpha chain variable domain of TCR clone 142090 (TRAV8-4, TRAJ5)
CAVSTDTGRRALTF

SEQ ID NO: 284180 - protein, 17 aa, Homo sapiens
  CDR3 for beta chain variable domain of TCR clone 142090 (TRBV13, TRBJ2-3)
CASSLSRVAGGRNTQYF

SEQ ID NO: 284181 - protein, 15 aa, Homo sapiens
  CDR3 for alpha chain variable domain of TCR clone 142091 (TRAV16, TRAJ10)
CALEGLTGGGNKLTF

SEQ ID NO: 284182 - protein, 14 aa, Homo sapiens
  CDR3 for beta chain variable domain of TCR clone 142091 (TRBV6-1, TRBJ1-3)
CASVQGGGGNTIYF

SEQ ID NO: 284183 - protein, 17 aa, Homo sapiens
  CDR3 for alpha chain variable domain of TCR clone 142092 (TRAV3, TRAJ6)
CAVRDGPRAGGSYIPTF

SEQ ID NO: 284184 - protein, 14 aa, Homo sapiens
  CDR3 for beta chain variable domain of TCR clone 142092 (TRBV7-2, TRBJ2-7)
CARRPKTSFYEQYF

SEQ ID NO: 284185 - protein, 13 aa, Homo sapiens
  CDR3 for alpha chain variable domain of TCR clone 142093 (TRAV1-2, TRAJ30)
CAVRDPGDDKIIF

SEQ ID NO: 284186 - protein, 17 aa, Homo sapiens
  CDR3 for beta chain variable domain of TCR clone 142093 (TRBV4-3, TRBJ2-7)
CASSQDLIGQGAYEQYF

SEQ ID NO: 284187 - protein, 16 aa, Homo sapiens
  CDR3 for alpha chain variable domain of TCR clone 142094 (TRAV38-1, TRAJ32)
CAFMPFLGDATNKLIF

SEQ ID NO: 284188 - protein, 13 aa, Homo sapiens
  CDR3 for beta chain variable domain of TCR clone 142094 (TRBV7-9, TRBJ2-7)
CASSFAGAYEQYF

SEQ ID NO: 284189 - protein, 13 aa, Homo sapiens
  CDR3 for alpha chain variable domain of TCR clone 142095 (TRAV26-1, TRAJ35)
CIVSRRVGEMLHC

SEQ ID NO: 284190 - protein, 17 aa, Homo sapiens
  CDR3 for beta chain variable domain of TCR clone 142095 (TRBV7-9, TRBJ2-7)
CASSFGGSRGGAYEQYF

SEQ ID NO: 284191 - protein, 13 aa, Homo sapiens
  CDR3 for alpha chain variable domain of TCR clone 142096 (TRAV12-2, TRAJ4)
CAGFSGGYNKLIF

SEQ ID NO: 284192 - protein, 14 aa, Homo sapiens
  CDR3 for beta chain variable domain of TCR clone 142096 (TRBV24-1, TRBJ1-1)
CATSIPRGDTEAFV

SEQ ID NO: 284193 - protein, 15 aa, Homo sapiens
  CDR3 for alpha chain variable domain of TCR clone 142097 (TRAV17, TRAJ56)
CATEPFTGSNSKLTF

SEQ ID NO: 284194 - protein, 15 aa, Homo sapiens
  CDR3 for beta chain variable domain of TCR clone 142097 (TRBV28, TRBJ1-5)
CASSRTGGYVHPQHF

SEQ ID NO: 284195 - protein, 14 aa, Homo sapiens
  CDR3 for alpha chain variable domain of TCR clone 142098 (TRAV36/DV7, TRAJ57)
CAVGFPGGSEKLFF

SEQ ID NO: 284196 - protein, 12 aa, Homo sapiens
  CDR3 for beta chain variable domain of TCR clone 142098 (TRBV19, TRBJ2-7)
CASTSGTYEQYF

SEQ ID NO: 284197 - protein, 13 aa, Homo sapiens
  CDR3 for alpha chain variable domain of TCR clone 142099 (TRAV3, TRAJ29)
CAVRDRIDTPLVF

SEQ ID NO: 284198 - protein, 14 aa, Homo sapiens
  CDR3 for beta chain variable domain of TCR clone 142099 (TRBV27, TRBJ2-1)
CASSATGGYNEQFF

SEQ ID NO: 284199 - protein, 17 aa, Homo sapiens
  CDR3 for alpha chain variable domain of TCR clone 142100 (TRAV4, TRAJ18)
CLVGARSVGSTLGRLYF

SEQ ID NO: 284200 - protein, 14 aa, Homo sapiens
  CDR3 for beta chain variable domain of TCR clone 142100 (TRBV6-5, TRBJ1-2)
CASSYDGTGGGYTF

SEQ ID NO: 284201 - protein, 15 aa, Homo sapiens
  CDR3 for alpha chain variable domain of TCR clone 142101 (TRAV27, TRAJ38)
CAARRNAGNNRKLIW

SEQ ID NO: 284202 - protein, 13 aa, Homo sapiens
  CDR3 for beta chain variable domain of TCR clone 142101 (TRBV12-4, TRBJ1-2)
CASSLRQGKGYTF

SEQ ID NO: 284203 - protein, 15 aa, Homo sapiens
  CDR3 for alpha chain variable domain of TCR clone 142102 (TRAV17, TRAJ16)
CATALRFSDGQKLLF

SEQ ID NO: 284204 - protein, 15 aa, Homo sapiens
  CDR3 for beta chain variable domain of TCR clone 142102 (TRBV13, TRBJ1-5)
CDSSFGQGGVQPQHF

SEQ ID NO: 284205 - protein, 21 aa, Homo sapiens
  CDR3 for alpha chain variable domain of TCR clone 142103 (TRAV12-1, TRAJ37)
CVVNGGLWQHRQTNLWARDNF

SEQ ID NO: 284206 - protein, 12 aa, Homo sapiens
  CDR3 for beta chain variable domain of TCR clone 142103 (TRBV20-1, TRBJ1-2)
CSAPGFNNGYTF

SEQ ID NO: 284207 - protein, 12 aa, Homo sapiens
  CDR3 for alpha chain variable domain of TCR clone 142104 (TRAV2, TRAJ33)
CAVWGSNYQLIR

SEQ ID NO: 284208 - protein, 16 aa, Homo sapiens
  CDR3 for beta chain variable domain of TCR clone 142104 (TRBV20-1, TRBJ1-4)
CSAPGQGLLTNEKLFF

SEQ ID NO: 284209 - protein, 11 aa, Homo sapiens
  CDR3 for alpha chain variable domain of TCR clone 142105 (TRAV22, TRAJ20)
CSPLHDYKLSF

SEQ ID NO: 284210 - protein, 15 aa, Homo sapiens
  CDR3 for beta chain variable domain of TCR clone 142105 (TRBV19, TRBJ1-1)
CASTSGQIQNTEAFF

SEQ ID NO: 284211 - protein, 12 aa, Homo sapiens
  CDR3 for alpha chain variable domain of TCR clone 142106 (TRAV1-2, TRAJ24)
CAVGGSWGNSSL

SEQ ID NO: 284212 - protein, 15 aa, Homo sapiens
  CDR3 for beta chain variable domain of TCR clone 142106 (TRBV6-1, TRBJ2-2)
CASSRLRGDTGELFF

SEQ ID NO: 284213 - protein, 11 aa, Homo sapiens
  CDR3 for alpha chain variable domain of TCR clone 142107 (TRAV2, TRAJ13)
CASGGYQKVTF

SEQ ID NO: 284214 - protein, 15 aa, Homo sapiens
  CDR3 for beta chain variable domain of TCR clone 142107 (TRBV12-4, TRBJ2-2)
CASSFKSANTGELFF

SEQ ID NO: 284215 - protein, 11 aa, Homo sapiens
  CDR3 for alpha chain variable domain of TCR clone 142108 (TRAV13-1, TRAJ43)
CAAHNNNDMRF

SEQ ID NO: 284216 - protein, 20 aa, Homo sapiens
  CDR3 for beta chain variable domain of TCR clone 142108 (TRBV28, TRBJ2-1)
CASTPIGRSPGLAGGNEQFF

SEQ ID NO: 284217 - protein, 16 aa, Homo sapiens
  CDR3 for alpha chain variable domain of TCR clone 142109 (TRAV26-1, TRAJ53)
CIVRVAMGGSNYKLTV

SEQ ID NO: 284218 - protein, 12 aa, Homo sapiens
  CDR3 for beta chain variable domain of TCR clone 142109 (TRBV7-9, TRBJ1-5)
CASSPQGQPQHF

SEQ ID NO: 284219 - protein, 15 aa, Homo sapiens
  CDR3 for alpha chain variable domain of TCR clone 142110 (TRAV8-4, TRAJ3)
CAVTGENLVQQCFQD

SEQ ID NO: 284220 - protein, 17 aa, Homo sapiens
  CDR3 for beta chain variable domain of TCR clone 142110 (TRBV20-1, TRBJ2-1)
CSASSSGLAGSYNEQFF

SEQ ID NO: 284221 - protein, 13 aa, Homo sapiens
  CDR3 for alpha chain variable domain of TCR clone 142111 (TRAV23/DV6, TRAJ22)
CAPWGGSARQPTF

SEQ ID NO: 284222 - protein, 14 aa, Homo sapiens
  CDR3 for beta chain variable domain of TCR clone 142111 (TRBV18, TRBJ2-7)
CASSPTSGGYEQYF

SEQ ID NO: 284223 - protein, 14 aa, Homo sapiens
  CDR3 for alpha chain variable domain of TCR clone 142112 (TRAV40, TRAJ41)
CLLGPPNSGYALNF

SEQ ID NO: 284224 - protein, 14 aa, Homo sapiens
  CDR3 for beta chain variable domain of TCR clone 142112 (TRBV7-2, TRBJ2-4)
CASSLSGGANIQYF

SEQ ID NO: 284225 - protein, 14 aa, Homo sapiens
  CDR3 for alpha chain variable domain of TCR clone 142113 (TRAV8-3, TRAJ39)
CAVGANNAGNMLPF

SEQ ID NO: 284226 - protein, 15 aa, Homo sapiens
  CDR3 for beta chain variable domain of TCR clone 142113 (TRBV7-9, TRBJ1-5)
CASSQGHQPNQPQHF

SEQ ID NO: 284227 - protein, 11 aa, Homo sapiens
  CDR3 for alpha chain variable domain of TCR clone 142114 (TRAV13-1, TRAJ49)
CAARIGNQFYF

SEQ ID NO: 284228 - protein, 11 aa, Homo sapiens
  CDR3 for beta chain variable domain of TCR clone 142114 (TRBV7-6, TRBJ2-5)
CASSLEETQYF

SEQ ID NO: 284229 - protein, 13 aa, Homo sapiens
  CDR3 for alpha chain variable domain of TCR clone 142115 (TRAV21, TRAJ20)
CAVGVFADYKLSF

SEQ ID NO: 284230 - protein, 12 aa, Homo sapiens
  CDR3 for beta chain variable domain of TCR clone 142115 (TRBV28, TRBJ2-5)
CASSGGLETQYF

SEQ ID NO: 284231 - protein, 13 aa, Homo sapiens
  CDR3 for alpha chain variable domain of TCR clone 142116 (TRAV2, TRAJ21)
CAVEDLNFNKFYF

SEQ ID NO: 284232 - protein, 13 aa, Homo sapiens
  CDR3 for beta chain variable domain of TCR clone 142116 (TRBV4-1, TRBJ2-1)
CASSQEVQYEQFF

SEQ ID NO: 284233 - protein, 17 aa, Homo sapiens
  CDR3 for alpha chain variable domain of TCR clone 142117 (TRAV3, TRAJ6)
CAVRDGPRAGGSYIPIF

SEQ ID NO: 284234 - protein, 13 aa, Homo sapiens
  CDR3 for beta chain variable domain of TCR clone 142117 (TRBV4-1, TRBJ2-2)
CASSQENTGELFF

SEQ ID NO: 284235 - protein, 11 aa, Homo sapiens
  CDR3 for alpha chain variable domain of TCR clone 142118 (TRAV2, TRAJ20)
CAVVNDYTLSF

SEQ ID NO: 284236 - protein, 17 aa, Homo sapiens
  CDR3 for beta chain variable domain of TCR clone 142118 (TRBV28, TRBJ1-1)
CASSLSGTGYENTEAFF

SEQ ID NO: 284237 - protein, 17 aa, Homo sapiens
  CDR3 for alpha chain variable domain of TCR clone 142119 (TRAV3, TRAJ42)
CAMRDRDYGGSQGNLIF

SEQ ID NO: 284238 - protein, 14 aa, Homo sapiens
  CDR3 for beta chain variable domain of TCR clone 142119 (TRBV19, TRBJ2-5)
CASSMTGQQETQYF

SEQ ID NO: 284239 - protein, 12 aa, Homo sapiens
  CDR3 for alpha chain variable domain of TCR clone 142120 (TRAV8-3, TRAJ26)
CAGDNYGQNFVF

SEQ ID NO: 284240 - protein, 15 aa, Homo sapiens
  CDR3 for beta chain variable domain of TCR clone 142120 (TRBV5-1, TRBJ2-3)
CASSVTSGSTDTEYF

SEQ ID NO: 284241 - protein, 13 aa, Homo sapiens
  CDR3 for alpha chain variable domain of TCR clone 142121 (TRAV3, TRAJ21)
CAVRERDFNKFYF

SEQ ID NO: 284242 - protein, 14 aa, Homo sapiens
  CDR3 for beta chain variable domain of TCR clone 142121 (TRBV4-2, TRBJ2-1)
CASGLDRAYNEQFF

SEQ ID NO: 284243 - protein, 16 aa, Homo sapiens
  CDR3 for alpha chain variable domain of TCR clone 142122 (TRAV27, TRAJ13)
CAGAKSDSGGYQKVTF

SEQ ID NO: 284244 - protein, 15 aa, Homo sapiens
  CDR3 for beta chain variable domain of TCR clone 142122 (TRBV11-2, TRBJ2-1)
CASSLGTSGLNEQFF

SEQ ID NO: 284245 - protein, 13 aa, Homo sapiens
  CDR3 for alpha chain variable domain of TCR clone 142123 (TRAV17, TRAJ13)
CATDSGGYQKVTI

SEQ ID NO: 284246 - protein, 14 aa, Homo sapiens
  CDR3 for beta chain variable domain of TCR clone 142123 (TRBV6-1, TRBJ1-1)
CASTPLQMNTEAFF

SEQ ID NO: 284247 - protein, 13 aa, Homo sapiens
  CDR3 for alpha chain variable domain of TCR clone 142124 (TRAV17, TRAJ5)
CALRGTGRRALTF

SEQ ID NO: 284248 - protein, 15 aa, Homo sapiens
  CDR3 for beta chain variable domain of TCR clone 142124 (TRBV7-3, TRBJ2-1)
CASSLGQGPFGEQFF

SEQ ID NO: 284249 - protein, 16 aa, Homo sapiens
  CDR3 for alpha chain variable domain of TCR clone 142125 (TRAV29/DV5, TRAJ18)
CAASANRGSTLGRLYF

SEQ ID NO: 284250 - protein, 16 aa, Homo sapiens
  CDR3 for beta chain variable domain of TCR clone 142125 (TRBV5-7, TRBJ2-3)
CASSSLGGAITDKQYF

SEQ ID NO: 284251 - protein, 16 aa, Homo sapiens
  CDR3 for alpha chain variable domain of TCR clone 142126 (TRAV12-2, TRAJ28)
CAVITDSGAGSYQLTF

SEQ ID NO: 284252 - protein, 12 aa, Homo sapiens
  CDR3 for beta chain variable domain of TCR clone 142126 (TRBV9, TRBJ2-2)
CASSLVTGELLF

SEQ ID NO: 284253 - protein, 15 aa, Homo sapiens
  CDR3 for alpha chain variable domain of TCR clone 142127 (TRAV17, TRAJ57)
CATGPSQGGSEKLVF

SEQ ID NO: 284254 - protein, 14 aa, Homo sapiens
  CDR3 for beta chain variable domain of TCR clone 142127 (TRBV7-2, TRBJ1-2)
CASSQTGSTYGYTF

SEQ ID NO: 284255 - protein, 13 aa, Homo sapiens
  CDR3 for alpha chain variable domain of TCR clone 142128 (TRAV2, TRAJ40)
CAVVTSGTYKYIF

SEQ ID NO: 284256 - protein, 13 aa, Homo sapiens
  CDR3 for beta chain variable domain of TCR clone 142128 (TRBV7-2, TRBJ2-3)
CASSPDPQMTQYF

SEQ ID NO: 284257 - protein, 15 aa, Homo sapiens
  CDR3 for alpha chain variable domain of TCR clone 142129 (TRAV1-2, TRAJ10)
CAVRGFTGGGNKLSF

SEQ ID NO: 284258 - protein, 16 aa, Homo sapiens
  CDR3 for beta chain variable domain of TCR clone 142129 (TRBV4-1, TRBJ2-1)
CASSQEAGQGSDEQFF

SEQ ID NO: 284259 - protein, 15 aa, Homo sapiens
  CDR3 for alpha chain variable domain of TCR clone 142130 (TRAV13-1, TRAJ48)
CAASGANFGNEKLTF

SEQ ID NO: 284260 - protein, 12 aa, Homo sapiens
  CDR3 for beta chain variable domain of TCR clone 142130 (TRBV7-9, TRBJ1-5)
CASSPQGQPQHF

SEQ ID NO: 284261 - protein, 17 aa, Homo sapiens
  CDR3 for alpha chain variable domain of TCR clone 142131 (TRAV14/DV4, TRAJ12)
CAMRELPWMDSSYKLIF

SEQ ID NO: 284262 - protein, 10 aa, Homo sapiens
  CDR3 for beta chain variable domain of TCR clone 142131 (TRBV24-1, TRBJ2-2)
CATSDDGDTP

SEQ ID NO: 284263 - protein, 18 aa, Homo sapiens
  CDR3 for alpha chain variable domain of TCR clone 142132 (TRAV2, TRAJ37)
CCLLLSVDFTSNTGKLIF

SEQ ID NO: 284264 - protein, 15 aa, Homo sapiens
  CDR3 for beta chain variable domain of TCR clone 142132 (TRBV20-1, TRBJ1-1)
CSASRGVTGNTEAFF

SEQ ID NO: 284265 - protein, 14 aa, Homo sapiens
  CDR3 for alpha chain variable domain of TCR clone 142133 (TRAV2, TRAJ9)
CAVEDRSGGFKTIF

SEQ ID NO: 284266 - protein, 16 aa, Homo sapiens
  CDR3 for beta chain variable domain of TCR clone 142133 (TRBV12-5, TRBJ2-5)
CASGPRTSGDQETQYF

SEQ ID NO: 284267 - protein, 15 aa, Homo sapiens
  CDR3 for alpha chain variable domain of TCR clone 142134 (TRAV8-3, TRAJ45)
CASSYSGGGADGLTC

SEQ ID NO: 284268 - protein, 13 aa, Homo sapiens
  CDR3 for beta chain variable domain of TCR clone 142134 (TRBV10-3, TRBJ2-7)
CTSKLAVNYEQYF

SEQ ID NO: 284269 - protein, 14 aa, Homo sapiens
  CDR3 for alpha chain variable domain of TCR clone 142135 (TRAV1-2, TRAJ16)
CAVNRLSDGQKLLF

SEQ ID NO: 284270 - protein, 15 aa, Homo sapiens
  CDR3 for beta chain variable domain of TCR clone 142135 (TRBV11-2, TRBJ2-1)
CASSLGTSGLNEQFF

SEQ ID NO: 284271 - protein, 11 aa, Homo sapiens
  CDR3 for alpha chain variable domain of TCR clone 142136 (TRAV3, TRAJ21)
CAVGNFNKFYF

SEQ ID NO: 284272 - protein, 16 aa, Homo sapiens
  CDR3 for beta chain variable domain of TCR clone 142136 (TRBV15, TRBJ2-3)
CATSRDLGIVTDTQYF

SEQ ID NO: 284273 - protein, 12 aa, Homo sapiens
  CDR3 for alpha chain variable domain of TCR clone 142137 (TRAV29/DV5, TRAJ49)
CAATDTGNQFYF

SEQ ID NO: 284274 - protein, 19 aa, Homo sapiens
  CDR3 for beta chain variable domain of TCR clone 142137 (TRBV25-1, TRBJ2-2)
CAILVYRVDRGRNTGELFF

SEQ ID NO: 284275 - protein, 16 aa, Homo sapiens
  CDR3 for alpha chain variable domain of TCR clone 142138 (TRAV10, TRAJ13)
CVVSARNSGGYQKVTF

SEQ ID NO: 284276 - protein, 19 aa, Homo sapiens
  CDR3 for beta chain variable domain of TCR clone 142138 (TRBV12-4, TRBJ2-1)
RASTLAFDPRDKEANEQFF

SEQ ID NO: 284277 - protein, 12 aa, Homo sapiens
  CDR3 for alpha chain variable domain of TCR clone 142139 (TRAV13-1, TRAJ53)
AASGGSNYKLTF

SEQ ID NO: 284278 - protein, 14 aa, Homo sapiens
  CDR3 for beta chain variable domain of TCR clone 142139 (TRBV12-4, TRBJ1-1)
CASSLGTGGTEAFF

SEQ ID NO: 284279 - protein, 15 aa, Homo sapiens
  CDR3 for alpha chain variable domain of TCR clone 142140 (TRAV3, TRAJ5)
CAVIDRKTGRRELTF

SEQ ID NO: 284280 - protein, 15 aa, Homo sapiens
  CDR3 for beta chain variable domain of TCR clone 142140 (TRBV7-9, TRBJ2-2)
CASGPLDTFPGELFF

SEQ ID NO: 284281 - protein, 14 aa, Homo sapiens
  CDR3 for alpha chain variable domain of TCR clone 142141 (TRAV12-2, TRAJ40)
CAVKIPSGTYKYIF

SEQ ID NO: 284282 - protein, 14 aa, Homo sapiens
  CDR3 for beta chain variable domain of TCR clone 142141 (TRBV11-2, TRBJ2-3)
CASRRLARTDTQYF

SEQ ID NO: 284283 - protein, 14 aa, Homo sapiens
  CDR3 for alpha chain variable domain of TCR clone 142142 (TRAV12-2, TRAJ13)
CAVKKTGGYQKVTF

SEQ ID NO: 284284 - protein, 19 aa, Homo sapiens
  CDR3 for beta chain variable domain of TCR clone 142142 (TRBV7-2, TRBJ2-3)
CASSPGLAGGGLTTDTQYF

SEQ ID NO: 284285 - protein, 14 aa, Homo sapiens
  CDR3 for alpha chain variable domain of TCR clone 142143 (TRAV16, TRAJ32)
CALKSGGATTRLIF

SEQ ID NO: 284286 - protein, 13 aa, Homo sapiens
  CDR3 for beta chain variable domain of TCR clone 142143 (TRBV15, TRBJ1-6)
CATSGGLNSPLHF

SEQ ID NO: 284287 - protein, 11 aa, Homo sapiens
  CDR3 for alpha chain variable domain of TCR clone 142144 (TRAV2, TRAJ13)
CASGGYQNVTF

SEQ ID NO: 284288 - protein, 15 aa, Homo sapiens
  CDR3 for beta chain variable domain of TCR clone 142144 (TRBV29-1, TRBJ2-1)
CSVPTGLALYNEQFF

SEQ ID NO: 284289 - protein, 11 aa, Homo sapiens
  CDR3 for alpha chain variable domain of TCR clone 142145 (TRAV21, TRAJ7)
CAAYGNNRLAF

SEQ ID NO: 284290 - protein, 14 aa, Homo sapiens
  CDR3 for beta chain variable domain of TCR clone 142145 (TRBV4-1, TRBJ2-7)
CASSRTGVAYEQYF

SEQ ID NO: 284291 - protein, 16 aa, Homo sapiens
  CDR3 for alpha chain variable domain of TCR clone 142146 (TRAV3, TRAJ3)
CAVRDRAKSSASKIIF

SEQ ID NO: 284292 - protein, 13 aa, Homo sapiens
  CDR3 for beta chain variable domain of TCR clone 142146 (TRBV12-4, TRBJ1-5)
CASSPRQYQPQHF

SEQ ID NO: 284293 - protein, 14 aa, Homo sapiens
  CDR3 for alpha chain variable domain of TCR clone 142147 (TRAV16, TRAJ33)
CALSAMDSNYKLIW

SEQ ID NO: 284294 - protein, 15 aa, Homo sapiens
  CDR3 for beta chain variable domain of TCR clone 142147 (TRBV28, TRBJ2-7)
CASSLEAYPIYEQYF

SEQ ID NO: 284295 - protein, 12 aa, Homo sapiens
  CDR3 for alpha chain variable domain of TCR clone 142148 (TRAV12-1, TRAJ40)
CVVYSGTYKYIF

SEQ ID NO: 284296 - protein, 13 aa, Homo sapiens
  CDR3 for beta chain variable domain of TCR clone 142148 (TRBV18, TRBJ1-1)
CASSPETKPEAFF

SEQ ID NO: 284297 - protein, 12 aa, Homo sapiens
  CDR3 for alpha chain variable domain of TCR clone 142149 (TRAV21, TRAJ49)
CAVTNTGNQFYF

SEQ ID NO: 284298 - protein, 17 aa, Homo sapiens
  CDR3 for beta chain variable domain of TCR clone 142149 (TRBV13, TRBJ2-3)
CASSLSRVAGGRNTQYF

SEQ ID NO: 284299 - protein, 15 aa, Homo sapiens
  CDR3 for alpha chain variable domain of TCR clone 142150 (TRAV3, TRAJ3)
CAVRDRDSSASKIIF

SEQ ID NO: 284300 - protein, 18 aa, Homo sapiens
  CDR3 for beta chain variable domain of TCR clone 142150 (TRBV25-1, TRBJ1-2)
CASSGLQSGQGLICGYTF

SEQ ID NO: 284301 - protein, 13 aa, Homo sapiens
  CDR3 for alpha chain variable domain of TCR clone 142151 (TRAV21, TRAJ44)
CAANTGTASKLTF

SEQ ID NO: 284302 - protein, 19 aa, Homo sapiens
  CDR3 for beta chain variable domain of TCR clone 142151 (TRBV3-1, TRBJ2-1)
CASSRMIVPGLAGKNEQFF

SEQ ID NO: 284303 - protein, 17 aa, Homo sapiens
  CDR3 for alpha chain variable domain of TCR clone 142152 (TRAV8-6, TRAJ58)
CAVSSWVGETSGSRLTF

SEQ ID NO: 284304 - protein, 17 aa, Homo sapiens
  CDR3 for beta chain variable domain of TCR clone 142152 (TRBV5-1, TRBJ2-5)
CASSPVALGQNQETQYF

SEQ ID NO: 284305 - protein, 14 aa, Homo sapiens
  CDR3 for alpha chain variable domain of TCR clone 142153 (TRAV17, TRAJ31)
CATVPLSCNSRLMF

SEQ ID NO: 284306 - protein, 15 aa, Homo sapiens
  CDR3 for beta chain variable domain of TCR clone 142153 (TRBV15, TRBJ2-2)
CATSGTGGRVGELFF

SEQ ID NO: 284307 - protein, 14 aa, Homo sapiens
  CDR3 for alpha chain variable domain of TCR clone 142154 (TRAV19, TRAJ37)
CALKDPGNTGKLIF

SEQ ID NO: 284308 - protein, 17 aa, Homo sapiens
  CDR3 for beta chain variable domain of TCR clone 142154 (TRBV20-1, TRBJ2-1)
CSARDPLAGVWDNEQFF

SEQ ID NO: 284309 - protein, 15 aa, Homo sapiens
  CDR3 for alpha chain variable domain of TCR clone 142155 (TRAV23/DV6, TRAJ18)
CAARYRGPNPGRLYF

SEQ ID NO: 284310 - protein, 13 aa, Homo sapiens
  CDR3 for beta chain variable domain of TCR clone 142155 (TRBV7-2, TRBJ2-7)
CASSSPSGSEQYF

SEQ ID NO: 284311 - protein, 15 aa, Homo sapiens
  CDR3 for alpha chain variable domain of TCR clone 142156 (TRAV12-1, TRAJ53)
CVVNRSGGSNYKLTF

SEQ ID NO: 284312 - protein, 16 aa, Homo sapiens
  CDR3 for beta chain variable domain of TCR clone 142156 (TRBV15, TRBJ2-5)
CATSRYLEAAQETQYF

SEQ ID NO: 284313 - protein, 22 aa, Homo sapiens
  CDR3 for alpha chain variable domain of TCR clone 142157 (TRAV8-3, TRAJ32)
CAVEVVLQTSSSLELSLCLLSS

SEQ ID NO: 284314 - protein, 12 aa, Homo sapiens
  CDR3 for beta chain variable domain of TCR clone 142157 (TRBV7-8, TRBJ2-7)
CASSLGDREQYF

SEQ ID NO: 284315 - protein, 14 aa, Homo sapiens
  CDR3 for alpha chain variable domain of TCR clone 142158 (TRAV17, TRAJ31)
CATVLRNNNARLMF

SEQ ID NO: 284316 - protein, 12 aa, Homo sapiens
  CDR3 for beta chain variable domain of TCR clone 142158 (TRBV5-1, TRBJ1-2)
CASSQDTYGYTF

SEQ ID NO: 284317 - protein, 12 aa, Homo sapiens
  CDR3 for alpha chain variable domain of TCR clone 142159 (TRAV36/DV7, TRAJ50)
CAVEPVNLLRQG

SEQ ID NO: 284318 - protein, 13 aa, Homo sapiens
  CDR3 for beta chain variable domain of TCR clone 142159 (TRBV7-2, TRBJ2-7)
CASSSPSGSEQYF

SEQ ID NO: 284319 - protein, 15 aa, Homo sapiens
  CDR3 for alpha chain variable domain of TCR clone 142160 (TRAV3, TRAJ22)
CAVRDRGGSARQLTF

SEQ ID NO: 284320 - protein, 16 aa, Homo sapiens
  CDR3 for beta chain variable domain of TCR clone 142160 (TRBV5-4, TRBJ2-3)
CASQQTGAGGADTQYF

SEQ ID NO: 284321 - protein, 14 aa, Homo sapiens
  CDR3 for alpha chain variable domain of TCR clone 142161 (TRAV12-3, TRAJ10)
SHLPLPGGGNKLTF

SEQ ID NO: 284322 - protein, 12 aa, Homo sapiens
  CDR3 for beta chain variable domain of TCR clone 142161 (TRBV7-9, TRBJ2-7)
CASSIKREEQYF

SEQ ID NO: 284323 - protein, 13 aa, Homo sapiens
  CDR3 for alpha chain variable domain of TCR clone 142162 (TRAV8-3, TRAJ28)
CAVGAVGSYQPTF

SEQ ID NO: 284324 - protein, 15 aa, Homo sapiens
  CDR3 for beta chain variable domain of TCR clone 142162 (TRBV7-9, TRBJ1-5)
CARSQGHQPNQPQHF

SEQ ID NO: 284325 - protein, 14 aa, Homo sapiens
  CDR3 for alpha chain variable domain of TCR clone 142163 (TRAV26-1, TRAJ39)
CIVRVGNAGNMLTF

SEQ ID NO: 284326 - protein, 15 aa, Homo sapiens
  CDR3 for beta chain variable domain of TCR clone 142163 (TRBV7-6, TRBJ2-1)
CASSSLAGEGNEQFF

SEQ ID NO: 284327 - protein, 13 aa, Homo sapiens
  CDR3 for alpha chain variable domain of TCR clone 142164 (TRAV12-3, TRAJ33)
CAMSVNSNYQLIW

SEQ ID NO: 284328 - protein, 12 aa, Homo sapiens
  CDR3 for beta chain variable domain of TCR clone 142164 (TRBV11-2, TRBJ2-2)
CASSLGVGELFF

SEQ ID NO: 284329 - protein, 13 aa, Homo sapiens
  CDR3 for alpha chain variable domain of TCR clone 142165 (TRAV30, TRAJ49)
CGTEPNTGNQFYF

SEQ ID NO: 284330 - protein, 14 aa, Homo sapiens
  CDR3 for beta chain variable domain of TCR clone 142165 (TRBV29-1, TRBJ2-1)
CSVEFRGIPFERFF

SEQ ID NO: 284331 - protein, 15 aa, Homo sapiens
  CDR3 for alpha chain variable domain of TCR clone 142166 (TRAV29/DV5, TRAJ24)
CAASGATDSWRKFQF

SEQ ID NO: 284332 - protein, 12 aa, Homo sapiens
  CDR3 for beta chain variable domain of TCR clone 142166 (TRBV11-2, TRBJ2-2)
CASSLPTGELFF

SEQ ID NO: 284333 - protein, 15 aa, Homo sapiens
  CDR3 for alpha chain variable domain of TCR clone 142167 (TRAV26-1, TRAJ29)
CIVRVEGSGNTPLVF

SEQ ID NO: 284334 - protein, 15 aa, Homo sapiens
  CDR3 for beta chain variable domain of TCR clone 142167 (TRBV7-9, TRBJ1-5)
CASSQGHQPNQTQNF

SEQ ID NO: 284335 - protein, 16 aa, Homo sapiens
  CDR3 for alpha chain variable domain of TCR clone 142168 (TRAV13-1, TRAJ45)
CAARGSRKGGADGLTF

SEQ ID NO: 284336 - protein, 13 aa, Homo sapiens
  CDR3 for beta chain variable domain of TCR clone 142168 (TRBV12-4, TRBJ2-5)
CASRKRGKETQYC

SEQ ID NO: 284337 - protein, 14 aa, Homo sapiens
  CDR3 for alpha chain variable domain of TCR clone 142169 (TRAV2, TRAJ37)
CAVDFTSNTGKLIL

SEQ ID NO: 284338 - protein, 16 aa, Homo sapiens
  CDR3 for beta chain variable domain of TCR clone 142169 (TRBV20-1, TRBJ1-4)
CSAPGQGLLTNEKLFF

SEQ ID NO: 284339 - protein, 11 aa, Homo sapiens
  CDR3 for alpha chain variable domain of TCR clone 142170 (TRAV2, TRAJ13)
CASVGYQKVTF

SEQ ID NO: 284340 - protein, 16 aa, Homo sapiens
  CDR3 for beta chain variable domain of TCR clone 142170 (TRBV12-5, TRBJ2-5)
CASGPRTSGNQETQYF

SEQ ID NO: 284341 - protein, 17 aa, Homo sapiens
  CDR3 for alpha chain variable domain of TCR clone 142171 (TRAV19, TRAJ58)
CALRGLRVGTSGARLTF

SEQ ID NO: 284342 - protein, 17 aa, Homo sapiens
  CDR3 for beta chain variable domain of TCR clone 142171 (TRBV10-3, TRBJ2-4)
CTSVPSVNKGSKNIQYF

SEQ ID NO: 284343 - protein, 14 aa, Homo sapiens
  CDR3 for alpha chain variable domain of TCR clone 142172 (TRAV29/DV5, TRAJ37)
CAASGSGNTGKLIF

SEQ ID NO: 284344 - protein, 17 aa, Homo sapiens
  CDR3 for beta chain variable domain of TCR clone 142172 (TRBV4-1, TRBJ2-7)
CASSPILTSGGVVEQYF

SEQ ID NO: 284345 - protein, 15 aa, Homo sapiens
  CDR3 for alpha chain variable domain of TCR clone 142173 (TRAV17, TRAJ22)
CAKVAPSGSARQLTF

SEQ ID NO: 284346 - protein, 15 aa, Homo sapiens
  CDR3 for beta chain variable domain of TCR clone 142173 (TRBV7-2, TRBJ2-3)
CASSSTGLETDTQYF

SEQ ID NO: 284347 - protein, 22 aa, Homo sapiens
  CDR3 for alpha chain variable domain of TCR clone 142174 (TRAV26-1, TRAJ30)
CIVRVRTEMTRSSLEKGHDFIF

SEQ ID NO: 284348 - protein, 18 aa, Homo sapiens
  CDR3 for beta chain variable domain of TCR clone 142174 (TRBV4-1, TRBJ1-5)
CASSQDPRGQGLNQPQPF

SEQ ID NO: 284349 - protein, 14 aa, Homo sapiens
  CDR3 for alpha chain variable domain of TCR clone 142175 (TRAV1-2, TRAJ16)
CAVNRFSDGQKRLF

SEQ ID NO: 284350 - protein, 15 aa, Homo sapiens
  CDR3 for beta chain variable domain of TCR clone 142175 (TRBV12-4, TRBJ2-5)
CASSPPTGLQETQYF

SEQ ID NO: 284351 - protein, 14 aa, Homo sapiens
  CDR3 for alpha chain variable domain of TCR clone 142176 (TRAV9-2, TRAJ36)
CALPWRTGANNLFS

SEQ ID NO: 284352 - protein, 14 aa, Homo sapiens
  CDR3 for beta chain variable domain of TCR clone 142176 (TRBV2, TRBJ1-2)
CASSELQVSYGYTF

SEQ ID NO: 284353 - protein, 12 aa, Homo sapiens
  CDR3 for alpha chain variable domain of TCR clone 142177 (TRAV12-3, TRAJ20)
CAMVRGDYKLSF

SEQ ID NO: 284354 - protein, 14 aa, Homo sapiens
  CDR3 for beta chain variable domain of TCR clone 142177 (TRBV5-5, TRBJ1-5)
CASSGQGVDQPQHC

SEQ ID NO: 284355 - protein, 14 aa, Homo sapiens
  CDR3 for alpha chain variable domain of TCR clone 142178 (TRAV12-2, TRAJ45)
CAVYSGGGADGLTF

SEQ ID NO: 284356 - protein, 15 aa, Homo sapiens
  CDR3 for beta chain variable domain of TCR clone 142178 (TRBV11-2, TRBJ2-1)
CASSKNRGLIYEQFF

SEQ ID NO: 284357 - protein, 18 aa, Homo sapiens
  CDR3 for alpha chain variable domain of TCR clone 142179 (TRAV21, TRAJ52)
CAVRPSPAGGTSYGKLTF

SEQ ID NO: 284358 - protein, 19 aa, Homo sapiens
  CDR3 for beta chain variable domain of TCR clone 142179 (TRBV7-2, TRBJ2-3)
CASSFLSRSWGGGTDTQYF

SEQ ID NO: 284359 - protein, 15 aa, Homo sapiens
  CDR3 for alpha chain variable domain of TCR clone 142180 (TRAV26-1, TRAJ29)
CIVRVEGSGNTPLVF

SEQ ID NO: 284360 - protein, 16 aa, Homo sapiens
  CDR3 for beta chain variable domain of TCR clone 142180 (TRBV11-2, TRBJ2-7)
CASSPTTGGVSYEQYF

SEQ ID NO: 284361 - protein, 18 aa, Homo sapiens
  CDR3 for alpha chain variable domain of TCR clone 142181 (TRAV13-1, TRAJ52)
CAAKNPNAGGTSYGKLTF

SEQ ID NO: 284362 - protein, 14 aa, Homo sapiens
  CDR3 for beta chain variable domain of TCR clone 142181 (TRBV11-2, TRBJ1-5)
CASSLDRGRQPQHF

SEQ ID NO: 284363 - protein, 15 aa, Homo sapiens
  CDR3 for alpha chain variable domain of TCR clone 142182 (TRAV16, TRAJ12)
CSKWPLRDSCYKLIF

SEQ ID NO: 284364 - protein, 13 aa, Homo sapiens
  CDR3 for beta chain variable domain of TCR clone 142182 (TRBV4-2, TRBJ1-1)
CASSQAGSTEAFF

SEQ ID NO: 284365 - protein, 12 aa, Homo sapiens
  CDR3 for alpha chain variable domain of TCR clone 142183 (TRAV13-1, TRAJ49)
CAAPNTGNQFYF

SEQ ID NO: 284366 - protein, 17 aa, Homo sapiens
  CDR3 for beta chain variable domain of TCR clone 142183 (TRBV25-1, TRBJ2-7)
CASSDARVVFSSYKQYF

SEQ ID NO: 284367 - protein, 14 aa, Homo sapiens
  CDR3 for alpha chain variable domain of TCR clone 142184 (TRAV1-2, TRAJ16)
CVVNRFSDGQKLLF

SEQ ID NO: 284368 - protein, 13 aa, Homo sapiens
  CDR3 for beta chain variable domain of TCR clone 142184 (TRBV10-3, TRBJ1-2)
CAISERDSYGDTF

SEQ ID NO: 284369 - protein, 12 aa, Homo sapiens
  CDR3 for alpha chain variable domain of TCR clone 142185 (TRAV21, TRAJ43)
CAVSWNNNDMRF

SEQ ID NO: 284370 - protein, 15 aa, Homo sapiens
  CDR3 for beta chain variable domain of TCR clone 142185 (TRBV9, TRBJ1-6)
CASSVAGTGDSPLHF

SEQ ID NO: 284371 - protein, 12 aa, Homo sapiens
  CDR3 for alpha chain variable domain of TCR clone 142186 (TRAV13-1, TRAJ21)
CAAKEGFNKFYF

SEQ ID NO: 284372 - protein, 13 aa, Homo sapiens
  CDR3 for beta chain variable domain of TCR clone 142186 (TRBV12-4, TRBJ2-7)
CASSPTETFEQYF

SEQ ID NO: 284373 - protein, 15 aa, Homo sapiens
  CDR3 for alpha chain variable domain of TCR clone 142187 (TRAV27, TRAJ38)
CAARRNAGNNRKLIW

SEQ ID NO: 284374 - protein, 13 aa, Homo sapiens
  CDR3 for beta chain variable domain of TCR clone 142187 (TRBV20-1, TRBJ1-1)
CSGRAGGNTEAFF

SEQ ID NO: 284375 - protein, 15 aa, Homo sapiens
  CDR3 for alpha chain variable domain of TCR clone 142188 (TRAV3, TRAJ22)
CAVRDRGGFARQLTF

SEQ ID NO: 284376 - protein, 13 aa, Homo sapiens
  CDR3 for beta chain variable domain of TCR clone 142188 (TRBV12-4, TRBJ1-2)
CASSLRQGKGYTF

SEQ ID NO: 284377 - protein, 11 aa, Homo sapiens
  CDR3 for alpha chain variable domain of TCR clone 142189 (TRAV1-1, TRAJ23)
CAMRPGGKLIF

SEQ ID NO: 284378 - protein, 20 aa, Homo sapiens
  CDR3 for beta chain variable domain of TCR clone 142189 (TRBV7-8, TRBJ2-2)
CDSSHLFPGPTIHITGELFF

SEQ ID NO: 284379 - protein, 12 aa, Homo sapiens
  CDR3 for alpha chain variable domain of TCR clone 142190 (TRAV29/DV5, TRAJ49)
CAATDTCNQFYF

SEQ ID NO: 284380 - protein, 19 aa, Homo sapiens
  CDR3 for beta chain variable domain of TCR clone 142190 (TRBV25-1, TRBJ2-2)
CAILVYRVDRGRKTGELFF

SEQ ID NO: 284381 - protein, 13 aa, Homo sapiens
  CDR3 for alpha chain variable domain of TCR clone 142191 (TRAV21, TRAJ20)
CAVGLRVDYKLSF

SEQ ID NO: 284382 - protein, 14 aa, Homo sapiens
  CDR3 for beta chain variable domain of TCR clone 142191 (TRBV2, TRBJ2-5)
CASKRDGTTETQYF

SEQ ID NO: 284383 - protein, 12 aa, Homo sapiens
  CDR3 for alpha chain variable domain of TCR clone 142192 (TRAV12-3, TRAJ17)
CAMTLTGNKLTF

SEQ ID NO: 284384 - protein, 15 aa, Homo sapiens
  CDR3 for beta chain variable domain of TCR clone 142192 (TRBV20-1, TRBJ2-7)
FSARDRVSVMDEQYF

SEQ ID NO: 284385 - protein, 15 aa, Homo sapiens
  CDR3 for alpha chain variable domain of TCR clone 142193 (TRAV13-1, TRAJ37)
CAATPKEIKHRPTKL

SEQ ID NO: 284386 - protein, 13 aa, Homo sapiens
  CDR3 for beta chain variable domain of TCR clone 142193 (TRBV20-1, TRBJ2-7)
CSATSEDSYEQYF

SEQ ID NO: 284387 - protein, 14 aa, Homo sapiens
  CDR3 for alpha chain variable domain of TCR clone 142194 (TRAV4, TRAJ12)
CLVGYMDSSYKLIF

SEQ ID NO: 284388 - protein, 14 aa, Homo sapiens
  CDR3 for beta chain variable domain of TCR clone 142194 (TRBV27, TRBJ1-1)
CASSPGGGATEALF

SEQ ID NO: 284389 - protein, 15 aa, Homo sapiens
  CDR3 for alpha chain variable domain of TCR clone 142195 (TRAV12-3, TRAJ11)
CAMREENSGYSTLTF

SEQ ID NO: 284390 - protein, 13 aa, Homo sapiens
  CDR3 for beta chain variable domain of TCR clone 142195 (TRBV12-4, TRBJ2-1)
CASSFHSGSEQFF

SEQ ID NO: 284391 - protein, 13 aa, Homo sapiens
  CDR3 for alpha chain variable domain of TCR clone 142196 (TRAV16, TRAJ26)
CITVLCLVQNFVF

SEQ ID NO: 284392 - protein, 12 aa, Homo sapiens
  CDR3 for beta chain variable domain of TCR clone 142196 (TRBV11-2, TRBJ2-1)
CASSPGNNEQFL

SEQ ID NO: 284393 - protein, 13 aa, Homo sapiens
  CDR3 for alpha chain variable domain of TCR clone 142197 (TRAV13-2, TRAJ11)
CAEGDSGYSTLTF

SEQ ID NO: 284394 - protein, 12 aa, Homo sapiens
  CDR3 for beta chain variable domain of TCR clone 142197 (TRBV7-9, TRBJ1-1)
CASSVEGTEAFF

SEQ ID NO: 284395 - protein, 13 aa, Homo sapiens
  CDR3 for alpha chain variable domain of TCR clone 142198 (TRAV13-2, TRAJ13)
CADLSGGYQKVTF

SEQ ID NO: 284396 - protein, 15 aa, Homo sapiens
  CDR3 for beta chain variable domain of TCR clone 142198 (TRBV19, TRBJ1-1)
CASSIGGGRNTEAFS

SEQ ID NO: 284397 - protein, 11 aa, Homo sapiens
  CDR3 for alpha chain variable domain of TCR clone 142199 (TRAV12-2, TRAJ33)
CAVGSNYQLIW

SEQ ID NO: 284398 - protein, 19 aa, Homo sapiens
  CDR3 for beta chain variable domain of TCR clone 142199 (TRBV28, TRBJ2-4)
CASSFQPGGPAHSKNIQYF

SEQ ID NO: 284399 - protein, 13 aa, Homo sapiens
  CDR3 for alpha chain variable domain of TCR clone 142200 (TRAV12-1, TRAJ22)
CVVPSGSARQLTF

SEQ ID NO: 284400 - protein, 13 aa, Homo sapiens
  CDR3 for beta chain variable domain of TCR clone 142200 (TRBV12-4, TRBJ1-2)
CASSLRQGKGYTF

SEQ ID NO: 284401 - protein, 14 aa, Homo sapiens
  CDR3 for alpha chain variable domain of TCR clone 142201 (TRAV20, TRAJ56)
CAVQFGGANSKLTF

SEQ ID NO: 284402 - protein, 13 aa, Homo sapiens
  CDR3 for beta chain variable domain of TCR clone 142201 (TRBV6-1, TRBJ1-1)
CASSEVFGTEAFF

SEQ ID NO: 284403 - protein, 14 aa, Homo sapiens
  CDR3 for alpha chain variable domain of TCR clone 142202 (TRAV10, TRAJ34)
CVVSRGGDTDKLIF

SEQ ID NO: 284404 - protein, 17 aa, Homo sapiens
  CDR3 for beta chain variable domain of TCR clone 142202 (TRBV6-3, TRBJ2-3)
CASRRPLGGVSTDTQYF

SEQ ID NO: 284405 - protein, 14 aa, Homo sapiens
  CDR3 for alpha chain variable domain of TCR clone 142203 (TRAV5, TRAJ33)
CAARRGDSNYQLIW

SEQ ID NO: 284406 - protein, 19 aa, Homo sapiens
  CDR3 for beta chain variable domain of TCR clone 142203 (TRBV2, TRBJ2-7)
CASSDDETSGRANDYEQYF

SEQ ID NO: 284407 - protein, 14 aa, Homo sapiens
  CDR3 for alpha chain variable domain of TCR clone 142204 (TRAV1-2, TRAJ8)
CAVREDTGFQKLVF

SEQ ID NO: 284408 - protein, 14 aa, Homo sapiens
  CDR3 for beta chain variable domain of TCR clone 142204 (TRBV13, TRBJ2-5)
CASSLGRGQETQYF

SEQ ID NO: 284409 - protein, 13 aa, Homo sapiens
  CDR3 for alpha chain variable domain of TCR clone 142205 (TRAV3, TRAJ21)
CSVREPDFNKFYF

SEQ ID NO: 284410 - protein, 15 aa, Homo sapiens
  CDR3 for beta chain variable domain of TCR clone 142205 (TRBV4-3, TRBJ2-2)
CASSQGQGGTGELFF

SEQ ID NO: 284411 - protein, 13 aa, Homo sapiens
  CDR3 for alpha chain variable domain of TCR clone 142206 (TRAV14/DV4, TRAJ4)
CAMKAGGYNKLIF

SEQ ID NO: 284412 - protein, 15 aa, Homo sapiens
  CDR3 for beta chain variable domain of TCR clone 142206 (TRBV11-3, TRBJ1-1)
CASSLGGPGDTEVFF

SEQ ID NO: 284413 - protein, 13 aa, Homo sapiens
  CDR3 for alpha chain variable domain of TCR clone 142207 (TRAV3, TRAJ30)
CAVRDRGDDKIIF

SEQ ID NO: 284414 - protein, 14 aa, Homo sapiens
  CDR3 for beta chain variable domain of TCR clone 142207 (TRBV5-1, TRBJ1-1)
CASSRTTGETEAFF

SEQ ID NO: 284415 - protein, 15 aa, Homo sapiens
  CDR3 for alpha chain variable domain of TCR clone 142208 (TRAV13-1, TRAJ44)
CAASRGAGTASKLTF

SEQ ID NO: 284416 - protein, 14 aa, Homo sapiens
  CDR3 for beta chain variable domain of TCR clone 142208 (TRBV7-2, TRBJ2-5)
CASSPRGSSETQYF

SEQ ID NO: 284417 - protein, 13 aa, Homo sapiens
  CDR3 for alpha chain variable domain of TCR clone 142209 (TRAV2, TRAJ15)
CAVASQAGTALIF

SEQ ID NO: 284418 - protein, 13 aa, Homo sapiens
  CDR3 for beta chain variable domain of TCR clone 142209 (TRBV2, TRBJ1-1)
CASRWTVNTEAFF

SEQ ID NO: 284419 - protein, 13 aa, Homo sapiens
  CDR3 for alpha chain variable domain of TCR clone 142210 (TRAV8-3, TRAJ28)
CAVAAVGSYQLTF

SEQ ID NO: 284420 - protein, 16 aa, Homo sapiens
  CDR3 for beta chain variable domain of TCR clone 142210 (TRBV6-5, TRBJ2-7)
CASSSDPTSGFYEQYF

SEQ ID NO: 284421 - protein, 11 aa, Homo sapiens
  CDR3 for alpha chain variable domain of TCR clone 142211 (TRAV3, TRAJ21)
RAVGNFNKFYF

SEQ ID NO: 284422 - protein, 13 aa, Homo sapiens
  CDR3 for beta chain variable domain of TCR clone 142211 (TRBV7-9, TRBJ1-2)
CASSLKQNYGYAF

SEQ ID NO: 284423 - protein, 14 aa, Homo sapiens
  CDR3 for alpha chain variable domain of TCR clone 142212 (TRAV1-2, TRAJ8)
CAVREDTGFQKLVL

SEQ ID NO: 284424 - protein, 12 aa, Homo sapiens
  CDR3 for beta chain variable domain of TCR clone 142212 (TRBV11-2, TRBJ2-2)
CASSLPTGELFF

SEQ ID NO: 284425 - protein, 14 aa, Homo sapiens
  CDR3 for alpha chain variable domain of TCR clone 142213 (TRAV1-2, TRAJ8)
CAVREDTGFQKLVF

SEQ ID NO: 284426 - protein, 13 aa, Homo sapiens
  CDR3 for beta chain variable domain of TCR clone 142213 (TRBV13, TRBJ2-7)
CASSSGLTHEQYF

SEQ ID NO: 284427 - protein, 13 aa, Homo sapiens
  CDR3 for alpha chain variable domain of TCR clone 142214 (TRAV25, TRAJ20)
CRKRSVGRLKLSF

SEQ ID NO: 284428 - protein, 12 aa, Homo sapiens
  CDR3 for beta chain variable domain of TCR clone 142214 (TRBV12-5, TRBJ2-3)
CASQASTDTQYF

SEQ ID NO: 284429 - protein, 16 aa, Homo sapiens
  CDR3 for alpha chain variable domain of TCR clone 142215 (TRAV12-3, TRAJ53)
CAMSPGSGGSNYKLTF

SEQ ID NO: 284430 - protein, 14 aa, Homo sapiens
  CDR3 for beta chain variable domain of TCR clone 142215 (TRBV4-1, TRBJ2-7)
CASSPDAGGDEQYF

SEQ ID NO: 284431 - protein, 15 aa, Homo sapiens
  CDR3 for alpha chain variable domain of TCR clone 142216 (TRAV27, TRAJ38)
CAARRNAGNNRKRIR

SEQ ID NO: 284432 - protein, 13 aa, Homo sapiens
  CDR3 for beta chain variable domain of TCR clone 142216 (TRBV12-5, TRBJ2-3)
CASGDRQSDTQYF

SEQ ID NO: 284433 - protein, 14 aa, Homo sapiens
  CDR3 for alpha chain variable domain of TCR clone 142217 (TRAV1-2, TRAJ8)
CAVREDTGFQKLVF

SEQ ID NO: 284434 - protein, 14 aa, Homo sapiens
  CDR3 for beta chain variable domain of TCR clone 142217 (TRBV7-9, TRBJ1-1)
CASTPLQSYAAAFF

SEQ ID NO: 284435 - protein, 14 aa, Homo sapiens
  CDR3 for alpha chain variable domain of TCR clone 142218 (TRAV2, TRAJ22)
CAVEVKRAARQLTF

SEQ ID NO: 284436 - protein, 14 aa, Homo sapiens
  CDR3 for beta chain variable domain of TCR clone 142218 (TRBV19, TRBJ2-2)
CASTPGYSGGELFL

SEQ ID NO: 284437 - protein, 14 aa, Homo sapiens
  CDR3 for alpha chain variable domain of TCR clone 142219 (TRAV3, TRAJ28)
CAVRRGAGRYQLTF

SEQ ID NO: 284438 - protein, 16 aa, Homo sapiens
  CDR3 for beta chain variable domain of TCR clone 142219 (TRBV4-1, TRBJ2-7)
CASSHEWTSGPLEQYF

SEQ ID NO: 284439 - protein, 13 aa, Homo sapiens
  CDR3 for alpha chain variable domain of TCR clone 142220 (TRAV12-1, TRAJ29)
CVVDISGNTPLVF

SEQ ID NO: 284440 - protein, 14 aa, Homo sapiens
  CDR3 for beta chain variable domain of TCR clone 142220 (TRBV12-4, TRBJ2-3)
CASSLVPSTDTQYF

SEQ ID NO: 284441 - protein, 15 aa, Homo sapiens
  CDR3 for alpha chain variable domain of TCR clone 142221 (TRAV3, TRAJ13)
CAVRVYSGGFQKVTF

SEQ ID NO: 284442 - protein, 15 aa, Homo sapiens
  CDR3 for beta chain variable domain of TCR clone 142221 (TRBV5-7, TRBJ1-2)
CASSLGVAATYGYTF

SEQ ID NO: 284443 - protein, 17 aa, Homo sapiens
  CDR3 for alpha chain variable domain of TCR clone 142222 (TRAV3, TRAJ42)
CAVRDRDYGGSQGNLIF

SEQ ID NO: 284444 - protein, 14 aa, Homo sapiens
  CDR3 for beta chain variable domain of TCR clone 142222 (TRBV10-3, TRBJ2-7)
CAISAPRGAYEQYF

SEQ ID NO: 284445 - protein, 14 aa, Homo sapiens
  CDR3 for alpha chain variable domain of TCR clone 142223 (TRAV13-1, TRAJ44)
CAAKATGTASKLTF

SEQ ID NO: 284446 - protein, 16 aa, Homo sapiens
  CDR3 for beta chain variable domain of TCR clone 142223 (TRBV27, TRBJ2-3)
CASSLQGNRGTDTQYF

SEQ ID NO: 284447 - protein, 14 aa, Homo sapiens
  CDR3 for alpha chain variable domain of TCR clone 142224 (TRAV12-3, TRAJ8)
CAASKNTGFQKLVF

SEQ ID NO: 284448 - protein, 16 aa, Homo sapiens
  CDR3 for beta chain variable domain of TCR clone 142224 (TRBV4-1, TRBJ2-6)
CASSQVGDPGANVLTF

SEQ ID NO: 284449 - protein, 14 aa, Homo sapiens
  CDR3 for alpha chain variable domain of TCR clone 142225 (TRAV17, TRAJ15)
CATDRGQAGTALIS

SEQ ID NO: 284450 - protein, 17 aa, Homo sapiens
  CDR3 for beta chain variable domain of TCR clone 142225 (TRBV29-1, TRBJ2-1)
CSVVGLAGAYSYNEQFF

SEQ ID NO: 284451 - protein, 14 aa, Homo sapiens
  CDR3 for alpha chain variable domain of TCR clone 142226 (TRAV2, TRAJ9)
CAVEDRCGGFKTIF

SEQ ID NO: 284452 - protein, 16 aa, Homo sapiens
  CDR3 for beta chain variable domain of TCR clone 142226 (TRBV12-5, TRBJ2-5)
CASGPRTSGNQETQYF

SEQ ID NO: 284453 - protein, 12 aa, Homo sapiens
  CDR3 for alpha chain variable domain of TCR clone 142227 (TRAV16, TRAJ10)
CSRTGGGKKLTF

SEQ ID NO: 284454 - protein, 19 aa, Homo sapiens
  CDR3 for beta chain variable domain of TCR clone 142227 (TRBV25-1, TRBJ2-2)
CAILVYRVDRGRKTGELFF

SEQ ID NO: 284455 - protein, 12 aa, Homo sapiens
  CDR3 for alpha chain variable domain of TCR clone 142228 (TRAV26-1, TRAJ54)
CIGGWGAQKLVF

SEQ ID NO: 284456 - protein, 14 aa, Homo sapiens
  CDR3 for beta chain variable domain of TCR clone 142228 (TRBV11-2, TRBJ1-2)
CASSYGQAGDGYTF

SEQ ID NO: 284457 - protein, 16 aa, Homo sapiens
  CDR3 for alpha chain variable domain of TCR clone 142229 (TRAV30, TRAJ24)
CGTEIVDADSWGKFQF

SEQ ID NO: 284458 - protein, 15 aa, Homo sapiens
  CDR3 for beta chain variable domain of TCR clone 142229 (TRBV27, TRBJ2-1)
CANSNGGGSSNEQFF

SEQ ID NO: 284459 - protein, 15 aa, Homo sapiens
  CDR3 for alpha chain variable domain of TCR clone 142230 (TRAV27, TRAJ38)
CAARRNAGNNRKLIW

SEQ ID NO: 284460 - protein, 11 aa, Homo sapiens
  CDR3 for beta chain variable domain of TCR clone 142230 (TRBV12-4, TRBJ2-2)
CPSSSAGELFF

SEQ ID NO: 284461 - protein, 12 aa, Homo sapiens
  CDR3 for alpha chain variable domain of TCR clone 142231 (TRAV22, TRAJ29)
FAPPSGNTPLVF

SEQ ID NO: 284462 - protein, 15 aa, Homo sapiens
  CDR3 for beta chain variable domain of TCR clone 142231 (TRBV7-3, TRBJ2-1)
CASSLGQGPFGEQFF

SEQ ID NO: 284463 - protein, 12 aa, Homo sapiens
  CDR3 for alpha chain variable domain of TCR clone 142232 (TRAV3, TRAJ7)
CADLLWEQQTRF

SEQ ID NO: 284464 - protein, 16 aa, Homo sapiens
  CDR3 for beta chain variable domain of TCR clone 142232 (TRBV7-2, TRBJ2-3)
CASSLVGDASTDTQYF

SEQ ID NO: 284465 - protein, 12 aa, Homo sapiens
  CDR3 for alpha chain variable domain of TCR clone 142233 (TRAV13-1, TRAJ48)
CAANFGNEKLTF

SEQ ID NO: 284466 - protein, 12 aa, Homo sapiens
  CDR3 for beta chain variable domain of TCR clone 142233 (TRBV7-8, TRBJ2-7)
CASSLGDREQYV

SEQ ID NO: 284467 - protein, 14 aa, Homo sapiens
  CDR3 for alpha chain variable domain of TCR clone 142234 (TRAV14/DV4, TRAJ32)
SNVLPLTPTNKLIF

SEQ ID NO: 284468 - protein, 14 aa, Homo sapiens
  CDR3 for beta chain variable domain of TCR clone 142234 (TRBV6-1, TRBJ1-3)
CASVQGGGGNTIYF

SEQ ID NO: 284469 - protein, 15 aa, Homo sapiens
  CDR3 for alpha chain variable domain of TCR clone 142235 (TRAV1-2, TRAJ38)
CAVSENAGNNRTLIW

SEQ ID NO: 284470 - protein, 16 aa, Homo sapiens
  CDR3 for beta chain variable domain of TCR clone 142235 (TRBV4-1, TRBJ2-7)
CASSLTAGQATYEQYF

SEQ ID NO: 284471 - protein, 16 aa, Homo sapiens
  CDR3 for alpha chain variable domain of TCR clone 142236 (TRAV26-1, TRAJ38)
CIVRAYNAGNNRKLIW

SEQ ID NO: 284472 - protein, 12 aa, Homo sapiens
  CDR3 for beta chain variable domain of TCR clone 142236 (TRBV7-9, TRBJ2-7)
CASSFGSYEQYF

SEQ ID NO: 284473 - protein, 15 aa, Homo sapiens
  CDR3 for alpha chain variable domain of TCR clone 142237 (TRAV20, TRAJ43)
CAVQAGKSSNNDMRF

SEQ ID NO: 284474 - protein, 11 aa, Homo sapiens
  CDR3 for beta chain variable domain of TCR clone 142237 (TRBV7-2, TRBJ2-7)
CASSSGLWQYF

SEQ ID NO: 284475 - protein, 13 aa, Homo sapiens
  CDR3 for alpha chain variable domain of TCR clone 142238 (TRAV22, TRAJ29)
CAVGGSGNTPLVF

SEQ ID NO: 284476 - protein, 17 aa, Homo sapiens
  CDR3 for beta chain variable domain of TCR clone 142238 (TRBV13, TRBJ2-3)
CASSLFRVAGGRNTQYF

SEQ ID NO: 284477 - protein, 14 aa, Homo sapiens
  CDR3 for alpha chain variable domain of TCR clone 142239 (TRAV29/DV5, TRAJ32)
CAAAYGGATNKIIF

SEQ ID NO: 284478 - protein, 15 aa, Homo sapiens
  CDR3 for beta chain variable domain of TCR clone 142239 (TRBV27, TRBJ2-7)
CASSTAGTGSYEQYF

SEQ ID NO: 284479 - protein, 14 aa, Homo sapiens
  CDR3 for alpha chain variable domain of TCR clone 142240 (TRAV1-1, TRAJ27)
CAVIYNTNAGRSTF

SEQ ID NO: 284480 - protein, 15 aa, Homo sapiens
  CDR3 for beta chain variable domain of TCR clone 142240 (TRBV7-2, TRBJ2-1)
CASSSGLAGGNEQFF

SEQ ID NO: 284481 - protein, 13 aa, Homo sapiens
  CDR3 for alpha chain variable domain of TCR clone 142241 (TRAV13-1, TRAJ4)
CAATIGGYNKLIF

SEQ ID NO: 284482 - protein, 16 aa, Homo sapiens
  CDR3 for beta chain variable domain of TCR clone 142241 (TRBV20-1, TRBJ2-1)
CSAPWLAGSYSDEQFF

SEQ ID NO: 284483 - protein, 12 aa, Homo sapiens
  CDR3 for alpha chain variable domain of TCR clone 142242 (TRAV3, TRAJ27)
CAVRDGAGKSTF

SEQ ID NO: 284484 - protein, 16 aa, Homo sapiens
  CDR3 for beta chain variable domain of TCR clone 142242 (TRBV4-1, TRBJ2-5)
CASSQAIAASSATQYF

SEQ ID NO: 284485 - protein, 13 aa, Homo sapiens
  CDR3 for alpha chain variable domain of TCR clone 142243 (TRAV20, TRAJ34)
CAVRSFNTDKLIF

SEQ ID NO: 284486 - protein, 12 aa, Homo sapiens
  CDR3 for beta chain variable domain of TCR clone 142243 (TRBV11-2, TRBJ2-1)
CASSPGNNEQFF

SEQ ID NO: 284487 - protein, 15 aa, Homo sapiens
  CDR3 for alpha chain variable domain of TCR clone 142244 (TRAV12-2, TRAJ53)
CAVNGGGGSNYQLTF

SEQ ID NO: 284488 - protein, 14 aa, Homo sapiens
  CDR3 for beta chain variable domain of TCR clone 142244 (TRBV18, TRBJ2-7)
CASSPRGGAYEQYF

SEQ ID NO: 284489 - protein, 15 aa, Homo sapiens
  CDR3 for alpha chain variable domain of TCR clone 142245 (TRAV26-1, TRAJ29)
CIVRVEGSGNTPLVS

SEQ ID NO: 284490 - protein, 15 aa, Homo sapiens
  CDR3 for beta chain variable domain of TCR clone 142245 (TRBV7-9, TRBJ1-5)
CASSQGHQPNQPQHF

SEQ ID NO: 284491 - protein, 13 aa, Homo sapiens
  CDR3 for alpha chain variable domain of TCR clone 142246 (TRAV21, TRAJ27)
CAARTGNAGKSTF

SEQ ID NO: 284492 - protein, 14 aa, Homo sapiens
  CDR3 for beta chain variable domain of TCR clone 142246 (TRBV20-1, TRBJ2-1)
CSAAGSGEYNEQFF

SEQ ID NO: 284493 - protein, 12 aa, Homo sapiens
  CDR3 for alpha chain variable domain of TCR clone 142247 (TRAV1-1, TRAJ39)
CAVPVVANMLTF

SEQ ID NO: 284494 - protein, 15 aa, Homo sapiens
  CDR3 for beta chain variable domain of TCR clone 142247 (TRBV19, TRBJ1-6)
CASSTQGAVGSPLHF

SEQ ID NO: 284495 - protein, 16 aa, Homo sapiens
  CDR3 for alpha chain variable domain of TCR clone 142248 (TRAV30, TRAJ24)
CGTEIVDADSWGKYQF

SEQ ID NO: 284496 - protein, 15 aa, Homo sapiens
  CDR3 for beta chain variable domain of TCR clone 142248 (TRBV12-4, TRBJ2-2)
CASSPNDSGTGELFF

SEQ ID NO: 284497 - protein, 14 aa, Homo sapiens
  CDR3 for alpha chain variable domain of TCR clone 142249 (TRAV1-2, TRAJ8)
CAVREDTGFQKLVF

SEQ ID NO: 284498 - protein, 15 aa, Homo sapiens
  CDR3 for beta chain variable domain of TCR clone 142249 (TRBV7-6, TRBJ2-7)
CASSGRRDTFGEQYF

SEQ ID NO: 284499 - protein, 12 aa, Homo sapiens
  CDR3 for alpha chain variable domain of TCR clone 142250 (TRAV13-1, TRAJ21)
CAAKEGFNKFYF

SEQ ID NO: 284500 - protein, 13 aa, Homo sapiens
  CDR3 for beta chain variable domain of TCR clone 142250 (TRBV7-3, TRBJ1-1)
CASSQDWGAAAFF

SEQ ID NO: 284501 - protein, 16 aa, Homo sapiens
  CDR3 for alpha chain variable domain of TCR clone 142251 (TRAV12-3, TRAJ53)
CAMGPGSGGSNYKLTF

SEQ ID NO: 284502 - protein, 11 aa, Homo sapiens
  CDR3 for beta chain variable domain of TCR clone 142251 (TRBV29-1, TRBJ2-5)
CSGDRTGTQYF

SEQ ID NO: 284503 - protein, 13 aa, Homo sapiens
  CDR3 for alpha chain variable domain of TCR clone 142252 (TRAV8-3, TRAJ28)
CAVGAVGSYQLTF

SEQ ID NO: 284504 - protein, 14 aa, Homo sapiens
  CDR3 for beta chain variable domain of TCR clone 142252 (TRBV25-1, TRBJ1-1)
CASTHLGWNTEAFF

SEQ ID NO: 284505 - protein, 15 aa, Homo sapiens
  CDR3 for alpha chain variable domain of TCR clone 142253 (TRAV8-3, TRAJ45)
CASSYSGGGADGLTF

SEQ ID NO: 284506 - protein, 15 aa, Homo sapiens
  CDR3 for beta chain variable domain of TCR clone 142253 (TRBV20-1, TRBJ2-7)
SSARDRVSGMDEQYF

SEQ ID NO: 284507 - protein, 16 aa, Homo sapiens
  CDR3 for alpha chain variable domain of TCR clone 142254 (TRAV38-1, TRAJ39)
CAFMKHYLGAGNMLTF

SEQ ID NO: 284508 - protein, 18 aa, Homo sapiens
  CDR3 for beta chain variable domain of TCR clone 142254 (TRBV6-7, TRBJ2-1)
CQQLHCGREGGGVNEQFF

SEQ ID NO: 284509 - protein, 18 aa, Homo sapiens
  CDR3 for alpha chain variable domain of TCR clone 142255 (TRAV13-1, TRAJ52)
CAAKNTNAGGTSYGKLTF

SEQ ID NO: 284510 - protein, 12 aa, Homo sapiens
  CDR3 for beta chain variable domain of TCR clone 142255 (TRBV11-2, TRBJ2-1)
CASSPGNNEQFF

SEQ ID NO: 284511 - protein, 15 aa, Homo sapiens
  CDR3 for alpha chain variable domain of TCR clone 142256 (TRAV3, TRAJ22)
CAVRHRGGSARQLTF

SEQ ID NO: 284512 - protein, 16 aa, Homo sapiens
  CDR3 for beta chain variable domain of TCR clone 142256 (TRBV5-4, TRBJ2-3)
CASQQPGAGGADTQYF

SEQ ID NO: 284513 - protein, 20 aa, Homo sapiens
  CDR3 for alpha chain variable domain of TCR clone 142257 (TRAV12-1, TRAJ42)
SSVIQPPTSVKGGSQGNLIF

SEQ ID NO: 284514 - protein, 11 aa, Homo sapiens
  CDR3 for beta chain variable domain of TCR clone 142257 (TRBV19, TRBJ1-1)
CASSIGSEAFF

SEQ ID NO: 284515 - protein, 15 aa, Homo sapiens
  CDR3 for alpha chain variable domain of TCR clone 142258 (TRAV12-3, TRAJ6)
CAMSATSGGSYIPTF

SEQ ID NO: 284516 - protein, 11 aa, Homo sapiens
  CDR3 for beta chain variable domain of TCR clone 142258 (TRBV20-1, TRBJ1-5)
CSAQGDQPEHF

SEQ ID NO: 284517 - protein, 16 aa, Homo sapiens
  CDR3 for alpha chain variable domain of TCR clone 142259 (TRAV8-3, TRAJ18)
CAVGARRGSTLGRLYF

SEQ ID NO: 284518 - protein, 14 aa, Homo sapiens
  CDR3 for beta chain variable domain of TCR clone 142259 (TRBV4-2, TRBJ2-1)
CASGLDRAYYEQFF

SEQ ID NO: 284519 - protein, 19 aa, Homo sapiens
  CDR3 for alpha chain variable domain of TCR clone 142260 (TRAV12-1, TRAJ41)
SAPTSVWSPNSNSGYALNF

SEQ ID NO: 284520 - protein, 12 aa, Homo sapiens
  CDR3 for beta chain variable domain of TCR clone 142260 (TRBV14, TRBJ2-5)
CASSQLKETQYF

SEQ ID NO: 284521 - protein, 14 aa, Homo sapiens
  CDR3 for alpha chain variable domain of TCR clone 142261 (TRAV12-2, TRAJ13)
CAVKKTGGYQKVTF

SEQ ID NO: 284522 - protein, 16 aa, Homo sapiens
  CDR3 for beta chain variable domain of TCR clone 142261 (TRBV2, TRBJ2-1)
CASRSPTGGKYNEQFF

SEQ ID NO: 284523 - protein, 13 aa, Homo sapiens
  CDR3 for alpha chain variable domain of TCR clone 142262 (TRAV8-1, TRAJ23)
YAVTGGQGGKLIF

SEQ ID NO: 284524 - protein, 15 aa, Homo sapiens
  CDR3 for beta chain variable domain of TCR clone 142262 (TRBV20-1, TRBJ2-2)
CSAIPGQSNTGELFF

SEQ ID NO: 284525 - protein, 16 aa, Homo sapiens
  CDR3 for alpha chain variable domain of TCR clone 142263 (TRAV3, TRAJ37)
CAVRGKGSGNTGKLIF

SEQ ID NO: 284526 - protein, 15 aa, Homo sapiens
  CDR3 for beta chain variable domain of TCR clone 142263 (TRBV7-9, TRBJ2-2)
CASGPLDTIPGELFF

SEQ ID NO: 284527 - protein, 12 aa, Homo sapiens
  CDR3 for alpha chain variable domain of TCR clone 142264 (TRAV13-1, TRAJ54)
CAASEQPGSPEA

SEQ ID NO: 284528 - protein, 16 aa, Homo sapiens
  CDR3 for beta chain variable domain of TCR clone 142264 (TRBV5-4, TRBJ2-3)
CASQQPGAGGADTQYF

SEQ ID NO: 284529 - protein, 13 aa, Homo sapiens
  CDR3 for alpha chain variable domain of TCR clone 142265 (TRAV12-2, TRAJ50)
CAVIVTSYDKVIF

SEQ ID NO: 284530 - protein, 16 aa, Homo sapiens
  CDR3 for beta chain variable domain of TCR clone 142265 (TRBV6-5, TRBJ2-7)
CASSSDPTSGFYEQYV

SEQ ID NO: 284531 - protein, 15 aa, Homo sapiens
  CDR3 for alpha chain variable domain of TCR clone 142266 (TRAV21, TRAJ32)
CAVNSYGGSTNKLIF

SEQ ID NO: 284532 - protein, 14 aa, Homo sapiens
  CDR3 for beta chain variable domain of TCR clone 142266 (TRBV7-2, TRBJ2-7)
CASSPKTSFYEQYF

SEQ ID NO: 284533 - protein, 13 aa, Homo sapiens
  CDR3 for alpha chain variable domain of TCR clone 142267 (TRAV8-3, TRAJ48)
CAVVPFGNEKLTF

SEQ ID NO: 284534 - protein, 15 aa, Homo sapiens
  CDR3 for beta chain variable domain of TCR clone 142267 (TRBV11-2, TRBJ2-1)
CASSSTSTRYNEQFF

SEQ ID NO: 284535 - protein, 13 aa, Homo sapiens
  CDR3 for alpha chain variable domain of TCR clone 142268 (TRAV20, TRAJ37)
CAGCSSNTGKLIF

SEQ ID NO: 284536 - protein, 21 aa, Homo sapiens
  CDR3 for beta chain variable domain of TCR clone 142268 (TRBV4-2, TRBJ2-3)
PGSQKTRPCISVPAAPDTQYF

SEQ ID NO: 284537 - protein, 15 aa, Homo sapiens
  CDR3 for alpha chain variable domain of TCR clone 142269 (TRAV8-3, TRAJ37)
CAVGARASSTGKLLF

SEQ ID NO: 284538 - protein, 15 aa, Homo sapiens
  CDR3 for beta chain variable domain of TCR clone 142269 (TRBV5-4, TRBJ2-3)
CASSLAGRVTDTQYF

SEQ ID NO: 284539 - protein, 12 aa, Homo sapiens
  CDR3 for alpha chain variable domain of TCR clone 142270 (TRAV21, TRAJ11)
CAVRGGNSTLTF

SEQ ID NO: 284540 - protein, 15 aa, Homo sapiens
  CDR3 for beta chain variable domain of TCR clone 142270 (TRBV6-1, TRBJ2-7)
CASSEPIAATTEQFF

SEQ ID NO: 284541 - protein, 12 aa, Homo sapiens
  CDR3 for alpha chain variable domain of TCR clone 142271 (TRAV8-3, TRAJ22)
FGGHSSARQLTF

SEQ ID NO: 284542 - protein, 15 aa, Homo sapiens
  CDR3 for beta chain variable domain of TCR clone 142271 (TRBV20-1, TRBJ1-1)
CSASRGVTGNTEAFF

SEQ ID NO: 284543 - protein, 12 aa, Homo sapiens
  CDR3 for alpha chain variable domain of TCR clone 142272 (TRAV12-3, TRAJ17)
CAMTLTGNKLTF

SEQ ID NO: 284544 - protein, 15 aa, Homo sapiens
  CDR3 for beta chain variable domain of TCR clone 142272 (TRBV7-9, TRBJ2-7)
CASSLDLDRGYEQYF

SEQ ID NO: 284545 - protein, 16 aa, Homo sapiens
  CDR3 for alpha chain variable domain of TCR clone 142273 (TRAV12-3, TRAJ53)
CAISPGSGGSNYKLTF

SEQ ID NO: 284546 - protein, 17 aa, Homo sapiens
  CDR3 for beta chain variable domain of TCR clone 142273 (TRBV28, TRBJ2-5)
CASSTPEGDALQETQYF

SEQ ID NO: 284547 - protein, 14 aa, Homo sapiens
  CDR3 for alpha chain variable domain of TCR clone 142274 (TRAV14/DV4, TRAJ32)
SNVLPLTPTNKLIF

SEQ ID NO: 284548 - protein, 14 aa, Homo sapiens
  CDR3 for beta chain variable domain of TCR clone 142274 (TRBV7-6, TRBJ2-3)
CASSLGTVTDTQYF

SEQ ID NO: 284549 - protein, 15 aa, Homo sapiens
  CDR3 for alpha chain variable domain of TCR clone 142275 (TRAV2, TRAJ15)
CAVEDREQAGTALNF

SEQ ID NO: 284550 - protein, 14 aa, Homo sapiens
  CDR3 for beta chain variable domain of TCR clone 142275 (TRBV11-2, TRBJ2-7)
CASSLGAGAYEQYF

SEQ ID NO: 284551 - protein, 14 aa, Homo sapiens
  CDR3 for alpha chain variable domain of TCR clone 142276 (TRAV12-1, TRAJ30)
CVVNIGGRDDMIIF

SEQ ID NO: 284552 - protein, 15 aa, Homo sapiens
  CDR3 for beta chain variable domain of TCR clone 142276 (TRBV18, TRBJ1-2)
CASSPSNTPNYGYTF

SEQ ID NO: 284553 - protein, 16 aa, Homo sapiens
  CDR3 for alpha chain variable domain of TCR clone 142277 (TRAV1-2, TRAJ10)
CAVRGVLTGGGNKLTF

SEQ ID NO: 284554 - protein, 16 aa, Homo sapiens
  CDR3 for beta chain variable domain of TCR clone 142277 (TRBV7-6, TRBJ2-5)
CASSETSGRAVETQYF

SEQ ID NO: 284555 - protein, 12 aa, Homo sapiens
  CDR3 for alpha chain variable domain of TCR clone 142278 (TRAV8-3, TRAJ6)
CAVAGGRYIPTF

SEQ ID NO: 284556 - protein, 14 aa, Homo sapiens
  CDR3 for beta chain variable domain of TCR clone 142278 (TRBV27, TRBJ2-7)
CASATGTERREQYF

SEQ ID NO: 284557 - protein, 14 aa, Homo sapiens
  CDR3 for alpha chain variable domain of TCR clone 142279 (TRAV1-2, TRAJ8)
CAVREDTGFQKLVF

SEQ ID NO: 284558 - protein, 20 aa, Homo sapiens
  CDR3 for beta chain variable domain of TCR clone 142279 (TRBV7-8, TRBJ2-2)
CASSHLFPGPTTHITGELFF

SEQ ID NO: 284559 - protein, 14 aa, Homo sapiens
  CDR3 for alpha chain variable domain of TCR clone 142280 (TRAV20, TRAJ56)
CSVQFGGANSNLTF

SEQ ID NO: 284560 - protein, 14 aa, Homo sapiens
  CDR3 for beta chain variable domain of TCR clone 142280 (TRBV20-1, TRBJ2-7)
CSAKRGRSSYEQYF

SEQ ID NO: 284561 - protein, 23 aa, Homo sapiens
  CDR3 for alpha chain variable domain of TCR clone 142281 (TRAV4, TRAJ26)
IHADRKSSTLSLPRVYYGQNFVF

SEQ ID NO: 284562 - protein, 16 aa, Homo sapiens
  CDR3 for beta chain variable domain of TCR clone 142281 (TRBV7-2, TRBJ1-2)
CASSSNQDRRGHGYTF

SEQ ID NO: 284563 - protein, 14 aa, Homo sapiens
  CDR3 for alpha chain variable domain of TCR clone 142282 (TRAV17, TRAJ33)
CATDAQRSNYQLIW

SEQ ID NO: 284564 - protein, 14 aa, Homo sapiens
  CDR3 for beta chain variable domain of TCR clone 142282 (TRBV25-1, TRBJ1-4)
CASSGGGQPEKLFF

SEQ ID NO: 284565 - protein, 16 aa, Homo sapiens
  CDR3 for alpha chain variable domain of TCR clone 142283 (TRAV30, TRAJ24)
CGTEIVDADSWGKFQF

SEQ ID NO: 284566 - protein, 15 aa, Homo sapiens
  CDR3 for beta chain variable domain of TCR clone 142283 (TRBV10-3, TRBJ2-1)
CATNGGPGQGDEQFF

SEQ ID NO: 284567 - protein, 12 aa, Homo sapiens
  CDR3 for alpha chain variable domain of TCR clone 142284 (TRAV36/DV7, TRAJ54)
CAVVRGAQKLVF

SEQ ID NO: 284568 - protein, 13 aa, Homo sapiens
  CDR3 for beta chain variable domain of TCR clone 142284 (TRBV20-1, TRBJ2-7)
CSARPSTNYEQYF

SEQ ID NO: 284569 - protein, 19 aa, Homo sapiens
  CDR3 for alpha chain variable domain of TCR clone 142285 (TRAV25, TRAJ20)
TATQTTDVVILPHDYKLSF

SEQ ID NO: 284570 - protein, 17 aa, Homo sapiens
  CDR3 for beta chain variable domain of TCR clone 142285 (TRBV4-3, TRBJ2-1)
CASSQFSSGRASGEQFF

SEQ ID NO: 284571 - protein, 14 aa, Homo sapiens
  CDR3 for alpha chain variable domain of TCR clone 142286 (TRAV13-1, TRAJ40)
CAASMTSGNYNYIF

SEQ ID NO: 284572 - protein, 15 aa, Homo sapiens
  CDR3 for beta chain variable domain of TCR clone 142286 (TRBV7-3, TRBJ2-1)
CASSPTGGGEVEQFF

SEQ ID NO: 284573 - protein, 14 aa, Homo sapiens
  CDR3 for alpha chain variable domain of TCR clone 142287 (TRAV12-2, TRAJ17)
CAVLFKAAGNKLTF

SEQ ID NO: 284574 - protein, 14 aa, Homo sapiens
  CDR3 for beta chain variable domain of TCR clone 142287 (TRBV19, TRBJ1-5)
CASSLGPGGEPQHF

SEQ ID NO: 284575 - protein, 14 aa, Homo sapiens
  CDR3 for alpha chain variable domain of TCR clone 142288 (TRAV12-3, TRAJ10)
SHLPLTGGGNKLTF

SEQ ID NO: 284576 - protein, 12 aa, Homo sapiens
  CDR3 for beta chain variable domain of TCR clone 142288 (TRBV7-9, TRBJ2-7)
CASSSKREEQYF

SEQ ID NO: 284577 - protein, 15 aa, Homo sapiens
  CDR3 for alpha chain variable domain of TCR clone 142289 (TRAV12-3, TRAJ42)
CAMITSVGSQGNLIF

SEQ ID NO: 284578 - protein, 13 aa, Homo sapiens
  CDR3 for beta chain variable domain of TCR clone 142289 (TRBV3-1, TRBJ2-7)
CASSPGLAHTEYF

SEQ ID NO: 284579 - protein, 13 aa, Homo sapiens
  CDR3 for alpha chain variable domain of TCR clone 142290 (TRAV21, TRAJ45)
CAVMGGGADGLTF

SEQ ID NO: 284580 - protein, 13 aa, Homo sapiens
  CDR3 for beta chain variable domain of TCR clone 142290 (TRBV15, TRBJ2-7)
CATSTTGHYEQYF

SEQ ID NO: 284581 - protein, 12 aa, Homo sapiens
  CDR3 for alpha chain variable domain of TCR clone 142291 (TRAV1-2, TRAJ11)
CAVRGGYSTLTC

SEQ ID NO: 284582 - protein, 16 aa, Homo sapiens
  CDR3 for beta chain variable domain of TCR clone 142291 (TRBV7-9, TRBJ2-1)
CASSSPQGTTRNEQFF

SEQ ID NO: 284583 - protein, 18 aa, Homo sapiens
  CDR3 for alpha chain variable domain of TCR clone 142292 (TRAV21, TRAJ52)
CSVRPSPAGGTSYGKLTF

SEQ ID NO: 284584 - protein, 17 aa, Homo sapiens
  CDR3 for beta chain variable domain of TCR clone 142292 (TRBV13, TRBJ2-3)
RASSLSRVAGGRNTQYF

SEQ ID NO: 284585 - protein, 18 aa, Homo sapiens
  CDR3 for alpha chain variable domain of TCR clone 142293 (TRAV21, TRAJ52)
CAVRPSPAGGTSYGKLTF

SEQ ID NO: 284586 - protein, 17 aa, Homo sapiens
  CDR3 for beta chain variable domain of TCR clone 142293 (TRBV13, TRBJ2-3)
CASNLSRVAGGRNSQYF

SEQ ID NO: 284587 - protein, 12 aa, Homo sapiens
  CDR3 for alpha chain variable domain of TCR clone 142294 (TRAV21, TRAJ43)
CAVSWNNNYMRF

SEQ ID NO: 284588 - protein, 15 aa, Homo sapiens
  CDR3 for beta chain variable domain of TCR clone 142294 (TRBV20-1, TRBJ2-1)
CSASPPSGGYNEQFF

SEQ ID NO: 284589 - protein, 14 aa, Homo sapiens
  CDR3 for alpha chain variable domain of TCR clone 142295 (TRAV17, TRAJ32)
CATDPGGAANKLMF

SEQ ID NO: 284590 - protein, 14 aa, Homo sapiens
  CDR3 for beta chain variable domain of TCR clone 142295 (TRBV2, TRBJ1-5)
CASSENRGGQPQHF

SEQ ID NO: 284591 - protein, 13 aa, Homo sapiens
  CDR3 for alpha chain variable domain of TCR clone 142296 (TRAV36/DV7, TRAJ49)
CAGDSNTGNQFYF

SEQ ID NO: 284592 - protein, 14 aa, Homo sapiens
  CDR3 for beta chain variable domain of TCR clone 142296 (TRBV28, TRBJ2-7)
CASSLRARGNEQYF

SEQ ID NO: 284593 - protein, 11 aa, Homo sapiens
  CDR3 for alpha chain variable domain of TCR clone 142297 (TRAV6, TRAJ39)
RAPDAGNMLTF

SEQ ID NO: 284594 - protein, 14 aa, Homo sapiens
  CDR3 for beta chain variable domain of TCR clone 142297 (TRBV28, TRBJ1-5)
CASSRTGLNQPQHF

SEQ ID NO: 284595 - protein, 10 aa, Homo sapiens
  CDR3 for alpha chain variable domain of TCR clone 142298 (TRAV13-2, TRAJ34)
CAENTDKLIF

SEQ ID NO: 284596 - protein, 15 aa, Homo sapiens
  CDR3 for beta chain variable domain of TCR clone 142298 (TRBV20-1, TRBJ2-7)
CSARDRVSGMDEQYF

SEQ ID NO: 284597 - protein, 21 aa, Homo sapiens
  CDR3 for alpha chain variable domain of TCR clone 142299 (TRAV17, TRAJ57)
TASRAADTTSYFCANPEKLVF

SEQ ID NO: 284598 - protein, 16 aa, Homo sapiens
  CDR3 for beta chain variable domain of TCR clone 142299 (TRBV11-2, TRBJ2-3)
CASSFQGRGALDTQYF

SEQ ID NO: 284599 - protein, 16 aa, Homo sapiens
  CDR3 for alpha chain variable domain of TCR clone 142300 (TRAV23/DV6, TRAJ34)
CAASGALSYNTDKLIF

SEQ ID NO: 284600 - protein, 13 aa, Homo sapiens
  CDR3 for beta chain variable domain of TCR clone 142300 (TRBV7-9, TRBJ1-2)
CASSLKQNYGYTF

SEQ ID NO: 284601 - protein, 12 aa, Homo sapiens
  CDR3 for alpha chain variable domain of TCR clone 142301 (TRAV13-2, TRAJ23)
CAERHRGGKLIF

SEQ ID NO: 284602 - protein, 16 aa, Homo sapiens
  CDR3 for beta chain variable domain of TCR clone 142301 (TRBV15, TRBJ1-2)
CATSRGPRTGGGGYTF

SEQ ID NO: 284603 - protein, 12 aa, Homo sapiens
  CDR3 for alpha chain variable domain of TCR clone 142302 (TRAV12-1, TRAJ9)
CVVHTGGFKTIF

SEQ ID NO: 284604 - protein, 15 aa, Homo sapiens
  CDR3 for beta chain variable domain of TCR clone 142302 (TRBV27, TRBJ2-1)
CASSNGGGSSNEQFF

SEQ ID NO: 284605 - protein, 18 aa, Homo sapiens
  CDR3 for alpha chain variable domain of TCR clone 142303 (TRAV21, TRAJ52)
CAVRPSPAGGTSYGKLTF

SEQ ID NO: 284606 - protein, 14 aa, Homo sapiens
  CDR3 for beta chain variable domain of TCR clone 142303 (TRBV7-9, TRBJ1-2)
CASSFPLREYGYTF

SEQ ID NO: 284607 - protein, 12 aa, Homo sapiens
  CDR3 for alpha chain variable domain of TCR clone 142304 (TRAV25, TRAJ5)
CAGGGGRRELTF

SEQ ID NO: 284608 - protein, 15 aa, Homo sapiens
  CDR3 for beta chain variable domain of TCR clone 142304 (TRBV9, TRBJ1-2)
CASSVVGQANYGYTF

SEQ ID NO: 284609 - protein, 14 aa, Homo sapiens
  CDR3 for alpha chain variable domain of TCR clone 142305 (TRAV17, TRAJ45)
CATASGGGADGLTF

SEQ ID NO: 284610 - protein, 15 aa, Homo sapiens
  CDR3 for beta chain variable domain of TCR clone 142305 (TRBV11-2, TRBJ2-1)
CASSRNRGLVYEQFF

SEQ ID NO: 284611 - protein, 14 aa, Homo sapiens
  CDR3 for alpha chain variable domain of TCR clone 142306 (TRAV1-1, TRAJ23)
CAVSIYNQGGKLIF

SEQ ID NO: 284612 - protein, 15 aa, Homo sapiens
  CDR3 for beta chain variable domain of TCR clone 142306 (TRBV7-3, TRBJ1-6)
CASSLGRGAGSPLHF

SEQ ID NO: 284613 - protein, 14 aa, Homo sapiens
  CDR3 for alpha chain variable domain of TCR clone 142307 (TRAV1-2, TRAJ16)
CAVNRFSDGHKLLF

SEQ ID NO: 284614 - protein, 15 aa, Homo sapiens
  CDR3 for beta chain variable domain of TCR clone 142307 (TRBV20-1, TRBJ2-7)
CSARDRVSGMDEQYF

SEQ ID NO: 284615 - protein, 14 aa, Homo sapiens
  CDR3 for alpha chain variable domain of TCR clone 142308 (TRAV12-2, TRAJ44)
CAVNPAGTASKLTV

SEQ ID NO: 284616 - protein, 15 aa, Homo sapiens
  CDR3 for beta chain variable domain of TCR clone 142308 (TRBV19, TRBJ2-7)
CASSPAGSGEALKYF

SEQ ID NO: 284617 - protein, 11 aa, Homo sapiens
  CDR3 for alpha chain variable domain of TCR clone 142309 (TRAV27, TRAJ47)
CAGAYGNKLVF

SEQ ID NO: 284618 - protein, 16 aa, Homo sapiens
  CDR3 for beta chain variable domain of TCR clone 142309 (TRBV12-5, TRBJ2-5)
CASGPRTSGNQETQYF

SEQ ID NO: 284619 - protein, 14 aa, Homo sapiens
  CDR3 for alpha chain variable domain of TCR clone 142310 (TRAV12-2, TRAJ36)
CAVKISTGANNLFF

SEQ ID NO: 284620 - protein, 14 aa, Homo sapiens
  CDR3 for beta chain variable domain of TCR clone 142310 (TRBV25-1, TRBJ1-2)
CASSDTTGVAGYTF

SEQ ID NO: 284621 - protein, 12 aa, Homo sapiens
  CDR3 for alpha chain variable domain of TCR clone 142311 (TRAV30, TRAJ43)
CGTEERGNDMRF

SEQ ID NO: 284622 - protein, 15 aa, Homo sapiens
  CDR3 for beta chain variable domain of TCR clone 142311 (TRBV7-9, TRBJ1-6)
CASSSPGRGNSPLHF

SEQ ID NO: 284623 - protein, 14 aa, Homo sapiens
  CDR3 for alpha chain variable domain of TCR clone 142312 (TRAV13-1, TRAJ44)
CAAKATGTASKLTF

SEQ ID NO: 284624 - protein, 13 aa, Homo sapiens
  CDR3 for beta chain variable domain of TCR clone 142312 (TRBV7-9, TRBJ2-7)
CASSLPLTYEQYF

SEQ ID NO: 284625 - protein, 17 aa, Homo sapiens
  CDR3 for alpha chain variable domain of TCR clone 142313 (TRAV38-2/DV8, TRAJ28)
CAYRFAYSGAGSYQLTF

SEQ ID NO: 284626 - protein, 17 aa, Homo sapiens
  CDR3 for beta chain variable domain of TCR clone 142313 (TRBV4-3, TRBJ2-2)
CASSQDTSARSPGELFC

SEQ ID NO: 284627 - protein, 13 aa, Homo sapiens
  CDR3 for alpha chain variable domain of TCR clone 142314 (TRAV9-2, TRAJ53)
CALSGGSNYKLTF

SEQ ID NO: 284628 - protein, 16 aa, Homo sapiens
  CDR3 for beta chain variable domain of TCR clone 142314 (TRBV28, TRBJ2-7)
CASSPWVATGDLSQYF

SEQ ID NO: 284629 - protein, 14 aa, Homo sapiens
  CDR3 for alpha chain variable domain of TCR clone 142315 (TRAV12-1, TRAJ23)
CVVIVYNQGGKLIF

SEQ ID NO: 284630 - protein, 15 aa, Homo sapiens
  CDR3 for beta chain variable domain of TCR clone 142315 (TRBV20-1, TRBJ1-5)
CSAKPQGQGPQPQHF

SEQ ID NO: 284631 - protein, 15 aa, Homo sapiens
  CDR3 for alpha chain variable domain of TCR clone 142316 (TRAV23/DV6, TRAJ18)
CAARYRGSTLGRIYF

SEQ ID NO: 284632 - protein, 13 aa, Homo sapiens
  CDR3 for beta chain variable domain of TCR clone 142316 (TRBV7-2, TRBJ2-7)
CASSSPSGSEQCF

SEQ ID NO: 284633 - protein, 17 aa, Homo sapiens
  CDR3 for alpha chain variable domain of TCR clone 142317 (TRAV3, TRAJ6)
CAVRDGPRAGGSYIPTF

SEQ ID NO: 284634 - protein, 17 aa, Homo sapiens
  CDR3 for beta chain variable domain of TCR clone 142317 (TRBV14, TRBJ2-1)
CASSQDRRVTSYNEQFF

SEQ ID NO: 284635 - protein, 14 aa, Homo sapiens
  CDR3 for alpha chain variable domain of TCR clone 142318 (TRAV8-3, TRAJ28)
CAVVPGAGSYQLTF

SEQ ID NO: 284636 - protein, 13 aa, Homo sapiens
  CDR3 for beta chain variable domain of TCR clone 142318 (TRBV7-9, TRBJ1-4)
CASSLPGIEKLFF

SEQ ID NO: 284637 - protein, 14 aa, Homo sapiens
  CDR3 for alpha chain variable domain of TCR clone 142319 (TRAV1-2, TRAJ16)
CAVNRFSDGLKLFF

SEQ ID NO: 284638 - protein, 14 aa, Homo sapiens
  CDR3 for beta chain variable domain of TCR clone 142319 (TRBV23-1, TRBJ2-5)
CASSFLRSQETQYF

SEQ ID NO: 284639 - protein, 11 aa, Homo sapiens
  CDR3 for alpha chain variable domain of TCR clone 142320 (TRAV39, TRAJ49)
CAVDISTQFYF

SEQ ID NO: 284640 - protein, 12 aa, Homo sapiens
  CDR3 for beta chain variable domain of TCR clone 142320 (TRBV11-2, TRBJ2-2)
CASSLGGGELFF

SEQ ID NO: 284641 - protein, 18 aa, Homo sapiens
  CDR3 for alpha chain variable domain of TCR clone 142321 (TRAV17, TRAJ17)
CFLLLCYGVEAAGNKLTV

SEQ ID NO: 284642 - protein, 11 aa, Homo sapiens
  CDR3 for beta chain variable domain of TCR clone 142321 (TRBV7-9, TRBJ2-3)
CASSPTDTQYF

SEQ ID NO: 284643 - protein, 16 aa, Homo sapiens
  CDR3 for alpha chain variable domain of TCR clone 142322 (TRAV20, TRAJ10)
CAVLRGLTGGGNKLTF

SEQ ID NO: 284644 - protein, 14 aa, Homo sapiens
  CDR3 for beta chain variable domain of TCR clone 142322 (TRBV11-2, TRBJ2-5)
CASSRTGGIETQYF

SEQ ID NO: 284645 - protein, 15 aa, Homo sapiens
  CDR3 for alpha chain variable domain of TCR clone 142323 (TRAV2, TRAJ45)
CAVDGTGGGADGLTF

SEQ ID NO: 284646 - protein, 17 aa, Homo sapiens
  CDR3 for beta chain variable domain of TCR clone 142323 (TRBV28, TRBJ2-3)
CASSLQVGPSSTDTQYF

SEQ ID NO: 284647 - protein, 11 aa, Homo sapiens
  CDR3 for alpha chain variable domain of TCR clone 142324 (TRAV4, TRAJ23)
CLVAPGGKLIF

SEQ ID NO: 284648 - protein, 15 aa, Homo sapiens
  CDR3 for beta chain variable domain of TCR clone 142324 (TRBV7-2, TRBJ2-1)
CARSFQADEYNEQFF

SEQ ID NO: 284649 - protein, 16 aa, Homo sapiens
  CDR3 for alpha chain variable domain of TCR clone 142325 (TRAV12-1, TRAJ45)
CVVIRYSGGGADGLTF

SEQ ID NO: 284650 - protein, 13 aa, Homo sapiens
  CDR3 for beta chain variable domain of TCR clone 142325 (TRBV20-1, TRBJ1-1)
CSARGGGNTEAFF

SEQ ID NO: 284651 - protein, 16 aa, Homo sapiens
  CDR3 for alpha chain variable domain of TCR clone 142326 (TRAV27, TRAJ48)
TAAQPGDTGLYLPLTL

SEQ ID NO: 284652 - protein, 13 aa, Homo sapiens
  CDR3 for beta chain variable domain of TCR clone 142326 (TRBV7-2, TRBJ2-5)
CASSQTSVETQYF

SEQ ID NO: 284653 - protein, 15 aa, Homo sapiens
  CDR3 for alpha chain variable domain of TCR clone 142327 (TRAV23/DV6, TRAJ13)
CAAWPGGGGYQIVTF

SEQ ID NO: 284654 - protein, 17 aa, Homo sapiens
  CDR3 for beta chain variable domain of TCR clone 142327 (TRBV19, TRBJ2-7)
CASSISFYDSYPYEQYF

SEQ ID NO: 284655 - protein, 14 aa, Homo sapiens
  CDR3 for alpha chain variable domain of TCR clone 142328 (TRAV8-4, TRAJ54)
CAVSEVLGAQKLVF

SEQ ID NO: 284656 - protein, 14 aa, Homo sapiens
  CDR3 for beta chain variable domain of TCR clone 142328 (TRBV5-1, TRBJ1-2)
CASSVDSTNYGYTF

SEQ ID NO: 284657 - protein, 11 aa, Homo sapiens
  CDR3 for alpha chain variable domain of TCR clone 142329 (TRAV12-1, TRAJ43)
CVEYDNNDMRF

SEQ ID NO: 284658 - protein, 13 aa, Homo sapiens
  CDR3 for beta chain variable domain of TCR clone 142329 (TRBV5-5, TRBJ1-2)
CASSVWRGEDYTF

SEQ ID NO: 284659 - protein, 12 aa, Homo sapiens
  CDR3 for alpha chain variable domain of TCR clone 142330 (TRAV29/DV5, TRAJ49)
CAALNTGNQFYF

SEQ ID NO: 284660 - protein, 15 aa, Homo sapiens
  CDR3 for beta chain variable domain of TCR clone 142330 (TRBV20-1, TRBJ1-1)
CSASRGVTGNTEAFF

SEQ ID NO: 284661 - protein, 14 aa, Homo sapiens
  CDR3 for alpha chain variable domain of TCR clone 142331 (TRAV1-2, TRAJ8)
CAVREDTGFQKLVF

SEQ ID NO: 284662 - protein, 13 aa, Homo sapiens
  CDR3 for beta chain variable domain of TCR clone 142331 (TRBV29-1, TRBJ2-5)
CSVEATAQGTQYF

SEQ ID NO: 284663 - protein, 15 aa, Homo sapiens
  CDR3 for alpha chain variable domain of TCR clone 142332 (TRAV3, TRAJ42)
CAVRGGTGSQGNLIF

SEQ ID NO: 284664 - protein, 14 aa, Homo sapiens
  CDR3 for beta chain variable domain of TCR clone 142332 (TRBV19, TRBJ1-2)
CASSSLFARDGYTL

SEQ ID NO: 284665 - protein, 18 aa, Homo sapiens
  CDR3 for alpha chain variable domain of TCR clone 142333 (TRAV1-2, TRAJ10)
CAVRALTPVTGGGNKLTF

SEQ ID NO: 284666 - protein, 14 aa, Homo sapiens
  CDR3 for beta chain variable domain of TCR clone 142333 (TRBV7-9, TRBJ2-5)
CASSLVGGEETQYF

SEQ ID NO: 284667 - protein, 11 aa, Homo sapiens
  CDR3 for alpha chain variable domain of TCR clone 142334 (TRAV3, TRAJ21)
CAVGTSNKFYF

SEQ ID NO: 284668 - protein, 16 aa, Homo sapiens
  CDR3 for beta chain variable domain of TCR clone 142334 (TRBV19, TRBJ2-1)
CASSKAGPSSYNEQFF

SEQ ID NO: 284669 - protein, 12 aa, Homo sapiens
  CDR3 for alpha chain variable domain of TCR clone 142335 (TRAV2, TRAJ31)
CAVEDNNARLMF

SEQ ID NO: 284670 - protein, 13 aa, Homo sapiens
  CDR3 for beta chain variable domain of TCR clone 142335 (TRBV11-2, TRBJ2-5)
CASSFSSQETQYF

SEQ ID NO: 284671 - protein, 14 aa, Homo sapiens
  CDR3 for alpha chain variable domain of TCR clone 142336 (TRAV12-1, TRAJ42)
CGDAGWGSQGNLIF

SEQ ID NO: 284672 - protein, 14 aa, Homo sapiens
  CDR3 for beta chain variable domain of TCR clone 142336 (TRBV11-2, TRBJ2-3)
CASSLGGGANTQYF

SEQ ID NO: 284673 - protein, 16 aa, Homo sapiens
  CDR3 for alpha chain variable domain of TCR clone 142337 (TRAV3, TRAJ37)
CAVRGKGAGNTGKLIF

SEQ ID NO: 284674 - protein, 15 aa, Homo sapiens
  CDR3 for beta chain variable domain of TCR clone 142337 (TRBV6-6, TRBJ2-5)
CASSYGKIIQETQYF

SEQ ID NO: 284675 - protein, 10 aa, Homo sapiens
  CDR3 for alpha chain variable domain of TCR clone 142338 (TRAV23/DV6, TRAJ57)
CAASSTLSQG

SEQ ID NO: 284676 - protein, 13 aa, Homo sapiens
  CDR3 for beta chain variable domain of TCR clone 142338 (TRBV7-2, TRBJ2-7)
CASSSPSGSEQYF

SEQ ID NO: 284677 - protein, 12 aa, Homo sapiens
  CDR3 for alpha chain variable domain of TCR clone 142339 (TRAV12-3, TRAJ17)
CAMTLTGNKLTF

SEQ ID NO: 284678 - protein, 15 aa, Homo sapiens
  CDR3 for beta chain variable domain of TCR clone 142339 (TRBV20-1, TRBJ2-7)
CSAGDRVSGMDEQFF

SEQ ID NO: 284679 - protein, 23 aa, Homo sapiens
  CDR3 for alpha chain variable domain of TCR clone 142340 (TRAV26-1, TRAJ38)
CIADNAGNNHIQNPDPAVYQLRD

SEQ ID NO: 284680 - protein, 14 aa, Homo sapiens
  CDR3 for beta chain variable domain of TCR clone 142340 (TRBV7-2, TRBJ2-7)
CASSLYPGRYEQYF

SEQ ID NO: 284681 - protein, 16 aa, Homo sapiens
  CDR3 for alpha chain variable domain of TCR clone 142341 (TRAV3, TRAJ10)
CAVRDMMAGGGNKLTF

SEQ ID NO: 284682 - protein, 16 aa, Homo sapiens
  CDR3 for beta chain variable domain of TCR clone 142341 (TRBV12-4, TRBJ1-5)
CASSRPVGGSNQPQHF

SEQ ID NO: 284683 - protein, 13 aa, Homo sapiens
  CDR3 for alpha chain variable domain of TCR clone 142342 (TRAV13-1, TRAJ23)
CAASGRGGGKLIF

SEQ ID NO: 284684 - protein, 14 aa, Homo sapiens
  CDR3 for beta chain variable domain of TCR clone 142342 (TRBV12-4, TRBJ1-1)
CASSLGTGGTEAFF

SEQ ID NO: 284685 - protein, 12 aa, Homo sapiens
  CDR3 for alpha chain variable domain of TCR clone 142343 (TRAV8-3, TRAJ5)
CAVGGGLRALTF

SEQ ID NO: 284686 - protein, 14 aa, Homo sapiens
  CDR3 for beta chain variable domain of TCR clone 142343 (TRBV4-2, TRBJ2-1)
CASGLDRAYNEQFF

SEQ ID NO: 284687 - protein, 14 aa, Homo sapiens
  CDR3 for alpha chain variable domain of TCR clone 142344 (TRAV17, TRAJ34)
CATDSLEGTDKLIF

SEQ ID NO: 284688 - protein, 14 aa, Homo sapiens
  CDR3 for beta chain variable domain of TCR clone 142344 (TRBV7-2, TRBJ2-7)
CASRSQGGAYEQYF

SEQ ID NO: 284689 - protein, 17 aa, Homo sapiens
  CDR3 for alpha chain variable domain of TCR clone 142345 (TRAV3, TRAJ42)
CAVRDRDYGGSQGNLIF

SEQ ID NO: 284690 - protein, 13 aa, Homo sapiens
  CDR3 for beta chain variable domain of TCR clone 142345 (TRBV10-3, TRBJ2-7)
CVSKLAVNYEQYF

SEQ ID NO: 284691 - protein, 11 aa, Homo sapiens
  CDR3 for alpha chain variable domain of TCR clone 142346 (TRAV12-2, TRAJ43)
CASPIGNDMRF

SEQ ID NO: 284692 - protein, 12 aa, Homo sapiens
  CDR3 for beta chain variable domain of TCR clone 142346 (TRBV20-1, TRBJ2-7)
CNAGLKMGEQYF

SEQ ID NO: 284693 - protein, 14 aa, Homo sapiens
  CDR3 for alpha chain variable domain of TCR clone 142347 (TRAV1-2, TRAJ16)
CAVNRFSDGQKLLF

SEQ ID NO: 284694 - protein, 15 aa, Homo sapiens
  CDR3 for beta chain variable domain of TCR clone 142347 (TRBV18, TRBJ2-7)
CASSPSSTGNYEQYF

SEQ ID NO: 284695 - protein, 14 aa, Homo sapiens
  CDR3 for alpha chain variable domain of TCR clone 142348 (TRAV29/DV5, TRAJ20)
CAASAPIEDYKLSF

SEQ ID NO: 284696 - protein, 15 aa, Homo sapiens
  CDR3 for beta chain variable domain of TCR clone 142348 (TRBV27, TRBJ1-6)
CASSFDRGLGSPLHL

SEQ ID NO: 284697 - protein, 13 aa, Homo sapiens
  CDR3 for alpha chain variable domain of TCR clone 142349 (TRAV27, TRAJ43)
CAGAGNNNNDMRF

SEQ ID NO: 284698 - protein, 12 aa, Homo sapiens
  CDR3 for beta chain variable domain of TCR clone 142349 (TRBV7-2, TRBJ2-5)
CASSLGQETQYF

SEQ ID NO: 284699 - protein, 13 aa, Homo sapiens
  CDR3 for alpha chain variable domain of TCR clone 142350 (TRAV13-1, TRAJ6)
CAASSGGSYIPTF

SEQ ID NO: 284700 - protein, 16 aa, Homo sapiens
  CDR3 for beta chain variable domain of TCR clone 142350 (TRBV20-1, TRBJ2-4)
CSAVAGGPGNIQYLAP

SEQ ID NO: 284701 - protein, 15 aa, Homo sapiens
  CDR3 for alpha chain variable domain of TCR clone 142351 (TRAV2, TRAJ22)
CAVPSRGGSARQLTF

SEQ ID NO: 284702 - protein, 13 aa, Homo sapiens
  CDR3 for beta chain variable domain of TCR clone 142351 (TRBV7-2, TRBJ2-5)
CASSQTSVETQYF

SEQ ID NO: 284703 - protein, 14 aa, Homo sapiens
  CDR3 for alpha chain variable domain of TCR clone 142352 (TRAV35, TRAJ50)
CAGHRKTSYDKVIF

SEQ ID NO: 284704 - protein, 15 aa, Homo sapiens
  CDR3 for beta chain variable domain of TCR clone 142352 (TRBV6-3, TRBJ2-7)
CASSSPGTVFYEQDF

SEQ ID NO: 284705 - protein, 15 aa, Homo sapiens
  CDR3 for alpha chain variable domain of TCR clone 142353 (TRAV13-1, TRAJ45)
CAASGSGGGADGLTF

SEQ ID NO: 284706 - protein, 14 aa, Homo sapiens
  CDR3 for beta chain variable domain of TCR clone 142353 (TRBV13, TRBJ1-1)
CASTVITVNTEAFF

SEQ ID NO: 284707 - protein, 13 aa, Homo sapiens
  CDR3 for alpha chain variable domain of TCR clone 142354 (TRAV12-1, TRAJ9)
CVVLNTGGFKTIF

SEQ ID NO: 284708 - protein, 15 aa, Homo sapiens
  CDR3 for beta chain variable domain of TCR clone 142354 (TRBV20-1, TRBJ1-1)
CSARGGGNTEAFLDK

SEQ ID NO: 284709 - protein, 12 aa, Homo sapiens
  CDR3 for alpha chain variable domain of TCR clone 142355 (TRAV17, TRAJ53)
CAFGGSNYKLTF

SEQ ID NO: 284710 - protein, 15 aa, Homo sapiens
  CDR3 for beta chain variable domain of TCR clone 142355 (TRBV11-2, TRBJ2-4)
CSSQEGRGGLDIQYF

SEQ ID NO: 284711 - protein, 14 aa, Homo sapiens
  CDR3 for alpha chain variable domain of TCR clone 142356 (TRAV29/DV5, TRAJ45)
CAASVRGGADGLTF

SEQ ID NO: 284712 - protein, 10 aa, Homo sapiens
  CDR3 for beta chain variable domain of TCR clone 142356 (TRBV11-2, TRBJ2-2)
CQQLTRELFF

SEQ ID NO: 284713 - protein, 16 aa, Homo sapiens
  CDR3 for alpha chain variable domain of TCR clone 142357 (TRAV17, TRAJ36)
CATVSFNWGKQPLLWD

SEQ ID NO: 284714 - protein, 13 aa, Homo sapiens
  CDR3 for beta chain variable domain of TCR clone 142357 (TRBV4-1, TRBJ1-1)
CASSQLGTGEAFF

SEQ ID NO: 284715 - protein, 12 aa, Homo sapiens
  CDR3 for alpha chain variable domain of TCR clone 142358 (TRAV8-3, TRAJ20)
CAVDFNDYKLSF

SEQ ID NO: 284716 - protein, 19 aa, Homo sapiens
  CDR3 for beta chain variable domain of TCR clone 142358 (TRBV19, TRBJ2-5)
CASSIGQVTDFFLGETQYF

SEQ ID NO: 284717 - protein, 12 aa, Homo sapiens
  CDR3 for alpha chain variable domain of TCR clone 142359 (TRAV3, TRAJ20)
CAVRDLDYKLSF

SEQ ID NO: 284718 - protein, 13 aa, Homo sapiens
  CDR3 for beta chain variable domain of TCR clone 142359 (TRBV9, TRBJ2-1)
CASSVGQGGEQFF

SEQ ID NO: 284719 - protein, 13 aa, Homo sapiens
  CDR3 for alpha chain variable domain of TCR clone 142360 (TRAV27, TRAJ45)
CRRSGGGADGLTF

SEQ ID NO: 284720 - protein, 13 aa, Homo sapiens
  CDR3 for beta chain variable domain of TCR clone 142360 (TRBV27, TRBJ1-4)
CASSLMGDEKLFF

SEQ ID NO: 284721 - protein, 13 aa, Homo sapiens
  CDR3 for alpha chain variable domain of TCR clone 142361 (TRAV1-1, TRAJ31)
CASYLNNNARLMF

SEQ ID NO: 284722 - protein, 15 aa, Homo sapiens
  CDR3 for beta chain variable domain of TCR clone 142361 (TRBV7-9, TRBJ1-6)
CASSSPGRGNSPLHF

SEQ ID NO: 284723 - protein, 14 aa, Homo sapiens
  CDR3 for alpha chain variable domain of TCR clone 142362 (TRAV26-1, TRAJ54)
CIVRVPQGAHKLVF

SEQ ID NO: 284724 - protein, 14 aa, Homo sapiens
  CDR3 for beta chain variable domain of TCR clone 142362 (TRBV5-4, TRBJ2-5)
CASSLVGVEETQYF

SEQ ID NO: 284725 - protein, 16 aa, Homo sapiens
  CDR3 for alpha chain variable domain of TCR clone 142363 (TRAV12-1, TRAJ53)
CVVTSVAGGSNYKLAF

SEQ ID NO: 284726 - protein, 16 aa, Homo sapiens
  CDR3 for beta chain variable domain of TCR clone 142363 (TRBV6-6, TRBJ2-3)
CASSYSHAGSTDTQYF

SEQ ID NO: 284727 - protein, 12 aa, Homo sapiens
  CDR3 for alpha chain variable domain of TCR clone 142364 (TRAV13-1, TRAJ15)
CAASQAATALIF

SEQ ID NO: 284728 - protein, 18 aa, Homo sapiens
  CDR3 for beta chain variable domain of TCR clone 142364 (TRBV7-9, TRBJ2-3)
CASSLPINGQISTDTQYF

SEQ ID NO: 284729 - protein, 12 aa, Homo sapiens
  CDR3 for alpha chain variable domain of TCR clone 142365 (TRAV13-2, TRAJ8)
CAPWLGFQKLVF

SEQ ID NO: 284730 - protein, 22 aa, Homo sapiens
  CDR3 for beta chain variable domain of TCR clone 142365 (TRBV11-2, TRBJ1-4)
CASSLDITRRGIPRKDNEKLFF

SEQ ID NO: 284731 - protein, 15 aa, Homo sapiens
  CDR3 for alpha chain variable domain of TCR clone 142366 (TRAV16, TRAJ12)
CSKWPLRDSSYKLIF

SEQ ID NO: 284732 - protein, 16 aa, Homo sapiens
  CDR3 for beta chain variable domain of TCR clone 142366 (TRBV20-1, TRBJ1-4)
CSAPGQGLLTNEKLFF

SEQ ID NO: 284733 - protein, 10 aa, Homo sapiens
  CDR3 for alpha chain variable domain of TCR clone 142367 (TRAV23/DV6, TRAJ9)
CAATLSPPNT

SEQ ID NO: 284734 - protein, 14 aa, Homo sapiens
  CDR3 for beta chain variable domain of TCR clone 142367 (TRBV11-2, TRBJ2-5)
CASSRTGGIETQYF

SEQ ID NO: 284735 - protein, 15 aa, Homo sapiens
  CDR3 for alpha chain variable domain of TCR clone 142368 (TRAV26-1, TRAJ29)
CIVRVEGSGNTLLVF

SEQ ID NO: 284736 - protein, 15 aa, Homo sapiens
  CDR3 for beta chain variable domain of TCR clone 142368 (TRBV7-9, TRBJ1-5)
CASSQDHQPNQPQHF

SEQ ID NO: 284737 - protein, 13 aa, Homo sapiens
  CDR3 for alpha chain variable domain of TCR clone 142369 (TRAV8-3, TRAJ36)
CAVVATGANNLFF

SEQ ID NO: 284738 - protein, 13 aa, Homo sapiens
  CDR3 for beta chain variable domain of TCR clone 142369 (TRBV6-1, TRBJ1-1)
CASSRQGNTEAFF

SEQ ID NO: 284739 - protein, 13 aa, Homo sapiens
  CDR3 for alpha chain variable domain of TCR clone 142370 (TRAV36/DV7, TRAJ34)
CAVGEVNTDKLIF

SEQ ID NO: 284740 - protein, 13 aa, Homo sapiens
  CDR3 for beta chain variable domain of TCR clone 142370 (TRBV10-2, TRBJ2-7)
CASSAESPYEQYF

SEQ ID NO: 284741 - protein, 15 aa, Homo sapiens
  CDR3 for alpha chain variable domain of TCR clone 142371 (TRAV13-1, TRAJ32)
CAASIYGGATNKLIF

SEQ ID NO: 284742 - protein, 15 aa, Homo sapiens
  CDR3 for beta chain variable domain of TCR clone 142371 (TRBV6-3, TRBJ2-7)
CASSSPGTVFYEQYF

SEQ ID NO: 284743 - protein, 15 aa, Homo sapiens
  CDR3 for alpha chain variable domain of TCR clone 142372 (TRAV21, TRAJ32)
CAVNSYGGATNKLIF

SEQ ID NO: 284744 - protein, 18 aa, Homo sapiens
  CDR3 for beta chain variable domain of TCR clone 142372 (TRBV7-9, TRBJ2-1)
CASNTGLAEGSSYNEQFF

SEQ ID NO: 284745 - protein, 14 aa, Homo sapiens
  CDR3 for alpha chain variable domain of TCR clone 142373 (TRAV1-2, TRAJ8)
CAVREDTGFQKLVF

SEQ ID NO: 284746 - protein, 16 aa, Homo sapiens
  CDR3 for beta chain variable domain of TCR clone 142373 (TRBV15, TRBJ2-1)
CATSISRLVQYNEQFF

SEQ ID NO: 284747 - protein, 14 aa, Homo sapiens
  CDR3 for alpha chain variable domain of TCR clone 142374 (TRAV17, TRAJ6)
CATNPAGGSYIPTF

SEQ ID NO: 284748 - protein, 19 aa, Homo sapiens
  CDR3 for beta chain variable domain of TCR clone 142374 (TRBV25-1, TRBJ2-2)
CAILVYRVDRGRKTGELFF

SEQ ID NO: 284749 - protein, 18 aa, Homo sapiens
  CDR3 for alpha chain variable domain of TCR clone 142375 (TRAV26-2, TRAJ45)
CILRLWGYSGGGGAGLTF

SEQ ID NO: 284750 - protein, 13 aa, Homo sapiens
  CDR3 for beta chain variable domain of TCR clone 142375 (TRBV7-8, TRBJ2-7)
CASSLTGGREQYF

SEQ ID NO: 284751 - protein, 15 aa, Homo sapiens
  CDR3 for alpha chain variable domain of TCR clone 142376 (TRAV9-2, TRAJ10)
CALSDFGGGGNKLTF

SEQ ID NO: 284752 - protein, 15 aa, Homo sapiens
  CDR3 for beta chain variable domain of TCR clone 142376 (TRBV27, TRBJ2-1)
CASSNGGGSSNEQFF

SEQ ID NO: 284753 - protein, 13 aa, Homo sapiens
  CDR3 for alpha chain variable domain of TCR clone 142377 (TRAV38-2/DV8, TRAJ57)
CAYTQGGSEKLVF

SEQ ID NO: 284754 - protein, 16 aa, Homo sapiens
  CDR3 for beta chain variable domain of TCR clone 142377 (TRBV4-2, TRBJ2-1)
CASSQGEGSIHNEQFF

SEQ ID NO: 284755 - protein, 12 aa, Homo sapiens
  CDR3 for alpha chain variable domain of TCR clone 142378 (TRAV16, TRAJ27)
CALNHQCRQINL

SEQ ID NO: 284756 - protein, 14 aa, Homo sapiens
  CDR3 for beta chain variable domain of TCR clone 142378 (TRBV11-2, TRBJ1-5)
CASSLDRGSQPQHF

SEQ ID NO: 284757 - protein, 15 aa, Homo sapiens
  CDR3 for alpha chain variable domain of TCR clone 142379 (TRAV13-1, TRAJ57)
CAAINTQGGSEKLVF

SEQ ID NO: 284758 - protein, 16 aa, Homo sapiens
  CDR3 for beta chain variable domain of TCR clone 142379 (TRBV19, TRBJ2-1)
CASSKAGPSSYNEQFF

SEQ ID NO: 284759 - protein, 13 aa, Homo sapiens
  CDR3 for alpha chain variable domain of TCR clone 142380 (TRAV3, TRAJ15)
CAVRDQAGTALIF

SEQ ID NO: 284760 - protein, 14 aa, Homo sapiens
  CDR3 for beta chain variable domain of TCR clone 142380 (TRBV7-2, TRBJ1-2)
CASSQTGSTYGYTF

SEQ ID NO: 284761 - protein, 14 aa, Homo sapiens
  CDR3 for alpha chain variable domain of TCR clone 142381 (TRAV12-2, TRAJ13)
CAVKKTGGYQKVTF

SEQ ID NO: 284762 - protein, 15 aa, Homo sapiens
  CDR3 for beta chain variable domain of TCR clone 142381 (TRBV27, TRBJ2-1)
CASSNGGGPPMSSPS

SEQ ID NO: 284763 - protein, 13 aa, Homo sapiens
  CDR3 for alpha chain variable domain of TCR clone 142382 (TRAV8-1, TRAJ30)
CAVIMNRDDKIIF

SEQ ID NO: 284764 - protein, 14 aa, Homo sapiens
  CDR3 for beta chain variable domain of TCR clone 142382 (TRBV7-2, TRBJ1-6)
CASSLQAANSPLHF

SEQ ID NO: 284765 - protein, 15 aa, Homo sapiens
  CDR3 for alpha chain variable domain of TCR clone 142383 (TRAV20, TRAJ53)
CAVQASGGSNYKLTF

SEQ ID NO: 284766 - protein, 14 aa, Homo sapiens
  CDR3 for beta chain variable domain of TCR clone 142383 (TRBV7-2, TRBJ1-2)
CASSQTGSTYGYTV

SEQ ID NO: 284767 - protein, 14 aa, Homo sapiens
  CDR3 for alpha chain variable domain of TCR clone 142384 (TRAV13-1, TRAJ17)
LSSRSKAAGNKLTF

SEQ ID NO: 284768 - protein, 14 aa, Homo sapiens
  CDR3 for beta chain variable domain of TCR clone 142384 (TRBV7-9, TRBJ2-5)
CASSSMVGFGEQFF

SEQ ID NO: 284769 - protein, 14 aa, Homo sapiens
  CDR3 for alpha chain variable domain of TCR clone 142385 (TRAV12-2, TRAJ44)
CAVNKAGTASKLTF

SEQ ID NO: 284770 - protein, 12 aa, Homo sapiens
  CDR3 for beta chain variable domain of TCR clone 142385 (TRBV19, TRBJ1-6)
CASKDWPGGLFF

SEQ ID NO: 284771 - protein, 21 aa, Homo sapiens
  CDR3 for alpha chain variable domain of TCR clone 142386 (TRAV34, TRAJ44)
PAMQASTSVEQTTGTASKLTF

SEQ ID NO: 284772 - protein, 18 aa, Homo sapiens
  CDR3 for beta chain variable domain of TCR clone 142386 (TRBV4-1, TRBJ1-5)
CASSQDPRGQGLNQPQHF

SEQ ID NO: 284773 - protein, 14 aa, Homo sapiens
  CDR3 for alpha chain variable domain of TCR clone 142387 (TRAV1-2, TRAJ8)
CAVREDTGFQKLVF

SEQ ID NO: 284774 - protein, 15 aa, Homo sapiens
  CDR3 for beta chain variable domain of TCR clone 142387 (TRBV4-1, TRBJ2-5)
CASSRKAGPQETQYF

SEQ ID NO: 284775 - protein, 13 aa, Homo sapiens
  CDR3 for alpha chain variable domain of TCR clone 142388 (TRAV16, TRAJ5)
CALTNTGRRARTF

SEQ ID NO: 284776 - protein, 15 aa, Homo sapiens
  CDR3 for beta chain variable domain of TCR clone 142388 (TRBV11-2, TRBJ2-4)
CASSRPGTGINIQYF

SEQ ID NO: 284777 - protein, 16 aa, Homo sapiens
  CDR3 for alpha chain variable domain of TCR clone 142389 (TRAV26-1, )
CIDIQNPDPAVYQLRE

SEQ ID NO: 284778 - protein, 19 aa, Homo sapiens
  CDR3 for beta chain variable domain of TCR clone 142389 (TRBV19, TRBJ2-5)
CASSIGQVTDFFLGETQYF

SEQ ID NO: 284779 - protein, 19 aa, Homo sapiens
  CDR3 for alpha chain variable domain of TCR clone 142390 (TRAV9-2, TRAJ52)
CALSFSLLSVGTSYGKLTF

SEQ ID NO: 284780 - protein, 14 aa, Homo sapiens
  CDR3 for beta chain variable domain of TCR clone 142390 (TRBV7-6, TRBJ2-7)
CASSLFQDSYEQYF

SEQ ID NO: 284781 - protein, 14 aa, Homo sapiens
  CDR3 for alpha chain variable domain of TCR clone 142391 (TRAV26-1, TRAJ34)
CIVRESYNTAKLIF

SEQ ID NO: 284782 - protein, 13 aa, Homo sapiens
  CDR3 for beta chain variable domain of TCR clone 142391 (TRBV19, TRBJ2-1)
CATSRGVYNEQFF

SEQ ID NO: 284783 - protein, 16 aa, Homo sapiens
  CDR3 for alpha chain variable domain of TCR clone 142392 (TRAV13-1, TRAJ48)
CSKYSGSNFGNEKLTF

SEQ ID NO: 284784 - protein, 17 aa, Homo sapiens
  CDR3 for beta chain variable domain of TCR clone 142392 (TRBV28, TRBJ2-1)
CASSSARQALTYNEQFF

SEQ ID NO: 284785 - protein, 12 aa, Homo sapiens
  CDR3 for alpha chain variable domain of TCR clone 142393 (TRAV1-1, TRAJ8)
CAGGTGFQKLVF

SEQ ID NO: 284786 - protein, 15 aa, Homo sapiens
  CDR3 for beta chain variable domain of TCR clone 142393 (TRBV7-9, TRBJ1-4)
CASSRTGGLNEKLLF

SEQ ID NO: 284787 - protein, 12 aa, Homo sapiens
  CDR3 for alpha chain variable domain of TCR clone 142394 (TRAV13-1, TRAJ21)
CAAKEGFNKFYF

SEQ ID NO: 284788 - protein, 12 aa, Homo sapiens
  CDR3 for beta chain variable domain of TCR clone 142394 (TRBV24-1, TRBJ2-2)
CATSDPGLTGLQ

SEQ ID NO: 284789 - protein, 18 aa, Homo sapiens
  CDR3 for alpha chain variable domain of TCR clone 142395 (TRAV26-2, TRAJ45)
CILSLWGYSGGGAGGLTF

SEQ ID NO: 284790 - protein, 17 aa, Homo sapiens
  CDR3 for beta chain variable domain of TCR clone 142395 (TRBV28, TRBJ2-3)
CASSPTPAGGRVDTQYF

SEQ ID NO: 284791 - protein, 13 aa, Homo sapiens
  CDR3 for alpha chain variable domain of TCR clone 142396 (TRAV27, TRAJ56)
CAGKPGANSKLTF

SEQ ID NO: 284792 - protein, 14 aa, Homo sapiens
  CDR3 for beta chain variable domain of TCR clone 142396 (TRBV7-9, TRBJ2-7)
CASSLEAVGDEQYF

SEQ ID NO: 284793 - protein, 16 aa, Homo sapiens
  CDR3 for alpha chain variable domain of TCR clone 142397 (TRAV1-2, TRAJ16)
CAVRGFQMARSCSLQG

SEQ ID NO: 284794 - protein, 12 aa, Homo sapiens
  CDR3 for beta chain variable domain of TCR clone 142397 (TRBV14, TRBJ2-7)
CASSRLKGEQYF

SEQ ID NO: 284795 - protein, 14 aa, Homo sapiens
  CDR3 for alpha chain variable domain of TCR clone 142398 (TRAV12-2, TRAJ15)
CAPHTGQAGTALIF

SEQ ID NO: 284796 - protein, 13 aa, Homo sapiens
  CDR3 for beta chain variable domain of TCR clone 142398 (TRBV7-9, TRBJ2-7)
CASSFAGAYEQYF

SEQ ID NO: 284797 - protein, 19 aa, Homo sapiens
  CDR3 for alpha chain variable domain of TCR clone 142399 (TRAV26-2, TRAJ28)
CCVLLHPLESGAGSYQLTF

SEQ ID NO: 284798 - protein, 11 aa, Homo sapiens
  CDR3 for beta chain variable domain of TCR clone 142399 (TRBV25-1, TRBJ2-7)
CASSTSYEQYF

SEQ ID NO: 284799 - protein, 12 aa, Homo sapiens
  CDR3 for alpha chain variable domain of TCR clone 142400 (TRAV2, TRAJ32)
CAVGGATNKLIF

SEQ ID NO: 284800 - protein, 17 aa, Homo sapiens
  CDR3 for beta chain variable domain of TCR clone 142400 (TRBV7-8, TRBJ2-6)
CASSAGTGGAGANVLTF

SEQ ID NO: 284801 - protein, 14 aa, Homo sapiens
  CDR3 for alpha chain variable domain of TCR clone 142401 (TRAV1-2, TRAJ8)
CAVREDTGFQKLVF

SEQ ID NO: 284802 - protein, 14 aa, Homo sapiens
  CDR3 for beta chain variable domain of TCR clone 142401 (TRBV2, TRBJ2-2)
CASRRDTVAGELFF

SEQ ID NO: 284803 - protein, 16 aa, Homo sapiens
  CDR3 for alpha chain variable domain of TCR clone 142402 (TRAV30, TRAJ24)
CGTEIVDADSWGKFQS

SEQ ID NO: 284804 - protein, 14 aa, Homo sapiens
  CDR3 for beta chain variable domain of TCR clone 142402 (TRBV12-5, TRBJ2-5)
CDSGSRTHQETQYF

SEQ ID NO: 284805 - protein, 11 aa, Homo sapiens
  CDR3 for alpha chain variable domain of TCR clone 142403 (TRAV23/DV6, TRAJ58)
CAARLLRGETS

SEQ ID NO: 284806 - protein, 14 aa, Homo sapiens
  CDR3 for beta chain variable domain of TCR clone 142403 (TRBV2, TRBJ1-5)
CASSGTGFNQPQHF

SEQ ID NO: 284807 - protein, 14 aa, Homo sapiens
  CDR3 for alpha chain variable domain of TCR clone 142404 (TRAV12-1, TRAJ30)
CVPTGTNRDDKIIF

SEQ ID NO: 284808 - protein, 11 aa, Homo sapiens
  CDR3 for beta chain variable domain of TCR clone 142404 (TRBV4-1, TRBJ2-2)
CASEHTGEQFF

SEQ ID NO: 284809 - protein, 14 aa, Homo sapiens
  CDR3 for alpha chain variable domain of TCR clone 142405 (TRAV8-3, TRAJ36)
CAVGPITGANNLFF

SEQ ID NO: 284810 - protein, 15 aa, Homo sapiens
  CDR3 for beta chain variable domain of TCR clone 142405 (TRBV4-1, TRBJ2-1)
CASIQDPGNYNEQFF

SEQ ID NO: 284811 - protein, 13 aa, Homo sapiens
  CDR3 for alpha chain variable domain of TCR clone 142406 (TRAV27, TRAJ38)
CAGNAGNNRKLIW

SEQ ID NO: 284812 - protein, 17 aa, Homo sapiens
  CDR3 for beta chain variable domain of TCR clone 142406 (TRBV13, TRBJ2-3)
CASSLSRVAGGRNTQYF

SEQ ID NO: 284813 - protein, 14 aa, Homo sapiens
  CDR3 for alpha chain variable domain of TCR clone 142407 (TRAV1-2, TRAJ8)
GAVREDTGFQKLVF

SEQ ID NO: 284814 - protein, 15 aa, Homo sapiens
  CDR3 for beta chain variable domain of TCR clone 142407 (TRBV10-2, TRBJ2-6)
CASSEQGTGANVLTF

SEQ ID NO: 284815 - protein, 15 aa, Homo sapiens
  CDR3 for alpha chain variable domain of TCR clone 142408 (TRAV12-1, TRAJ44)
GVVFVNTGTASKLTF

SEQ ID NO: 284816 - protein, 17 aa, Homo sapiens
  CDR3 for beta chain variable domain of TCR clone 142408 (TRBV7-8, TRBJ2-6)
CASSAGTGGAGANVLTF

SEQ ID NO: 284817 - protein, 12 aa, Homo sapiens
  CDR3 for alpha chain variable domain of TCR clone 142409 (TRAV2, TRAJ9)
CAVGAGCFKTIF

SEQ ID NO: 284818 - protein, 11 aa, Homo sapiens
  CDR3 for beta chain variable domain of TCR clone 142409 (TRBV13, TRBJ2-2)
CASSPRTGEHT

SEQ ID NO: 284819 - protein, 15 aa, Homo sapiens
  CDR3 for alpha chain variable domain of TCR clone 142410 (TRAV8-3, TRAJ27)
CAVGPSTTNAGKSTL

SEQ ID NO: 284820 - protein, 15 aa, Homo sapiens
  CDR3 for beta chain variable domain of TCR clone 142410 (TRBV7-2, TRBJ2-1)
CASSSGLAGGNEQFF

SEQ ID NO: 284821 - protein, 12 aa, Homo sapiens
  CDR3 for alpha chain variable domain of TCR clone 142411 (TRAV12-3, TRAJ17)
CAMTLTGNKLTF

SEQ ID NO: 284822 - protein, 15 aa, Homo sapiens
  CDR3 for beta chain variable domain of TCR clone 142411 (TRBV20-1, TRBJ2-7)
CSARDQVSRMDEQYF

SEQ ID NO: 284823 - protein, 16 aa, Homo sapiens
  CDR3 for alpha chain variable domain of TCR clone 142412 (TRAV12-3, TRAJ53)
CAMSPGSGGSTYKPTF

SEQ ID NO: 284824 - protein, 11 aa, Homo sapiens
  CDR3 for beta chain variable domain of TCR clone 142412 (TRBV29-1, TRBJ2-5)
CSEDRTGTQYF

SEQ ID NO: 284825 - protein, 12 aa, Homo sapiens
  CDR3 for alpha chain variable domain of TCR clone 142413 (TRAV12-1, TRAJ40)
CVVKVRTYKYIF

SEQ ID NO: 284826 - protein, 16 aa, Homo sapiens
  CDR3 for beta chain variable domain of TCR clone 142413 (TRBV12-5, TRBJ2-5)
CASGPRTSGNQETQYF

SEQ ID NO: 284827 - protein, 16 aa, Homo sapiens
  CDR3 for alpha chain variable domain of TCR clone 142414 (TRAV3, TRAJ37)
CAVRPHGSGNTGKLIF

SEQ ID NO: 284828 - protein, 15 aa, Homo sapiens
  CDR3 for beta chain variable domain of TCR clone 142414 (TRBV20-1, TRBJ2-7)
CSARDRVSGMDERYF

SEQ ID NO: 284829 - protein, 13 aa, Homo sapiens
  CDR3 for alpha chain variable domain of TCR clone 142415 (TRAV12-1, TRAJ37)
CVVSSGNTGKLIF

SEQ ID NO: 284830 - protein, 13 aa, Homo sapiens
  CDR3 for beta chain variable domain of TCR clone 142415 (TRBV12-4, TRBJ1-2)
CASSLRQGKGYTF

SEQ ID NO: 284831 - protein, 15 aa, Homo sapiens
  CDR3 for alpha chain variable domain of TCR clone 142416 (TRAV8-3, TRAJ45)
CASSYSGGDADGLTF

SEQ ID NO: 284832 - protein, 16 aa, Homo sapiens
  CDR3 for beta chain variable domain of TCR clone 142416 (TRBV7-9, TRBJ2-2)
CASSGFGGANTGELFF

SEQ ID NO: 284833 - protein, 12 aa, Homo sapiens
  CDR3 for alpha chain variable domain of TCR clone 142417 (TRAV12-2, TRAJ31)
CAVNTPDARLMF

SEQ ID NO: 284834 - protein, 17 aa, Homo sapiens
  CDR3 for beta chain variable domain of TCR clone 142417 (TRBV20-1, TRBJ1-6)
CSARGGYTFSYNAPLYF

SEQ ID NO: 284835 - protein, 13 aa, Homo sapiens
  CDR3 for alpha chain variable domain of TCR clone 142418 (TRAV1-1, TRAJ9)
CAAKNTGGFKTIF

SEQ ID NO: 284836 - protein, 13 aa, Homo sapiens
  CDR3 for beta chain variable domain of TCR clone 142418 (TRBV11-2, TRBJ2-5)
CASSCSSQETQYF

SEQ ID NO: 284837 - protein, 15 aa, Homo sapiens
  CDR3 for alpha chain variable domain of TCR clone 142419 (TRAV12-1, TRAJ44)
CVADLPTGTVNKLTF

SEQ ID NO: 284838 - protein, 13 aa, Homo sapiens
  CDR3 for beta chain variable domain of TCR clone 142419 (TRBV6-5, TRBJ2-5)
CASSPQGGETQYF

SEQ ID NO: 284839 - protein, 14 aa, Homo sapiens
  CDR3 for alpha chain variable domain of TCR clone 142420 (TRAV17, TRAJ57)
CATDASGGSEKLAF

SEQ ID NO: 284840 - protein, 14 aa, Homo sapiens
  CDR3 for beta chain variable domain of TCR clone 142420 (TRBV4-2, TRBJ2-1)
CASGLDRAYNEQFF

SEQ ID NO: 284841 - protein, 14 aa, Homo sapiens
  CDR3 for alpha chain variable domain of TCR clone 142421 (TRAV21, TRAJ35)
CAVMPIGFWNLLHC

SEQ ID NO: 284842 - protein, 12 aa, Homo sapiens
  CDR3 for beta chain variable domain of TCR clone 142421 (TRBV7-9, TRBJ2-7)
CASSIKREEQYF

SEQ ID NO: 284843 - protein, 15 aa, Homo sapiens
  CDR3 for alpha chain variable domain of TCR clone 142422 (TRAV8-3, TRAJ40)
CAAPSLGSGTYRYIF

SEQ ID NO: 284844 - protein, 16 aa, Homo sapiens
  CDR3 for beta chain variable domain of TCR clone 142422 (TRBV7-3, TRBJ2-3)
CGSSLSGYRPEDTQYF

SEQ ID NO: 284845 - protein, 10 aa, Homo sapiens
  CDR3 for alpha chain variable domain of TCR clone 142423 (TRAV36/DV7, TRAJ48)
CAVGNEKLTF

SEQ ID NO: 284846 - protein, 16 aa, Homo sapiens
  CDR3 for beta chain variable domain of TCR clone 142423 (TRBV15, TRBJ2-3)
CATRLSGGRAPYTQYF

SEQ ID NO: 284847 - protein, 14 aa, Homo sapiens
  CDR3 for alpha chain variable domain of TCR clone 142424 (TRAV17, TRAJ22)
CATVLSGSARQLIF

SEQ ID NO: 284848 - protein, 14 aa, Homo sapiens
  CDR3 for beta chain variable domain of TCR clone 142424 (TRBV19, TRBJ2-1)
CASPTFVLSGEQFF

SEQ ID NO: 284849 - protein, 12 aa, Homo sapiens
  CDR3 for alpha chain variable domain of TCR clone 142425 (TRAV21, TRAJ39)
LPYNNAGNMLTF

SEQ ID NO: 284850 - protein, 14 aa, Homo sapiens
  CDR3 for beta chain variable domain of TCR clone 142425 (TRBV7-2, TRBJ1-1)
CASSFLTGTTEAFF

SEQ ID NO: 284851 - protein, 14 aa, Homo sapiens
  CDR3 for alpha chain variable domain of TCR clone 142426 (TRAV12-3, TRAJ10)
SHLPLTGGGNKLTF

SEQ ID NO: 284852 - protein, 14 aa, Homo sapiens
  CDR3 for beta chain variable domain of TCR clone 142426 (TRBV7-2, TRBJ2-3)
CASSSGISTDTQYF

SEQ ID NO: 284853 - protein, 15 aa, Homo sapiens
  CDR3 for alpha chain variable domain of TCR clone 142427 (TRAV20, TRAJ52)
CAVQAGGTSYGKLTF

SEQ ID NO: 284854 - protein, 17 aa, Homo sapiens
  CDR3 for beta chain variable domain of TCR clone 142427 (TRBV11-2, TRBJ2-1)
CASSLYPPGVEYNEQFF

SEQ ID NO: 284855 - protein, 18 aa, Homo sapiens
  CDR3 for alpha chain variable domain of TCR clone 142428 (TRAV35, TRAJ28)
CAGHNYTLSGAGRYQLTF

SEQ ID NO: 284856 - protein, 12 aa, Homo sapiens
  CDR3 for beta chain variable domain of TCR clone 142428 (TRBV7-9, TRBJ1-1)
CASSLEGTEAFF

SEQ ID NO: 284857 - protein, 14 aa, Homo sapiens
  CDR3 for alpha chain variable domain of TCR clone 142429 (TRAV12-3, TRAJ10)
SHLPLTGGGNKLTF

SEQ ID NO: 284858 - protein, 13 aa, Homo sapiens
  CDR3 for beta chain variable domain of TCR clone 142429 (TRBV7-9, TRBJ2-3)
CASSPGSTDRQYF

SEQ ID NO: 284859 - protein, 15 aa, Homo sapiens
  CDR3 for alpha chain variable domain of TCR clone 142430 (TRAV12-3, TRAJ6)
CAMSASTGGSYIPTF

SEQ ID NO: 284860 - protein, 16 aa, Homo sapiens
  CDR3 for beta chain variable domain of TCR clone 142430 (TRBV20-1, TRBJ1-2)
CSASMGQGVANYGYTF

SEQ ID NO: 284861 - protein, 14 aa, Homo sapiens
  CDR3 for alpha chain variable domain of TCR clone 142431 (TRAV38-1, TRAJ45)
CASHSGGGADGLTF

SEQ ID NO: 284862 - protein, 13 aa, Homo sapiens
  CDR3 for beta chain variable domain of TCR clone 142431 (TRBV10-3, TRBJ1-2)
CAISERDSYCYTF

SEQ ID NO: 284863 - protein, 13 aa, Homo sapiens
  CDR3 for alpha chain variable domain of TCR clone 142432 (TRAV3, TRAJ36)
CAVSLGGANNLFF

SEQ ID NO: 284864 - protein, 11 aa, Homo sapiens
  CDR3 for beta chain variable domain of TCR clone 142432 (TRBV12-4, TRBJ2-3)
CASTATDTQYF

SEQ ID NO: 284865 - protein, 15 aa, Homo sapiens
  CDR3 for alpha chain variable domain of TCR clone 142433 (TRAV3, TRAJ5)
CAVRDLDTGRRALTF

SEQ ID NO: 284866 - protein, 14 aa, Homo sapiens
  CDR3 for beta chain variable domain of TCR clone 142433 (TRBV25-1, TRGJ1)
CASSGGGQPEKLLF

SEQ ID NO: 284867 - protein, 16 aa, Homo sapiens
  CDR3 for alpha chain variable domain of TCR clone 142434 (TRAV27, TRAJ34)
CAGGGLGDYNTDKLIF

SEQ ID NO: 284868 - protein, 15 aa, Homo sapiens
  CDR3 for beta chain variable domain of TCR clone 142434 (TRBV9, TRBJ1-4)
CASSVGGSTNEKLFV

SEQ ID NO: 284869 - protein, 13 aa, Homo sapiens
  CDR3 for alpha chain variable domain of TCR clone 142435 (TRAV36/DV7, TRAJ49)
CAGDSNTGNQFYF

SEQ ID NO: 284870 - protein, 12 aa, Homo sapiens
  CDR3 for beta chain variable domain of TCR clone 142435 (TRBV11-2, TRBJ2-2)
CASSLGGGELFL

SEQ ID NO: 284871 - protein, 14 aa, Homo sapiens
  CDR3 for alpha chain variable domain of TCR clone 142436 (TRAV35, TRAJ33)
CAGSSQDSNYQLIW

SEQ ID NO: 284872 - protein, 15 aa, Homo sapiens
  CDR3 for beta chain variable domain of TCR clone 142436 (TRBV20-1, TRBJ2-7)
CSAEAGTSGEYEQYF

SEQ ID NO: 284873 - protein, 12 aa, Homo sapiens
  CDR3 for alpha chain variable domain of TCR clone 142437 (TRAV2, TRAJ31)
CAVEDNNARLMF

SEQ ID NO: 284874 - protein, 14 aa, Homo sapiens
  CDR3 for beta chain variable domain of TCR clone 142437 (TRBV11-2, TRBJ2-5)
CASSRTVGIETQYF

SEQ ID NO: 284875 - protein, 13 aa, Homo sapiens
  CDR3 for alpha chain variable domain of TCR clone 142438 (TRAV17, TRAJ26)
CATVDNYGQNFVF

SEQ ID NO: 284876 - protein, 13 aa, Homo sapiens
  CDR3 for beta chain variable domain of TCR clone 142438 (TRBV14, TRBJ1-1)
CASSREFGTKAFF

SEQ ID NO: 284877 - protein, 12 aa, Homo sapiens
  CDR3 for alpha chain variable domain of TCR clone 142439 (TRAV17, TRAJ12)
CGTLRSSYKLIF

SEQ ID NO: 284878 - protein, 16 aa, Homo sapiens
  CDR3 for beta chain variable domain of TCR clone 142439 (TRBV28, TRBJ2-7)
CASSLFFETGGPEQYF

SEQ ID NO: 284879 - protein, 19 aa, Homo sapiens
  CDR3 for alpha chain variable domain of TCR clone 142440 (TRAV26-1, TRAJ52)
CIVRAHRNAGGTSYGKLTF

SEQ ID NO: 284880 - protein, 15 aa, Homo sapiens
  CDR3 for beta chain variable domain of TCR clone 142440 (TRBV19, TRBJ2-1)
CASSSPGVPLDEQFF

SEQ ID NO: 284881 - protein, 11 aa, Homo sapiens
  CDR3 for alpha chain variable domain of TCR clone 142441 (TRAV12-1, TRAJ33)
CVVNMNYQLIL

SEQ ID NO: 284882 - protein, 11 aa, Homo sapiens
  CDR3 for beta chain variable domain of TCR clone 142441 (TRBV10-1, TRBJ2-3)
CASSDSDTQYF

SEQ ID NO: 284883 - protein, 21 aa, Homo sapiens
  CDR3 for alpha chain variable domain of TCR clone 142442 (TRAV25, TRAJ53)
TATQTTDVGTGSGASNYKLTF

SEQ ID NO: 284884 - protein, 16 aa, Homo sapiens
  CDR3 for beta chain variable domain of TCR clone 142442 (TRBV4-2, TRBJ2-3)
CASSLSSGGHTDTQYF

SEQ ID NO: 284885 - protein, 14 aa, Homo sapiens
  CDR3 for alpha chain variable domain of TCR clone 142443 (TRAV16, TRAJ39)
CALSKNNAGNMPTF

SEQ ID NO: 284886 - protein, 14 aa, Homo sapiens
  CDR3 for beta chain variable domain of TCR clone 142443 (TRBV20-1, TRBJ2-3)
CSARVRGSTDTQYF

SEQ ID NO: 284887 - protein, 16 aa, Homo sapiens
  CDR3 for alpha chain variable domain of TCR clone 142444 (TRAV14/DV4, TRAJ53)
CAMREGGGGSNYKLTF

SEQ ID NO: 284888 - protein, 19 aa, Homo sapiens
  CDR3 for beta chain variable domain of TCR clone 142444 (TRBV28, TRBJ2-4)
CASSFQPGGPAHFKNIQYF

SEQ ID NO: 284889 - protein, 14 aa, Homo sapiens
  CDR3 for alpha chain variable domain of TCR clone 142445 (TRAV2, TRAJ37)
CAVEGSSNTGKLLF

SEQ ID NO: 284890 - protein, 15 aa, Homo sapiens
  CDR3 for beta chain variable domain of TCR clone 142445 (TRBV24-1, TRBJ2-4)
CATSDPRDRANIQYF

SEQ ID NO: 284891 - protein, 14 aa, Homo sapiens
  CDR3 for alpha chain variable domain of TCR clone 142446 (TRAV1-2, TRAJ8)
CAVREDTGFQKLVL

SEQ ID NO: 284892 - protein, 14 aa, Homo sapiens
  CDR3 for beta chain variable domain of TCR clone 142446 (TRBV29-1, TRBJ2-3)
CSAGAGVGADTQYF

SEQ ID NO: 284893 - protein, 15 aa, Homo sapiens
  CDR3 for alpha chain variable domain of TCR clone 142447 (TRAV21, TRAJ24)
CAARSSTDSWGKLQF

SEQ ID NO: 284894 - protein, 16 aa, Homo sapiens
  CDR3 for beta chain variable domain of TCR clone 142447 (TRBV11-2, TRBJ2-7)
CASSPTTGGVSYEQYF

SEQ ID NO: 284895 - protein, 12 aa, Homo sapiens
  CDR3 for alpha chain variable domain of TCR clone 142448 (TRAV13-1, TRAJ21)
CTAKEGFNKFYF

SEQ ID NO: 284896 - protein, 13 aa, Homo sapiens
  CDR3 for beta chain variable domain of TCR clone 142448 (TRBV7-6, TRBJ1-2)
CASSLVADYGYTF

SEQ ID NO: 284897 - protein, 13 aa, Homo sapiens
  CDR3 for alpha chain variable domain of TCR clone 142449 (TRAV13-1, TRAJ21)
CAASIYNINKFYF

SEQ ID NO: 284898 - protein, 12 aa, Homo sapiens
  CDR3 for beta chain variable domain of TCR clone 142449 (TRBV11-2, TRBJ2-1)
CASSPGNNEQFF

SEQ ID NO: 284899 - protein, 13 aa, Homo sapiens
  CDR3 for alpha chain variable domain of TCR clone 142450 (TRAV2, TRAJ15)
CAVASQAGTALTF

SEQ ID NO: 284900 - protein, 16 aa, Homo sapiens
  CDR3 for beta chain variable domain of TCR clone 142450 (TRBV5-1, TRBJ1-1)
CASSSGGNSLNTEAVF

SEQ ID NO: 284901 - protein, 12 aa, Homo sapiens
  CDR3 for alpha chain variable domain of TCR clone 142451 (TRAV38-1, TRAJ34)
CAFMKETDKLLF

SEQ ID NO: 284902 - protein, 17 aa, Homo sapiens
  CDR3 for beta chain variable domain of TCR clone 142451 (TRBV7-8, TRBJ2-6)
CASSAGTGGAGANVLTF

SEQ ID NO: 284903 - protein, 15 aa, Homo sapiens
  CDR3 for alpha chain variable domain of TCR clone 142452 (TRAV23/DV6, )
CAADIQNPDPAEYQL

SEQ ID NO: 284904 - protein, 14 aa, Homo sapiens
  CDR3 for beta chain variable domain of TCR clone 142452 (TRBV5-7, TRBJ1-6)
CASSFAGHNSPLHF

SEQ ID NO: 284905 - protein, 15 aa, Homo sapiens
  CDR3 for alpha chain variable domain of TCR clone 142453 (TRAV21, TRAJ45)
CAVSYSGGGADGLTF

SEQ ID NO: 284906 - protein, 13 aa, Homo sapiens
  CDR3 for beta chain variable domain of TCR clone 142453 (TRBV20-1, TRBJ2-5)
CSAATERQETQYS

SEQ ID NO: 284907 - protein, 15 aa, Homo sapiens
  CDR3 for alpha chain variable domain of TCR clone 142454 (TRAV8-6, TRAJ38)
CAVSSNAVNNRKLIW

SEQ ID NO: 284908 - protein, 14 aa, Homo sapiens
  CDR3 for beta chain variable domain of TCR clone 142454 (TRBV14, TRBJ2-1)
CASSQVQGRGEQFF

SEQ ID NO: 284909 - protein, 18 aa, Homo sapiens
  CDR3 for alpha chain variable domain of TCR clone 142455 (TRAV21, TRAJ52)
CAVRPSPAGGTSYGKMTF

SEQ ID NO: 284910 - protein, 17 aa, Homo sapiens
  CDR3 for beta chain variable domain of TCR clone 142455 (TRBV13, TRBJ2-3)
CASSLSRVAGGRNTQYV

SEQ ID NO: 284911 - protein, 14 aa, Homo sapiens
  CDR3 for alpha chain variable domain of TCR clone 142456 (TRAV17, TRAJ31)
CATDAEDNNARLMF

SEQ ID NO: 284912 - protein, 14 aa, Homo sapiens
  CDR3 for beta chain variable domain of TCR clone 142456 (TRBV6-1, TRBJ1-3)
CASVQGGGGNTIYF

SEQ ID NO: 284913 - protein, 13 aa, Homo sapiens
  CDR3 for alpha chain variable domain of TCR clone 142457 (TRAV8-2, TRAJ21)
CVVSSYNFNKFYF

SEQ ID NO: 284914 - protein, 16 aa, Homo sapiens
  CDR3 for beta chain variable domain of TCR clone 142457 (TRBV7-9, TRBJ2-3)
CASSPWREVGTDTQYF

SEQ ID NO: 284915 - protein, 15 aa, Homo sapiens
  CDR3 for alpha chain variable domain of TCR clone 142458 (TRAV27, TRAJ38)
CAARRNAGNNRKLVW

SEQ ID NO: 284916 - protein, 13 aa, Homo sapiens
  CDR3 for beta chain variable domain of TCR clone 142458 (TRBV12-5, TRBJ2-3)
CASGDRQSDTQYL

SEQ ID NO: 284917 - protein, 12 aa, Homo sapiens
  CDR3 for alpha chain variable domain of TCR clone 142459 (TRAV12-2, TRAJ8)
CAVATGFQKLVF

SEQ ID NO: 284918 - protein, 16 aa, Homo sapiens
  CDR3 for beta chain variable domain of TCR clone 142459 (TRBV13, TRBJ2-2)
CASSPRTGEHTGELFF

SEQ ID NO: 284919 - protein, 16 aa, Homo sapiens
  CDR3 for alpha chain variable domain of TCR clone 142460 (TRAV30, TRAJ24)
CGTAIVDADSWGKFQF

SEQ ID NO: 284920 - protein, 15 aa, Homo sapiens
  CDR3 for beta chain variable domain of TCR clone 142460 (TRBV12-4, TRBJ2-2)
CASSPNDSGTGELFF

SEQ ID NO: 284921 - protein, 13 aa, Homo sapiens
  CDR3 for alpha chain variable domain of TCR clone 142461 (TRAV23/DV6, TRAJ40)
CSNPSLRNLQYSF

SEQ ID NO: 284922 - protein, 12 aa, Homo sapiens
  CDR3 for beta chain variable domain of TCR clone 142461 (TRBV12-4, TRBJ2-1)
CASSPGRNEQFF

SEQ ID NO: 284923 - protein, 11 aa, Homo sapiens
  CDR3 for alpha chain variable domain of TCR clone 142462 (TRAV12-2, TRAJ31)
CAVTRWARLMF

SEQ ID NO: 284924 - protein, 15 aa, Homo sapiens
  CDR3 for beta chain variable domain of TCR clone 142462 (TRBV19, TRBJ2-7)
CASSIVGGLVNEQYF

SEQ ID NO: 284925 - protein, 14 aa, Homo sapiens
  CDR3 for alpha chain variable domain of TCR clone 142463 (TRAV1-2, TRAJ8)
CAGREDTGFQKLLF

SEQ ID NO: 284926 - protein, 15 aa, Homo sapiens
  CDR3 for beta chain variable domain of TCR clone 142463 (TRBV6-3, TRBJ2-7)
CASSSPGTVFYEQYF

SEQ ID NO: 284927 - protein, 13 aa, Homo sapiens
  CDR3 for alpha chain variable domain of TCR clone 142464 (TRAV36/DV7, TRAJ49)
CAGDSNTGNQFYF

SEQ ID NO: 284928 - protein, 12 aa, Homo sapiens
  CDR3 for beta chain variable domain of TCR clone 142464 (TRBV28, TRBJ1-5)
CASRDSNQPQHF

SEQ ID NO: 284929 - protein, 11 aa, Homo sapiens
  CDR3 for alpha chain variable domain of TCR clone 142465 (TRAV12-3, TRAJ43)
CAMSVSNDMRF

SEQ ID NO: 284930 - protein, 14 aa, Homo sapiens
  CDR3 for beta chain variable domain of TCR clone 142465 (TRBV12-5, TRBJ2-5)
FVSGSRTHQETQYF

SEQ ID NO: 284931 - protein, 15 aa, Homo sapiens
  CDR3 for alpha chain variable domain of TCR clone 142466 (TRAV13-1, TRAJ10)
CAAEVVTGGGNKLTF

SEQ ID NO: 284932 - protein, 15 aa, Homo sapiens
  CDR3 for beta chain variable domain of TCR clone 142466 (TRBV18, TRBJ2-1)
CASSPPSASYNEQFF

SEQ ID NO: 284933 - protein, 13 aa, Homo sapiens
  CDR3 for alpha chain variable domain of TCR clone 142467 (TRAV35, TRAJ42)
CAGFPGSQGNLIF

SEQ ID NO: 284934 - protein, 15 aa, Homo sapiens
  CDR3 for beta chain variable domain of TCR clone 142467 (TRBV20-1, TRBJ2-7)
CSARGPLAGGREQYF

SEQ ID NO: 284935 - protein, 12 aa, Homo sapiens
  CDR3 for alpha chain variable domain of TCR clone 142468 (TRAV4, TRAJ26)
CLVGDYGQNFVF

SEQ ID NO: 284936 - protein, 15 aa, Homo sapiens
  CDR3 for beta chain variable domain of TCR clone 142468 (TRBV6-6, TRBJ2-7)
CASSYSIRGVYEQYF

SEQ ID NO: 284937 - protein, 15 aa, Homo sapiens
  CDR3 for alpha chain variable domain of TCR clone 142469 (TRAV8-3, TRAJ40)
CAAPSLGSGTYKYIF

SEQ ID NO: 284938 - protein, 16 aa, Homo sapiens
  CDR3 for beta chain variable domain of TCR clone 142469 (TRBV7-3, TRBJ2-3)
CASSLSGYRPEDSQYF

SEQ ID NO: 284939 - protein, 14 aa, Homo sapiens
  CDR3 for alpha chain variable domain of TCR clone 142470 (TRAV1-2, TRAJ16)
CAVNRFSDGQKLLY

SEQ ID NO: 284940 - protein, 17 aa, Homo sapiens
  CDR3 for beta chain variable domain of TCR clone 142470 (TRBV7-9, TRBJ2-1)
CASSLVASYPSYNEQFF

SEQ ID NO: 284941 - protein, 14 aa, Homo sapiens
  CDR3 for alpha chain variable domain of TCR clone 142471 (TRAV9-2, TRAJ39)
WALYIYNAGNMLTF

SEQ ID NO: 284942 - protein, 14 aa, Homo sapiens
  CDR3 for beta chain variable domain of TCR clone 142471 (TRBV20-1, TRBJ1-1)
CSAQTRIGGTEAFF

SEQ ID NO: 284943 - protein, 14 aa, Homo sapiens
  CDR3 for alpha chain variable domain of TCR clone 142472 (TRAV14/DV4, TRAJ7)
CAMREAYGNNRLAF

SEQ ID NO: 284944 - protein, 14 aa, Homo sapiens
  CDR3 for beta chain variable domain of TCR clone 142472 (TRBV5-1, TRBJ2-7)
CASSRGESLYEQYF

SEQ ID NO: 284945 - protein, 15 aa, Homo sapiens
  CDR3 for alpha chain variable domain of TCR clone 142473 (TRAV3, TRAJ37)
CAVRATSGNTGKLIF

SEQ ID NO: 284946 - protein, 14 aa, Homo sapiens
  CDR3 for beta chain variable domain of TCR clone 142473 (TRBV12-4, TRBJ1-1)
CASSFSQMNTEAFF

SEQ ID NO: 284947 - protein, 16 aa, Homo sapiens
  CDR3 for alpha chain variable domain of TCR clone 142474 (TRAV23/DV6, )
CADIQNPDPAVYQLRD

SEQ ID NO: 284948 - protein, 13 aa, Homo sapiens
  CDR3 for beta chain variable domain of TCR clone 142474 (TRBV28, TRBJ2-7)
CASRSSGVYEPYF

SEQ ID NO: 284949 - protein, 13 aa, Homo sapiens
  CDR3 for alpha chain variable domain of TCR clone 142475 (TRAV2, TRAJ40)
CAVVTSGTYKYIF

SEQ ID NO: 284950 - protein, 14 aa, Homo sapiens
  CDR3 for beta chain variable domain of TCR clone 142475 (TRBV12-4, TRBJ1-1)
CASSFSQMNTEAFF

SEQ ID NO: 284951 - protein, 14 aa, Homo sapiens
  CDR3 for alpha chain variable domain of TCR clone 142476 (TRAV2, TRAJ39)
CAVEGDHAGNMLTF

SEQ ID NO: 284952 - protein, 14 aa, Homo sapiens
  CDR3 for beta chain variable domain of TCR clone 142476 (TRBV28, TRBJ2-7)
CASSLRARGNEQYF

SEQ ID NO: 284953 - protein, 15 aa, Homo sapiens
  CDR3 for alpha chain variable domain of TCR clone 142477 (TRAV26-1, TRAJ22)
CIVRVSFWFCKATDL

SEQ ID NO: 284954 - protein, 17 aa, Homo sapiens
  CDR3 for beta chain variable domain of TCR clone 142477 (TRBV11-2, TRBJ2-1)
CASSLYPPGVEYNEQFF

SEQ ID NO: 284955 - protein, 17 aa, Homo sapiens
  CDR3 for alpha chain variable domain of TCR clone 142478 (TRAV8-3, TRAJ4)
VRDPTSNDPGGYNKLIF

SEQ ID NO: 284956 - protein, 13 aa, Homo sapiens
  CDR3 for beta chain variable domain of TCR clone 142478 (TRBV20-1, TRBJ1-2)
CSATGIQGSGYTF

SEQ ID NO: 284957 - protein, 15 aa, Homo sapiens
  CDR3 for alpha chain variable domain of TCR clone 142479 (TRAV23/DV6, TRAJ13)
CAAWPGGGGYQKVTF

SEQ ID NO: 284958 - protein, 14 aa, Homo sapiens
  CDR3 for beta chain variable domain of TCR clone 142479 (TRBV7-2, TRBJ1-2)
CASSQTGSTYGYTF

SEQ ID NO: 284959 - protein, 12 aa, Homo sapiens
  CDR3 for alpha chain variable domain of TCR clone 142480 (TRAV1-1, TRAJ9)
CAVDTGGFNTIF

SEQ ID NO: 284960 - protein, 14 aa, Homo sapiens
  CDR3 for beta chain variable domain of TCR clone 142480 (TRBV7-8, TRBJ2-5)
CASSATGGQETQFF

SEQ ID NO: 284961 - protein, 16 aa, Homo sapiens
  CDR3 for alpha chain variable domain of TCR clone 142481 (TRAV3, TRAJ37)
CAVRPHGSGNTGKLIF

SEQ ID NO: 284962 - protein, 14 aa, Homo sapiens
  CDR3 for beta chain variable domain of TCR clone 142481 (TRBV12-4, TRBJ1-6)
CASNLQGKGSPLHF

SEQ ID NO: 284963 - protein, 11 aa, Homo sapiens
  CDR3 for alpha chain variable domain of TCR clone 142482 (TRAV21, TRAJ11)
CAANGYSTLTF

SEQ ID NO: 284964 - protein, 11 aa, Homo sapiens
  CDR3 for beta chain variable domain of TCR clone 142482 (TRBV19, TRBJ1-1)
CASSIGSEALF

SEQ ID NO: 284965 - protein, 17 aa, Homo sapiens
  CDR3 for alpha chain variable domain of TCR clone 142483 (TRAV8-4, TRAJ45)
CAVSEGGSGGGADGLTF

SEQ ID NO: 284966 - protein, 15 aa, Homo sapiens
  CDR3 for beta chain variable domain of TCR clone 142483 (TRBV20-1, TRBJ2-7)
CSARDRVSGMDEQYF

SEQ ID NO: 284967 - protein, 18 aa, Homo sapiens
  CDR3 for alpha chain variable domain of TCR clone 142484 (TRAV1-2, TRAJ18)
CAVRDMGDRGSTLGRLYF

SEQ ID NO: 284968 - protein, 16 aa, Homo sapiens
  CDR3 for beta chain variable domain of TCR clone 142484 (TRBV20-1, TRBJ1-4)
CSAPGQGLLTNEKLFF

SEQ ID NO: 284969 - protein, 15 aa, Homo sapiens
  CDR3 for alpha chain variable domain of TCR clone 142485 (TRAV12-1, TRAJ31)
CVVNPARDNNARLMF

SEQ ID NO: 284970 - protein, 13 aa, Homo sapiens
  CDR3 for beta chain variable domain of TCR clone 142485 (TRBV24-1, TRBJ2-2)
CATSDWSTGELFF

SEQ ID NO: 284971 - protein, 12 aa, Homo sapiens
  CDR3 for alpha chain variable domain of TCR clone 142486 (TRAV12-3, TRAJ17)
CAMTLTGNKLTF

SEQ ID NO: 284972 - protein, 15 aa, Homo sapiens
  CDR3 for beta chain variable domain of TCR clone 142486 (TRBV14, TRBJ2-5)
CASSQGEAVQETQYF

SEQ ID NO: 284973 - protein, 14 aa, Homo sapiens
  CDR3 for alpha chain variable domain of TCR clone 142487 (TRAV8-1, TRAJ22)
CAAPSSGSARQLTF

SEQ ID NO: 284974 - protein, 14 aa, Homo sapiens
  CDR3 for beta chain variable domain of TCR clone 142487 (TRBV9, TRBJ2-2)
CASSVGQGAGELLF

SEQ ID NO: 284975 - protein, 14 aa, Homo sapiens
  CDR3 for alpha chain variable domain of TCR clone 142488 (TRAV1-2, TRAJ16)
CAVNRFSAGQMLLF

SEQ ID NO: 284976 - protein, 15 aa, Homo sapiens
  CDR3 for beta chain variable domain of TCR clone 142488 (TRBV12-4, TRBJ2-5)
CASSPPTGLQETQYF

SEQ ID NO: 284977 - protein, 15 aa, Homo sapiens
  CDR3 for alpha chain variable domain of TCR clone 142489 (TRAV23/DV6, TRAJ12)
CAAIDLGAMDSIYKL

SEQ ID NO: 284978 - protein, 14 aa, Homo sapiens
  CDR3 for beta chain variable domain of TCR clone 142489 (TRBV20-1, TRBJ2-1)
CSARRGGSYNEQFF

SEQ ID NO: 284979 - protein, 14 aa, Homo sapiens
  CDR3 for alpha chain variable domain of TCR clone 142490 (TRAV12-2, TRAJ17)
CAVLFKAAGNKLTF

SEQ ID NO: 284980 - protein, 12 aa, Homo sapiens
  CDR3 for beta chain variable domain of TCR clone 142490 (TRBV5-1, TRBJ1-2)
CASSQDTYGYTF

SEQ ID NO: 284981 - protein, 17 aa, Homo sapiens
  CDR3 for alpha chain variable domain of TCR clone 142491 (TRAV8-2, TRAJ17)
CVVSDRRFKAAGNKLTV

SEQ ID NO: 284982 - protein, 12 aa, Homo sapiens
  CDR3 for beta chain variable domain of TCR clone 142491 (TRBV27, TRBJ2-2)
CASKLFTGELFF

SEQ ID NO: 284983 - protein, 16 aa, Homo sapiens
  CDR3 for alpha chain variable domain of TCR clone 142492 (TRAV3, TRAJ10)
CAVRDMRAGGGNKLTF

SEQ ID NO: 284984 - protein, 12 aa, Homo sapiens
  CDR3 for beta chain variable domain of TCR clone 142492 (TRBV12-4, TRBJ2-1)
CASTYVLNEQFF

SEQ ID NO: 284985 - protein, 13 aa, Homo sapiens
  CDR3 for alpha chain variable domain of TCR clone 142493 (TRAV21, TRAJ27)
CAARPGNAGKSTF

SEQ ID NO: 284986 - protein, 15 aa, Homo sapiens
  CDR3 for beta chain variable domain of TCR clone 142493 (TRBV5-7, TRBJ2-7)
CASSLGPGRGHEQYF

SEQ ID NO: 284987 - protein, 15 aa, Homo sapiens
  CDR3 for alpha chain variable domain of TCR clone 142494 (TRAV3, TRAJ22)
CAVRDRGGSARQLTF

SEQ ID NO: 284988 - protein, 14 aa, Homo sapiens
  CDR3 for beta chain variable domain of TCR clone 142494 (TRBV13, TRBJ2-5)
CASYRRLAEETQYF

SEQ ID NO: 284989 - protein, 12 aa, Homo sapiens
  CDR3 for alpha chain variable domain of TCR clone 142495 (TRAV27, TRAJ35)
CAGADFGNVLHC

SEQ ID NO: 284990 - protein, 16 aa, Homo sapiens
  CDR3 for beta chain variable domain of TCR clone 142495 (TRBV24-1, TRBJ2-3)
CATSDPGTGATDTQYF

SEQ ID NO: 284991 - protein, 15 aa, Homo sapiens
  CDR3 for alpha chain variable domain of TCR clone 142496 (TRAV3, TRAJ3)
CAVRDMSSSASKIIF

SEQ ID NO: 284992 - protein, 14 aa, Homo sapiens
  CDR3 for beta chain variable domain of TCR clone 142496 (TRBV19, TRBJ2-1)
CTSPTFVLSGEQFF

SEQ ID NO: 284993 - protein, 14 aa, Homo sapiens
  CDR3 for alpha chain variable domain of TCR clone 142497 (TRAV38-1, TRAJ54)
CAFMSPSGAQKLVF

SEQ ID NO: 284994 - protein, 16 aa, Homo sapiens
  CDR3 for beta chain variable domain of TCR clone 142497 (TRBV28, TRBJ2-1)
CANSLGGSGSYNEQFF

SEQ ID NO: 284995 - protein, 13 aa, Homo sapiens
  CDR3 for alpha chain variable domain of TCR clone 142498 (TRAV13-1, TRAJ53)
CAASKGSNYKLTF

SEQ ID NO: 284996 - protein, 13 aa, Homo sapiens
  CDR3 for beta chain variable domain of TCR clone 142498 (TRBV29-1, TRBJ2-5)
CSVTIASEETQYV

SEQ ID NO: 284997 - protein, 14 aa, Homo sapiens
  CDR3 for alpha chain variable domain of TCR clone 142499 (TRAV26-1, TRAJ40)
CIVRLLSGAYKYIF

SEQ ID NO: 284998 - protein, 17 aa, Homo sapiens
  CDR3 for beta chain variable domain of TCR clone 142499 (TRBV11-2, TRBJ2-5)
CASSNSQENPVLRARHA

SEQ ID NO: 284999 - protein, 16 aa, Homo sapiens
  CDR3 for alpha chain variable domain of TCR clone 142500 (TRAV12-3, TRAJ45)
CAMGWGSGGGADGLTF

SEQ ID NO: 285000 - protein, 13 aa, Homo sapiens
  CDR3 for beta chain variable domain of TCR clone 142500 (TRBV4-1, TRBJ1-1)
FASSQLGTGEAFF

SEQ ID NO: 285001 - protein, 18 aa, Homo sapiens
  CDR3 for alpha chain variable domain of TCR clone 142501 (TRAV21, TRAJ52)
CAVRPSPAGGTSYGKLTF

SEQ ID NO: 285002 - protein, 16 aa, Homo sapiens
  CDR3 for beta chain variable domain of TCR clone 142501 (TRBV11-2, TRBJ2-1)
CSSLYPPGVEYNEQFF

SEQ ID NO: 285003 - protein, 15 aa, Homo sapiens
  CDR3 for alpha chain variable domain of TCR clone 142502 (TRAV3, TRAJ47)
CAVRDIGEYGNTLVF

SEQ ID NO: 285004 - protein, 14 aa, Homo sapiens
  CDR3 for beta chain variable domain of TCR clone 142502 (TRBV13, TRBJ2-5)
CASSLERVGETQYF

SEQ ID NO: 285005 - protein, 12 aa, Homo sapiens
  CDR3 for alpha chain variable domain of TCR clone 142503 (TRAV2, TRAJ36)
CAESTGANNLFF

SEQ ID NO: 285006 - protein, 14 aa, Homo sapiens
  CDR3 for beta chain variable domain of TCR clone 142503 (TRBV18, TRBJ2-7)
CASSPRGGAYEQYF

SEQ ID NO: 285007 - protein, 14 aa, Homo sapiens
  CDR3 for alpha chain variable domain of TCR clone 142504 (TRAV23/DV6, TRAJ37)
CSASTSSNTGKLIF

SEQ ID NO: 285008 - protein, 14 aa, Homo sapiens
  CDR3 for beta chain variable domain of TCR clone 142504 (TRBV15, TRBJ2-3)
CATRSGTSTDTQYF

SEQ ID NO: 285009 - protein, 14 aa, Homo sapiens
  CDR3 for alpha chain variable domain of TCR clone 142505 (TRAV21, TRAJ35)
CAVRPRGFGNVLHC

SEQ ID NO: 285010 - protein, 13 aa, Homo sapiens
  CDR3 for beta chain variable domain of TCR clone 142505 (TRBV14, TRBJ2-1)
CASSPPSPWPQFF

SEQ ID NO: 285011 - protein, 13 aa, Homo sapiens
  CDR3 for alpha chain variable domain of TCR clone 142506 (TRAV12-2, TRAJ42)
CAVKRGSQGNLIF

SEQ ID NO: 285012 - protein, 12 aa, Homo sapiens
  CDR3 for beta chain variable domain of TCR clone 142506 (TRBV7-9, TRBJ2-7)
CASSIKREEQYF

SEQ ID NO: 285013 - protein, 14 aa, Homo sapiens
  CDR3 for alpha chain variable domain of TCR clone 142507 (TRAV1-2, TRAJ8)
CAVREDTGFQKFVF

SEQ ID NO: 285014 - protein, 12 aa, Homo sapiens
  CDR3 for beta chain variable domain of TCR clone 142507 (TRBV24-1, TRBJ1-1)
CATLYPDTEAFF

SEQ ID NO: 285015 - protein, 14 aa, Homo sapiens
  CDR3 for alpha chain variable domain of TCR clone 142508 (TRAV12-1, TRAJ17)
CVVNYKAAGKKLTF

SEQ ID NO: 285016 - protein, 15 aa, Homo sapiens
  CDR3 for beta chain variable domain of TCR clone 142508 (TRBV18, TRBJ2-1)
CASSPPSASYNEQFF

SEQ ID NO: 285017 - protein, 12 aa, Homo sapiens
  CDR3 for alpha chain variable domain of TCR clone 142509 (TRAV1-2, TRAJ26)
CAVRGYGQNLVF

SEQ ID NO: 285018 - protein, 13 aa, Homo sapiens
  CDR3 for beta chain variable domain of TCR clone 142509 (TRBV12-4, TRBJ1-5)
CASSPDRAQPQHF

SEQ ID NO: 285019 - protein, 12 aa, Homo sapiens
  CDR3 for alpha chain variable domain of TCR clone 142510 (TRAV3, TRAJ7)
CADLLWEQQTRF

SEQ ID NO: 285020 - protein, 12 aa, Homo sapiens
  CDR3 for beta chain variable domain of TCR clone 142510 (TRBV6-3, TRBJ2-7)
CASSLTPYEQYF

SEQ ID NO: 285021 - protein, 15 aa, Homo sapiens
  CDR3 for alpha chain variable domain of TCR clone 142511 (TRAV12-2, TRAJ43)
CAFDMRFGAGTRLTV

SEQ ID NO: 285022 - protein, 12 aa, Homo sapiens
  CDR3 for beta chain variable domain of TCR clone 142511 (TRBV11-2, TRBJ2-2)
CASSLGGGELFF

SEQ ID NO: 285023 - protein, 12 aa, Homo sapiens
  CDR3 for alpha chain variable domain of TCR clone 142512 (TRAV1-1, TRAJ39)
CAVPVVGNMLTF

SEQ ID NO: 285024 - protein, 15 aa, Homo sapiens
  CDR3 for beta chain variable domain of TCR clone 142512 (TRBV19, TRBJ1-6)
CASSTQGAVGSPRHF

SEQ ID NO: 285025 - protein, 12 aa, Homo sapiens
  CDR3 for alpha chain variable domain of TCR clone 142513 (TRAV16, TRAJ10)
CCRTGGGNKLTF

SEQ ID NO: 285026 - protein, 15 aa, Homo sapiens
  CDR3 for beta chain variable domain of TCR clone 142513 (TRBV6-3, TRBJ2-7)
CASSSPGTVFYEQYF

SEQ ID NO: 285027 - protein, 18 aa, Homo sapiens
  CDR3 for alpha chain variable domain of TCR clone 142514 (TRAV12-3, TRAJ52)
CAMSRTNAGGTSYGKLTF

SEQ ID NO: 285028 - protein, 12 aa, Homo sapiens
  CDR3 for beta chain variable domain of TCR clone 142514 (TRBV7-8, TRBJ2-7)
CASSLGDREQCF

SEQ ID NO: 285029 - protein, 12 aa, Homo sapiens
  CDR3 for alpha chain variable domain of TCR clone 142515 (TRAV13-1, TRAJ6)
CAAMGGSYTPTF

SEQ ID NO: 285030 - protein, 12 aa, Homo sapiens
  CDR3 for beta chain variable domain of TCR clone 142515 (TRBV5-4, TRBJ2-2)
CASIDQGGELFF

SEQ ID NO: 285031 - protein, 11 aa, Homo sapiens
  CDR3 for alpha chain variable domain of TCR clone 142516 (TRAV3, TRAJ21)
CAVGNFNKFYF

SEQ ID NO: 285032 - protein, 16 aa, Homo sapiens
  CDR3 for beta chain variable domain of TCR clone 142516 (TRBV7-3, TRBJ2-1)
RASSLEGYRSYNEQFF

SEQ ID NO: 285033 - protein, 12 aa, Homo sapiens
  CDR3 for alpha chain variable domain of TCR clone 142517 (TRAV21, TRAJ33)
CAKMDSNYQLIW

SEQ ID NO: 285034 - protein, 14 aa, Homo sapiens
  CDR3 for beta chain variable domain of TCR clone 142517 (TRBV12-4, TRBJ2-3)
CASTIAGWGDTQYS

SEQ ID NO: 285035 - protein, 16 aa, Homo sapiens
  CDR3 for alpha chain variable domain of TCR clone 142518 (TRAV30, TRAJ24)
CGTEIVDADSWGKFQF

SEQ ID NO: 285036 - protein, 17 aa, Homo sapiens
  CDR3 for beta chain variable domain of TCR clone 142518 (TRBV20-1, TRBJ2-1)
CSARDRRRASPYNEQFF

SEQ ID NO: 285037 - protein, 14 aa, Homo sapiens
  CDR3 for alpha chain variable domain of TCR clone 142519 (TRAV12-2, TRAJ17)
CAVPFKAAGNKLTF

SEQ ID NO: 285038 - protein, 17 aa, Homo sapiens
  CDR3 for beta chain variable domain of TCR clone 142519 (TRBV20-1, TRBJ2-2)
CSASGSGLGGLTGELFF

SEQ ID NO: 285039 - protein, 11 aa, Homo sapiens
  CDR3 for alpha chain variable domain of TCR clone 142520 (TRAV35, TRAJ29)
CAGAGNTPLVF

SEQ ID NO: 285040 - protein, 12 aa, Homo sapiens
  CDR3 for beta chain variable domain of TCR clone 142520 (TRBV12-4, TRBJ2-7)
CASSLGGYEQYF

SEQ ID NO: 285041 - protein, 14 aa, Homo sapiens
  CDR3 for alpha chain variable domain of TCR clone 142521 (TRAV12-2, TRAJ45)
CAVYSGGGADGLTF

SEQ ID NO: 285042 - protein, 14 aa, Homo sapiens
  CDR3 for beta chain variable domain of TCR clone 142521 (TRBV4-1, TRBJ2-2)
CASSQAMNTGELFF

SEQ ID NO: 285043 - protein, 13 aa, Homo sapiens
  CDR3 for alpha chain variable domain of TCR clone 142522 (TRAV12-3, TRAJ40)
RATSDSGTYKYIF

SEQ ID NO: 285044 - protein, 14 aa, Homo sapiens
  CDR3 for beta chain variable domain of TCR clone 142522 (TRBV7-2, TRBJ1-5)
CASSTQGAGQPQHF

SEQ ID NO: 285045 - protein, 14 aa, Homo sapiens
  CDR3 for alpha chain variable domain of TCR clone 142523 (TRAV16, TRAJ26)
CALSSANYGQNFDF

SEQ ID NO: 285046 - protein, 16 aa, Homo sapiens
  CDR3 for beta chain variable domain of TCR clone 142523 (TRBV20-1, TRBJ1-4)
CSAPGQGLLTNEKLFF

SEQ ID NO: 285047 - protein, 14 aa, Homo sapiens
  CDR3 for alpha chain variable domain of TCR clone 142524 (TRAV12-2, TRAJ13)
CAVKKPGGYQKVTF

SEQ ID NO: 285048 - protein, 15 aa, Homo sapiens
  CDR3 for beta chain variable domain of TCR clone 142524 (TRBV12-4, TRBJ1-1)
CASSSSGTGNTEAFF

SEQ ID NO: 285049 - protein, 13 aa, Homo sapiens
  CDR3 for alpha chain variable domain of TCR clone 142525 (TRAV30, TRAJ6)
CGFIEGGSYIPTF

SEQ ID NO: 285050 - protein, 13 aa, Homo sapiens
  CDR3 for beta chain variable domain of TCR clone 142525 (TRBV5-4, TRBJ2-5)
CASSPVSEETQYF

SEQ ID NO: 285051 - protein, 15 aa, Homo sapiens
  CDR3 for alpha chain variable domain of TCR clone 142526 (TRAV26-2, TRAJ45)
CILRDRVDQEEVLTD

SEQ ID NO: 285052 - protein, 15 aa, Homo sapiens
  CDR3 for beta chain variable domain of TCR clone 142526 (TRBV7-6, TRBJ2-5)
CASSKPTGPQATQYF

SEQ ID NO: 285053 - protein, 15 aa, Homo sapiens
  CDR3 for alpha chain variable domain of TCR clone 142527 (TRAV27, TRAJ38)
CAARRNAGNNRKLIL

SEQ ID NO: 285054 - protein, 13 aa, Homo sapiens
  CDR3 for beta chain variable domain of TCR clone 142527 (TRBV7-3, TRBJ1-1)
CASSQDWGAEAFF

SEQ ID NO: 285055 - protein, 15 aa, Homo sapiens
  CDR3 for alpha chain variable domain of TCR clone 142528 (TRAV12-1, TRAJ44)
SVADLPTGTASKLTF

SEQ ID NO: 285056 - protein, 16 aa, Homo sapiens
  CDR3 for beta chain variable domain of TCR clone 142528 (TRBV12-5, TRBJ2-5)
CASGPRTSGNQETQYF

SEQ ID NO: 285057 - protein, 12 aa, Homo sapiens
  CDR3 for alpha chain variable domain of TCR clone 142529 (TRAV29/DV5, TRAJ34)
CAASGNTDKLIF

SEQ ID NO: 285058 - protein, 13 aa, Homo sapiens
  CDR3 for beta chain variable domain of TCR clone 142529 (TRBV7-9, TRBJ1-2)
CASSLKQNYGYTF

SEQ ID NO: 285059 - protein, 13 aa, Homo sapiens
  CDR3 for alpha chain variable domain of TCR clone 142530 (TRAV21, TRAJ57)
CAMIEGGSEKLVF

SEQ ID NO: 285060 - protein, 14 aa, Homo sapiens
  CDR3 for beta chain variable domain of TCR clone 142530 (TRBV12-5, TRBJ2-5)
CASGSRTHQETQYF

SEQ ID NO: 285061 - protein, 16 aa, Homo sapiens
  CDR3 for alpha chain variable domain of TCR clone 142531 (TRAV30, TRAJ49)
SAAQRVGPNTGNQFYF

SEQ ID NO: 285062 - protein, 18 aa, Homo sapiens
  CDR3 for beta chain variable domain of TCR clone 142531 (TRBV20-1, TRBJ2-6)
CSAETTPTHGSGANVLTF

SEQ ID NO: 285063 - protein, 15 aa, Homo sapiens
  CDR3 for alpha chain variable domain of TCR clone 142532 (TRAV2, TRAJ37)
CAVEDGSSNTGKLIF

SEQ ID NO: 285064 - protein, 14 aa, Homo sapiens
  CDR3 for beta chain variable domain of TCR clone 142532 (TRBV20-1, TRBJ1-1)
CSAQTRIGGTEAFV

SEQ ID NO: 285065 - protein, 16 aa, Homo sapiens
  CDR3 for alpha chain variable domain of TCR clone 142533 (TRAV27, TRAJ57)
CRRKRLNSGGSEKLVF

SEQ ID NO: 285066 - protein, 15 aa, Homo sapiens
  CDR3 for beta chain variable domain of TCR clone 142533 (TRBV27, TRBJ1-6)
CASSFDRGLGSPLHF

SEQ ID NO: 285067 - protein, 12 aa, Homo sapiens
  CDR3 for alpha chain variable domain of TCR clone 142534 (TRAV9-2, TRAJ24)
CAQTDSWGKLQF

SEQ ID NO: 285068 - protein, 13 aa, Homo sapiens
  CDR3 for beta chain variable domain of TCR clone 142534 (TRBV12-4, TRBJ2-1)
CARSLQGYNEQFF

SEQ ID NO: 285069 - protein, 16 aa, Homo sapiens
  CDR3 for alpha chain variable domain of TCR clone 142535 (TRAV30, TRAJ24)
CGTEIVDANCWGKFQF

SEQ ID NO: 285070 - protein, 13 aa, Homo sapiens
  CDR3 for beta chain variable domain of TCR clone 142535 (TRBV12-4, TRBJ2-5)
CASSPGTEETQYF

SEQ ID NO: 285071 - protein, 16 aa, Homo sapiens
  CDR3 for alpha chain variable domain of TCR clone 142536 (TRAV3, TRAJ37)
CAVRGKGFGNTGKLIF

SEQ ID NO: 285072 - protein, 15 aa, Homo sapiens
  CDR3 for beta chain variable domain of TCR clone 142536 (TRBV7-9, TRBJ2-2)
CASGPLDTFPGELFF

SEQ ID NO: 285073 - protein, 18 aa, Homo sapiens
  CDR3 for alpha chain variable domain of TCR clone 142537 (TRAV29/DV5, TRAJ52)
CAAGFRGAGGTSYVKLTF

SEQ ID NO: 285074 - protein, 13 aa, Homo sapiens
  CDR3 for beta chain variable domain of TCR clone 142537 (TRBV7-9, TRBJ1-2)
CASSLKQNYGYTF

SEQ ID NO: 285075 - protein, 13 aa, Homo sapiens
  CDR3 for alpha chain variable domain of TCR clone 142538 (TRAV3, TRAJ27)
CAVRPLGAGRSTF

SEQ ID NO: 285076 - protein, 17 aa, Homo sapiens
  CDR3 for beta chain variable domain of TCR clone 142538 (TRBV11-2, TRBJ2-1)
CASSLYPPGVEYNEQFF

SEQ ID NO: 285077 - protein, 15 aa, Homo sapiens
  CDR3 for alpha chain variable domain of TCR clone 142539 (TRAV8-4, TRAJ37)
CAVSKVPGNTGKLIF

SEQ ID NO: 285078 - protein, 12 aa, Homo sapiens
  CDR3 for beta chain variable domain of TCR clone 142539 (TRBV28, TRBJ2-2)
CASIGGLGGELF

SEQ ID NO: 285079 - protein, 15 aa, Homo sapiens
  CDR3 for alpha chain variable domain of TCR clone 142540 (TRAV34, TRAJ38)
CGADFTPGNNRKLIW

SEQ ID NO: 285080 - protein, 15 aa, Homo sapiens
  CDR3 for beta chain variable domain of TCR clone 142540 (TRBV6-1, TRBJ2-3)
CASSERGGITDTQYF

SEQ ID NO: 285081 - protein, 16 aa, Homo sapiens
  CDR3 for alpha chain variable domain of TCR clone 142541 (TRAV3, TRAJ10)
CAVRDMRAGGGNKLTF

SEQ ID NO: 285082 - protein, 20 aa, Homo sapiens
  CDR3 for beta chain variable domain of TCR clone 142541 (TRBV28, TRBJ2-1)
CASTHIGRSPGLAGGNEQFF

SEQ ID NO: 285083 - protein, 11 aa, Homo sapiens
  CDR3 for alpha chain variable domain of TCR clone 142542 (TRAV3, TRAJ21)
CAVSNFNKFYF

SEQ ID NO: 285084 - protein, 16 aa, Homo sapiens
  CDR3 for beta chain variable domain of TCR clone 142542 (TRBV20-1, TRBJ1-2)
CSASMGQGVANYGYTF

SEQ ID NO: 285085 - protein, 14 aa, Homo sapiens
  CDR3 for alpha chain variable domain of TCR clone 142543 (TRAV12-3, TRAJ7)
CAMSEIGGNNRLAF

SEQ ID NO: 285086 - protein, 17 aa, Homo sapiens
  CDR3 for beta chain variable domain of TCR clone 142543 (TRBV6-1, TRBJ2-3)
CASSEALRLISTDTQYF

SEQ ID NO: 285087 - protein, 17 aa, Homo sapiens
  CDR3 for alpha chain variable domain of TCR clone 142544 (TRAV3, TRAJ42)
YAVRDRDYGGSQGNLIF

SEQ ID NO: 285088 - protein, 15 aa, Homo sapiens
  CDR3 for beta chain variable domain of TCR clone 142544 (TRBV6-6, TRBJ2-7)
CASSCSYGGSYEQYF

SEQ ID NO: 285089 - protein, 10 aa, Homo sapiens
  CDR3 for alpha chain variable domain of TCR clone 142545 (TRAV16, TRAJ26)
CAPEELWSEF

SEQ ID NO: 285090 - protein, 15 aa, Homo sapiens
  CDR3 for beta chain variable domain of TCR clone 142545 (TRBV7-2, TRBJ2-3)
CASILTGTSTDTQYF

SEQ ID NO: 285091 - protein, 12 aa, Homo sapiens
  CDR3 for alpha chain variable domain of TCR clone 142546 (TRAV25, TRAJ5)
CAGGGGRRALNF

SEQ ID NO: 285092 - protein, 15 aa, Homo sapiens
  CDR3 for beta chain variable domain of TCR clone 142546 (TRBV19, TRBJ2-4)
CASRGPRRGENIQYF

SEQ ID NO: 285093 - protein, 13 aa, Homo sapiens
  CDR3 for alpha chain variable domain of TCR clone 142547 (TRAV21, TRAJ27)
CAARPGNAGKSTF

SEQ ID NO: 285094 - protein, 13 aa, Homo sapiens
  CDR3 for beta chain variable domain of TCR clone 142547 (TRBV13, TRBJ2-1)
CASILGGCGEQFF

SEQ ID NO: 285095 - protein, 14 aa, Homo sapiens
  CDR3 for alpha chain variable domain of TCR clone 142548 (TRAV12-1, TRAJ8)
CVVNSNTGFQKLVF

SEQ ID NO: 285096 - protein, 16 aa, Homo sapiens
  CDR3 for beta chain variable domain of TCR clone 142548 (TRBV20-1, TRBJ2-2)
CSARDYRVGLTGELFF

SEQ ID NO: 285097 - protein, 13 aa, Homo sapiens
  CDR3 for alpha chain variable domain of TCR clone 142549 (TRAV17, TRAJ26)
CATVDNYGQNFVF

SEQ ID NO: 285098 - protein, 13 aa, Homo sapiens
  CDR3 for beta chain variable domain of TCR clone 142549 (TRBV14, TRBJ1-1)
CASSRDFGTEAFF

SEQ ID NO: 285099 - protein, 23 aa, Homo sapiens
  CDR3 for alpha chain variable domain of TCR clone 142550 (TRAV26-1, TRAJ38)
CIADNAGNNHIQNPAPAVNQLRN

SEQ ID NO: 285100 - protein, 13 aa, Homo sapiens
  CDR3 for beta chain variable domain of TCR clone 142550 (TRBV20-1, TRBJ1-1)
CSARGGGNTEAFF

SEQ ID NO: 285101 - protein, 14 aa, Homo sapiens
  CDR3 for alpha chain variable domain of TCR clone 142551 (TRAV1-1, TRAJ23)
CAVSIYNQGGRLIF

SEQ ID NO: 285102 - protein, 15 aa, Homo sapiens
  CDR3 for beta chain variable domain of TCR clone 142551 (TRBV9, TRBJ1-6)
CASSVAGTGDSPLHF

SEQ ID NO: 285103 - protein, 17 aa, Homo sapiens
  CDR3 for alpha chain variable domain of TCR clone 142552 (TRAV1-2, TRAJ8)
CAVRDPDENTGFQKLDF

SEQ ID NO: 285104 - protein, 16 aa, Homo sapiens
  CDR3 for beta chain variable domain of TCR clone 142552 (TRBV7-9, TRBJ2-2)
CASSGFGGANTGELFF

SEQ ID NO: 285105 - protein, 14 aa, Homo sapiens
  CDR3 for alpha chain variable domain of TCR clone 142553 (TRAV17, TRAJ22)
CATVLSGSARQLTF

SEQ ID NO: 285106 - protein, 14 aa, Homo sapiens
  CDR3 for beta chain variable domain of TCR clone 142553 (TRBV19, TRBJ2-1)
CASPTVVLSGEQFF

SEQ ID NO: 285107 - protein, 13 aa, Homo sapiens
  CDR3 for alpha chain variable domain of TCR clone 142554 (TRAV12-2, TRAJ37)
CAGGSGNTGKLIF

SEQ ID NO: 285108 - protein, 17 aa, Homo sapiens
  CDR3 for beta chain variable domain of TCR clone 142554 (TRBV11-2, TRBJ2-1)
CASSLYPPGVEYNEQYF

SEQ ID NO: 285109 - protein, 15 aa, Homo sapiens
  CDR3 for alpha chain variable domain of TCR clone 142555 (TRAV8-1, TRAJ23)
CAVNSHYNQGGKLIF

SEQ ID NO: 285110 - protein, 13 aa, Homo sapiens
  CDR3 for beta chain variable domain of TCR clone 142555 (TRBV7-3, TRBJ1-1)
CASSQDWGAEAFF

SEQ ID NO: 285111 - protein, 13 aa, Homo sapiens
  CDR3 for alpha chain variable domain of TCR clone 142556 (TRAV17, TRAJ40)
CATAPGGTSKYIF

SEQ ID NO: 285112 - protein, 12 aa, Homo sapiens
  CDR3 for beta chain variable domain of TCR clone 142556 (TRBV2, TRBJ1-5)
CASSENRTHQHF

SEQ ID NO: 285113 - protein, 13 aa, Homo sapiens
  CDR3 for alpha chain variable domain of TCR clone 142557 (TRAV12-2, TRAJ18)
CAVRGSTLGRLDF

SEQ ID NO: 285114 - protein, 16 aa, Homo sapiens
  CDR3 for beta chain variable domain of TCR clone 142557 (TRBV12-4, TRBJ1-5)
CASSSGPRGSNQPQHF

SEQ ID NO: 285115 - protein, 11 aa, Homo sapiens
  CDR3 for alpha chain variable domain of TCR clone 142558 (TRAV12-2, TRAJ21)
CAVRNFNKFYF

SEQ ID NO: 285116 - protein, 14 aa, Homo sapiens
  CDR3 for beta chain variable domain of TCR clone 142558 (TRBV7-6, TRBJ2-3)
CASSLGPSTDTQYF

SEQ ID NO: 285117 - protein, 14 aa, Homo sapiens
  CDR3 for alpha chain variable domain of TCR clone 142559 (TRAV1-2, TRAJ8)
CAVREDTGFQKLVF

SEQ ID NO: 285118 - protein, 15 aa, Homo sapiens
  CDR3 for beta chain variable domain of TCR clone 142559 (TRBV11-2, TRBJ2-7)
CASRSVRDRVYEQYF

SEQ ID NO: 285119 - protein, 15 aa, Homo sapiens
  CDR3 for alpha chain variable domain of TCR clone 142560 (TRAV12-1, TRAJ39)
CGEQGGRNAGNMLTF

SEQ ID NO: 285120 - protein, 19 aa, Homo sapiens
  CDR3 for beta chain variable domain of TCR clone 142560 (TRBV28, TRBJ2-1)
CASSFSIRGSGRTRYEQFF

SEQ ID NO: 285121 - protein, 14 aa, Homo sapiens
  CDR3 for alpha chain variable domain of TCR clone 142561 (TRAV8-3, TRAJ4)
CAVGAAGGYSKLIF

SEQ ID NO: 285122 - protein, 14 aa, Homo sapiens
  CDR3 for beta chain variable domain of TCR clone 142561 (TRBV12-5, TRBJ2-5)
CASGSRTHQETQYF

SEQ ID NO: 285123 - protein, 14 aa, Homo sapiens
  CDR3 for alpha chain variable domain of TCR clone 142562 (TRAV12-3, TRAJ10)
SHLPLTGGGNKLTF

SEQ ID NO: 285124 - protein, 16 aa, Homo sapiens
  CDR3 for beta chain variable domain of TCR clone 142562 (TRBV19, TRBJ2-1)
CASSKAGPSPYNEQFF

SEQ ID NO: 285125 - protein, 12 aa, Homo sapiens
  CDR3 for alpha chain variable domain of TCR clone 142563 (TRAV27, TRAJ13)
CAGAGGYQKVTF

SEQ ID NO: 285126 - protein, 15 aa, Homo sapiens
  CDR3 for beta chain variable domain of TCR clone 142563 (TRBV27, TRBJ2-1)
CASSNGGGSSNEQFF

SEQ ID NO: 285127 - protein, 13 aa, Homo sapiens
  CDR3 for alpha chain variable domain of TCR clone 142564 (TRAV21, TRAJ27)
CAERPGNAGKSTF

SEQ ID NO: 285128 - protein, 15 aa, Homo sapiens
  CDR3 for beta chain variable domain of TCR clone 142564 (TRBV7-6, TRBJ1-4)
CASSARTGGNEKLFF

SEQ ID NO: 285129 - protein, 13 aa, Homo sapiens
  CDR3 for alpha chain variable domain of TCR clone 142565 (TRAV14/DV4, TRAJ15)
CAMRDQAGNALIF

SEQ ID NO: 285130 - protein, 14 aa, Homo sapiens
  CDR3 for beta chain variable domain of TCR clone 142565 (TRBV2, TRBJ2-3)
CASARDFPADTQYF

SEQ ID NO: 285131 - protein, 16 aa, Homo sapiens
  CDR3 for alpha chain variable domain of TCR clone 142566 (TRAV12-3, TRAJ53)
WAMSAGSGGSNYKLTF

SEQ ID NO: 285132 - protein, 13 aa, Homo sapiens
  CDR3 for beta chain variable domain of TCR clone 142566 (TRBV29-1, TRBJ2-3)
CSVGPRGTDTQYF

SEQ ID NO: 285133 - protein, 14 aa, Homo sapiens
  CDR3 for alpha chain variable domain of TCR clone 142567 (TRAV1-2, TRAJ8)
CAVREVTGFQKLVF

SEQ ID NO: 285134 - protein, 13 aa, Homo sapiens
  CDR3 for beta chain variable domain of TCR clone 142567 (TRBV12-4, TRBJ1-5)
CASSPDGAQPQHF

SEQ ID NO: 285135 - protein, 10 aa, Homo sapiens
  CDR3 for alpha chain variable domain of TCR clone 142568 (TRAV13-2, TRAJ49)
CADTGNQFYF

SEQ ID NO: 285136 - protein, 13 aa, Homo sapiens
  CDR3 for beta chain variable domain of TCR clone 142568 (TRBV4-2, TRBJ1-1)
CASSQAGNTEAFF

SEQ ID NO: 285137 - protein, 16 aa, Homo sapiens
  CDR3 for alpha chain variable domain of TCR clone 142569 (TRAV3, TRAJ10)
CAVRDMRAGEGNKLTF

SEQ ID NO: 285138 - protein, 17 aa, Homo sapiens
  CDR3 for beta chain variable domain of TCR clone 142569 (TRBV20-1, TRBJ2-2)
CSASGSGQGGLTGELFF

SEQ ID NO: 285139 - protein, 13 aa, Homo sapiens
  CDR3 for alpha chain variable domain of TCR clone 142570 (TRAV3, TRAJ27)
RAVRPLGAGKSTV

SEQ ID NO: 285140 - protein, 13 aa, Homo sapiens
  CDR3 for beta chain variable domain of TCR clone 142570 (TRBV7-9, TRBJ2-3)
WASSPGSTDTQYF

SEQ ID NO: 285141 - protein, 13 aa, Homo sapiens
  CDR3 for alpha chain variable domain of TCR clone 142571 (TRAV25, TRAJ22)
CAAHSGSARQLTF

SEQ ID NO: 285142 - protein, 14 aa, Homo sapiens
  CDR3 for beta chain variable domain of TCR clone 142571 (TRBV20-1, TRBJ1-1)
CSAQTRIGGTEAFF

SEQ ID NO: 285143 - protein, 14 aa, Homo sapiens
  CDR3 for alpha chain variable domain of TCR clone 142572 (TRAV1-2, TRAJ16)
CAVGSASDGQKLLF

SEQ ID NO: 285144 - protein, 17 aa, Homo sapiens
  CDR3 for beta chain variable domain of TCR clone 142572 (TRBV7-3, TRBJ2-3)
CASSLMKRMRGADTQYF

SEQ ID NO: 285145 - protein, 15 aa, Homo sapiens
  CDR3 for alpha chain variable domain of TCR clone 142573 (TRAV29/DV5, TRAJ42)
CAAKTDGGGQGNLIF

SEQ ID NO: 285146 - protein, 15 aa, Homo sapiens
  CDR3 for beta chain variable domain of TCR clone 142573 (TRBV5-1, TRBJ2-2)
CASSSQGGNTGELFF

SEQ ID NO: 285147 - protein, 12 aa, Homo sapiens
  CDR3 for alpha chain variable domain of TCR clone 142574 (TRAV12-2, TRAJ34)
CAVRRVTDKLIF

SEQ ID NO: 285148 - protein, 14 aa, Homo sapiens
  CDR3 for beta chain variable domain of TCR clone 142574 (TRBV7-7, TRBJ2-2)
CATRQDSDTGELFF

SEQ ID NO: 285149 - protein, 13 aa, Homo sapiens
  CDR3 for alpha chain variable domain of TCR clone 142575 (TRAV38-1, TRAJ42)
CARWGGSQGNLIF

SEQ ID NO: 285150 - protein, 17 aa, Homo sapiens
  CDR3 for beta chain variable domain of TCR clone 142575 (TRBV20-1, TRBJ2-1)
CSARAPLAGVWDNEHFF

SEQ ID NO: 285151 - protein, 14 aa, Homo sapiens
  CDR3 for alpha chain variable domain of TCR clone 142576 (TRAV40, TRAJ41)
CLLGPPNSGYALNF

SEQ ID NO: 285152 - protein, 11 aa, Homo sapiens
  CDR3 for beta chain variable domain of TCR clone 142576 (TRBV19, TRBJ2-7)
WASSILGEQYF

SEQ ID NO: 285153 - protein, 17 aa, Homo sapiens
  CDR3 for alpha chain variable domain of TCR clone 142577 (TRAV3, TRAJ6)
CAVRDGPRAGGIYIPTF

SEQ ID NO: 285154 - protein, 19 aa, Homo sapiens
  CDR3 for beta chain variable domain of TCR clone 142577 (TRBV28, TRBJ2-1)
CQHPIGRSPGLAGGNEQFF

SEQ ID NO: 285155 - protein, 12 aa, Homo sapiens
  CDR3 for alpha chain variable domain of TCR clone 142578 (TRAV12-3, TRAJ17)
CAMTLTGNTLTF

SEQ ID NO: 285156 - protein, 15 aa, Homo sapiens
  CDR3 for beta chain variable domain of TCR clone 142578 (TRBV7-2, TRBJ2-3)
CASSLAGAFIDTQYF

SEQ ID NO: 285157 - protein, 15 aa, Homo sapiens
  CDR3 for alpha chain variable domain of TCR clone 142579 (TRAV17, TRAJ54)
CATTRSEQGAQKLVF

SEQ ID NO: 285158 - protein, 16 aa, Homo sapiens
  CDR3 for beta chain variable domain of TCR clone 142579 (TRBV12-4, TRBJ2-3)
CASSLRLAETTETQYF

SEQ ID NO: 285159 - protein, 12 aa, Homo sapiens
  CDR3 for alpha chain variable domain of TCR clone 142580 (TRAV12-2, TRAJ10)
WGVTGGGNKLTF

SEQ ID NO: 285160 - protein, 16 aa, Homo sapiens
  CDR3 for beta chain variable domain of TCR clone 142580 (TRBV2, TRBJ1-1)
CASSPPNRGMNTEAFF

SEQ ID NO: 285161 - protein, 19 aa, Homo sapiens
  CDR3 for alpha chain variable domain of TCR clone 142581 (TRAV26-1, TRAJ50)
CCVLLHRQNPKTSYDKVIF

SEQ ID NO: 285162 - protein, 14 aa, Homo sapiens
  CDR3 for beta chain variable domain of TCR clone 142581 (TRBV7-3, TRBJ2-1)
CASSLAGGTNEQFF

SEQ ID NO: 285163 - protein, 14 aa, Homo sapiens
  CDR3 for alpha chain variable domain of TCR clone 142582 (TRAV8-4, TRAJ8)
CAWSEDTGFQKLVF

SEQ ID NO: 285164 - protein, 16 aa, Homo sapiens
  CDR3 for beta chain variable domain of TCR clone 142582 (TRBV7-3, TRBJ2-1)
CSSSKPLAGGYNEQFF

SEQ ID NO: 285165 - protein, 15 aa, Homo sapiens
  CDR3 for alpha chain variable domain of TCR clone 142583 (TRAV3, TRAJ3)
CAVRDRDSSAFKIIF

SEQ ID NO: 285166 - protein, 15 aa, Homo sapiens
  CDR3 for beta chain variable domain of TCR clone 142583 (TRBV19, TRBJ2-1)
CASSSPGVPLDEQFF

SEQ ID NO: 285167 - protein, 10 aa, Homo sapiens
  CDR3 for alpha chain variable domain of TCR clone 142584 (TRAV23/DV6, TRAJ43)
YAAAVAALEQ

SEQ ID NO: 285168 - protein, 13 aa, Homo sapiens
  CDR3 for beta chain variable domain of TCR clone 142584 (TRBV12-4, TRBJ1-2)
CASSVRQGKGYTF

SEQ ID NO: 285169 - protein, 14 aa, Homo sapiens
  CDR3 for alpha chain variable domain of TCR clone 142585 (TRAV13-1, TRAJ40)
CAASMTSGTYKYIF

SEQ ID NO: 285170 - protein, 15 aa, Homo sapiens
  CDR3 for beta chain variable domain of TCR clone 142585 (TRBV4-1, TRBJ2-7)
CASSQNTGRLYEQSF

SEQ ID NO: 285171 - protein, 12 aa, Homo sapiens
  CDR3 for alpha chain variable domain of TCR clone 142586 (TRAV2, TRAJ9)
CAVGAGGFKTIF

SEQ ID NO: 285172 - protein, 15 aa, Homo sapiens
  CDR3 for beta chain variable domain of TCR clone 142586 (TRBV13, TRBJ2-2)
CSSPRTGEHTGEPFF

SEQ ID NO: 285173 - protein, 13 aa, Homo sapiens
  CDR3 for alpha chain variable domain of TCR clone 142587 (TRAV1-2, TRAJ12)
CAVSIDSSYKFIF

SEQ ID NO: 285174 - protein, 15 aa, Homo sapiens
  CDR3 for beta chain variable domain of TCR clone 142587 (TRBV27, TRBJ2-5)
CASSLIPSGGETQYF

SEQ ID NO: 285175 - protein, 15 aa, Homo sapiens
  CDR3 for alpha chain variable domain of TCR clone 142588 (TRAV12-1, TRAJ52)
FVGNAGGTSYGKLTF

SEQ ID NO: 285176 - protein, 14 aa, Homo sapiens
  CDR3 for beta chain variable domain of TCR clone 142588 (TRBV7-3, TRBJ2-2)
CASSPDPSGRELFF

SEQ ID NO: 285177 - protein, 15 aa, Homo sapiens
  CDR3 for alpha chain variable domain of TCR clone 142589 (TRAV26-1, TRAJ48)
CIALWSGFGNEKLTF

SEQ ID NO: 285178 - protein, 12 aa, Homo sapiens
  CDR3 for beta chain variable domain of TCR clone 142589 (TRBV19, TRBJ2-5)
CASSISEETQYF

SEQ ID NO: 285179 - protein, 13 aa, Homo sapiens
  CDR3 for alpha chain variable domain of TCR clone 142590 (TRAV21, TRAJ27)
CAARPGTAGQSTF

SEQ ID NO: 285180 - protein, 12 aa, Homo sapiens
  CDR3 for beta chain variable domain of TCR clone 142590 (TRBV27, TRBJ2-5)
CASSPTGETQYF

SEQ ID NO: 285181 - protein, 14 aa, Homo sapiens
  CDR3 for alpha chain variable domain of TCR clone 142591 (TRAV29/DV5, TRAJ20)
CAASAPIEDYKLSF

SEQ ID NO: 285182 - protein, 13 aa, Homo sapiens
  CDR3 for beta chain variable domain of TCR clone 142591 (TRBV20-1, TRBJ1-1)
CSARGGGNTEAFF

SEQ ID NO: 285183 - protein, 16 aa, Homo sapiens
  CDR3 for alpha chain variable domain of TCR clone 142592 (TRAV38-2/DV8, TRAJ47)
CAYGSAIMEYGNKLVF

SEQ ID NO: 285184 - protein, 17 aa, Homo sapiens
  CDR3 for beta chain variable domain of TCR clone 142592 (TRBV11-2, TRBJ2-1)
CASSLYPPGVEYNEQFF

SEQ ID NO: 285185 - protein, 12 aa, Homo sapiens
  CDR3 for alpha chain variable domain of TCR clone 142593 (TRAV13-2, TRAJ23)
CAGRHRGGKLIF

SEQ ID NO: 285186 - protein, 16 aa, Homo sapiens
  CDR3 for beta chain variable domain of TCR clone 142593 (TRBV20-1, TRBJ2-7)
CSASTSGRLSSYEQYF

SEQ ID NO: 285187 - protein, 17 aa, Homo sapiens
  CDR3 for alpha chain variable domain of TCR clone 142594 (TRAV41, TRAJ32)
CAVRIMVVLQTSSSLEL

SEQ ID NO: 285188 - protein, 15 aa, Homo sapiens
  CDR3 for beta chain variable domain of TCR clone 142594 (TRBV11-2, TRBJ2-1)
CASSKNRGLIYEQFF

SEQ ID NO: 285189 - protein, 12 aa, Homo sapiens
  CDR3 for alpha chain variable domain of TCR clone 142595 (TRAV13-2, TRAJ23)
CAERSRGGKLIF

SEQ ID NO: 285190 - protein, 16 aa, Homo sapiens
  CDR3 for beta chain variable domain of TCR clone 142595 (TRBV20-1, TRBJ1-4)
CSAPGQGLLTNEKLFF

SEQ ID NO: 285191 - protein, 13 aa, Homo sapiens
  CDR3 for alpha chain variable domain of TCR clone 142596 (TRAV1-2, TRAJ9)
CAALNTGGFNTIF

SEQ ID NO: 285192 - protein, 13 aa, Homo sapiens
  CDR3 for beta chain variable domain of TCR clone 142596 (TRBV4-1, TRBJ2-1)
CASSQAGGDEQFF

SEQ ID NO: 285193 - protein, 15 aa, Homo sapiens
  CDR3 for alpha chain variable domain of TCR clone 142597 (TRAV26-1, TRAJ9)
CIVRESNTGGFKTTF

SEQ ID NO: 285194 - protein, 11 aa, Homo sapiens
  CDR3 for beta chain variable domain of TCR clone 142597 (TRBV7-6, TRBJ2-5)
CASSFQETQYF

SEQ ID NO: 285195 - protein, 12 aa, Homo sapiens
  CDR3 for alpha chain variable domain of TCR clone 142598 (TRAV23/DV6, TRAJ24)
CAANDSWGKLQF

SEQ ID NO: 285196 - protein, 16 aa, Homo sapiens
  CDR3 for beta chain variable domain of TCR clone 142598 (TRBV12-4, TRBJ2-5)
CASSLSTGGGKETQYF

SEQ ID NO: 285197 - protein, 16 aa, Homo sapiens
  CDR3 for alpha chain variable domain of TCR clone 142599 (TRAV12-3, TRAJ53)
CAMSPGSGGSNYKLTF

SEQ ID NO: 285198 - protein, 11 aa, Homo sapiens
  CDR3 for beta chain variable domain of TCR clone 142599 (TRBV29-1, TRBJ2-5)
CSEDRTGNQYL

SEQ ID NO: 285199 - protein, 14 aa, Homo sapiens
  CDR3 for alpha chain variable domain of TCR clone 142600 (TRAV12-2, TRAJ40)
CAVKIPSETYKYIF

SEQ ID NO: 285200 - protein, 14 aa, Homo sapiens
  CDR3 for beta chain variable domain of TCR clone 142600 (TRBV7-8, TRBJ2-7)
CASSPRDRVYEQYF

SEQ ID NO: 285201 - protein, 17 aa, Homo sapiens
  CDR3 for alpha chain variable domain of TCR clone 142601 (TRAV13-1, TRAJ52)
CAAGRNAGGTSYGKLTF

SEQ ID NO: 285202 - protein, 15 aa, Homo sapiens
  CDR3 for beta chain variable domain of TCR clone 142601 (TRBV7-2, TRBJ2-2)
CASSPTGANTGELFF

SEQ ID NO: 285203 - protein, 11 aa, Homo sapiens
  CDR3 for alpha chain variable domain of TCR clone 142602 (TRAV3, TRAJ21)
CAVGNFNKFYF

SEQ ID NO: 285204 - protein, 14 aa, Homo sapiens
  CDR3 for beta chain variable domain of TCR clone 142602 (TRBV7-9, TRBJ2-5)
CASSRWAVSETQYF

SEQ ID NO: 285205 - protein, 16 aa, Homo sapiens
  CDR3 for alpha chain variable domain of TCR clone 142603 (TRAV16, TRAJ42)
CALSGYYGGSQGNLIF

SEQ ID NO: 285206 - protein, 13 aa, Homo sapiens
  CDR3 for beta chain variable domain of TCR clone 142603 (TRBV12-4, TRBJ1-2)
CASSLRQGKGYTF

SEQ ID NO: 285207 - protein, 15 aa, Homo sapiens
  CDR3 for alpha chain variable domain of TCR clone 142604 (TRAV4, TRAJ42)
CLVGGYGGSQGNLIF

SEQ ID NO: 285208 - protein, 15 aa, Homo sapiens
  CDR3 for beta chain variable domain of TCR clone 142604 (TRBV27, TRBJ2-3)
CASSLGLAATDTQYF

SEQ ID NO: 285209 - protein, 14 aa, Homo sapiens
  CDR3 for alpha chain variable domain of TCR clone 142605 (TRAV12-2, TRAJ40)
CSVKIPSGTSQYIF

SEQ ID NO: 285210 - protein, 17 aa, Homo sapiens
  CDR3 for beta chain variable domain of TCR clone 142605 (TRBV11-2, TRBJ2-1)
CASSLYPPGVEYNEQFF

SEQ ID NO: 285211 - protein, 13 aa, Homo sapiens
  CDR3 for alpha chain variable domain of TCR clone 142606 (TRAV12-2, TRAJ10)
CAVPTGGGNKLTF

SEQ ID NO: 285212 - protein, 11 aa, Homo sapiens
  CDR3 for beta chain variable domain of TCR clone 142606 (TRBV6-1, TRBJ2-1)
CDSISSNEQFF

SEQ ID NO: 285213 - protein, 14 aa, Homo sapiens
  CDR3 for alpha chain variable domain of TCR clone 142607 (TRAV12-2, TRAJ13)
CAVKKTGGYQKVTF

SEQ ID NO: 285214 - protein, 14 aa, Homo sapiens
  CDR3 for beta chain variable domain of TCR clone 142607 (TRBV5-5, TRBJ2-7)
CASSLEQGTYEQYF

SEQ ID NO: 285215 - protein, 17 aa, Homo sapiens
  CDR3 for alpha chain variable domain of TCR clone 142608 (TRAV3, TRAJ42)
CAVRDRDYGGSQGNLIF

SEQ ID NO: 285216 - protein, 15 aa, Homo sapiens
  CDR3 for beta chain variable domain of TCR clone 142608 (TRBV6-5, TRBJ2-1)
CASSYDAGAGNGQFF

SEQ ID NO: 285217 - protein, 18 aa, Homo sapiens
  CDR3 for alpha chain variable domain of TCR clone 142609 (TRAV13-1, TRAJ52)
CAAKNPNAGGTSYGQLTF

SEQ ID NO: 285218 - protein, 18 aa, Homo sapiens
  CDR3 for beta chain variable domain of TCR clone 142609 (TRBV12-4, TRBJ2-4)
WASSRTGAVDVAKNIQYF

SEQ ID NO: 285219 - protein, 10 aa, Homo sapiens
  CDR3 for alpha chain variable domain of TCR clone 142610 (TRAV25, TRAJ20)
CAVNDYKLSF

SEQ ID NO: 285220 - protein, 18 aa, Homo sapiens
  CDR3 for beta chain variable domain of TCR clone 142610 (TRBV20-1, TRBJ2-6)
CSAETTPTLGSGANVLTF

SEQ ID NO: 285221 - protein, 14 aa, Homo sapiens
  CDR3 for alpha chain variable domain of TCR clone 142611 (TRAV12-1, TRAJ45)
CVVNENAGADGLTF

SEQ ID NO: 285222 - protein, 15 aa, Homo sapiens
  CDR3 for beta chain variable domain of TCR clone 142611 (TRBV5-7, TRBJ2-7)
CASSLGPRRGHEQYF

SEQ ID NO: 285223 - protein, 14 aa, Homo sapiens
  CDR3 for alpha chain variable domain of TCR clone 142612 (TRAV36/DV7, TRAJ57)
CAVGFPVGSAKLVF

SEQ ID NO: 285224 - protein, 12 aa, Homo sapiens
  CDR3 for beta chain variable domain of TCR clone 142612 (TRBV19, TRBJ2-7)
CASTSGTYEQYF

SEQ ID NO: 285225 - protein, 14 aa, Homo sapiens
  CDR3 for alpha chain variable domain of TCR clone 142613 (TRAV9-2, TRAJ39)
CALYIYNAGNMLTF

SEQ ID NO: 285226 - protein, 15 aa, Homo sapiens
  CDR3 for beta chain variable domain of TCR clone 142613 (TRBV7-3, TRBJ2-1)
CASSLSSGSFDEQFF

SEQ ID NO: 285227 - protein, 13 aa, Homo sapiens
  CDR3 for alpha chain variable domain of TCR clone 142614 (TRAV25, TRAJ26)
CAGMDNYGLNFVF

SEQ ID NO: 285228 - protein, 15 aa, Homo sapiens
  CDR3 for beta chain variable domain of TCR clone 142614 (TRBV10-3, TRBJ2-1)
CAIRNGTSGHNEQFF

SEQ ID NO: 285229 - protein, 13 aa, Homo sapiens
  CDR3 for alpha chain variable domain of TCR clone 142615 (TRAV8-6, TRAJ21)
CAVSPSSLNKFYF

SEQ ID NO: 285230 - protein, 13 aa, Homo sapiens
  CDR3 for beta chain variable domain of TCR clone 142615 (TRBV28, TRBJ2-7)
CASKAGGVYEQYF

SEQ ID NO: 285231 - protein, 17 aa, Homo sapiens
  CDR3 for alpha chain variable domain of TCR clone 142616 (TRAV3, TRAJ6)
CAVRDGTMAGGSYIPTF

SEQ ID NO: 285232 - protein, 20 aa, Homo sapiens
  CDR3 for beta chain variable domain of TCR clone 142616 (TRBV28, TRBJ2-1)
CASTPIGRSPGLAGGNEQFF

SEQ ID NO: 285233 - protein, 11 aa, Homo sapiens
  CDR3 for alpha chain variable domain of TCR clone 142617 (TRAV9-2, TRAJ26)
CALRRPQNFVF

SEQ ID NO: 285234 - protein, 20 aa, Homo sapiens
  CDR3 for beta chain variable domain of TCR clone 142617 (TRBV7-8, TRBJ2-1)
CASSLAHRLAGVRSYNEQFF

SEQ ID NO: 285235 - protein, 12 aa, Homo sapiens
  CDR3 for alpha chain variable domain of TCR clone 142618 (TRAV21, TRAJ31)
CVLAGNTARLMF

SEQ ID NO: 285236 - protein, 16 aa, Homo sapiens
  CDR3 for beta chain variable domain of TCR clone 142618 (TRBV27, TRBJ2-5)
CASSFGPGGTKETQYF

SEQ ID NO: 285237 - protein, 15 aa, Homo sapiens
  CDR3 for alpha chain variable domain of TCR clone 142619 (TRAV23/DV6, TRAJ7)
CAASVGRSGNNSLAY

SEQ ID NO: 285238 - protein, 15 aa, Homo sapiens
  CDR3 for beta chain variable domain of TCR clone 142619 (TRBV12-4, TRBJ1-6)
RASSLLGGSNSPLHF

SEQ ID NO: 285239 - protein, 14 aa, Homo sapiens
  CDR3 for alpha chain variable domain of TCR clone 142620 (TRAV8-4, TRAJ13)
CAVTLSGGYQKVTL

SEQ ID NO: 285240 - protein, 14 aa, Homo sapiens
  CDR3 for beta chain variable domain of TCR clone 142620 (TRBV3-1, TRBJ2-5)
CASSQGPDQETQYF

SEQ ID NO: 285241 - protein, 13 aa, Homo sapiens
  CDR3 for alpha chain variable domain of TCR clone 142621 (TRAV13-2, TRAJ40)
CAELISRTYKYIF

SEQ ID NO: 285242 - protein, 14 aa, Homo sapiens
  CDR3 for beta chain variable domain of TCR clone 142621 (TRBV19, TRBJ1-5)
CASGTEVYNQPQHF

SEQ ID NO: 285243 - protein, 15 aa, Homo sapiens
  CDR3 for alpha chain variable domain of TCR clone 142622 (TRAV8-2, TRAJ16)
CVVSYGFSDGQKLLF

SEQ ID NO: 285244 - protein, 14 aa, Homo sapiens
  CDR3 for beta chain variable domain of TCR clone 142622 (TRBV7-3, TRBJ1-1)
CASSLGTGYTEAFF

SEQ ID NO: 285245 - protein, 10 aa, Homo sapiens
  CDR3 for alpha chain variable domain of TCR clone 142623 (TRAV21, TRAJ31)
CAVDNARLMC

SEQ ID NO: 285246 - protein, 13 aa, Homo sapiens
  CDR3 for beta chain variable domain of TCR clone 142623 (TRBV4-1, TRBJ1-1)
CASSRKMNTEAFF

SEQ ID NO: 285247 - protein, 16 aa, Homo sapiens
  CDR3 for alpha chain variable domain of TCR clone 142624 (TRAV23/DV6, TRAJ9)
CAASTGGNTGGFKTIF

SEQ ID NO: 285248 - protein, 13 aa, Homo sapiens
  CDR3 for beta chain variable domain of TCR clone 142624 (TRBV10-3, TRBJ2-7)
CASKLAVNYEQYF

SEQ ID NO: 285249 - protein, 15 aa, Homo sapiens
  CDR3 for alpha chain variable domain of TCR clone 142625 (TRAV2, TRAJ9)
CAVDDRGTGGFKTIF

SEQ ID NO: 285250 - protein, 16 aa, Homo sapiens
  CDR3 for beta chain variable domain of TCR clone 142625 (TRBV24-1, TRBJ2-3)
CATSDPGKGATDTQYF

SEQ ID NO: 285251 - protein, 13 aa, Homo sapiens
  CDR3 for alpha chain variable domain of TCR clone 142626 (TRAV26-2, TRAJ43)
CILRAVNNNDMRF

SEQ ID NO: 285252 - protein, 14 aa, Homo sapiens
  CDR3 for beta chain variable domain of TCR clone 142626 (TRBV10-3, TRBJ1-1)
CAISDGSGVTEAFF

SEQ ID NO: 285253 - protein, 16 aa, Homo sapiens
  CDR3 for alpha chain variable domain of TCR clone 142627 (TRAV3, TRAJ37)
CAVRGKGSGNTGKLII

SEQ ID NO: 285254 - protein, 13 aa, Homo sapiens
  CDR3 for beta chain variable domain of TCR clone 142627 (TRBV7-8, TRBJ2-3)
CASSLRGPDTQYF

SEQ ID NO: 285255 - protein, 14 aa, Homo sapiens
  CDR3 for alpha chain variable domain of TCR clone 142628 (TRAV12-2, TRAJ13)
CAVKKTGGYQKVTL

SEQ ID NO: 285256 - protein, 13 aa, Homo sapiens
  CDR3 for beta chain variable domain of TCR clone 142628 (TRBV7-7, TRBJ2-5)
CASSRSGQETQCF

SEQ ID NO: 285257 - protein, 13 aa, Homo sapiens
  CDR3 for alpha chain variable domain of TCR clone 142629 (TRAV8-1, TRAJ23)
CAWRDNQGGKLIF

SEQ ID NO: 285258 - protein, 13 aa, Homo sapiens
  CDR3 for beta chain variable domain of TCR clone 142629 (TRBV7-6, TRBJ2-1)
CRQLGGGADEQFF

SEQ ID NO: 285259 - protein, 13 aa, Homo sapiens
  CDR3 for alpha chain variable domain of TCR clone 142630 (TRAV3, TRAJ21)
CAVREPDFNKFYS

SEQ ID NO: 285260 - protein, 12 aa, Homo sapiens
  CDR3 for beta chain variable domain of TCR clone 142630 (TRBV11-2, TRBJ2-1)
CASSPGNNEQFF

SEQ ID NO: 285261 - protein, 14 aa, Homo sapiens
  CDR3 for alpha chain variable domain of TCR clone 142631 (TRAV12-1, TRAJ29)
CVVNEGSGNTPLVF

SEQ ID NO: 285262 - protein, 13 aa, Homo sapiens
  CDR3 for beta chain variable domain of TCR clone 142631 (TRBV7-9, TRBJ2-3)
CASSPVSTDTQYF

SEQ ID NO: 285263 - protein, 13 aa, Homo sapiens
  CDR3 for alpha chain variable domain of TCR clone 142632 (TRAV13-1, TRAJ5)
CAARVTGRRALTF

SEQ ID NO: 285264 - protein, 13 aa, Homo sapiens
  CDR3 for beta chain variable domain of TCR clone 142632 (TRBV7-6, TRBJ1-2)
CASSLVADYGYTF

SEQ ID NO: 285265 - protein, 15 aa, Homo sapiens
  CDR3 for alpha chain variable domain of TCR clone 142633 (TRAV17, TRAJ22)
CATVAPSGSARHLTF

SEQ ID NO: 285266 - protein, 16 aa, Homo sapiens
  CDR3 for beta chain variable domain of TCR clone 142633 (TRBV10-3, TRBJ2-7)
CAISADFADRPYEQYF

SEQ ID NO: 285267 - protein, 18 aa, Homo sapiens
  CDR3 for alpha chain variable domain of TCR clone 142634 (TRAV29/DV5, TRAJ52)
CAAGFRGAGGTIYGKLTF

SEQ ID NO: 285268 - protein, 17 aa, Homo sapiens
  CDR3 for beta chain variable domain of TCR clone 142634 (TRBV20-1, TRBJ2-3)
CSARSAGLAGVTDTQYF

SEQ ID NO: 285269 - protein, 13 aa, Homo sapiens
  CDR3 for alpha chain variable domain of TCR clone 142635 (TRAV12-2, TRAJ4)
CAVRSDGYNKLIF

SEQ ID NO: 285270 - protein, 15 aa, Homo sapiens
  CDR3 for beta chain variable domain of TCR clone 142635 (TRBV10-3, TRBJ2-1)
CAISDVQDRAYEQFF

SEQ ID NO: 285271 - protein, 16 aa, Homo sapiens
  CDR3 for alpha chain variable domain of TCR clone 142636 (TRAV12-2, TRAJ10)
CAVNRVLTGGGNKLTF

SEQ ID NO: 285272 - protein, 12 aa, Homo sapiens
  CDR3 for beta chain variable domain of TCR clone 142636 (TRBV28, TRBJ2-7)
CASSFSNYEQYF

SEQ ID NO: 285273 - protein, 12 aa, Homo sapiens
  CDR3 for alpha chain variable domain of TCR clone 142637 (TRAV12-3, TRAJ17)
CAMTLTGNKLTF

SEQ ID NO: 285274 - protein, 15 aa, Homo sapiens
  CDR3 for beta chain variable domain of TCR clone 142637 (TRBV6-3, TRBJ2-1)
CASSYASDSYNEQFF

SEQ ID NO: 285275 - protein, 17 aa, Homo sapiens
  CDR3 for alpha chain variable domain of TCR clone 142638 (TRAV3, TRAJ6)
CAVRDGPRAGGSFIPTF

SEQ ID NO: 285276 - protein, 14 aa, Homo sapiens
  CDR3 for beta chain variable domain of TCR clone 142638 (TRBV7-2, TRBJ2-7)
SASSPKTSFYEQYF

SEQ ID NO: 285277 - protein, 14 aa, Homo sapiens
  CDR3 for alpha chain variable domain of TCR clone 142639 (TRAV2, TRAJ22)
CAVGRAGSARQLTF

SEQ ID NO: 285278 - protein, 12 aa, Homo sapiens
  CDR3 for beta chain variable domain of TCR clone 142639 (TRBV19, TRBJ2-1)
CASSMQDTEQFF

SEQ ID NO: 285279 - protein, 14 aa, Homo sapiens
  CDR3 for alpha chain variable domain of TCR clone 142640 (TRAV12-1, TRAJ23)
CVVIVYNQGGKLIF

SEQ ID NO: 285280 - protein, 15 aa, Homo sapiens
  CDR3 for beta chain variable domain of TCR clone 142640 (TRBV20-1, TRBJ1-5)
CSAKLPGQGPQPQHF

SEQ ID NO: 285281 - protein, 14 aa, Homo sapiens
  CDR3 for alpha chain variable domain of TCR clone 142641 (TRAV23/DV6, TRAJ37)
CSASTSSNTGKTIF

SEQ ID NO: 285282 - protein, 14 aa, Homo sapiens
  CDR3 for beta chain variable domain of TCR clone 142641 (TRBV15, TRBJ2-3)
CATRSGTSTDTQYF

SEQ ID NO: 285283 - protein, 14 aa, Homo sapiens
  CDR3 for alpha chain variable domain of TCR clone 142642 (TRAV3, TRAJ32)
CCERRAGATNKLIF

SEQ ID NO: 285284 - protein, 18 aa, Homo sapiens
  CDR3 for beta chain variable domain of TCR clone 142642 (TRBV12-4, TRBJ2-2)
CASSLVAGTRGRTGELFF

SEQ ID NO: 285285 - protein, 14 aa, Homo sapiens
  CDR3 for alpha chain variable domain of TCR clone 142643 (TRAV35, TRAJ40)
CAGSTTSGTYKYIF

SEQ ID NO: 285286 - protein, 13 aa, Homo sapiens
  CDR3 for beta chain variable domain of TCR clone 142643 (TRBV20-1, TRBJ1-6)
CSAPLGVRSPLHF

SEQ ID NO: 285287 - protein, 11 aa, Homo sapiens
  CDR3 for alpha chain variable domain of TCR clone 142644 (TRAV21, TRAJ11)
CAVNGYSTLTF

SEQ ID NO: 285288 - protein, 16 aa, Homo sapiens
  CDR3 for beta chain variable domain of TCR clone 142644 (TRBV20-1, TRBJ1-4)
CSAPGQGLLTNEKLFF

SEQ ID NO: 285289 - protein, 15 aa, Homo sapiens
  CDR3 for alpha chain variable domain of TCR clone 142645 (TRAV8-3, TRAJ45)
CASSYAGGGADGLTF

SEQ ID NO: 285290 - protein, 13 aa, Homo sapiens
  CDR3 for beta chain variable domain of TCR clone 142645 (TRBV10-3, TRBJ2-7)
CASKLAVNYGQYF

SEQ ID NO: 285291 - protein, 11 aa, Homo sapiens
  CDR3 for alpha chain variable domain of TCR clone 142646 (TRAV14/DV4, )
CPLREISRTLT

SEQ ID NO: 285292 - protein, 14 aa, Homo sapiens
  CDR3 for beta chain variable domain of TCR clone 142646 (TRBV2, TRBJ2-1)
CASSDRAYYNEQFF

SEQ ID NO: 285293 - protein, 16 aa, Homo sapiens
  CDR3 for alpha chain variable domain of TCR clone 142647 (TRAV20, TRAJ53)
CAVQGNSGGSNYKLTF

SEQ ID NO: 285294 - protein, 16 aa, Homo sapiens
  CDR3 for beta chain variable domain of TCR clone 142647 (TRBV7-3, TRBJ2-2)
CASSLKRGTLSGELFF

SEQ ID NO: 285295 - protein, 17 aa, Homo sapiens
  CDR3 for alpha chain variable domain of TCR clone 142648 (TRAV3, TRAJ16)
CAVRDYNQMARSCSLQG

SEQ ID NO: 285296 - protein, 15 aa, Homo sapiens
  CDR3 for beta chain variable domain of TCR clone 142648 (TRBV28, TRBJ2-7)
CASSPGGRGFYEQYF

SEQ ID NO: 285297 - protein, 13 aa, Homo sapiens
  CDR3 for alpha chain variable domain of TCR clone 142649 (TRAV2, TRAJ15)
CAVASQAGTALIF

SEQ ID NO: 285298 - protein, 16 aa, Homo sapiens
  CDR3 for beta chain variable domain of TCR clone 142649 (TRBV12-5, TRBJ2-5)
CASGPRTSGDQETQYF

SEQ ID NO: 285299 - protein, 13 aa, Homo sapiens
  CDR3 for alpha chain variable domain of TCR clone 142650 (TRAV30, TRAJ24)
CGTVTDSWGKLQF

SEQ ID NO: 285300 - protein, 16 aa, Homo sapiens
  CDR3 for beta chain variable domain of TCR clone 142650 (TRBV5-1, TRBJ1-1)
CASSSGGNSLNTEAFF

SEQ ID NO: 285301 - protein, 12 aa, Homo sapiens
  CDR3 for alpha chain variable domain of TCR clone 142651 (TRAV12-3, TRAJ17)
CAMTLTGNKLTF

SEQ ID NO: 285302 - protein, 17 aa, Homo sapiens
  CDR3 for beta chain variable domain of TCR clone 142651 (TRBV28, TRBJ2-1)
CASSSARQALTYNEQFF

SEQ ID NO: 285303 - protein, 13 aa, Homo sapiens
  CDR3 for alpha chain variable domain of TCR clone 142652 (TRAV8-3, TRAJ30)
CAVGGWRDDKIIF

SEQ ID NO: 285304 - protein, 12 aa, Homo sapiens
  CDR3 for beta chain variable domain of TCR clone 142652 (TRBV11-2, TRBJ2-2)
CASSLGGGELFF

SEQ ID NO: 285305 - protein, 13 aa, Homo sapiens
  CDR3 for alpha chain variable domain of TCR clone 142653 (TRAV13-1, TRAJ5)
CAASDTGRSALTF

SEQ ID NO: 285306 - protein, 12 aa, Homo sapiens
  CDR3 for beta chain variable domain of TCR clone 142653 (TRBV28, TRBJ2-3)
CACSLYRDTQYF

SEQ ID NO: 285307 - protein, 13 aa, Homo sapiens
  CDR3 for alpha chain variable domain of TCR clone 142654 (TRAV20, TRAJ37)
CAGCSSNTGKLIF

SEQ ID NO: 285308 - protein, 11 aa, Homo sapiens
  CDR3 for beta chain variable domain of TCR clone 142654 (TRBV12-5, TRBJ2-3)
CPSTATDTQYF

SEQ ID NO: 285309 - protein, 13 aa, Homo sapiens
  CDR3 for alpha chain variable domain of TCR clone 142655 (TRAV27, TRAJ45)
CMSSGGGADGLTF

SEQ ID NO: 285310 - protein, 11 aa, Homo sapiens
  CDR3 for beta chain variable domain of TCR clone 142655 (TRBV11-2, TRBJ2-1)
PPGVEYNEQFF

SEQ ID NO: 285311 - protein, 12 aa, Homo sapiens
  CDR3 for alpha chain variable domain of TCR clone 142656 (TRAV3, TRAJ26)
CAVRDYGQHFVF

SEQ ID NO: 285312 - protein, 16 aa, Homo sapiens
  CDR3 for beta chain variable domain of TCR clone 142656 (TRBV11-2, TRBJ1-2)
CASSTSGMEANYGYTF

SEQ ID NO: 285313 - protein, 12 aa, Homo sapiens
  CDR3 for alpha chain variable domain of TCR clone 142657 (TRAV8-3, TRAJ26)
CAGDNYGQNFVF

SEQ ID NO: 285314 - protein, 12 aa, Homo sapiens
  CDR3 for beta chain variable domain of TCR clone 142657 (TRBV7-9, TRBJ2-7)
CASSFGSYEQYF

SEQ ID NO: 285315 - protein, 12 aa, Homo sapiens
  CDR3 for alpha chain variable domain of TCR clone 142658 (TRAV2, TRAJ34)
CAVESNTDKLIF

SEQ ID NO: 285316 - protein, 20 aa, Homo sapiens
  CDR3 for beta chain variable domain of TCR clone 142658 (TRBV7-2, TRBJ2-5)
CASSFLRGGGRDPVLRARHA

SEQ ID NO: 285317 - protein, 16 aa, Homo sapiens
  CDR3 for alpha chain variable domain of TCR clone 142659 (TRAV30, TRAJ24)
CGTEIVYADSWGKFQF

SEQ ID NO: 285318 - protein, 13 aa, Homo sapiens
  CDR3 for beta chain variable domain of TCR clone 142659 (TRBV6-4, TRBJ1-5)
CASSADLNQPQHF

SEQ ID NO: 285319 - protein, 14 aa, Homo sapiens
  CDR3 for alpha chain variable domain of TCR clone 142660 (TRAV12-1, TRAJ27)
CGEHIRTNAGKSNF

SEQ ID NO: 285320 - protein, 15 aa, Homo sapiens
  CDR3 for beta chain variable domain of TCR clone 142660 (TRBV19, TRBJ1-1)
CASTSGQIQNTEAFF

SEQ ID NO: 285321 - protein, 11 aa, Homo sapiens
  CDR3 for alpha chain variable domain of TCR clone 142661 (TRAV1-1, TRAJ23)
CAVRQGGKLIF

SEQ ID NO: 285322 - protein, 14 aa, Homo sapiens
  CDR3 for beta chain variable domain of TCR clone 142661 (TRBV7-8, TRBJ2-3)
CARSLEAGTDTQYF

SEQ ID NO: 285323 - protein, 14 aa, Homo sapiens
  CDR3 for alpha chain variable domain of TCR clone 142662 (TRAV16, TRAJ57)
CALSGQGGSEKLVF

SEQ ID NO: 285324 - protein, 16 aa, Homo sapiens
  CDR3 for beta chain variable domain of TCR clone 142662 (TRBV5-4, TRBJ2-2)
CASSLVGGPNTGELFF

SEQ ID NO: 285325 - protein, 16 aa, Homo sapiens
  CDR3 for alpha chain variable domain of TCR clone 142663 (TRAV30, TRAJ24)
CGTEIVDADSWGKFQF

SEQ ID NO: 285326 - protein, 15 aa, Homo sapiens
  CDR3 for beta chain variable domain of TCR clone 142663 (TRBV4-1, TRBJ2-1)
CASSQAQREIYEQFF

SEQ ID NO: 285327 - protein, 18 aa, Homo sapiens
  CDR3 for alpha chain variable domain of TCR clone 142664 (TRAV13-2, TRAJ52)
CAETPLNAGGTSYGKLTF

SEQ ID NO: 285328 - protein, 15 aa, Homo sapiens
  CDR3 for beta chain variable domain of TCR clone 142664 (TRBV7-2, TRBJ2-7)
CASSLKGALTYEQFF

SEQ ID NO: 285329 - protein, 14 aa, Homo sapiens
  CDR3 for alpha chain variable domain of TCR clone 142665 (TRAV1-1, TRAJ28)
CAAPSGAGSFQLTF

SEQ ID NO: 285330 - protein, 15 aa, Homo sapiens
  CDR3 for beta chain variable domain of TCR clone 142665 (TRBV7-2, TRBJ1-2)
CASSLVSGGDYGYTF

SEQ ID NO: 285331 - protein, 16 aa, Homo sapiens
  CDR3 for alpha chain variable domain of TCR clone 142666 (TRAV23/DV6, TRAJ23)
CAASMKGKKPGRKAYL

SEQ ID NO: 285332 - protein, 15 aa, Homo sapiens
  CDR3 for beta chain variable domain of TCR clone 142666 (TRBV5-1, TRBJ2-7)
CASSLGDFTTYEQYF

SEQ ID NO: 285333 - protein, 12 aa, Homo sapiens
  CDR3 for alpha chain variable domain of TCR clone 142667 (TRAV12-3, TRAJ20)
CAMVRGDYKLSF

SEQ ID NO: 285334 - protein, 13 aa, Homo sapiens
  CDR3 for beta chain variable domain of TCR clone 142667 (TRBV20-1, TRBJ2-5)
CSAREAFQETQYF

SEQ ID NO: 285335 - protein, 17 aa, Homo sapiens
  CDR3 for alpha chain variable domain of TCR clone 142668 (TRAV3, TRAJ6)
CAVRDGPRAGGRYIPTF

SEQ ID NO: 285336 - protein, 14 aa, Homo sapiens
  CDR3 for beta chain variable domain of TCR clone 142668 (TRBV7-2, TRBJ2-7)
CASSPKTSFYEQYC

SEQ ID NO: 285337 - protein, 14 aa, Homo sapiens
  CDR3 for alpha chain variable domain of TCR clone 142669 (TRAV2, TRAJ20)
CAVEDGTNDYKRSF

SEQ ID NO: 285338 - protein, 13 aa, Homo sapiens
  CDR3 for beta chain variable domain of TCR clone 142669 (TRBV7-2, TRBJ1-1)
CASSRNTNTEAFF

SEQ ID NO: 285339 - protein, 16 aa, Homo sapiens
  CDR3 for alpha chain variable domain of TCR clone 142670 (TRAV12-2, TRAJ5)
CAVTRGSGTGRIALTF

SEQ ID NO: 285340 - protein, 15 aa, Homo sapiens
  CDR3 for beta chain variable domain of TCR clone 142670 (TRBV9, TRBJ2-1)
CASSVGTGELNEQFF

SEQ ID NO: 285341 - protein, 10 aa, Homo sapiens
  CDR3 for alpha chain variable domain of TCR clone 142671 (TRAV8-4, TRAJ48)
FNFGNEKLTF

SEQ ID NO: 285342 - protein, 12 aa, Homo sapiens
  CDR3 for beta chain variable domain of TCR clone 142671 (TRBV7-3, TRBJ1-2)
CASNKKGVPVTF

SEQ ID NO: 285343 - protein, 13 aa, Homo sapiens
  CDR3 for alpha chain variable domain of TCR clone 142672 (TRAV13-2, TRAJ53)
CAENMGSNYKLTF

SEQ ID NO: 285344 - protein, 13 aa, Homo sapiens
  CDR3 for beta chain variable domain of TCR clone 142672 (TRBV4-1, TRBJ2-2)
CASSQENSGELFF

SEQ ID NO: 285345 - protein, 16 aa, Homo sapiens
  CDR3 for alpha chain variable domain of TCR clone 142673 (TRAV26-1, TRAJ53)
CIVRVAVGGSNYKLTF

SEQ ID NO: 285346 - protein, 12 aa, Homo sapiens
  CDR3 for beta chain variable domain of TCR clone 142673 (TRBV7-9, TRBJ1-5)
WASSPQGQPQHF

SEQ ID NO: 285347 - protein, 16 aa, Homo sapiens
  CDR3 for alpha chain variable domain of TCR clone 142674 (TRAV21, TRAJ37)
CAVRPRGSSNTGKLIF

SEQ ID NO: 285348 - protein, 14 aa, Homo sapiens
  CDR3 for beta chain variable domain of TCR clone 142674 (TRBV4-2, TRBJ2-1)
CASGLDRDYNEQFF

SEQ ID NO: 285349 - protein, 14 aa, Homo sapiens
  CDR3 for alpha chain variable domain of TCR clone 142675 (TRAV35, TRAJ22)
CAGLRPGSARQLTF

SEQ ID NO: 285350 - protein, 13 aa, Homo sapiens
  CDR3 for beta chain variable domain of TCR clone 142675 (TRBV20-1, TRBJ1-1)
GSARGGGNTEAFF

SEQ ID NO: 285351 - protein, 12 aa, Homo sapiens
  CDR3 for alpha chain variable domain of TCR clone 142676 (TRAV22, TRAJ29)
CAPPSGTTPLVF

SEQ ID NO: 285352 - protein, 14 aa, Homo sapiens
  CDR3 for beta chain variable domain of TCR clone 142676 (TRBV11-2, TRBJ2-7)
CASSLGAGAYEQYF

SEQ ID NO: 285353 - protein, 15 aa, Homo sapiens
  CDR3 for alpha chain variable domain of TCR clone 142677 (TRAV4, TRAJ32)
CLVGEDGGATNKLIY

SEQ ID NO: 285354 - protein, 16 aa, Homo sapiens
  CDR3 for beta chain variable domain of TCR clone 142677 (TRBV7-9, TRBJ2-1)
CASSDVAGGSYNEQFF

SEQ ID NO: 285355 - protein, 14 aa, Homo sapiens
  CDR3 for alpha chain variable domain of TCR clone 142678 (TRAV1-2, TRAJ8)
CAVREDKGFQKLVF

SEQ ID NO: 285356 - protein, 16 aa, Homo sapiens
  CDR3 for beta chain variable domain of TCR clone 142678 (TRBV7-6, TRBJ2-6)
CASSLPGLSGANVLTF

SEQ ID NO: 285357 - protein, 14 aa, Homo sapiens
  CDR3 for alpha chain variable domain of TCR clone 142679 (TRAV8-2, TRAJ33)
CVASDRNSNYQLIW

SEQ ID NO: 285358 - protein, 13 aa, Homo sapiens
  CDR3 for beta chain variable domain of TCR clone 142679 (TRBV10-3, TRBJ2-7)
CASKLAVNYEQYF

SEQ ID NO: 285359 - protein, 14 aa, Homo sapiens
  CDR3 for alpha chain variable domain of TCR clone 142680 (TRAV26-1, TRAJ38)
CFADNAGNNRKLIW

SEQ ID NO: 285360 - protein, 16 aa, Homo sapiens
  CDR3 for beta chain variable domain of TCR clone 142680 (TRBV20-1, TRBJ2-7)
CSASTSGRLSSYEQYF

SEQ ID NO: 285361 - protein, 15 aa, Homo sapiens
  CDR3 for alpha chain variable domain of TCR clone 142681 (TRAV17, TRAJ57)
CATGPSQGGSEKLVF

SEQ ID NO: 285362 - protein, 15 aa, Homo sapiens
  CDR3 for beta chain variable domain of TCR clone 142681 (TRBV4-1, TRBJ2-5)
CASSQWDLYQETQYF

SEQ ID NO: 285363 - protein, 14 aa, Homo sapiens
  CDR3 for alpha chain variable domain of TCR clone 142682 (TRAV8-1, TRAJ23)
CAVGTYNQGGKLIF

SEQ ID NO: 285364 - protein, 15 aa, Homo sapiens
  CDR3 for beta chain variable domain of TCR clone 142682 (TRBV2, TRBJ2-1)
CASSELAGGYNEQFF

SEQ ID NO: 285365 - protein, 12 aa, Homo sapiens
  CDR3 for alpha chain variable domain of TCR clone 142683 (TRAV2, TRAJ33)
CAVPDSNYQLIW

SEQ ID NO: 285366 - protein, 17 aa, Homo sapiens
  CDR3 for beta chain variable domain of TCR clone 142683 (TRBV6-5, TRBJ2-3)
CASSYGTSLYKSVTQYF

SEQ ID NO: 285367 - protein, 13 aa, Homo sapiens
  CDR3 for alpha chain variable domain of TCR clone 142684 (TRAV13-1, TRAJ21)
CSASIYNFNKFYF

SEQ ID NO: 285368 - protein, 13 aa, Homo sapiens
  CDR3 for beta chain variable domain of TCR clone 142684 (TRBV27, TRBJ1-4)
CASSLMGDERLFF

SEQ ID NO: 285369 - protein, 15 aa, Homo sapiens
  CDR3 for alpha chain variable domain of TCR clone 142685 (TRAV21, TRAJ22)
CAVRLFFWFCTATDL

SEQ ID NO: 285370 - protein, 14 aa, Homo sapiens
  CDR3 for beta chain variable domain of TCR clone 142685 (TRBV19, TRBJ1-5)
CASRAPDSFLSQHF

SEQ ID NO: 285371 - protein, 14 aa, Homo sapiens
  CDR3 for alpha chain variable domain of TCR clone 142686 (TRAV35, TRAJ50)
CAGHRKTSYDKEIF

SEQ ID NO: 285372 - protein, 12 aa, Homo sapiens
  CDR3 for beta chain variable domain of TCR clone 142686 (TRBV27, TRBJ2-7)
CASSGGFYEQYF

SEQ ID NO: 285373 - protein, 11 aa, Homo sapiens
  CDR3 for alpha chain variable domain of TCR clone 142687 (TRAV4, TRAJ23)
CLVAPGGKLIF

SEQ ID NO: 285374 - protein, 14 aa, Homo sapiens
  CDR3 for beta chain variable domain of TCR clone 142687 (TRBV7-2, TRBJ2-1)
CQQLPSRRVNEQFF

SEQ ID NO: 285375 - protein, 15 aa, Homo sapiens
  CDR3 for alpha chain variable domain of TCR clone 142688 (TRAV25, TRAJ52)
CAGRPGGTSYGKLTF

SEQ ID NO: 285376 - protein, 16 aa, Homo sapiens
  CDR3 for beta chain variable domain of TCR clone 142688 (TRBV5-1, TRBJ2-3)
CASSLGLAVYTDTQYF

SEQ ID NO: 285377 - protein, 19 aa, Homo sapiens
  CDR3 for alpha chain variable domain of TCR clone 142689 (TRAV38-1, TRAJ53)
CAFMKHGLESGGSNYKLTF

SEQ ID NO: 285378 - protein, 12 aa, Homo sapiens
  CDR3 for beta chain variable domain of TCR clone 142689 (TRBV7-8, TRBJ2-7)
CASSLGDREQYF

SEQ ID NO: 285379 - protein, 14 aa, Homo sapiens
  CDR3 for alpha chain variable domain of TCR clone 142690 (TRAV30, TRAJ26)
CGTEIVSYGQNFVF

SEQ ID NO: 285380 - protein, 17 aa, Homo sapiens
  CDR3 for beta chain variable domain of TCR clone 142690 (TRBV19, TRBJ2-5)
CASSIAAWGTGSGTQYF

SEQ ID NO: 285381 - protein, 18 aa, Homo sapiens
  CDR3 for alpha chain variable domain of TCR clone 142691 (TRAV26-2, TRAJ45)
CILRVDKYSGGGADGLTF

SEQ ID NO: 285382 - protein, 15 aa, Homo sapiens
  CDR3 for beta chain variable domain of TCR clone 142691 (TRBV2, TRBJ1-4)
CQQSFTGATNEKLFF

SEQ ID NO: 285383 - protein, 14 aa, Homo sapiens
  CDR3 for alpha chain variable domain of TCR clone 142692 (TRAV2, TRAJ9)
CAVEERSGGFKTIF

SEQ ID NO: 285384 - protein, 11 aa, Homo sapiens
  CDR3 for beta chain variable domain of TCR clone 142692 (TRBV7-9, TRBJ2-5)
CASSLGETQYF

SEQ ID NO: 285385 - protein, 14 aa, Homo sapiens
  CDR3 for alpha chain variable domain of TCR clone 142693 (TRAV12-3, TRAJ42)
CAMNHGGSQGNLIF

SEQ ID NO: 285386 - protein, 15 aa, Homo sapiens
  CDR3 for beta chain variable domain of TCR clone 142693 (TRBV5-7, TRBJ1-5)
CASSYGKLWEQPQHF

SEQ ID NO: 285387 - protein, 14 aa, Homo sapiens
  CDR3 for alpha chain variable domain of TCR clone 142694 (TRAV20, TRAJ42)
CAVQARGSQGNLIF

SEQ ID NO: 285388 - protein, 13 aa, Homo sapiens
  CDR3 for beta chain variable domain of TCR clone 142694 (TRBV6-4, TRBJ1-5)
CASSADLNQPQHF

SEQ ID NO: 285389 - protein, 13 aa, Homo sapiens
  CDR3 for alpha chain variable domain of TCR clone 142695 (TRAV8-3, TRAJ29)
CAVAPLGNTPLVF

SEQ ID NO: 285390 - protein, 15 aa, Homo sapiens
  CDR3 for beta chain variable domain of TCR clone 142695 (TRBV4-1, TRBJ2-7)
CASSQNTGRLYEQYF

SEQ ID NO: 285391 - protein, 10 aa, Homo sapiens
  CDR3 for alpha chain variable domain of TCR clone 142696 (TRAV12-3, TRAJ49)
CAMNDDQFYF

SEQ ID NO: 285392 - protein, 13 aa, Homo sapiens
  CDR3 for beta chain variable domain of TCR clone 142696 (TRBV14, TRBJ1-1)
CASSRTVNTEAFF

SEQ ID NO: 285393 - protein, 14 aa, Homo sapiens
  CDR3 for alpha chain variable domain of TCR clone 142697 (TRAV12-1, TRAJ3)
CVVILYSSASKIIF

SEQ ID NO: 285394 - protein, 16 aa, Homo sapiens
  CDR3 for beta chain variable domain of TCR clone 142697 (TRBV7-3, TRBJ2-2)
CASSLKRGTLSGELFF

SEQ ID NO: 285395 - protein, 14 aa, Homo sapiens
  CDR3 for alpha chain variable domain of TCR clone 142698 (TRAV13-2, TRAJ43)
CAEIPTYNNNDMRF

SEQ ID NO: 285396 - protein, 15 aa, Homo sapiens
  CDR3 for beta chain variable domain of TCR clone 142698 (TRBV7-9, TRBJ2-2)
CASGPLESFPGELFF

SEQ ID NO: 285397 - protein, 15 aa, Homo sapiens
  CDR3 for alpha chain variable domain of TCR clone 142699 (TRAV17, TRAJ37)
CATDGGSSNTGKLIF

SEQ ID NO: 285398 - protein, 13 aa, Homo sapiens
  CDR3 for beta chain variable domain of TCR clone 142699 (TRBV7-2, TRBJ2-2)
CASSLAVTGELFF

SEQ ID NO: 285399 - protein, 13 aa, Homo sapiens
  CDR3 for alpha chain variable domain of TCR clone 142700 (TRAV21, TRAJ15)
CAVANQAGTALIF

SEQ ID NO: 285400 - protein, 15 aa, Homo sapiens
  CDR3 for beta chain variable domain of TCR clone 142700 (TRBV11-2, TRBJ2-1)
CASSKNRGLIYEQFF

SEQ ID NO: 285401 - protein, 13 aa, Homo sapiens
  CDR3 for alpha chain variable domain of TCR clone 142701 (TRAV12-2, TRAJ34)
CAVRGYNTAKLIF

SEQ ID NO: 285402 - protein, 15 aa, Homo sapiens
  CDR3 for beta chain variable domain of TCR clone 142701 (TRBV28, TRBJ2-1)
CASRTGAGVIARQSF

SEQ ID NO: 285403 - protein, 12 aa, Homo sapiens
  CDR3 for alpha chain variable domain of TCR clone 142702 (TRAV2, TRAJ24)
CAATDRWGKFQF

SEQ ID NO: 285404 - protein, 13 aa, Homo sapiens
  CDR3 for beta chain variable domain of TCR clone 142702 (TRBV5-8, TRBJ1-1)
CASSLGGGTEAFF

SEQ ID NO: 285405 - protein, 12 aa, Homo sapiens
  CDR3 for alpha chain variable domain of TCR clone 142703 (TRAV23/DV6, TRAJ30)
CAASKGDDKIIF

SEQ ID NO: 285406 - protein, 17 aa, Homo sapiens
  CDR3 for beta chain variable domain of TCR clone 142703 (TRBV20-1, TRBJ2-2)
CSASGSGQGGLTGELFF

SEQ ID NO: 285407 - protein, 12 aa, Homo sapiens
  CDR3 for alpha chain variable domain of TCR clone 142704 (TRAV3, TRAJ20)
CAVRDGDYKSSF

SEQ ID NO: 285408 - protein, 13 aa, Homo sapiens
  CDR3 for beta chain variable domain of TCR clone 142704 (TRBV9, TRBJ2-1)
CASSVGQGGEQFF

SEQ ID NO: 285409 - protein, 12 aa, Homo sapiens
  CDR3 for alpha chain variable domain of TCR clone 142705 (TRAV13-2, TRAJ23)
CAERHRGGKLIF

SEQ ID NO: 285410 - protein, 15 aa, Homo sapiens
  CDR3 for beta chain variable domain of TCR clone 142705 (TRBV6-1, TRBJ2-6)
CASSSRPSGANVLTF

SEQ ID NO: 285411 - protein, 14 aa, Homo sapiens
  CDR3 for alpha chain variable domain of TCR clone 142706 (TRAV14/DV4, TRAJ15)
CAMTRDQAGTALIF

SEQ ID NO: 285412 - protein, 11 aa, Homo sapiens
  CDR3 for beta chain variable domain of TCR clone 142706 (TRBV7-2, TRBJ2-7)
CASSSGLWQYF

SEQ ID NO: 285413 - protein, 16 aa, Homo sapiens
  CDR3 for alpha chain variable domain of TCR clone 142707 (TRAV30, TRAJ24)
CGTEFVDADSWGNFQF

SEQ ID NO: 285414 - protein, 14 aa, Homo sapiens
  CDR3 for beta chain variable domain of TCR clone 142707 (TRBV12-5, TRBJ2-5)
CASGSRTHQETQYF

SEQ ID NO: 285415 - protein, 10 aa, Homo sapiens
  CDR3 for alpha chain variable domain of TCR clone 142708 (TRAV1-2, TRAJ20)
CVPNDYKLSF

SEQ ID NO: 285416 - protein, 14 aa, Homo sapiens
  CDR3 for beta chain variable domain of TCR clone 142708 (TRBV12-5, TRBJ2-5)
CASGSRTHQETQYV

SEQ ID NO: 285417 - protein, 13 aa, Homo sapiens
  CDR3 for alpha chain variable domain of TCR clone 142709 (TRAV1-2, TRAJ9)
WAALNTGGFKTIF

SEQ ID NO: 285418 - protein, 14 aa, Homo sapiens
  CDR3 for beta chain variable domain of TCR clone 142709 (TRBV9, TRBJ2-3)
CASSVGLSTDTQYF

SEQ ID NO: 285419 - protein, 10 aa, Homo sapiens
  CDR3 for alpha chain variable domain of TCR clone 142710 (TRAV1-2, TRAJ23)
CAGQGGKLIF

SEQ ID NO: 285420 - protein, 13 aa, Homo sapiens
  CDR3 for beta chain variable domain of TCR clone 142710 (TRBV7-7, TRBJ2-3)
CASSVSRADTQYF

SEQ ID NO: 285421 - protein, 14 aa, Homo sapiens
  CDR3 for alpha chain variable domain of TCR clone 142711 (TRAV12-1, TRAJ20)
CVVNPLSNDYKLSF

SEQ ID NO: 285422 - protein, 15 aa, Homo sapiens
  CDR3 for beta chain variable domain of TCR clone 142711 (TRBV28, TRBJ2-7)
CASSPGGRGFYEQYF

SEQ ID NO: 285423 - protein, 18 aa, Homo sapiens
  CDR3 for alpha chain variable domain of TCR clone 142712 (TRAV8-3, TRAJ52)
CAVGPRDAGGTSYGKLTF

SEQ ID NO: 285424 - protein, 13 aa, Homo sapiens
  CDR3 for beta chain variable domain of TCR clone 142712 (TRBV10-3, TRBJ2-7)
CASKLAVNYEQYF

SEQ ID NO: 285425 - protein, 16 aa, Homo sapiens
  CDR3 for alpha chain variable domain of TCR clone 142713 (TRAV3, TRAJ10)
CAVRDMRAGGGNKITF

SEQ ID NO: 285426 - protein, 14 aa, Homo sapiens
  CDR3 for beta chain variable domain of TCR clone 142713 (TRBV28, TRBJ2-2)
CASTRRSGDGELFF

SEQ ID NO: 285427 - protein, 11 aa, Homo sapiens
  CDR3 for alpha chain variable domain of TCR clone 142714 (TRAV3, TRAJ21)
CAVGNFKKFYF

SEQ ID NO: 285428 - protein, 14 aa, Homo sapiens
  CDR3 for beta chain variable domain of TCR clone 142714 (TRBV7-2, TRBJ1-1)
CASSFLTGTTEAFF

SEQ ID NO: 285429 - protein, 15 aa, Homo sapiens
  CDR3 for alpha chain variable domain of TCR clone 142715 (TRAV16, TRAJ12)
CSKWPLRDSSYKLIF

SEQ ID NO: 285430 - protein, 13 aa, Homo sapiens
  CDR3 for beta chain variable domain of TCR clone 142715 (TRBV4-2, TRBJ1-1)
CASNQAGNTEAFF

SEQ ID NO: 285431 - protein, 16 aa, Homo sapiens
  CDR3 for alpha chain variable domain of TCR clone 142716 (TRAV20, TRAJ28)
CAVRGPSGAGSYQLTF

SEQ ID NO: 285432 - protein, 16 aa, Homo sapiens
  CDR3 for beta chain variable domain of TCR clone 142716 (TRBV12-4, TRBJ1-4)
CASSSNRETTNEKLFF

SEQ ID NO: 285433 - protein, 14 aa, Homo sapiens
  CDR3 for alpha chain variable domain of TCR clone 142717 (TRAV1-2, TRAJ8)
CAVREDTGFQKLVF

SEQ ID NO: 285434 - protein, 15 aa, Homo sapiens
  CDR3 for beta chain variable domain of TCR clone 142717 (TRBV7-9, TRBJ2-1)
CQQRCSGGAYNEQFF

SEQ ID NO: 285435 - protein, 15 aa, Homo sapiens
  CDR3 for alpha chain variable domain of TCR clone 142718 (TRAV29/DV5, TRAJ53)
CAASASGGSNYKLTF

SEQ ID NO: 285436 - protein, 19 aa, Homo sapiens
  CDR3 for beta chain variable domain of TCR clone 142718 (TRBV5-1, TRBJ2-3)
CASSLWLAGGISTTDTQYF

SEQ ID NO: 285437 - protein, 16 aa, Homo sapiens
  CDR3 for alpha chain variable domain of TCR clone 142719 (TRAV3, TRAJ37)
YAVRGKGSGNTGKLIF

SEQ ID NO: 285438 - protein, 16 aa, Homo sapiens
  CDR3 for beta chain variable domain of TCR clone 142719 (TRBV4-3, TRBJ1-6)
CASSAQPGGEGSPLHF

SEQ ID NO: 285439 - protein, 10 aa, Homo sapiens
  CDR3 for alpha chain variable domain of TCR clone 142720 (TRAV16, TRAJ22)
SAMYLRHLTF

SEQ ID NO: 285440 - protein, 15 aa, Homo sapiens
  CDR3 for beta chain variable domain of TCR clone 142720 (TRBV7-9, TRBJ1-6)
CASSAPGRGNSPLHF

SEQ ID NO: 285441 - protein, 14 aa, Homo sapiens
  CDR3 for alpha chain variable domain of TCR clone 142721 (TRAV35, TRAJ10)
CAGILTGGGNKLTF

SEQ ID NO: 285442 - protein, 13 aa, Homo sapiens
  CDR3 for beta chain variable domain of TCR clone 142721 (TRBV12-4, TRBJ2-7)
CASSLERVREQYF

SEQ ID NO: 285443 - protein, 13 aa, Homo sapiens
  CDR3 for alpha chain variable domain of TCR clone 142722 (TRAV8-1, TRAJ15)
CAVKNQAGTSLIF

SEQ ID NO: 285444 - protein, 15 aa, Homo sapiens
  CDR3 for beta chain variable domain of TCR clone 142722 (TRBV7-3, TRBJ2-7)
CASSLTPTGYDEQYF

SEQ ID NO: 285445 - protein, 16 aa, Homo sapiens
  CDR3 for alpha chain variable domain of TCR clone 142723 (TRAV30, TRAJ24)
CGTEIADADGWGKFQF

SEQ ID NO: 285446 - protein, 14 aa, Homo sapiens
  CDR3 for beta chain variable domain of TCR clone 142723 (TRBV12-5, TRBJ2-5)
CASGSRTHQETQYF

SEQ ID NO: 285447 - protein, 13 aa, Homo sapiens
  CDR3 for alpha chain variable domain of TCR clone 142724 (TRAV26-2, TRAJ43)
CILRAVNNNDMRF

SEQ ID NO: 285448 - protein, 14 aa, Homo sapiens
  CDR3 for beta chain variable domain of TCR clone 142724 (TRBV20-1, TRBJ1-1)
CSAQTRIGGIEAFF

SEQ ID NO: 285449 - protein, 15 aa, Homo sapiens
  CDR3 for alpha chain variable domain of TCR clone 142725 (TRAV13-1, TRAJ5)
FAASKADTGRRALTF

SEQ ID NO: 285450 - protein, 16 aa, Homo sapiens
  CDR3 for beta chain variable domain of TCR clone 142725 (TRBV7-2, TRBJ2-1)
CASSLGRTSGDNEQFF

SEQ ID NO: 285451 - protein, 14 aa, Homo sapiens
  CDR3 for alpha chain variable domain of TCR clone 142726 (TRAV12-1, TRAJ17)
CVVNPKAAGNKLTF

SEQ ID NO: 285452 - protein, 16 aa, Homo sapiens
  CDR3 for beta chain variable domain of TCR clone 142726 (TRBV20-1, TRBJ2-1)
CRASASGYSSYNEQFF

SEQ ID NO: 285453 - protein, 13 aa, Homo sapiens
  CDR3 for alpha chain variable domain of TCR clone 142727 (TRAV27, TRAJ45)
CRSSGGGADGLTF

SEQ ID NO: 285454 - protein, 14 aa, Homo sapiens
  CDR3 for beta chain variable domain of TCR clone 142727 (TRBV11-2, TRBJ2-7)
CASSPRDGAYEQYF

SEQ ID NO: 285455 - protein, 17 aa, Homo sapiens
  CDR3 for alpha chain variable domain of TCR clone 142728 (TRAV3, TRAJ6)
CAVRDGPRAGGSYIPTF

SEQ ID NO: 285456 - protein, 12 aa, Homo sapiens
  CDR3 for beta chain variable domain of TCR clone 142728 (TRBV20-1, TRBJ2-1)
CSARLGTDEQFS

SEQ ID NO: 285457 - protein, 14 aa, Homo sapiens
  CDR3 for alpha chain variable domain of TCR clone 142729 (TRAV3, TRAJ9)
CAVRLNTGGFKTIF

SEQ ID NO: 285458 - protein, 15 aa, Homo sapiens
  CDR3 for beta chain variable domain of TCR clone 142729 (TRBV7-8, TRBJ2-1)
CASSLASGSVNEQFF

SEQ ID NO: 285459 - protein, 13 aa, Homo sapiens
  CDR3 for alpha chain variable domain of TCR clone 142730 (TRAV2, TRAJ40)
CAVVTSGTYKYIF

SEQ ID NO: 285460 - protein, 15 aa, Homo sapiens
  CDR3 for beta chain variable domain of TCR clone 142730 (TRBV27, TRBJ2-1)
CASSNGGGSSNEQVF

SEQ ID NO: 285461 - protein, 14 aa, Homo sapiens
  CDR3 for alpha chain variable domain of TCR clone 142731 (TRAV8-3, TRAJ4)
CAVGASGGYNKLIF

SEQ ID NO: 285462 - protein, 14 aa, Homo sapiens
  CDR3 for beta chain variable domain of TCR clone 142731 (TRBV11-2, TRBJ1-5)
CASSLDRGRQPQHF

SEQ ID NO: 285463 - protein, 14 aa, Homo sapiens
  CDR3 for alpha chain variable domain of TCR clone 142732 (TRAV17, TRAJ15)
CATDRGQAGTALIF

SEQ ID NO: 285464 - protein, 18 aa, Homo sapiens
  CDR3 for beta chain variable domain of TCR clone 142732 (TRBV7-2, TRBJ2-3)
CASSLKREGSGITDTQYF

SEQ ID NO: 285465 - protein, 16 aa, Homo sapiens
  CDR3 for alpha chain variable domain of TCR clone 142733 (TRAV12-3, TRAJ53)
CAMSPGSGGSNNKLTV

SEQ ID NO: 285466 - protein, 11 aa, Homo sapiens
  CDR3 for beta chain variable domain of TCR clone 142733 (TRBV29-1, TRBJ2-5)
CSEDRTGTQYF

SEQ ID NO: 285467 - protein, 11 aa, Homo sapiens
  CDR3 for alpha chain variable domain of TCR clone 142734 (TRAV3, TRAJ21)
CAVGNFNKSYF

SEQ ID NO: 285468 - protein, 15 aa, Homo sapiens
  CDR3 for beta chain variable domain of TCR clone 142734 (TRBV7-2, TRBJ2-3)
CASSLEQGGTDTQYF

SEQ ID NO: 285469 - protein, 10 aa, Homo sapiens
  CDR3 for alpha chain variable domain of TCR clone 142735 (TRAV30, TRAJ48)
CGIGNEKLTF

SEQ ID NO: 285470 - protein, 15 aa, Homo sapiens
  CDR3 for beta chain variable domain of TCR clone 142735 (TRBV28, TRBJ2-5)
CASSPGQGSIETQYF

SEQ ID NO: 285471 - protein, 13 aa, Homo sapiens
  CDR3 for alpha chain variable domain of TCR clone 142736 (TRAV13-1, TRAJ21)
CAASIYNFNKFYL

SEQ ID NO: 285472 - protein, 13 aa, Homo sapiens
  CDR3 for beta chain variable domain of TCR clone 142736 (TRBV27, TRBJ1-4)
CASSLTGDEKLFF

SEQ ID NO: 285473 - protein, 17 aa, Homo sapiens
  CDR3 for alpha chain variable domain of TCR clone 142737 (TRAV3, TRAJ6)
CAVRDGPRAGGSYIPTF

SEQ ID NO: 285474 - protein, 16 aa, Homo sapiens
  CDR3 for beta chain variable domain of TCR clone 142737 (TRBV5-1, TRBJ2-2)
CARSLWDTTNTGELFF

SEQ ID NO: 285475 - protein, 17 aa, Homo sapiens
  CDR3 for alpha chain variable domain of TCR clone 142738 (TRAV3, TRAJ6)
CAVRDGPSAGGSYIPTF

SEQ ID NO: 285476 - protein, 12 aa, Homo sapiens
  CDR3 for beta chain variable domain of TCR clone 142738 (TRBV11-2, TRBJ2-1)
CASSPGNNEQFF

SEQ ID NO: 285477 - protein, 23 aa, Homo sapiens
  CDR3 for alpha chain variable domain of TCR clone 142739 (TRAV8-3, )
CAVGASNAGNNDIQNPDPAVYQL

SEQ ID NO: 285478 - protein, 15 aa, Homo sapiens
  CDR3 for beta chain variable domain of TCR clone 142739 (TRBV11-3, TRBJ1-3)
CASSLFGPSGNTIYF

SEQ ID NO: 285479 - protein, 15 aa, Homo sapiens
  CDR3 for alpha chain variable domain of TCR clone 142740 (TRAV38-1, TRAJ37)
CAFIFGSGNTGKLSL

SEQ ID NO: 285480 - protein, 12 aa, Homo sapiens
  CDR3 for beta chain variable domain of TCR clone 142740 (TRBV7-9, TRBJ2-7)
CASSLEGYEQYF

SEQ ID NO: 285481 - protein, 14 aa, Homo sapiens
  CDR3 for alpha chain variable domain of TCR clone 142741 (TRAV1-2, TRAJ16)
CAVNLFSDGQKLLF

SEQ ID NO: 285482 - protein, 16 aa, Homo sapiens
  CDR3 for beta chain variable domain of TCR clone 142741 (TRBV12-4, TRBJ2-5)
CASSFFVRGRQETQYF

SEQ ID NO: 285483 - protein, 23 aa, Homo sapiens
  CDR3 for alpha chain variable domain of TCR clone 142742 (TRAV26-1, TRAJ38)
CIADNAGNNHIQNPDPAVYQLRD

SEQ ID NO: 285484 - protein, 16 aa, Homo sapiens
  CDR3 for beta chain variable domain of TCR clone 142742 (TRBV7-8, TRBJ2-4)
CASSAERTLAKNIQYF

SEQ ID NO: 285485 - protein, 15 aa, Homo sapiens
  CDR3 for alpha chain variable domain of TCR clone 142743 (TRAV21, TRAJ4)
CCEAPFSGGYNKLIF

SEQ ID NO: 285486 - protein, 15 aa, Homo sapiens
  CDR3 for beta chain variable domain of TCR clone 142743 (TRBV11-2, TRBJ2-2)
CASRGLAANTGELFF

SEQ ID NO: 285487 - protein, 15 aa, Homo sapiens
  CDR3 for alpha chain variable domain of TCR clone 142744 (TRAV14/DV4, TRAJ22)
CAMREDWTTARQLTF

SEQ ID NO: 285488 - protein, 13 aa, Homo sapiens
  CDR3 for beta chain variable domain of TCR clone 142744 (TRBV5-4, TRBJ1-2)
CASSSRENYGYTF

SEQ ID NO: 285489 - protein, 14 aa, Homo sapiens
  CDR3 for alpha chain variable domain of TCR clone 142745 (TRAV8-1, TRAJ27)
RAVNVGTNAVKSTF

SEQ ID NO: 285490 - protein, 15 aa, Homo sapiens
  CDR3 for beta chain variable domain of TCR clone 142745 (TRBV11-3, TRBJ2-2)
CASSLGGRPTGELFF

SEQ ID NO: 285491 - protein, 13 aa, Homo sapiens
  CDR3 for alpha chain variable domain of TCR clone 142746 (TRAV27, TRAJ6)
CAGGTRGTYIPTF

SEQ ID NO: 285492 - protein, 15 aa, Homo sapiens
  CDR3 for beta chain variable domain of TCR clone 142746 (TRBV5-5, TRBJ2-7)
CASSLAAPLSYEQYF

SEQ ID NO: 285493 - protein, 13 aa, Homo sapiens
  CDR3 for alpha chain variable domain of TCR clone 142747 (TRAV29/DV5, TRAJ31)
CAASRNNNARLMF

SEQ ID NO: 285494 - protein, 15 aa, Homo sapiens
  CDR3 for beta chain variable domain of TCR clone 142747 (TRBV28, TRBJ2-5)
CASSSGRTIQETQYF

SEQ ID NO: 285495 - protein, 13 aa, Homo sapiens
  CDR3 for alpha chain variable domain of TCR clone 142748 (TRAV16, TRAJ54)
CALAKGGAQKLVF

SEQ ID NO: 285496 - protein, 12 aa, Homo sapiens
  CDR3 for beta chain variable domain of TCR clone 142748 (TRBV11-3, TRBJ1-1)
CASSRRQGEAFF

SEQ ID NO: 285497 - protein, 15 aa, Homo sapiens
  CDR3 for alpha chain variable domain of TCR clone 142749 (TRAV29/DV5, TRAJ24)
CAARGATDSWGKFQF

SEQ ID NO: 285498 - protein, 14 aa, Homo sapiens
  CDR3 for beta chain variable domain of TCR clone 142749 (TRBV7-8, TRBJ2-3)
CASSLEAGTDTQYF

SEQ ID NO: 285499 - protein, 12 aa, Homo sapiens
  CDR3 for alpha chain variable domain of TCR clone 142750 (TRAV12-3, TRAJ17)
CAMALTGNKLTF

SEQ ID NO: 285500 - protein, 14 aa, Homo sapiens
  CDR3 for beta chain variable domain of TCR clone 142750 (TRBV7-2, TRBJ2-7)
CASSPKTSFYEQYF

SEQ ID NO: 285501 - protein, 10 aa, Homo sapiens
  CDR3 for alpha chain variable domain of TCR clone 142751 (TRAV14/DV4, TRAJ48)
CAPRSEKLTF

SEQ ID NO: 285502 - protein, 17 aa, Homo sapiens
  CDR3 for beta chain variable domain of TCR clone 142751 (TRBV28, TRBJ2-5)
CASSTTEGDALQETQYF

SEQ ID NO: 285503 - protein, 14 aa, Homo sapiens
  CDR3 for alpha chain variable domain of TCR clone 142752 (TRAV2, TRAJ9)
CAVEDRSGGFKTII

SEQ ID NO: 285504 - protein, 13 aa, Homo sapiens
  CDR3 for beta chain variable domain of TCR clone 142752 (TRBV7-3, TRBJ2-5)
CASSFRGGETQYF

SEQ ID NO: 285505 - protein, 12 aa, Homo sapiens
  CDR3 for alpha chain variable domain of TCR clone 142753 (TRAV12-1, TRAJ40)
CVFYSGTYKYIF

SEQ ID NO: 285506 - protein, 18 aa, Homo sapiens
  CDR3 for beta chain variable domain of TCR clone 142753 (TRBV12-4, TRBJ2-2)
RASSLVAGTRGRTGELFF

SEQ ID NO: 285507 - protein, 15 aa, Homo sapiens
  CDR3 for alpha chain variable domain of TCR clone 142754 (TRAV17, TRAJ4)
CATGSWSGGYNKLIF

SEQ ID NO: 285508 - protein, 13 aa, Homo sapiens
  CDR3 for beta chain variable domain of TCR clone 142754 (TRBV6-6, TRBJ2-7)
CASSPKHLAEQYF

SEQ ID NO: 285509 - protein, 14 aa, Homo sapiens
  CDR3 for alpha chain variable domain of TCR clone 142755 (TRAV12-2, TRAJ40)
CAVKIPSGTYKYIF

SEQ ID NO: 285510 - protein, 16 aa, Homo sapiens
  CDR3 for beta chain variable domain of TCR clone 142755 (TRBV7-9, TRBJ2-6)
CASSLKGPLRANVLTF

SEQ ID NO: 285511 - protein, 12 aa, Homo sapiens
  CDR3 for alpha chain variable domain of TCR clone 142756 (TRAV13-2, TRAJ23)
CAERHRGGKRIF

SEQ ID NO: 285512 - protein, 16 aa, Homo sapiens
  CDR3 for beta chain variable domain of TCR clone 142756 (TRBV20-1, TRBJ1-4)
CSAPGQGLLTNENLFF

SEQ ID NO: 285513 - protein, 13 aa, Homo sapiens
  CDR3 for alpha chain variable domain of TCR clone 142757 (TRAV12-2, TRAJ18)
CAVRGSTLGRLYF

SEQ ID NO: 285514 - protein, 16 aa, Homo sapiens
  CDR3 for beta chain variable domain of TCR clone 142757 (TRBV2, TRBJ1-3)
CASSRTGGSTGNTIYF

SEQ ID NO: 285515 - protein, 19 aa, Homo sapiens
  CDR3 for alpha chain variable domain of TCR clone 142758 (TRAV2, TRAJ20)
ILQVREADAAVCRDCKLSF

SEQ ID NO: 285516 - protein, 15 aa, Homo sapiens
  CDR3 for beta chain variable domain of TCR clone 142758 (TRBV4-1, TRBJ1-4)
CASSDTGGTNEKLFF

SEQ ID NO: 285517 - protein, 16 aa, Homo sapiens
  CDR3 for alpha chain variable domain of TCR clone 142759 (TRAV1-2, TRAJ10)
CAVRGVLTGGGNKPTF

SEQ ID NO: 285518 - protein, 15 aa, Homo sapiens
  CDR3 for beta chain variable domain of TCR clone 142759 (TRBV9, TRBJ1-6)
CASSVAGTGDSPLHF

SEQ ID NO: 285519 - protein, 14 aa, Homo sapiens
  CDR3 for alpha chain variable domain of TCR clone 142760 (TRAV26-1, TRAJ38)
CIADNAGNNRKLIW

SEQ ID NO: 285520 - protein, 14 aa, Homo sapiens
  CDR3 for beta chain variable domain of TCR clone 142760 (TRBV7-2, TRBJ2-5)
CASSPRGSSETQYF

SEQ ID NO: 285521 - protein, 16 aa, Homo sapiens
  CDR3 for alpha chain variable domain of TCR clone 142761 (TRAV3, TRAJ10)
CAVRDMRAGGGNKLTV

SEQ ID NO: 285522 - protein, 14 aa, Homo sapiens
  CDR3 for beta chain variable domain of TCR clone 142761 (TRBV25-1, TRBJ1-1)
CASTHLGGNTEAFF

SEQ ID NO: 285523 - protein, 14 aa, Homo sapiens
  CDR3 for alpha chain variable domain of TCR clone 142762 (TRAV8-2, TRAJ26)
CVVSDWNYGQNFVF

SEQ ID NO: 285524 - protein, 12 aa, Homo sapiens
  CDR3 for beta chain variable domain of TCR clone 142762 (TRBV5-4, TRBJ2-5)
SASNRAGETQYF

SEQ ID NO: 285525 - protein, 14 aa, Homo sapiens
  CDR3 for alpha chain variable domain of TCR clone 142763 (TRAV2, TRAJ9)
CAVEDRSGGFKTIF

SEQ ID NO: 285526 - protein, 18 aa, Homo sapiens
  CDR3 for beta chain variable domain of TCR clone 142763 (TRBV11-2, TRBJ2-3)
CASGLGGASRGAPNTQYF

SEQ ID NO: 285527 - protein, 13 aa, Homo sapiens
  CDR3 for alpha chain variable domain of TCR clone 142764 (TRAV38-1, TRAJ7)
CAFMMDGNNRLAF

SEQ ID NO: 285528 - protein, 14 aa, Homo sapiens
  CDR3 for beta chain variable domain of TCR clone 142764 (TRBV4-2, TRBJ2-3)
CAIRETRAPGMQYF

SEQ ID NO: 285529 - protein, 14 aa, Homo sapiens
  CDR3 for alpha chain variable domain of TCR clone 142765 (TRAV8-4, TRAJ15)
CAVTIREAGPALIF

SEQ ID NO: 285530 - protein, 16 aa, Homo sapiens
  CDR3 for beta chain variable domain of TCR clone 142765 (TRBV29-1, TRBJ2-6)
CSVEDITYSGANVLTF

SEQ ID NO: 285531 - protein, 13 aa, Homo sapiens
  CDR3 for alpha chain variable domain of TCR clone 142766 (TRAV20, TRAJ21)
CAVEGYNFNKFYF

SEQ ID NO: 285532 - protein, 17 aa, Homo sapiens
  CDR3 for beta chain variable domain of TCR clone 142766 (TRBV15, TRBJ1-1)
CATSRVGGADGDTEAFF

SEQ ID NO: 285533 - protein, 13 aa, Homo sapiens
  CDR3 for alpha chain variable domain of TCR clone 142767 (TRAV21, TRAJ15)
CAVRNQAGTALIF

SEQ ID NO: 285534 - protein, 16 aa, Homo sapiens
  CDR3 for beta chain variable domain of TCR clone 142767 (TRBV20-1, TRBJ2-5)
CSPGGTSGGYMATQYF

SEQ ID NO: 285535 - protein, 14 aa, Homo sapiens
  CDR3 for alpha chain variable domain of TCR clone 142768 (TRAV17, TRAJ37)
CATDGSSNTGKLIF

SEQ ID NO: 285536 - protein, 14 aa, Homo sapiens
  CDR3 for beta chain variable domain of TCR clone 142768 (TRBV3-1, TRBJ2-5)
CASSQGPDQETQYF

SEQ ID NO: 285537 - protein, 16 aa, Homo sapiens
  CDR3 for alpha chain variable domain of TCR clone 142769 (TRAV14/DV4, TRAJ53)
CAMREGGGGSNYKLTF

SEQ ID NO: 285538 - protein, 15 aa, Homo sapiens
  CDR3 for beta chain variable domain of TCR clone 142769 (TRBV19, TRBJ1-1)
CASTSGQIQNTEAFF

SEQ ID NO: 285539 - protein, 13 aa, Homo sapiens
  CDR3 for alpha chain variable domain of TCR clone 142770 (TRAV27, TRAJ29)
CAGAHSGNTPLVF

SEQ ID NO: 285540 - protein, 12 aa, Homo sapiens
  CDR3 for beta chain variable domain of TCR clone 142770 (TRBV11-2, TRBJ2-2)
CASSLGGGELFF

SEQ ID NO: 285541 - protein, 14 aa, Homo sapiens
  CDR3 for alpha chain variable domain of TCR clone 142771 (TRAV26-1, TRAJ34)
CIVRVAYNTDKPLF

SEQ ID NO: 285542 - protein, 15 aa, Homo sapiens
  CDR3 for beta chain variable domain of TCR clone 142771 (TRBV20-1, TRBJ2-7)
CSARVPAAYFYEQYF

SEQ ID NO: 285543 - protein, 15 aa, Homo sapiens
  CDR3 for alpha chain variable domain of TCR clone 142772 (TRAV12-3, TRAJ44)
CAMSGLTGTASKPTF

SEQ ID NO: 285544 - protein, 15 aa, Homo sapiens
  CDR3 for beta chain variable domain of TCR clone 142772 (TRBV20-1, TRBJ2-7)
CSARTPGTITYEQYF

SEQ ID NO: 285545 - protein, 15 aa, Homo sapiens
  CDR3 for alpha chain variable domain of TCR clone 142773 (TRAV3, TRAJ13)
CAVRDIGGGYQKVTF

SEQ ID NO: 285546 - protein, 13 aa, Homo sapiens
  CDR3 for beta chain variable domain of TCR clone 142773 (TRBV7-9, TRBJ2-7)
CASSFAGAYEQYF

SEQ ID NO: 285547 - protein, 13 aa, Homo sapiens
  CDR3 for alpha chain variable domain of TCR clone 142774 (TRAV12-3, TRAJ13)
CAMSSGGYQKVTF

SEQ ID NO: 285548 - protein, 20 aa, Homo sapiens
  CDR3 for beta chain variable domain of TCR clone 142774 (TRBV11-2, TRBJ1-6)
CASSLVFATGGSVHPSTLGT

SEQ ID NO: 285549 - protein, 13 aa, Homo sapiens
  CDR3 for alpha chain variable domain of TCR clone 142775 (TRAV1-2, TRAJ9)
CVALNTGGFKTIF

SEQ ID NO: 285550 - protein, 15 aa, Homo sapiens
  CDR3 for beta chain variable domain of TCR clone 142775 (TRBV19, TRBJ1-1)
CASTSGQIQNTEAFF

SEQ ID NO: 285551 - protein, 13 aa, Homo sapiens
  CDR3 for alpha chain variable domain of TCR clone 142776 (TRAV2, TRAJ21)
CAVEGSNFNKFYF

SEQ ID NO: 285552 - protein, 14 aa, Homo sapiens
  CDR3 for beta chain variable domain of TCR clone 142776 (TRBV19, TRBJ2-1)
CASPTFVLSGEQFF

SEQ ID NO: 285553 - protein, 16 aa, Homo sapiens
  CDR3 for alpha chain variable domain of TCR clone 142777 (TRAV3, TRAJ10)
CAVRDMMAGGGNKLTF

SEQ ID NO: 285554 - protein, 13 aa, Homo sapiens
  CDR3 for beta chain variable domain of TCR clone 142777 (TRBV6-1, TRBJ1-1)
CASSRQGNTEAFF

SEQ ID NO: 285555 - protein, 12 aa, Homo sapiens
  CDR3 for alpha chain variable domain of TCR clone 142778 (TRAV25, TRAJ11)
SAGASGYSTLTF

SEQ ID NO: 285556 - protein, 14 aa, Homo sapiens
  CDR3 for beta chain variable domain of TCR clone 142778 (TRBV5-8, TRBJ2-3)
CASSLGQGTDTQYF

SEQ ID NO: 285557 - protein, 14 aa, Homo sapiens
  CDR3 for alpha chain variable domain of TCR clone 142779 (TRAV27, TRAJ12)
CAGARMDSSYKLIF

SEQ ID NO: 285558 - protein, 18 aa, Homo sapiens
  CDR3 for beta chain variable domain of TCR clone 142779 (TRBV10-3, TRBJ2-7)
CAISESGRPSGGRDEQYF

SEQ ID NO: 285559 - protein, 13 aa, Homo sapiens
  CDR3 for alpha chain variable domain of TCR clone 142780 (TRAV13-1, TRAJ39)
CAASIWAGNMLTF

SEQ ID NO: 285560 - protein, 15 aa, Homo sapiens
  CDR3 for beta chain variable domain of TCR clone 142780 (TRBV28, TRBJ2-1)
CASSIIAGGRSEQFF

SEQ ID NO: 285561 - protein, 14 aa, Homo sapiens
  CDR3 for alpha chain variable domain of TCR clone 142781 (TRAV13-1, TRAJ10)
CAAKDPGGGNKLTF

SEQ ID NO: 285562 - protein, 14 aa, Homo sapiens
  CDR3 for beta chain variable domain of TCR clone 142781 (TRBV6-6, TRBJ2-7)
CASSDSGAGYEQYF

SEQ ID NO: 285563 - protein, 13 aa, Homo sapiens
  CDR3 for alpha chain variable domain of TCR clone 142782 (TRAV26-2, TRAJ57)
CILSRGGSEKLVF

SEQ ID NO: 285564 - protein, 16 aa, Homo sapiens
  CDR3 for beta chain variable domain of TCR clone 142782 (TRBV18, TRBJ1-5)
CASSPRTGCGNQPQHF

SEQ ID NO: 285565 - protein, 13 aa, Homo sapiens
  CDR3 for alpha chain variable domain of TCR clone 142783 (TRAV17, TRAJ31)
CATDENNNARLMF

SEQ ID NO: 285566 - protein, 14 aa, Homo sapiens
  CDR3 for beta chain variable domain of TCR clone 142783 (TRBV11-2, TRBJ2-1)
CDSSPSRQGGGQFF

SEQ ID NO: 285567 - protein, 14 aa, Homo sapiens
  CDR3 for alpha chain variable domain of TCR clone 142784 (TRAV3, TRAJ20)
CAVRPSVTTTSSAF

SEQ ID NO: 285568 - protein, 15 aa, Homo sapiens
  CDR3 for beta chain variable domain of TCR clone 142784 (TRBV7-8, TRBJ1-1)
CASSLGDSRNTEAFF

SEQ ID NO: 285569 - protein, 17 aa, Homo sapiens
  CDR3 for alpha chain variable domain of TCR clone 142785 (TRAV3, TRAJ42)
CAVRDRDYGGSQGNLIF

SEQ ID NO: 285570 - protein, 13 aa, Homo sapiens
  CDR3 for beta chain variable domain of TCR clone 142785 (TRBV11-2, TRBJ2-1)
CASSLGLAGGRFF

SEQ ID NO: 285571 - protein, 12 aa, Homo sapiens
  CDR3 for alpha chain variable domain of TCR clone 142786 (TRAV21, TRAJ31)
CALSPARGRLMF

SEQ ID NO: 285572 - protein, 14 aa, Homo sapiens
  CDR3 for beta chain variable domain of TCR clone 142786 (TRBV28, TRBJ2-7)
CASSLLRISYEQYF

SEQ ID NO: 285573 - protein, 18 aa, Homo sapiens
  CDR3 for alpha chain variable domain of TCR clone 142787 (TRAV3, TRAJ17)
CAVRARRGGRSCRQQANF

SEQ ID NO: 285574 - protein, 14 aa, Homo sapiens
  CDR3 for beta chain variable domain of TCR clone 142787 (TRBV4-1, TRBJ2-2)
CASSQAVNTGELLF

SEQ ID NO: 285575 - protein, 14 aa, Homo sapiens
  CDR3 for alpha chain variable domain of TCR clone 142788 (TRAV24, TRAJ37)
CASDGSSNTGKLIF

SEQ ID NO: 285576 - protein, 15 aa, Homo sapiens
  CDR3 for beta chain variable domain of TCR clone 142788 (TRBV7-3, TRBJ2-2)
CASRANGANTGELVF

SEQ ID NO: 285577 - protein, 12 aa, Homo sapiens
  CDR3 for alpha chain variable domain of TCR clone 142789 (TRAV8-4, TRAJ9)
CAVNTVGFKTIF

SEQ ID NO: 285578 - protein, 15 aa, Homo sapiens
  CDR3 for beta chain variable domain of TCR clone 142789 (TRBV5-4, TRBJ2-1)
CASSSGLAELNEQFF

SEQ ID NO: 285579 - protein, 14 aa, Homo sapiens
  CDR3 for alpha chain variable domain of TCR clone 142790 (TRAV12-2, TRAJ40)
CAVKIPSGTYKYIF

SEQ ID NO: 285580 - protein, 14 aa, Homo sapiens
  CDR3 for beta chain variable domain of TCR clone 142790 (TRBV25-1, TRBJ1-1)
CASTRLGGKTEAFF

SEQ ID NO: 285581 - protein, 11 aa, Homo sapiens
  CDR3 for alpha chain variable domain of TCR clone 142791 (TRAV16, TRAJ31)
CALFNNARLMF

SEQ ID NO: 285582 - protein, 15 aa, Homo sapiens
  CDR3 for beta chain variable domain of TCR clone 142791 (TRBV7-9, TRBJ2-2)
CASGPLDTFPGELFF

SEQ ID NO: 285583 - protein, 15 aa, Homo sapiens
  CDR3 for alpha chain variable domain of TCR clone 142792 (TRAV27, TRAJ38)
CAARRNAGNNRKLIW

SEQ ID NO: 285584 - protein, 15 aa, Homo sapiens
  CDR3 for beta chain variable domain of TCR clone 142792 (TRBV12-4, TRBJ1-1)
CQQQDRVVANTEAFF

SEQ ID NO: 285585 - protein, 15 aa, Homo sapiens
  CDR3 for alpha chain variable domain of TCR clone 142793 (TRAV3, TRAJ22)
GAVRDRGGSARQLSF

SEQ ID NO: 285586 - protein, 16 aa, Homo sapiens
  CDR3 for beta chain variable domain of TCR clone 142793 (TRBV5-4, TRBJ2-3)
CASQQPGAGGADTQYF

SEQ ID NO: 285587 - protein, 13 aa, Homo sapiens
  CDR3 for alpha chain variable domain of TCR clone 142794 (TRAV23/DV6, TRAJ41)
CAAIGDSGYALNY

SEQ ID NO: 285588 - protein, 13 aa, Homo sapiens
  CDR3 for beta chain variable domain of TCR clone 142794 (TRBV28, TRBJ2-5)
CASSWGTQETQYF

SEQ ID NO: 285589 - protein, 15 aa, Homo sapiens
  CDR3 for alpha chain variable domain of TCR clone 142795 (TRAV14/DV4, TRAJ12)
CAMREDRDSSYKLIF

SEQ ID NO: 285590 - protein, 16 aa, Homo sapiens
  CDR3 for beta chain variable domain of TCR clone 142795 (TRBV11-2, TRBJ1-2)
CASSLDRGGNNYGYTF

SEQ ID NO: 285591 - protein, 15 aa, Homo sapiens
  CDR3 for alpha chain variable domain of TCR clone 142796 (TRAV8-3, TRAJ45)
CASSYSGGGADGLTF

SEQ ID NO: 285592 - protein, 15 aa, Homo sapiens
  CDR3 for beta chain variable domain of TCR clone 142796 (TRBV6-6, TRBJ2-7)
CASSYSYGGSYEQYF

SEQ ID NO: 285593 - protein, 16 aa, Homo sapiens
  CDR3 for alpha chain variable domain of TCR clone 142797 (TRAV1-1, TRAJ29)
CAVRSTRNSGNTPFVF

SEQ ID NO: 285594 - protein, 16 aa, Homo sapiens
  CDR3 for beta chain variable domain of TCR clone 142797 (TRBV27, TRBJ1-1)
CASSSRGRTGYTEAFF

SEQ ID NO: 285595 - protein, 14 aa, Homo sapiens
  CDR3 for alpha chain variable domain of TCR clone 142798 (TRAV16, TRAJ33)
CALSAMDSNYQLIW

SEQ ID NO: 285596 - protein, 15 aa, Homo sapiens
  CDR3 for beta chain variable domain of TCR clone 142798 (TRBV28, TRBJ2-7)
RASSLEAYPIYEQYF

SEQ ID NO: 285597 - protein, 15 aa, Homo sapiens
  CDR3 for alpha chain variable domain of TCR clone 142799 (TRAV12-3, TRAJ6)
CAMSATTGGSYIPTF

SEQ ID NO: 285598 - protein, 16 aa, Homo sapiens
  CDR3 for beta chain variable domain of TCR clone 142799 (TRBV12-5, TRBJ2-5)
CASGPRTSGNQGTQYF

SEQ ID NO: 285599 - protein, 14 aa, Homo sapiens
  CDR3 for alpha chain variable domain of TCR clone 142800 (TRAV2, TRAJ23)
CAVRDCNQGGKLIF

SEQ ID NO: 285600 - protein, 17 aa, Homo sapiens
  CDR3 for beta chain variable domain of TCR clone 142800 (TRBV13, TRBJ2-3)
CASSLSRVAGGRNTQYF

SEQ ID NO: 285601 - protein, 15 aa, Homo sapiens
  CDR3 for alpha chain variable domain of TCR clone 142801 (TRAV12-1, TRAJ44)
CVVDTPQGTASKLTV

SEQ ID NO: 285602 - protein, 14 aa, Homo sapiens
  CDR3 for beta chain variable domain of TCR clone 142801 (TRBV7-9, TRBJ2-1)
CASSPRDSLYEQFF

SEQ ID NO: 285603 - protein, 14 aa, Homo sapiens
  CDR3 for alpha chain variable domain of TCR clone 142802 (TRAV8-3, TRAJ44)
CAVEDTGTASNLTF

SEQ ID NO: 285604 - protein, 15 aa, Homo sapiens
  CDR3 for beta chain variable domain of TCR clone 142802 (TRBV7-2, TRBJ1-1)
CASSSPGGEETEAFF

SEQ ID NO: 285605 - protein, 15 aa, Homo sapiens
  CDR3 for alpha chain variable domain of TCR clone 142803 (TRAV8-2, TRAJ16)
CVVSDGFLDGQKRLF

SEQ ID NO: 285606 - protein, 12 aa, Homo sapiens
  CDR3 for beta chain variable domain of TCR clone 142803 (TRBV12-4, TRBJ2-7)
CASSLGGYEQYF

SEQ ID NO: 285607 - protein, 13 aa, Homo sapiens
  CDR3 for alpha chain variable domain of TCR clone 142804 (TRAV22, TRAJ12)
CSGRMDSSYKLIF

SEQ ID NO: 285608 - protein, 15 aa, Homo sapiens
  CDR3 for beta chain variable domain of TCR clone 142804 (TRBV10-1, TRBJ2-1)
CASSEWRGTYNEQFF

SEQ ID NO: 285609 - protein, 15 aa, Homo sapiens
  CDR3 for alpha chain variable domain of TCR clone 142805 (TRAV27, TRAJ38)
CAGRFNAGNNRKLIS

SEQ ID NO: 285610 - protein, 13 aa, Homo sapiens
  CDR3 for beta chain variable domain of TCR clone 142805 (TRBV12-5, TRBJ2-3)
CASQNRGTDTQYF

SEQ ID NO: 285611 - protein, 15 aa, Homo sapiens
  CDR3 for alpha chain variable domain of TCR clone 142806 (TRAV12-1, TRAJ26)
CVVNSWVTMVRTLSL

SEQ ID NO: 285612 - protein, 15 aa, Homo sapiens
  CDR3 for beta chain variable domain of TCR clone 142806 (TRBV6-3, TRBJ2-3)
RLIHYSVGQADTQYF

SEQ ID NO: 285613 - protein, 14 aa, Homo sapiens
  CDR3 for alpha chain variable domain of TCR clone 142807 (TRAV16, TRAJ15)
CSLSGPQAGTALIF

SEQ ID NO: 285614 - protein, 17 aa, Homo sapiens
  CDR3 for beta chain variable domain of TCR clone 142807 (TRBV7-8, TRBJ2-6)
CASSAGTGGAGANVLTF

SEQ ID NO: 285615 - protein, 14 aa, Homo sapiens
  CDR3 for alpha chain variable domain of TCR clone 142808 (TRAV12-2, TRAJ13)
CAVKKTGGYQKVTF

SEQ ID NO: 285616 - protein, 17 aa, Homo sapiens
  CDR3 for beta chain variable domain of TCR clone 142808 (TRBV15, TRBJ2-4)
CATSRDNPQTGLDIHYF

SEQ ID NO: 285617 - protein, 15 aa, Homo sapiens
  CDR3 for alpha chain variable domain of TCR clone 142809 (TRAV1-1, TRAJ20)
CAVRDNVANDYKLSF

SEQ ID NO: 285618 - protein, 20 aa, Homo sapiens
  CDR3 for beta chain variable domain of TCR clone 142809 (TRBV7-8, TRBJ2-2)
CASSHLFPGPTIHITGELFF

SEQ ID NO: 285619 - protein, 14 aa, Homo sapiens
  CDR3 for alpha chain variable domain of TCR clone 142810 (TRAV1-2, TRAJ16)
CAVNRFSDGQKLLF

SEQ ID NO: 285620 - protein, 15 aa, Homo sapiens
  CDR3 for beta chain variable domain of TCR clone 142810 (TRBV5-1, TRBJ2-1)
CASSPPRAPYNEQSF

SEQ ID NO: 285621 - protein, 13 aa, Homo sapiens
  CDR3 for alpha chain variable domain of TCR clone 142811 (TRAV12-1, TRAJ17)
CVVSKAAGNKLTF

SEQ ID NO: 285622 - protein, 15 aa, Homo sapiens
  CDR3 for beta chain variable domain of TCR clone 142811 (TRBV2, TRBJ2-7)
EDSAMYFCASSEQYF

SEQ ID NO: 285623 - protein, 23 aa, Homo sapiens
  CDR3 for alpha chain variable domain of TCR clone 142812 (TRAV4, TRAJ26)
IPADRKSSTLSLARVYYGQNFVF

SEQ ID NO: 285624 - protein, 16 aa, Homo sapiens
  CDR3 for beta chain variable domain of TCR clone 142812 (TRBV7-2, TRBJ1-2)
CASSSNQDRRGHGYTF

SEQ ID NO: 285625 - protein, 14 aa, Homo sapiens
  CDR3 for alpha chain variable domain of TCR clone 142813 (TRAV27, TRAJ22)
CAGLPSGSARQLTF

SEQ ID NO: 285626 - protein, 13 aa, Homo sapiens
  CDR3 for beta chain variable domain of TCR clone 142813 (TRBV7-3, TRBJ1-1)
CASSQDWGAEAFF

SEQ ID NO: 285627 - protein, 15 aa, Homo sapiens
  CDR3 for alpha chain variable domain of TCR clone 142814 (TRAV9-2, TRAJ49)
CALSPPDHTGNQFYF

SEQ ID NO: 285628 - protein, 14 aa, Homo sapiens
  CDR3 for beta chain variable domain of TCR clone 142814 (TRBV12-4, TRBJ1-1)
CASSLGTGGTEASF

SEQ ID NO: 285629 - protein, 13 aa, Homo sapiens
  CDR3 for alpha chain variable domain of TCR clone 142815 (TRAV30, TRAJ6)
CGFIEGGSYIPTF

SEQ ID NO: 285630 - protein, 16 aa, Homo sapiens
  CDR3 for beta chain variable domain of TCR clone 142815 (TRBV2, TRBJ2-3)
CASSTSVEGVTDTQYF

SEQ ID NO: 285631 - protein, 14 aa, Homo sapiens
  CDR3 for alpha chain variable domain of TCR clone 142816 (TRAV12-2, TRAJ13)
CAVKKTGGYQKVTF

SEQ ID NO: 285632 - protein, 12 aa, Homo sapiens
  CDR3 for beta chain variable domain of TCR clone 142816 (TRBV11-2, TRBJ2-4)
CASSSASGSEYF

SEQ ID NO: 285633 - protein, 17 aa, Homo sapiens
  CDR3 for alpha chain variable domain of TCR clone 142817 (TRAV12-2, TRAJ6)
CAPQGPPRAGGSYISTF

SEQ ID NO: 285634 - protein, 16 aa, Homo sapiens
  CDR3 for beta chain variable domain of TCR clone 142817 (TRBV19, TRBJ2-2)
CASSTARASNTGELFF

SEQ ID NO: 285635 - protein, 14 aa, Homo sapiens
  CDR3 for alpha chain variable domain of TCR clone 142818 (TRAV29/DV5, TRAJ52)
CAATDGTSYGKLTF

SEQ ID NO: 285636 - protein, 13 aa, Homo sapiens
  CDR3 for beta chain variable domain of TCR clone 142818 (TRBV19, TRBJ1-2)
CASSVPGQDGYTF

SEQ ID NO: 285637 - protein, 18 aa, Homo sapiens
  CDR3 for alpha chain variable domain of TCR clone 142819 (TRAV13-2, TRAJ52)
CAETPLNAGGTSYGNLTF

SEQ ID NO: 285638 - protein, 15 aa, Homo sapiens
  CDR3 for beta chain variable domain of TCR clone 142819 (TRBV7-2, TRBJ2-7)
CASSLKGALTYEQCF

SEQ ID NO: 285639 - protein, 12 aa, Homo sapiens
  CDR3 for alpha chain variable domain of TCR clone 142820 (TRAV27, TRAJ35)
CAGAAFGNVLHC

SEQ ID NO: 285640 - protein, 16 aa, Homo sapiens
  CDR3 for beta chain variable domain of TCR clone 142820 (TRBV6-1, TRBJ2-1)
CVSILRQGSSYNEQFF

SEQ ID NO: 285641 - protein, 14 aa, Homo sapiens
  CDR3 for alpha chain variable domain of TCR clone 142821 (TRAV1-2, TRAJ8)
CAVREDTGFQKLVF

SEQ ID NO: 285642 - protein, 18 aa, Homo sapiens
  CDR3 for beta chain variable domain of TCR clone 142821 (TRBV12-4, TRBJ1-2)
CASSPNPGQAGPYYGYTF

SEQ ID NO: 285643 - protein, 13 aa, Homo sapiens
  CDR3 for alpha chain variable domain of TCR clone 142822 (TRAV17, TRAJ21)
CATDGGNFNKFYF

SEQ ID NO: 285644 - protein, 15 aa, Homo sapiens
  CDR3 for beta chain variable domain of TCR clone 142822 (TRBV28, TRBJ2-1)
CASSIIAGGRSEQFF

SEQ ID NO: 285645 - protein, 17 aa, Homo sapiens
  CDR3 for alpha chain variable domain of TCR clone 142823 (TRAV12-2, TRAJ52)
CAVNPYAGGTSYGNLTF

SEQ ID NO: 285646 - protein, 16 aa, Homo sapiens
  CDR3 for beta chain variable domain of TCR clone 142823 (TRBV5-5, TRBJ2-2)
CASSGRREGATGELFF

SEQ ID NO: 285647 - protein, 18 aa, Homo sapiens
  CDR3 for alpha chain variable domain of TCR clone 142824 (TRAV8-3, TRAJ13)
CAVGAYPSGGYRKLPLEL

SEQ ID NO: 285648 - protein, 15 aa, Homo sapiens
  CDR3 for beta chain variable domain of TCR clone 142824 (TRBV19, TRBJ1-5)
CASSIVWADNQPQHF

SEQ ID NO: 285649 - protein, 14 aa, Homo sapiens
  CDR3 for alpha chain variable domain of TCR clone 142825 (TRAV1-2, TRAJ8)
CAVREDTGFQKLVF

SEQ ID NO: 285650 - protein, 15 aa, Homo sapiens
  CDR3 for beta chain variable domain of TCR clone 142825 (TRBV20-1, TRBJ2-7)
FSARDRVSGMDEQYF

SEQ ID NO: 285651 - protein, 14 aa, Homo sapiens
  CDR3 for alpha chain variable domain of TCR clone 142826 (TRAV1-2, TRAJ16)
SAVNRFSDGQKLLF

SEQ ID NO: 285652 - protein, 14 aa, Homo sapiens
  CDR3 for beta chain variable domain of TCR clone 142826 (TRBV12-5, TRBJ2-5)
CASGSRTHQETQYF

SEQ ID NO: 285653 - protein, 12 aa, Homo sapiens
  CDR3 for alpha chain variable domain of TCR clone 142827 (TRAV12-1, TRAJ40)
CVVYSGTYKYIF

SEQ ID NO: 285654 - protein, 15 aa, Homo sapiens
  CDR3 for beta chain variable domain of TCR clone 142827 (TRBV6-1, TRBJ2-7)
CASSDWDKPNYEQYF

SEQ ID NO: 285655 - protein, 10 aa, Homo sapiens
  CDR3 for alpha chain variable domain of TCR clone 142828 (TRAV36/DV7, TRAJ56)
CAGPAVELTF

SEQ ID NO: 285656 - protein, 13 aa, Homo sapiens
  CDR3 for beta chain variable domain of TCR clone 142828 (TRBV7-9, TRBJ2-7)
CARSFWSSYEQYF

SEQ ID NO: 285657 - protein, 15 aa, Homo sapiens
  CDR3 for alpha chain variable domain of TCR clone 142829 (TRAV13-1, TRAJ32)
CAASIYGGATNKPIF

SEQ ID NO: 285658 - protein, 14 aa, Homo sapiens
  CDR3 for beta chain variable domain of TCR clone 142829 (TRBV7-9, TRBJ2-1)
CASSLASGINEQFF

SEQ ID NO: 285659 - protein, 13 aa, Homo sapiens
  CDR3 for alpha chain variable domain of TCR clone 142830 (TRAV12-3, TRAJ40)
CAMSDSGTYKYIF

SEQ ID NO: 285660 - protein, 15 aa, Homo sapiens
  CDR3 for beta chain variable domain of TCR clone 142830 (TRBV11-3, TRBJ2-7)
CASSPGPASSYEQYF

SEQ ID NO: 285661 - protein, 14 aa, Homo sapiens
  CDR3 for alpha chain variable domain of TCR clone 142831 (TRAV8-4, TRAJ48)
CAVSETFGNEKLTF

SEQ ID NO: 285662 - protein, 14 aa, Homo sapiens
  CDR3 for beta chain variable domain of TCR clone 142831 (TRBV13, TRBJ2-7)
CASSLKGASYEQHF

SEQ ID NO: 285663 - protein, 15 aa, Homo sapiens
  CDR3 for alpha chain variable domain of TCR clone 142832 (TRAV2, TRAJ40)
CAVVTSGTYKYILEQ

SEQ ID NO: 285664 - protein, 14 aa, Homo sapiens
  CDR3 for beta chain variable domain of TCR clone 142832 (TRBV19, TRBJ2-1)
CAIPTFVLSGEQFF

SEQ ID NO: 285665 - protein, 18 aa, Homo sapiens
  CDR3 for alpha chain variable domain of TCR clone 142833 (TRAV26-2, TRAJ45)
CILRVDKYSGGGADGLRF

SEQ ID NO: 285666 - protein, 14 aa, Homo sapiens
  CDR3 for beta chain variable domain of TCR clone 142833 (TRBV7-2, TRBJ2-7)
CASRSQGAAYEQYF

SEQ ID NO: 285667 - protein, 19 aa, Homo sapiens
  CDR3 for alpha chain variable domain of TCR clone 142834 (TRAV26-1, TRAJ52)
CIVRAHRNAGGTSYGKLTF

SEQ ID NO: 285668 - protein, 13 aa, Homo sapiens
  CDR3 for beta chain variable domain of TCR clone 142834 (TRBV19, TRBJ2-7)
CASSPRQSYEQYF

SEQ ID NO: 285669 - protein, 17 aa, Homo sapiens
  CDR3 for alpha chain variable domain of TCR clone 142835 (TRAV38-2/DV8, TRAJ56)
CAYSSEVGTGANSKLPF

SEQ ID NO: 285670 - protein, 14 aa, Homo sapiens
  CDR3 for beta chain variable domain of TCR clone 142835 (TRBV11-1, TRBJ1-1)
CASSLEHPNTEAFF

SEQ ID NO: 285671 - protein, 12 aa, Homo sapiens
  CDR3 for alpha chain variable domain of TCR clone 142836 (TRAV12-1, TRAJ40)
CVGYSGTYKYIF

SEQ ID NO: 285672 - protein, 17 aa, Homo sapiens
  CDR3 for beta chain variable domain of TCR clone 142836 (TRBV11-3, TRBJ1-5)
CASSPLTGLRGNQPQHF

SEQ ID NO: 285673 - protein, 21 aa, Homo sapiens
  CDR3 for alpha chain variable domain of TCR clone 142837 (TRAV9-2, )
CALIQIGDIQNPDPAVYQLRD

SEQ ID NO: 285674 - protein, 17 aa, Homo sapiens
  CDR3 for beta chain variable domain of TCR clone 142837 (TRBV7-8, TRBJ2-6)
CASSAGTGGAGANGLTF

SEQ ID NO: 285675 - protein, 14 aa, Homo sapiens
  CDR3 for alpha chain variable domain of TCR clone 142838 (TRAV29/DV5, TRAJ40)
CAAAVASGTYKYIF

SEQ ID NO: 285676 - protein, 15 aa, Homo sapiens
  CDR3 for beta chain variable domain of TCR clone 142838 (TRBV7-2, TRBJ2-3)
CASSLAGAFIDTQYF

SEQ ID NO: 285677 - protein, 15 aa, Homo sapiens
  CDR3 for alpha chain variable domain of TCR clone 142839 (TRAV8-3, TRAJ40)
CAAPSLGSGTYKYIF

SEQ ID NO: 285678 - protein, 14 aa, Homo sapiens
  CDR3 for beta chain variable domain of TCR clone 142839 (TRBV12-4, TRBJ1-1)
CASSPIRRTGEAFF

SEQ ID NO: 285679 - protein, 15 aa, Homo sapiens
  CDR3 for alpha chain variable domain of TCR clone 142840 (TRAV6, TRAJ37)
CALGGGSGNTGKQIF

SEQ ID NO: 285680 - protein, 14 aa, Homo sapiens
  CDR3 for beta chain variable domain of TCR clone 142840 (TRBV5-7, TRBJ2-5)
CASSVWTVQETQYF

SEQ ID NO: 285681 - protein, 22 aa, Homo sapiens
  CDR3 for alpha chain variable domain of TCR clone 142841 (TRAV8-2, TRAJ45)
HLTKPSAHMSDAAEYSADGLSF

SEQ ID NO: 285682 - protein, 13 aa, Homo sapiens
  CDR3 for beta chain variable domain of TCR clone 142841 (TRBV7-3, TRBJ2-1)
CASSPVAYNEQFF

SEQ ID NO: 285683 - protein, 14 aa, Homo sapiens
  CDR3 for alpha chain variable domain of TCR clone 142842 (TRAV13-1, TRAJ35)
CAASKGGFGNVLHC

SEQ ID NO: 285684 - protein, 14 aa, Homo sapiens
  CDR3 for beta chain variable domain of TCR clone 142842 (TRBV5-4, TRBJ2-2)
CASSLFGVPGELFF

SEQ ID NO: 285685 - protein, 13 aa, Homo sapiens
  CDR3 for alpha chain variable domain of TCR clone 142843 (TRAV12-2, TRAJ20)
CAVNRFDDYKLSF

SEQ ID NO: 285686 - protein, 13 aa, Homo sapiens
  CDR3 for beta chain variable domain of TCR clone 142843 (TRBV4-2, TRBJ1-1)
CTSSQAGNTEAFF

SEQ ID NO: 285687 - protein, 14 aa, Homo sapiens
  CDR3 for alpha chain variable domain of TCR clone 142844 (TRAV1-2, TRAJ16)
CAVNRFSYGQKLLF

SEQ ID NO: 285688 - protein, 14 aa, Homo sapiens
  CDR3 for beta chain variable domain of TCR clone 142844 (TRBV5-5, TRBJ1-2)
CASSLDPYNYGYTF

SEQ ID NO: 285689 - protein, 13 aa, Homo sapiens
  CDR3 for alpha chain variable domain of TCR clone 142845 (TRAV20, TRAJ54)
CAVQARGAQKLVF

SEQ ID NO: 285690 - protein, 14 aa, Homo sapiens
  CDR3 for beta chain variable domain of TCR clone 142845 (TRBV20-1, TRBJ2-7)
CSAKTGTGGYEQYF

SEQ ID NO: 285691 - protein, 14 aa, Homo sapiens
  CDR3 for alpha chain variable domain of TCR clone 142846 (TRAV8-2, TRAJ23)
CVVSDDNQGGKLIF

SEQ ID NO: 285692 - protein, 13 aa, Homo sapiens
  CDR3 for beta chain variable domain of TCR clone 142846 (TRBV7-7, TRBJ2-2)
CASSLTSAGELSF

SEQ ID NO: 285693 - protein, 14 aa, Homo sapiens
  CDR3 for alpha chain variable domain of TCR clone 142847 (TRAV26-1, TRAJ39)
CIVRANNAGNMLTF

SEQ ID NO: 285694 - protein, 15 aa, Homo sapiens
  CDR3 for beta chain variable domain of TCR clone 142847 (TRBV28, TRBJ1-2)
CASSLMGGRRDGYAF

SEQ ID NO: 285695 - protein, 18 aa, Homo sapiens
  CDR3 for alpha chain variable domain of TCR clone 142848 (TRAV12-1, TRAJ52)
CVVKLINAGGTSYGKLTF

SEQ ID NO: 285696 - protein, 16 aa, Homo sapiens
  CDR3 for beta chain variable domain of TCR clone 142848 (TRBV10-3, TRBJ2-1)
CAIRGGGRGDYNEQFF

SEQ ID NO: 285697 - protein, 14 aa, Homo sapiens
  CDR3 for alpha chain variable domain of TCR clone 142849 (TRAV2, TRAJ9)
CAVEDLSGGFKTIF

SEQ ID NO: 285698 - protein, 13 aa, Homo sapiens
  CDR3 for beta chain variable domain of TCR clone 142849 (TRBV7-3, TRBJ1-1)
CASSEDWGAEAFF

SEQ ID NO: 285699 - protein, 16 aa, Homo sapiens
  CDR3 for alpha chain variable domain of TCR clone 142850 (TRAV13-1, TRAJ45)
CAARGSSKGGADGLTF

SEQ ID NO: 285700 - protein, 13 aa, Homo sapiens
  CDR3 for beta chain variable domain of TCR clone 142850 (TRBV12-4, TRBJ2-5)
CASRKRGKETQYF

SEQ ID NO: 285701 - protein, 14 aa, Homo sapiens
  CDR3 for alpha chain variable domain of TCR clone 142851 (TRAV12-2, TRAJ17)
CAVRFKAAGNKLTF

SEQ ID NO: 285702 - protein, 17 aa, Homo sapiens
  CDR3 for beta chain variable domain of TCR clone 142851 (TRBV20-1, TRBJ2-2)
CSASGSGHGGLTGELFF

SEQ ID NO: 285703 - protein, 14 aa, Homo sapiens
  CDR3 for alpha chain variable domain of TCR clone 142852 (TRAV29/DV5, TRAJ44)
CAAFLVGTASKLTF

SEQ ID NO: 285704 - protein, 12 aa, Homo sapiens
  CDR3 for beta chain variable domain of TCR clone 142852 (TRBV11-2, TRBJ2-2)
CASSLGGGELFF

SEQ ID NO: 285705 - protein, 15 aa, Homo sapiens
  CDR3 for alpha chain variable domain of TCR clone 142853 (TRAV27, TRAJ38)
CAARRNAGNNRKLLC

SEQ ID NO: 285706 - protein, 13 aa, Homo sapiens
  CDR3 for beta chain variable domain of TCR clone 142853 (TRBV12-5, TRBJ2-3)
CASGDRQSDTQYF

SEQ ID NO: 285707 - protein, 11 aa, Homo sapiens
  CDR3 for alpha chain variable domain of TCR clone 142854 (TRAV26-1, TRAJ37)
CIVRVGRKLIF

SEQ ID NO: 285708 - protein, 16 aa, Homo sapiens
  CDR3 for beta chain variable domain of TCR clone 142854 (TRBV7-2, TRBJ2-7)
CASSLEAGGPWYEQYF

SEQ ID NO: 285709 - protein, 13 aa, Homo sapiens
  CDR3 for alpha chain variable domain of TCR clone 142855 (TRAV12-2, TRAJ52)
RAVRGTSYGKLTF

SEQ ID NO: 285710 - protein, 17 aa, Homo sapiens
  CDR3 for beta chain variable domain of TCR clone 142855 (TRBV11-2, TRBJ2-1)
CASSLYPPGVEYNEQFF

SEQ ID NO: 285711 - protein, 14 aa, Homo sapiens
  CDR3 for alpha chain variable domain of TCR clone 142856 (TRAV38-1, TRAJ11)
CAFMKHEGYSTLTF

SEQ ID NO: 285712 - protein, 13 aa, Homo sapiens
  CDR3 for beta chain variable domain of TCR clone 142856 (TRBV7-9, TRBJ2-7)
CASSFAGAYEQYF

SEQ ID NO: 285713 - protein, 14 aa, Homo sapiens
  CDR3 for alpha chain variable domain of TCR clone 142857 (TRAV12-3, TRAJ10)
SHLPLTGGGNKLTF

SEQ ID NO: 285714 - protein, 16 aa, Homo sapiens
  CDR3 for beta chain variable domain of TCR clone 142857 (TRBV19, TRBJ1-1)
CASRFGGPVTGTDAFF

SEQ ID NO: 285715 - protein, 15 aa, Homo sapiens
  CDR3 for alpha chain variable domain of TCR clone 142858 (TRAV25, TRAJ52)
CAGRPGGTSYGKLTF

SEQ ID NO: 285716 - protein, 17 aa, Homo sapiens
  CDR3 for beta chain variable domain of TCR clone 142858 (TRBV7-8, TRBJ2-6)
YASSAGTGGAGANGLTF

SEQ ID NO: 285717 - protein, 13 aa, Homo sapiens
  CDR3 for alpha chain variable domain of TCR clone 142859 (TRAV30, TRAJ24)
CGTVTDSWGKLQF

SEQ ID NO: 285718 - protein, 15 aa, Homo sapiens
  CDR3 for beta chain variable domain of TCR clone 142859 (TRBV19, TRBJ1-1)
CASTSGQIENTEAFF

SEQ ID NO: 285719 - protein, 15 aa, Homo sapiens
  CDR3 for alpha chain variable domain of TCR clone 142860 (TRAV38-1, TRAJ57)
CAFMDSQGGSEKLVF

SEQ ID NO: 285720 - protein, 13 aa, Homo sapiens
  CDR3 for beta chain variable domain of TCR clone 142860 (TRBV7-2, TRBJ2-2)
CASSLAVTGELFF

SEQ ID NO: 285721 - protein, 16 aa, Homo sapiens
  CDR3 for alpha chain variable domain of TCR clone 142861 (TRAV8-3, TRAJ28)
CAVGGTLGLGVTNSLS

SEQ ID NO: 285722 - protein, 14 aa, Homo sapiens
  CDR3 for beta chain variable domain of TCR clone 142861 (TRBV7-2, TRBJ2-1)
CASSLGVGYNEQFF

SEQ ID NO: 285723 - protein, 12 aa, Homo sapiens
  CDR3 for alpha chain variable domain of TCR clone 142862 (TRAV12-2, TRAJ16)
CAGNLDGQKLLF

SEQ ID NO: 285724 - protein, 12 aa, Homo sapiens
  CDR3 for beta chain variable domain of TCR clone 142862 (TRBV5-7, TRBJ2-7)
CASSVQGGEQYF

SEQ ID NO: 285725 - protein, 13 aa, Homo sapiens
  CDR3 for alpha chain variable domain of TCR clone 142863 (TRAV12-2, TRAJ10)
CAVHTGGGNKLTF

SEQ ID NO: 285726 - protein, 11 aa, Homo sapiens
  CDR3 for beta chain variable domain of TCR clone 142863 (TRBV12-4, TRBJ2-3)
CASTATDTQYF

SEQ ID NO: 285727 - protein, 16 aa, Homo sapiens
  CDR3 for alpha chain variable domain of TCR clone 142864 (TRAV8-3, TRAJ28)
CALGATLGLGVTNSLS

SEQ ID NO: 285728 - protein, 14 aa, Homo sapiens
  CDR3 for beta chain variable domain of TCR clone 142864 (TRBV7-2, TRBJ2-1)
CASSLGVGYNEQFF

SEQ ID NO: 285729 - protein, 13 aa, Homo sapiens
  CDR3 for alpha chain variable domain of TCR clone 142865 (TRAV29/DV5, TRAJ31)
CAASRNNNARLMF

SEQ ID NO: 285730 - protein, 16 aa, Homo sapiens
  CDR3 for beta chain variable domain of TCR clone 142865 (TRBV7-3, TRBJ2-1)
CASSLEGYRSYNEQFF

SEQ ID NO: 285731 - protein, 17 aa, Homo sapiens
  CDR3 for alpha chain variable domain of TCR clone 142866 (TRAV12-3, TRAJ6)
CAMSARGGAGGSYIHTF

SEQ ID NO: 285732 - protein, 18 aa, Homo sapiens
  CDR3 for beta chain variable domain of TCR clone 142866 (TRBV7-9, TRBJ2-3)
CARSPRGTSGTGTDTQYF

SEQ ID NO: 285733 - protein, 17 aa, Homo sapiens
  CDR3 for alpha chain variable domain of TCR clone 142867 (TRAV8-6, TRAJ58)
CAVSSWVGETSGSRLTL

SEQ ID NO: 285734 - protein, 17 aa, Homo sapiens
  CDR3 for beta chain variable domain of TCR clone 142867 (TRBV11-2, TRBJ2-1)
CASSLYPPGVEYNEQFF

SEQ ID NO: 285735 - protein, 12 aa, Homo sapiens
  CDR3 for alpha chain variable domain of TCR clone 142868 (TRAV3, TRAJ20)
CSVRDPDYKLSF

SEQ ID NO: 285736 - protein, 14 aa, Homo sapiens
  CDR3 for beta chain variable domain of TCR clone 142868 (TRBV4-2, TRBJ2-1)
CASGLDRAYNVQFF

SEQ ID NO: 285737 - protein, 12 aa, Homo sapiens
  CDR3 for alpha chain variable domain of TCR clone 142869 (TRAV13-2, TRAJ23)
CAERHRGGKLIF

SEQ ID NO: 285738 - protein, 16 aa, Homo sapiens
  CDR3 for beta chain variable domain of TCR clone 142869 (TRBV4-1, TRBJ2-5)
CASSHADRAAGETQYF

SEQ ID NO: 285739 - protein, 15 aa, Homo sapiens
  CDR3 for alpha chain variable domain of TCR clone 142870 (TRAV12-1, TRAJ9)
CVVSFGDTGVFKTIF

SEQ ID NO: 285740 - protein, 19 aa, Homo sapiens
  CDR3 for beta chain variable domain of TCR clone 142870 (TRBV25-1, TRBJ2-2)
CAILVYRVDRGRKTGELFF

SEQ ID NO: 285741 - protein, 14 aa, Homo sapiens
  CDR3 for alpha chain variable domain of TCR clone 142871 (TRAV13-1, TRAJ44)
CAAKATGTASKLTF

SEQ ID NO: 285742 - protein, 15 aa, Homo sapiens
  CDR3 for beta chain variable domain of TCR clone 142871 (TRBV25-1, TRBJ2-5)
CASSDTRGYQETQYF

SEQ ID NO: 285743 - protein, 14 aa, Homo sapiens
  CDR3 for alpha chain variable domain of TCR clone 142872 (TRAV38-1, TRAJ45)
CASHLGGGADGLTF

SEQ ID NO: 285744 - protein, 13 aa, Homo sapiens
  CDR3 for beta chain variable domain of TCR clone 142872 (TRBV10-3, TRBJ1-2)
CAISERDSYGYTF

SEQ ID NO: 285745 - protein, 15 aa, Homo sapiens
  CDR3 for alpha chain variable domain of TCR clone 142873 (TRAV8-3, TRAJ27)
CAVGPSKTNAGKSTF

SEQ ID NO: 285746 - protein, 14 aa, Homo sapiens
  CDR3 for beta chain variable domain of TCR clone 142873 (TRBV12-5, TRBJ2-5)
CASGSRTHQETRYF

SEQ ID NO: 285747 - protein, 15 aa, Homo sapiens
  CDR3 for alpha chain variable domain of TCR clone 142874 (TRAV27, TRAJ38)
CAARRNAGNNRKLIW

SEQ ID NO: 285748 - protein, 16 aa, Homo sapiens
  CDR3 for beta chain variable domain of TCR clone 142874 (TRBV11-3, TRBJ2-5)
CASSSVVAGSTETQYF

SEQ ID NO: 285749 - protein, 14 aa, Homo sapiens
  CDR3 for alpha chain variable domain of TCR clone 142875 (TRAV12-3, TRAJ29)
CAMSPYSGNTPLVF

SEQ ID NO: 285750 - protein, 15 aa, Homo sapiens
  CDR3 for beta chain variable domain of TCR clone 142875 (TRBV7-6, TRBJ2-5)
CASSKPTGPQETQYF

SEQ ID NO: 285751 - protein, 15 aa, Homo sapiens
  CDR3 for alpha chain variable domain of TCR clone 142876 (TRAV12-3, TRAJ27)
CAMRAYNTNAGKSTF

SEQ ID NO: 285752 - protein, 12 aa, Homo sapiens
  CDR3 for beta chain variable domain of TCR clone 142876 (TRBV11-2, TRBJ2-2)
CASSLGGGELFY

SEQ ID NO: 285753 - protein, 10 aa, Homo sapiens
  CDR3 for alpha chain variable domain of TCR clone 142877 (TRAV2, TRAJ24)
QLTAGGKLQF

SEQ ID NO: 285754 - protein, 14 aa, Homo sapiens
  CDR3 for beta chain variable domain of TCR clone 142877 (TRBV13, TRBJ2-5)
CASSLGTAQETQYF

SEQ ID NO: 285755 - protein, 12 aa, Homo sapiens
  CDR3 for alpha chain variable domain of TCR clone 142878 (TRAV8-3, TRAJ20)
CAVGANDYKLSF

SEQ ID NO: 285756 - protein, 15 aa, Homo sapiens
  CDR3 for beta chain variable domain of TCR clone 142878 (TRBV7-9, TRBJ1-4)
CASSARTGGNEKLFF

SEQ ID NO: 285757 - protein, 15 aa, Homo sapiens
  CDR3 for alpha chain variable domain of TCR clone 142879 (TRAV35, TRAJ23)
CAGQRGYNQGGKLIF

SEQ ID NO: 285758 - protein, 16 aa, Homo sapiens
  CDR3 for beta chain variable domain of TCR clone 142879 (TRBV27, TRBJ2-1)
CASSSRLAGKYNEQFF

SEQ ID NO: 285759 - protein, 12 aa, Homo sapiens
  CDR3 for alpha chain variable domain of TCR clone 142880 (TRAV1-1, TRAJ39)
CAVPVVGNMLTF

SEQ ID NO: 285760 - protein, 12 aa, Homo sapiens
  CDR3 for beta chain variable domain of TCR clone 142880 (TRBV5-8, TRBJ2-5)
CASSLLRETQYF

SEQ ID NO: 285761 - protein, 13 aa, Homo sapiens
  CDR3 for alpha chain variable domain of TCR clone 142881 (TRAV14/DV4, TRAJ23)
CAMREVKGGKLIF

SEQ ID NO: 285762 - protein, 13 aa, Homo sapiens
  CDR3 for beta chain variable domain of TCR clone 142881 (TRBV12-4, TRBJ1-1)
CASSLGGTIEAFF

SEQ ID NO: 285763 - protein, 13 aa, Homo sapiens
  CDR3 for alpha chain variable domain of TCR clone 142882 (TRAV13-2, TRAJ48)
CAEMDFGNEKLTF

SEQ ID NO: 285764 - protein, 15 aa, Homo sapiens
  CDR3 for beta chain variable domain of TCR clone 142882 (TRBV7-9, TRBJ1-6)
CASSSPWRGNSPLHF

SEQ ID NO: 285765 - protein, 16 aa, Homo sapiens
  CDR3 for alpha chain variable domain of TCR clone 142883 (TRAV3, TRAJ23)
CAVKIGIYNQGGKLIF

SEQ ID NO: 285766 - protein, 18 aa, Homo sapiens
  CDR3 for beta chain variable domain of TCR clone 142883 (TRBV18, TRBJ2-3)
CASSYTSGAAGGTDTQYF

SEQ ID NO: 285767 - protein, 15 aa, Homo sapiens
  CDR3 for alpha chain variable domain of TCR clone 142884 (TRAV13-1, TRAJ44)
CAASRGGGNASKLTF

SEQ ID NO: 285768 - protein, 12 aa, Homo sapiens
  CDR3 for beta chain variable domain of TCR clone 142884 (TRBV11-2, TRBJ2-2)
CASSLGGGELFL

SEQ ID NO: 285769 - protein, 14 aa, Homo sapiens
  CDR3 for alpha chain variable domain of TCR clone 142885 (TRAV14/DV4, TRAJ41)
CARGGPDSGYALNF

SEQ ID NO: 285770 - protein, 14 aa, Homo sapiens
  CDR3 for beta chain variable domain of TCR clone 142885 (TRBV24-1, TRBJ1-2)
CATSGRGSGAGYTF

SEQ ID NO: 285771 - protein, 13 aa, Homo sapiens
  CDR3 for alpha chain variable domain of TCR clone 142886 (TRAV2, TRAJ9)
CAVGSTGGFKTIF

SEQ ID NO: 285772 - protein, 15 aa, Homo sapiens
  CDR3 for beta chain variable domain of TCR clone 142886 (TRBV10-3, TRBJ2-1)
CAITFGGGTDNEQFF

SEQ ID NO: 285773 - protein, 12 aa, Homo sapiens
  CDR3 for alpha chain variable domain of TCR clone 142887 (TRAV13-1, TRAJ52)
HAVGTSYGKLTF

SEQ ID NO: 285774 - protein, 16 aa, Homo sapiens
  CDR3 for beta chain variable domain of TCR clone 142887 (TRBV20-1, TRBJ2-1)
CSARSTSESSYNEQFF

SEQ ID NO: 285775 - protein, 14 aa, Homo sapiens
  CDR3 for alpha chain variable domain of TCR clone 142888 (TRAV3, TRAJ7)
CAVSEEEREQQTRF

SEQ ID NO: 285776 - protein, 12 aa, Homo sapiens
  CDR3 for beta chain variable domain of TCR clone 142888 (TRBV7-8, TRBJ2-7)
CASSLGDREQYF

SEQ ID NO: 285777 - protein, 14 aa, Homo sapiens
  CDR3 for alpha chain variable domain of TCR clone 142889 (TRAV12-2, TRAJ9)
CAVNPLEGGFKTIF

SEQ ID NO: 285778 - protein, 16 aa, Homo sapiens
  CDR3 for beta chain variable domain of TCR clone 142889 (TRBV19, TRBJ1-6)
CASSVAPVAGNSPLHF

SEQ ID NO: 285779 - protein, 14 aa, Homo sapiens
  CDR3 for alpha chain variable domain of TCR clone 142890 (TRAV8-3, TRAJ39)
CAVGANNAGNMLTF

SEQ ID NO: 285780 - protein, 14 aa, Homo sapiens
  CDR3 for beta chain variable domain of TCR clone 142890 (TRBV7-2, TRBJ2-1)
CASSRGGARNEQFF

SEQ ID NO: 285781 - protein, 21 aa, Homo sapiens
  CDR3 for alpha chain variable domain of TCR clone 142891 (TRAV1-1, TRAJ6)
CLLLLRCERLERTGGSYIPTF

SEQ ID NO: 285782 - protein, 15 aa, Homo sapiens
  CDR3 for beta chain variable domain of TCR clone 142891 (TRBV10-2, TRBJ2-7)
CASGLAGATSSTSGR

SEQ ID NO: 285783 - protein, 12 aa, Homo sapiens
  CDR3 for alpha chain variable domain of TCR clone 142892 (TRAV35, TRAJ30)
CAGLNRDNKIIF

SEQ ID NO: 285784 - protein, 15 aa, Homo sapiens
  CDR3 for beta chain variable domain of TCR clone 142892 (TRBV18, TRBJ2-3)
CASSPLAGETDTQYF

SEQ ID NO: 285785 - protein, 18 aa, Homo sapiens
  CDR3 for alpha chain variable domain of TCR clone 142893 (TRAV12-3, TRAJ52)
CAMSRTNAGGTSYGKLTF

SEQ ID NO: 285786 - protein, 17 aa, Homo sapiens
  CDR3 for beta chain variable domain of TCR clone 142893 (TRBV7-3, TRBJ2-3)
SASSLMKRMRGADTQYF

SEQ ID NO: 285787 - protein, 16 aa, Homo sapiens
  CDR3 for alpha chain variable domain of TCR clone 142894 (TRAV12-3, TRAJ53)
CAMSPGSGGSNYKLKF

SEQ ID NO: 285788 - protein, 16 aa, Homo sapiens
  CDR3 for beta chain variable domain of TCR clone 142894 (TRBV7-9, TRBJ1-2)
CASSLGFSSGEDGYTF

SEQ ID NO: 285789 - protein, 13 aa, Homo sapiens
  CDR3 for alpha chain variable domain of TCR clone 142895 (TRAV35, TRAJ22)
CAGLSGSARQLTF

SEQ ID NO: 285790 - protein, 16 aa, Homo sapiens
  CDR3 for beta chain variable domain of TCR clone 142895 (TRBV7-9, TRBJ2-1)
CASSLVLTCQGNEQFF

SEQ ID NO: 285791 - protein, 17 aa, Homo sapiens
  CDR3 for alpha chain variable domain of TCR clone 142896 (TRAV8-6, TRAJ52)
CAVSEGAGGTSYGKLTF

SEQ ID NO: 285792 - protein, 15 aa, Homo sapiens
  CDR3 for beta chain variable domain of TCR clone 142896 (TRBV7-9, TRBJ1-6)
CASSSATADNSPLHF

SEQ ID NO: 285793 - protein, 17 aa, Homo sapiens
  CDR3 for alpha chain variable domain of TCR clone 142897 (TRAV4, TRAJ13)
CLVGVQGSSGGYQKVTF

SEQ ID NO: 285794 - protein, 15 aa, Homo sapiens
  CDR3 for beta chain variable domain of TCR clone 142897 (TRBV15, TRBJ2-2)
CATSRGLADTGELFF

SEQ ID NO: 285795 - protein, 14 aa, Homo sapiens
  CDR3 for alpha chain variable domain of TCR clone 142898 (TRAV12-1, TRAJ17)
CVVNYKAAGNKLTF

SEQ ID NO: 285796 - protein, 15 aa, Homo sapiens
  CDR3 for beta chain variable domain of TCR clone 142898 (TRBV13, TRBJ1-5)
CASSFGQGGVQPQHF

SEQ ID NO: 285797 - protein, 15 aa, Homo sapiens
  CDR3 for alpha chain variable domain of TCR clone 142899 (TRAV13-1, TRAJ5)
CAASPRGHGQESTYF

SEQ ID NO: 285798 - protein, 17 aa, Homo sapiens
  CDR3 for beta chain variable domain of TCR clone 142899 (TRBV3-1, TRBJ2-2)
CASSQFSDKVDTGELFF

SEQ ID NO: 285799 - protein, 11 aa, Homo sapiens
  CDR3 for alpha chain variable domain of TCR clone 142900 (TRAV12-2, TRAJ31)
CAVTRWARLMF

SEQ ID NO: 285800 - protein, 15 aa, Homo sapiens
  CDR3 for beta chain variable domain of TCR clone 142900 (TRBV19, TRBJ2-1)
CASSTGTSSYNEQFF

SEQ ID NO: 285801 - protein, 14 aa, Homo sapiens
  CDR3 for alpha chain variable domain of TCR clone 142901 (TRAV3, TRAJ33)
CAVRDMGSNYQVIW

SEQ ID NO: 285802 - protein, 17 aa, Homo sapiens
  CDR3 for beta chain variable domain of TCR clone 142901 (TRBV19, TRBJ2-1)
CASSIWSAQPTHNEQFF

SEQ ID NO: 285803 - protein, 14 aa, Homo sapiens
  CDR3 for alpha chain variable domain of TCR clone 142902 (TRAV1-2, TRAJ16)
CAVNRFSHGQKLLF

SEQ ID NO: 285804 - protein, 15 aa, Homo sapiens
  CDR3 for beta chain variable domain of TCR clone 142902 (TRBV7-9, TRBJ1-6)
CASSSPGRVNSPLHF

SEQ ID NO: 285805 - protein, 12 aa, Homo sapiens
  CDR3 for alpha chain variable domain of TCR clone 142903 (TRAV16, TRAJ10)
CSRTGGGNKLTF

SEQ ID NO: 285806 - protein, 16 aa, Homo sapiens
  CDR3 for beta chain variable domain of TCR clone 142903 (TRBV29-1, TRBJ2-7)
CSVEVVGTSGSYEQYF

SEQ ID NO: 285807 - protein, 14 aa, Homo sapiens
  CDR3 for alpha chain variable domain of TCR clone 142904 (TRAV13-2, TRAJ6)
CAERGSGGSYIPTF

SEQ ID NO: 285808 - protein, 12 aa, Homo sapiens
  CDR3 for beta chain variable domain of TCR clone 142904 (TRBV12-4, TRBJ2-1)
CASSSSYNEQFF

SEQ ID NO: 285809 - protein, 14 aa, Homo sapiens
  CDR3 for alpha chain variable domain of TCR clone 142905 (TRAV3, TRAJ17)
CAVRDAAAGNKLTF

SEQ ID NO: 285810 - protein, 14 aa, Homo sapiens
  CDR3 for beta chain variable domain of TCR clone 142905 (TRBV5-1, TRBJ2-7)
CASSRGESLYEQYF

SEQ ID NO: 285811 - protein, 13 aa, Homo sapiens
  CDR3 for alpha chain variable domain of TCR clone 142906 (TRAV8-3, TRAJ43)
CAVVPYNNNDMRV

SEQ ID NO: 285812 - protein, 17 aa, Homo sapiens
  CDR3 for beta chain variable domain of TCR clone 142906 (TRBV7-7, TRBJ1-1)
CASIGDRPNLGVTEAFL

SEQ ID NO: 285813 - protein, 14 aa, Homo sapiens
  CDR3 for alpha chain variable domain of TCR clone 142907 (TRAV1-2, TRAJ16)
CAVNRFSDGQKLLF

SEQ ID NO: 285814 - protein, 15 aa, Homo sapiens
  CDR3 for beta chain variable domain of TCR clone 142907 (TRBV10-3, TRBJ2-3)
CAISLTGGGTDTQYF

SEQ ID NO: 285815 - protein, 16 aa, Homo sapiens
  CDR3 for alpha chain variable domain of TCR clone 142908 (TRAV25, TRAJ39)
CRNLLLRNNAGNMLTF

SEQ ID NO: 285816 - protein, 13 aa, Homo sapiens
  CDR3 for beta chain variable domain of TCR clone 142908 (TRBV5-5, TRBJ1-2)
CASSFWRGEDYTF

SEQ ID NO: 285817 - protein, 15 aa, Homo sapiens
  CDR3 for alpha chain variable domain of TCR clone 142909 (TRAV26-1, TRAJ29)
FIVRVEGSGNTPLVF

SEQ ID NO: 285818 - protein, 14 aa, Homo sapiens
  CDR3 for beta chain variable domain of TCR clone 142909 (TRBV19, TRBJ2-5)
CASSMTGQQETQYF

SEQ ID NO: 285819 - protein, 14 aa, Homo sapiens
  CDR3 for alpha chain variable domain of TCR clone 142910 (TRAV1-2, TRAJ8)
CAVREDTGFQKLVF

SEQ ID NO: 285820 - protein, 16 aa, Homo sapiens
  CDR3 for beta chain variable domain of TCR clone 142910 (TRBV2, TRBJ2-6)
CASSEVGGAGANVLTF

SEQ ID NO: 285821 - protein, 13 aa, Homo sapiens
  CDR3 for alpha chain variable domain of TCR clone 142911 (TRAV17, TRAJ8)
CATGPVGFQKLVF

SEQ ID NO: 285822 - protein, 14 aa, Homo sapiens
  CDR3 for beta chain variable domain of TCR clone 142911 (TRBV20-1, TRBJ2-5)
CSAGRLPGQETQYF

SEQ ID NO: 285823 - protein, 14 aa, Homo sapiens
  CDR3 for alpha chain variable domain of TCR clone 142912 (TRAV6, TRAJ17)
CALALKAAGNKLTF

SEQ ID NO: 285824 - protein, 17 aa, Homo sapiens
  CDR3 for beta chain variable domain of TCR clone 142912 (TRBV7-8, TRBJ2-7)
CASSFTSGRPPSYEQYF

SEQ ID NO: 285825 - protein, 15 aa, Homo sapiens
  CDR3 for alpha chain variable domain of TCR clone 142913 (TRAV12-2, TRAJ40)
CRDKRGTSGTYKYIF

SEQ ID NO: 285826 - protein, 14 aa, Homo sapiens
  CDR3 for beta chain variable domain of TCR clone 142913 (TRBV20-1, TRBJ2-5)
CSARDGRAGETQYF

SEQ ID NO: 285827 - protein, 15 aa, Homo sapiens
  CDR3 for alpha chain variable domain of TCR clone 142914 (TRAV17, TRAJ57)
CATGPSQGGSEKLGF

SEQ ID NO: 285828 - protein, 13 aa, Homo sapiens
  CDR3 for beta chain variable domain of TCR clone 142914 (TRBV11-2, TRBJ2-5)
CASSSTGEETQYF

SEQ ID NO: 285829 - protein, 16 aa, Homo sapiens
  CDR3 for alpha chain variable domain of TCR clone 142915 (TRAV20, TRAJ53)
CAVQDQPRGSNYKLTF

SEQ ID NO: 285830 - protein, 13 aa, Homo sapiens
  CDR3 for beta chain variable domain of TCR clone 142915 (TRBV4-2, TRBJ1-1)
CASSQAGNTEAFF

SEQ ID NO: 285831 - protein, 14 aa, Homo sapiens
  CDR3 for alpha chain variable domain of TCR clone 142916 (TRAV1-2, TRAJ8)
CAVREDTGFQQLVF

SEQ ID NO: 285832 - protein, 15 aa, Homo sapiens
  CDR3 for beta chain variable domain of TCR clone 142916 (TRBV4-1, TRBJ2-7)
CASSQNTGRLYEQYF

SEQ ID NO: 285833 - protein, 14 aa, Homo sapiens
  CDR3 for alpha chain variable domain of TCR clone 142917 (TRAV17, TRAJ34)
CATDSLEGTDKLIF

SEQ ID NO: 285834 - protein, 13 aa, Homo sapiens
  CDR3 for beta chain variable domain of TCR clone 142917 (TRBV11-2, TRBJ2-7)
CAGSGTRPYEQYF

SEQ ID NO: 285835 - protein, 14 aa, Homo sapiens
  CDR3 for alpha chain variable domain of TCR clone 142918 (TRAV1-2, TRAJ16)
CAVNRFSDGQKLLF

SEQ ID NO: 285836 - protein, 16 aa, Homo sapiens
  CDR3 for beta chain variable domain of TCR clone 142918 (TRBV28, TRBJ2-1)
CASRRSGRVVGNEQFF

SEQ ID NO: 285837 - protein, 13 aa, Homo sapiens
  CDR3 for alpha chain variable domain of TCR clone 142919 (TRAV6, TRAJ37)
CPHVSGNTGKLIF

SEQ ID NO: 285838 - protein, 16 aa, Homo sapiens
  CDR3 for beta chain variable domain of TCR clone 142919 (TRBV27, TRBJ2-5)
CASSLSRTAGGETQYF

SEQ ID NO: 285839 - protein, 14 aa, Homo sapiens
  CDR3 for alpha chain variable domain of TCR clone 142920 (TRAV24, TRAJ42)
CAQNYGGSQGNLIF

SEQ ID NO: 285840 - protein, 15 aa, Homo sapiens
  CDR3 for beta chain variable domain of TCR clone 142920 (TRBV19, TRBJ1-5)
CASSIPGGAGQHQHF

SEQ ID NO: 285841 - protein, 14 aa, Homo sapiens
  CDR3 for alpha chain variable domain of TCR clone 142921 (TRAV13-1, TRAJ35)
CAASKGGFGNVLHC

SEQ ID NO: 285842 - protein, 12 aa, Homo sapiens
  CDR3 for beta chain variable domain of TCR clone 142921 (TRBV20-1, TRBJ2-7)
CSAGLKMGEQYF

SEQ ID NO: 285843 - protein, 13 aa, Homo sapiens
  CDR3 for alpha chain variable domain of TCR clone 142922 (TRAV27, TRAJ41)
CAGEGNSGYALNF

SEQ ID NO: 285844 - protein, 14 aa, Homo sapiens
  CDR3 for beta chain variable domain of TCR clone 142922 (TRBV13, TRBJ2-5)
CASSLERVGETQFF

SEQ ID NO: 285845 - protein, 15 aa, Homo sapiens
  CDR3 for alpha chain variable domain of TCR clone 142923 (TRAV21, TRAJ27)
CAARPGMQANQPLGM

SEQ ID NO: 285846 - protein, 14 aa, Homo sapiens
  CDR3 for beta chain variable domain of TCR clone 142923 (TRBV7-6, TRBJ2-3)
CASSLGTVTDTQYF

SEQ ID NO: 285847 - protein, 14 aa, Homo sapiens
  CDR3 for alpha chain variable domain of TCR clone 142924 (TRAV20, TRAJ20)
CAVRRGYNDYKLSF

SEQ ID NO: 285848 - protein, 13 aa, Homo sapiens
  CDR3 for beta chain variable domain of TCR clone 142924 (TRBV19, TRBJ2-5)
CASSETAPGNQYF

SEQ ID NO: 285849 - protein, 14 aa, Homo sapiens
  CDR3 for alpha chain variable domain of TCR clone 142925 (TRAV13-1, TRAJ44)
CAAKATGTASKLTF

SEQ ID NO: 285850 - protein, 17 aa, Homo sapiens
  CDR3 for beta chain variable domain of TCR clone 142925 (TRBV7-3, TRBJ2-3)
CASSLMKRMGGADTQYF

SEQ ID NO: 285851 - protein, 15 aa, Homo sapiens
  CDR3 for alpha chain variable domain of TCR clone 142926 (TRAV4, TRAJ8)
CLVGKQHTGFQKLVF

SEQ ID NO: 285852 - protein, 15 aa, Homo sapiens
  CDR3 for beta chain variable domain of TCR clone 142926 (TRBV7-9, TRBJ2-5)
CASSNRDYLQETQYF

SEQ ID NO: 285853 - protein, 14 aa, Homo sapiens
  CDR3 for alpha chain variable domain of TCR clone 142927 (TRAV1-2, TRAJ16)
CAVNRFSDVQKMLF

SEQ ID NO: 285854 - protein, 15 aa, Homo sapiens
  CDR3 for beta chain variable domain of TCR clone 142927 (TRBV9, TRBJ1-6)
CASSVAGTGDSPLHF

SEQ ID NO: 285855 - protein, 11 aa, Homo sapiens
  CDR3 for alpha chain variable domain of TCR clone 142928 (TRAV4, TRAJ23)
CLVAPGGKLIF

SEQ ID NO: 285856 - protein, 15 aa, Homo sapiens
  CDR3 for beta chain variable domain of TCR clone 142928 (TRBV7-2, TRBJ2-1)
CASSFQSDEYNEQFF

SEQ ID NO: 285857 - protein, 16 aa, Homo sapiens
  CDR3 for alpha chain variable domain of TCR clone 142929 (TRAV8-3, TRAJ13)
CAVGAYPSGGYQKVTF

SEQ ID NO: 285858 - protein, 11 aa, Homo sapiens
  CDR3 for beta chain variable domain of TCR clone 142929 (TRBV6-3, TRBJ2-3)
CATGQADTQYF

SEQ ID NO: 285859 - protein, 13 aa, Homo sapiens
  CDR3 for alpha chain variable domain of TCR clone 142930 (TRAV13-1, TRAJ39)
CAASIWAGNMLTF

SEQ ID NO: 285860 - protein, 16 aa, Homo sapiens
  CDR3 for beta chain variable domain of TCR clone 142930 (TRBV7-2, TRBJ1-4)
CASSPVGRFDREKLFF

SEQ ID NO: 285861 - protein, 13 aa, Homo sapiens
  CDR3 for alpha chain variable domain of TCR clone 142931 (TRAV27, TRAJ56)
CAGLTGANSKLTF

SEQ ID NO: 285862 - protein, 15 aa, Homo sapiens
  CDR3 for beta chain variable domain of TCR clone 142931 (TRBV2, TRBJ1-1)
CASSERSGRNTEAFF

SEQ ID NO: 285863 - protein, 13 aa, Homo sapiens
  CDR3 for alpha chain variable domain of TCR clone 142932 (TRAV12-2, TRAJ50)
CAVIVTSSDKVIF

SEQ ID NO: 285864 - protein, 16 aa, Homo sapiens
  CDR3 for beta chain variable domain of TCR clone 142932 (TRBV6-5, TRBJ2-7)
CASSSDPTSGFYEQYF

SEQ ID NO: 285865 - protein, 13 aa, Homo sapiens
  CDR3 for alpha chain variable domain of TCR clone 142933 (TRAV9-2, TRAJ53)
CALSGGSNYKLTF

SEQ ID NO: 285866 - protein, 11 aa, Homo sapiens
  CDR3 for beta chain variable domain of TCR clone 142933 (TRBV11-2, TRBJ2-1)
PPGVEYNEQFF

SEQ ID NO: 285867 - protein, 13 aa, Homo sapiens
  CDR3 for alpha chain variable domain of TCR clone 142934 (TRAV12-1, TRAJ21)
CLVTLYNFNKFYF

SEQ ID NO: 285868 - protein, 20 aa, Homo sapiens
  CDR3 for beta chain variable domain of TCR clone 142934 (TRBV7-8, TRBJ2-1)
CASSLAHRLAGVRSYNEQFF

SEQ ID NO: 285869 - protein, 13 aa, Homo sapiens
  CDR3 for alpha chain variable domain of TCR clone 142935 (TRAV8-3, TRAJ21)
CAVGAYHFNKFYF

SEQ ID NO: 285870 - protein, 16 aa, Homo sapiens
  CDR3 for beta chain variable domain of TCR clone 142935 (TRBV19, TRBJ2-1)
CASSMGGGSSYNEQFF

SEQ ID NO: 285871 - protein, 15 aa, Homo sapiens
  CDR3 for alpha chain variable domain of TCR clone 142936 (TRAV12-1, TRAJ26)
CVVNSWVTMVSILSL

SEQ ID NO: 285872 - protein, 13 aa, Homo sapiens
  CDR3 for beta chain variable domain of TCR clone 142936 (TRBV10-3, TRBJ2-7)
CASKLAVNYEQYF

SEQ ID NO: 285873 - protein, 15 aa, Homo sapiens
  CDR3 for alpha chain variable domain of TCR clone 142937 (TRAV8-3, TRAJ7)
CAVGPISYGNNRLAF

SEQ ID NO: 285874 - protein, 15 aa, Homo sapiens
  CDR3 for beta chain variable domain of TCR clone 142937 (TRBV4-2, TRBJ1-1)
CASSQEDLPRTEAFF

SEQ ID NO: 285875 - protein, 11 aa, Homo sapiens
  CDR3 for alpha chain variable domain of TCR clone 142938 (TRAV8-4, TRAJ26)
CAGGEGQNFVF

SEQ ID NO: 285876 - protein, 16 aa, Homo sapiens
  CDR3 for beta chain variable domain of TCR clone 142938 (TRBV20-1, TRBJ2-1)
CSARDSLGAVYNEQFF

SEQ ID NO: 285877 - protein, 14 aa, Homo sapiens
  CDR3 for alpha chain variable domain of TCR clone 142939 (TRAV27, TRAJ42)
CAGEKGGSQGNLIF

SEQ ID NO: 285878 - protein, 15 aa, Homo sapiens
  CDR3 for beta chain variable domain of TCR clone 142939 (TRBV7-2, TRBJ2-2)
CASSLVAGSAGELFF

SEQ ID NO: 285879 - protein, 18 aa, Homo sapiens
  CDR3 for alpha chain variable domain of TCR clone 142940 (TRAV13-1, TRAJ52)
CAAKNPNAGGTSYGKLTF

SEQ ID NO: 285880 - protein, 18 aa, Homo sapiens
  CDR3 for beta chain variable domain of TCR clone 142940 (TRBV12-4, TRBJ2-4)
CASSRTGAVDVAKNSQYV

SEQ ID NO: 285881 - protein, 14 aa, Homo sapiens
  CDR3 for alpha chain variable domain of TCR clone 142941 (TRAV20, TRAJ10)
CAVQVEGGGNKLTF

SEQ ID NO: 285882 - protein, 18 aa, Homo sapiens
  CDR3 for beta chain variable domain of TCR clone 142941 (TRBV24-1, TRBJ2-1)
CATSDLMFLGRGVHEQFF

SEQ ID NO: 285883 - protein, 12 aa, Homo sapiens
  CDR3 for alpha chain variable domain of TCR clone 142942 (TRAV13-1, TRAJ21)
CAAKEGFNKFYF

SEQ ID NO: 285884 - protein, 14 aa, Homo sapiens
  CDR3 for beta chain variable domain of TCR clone 142942 (TRBV5-4, TRBJ1-1)
CTSSLDSRRDEDFF

SEQ ID NO: 285885 - protein, 13 aa, Homo sapiens
  CDR3 for alpha chain variable domain of TCR clone 142943 (TRAV8-3, TRAJ44)
CAVVPGTASKLTF

SEQ ID NO: 285886 - protein, 14 aa, Homo sapiens
  CDR3 for beta chain variable domain of TCR clone 142943 (TRBV11-2, TRBJ2-3)
CASSGLARTDTQYF

SEQ ID NO: 285887 - protein, 12 aa, Homo sapiens
  CDR3 for alpha chain variable domain of TCR clone 142944 (TRAV21, TRAJ31)
CAVWGNNARLMF

SEQ ID NO: 285888 - protein, 15 aa, Homo sapiens
  CDR3 for beta chain variable domain of TCR clone 142944 (TRBV7-2, TRBJ2-5)
CASSLRGASGETQYF

SEQ ID NO: 285889 - protein, 14 aa, Homo sapiens
  CDR3 for alpha chain variable domain of TCR clone 142945 (TRAV1-2, TRAJ16)
CAVNRFSGGQKLLF

SEQ ID NO: 285890 - protein, 12 aa, Homo sapiens
  CDR3 for beta chain variable domain of TCR clone 142945 (TRBV11-2, TRBJ2-2)
CASSLPTGELFF

SEQ ID NO: 285891 - protein, 16 aa, Homo sapiens
  CDR3 for alpha chain variable domain of TCR clone 142946 (TRAV30, TRAJ24)
CGTEIVDADSWGKFQF

SEQ ID NO: 285892 - protein, 17 aa, Homo sapiens
  CDR3 for beta chain variable domain of TCR clone 142946 (TRBV13, TRBJ2-3)
CASSLSRVAGGRNKQYF

SEQ ID NO: 285893 - protein, 16 aa, Homo sapiens
  CDR3 for alpha chain variable domain of TCR clone 142947 (TRAV38-1, TRAJ37)
FAFKGDGSSNTGKLIF

SEQ ID NO: 285894 - protein, 13 aa, Homo sapiens
  CDR3 for beta chain variable domain of TCR clone 142947 (TRBV12-4, TRBJ2-5)
CASSLFRRETQYF

SEQ ID NO: 285895 - protein, 14 aa, Homo sapiens
  CDR3 for alpha chain variable domain of TCR clone 142948 (TRAV20, TRAJ20)
CAVRRGYNDYKLNF

SEQ ID NO: 285896 - protein, 13 aa, Homo sapiens
  CDR3 for beta chain variable domain of TCR clone 142948 (TRBV19, TRBJ2-5)
CASSETAPETQYF

SEQ ID NO: 285897 - protein, 16 aa, Homo sapiens
  CDR3 for alpha chain variable domain of TCR clone 142949 (TRAV26-1, TRAJ23)
CIVRPRFYNQGGKLIF

SEQ ID NO: 285898 - protein, 13 aa, Homo sapiens
  CDR3 for beta chain variable domain of TCR clone 142949 (TRBV20-1, TRBJ1-1)
CSARCGGNTEAFF

SEQ ID NO: 285899 - protein, 14 aa, Homo sapiens
  CDR3 for alpha chain variable domain of TCR clone 142950 (TRAV13-1, TRAJ44)
CAAKATGTASKLTF

SEQ ID NO: 285900 - protein, 13 aa, Homo sapiens
  CDR3 for beta chain variable domain of TCR clone 142950 (TRBV7-7, TRBJ2-2)
CASSLTSAGELFF

SEQ ID NO: 285901 - protein, 12 aa, Homo sapiens
  CDR3 for alpha chain variable domain of TCR clone 142951 (TRAV2, TRAJ9)
CAVGAGGFKTIF

SEQ ID NO: 285902 - protein, 13 aa, Homo sapiens
  CDR3 for beta chain variable domain of TCR clone 142951 (TRBV4-1, TRBJ2-2)
CASSQENTGELFF

SEQ ID NO: 285903 - protein, 11 aa, Homo sapiens
  CDR3 for alpha chain variable domain of TCR clone 142952 (TRAV17, TRAJ31)
CATDRTARLTF

SEQ ID NO: 285904 - protein, 14 aa, Homo sapiens
  CDR3 for beta chain variable domain of TCR clone 142952 (TRBV4-1, TRBJ2-2)
CASSQAVNTGELFF

SEQ ID NO: 285905 - protein, 14 aa, Homo sapiens
  CDR3 for alpha chain variable domain of TCR clone 142953 (TRAV1-2, TRAJ16)
CAVNRFSDGQKLLF

SEQ ID NO: 285906 - protein, 11 aa, Homo sapiens
  CDR3 for beta chain variable domain of TCR clone 142953 (TRBV11-2, TRBJ2-2)
CRSLGGGELFF

SEQ ID NO: 285907 - protein, 18 aa, Homo sapiens
  CDR3 for alpha chain variable domain of TCR clone 142954 (TRAV17, TRAJ45)
CATSLDLYSGGGADGFTF

SEQ ID NO: 285908 - protein, 15 aa, Homo sapiens
  CDR3 for beta chain variable domain of TCR clone 142954 (TRBV7-2, TRBJ2-7)
CASSTPGLTRGEQYF

SEQ ID NO: 285909 - protein, 14 aa, Homo sapiens
  CDR3 for alpha chain variable domain of TCR clone 142955 (TRAV12-3, TRAJ10)
SHLPLKGGGNKLTF

SEQ ID NO: 285910 - protein, 12 aa, Homo sapiens
  CDR3 for beta chain variable domain of TCR clone 142955 (TRBV7-9, TRBJ2-7)
CASSIKREEQYF

SEQ ID NO: 285911 - protein, 15 aa, Homo sapiens
  CDR3 for alpha chain variable domain of TCR clone 142956 (TRAV26-1, TRAJ56)
CIVRVDSGANSKLTF

SEQ ID NO: 285912 - protein, 14 aa, Homo sapiens
  CDR3 for beta chain variable domain of TCR clone 142956 (TRBV5-1, TRBJ2-7)
CASSRGETLYEQYF

SEQ ID NO: 285913 - protein, 15 aa, Homo sapiens
  CDR3 for alpha chain variable domain of TCR clone 142957 (TRAV29/DV5, TRAJ29)
CAASERSSGNTPLVF

SEQ ID NO: 285914 - protein, 17 aa, Homo sapiens
  CDR3 for beta chain variable domain of TCR clone 142957 (TRBV4-1, TRBJ1-4)
YASSQEGPRGVEEKLFF

SEQ ID NO: 285915 - protein, 14 aa, Homo sapiens
  CDR3 for alpha chain variable domain of TCR clone 142958 (TRAV12-3, TRAJ10)
SHLPLTGGGNKLTF

SEQ ID NO: 285916 - protein, 14 aa, Homo sapiens
  CDR3 for beta chain variable domain of TCR clone 142958 (TRBV7-7, TRBJ2-5)
CASSLRTGQETQYF

SEQ ID NO: 285917 - protein, 14 aa, Homo sapiens
  CDR3 for alpha chain variable domain of TCR clone 142959 (TRAV16, TRAJ39)
CALRKNNAGNMLTF

SEQ ID NO: 285918 - protein, 14 aa, Homo sapiens
  CDR3 for beta chain variable domain of TCR clone 142959 (TRBV6-6, TRBJ1-5)
CASSYGPANQPQHF

SEQ ID NO: 285919 - protein, 14 aa, Homo sapiens
  CDR3 for alpha chain variable domain of TCR clone 142960 (TRAV29/DV5, TRAJ40)
CAASLAPGTYKYIF

SEQ ID NO: 285920 - protein, 13 aa, Homo sapiens
  CDR3 for beta chain variable domain of TCR clone 142960 (TRBV4-2, TRBJ1-1)
CASSQAGNTEAFF

SEQ ID NO: 285921 - protein, 15 aa, Homo sapiens
  CDR3 for alpha chain variable domain of TCR clone 142961 (TRAV3, TRAJ4)
CAVRDGTGGYNKLIF

SEQ ID NO: 285922 - protein, 15 aa, Homo sapiens
  CDR3 for beta chain variable domain of TCR clone 142961 (TRBV27, TRBJ2-7)
CASSPDQCRLYEHYF

SEQ ID NO: 285923 - protein, 13 aa, Homo sapiens
  CDR3 for alpha chain variable domain of TCR clone 142962 (TRAV2, TRAJ15)
CAVASQAGTALIF

SEQ ID NO: 285924 - protein, 16 aa, Homo sapiens
  CDR3 for beta chain variable domain of TCR clone 142962 (TRBV18, TRBJ1-5)
CASSPYRLEGNQPQHF

SEQ ID NO: 285925 - protein, 14 aa, Homo sapiens
  CDR3 for alpha chain variable domain of TCR clone 142963 (TRAV25, TRAJ27)
CAGPANTNAGKSTF

SEQ ID NO: 285926 - protein, 16 aa, Homo sapiens
  CDR3 for beta chain variable domain of TCR clone 142963 (TRBV4-1, TRBJ2-6)
CASSQDGGPGANVLTF

SEQ ID NO: 285927 - protein, 18 aa, Homo sapiens
  CDR3 for alpha chain variable domain of TCR clone 142964 (TRAV12-2, )
CAVEDIQNPDPAVYQLRD

SEQ ID NO: 285928 - protein, 12 aa, Homo sapiens
  CDR3 for beta chain variable domain of TCR clone 142964 (TRBV7-6, TRBJ2-7)
CASSLADSEQYF

SEQ ID NO: 285929 - protein, 13 aa, Homo sapiens
  CDR3 for alpha chain variable domain of TCR clone 142965 (TRAV27, TRAJ45)
CRSSGGGADGLTF

SEQ ID NO: 285930 - protein, 16 aa, Homo sapiens
  CDR3 for beta chain variable domain of TCR clone 142965 (TRBV27, TRBJ2-2)
CASSFRGLVRTGELFF

SEQ ID NO: 285931 - protein, 13 aa, Homo sapiens
  CDR3 for alpha chain variable domain of TCR clone 142966 (TRAV25, TRAJ30)
CAGRVDRDHKIIF

SEQ ID NO: 285932 - protein, 17 aa, Homo sapiens
  CDR3 for beta chain variable domain of TCR clone 142966 (TRBV7-9, TRBJ2-6)
CASSFGAGYSGANVLTF

SEQ ID NO: 285933 - protein, 16 aa, Homo sapiens
  CDR3 for alpha chain variable domain of TCR clone 142967 (TRAV21, TRAJ52)
CAVTNAGGTSYGKLTF

SEQ ID NO: 285934 - protein, 13 aa, Homo sapiens
  CDR3 for beta chain variable domain of TCR clone 142967 (TRBV20-1, TRBJ2-3)
CSARLAGIDTQYF

SEQ ID NO: 285935 - protein, 15 aa, Homo sapiens
  CDR3 for alpha chain variable domain of TCR clone 142968 (TRAV8-2, TRAJ15)
CVVTMGNQAGTALIF

SEQ ID NO: 285936 - protein, 12 aa, Homo sapiens
  CDR3 for beta chain variable domain of TCR clone 142968 (TRBV6-1, TRBJ2-7)
CASSHYSYEQYF

SEQ ID NO: 285937 - protein, 12 aa, Homo sapiens
  CDR3 for alpha chain variable domain of TCR clone 142969 (TRAV13-2, TRAJ8)
CAPWLGFHKLVF

SEQ ID NO: 285938 - protein, 15 aa, Homo sapiens
  CDR3 for beta chain variable domain of TCR clone 142969 (TRBV12-4, TRBJ2-5)
CASSLSGAFQETQYF

SEQ ID NO: 285939 - protein, 12 aa, Homo sapiens
  CDR3 for alpha chain variable domain of TCR clone 142970 (TRAV1-2, TRAJ33)
CAALDSNYQLIR

SEQ ID NO: 285940 - protein, 14 aa, Homo sapiens
  CDR3 for beta chain variable domain of TCR clone 142970 (TRBV20-1, TRBJ2-7)
CSAKRGRSSYEQYF

SEQ ID NO: 285941 - protein, 12 aa, Homo sapiens
  CDR3 for alpha chain variable domain of TCR clone 142971 (TRAV12-3, TRAJ34)
CAIGYNTDKIIF

SEQ ID NO: 285942 - protein, 15 aa, Homo sapiens
  CDR3 for beta chain variable domain of TCR clone 142971 (TRBV28, TRBJ2-1)
CASSIIAGGRSGQFF

SEQ ID NO: 285943 - protein, 14 aa, Homo sapiens
  CDR3 for alpha chain variable domain of TCR clone 142972 (TRAV8-4, TRAJ15)
CAVTIREAGTALIF

SEQ ID NO: 285944 - protein, 16 aa, Homo sapiens
  CDR3 for beta chain variable domain of TCR clone 142972 (TRBV29-1, TRBJ2-6)
CSGEDITYSGANVLTF

SEQ ID NO: 285945 - protein, 14 aa, Homo sapiens
  CDR3 for alpha chain variable domain of TCR clone 142973 (TRAV12-1, TRAJ13)
CVVIDSGGYQKVTF

SEQ ID NO: 285946 - protein, 13 aa, Homo sapiens
  CDR3 for beta chain variable domain of TCR clone 142973 (TRBV15, TRBJ1-6)
CATSGGLNSPLHF

SEQ ID NO: 285947 - protein, 13 aa, Homo sapiens
  CDR3 for alpha chain variable domain of TCR clone 142974 (TRAV27, TRAJ39)
CAGEGNAGNMLTF

SEQ ID NO: 285948 - protein, 16 aa, Homo sapiens
  CDR3 for beta chain variable domain of TCR clone 142974 (TRBV20-1, TRBJ1-4)
CSAPGQGLLTNEKLFF

SEQ ID NO: 285949 - protein, 13 aa, Homo sapiens
  CDR3 for alpha chain variable domain of TCR clone 142975 (TRAV35, TRAJ32)
CAGVGGATNKFIF

SEQ ID NO: 285950 - protein, 17 aa, Homo sapiens
  CDR3 for beta chain variable domain of TCR clone 142975 (TRBV4-3, TRBJ2-1)
CASSQFSSGRASGEQFF

SEQ ID NO: 285951 - protein, 23 aa, Homo sapiens
  CDR3 for alpha chain variable domain of TCR clone 142976 (TRAV26-1, TRAJ38)
CIADNAGNNHIQNPDPAVYQLRD

SEQ ID NO: 285952 - protein, 15 aa, Homo sapiens
  CDR3 for beta chain variable domain of TCR clone 142976 (TRBV2, TRBJ2-1)
CASSEARSAYNEQFF

SEQ ID NO: 285953 - protein, 13 aa, Homo sapiens
  CDR3 for alpha chain variable domain of TCR clone 142977 (TRAV36/DV7, TRAJ54)
CAVDIQGAQKLVF

SEQ ID NO: 285954 - protein, 14 aa, Homo sapiens
  CDR3 for beta chain variable domain of TCR clone 142977 (TRBV7-2, TRBJ2-5)
CASSPRGSSETQYF

SEQ ID NO: 285955 - protein, 14 aa, Homo sapiens
  CDR3 for alpha chain variable domain of TCR clone 142978 (TRAV16, TRAJ17)
CALSEGAAGNKLTF

SEQ ID NO: 285956 - protein, 13 aa, Homo sapiens
  CDR3 for beta chain variable domain of TCR clone 142978 (TRBV12-4, TRBJ2-7)
CASSPTVTYEQYF

SEQ ID NO: 285957 - protein, 15 aa, Homo sapiens
  CDR3 for alpha chain variable domain of TCR clone 142979 (TRAV12-3, TRAJ5)
CAMSGLGTGRRALIF

SEQ ID NO: 285958 - protein, 16 aa, Homo sapiens
  CDR3 for beta chain variable domain of TCR clone 142979 (TRBV20-1, TRBJ2-3)
CSARLHSAGAIDTQYF

SEQ ID NO: 285959 - protein, 11 aa, Homo sapiens
  CDR3 for alpha chain variable domain of TCR clone 142980 (TRAV3, TRAJ21)
CAVGNFNKFYF

SEQ ID NO: 285960 - protein, 16 aa, Homo sapiens
  CDR3 for beta chain variable domain of TCR clone 142980 (TRBV19, TRBJ2-1)
CASSKAVPSSYNEQFC

SEQ ID NO: 285961 - protein, 12 aa, Homo sapiens
  CDR3 for alpha chain variable domain of TCR clone 142981 (TRAV1-1, TRAJ39)
CAVPVVGNMLTF

SEQ ID NO: 285962 - protein, 18 aa, Homo sapiens
  CDR3 for beta chain variable domain of TCR clone 142981 (TRBV7-9, TRBJ2-7)
CASSLTTSGSRTWYEQCF

SEQ ID NO: 285963 - protein, 15 aa, Homo sapiens
  CDR3 for alpha chain variable domain of TCR clone 142982 (TRAV4, TRAJ15)
CLVGDIRRAGTALIF

SEQ ID NO: 285964 - protein, 19 aa, Homo sapiens
  CDR3 for beta chain variable domain of TCR clone 142982 (TRBV19, TRBJ2-2)
CASTRPGLAGGRVTGELFF

SEQ ID NO: 285965 - protein, 13 aa, Homo sapiens
  CDR3 for alpha chain variable domain of TCR clone 142983 (TRAV25, TRAJ22)
CSRSSGSARQLTF

SEQ ID NO: 285966 - protein, 16 aa, Homo sapiens
  CDR3 for beta chain variable domain of TCR clone 142983 (TRBV4-2, TRBJ1-1)
CASSPSPGRAAPEAFF

SEQ ID NO: 285967 - protein, 14 aa, Homo sapiens
  CDR3 for alpha chain variable domain of TCR clone 142984 (TRAV13-1, TRAJ52)
CAANGGTSYGKLTF

SEQ ID NO: 285968 - protein, 14 aa, Homo sapiens
  CDR3 for beta chain variable domain of TCR clone 142984 (TRBV4-1, TRBJ2-2)
CASSQAVNTGELFF

SEQ ID NO: 285969 - protein, 15 aa, Homo sapiens
  CDR3 for alpha chain variable domain of TCR clone 142985 (TRAV26-1, TRAJ29)
CIVRVEGSGNTPLVF

SEQ ID NO: 285970 - protein, 11 aa, Homo sapiens
  CDR3 for beta chain variable domain of TCR clone 142985 (TRBV12-4, TRBJ1-2)
CASRGDRGYTF

SEQ ID NO: 285971 - protein, 12 aa, Homo sapiens
  CDR3 for alpha chain variable domain of TCR clone 142986 (TRAV21, TRAJ11)
CAATSGYSTLTF

SEQ ID NO: 285972 - protein, 16 aa, Homo sapiens
  CDR3 for beta chain variable domain of TCR clone 142986 (TRBV9, TRBJ2-2)
CASSGPSGTGIGELFF

SEQ ID NO: 285973 - protein, 14 aa, Homo sapiens
  CDR3 for alpha chain variable domain of TCR clone 142987 (TRAV13-1, TRAJ3)
CAAEGYSSASKIIS

SEQ ID NO: 285974 - protein, 15 aa, Homo sapiens
  CDR3 for beta chain variable domain of TCR clone 142987 (TRBV4-1, TRBJ1-4)
CASSDTGGTNEKLFF

SEQ ID NO: 285975 - protein, 14 aa, Homo sapiens
  CDR3 for alpha chain variable domain of TCR clone 142988 (TRAV12-2, TRAJ13)
CTVKKTGGYQKVTF

SEQ ID NO: 285976 - protein, 15 aa, Homo sapiens
  CDR3 for beta chain variable domain of TCR clone 142988 (TRBV27, TRBJ2-1)
CASRNGGGSSNEQFF

SEQ ID NO: 285977 - protein, 12 aa, Homo sapiens
  CDR3 for alpha chain variable domain of TCR clone 142989 (TRAV3, TRAJ20)
CAVRDHDYKLSF

SEQ ID NO: 285978 - protein, 13 aa, Homo sapiens
  CDR3 for beta chain variable domain of TCR clone 142989 (TRBV9, TRBJ2-7)
CASSVGQGGEQVF

SEQ ID NO: 285979 - protein, 13 aa, Homo sapiens
  CDR3 for alpha chain variable domain of TCR clone 142990 (TRAV13-1, TRAJ10)
CAATAGGGNKPTF

SEQ ID NO: 285980 - protein, 14 aa, Homo sapiens
  CDR3 for beta chain variable domain of TCR clone 142990 (TRBV12-4, TRBJ2-7)
CASSPAGLKYEQYF

SEQ ID NO: 285981 - protein, 16 aa, Homo sapiens
  CDR3 for alpha chain variable domain of TCR clone 142991 (TRAV3, TRAJ10)
CAVRDMRAGGGNKITF

SEQ ID NO: 285982 - protein, 14 aa, Homo sapiens
  CDR3 for beta chain variable domain of TCR clone 142991 (TRBV6-6, TRBJ2-7)
CASSDSGAGYEQYF

SEQ ID NO: 285983 - protein, 10 aa, Homo sapiens
  CDR3 for alpha chain variable domain of TCR clone 142992 (TRAV23/DV6, TRAJ57)
CAASSTLSQG

SEQ ID NO: 285984 - protein, 14 aa, Homo sapiens
  CDR3 for beta chain variable domain of TCR clone 142992 (TRBV7-3, TRBJ1-1)
CASSLKGGNTEAFF

SEQ ID NO: 285985 - protein, 16 aa, Homo sapiens
  CDR3 for alpha chain variable domain of TCR clone 142993 (TRAV26-2, TRAJ48)
CILRPPFNFGNEQLTF

SEQ ID NO: 285986 - protein, 15 aa, Homo sapiens
  CDR3 for beta chain variable domain of TCR clone 142993 (TRBV20-1, TRBJ2-3)
CSARVEGTYTDTQYF

SEQ ID NO: 285987 - protein, 12 aa, Homo sapiens
  CDR3 for alpha chain variable domain of TCR clone 142994 (TRAV2, TRAJ31)
CAVEEGDARLVF

SEQ ID NO: 285988 - protein, 18 aa, Homo sapiens
  CDR3 for beta chain variable domain of TCR clone 142994 (TRBV7-9, TRBJ2-3)
CASSLDLAGLATPDTQYF

SEQ ID NO: 285989 - protein, 14 aa, Homo sapiens
  CDR3 for alpha chain variable domain of TCR clone 142995 (TRAV12-2, TRAJ13)
CAAKKTGGYQEVTF

SEQ ID NO: 285990 - protein, 15 aa, Homo sapiens
  CDR3 for beta chain variable domain of TCR clone 142995 (TRBV27, TRBJ2-1)
CASSNGGGSSNEQFF

SEQ ID NO: 285991 - protein, 12 aa, Homo sapiens
  CDR3 for alpha chain variable domain of TCR clone 142996 (TRAV25, TRAJ33)
CAGPDSNYQLIW

SEQ ID NO: 285992 - protein, 14 aa, Homo sapiens
  CDR3 for beta chain variable domain of TCR clone 142996 (TRBV20-1, TRBJ1-1)
CSAQTRIGGTEAFF

SEQ ID NO: 285993 - protein, 15 aa, Homo sapiens
  CDR3 for alpha chain variable domain of TCR clone 142997 (TRAV1-2, TRAJ28)
CAVQYSGAGSYQLTF

SEQ ID NO: 285994 - protein, 13 aa, Homo sapiens
  CDR3 for beta chain variable domain of TCR clone 142997 (TRBV4-2, TRBJ1-1)
CASSQAGNIEAFF

SEQ ID NO: 285995 - protein, 14 aa, Homo sapiens
  CDR3 for alpha chain variable domain of TCR clone 142998 (TRAV12-1, TRAJ43)
CVVNGRSNNNDMLF

SEQ ID NO: 285996 - protein, 13 aa, Homo sapiens
  CDR3 for beta chain variable domain of TCR clone 142998 (TRBV27, TRBJ1-1)
CASSLSIGAEAFF

SEQ ID NO: 285997 - protein, 15 aa, Homo sapiens
  CDR3 for alpha chain variable domain of TCR clone 142999 (TRAV12-1, TRAJ44)
CVADLPTGTASKLTF

SEQ ID NO: 285998 - protein, 17 aa, Homo sapiens
  CDR3 for beta chain variable domain of TCR clone 142999 (TRBV6-5, TRBJ2-7)
CASSPSGAVYGWGEQYF

SEQ ID NO: 285999 - protein, 12 aa, Homo sapiens
  CDR3 for alpha chain variable domain of TCR clone 143000 (TRAV2, TRAJ33)
CAVPDSNYQLIW

SEQ ID NO: 286000 - protein, 17 aa, Homo sapiens
  CDR3 for beta chain variable domain of TCR clone 143000 (TRBV6-5, TRBJ2-3)
CASSYGTSLYKSDTQYC

SEQ ID NO: 286001 - protein, 15 aa, Homo sapiens
  CDR3 for alpha chain variable domain of TCR clone 143001 (TRAV16, TRAJ4)
CALEDPSGGYNKLIF

SEQ ID NO: 286002 - protein, 13 aa, Homo sapiens
  CDR3 for beta chain variable domain of TCR clone 143001 (TRBV7-3, TRBJ2-7)
CASSQAGGYEQNF

SEQ ID NO: 286003 - protein, 18 aa, Homo sapiens
  CDR3 for alpha chain variable domain of TCR clone 143002 (TRAV38-2/DV8, TRAJ42)
CAYRSADLTGGSQGNPIL

SEQ ID NO: 286004 - protein, 12 aa, Homo sapiens
  CDR3 for beta chain variable domain of TCR clone 143002 (TRBV11-2, TRBJ2-2)
CASSLGGGELFF

SEQ ID NO: 286005 - protein, 13 aa, Homo sapiens
  CDR3 for alpha chain variable domain of TCR clone 143003 (TRAV27, TRAJ45)
CRSSGGGADGLTF

SEQ ID NO: 286006 - protein, 11 aa, Homo sapiens
  CDR3 for beta chain variable domain of TCR clone 143003 (TRBV19, TRBJ1-1)
CASSIGGEAFF

SEQ ID NO: 286007 - protein, 12 aa, Homo sapiens
  CDR3 for alpha chain variable domain of TCR clone 143004 (TRAV12-3, TRAJ17)
CAMTLTGNKLTS

SEQ ID NO: 286008 - protein, 14 aa, Homo sapiens
  CDR3 for beta chain variable domain of TCR clone 143004 (TRBV25-1, TRBJ1-1)
CASTHLGGNTEAFF

SEQ ID NO: 286009 - protein, 12 aa, Homo sapiens
  CDR3 for alpha chain variable domain of TCR clone 143005 (TRAV13-1, TRAJ49)
CAASPMGNQFYF

SEQ ID NO: 286010 - protein, 13 aa, Homo sapiens
  CDR3 for beta chain variable domain of TCR clone 143005 (TRBV20-1, TRBJ2-2)
CSASSAGTGELFF

SEQ ID NO: 286011 - protein, 12 aa, Homo sapiens
  CDR3 for alpha chain variable domain of TCR clone 143006 (TRAV16, TRAJ10)
CSRTGGGNKLTF

SEQ ID NO: 286012 - protein, 18 aa, Homo sapiens
  CDR3 for beta chain variable domain of TCR clone 143006 (TRBV28, TRBJ2-3)
CASSSPGLAGEGTDTQYF

SEQ ID NO: 286013 - protein, 13 aa, Homo sapiens
  CDR3 for alpha chain variable domain of TCR clone 143007 (TRAV1-2, TRAJ9)
CAALNTGGFKTIF

SEQ ID NO: 286014 - protein, 14 aa, Homo sapiens
  CDR3 for beta chain variable domain of TCR clone 143007 (TRBV20-1, TRBJ2-4)
CSAVAGGPGNIQYF

SEQ ID NO: 286015 - protein, 12 aa, Homo sapiens
  CDR3 for alpha chain variable domain of TCR clone 143008 (TRAV27, TRAJ33)
CAGDGSNYQLIW

SEQ ID NO: 286016 - protein, 17 aa, Homo sapiens
  CDR3 for beta chain variable domain of TCR clone 143008 (TRBV7-8, TRBJ2-6)
CASSAGTGGAGANVLTF

SEQ ID NO: 286017 - protein, 14 aa, Homo sapiens
  CDR3 for alpha chain variable domain of TCR clone 143009 (TRAV16, TRAJ54)
CALSLIQGAQKLVF

SEQ ID NO: 286018 - protein, 15 aa, Homo sapiens
  CDR3 for beta chain variable domain of TCR clone 143009 (TRBV11-2, TRBJ2-1)
CASSRNRGLMYEQFF

SEQ ID NO: 286019 - protein, 15 aa, Homo sapiens
  CDR3 for alpha chain variable domain of TCR clone 143010 (TRAV12-2, TRAJ43)
CAFDMRFGAGTRLTV

SEQ ID NO: 286020 - protein, 18 aa, Homo sapiens
  CDR3 for beta chain variable domain of TCR clone 143010 (TRBV20-1, TRBJ2-3)
CSASGLAGAPGTTDTQYF

SEQ ID NO: 286021 - protein, 16 aa, Homo sapiens
  CDR3 for alpha chain variable domain of TCR clone 143011 (TRAV30, TRAJ24)
CGTEIVDADSWGKFQF

SEQ ID NO: 286022 - protein, 15 aa, Homo sapiens
  CDR3 for beta chain variable domain of TCR clone 143011 (TRBV28, TRBJ2-3)
CPSSPDRQGANTQYF

SEQ ID NO: 286023 - protein, 21 aa, Homo sapiens
  CDR3 for alpha chain variable domain of TCR clone 143012 (TRAV12-1, TRAJ37)
CVVKGGLWQHRQTNLLARDNF

SEQ ID NO: 286024 - protein, 12 aa, Homo sapiens
  CDR3 for beta chain variable domain of TCR clone 143012 (TRBV20-1, TRBJ1-2)
CSAPGFNYGYTF

SEQ ID NO: 286025 - protein, 11 aa, Homo sapiens
  CDR3 for alpha chain variable domain of TCR clone 143013 (TRAV1-2, TRAJ40)
CAVPGTCKYIF

SEQ ID NO: 286026 - protein, 15 aa, Homo sapiens
  CDR3 for beta chain variable domain of TCR clone 143013 (TRBV5-1, TRBJ1-2)
CASSMNSQQKYGYTF

SEQ ID NO: 286027 - protein, 15 aa, Homo sapiens
  CDR3 for alpha chain variable domain of TCR clone 143014 (TRAV13-1, TRAJ5)
CEASPRGHGQESTYF

SEQ ID NO: 286028 - protein, 15 aa, Homo sapiens
  CDR3 for beta chain variable domain of TCR clone 143014 (TRBV6-1, TRBJ2-3)
CASSERGGITDTQYF

SEQ ID NO: 286029 - protein, 16 aa, Homo sapiens
  CDR3 for alpha chain variable domain of TCR clone 143015 (TRAV3, TRAJ18)
CAVRDGRGSTLGRLSF

SEQ ID NO: 286030 - protein, 15 aa, Homo sapiens
  CDR3 for beta chain variable domain of TCR clone 143015 (TRBV7-9, TRBJ1-6)
CVSSSPGRGNSPLHF

SEQ ID NO: 286031 - protein, 16 aa, Homo sapiens
  CDR3 for alpha chain variable domain of TCR clone 143016 (TRAV17, TRAJ53)
CATDALSGGSNYKLTF

SEQ ID NO: 286032 - protein, 14 aa, Homo sapiens
  CDR3 for beta chain variable domain of TCR clone 143016 (TRBV7-2, TRBJ2-5)
CASSPRGSSETQYF

SEQ ID NO: 286033 - protein, 16 aa, Homo sapiens
  CDR3 for alpha chain variable domain of TCR clone 143017 (TRAV12-2, TRAJ45)
CAVNRGSGGGADGLTF

SEQ ID NO: 286034 - protein, 11 aa, Homo sapiens
  CDR3 for beta chain variable domain of TCR clone 143017 (TRBV6-3, TRBJ2-3)
CATGQADTQYF

SEQ ID NO: 286035 - protein, 16 aa, Homo sapiens
  CDR3 for alpha chain variable domain of TCR clone 143018 (TRAV26-1, TRAJ37)
CIVRGDGSGNTGKLIF

SEQ ID NO: 286036 - protein, 16 aa, Homo sapiens
  CDR3 for beta chain variable domain of TCR clone 143018 (TRBV19, TRBJ2-2)
CASRSPGTGATGELFF

SEQ ID NO: 286037 - protein, 17 aa, Homo sapiens
  CDR3 for alpha chain variable domain of TCR clone 143019 (TRAV23/DV6, TRAJ58)
CAARLLRGETSGSRLTF

SEQ ID NO: 286038 - protein, 12 aa, Homo sapiens
  CDR3 for beta chain variable domain of TCR clone 143019 (TRBV28, TRBJ2-3)
CASSLYRDTQYF

SEQ ID NO: 286039 - protein, 14 aa, Homo sapiens
  CDR3 for alpha chain variable domain of TCR clone 143020 (TRAV3, TRAJ22)
CAVRDYGSARQLTF

SEQ ID NO: 286040 - protein, 15 aa, Homo sapiens
  CDR3 for beta chain variable domain of TCR clone 143020 (TRBV11-3, TRBJ2-7)
CASSPGPASSYEQYF

SEQ ID NO: 286041 - protein, 14 aa, Homo sapiens
  CDR3 for alpha chain variable domain of TCR clone 143021 (TRAV12-1, TRAJ9)
CVVNRRTGGFKTIF

SEQ ID NO: 286042 - protein, 14 aa, Homo sapiens
  CDR3 for beta chain variable domain of TCR clone 143021 (TRBV7-9, TRBJ2-2)
CASSGLADTGELFF

SEQ ID NO: 286043 - protein, 14 aa, Homo sapiens
  CDR3 for alpha chain variable domain of TCR clone 143022 (TRAV1-2, TRAJ8)
CAVREDTGFQKLVF

SEQ ID NO: 286044 - protein, 20 aa, Homo sapiens
  CDR3 for beta chain variable domain of TCR clone 143022 (TRBV7-8, TRBJ2-2)
CASSHLFPGPTIHITGDLFF

SEQ ID NO: 286045 - protein, 14 aa, Homo sapiens
  CDR3 for alpha chain variable domain of TCR clone 143023 (TRAV16, TRAJ57)
CALPAQGGSEKMVF

SEQ ID NO: 286046 - protein, 15 aa, Homo sapiens
  CDR3 for beta chain variable domain of TCR clone 143023 (TRBV28, TRBJ1-3)
CASWGGHLSGNTIYF

SEQ ID NO: 286047 - protein, 15 aa, Homo sapiens
  CDR3 for alpha chain variable domain of TCR clone 143024 (TRAV12-1, TRAJ45)
CVVLSGGGGADGLTF

SEQ ID NO: 286048 - protein, 14 aa, Homo sapiens
  CDR3 for beta chain variable domain of TCR clone 143024 (TRBV11-2, TRBJ2-5)
FASSRTGGIETQYF

SEQ ID NO: 286049 - protein, 12 aa, Homo sapiens
  CDR3 for alpha chain variable domain of TCR clone 143025 (TRAV12-3, TRAJ17)
CTMTLTGNKLTF

SEQ ID NO: 286050 - protein, 15 aa, Homo sapiens
  CDR3 for beta chain variable domain of TCR clone 143025 (TRBV11-3, TRBJ2-3)
CASLKDGREGDTQYF

SEQ ID NO: 286051 - protein, 11 aa, Homo sapiens
  CDR3 for alpha chain variable domain of TCR clone 143026 (TRAV35, TRAJ34)
CWARNTDKLIF

SEQ ID NO: 286052 - protein, 12 aa, Homo sapiens
  CDR3 for beta chain variable domain of TCR clone 143026 (TRBV12-5, TRBJ2-5)
CASGQGVETQYV

SEQ ID NO: 286053 - protein, 17 aa, Homo sapiens
  CDR3 for alpha chain variable domain of TCR clone 143027 (TRAV13-1, TRAJ32)
CAASNGWWCYKQAHLWN

SEQ ID NO: 286054 - protein, 15 aa, Homo sapiens
  CDR3 for beta chain variable domain of TCR clone 143027 (TRBV20-1, TRBJ1-2)
CSAIRTGAFNYGYTF

SEQ ID NO: 286055 - protein, 15 aa, Homo sapiens
  CDR3 for alpha chain variable domain of TCR clone 143028 (TRAV8-4, TRAJ53)
CAVSDGGGSNYKLTF

SEQ ID NO: 286056 - protein, 15 aa, Homo sapiens
  CDR3 for beta chain variable domain of TCR clone 143028 (TRBV19, TRBJ2-5)
CASPGLAGAQETQYF

SEQ ID NO: 286057 - protein, 15 aa, Homo sapiens
  CDR3 for alpha chain variable domain of TCR clone 143029 (TRAV8-2, TRAJ23)
CVVSPLITREESLSS

SEQ ID NO: 286058 - protein, 14 aa, Homo sapiens
  CDR3 for beta chain variable domain of TCR clone 143029 (TRBV19, TRBJ2-3)
CASPTFVLSGEQFF

SEQ ID NO: 286059 - protein, 13 aa, Homo sapiens
  CDR3 for alpha chain variable domain of TCR clone 143030 (TRAV23/DV6, TRAJ22)
CAPYSGSARQLTF

SEQ ID NO: 286060 - protein, 13 aa, Homo sapiens
  CDR3 for beta chain variable domain of TCR clone 143030 (TRBV7-9, TRBJ1-2)
CASSLKQNYGCTF

SEQ ID NO: 286061 - protein, 11 aa, Homo sapiens
  CDR3 for alpha chain variable domain of TCR clone 143031 (TRAV13-1, TRAJ6)
CAPLGSYIPTF

SEQ ID NO: 286062 - protein, 12 aa, Homo sapiens
  CDR3 for beta chain variable domain of TCR clone 143031 (TRBV11-2, TRBJ2-1)
CASSPGNNEQFF

SEQ ID NO: 286063 - protein, 16 aa, Homo sapiens
  CDR3 for alpha chain variable domain of TCR clone 143032 (TRAV3, TRAJ10)
CAVRDMRAGGGNKLTF

SEQ ID NO: 286064 - protein, 14 aa, Homo sapiens
  CDR3 for beta chain variable domain of TCR clone 143032 (TRBV7-9, TRBJ1-1)
CARTPLQSYTEAFF

SEQ ID NO: 286065 - protein, 15 aa, Homo sapiens
  CDR3 for alpha chain variable domain of TCR clone 143033 (TRAV12-3, TRAJ6)
CAMSATTGGSYIPTF

SEQ ID NO: 286066 - protein, 16 aa, Homo sapiens
  CDR3 for beta chain variable domain of TCR clone 143033 (TRBV20-1, TRBJ1-2)
RSDSMGQGVANYGYTF

SEQ ID NO: 286067 - protein, 12 aa, Homo sapiens
  CDR3 for alpha chain variable domain of TCR clone 143034 (TRAV27, TRAJ13)
CAGAGGYQKVTF

SEQ ID NO: 286068 - protein, 12 aa, Homo sapiens
  CDR3 for beta chain variable domain of TCR clone 143034 (TRBV2, TRBJ2-1)
CAKREGYNEQFF

SEQ ID NO: 286069 - protein, 14 aa, Homo sapiens
  CDR3 for alpha chain variable domain of TCR clone 143035 (TRAV12-3, TRAJ12)
CAMSEVDSSYKLIF

SEQ ID NO: 286070 - protein, 16 aa, Homo sapiens
  CDR3 for beta chain variable domain of TCR clone 143035 (TRBV5-4, TRBJ2-3)
CASQQPGAGGADTQYF

SEQ ID NO: 286071 - protein, 15 aa, Homo sapiens
  CDR3 for alpha chain variable domain of TCR clone 143036 (TRAV21, TRAJ53)
CATLDSGGSNYKLTF

SEQ ID NO: 286072 - protein, 15 aa, Homo sapiens
  CDR3 for beta chain variable domain of TCR clone 143036 (TRBV19, TRBJ2-4)
CASRGPRRGENIQYF

SEQ ID NO: 286073 - protein, 17 aa, Homo sapiens
  CDR3 for alpha chain variable domain of TCR clone 143037 (TRAV12-2, TRAJ52)
CAVNPYAGGTSYGKLTF

SEQ ID NO: 286074 - protein, 15 aa, Homo sapiens
  CDR3 for beta chain variable domain of TCR clone 143037 (TRBV28, TRBJ2-7)
CASSPGGRGFYEQYF

SEQ ID NO: 286075 - protein, 13 aa, Homo sapiens
  CDR3 for alpha chain variable domain of TCR clone 143038 (TRAV12-1, TRAJ39)
CVALNNAGNMLTF

SEQ ID NO: 286076 - protein, 16 aa, Homo sapiens
  CDR3 for beta chain variable domain of TCR clone 143038 (TRBV19, TRBJ2-1)
CASSKAGPSSYNEQFF

SEQ ID NO: 286077 - protein, 13 aa, Homo sapiens
  CDR3 for alpha chain variable domain of TCR clone 143039 (TRAV27, TRAJ6)
CAGGTRGSYRPTF

SEQ ID NO: 286078 - protein, 14 aa, Homo sapiens
  CDR3 for beta chain variable domain of TCR clone 143039 (TRBV20-1, TRBJ2-4)
CSASGRVGENIQYF

SEQ ID NO: 286079 - protein, 11 aa, Homo sapiens
  CDR3 for alpha chain variable domain of TCR clone 143040 (TRAV12-3, TRAJ43)
CAISVSNDMRF

SEQ ID NO: 286080 - protein, 16 aa, Homo sapiens
  CDR3 for beta chain variable domain of TCR clone 143040 (TRBV2, TRBJ2-3)
CASSTSVEGVTDTQYF

SEQ ID NO: 286081 - protein, 14 aa, Homo sapiens
  CDR3 for alpha chain variable domain of TCR clone 143041 (TRAV38-2/DV8, TRAJ31)
CAYRSDTNNARLMF

SEQ ID NO: 286082 - protein, 16 aa, Homo sapiens
  CDR3 for beta chain variable domain of TCR clone 143041 (TRBV12-4, TRBJ1-5)
CASSRPVGGSNQPQHF

SEQ ID NO: 286083 - protein, 14 aa, Homo sapiens
  CDR3 for alpha chain variable domain of TCR clone 143042 (TRAV38-1, TRAJ29)
CAFITPSGNTPLIF

SEQ ID NO: 286084 - protein, 19 aa, Homo sapiens
  CDR3 for beta chain variable domain of TCR clone 143042 (TRBV18, TRBJ2-7)
CASSPRGGGLRAVLRAGHQ

SEQ ID NO: 286085 - protein, 13 aa, Homo sapiens
  CDR3 for alpha chain variable domain of TCR clone 143043 (TRAV21, TRAJ20)
CAVGLRVDYKLSF

SEQ ID NO: 286086 - protein, 15 aa, Homo sapiens
  CDR3 for beta chain variable domain of TCR clone 143043 (TRBV6-1, TRBJ1-1)
CASSRQGNTGAFLDK

SEQ ID NO: 286087 - protein, 14 aa, Homo sapiens
  CDR3 for alpha chain variable domain of TCR clone 143044 (TRAV13-1, TRAJ35)
RAASKGGFGNVLHC

SEQ ID NO: 286088 - protein, 14 aa, Homo sapiens
  CDR3 for beta chain variable domain of TCR clone 143044 (TRBV25-1, TRBJ1-1)
CASTHLGGNTEAFF

SEQ ID NO: 286089 - protein, 20 aa, Homo sapiens
  CDR3 for alpha chain variable domain of TCR clone 143045 (TRAV26-1, TRAJ38)
CIADNAGNNHIQNPDPAVYQ

SEQ ID NO: 286090 - protein, 13 aa, Homo sapiens
  CDR3 for beta chain variable domain of TCR clone 143045 (TRBV20-1, TRBJ2-7)
CSAPGLADYEQYF

SEQ ID NO: 286091 - protein, 15 aa, Homo sapiens
  CDR3 for alpha chain variable domain of TCR clone 143046 (TRAV26-2, TRAJ57)
CILRDIRGGSEKLVF

SEQ ID NO: 286092 - protein, 11 aa, Homo sapiens
  CDR3 for beta chain variable domain of TCR clone 143046 (TRBV6-3, TRBJ2-3)
CAAGQADTQYF

SEQ ID NO: 286093 - protein, 15 aa, Homo sapiens
  CDR3 for alpha chain variable domain of TCR clone 143047 (TRAV12-1, TRAJ6)
CGELPPSGGSYIPTF

SEQ ID NO: 286094 - protein, 13 aa, Homo sapiens
  CDR3 for beta chain variable domain of TCR clone 143047 (TRBV7-3, TRBJ2-1)
CASSVDSYNEQFF

SEQ ID NO: 286095 - protein, 10 aa, Homo sapiens
  CDR3 for alpha chain variable domain of TCR clone 143048 (TRAV1-2, TRAJ20)
CALNDYKLSF

SEQ ID NO: 286096 - protein, 13 aa, Homo sapiens
  CDR3 for beta chain variable domain of TCR clone 143048 (TRBV10-3, TRBJ2-7)
CASKLAVNYEQYF

SEQ ID NO: 286097 - protein, 12 aa, Homo sapiens
  CDR3 for alpha chain variable domain of TCR clone 143049 (TRAV3, TRAJ20)
CAVRDGDYKLSF

SEQ ID NO: 286098 - protein, 17 aa, Homo sapiens
  CDR3 for beta chain variable domain of TCR clone 143049 (TRBV28, TRBJ2-5)
CASSRQGGLAGAETQYF

SEQ ID NO: 286099 - protein, 15 aa, Homo sapiens
  CDR3 for alpha chain variable domain of TCR clone 143050 (TRAV8-4, TRAJ3)
CAVTGENLVQQYFQD

SEQ ID NO: 286100 - protein, 16 aa, Homo sapiens
  CDR3 for beta chain variable domain of TCR clone 143050 (TRBV4-2, TRBJ1-1)
CASSQAGFGMNTEAFF

SEQ ID NO: 286101 - protein, 15 aa, Homo sapiens
  CDR3 for alpha chain variable domain of TCR clone 143051 (TRAV17, TRAJ37)
CATDHGSSNTGKLIS

SEQ ID NO: 286102 - protein, 14 aa, Homo sapiens
  CDR3 for beta chain variable domain of TCR clone 143051 (TRBV7-2, TRBJ2-3)
CASSRTSGADTQYF

SEQ ID NO: 286103 - protein, 13 aa, Homo sapiens
  CDR3 for alpha chain variable domain of TCR clone 143052 (TRAV2, TRAJ40)
CAVVTSGTYNYIF

SEQ ID NO: 286104 - protein, 12 aa, Homo sapiens
  CDR3 for beta chain variable domain of TCR clone 143052 (TRBV6-3, TRBJ2-7)
CASSLTPYEQYF

SEQ ID NO: 286105 - protein, 18 aa, Homo sapiens
  CDR3 for alpha chain variable domain of TCR clone 143053 (TRAV12-3, TRAJ52)
CAMSRTNAGGTSYGKLTF

SEQ ID NO: 286106 - protein, 17 aa, Homo sapiens
  CDR3 for beta chain variable domain of TCR clone 143053 (TRBV7-3, TRBJ2-3)
CASSIMKRMRGADTQYF

SEQ ID NO: 286107 - protein, 13 aa, Homo sapiens
  CDR3 for alpha chain variable domain of TCR clone 143054 (TRAV16, TRAJ54)
CALMVQGAQKLVF

SEQ ID NO: 286108 - protein, 12 aa, Homo sapiens
  CDR3 for beta chain variable domain of TCR clone 143054 (TRBV18, TRBJ2-7)
CASSTAMGEQYY

SEQ ID NO: 286109 - protein, 14 aa, Homo sapiens
  CDR3 for alpha chain variable domain of TCR clone 143055 (TRAV23/DV6, TRAJ8)
CAASKNTGFQKLVF

SEQ ID NO: 286110 - protein, 16 aa, Homo sapiens
  CDR3 for beta chain variable domain of TCR clone 143055 (TRBV4-1, TRBJ2-6)
CASCQVGDPGANVLTF

SEQ ID NO: 286111 - protein, 14 aa, Homo sapiens
  CDR3 for alpha chain variable domain of TCR clone 143056 (TRAV9-2, TRAJ39)
CAPYIYNAGNMLTF

SEQ ID NO: 286112 - protein, 16 aa, Homo sapiens
  CDR3 for beta chain variable domain of TCR clone 143056 (TRBV28, TRBJ2-5)
CASSFSPAGGWETQYF

SEQ ID NO: 286113 - protein, 12 aa, Homo sapiens
  CDR3 for alpha chain variable domain of TCR clone 143057 (TRAV13-1, TRAJ48)
CAANFGNEKLTF

SEQ ID NO: 286114 - protein, 20 aa, Homo sapiens
  CDR3 for beta chain variable domain of TCR clone 143057 (TRBV7-8, TRBJ2-2)
CASSHLFPGPTIHITGELFF

SEQ ID NO: 286115 - protein, 13 aa, Homo sapiens
  CDR3 for alpha chain variable domain of TCR clone 143058 (TRAV21, TRAJ20)
CAVGLRVDYKLSF

SEQ ID NO: 286116 - protein, 13 aa, Homo sapiens
  CDR3 for beta chain variable domain of TCR clone 143058 (TRBV14, TRBJ1-1)
CASSREFGTEAFF

SEQ ID NO: 286117 - protein, 14 aa, Homo sapiens
  CDR3 for alpha chain variable domain of TCR clone 143059 (TRAV2, TRAJ37)
CAVDFTSNTGKLII

SEQ ID NO: 286118 - protein, 14 aa, Homo sapiens
  CDR3 for beta chain variable domain of TCR clone 143059 (TRBV7-7, TRBJ2-7)
CASSLGRGVGEQYF

SEQ ID NO: 286119 - protein, 15 aa, Homo sapiens
  CDR3 for alpha chain variable domain of TCR clone 143060 (TRAV17, TRAJ13)
CATDAGSGGYQKVTF

SEQ ID NO: 286120 - protein, 17 aa, Homo sapiens
  CDR3 for beta chain variable domain of TCR clone 143060 (TRBV11-2, TRBJ2-1)
CAGSLYPPGVEYNEQFF

SEQ ID NO: 286121 - protein, 16 aa, Homo sapiens
  CDR3 for alpha chain variable domain of TCR clone 143061 (TRAV17, TRAJ53)
CATDALSGGSNYTLTF

SEQ ID NO: 286122 - protein, 12 aa, Homo sapiens
  CDR3 for beta chain variable domain of TCR clone 143061 (TRBV5-1, TRBJ2-7)
CASSFRGYEQYF

SEQ ID NO: 286123 - protein, 13 aa, Homo sapiens
  CDR3 for alpha chain variable domain of TCR clone 143062 (TRAV36/DV7, TRAJ49)
CAVEANTGNQFYF

SEQ ID NO: 286124 - protein, 13 aa, Homo sapiens
  CDR3 for beta chain variable domain of TCR clone 143062 (TRBV10-3, TRBJ2-7)
CATKLAVNYEQYF

SEQ ID NO: 286125 - protein, 12 aa, Homo sapiens
  CDR3 for alpha chain variable domain of TCR clone 143063 (TRAV27, TRAJ9)
CAGESGGFKTIF

SEQ ID NO: 286126 - protein, 12 aa, Homo sapiens
  CDR3 for beta chain variable domain of TCR clone 143063 (TRBV7-9, TRBJ2-7)
CASSIKREEQYF

SEQ ID NO: 286127 - protein, 12 aa, Homo sapiens
  CDR3 for alpha chain variable domain of TCR clone 143064 (TRAV12-1, TRAJ40)
CVFYSGTYKYIF

SEQ ID NO: 286128 - protein, 16 aa, Homo sapiens
  CDR3 for beta chain variable domain of TCR clone 143064 (TRBV7-9, TRBJ1-2)
CASSPGGGAINYGYTF

SEQ ID NO: 286129 - protein, 15 aa, Homo sapiens
  CDR3 for alpha chain variable domain of TCR clone 143065 (TRAV12-1, TRAJ4)
CVVNPFSGGYNKLIF

SEQ ID NO: 286130 - protein, 13 aa, Homo sapiens
  CDR3 for beta chain variable domain of TCR clone 143065 (TRBV20-1, TRBJ1-1)
CSAPLGGGTEAFF

SEQ ID NO: 286131 - protein, 16 aa, Homo sapiens
  CDR3 for alpha chain variable domain of TCR clone 143066 (TRAV30, TRAJ24)
VGTEIVDADSWGKFQF

SEQ ID NO: 286132 - protein, 14 aa, Homo sapiens
  CDR3 for beta chain variable domain of TCR clone 143066 (TRBV7-2, TRBJ1-2)
CASSQTGSTYGYTF

SEQ ID NO: 286133 - protein, 12 aa, Homo sapiens
  CDR3 for alpha chain variable domain of TCR clone 143067 (TRAV10, TRAJ6)
CVVSEGSYIPTF

SEQ ID NO: 286134 - protein, 13 aa, Homo sapiens
  CDR3 for beta chain variable domain of TCR clone 143067 (TRBV27, TRBJ1-4)
CASSLMGDEKLFF

SEQ ID NO: 286135 - protein, 17 aa, Homo sapiens
  CDR3 for alpha chain variable domain of TCR clone 143068 (TRAV13-1, TRAJ52)
CAASSGAGGTSYGKLTF

SEQ ID NO: 286136 - protein, 15 aa, Homo sapiens
  CDR3 for beta chain variable domain of TCR clone 143068 (TRBV27, TRBJ2-1)
CASSNGGGSSNEQFF

SEQ ID NO: 286137 - protein, 12 aa, Homo sapiens
  CDR3 for alpha chain variable domain of TCR clone 143069 (TRAV21, TRAJ37)
CAVRGNTGKLIF

SEQ ID NO: 286138 - protein, 13 aa, Homo sapiens
  CDR3 for beta chain variable domain of TCR clone 143069 (TRBV7-8, TRBJ2-7)
CASSFAGLYEQYF

SEQ ID NO: 286139 - protein, 10 aa, Homo sapiens
  CDR3 for alpha chain variable domain of TCR clone 143070 (TRAV2, TRAJ33)
CAVESNYQLI

SEQ ID NO: 286140 - protein, 15 aa, Homo sapiens
  CDR3 for beta chain variable domain of TCR clone 143070 (TRBV19, TRBJ1-1)
CASTSGQIQNTEAFF

SEQ ID NO: 286141 - protein, 16 aa, Homo sapiens
  CDR3 for alpha chain variable domain of TCR clone 143071 (TRAV30, TRAJ24)
CGTEIVDADSWGKFQF

SEQ ID NO: 286142 - protein, 14 aa, Homo sapiens
  CDR3 for beta chain variable domain of TCR clone 143071 (TRBV12-5, TRBJ2-5)
CASGSRIYQETQYF

SEQ ID NO: 286143 - protein, 12 aa, Homo sapiens
  CDR3 for alpha chain variable domain of TCR clone 143072 (TRAV1-1, TRAJ39)
CAVPVVGNMLTF

SEQ ID NO: 286144 - protein, 17 aa, Homo sapiens
  CDR3 for beta chain variable domain of TCR clone 143072 (TRBV28, TRBJ2-5)
CASSTPEGDGLQETQYF

SEQ ID NO: 286145 - protein, 14 aa, Homo sapiens
  CDR3 for alpha chain variable domain of TCR clone 143073 (TRAV10, TRAJ36)
CVVKYEGGANNIFF

SEQ ID NO: 286146 - protein, 16 aa, Homo sapiens
  CDR3 for beta chain variable domain of TCR clone 143073 (TRBV7-3, TRBJ2-2)
CASSLKRGTLSGELFF

SEQ ID NO: 286147 - protein, 15 aa, Homo sapiens
  CDR3 for alpha chain variable domain of TCR clone 143074 (TRAV26-1, TRAJ29)
CVVRVEGSGNTPLVF

SEQ ID NO: 286148 - protein, 14 aa, Homo sapiens
  CDR3 for beta chain variable domain of TCR clone 143074 (TRBV25-1, TRBJ1-1)
CASTHLGGNTEAFF

SEQ ID NO: 286149 - protein, 16 aa, Homo sapiens
  CDR3 for alpha chain variable domain of TCR clone 143075 (TRAV30, TRAJ24)
CGTGIVDADSWGKFKF

SEQ ID NO: 286150 - protein, 12 aa, Homo sapiens
  CDR3 for beta chain variable domain of TCR clone 143075 (TRBV11-2, TRBJ2-2)
CASSLGGGELFF

SEQ ID NO: 286151 - protein, 12 aa, Homo sapiens
  CDR3 for alpha chain variable domain of TCR clone 143076 (TRAV13-1, TRAJ21)
CAAKEGLNKFYF

SEQ ID NO: 286152 - protein, 14 aa, Homo sapiens
  CDR3 for beta chain variable domain of TCR clone 143076 (TRBV5-4, TRBJ1-1)
CASSLDSRRDEAFS

SEQ ID NO: 286153 - protein, 14 aa, Homo sapiens
  CDR3 for alpha chain variable domain of TCR clone 143077 (TRAV12-1, TRAJ30)
CVVNIGGRDDKIIF

SEQ ID NO: 286154 - protein, 13 aa, Homo sapiens
  CDR3 for beta chain variable domain of TCR clone 143077 (TRBV12-5, TRBJ2-1)
CASGLGRWNEQFF

SEQ ID NO: 286155 - protein, 19 aa, Homo sapiens
  CDR3 for alpha chain variable domain of TCR clone 143078 (TRAV26-1, TRAJ52)
CIVRVANNAGGTSYGKLTF

SEQ ID NO: 286156 - protein, 16 aa, Homo sapiens
  CDR3 for beta chain variable domain of TCR clone 143078 (TRBV10-3, TRBJ2-1)
CAISGVGDGGGGEQFF

SEQ ID NO: 286157 - protein, 11 aa, Homo sapiens
  CDR3 for alpha chain variable domain of TCR clone 143079 (TRAV27, TRAJ45)
CAGAQEEVLTY

SEQ ID NO: 286158 - protein, 15 aa, Homo sapiens
  CDR3 for beta chain variable domain of TCR clone 143079 (TRBV9, TRBJ2-2)
CASSDFAGASGELFF

SEQ ID NO: 286159 - protein, 13 aa, Homo sapiens
  CDR3 for alpha chain variable domain of TCR clone 143080 (TRAV12-3, TRAJ5)
CAMIYTGRRALTF

SEQ ID NO: 286160 - protein, 12 aa, Homo sapiens
  CDR3 for beta chain variable domain of TCR clone 143080 (TRBV18, TRBJ1-4)
CASTPSREKLFF

SEQ ID NO: 286161 - protein, 17 aa, Homo sapiens
  CDR3 for alpha chain variable domain of TCR clone 143081 (TRAV16, TRAJ42)
CALSPKLYGGSQGNLIF

SEQ ID NO: 286162 - protein, 13 aa, Homo sapiens
  CDR3 for beta chain variable domain of TCR clone 143081 (TRBV19, TRBJ1-5)
CASSTRRDKHQHF

SEQ ID NO: 286163 - protein, 14 aa, Homo sapiens
  CDR3 for alpha chain variable domain of TCR clone 143082 (TRAV12-3, TRAJ10)
SHLPLTGGGNKLNF

SEQ ID NO: 286164 - protein, 14 aa, Homo sapiens
  CDR3 for beta chain variable domain of TCR clone 143082 (TRBV4-1, TRBJ2-2)
CASSQAVNTGELFF

SEQ ID NO: 286165 - protein, 13 aa, Homo sapiens
  CDR3 for alpha chain variable domain of TCR clone 143083 (TRAV21, TRAJ57)
CAVTQGGSEKLVF

SEQ ID NO: 286166 - protein, 14 aa, Homo sapiens
  CDR3 for beta chain variable domain of TCR clone 143083 (TRBV4-2, TRBJ1-2)
CASSPGGSNYGYTF

SEQ ID NO: 286167 - protein, 15 aa, Homo sapiens
  CDR3 for alpha chain variable domain of TCR clone 143084 (TRAV8-3, TRAJ45)
CASSYSGGGADGLTF

SEQ ID NO: 286168 - protein, 14 aa, Homo sapiens
  CDR3 for beta chain variable domain of TCR clone 143084 (TRBV9, TRBJ2-7)
CASSVGVGSYEQYF

SEQ ID NO: 286169 - protein, 15 aa, Homo sapiens
  CDR3 for alpha chain variable domain of TCR clone 143085 (TRAV8-3, TRAJ23)
CAVGDRYNQGGKLIF

SEQ ID NO: 286170 - protein, 17 aa, Homo sapiens
  CDR3 for beta chain variable domain of TCR clone 143085 (TRBV4-1, TRBJ1-4)
CASSQEGPRGVEERLFF

SEQ ID NO: 286171 - protein, 13 aa, Homo sapiens
  CDR3 for alpha chain variable domain of TCR clone 143086 (TRAV21, TRAJ27)
CAALNTNAGKSTF

SEQ ID NO: 286172 - protein, 14 aa, Homo sapiens
  CDR3 for beta chain variable domain of TCR clone 143086 (TRBV27, TRBJ2-5)
CASSRTFLVDTQYF

SEQ ID NO: 286173 - protein, 15 aa, Homo sapiens
  CDR3 for alpha chain variable domain of TCR clone 143087 (TRAV17, TRAJ57)
CATGPPQGGSEKLVF

SEQ ID NO: 286174 - protein, 13 aa, Homo sapiens
  CDR3 for beta chain variable domain of TCR clone 143087 (TRBV27, TRBJ1-4)
CASSLMGDEKLFF

SEQ ID NO: 286175 - protein, 12 aa, Homo sapiens
  CDR3 for alpha chain variable domain of TCR clone 143088 (TRAV36/DV7, TRAJ54)
CAVVRGAQKLVF

SEQ ID NO: 286176 - protein, 12 aa, Homo sapiens
  CDR3 for beta chain variable domain of TCR clone 143088 (TRBV7-8, TRBJ2-7)
CASSLGDREQYF

SEQ ID NO: 286177 - protein, 14 aa, Homo sapiens
  CDR3 for alpha chain variable domain of TCR clone 143089 (TRAV8-1, TRAJ5)
CAVSMDTGRRALTF

SEQ ID NO: 286178 - protein, 15 aa, Homo sapiens
  CDR3 for beta chain variable domain of TCR clone 143089 (TRBV19, TRBJ2-4)
GASRGPRRGENSQYF

SEQ ID NO: 286179 - protein, 17 aa, Homo sapiens
  CDR3 for alpha chain variable domain of TCR clone 143090 (TRAV3, TRAJ6)
CAVRDGPRAGGSYIPTF

SEQ ID NO: 286180 - protein, 14 aa, Homo sapiens
  CDR3 for beta chain variable domain of TCR clone 143090 (TRBV6-1, TRBJ2-2)
CASTWQGNTGELLF

SEQ ID NO: 286181 - protein, 13 aa, Homo sapiens
  CDR3 for alpha chain variable domain of TCR clone 143091 (TRAV1-2, TRAJ9)
CAALNTGGFKTII

SEQ ID NO: 286182 - protein, 13 aa, Homo sapiens
  CDR3 for beta chain variable domain of TCR clone 143091 (TRBV7-3, TRBJ1-1)
CASSQDWGAEAFF

SEQ ID NO: 286183 - protein, 15 aa, Homo sapiens
  CDR3 for alpha chain variable domain of TCR clone 143092 (TRAV8-4, TRAJ47)
CAVSDPEEYGHKLVF

SEQ ID NO: 286184 - protein, 15 aa, Homo sapiens
  CDR3 for beta chain variable domain of TCR clone 143092 (TRBV11-2, TRBJ2-1)
CASSLGPDSYNEQFF

SEQ ID NO: 286185 - protein, 14 aa, Homo sapiens
  CDR3 for alpha chain variable domain of TCR clone 143093 (TRAV12-2, TRAJ13)
CAVKKTGGYQKGTF

SEQ ID NO: 286186 - protein, 12 aa, Homo sapiens
  CDR3 for beta chain variable domain of TCR clone 143093 (TRBV11-2, TRBJ2-2)
CASSLGGGELFF

SEQ ID NO: 286187 - protein, 16 aa, Homo sapiens
  CDR3 for alpha chain variable domain of TCR clone 143094 (TRAV4, TRAJ18)
CCVLLIGGSTLGRLYF

SEQ ID NO: 286188 - protein, 14 aa, Homo sapiens
  CDR3 for beta chain variable domain of TCR clone 143094 (TRBV5-1, TRBJ2-1)
CASSLENLYNEQFF

SEQ ID NO: 286189 - protein, 13 aa, Homo sapiens
  CDR3 for alpha chain variable domain of TCR clone 143095 (TRAV2, TRAJ40)
CAVVTSGTYKYIF

SEQ ID NO: 286190 - protein, 16 aa, Homo sapiens
  CDR3 for beta chain variable domain of TCR clone 143095 (TRBV19, TRBJ2-1)
CAGSKAGPSSYNEQFF

SEQ ID NO: 286191 - protein, 16 aa, Homo sapiens
  CDR3 for alpha chain variable domain of TCR clone 143096 (TRAV3, TRAJ4)
CAVRPSPSGGYNKLIF

SEQ ID NO: 286192 - protein, 12 aa, Homo sapiens
  CDR3 for beta chain variable domain of TCR clone 143096 (TRBV7-9, TRBJ2-7)
CASSQVVYEQYF

SEQ ID NO: 286193 - protein, 15 aa, Homo sapiens
  CDR3 for alpha chain variable domain of TCR clone 143097 (TRAV27, TRAJ38)
CAARRNAGNNRTLIW

SEQ ID NO: 286194 - protein, 13 aa, Homo sapiens
  CDR3 for beta chain variable domain of TCR clone 143097 (TRBV12-5, TRBJ2-3)
CASCDRQSDTQYF

SEQ ID NO: 286195 - protein, 16 aa, Homo sapiens
  CDR3 for alpha chain variable domain of TCR clone 143098 (TRAV30, TRAJ24)
CGTEIVDADSWGKFQF

SEQ ID NO: 286196 - protein, 14 aa, Homo sapiens
  CDR3 for beta chain variable domain of TCR clone 143098 (TRBV12-5, TRBJ2-5)
CASGSRTHQGAQYF

SEQ ID NO: 286197 - protein, 13 aa, Homo sapiens
  CDR3 for alpha chain variable domain of TCR clone 143099 (TRAV1-2, TRAJ9)
CAALNTGGFKTIF

SEQ ID NO: 286198 - protein, 13 aa, Homo sapiens
  CDR3 for beta chain variable domain of TCR clone 143099 (TRBV12-4, TRBJ1-5)
CASSPRQYQPQHF

SEQ ID NO: 286199 - protein, 15 aa, Homo sapiens
  CDR3 for alpha chain variable domain of TCR clone 143100 (TRAV3, TRAJ47)
CAVRGIGEYGNKLVF

SEQ ID NO: 286200 - protein, 14 aa, Homo sapiens
  CDR3 for beta chain variable domain of TCR clone 143100 (TRBV13, TRBJ2-5)
CASSLERVGETQYF

SEQ ID NO: 286201 - protein, 16 aa, Homo sapiens
  CDR3 for alpha chain variable domain of TCR clone 143101 (TRAV12-3, TRAJ53)
CAMSPGSGGSNYKLTF

SEQ ID NO: 286202 - protein, 15 aa, Homo sapiens
  CDR3 for beta chain variable domain of TCR clone 143101 (TRBV28, TRBJ2-3)
CASSQELGGTDTQYF

SEQ ID NO: 286203 - protein, 12 aa, Homo sapiens
  CDR3 for alpha chain variable domain of TCR clone 143102 (TRAV8-3, TRAJ6)
CAVGGGSYIPTF

SEQ ID NO: 286204 - protein, 14 aa, Homo sapiens
  CDR3 for beta chain variable domain of TCR clone 143102 (TRBV19, TRBJ2-1)
CANPTFVLSGEQFF

SEQ ID NO: 286205 - protein, 15 aa, Homo sapiens
  CDR3 for alpha chain variable domain of TCR clone 143103 (TRAV26-1, TRAJ44)
CIVRVATGTSSKLTF

SEQ ID NO: 286206 - protein, 18 aa, Homo sapiens
  CDR3 for beta chain variable domain of TCR clone 143103 (TRBV20-1, TRBJ2-3)
CSAKPLVRVARRTDTQYF

SEQ ID NO: 286207 - protein, 15 aa, Homo sapiens
  CDR3 for alpha chain variable domain of TCR clone 143104 (TRAV12-1, TRAJ41)
CVLNSRTGSGYALNF

SEQ ID NO: 286208 - protein, 11 aa, Homo sapiens
  CDR3 for beta chain variable domain of TCR clone 143104 (TRBV6-4, TRBJ2-1)
CASSDSYAQFF

SEQ ID NO: 286209 - protein, 12 aa, Homo sapiens
  CDR3 for alpha chain variable domain of TCR clone 143105 (TRAV12-3, TRAJ17)
CAMTLTGNKLTF

SEQ ID NO: 286210 - protein, 15 aa, Homo sapiens
  CDR3 for beta chain variable domain of TCR clone 143105 (TRBV15, TRBJ1-4)
CATSRDMGSYEKLFF

SEQ ID NO: 286211 - protein, 14 aa, Homo sapiens
  CDR3 for alpha chain variable domain of TCR clone 143106 (TRAV12-3, TRAJ42)
RAMNYGGSQGNLIF

SEQ ID NO: 286212 - protein, 15 aa, Homo sapiens
  CDR3 for beta chain variable domain of TCR clone 143106 (TRBV5-7, TRBJ1-5)
CASSYGKLWDQPQHC

SEQ ID NO: 286213 - protein, 13 aa, Homo sapiens
  CDR3 for alpha chain variable domain of TCR clone 143107 (TRAV1-2, TRAJ11)
CAVRDSGYSNLTF

SEQ ID NO: 286214 - protein, 16 aa, Homo sapiens
  CDR3 for beta chain variable domain of TCR clone 143107 (TRBV5-1, TRBJ2-7)
CASSWGTGGRAWEQYF

SEQ ID NO: 286215 - protein, 15 aa, Homo sapiens
  CDR3 for alpha chain variable domain of TCR clone 143108 (TRAV38-2/DV8, TRAJ48)
CAYRSGGFGNEKSTF

SEQ ID NO: 286216 - protein, 16 aa, Homo sapiens
  CDR3 for beta chain variable domain of TCR clone 143108 (TRBV28, TRBJ2-7)
CASSPCVATGDLSQYF

SEQ ID NO: 286217 - protein, 14 aa, Homo sapiens
  CDR3 for alpha chain variable domain of TCR clone 143109 (TRAV13-2, TRAJ22)
CADVTLGSARQLTF

SEQ ID NO: 286218 - protein, 16 aa, Homo sapiens
  CDR3 for beta chain variable domain of TCR clone 143109 (TRBV19, TRBJ2-1)
CASSSKGTRSYNEQFF

SEQ ID NO: 286219 - protein, 18 aa, Homo sapiens
  CDR3 for alpha chain variable domain of TCR clone 143110 (TRAV13-1, TRAJ52)
CAAKNPNAGGTSYGKLTF

SEQ ID NO: 286220 - protein, 14 aa, Homo sapiens
  CDR3 for beta chain variable domain of TCR clone 143110 (TRBV4-1, TRBJ2-2)
CASSQAVNTGEPFF

SEQ ID NO: 286221 - protein, 15 aa, Homo sapiens
  CDR3 for alpha chain variable domain of TCR clone 143111 (TRAV27, TRAJ38)
CAARRNAGNNRKLIW

SEQ ID NO: 286222 - protein, 16 aa, Homo sapiens
  CDR3 for beta chain variable domain of TCR clone 143111 (TRBV27, TRBJ2-2)
CASSFRGLVRTGELFF

SEQ ID NO: 286223 - protein, 15 aa, Homo sapiens
  CDR3 for alpha chain variable domain of TCR clone 143112 (TRAV3, TRAJ45)
CAVRTPWGGADGLTF

SEQ ID NO: 286224 - protein, 16 aa, Homo sapiens
  CDR3 for beta chain variable domain of TCR clone 143112 (TRBV6-1, TRBJ2-2)
CASSFGQGANTWELFF

SEQ ID NO: 286225 - protein, 15 aa, Homo sapiens
  CDR3 for alpha chain variable domain of TCR clone 143113 (TRAV3, TRAJ32)
CAVRSYGGATNKLIF

SEQ ID NO: 286226 - protein, 13 aa, Homo sapiens
  CDR3 for beta chain variable domain of TCR clone 143113 (TRBV20-1, TRBJ2-7)
CSARPSANYEQYF

SEQ ID NO: 286227 - protein, 14 aa, Homo sapiens
  CDR3 for alpha chain variable domain of TCR clone 143114 (TRAV1-2, TRAJ8)
CAVREDTGFKKLVF

SEQ ID NO: 286228 - protein, 13 aa, Homo sapiens
  CDR3 for beta chain variable domain of TCR clone 143114 (TRBV7-3, TRBJ2-1)
CASSLDSYNEQFF

SEQ ID NO: 286229 - protein, 18 aa, Homo sapiens
  CDR3 for alpha chain variable domain of TCR clone 143115 (TRAV26-1, TRAJ38)
CCVLFIADNAGNNRKLIW

SEQ ID NO: 286230 - protein, 13 aa, Homo sapiens
  CDR3 for beta chain variable domain of TCR clone 143115 (TRBV20-1, TRBJ1-1)
RSARGGGNTEAFF

SEQ ID NO: 286231 - protein, 12 aa, Homo sapiens
  CDR3 for alpha chain variable domain of TCR clone 143116 (TRAV17, TRAJ20)
CATDSNDYKLSF

SEQ ID NO: 286232 - protein, 14 aa, Homo sapiens
  CDR3 for beta chain variable domain of TCR clone 143116 (TRBV7-3, TRBJ2-1)
CASSLGTSANEQFF

SEQ ID NO: 286233 - protein, 16 aa, Homo sapiens
  CDR3 for alpha chain variable domain of TCR clone 143117 (TRAV8-6, TRAJ28)
CAVTSKPGAGSYQLTF

SEQ ID NO: 286234 - protein, 15 aa, Homo sapiens
  CDR3 for beta chain variable domain of TCR clone 143117 (TRBV20-1, TRBJ2-7)
CSARKGLAESYEQYF

SEQ ID NO: 286235 - protein, 17 aa, Homo sapiens
  CDR3 for alpha chain variable domain of TCR clone 143118 (TRAV3, TRAJ38)
CAVRDYLNAGNNRKLIW

SEQ ID NO: 286236 - protein, 16 aa, Homo sapiens
  CDR3 for beta chain variable domain of TCR clone 143118 (TRBV20-1, TRBJ1-4)
CSAPGQGLLTNEKLFF

SEQ ID NO: 286237 - protein, 16 aa, Homo sapiens
  CDR3 for alpha chain variable domain of TCR clone 143119 (TRAV38-1, TRAJ42)
CAFRLVRGGSQGNLIF

SEQ ID NO: 286238 - protein, 15 aa, Homo sapiens
  CDR3 for beta chain variable domain of TCR clone 143119 (TRBV2, TRBJ2-1)
CASSELAGSYNEQFF

SEQ ID NO: 286239 - protein, 23 aa, Homo sapiens
  CDR3 for alpha chain variable domain of TCR clone 143120 (TRAV8-4, TRAJ38)
CAGLNAGNNHIQNPDPAVYQLRD

SEQ ID NO: 286240 - protein, 14 aa, Homo sapiens
  CDR3 for beta chain variable domain of TCR clone 143120 (TRBV7-8, TRBJ2-3)
CASSLEAGTDTQYF

SEQ ID NO: 286241 - protein, 13 aa, Homo sapiens
  CDR3 for alpha chain variable domain of TCR clone 143121 (TRAV12-2, TRAJ42)
CAVKRGSQGNLIF

SEQ ID NO: 286242 - protein, 13 aa, Homo sapiens
  CDR3 for beta chain variable domain of TCR clone 143121 (TRBV4-1, TRBJ2-2)
CASSQENTGELFF

SEQ ID NO: 286243 - protein, 13 aa, Homo sapiens
  CDR3 for alpha chain variable domain of TCR clone 143122 (TRAV21, TRAJ45)
CAVMGGGAVGLTF

SEQ ID NO: 286244 - protein, 14 aa, Homo sapiens
  CDR3 for beta chain variable domain of TCR clone 143122 (TRBV4-3, TRBJ1-4)
CASSPLQRNEKLFF

SEQ ID NO: 286245 - protein, 14 aa, Homo sapiens
  CDR3 for alpha chain variable domain of TCR clone 143123 (TRAV2, TRAJ9)
CAVEDRSGGFKTMF

SEQ ID NO: 286246 - protein, 17 aa, Homo sapiens
  CDR3 for beta chain variable domain of TCR clone 143123 (TRBV7-8, TRBJ2-6)
CASSAGTGGAGANVLTF

SEQ ID NO: 286247 - protein, 13 aa, Homo sapiens
  CDR3 for alpha chain variable domain of TCR clone 143124 (TRAV20, TRAJ21)
CAVEGYNFNKFYF

SEQ ID NO: 286248 - protein, 16 aa, Homo sapiens
  CDR3 for beta chain variable domain of TCR clone 143124 (TRBV6-1, TRBJ2-5)
CASSETLDRGAETQYF

SEQ ID NO: 286249 - protein, 13 aa, Homo sapiens
  CDR3 for alpha chain variable domain of TCR clone 143125 (TRAV6, TRAJ20)
CALAVSHDYKLSF

SEQ ID NO: 286250 - protein, 16 aa, Homo sapiens
  CDR3 for beta chain variable domain of TCR clone 143125 (TRBV7-9, TRBJ2-1)
CASSDVAGGSYNEQFF

SEQ ID NO: 286251 - protein, 17 aa, Homo sapiens
  CDR3 for alpha chain variable domain of TCR clone 143126 (TRAV17, TRAJ28)
CATDPRRGGAGSYQLTP

SEQ ID NO: 286252 - protein, 16 aa, Homo sapiens
  CDR3 for beta chain variable domain of TCR clone 143126 (TRBV25-1, TRBJ1-1)
CASSGDRDRGRIEAFF

SEQ ID NO: 286253 - protein, 15 aa, Homo sapiens
  CDR3 for alpha chain variable domain of TCR clone 143127 (TRAV23/DV6, TRAJ18)
CAARYRGSTLVRPYF

SEQ ID NO: 286254 - protein, 13 aa, Homo sapiens
  CDR3 for beta chain variable domain of TCR clone 143127 (TRBV7-2, TRBJ2-7)
CASSSPSGSEQYF

SEQ ID NO: 286255 - protein, 12 aa, Homo sapiens
  CDR3 for alpha chain variable domain of TCR clone 143128 (TRAV27, TRAJ9)
CAGESGGFKTIF

SEQ ID NO: 286256 - protein, 14 aa, Homo sapiens
  CDR3 for beta chain variable domain of TCR clone 143128 (TRBV20-1, TRBJ2-1)
CSARGGSSYNEQFF

SEQ ID NO: 286257 - protein, 14 aa, Homo sapiens
  CDR3 for alpha chain variable domain of TCR clone 143129 (TRAV1-1, TRAJ27)
CAVIYNTNAGKSTC

SEQ ID NO: 286258 - protein, 14 aa, Homo sapiens
  CDR3 for beta chain variable domain of TCR clone 143129 (TRBV6-5, TRBJ1-2)
CASSYDGTGGGYTF

SEQ ID NO: 286259 - protein, 12 aa, Homo sapiens
  CDR3 for alpha chain variable domain of TCR clone 143130 (TRAV12-2, TRAJ8)
CAVNTGFQKLVF

SEQ ID NO: 286260 - protein, 13 aa, Homo sapiens
  CDR3 for beta chain variable domain of TCR clone 143130 (TRBV27, TRBJ1-1)
CASSLSIGAEAFF

SEQ ID NO: 286261 - protein, 14 aa, Homo sapiens
  CDR3 for alpha chain variable domain of TCR clone 143131 (TRAV12-1, TRAJ30)
CVVNIGGSDDKIIF

SEQ ID NO: 286262 - protein, 14 aa, Homo sapiens
  CDR3 for beta chain variable domain of TCR clone 143131 (TRBV7-6, TRBJ2-3)
CASSLGTVTDTQYF

SEQ ID NO: 286263 - protein, 17 aa, Homo sapiens
  CDR3 for alpha chain variable domain of TCR clone 143132 (TRAV3, TRAJ37)
CAVSVYLGSSNTGKLIF

SEQ ID NO: 286264 - protein, 15 aa, Homo sapiens
  CDR3 for beta chain variable domain of TCR clone 143132 (TRBV11-2, TRBJ1-6)
CASSLDPWAVSPLHF

SEQ ID NO: 286265 - protein, 13 aa, Homo sapiens
  CDR3 for alpha chain variable domain of TCR clone 143133 (TRAV21, TRAJ27)
CPARPGNAGKSTF

SEQ ID NO: 286266 - protein, 14 aa, Homo sapiens
  CDR3 for beta chain variable domain of TCR clone 143133 (TRBV7-6, TRBJ2-3)
CASSLGTVTDTRYF

SEQ ID NO: 286267 - protein, 14 aa, Homo sapiens
  CDR3 for alpha chain variable domain of TCR clone 143134 (TRAV8-1, TRAJ39)
CAVNASNAGNMLTF

SEQ ID NO: 286268 - protein, 13 aa, Homo sapiens
  CDR3 for beta chain variable domain of TCR clone 143134 (TRBV12-4, TRBJ2-5)
CTSSPGTEETQYF

SEQ ID NO: 286269 - protein, 19 aa, Homo sapiens
  CDR3 for alpha chain variable domain of TCR clone 143135 (TRAV1-2, TRAJ26)
CLLPLCCERPDNYDQNFVF

SEQ ID NO: 286270 - protein, 15 aa, Homo sapiens
  CDR3 for beta chain variable domain of TCR clone 143135 (TRBV9, TRBJ1-6)
CASSVAGTGDSPLLF

SEQ ID NO: 286271 - protein, 15 aa, Homo sapiens
  CDR3 for alpha chain variable domain of TCR clone 143136 (TRAV8-4, TRAJ56)
CALSGGTGANSKLTF

SEQ ID NO: 286272 - protein, 14 aa, Homo sapiens
  CDR3 for beta chain variable domain of TCR clone 143136 (TRBV7-9, TRBJ2-1)
CASSPKGGADEQFF

SEQ ID NO: 286273 - protein, 14 aa, Homo sapiens
  CDR3 for alpha chain variable domain of TCR clone 143137 (TRAV12-1, TRAJ17)
CVVNYKAAGNKLTF

SEQ ID NO: 286274 - protein, 15 aa, Homo sapiens
  CDR3 for beta chain variable domain of TCR clone 143137 (TRBV6-1, TRBJ2-1)
CASSEAAYSYNEQFF

SEQ ID NO: 286275 - protein, 10 aa, Homo sapiens
  CDR3 for alpha chain variable domain of TCR clone 143138 (TRAV23/DV6, TRAJ57)
CAASSTLSQR

SEQ ID NO: 286276 - protein, 12 aa, Homo sapiens
  CDR3 for beta chain variable domain of TCR clone 143138 (TRBV7-6, TRBJ2-7)
CASSLADSEQYF

SEQ ID NO: 286277 - protein, 14 aa, Homo sapiens
  CDR3 for alpha chain variable domain of TCR clone 143139 (TRAV2, TRAJ9)
CAVEDRSGGFKTIF

SEQ ID NO: 286278 - protein, 16 aa, Homo sapiens
  CDR3 for beta chain variable domain of TCR clone 143139 (TRBV7-3, TRBJ2-2)
CASSLKRGTLYGELFF

SEQ ID NO: 286279 - protein, 18 aa, Homo sapiens
  CDR3 for alpha chain variable domain of TCR clone 143140 (TRAV2, TRAJ32)
CCLLLCFHCGGATNKLIF

SEQ ID NO: 286280 - protein, 16 aa, Homo sapiens
  CDR3 for beta chain variable domain of TCR clone 143140 (TRBV7-9, TRBJ2-7)
CASSYPDREGGYEQYF

SEQ ID NO: 286281 - protein, 10 aa, Homo sapiens
  CDR3 for alpha chain variable domain of TCR clone 143141 (TRAV5, TRAJ34)
CAEDTDKLIF

SEQ ID NO: 286282 - protein, 13 aa, Homo sapiens
  CDR3 for beta chain variable domain of TCR clone 143141 (TRBV19, TRBJ2-7)
CASSPRQSYEQYF

SEQ ID NO: 286283 - protein, 15 aa, Homo sapiens
  CDR3 for alpha chain variable domain of TCR clone 143142 (TRAV8-3, TRAJ27)
CAVGPSKTNAGKSTF

SEQ ID NO: 286284 - protein, 16 aa, Homo sapiens
  CDR3 for beta chain variable domain of TCR clone 143142 (TRBV7-2, TRBJ1-4)
CASSLAPGRRDEKLFF

SEQ ID NO: 286285 - protein, 17 aa, Homo sapiens
  CDR3 for alpha chain variable domain of TCR clone 143143 (TRAV12-2, TRAJ52)
CAVNPYAGRTSYGKLTF

SEQ ID NO: 286286 - protein, 16 aa, Homo sapiens
  CDR3 for beta chain variable domain of TCR clone 143143 (TRBV5-5, TRBJ2-2)
CASSGRREGATGELFF

SEQ ID NO: 286287 - protein, 15 aa, Homo sapiens
  CDR3 for alpha chain variable domain of TCR clone 143144 (TRAV21, TRAJ53)
CATLNSGGSNYKLTF

SEQ ID NO: 286288 - protein, 16 aa, Homo sapiens
  CDR3 for beta chain variable domain of TCR clone 143144 (TRBV9, TRBJ2-1)
CASSVGGGGNYNEQCF

SEQ ID NO: 286289 - protein, 16 aa, Homo sapiens
  CDR3 for alpha chain variable domain of TCR clone 143145 (TRAV14/DV4, TRAJ54)
CAMREGRIQGAQKLVF

SEQ ID NO: 286290 - protein, 12 aa, Homo sapiens
  CDR3 for beta chain variable domain of TCR clone 143145 (TRBV20-1, TRBJ1-5)
CSAAGWDQPQHF

SEQ ID NO: 286291 - protein, 11 aa, Homo sapiens
  CDR3 for alpha chain variable domain of TCR clone 143146 (TRAV12-3, TRAJ23)
CAVRQGGKLIF

SEQ ID NO: 286292 - protein, 20 aa, Homo sapiens
  CDR3 for beta chain variable domain of TCR clone 143146 (TRBV7-8, TRBJ2-2)
CASSHLFPGPTIHITGELFF

SEQ ID NO: 286293 - protein, 12 aa, Homo sapiens
  CDR3 for alpha chain variable domain of TCR clone 143147 (TRAV12-2, TRAJ21)
CAVRYNFNKFYF

SEQ ID NO: 286294 - protein, 17 aa, Homo sapiens
  CDR3 for beta chain variable domain of TCR clone 143147 (TRBV28, TRBJ2-5)
CASSTPEGDALQETQYF

SEQ ID NO: 286295 - protein, 14 aa, Homo sapiens
  CDR3 for alpha chain variable domain of TCR clone 143148 (TRAV8-2, TRAJ4)
CVVSPSGGYNKLIF

SEQ ID NO: 286296 - protein, 14 aa, Homo sapiens
  CDR3 for beta chain variable domain of TCR clone 143148 (TRBV11-2, TRBJ2-3)
CASSRLARTDTQYF

SEQ ID NO: 286297 - protein, 14 aa, Homo sapiens
  CDR3 for alpha chain variable domain of TCR clone 143149 (TRAV12-2, TRAJ48)
CAVNAFFGNEKLTF

SEQ ID NO: 286298 - protein, 13 aa, Homo sapiens
  CDR3 for beta chain variable domain of TCR clone 143149 (TRBV28, TRBJ2-7)
CAGAQPGLDEQYF

SEQ ID NO: 286299 - protein, 14 aa, Homo sapiens
  CDR3 for alpha chain variable domain of TCR clone 143150 (TRAV1-2, TRAJ16)
CAVNRFSDGQKLLF

SEQ ID NO: 286300 - protein, 13 aa, Homo sapiens
  CDR3 for beta chain variable domain of TCR clone 143150 (TRBV4-1, TRBJ2-1)
CARSQAGGDEQFF

SEQ ID NO: 286301 - protein, 14 aa, Homo sapiens
  CDR3 for alpha chain variable domain of TCR clone 143151 (TRAV29/DV5, TRAJ36)
CAARRKTGANNRFF

SEQ ID NO: 286302 - protein, 15 aa, Homo sapiens
  CDR3 for beta chain variable domain of TCR clone 143151 (TRBV18, TRBJ2-7)
CASSPLQGRTYEQYF

SEQ ID NO: 286303 - protein, 14 aa, Homo sapiens
  CDR3 for alpha chain variable domain of TCR clone 143152 (TRAV26-1, TRAJ45)
CIEVTGGGADGLTF

SEQ ID NO: 286304 - protein, 16 aa, Homo sapiens
  CDR3 for beta chain variable domain of TCR clone 143152 (TRBV7-2, TRBJ1-4)
CASSPVGRFDREKLFF

SEQ ID NO: 286305 - protein, 10 aa, Homo sapiens
  CDR3 for alpha chain variable domain of TCR clone 143153 (TRAV2, TRAJ34)
CAVVNDKLIF

SEQ ID NO: 286306 - protein, 16 aa, Homo sapiens
  CDR3 for beta chain variable domain of TCR clone 143153 (TRBV5-4, TRBJ2-1)
CASSLVGSGQDNEQFF

SEQ ID NO: 286307 - protein, 12 aa, Homo sapiens
  CDR3 for alpha chain variable domain of TCR clone 143154 (TRAV12-3, TRAJ17)
CAMTLTGNKLNF

SEQ ID NO: 286308 - protein, 14 aa, Homo sapiens
  CDR3 for beta chain variable domain of TCR clone 143154 (TRBV20-1, TRBJ2-3)
CSARGGTSTDTQYF

SEQ ID NO: 286309 - protein, 10 aa, Homo sapiens
  CDR3 for alpha chain variable domain of TCR clone 143155 (TRAV30, TRAJ48)
CGIGNEKLTF

SEQ ID NO: 286310 - protein, 14 aa, Homo sapiens
  CDR3 for beta chain variable domain of TCR clone 143155 (TRBV7-6, TRBJ2-3)
CASSVAGGTDTQYF

SEQ ID NO: 286311 - protein, 16 aa, Homo sapiens
  CDR3 for alpha chain variable domain of TCR clone 143156 (TRAV3, TRAJ10)
CAVRDMRAGGGNKLTF

SEQ ID NO: 286312 - protein, 15 aa, Homo sapiens
  CDR3 for beta chain variable domain of TCR clone 143156 (TRBV20-1, TRBJ2-7)
CSADSGTSGAYEQYF

SEQ ID NO: 286313 - protein, 17 aa, Homo sapiens
  CDR3 for alpha chain variable domain of TCR clone 143157 (TRAV26-1, TRAJ53)
CIVRVDDRGGGNYKLTF

SEQ ID NO: 286314 - protein, 15 aa, Homo sapiens
  CDR3 for beta chain variable domain of TCR clone 143157 (TRBV20-1, TRBJ2-7)
CSARVPAAYFYEQYF

SEQ ID NO: 286315 - protein, 11 aa, Homo sapiens
  CDR3 for alpha chain variable domain of TCR clone 143158 (TRAV2, TRAJ13)
CASGGYQKVTF

SEQ ID NO: 286316 - protein, 13 aa, Homo sapiens
  CDR3 for beta chain variable domain of TCR clone 143158 (TRBV28, TRBJ2-2)
CASIRESTGELFF

SEQ ID NO: 286317 - protein, 14 aa, Homo sapiens
  CDR3 for alpha chain variable domain of TCR clone 143159 (TRAV1-2, TRAJ8)
CAVREHTGFQKLVF

SEQ ID NO: 286318 - protein, 17 aa, Homo sapiens
  CDR3 for beta chain variable domain of TCR clone 143159 (TRBV13, TRBJ2-3)
CASSLSRVAGGRNTQYF

SEQ ID NO: 286319 - protein, 17 aa, Homo sapiens
  CDR3 for alpha chain variable domain of TCR clone 143160 (TRAV36/DV7, TRAJ50)
CAVEPENLLRQDIQNPD

SEQ ID NO: 286320 - protein, 13 aa, Homo sapiens
  CDR3 for beta chain variable domain of TCR clone 143160 (TRBV7-2, TRBJ2-7)
CASSSPSGSEQYF

SEQ ID NO: 286321 - protein, 14 aa, Homo sapiens
  CDR3 for alpha chain variable domain of TCR clone 143161 (TRAV12-2, TRAJ38)
CAPQTAGNNRKRIW

SEQ ID NO: 286322 - protein, 18 aa, Homo sapiens
  CDR3 for beta chain variable domain of TCR clone 143161 (TRBV28, TRBJ1-3)
CASKTPVGQIGSGNTIYF

SEQ ID NO: 286323 - protein, 14 aa, Homo sapiens
  CDR3 for alpha chain variable domain of TCR clone 143162 (TRAV17, TRAJ33)
CATDARRSNYQLIW

SEQ ID NO: 286324 - protein, 14 aa, Homo sapiens
  CDR3 for beta chain variable domain of TCR clone 143162 (TRBV25-1, TRBJ1-4)
CAGSGGGQPEKLFF

SEQ ID NO: 286325 - protein, 12 aa, Homo sapiens
  CDR3 for alpha chain variable domain of TCR clone 143163 (TRAV1-1, TRAJ39)
RAVPVVGNMLTF

SEQ ID NO: 286326 - protein, 15 aa, Homo sapiens
  CDR3 for beta chain variable domain of TCR clone 143163 (TRBV19, TRBJ1-6)
CTSSTQGAVGSPLHF

SEQ ID NO: 286327 - protein, 15 aa, Homo sapiens
  CDR3 for alpha chain variable domain of TCR clone 143164 (TRAV4, TRAJ39)
CLVGPNNNAGNMLTF

SEQ ID NO: 286328 - protein, 12 aa, Homo sapiens
  CDR3 for beta chain variable domain of TCR clone 143164 (TRBV2, TRBJ2-1)
CAYGPPGNEQFF

SEQ ID NO: 286329 - protein, 18 aa, Homo sapiens
  CDR3 for alpha chain variable domain of TCR clone 143165 (TRAV21, TRAJ52)
FAVRPSPAGGTSYGKLTF

SEQ ID NO: 286330 - protein, 17 aa, Homo sapiens
  CDR3 for beta chain variable domain of TCR clone 143165 (TRBV25-1, TRBJ2-1)
CASSAYGQGRGVYEQFF

SEQ ID NO: 286331 - protein, 12 aa, Homo sapiens
  CDR3 for alpha chain variable domain of TCR clone 143166 (TRAV27, TRAJ13)
CAGAGGYQKVTF

SEQ ID NO: 286332 - protein, 20 aa, Homo sapiens
  CDR3 for beta chain variable domain of TCR clone 143166 (TRBV7-8, TRBJ2-2)
CASSHLFPGPTIHITGELFF

SEQ ID NO: 286333 - protein, 15 aa, Homo sapiens
  CDR3 for alpha chain variable domain of TCR clone 143167 (TRAV3, TRAJ22)
CAVRDRGGSAWQLTF

SEQ ID NO: 286334 - protein, 16 aa, Homo sapiens
  CDR3 for beta chain variable domain of TCR clone 143167 (TRBV5-4, TRBJ2-3)
CASQQPGAGGSDTQYF

SEQ ID NO: 286335 - protein, 18 aa, Homo sapiens
  CDR3 for alpha chain variable domain of TCR clone 143168 (TRAV21, TRAJ52)
CAVRPSPAGGTSYGTLTF

SEQ ID NO: 286336 - protein, 13 aa, Homo sapiens
  CDR3 for beta chain variable domain of TCR clone 143168 (TRBV7-3, TRBJ1-1)
CASSQEWGAEAFF

SEQ ID NO: 286337 - protein, 13 aa, Homo sapiens
  CDR3 for alpha chain variable domain of TCR clone 143169 (TRAV21, TRAJ32)
CTVSGGATNKLIF

SEQ ID NO: 286338 - protein, 15 aa, Homo sapiens
  CDR3 for beta chain variable domain of TCR clone 143169 (TRBV23-1, TRBJ2-1)
CASSQWPQLTMSSSS

SEQ ID NO: 286339 - protein, 13 aa, Homo sapiens
  CDR3 for alpha chain variable domain of TCR clone 143170 (TRAV3, TRAJ3)
CAVRALGASKIIF

SEQ ID NO: 286340 - protein, 16 aa, Homo sapiens
  CDR3 for beta chain variable domain of TCR clone 143170 (TRBV12-4, TRBJ2-5)
CTSGPAVRRGGETQYF

SEQ ID NO: 286341 - protein, 14 aa, Homo sapiens
  CDR3 for alpha chain variable domain of TCR clone 143171 (TRAV12-2, TRAJ36)
CAVKISTGANNLFF

SEQ ID NO: 286342 - protein, 14 aa, Homo sapiens
  CDR3 for beta chain variable domain of TCR clone 143171 (TRBV20-1, TRBJ2-3)
CSARGGISTDTQYF

SEQ ID NO: 286343 - protein, 12 aa, Homo sapiens
  CDR3 for alpha chain variable domain of TCR clone 143172 (TRAV35, TRAJ39)
LAPNNAGNMLTF

SEQ ID NO: 286344 - protein, 12 aa, Homo sapiens
  CDR3 for beta chain variable domain of TCR clone 143172 (TRBV7-9, TRBJ2-7)
CASSLEGYEQYF

SEQ ID NO: 286345 - protein, 14 aa, Homo sapiens
  CDR3 for alpha chain variable domain of TCR clone 143173 (TRAV12-3, TRAJ10)
SHLPLTGGGNKLTF

SEQ ID NO: 286346 - protein, 14 aa, Homo sapiens
  CDR3 for beta chain variable domain of TCR clone 143173 (TRBV28, TRBJ2-1)
CASSLVAPYNEQFF

SEQ ID NO: 286347 - protein, 13 aa, Homo sapiens
  CDR3 for alpha chain variable domain of TCR clone 143174 (TRAV1-2, TRAJ9)
CAALNTGGFKTIF

SEQ ID NO: 286348 - protein, 14 aa, Homo sapiens
  CDR3 for beta chain variable domain of TCR clone 143174 (TRBV18, TRBJ1-1)
CASSLTDRNTEAFF

SEQ ID NO: 286349 - protein, 14 aa, Homo sapiens
  CDR3 for alpha chain variable domain of TCR clone 143175 (TRAV17, TRAJ57)
CATDPQGGSEKLVF

SEQ ID NO: 286350 - protein, 14 aa, Homo sapiens
  CDR3 for beta chain variable domain of TCR clone 143175 (TRBV5-1, TRBJ1-2)
CASSLSSGPYGYTF

SEQ ID NO: 286351 - protein, 14 aa, Homo sapiens
  CDR3 for alpha chain variable domain of TCR clone 143176 (TRAV12-2, TRAJ13)
CAVKKTWGYQKVTF

SEQ ID NO: 286352 - protein, 12 aa, Homo sapiens
  CDR3 for beta chain variable domain of TCR clone 143176 (TRBV29-1, TRBJ2-3)
CSVTGGADTQYF

SEQ ID NO: 286353 - protein, 14 aa, Homo sapiens
  CDR3 for alpha chain variable domain of TCR clone 143177 (TRAV23/DV6, TRAJ4)
CAAPSSGGYNKLIF

SEQ ID NO: 286354 - protein, 16 aa, Homo sapiens
  CDR3 for beta chain variable domain of TCR clone 143177 (TRBV19, TRBJ1-1)
CASRFGGPVTCTEAFF

SEQ ID NO: 286355 - protein, 16 aa, Homo sapiens
  CDR3 for alpha chain variable domain of TCR clone 143178 (TRAV26-1, TRAJ22)
CIVSRSYSGSARQLTF

SEQ ID NO: 286356 - protein, 15 aa, Homo sapiens
  CDR3 for beta chain variable domain of TCR clone 143178 (TRBV7-2, TRBJ2-1)
CASSLVLAGGNEQFF

SEQ ID NO: 286357 - protein, 17 aa, Homo sapiens
  CDR3 for alpha chain variable domain of TCR clone 143179 (TRAV26-1, TRAJ47)
CIVPSLLYMEYGNKLVF

SEQ ID NO: 286358 - protein, 14 aa, Homo sapiens
  CDR3 for beta chain variable domain of TCR clone 143179 (TRBV7-3, TRBJ1-5)
RASSFPGCNQPQHF

SEQ ID NO: 286359 - protein, 14 aa, Homo sapiens
  CDR3 for alpha chain variable domain of TCR clone 143180 (TRAV27, TRAJ22)
CAGLPSGSAMQLTF

SEQ ID NO: 286360 - protein, 16 aa, Homo sapiens
  CDR3 for beta chain variable domain of TCR clone 143180 (TRBV7-3, TRBJ2-2)
CASSLKRGTLSGELFF

SEQ ID NO: 286361 - protein, 12 aa, Homo sapiens
  CDR3 for alpha chain variable domain of TCR clone 143181 (TRAV12-1, TRAJ23)
CVVNIPGGKLIF

SEQ ID NO: 286362 - protein, 20 aa, Homo sapiens
  CDR3 for beta chain variable domain of TCR clone 143181 (TRBV19, TRBJ2-1)
CASSISRTVTSTRLNNEQFF

SEQ ID NO: 286363 - protein, 15 aa, Homo sapiens
  CDR3 for alpha chain variable domain of TCR clone 143182 (TRAV21, TRAJ24)
CAARSSTDSWGKLRF

SEQ ID NO: 286364 - protein, 13 aa, Homo sapiens
  CDR3 for beta chain variable domain of TCR clone 143182 (TRBV11-2, TRBJ2-5)
CDSSSTGEETQYF

SEQ ID NO: 286365 - protein, 14 aa, Homo sapiens
  CDR3 for alpha chain variable domain of TCR clone 143183 (TRAV12-3, TRAJ10)
SHLPLTGGGNKLTF

SEQ ID NO: 286366 - protein, 11 aa, Homo sapiens
  CDR3 for beta chain variable domain of TCR clone 143183 (TRBV20-1, TRBJ2-5)
FSADRAETQYF

SEQ ID NO: 286367 - protein, 15 aa, Homo sapiens
  CDR3 for alpha chain variable domain of TCR clone 143184 (TRAV12-3, TRAJ27)
CAMRAYNTNAGKSTF

SEQ ID NO: 286368 - protein, 13 aa, Homo sapiens
  CDR3 for beta chain variable domain of TCR clone 143184 (TRBV20-1, TRBJ1-6)
CSAPLGVGSPLHF

SEQ ID NO: 286369 - protein, 16 aa, Homo sapiens
  CDR3 for alpha chain variable domain of TCR clone 143185 (TRAV12-2, TRAJ28)
CAVITDSGAGSYQLTF

SEQ ID NO: 286370 - protein, 18 aa, Homo sapiens
  CDR3 for beta chain variable domain of TCR clone 143185 (TRBV12-4, TRBJ2-2)
CASSLVAGTRGRTGELFF

SEQ ID NO: 286371 - protein, 14 aa, Homo sapiens
  CDR3 for alpha chain variable domain of TCR clone 143186 (TRAV12-1, TRAJ12)
CVVTSGDSSYKLIF

SEQ ID NO: 286372 - protein, 16 aa, Homo sapiens
  CDR3 for beta chain variable domain of TCR clone 143186 (TRBV2, TRBJ2-3)
CASSTSVEGVTDTQYF

SEQ ID NO: 286373 - protein, 16 aa, Homo sapiens
  CDR3 for alpha chain variable domain of TCR clone 143187 (TRAV16, TRAJ4)
CALSRMFSGGYNKLIF

SEQ ID NO: 286374 - protein, 15 aa, Homo sapiens
  CDR3 for beta chain variable domain of TCR clone 143187 (TRBV7-3, TRBJ2-6)
CASSLGGSGANVLTF

SEQ ID NO: 286375 - protein, 12 aa, Homo sapiens
  CDR3 for alpha chain variable domain of TCR clone 143188 (TRAV8-3, TRAJ20)
CAVDFNDYKLSF

SEQ ID NO: 286376 - protein, 13 aa, Homo sapiens
  CDR3 for beta chain variable domain of TCR clone 143188 (TRBV11-2, TRBJ1-3)
CASSLEPVNTIYF

SEQ ID NO: 286377 - protein, 12 aa, Homo sapiens
  CDR3 for alpha chain variable domain of TCR clone 143189 (TRAV12-3, TRAJ20)
CAMVRGDYKLSF

SEQ ID NO: 286378 - protein, 16 aa, Homo sapiens
  CDR3 for beta chain variable domain of TCR clone 143189 (TRBV5-1, TRBJ2-3)
CASSLVLAVYTDTQYF

SEQ ID NO: 286379 - protein, 13 aa, Homo sapiens
  CDR3 for alpha chain variable domain of TCR clone 143190 (TRAV2, TRAJ21)
CAVEDLNFNKFYF

SEQ ID NO: 286380 - protein, 14 aa, Homo sapiens
  CDR3 for beta chain variable domain of TCR clone 143190 (TRBV28, TRBJ2-5)
CRSPGQGSIETQYF

SEQ ID NO: 286381 - protein, 12 aa, Homo sapiens
  CDR3 for alpha chain variable domain of TCR clone 143191 (TRAV6, TRAJ9)
CALVTGGFKTIV

SEQ ID NO: 286382 - protein, 16 aa, Homo sapiens
  CDR3 for beta chain variable domain of TCR clone 143191 (TRBV7-3, TRBJ2-2)
GGTQPCIQWNTGELFF

SEQ ID NO: 286383 - protein, 19 aa, Homo sapiens
  CDR3 for alpha chain variable domain of TCR clone 143192 (TRAV3, TRAJ6)
CAVRDRNPSRSGGSYIPTF

SEQ ID NO: 286384 - protein, 14 aa, Homo sapiens
  CDR3 for beta chain variable domain of TCR clone 143192 (TRBV2, TRBJ2-7)
CASSLTSGGYEQYF

SEQ ID NO: 286385 - protein, 14 aa, Homo sapiens
  CDR3 for alpha chain variable domain of TCR clone 143193 (TRAV38-1, TRAJ45)
CAYYSGGGADGHTF

SEQ ID NO: 286386 - protein, 20 aa, Homo sapiens
  CDR3 for beta chain variable domain of TCR clone 143193 (TRBV28, TRBJ2-1)
CASTPIGRSPGLAGGNEQFF

SEQ ID NO: 286387 - protein, 12 aa, Homo sapiens
  CDR3 for alpha chain variable domain of TCR clone 143194 (TRAV2, TRAJ3)
CAVRSSASKIIF

SEQ ID NO: 286388 - protein, 15 aa, Homo sapiens
  CDR3 for beta chain variable domain of TCR clone 143194 (TRBV15, TRBJ2-5)
CATSRDEGPQETQYF

SEQ ID NO: 286389 - protein, 16 aa, Homo sapiens
  CDR3 for alpha chain variable domain of TCR clone 143195 (TRAV12-2, TRAJ10)
CAVNRVPTGGGNKLTF

SEQ ID NO: 286390 - protein, 15 aa, Homo sapiens
  CDR3 for beta chain variable domain of TCR clone 143195 (TRBV20-1, TRBJ2-7)
CSARDRVSGMDEQYF

SEQ ID NO: 286391 - protein, 14 aa, Homo sapiens
  CDR3 for alpha chain variable domain of TCR clone 143196 (TRAV35, TRAJ22)
CAGLRPGSARQLTF

SEQ ID NO: 286392 - protein, 14 aa, Homo sapiens
  CDR3 for beta chain variable domain of TCR clone 143196 (TRBV5-7, TRBJ2-7)
CASSFKGATGEQYF

SEQ ID NO: 286393 - protein, 14 aa, Homo sapiens
  CDR3 for alpha chain variable domain of TCR clone 143197 (TRAV12-2, TRAJ13)
CAVKKTGGYQKVTF

SEQ ID NO: 286394 - protein, 15 aa, Homo sapiens
  CDR3 for beta chain variable domain of TCR clone 143197 (TRBV20-1, TRBJ2-1)
CSASSAGSSYNEQFF

SEQ ID NO: 286395 - protein, 11 aa, Homo sapiens
  CDR3 for alpha chain variable domain of TCR clone 143198 (TRAV12-3, TRAJ27)
CAMANAGKSTF

SEQ ID NO: 286396 - protein, 15 aa, Homo sapiens
  CDR3 for beta chain variable domain of TCR clone 143198 (TRBV7-3, TRBJ2-1)
CASSLSSGSFDEQFF

SEQ ID NO: 286397 - protein, 13 aa, Homo sapiens
  CDR3 for alpha chain variable domain of TCR clone 143199 (TRAV21, TRAJ15)
CAVANQAGTALIF

SEQ ID NO: 286398 - protein, 15 aa, Homo sapiens
  CDR3 for beta chain variable domain of TCR clone 143199 (TRBV19, TRBJ1-2)
CASSVGQVLNYGYTF

SEQ ID NO: 286399 - protein, 14 aa, Homo sapiens
  CDR3 for alpha chain variable domain of TCR clone 143200 (TRAV13-1, TRAJ3)
CAASKSGSASKIIF

SEQ ID NO: 286400 - protein, 14 aa, Homo sapiens
  CDR3 for beta chain variable domain of TCR clone 143200 (TRBV25-1, TRBJ1-1)
CASTHLGGNTEAFF

SEQ ID NO: 286401 - protein, 13 aa, Homo sapiens
  CDR3 for alpha chain variable domain of TCR clone 143201 (TRAV25, TRAJ58)
CAGRRTSGSRLTF

SEQ ID NO: 286402 - protein, 14 aa, Homo sapiens
  CDR3 for beta chain variable domain of TCR clone 143201 (TRBV7-9, TRBJ1-4)
CAITEGEANEKLFF

SEQ ID NO: 286403 - protein, 18 aa, Homo sapiens
  CDR3 for alpha chain variable domain of TCR clone 143202 (TRAV13-1, TRAJ52)
CAAKNPNAGGTSYGQLTF

SEQ ID NO: 286404 - protein, 14 aa, Homo sapiens
  CDR3 for beta chain variable domain of TCR clone 143202 (TRBV6-5, TRBJ1-1)
CASSFGQGLTEAFF

SEQ ID NO: 286405 - protein, 14 aa, Homo sapiens
  CDR3 for alpha chain variable domain of TCR clone 143203 (TRAV14/DV4, TRAJ32)
SNVLPLTPTNKLIF

SEQ ID NO: 286406 - protein, 15 aa, Homo sapiens
  CDR3 for beta chain variable domain of TCR clone 143203 (TRBV2, TRBJ2-3)
CASSDFEKATDTQYF

SEQ ID NO: 286407 - protein, 18 aa, Homo sapiens
  CDR3 for alpha chain variable domain of TCR clone 143204 (TRAV21, TRAJ52)
CAVRPSPAGGTSSGKLTF

SEQ ID NO: 286408 - protein, 15 aa, Homo sapiens
  CDR3 for beta chain variable domain of TCR clone 143204 (TRBV9, TRBJ1-6)
CASSVAGTGDSPLHF

SEQ ID NO: 286409 - protein, 11 aa, Homo sapiens
  CDR3 for alpha chain variable domain of TCR clone 143205 (TRAV3, TRAJ21)
CAVGNFNKFYF

SEQ ID NO: 286410 - protein, 15 aa, Homo sapiens
  CDR3 for beta chain variable domain of TCR clone 143205 (TRBV7-2, TRBJ2-2)
CASSLVAGSAGELFF

SEQ ID NO: 286411 - protein, 15 aa, Homo sapiens
  CDR3 for alpha chain variable domain of TCR clone 143206 (TRAV16, TRAJ42)
CALRRGGGSQGNLIF

SEQ ID NO: 286412 - protein, 16 aa, Homo sapiens
  CDR3 for beta chain variable domain of TCR clone 143206 (TRBV5-5, TRBJ2-2)
CASSGRREGATGELFF

SEQ ID NO: 286413 - protein, 18 aa, Homo sapiens
  CDR3 for alpha chain variable domain of TCR clone 143207 (TRAV12-3, TRAJ52)
CAMSVGGAGGTSYGKLTF

SEQ ID NO: 286414 - protein, 14 aa, Homo sapiens
  CDR3 for beta chain variable domain of TCR clone 143207 (TRBV7-2, TRBJ2-7)
CASRSQGAAHEQYF

SEQ ID NO: 286415 - protein, 14 aa, Homo sapiens
  CDR3 for alpha chain variable domain of TCR clone 143208 (TRAV12-2, TRAJ13)
FAVKKTGGYQKVTF

SEQ ID NO: 286416 - protein, 15 aa, Homo sapiens
  CDR3 for beta chain variable domain of TCR clone 143208 (TRBV27, TRBJ2-1)
CASSNGGGSSNEQCF

SEQ ID NO: 286417 - protein, 14 aa, Homo sapiens
  CDR3 for alpha chain variable domain of TCR clone 143209 (TRAV17, TRAJ54)
CATDANQGAQKLVF

SEQ ID NO: 286418 - protein, 13 aa, Homo sapiens
  CDR3 for beta chain variable domain of TCR clone 143209 (TRBV6-1, TRBJ1-3)
CSVQGGGGNTIYF

SEQ ID NO: 286419 - protein, 18 aa, Homo sapiens
  CDR3 for alpha chain variable domain of TCR clone 143210 (TRAV30, TRAJ29)
RSLLLWHRAFSVNTPLVF

SEQ ID NO: 286420 - protein, 15 aa, Homo sapiens
  CDR3 for beta chain variable domain of TCR clone 143210 (TRBV5-1, TRBJ2-2)
CASSLFGQNTGELFF

SEQ ID NO: 286421 - protein, 16 aa, Homo sapiens
  CDR3 for alpha chain variable domain of TCR clone 143211 (TRAV14/DV4, TRAJ53)
CAMREGGGGRNYKLTF

SEQ ID NO: 286422 - protein, 13 aa, Homo sapiens
  CDR3 for beta chain variable domain of TCR clone 143211 (TRBV4-1, TRBJ2-1)
CASSQEVQYEQFF

SEQ ID NO: 286423 - protein, 16 aa, Homo sapiens
  CDR3 for alpha chain variable domain of TCR clone 143212 (TRAV4, TRAJ9)
CLVGDPNRPGGFKTIF

SEQ ID NO: 286424 - protein, 16 aa, Homo sapiens
  CDR3 for beta chain variable domain of TCR clone 143212 (TRBV28, TRBJ1-4)
CASSPPYGGRSEKLFF

SEQ ID NO: 286425 - protein, 14 aa, Homo sapiens
  CDR3 for alpha chain variable domain of TCR clone 143213 (TRAV13-1, TRAJ10)
CAALFTGGGTKLTF

SEQ ID NO: 286426 - protein, 15 aa, Homo sapiens
  CDR3 for beta chain variable domain of TCR clone 143213 (TRBV10-3, TRBJ2-2)
CAISEGDRAAGELFF

SEQ ID NO: 286427 - protein, 14 aa, Homo sapiens
  CDR3 for alpha chain variable domain of TCR clone 143214 (TRAV13-1, TRAJ3)
FAASKSSSASKIIF

SEQ ID NO: 286428 - protein, 15 aa, Homo sapiens
  CDR3 for beta chain variable domain of TCR clone 143214 (TRBV5-5, TRBJ2-2)
CASSRQASGAGELFF

SEQ ID NO: 286429 - protein, 14 aa, Homo sapiens
  CDR3 for alpha chain variable domain of TCR clone 143215 (TRAV36/DV7, TRAJ44)
CCGANTGTASKLTF

SEQ ID NO: 286430 - protein, 13 aa, Homo sapiens
  CDR3 for beta chain variable domain of TCR clone 143215 (TRBV14, TRBJ1-1)
CASSQEAGTEAFF

SEQ ID NO: 286431 - protein, 18 aa, Homo sapiens
  CDR3 for alpha chain variable domain of TCR clone 143216 (TRAV21, TRAJ52)
CAVRPSPAGGTSYGKLTF

SEQ ID NO: 286432 - protein, 13 aa, Homo sapiens
  CDR3 for beta chain variable domain of TCR clone 143216 (TRBV20-1, TRBJ2-5)
CSASLTGRETQYF

SEQ ID NO: 286433 - protein, 20 aa, Homo sapiens
  CDR3 for alpha chain variable domain of TCR clone 143217 (TRAV12-2, TRAJ52)
SPVIQPPPSFRSTSYGKLTF

SEQ ID NO: 286434 - protein, 11 aa, Homo sapiens
  CDR3 for beta chain variable domain of TCR clone 143217 (TRBV11-2, TRBJ2-2)
CASSLPGELFF

SEQ ID NO: 286435 - protein, 19 aa, Homo sapiens
  CDR3 for alpha chain variable domain of TCR clone 143218 (TRAV1-2, TRAJ26)
CLLPLCCERPDNYGQNFVF

SEQ ID NO: 286436 - protein, 14 aa, Homo sapiens
  CDR3 for beta chain variable domain of TCR clone 143218 (TRBV7-3, TRBJ2-2)
CASSSGGYTGELFF

SEQ ID NO: 286437 - protein, 16 aa, Homo sapiens
  CDR3 for alpha chain variable domain of TCR clone 143219 (TRAV36/DV7, TRAJ30)
CAVETYGLERDDKIIF

SEQ ID NO: 286438 - protein, 16 aa, Homo sapiens
  CDR3 for beta chain variable domain of TCR clone 143219 (TRBV7-3, TRBJ2-2)
CASSLKRGTLSGELFF

SEQ ID NO: 286439 - protein, 17 aa, Homo sapiens
  CDR3 for alpha chain variable domain of TCR clone 143220 (TRAV36/DV7, TRAJ52)
CSVAQRAGGTSYGKLTF

SEQ ID NO: 286440 - protein, 16 aa, Homo sapiens
  CDR3 for beta chain variable domain of TCR clone 143220 (TRBV4-2, TRBJ1-1)
CASSQAGFGMNTEAFF

SEQ ID NO: 286441 - protein, 12 aa, Homo sapiens
  CDR3 for alpha chain variable domain of TCR clone 143221 (TRAV8-6, TRAJ8)
CAVTPGFQKLVF

SEQ ID NO: 286442 - protein, 16 aa, Homo sapiens
  CDR3 for beta chain variable domain of TCR clone 143221 (TRBV7-3, TRBJ2-2)
CASSLKRGTLSGQLFF

SEQ ID NO: 286443 - protein, 14 aa, Homo sapiens
  CDR3 for alpha chain variable domain of TCR clone 143222 (TRAV29/DV5, TRAJ32)
SAAAYGGATNKLIF

SEQ ID NO: 286444 - protein, 15 aa, Homo sapiens
  CDR3 for beta chain variable domain of TCR clone 143222 (TRBV27, TRBJ2-7)
CASSTAGTGSYEQYF

SEQ ID NO: 286445 - protein, 10 aa, Homo sapiens
  CDR3 for alpha chain variable domain of TCR clone 143223 (TRAV36/DV7, TRAJ48)
CAVGNEKLTF

SEQ ID NO: 286446 - protein, 15 aa, Homo sapiens
  CDR3 for beta chain variable domain of TCR clone 143223 (TRBV11-2, TRBJ2-1)
CASSNNRGLIYEQFF

SEQ ID NO: 286447 - protein, 14 aa, Homo sapiens
  CDR3 for alpha chain variable domain of TCR clone 143224 (TRAV26-1, TRAJ38)
CIADNAGKNRKLIW

SEQ ID NO: 286448 - protein, 15 aa, Homo sapiens
  CDR3 for beta chain variable domain of TCR clone 143224 (TRBV4-1, TRBJ1-1)
CASSQEWGHYTEAFF

SEQ ID NO: 286449 - protein, 13 aa, Homo sapiens
  CDR3 for alpha chain variable domain of TCR clone 143225 (TRAV12-3, TRAJ7)
CAMTPYGNNRLAC

SEQ ID NO: 286450 - protein, 13 aa, Homo sapiens
  CDR3 for beta chain variable domain of TCR clone 143225 (TRBV20-1, TRBJ1-4)
DLTGGELNEKLFF

SEQ ID NO: 286451 - protein, 13 aa, Homo sapiens
  CDR3 for alpha chain variable domain of TCR clone 143226 (TRAV13-2, TRAJ54)
CAENYQGAQSLVF

SEQ ID NO: 286452 - protein, 14 aa, Homo sapiens
  CDR3 for beta chain variable domain of TCR clone 143226 (TRBV4-2, TRBJ2-1)
CASGLDRAYNEQFF

SEQ ID NO: 286453 - protein, 15 aa, Homo sapiens
  CDR3 for alpha chain variable domain of TCR clone 143227 (TRAV3, TRAJ32)
CAVSSYGGATNKLIF

SEQ ID NO: 286454 - protein, 13 aa, Homo sapiens
  CDR3 for beta chain variable domain of TCR clone 143227 (TRBV20-1, TRBJ2-7)
CSARPSTNYEQDF

SEQ ID NO: 286455 - protein, 12 aa, Homo sapiens
  CDR3 for alpha chain variable domain of TCR clone 143228 (TRAV12-2, TRAJ4)
CAVNGGYNKLIF

SEQ ID NO: 286456 - protein, 16 aa, Homo sapiens
  CDR3 for beta chain variable domain of TCR clone 143228 (TRBV28, TRBJ2-2)
CASSLSPGWNTGELFF

SEQ ID NO: 286457 - protein, 16 aa, Homo sapiens
  CDR3 for alpha chain variable domain of TCR clone 143229 (TRAV14/DV4, TRAJ21)
CAMREGPENNFNKFYF

SEQ ID NO: 286458 - protein, 13 aa, Homo sapiens
  CDR3 for beta chain variable domain of TCR clone 143229 (TRBV10-2, TRBJ2-2)
CASSGLAGGELFF

SEQ ID NO: 286459 - protein, 14 aa, Homo sapiens
  CDR3 for alpha chain variable domain of TCR clone 143230 (TRAV12-3, TRAJ10)
SHLPLTGGGNKLTF

SEQ ID NO: 286460 - protein, 12 aa, Homo sapiens
  CDR3 for beta chain variable domain of TCR clone 143230 (TRBV11-2, TRBJ2-2)
CTSSLGGGELFF

SEQ ID NO: 286461 - protein, 16 aa, Homo sapiens
  CDR3 for alpha chain variable domain of TCR clone 143231 (TRAV8-3, TRAJ28)
CAVGATLGLGVTNSLS

SEQ ID NO: 286462 - protein, 14 aa, Homo sapiens
  CDR3 for beta chain variable domain of TCR clone 143231 (TRBV7-2, TRBJ2-1)
CASSLGVGYNEQFY

SEQ ID NO: 286463 - protein, 14 aa, Homo sapiens
  CDR3 for alpha chain variable domain of TCR clone 143232 (TRAV12-1, TRAJ17)
CVVNYKAAGNKLTF

SEQ ID NO: 286464 - protein, 13 aa, Homo sapiens
  CDR3 for beta chain variable domain of TCR clone 143232 (TRBV7-6, TRBJ1-2)
CASSLVADYGYTF

SEQ ID NO: 286465 - protein, 23 aa, Homo sapiens
  CDR3 for alpha chain variable domain of TCR clone 143233 (TRAV21, TRAJ4)
SLVTQPPPSVLFHVSGGYNKLIF

SEQ ID NO: 286466 - protein, 13 aa, Homo sapiens
  CDR3 for beta chain variable domain of TCR clone 143233 (TRBV7-3, TRBJ2-5)
CASSLTAGETQYF

SEQ ID NO: 286467 - protein, 15 aa, Homo sapiens
  CDR3 for alpha chain variable domain of TCR clone 143234 (TRAV20, TRAJ40)
FAVQRGTSGTYKYIF

SEQ ID NO: 286468 - protein, 19 aa, Homo sapiens
  CDR3 for beta chain variable domain of TCR clone 143234 (TRBV28, TRBJ2-7)
CASSYSGTSRLGWVYEQYF

SEQ ID NO: 286469 - protein, 13 aa, Homo sapiens
  CDR3 for alpha chain variable domain of TCR clone 143235 (TRAV26-1, TRAJ48)
CIVRVVGDEKLTF

SEQ ID NO: 286470 - protein, 14 aa, Homo sapiens
  CDR3 for beta chain variable domain of TCR clone 143235 (TRBV12-5, TRBJ2-5)
CASGSRTHRETQYF

SEQ ID NO: 286471 - protein, 15 aa, Homo sapiens
  CDR3 for alpha chain variable domain of TCR clone 143236 (TRAV13-1, TRAJ44)
CAASRNTGTASKLTF

SEQ ID NO: 286472 - protein, 14 aa, Homo sapiens
  CDR3 for beta chain variable domain of TCR clone 143236 (TRBV11-2, TRBJ1-2)
CASSVYRGNYGYTF

SEQ ID NO: 286473 - protein, 15 aa, Homo sapiens
  CDR3 for alpha chain variable domain of TCR clone 143237 (TRAV21, TRAJ24)
CAARSSTDSWGNCSL

SEQ ID NO: 286474 - protein, 13 aa, Homo sapiens
  CDR3 for beta chain variable domain of TCR clone 143237 (TRBV11-2, TRBJ2-5)
CASSATGEETQYF

SEQ ID NO: 286475 - protein, 15 aa, Homo sapiens
  CDR3 for alpha chain variable domain of TCR clone 143238 (TRAV26-1, TRAJ15)
CIVRAANQAGTALIF

SEQ ID NO: 286476 - protein, 17 aa, Homo sapiens
  CDR3 for beta chain variable domain of TCR clone 143238 (TRBV4-1, TRBJ2-5)
CASSQDLTGGPIETQYF

SEQ ID NO: 286477 - protein, 18 aa, Homo sapiens
  CDR3 for alpha chain variable domain of TCR clone 143239 (TRAV21, TRAJ52)
CAVRPSPAGGTSYGKLTF

SEQ ID NO: 286478 - protein, 14 aa, Homo sapiens
  CDR3 for beta chain variable domain of TCR clone 143239 (TRBV27, TRBJ2-2)
CASRPGVNTGGLFF

SEQ ID NO: 286479 - protein, 17 aa, Homo sapiens
  CDR3 for alpha chain variable domain of TCR clone 143240 (TRAV4, TRAJ42)
CLVGVLNYGGSQANLIF

SEQ ID NO: 286480 - protein, 12 aa, Homo sapiens
  CDR3 for beta chain variable domain of TCR clone 143240 (TRBV20-1, TRBJ2-1)
CSAQYTYNEQFF

SEQ ID NO: 286481 - protein, 21 aa, Homo sapiens
  CDR3 for alpha chain variable domain of TCR clone 143241 (TRAV26-2, TRAJ42)
CCVLLHPERRWVWRKQGNLIF

SEQ ID NO: 286482 - protein, 16 aa, Homo sapiens
  CDR3 for beta chain variable domain of TCR clone 143241 (TRBV6-3, TRBJ2-2)
CASSFSGTDNTGELFF

SEQ ID NO: 286483 - protein, 15 aa, Homo sapiens
  CDR3 for alpha chain variable domain of TCR clone 143242 (TRAV8-3, TRAJ32)
CAVDLYGGATNKLIF

SEQ ID NO: 286484 - protein, 17 aa, Homo sapiens
  CDR3 for beta chain variable domain of TCR clone 143242 (TRBV12-4, TRBJ2-3)
CASSGPGLAGGADTQYF

SEQ ID NO: 286485 - protein, 14 aa, Homo sapiens
  CDR3 for alpha chain variable domain of TCR clone 143243 (TRAV1-2, TRAJ8)
CAVREDTGFQKLVF

SEQ ID NO: 286486 - protein, 16 aa, Homo sapiens
  CDR3 for beta chain variable domain of TCR clone 143243 (TRBV12-4, TRBJ1-5)
CASSRPVGGSNQLQHF

SEQ ID NO: 286487 - protein, 15 aa, Homo sapiens
  CDR3 for alpha chain variable domain of TCR clone 143244 (TRAV1-2, TRAJ35)
CAVGDPGGFGNVLHC

SEQ ID NO: 286488 - protein, 14 aa, Homo sapiens
  CDR3 for beta chain variable domain of TCR clone 143244 (TRBV5-1, TRBJ2-1)
CASSLDDRFDEQFF

SEQ ID NO: 286489 - protein, 16 aa, Homo sapiens
  CDR3 for alpha chain variable domain of TCR clone 143245 (TRAV30, TRAJ24)
CGTAIVAADSGGKFQF

SEQ ID NO: 286490 - protein, 14 aa, Homo sapiens
  CDR3 for beta chain variable domain of TCR clone 143245 (TRBV12-5, TRBJ2-5)
CASGSRTHQETQYF

SEQ ID NO: 286491 - protein, 12 aa, Homo sapiens
  CDR3 for alpha chain variable domain of TCR clone 143246 (TRAV12-3, TRAJ17)
CAMTLTGNKLTF

SEQ ID NO: 286492 - protein, 13 aa, Homo sapiens
  CDR3 for beta chain variable domain of TCR clone 143246 (TRBV20-1, TRBJ2-1)
CSAGAGTYNEQFF

SEQ ID NO: 286493 - protein, 11 aa, Homo sapiens
  CDR3 for alpha chain variable domain of TCR clone 143247 (TRAV21, TRAJ9)
CAVPGGFKTIF

SEQ ID NO: 286494 - protein, 14 aa, Homo sapiens
  CDR3 for beta chain variable domain of TCR clone 143247 (TRBV7-9, TRBJ2-7)
CASSPKTSFYEQYF

SEQ ID NO: 286495 - protein, 14 aa, Homo sapiens
  CDR3 for alpha chain variable domain of TCR clone 143248 (TRAV12-2, TRAJ3)
CAVSLYSSASKIIF

SEQ ID NO: 286496 - protein, 14 aa, Homo sapiens
  CDR3 for beta chain variable domain of TCR clone 143248 (TRBV25-1, TRBJ1-1)
CASTHLGGNTEAFF

SEQ ID NO: 286497 - protein, 15 aa, Homo sapiens
  CDR3 for alpha chain variable domain of TCR clone 143249 (TRAV8-4, TRAJ13)
CAVSDRGGGYQKVTF

SEQ ID NO: 286498 - protein, 13 aa, Homo sapiens
  CDR3 for beta chain variable domain of TCR clone 143249 (TRBV12-5, TRBJ2-3)
CASGDRQSDTQYF

SEQ ID NO: 286499 - protein, 13 aa, Homo sapiens
  CDR3 for alpha chain variable domain of TCR clone 143250 (TRAV21, TRAJ20)
CAVGLRVDYKLSF

SEQ ID NO: 286500 - protein, 16 aa, Homo sapiens
  CDR3 for beta chain variable domain of TCR clone 143250 (TRBV12-5, TRBJ2-5)
CASGPRTRGNQETQYF

SEQ ID NO: 286501 - protein, 13 aa, Homo sapiens
  CDR3 for alpha chain variable domain of TCR clone 143251 (TRAV27, TRAJ41)
CAGEGNSGEALNF

SEQ ID NO: 286502 - protein, 14 aa, Homo sapiens
  CDR3 for beta chain variable domain of TCR clone 143251 (TRBV7-2, TRBJ1-1)
CASSFLTGTTEAFF

SEQ ID NO: 286503 - protein, 12 aa, Homo sapiens
  CDR3 for alpha chain variable domain of TCR clone 143252 (TRAV27, TRAJ13)
CAGVRGYQKVTF

SEQ ID NO: 286504 - protein, 16 aa, Homo sapiens
  CDR3 for beta chain variable domain of TCR clone 143252 (TRBV28, TRBJ2-1)
CASSSYYSGSLNEQFF

SEQ ID NO: 286505 - protein, 12 aa, Homo sapiens
  CDR3 for alpha chain variable domain of TCR clone 143253 (TRAV3, TRAJ43)
CAVRDPNNDMRF

SEQ ID NO: 286506 - protein, 17 aa, Homo sapiens
  CDR3 for beta chain variable domain of TCR clone 143253 (TRBV7-8, TRBJ2-6)
CASSAGTGGAGAKVLTF

SEQ ID NO: 286507 - protein, 16 aa, Homo sapiens
  CDR3 for alpha chain variable domain of TCR clone 143254 (TRAV30, TRAJ24)
CGTEIVDADSWGKFQF

SEQ ID NO: 286508 - protein, 15 aa, Homo sapiens
  CDR3 for beta chain variable domain of TCR clone 143254 (TRBV12-5, TRBJ2-2)
CASGRLGGNTGELFF

SEQ ID NO: 286509 - protein, 15 aa, Homo sapiens
  CDR3 for alpha chain variable domain of TCR clone 143255 (TRAV3, TRAJ5)
CAVRDLDTGRRAVTF

SEQ ID NO: 286510 - protein, 13 aa, Homo sapiens
  CDR3 for beta chain variable domain of TCR clone 143255 (TRBV12-4, TRBJ2-7)
CASSPTETYGQYF

SEQ ID NO: 286511 - protein, 13 aa, Homo sapiens
  CDR3 for alpha chain variable domain of TCR clone 143256 (TRAV30, TRAJ6)
CGFIEGGSSIPTF

SEQ ID NO: 286512 - protein, 13 aa, Homo sapiens
  CDR3 for beta chain variable domain of TCR clone 143256 (TRBV5-4, TRBJ2-5)
CASSPVSQETQYF

SEQ ID NO: 286513 - protein, 13 aa, Homo sapiens
  CDR3 for alpha chain variable domain of TCR clone 143257 (TRAV16, TRAJ34)
RALSPYNTDKLIF

SEQ ID NO: 286514 - protein, 17 aa, Homo sapiens
  CDR3 for beta chain variable domain of TCR clone 143257 (TRBV5-1, TRBJ2-1)
CASSTGTSGYSYNEQFF

SEQ ID NO: 286515 - protein, 14 aa, Homo sapiens
  CDR3 for alpha chain variable domain of TCR clone 143258 (TRAV8-2, TRAJ44)
CVVSLTGTASKLTF

SEQ ID NO: 286516 - protein, 19 aa, Homo sapiens
  CDR3 for beta chain variable domain of TCR clone 143258 (TRBV25-1, TRBJ2-2)
CAILVYRVDRGRKTGELFF

SEQ ID NO: 286517 - protein, 17 aa, Homo sapiens
  CDR3 for alpha chain variable domain of TCR clone 143259 (TRAV3, TRAJ6)
CAVSRRTDTGGSSIPTF

SEQ ID NO: 286518 - protein, 18 aa, Homo sapiens
  CDR3 for beta chain variable domain of TCR clone 143259 (TRBV7-2, TRBJ2-3)
CASSLETSRGRKADTQYF

SEQ ID NO: 286519 - protein, 13 aa, Homo sapiens
  CDR3 for alpha chain variable domain of TCR clone 143260 (TRAV21, TRAJ27)
FAARPGNAGKSTF

SEQ ID NO: 286520 - protein, 13 aa, Homo sapiens
  CDR3 for beta chain variable domain of TCR clone 143260 (TRBV7-3, TRBJ1-1)
CASSQDWGAEAFF

SEQ ID NO: 286521 - protein, 14 aa, Homo sapiens
  CDR3 for alpha chain variable domain of TCR clone 143261 (TRAV16, TRAJ29)
CALTRNSGNTPLVF

SEQ ID NO: 286522 - protein, 20 aa, Homo sapiens
  CDR3 for beta chain variable domain of TCR clone 143261 (TRBV7-8, TRBJ2-2)
CASSHLFPGPTIHITGELFF

SEQ ID NO: 286523 - protein, 15 aa, Homo sapiens
  CDR3 for alpha chain variable domain of TCR clone 143262 (TRAV16, TRAJ42)
CALRRGGGSQGNLIF

SEQ ID NO: 286524 - protein, 15 aa, Homo sapiens
  CDR3 for beta chain variable domain of TCR clone 143262 (TRBV27, TRBJ2-5)
CASSLIPSGGETQYF

SEQ ID NO: 286525 - protein, 16 aa, Homo sapiens
  CDR3 for alpha chain variable domain of TCR clone 143263 (TRAV30, TRAJ24)
CGIEIVDADSWGKFQF

SEQ ID NO: 286526 - protein, 15 aa, Homo sapiens
  CDR3 for beta chain variable domain of TCR clone 143263 (TRBV15, TRBJ1-5)
CATSRDPVSNQPQHF

SEQ ID NO: 286527 - protein, 14 aa, Homo sapiens
  CDR3 for alpha chain variable domain of TCR clone 143264 (TRAV12-2, TRAJ13)
CAVKKTGGYQKVTF

SEQ ID NO: 286528 - protein, 14 aa, Homo sapiens
  CDR3 for beta chain variable domain of TCR clone 143264 (TRBV19, TRBJ2-1)
CASPTFVLSGEQCF

SEQ ID NO: 286529 - protein, 18 aa, Homo sapiens
  CDR3 for alpha chain variable domain of TCR clone 143265 (TRAV26-1, TRAJ27)
CIVRPSFNCNTNAGKSTF

SEQ ID NO: 286530 - protein, 14 aa, Homo sapiens
  CDR3 for beta chain variable domain of TCR clone 143265 (TRBV10-3, TRBJ1-6)
CAISVDGDESPLHF

SEQ ID NO: 286531 - protein, 18 aa, Homo sapiens
  CDR3 for alpha chain variable domain of TCR clone 143266 (TRAV12-3, TRAJ52)
CAMSRTNAGGTSYGKLTF

SEQ ID NO: 286532 - protein, 16 aa, Homo sapiens
  CDR3 for beta chain variable domain of TCR clone 143266 (TRBV12-5, TRBJ2-5)
CASGPRTSGNQETQYF

SEQ ID NO: 286533 - protein, 14 aa, Homo sapiens
  CDR3 for alpha chain variable domain of TCR clone 143267 (TRAV8-3, TRAJ39)
CAVGANNADNMLTF

SEQ ID NO: 286534 - protein, 15 aa, Homo sapiens
  CDR3 for beta chain variable domain of TCR clone 143267 (TRBV4-3, TRBJ1-1)
CASSQELGRGTEAFF

SEQ ID NO: 286535 - protein, 14 aa, Homo sapiens
  CDR3 for alpha chain variable domain of TCR clone 143268 (TRAV1-2, TRAJ16)
CAVNRFSDGQKVLF

SEQ ID NO: 286536 - protein, 14 aa, Homo sapiens
  CDR3 for beta chain variable domain of TCR clone 143268 (TRBV4-1, TRBJ2-2)
CASSQAVNTGELFF

SEQ ID NO: 286537 - protein, 10 aa, Homo sapiens
  CDR3 for alpha chain variable domain of TCR clone 143269 (TRAV26-2, TRAJ49)
CILLVNQFYF

SEQ ID NO: 286538 - protein, 13 aa, Homo sapiens
  CDR3 for beta chain variable domain of TCR clone 143269 (TRBV20-1, TRBJ2-7)
CSADPGATYEQYF

SEQ ID NO: 286539 - protein, 15 aa, Homo sapiens
  CDR3 for alpha chain variable domain of TCR clone 143270 (TRAV27, TRAJ38)
FAARRNAVNNRKLIW

SEQ ID NO: 286540 - protein, 13 aa, Homo sapiens
  CDR3 for beta chain variable domain of TCR clone 143270 (TRBV12-5, TRBJ2-3)
CASGDRQSDTQYF

SEQ ID NO: 286541 - protein, 14 aa, Homo sapiens
  CDR3 for alpha chain variable domain of TCR clone 143271 (TRAV21, TRAJ37)
CAVKGSSNTGKLIF

SEQ ID NO: 286542 - protein, 15 aa, Homo sapiens
  CDR3 for beta chain variable domain of TCR clone 143271 (TRBV6-3, TRBJ2-7)
CASSSPGTVFYEQYF

SEQ ID NO: 286543 - protein, 16 aa, Homo sapiens
  CDR3 for alpha chain variable domain of TCR clone 143272 (TRAV21, TRAJ37)
CAVRPRGSSNTGKLIF

SEQ ID NO: 286544 - protein, 13 aa, Homo sapiens
  CDR3 for beta chain variable domain of TCR clone 143272 (TRBV7-9, TRBJ2-5)
CASLSPGQDTQYF

SEQ ID NO: 286545 - protein, 15 aa, Homo sapiens
  CDR3 for alpha chain variable domain of TCR clone 143273 (TRAV26-1, TRAJ29)
CIVRVTNSGNTPLVF

SEQ ID NO: 286546 - protein, 13 aa, Homo sapiens
  CDR3 for beta chain variable domain of TCR clone 143273 (TRBV19, TRBJ1-3)
CASRLSLGNTIYF

SEQ ID NO: 286547 - protein, 13 aa, Homo sapiens
  CDR3 for alpha chain variable domain of TCR clone 143274 (TRAV8-3, TRAJ44)
YAVVPGTASKLPF

SEQ ID NO: 286548 - protein, 14 aa, Homo sapiens
  CDR3 for beta chain variable domain of TCR clone 143274 (TRBV11-2, TRBJ2-3)
CASSRLARTDTQHF

SEQ ID NO: 286549 - protein, 15 aa, Homo sapiens
  CDR3 for alpha chain variable domain of TCR clone 143275 (TRAV26-1, TRAJ23)
CIVRVAGYQGGKLIF

SEQ ID NO: 286550 - protein, 18 aa, Homo sapiens
  CDR3 for beta chain variable domain of TCR clone 143275 (TRBV28, TRBJ2-1)
CASSSTSGRANSYNEQFS

SEQ ID NO: 286551 - protein, 13 aa, Homo sapiens
  CDR3 for alpha chain variable domain of TCR clone 143276 (TRAV2, TRAJ40)
CAVVTSGTYKYIF

SEQ ID NO: 286552 - protein, 16 aa, Homo sapiens
  CDR3 for beta chain variable domain of TCR clone 143276 (TRBV7-9, TRBJ2-3)
CASSFSVAGGTDTQYF

SEQ ID NO: 286553 - protein, 18 aa, Homo sapiens
  CDR3 for alpha chain variable domain of TCR clone 143277 (TRAV21, TRAJ52)
CAVGPSPAGGTSYGKLTF

SEQ ID NO: 286554 - protein, 13 aa, Homo sapiens
  CDR3 for beta chain variable domain of TCR clone 143277 (TRBV29-1, TRBJ2-1)
CSVGGGRVNEQFF

SEQ ID NO: 286555 - protein, 14 aa, Homo sapiens
  CDR3 for alpha chain variable domain of TCR clone 143278 (TRAV30, TRAJ45)
CGTSTGGGADGLTF

SEQ ID NO: 286556 - protein, 13 aa, Homo sapiens
  CDR3 for beta chain variable domain of TCR clone 143278 (TRBV7-9, TRBJ2-7)
CASSFAGAYEQYF

SEQ ID NO: 286557 - protein, 14 aa, Homo sapiens
  CDR3 for alpha chain variable domain of TCR clone 143279 (TRAV12-2, TRAJ13)
CAVKKTGGYQKVTF

SEQ ID NO: 286558 - protein, 14 aa, Homo sapiens
  CDR3 for beta chain variable domain of TCR clone 143279 (TRBV25-1, TRBJ1-1)
FASTHLGGNTEAFF

SEQ ID NO: 286559 - protein, 17 aa, Homo sapiens
  CDR3 for alpha chain variable domain of TCR clone 143280 (TRAV2, TRAJ36)
CAVEDRGNWGKQPLLWA

SEQ ID NO: 286560 - protein, 14 aa, Homo sapiens
  CDR3 for beta chain variable domain of TCR clone 143280 (TRBV7-9, TRBJ2-5)
CASSLDTAQGTQYF

SEQ ID NO: 286561 - protein, 15 aa, Homo sapiens
  CDR3 for alpha chain variable domain of TCR clone 143281 (TRAV3, TRAJ32)
CAVSSYGGATNKLIF

SEQ ID NO: 286562 - protein, 13 aa, Homo sapiens
  CDR3 for beta chain variable domain of TCR clone 143281 (TRBV15, TRBJ1-6)
CATSGGLNSPLHF

SEQ ID NO: 286563 - protein, 12 aa, Homo sapiens
  CDR3 for alpha chain variable domain of TCR clone 143282 (TRAV2, TRAJ10)
CASTGGGNKLTF

SEQ ID NO: 286564 - protein, 11 aa, Homo sapiens
  CDR3 for beta chain variable domain of TCR clone 143282 (TRBV12-4, TRBJ2-3)
CASTATDTQYF

SEQ ID NO: 286565 - protein, 16 aa, Homo sapiens
  CDR3 for alpha chain variable domain of TCR clone 143283 (TRAV27, TRAJ13)
CAGAKSDSGGYQKVTF

SEQ ID NO: 286566 - protein, 14 aa, Homo sapiens
  CDR3 for beta chain variable domain of TCR clone 143283 (TRBV20-1, TRBJ2-5)
CSARDGRAGETQYF

SEQ ID NO: 286567 - protein, 11 aa, Homo sapiens
  CDR3 for alpha chain variable domain of TCR clone 143284 (TRAV3, TRAJ17)
PRGAAGNKLTF

SEQ ID NO: 286568 - protein, 16 aa, Homo sapiens
  CDR3 for beta chain variable domain of TCR clone 143284 (TRBV7-6, TRBJ2-1)
CASSAPGPGSYNEQFF

SEQ ID NO: 286569 - protein, 14 aa, Homo sapiens
  CDR3 for alpha chain variable domain of TCR clone 143285 (TRAV1-2, TRAJ24)
CAVLTTDSWGKFQF

SEQ ID NO: 286570 - protein, 15 aa, Homo sapiens
  CDR3 for beta chain variable domain of TCR clone 143285 (TRBV25-1, TRBJ1-4)
CASSPGDSTNEKLFF

SEQ ID NO: 286571 - protein, 15 aa, Homo sapiens
  CDR3 for alpha chain variable domain of TCR clone 143286 (TRAV8-3, TRAJ45)
CASSYSGGGADGLTF

SEQ ID NO: 286572 - protein, 15 aa, Homo sapiens
  CDR3 for beta chain variable domain of TCR clone 143286 (TRBV7-2, TRBJ1-1)
CASSFAGDRDTEAFF

SEQ ID NO: 286573 - protein, 14 aa, Homo sapiens
  CDR3 for alpha chain variable domain of TCR clone 143287 (TRAV12-1, TRAJ46)
CVVTAKSSGDKLTF

SEQ ID NO: 286574 - protein, 16 aa, Homo sapiens
  CDR3 for beta chain variable domain of TCR clone 143287 (TRBV20-1, TRBJ1-4)
CSAPGQGLLTNEKLFF

SEQ ID NO: 286575 - protein, 13 aa, Homo sapiens
  CDR3 for alpha chain variable domain of TCR clone 143288 (TRAV21, TRAJ57)
CAVTQGGSEKLVF

SEQ ID NO: 286576 - protein, 16 aa, Homo sapiens
  CDR3 for beta chain variable domain of TCR clone 143288 (TRBV29-1, TRBJ2-7)
CSVEDAEDGRAYEQYF

SEQ ID NO: 286577 - protein, 16 aa, Homo sapiens
  CDR3 for alpha chain variable domain of TCR clone 143289 (TRAV12-1, TRAJ21)
CVVLSGYFGSGTKLNV

SEQ ID NO: 286578 - protein, 13 aa, Homo sapiens
  CDR3 for beta chain variable domain of TCR clone 143289 (TRBV12-4, TRBJ1-1)
CASSPGTGFEAFF

SEQ ID NO: 286579 - protein, 16 aa, Homo sapiens
  CDR3 for alpha chain variable domain of TCR clone 143290 (TRAV26-1, TRAJ36)
CIVRVSDQTGANNLFF

SEQ ID NO: 286580 - protein, 13 aa, Homo sapiens
  CDR3 for beta chain variable domain of TCR clone 143290 (TRBV5-5, TRBJ1-5)
CASSLGIGGDQHF

SEQ ID NO: 286581 - protein, 12 aa, Homo sapiens
  CDR3 for alpha chain variable domain of TCR clone 143291 (TRAV16, TRAJ10)
CSRTGGGNKLTF

SEQ ID NO: 286582 - protein, 14 aa, Homo sapiens
  CDR3 for beta chain variable domain of TCR clone 143291 (TRBV7-2, TRBJ2-7)
CASKSQGAAYEQYF

SEQ ID NO: 286583 - protein, 15 aa, Homo sapiens
  CDR3 for alpha chain variable domain of TCR clone 143292 (TRAV26-1, TRAJ29)
CIVRVEGSGNTRLVV

SEQ ID NO: 286584 - protein, 15 aa, Homo sapiens
  CDR3 for beta chain variable domain of TCR clone 143292 (TRBV7-9, TRBJ1-5)
CASSQGHQPNQPQHF

SEQ ID NO: 286585 - protein, 15 aa, Homo sapiens
  CDR3 for alpha chain variable domain of TCR clone 143293 (TRAV8-2, TRAJ40)
CVVVGTTSGTYKYIF

SEQ ID NO: 286586 - protein, 16 aa, Homo sapiens
  CDR3 for beta chain variable domain of TCR clone 143293 (TRBV7-3, TRBJ2-1)
CASSLEGYRSYNKQFF

SEQ ID NO: 286587 - protein, 15 aa, Homo sapiens
  CDR3 for alpha chain variable domain of TCR clone 143294 (TRAV35, TRAJ33)
CAGQPPRYSNYQLIW

SEQ ID NO: 286588 - protein, 15 aa, Homo sapiens
  CDR3 for beta chain variable domain of TCR clone 143294 (TRBV2, TRBJ2-1)
CASSEEREGDNEQFF

SEQ ID NO: 286589 - protein, 13 aa, Homo sapiens
  CDR3 for alpha chain variable domain of TCR clone 143295 (TRAV12-2, TRAJ50)
CAVIVTSYDKVIF

SEQ ID NO: 286590 - protein, 13 aa, Homo sapiens
  CDR3 for beta chain variable domain of TCR clone 143295 (TRBV27, TRBJ2-1)
CASSLSRSHEQFF

SEQ ID NO: 286591 - protein, 15 aa, Homo sapiens
  CDR3 for alpha chain variable domain of TCR clone 143296 (TRAV3, TRAJ17)
CAARDTGAAGNKLTF

SEQ ID NO: 286592 - protein, 13 aa, Homo sapiens
  CDR3 for beta chain variable domain of TCR clone 143296 (TRBV12-4, TRBJ2-7)
CASSPTETYEQYF

SEQ ID NO: 286593 - protein, 12 aa, Homo sapiens
  CDR3 for alpha chain variable domain of TCR clone 143297 (TRAV12-1, TRAJ40)
CVVYSGTYKYVF

SEQ ID NO: 286594 - protein, 16 aa, Homo sapiens
  CDR3 for beta chain variable domain of TCR clone 143297 (TRBV7-3, TRBJ2-2)
CASSLKRGTLSGELFF

SEQ ID NO: 286595 - protein, 14 aa, Homo sapiens
  CDR3 for alpha chain variable domain of TCR clone 143298 (TRAV12-2, TRAJ13)
CAVKKTGGYQKVTF

SEQ ID NO: 286596 - protein, 13 aa, Homo sapiens
  CDR3 for beta chain variable domain of TCR clone 143298 (TRBV28, TRBJ2-5)
CASSFAGGETQYF

SEQ ID NO: 286597 - protein, 14 aa, Homo sapiens
  CDR3 for alpha chain variable domain of TCR clone 143299 (TRAV3, TRAJ20)
CCERHKVERHKLSF

SEQ ID NO: 286598 - protein, 15 aa, Homo sapiens
  CDR3 for beta chain variable domain of TCR clone 143299 (TRBV7-9, TRBJ1-6)
CASSSPGRGNSPLHF

SEQ ID NO: 286599 - protein, 17 aa, Homo sapiens
  CDR3 for alpha chain variable domain of TCR clone 143300 (TRAV3, TRAJ42)
CAVRDRDYGGSQGNLIF

SEQ ID NO: 286600 - protein, 10 aa, Homo sapiens
  CDR3 for beta chain variable domain of TCR clone 143300 (TRBV19, TRBJ1-1)
CASRQVEAFF

SEQ ID NO: 286601 - protein, 13 aa, Homo sapiens
  CDR3 for alpha chain variable domain of TCR clone 143301 (TRAV36/DV7, TRAJ49)
CAVEANTGNQFYF

SEQ ID NO: 286602 - protein, 13 aa, Homo sapiens
  CDR3 for beta chain variable domain of TCR clone 143301 (TRBV10-3, TRBJ2-7)
CASKLAVNDEQYF

SEQ ID NO: 286603 - protein, 14 aa, Homo sapiens
  CDR3 for alpha chain variable domain of TCR clone 143302 (TRAV17, TRAJ54)
CATDANQGAQKLVF

SEQ ID NO: 286604 - protein, 12 aa, Homo sapiens
  CDR3 for beta chain variable domain of TCR clone 143302 (TRBV5-4, TRBJ2-5)
CASSSTRETQYF

SEQ ID NO: 286605 - protein, 13 aa, Homo sapiens
  CDR3 for alpha chain variable domain of TCR clone 143303 (TRAV39, TRAJ33)
CAANPDSNYQLIW

SEQ ID NO: 286606 - protein, 14 aa, Homo sapiens
  CDR3 for beta chain variable domain of TCR clone 143303 (TRBV7-9, TRBJ2-1)
CASRPTGLRNEQFF

SEQ ID NO: 286607 - protein, 14 aa, Homo sapiens
  CDR3 for alpha chain variable domain of TCR clone 143304 (TRAV26-1, TRAJ45)
CIEVTGGGADGLTF

SEQ ID NO: 286608 - protein, 14 aa, Homo sapiens
  CDR3 for beta chain variable domain of TCR clone 143304 (TRBV7-9, TRBJ2-3)
CASSLEDGTDTQYF

SEQ ID NO: 286609 - protein, 14 aa, Homo sapiens
  CDR3 for alpha chain variable domain of TCR clone 143305 (TRAV27, TRAJ37)
CAGERSSNTGTLIL

SEQ ID NO: 286610 - protein, 15 aa, Homo sapiens
  CDR3 for beta chain variable domain of TCR clone 143305 (TRBV11-3, TRBJ1-6)
CASSLDWGANSPLHF

SEQ ID NO: 286611 - protein, 14 aa, Homo sapiens
  CDR3 for alpha chain variable domain of TCR clone 143306 (TRAV1-2, TRAJ8)
CAVREDTGFQKLVF

SEQ ID NO: 286612 - protein, 18 aa, Homo sapiens
  CDR3 for beta chain variable domain of TCR clone 143306 (TRBV20-1, TRBJ2-6)
CSAETTPAHGSGANVLTF

SEQ ID NO: 286613 - protein, 11 aa, Homo sapiens
  CDR3 for alpha chain variable domain of TCR clone 143307 (TRAV3, TRAJ49)
CAPITGNQFYL

SEQ ID NO: 286614 - protein, 13 aa, Homo sapiens
  CDR3 for beta chain variable domain of TCR clone 143307 (TRBV10-3, TRBJ2-7)
CASKLAVNYEQYF

SEQ ID NO: 286615 - protein, 16 aa, Homo sapiens
  CDR3 for alpha chain variable domain of TCR clone 143308 (TRAV30, TRAJ24)
CGTEIVDADSWGKFQF

SEQ ID NO: 286616 - protein, 13 aa, Homo sapiens
  CDR3 for beta chain variable domain of TCR clone 143308 (TRBV7-8, TRBJ2-1)
CASTRDAVDEQFF

SEQ ID NO: 286617 - protein, 17 aa, Homo sapiens
  CDR3 for alpha chain variable domain of TCR clone 143309 (TRAV8-6, TRAJ58)
CAVSYWVGETSGSRLTF

SEQ ID NO: 286618 - protein, 14 aa, Homo sapiens
  CDR3 for beta chain variable domain of TCR clone 143309 (TRBV4-2, TRBJ2-1)
CASGLDSAYNEQFF

SEQ ID NO: 286619 - protein, 14 aa, Homo sapiens
  CDR3 for alpha chain variable domain of TCR clone 143310 (TRAV23/DV6, TRAJ22)
CADISSGSARQLTF

SEQ ID NO: 286620 - protein, 16 aa, Homo sapiens
  CDR3 for beta chain variable domain of TCR clone 143310 (TRBV5-6, TRBJ2-5)
CASIRGQTGYEETQYF

SEQ ID NO: 286621 - protein, 16 aa, Homo sapiens
  CDR3 for alpha chain variable domain of TCR clone 143311 (TRAV27, TRAJ13)
CAGAESDSGGYQKVTF

SEQ ID NO: 286622 - protein, 13 aa, Homo sapiens
  CDR3 for beta chain variable domain of TCR clone 143311 (TRBV27, TRBJ2-7)
CASSLTTGYEQYF

SEQ ID NO: 286623 - protein, 13 aa, Homo sapiens
  CDR3 for alpha chain variable domain of TCR clone 143312 (TRAV8-3, TRAJ43)
CAVGPDNNNDMRF

SEQ ID NO: 286624 - protein, 17 aa, Homo sapiens
  CDR3 for beta chain variable domain of TCR clone 143312 (TRBV13, TRBJ2-3)
CASSLSRVAGGGNTQYF

SEQ ID NO: 286625 - protein, 14 aa, Homo sapiens
  CDR3 for alpha chain variable domain of TCR clone 143313 (TRAV1-2, TRAJ8)
CAVREDTGFQKLVF

SEQ ID NO: 286626 - protein, 13 aa, Homo sapiens
  CDR3 for beta chain variable domain of TCR clone 143313 (TRBV4-2, TRBJ2-3)
CASSLTSTDTQYF

SEQ ID NO: 286627 - protein, 12 aa, Homo sapiens
  CDR3 for alpha chain variable domain of TCR clone 143314 (TRAV1-1, TRAJ30)
CAVRGRDDKIIF

SEQ ID NO: 286628 - protein, 16 aa, Homo sapiens
  CDR3 for beta chain variable domain of TCR clone 143314 (TRBV27, TRBJ2-1)
CASSSRLAGNYNEQFF

SEQ ID NO: 286629 - protein, 13 aa, Homo sapiens
  CDR3 for alpha chain variable domain of TCR clone 143315 (TRAV27, TRAJ6)
CAGGTRGSYIPTF

SEQ ID NO: 286630 - protein, 15 aa, Homo sapiens
  CDR3 for beta chain variable domain of TCR clone 143315 (TRBV2, TRBJ2-5)
CASTRDGGPQETQYF

SEQ ID NO: 286631 - protein, 22 aa, Homo sapiens
  CDR3 for alpha chain variable domain of TCR clone 143316 (TRAV4, )
CLVGPHNYDIQNPDPAVSPLRD

SEQ ID NO: 286632 - protein, 17 aa, Homo sapiens
  CDR3 for beta chain variable domain of TCR clone 143316 (TRBV24-1, TRBJ2-1)
CATSDVSTSGTYNEQFF

SEQ ID NO: 286633 - protein, 18 aa, Homo sapiens
  CDR3 for alpha chain variable domain of TCR clone 143317 (TRAV21, TRAJ52)
CAVRPSPAGGTSYGKLTF

SEQ ID NO: 286634 - protein, 17 aa, Homo sapiens
  CDR3 for beta chain variable domain of TCR clone 143317 (TRBV13, TRBJ2-3)
CASSLSRVAGGRHTQYF

SEQ ID NO: 286635 - protein, 15 aa, Homo sapiens
  CDR3 for alpha chain variable domain of TCR clone 143318 (TRAV3, TRAJ5)
CAVRDLDTGRRARTF

SEQ ID NO: 286636 - protein, 13 aa, Homo sapiens
  CDR3 for beta chain variable domain of TCR clone 143318 (TRBV12-4, TRBJ2-7)
CASSPTEAYEQYF

SEQ ID NO: 286637 - protein, 17 aa, Homo sapiens
  CDR3 for alpha chain variable domain of TCR clone 143319 (TRAV26-2, TRAJ42)
CILRDESYGGSQGNLIF

SEQ ID NO: 286638 - protein, 13 aa, Homo sapiens
  CDR3 for beta chain variable domain of TCR clone 143319 (TRBV7-3, TRBJ1-1)
CASSQDWGAEAFF

SEQ ID NO: 286639 - protein, 13 aa, Homo sapiens
  CDR3 for alpha chain variable domain of TCR clone 143320 (TRAV17, TRAJ9)
CATDYTGGLKTIF

SEQ ID NO: 286640 - protein, 13 aa, Homo sapiens
  CDR3 for beta chain variable domain of TCR clone 143320 (TRBV2, TRBJ2-5)
CASSGLVEETQYF

SEQ ID NO: 286641 - protein, 15 aa, Homo sapiens
  CDR3 for alpha chain variable domain of TCR clone 143321 (TRAV12-1, TRAJ44)
CVVFVNTGTASKLTF

SEQ ID NO: 286642 - protein, 14 aa, Homo sapiens
  CDR3 for beta chain variable domain of TCR clone 143321 (TRBV2, TRBJ2-7)
CASSLTSGGYEQYF

SEQ ID NO: 286643 - protein, 12 aa, Homo sapiens
  CDR3 for alpha chain variable domain of TCR clone 143322 (TRAV2, TRAJ31)
CAVEDNNARLMF

SEQ ID NO: 286644 - protein, 13 aa, Homo sapiens
  CDR3 for beta chain variable domain of TCR clone 143322 (TRBV19, TRBJ1-1)
CASSFGRMPEAFF

SEQ ID NO: 286645 - protein, 20 aa, Homo sapiens
  CDR3 for alpha chain variable domain of TCR clone 143323 (TRAV23/DV6, )
CAATALIPDIQNPDPAVYQL

SEQ ID NO: 286646 - protein, 16 aa, Homo sapiens
  CDR3 for beta chain variable domain of TCR clone 143323 (TRBV10-3, TRBJ2-7)
CAISPRGQEQTYEQDF

SEQ ID NO: 286647 - protein, 15 aa, Homo sapiens
  CDR3 for alpha chain variable domain of TCR clone 143324 (TRAV34, TRAJ36)
CGAPSRLGGANTLFF

SEQ ID NO: 286648 - protein, 16 aa, Homo sapiens
  CDR3 for beta chain variable domain of TCR clone 143324 (TRBV4-3, TRBJ2-1)
CASSYRRLGSWDEQFF

SEQ ID NO: 286649 - protein, 15 aa, Homo sapiens
  CDR3 for alpha chain variable domain of TCR clone 143325 (TRAV12-2, TRAJ56)
CAVNPFTGANSKLTF

SEQ ID NO: 286650 - protein, 13 aa, Homo sapiens
  CDR3 for beta chain variable domain of TCR clone 143325 (TRBV20-1, TRBJ1-2)
CSARDRVYGGYNF

SEQ ID NO: 286651 - protein, 14 aa, Homo sapiens
  CDR3 for alpha chain variable domain of TCR clone 143326 (TRAV8-4, TRAJ13)
CAVTLSVGYQKVTF

SEQ ID NO: 286652 - protein, 16 aa, Homo sapiens
  CDR3 for beta chain variable domain of TCR clone 143326 (TRBV5-7, TRBJ1-4)
CASSPSGGLKTEKLFF

SEQ ID NO: 286653 - protein, 14 aa, Homo sapiens
  CDR3 for alpha chain variable domain of TCR clone 143327 (TRAV4, TRAJ12)
CLVGYMDSSYKLIF

SEQ ID NO: 286654 - protein, 12 aa, Homo sapiens
  CDR3 for beta chain variable domain of TCR clone 143327 (TRBV11-2, TRBJ2-2)
CASSLGGGELFF

SEQ ID NO: 286655 - protein, 14 aa, Homo sapiens
  CDR3 for alpha chain variable domain of TCR clone 143328 (TRAV12-2, TRAJ13)
CAVKKTGGYQKVTF

SEQ ID NO: 286656 - protein, 14 aa, Homo sapiens
  CDR3 for beta chain variable domain of TCR clone 143328 (TRBV7-3, TRBJ1-1)
CQQLRGQMNTEAFF

SEQ ID NO: 286657 - protein, 13 aa, Homo sapiens
  CDR3 for alpha chain variable domain of TCR clone 143329 (TRAV20, TRAJ48)
CAVQGVGNEKLTF

SEQ ID NO: 286658 - protein, 17 aa, Homo sapiens
  CDR3 for beta chain variable domain of TCR clone 143329 (TRBV20-1, TRBJ2-2)
CSASGSGQGGLTGELFF

SEQ ID NO: 286659 - protein, 13 aa, Homo sapiens
  CDR3 for alpha chain variable domain of TCR clone 143330 (TRAV16, TRAJ39)
CALKDNAGNMLTF

SEQ ID NO: 286660 - protein, 17 aa, Homo sapiens
  CDR3 for beta chain variable domain of TCR clone 143330 (TRBV13, TRBJ2-3)
CASSLSRVAGGRNTQYF

SEQ ID NO: 286661 - protein, 15 aa, Homo sapiens
  CDR3 for alpha chain variable domain of TCR clone 143331 (TRAV23/DV6, TRAJ4)
CAASPLRGGYNKLIF

SEQ ID NO: 286662 - protein, 13 aa, Homo sapiens
  CDR3 for beta chain variable domain of TCR clone 143331 (TRBV24-1, TRBJ2-2)
CATSDWSTGELFF

SEQ ID NO: 286663 - protein, 11 aa, Homo sapiens
  CDR3 for alpha chain variable domain of TCR clone 143332 (TRAV2, TRAJ33)
CAVDSNYQLIW

SEQ ID NO: 286664 - protein, 15 aa, Homo sapiens
  CDR3 for beta chain variable domain of TCR clone 143332 (TRBV4-3, TRBJ2-3)
CASSPSLLSTDTQYF

SEQ ID NO: 286665 - protein, 12 aa, Homo sapiens
  CDR3 for alpha chain variable domain of TCR clone 143333 (TRAV13-1, TRAJ5)
CAASDTQESTYF

SEQ ID NO: 286666 - protein, 12 aa, Homo sapiens
  CDR3 for beta chain variable domain of TCR clone 143333 (TRBV28, TRBJ2-3)
CASSLYRDTQYF

SEQ ID NO: 286667 - protein, 14 aa, Homo sapiens
  CDR3 for alpha chain variable domain of TCR clone 143334 (TRAV12-2, TRAJ17)
CAVIFKAAGNKLTF

SEQ ID NO: 286668 - protein, 13 aa, Homo sapiens
  CDR3 for beta chain variable domain of TCR clone 143334 (TRBV10-3, TRBJ2-7)
CASKLAVNYEQYF

SEQ ID NO: 286669 - protein, 14 aa, Homo sapiens
  CDR3 for alpha chain variable domain of TCR clone 143335 (TRAV26-1, TRAJ38)
CIADNSGNNRKLIW

SEQ ID NO: 286670 - protein, 13 aa, Homo sapiens
  CDR3 for beta chain variable domain of TCR clone 143335 (TRBV20-1, TRBJ1-1)
CSARGGGNTEAFF

SEQ ID NO: 286671 - protein, 17 aa, Homo sapiens
  CDR3 for alpha chain variable domain of TCR clone 143336 (TRAV3, TRAJ6)
CAVRDGPRAGGSYIPTF

SEQ ID NO: 286672 - protein, 15 aa, Homo sapiens
  CDR3 for beta chain variable domain of TCR clone 143336 (TRBV27, TRBJ2-1)
WASSNGGGSSNEQFF

SEQ ID NO: 286673 - protein, 17 aa, Homo sapiens
  CDR3 for alpha chain variable domain of TCR clone 143337 (TRAV3, TRAJ42)
CAVRGRDYGGSQGNLIF

SEQ ID NO: 286674 - protein, 14 aa, Homo sapiens
  CDR3 for beta chain variable domain of TCR clone 143337 (TRBV25-1, TRBJ1-1)
CASTHLGGNTEAFF

SEQ ID NO: 286675 - protein, 14 aa, Homo sapiens
  CDR3 for alpha chain variable domain of TCR clone 143338 (TRAV26-1, TRAJ38)
CIADNAGNNRKRIW

SEQ ID NO: 286676 - protein, 13 aa, Homo sapiens
  CDR3 for beta chain variable domain of TCR clone 143338 (TRBV20-1, TRBJ2-2)
CSASAAGTGELFF

SEQ ID NO: 286677 - protein, 13 aa, Homo sapiens
  CDR3 for alpha chain variable domain of TCR clone 143339 (TRAV13-2, TRAJ48)
CAEMDFGNEKLTF

SEQ ID NO: 286678 - protein, 15 aa, Homo sapiens
  CDR3 for beta chain variable domain of TCR clone 143339 (TRBV12-4, TRBJ2-1)
CASSLLATGNNEQFF

SEQ ID NO: 286679 - protein, 12 aa, Homo sapiens
  CDR3 for alpha chain variable domain of TCR clone 143340 (TRAV26-1, TRAJ35)
CMGLSFGNVLHC

SEQ ID NO: 286680 - protein, 14 aa, Homo sapiens
  CDR3 for beta chain variable domain of TCR clone 143340 (TRBV18, TRBJ2-5)
CASSPGVSQETQYF

SEQ ID NO: 286681 - protein, 14 aa, Homo sapiens
  CDR3 for alpha chain variable domain of TCR clone 143341 (TRAV8-3, TRAJ21)
CAVGLNLRSDKFYF

SEQ ID NO: 286682 - protein, 11 aa, Homo sapiens
  CDR3 for beta chain variable domain of TCR clone 143341 (TRBV6-3, TRBJ2-3)
CATGQADTQYF

SEQ ID NO: 286683 - protein, 13 aa, Homo sapiens
  CDR3 for alpha chain variable domain of TCR clone 143342 (TRAV20, TRAJ20)
CAVQAGSGYKLSF

SEQ ID NO: 286684 - protein, 13 aa, Homo sapiens
  CDR3 for beta chain variable domain of TCR clone 143342 (TRBV2, TRBJ1-1)
CARNPTGGFHAFF

SEQ ID NO: 286685 - protein, 12 aa, Homo sapiens
  CDR3 for alpha chain variable domain of TCR clone 143343 (TRAV13-1, TRAJ40)
FAANSGTYKYIF

SEQ ID NO: 286686 - protein, 12 aa, Homo sapiens
  CDR3 for beta chain variable domain of TCR clone 143343 (TRBV12-4, TRBJ2-7)
CASSLGGYEQYF

SEQ ID NO: 286687 - protein, 14 aa, Homo sapiens
  CDR3 for alpha chain variable domain of TCR clone 143344 (TRAV20, TRAJ42)
CAVQARGSQVNLIF

SEQ ID NO: 286688 - protein, 14 aa, Homo sapiens
  CDR3 for beta chain variable domain of TCR clone 143344 (TRBV28, TRBJ1-2)
CASRIQGANYGYTF

SEQ ID NO: 286689 - protein, 15 aa, Homo sapiens
  CDR3 for alpha chain variable domain of TCR clone 143345 (TRAV3, TRAJ4)
CAVRDGTGGYNKLIF

SEQ ID NO: 286690 - protein, 12 aa, Homo sapiens
  CDR3 for beta chain variable domain of TCR clone 143345 (TRBV5-4, TRBJ2-5)
CASSSTRETQYF

SEQ ID NO: 286691 - protein, 14 aa, Homo sapiens
  CDR3 for alpha chain variable domain of TCR clone 143346 (TRAV26-1, TRAJ44)
CIVRPTGTASKLTF

SEQ ID NO: 286692 - protein, 15 aa, Homo sapiens
  CDR3 for beta chain variable domain of TCR clone 143346 (TRBV28, TRBJ2-1)
CASSIIAGGRSEQFF

SEQ ID NO: 286693 - protein, 16 aa, Homo sapiens
  CDR3 for alpha chain variable domain of TCR clone 143347 (TRAV4, TRAJ22)
CLVGELYSGSARQLTF

SEQ ID NO: 286694 - protein, 16 aa, Homo sapiens
  CDR3 for beta chain variable domain of TCR clone 143347 (TRBV7-9, TRBJ2-1)
CASSDVAGGSYNEQFF

SEQ ID NO: 286695 - protein, 14 aa, Homo sapiens
  CDR3 for alpha chain variable domain of TCR clone 143348 (TRAV26-1, TRAJ38)
CIADNAGNNRQLIW

SEQ ID NO: 286696 - protein, 13 aa, Homo sapiens
  CDR3 for beta chain variable domain of TCR clone 143348 (TRBV4-1, TRBJ2-7)
CASSQGQAYEQYF

SEQ ID NO: 286697 - protein, 11 aa, Homo sapiens
  CDR3 for alpha chain variable domain of TCR clone 143349 (TRAV3, TRAJ21)
CAMGNFNKFYF

SEQ ID NO: 286698 - protein, 16 aa, Homo sapiens
  CDR3 for beta chain variable domain of TCR clone 143349 (TRBV19, TRBJ2-1)
CASSKAGPRSYNEQFF

SEQ ID NO: 286699 - protein, 14 aa, Homo sapiens
  CDR3 for alpha chain variable domain of TCR clone 143350 (TRAV16, TRAJ33)
CALSAMDSNYQLIW

SEQ ID NO: 286700 - protein, 16 aa, Homo sapiens
  CDR3 for beta chain variable domain of TCR clone 143350 (TRBV4-1, TRBJ1-2)
CASSQDAGQVLYGYTF

SEQ ID NO: 286701 - protein, 12 aa, Homo sapiens
  CDR3 for alpha chain variable domain of TCR clone 143351 (TRAV35, TRAJ49)
CAGWNTGNQFYF

SEQ ID NO: 286702 - protein, 13 aa, Homo sapiens
  CDR3 for beta chain variable domain of TCR clone 143351 (TRBV5-7, TRBJ2-6)
CASTSSGANVLTF

SEQ ID NO: 286703 - protein, 13 aa, Homo sapiens
  CDR3 for alpha chain variable domain of TCR clone 143352 (TRAV1-2, TRAJ9)
CAALNTGGFKTIV

SEQ ID NO: 286704 - protein, 13 aa, Homo sapiens
  CDR3 for beta chain variable domain of TCR clone 143352 (TRBV15, TRBJ1-6)
CATSGGLNSPLHF

SEQ ID NO: 286705 - protein, 12 aa, Homo sapiens
  CDR3 for alpha chain variable domain of TCR clone 143353 (TRAV3, TRAJ43)
CAVRDPNNDMRF

SEQ ID NO: 286706 - protein, 13 aa, Homo sapiens
  CDR3 for beta chain variable domain of TCR clone 143353 (TRBV10-2, TRBJ2-1)
CASGASGDAKQFF

SEQ ID NO: 286707 - protein, 13 aa, Homo sapiens
  CDR3 for alpha chain variable domain of TCR clone 143354 (TRAV8-6, TRAJ8)
CAVSNTGFQKLVF

SEQ ID NO: 286708 - protein, 15 aa, Homo sapiens
  CDR3 for beta chain variable domain of TCR clone 143354 (TRBV28, TRBJ2-5)
CASSSGRTIQETQHF

SEQ ID NO: 286709 - protein, 13 aa, Homo sapiens
  CDR3 for alpha chain variable domain of TCR clone 143355 (TRAV8-2, TRAJ43)
CVVSDQGDNDMRC

SEQ ID NO: 286710 - protein, 12 aa, Homo sapiens
  CDR3 for beta chain variable domain of TCR clone 143355 (TRBV7-9, TRBJ2-7)
CASRTGFDEQYF

SEQ ID NO: 286711 - protein, 16 aa, Homo sapiens
  CDR3 for alpha chain variable domain of TCR clone 143356 (TRAV3, TRAJ37)
CAVRVRGSGNTGKPIF

SEQ ID NO: 286712 - protein, 12 aa, Homo sapiens
  CDR3 for beta chain variable domain of TCR clone 143356 (TRBV12-4, TRBJ2-5)
CASSSAQETQYF

SEQ ID NO: 286713 - protein, 14 aa, Homo sapiens
  CDR3 for alpha chain variable domain of TCR clone 143357 (TRAV13-1, TRAJ35)
CAASKGVFGNVLPC

SEQ ID NO: 286714 - protein, 13 aa, Homo sapiens
  CDR3 for beta chain variable domain of TCR clone 143357 (TRBV7-3, TRBJ1-1)
CASSQDWGAEAFF

SEQ ID NO: 286715 - protein, 13 aa, Homo sapiens
  CDR3 for alpha chain variable domain of TCR clone 143358 (TRAV13-1, TRAJ23)
CAASGRGGGKLIF

SEQ ID NO: 286716 - protein, 15 aa, Homo sapiens
  CDR3 for beta chain variable domain of TCR clone 143358 (TRBV19, TRBJ2-1)
CASSYSGSPYNEQFF

SEQ ID NO: 286717 - protein, 13 aa, Homo sapiens
  CDR3 for alpha chain variable domain of TCR clone 143359 (TRAV2, TRAJ40)
CAVVTSGTYKYIF

SEQ ID NO: 286718 - protein, 13 aa, Homo sapiens
  CDR3 for beta chain variable domain of TCR clone 143359 (TRBV3-1, TRBJ2-7)
CASSLTVGGEQYF

SEQ ID NO: 286719 - protein, 14 aa, Homo sapiens
  CDR3 for alpha chain variable domain of TCR clone 143360 (TRAV17, TRAJ57)
CVTDPQGGSEKLVF

SEQ ID NO: 286720 - protein, 18 aa, Homo sapiens
  CDR3 for beta chain variable domain of TCR clone 143360 (TRBV6-6, TRBJ1-3)
CASSYSKWDSISGNTIYF

SEQ ID NO: 286721 - protein, 12 aa, Homo sapiens
  CDR3 for alpha chain variable domain of TCR clone 143361 (TRAV2, TRAJ31)
CAVEDNNARLMF

SEQ ID NO: 286722 - protein, 16 aa, Homo sapiens
  CDR3 for beta chain variable domain of TCR clone 143361 (TRBV10-3, TRBJ2-1)
CAISGVGDRGGGEHFF

SEQ ID NO: 286723 - protein, 13 aa, Homo sapiens
  CDR3 for alpha chain variable domain of TCR clone 143362 (TRAV2, TRAJ40)
CAVVTSGTYKYIF

SEQ ID NO: 286724 - protein, 15 aa, Homo sapiens
  CDR3 for beta chain variable domain of TCR clone 143362 (TRBV11-3, TRBJ2-3)
CASRKDGREWDTQYF

SEQ ID NO: 286725 - protein, 12 aa, Homo sapiens
  CDR3 for alpha chain variable domain of TCR clone 143363 (TRAV1-1, TRAJ39)
CAVPVVGNMLTF

SEQ ID NO: 286726 - protein, 15 aa, Homo sapiens
  CDR3 for beta chain variable domain of TCR clone 143363 (TRBV5-1, TRBJ2-7)
CASSLDLTSSYEQYF

SEQ ID NO: 286727 - protein, 15 aa, Homo sapiens
  CDR3 for alpha chain variable domain of TCR clone 143364 (TRAV17, TRAJ23)
CAMDAEDNQGGKLSF

SEQ ID NO: 286728 - protein, 12 aa, Homo sapiens
  CDR3 for beta chain variable domain of TCR clone 143364 (TRBV2, TRBJ2-1)
CAKREGYNEQFF

SEQ ID NO: 286729 - protein, 15 aa, Homo sapiens
  CDR3 for alpha chain variable domain of TCR clone 143365 (TRAV21, TRAJ53)
CATLNSGGSNYELTF

SEQ ID NO: 286730 - protein, 16 aa, Homo sapiens
  CDR3 for beta chain variable domain of TCR clone 143365 (TRBV10-3, TRBJ2-2)
CAISGETGANTGELFF

SEQ ID NO: 286731 - protein, 13 aa, Homo sapiens
  CDR3 for alpha chain variable domain of TCR clone 143366 (TRAV12-3, TRAJ33)
CAMSVNSNHRLIW

SEQ ID NO: 286732 - protein, 13 aa, Homo sapiens
  CDR3 for beta chain variable domain of TCR clone 143366 (TRBV7-2, TRBJ2-2)
CASSLAVTGELFF

SEQ ID NO: 286733 - protein, 16 aa, Homo sapiens
  CDR3 for alpha chain variable domain of TCR clone 143367 (TRAV13-1, TRAJ18)
CAASRMRGSTLGRLYF

SEQ ID NO: 286734 - protein, 12 aa, Homo sapiens
  CDR3 for beta chain variable domain of TCR clone 143367 (TRBV11-2, TRBJ2-1)
CASSPGNNEQFF

SEQ ID NO: 286735 - protein, 12 aa, Homo sapiens
  CDR3 for alpha chain variable domain of TCR clone 143368 (TRAV12-3, TRAJ20)
CAMVRGDYKLSF

SEQ ID NO: 286736 - protein, 14 aa, Homo sapiens
  CDR3 for beta chain variable domain of TCR clone 143368 (TRBV19, TRBJ2-2)
CASSGQGIAGELFF

SEQ ID NO: 286737 - protein, 15 aa, Homo sapiens
  CDR3 for alpha chain variable domain of TCR clone 143369 (TRAV35, TRAJ40)
CAGQLGTSGTYKYIF

SEQ ID NO: 286738 - protein, 14 aa, Homo sapiens
  CDR3 for beta chain variable domain of TCR clone 143369 (TRBV7-3, TRBJ2-1)
CASSLAGGTNQQFF

SEQ ID NO: 286739 - protein, 19 aa, Homo sapiens
  CDR3 for alpha chain variable domain of TCR clone 143370 (TRAV10, TRAJ43)
TASQLSDSASYPAPNDMRF

SEQ ID NO: 286740 - protein, 13 aa, Homo sapiens
  CDR3 for beta chain variable domain of TCR clone 143370 (TRBV10-3, TRBJ2-7)
CASKLAVNYEQYF

SEQ ID NO: 286741 - protein, 13 aa, Homo sapiens
  CDR3 for alpha chain variable domain of TCR clone 143371 (TRAV17, TRAJ54)
CAAGIQGAQKLLF

SEQ ID NO: 286742 - protein, 14 aa, Homo sapiens
  CDR3 for beta chain variable domain of TCR clone 143371 (TRBV11-2, TRBJ1-2)
CASSLGTANYGYTF

SEQ ID NO: 286743 - protein, 11 aa, Homo sapiens
  CDR3 for alpha chain variable domain of TCR clone 143372 (TRAV21, TRAJ41)
CAVRSGYALNF

SEQ ID NO: 286744 - protein, 13 aa, Homo sapiens
  CDR3 for beta chain variable domain of TCR clone 143372 (TRBV7-2, TRBJ2-5)
CASSQPSVETQYF

SEQ ID NO: 286745 - protein, 16 aa, Homo sapiens
  CDR3 for alpha chain variable domain of TCR clone 143373 (TRAV3, TRAJ37)
CAVRPHGSGNTGKLLF

SEQ ID NO: 286746 - protein, 17 aa, Homo sapiens
  CDR3 for beta chain variable domain of TCR clone 143373 (TRBV20-1, TRBJ2-1)
CSASSSGLAGSYNEQFF

SEQ ID NO: 286747 - protein, 14 aa, Homo sapiens
  CDR3 for alpha chain variable domain of TCR clone 143374 (TRAV38-1, TRAJ31)
CAFMKHDNNARLMF

SEQ ID NO: 286748 - protein, 14 aa, Homo sapiens
  CDR3 for beta chain variable domain of TCR clone 143374 (TRBV23-1, TRBJ2-1)
AAPATGPTYNEQFF

SEQ ID NO: 286749 - protein, 12 aa, Homo sapiens
  CDR3 for alpha chain variable domain of TCR clone 143375 (TRAV29/DV5, TRAJ26)
CAAIPSGQNFVF

SEQ ID NO: 286750 - protein, 13 aa, Homo sapiens
  CDR3 for beta chain variable domain of TCR clone 143375 (TRBV7-9, TRBJ1-2)
CASSLKQNYGYTF

SEQ ID NO: 286751 - protein, 15 aa, Homo sapiens
  CDR3 for alpha chain variable domain of TCR clone 143376 (TRAV35, TRAJ41)
CAVQLFSNSGYALNF

SEQ ID NO: 286752 - protein, 14 aa, Homo sapiens
  CDR3 for beta chain variable domain of TCR clone 143376 (TRBV7-2, TRBJ1-2)
CASSRGGTNYGYTF

SEQ ID NO: 286753 - protein, 13 aa, Homo sapiens
  CDR3 for alpha chain variable domain of TCR clone 143377 (TRAV2, TRAJ40)
CAVVTPGTYKYIF

SEQ ID NO: 286754 - protein, 12 aa, Homo sapiens
  CDR3 for beta chain variable domain of TCR clone 143377 (TRBV19, TRBJ1-5)
CASSIAQQPQHF

SEQ ID NO: 286755 - protein, 14 aa, Homo sapiens
  CDR3 for alpha chain variable domain of TCR clone 143378 (TRAV17, TRAJ6)
CATNPAGGSYMPTF

SEQ ID NO: 286756 - protein, 15 aa, Homo sapiens
  CDR3 for beta chain variable domain of TCR clone 143378 (TRBV2, TRBJ2-5)
CASSVTVAAGETQYF

SEQ ID NO: 286757 - protein, 16 aa, Homo sapiens
  CDR3 for alpha chain variable domain of TCR clone 143379 (TRAV23/DV6, TRAJ9)
CSASIGGNTGGFKTIF

SEQ ID NO: 286758 - protein, 12 aa, Homo sapiens
  CDR3 for beta chain variable domain of TCR clone 143379 (TRBV6-3, TRBJ2-7)
CASSEPGFEQYF

SEQ ID NO: 286759 - protein, 14 aa, Homo sapiens
  CDR3 for alpha chain variable domain of TCR clone 143380 (TRAV1-1, TRAJ27)
CAVIYNTNAGKSIF

SEQ ID NO: 286760 - protein, 13 aa, Homo sapiens
  CDR3 for beta chain variable domain of TCR clone 143380 (TRBV7-9, TRBJ1-2)
CANSLKQNYGYTF

SEQ ID NO: 286761 - protein, 14 aa, Homo sapiens
  CDR3 for alpha chain variable domain of TCR clone 143381 (TRAV8-2, TRAJ23)
CVVSDDNQGGKLIF

SEQ ID NO: 286762 - protein, 13 aa, Homo sapiens
  CDR3 for beta chain variable domain of TCR clone 143381 (TRBV19, TRBJ2-7)
CASRKAGGSEQYF

SEQ ID NO: 286763 - protein, 18 aa, Homo sapiens
  CDR3 for alpha chain variable domain of TCR clone 143382 (TRAV29/DV5, TRAJ52)
CAAGFRGAGGTSYGKLKF

SEQ ID NO: 286764 - protein, 15 aa, Homo sapiens
  CDR3 for beta chain variable domain of TCR clone 143382 (TRBV7-2, TRBJ2-7)
CASSLLGTGSYEQYF

SEQ ID NO: 286765 - protein, 13 aa, Homo sapiens
  CDR3 for alpha chain variable domain of TCR clone 143383 (TRAV8-4, TRAJ47)
CAVTALYVNKLVF

SEQ ID NO: 286766 - protein, 14 aa, Homo sapiens
  CDR3 for beta chain variable domain of TCR clone 143383 (TRBV19, TRBJ2-7)
CASSIGGAVAEQYF

SEQ ID NO: 286767 - protein, 16 aa, Homo sapiens
  CDR3 for alpha chain variable domain of TCR clone 143384 (TRAV17, TRAJ9)
CATGEWGGTGGFKTIF

SEQ ID NO: 286768 - protein, 15 aa, Homo sapiens
  CDR3 for beta chain variable domain of TCR clone 143384 (TRBV20-1, TRBJ1-2)
CSARGSRGRNYGYTF

SEQ ID NO: 286769 - protein, 13 aa, Homo sapiens
  CDR3 for alpha chain variable domain of TCR clone 143385 (TRAV1-2, TRAJ12)
CAVSMDSSFKLIF

SEQ ID NO: 286770 - protein, 14 aa, Homo sapiens
  CDR3 for beta chain variable domain of TCR clone 143385 (TRBV28, TRBJ2-7)
CASTKGLAGLEQYF

SEQ ID NO: 286771 - protein, 11 aa, Homo sapiens
  CDR3 for alpha chain variable domain of TCR clone 143386 (TRAV1-1, TRAJ31)
CAVPNQCQTHV

SEQ ID NO: 286772 - protein, 17 aa, Homo sapiens
  CDR3 for beta chain variable domain of TCR clone 143386 (TRBV27, TRBJ2-6)
CASSAGTGFSGANVLTF

SEQ ID NO: 286773 - protein, 14 aa, Homo sapiens
  CDR3 for alpha chain variable domain of TCR clone 143387 (TRAV35, TRAJ40)
CAGSTTSGTYKYIF

SEQ ID NO: 286774 - protein, 14 aa, Homo sapiens
  CDR3 for beta chain variable domain of TCR clone 143387 (TRBV2, TRBJ1-5)
CASSENRGGQPQHF

SEQ ID NO: 286775 - protein, 19 aa, Homo sapiens
  CDR3 for alpha chain variable domain of TCR clone 143388 (TRAV26-1, TRAJ50)
CCVLLHRQNPKNSYDKVIF

SEQ ID NO: 286776 - protein, 17 aa, Homo sapiens
  CDR3 for beta chain variable domain of TCR clone 143388 (TRBV4-1, TRBJ1-4)
CASSQEGPRGVGEKLFF

SEQ ID NO: 286777 - protein, 13 aa, Homo sapiens
  CDR3 for alpha chain variable domain of TCR clone 143389 (TRAV29/DV5, TRAJ26)
CAATDNYGQNFVF

SEQ ID NO: 286778 - protein, 13 aa, Homo sapiens
  CDR3 for beta chain variable domain of TCR clone 143389 (TRBV7-2, TRBJ2-4)
CASSREHANIQYF

SEQ ID NO: 286779 - protein, 12 aa, Homo sapiens
  CDR3 for alpha chain variable domain of TCR clone 143390 (TRAV17, TRAJ20)
CATYSNDYKLSF

SEQ ID NO: 286780 - protein, 14 aa, Homo sapiens
  CDR3 for beta chain variable domain of TCR clone 143390 (TRBV25-1, TRBJ1-1)
CASTHLGGNTEDFF

SEQ ID NO: 286781 - protein, 11 aa, Homo sapiens
  CDR3 for alpha chain variable domain of TCR clone 143391 (TRAV17, TRAJ31)
CATSNNARLMF

SEQ ID NO: 286782 - protein, 15 aa, Homo sapiens
  CDR3 for beta chain variable domain of TCR clone 143391 (TRBV7-2, TRBJ1-2)
CASSPRAGWNYGYTF

SEQ ID NO: 286783 - protein, 14 aa, Homo sapiens
  CDR3 for alpha chain variable domain of TCR clone 143392 (TRAV13-2, TRAJ57)
CAENFQGGSEKLVF

SEQ ID NO: 286784 - protein, 12 aa, Homo sapiens
  CDR3 for beta chain variable domain of TCR clone 143392 (TRBV12-4, TRBJ2-7)
CASSLGGYEQYF

SEQ ID NO: 286785 - protein, 10 aa, Homo sapiens
  CDR3 for alpha chain variable domain of TCR clone 143393 (TRAV1-2, TRAJ20)
CACNDYKLSF

SEQ ID NO: 286786 - protein, 16 aa, Homo sapiens
  CDR3 for beta chain variable domain of TCR clone 143393 (TRBV7-9, TRBJ1-2)
CASSLGFSSGEDGYTF

SEQ ID NO: 286787 - protein, 18 aa, Homo sapiens
  CDR3 for alpha chain variable domain of TCR clone 143394 (TRAV12-3, TRAJ52)
CAMSRTNAGGTSYGKLTF

SEQ ID NO: 286788 - protein, 16 aa, Homo sapiens
  CDR3 for beta chain variable domain of TCR clone 143394 (TRBV6-1, TRBJ2-5)
CASSETLDRGAETQYF

SEQ ID NO: 286789 - protein, 15 aa, Homo sapiens
  CDR3 for alpha chain variable domain of TCR clone 143395 (TRAV4, TRAJ10)
CLVGDEEGGGNKHTF

SEQ ID NO: 286790 - protein, 15 aa, Homo sapiens
  CDR3 for beta chain variable domain of TCR clone 143395 (TRBV7-2, TRBJ2-7)
CASSLTGQGTYEQYF

SEQ ID NO: 286791 - protein, 17 aa, Homo sapiens
  CDR3 for alpha chain variable domain of TCR clone 143396 (TRAV20, TRAJ53)
CAVQPQGSGGSNYKLTF

SEQ ID NO: 286792 - protein, 11 aa, Homo sapiens
  CDR3 for beta chain variable domain of TCR clone 143396 (TRBV18, TRBJ2-5)
CASSPRETQYF

SEQ ID NO: 286793 - protein, 11 aa, Homo sapiens
  CDR3 for alpha chain variable domain of TCR clone 143397 (TRAV1-2, TRAJ40)
CAVPGTYKYIF

SEQ ID NO: 286794 - protein, 16 aa, Homo sapiens
  CDR3 for beta chain variable domain of TCR clone 143397 (TRBV19, TRBJ2-1)
CASSKAGPSSHNEQFF

SEQ ID NO: 286795 - protein, 14 aa, Homo sapiens
  CDR3 for alpha chain variable domain of TCR clone 143398 (TRAV1-2, TRAJ16)
CAVNRLSDGQKLLF

SEQ ID NO: 286796 - protein, 15 aa, Homo sapiens
  CDR3 for beta chain variable domain of TCR clone 143398 (TRBV9, TRBJ1-6)
CASSVAGTGDSPLHC

SEQ ID NO: 286797 - protein, 13 aa, Homo sapiens
  CDR3 for alpha chain variable domain of TCR clone 143399 (TRAV13-1, TRAJ12)
CAASPDSSYKLIF

SEQ ID NO: 286798 - protein, 16 aa, Homo sapiens
  CDR3 for beta chain variable domain of TCR clone 143399 (TRBV15, TRBJ2-1)
GATSKERLAGAYEQFF

SEQ ID NO: 286799 - protein, 17 aa, Homo sapiens
  CDR3 for alpha chain variable domain of TCR clone 143400 (TRAV3, TRAJ6)
CAVRGGPRAGGSYIPTF

SEQ ID NO: 286800 - protein, 14 aa, Homo sapiens
  CDR3 for beta chain variable domain of TCR clone 143400 (TRBV7-2, TRBJ2-7)
CASSPNTSFYEQYF

SEQ ID NO: 286801 - protein, 17 aa, Homo sapiens
  CDR3 for alpha chain variable domain of TCR clone 143401 (TRAV3, TRAJ6)
CAVRDGPRAGGSYIPRF

SEQ ID NO: 286802 - protein, 14 aa, Homo sapiens
  CDR3 for beta chain variable domain of TCR clone 143401 (TRBV11-2, TRBJ2-3)
CASSRLARTDTQYF

SEQ ID NO: 286803 - protein, 14 aa, Homo sapiens
  CDR3 for alpha chain variable domain of TCR clone 143402 (TRAV16, TRAJ33)
CALSAMDSNYQLTW

SEQ ID NO: 286804 - protein, 12 aa, Homo sapiens
  CDR3 for beta chain variable domain of TCR clone 143402 (TRBV5-1, TRBJ1-2)
CASSQDTYGYTF

SEQ ID NO: 286805 - protein, 12 aa, Homo sapiens
  CDR3 for alpha chain variable domain of TCR clone 143403 (TRAV13-2, TRAJ8)
CAPWLGFQKLVF

SEQ ID NO: 286806 - protein, 12 aa, Homo sapiens
  CDR3 for beta chain variable domain of TCR clone 143403 (TRBV6-3, TRBJ2-1)
CASSGSYNEQFF

SEQ ID NO: 286807 - protein, 16 aa, Homo sapiens
  CDR3 for alpha chain variable domain of TCR clone 143404 (TRAV17, TRAJ22)
CATGPISSGSARQLTF

SEQ ID NO: 286808 - protein, 13 aa, Homo sapiens
  CDR3 for beta chain variable domain of TCR clone 143404 (TRBV11-2, TRBJ2-1)
CANSLGLAGGRFF

SEQ ID NO: 286809 - protein, 14 aa, Homo sapiens
  CDR3 for alpha chain variable domain of TCR clone 143405 (TRAV12-2, TRAJ24)
CAVTPADSWGKLQF

SEQ ID NO: 286810 - protein, 20 aa, Homo sapiens
  CDR3 for beta chain variable domain of TCR clone 143405 (TRBV7-8, TRBJ2-2)
CASSHLFPGPTIHITGELFF

SEQ ID NO: 286811 - protein, 15 aa, Homo sapiens
  CDR3 for alpha chain variable domain of TCR clone 143406 (TRAV26-1, TRAJ29)
CIFRFEGSGNTPLVF

SEQ ID NO: 286812 - protein, 14 aa, Homo sapiens
  CDR3 for beta chain variable domain of TCR clone 143406 (TRBV18, TRBJ2-5)
CASSPGVSQETQYF

SEQ ID NO: 286813 - protein, 15 aa, Homo sapiens
  CDR3 for alpha chain variable domain of TCR clone 143407 (TRAV13-1, TRAJ42)
CAASELWRKPRKSHL

SEQ ID NO: 286814 - protein, 15 aa, Homo sapiens
  CDR3 for beta chain variable domain of TCR clone 143407 (TRBV20-1, TRBJ2-1)
CSASSAGSSYNEQFF

SEQ ID NO: 286815 - protein, 19 aa, Homo sapiens
  CDR3 for alpha chain variable domain of TCR clone 143408 (TRAV2, TRAJ20)
ILQVREADAAVYRDCKLSF

SEQ ID NO: 286816 - protein, 13 aa, Homo sapiens
  CDR3 for beta chain variable domain of TCR clone 143408 (TRBV10-3, TRBJ2-7)
CASKLAVNYEQYF

SEQ ID NO: 286817 - protein, 14 aa, Homo sapiens
  CDR3 for alpha chain variable domain of TCR clone 143409 (TRAV12-1, TRAJ3)
CGAALYSSASKIIF

SEQ ID NO: 286818 - protein, 16 aa, Homo sapiens
  CDR3 for beta chain variable domain of TCR clone 143409 (TRBV4-3, TRBJ2-2)
CASSHLQGSGTGELFF

SEQ ID NO: 286819 - protein, 11 aa, Homo sapiens
  CDR3 for alpha chain variable domain of TCR clone 143410 (TRAV1-2, TRAJ31)
CAVSNNARLMF

SEQ ID NO: 286820 - protein, 15 aa, Homo sapiens
  CDR3 for beta chain variable domain of TCR clone 143410 (TRBV28, TRBJ2-1)
CASSIIAGGRIEQFF

SEQ ID NO: 286821 - protein, 16 aa, Homo sapiens
  CDR3 for alpha chain variable domain of TCR clone 143411 (TRAV16, TRAJ4)
CALSRMFSGGYNKLIF

SEQ ID NO: 286822 - protein, 16 aa, Homo sapiens
  CDR3 for beta chain variable domain of TCR clone 143411 (TRBV24-1, TRBJ2-3)
CATSDPGIGATDTQYF

SEQ ID NO: 286823 - protein, 15 aa, Homo sapiens
  CDR3 for alpha chain variable domain of TCR clone 143412 (TRAV3, TRAJ5)
CAVRDRKTRRRALTF

SEQ ID NO: 286824 - protein, 15 aa, Homo sapiens
  CDR3 for beta chain variable domain of TCR clone 143412 (TRBV7-8, TRBJ2-1)
CASSLADSLYNEQFF

SEQ ID NO: 286825 - protein, 13 aa, Homo sapiens
  CDR3 for alpha chain variable domain of TCR clone 143413 (TRAV9-2, TRAJ37)
CALHSSNTGKLIF

SEQ ID NO: 286826 - protein, 15 aa, Homo sapiens
  CDR3 for beta chain variable domain of TCR clone 143413 (TRBV7-2, TRBJ2-7)
RASSTPGLTRGEQYF

SEQ ID NO: 286827 - protein, 15 aa, Homo sapiens
  CDR3 for alpha chain variable domain of TCR clone 143414 (TRAV8-3, TRAJ45)
CASSYSGVGADGLAF

SEQ ID NO: 286828 - protein, 13 aa, Homo sapiens
  CDR3 for beta chain variable domain of TCR clone 143414 (TRBV10-3, TRBJ2-7)
CASKLAVNYEQYF

SEQ ID NO: 286829 - protein, 12 aa, Homo sapiens
  CDR3 for alpha chain variable domain of TCR clone 143415 (TRAV12-3, TRAJ17)
CAMTLTGKQANF

SEQ ID NO: 286830 - protein, 15 aa, Homo sapiens
  CDR3 for beta chain variable domain of TCR clone 143415 (TRBV20-1, TRBJ2-7)
CSARDRVSGMDEQYF

SEQ ID NO: 286831 - protein, 12 aa, Homo sapiens
  CDR3 for alpha chain variable domain of TCR clone 143416 (TRAV12-2, TRAJ31)
CAVNTPDARLMF

SEQ ID NO: 286832 - protein, 13 aa, Homo sapiens
  CDR3 for beta chain variable domain of TCR clone 143416 (TRBV7-3, TRBJ1-1)
CASSQDWGAEAFF

SEQ ID NO: 286833 - protein, 14 aa, Homo sapiens
  CDR3 for alpha chain variable domain of TCR clone 143417 (TRAV8-4, TRAJ54)
CAVSEVLGAKKLVF

SEQ ID NO: 286834 - protein, 13 aa, Homo sapiens
  CDR3 for beta chain variable domain of TCR clone 143417 (TRBV27, TRBJ2-7)
CASSFVSSYEQYF

SEQ ID NO: 286835 - protein, 13 aa, Homo sapiens
  CDR3 for alpha chain variable domain of TCR clone 143418 (TRAV17, TRAJ26)
CATVDNYGQNFVF

SEQ ID NO: 286836 - protein, 17 aa, Homo sapiens
  CDR3 for beta chain variable domain of TCR clone 143418 (TRBV13, TRBJ2-7)
CASSLKPGASGTYEQYF

SEQ ID NO: 286837 - protein, 15 aa, Homo sapiens
  CDR3 for alpha chain variable domain of TCR clone 143419 (TRAV41, TRAJ45)
CAASYSGGGADGLTF

SEQ ID NO: 286838 - protein, 14 aa, Homo sapiens
  CDR3 for beta chain variable domain of TCR clone 143419 (TRBV12-5, TRBJ2-5)
CASGSRTHQETQYF

SEQ ID NO: 286839 - protein, 17 aa, Homo sapiens
  CDR3 for alpha chain variable domain of TCR clone 143420 (TRAV38-2/DV8, TRAJ23)
CALPRKLIFGQGTELSV

SEQ ID NO: 286840 - protein, 17 aa, Homo sapiens
  CDR3 for beta chain variable domain of TCR clone 143420 (TRBV5-4, TRBJ2-1)
CASSSAGGRGPYNEQFF

SEQ ID NO: 286841 - protein, 15 aa, Homo sapiens
  CDR3 for alpha chain variable domain of TCR clone 143421 (TRAV36/DV7, TRAJ44)
CAVCRNTGTASKLTF

SEQ ID NO: 286842 - protein, 17 aa, Homo sapiens
  CDR3 for beta chain variable domain of TCR clone 143421 (TRBV7-9, TRBJ1-1)
CASSSPPGQGQNTEAFF

SEQ ID NO: 286843 - protein, 15 aa, Homo sapiens
  CDR3 for alpha chain variable domain of TCR clone 143422 (TRAV23/DV6, TRAJ45)
CAAGSAGGGADGLTF

SEQ ID NO: 286844 - protein, 13 aa, Homo sapiens
  CDR3 for beta chain variable domain of TCR clone 143422 (TRBV3-1, TRBJ2-2)
CASRQTNTGELVF

SEQ ID NO: 286845 - protein, 12 aa, Homo sapiens
  CDR3 for alpha chain variable domain of TCR clone 143423 (TRAV29/DV5, TRAJ49)
CAATDTGNQFYF

SEQ ID NO: 286846 - protein, 13 aa, Homo sapiens
  CDR3 for beta chain variable domain of TCR clone 143423 (TRBV11-2, TRBJ2-1)
CASSSRPNNEQFF

SEQ ID NO: 286847 - protein, 16 aa, Homo sapiens
  CDR3 for alpha chain variable domain of TCR clone 143424 (TRAV3, TRAJ37)
CAVRGKGSGNTGKLIF

SEQ ID NO: 286848 - protein, 13 aa, Homo sapiens
  CDR3 for beta chain variable domain of TCR clone 143424 (TRBV20-1, TRBJ1-1)
CSAPLGGGTEAFF

SEQ ID NO: 286849 - protein, 16 aa, Homo sapiens
  CDR3 for alpha chain variable domain of TCR clone 143425 (TRAV3, TRAJ37)
CAVGRKGSGNTGKLIF

SEQ ID NO: 286850 - protein, 20 aa, Homo sapiens
  CDR3 for beta chain variable domain of TCR clone 143425 (TRBV7-8, TRBJ2-2)
CASSHLFPGPTIHITGELFF

SEQ ID NO: 286851 - protein, 14 aa, Homo sapiens
  CDR3 for alpha chain variable domain of TCR clone 143426 (TRAV2, TRAJ37)
WAVGFTSNTGKLIF

SEQ ID NO: 286852 - protein, 15 aa, Homo sapiens
  CDR3 for beta chain variable domain of TCR clone 143426 (TRBV20-1, TRBJ1-1)
CSASRGVTGNTEAFF

SEQ ID NO: 286853 - protein, 19 aa, Homo sapiens
  CDR3 for alpha chain variable domain of TCR clone 143427 (TRAV1-2, TRAJ26)
CLLPLCCERPDNYGQNFVF

SEQ ID NO: 286854 - protein, 12 aa, Homo sapiens
  CDR3 for beta chain variable domain of TCR clone 143427 (TRBV7-9, TRBJ2-7)
CATRTDAYEQYL

SEQ ID NO: 286855 - protein, 18 aa, Homo sapiens
  CDR3 for alpha chain variable domain of TCR clone 143428 (TRAV21, TRAJ52)
CAVRPSPAGGTSYGKLTF

SEQ ID NO: 286856 - protein, 17 aa, Homo sapiens
  CDR3 for beta chain variable domain of TCR clone 143428 (TRBV7-3, TRBJ2-3)
GASSLMKRMRGADTQYF

SEQ ID NO: 286857 - protein, 12 aa, Homo sapiens
  CDR3 for alpha chain variable domain of TCR clone 143429 (TRAV13-1, TRAJ49)
CAASIWGNQFYS

SEQ ID NO: 286858 - protein, 14 aa, Homo sapiens
  CDR3 for beta chain variable domain of TCR clone 143429 (TRBV12-4, TRBJ1-1)
CASSLDGLNTEAFF

SEQ ID NO: 286859 - protein, 11 aa, Homo sapiens
  CDR3 for alpha chain variable domain of TCR clone 143430 (TRAV17, TRAJ9)
CGFTGGFKTIF

SEQ ID NO: 286860 - protein, 12 aa, Homo sapiens
  CDR3 for beta chain variable domain of TCR clone 143430 (TRBV11-2, TRBJ2-1)
CASSPGNNEQFF

SEQ ID NO: 286861 - protein, 13 aa, Homo sapiens
  CDR3 for alpha chain variable domain of TCR clone 143431 (TRAV27, TRAJ6)
CAGGTRGSYIPTF

SEQ ID NO: 286862 - protein, 14 aa, Homo sapiens
  CDR3 for beta chain variable domain of TCR clone 143431 (TRBV6-3, TRBJ1-1)
CASSYQRRDTGAFF

SEQ ID NO: 286863 - protein, 14 aa, Homo sapiens
  CDR3 for alpha chain variable domain of TCR clone 143432 (TRAV8-3, TRAJ6)
CAVSSSGGSYIPTF

SEQ ID NO: 286864 - protein, 18 aa, Homo sapiens
  CDR3 for beta chain variable domain of TCR clone 143432 (TRBV7-9, TRBJ2-7)
CASSLTTSGSRTWYEQYF

SEQ ID NO: 286865 - protein, 14 aa, Homo sapiens
  CDR3 for alpha chain variable domain of TCR clone 143433 (TRAV16, TRAJ26)
CITVLSAYGQNFVF

SEQ ID NO: 286866 - protein, 14 aa, Homo sapiens
  CDR3 for beta chain variable domain of TCR clone 143433 (TRBV7-2, TRBJ2-7)
CASRSQGAAYEQSF

SEQ ID NO: 286867 - protein, 14 aa, Homo sapiens
  CDR3 for alpha chain variable domain of TCR clone 143434 (TRAV35, TRAJ22)
CAGLRPGSARQLTF

SEQ ID NO: 286868 - protein, 14 aa, Homo sapiens
  CDR3 for beta chain variable domain of TCR clone 143434 (TRBV11-2, TRBJ2-5)
CASSRTGGIETQYF

SEQ ID NO: 286869 - protein, 13 aa, Homo sapiens
  CDR3 for alpha chain variable domain of TCR clone 143435 (TRAV38-2/DV8, TRAJ34)
FAYRTWNTDKLIF

SEQ ID NO: 286870 - protein, 18 aa, Homo sapiens
  CDR3 for beta chain variable domain of TCR clone 143435 (TRBV6-6, TRBJ1-3)
CASSYSKWDSISGNTIYF

SEQ ID NO: 286871 - protein, 13 aa, Homo sapiens
  CDR3 for alpha chain variable domain of TCR clone 143436 (TRAV8-6, TRAJ49)
CAVIKNTGNRFYF

SEQ ID NO: 286872 - protein, 14 aa, Homo sapiens
  CDR3 for beta chain variable domain of TCR clone 143436 (TRBV13, TRBJ2-5)
CASSLGPRGETQYF

SEQ ID NO: 286873 - protein, 14 aa, Homo sapiens
  CDR3 for alpha chain variable domain of TCR clone 143437 (TRAV26-1, TRAJ38)
CIADNAGNNRKLSC

SEQ ID NO: 286874 - protein, 13 aa, Homo sapiens
  CDR3 for beta chain variable domain of TCR clone 143437 (TRBV20-1, TRBJ1-1)
CSARGGGNTEAFF

SEQ ID NO: 286875 - protein, 18 aa, Homo sapiens
  CDR3 for alpha chain variable domain of TCR clone 143438 (TRAV13-1, TRAJ52)
CAAIKRSAGGTSYGKLTF

SEQ ID NO: 286876 - protein, 13 aa, Homo sapiens
  CDR3 for beta chain variable domain of TCR clone 143438 (TRBV10-3, TRBJ2-7)
CASKLAVNYEQYF

SEQ ID NO: 286877 - protein, 12 aa, Homo sapiens
  CDR3 for alpha chain variable domain of TCR clone 143439 (TRAV8-3, TRAJ26)
CAGDNYGHNFVF

SEQ ID NO: 286878 - protein, 13 aa, Homo sapiens
  CDR3 for beta chain variable domain of TCR clone 143439 (TRBV5-1, TRBJ2-5)
CASSLIPAETQYF

SEQ ID NO: 286879 - protein, 11 aa, Homo sapiens
  CDR3 for alpha chain variable domain of TCR clone 143440 (TRAV12-1, TRAJ34)
CVVNKGRELIF

SEQ ID NO: 286880 - protein, 14 aa, Homo sapiens
  CDR3 for beta chain variable domain of TCR clone 143440 (TRBV5-1, TRBJ2-7)
CASSRGESLYEQYF

SEQ ID NO: 286881 - protein, 12 aa, Homo sapiens
  CDR3 for alpha chain variable domain of TCR clone 143441 (TRAV3, TRAJ43)
CAVRDPNNDMRF

SEQ ID NO: 286882 - protein, 15 aa, Homo sapiens
  CDR3 for beta chain variable domain of TCR clone 143441 (TRBV6-5, TRBJ2-1)
CASSYDAGAGTEQFF

SEQ ID NO: 286883 - protein, 23 aa, Homo sapiens
  CDR3 for alpha chain variable domain of TCR clone 143442 (TRAV35, TRAJ38)
CAGSNAGNNHIQNPDPAVYQLRD

SEQ ID NO: 286884 - protein, 13 aa, Homo sapiens
  CDR3 for beta chain variable domain of TCR clone 143442 (TRBV12-5, TRBJ2-3)
CASGDRQSDTQYF

SEQ ID NO: 286885 - protein, 11 aa, Homo sapiens
  CDR3 for alpha chain variable domain of TCR clone 143443 (TRAV13-1, TRAJ39)
CASHAGNMLTF

SEQ ID NO: 286886 - protein, 14 aa, Homo sapiens
  CDR3 for beta chain variable domain of TCR clone 143443 (TRBV11-2, TRBJ1-5)
CASSLDRGRQPQHL

SEQ ID NO: 286887 - protein, 16 aa, Homo sapiens
  CDR3 for alpha chain variable domain of TCR clone 143444 (TRAV8-2, TRAJ7)
CVVREGPYYGNNRLAF

SEQ ID NO: 286888 - protein, 16 aa, Homo sapiens
  CDR3 for beta chain variable domain of TCR clone 143444 (TRBV29-1, TRBJ1-2)
CSVEANRDIANYGYTF

SEQ ID NO: 286889 - protein, 14 aa, Homo sapiens
  CDR3 for alpha chain variable domain of TCR clone 143445 (TRAV38-1, TRAJ40)
CALRPTSGTYKYTF

SEQ ID NO: 286890 - protein, 14 aa, Homo sapiens
  CDR3 for beta chain variable domain of TCR clone 143445 (TRBV20-1, TRBJ1-1)
CSAQTRIGGTEAFF

SEQ ID NO: 286891 - protein, 15 aa, Homo sapiens
  CDR3 for alpha chain variable domain of TCR clone 143446 (TRAV4, TRAJ39)
CLVGPNNNAGNMLTF

SEQ ID NO: 286892 - protein, 16 aa, Homo sapiens
  CDR3 for beta chain variable domain of TCR clone 143446 (TRBV7-3, TRBJ2-3)
CASSLSGYRPEDTQYF

SEQ ID NO: 286893 - protein, 13 aa, Homo sapiens
  CDR3 for alpha chain variable domain of TCR clone 143447 (TRAV17, TRAJ9)
CATDYTGGFKTIF

SEQ ID NO: 286894 - protein, 12 aa, Homo sapiens
  CDR3 for beta chain variable domain of TCR clone 143447 (TRBV18, TRBJ2-1)
CASSPGTSEGFF

SEQ ID NO: 286895 - protein, 13 aa, Homo sapiens
  CDR3 for alpha chain variable domain of TCR clone 143448 (TRAV12-1, TRAJ26)
CVVRRNYGQNFVF

SEQ ID NO: 286896 - protein, 14 aa, Homo sapiens
  CDR3 for beta chain variable domain of TCR clone 143448 (TRBV4-2, TRBJ2-1)
CASGLGRAYNEQFF

SEQ ID NO: 286897 - protein, 15 aa, Homo sapiens
  CDR3 for alpha chain variable domain of TCR clone 143449 (TRAV38-1, TRAJ37)
CAFIHGSGNTGKPIF

SEQ ID NO: 286898 - protein, 14 aa, Homo sapiens
  CDR3 for beta chain variable domain of TCR clone 143449 (TRBV29-1, TRBJ2-5)
CSVETSGSGETQYF

SEQ ID NO: 286899 - protein, 14 aa, Homo sapiens
  CDR3 for alpha chain variable domain of TCR clone 143450 (TRAV13-2, TRAJ17)
CAENFKAAGNKLTF

SEQ ID NO: 286900 - protein, 14 aa, Homo sapiens
  CDR3 for beta chain variable domain of TCR clone 143450 (TRBV4-1, TRBJ2-2)
CASSQAVNTGELFF

SEQ ID NO: 286901 - protein, 12 aa, Homo sapiens
  CDR3 for alpha chain variable domain of TCR clone 143451 (TRAV12-2, TRAJ20)
CAVRPSDYKLSF

SEQ ID NO: 286902 - protein, 12 aa, Homo sapiens
  CDR3 for beta chain variable domain of TCR clone 143451 (TRBV7-2, TRBJ2-5)
CASSLYQETQYF

SEQ ID NO: 286903 - protein, 15 aa, Homo sapiens
  CDR3 for alpha chain variable domain of TCR clone 143452 (TRAV13-2, TRAJ10)
CAENSDTGGGNKLTF

SEQ ID NO: 286904 - protein, 16 aa, Homo sapiens
  CDR3 for beta chain variable domain of TCR clone 143452 (TRBV2, TRBJ1-3)
CASSRTGGSTGNTIYF

SEQ ID NO: 286905 - protein, 14 aa, Homo sapiens
  CDR3 for alpha chain variable domain of TCR clone 143453 (TRAV1-2, TRAJ16)
CAVNRISDGQKLLF

SEQ ID NO: 286906 - protein, 14 aa, Homo sapiens
  CDR3 for beta chain variable domain of TCR clone 143453 (TRBV7-9, TRBJ2-3)
CASSLEDGTDTQYF

SEQ ID NO: 286907 - protein, 21 aa, Homo sapiens
  CDR3 for alpha chain variable domain of TCR clone 143454 (TRAV26-1, TRAJ38)
CTADNAGNNHIQNPDPAVYQL

SEQ ID NO: 286908 - protein, 15 aa, Homo sapiens
  CDR3 for beta chain variable domain of TCR clone 143454 (TRBV20-1, TRBJ1-1)
CSARGGGTLKLSLDK

SEQ ID NO: 286909 - protein, 15 aa, Homo sapiens
  CDR3 for alpha chain variable domain of TCR clone 143455 (TRAV8-4, TRAJ3)
CAVSEPYSSASKIIF

SEQ ID NO: 286910 - protein, 14 aa, Homo sapiens
  CDR3 for beta chain variable domain of TCR clone 143455 (TRBV7-2, TRBJ2-5)
CQQLKEQGRETQYF

SEQ ID NO: 286911 - protein, 13 aa, Homo sapiens
  CDR3 for alpha chain variable domain of TCR clone 143456 (TRAV21, TRAJ20)
CAVGLRVDYKLSF

SEQ ID NO: 286912 - protein, 14 aa, Homo sapiens
  CDR3 for beta chain variable domain of TCR clone 143456 (TRBV27, TRBJ2-1)
CAGSIAETYNEQFF

SEQ ID NO: 286913 - protein, 14 aa, Homo sapiens
  CDR3 for alpha chain variable domain of TCR clone 143457 (TRAV1-2, TRAJ8)
CAVREDTGFQKLVF

SEQ ID NO: 286914 - protein, 14 aa, Homo sapiens
  CDR3 for beta chain variable domain of TCR clone 143457 (TRBV5-5, TRBJ2-7)
CASSLGLAVYEQYF

SEQ ID NO: 286915 - protein, 13 aa, Homo sapiens
  CDR3 for alpha chain variable domain of TCR clone 143458 (TRAV8-3, TRAJ44)
CAVVPGTASKLTF

SEQ ID NO: 286916 - protein, 14 aa, Homo sapiens
  CDR3 for beta chain variable domain of TCR clone 143458 (TRBV6-6, TRBJ2-7)
CASSDSGAGYEQYF

SEQ ID NO: 286917 - protein, 13 aa, Homo sapiens
  CDR3 for alpha chain variable domain of TCR clone 143459 (TRAV27, TRAJ41)
CAGEGNSGYALNF

SEQ ID NO: 286918 - protein, 15 aa, Homo sapiens
  CDR3 for beta chain variable domain of TCR clone 143459 (TRBV7-8, TRBJ2-1)
CASSLAGGLYNEQFF

SEQ ID NO: 286919 - protein, 13 aa, Homo sapiens
  CDR3 for alpha chain variable domain of TCR clone 143460 (TRAV13-1, TRAJ5)
CAASDTGRRALTF

SEQ ID NO: 286920 - protein, 14 aa, Homo sapiens
  CDR3 for beta chain variable domain of TCR clone 143460 (TRBV12-4, TRBJ2-5)
CASSAGLVSETQYF

SEQ ID NO: 286921 - protein, 14 aa, Homo sapiens
  CDR3 for alpha chain variable domain of TCR clone 143461 (TRAV4, TRAJ12)
CLVGDADSSYKLIF

SEQ ID NO: 286922 - protein, 17 aa, Homo sapiens
  CDR3 for beta chain variable domain of TCR clone 143461 (TRBV13, TRBJ2-3)
CASSPSRVAGGRNTQYF

SEQ ID NO: 286923 - protein, 14 aa, Homo sapiens
  CDR3 for alpha chain variable domain of TCR clone 143462 (TRAV8-3, TRAJ4)
CAVGAAGGYNKLIF

SEQ ID NO: 286924 - protein, 13 aa, Homo sapiens
  CDR3 for beta chain variable domain of TCR clone 143462 (TRBV12-4, TRBJ2-7)
CASSLSGVYEQYF

SEQ ID NO: 286925 - protein, 17 aa, Homo sapiens
  CDR3 for alpha chain variable domain of TCR clone 143463 (TRAV3, TRAJ6)
CAVRDGPRAGGSYIPTF

SEQ ID NO: 286926 - protein, 20 aa, Homo sapiens
  CDR3 for beta chain variable domain of TCR clone 143463 (TRBV28, TRBJ2-1)
CASTPIGRSPGLAGGNEQIF

SEQ ID NO: 286927 - protein, 13 aa, Homo sapiens
  CDR3 for alpha chain variable domain of TCR clone 143464 (TRAV21, TRAJ11)
CAVPNSGYSTPTF

SEQ ID NO: 286928 - protein, 13 aa, Homo sapiens
  CDR3 for beta chain variable domain of TCR clone 143464 (TRBV3-1, TRBJ2-7)
CASSLRDGYEQYF

SEQ ID NO: 286929 - protein, 16 aa, Homo sapiens
  CDR3 for alpha chain variable domain of TCR clone 143465 (TRAV14/DV4, TRAJ53)
CAMREGGGGSNYKLTF

SEQ ID NO: 286930 - protein, 13 aa, Homo sapiens
  CDR3 for beta chain variable domain of TCR clone 143465 (TRBV10-2, TRBJ2-3)
CASSESGDHTQYF

SEQ ID NO: 286931 - protein, 13 aa, Homo sapiens
  CDR3 for alpha chain variable domain of TCR clone 143466 (TRAV12-3, TRAJ13)
CAMSSGGYQKVTF

SEQ ID NO: 286932 - protein, 15 aa, Homo sapiens
  CDR3 for beta chain variable domain of TCR clone 143466 (TRBV11-3, TRBJ2-7)
CASSLGRLSGYEQYF

SEQ ID NO: 286933 - protein, 16 aa, Homo sapiens
  CDR3 for alpha chain variable domain of TCR clone 143467 (TRAV3, TRAJ10)
CAVRDMRAGGGNKLTF

SEQ ID NO: 286934 - protein, 13 aa, Homo sapiens
  CDR3 for beta chain variable domain of TCR clone 143467 (TRBV7-7, TRBJ2-3)
CASSLSRADTQYF

SEQ ID NO: 286935 - protein, 19 aa, Homo sapiens
  CDR3 for alpha chain variable domain of TCR clone 143468 (TRAV26-1, TRAJ52)
CIVRAHRNAGGTSYGKLTF

SEQ ID NO: 286936 - protein, 15 aa, Homo sapiens
  CDR3 for beta chain variable domain of TCR clone 143468 (TRBV12-4, TRBJ2-5)
CASSPPTGLQEAQYF

SEQ ID NO: 286937 - protein, 16 aa, Homo sapiens
  CDR3 for alpha chain variable domain of TCR clone 143469 (TRAV12-3, TRAJ53)
CAMSVGSGGSNYKLTF

SEQ ID NO: 286938 - protein, 15 aa, Homo sapiens
  CDR3 for beta chain variable domain of TCR clone 143469 (TRBV7-9, TRBJ2-7)
CASSPGGGLTYEQYF

SEQ ID NO: 286939 - protein, 11 aa, Homo sapiens
  CDR3 for alpha chain variable domain of TCR clone 143470 (TRAV3, TRAJ21)
CAVGNFNKFYL

SEQ ID NO: 286940 - protein, 14 aa, Homo sapiens
  CDR3 for beta chain variable domain of TCR clone 143470 (TRBV29-1, TRBJ2-2)
CSGRGSGNTGELFF

SEQ ID NO: 286941 - protein, 11 aa, Homo sapiens
  CDR3 for alpha chain variable domain of TCR clone 143471 (TRAV21, TRAJ34)
CAVTNTDKLIF

SEQ ID NO: 286942 - protein, 14 aa, Homo sapiens
  CDR3 for beta chain variable domain of TCR clone 143471 (TRBV4-1, TRBJ2-7)
CASSPVAGGDEQYF

SEQ ID NO: 286943 - protein, 14 aa, Homo sapiens
  CDR3 for alpha chain variable domain of TCR clone 143472 (TRAV16, TRAJ42)
CALLAGGSQGDLIF

SEQ ID NO: 286944 - protein, 13 aa, Homo sapiens
  CDR3 for beta chain variable domain of TCR clone 143472 (TRBV7-9, TRBJ1-2)
CASSLKQNYGYTF

SEQ ID NO: 286945 - protein, 14 aa, Homo sapiens
  CDR3 for alpha chain variable domain of TCR clone 143473 (TRAV12-2, TRAJ40)
CAVKIPSGTYKYIF

SEQ ID NO: 286946 - protein, 15 aa, Homo sapiens
  CDR3 for beta chain variable domain of TCR clone 143473 (TRBV7-2, TRBJ2-1)
CASSFQADEYNEQFF

SEQ ID NO: 286947 - protein, 16 aa, Homo sapiens
  CDR3 for alpha chain variable domain of TCR clone 143474 (TRAV3, TRAJ37)
CAVRPHGSGNTGKLIF

SEQ ID NO: 286948 - protein, 15 aa, Homo sapiens
  CDR3 for beta chain variable domain of TCR clone 143474 (TRBV9, TRBJ1-2)
CQQRRGKVSPYGYSF

SEQ ID NO: 286949 - protein, 12 aa, Homo sapiens
  CDR3 for alpha chain variable domain of TCR clone 143475 (TRAV16, TRAJ10)
CSRTGGGNKLTF

SEQ ID NO: 286950 - protein, 15 aa, Homo sapiens
  CDR3 for beta chain variable domain of TCR clone 143475 (TRBV27, TRBJ2-1)
CASSLRAGIPGEQFF

SEQ ID NO: 286951 - protein, 12 aa, Homo sapiens
  CDR3 for alpha chain variable domain of TCR clone 143476 (TRAV23/DV6, TRAJ33)
CAAADSNYQLIW

SEQ ID NO: 286952 - protein, 14 aa, Homo sapiens
  CDR3 for beta chain variable domain of TCR clone 143476 (TRBV18, TRBJ1-5)
CASSRQQRNQPQHF

SEQ ID NO: 286953 - protein, 13 aa, Homo sapiens
  CDR3 for alpha chain variable domain of TCR clone 143477 (TRAV21, TRAJ15)
CAVANQAGTALIF

SEQ ID NO: 286954 - protein, 15 aa, Homo sapiens
  CDR3 for beta chain variable domain of TCR clone 143477 (TRBV2, TRBJ1-2)
CASSEIGGANYGYTF

SEQ ID NO: 286955 - protein, 16 aa, Homo sapiens
  CDR3 for alpha chain variable domain of TCR clone 143478 (TRAV17, TRAJ28)
CATALESGAGSYQLTF

SEQ ID NO: 286956 - protein, 15 aa, Homo sapiens
  CDR3 for beta chain variable domain of TCR clone 143478 (TRBV12-4, TRBJ1-2)
CASSFEAGLGYGYTF

SEQ ID NO: 286957 - protein, 16 aa, Homo sapiens
  CDR3 for alpha chain variable domain of TCR clone 143479 (TRAV1-2, TRAJ10)
CAVRGVLTGGGNKLTL

SEQ ID NO: 286958 - protein, 16 aa, Homo sapiens
  CDR3 for beta chain variable domain of TCR clone 143479 (TRBV29-1, TRBJ2-7)
CSVEVVGTSGSYEQYF

SEQ ID NO: 286959 - protein, 10 aa, Homo sapiens
  CDR3 for alpha chain variable domain of TCR clone 143480 (TRAV23/DV6, TRAJ57)
CAASSTLSQG

SEQ ID NO: 286960 - protein, 15 aa, Homo sapiens
  CDR3 for beta chain variable domain of TCR clone 143480 (TRBV10-2, TRBJ2-6)
CASSEQGTGANVLTF

SEQ ID NO: 286961 - protein, 14 aa, Homo sapiens
  CDR3 for alpha chain variable domain of TCR clone 143481 (TRAV13-1, TRAJ40)
CAASRTSGTYKYIF

SEQ ID NO: 286962 - protein, 15 aa, Homo sapiens
  CDR3 for beta chain variable domain of TCR clone 143481 (TRBV7-3, TRBJ2-1)
CASSPTGGGEGEQFF

SEQ ID NO: 286963 - protein, 13 aa, Homo sapiens
  CDR3 for alpha chain variable domain of TCR clone 143482 (TRAV27, TRAJ8)
CAGGPTGFQKLVF

SEQ ID NO: 286964 - protein, 14 aa, Homo sapiens
  CDR3 for beta chain variable domain of TCR clone 143482 (TRBV18, TRBJ2-7)
CASSPRGGAYEQYF

SEQ ID NO: 286965 - protein, 13 aa, Homo sapiens
  CDR3 for alpha chain variable domain of TCR clone 143483 (TRAV23/DV6, TRAJ6)
CAAKTGGSYIPPF

SEQ ID NO: 286966 - protein, 15 aa, Homo sapiens
  CDR3 for beta chain variable domain of TCR clone 143483 (TRBV5-1, TRBJ1-2)
CASSSYGEFDYGYTF

SEQ ID NO: 286967 - protein, 16 aa, Homo sapiens
  CDR3 for alpha chain variable domain of TCR clone 143484 (TRAV13-1, TRAJ45)
CAASWESGGGADGLTF

SEQ ID NO: 286968 - protein, 14 aa, Homo sapiens
  CDR3 for beta chain variable domain of TCR clone 143484 (TRBV12-4, TRBJ1-3)
CASGQTESGNTIYF

SEQ ID NO: 286969 - protein, 18 aa, Homo sapiens
  CDR3 for alpha chain variable domain of TCR clone 143485 (TRAV26-1, TRAJ23)
CVVRVGLEVWNQGEKLIF

SEQ ID NO: 286970 - protein, 16 aa, Homo sapiens
  CDR3 for beta chain variable domain of TCR clone 143485 (TRBV12-4, TRBJ2-5)
CASSFFVRGRQETQYF

SEQ ID NO: 286971 - protein, 15 aa, Homo sapiens
  CDR3 for alpha chain variable domain of TCR clone 143486 (TRAV14/DV4, TRAJ4)
CAMRDSTGGYNKLIF

SEQ ID NO: 286972 - protein, 12 aa, Homo sapiens
  CDR3 for beta chain variable domain of TCR clone 143486 (TRBV19, TRBJ1-1)
CASSIGTEEAFF

SEQ ID NO: 286973 - protein, 13 aa, Homo sapiens
  CDR3 for alpha chain variable domain of TCR clone 143487 (TRAV23/DV6, TRAJ45)
CAARRGGAYGLTF

SEQ ID NO: 286974 - protein, 14 aa, Homo sapiens
  CDR3 for beta chain variable domain of TCR clone 143487 (TRBV7-2, TRBJ2-3)
CASSLARGTDTQYF

SEQ ID NO: 286975 - protein, 14 aa, Homo sapiens
  CDR3 for alpha chain variable domain of TCR clone 143488 (TRAV38-1, TRAJ45)
CAYYSGGGADGLTF

SEQ ID NO: 286976 - protein, 14 aa, Homo sapiens
  CDR3 for beta chain variable domain of TCR clone 143488 (TRBV25-1, TRBJ1-1)
CASTHMGGNTEAFF

SEQ ID NO: 286977 - protein, 10 aa, Homo sapiens
  CDR3 for alpha chain variable domain of TCR clone 143489 (TRAV12-1, TRAJ43)
CVVHNNDMRI

SEQ ID NO: 286978 - protein, 13 aa, Homo sapiens
  CDR3 for beta chain variable domain of TCR clone 143489 (TRBV12-4, TRBJ1-2)
CASSSGLTVISAF

SEQ ID NO: 286979 - protein, 14 aa, Homo sapiens
  CDR3 for alpha chain variable domain of TCR clone 143490 (TRAV13-1, TRAJ44)
CAAKATGTASKLTL

SEQ ID NO: 286980 - protein, 13 aa, Homo sapiens
  CDR3 for beta chain variable domain of TCR clone 143490 (TRBV5-5, TRBJ1-2)
CASSFWRGEDDTF

SEQ ID NO: 286981 - protein, 18 aa, Homo sapiens
  CDR3 for alpha chain variable domain of TCR clone 143491 (TRAV12-3, TRAJ52)
CAMSAGGAGGTSYGKLTF

SEQ ID NO: 286982 - protein, 14 aa, Homo sapiens
  CDR3 for beta chain variable domain of TCR clone 143491 (TRBV7-2, TRBJ2-7)
CASRSQGAAYEQYF

SEQ ID NO: 286983 - protein, 15 aa, Homo sapiens
  CDR3 for alpha chain variable domain of TCR clone 143492 (TRAV12-3, TRAJ6)
CAMSPASGGSYIPTF

SEQ ID NO: 286984 - protein, 15 aa, Homo sapiens
  CDR3 for beta chain variable domain of TCR clone 143492 (TRBV7-2, TRBJ2-7)
CASSLKGALTYEQYF

SEQ ID NO: 286985 - protein, 16 aa, Homo sapiens
  CDR3 for alpha chain variable domain of TCR clone 143493 (TRAV16, TRAJ4)
CALSRMFSGGYNKLIF

SEQ ID NO: 286986 - protein, 15 aa, Homo sapiens
  CDR3 for beta chain variable domain of TCR clone 143493 (TRBV7-8, TRBJ2-7)
CASSLGTGNPYEQYF

SEQ ID NO: 286987 - protein, 11 aa, Homo sapiens
  CDR3 for alpha chain variable domain of TCR clone 143494 (TRAV2, TRAJ4)
CAVGWYNKLIF

SEQ ID NO: 286988 - protein, 15 aa, Homo sapiens
  CDR3 for beta chain variable domain of TCR clone 143494 (TRBV7-2, TRBJ2-2)
CASSFQRGETGELSF

SEQ ID NO: 286989 - protein, 20 aa, Homo sapiens
  CDR3 for alpha chain variable domain of TCR clone 143495 (TRAV12-3, TRAJ41)
SLFIRYSQPSDSATPEALNF

SEQ ID NO: 286990 - protein, 15 aa, Homo sapiens
  CDR3 for beta chain variable domain of TCR clone 143495 (TRBV5-1, TRBJ2-7)
CASSLDLTSSYEQYF

SEQ ID NO: 286991 - protein, 15 aa, Homo sapiens
  CDR3 for alpha chain variable domain of TCR clone 143496 (TRAV8-3, TRAJ45)
CASSYSGGGADGLTF

SEQ ID NO: 286992 - protein, 15 aa, Homo sapiens
  CDR3 for beta chain variable domain of TCR clone 143496 (TRBV10-3, TRBJ2-7)
CASKLAVNTSSTSGR

SEQ ID NO: 286993 - protein, 12 aa, Homo sapiens
  CDR3 for alpha chain variable domain of TCR clone 143497 (TRAV36/DV7, TRAJ54)
CAVVRGAQKLVF

SEQ ID NO: 286994 - protein, 15 aa, Homo sapiens
  CDR3 for beta chain variable domain of TCR clone 143497 (TRBV7-3, TRBJ2-7)
CASSPSTGPNYEQYF

SEQ ID NO: 286995 - protein, 13 aa, Homo sapiens
  CDR3 for alpha chain variable domain of TCR clone 143498 (TRAV12-2, TRAJ20)
CAVYPSNDYKPSF

SEQ ID NO: 286996 - protein, 12 aa, Homo sapiens
  CDR3 for beta chain variable domain of TCR clone 143498 (TRBV7-9, TRBJ2-7)
CASSIKREEQYF

SEQ ID NO: 286997 - protein, 15 aa, Homo sapiens
  CDR3 for alpha chain variable domain of TCR clone 143499 (TRAV12-3, TRAJ10)
CASYILMGGGNKLTF

SEQ ID NO: 286998 - protein, 15 aa, Homo sapiens
  CDR3 for beta chain variable domain of TCR clone 143499 (TRBV7-2, TRBJ1-6)
CASSLGPDRGMPLHF

SEQ ID NO: 286999 - protein, 13 aa, Homo sapiens
  CDR3 for alpha chain variable domain of TCR clone 143500 (TRAV21, TRAJ27)
CAARPGNAGKSTF

SEQ ID NO: 287000 - protein, 13 aa, Homo sapiens
  CDR3 for beta chain variable domain of TCR clone 143500 (TRBV7-6, TRBJ1-5)
CASSLSINQPQHF

SEQ ID NO: 287001 - protein, 12 aa, Homo sapiens
  CDR3 for alpha chain variable domain of TCR clone 143501 (TRAV2, TRAJ31)
CAVEDNNARLMF

SEQ ID NO: 287002 - protein, 16 aa, Homo sapiens
  CDR3 for beta chain variable domain of TCR clone 143501 (TRBV10-3, TRBJ2-1)
CAISGVGDGGGAEQFF

SEQ ID NO: 287003 - protein, 12 aa, Homo sapiens
  CDR3 for alpha chain variable domain of TCR clone 143502 (TRAV13-1, TRAJ15)
CAASQAGTALIF

SEQ ID NO: 287004 - protein, 18 aa, Homo sapiens
  CDR3 for beta chain variable domain of TCR clone 143502 (TRBV7-9, TRBJ2-3)
RASSLPINGQISTDTQYF

SEQ ID NO: 287005 - protein, 13 aa, Homo sapiens
  CDR3 for alpha chain variable domain of TCR clone 143503 (TRAV26-1, TRAJ29)
CIVRRSGNTPLVF

SEQ ID NO: 287006 - protein, 12 aa, Homo sapiens
  CDR3 for beta chain variable domain of TCR clone 143503 (TRBV11-2, TRBJ2-2)
CASSLGGGELFF

SEQ ID NO: 287007 - protein, 13 aa, Homo sapiens
  CDR3 for alpha chain variable domain of TCR clone 143504 (TRAV1-2, TRAJ11)
CAVRDSGYSTLTF

SEQ ID NO: 287008 - protein, 15 aa, Homo sapiens
  CDR3 for beta chain variable domain of TCR clone 143504 (TRBV6-3, TRBJ2-7)
CASSSPGTVFYEQYF

SEQ ID NO: 287009 - protein, 23 aa, Homo sapiens
  CDR3 for alpha chain variable domain of TCR clone 143505 (TRAV8-4, TRAJ38)
CARLNAGNNHIQNPDPAVYQLTD

SEQ ID NO: 287010 - protein, 12 aa, Homo sapiens
  CDR3 for beta chain variable domain of TCR clone 143505 (TRBV6-1, TRBJ2-7)
CASSEPLYEQYF

SEQ ID NO: 287011 - protein, 14 aa, Homo sapiens
  CDR3 for alpha chain variable domain of TCR clone 143506 (TRAV1-2, TRAJ16)
CAVNRFSDGQKLRF

SEQ ID NO: 287012 - protein, 13 aa, Homo sapiens
  CDR3 for beta chain variable domain of TCR clone 143506 (TRBV4-1, TRBJ2-1)
CASSQAGGDGQFF

SEQ ID NO: 287013 - protein, 13 aa, Homo sapiens
  CDR3 for alpha chain variable domain of TCR clone 143507 (TRAV29/DV5, TRAJ31)
CAASRNNNARLMF

SEQ ID NO: 287014 - protein, 14 aa, Homo sapiens
  CDR3 for beta chain variable domain of TCR clone 143507 (TRBV20-1, TRBJ2-5)
CSARRQGLWETQYF

SEQ ID NO: 287015 - protein, 11 aa, Homo sapiens
  CDR3 for alpha chain variable domain of TCR clone 143508 (TRAV27, TRAJ45)
CAGAQEEVLTD

SEQ ID NO: 287016 - protein, 15 aa, Homo sapiens
  CDR3 for beta chain variable domain of TCR clone 143508 (TRBV20-1, TRBJ2-7)
CSARDWVSGMDEQYF

SEQ ID NO: 287017 - protein, 11 aa, Homo sapiens
  CDR3 for alpha chain variable domain of TCR clone 143509 (TRAV2, TRAJ23)
CAVETRGKLTF

SEQ ID NO: 287018 - protein, 14 aa, Homo sapiens
  CDR3 for beta chain variable domain of TCR clone 143509 (TRBV7-2, TRBJ2-7)
CASSPKTSFYEQYF

SEQ ID NO: 287019 - protein, 13 aa, Homo sapiens
  CDR3 for alpha chain variable domain of TCR clone 143510 (TRAV20, TRAJ37)
CAGCSSNTGKLIY

SEQ ID NO: 287020 - protein, 11 aa, Homo sapiens
  CDR3 for beta chain variable domain of TCR clone 143510 (TRBV12-4, TRBJ2-3)
CASTATDTQYF

SEQ ID NO: 287021 - protein, 15 aa, Homo sapiens
  CDR3 for alpha chain variable domain of TCR clone 143511 (TRAV38-2/DV8, TRAJ43)
CAYRSLGAMPNDMRF

SEQ ID NO: 287022 - protein, 12 aa, Homo sapiens
  CDR3 for beta chain variable domain of TCR clone 143511 (TRBV28, TRBJ1-1)
CASNSGDTEAFF

SEQ ID NO: 287023 - protein, 13 aa, Homo sapiens
  CDR3 for alpha chain variable domain of TCR clone 143512 (TRAV8-3, TRAJ36)
CAVGATGANNLFF

SEQ ID NO: 287024 - protein, 13 aa, Homo sapiens
  CDR3 for beta chain variable domain of TCR clone 143512 (TRBV27, TRBJ2-1)
CASRTLGVGEQFF

SEQ ID NO: 287025 - protein, 13 aa, Homo sapiens
  CDR3 for alpha chain variable domain of TCR clone 143513 (TRAV13-1, TRAJ17)
CAANKAAGNKLTF

SEQ ID NO: 287026 - protein, 14 aa, Homo sapiens
  CDR3 for beta chain variable domain of TCR clone 143513 (TRBV12-5, TRBJ2-5)
CASGSRTHQETQYF

SEQ ID NO: 287027 - protein, 13 aa, Homo sapiens
  CDR3 for alpha chain variable domain of TCR clone 143514 (TRAV12-2, TRAJ24)
CAVSTDSWGKWQF

SEQ ID NO: 287028 - protein, 15 aa, Homo sapiens
  CDR3 for beta chain variable domain of TCR clone 143514 (TRBV7-2, TRBJ2-2)
CASSPTGANTGELFF

SEQ ID NO: 287029 - protein, 12 aa, Homo sapiens
  CDR3 for alpha chain variable domain of TCR clone 143515 (TRAV21, TRAJ49)
CAVSWTGNQFYF

SEQ ID NO: 287030 - protein, 14 aa, Homo sapiens
  CDR3 for beta chain variable domain of TCR clone 143515 (TRBV7-6, TRBJ2-7)
CASSLEGPGYEQYF

SEQ ID NO: 287031 - protein, 14 aa, Homo sapiens
  CDR3 for alpha chain variable domain of TCR clone 143516 (TRAV2, TRAJ37)
CAVDFTSNTGKLIF

SEQ ID NO: 287032 - protein, 12 aa, Homo sapiens
  CDR3 for beta chain variable domain of TCR clone 143516 (TRBV11-2, TRBJ2-2)
CASSLPTVELFF

SEQ ID NO: 287033 - protein, 16 aa, Homo sapiens
  CDR3 for alpha chain variable domain of TCR clone 143517 (TRAV13-2, TRAJ57)
CAENIGTQGGSEKLVF

SEQ ID NO: 287034 - protein, 15 aa, Homo sapiens
  CDR3 for beta chain variable domain of TCR clone 143517 (TRBV12-4, TRBJ2-5)
CASSPPTGLQETQYF

SEQ ID NO: 287035 - protein, 14 aa, Homo sapiens
  CDR3 for alpha chain variable domain of TCR clone 143518 (TRAV38-1, TRAJ45)
CAYYSGGGADGLTF

SEQ ID NO: 287036 - protein, 16 aa, Homo sapiens
  CDR3 for beta chain variable domain of TCR clone 143518 (TRBV4-1, TRBJ1-1)
SASSQDAGMGNTEAFF

SEQ ID NO: 287037 - protein, 15 aa, Homo sapiens
  CDR3 for alpha chain variable domain of TCR clone 143519 (TRAV20, TRAJ58)
CAVQDLETSGSRLTF

SEQ ID NO: 287038 - protein, 16 aa, Homo sapiens
  CDR3 for beta chain variable domain of TCR clone 143519 (TRBV27, TRBJ2-2)
CASSFRGLVRTGELFF

SEQ ID NO: 287039 - protein, 16 aa, Homo sapiens
  CDR3 for alpha chain variable domain of TCR clone 143520 (TRAV12-3, TRAJ53)
CAMSPGSGGSNYKLTF

SEQ ID NO: 287040 - protein, 15 aa, Homo sapiens
  CDR3 for beta chain variable domain of TCR clone 143520 (TRBV7-9, TRBJ2-3)
CASSQDRGITDTQYF

SEQ ID NO: 287041 - protein, 12 aa, Homo sapiens
  CDR3 for alpha chain variable domain of TCR clone 143521 (TRAV13-1, TRAJ49)
CAASPMGNQFYF

SEQ ID NO: 287042 - protein, 15 aa, Homo sapiens
  CDR3 for beta chain variable domain of TCR clone 143521 (TRBV5-1, TRBJ2-1)
CASSPPRAPYNEQFF

SEQ ID NO: 287043 - protein, 15 aa, Homo sapiens
  CDR3 for alpha chain variable domain of TCR clone 143522 (TRAV12-2, TRAJ53)
CAVNGGGGSNYKLTF

SEQ ID NO: 287044 - protein, 11 aa, Homo sapiens
  CDR3 for beta chain variable domain of TCR clone 143522 (TRBV7-6, TRBJ2-5)
CQQLKPRDQYF

SEQ ID NO: 287045 - protein, 11 aa, Homo sapiens
  CDR3 for alpha chain variable domain of TCR clone 143523 (TRAV2, TRAJ4)
CAAGGYTKLIF

SEQ ID NO: 287046 - protein, 13 aa, Homo sapiens
  CDR3 for beta chain variable domain of TCR clone 143523 (TRBV20-1, TRBJ1-1)
CSARVGGNTEAFF

SEQ ID NO: 287047 - protein, 15 aa, Homo sapiens
  CDR3 for alpha chain variable domain of TCR clone 143524 (TRAV3, TRAJ22)
CAVRDRGGSARQLPF

SEQ ID NO: 287048 - protein, 15 aa, Homo sapiens
  CDR3 for beta chain variable domain of TCR clone 143524 (TRBV19, TRBJ2-1)
CASSRPGQNYNEQFF

SEQ ID NO: 287049 - protein, 14 aa, Homo sapiens
  CDR3 for alpha chain variable domain of TCR clone 143525 (TRAV1-2, TRAJ16)
CAVNRLSDGQKLPF

SEQ ID NO: 287050 - protein, 13 aa, Homo sapiens
  CDR3 for beta chain variable domain of TCR clone 143525 (TRBV10-3, TRBJ2-7)
CASKLAVNYEQYF

SEQ ID NO: 287051 - protein, 13 aa, Homo sapiens
  CDR3 for alpha chain variable domain of TCR clone 143526 (TRAV2, TRAJ40)
CAVVTSGTYTYIF

SEQ ID NO: 287052 - protein, 14 aa, Homo sapiens
  CDR3 for beta chain variable domain of TCR clone 143526 (TRBV11-2, TRBJ2-3)
CASSRLARTDTQYL

SEQ ID NO: 287053 - protein, 13 aa, Homo sapiens
  CDR3 for alpha chain variable domain of TCR clone 143527 (TRAV13-1, TRAJ39)
CAASIWAGNMLTF

SEQ ID NO: 287054 - protein, 15 aa, Homo sapiens
  CDR3 for beta chain variable domain of TCR clone 143527 (TRBV7-9, TRBJ1-1)
CASSLLEQRGTEAFF

SEQ ID NO: 287055 - protein, 17 aa, Homo sapiens
  CDR3 for alpha chain variable domain of TCR clone 143528 (TRAV12-2, TRAJ48)
CASNEKLTFGTGPRLTI

SEQ ID NO: 287056 - protein, 16 aa, Homo sapiens
  CDR3 for beta chain variable domain of TCR clone 143528 (TRBV7-3, TRBJ2-2)
CASSLKRGTLSGELFF

SEQ ID NO: 287057 - protein, 16 aa, Homo sapiens
  CDR3 for alpha chain variable domain of TCR clone 143529 (TRAV14/DV4, TRAJ21)
CAMREGPENNFNKFYF

SEQ ID NO: 287058 - protein, 19 aa, Homo sapiens
  CDR3 for beta chain variable domain of TCR clone 143529 (TRBV25-1, TRBJ2-2)
CAILVYRVDRGRKTGELFF

SEQ ID NO: 287059 - protein, 19 aa, Homo sapiens
  CDR3 for alpha chain variable domain of TCR clone 143530 (TRAV21, TRAJ48)
SLVTQPPTSVLSRDEKLTF

SEQ ID NO: 287060 - protein, 16 aa, Homo sapiens
  CDR3 for beta chain variable domain of TCR clone 143530 (TRBV12-4, TRBJ1-5)
CASSRPVGGSNQPQHF

SEQ ID NO: 287061 - protein, 13 aa, Homo sapiens
  CDR3 for alpha chain variable domain of TCR clone 143531 (TRAV23/DV6, TRAJ47)
CAASSQYGNKLVF

SEQ ID NO: 287062 - protein, 15 aa, Homo sapiens
  CDR3 for beta chain variable domain of TCR clone 143531 (TRBV5-1, TRBJ2-1)
CASSPPRAPYNERFF

SEQ ID NO: 287063 - protein, 13 aa, Homo sapiens
  CDR3 for alpha chain variable domain of TCR clone 143532 (TRAV3, TRAJ41)
CAASSNSGYALNF

SEQ ID NO: 287064 - protein, 14 aa, Homo sapiens
  CDR3 for beta chain variable domain of TCR clone 143532 (TRBV7-2, TRBJ2-7)
CASSTKTSFYEQYF

SEQ ID NO: 287065 - protein, 13 aa, Homo sapiens
  CDR3 for alpha chain variable domain of TCR clone 143533 (TRAV14/DV4, TRAJ34)
CAMRDYNTDKLIF

SEQ ID NO: 287066 - protein, 14 aa, Homo sapiens
  CDR3 for beta chain variable domain of TCR clone 143533 (TRBV2, TRBJ2-7)
CASSLTSGGYEQYF

SEQ ID NO: 287067 - protein, 12 aa, Homo sapiens
  CDR3 for alpha chain variable domain of TCR clone 143534 (TRAV16, TRAJ21)
CAPLGNFNKFYF

SEQ ID NO: 287068 - protein, 16 aa, Homo sapiens
  CDR3 for beta chain variable domain of TCR clone 143534 (TRBV28, TRBJ2-7)
CTSVPAKRGGVYEQYF

SEQ ID NO: 287069 - protein, 13 aa, Homo sapiens
  CDR3 for alpha chain variable domain of TCR clone 143535 (TRAV34, TRAJ33)
CGADMNSNYQLIW

SEQ ID NO: 287070 - protein, 12 aa, Homo sapiens
  CDR3 for beta chain variable domain of TCR clone 143535 (TRBV6-3, TRBJ2-1)
CASSYRTVEQFF

SEQ ID NO: 287071 - protein, 15 aa, Homo sapiens
  CDR3 for alpha chain variable domain of TCR clone 143536 (TRAV16, TRAJ22)
CSRGRLSHVPRQLTF

SEQ ID NO: 287072 - protein, 15 aa, Homo sapiens
  CDR3 for beta chain variable domain of TCR clone 143536 (TRBV7-9, TRBJ1-6)
CASSSPGRGNSPLHF

SEQ ID NO: 287073 - protein, 11 aa, Homo sapiens
  CDR3 for alpha chain variable domain of TCR clone 143537 (TRAV3, TRAJ21)
CSVGNLNKFYF

SEQ ID NO: 287074 - protein, 13 aa, Homo sapiens
  CDR3 for beta chain variable domain of TCR clone 143537 (TRBV7-3, TRBJ1-1)
CASSQDWGAEAFF

SEQ ID NO: 287075 - protein, 13 aa, Homo sapiens
  CDR3 for alpha chain variable domain of TCR clone 143538 (TRAV21, TRAJ41)
CAVRRNSGYALNF

SEQ ID NO: 287076 - protein, 15 aa, Homo sapiens
  CDR3 for beta chain variable domain of TCR clone 143538 (TRBV7-3, TRBJ2-7)
CASSLTGQGKYEQYF

SEQ ID NO: 287077 - protein, 16 aa, Homo sapiens
  CDR3 for alpha chain variable domain of TCR clone 143539 (TRAV20, TRAJ26)
CAVQHRRDNYGQNIVF

SEQ ID NO: 287078 - protein, 15 aa, Homo sapiens
  CDR3 for beta chain variable domain of TCR clone 143539 (TRBV7-2, TRBJ2-7)
CASSWGQGAIYEQYF

SEQ ID NO: 287079 - protein, 20 aa, Homo sapiens
  CDR3 for alpha chain variable domain of TCR clone 143540 (TRAV27, TRAJ41)
CAVRTQIPDIQNPDPAVYQL

SEQ ID NO: 287080 - protein, 11 aa, Homo sapiens
  CDR3 for beta chain variable domain of TCR clone 143540 (TRBV10-3, TRBJ2-7)
CAISEGLEQYF

SEQ ID NO: 287081 - protein, 14 aa, Homo sapiens
  CDR3 for alpha chain variable domain of TCR clone 143541 (TRAV8-4, TRAJ48)
CAVSETFGNEKLTF

SEQ ID NO: 287082 - protein, 14 aa, Homo sapiens
  CDR3 for beta chain variable domain of TCR clone 143541 (TRBV13, TRBJ2-7)
CASSLKRASYEHYF

SEQ ID NO: 287083 - protein, 19 aa, Homo sapiens
  CDR3 for alpha chain variable domain of TCR clone 143542 (TRAV25, TRAJ20)
TATQTTDVGILPHDYKLSF

SEQ ID NO: 287084 - protein, 16 aa, Homo sapiens
  CDR3 for beta chain variable domain of TCR clone 143542 (TRBV12-4, TRBJ1-5)
CASSRPVGGSNQPQHF

SEQ ID NO: 287085 - protein, 12 aa, Homo sapiens
  CDR3 for alpha chain variable domain of TCR clone 143543 (TRAV26-1, TRAJ26)
CIVYNYGQNFVF

SEQ ID NO: 287086 - protein, 13 aa, Homo sapiens
  CDR3 for beta chain variable domain of TCR clone 143543 (TRBV11-1, TRBJ1-1)
CASSKQGRTEAFF

SEQ ID NO: 287087 - protein, 13 aa, Homo sapiens
  CDR3 for alpha chain variable domain of TCR clone 143544 (TRAV2, TRAJ40)
CAVVTSGTYKYIF

SEQ ID NO: 287088 - protein, 14 aa, Homo sapiens
  CDR3 for beta chain variable domain of TCR clone 143544 (TRBV11-2, TRBJ2-2)
CASSFTPGDGELFF

SEQ ID NO: 287089 - protein, 22 aa, Homo sapiens
  CDR3 for alpha chain variable domain of TCR clone 143545 (TRAV13-1, TRAJ35)
CAASKGGFGNVLHFGSGPPVIF

SEQ ID NO: 287090 - protein, 13 aa, Homo sapiens
  CDR3 for beta chain variable domain of TCR clone 143545 (TRBV7-3, TRBJ1-1)
CASSQDWGAEAFF

SEQ ID NO: 287091 - protein, 13 aa, Homo sapiens
  CDR3 for alpha chain variable domain of TCR clone 143546 (TRAV2, TRAJ40)
CAVVTSATYKYIF

SEQ ID NO: 287092 - protein, 14 aa, Homo sapiens
  CDR3 for beta chain variable domain of TCR clone 143546 (TRBV19, TRBJ2-1)
CASPTFVLIGEQFF

SEQ ID NO: 287093 - protein, 14 aa, Homo sapiens
  CDR3 for alpha chain variable domain of TCR clone 143547 (TRAV16, TRAJ37)
FALDISGNTGKLIF

SEQ ID NO: 287094 - protein, 11 aa, Homo sapiens
  CDR3 for beta chain variable domain of TCR clone 143547 (TRBV6-1, TRBJ2-1)
CASISSNEQFF

SEQ ID NO: 287095 - protein, 13 aa, Homo sapiens
  CDR3 for alpha chain variable domain of TCR clone 143548 (TRAV38-2/DV8, TRAJ34)
CAYRTWNTDKFIF

SEQ ID NO: 287096 - protein, 16 aa, Homo sapiens
  CDR3 for beta chain variable domain of TCR clone 143548 (TRBV19, TRBJ2-1)
CASSKAGPSSYNEQFF

SEQ ID NO: 287097 - protein, 13 aa, Homo sapiens
  CDR3 for alpha chain variable domain of TCR clone 143549 (TRAV38-2/DV8, TRAJ57)
CAYRWGGSEKLVF

SEQ ID NO: 287098 - protein, 14 aa, Homo sapiens
  CDR3 for beta chain variable domain of TCR clone 143549 (TRBV19, TRBJ2-1)
CASPTFVLSGEQFF

SEQ ID NO: 287099 - protein, 15 aa, Homo sapiens
  CDR3 for alpha chain variable domain of TCR clone 143550 (TRAV8-2, TRAJ40)
CVVLGTTSGTYKYIF

SEQ ID NO: 287100 - protein, 16 aa, Homo sapiens
  CDR3 for beta chain variable domain of TCR clone 143550 (TRBV7-3, TRBJ2-1)
CASSLEGYRSYNAQFF

SEQ ID NO: 287101 - protein, 20 aa, Homo sapiens
  CDR3 for alpha chain variable domain of TCR clone 143551 (TRAV12-1, TRAJ42)
SSVIQPPTSVKGGSQGNLIF

SEQ ID NO: 287102 - protein, 12 aa, Homo sapiens
  CDR3 for beta chain variable domain of TCR clone 143551 (TRBV12-5, TRBJ2-5)
CASGQGVETQYF

SEQ ID NO: 287103 - protein, 13 aa, Homo sapiens
  CDR3 for alpha chain variable domain of TCR clone 143552 (TRAV8-6, TRAJ40)
CDVSVTGTYKYIF

SEQ ID NO: 287104 - protein, 15 aa, Homo sapiens
  CDR3 for beta chain variable domain of TCR clone 143552 (TRBV4-1, TRBJ2-3)
CASGRGQGIPDTQYF

SEQ ID NO: 287105 - protein, 13 aa, Homo sapiens
  CDR3 for alpha chain variable domain of TCR clone 143553 (TRAV2, TRAJ15)
CAVASQAGTALIF

SEQ ID NO: 287106 - protein, 16 aa, Homo sapiens
  CDR3 for beta chain variable domain of TCR clone 143553 (TRBV20-1, TRBJ2-3)
CSGEAGLAGGQDTQYF

SEQ ID NO: 287107 - protein, 14 aa, Homo sapiens
  CDR3 for alpha chain variable domain of TCR clone 143554 (TRAV17, TRAJ22)
CATSPSGSARQLTF

SEQ ID NO: 287108 - protein, 15 aa, Homo sapiens
  CDR3 for beta chain variable domain of TCR clone 143554 (TRBV7-2, TRBJ2-7)
CASSWGQGAIYEQYF

SEQ ID NO: 287109 - protein, 12 aa, Homo sapiens
  CDR3 for alpha chain variable domain of TCR clone 143555 (TRAV12-2, TRAJ4)
GWPEGRYNKLIF

SEQ ID NO: 287110 - protein, 16 aa, Homo sapiens
  CDR3 for beta chain variable domain of TCR clone 143555 (TRBV6-1, TRBJ2-5)
CASSETLDRGAETQYF

SEQ ID NO: 287111 - protein, 13 aa, Homo sapiens
  CDR3 for alpha chain variable domain of TCR clone 143556 (TRAV21, TRAJ27)
CAALNTNAGKSTF

SEQ ID NO: 287112 - protein, 12 aa, Homo sapiens
  CDR3 for beta chain variable domain of TCR clone 143556 (TRBV28, TRBJ2-3)
CASSLYRDTQYF

SEQ ID NO: 287113 - protein, 18 aa, Homo sapiens
  CDR3 for alpha chain variable domain of TCR clone 143557 (TRAV17, TRAJ45)
CAKSLDLYSGGGADGVTF

SEQ ID NO: 287114 - protein, 13 aa, Homo sapiens
  CDR3 for beta chain variable domain of TCR clone 143557 (TRBV10-3, TRBJ2-7)
CASKLAVNYEQYF

SEQ ID NO: 287115 - protein, 14 aa, Homo sapiens
  CDR3 for alpha chain variable domain of TCR clone 143558 (TRAV20, TRAJ32)
CCGRYGGATNKLMF

SEQ ID NO: 287116 - protein, 16 aa, Homo sapiens
  CDR3 for beta chain variable domain of TCR clone 143558 (TRBV19, TRBJ2-2)
CASRSPGTGATGELFF

SEQ ID NO: 287117 - protein, 15 aa, Homo sapiens
  CDR3 for alpha chain variable domain of TCR clone 143559 (TRAV25, TRAJ53)
CAATGGGGSNYKLTF

SEQ ID NO: 287118 - protein, 12 aa, Homo sapiens
  CDR3 for beta chain variable domain of TCR clone 143559 (TRBV13, TRBJ2-2)
CASSWAPGELFF

SEQ ID NO: 287119 - protein, 15 aa, Homo sapiens
  CDR3 for alpha chain variable domain of TCR clone 143560 (TRAV8-3, TRAJ11)
CAVCLLNSGYSTLTF

SEQ ID NO: 287120 - protein, 16 aa, Homo sapiens
  CDR3 for beta chain variable domain of TCR clone 143560 (TRBV28, TRBJ2-1)
CASSLWGRTSGTLQFF

SEQ ID NO: 287121 - protein, 13 aa, Homo sapiens
  CDR3 for alpha chain variable domain of TCR clone 143561 (TRAV21, TRAJ27)
CAARPGNAGKWTF

SEQ ID NO: 287122 - protein, 14 aa, Homo sapiens
  CDR3 for beta chain variable domain of TCR clone 143561 (TRBV7-6, TRBJ2-3)
CASSLGTVTDTQYF

SEQ ID NO: 287123 - protein, 14 aa, Homo sapiens
  CDR3 for alpha chain variable domain of TCR clone 143562 (TRAV1-2, TRAJ16)
FAVNRFSDGQKLLF

SEQ ID NO: 287124 - protein, 15 aa, Homo sapiens
  CDR3 for beta chain variable domain of TCR clone 143562 (TRBV5-1, TRBJ2-3)
CASSVTSGSTDTQYF

SEQ ID NO: 287125 - protein, 13 aa, Homo sapiens
  CDR3 for alpha chain variable domain of TCR clone 143563 (TRAV12-2, TRAJ20)
CAVYPSNDYKLSV

SEQ ID NO: 287126 - protein, 15 aa, Homo sapiens
  CDR3 for beta chain variable domain of TCR clone 143563 (TRBV27, TRBJ2-5)
CASSLYPRGGETQYF

SEQ ID NO: 287127 - protein, 11 aa, Homo sapiens
  CDR3 for alpha chain variable domain of TCR clone 143564 (TRAV1-1, TRAJ23)
CAVRQGGKLIF

SEQ ID NO: 287128 - protein, 13 aa, Homo sapiens
  CDR3 for beta chain variable domain of TCR clone 143564 (TRBV7-2, TRBJ1-2)
CASSVTGVGGYTF

SEQ ID NO: 287129 - protein, 12 aa, Homo sapiens
  CDR3 for alpha chain variable domain of TCR clone 143565 (TRAV8-4, TRAJ37)
CAVGSNTGKLIF

SEQ ID NO: 287130 - protein, 16 aa, Homo sapiens
  CDR3 for beta chain variable domain of TCR clone 143565 (TRBV7-2, TRBJ2-3)
CASSLVGDASTDTRYF

SEQ ID NO: 287131 - protein, 11 aa, Homo sapiens
  CDR3 for alpha chain variable domain of TCR clone 143566 (TRAV17, TRAJ31)
CATANNARLMF

SEQ ID NO: 287132 - protein, 16 aa, Homo sapiens
  CDR3 for beta chain variable domain of TCR clone 143566 (TRBV7-8, TRBJ2-4)
CASSAERTLAKNIQYF

SEQ ID NO: 287133 - protein, 17 aa, Homo sapiens
  CDR3 for alpha chain variable domain of TCR clone 143567 (TRAV13-1, TRAJ28)
CAASPPYSGAGSYQLTF

SEQ ID NO: 287134 - protein, 13 aa, Homo sapiens
  CDR3 for beta chain variable domain of TCR clone 143567 (TRBV2, TRBJ1-4)
CASSERAGEKLFF

SEQ ID NO: 287135 - protein, 12 aa, Homo sapiens
  CDR3 for alpha chain variable domain of TCR clone 143568 (TRAV16, TRAJ10)
CSRTGGGNKLTF

SEQ ID NO: 287136 - protein, 16 aa, Homo sapiens
  CDR3 for beta chain variable domain of TCR clone 143568 (TRBV5-3, TRBJ2-2)
CARSFGTGTNTGELFF

SEQ ID NO: 287137 - protein, 12 aa, Homo sapiens
  CDR3 for alpha chain variable domain of TCR clone 143569 (TRAV2, TRAJ9)
CAVGAGGFKTIF

SEQ ID NO: 287138 - protein, 14 aa, Homo sapiens
  CDR3 for beta chain variable domain of TCR clone 143569 (TRBV9, TRBJ2-7)
CASSPLRAVGEQYF

SEQ ID NO: 287139 - protein, 13 aa, Homo sapiens
  CDR3 for alpha chain variable domain of TCR clone 143570 (TRAV35, TRAJ36)
CAGPRIGANNLFF

SEQ ID NO: 287140 - protein, 17 aa, Homo sapiens
  CDR3 for beta chain variable domain of TCR clone 143570 (TRBV13, TRBJ2-3)
CASSLSRVAGGRNTQYF

SEQ ID NO: 287141 - protein, 13 aa, Homo sapiens
  CDR3 for alpha chain variable domain of TCR clone 143571 (TRAV12-1, TRAJ39)
CVVNDNAGNMLTF

SEQ ID NO: 287142 - protein, 11 aa, Homo sapiens
  CDR3 for beta chain variable domain of TCR clone 143571 (TRBV7-3, TRBJ2-5)
CASSLSETQYF

SEQ ID NO: 287143 - protein, 15 aa, Homo sapiens
  CDR3 for alpha chain variable domain of TCR clone 143572 (TRAV26-1, TRAJ39)
CIVRVVGDAGNMLTF

SEQ ID NO: 287144 - protein, 13 aa, Homo sapiens
  CDR3 for beta chain variable domain of TCR clone 143572 (TRBV7-9, TRBJ1-2)
CASSLKQNYGYTF

SEQ ID NO: 287145 - protein, 17 aa, Homo sapiens
  CDR3 for alpha chain variable domain of TCR clone 143573 (TRAV17, TRAJ52)
CATDRNAGGTSYGKLTF

SEQ ID NO: 287146 - protein, 14 aa, Homo sapiens
  CDR3 for beta chain variable domain of TCR clone 143573 (TRBV20-1, TRBJ2-7)
CSAKRGRSSYEQYF

SEQ ID NO: 287147 - protein, 14 aa, Homo sapiens
  CDR3 for alpha chain variable domain of TCR clone 143574 (TRAV12-2, TRAJ53)
CAVKGGGSNYKLTF

SEQ ID NO: 287148 - protein, 11 aa, Homo sapiens
  CDR3 for beta chain variable domain of TCR clone 143574 (TRBV29-1, TRBJ2-5)
CSEDRTGTQYF

SEQ ID NO: 287149 - protein, 14 aa, Homo sapiens
  CDR3 for alpha chain variable domain of TCR clone 143575 (TRAV1-1, TRAJ23)
CAVSIYNYVGKLIF

SEQ ID NO: 287150 - protein, 15 aa, Homo sapiens
  CDR3 for beta chain variable domain of TCR clone 143575 (TRBV5-8, TRBJ2-2)
CASSLDRGATGELFF

SEQ ID NO: 287151 - protein, 15 aa, Homo sapiens
  CDR3 for alpha chain variable domain of TCR clone 143576 (TRAV3, TRAJ22)
CAVRDRGGSGRQLTF

SEQ ID NO: 287152 - protein, 15 aa, Homo sapiens
  CDR3 for beta chain variable domain of TCR clone 143576 (TRBV7-3, TRBJ2-2)
CASSETGQGTGELFF

SEQ ID NO: 287153 - protein, 16 aa, Homo sapiens
  CDR3 for alpha chain variable domain of TCR clone 143577 (TRAV12-2, TRAJ45)
CAVKRNPGGGDDGLTF

SEQ ID NO: 287154 - protein, 12 aa, Homo sapiens
  CDR3 for beta chain variable domain of TCR clone 143577 (TRBV6-1, TRBJ2-5)
CASSEGRETQYF

SEQ ID NO: 287155 - protein, 13 aa, Homo sapiens
  CDR3 for alpha chain variable domain of TCR clone 143578 (TRAV8-2, TRAJ26)
CVVSLGYGQNFVF

SEQ ID NO: 287156 - protein, 16 aa, Homo sapiens
  CDR3 for beta chain variable domain of TCR clone 143578 (TRBV29-1, TRBJ2-7)
CSVEDAEDGTAYEQYF

SEQ ID NO: 287157 - protein, 16 aa, Homo sapiens
  CDR3 for alpha chain variable domain of TCR clone 143579 (TRAV4, TRAJ5)
CLVGPDHGHGQESTYF

SEQ ID NO: 287158 - protein, 15 aa, Homo sapiens
  CDR3 for beta chain variable domain of TCR clone 143579 (TRBV7-8, TRBJ2-3)
CASSPRTGSTDTQYF

SEQ ID NO: 287159 - protein, 12 aa, Homo sapiens
  CDR3 for alpha chain variable domain of TCR clone 143580 (TRAV12-3, TRAJ17)
CAMTLTGNKLTF

SEQ ID NO: 287160 - protein, 15 aa, Homo sapiens
  CDR3 for beta chain variable domain of TCR clone 143580 (TRBV2, TRBJ2-1)
CASSELAGGRNEQFF

SEQ ID NO: 287161 - protein, 14 aa, Homo sapiens
  CDR3 for alpha chain variable domain of TCR clone 143581 (TRAV1-2, TRAJ8)
CAVREDTVFQKLVF

SEQ ID NO: 287162 - protein, 13 aa, Homo sapiens
  CDR3 for beta chain variable domain of TCR clone 143581 (TRBV24-1, TRBJ2-2)
CATSDWATGELFF

SEQ ID NO: 287163 - protein, 15 aa, Homo sapiens
  CDR3 for alpha chain variable domain of TCR clone 143582 (TRAV35, TRAJ58)
CAGRRQETSGSRLTF

SEQ ID NO: 287164 - protein, 14 aa, Homo sapiens
  CDR3 for beta chain variable domain of TCR clone 143582 (TRBV7-9, TRBJ2-2)
CASSLGHRTGELFF

SEQ ID NO: 287165 - protein, 13 aa, Homo sapiens
  CDR3 for alpha chain variable domain of TCR clone 143583 (TRAV12-2, TRAJ47)
CAVFMEYGNKLVF

SEQ ID NO: 287166 - protein, 13 aa, Homo sapiens
  CDR3 for beta chain variable domain of TCR clone 143583 (TRBV6-5, TRBJ2-5)
CASSPQGGENQYF

SEQ ID NO: 287167 - protein, 18 aa, Homo sapiens
  CDR3 for alpha chain variable domain of TCR clone 143584 (TRAV29/DV5, TRAJ52)
QCTSVQQADGTSYGKRTF

SEQ ID NO: 287168 - protein, 13 aa, Homo sapiens
  CDR3 for beta chain variable domain of TCR clone 143584 (TRBV7-2, TRBJ1-1)
CASNLKGAKVAFF

SEQ ID NO: 287169 - protein, 15 aa, Homo sapiens
  CDR3 for alpha chain variable domain of TCR clone 143585 (TRAV35, TRAJ38)
CAGFSNAVNNRKLIW

SEQ ID NO: 287170 - protein, 18 aa, Homo sapiens
  CDR3 for beta chain variable domain of TCR clone 143585 (TRBV3-1, TRBJ1-2)
CASSQDVIGWNGDYGYTF

SEQ ID NO: 287171 - protein, 16 aa, Homo sapiens
  CDR3 for alpha chain variable domain of TCR clone 143586 (TRAV30, TRAJ24)
CGTEIVDADSWGKFQF

SEQ ID NO: 287172 - protein, 14 aa, Homo sapiens
  CDR3 for beta chain variable domain of TCR clone 143586 (TRBV7-9, TRBJ1-1)
CASSSTKGNTEAFF

SEQ ID NO: 287173 - protein, 13 aa, Homo sapiens
  CDR3 for alpha chain variable domain of TCR clone 143587 (TRAV12-3, TRAJ20)
CAMRRSNDYKLSF

SEQ ID NO: 287174 - protein, 15 aa, Homo sapiens
  CDR3 for beta chain variable domain of TCR clone 143587 (TRBV9, TRBJ2-3)
CASSVAGGRSNTQYF

SEQ ID NO: 287175 - protein, 18 aa, Homo sapiens
  CDR3 for alpha chain variable domain of TCR clone 143588 (TRAV21, TRAJ52)
CAVRPSPAGGTSYGKLTF

SEQ ID NO: 287176 - protein, 14 aa, Homo sapiens
  CDR3 for beta chain variable domain of TCR clone 143588 (TRBV7-9, TRBJ2-3)
CASSLEQGTNTQYF

SEQ ID NO: 287177 - protein, 13 aa, Homo sapiens
  CDR3 for alpha chain variable domain of TCR clone 143589 (TRAV27, TRAJ40)
CAGPPSGTYNYIF

SEQ ID NO: 287178 - protein, 13 aa, Homo sapiens
  CDR3 for beta chain variable domain of TCR clone 143589 (TRBV28, TRBJ1-2)
CAGRDRGNYGYTF

SEQ ID NO: 287179 - protein, 14 aa, Homo sapiens
  CDR3 for alpha chain variable domain of TCR clone 143590 (TRAV1-2, TRAJ16)
CAVNRFSYGQKLLF

SEQ ID NO: 287180 - protein, 15 aa, Homo sapiens
  CDR3 for beta chain variable domain of TCR clone 143590 (TRBV7-9, TRBJ1-6)
CASSSPGCGNSPLHF

SEQ ID NO: 287181 - protein, 13 aa, Homo sapiens
  CDR3 for alpha chain variable domain of TCR clone 143591 (TRAV3, TRAJ29)
CAVRDIIDTPLGF

SEQ ID NO: 287182 - protein, 14 aa, Homo sapiens
  CDR3 for beta chain variable domain of TCR clone 143591 (TRBV27, TRBJ2-1)
CASSATGGYNEQFF

SEQ ID NO: 287183 - protein, 14 aa, Homo sapiens
  CDR3 for alpha chain variable domain of TCR clone 143592 (TRAV26-1, TRAJ38)
CIADNAGNNRKLIW

SEQ ID NO: 287184 - protein, 13 aa, Homo sapiens
  CDR3 for beta chain variable domain of TCR clone 143592 (TRBV2, TRBJ1-4)
CASSDLFNEKLFF

SEQ ID NO: 287185 - protein, 16 aa, Homo sapiens
  CDR3 for alpha chain variable domain of TCR clone 143593 (TRAV8-6, TRAJ39)
CAVMPMNNNAGNMLTF

SEQ ID NO: 287186 - protein, 15 aa, Homo sapiens
  CDR3 for beta chain variable domain of TCR clone 143593 (TRBV5-1, TRBJ2-3)
CASRNQAGSTDTQYF

SEQ ID NO: 287187 - protein, 14 aa, Homo sapiens
  CDR3 for alpha chain variable domain of TCR clone 143594 (TRAV23/DV6, TRAJ40)
CAASLTSGPYKYIF

SEQ ID NO: 287188 - protein, 14 aa, Homo sapiens
  CDR3 for beta chain variable domain of TCR clone 143594 (TRBV5-1, TRBJ2-3)
CASSRGQGGGTQYF

SEQ ID NO: 287189 - protein, 14 aa, Homo sapiens
  CDR3 for alpha chain variable domain of TCR clone 143595 (TRAV1-1, TRAJ27)
CAVIYNTNAGKSTF

SEQ ID NO: 287190 - protein, 18 aa, Homo sapiens
  CDR3 for beta chain variable domain of TCR clone 143595 (TRBV7-3, TRBJ2-1)
CASSLTLASGRAIVSSSS

SEQ ID NO: 287191 - protein, 18 aa, Homo sapiens
  CDR3 for alpha chain variable domain of TCR clone 143596 (TRAV13-1, TRAJ52)
CAASKRSAGGTSYGKLTF

SEQ ID NO: 287192 - protein, 16 aa, Homo sapiens
  CDR3 for beta chain variable domain of TCR clone 143596 (TRBV5-7, TRBJ2-5)
CASIRGQTGYQETQYF

SEQ ID NO: 287193 - protein, 11 aa, Homo sapiens
  CDR3 for alpha chain variable domain of TCR clone 143597 (TRAV3, TRAJ17)
PRGAAGNKLTF

SEQ ID NO: 287194 - protein, 12 aa, Homo sapiens
  CDR3 for beta chain variable domain of TCR clone 143597 (TRBV11-3, TRBJ2-2)
CASSLGGGELFF

SEQ ID NO: 287195 - protein, 14 aa, Homo sapiens
  CDR3 for alpha chain variable domain of TCR clone 143598 (TRAV1-1, TRAJ30)
CAVRSLNRDDKIIF

SEQ ID NO: 287196 - protein, 15 aa, Homo sapiens
  CDR3 for beta chain variable domain of TCR clone 143598 (TRBV27, TRBJ1-4)
CASSAQQDLNEKLSF

SEQ ID NO: 287197 - protein, 16 aa, Homo sapiens
  CDR3 for alpha chain variable domain of TCR clone 143599 (TRAV1-2, TRAJ10)
CAVRGVLTGGGNKLTF

SEQ ID NO: 287198 - protein, 15 aa, Homo sapiens
  CDR3 for beta chain variable domain of TCR clone 143599 (TRBV12-4, TRBJ2-2)
CASSLGVRHTGELFF

SEQ ID NO: 287199 - protein, 14 aa, Homo sapiens
  CDR3 for alpha chain variable domain of TCR clone 143600 (TRAV21, TRAJ58)
CAVRKGTSGSRLTF

SEQ ID NO: 287200 - protein, 13 aa, Homo sapiens
  CDR3 for beta chain variable domain of TCR clone 143600 (TRBV7-9, TRBJ2-7)
CASSFAGAYEQYF

SEQ ID NO: 287201 - protein, 18 aa, Homo sapiens
  CDR3 for alpha chain variable domain of TCR clone 143601 (TRAV26-1, TRAJ56)
CIVRVASRVTGANSKLTF

SEQ ID NO: 287202 - protein, 14 aa, Homo sapiens
  CDR3 for beta chain variable domain of TCR clone 143601 (TRBV7-9, TRBJ2-5)
CQQRHRKGRETQYF

SEQ ID NO: 287203 - protein, 15 aa, Homo sapiens
  CDR3 for alpha chain variable domain of TCR clone 143602 (TRAV12-1, TRAJ45)
CVVLSGRGGADGLTF

SEQ ID NO: 287204 - protein, 13 aa, Homo sapiens
  CDR3 for beta chain variable domain of TCR clone 143602 (TRBV7-9, TRBJ2-3)
CASSPGSTDTQYF

SEQ ID NO: 287205 - protein, 15 aa, Homo sapiens
  CDR3 for alpha chain variable domain of TCR clone 143603 (TRAV3, TRAJ22)
CAVRDRGGSARQLTF

SEQ ID NO: 287206 - protein, 15 aa, Homo sapiens
  CDR3 for beta chain variable domain of TCR clone 143603 (TRBV7-3, TRBJ2-1)
CASSPMGGGEVEQFF

SEQ ID NO: 287207 - protein, 15 aa, Homo sapiens
  CDR3 for alpha chain variable domain of TCR clone 143604 (TRAV1-2, TRAJ12)
CAVIPEVDSSYKLIF

SEQ ID NO: 287208 - protein, 12 aa, Homo sapiens
  CDR3 for beta chain variable domain of TCR clone 143604 (TRBV11-2, TRBJ2-2)
CASSLPAGELFF

SEQ ID NO: 287209 - protein, 14 aa, Homo sapiens
  CDR3 for alpha chain variable domain of TCR clone 143605 (TRAV1-2, TRAJ27)
CAPAEYTNAGKSTF

SEQ ID NO: 287210 - protein, 18 aa, Homo sapiens
  CDR3 for beta chain variable domain of TCR clone 143605 (TRBV28, TRBJ1-2)
CASRQQQGKRGSNCGYTF

SEQ ID NO: 287211 - protein, 12 aa, Homo sapiens
  CDR3 for alpha chain variable domain of TCR clone 143606 (TRAV13-1, TRAJ53)
AASGGSNYKLTF

SEQ ID NO: 287212 - protein, 16 aa, Homo sapiens
  CDR3 for beta chain variable domain of TCR clone 143606 (TRBV28, TRBJ2-6)
CASSNRRGAGANVLTF

SEQ ID NO: 287213 - protein, 14 aa, Homo sapiens
  CDR3 for alpha chain variable domain of TCR clone 143607 (TRAV2, TRAJ3)
CAVPPYSSASKIIF

SEQ ID NO: 287214 - protein, 13 aa, Homo sapiens
  CDR3 for beta chain variable domain of TCR clone 143607 (TRBV7-2, TRBJ2-7)
CASSSPSGSEQYF

SEQ ID NO: 287215 - protein, 13 aa, Homo sapiens
  CDR3 for alpha chain variable domain of TCR clone 143608 (TRAV27, TRAJ57)
CRSAQGGSEKLVF

SEQ ID NO: 287216 - protein, 13 aa, Homo sapiens
  CDR3 for beta chain variable domain of TCR clone 143608 (TRBV6-1, TRBJ1-1)
CASSWTVDTEAFF

SEQ ID NO: 287217 - protein, 12 aa, Homo sapiens
  CDR3 for alpha chain variable domain of TCR clone 143609 (TRAV12-3, TRAJ17)
CAMKLTGNKLTF

SEQ ID NO: 287218 - protein, 13 aa, Homo sapiens
  CDR3 for beta chain variable domain of TCR clone 143609 (TRBV5-1, TRBJ1-1)
CASSADWDTEAFF

SEQ ID NO: 287219 - protein, 15 aa, Homo sapiens
  CDR3 for alpha chain variable domain of TCR clone 143610 (TRAV26-2, TRAJ26)
CILRDFDNYGQNFVF

SEQ ID NO: 287220 - protein, 14 aa, Homo sapiens
  CDR3 for beta chain variable domain of TCR clone 143610 (TRBV29-1, TRBJ2-5)
CSLWTPYAGETQYF

SEQ ID NO: 287221 - protein, 11 aa, Homo sapiens
  CDR3 for alpha chain variable domain of TCR clone 143611 (TRAV2, TRAJ13)
CASRGYQKVTF

SEQ ID NO: 287222 - protein, 13 aa, Homo sapiens
  CDR3 for beta chain variable domain of TCR clone 143611 (TRBV6-1, TRBJ1-1)
CASSRQGNTEAFF

SEQ ID NO: 287223 - protein, 14 aa, Homo sapiens
  CDR3 for alpha chain variable domain of TCR clone 143612 (TRAV12-2, TRAJ15)
CAPHTGQAGTALIF

SEQ ID NO: 287224 - protein, 15 aa, Homo sapiens
  CDR3 for beta chain variable domain of TCR clone 143612 (TRBV28, TRBJ2-5)
CASSQTSGSLETQYF

SEQ ID NO: 287225 - protein, 11 aa, Homo sapiens
  CDR3 for alpha chain variable domain of TCR clone 143613 (TRAV13-1, TRAJ39)
CASHAGNMLTF

SEQ ID NO: 287226 - protein, 13 aa, Homo sapiens
  CDR3 for beta chain variable domain of TCR clone 143613 (TRBV12-4, TRBJ1-5)
CASSPDRAQPQHF

SEQ ID NO: 287227 - protein, 14 aa, Homo sapiens
  CDR3 for alpha chain variable domain of TCR clone 143614 (TRAV12-2, TRAJ17)
CAVLFTAAGNKLTF

SEQ ID NO: 287228 - protein, 13 aa, Homo sapiens
  CDR3 for beta chain variable domain of TCR clone 143614 (TRBV19, TRBJ1-2)
CASSQGQVYGYTF

SEQ ID NO: 287229 - protein, 21 aa, Homo sapiens
  CDR3 for alpha chain variable domain of TCR clone 143615 (TRAV8-3, TRAJ6)
CAVGGEEATYLHLEEEPALLF

SEQ ID NO: 287230 - protein, 17 aa, Homo sapiens
  CDR3 for beta chain variable domain of TCR clone 143615 (TRBV7-2, TRBJ2-3)
SASSLAGGLAGTAGQYF

SEQ ID NO: 287231 - protein, 14 aa, Homo sapiens
  CDR3 for alpha chain variable domain of TCR clone 143616 (TRAV12-1, TRAJ31)
CVVNNRDNNARLMF

SEQ ID NO: 287232 - protein, 15 aa, Homo sapiens
  CDR3 for beta chain variable domain of TCR clone 143616 (TRBV11-3, TRBJ2-3)
CASLKDGREGDTQYF

SEQ ID NO: 287233 - protein, 14 aa, Homo sapiens
  CDR3 for alpha chain variable domain of TCR clone 143617 (TRAV13-2, TRAJ11)
CAETGNSGYSPLTF

SEQ ID NO: 287234 - protein, 11 aa, Homo sapiens
  CDR3 for beta chain variable domain of TCR clone 143617 (TRBV10-3, TRBJ2-7)
CAISEGLEQYF

SEQ ID NO: 287235 - protein, 11 aa, Homo sapiens
  CDR3 for alpha chain variable domain of TCR clone 143618 (TRAV12-3, TRAJ43)
CAMSDSNDMRF

SEQ ID NO: 287236 - protein, 15 aa, Homo sapiens
  CDR3 for beta chain variable domain of TCR clone 143618 (TRBV20-1, TRBJ2-7)
CSARDRVSGMDEQYF

SEQ ID NO: 287237 - protein, 14 aa, Homo sapiens
  CDR3 for alpha chain variable domain of TCR clone 143619 (TRAV1-2, TRAJ16)
CAVNRFSDGQKLLF

SEQ ID NO: 287238 - protein, 14 aa, Homo sapiens
  CDR3 for beta chain variable domain of TCR clone 143619 (TRBV7-9, TRBJ2-3)
CAISLEDGTDTQYF

SEQ ID NO: 287239 - protein, 15 aa, Homo sapiens
  CDR3 for alpha chain variable domain of TCR clone 143620 (TRAV12-1, TRAJ41)
CVVNSRTGSGYALNF

SEQ ID NO: 287240 - protein, 11 aa, Homo sapiens
  CDR3 for beta chain variable domain of TCR clone 143620 (TRBV6-4, TRBJ2-1)
CASGDSYAQFF

SEQ ID NO: 287241 - protein, 12 aa, Homo sapiens
  CDR3 for alpha chain variable domain of TCR clone 143621 (TRAV2, TRAJ31)
CAVEGNNARLMF

SEQ ID NO: 287242 - protein, 17 aa, Homo sapiens
  CDR3 for beta chain variable domain of TCR clone 143621 (TRBV13, TRBJ2-3)
CASSLSRVAGGRNTQYF

SEQ ID NO: 287243 - protein, 11 aa, Homo sapiens
  CDR3 for alpha chain variable domain of TCR clone 143622 (TRAV25, TRAJ41)
CARNSGYALNF

SEQ ID NO: 287244 - protein, 15 aa, Homo sapiens
  CDR3 for beta chain variable domain of TCR clone 143622 (TRBV20-1, TRBJ2-7)
CSAESGTSGAYEQYF

SEQ ID NO: 287245 - protein, 14 aa, Homo sapiens
  CDR3 for alpha chain variable domain of TCR clone 143623 (TRAV1-2, TRAJ16)
CAVNRFSDGQKLLF

SEQ ID NO: 287246 - protein, 19 aa, Homo sapiens
  CDR3 for beta chain variable domain of TCR clone 143623 (TRBV6-3, TRBJ1-2)
CASSYSKDRTGPPNYGYTF

SEQ ID NO: 287247 - protein, 12 aa, Homo sapiens
  CDR3 for alpha chain variable domain of TCR clone 143624 (TRAV1-1, TRAJ24)
CAVRGSWGKCQF

SEQ ID NO: 287248 - protein, 14 aa, Homo sapiens
  CDR3 for beta chain variable domain of TCR clone 143624 (TRBV7-2, TRBJ1-2)
CASSQTGSTYGYTF

SEQ ID NO: 287249 - protein, 10 aa, Homo sapiens
  CDR3 for alpha chain variable domain of TCR clone 143625 (TRAV1-2, TRAJ31)
CVSEDARLMF

SEQ ID NO: 287250 - protein, 17 aa, Homo sapiens
  CDR3 for beta chain variable domain of TCR clone 143625 (TRBV24-1, TRBJ2-1)
CATSDVSTSGTYNEQFF

SEQ ID NO: 287251 - protein, 13 aa, Homo sapiens
  CDR3 for alpha chain variable domain of TCR clone 143626 (TRAV1-1, TRAJ10)
CAVNSGGYQKVTF

SEQ ID NO: 287252 - protein, 19 aa, Homo sapiens
  CDR3 for beta chain variable domain of TCR clone 143626 (TRBV2, TRBJ2-7)
CASSDDETSGRANDYEQYF

SEQ ID NO: 287253 - protein, 13 aa, Homo sapiens
  CDR3 for alpha chain variable domain of TCR clone 143627 (TRAV13-1, TRAJ21)
CAASIYNFNKFYF

SEQ ID NO: 287254 - protein, 16 aa, Homo sapiens
  CDR3 for beta chain variable domain of TCR clone 143627 (TRBV27, TRBJ2-2)
CASSFRGLVRTGELFF

SEQ ID NO: 287255 - protein, 14 aa, Homo sapiens
  CDR3 for alpha chain variable domain of TCR clone 143628 (TRAV1-2, TRAJ8)
CAVREDTGFQKIVF

SEQ ID NO: 287256 - protein, 15 aa, Homo sapiens
  CDR3 for beta chain variable domain of TCR clone 143628 (TRBV12-4, TRBJ2-5)
CASSPPTGLQETQYF

SEQ ID NO: 287257 - protein, 13 aa, Homo sapiens
  CDR3 for alpha chain variable domain of TCR clone 143629 (TRAV2, TRAJ40)
CAVVTAGTYKYIF

SEQ ID NO: 287258 - protein, 16 aa, Homo sapiens
  CDR3 for beta chain variable domain of TCR clone 143629 (TRBV19, TRBJ2-1)
CASSKAGPSSYNEQFF

SEQ ID NO: 287259 - protein, 23 aa, Homo sapiens
  CDR3 for alpha chain variable domain of TCR clone 143630 (TRAV12-2, TRAJ36)
SLLIRDSQPSDPATLERANNLFF

SEQ ID NO: 287260 - protein, 17 aa, Homo sapiens
  CDR3 for beta chain variable domain of TCR clone 143630 (TRBV3-1, TRBJ2-3)
CASSQLLDRGHTDTQYF

SEQ ID NO: 287261 - protein, 15 aa, Homo sapiens
  CDR3 for alpha chain variable domain of TCR clone 143631 (TRAV3, TRAJ15)
CAVRPANQAGTPLIF

SEQ ID NO: 287262 - protein, 14 aa, Homo sapiens
  CDR3 for beta chain variable domain of TCR clone 143631 (TRBV4-1, TRBJ2-2)
CASSQAVNTGELFF

SEQ ID NO: 287263 - protein, 15 aa, Homo sapiens
  CDR3 for alpha chain variable domain of TCR clone 143632 (TRAV26-1, TRAJ29)
CIVRALNSGNKPLVF

SEQ ID NO: 287264 - protein, 14 aa, Homo sapiens
  CDR3 for beta chain variable domain of TCR clone 143632 (TRBV5-4, TRBJ1-2)
CASSLLGVTYGYTF

SEQ ID NO: 287265 - protein, 12 aa, Homo sapiens
  CDR3 for alpha chain variable domain of TCR clone 143633 (TRAV8-6, TRAJ21)
CAVRPNFNKFYF

SEQ ID NO: 287266 - protein, 13 aa, Homo sapiens
  CDR3 for beta chain variable domain of TCR clone 143633 (TRBV18, TRBJ1-1)
CASSGGRNTEAFF

SEQ ID NO: 287267 - protein, 15 aa, Homo sapiens
  CDR3 for alpha chain variable domain of TCR clone 143634 (TRAV12-2, TRAJ13)
CRESLGSGVYQKVTF

SEQ ID NO: 287268 - protein, 15 aa, Homo sapiens
  CDR3 for beta chain variable domain of TCR clone 143634 (TRBV6-5, TRBJ2-1)
CASRRAQLSYNEQFF

SEQ ID NO: 287269 - protein, 14 aa, Homo sapiens
  CDR3 for alpha chain variable domain of TCR clone 143635 (TRAV12-3, TRAJ10)
SHLPLTGGGNKLTF

SEQ ID NO: 287270 - protein, 15 aa, Homo sapiens
  CDR3 for beta chain variable domain of TCR clone 143635 (TRBV6-1, TRBJ1-3)
CASVQGGGGGNTIYF

SEQ ID NO: 287271 - protein, 14 aa, Homo sapiens
  CDR3 for alpha chain variable domain of TCR clone 143636 (TRAV1-2, TRAJ16)
CAVNRFSDGQKLLF

SEQ ID NO: 287272 - protein, 17 aa, Homo sapiens
  CDR3 for beta chain variable domain of TCR clone 143636 (TRBV5-1, TRBJ2-2)
CASSLAGLSGGIGELFF

SEQ ID NO: 287273 - protein, 11 aa, Homo sapiens
  CDR3 for alpha chain variable domain of TCR clone 143637 (TRAV35, TRAJ30)
CAPGGHDKIIF

SEQ ID NO: 287274 - protein, 22 aa, Homo sapiens
  CDR3 for beta chain variable domain of TCR clone 143637 (TRBV7-6, TRBJ2-1)
SGTRPCIAVPAAWGGGADEQFF

SEQ ID NO: 287275 - protein, 15 aa, Homo sapiens
  CDR3 for alpha chain variable domain of TCR clone 143638 (TRAV29/DV5, TRAJ29)
CAASESNSGNTPLVF

SEQ ID NO: 287276 - protein, 14 aa, Homo sapiens
  CDR3 for beta chain variable domain of TCR clone 143638 (TRBV11-2, TRBJ1-3)
CASSPRTGGNTIYF

SEQ ID NO: 287277 - protein, 17 aa, Homo sapiens
  CDR3 for alpha chain variable domain of TCR clone 143639 (TRAV13-1, TRAJ28)
CAASPPYSGAGIYQLTF

SEQ ID NO: 287278 - protein, 15 aa, Homo sapiens
  CDR3 for beta chain variable domain of TCR clone 143639 (TRBV6-3, TRBJ2-2)
CASSFLATLTGELFF

SEQ ID NO: 287279 - protein, 14 aa, Homo sapiens
  CDR3 for alpha chain variable domain of TCR clone 143640 (TRAV9-2, TRAJ9)
CALSDPTGGFKTIF

SEQ ID NO: 287280 - protein, 14 aa, Homo sapiens
  CDR3 for beta chain variable domain of TCR clone 143640 (TRBV20-1, TRBJ2-4)
CSARARGQGGIQYF

SEQ ID NO: 287281 - protein, 12 aa, Homo sapiens
  CDR3 for alpha chain variable domain of TCR clone 143641 (TRAV26-1, TRAJ36)
CIVRVRADNIFF

SEQ ID NO: 287282 - protein, 15 aa, Homo sapiens
  CDR3 for beta chain variable domain of TCR clone 143641 (TRBV6-3, TRBJ2-7)
CASSSPGTVFYEQYF

SEQ ID NO: 287283 - protein, 13 aa, Homo sapiens
  CDR3 for alpha chain variable domain of TCR clone 143642 (TRAV17, TRAJ5)
CATGDTGRRALTF

SEQ ID NO: 287284 - protein, 13 aa, Homo sapiens
  CDR3 for beta chain variable domain of TCR clone 143642 (TRBV19, TRBJ1-5)
CASSIEPVQPQYF

SEQ ID NO: 287285 - protein, 15 aa, Homo sapiens
  CDR3 for alpha chain variable domain of TCR clone 143643 (TRAV13-1, TRAJ52)
CAATSPRTSYGNLTF

SEQ ID NO: 287286 - protein, 16 aa, Homo sapiens
  CDR3 for beta chain variable domain of TCR clone 143643 (TRBV7-3, TRBJ2-2)
CASSLKRGTLSGELFF

SEQ ID NO: 287287 - protein, 17 aa, Homo sapiens
  CDR3 for alpha chain variable domain of TCR clone 143644 (TRAV8-3, TRAJ32)
CAVGPLDSGGATNKLIF

SEQ ID NO: 287288 - protein, 15 aa, Homo sapiens
  CDR3 for beta chain variable domain of TCR clone 143644 (TRBV18, TRBJ1-2)
CASSPGNGLGYGYTF

SEQ ID NO: 287289 - protein, 17 aa, Homo sapiens
  CDR3 for alpha chain variable domain of TCR clone 143645 (TRAV3, TRAJ6)
GAVRDDPRAGGSYIPTF

SEQ ID NO: 287290 - protein, 14 aa, Homo sapiens
  CDR3 for beta chain variable domain of TCR clone 143645 (TRBV7-2, TRBJ2-7)
CASSPKTSFYEQYF

SEQ ID NO: 287291 - protein, 17 aa, Homo sapiens
  CDR3 for alpha chain variable domain of TCR clone 143646 (TRAV16, TRAJ58)
CITVLSHGETSGSRLTF

SEQ ID NO: 287292 - protein, 13 aa, Homo sapiens
  CDR3 for beta chain variable domain of TCR clone 143646 (TRBV20-1, TRBJ2-2)
CSASAAGTGELFF

SEQ ID NO: 287293 - protein, 13 aa, Homo sapiens
  CDR3 for alpha chain variable domain of TCR clone 143647 (TRAV8-3, TRAJ4)
WVFDSGGYNKLIF

SEQ ID NO: 287294 - protein, 14 aa, Homo sapiens
  CDR3 for beta chain variable domain of TCR clone 143647 (TRBV7-9, TRBJ2-3)
CASSLEDGTDTQYF

SEQ ID NO: 287295 - protein, 11 aa, Homo sapiens
  CDR3 for alpha chain variable domain of TCR clone 143648 (TRAV12-1, TRAJ43)
CVEYDNNDMRF

SEQ ID NO: 287296 - protein, 14 aa, Homo sapiens
  CDR3 for beta chain variable domain of TCR clone 143648 (TRBV3-1, TRBJ2-5)
CASSQGPDQETQYF

SEQ ID NO: 287297 - protein, 16 aa, Homo sapiens
  CDR3 for alpha chain variable domain of TCR clone 143649 (TRAV26-2, TRAJ57)
CILRDVGSGGSEKLVF

SEQ ID NO: 287298 - protein, 13 aa, Homo sapiens
  CDR3 for beta chain variable domain of TCR clone 143649 (TRBV6-4, TRBJ2-3)
CASSVSWADTLYF

SEQ ID NO: 287299 - protein, 17 aa, Homo sapiens
  CDR3 for alpha chain variable domain of TCR clone 143650 (TRAV3, TRAJ12)
CAVRDGGRTDSSDKLIF

SEQ ID NO: 287300 - protein, 14 aa, Homo sapiens
  CDR3 for beta chain variable domain of TCR clone 143650 (TRBV7-9, TRBJ1-2)
CASSRQGANYGYTF

SEQ ID NO: 287301 - protein, 14 aa, Homo sapiens
  CDR3 for alpha chain variable domain of TCR clone 143651 (TRAV2, TRAJ9)
CAVEDRSGGFKTIF

SEQ ID NO: 287302 - protein, 13 aa, Homo sapiens
  CDR3 for beta chain variable domain of TCR clone 143651 (TRBV7-3, TRBJ2-5)
CASSFRGGQTQYF

SEQ ID NO: 287303 - protein, 16 aa, Homo sapiens
  CDR3 for alpha chain variable domain of TCR clone 143652 (TRAV2, TRAJ23)
CVGGQLIFGQGTELSV

SEQ ID NO: 287304 - protein, 20 aa, Homo sapiens
  CDR3 for beta chain variable domain of TCR clone 143652 (TRBV20-1, TRBJ2-5)
CSARAGLAGRLAGHLETQYF

SEQ ID NO: 287305 - protein, 13 aa, Homo sapiens
  CDR3 for alpha chain variable domain of TCR clone 143653 (TRAV26-1, TRAJ34)
CIVRPWITDKLIF

SEQ ID NO: 287306 - protein, 13 aa, Homo sapiens
  CDR3 for beta chain variable domain of TCR clone 143653 (TRBV11-2, TRBJ2-5)
CASSSTGEETQYF

SEQ ID NO: 287307 - protein, 14 aa, Homo sapiens
  CDR3 for alpha chain variable domain of TCR clone 143654 (TRAV1-1, TRAJ28)
CAAPSGAGSYQLTF

SEQ ID NO: 287308 - protein, 11 aa, Homo sapiens
  CDR3 for beta chain variable domain of TCR clone 143654 (TRBV11-2, TRBJ2-2)
CASSLPGELFF

SEQ ID NO: 287309 - protein, 15 aa, Homo sapiens
  CDR3 for alpha chain variable domain of TCR clone 143655 (TRAV21, TRAJ53)
CATLNSGGSNYKLTV

SEQ ID NO: 287310 - protein, 16 aa, Homo sapiens
  CDR3 for beta chain variable domain of TCR clone 143655 (TRBV9, TRBJ2-1)
CASSVCGGGNYNEQFF

SEQ ID NO: 287311 - protein, 13 aa, Homo sapiens
  CDR3 for alpha chain variable domain of TCR clone 143656 (TRAV8-6, TRAJ49)
CAVITNTGNQFYF

SEQ ID NO: 287312 - protein, 15 aa, Homo sapiens
  CDR3 for beta chain variable domain of TCR clone 143656 (TRBV7-9, TRBJ1-4)
CASSRTGGFNEKLFF

SEQ ID NO: 287313 - protein, 12 aa, Homo sapiens
  CDR3 for alpha chain variable domain of TCR clone 143657 (TRAV13-1, TRAJ21)
CAAKEGFNKFYL

SEQ ID NO: 287314 - protein, 17 aa, Homo sapiens
  CDR3 for beta chain variable domain of TCR clone 143657 (TRBV19, TRBJ2-7)
CASSISFYDSYPYEQYL

SEQ ID NO: 287315 - protein, 15 aa, Homo sapiens
  CDR3 for alpha chain variable domain of TCR clone 143658 (TRAV2, TRAJ9)
CAVAALNTGGYKTIF

SEQ ID NO: 287316 - protein, 14 aa, Homo sapiens
  CDR3 for beta chain variable domain of TCR clone 143658 (TRBV7-8, TRBJ2-5)
CASSATGGQETQYF

SEQ ID NO: 287317 - protein, 10 aa, Homo sapiens
  CDR3 for alpha chain variable domain of TCR clone 143659 (TRAV8-4, TRAJ43)
CAVSADDMRF

SEQ ID NO: 287318 - protein, 14 aa, Homo sapiens
  CDR3 for beta chain variable domain of TCR clone 143659 (TRBV7-6, TRBJ2-3)
CASSLGTVTDTQYF

SEQ ID NO: 287319 - protein, 14 aa, Homo sapiens
  CDR3 for alpha chain variable domain of TCR clone 143660 (TRAV13-2, TRAJ29)
CAENIEPGNTPLVF

SEQ ID NO: 287320 - protein, 12 aa, Homo sapiens
  CDR3 for beta chain variable domain of TCR clone 143660 (TRBV5-1, TRBJ1-1)
CASSLTGAEAFF

SEQ ID NO: 287321 - protein, 18 aa, Homo sapiens
  CDR3 for alpha chain variable domain of TCR clone 143661 (TRAV21, TRAJ52)
CAVRPSPAGGTSYGKLTF

SEQ ID NO: 287322 - protein, 14 aa, Homo sapiens
  CDR3 for beta chain variable domain of TCR clone 143661 (TRBV7-2, TRBJ2-1)
CASSLEGGYNKQFF

SEQ ID NO: 287323 - protein, 13 aa, Homo sapiens
  CDR3 for alpha chain variable domain of TCR clone 143662 (TRAV20, TRAJ54)
CAVQAGGPQKLVF

SEQ ID NO: 287324 - protein, 14 aa, Homo sapiens
  CDR3 for beta chain variable domain of TCR clone 143662 (TRBV20-1, TRBJ2-7)
CSAKTGTGGYEQYF

SEQ ID NO: 287325 - protein, 13 aa, Homo sapiens
  CDR3 for alpha chain variable domain of TCR clone 143663 (TRAV21, TRAJ20)
CAVGLRVDYKLSF

SEQ ID NO: 287326 - protein, 12 aa, Homo sapiens
  CDR3 for beta chain variable domain of TCR clone 143663 (TRBV12-4, TRBJ2-3)
CASSTLPDTQYF

SEQ ID NO: 287327 - protein, 13 aa, Homo sapiens
  CDR3 for alpha chain variable domain of TCR clone 143664 (TRAV38-1, TRAJ42)
CARWGGSQGNLIF

SEQ ID NO: 287328 - protein, 13 aa, Homo sapiens
  CDR3 for beta chain variable domain of TCR clone 143664 (TRBV18, TRBJ2-5)
CASSLQGQETQYF

SEQ ID NO: 287329 - protein, 15 aa, Homo sapiens
  CDR3 for alpha chain variable domain of TCR clone 143665 (TRAV13-1, TRAJ15)
CAASIERQAGTALIF

SEQ ID NO: 287330 - protein, 13 aa, Homo sapiens
  CDR3 for beta chain variable domain of TCR clone 143665 (TRBV7-2, TRBJ2-7)
CASSSPSGSEQYF

SEQ ID NO: 287331 - protein, 13 aa, Homo sapiens
  CDR3 for alpha chain variable domain of TCR clone 143666 (TRAV29/DV5, TRAJ29)
CGASAAGNTPLVF

SEQ ID NO: 287332 - protein, 14 aa, Homo sapiens
  CDR3 for beta chain variable domain of TCR clone 143666 (TRBV19, TRBJ2-3)
CASSAPRGTDTQYF

SEQ ID NO: 287333 - protein, 13 aa, Homo sapiens
  CDR3 for alpha chain variable domain of TCR clone 143667 (TRAV12-3, TRAJ7)
CALSASGNNRLAF

SEQ ID NO: 287334 - protein, 14 aa, Homo sapiens
  CDR3 for beta chain variable domain of TCR clone 143667 (TRBV5-4, TRBJ1-1)
CASSLDSRRDEAFF

SEQ ID NO: 287335 - protein, 16 aa, Homo sapiens
  CDR3 for alpha chain variable domain of TCR clone 143668 (TRAV21, TRAJ58)
CAVRGDRETSGSRLTF

SEQ ID NO: 287336 - protein, 11 aa, Homo sapiens
  CDR3 for beta chain variable domain of TCR clone 143668 (TRBV19, TRBJ2-3)
CQCWGADTQYF

SEQ ID NO: 287337 - protein, 14 aa, Homo sapiens
  CDR3 for alpha chain variable domain of TCR clone 143669 (TRAV12-2, TRAJ11)
CAVNRESGYSTLIF

SEQ ID NO: 287338 - protein, 10 aa, Homo sapiens
  CDR3 for beta chain variable domain of TCR clone 143669 (TRBV20-1, TRBJ2-5)
CSARFETQYF

SEQ ID NO: 287339 - protein, 12 aa, Homo sapiens
  CDR3 for alpha chain variable domain of TCR clone 143670 (TRAV16, TRAJ22)
CALEVSARQLTF

SEQ ID NO: 287340 - protein, 13 aa, Homo sapiens
  CDR3 for beta chain variable domain of TCR clone 143670 (TRBV2, TRBJ2-3)
CASILAGGQGQYF

SEQ ID NO: 287341 - protein, 15 aa, Homo sapiens
  CDR3 for alpha chain variable domain of TCR clone 143671 (TRAV27, TRAJ38)
CAARRNAGNNRKLIW

SEQ ID NO: 287342 - protein, 17 aa, Homo sapiens
  CDR3 for beta chain variable domain of TCR clone 143671 (TRBV28, TRBJ2-5)
CAGVSRGEETQYFARHA

SEQ ID NO: 287343 - protein, 22 aa, Homo sapiens
  CDR3 for alpha chain variable domain of TCR clone 143672 (TRAV4, )
CLVGPHNYDIQNPDPAVYQLRD

SEQ ID NO: 287344 - protein, 17 aa, Homo sapiens
  CDR3 for beta chain variable domain of TCR clone 143672 (TRBV24-1, TRBJ2-1)
CVTSDVSTSGTYNEQFF

SEQ ID NO: 287345 - protein, 20 aa, Homo sapiens
  CDR3 for alpha chain variable domain of TCR clone 143673 (TRAV8-3, TRAJ44)
LSTSVLWVRFYTGTASKLTF

SEQ ID NO: 287346 - protein, 15 aa, Homo sapiens
  CDR3 for beta chain variable domain of TCR clone 143673 (TRBV6-5, TRBJ1-2)
CASSYSQAFNYGYTL

SEQ ID NO: 287347 - protein, 14 aa, Homo sapiens
  CDR3 for alpha chain variable domain of TCR clone 143674 (TRAV1-2, TRAJ16)
CAVNRFSDGQKLLF

SEQ ID NO: 287348 - protein, 14 aa, Homo sapiens
  CDR3 for beta chain variable domain of TCR clone 143674 (TRBV4-1, TRBJ2-2)
CASSQAVNTGVLFF

SEQ ID NO: 287349 - protein, 14 aa, Homo sapiens
  CDR3 for alpha chain variable domain of TCR clone 143675 (TRAV1-2, TRAJ16)
CAVNRFSDGPKLLF

SEQ ID NO: 287350 - protein, 12 aa, Homo sapiens
  CDR3 for beta chain variable domain of TCR clone 143675 (TRBV24-1, TRBJ1-1)
CATLYPDTEAFF

SEQ ID NO: 287351 - protein, 12 aa, Homo sapiens
  CDR3 for alpha chain variable domain of TCR clone 143676 (TRAV2, TRAJ9)
CAVGAGGFKTIF

SEQ ID NO: 287352 - protein, 16 aa, Homo sapiens
  CDR3 for beta chain variable domain of TCR clone 143676 (TRBV4-2, TRBJ2-7)
CASSQDTSGGPSEQYF

SEQ ID NO: 287353 - protein, 13 aa, Homo sapiens
  CDR3 for alpha chain variable domain of TCR clone 143677 (TRAV17, TRAJ5)
CALRGTGRRALTF

SEQ ID NO: 287354 - protein, 12 aa, Homo sapiens
  CDR3 for beta chain variable domain of TCR clone 143677 (TRBV2, TRBJ2-1)
CAYGPPGNEQFF

SEQ ID NO: 287355 - protein, 18 aa, Homo sapiens
  CDR3 for alpha chain variable domain of TCR clone 143678 (TRAV13-1, TRAJ52)
CAAKNPNAGGTSYRKLTF

SEQ ID NO: 287356 - protein, 16 aa, Homo sapiens
  CDR3 for beta chain variable domain of TCR clone 143678 (TRBV27, TRBJ2-2)
CASSFRGLVRTEELFF

SEQ ID NO: 287357 - protein, 14 aa, Homo sapiens
  CDR3 for alpha chain variable domain of TCR clone 143679 (TRAV1-2, TRAJ16)
CAVNRFSDGQKLHF

SEQ ID NO: 287358 - protein, 15 aa, Homo sapiens
  CDR3 for beta chain variable domain of TCR clone 143679 (TRBV9, TRBJ1-6)
CASSVAGAGDSPLHF

SEQ ID NO: 287359 - protein, 14 aa, Homo sapiens
  CDR3 for alpha chain variable domain of TCR clone 143680 (TRAV12-2, TRAJ17)
CAVNIKAASNKLTF

SEQ ID NO: 287360 - protein, 13 aa, Homo sapiens
  CDR3 for beta chain variable domain of TCR clone 143680 (TRBV7-8, TRBJ2-7)
CASSLTGGREQYF

SEQ ID NO: 287361 - protein, 12 aa, Homo sapiens
  CDR3 for alpha chain variable domain of TCR clone 143681 (TRAV8-3, TRAJ20)
CAAGANDYKLSF

SEQ ID NO: 287362 - protein, 15 aa, Homo sapiens
  CDR3 for beta chain variable domain of TCR clone 143681 (TRBV11-2, TRBJ2-1)
CASSLGTSGLNEQFF

SEQ ID NO: 287363 - protein, 11 aa, Homo sapiens
  CDR3 for alpha chain variable domain of TCR clone 143682 (TRAV35, TRAJ30)
CAPGGDDKIIF

SEQ ID NO: 287364 - protein, 14 aa, Homo sapiens
  CDR3 for beta chain variable domain of TCR clone 143682 (TRBV7-6, TRBJ2-1)
CAGSLGGGADEQFF

SEQ ID NO: 287365 - protein, 14 aa, Homo sapiens
  CDR3 for alpha chain variable domain of TCR clone 143683 (TRAV2, TRAJ9)
CAVEDRSGGFKTIF

SEQ ID NO: 287366 - protein, 19 aa, Homo sapiens
  CDR3 for beta chain variable domain of TCR clone 143683 (TRBV11-3, TRBJ2-2)
CASSTRPGAKTTNTGELFF

SEQ ID NO: 287367 - protein, 12 aa, Homo sapiens
  CDR3 for alpha chain variable domain of TCR clone 143684 (TRAV8-3, TRAJ20)
CAGGANDYELSF

SEQ ID NO: 287368 - protein, 16 aa, Homo sapiens
  CDR3 for beta chain variable domain of TCR clone 143684 (TRBV19, TRBJ2-2)
CASRSPGTGATGELFF

SEQ ID NO: 287369 - protein, 14 aa, Homo sapiens
  CDR3 for alpha chain variable domain of TCR clone 143685 (TRAV17, TRAJ56)
CATDYTGAISKLTF

SEQ ID NO: 287370 - protein, 14 aa, Homo sapiens
  CDR3 for beta chain variable domain of TCR clone 143685 (TRBV18, TRBJ2-1)
CASSPVRGDNEQFF

SEQ ID NO: 287371 - protein, 14 aa, Homo sapiens
  CDR3 for alpha chain variable domain of TCR clone 143686 (TRAV1-2, TRAJ8)
CAVREDTGFQKLVF

SEQ ID NO: 287372 - protein, 12 aa, Homo sapiens
  CDR3 for beta chain variable domain of TCR clone 143686 (TRBV27, TRBJ2-2)
CASKLVTGELFF

SEQ ID NO: 287373 - protein, 16 aa, Homo sapiens
  CDR3 for alpha chain variable domain of TCR clone 143687 (TRAV30, TRAJ24)
CGTEIVDADSWWKFQF

SEQ ID NO: 287374 - protein, 14 aa, Homo sapiens
  CDR3 for beta chain variable domain of TCR clone 143687 (TRBV19, TRBJ2-1)
CASTTFVLSGEQFF

SEQ ID NO: 287375 - protein, 16 aa, Homo sapiens
  CDR3 for alpha chain variable domain of TCR clone 143688 (TRAV30, TRAJ24)
CGTEIVDADSWGKFQF

SEQ ID NO: 287376 - protein, 15 aa, Homo sapiens
  CDR3 for beta chain variable domain of TCR clone 143688 (TRBV3-1, TRBJ2-7)
CASSHRDRVSYEQYF

SEQ ID NO: 287377 - protein, 17 aa, Homo sapiens
  CDR3 for alpha chain variable domain of TCR clone 143689 (TRAV13-1, TRAJ52)
CAAGRNAGGTNYGKLTF

SEQ ID NO: 287378 - protein, 12 aa, Homo sapiens
  CDR3 for beta chain variable domain of TCR clone 143689 (TRBV19, TRBJ1-5)
CASSIAQQPQHF

SEQ ID NO: 287379 - protein, 14 aa, Homo sapiens
  CDR3 for alpha chain variable domain of TCR clone 143690 (TRAV12-3, TRAJ10)
SHLPLTGGGNKLTF

SEQ ID NO: 287380 - protein, 15 aa, Homo sapiens
  CDR3 for beta chain variable domain of TCR clone 143690 (TRBV11-2, TRBJ1-3)
CASSLDGAVGNTMYF

SEQ ID NO: 287381 - protein, 17 aa, Homo sapiens
  CDR3 for alpha chain variable domain of TCR clone 143691 (TRAV3, TRAJ6)
CAVRDGPRAGGSYIPPF

SEQ ID NO: 287382 - protein, 14 aa, Homo sapiens
  CDR3 for beta chain variable domain of TCR clone 143691 (TRBV7-2, TRBJ2-7)
YASSPKTSFYEQYF

SEQ ID NO: 287383 - protein, 15 aa, Homo sapiens
  CDR3 for alpha chain variable domain of TCR clone 143692 (TRAV12-3, TRAJ6)
CAMSAASGGSYLPTF

SEQ ID NO: 287384 - protein, 13 aa, Homo sapiens
  CDR3 for beta chain variable domain of TCR clone 143692 (TRBV20-1, TRBJ1-2)
CSASPEFNYGYTF

SEQ ID NO: 287385 - protein, 12 aa, Homo sapiens
  CDR3 for alpha chain variable domain of TCR clone 143693 (TRAV12-2, TRAJ3)
CAVWSSASKICF

SEQ ID NO: 287386 - protein, 12 aa, Homo sapiens
  CDR3 for beta chain variable domain of TCR clone 143693 (TRBV11-2, TRBJ2-1)
CASSPGNNEQFF

SEQ ID NO: 287387 - protein, 11 aa, Homo sapiens
  CDR3 for alpha chain variable domain of TCR clone 143694 (TRAV27, TRAJ20)
CAGRNDYKLSF

SEQ ID NO: 287388 - protein, 14 aa, Homo sapiens
  CDR3 for beta chain variable domain of TCR clone 143694 (TRBV6-1, TRBJ1-1)
CASTPLQMNTEAFF

SEQ ID NO: 287389 - protein, 13 aa, Homo sapiens
  CDR3 for alpha chain variable domain of TCR clone 143695 (TRAV21, TRAJ27)
CAARPGNAGKPTF

SEQ ID NO: 287390 - protein, 15 aa, Homo sapiens
  CDR3 for beta chain variable domain of TCR clone 143695 (TRBV5-1, TRBJ2-5)
CASSFKGGDQETQYF

SEQ ID NO: 287391 - protein, 14 aa, Homo sapiens
  CDR3 for alpha chain variable domain of TCR clone 143696 (TRAV2, TRAJ29)
CAVTPPSGNTPLVF

SEQ ID NO: 287392 - protein, 13 aa, Homo sapiens
  CDR3 for beta chain variable domain of TCR clone 143696 (TRBV11-2, TRBJ2-1)
CASSLGLAGGRFC

SEQ ID NO: 287393 - protein, 18 aa, Homo sapiens
  CDR3 for alpha chain variable domain of TCR clone 143697 (TRAV16, TRAJ52)
CALSGVDAGGTSYGKLQF

SEQ ID NO: 287394 - protein, 15 aa, Homo sapiens
  CDR3 for beta chain variable domain of TCR clone 143697 (TRBV11-3, TRBJ2-3)
CASSAGTVVTNTQYF

SEQ ID NO: 287395 - protein, 15 aa, Homo sapiens
  CDR3 for alpha chain variable domain of TCR clone 143698 (TRAV2, TRAJ15)
CAVEDRGQAGTALIF

SEQ ID NO: 287396 - protein, 14 aa, Homo sapiens
  CDR3 for beta chain variable domain of TCR clone 143698 (TRBV7-9, TRBJ2-3)
CASSLEQGTNTQYF

SEQ ID NO: 287397 - protein, 19 aa, Homo sapiens
  CDR3 for alpha chain variable domain of TCR clone 143699 (TRAV36/DV7, )
CAANNHIQNPDPAVYQLRD

SEQ ID NO: 287398 - protein, 14 aa, Homo sapiens
  CDR3 for beta chain variable domain of TCR clone 143699 (TRBV25-1, TRBJ1-1)
CASTHLGGNTEAFF

SEQ ID NO: 287399 - protein, 15 aa, Homo sapiens
  CDR3 for alpha chain variable domain of TCR clone 143700 (TRAV3, TRAJ9)
CAVRARNTGGFKTNI

SEQ ID NO: 287400 - protein, 12 aa, Homo sapiens
  CDR3 for beta chain variable domain of TCR clone 143700 (TRBV11-2, TRBJ2-7)
CASSLPTYEQYF

SEQ ID NO: 287401 - protein, 13 aa, Homo sapiens
  CDR3 for alpha chain variable domain of TCR clone 143701 (TRAV12-2, TRAJ12)
CAVNWDSSYKLIF

SEQ ID NO: 287402 - protein, 12 aa, Homo sapiens
  CDR3 for beta chain variable domain of TCR clone 143701 (TRBV7-9, TRBJ2-7)
CASSLEGYEQYF

SEQ ID NO: 287403 - protein, 13 aa, Homo sapiens
  CDR3 for alpha chain variable domain of TCR clone 143702 (TRAV12-1, TRAJ21)
CVVIGDNFNRFYF

SEQ ID NO: 287404 - protein, 13 aa, Homo sapiens
  CDR3 for beta chain variable domain of TCR clone 143702 (TRBV7-9, TRBJ1-2)
CASSLKQNYGYTF

SEQ ID NO: 287405 - protein, 13 aa, Homo sapiens
  CDR3 for alpha chain variable domain of TCR clone 143703 (TRAV23/DV6, TRAJ34)
CAAIENNTDKLIF

SEQ ID NO: 287406 - protein, 12 aa, Homo sapiens
  CDR3 for beta chain variable domain of TCR clone 143703 (TRBV11-2, TRBJ2-2)
CASSLPTGELFF

SEQ ID NO: 287407 - protein, 21 aa, Homo sapiens
  CDR3 for alpha chain variable domain of TCR clone 143704 (TRAV30, TRAJ43)
GLPAQLLRNLLPIIELNDMRF

SEQ ID NO: 287408 - protein, 14 aa, Homo sapiens
  CDR3 for beta chain variable domain of TCR clone 143704 (TRBV27, TRBJ2-1)
CTSRHLGGGKEQFF

SEQ ID NO: 287409 - protein, 11 aa, Homo sapiens
  CDR3 for alpha chain variable domain of TCR clone 143705 (TRAV2, TRAJ13)
CASGGYQKVTF

SEQ ID NO: 287410 - protein, 12 aa, Homo sapiens
  CDR3 for beta chain variable domain of TCR clone 143705 (TRBV19, TRBJ1-4)
CASKDWPGGLYF

SEQ ID NO: 287411 - protein, 17 aa, Homo sapiens
  CDR3 for alpha chain variable domain of TCR clone 143706 (TRAV14/DV4, TRAJ28)
CAMREVSSGAGSYQLTF

SEQ ID NO: 287412 - protein, 15 aa, Homo sapiens
  CDR3 for beta chain variable domain of TCR clone 143706 (TRBV11-2, TRBJ1-6)
CASTLRETGNSSLHF

SEQ ID NO: 287413 - protein, 11 aa, Homo sapiens
  CDR3 for alpha chain variable domain of TCR clone 143707 (TRAV6, TRAJ41)
CSLNSGYALNF

SEQ ID NO: 287414 - protein, 15 aa, Homo sapiens
  CDR3 for beta chain variable domain of TCR clone 143707 (TRBV20-1, TRBJ1-5)
CSAFKNGQRNQPQHF

SEQ ID NO: 287415 - protein, 14 aa, Homo sapiens
  CDR3 for alpha chain variable domain of TCR clone 143708 (TRAV26-1, TRAJ6)
CIVSPVGGSYIPTF

SEQ ID NO: 287416 - protein, 14 aa, Homo sapiens
  CDR3 for beta chain variable domain of TCR clone 143708 (TRBV29-1, TRBJ2-3)
CSAGAGVGADTQYF

SEQ ID NO: 287417 - protein, 13 aa, Homo sapiens
  CDR3 for alpha chain variable domain of TCR clone 143709 (TRAV2, TRAJ40)
CAVVTSGTYKYTF

SEQ ID NO: 287418 - protein, 13 aa, Homo sapiens
  CDR3 for beta chain variable domain of TCR clone 143709 (TRBV7-7, TRBJ2-2)
CASSLTSAGELFF

SEQ ID NO: 287419 - protein, 14 aa, Homo sapiens
  CDR3 for alpha chain variable domain of TCR clone 143710 (TRAV17, TRAJ15)
CATAPNQAVTALIF

SEQ ID NO: 287420 - protein, 14 aa, Homo sapiens
  CDR3 for beta chain variable domain of TCR clone 143710 (TRBV19, TRBJ2-7)
CASSMGQGAIEQYF

SEQ ID NO: 287421 - protein, 14 aa, Homo sapiens
  CDR3 for alpha chain variable domain of TCR clone 143711 (TRAV35, TRAJ22)
CAGLRPGSARQLTL

SEQ ID NO: 287422 - protein, 15 aa, Homo sapiens
  CDR3 for beta chain variable domain of TCR clone 143711 (TRBV12-4, TRBJ2-5)
CASSPPTGLQETQCF

SEQ ID NO: 287423 - protein, 15 aa, Homo sapiens
  CDR3 for alpha chain variable domain of TCR clone 143712 (TRAV38-1, TRAJ30)
CAFMTSYGGDDKIIV

SEQ ID NO: 287424 - protein, 16 aa, Homo sapiens
  CDR3 for beta chain variable domain of TCR clone 143712 (TRBV7-9, TRBJ2-7)
CASSFGLAGPSYEQYF

SEQ ID NO: 287425 - protein, 23 aa, Homo sapiens
  CDR3 for alpha chain variable domain of TCR clone 143713 (TRAV8-4, )
CARLNAGNKHIQNPDPAVYQLRD

SEQ ID NO: 287426 - protein, 14 aa, Homo sapiens
  CDR3 for beta chain variable domain of TCR clone 143713 (TRBV7-8, TRBJ2-3)
CASSLEAGTDTQYF

SEQ ID NO: 287427 - protein, 12 aa, Homo sapiens
  CDR3 for alpha chain variable domain of TCR clone 143714 (TRAV35, TRAJ49)
CAGWNTGNQFYF

SEQ ID NO: 287428 - protein, 12 aa, Homo sapiens
  CDR3 for beta chain variable domain of TCR clone 143714 (TRBV19, TRBJ2-3)
CATTSSTDTQYF

SEQ ID NO: 287429 - protein, 14 aa, Homo sapiens
  CDR3 for alpha chain variable domain of TCR clone 143715 (TRAV12-2, TRAJ24)
CAVTPADSWGKLQF

SEQ ID NO: 287430 - protein, 12 aa, Homo sapiens
  CDR3 for beta chain variable domain of TCR clone 143715 (TRBV29-1, TRBJ2-3)
CSVTGGADTQYF

SEQ ID NO: 287431 - protein, 14 aa, Homo sapiens
  CDR3 for alpha chain variable domain of TCR clone 143716 (TRAV27, TRAJ37)
CAGERSSNTGKLIF

SEQ ID NO: 287432 - protein, 17 aa, Homo sapiens
  CDR3 for beta chain variable domain of TCR clone 143716 (TRBV11-3, TRBJ1-6)
CASSLDWGPIHPSTLGT

SEQ ID NO: 287433 - protein, 13 aa, Homo sapiens
  CDR3 for alpha chain variable domain of TCR clone 143717 (TRAV13-1, TRAJ39)
CSKYSNGGNMLTF

SEQ ID NO: 287434 - protein, 16 aa, Homo sapiens
  CDR3 for beta chain variable domain of TCR clone 143717 (TRBV7-2, TRBJ2-3)
CASSLVALYSTDTQYF

SEQ ID NO: 287435 - protein, 14 aa, Homo sapiens
  CDR3 for alpha chain variable domain of TCR clone 143718 (TRAV3, TRAJ36)
CAVRDGTGANNLFF

SEQ ID NO: 287436 - protein, 19 aa, Homo sapiens
  CDR3 for beta chain variable domain of TCR clone 143718 (TRBV19, TRBJ2-6)
CASTPTWGRAASGANVMTF

SEQ ID NO: 287437 - protein, 15 aa, Homo sapiens
  CDR3 for alpha chain variable domain of TCR clone 143719 (TRAV23/DV6, TRAJ45)
CAASYSGGGADVLTF

SEQ ID NO: 287438 - protein, 15 aa, Homo sapiens
  CDR3 for beta chain variable domain of TCR clone 143719 (TRBV2, TRBJ2-1)
CASSELAGSYNEQFF

SEQ ID NO: 287439 - protein, 15 aa, Homo sapiens
  CDR3 for alpha chain variable domain of TCR clone 143720 (TRAV26-1, TRAJ17)
CIVRVGKAAGNKLTF

SEQ ID NO: 287440 - protein, 15 aa, Homo sapiens
  CDR3 for beta chain variable domain of TCR clone 143720 (TRBV7-9, TRBJ1-6)
CASSSPGRGNSPLHF

SEQ ID NO: 287441 - protein, 14 aa, Homo sapiens
  CDR3 for alpha chain variable domain of TCR clone 143721 (TRAV8-4, TRAJ39)
CAVSLNNAGNMLTF

SEQ ID NO: 287442 - protein, 16 aa, Homo sapiens
  CDR3 for beta chain variable domain of TCR clone 143721 (TRBV12-4, TRBJ1-5)
CASSRPVGGSNQPQHF

SEQ ID NO: 287443 - protein, 14 aa, Homo sapiens
  CDR3 for alpha chain variable domain of TCR clone 143722 (TRAV12-1, TRAJ17)
GVVNYKAAGNKLTF

SEQ ID NO: 287444 - protein, 17 aa, Homo sapiens
  CDR3 for beta chain variable domain of TCR clone 143722 (TRBV11-2, TRBJ2-1)
CASSLYPPGVEYNEQFF

SEQ ID NO: 287445 - protein, 13 aa, Homo sapiens
  CDR3 for alpha chain variable domain of TCR clone 143723 (TRAV3, TRAJ3)
CAVADSSASKIIF

SEQ ID NO: 287446 - protein, 16 aa, Homo sapiens
  CDR3 for beta chain variable domain of TCR clone 143723 (TRBV12-4, TRBJ1-5)
CASSRPVGGSNQPQHF

SEQ ID NO: 287447 - protein, 13 aa, Homo sapiens
  CDR3 for alpha chain variable domain of TCR clone 143724 (TRAV21, TRAJ3)
CAVTGSSASKIIF

SEQ ID NO: 287448 - protein, 14 aa, Homo sapiens
  CDR3 for beta chain variable domain of TCR clone 143724 (TRBV18, TRBJ2-5)
CASSPGVSQETQYF

SEQ ID NO: 287449 - protein, 17 aa, Homo sapiens
  CDR3 for alpha chain variable domain of TCR clone 143725 (TRAV16, TRAJ53)
CALPAMNSGGSNYKLTF

SEQ ID NO: 287450 - protein, 14 aa, Homo sapiens
  CDR3 for beta chain variable domain of TCR clone 143725 (TRBV12-4, TRBJ1-6)
CASRPDGYNSPLHF

SEQ ID NO: 287451 - protein, 13 aa, Homo sapiens
  CDR3 for alpha chain variable domain of TCR clone 143726 (TRAV26-1, TRAJ31)
CNVRVDGNARLMF

SEQ ID NO: 287452 - protein, 17 aa, Homo sapiens
  CDR3 for beta chain variable domain of TCR clone 143726 (TRBV11-2, TRBJ2-1)
CASSLYPPGVEYNEQFF

SEQ ID NO: 287453 - protein, 12 aa, Homo sapiens
  CDR3 for alpha chain variable domain of TCR clone 143727 (TRAV23/DV6, TRAJ17)
CAQGSCRQQANF

SEQ ID NO: 287454 - protein, 14 aa, Homo sapiens
  CDR3 for beta chain variable domain of TCR clone 143727 (TRBV7-2, TRBJ1-2)
CASSQTGSTYGYTF

SEQ ID NO: 287455 - protein, 10 aa, Homo sapiens
  CDR3 for alpha chain variable domain of TCR clone 143728 (TRAV8-3, TRAJ43)
CAVALADMRF

SEQ ID NO: 287456 - protein, 15 aa, Homo sapiens
  CDR3 for beta chain variable domain of TCR clone 143728 (TRBV6-5, TRBJ2-1)
CASSYDAGAGNEQFF

SEQ ID NO: 287457 - protein, 14 aa, Homo sapiens
  CDR3 for alpha chain variable domain of TCR clone 143729 (TRAV1-2, TRAJ16)
CAVNRFSDGRKLLF

SEQ ID NO: 287458 - protein, 14 aa, Homo sapiens
  CDR3 for beta chain variable domain of TCR clone 143729 (TRBV11-2, TRBJ2-3)
CASSRLARTDTQYF

SEQ ID NO: 287459 - protein, 14 aa, Homo sapiens
  CDR3 for alpha chain variable domain of TCR clone 143730 (TRAV23/DV6, TRAJ4)
CAANLSGGYNKLIF

SEQ ID NO: 287460 - protein, 11 aa, Homo sapiens
  CDR3 for beta chain variable domain of TCR clone 143730 (TRBV7-9, TRBJ2-3)
CARSPTATQYF

SEQ ID NO: 287461 - protein, 12 aa, Homo sapiens
  CDR3 for alpha chain variable domain of TCR clone 143731 (TRAV29/DV5, TRAJ49)
CAALNTGNQFYF

SEQ ID NO: 287462 - protein, 13 aa, Homo sapiens
  CDR3 for beta chain variable domain of TCR clone 143731 (TRBV6-5, TRBJ2-7)
CASRGRGGYEQYF

SEQ ID NO: 287463 - protein, 10 aa, Homo sapiens
  CDR3 for alpha chain variable domain of TCR clone 143732 (TRAV13-1, TRAJ41)
CAASGPRRTQ

SEQ ID NO: 287464 - protein, 16 aa, Homo sapiens
  CDR3 for beta chain variable domain of TCR clone 143732 (TRBV18, TRBJ2-3)
CASSPTAGGPRKYAVF

SEQ ID NO: 287465 - protein, 14 aa, Homo sapiens
  CDR3 for alpha chain variable domain of TCR clone 143733 (TRAV23/DV6, TRAJ24)
CAASLSDSWGKLQV

SEQ ID NO: 287466 - protein, 15 aa, Homo sapiens
  CDR3 for beta chain variable domain of TCR clone 143733 (TRBV9, TRBJ1-6)
CAGSVAGTGDSPLHF

SEQ ID NO: 287467 - protein, 15 aa, Homo sapiens
  CDR3 for alpha chain variable domain of TCR clone 143734 (TRAV27, TRAJ38)
CAARRNAGNNRKLIW

SEQ ID NO: 287468 - protein, 14 aa, Homo sapiens
  CDR3 for beta chain variable domain of TCR clone 143734 (TRBV28, TRBJ1-1)
CASSSEQGYTEAFF

SEQ ID NO: 287469 - protein, 13 aa, Homo sapiens
  CDR3 for alpha chain variable domain of TCR clone 143735 (TRAV17, TRAJ39)
CATVSNAGNMLTF

SEQ ID NO: 287470 - protein, 15 aa, Homo sapiens
  CDR3 for beta chain variable domain of TCR clone 143735 (TRBV7-9, TRBJ2-7)
CASSLPMGQANEQYF

SEQ ID NO: 287471 - protein, 14 aa, Homo sapiens
  CDR3 for alpha chain variable domain of TCR clone 143736 (TRAV27, TRAJ17)
CRSTIRAAGNKLTF

SEQ ID NO: 287472 - protein, 16 aa, Homo sapiens
  CDR3 for beta chain variable domain of TCR clone 143736 (TRBV5-7, TRBJ2-5)
WASTLAPAGGRETQYF

SEQ ID NO: 287473 - protein, 12 aa, Homo sapiens
  CDR3 for alpha chain variable domain of TCR clone 143737 (TRAV2, TRAJ31)
CAVEDNNARLML

SEQ ID NO: 287474 - protein, 14 aa, Homo sapiens
  CDR3 for beta chain variable domain of TCR clone 143737 (TRBV19, TRBJ2-5)
CASSMTGQQETQYF

SEQ ID NO: 287475 - protein, 11 aa, Homo sapiens
  CDR3 for alpha chain variable domain of TCR clone 143738 (TRAV1-2, TRAJ20)
CAVANDYELSF

SEQ ID NO: 287476 - protein, 17 aa, Homo sapiens
  CDR3 for beta chain variable domain of TCR clone 143738 (TRBV20-1, TRBJ2-1)
CSASSSGLAGSYNEQFF

SEQ ID NO: 287477 - protein, 18 aa, Homo sapiens
  CDR3 for alpha chain variable domain of TCR clone 143739 (TRAV13-1, TRAJ52)
CAASKRSAGCTSDGKLTF

SEQ ID NO: 287478 - protein, 12 aa, Homo sapiens
  CDR3 for beta chain variable domain of TCR clone 143739 (TRBV12-4, TRBJ2-7)
CASSLGGYEQYF

SEQ ID NO: 287479 - protein, 19 aa, Homo sapiens
  CDR3 for alpha chain variable domain of TCR clone 143740 (TRAV26-1, TRAJ52)
CIVRAHRNAGGTSYGKLTF

SEQ ID NO: 287480 - protein, 15 aa, Homo sapiens
  CDR3 for beta chain variable domain of TCR clone 143740 (TRBV29-1, TRBJ2-1)
CSGRDRKSSYNEQVF

SEQ ID NO: 287481 - protein, 11 aa, Homo sapiens
  CDR3 for alpha chain variable domain of TCR clone 143741 (TRAV12-2, TRAJ31)
CAILNNARLMF

SEQ ID NO: 287482 - protein, 13 aa, Homo sapiens
  CDR3 for beta chain variable domain of TCR clone 143741 (TRBV12-4, TRBJ1-2)
CASSLRQGKGYTF

SEQ ID NO: 287483 - protein, 15 aa, Homo sapiens
  CDR3 for alpha chain variable domain of TCR clone 143742 (TRAV26-1, TRAJ29)
CIVRVEGSGNTPLVF

SEQ ID NO: 287484 - protein, 13 aa, Homo sapiens
  CDR3 for beta chain variable domain of TCR clone 143742 (TRBV2, TRBJ1-4)
CASSERAGEKLFF

SEQ ID NO: 287485 - protein, 16 aa, Homo sapiens
  CDR3 for alpha chain variable domain of TCR clone 143743 (TRAV30, TRAJ57)
CGTGWAPQGGSVKLVF

SEQ ID NO: 287486 - protein, 14 aa, Homo sapiens
  CDR3 for beta chain variable domain of TCR clone 143743 (TRBV18, TRBJ1-1)
CASSPGFQGVEAFF

SEQ ID NO: 287487 - protein, 13 aa, Homo sapiens
  CDR3 for alpha chain variable domain of TCR clone 143744 (TRAV12-2, TRAJ22)
CALYSGSARQLTF

SEQ ID NO: 287488 - protein, 12 aa, Homo sapiens
  CDR3 for beta chain variable domain of TCR clone 143744 (TRBV20-1, TRBJ2-7)
CSAGLKMGEQYF

SEQ ID NO: 287489 - protein, 13 aa, Homo sapiens
  CDR3 for alpha chain variable domain of TCR clone 143745 (TRAV23/DV6, TRAJ12)
CAPRVDSSHKLIF

SEQ ID NO: 287490 - protein, 12 aa, Homo sapiens
  CDR3 for beta chain variable domain of TCR clone 143745 (TRBV7-6, TRBJ2-5)
CASSLSQETQYF

SEQ ID NO: 287491 - protein, 14 aa, Homo sapiens
  CDR3 for alpha chain variable domain of TCR clone 143746 (TRAV12-3, TRAJ10)
SHLPLTGGGKKLTF

SEQ ID NO: 287492 - protein, 16 aa, Homo sapiens
  CDR3 for beta chain variable domain of TCR clone 143746 (TRBV20-1, TRBJ2-6)
CSASSQGYDGANVLTF

SEQ ID NO: 287493 - protein, 12 aa, Homo sapiens
  CDR3 for alpha chain variable domain of TCR clone 143747 (TRAV3, TRAJ20)
CAVRDPDYKLSF

SEQ ID NO: 287494 - protein, 15 aa, Homo sapiens
  CDR3 for beta chain variable domain of TCR clone 143747 (TRBV6-5, TRBJ2-5)
CARSPLAGGIETQYF

SEQ ID NO: 287495 - protein, 15 aa, Homo sapiens
  CDR3 for alpha chain variable domain of TCR clone 143748 (TRAV2, TRAJ37)
CAVEDGSSNTGKLIF

SEQ ID NO: 287496 - protein, 15 aa, Homo sapiens
  CDR3 for beta chain variable domain of TCR clone 143748 (TRBV9, TRBJ1-6)
CASSVAGTGDSPLHF

SEQ ID NO: 287497 - protein, 12 aa, Homo sapiens
  CDR3 for alpha chain variable domain of TCR clone 143749 (TRAV13-2, TRAJ49)
CAEISTGNQFYF

SEQ ID NO: 287498 - protein, 14 aa, Homo sapiens
  CDR3 for beta chain variable domain of TCR clone 143749 (TRBV7-2, TRBJ2-2)
CASRGQGAAGELFF

SEQ ID NO: 287499 - protein, 15 aa, Homo sapiens
  CDR3 for alpha chain variable domain of TCR clone 143750 (TRAV12-1, TRAJ42)
CVVTRDGGSQGNLIF

SEQ ID NO: 287500 - protein, 13 aa, Homo sapiens
  CDR3 for beta chain variable domain of TCR clone 143750 (TRBV7-9, TRBJ2-5)
CASLSPGQETQYF

SEQ ID NO: 287501 - protein, 13 aa, Homo sapiens
  CDR3 for alpha chain variable domain of TCR clone 143751 (TRAV36/DV7, TRAJ54)
CAVGIQGAQKLVF

SEQ ID NO: 287502 - protein, 14 aa, Homo sapiens
  CDR3 for beta chain variable domain of TCR clone 143751 (TRBV19, TRBJ2-7)
CASNFRDTFTGMYF

SEQ ID NO: 287503 - protein, 16 aa, Homo sapiens
  CDR3 for alpha chain variable domain of TCR clone 143752 (TRAV16, TRAJ4)
CALSRMFSGGYNKLIF

SEQ ID NO: 287504 - protein, 14 aa, Homo sapiens
  CDR3 for beta chain variable domain of TCR clone 143752 (TRBV13, TRBJ2-5)
CASSLGPRGETQYF

SEQ ID NO: 287505 - protein, 14 aa, Homo sapiens
  CDR3 for alpha chain variable domain of TCR clone 143753 (TRAV17, TRAJ32)
CATDPGGATNKLIF

SEQ ID NO: 287506 - protein, 16 aa, Homo sapiens
  CDR3 for beta chain variable domain of TCR clone 143753 (TRBV7-3, TRBJ2-2)
CASSLKRGTLSGELFF

SEQ ID NO: 287507 - protein, 12 aa, Homo sapiens
  CDR3 for alpha chain variable domain of TCR clone 143754 (TRAV12-3, TRAJ17)
CAMTLTSNKLTF

SEQ ID NO: 287508 - protein, 15 aa, Homo sapiens
  CDR3 for beta chain variable domain of TCR clone 143754 (TRBV20-1, TRBJ2-7)
CSARDRVAGMDEQYF

SEQ ID NO: 287509 - protein, 16 aa, Homo sapiens
  CDR3 for alpha chain variable domain of TCR clone 143755 (TRAV3, TRAJ37)
CAVRPHGSGNTGKPIF

SEQ ID NO: 287510 - protein, 14 aa, Homo sapiens
  CDR3 for beta chain variable domain of TCR clone 143755 (TRBV20-1, TRBJ2-1)
CSARGGSSYNEQFF

SEQ ID NO: 287511 - protein, 11 aa, Homo sapiens
  CDR3 for alpha chain variable domain of TCR clone 143756 (TRAV12-2, TRAJ39)
CAVNNMLTFGG

SEQ ID NO: 287512 - protein, 16 aa, Homo sapiens
  CDR3 for beta chain variable domain of TCR clone 143756 (TRBV5-3, TRBJ2-2)
CARSFRTGTNTGELFF

SEQ ID NO: 287513 - protein, 13 aa, Homo sapiens
  CDR3 for alpha chain variable domain of TCR clone 143757 (TRAV2, TRAJ40)
CAVVTSGTYKCIF

SEQ ID NO: 287514 - protein, 14 aa, Homo sapiens
  CDR3 for beta chain variable domain of TCR clone 143757 (TRBV28, TRBJ2-1)
CASSYYTAYNEQFF

SEQ ID NO: 287515 - protein, 15 aa, Homo sapiens
  CDR3 for alpha chain variable domain of TCR clone 143758 (TRAV3, TRAJ13)
CAVRVYSGGYQKVTF

SEQ ID NO: 287516 - protein, 15 aa, Homo sapiens
  CDR3 for beta chain variable domain of TCR clone 143758 (TRBV5-7, TRBJ1-2)
CGSSLGVAANYGYTF

SEQ ID NO: 287517 - protein, 12 aa, Homo sapiens
  CDR3 for alpha chain variable domain of TCR clone 143759 (TRAV25, TRAJ49)
CAGLLTGNQFYF

SEQ ID NO: 287518 - protein, 14 aa, Homo sapiens
  CDR3 for beta chain variable domain of TCR clone 143759 (TRBV4-3, TRBJ1-5)
CASSQGGQGWPQHF

SEQ ID NO: 287519 - protein, 12 aa, Homo sapiens
  CDR3 for alpha chain variable domain of TCR clone 143760 (TRAV8-4, TRAJ33)
CAVSEGNYQLIW

SEQ ID NO: 287520 - protein, 15 aa, Homo sapiens
  CDR3 for beta chain variable domain of TCR clone 143760 (TRBV20-1, TRBJ2-7)
CSARDRVSGMDEQYF

SEQ ID NO: 287521 - protein, 14 aa, Homo sapiens
  CDR3 for alpha chain variable domain of TCR clone 143761 (TRAV12-3, TRAJ15)
CAMIPPQEGTALIF

SEQ ID NO: 287522 - protein, 14 aa, Homo sapiens
  CDR3 for beta chain variable domain of TCR clone 143761 (TRBV20-1, TRBJ2-2)
CSARRRLATGELFF

SEQ ID NO: 287523 - protein, 13 aa, Homo sapiens
  CDR3 for alpha chain variable domain of TCR clone 143762 (TRAV12-2, TRAJ9)
CAVLETGGFKTLF

SEQ ID NO: 287524 - protein, 15 aa, Homo sapiens
  CDR3 for beta chain variable domain of TCR clone 143762 (TRBV6-3, TRBJ2-7)
CASSRTGVNRYEQYF

SEQ ID NO: 287525 - protein, 13 aa, Homo sapiens
  CDR3 for alpha chain variable domain of TCR clone 143763 (TRAV8-3, TRAJ4)
CCGCSCGYNKLIF

SEQ ID NO: 287526 - protein, 14 aa, Homo sapiens
  CDR3 for beta chain variable domain of TCR clone 143763 (TRBV12-5, TRBJ2-5)
CASGSRTHQETQYF

SEQ ID NO: 287527 - protein, 17 aa, Homo sapiens
  CDR3 for alpha chain variable domain of TCR clone 143764 (TRAV4, TRAJ42)
CLVGVLNYGGSQGNLIF

SEQ ID NO: 287528 - protein, 12 aa, Homo sapiens
  CDR3 for beta chain variable domain of TCR clone 143764 (TRBV20-1, TRBJ2-1)
CSAQYTYNEHFF

SEQ ID NO: 287529 - protein, 13 aa, Homo sapiens
  CDR3 for alpha chain variable domain of TCR clone 143765 (TRAV30, TRAJ24)
CGTVTDSWGKLQF

SEQ ID NO: 287530 - protein, 16 aa, Homo sapiens
  CDR3 for beta chain variable domain of TCR clone 143765 (TRBV12-4, TRBJ2-5)
CASSFFVRGRQETQYF

SEQ ID NO: 287531 - protein, 22 aa, Homo sapiens
  CDR3 for alpha chain variable domain of TCR clone 143766 (TRAV25, TRAJ35)
CARRMEGFGNVLHCGSGPQVIF

SEQ ID NO: 287532 - protein, 13 aa, Homo sapiens
  CDR3 for beta chain variable domain of TCR clone 143766 (TRBV7-2, TRBJ1-4)
CASSLAGLEKLFF

SEQ ID NO: 287533 - protein, 13 aa, Homo sapiens
  CDR3 for alpha chain variable domain of TCR clone 143767 (TRAV38-2/DV8, TRAJ34)
CAYRTWNTDKLIF

SEQ ID NO: 287534 - protein, 15 aa, Homo sapiens
  CDR3 for beta chain variable domain of TCR clone 143767 (TRBV27, TRBJ2-1)
CASSNGGGSSNEQFF

SEQ ID NO: 287535 - protein, 16 aa, Homo sapiens
  CDR3 for alpha chain variable domain of TCR clone 143768 (TRAV3, TRAJ10)
CAARDMRAGGGNKLTF

SEQ ID NO: 287536 - protein, 15 aa, Homo sapiens
  CDR3 for beta chain variable domain of TCR clone 143768 (TRBV6-3, TRBJ2-7)
CASSSPGTVFYEQYF

SEQ ID NO: 287537 - protein, 14 aa, Homo sapiens
  CDR3 for alpha chain variable domain of TCR clone 143769 (TRAV13-1, TRAJ44)
CAAKATGTASKLTF

SEQ ID NO: 287538 - protein, 15 aa, Homo sapiens
  CDR3 for beta chain variable domain of TCR clone 143769 (TRBV29-1, TRBJ2-1)
CSVGRHALFYNEQFF

SEQ ID NO: 287539 - protein, 13 aa, Homo sapiens
  CDR3 for alpha chain variable domain of TCR clone 143770 (TRAV8-3, TRAJ36)
RAVGATGANNLFF

SEQ ID NO: 287540 - protein, 15 aa, Homo sapiens
  CDR3 for beta chain variable domain of TCR clone 143770 (TRBV5-1, TRBJ2-1)
CASSPPRAPYNEQFF

SEQ ID NO: 287541 - protein, 13 aa, Homo sapiens
  CDR3 for alpha chain variable domain of TCR clone 143771 (TRAV3, TRAJ20)
CAVRDTPRYKLSF

SEQ ID NO: 287542 - protein, 16 aa, Homo sapiens
  CDR3 for beta chain variable domain of TCR clone 143771 (TRBV20-1, TRBJ2-7)
RSARAPGLALSYEQYF

SEQ ID NO: 287543 - protein, 13 aa, Homo sapiens
  CDR3 for alpha chain variable domain of TCR clone 143772 (TRAV1-2, TRAJ20)
CAVRDGNDSKLSF

SEQ ID NO: 287544 - protein, 14 aa, Homo sapiens
  CDR3 for beta chain variable domain of TCR clone 143772 (TRBV7-2, TRBJ2-3)
WASSLGGGERYAVF

SEQ ID NO: 287545 - protein, 12 aa, Homo sapiens
  CDR3 for alpha chain variable domain of TCR clone 143773 (TRAV12-3, TRAJ17)
CSMTLTGNKLTF

SEQ ID NO: 287546 - protein, 12 aa, Homo sapiens
  CDR3 for beta chain variable domain of TCR clone 143773 (TRBV6-3, TRBJ2-7)
CASSLTPYEQYF

SEQ ID NO: 287547 - protein, 14 aa, Homo sapiens
  CDR3 for alpha chain variable domain of TCR clone 143774 (TRAV8-4, TRAJ17)
CAVSDQAAGNKLTL

SEQ ID NO: 287548 - protein, 15 aa, Homo sapiens
  CDR3 for beta chain variable domain of TCR clone 143774 (TRBV7-2, TRBJ1-2)
CASSLAPDRGLGYTF

SEQ ID NO: 287549 - protein, 19 aa, Homo sapiens
  CDR3 for alpha chain variable domain of TCR clone 143775 (TRAV40, )
CLPIPDIQNPDPAVYQLRD

SEQ ID NO: 287550 - protein, 15 aa, Homo sapiens
  CDR3 for beta chain variable domain of TCR clone 143775 (TRBV2, TRBJ1-2)
CASSEIGGANYGYTF

SEQ ID NO: 287551 - protein, 14 aa, Homo sapiens
  CDR3 for alpha chain variable domain of TCR clone 143776 (TRAV13-2, TRAJ45)
CAEMSGGGADGLTF

SEQ ID NO: 287552 - protein, 14 aa, Homo sapiens
  CDR3 for beta chain variable domain of TCR clone 143776 (TRBV2, TRBJ1-4)
WASNQGGLSLGLVF

SEQ ID NO: 287553 - protein, 13 aa, Homo sapiens
  CDR3 for alpha chain variable domain of TCR clone 143777 (TRAV8-6, TRAJ34)
CAVSDQGTDKLIF

SEQ ID NO: 287554 - protein, 13 aa, Homo sapiens
  CDR3 for beta chain variable domain of TCR clone 143777 (TRBV12-4, TRBJ1-1)
CQPWTGHDTEAFF

SEQ ID NO: 287555 - protein, 13 aa, Homo sapiens
  CDR3 for alpha chain variable domain of TCR clone 143778 (TRAV2, TRAJ24)
CAVPTDSWGKLQF

SEQ ID NO: 287556 - protein, 13 aa, Homo sapiens
  CDR3 for beta chain variable domain of TCR clone 143778 (TRBV7-2, TRBJ1-1)
CASNLKGAKLAFF

SEQ ID NO: 287557 - protein, 16 aa, Homo sapiens
  CDR3 for alpha chain variable domain of TCR clone 143779 (TRAV38-1, TRAJ56)
CAFMKRQTGANSKLTF

SEQ ID NO: 287558 - protein, 16 aa, Homo sapiens
  CDR3 for beta chain variable domain of TCR clone 143779 (TRBV7-3, TRBJ1-1)
CASSRLPGQGNTEAFF

SEQ ID NO: 287559 - protein, 12 aa, Homo sapiens
  CDR3 for alpha chain variable domain of TCR clone 143780 (TRAV3, TRAJ43)
CAVSNPNNDMRF

SEQ ID NO: 287560 - protein, 14 aa, Homo sapiens
  CDR3 for beta chain variable domain of TCR clone 143780 (TRBV5-1, TRBJ2-3)
CASSLFGPTDTQYF

SEQ ID NO: 287561 - protein, 15 aa, Homo sapiens
  CDR3 for alpha chain variable domain of TCR clone 143781 (TRAV26-1, TRAJ29)
CIVRVEGSGNAPLAF

SEQ ID NO: 287562 - protein, 15 aa, Homo sapiens
  CDR3 for beta chain variable domain of TCR clone 143781 (TRBV7-9, TRBJ1-5)
CASSQGHQPNQPQHF

SEQ ID NO: 287563 - protein, 12 aa, Homo sapiens
  CDR3 for alpha chain variable domain of TCR clone 143782 (TRAV26-2, TRAJ23)
CILRGQGGKLIF

SEQ ID NO: 287564 - protein, 14 aa, Homo sapiens
  CDR3 for beta chain variable domain of TCR clone 143782 (TRBV20-1, TRBJ1-5)
CSARGRGSNQPQHF

SEQ ID NO: 287565 - protein, 11 aa, Homo sapiens
  CDR3 for alpha chain variable domain of TCR clone 143783 (TRAV35, TRAJ30)
CAGPGDDKIIF

SEQ ID NO: 287566 - protein, 16 aa, Homo sapiens
  CDR3 for beta chain variable domain of TCR clone 143783 (TRBV7-6, TRBJ1-6)
CASSQAGGGSPLTLGM

SEQ ID NO: 287567 - protein, 11 aa, Homo sapiens
  CDR3 for alpha chain variable domain of TCR clone 143784 (TRAV3, TRAJ13)
CAVTSYQKVTF

SEQ ID NO: 287568 - protein, 15 aa, Homo sapiens
  CDR3 for beta chain variable domain of TCR clone 143784 (TRBV7-9, TRBJ2-7)
CTSSSSGLAVYEQYF

SEQ ID NO: 287569 - protein, 19 aa, Homo sapiens
  CDR3 for alpha chain variable domain of TCR clone 143785 (TRAV23/DV6, TRAJ9)
CSKHRLKGAGHTGGFKTIF

SEQ ID NO: 287570 - protein, 15 aa, Homo sapiens
  CDR3 for beta chain variable domain of TCR clone 143785 (TRBV6-3, TRBJ2-1)
CARSYASDSYNEQFF

SEQ ID NO: 287571 - protein, 17 aa, Homo sapiens
  CDR3 for alpha chain variable domain of TCR clone 143786 (TRAV3, TRAJ6)
CAVRDGPRAGGSYIPTF

SEQ ID NO: 287572 - protein, 14 aa, Homo sapiens
  CDR3 for beta chain variable domain of TCR clone 143786 (TRBV11-3, TRBJ2-1)
CASSATTSGSIQFF

SEQ ID NO: 287573 - protein, 17 aa, Homo sapiens
  CDR3 for alpha chain variable domain of TCR clone 143787 (TRAV2, TRAJ22)
ILQVREADAAEQRQLTF

SEQ ID NO: 287574 - protein, 12 aa, Homo sapiens
  CDR3 for beta chain variable domain of TCR clone 143787 (TRBV11-2, TRBJ2-2)
CASSLGGGELFF

SEQ ID NO: 287575 - protein, 13 aa, Homo sapiens
  CDR3 for alpha chain variable domain of TCR clone 143788 (TRAV20, TRAJ40)
CAVPFSGTYKYIC

SEQ ID NO: 287576 - protein, 13 aa, Homo sapiens
  CDR3 for beta chain variable domain of TCR clone 143788 (TRBV15, TRBJ2-5)
CATSQIGEETQYF

SEQ ID NO: 287577 - protein, 12 aa, Homo sapiens
  CDR3 for alpha chain variable domain of TCR clone 143789 (TRAV13-1, TRAJ21)
CAAKEGFNKFYF

SEQ ID NO: 287578 - protein, 13 aa, Homo sapiens
  CDR3 for beta chain variable domain of TCR clone 143789 (TRBV7-8, TRBJ2-7)
CASSPGYGGEQYF

SEQ ID NO: 287579 - protein, 18 aa, Homo sapiens
  CDR3 for alpha chain variable domain of TCR clone 143790 (TRAV21, TRAJ52)
CAVRPSHAGGTSYGKLTF

SEQ ID NO: 287580 - protein, 13 aa, Homo sapiens
  CDR3 for beta chain variable domain of TCR clone 143790 (TRBV7-2, TRBJ2-5)
CASSYWTGETQYF

SEQ ID NO: 287581 - protein, 14 aa, Homo sapiens
  CDR3 for alpha chain variable domain of TCR clone 143791 (TRAV1-2, TRAJ8)
CAERGDTGFQKLVF

SEQ ID NO: 287582 - protein, 15 aa, Homo sapiens
  CDR3 for beta chain variable domain of TCR clone 143791 (TRBV6-3, TRBJ2-7)
CASSSPGTVFYEQYF

SEQ ID NO: 287583 - protein, 16 aa, Homo sapiens
  CDR3 for alpha chain variable domain of TCR clone 143792 (TRAV8-3, TRAJ52)
CAGQPAGGTSYGKLTF

SEQ ID NO: 287584 - protein, 15 aa, Homo sapiens
  CDR3 for beta chain variable domain of TCR clone 143792 (TRBV11-2, TRBJ2-7)
CASSLAGGVATEQYF

SEQ ID NO: 287585 - protein, 15 aa, Homo sapiens
  CDR3 for alpha chain variable domain of TCR clone 143793 (TRAV21, TRAJ53)
CATLNSGGINYKLTF

SEQ ID NO: 287586 - protein, 13 aa, Homo sapiens
  CDR3 for beta chain variable domain of TCR clone 143793 (TRBV4-1, TRBJ2-2)
CASSQENTGELFF

SEQ ID NO: 287587 - protein, 19 aa, Homo sapiens
  CDR3 for alpha chain variable domain of TCR clone 143794 (TRAV2, TRAJ20)
ILQLREADAAVYRYCKLSF

SEQ ID NO: 287588 - protein, 12 aa, Homo sapiens
  CDR3 for beta chain variable domain of TCR clone 143794 (TRBV11-2, TRBJ2-2)
CASSLGGGELFF

SEQ ID NO: 287589 - protein, 12 aa, Homo sapiens
  CDR3 for alpha chain variable domain of TCR clone 143795 (TRAV30, TRAJ43)
CGTEERGNDMRF

SEQ ID NO: 287590 - protein, 13 aa, Homo sapiens
  CDR3 for beta chain variable domain of TCR clone 143795 (TRBV7-7, TRBJ1-1)
CASSLGANTEAFF

SEQ ID NO: 287591 - protein, 12 aa, Homo sapiens
  CDR3 for alpha chain variable domain of TCR clone 143796 (TRAV38-1, TRAJ47)
CAFETYGNKLVF

SEQ ID NO: 287592 - protein, 15 aa, Homo sapiens
  CDR3 for beta chain variable domain of TCR clone 143796 (TRBV6-3, TRBJ2-7)
CASSSPGTVFYEQYF

SEQ ID NO: 287593 - protein, 19 aa, Homo sapiens
  CDR3 for alpha chain variable domain of TCR clone 143797 (TRAV26-1, TRAJ52)
CIVRAHRNAGGTSYGKLTF

SEQ ID NO: 287594 - protein, 17 aa, Homo sapiens
  CDR3 for beta chain variable domain of TCR clone 143797 (TRBV28, TRBJ2-5)
CASSTPEGDALQETQYF

SEQ ID NO: 287595 - protein, 12 aa, Homo sapiens
  CDR3 for alpha chain variable domain of TCR clone 143798 (TRAV13-1, TRAJ27)
CAAHTNAGKSTF

SEQ ID NO: 287596 - protein, 16 aa, Homo sapiens
  CDR3 for beta chain variable domain of TCR clone 143798 (TRBV12-4, TRBJ1-5)
CASRQPVEGSNQPQHF

SEQ ID NO: 287597 - protein, 14 aa, Homo sapiens
  CDR3 for alpha chain variable domain of TCR clone 143799 (TRAV13-1, TRAJ3)
CAASKSTSASKIIF

SEQ ID NO: 287598 - protein, 13 aa, Homo sapiens
  CDR3 for beta chain variable domain of TCR clone 143799 (TRBV25-1, TRBJ2-5)
CASSESGRETQYF

SEQ ID NO: 287599 - protein, 15 aa, Homo sapiens
  CDR3 for alpha chain variable domain of TCR clone 143800 (TRAV8-3, TRAJ45)
CASSYSGGGADGLTF

SEQ ID NO: 287600 - protein, 12 aa, Homo sapiens
  CDR3 for beta chain variable domain of TCR clone 143800 (TRBV11-2, TRBJ2-1)
CAGSPGNNEQFF

SEQ ID NO: 287601 - protein, 13 aa, Homo sapiens
  CDR3 for alpha chain variable domain of TCR clone 143801 (TRAV20, TRAJ48)
CAVQGVGNGKLTF

SEQ ID NO: 287602 - protein, 14 aa, Homo sapiens
  CDR3 for beta chain variable domain of TCR clone 143801 (TRBV19, TRBJ2-2)
CASSGQGIAGELFF

SEQ ID NO: 287603 - protein, 16 aa, Homo sapiens
  CDR3 for alpha chain variable domain of TCR clone 143802 (TRAV23/DV6, TRAJ9)
CAASTGGNTGGFKTIF

SEQ ID NO: 287604 - protein, 15 aa, Homo sapiens
  CDR3 for beta chain variable domain of TCR clone 143802 (TRBV6-3, TRBJ2-7)
CASSSPGTVLYEQYF

SEQ ID NO: 287605 - protein, 14 aa, Homo sapiens
  CDR3 for alpha chain variable domain of TCR clone 143803 (TRAV12-2, TRAJ40)
CAVKIPSGTYKYIF

SEQ ID NO: 287606 - protein, 13 aa, Homo sapiens
  CDR3 for beta chain variable domain of TCR clone 143803 (TRBV20-1, TRBJ2-7)
CSATHTSGYEQYF

SEQ ID NO: 287607 - protein, 12 aa, Homo sapiens
  CDR3 for alpha chain variable domain of TCR clone 143804 (TRAV38-2/DV8, TRAJ48)
CALLSGNEKLTF

SEQ ID NO: 287608 - protein, 19 aa, Homo sapiens
  CDR3 for beta chain variable domain of TCR clone 143804 (TRBV6-3, TRBJ1-2)
CASSYSKGRTGPPNYGYTF

SEQ ID NO: 287609 - protein, 13 aa, Homo sapiens
  CDR3 for alpha chain variable domain of TCR clone 143805 (TRAV27, TRAJ41)
CAGEGNSRYALNF

SEQ ID NO: 287610 - protein, 12 aa, Homo sapiens
  CDR3 for beta chain variable domain of TCR clone 143805 (TRBV5-1, TRBJ1-2)
CASSQDTYGYTF

SEQ ID NO: 287611 - protein, 17 aa, Homo sapiens
  CDR3 for alpha chain variable domain of TCR clone 143806 (TRAV3, TRAJ6)
CAVRDGPRAGGSCIPTF

SEQ ID NO: 287612 - protein, 12 aa, Homo sapiens
  CDR3 for beta chain variable domain of TCR clone 143806 (TRBV12-4, TRBJ2-7)
CASSLGGYEQYF

SEQ ID NO: 287613 - protein, 14 aa, Homo sapiens
  CDR3 for alpha chain variable domain of TCR clone 143807 (TRAV9-2, TRAJ39)
CAPYIYNAGNMLTF

SEQ ID NO: 287614 - protein, 15 aa, Homo sapiens
  CDR3 for beta chain variable domain of TCR clone 143807 (TRBV20-1, TRBJ2-7)
CSARDRVSGMDEQYF

SEQ ID NO: 287615 - protein, 14 aa, Homo sapiens
  CDR3 for alpha chain variable domain of TCR clone 143808 (TRAV1-2, TRAJ33)
CAVRAPDSNYQLIW

SEQ ID NO: 287616 - protein, 12 aa, Homo sapiens
  CDR3 for beta chain variable domain of TCR clone 143808 (TRBV29-1, TRBJ2-3)
CSVTGGADTQYF

SEQ ID NO: 287617 - protein, 14 aa, Homo sapiens
  CDR3 for alpha chain variable domain of TCR clone 143809 (TRAV8-2, TRAJ4)
CVVSPSGVYNKLIF

SEQ ID NO: 287618 - protein, 15 aa, Homo sapiens
  CDR3 for beta chain variable domain of TCR clone 143809 (TRBV4-1, TRBJ1-4)
CASSDTGGTIEKLFF

SEQ ID NO: 287619 - protein, 14 aa, Homo sapiens
  CDR3 for alpha chain variable domain of TCR clone 143810 (TRAV13-2, TRAJ17)
CAENSKAAGNKLTF

SEQ ID NO: 287620 - protein, 15 aa, Homo sapiens
  CDR3 for beta chain variable domain of TCR clone 143810 (TRBV18, TRBJ2-7)
CASSPLQGRTYEQYF

SEQ ID NO: 287621 - protein, 15 aa, Homo sapiens
  CDR3 for alpha chain variable domain of TCR clone 143811 (TRAV1-1, TRAJ4)
CAVRAFSGGYNKLIF

SEQ ID NO: 287622 - protein, 16 aa, Homo sapiens
  CDR3 for beta chain variable domain of TCR clone 143811 (TRBV7-2, TRBJ2-6)
CAILSGVASGANVLTF

SEQ ID NO: 287623 - protein, 16 aa, Homo sapiens
  CDR3 for alpha chain variable domain of TCR clone 143812 (TRAV8-4, TRAJ5)
CAVGPLTDTGRRALTF

SEQ ID NO: 287624 - protein, 14 aa, Homo sapiens
  CDR3 for beta chain variable domain of TCR clone 143812 (TRBV19, TRBJ1-6)
CASSTDGWNSPLHF

SEQ ID NO: 287625 - protein, 15 aa, Homo sapiens
  CDR3 for alpha chain variable domain of TCR clone 143813 (TRAV12-2, TRAJ50)
CAVNGLETSYDKVIL

SEQ ID NO: 287626 - protein, 14 aa, Homo sapiens
  CDR3 for beta chain variable domain of TCR clone 143813 (TRBV7-2, TRBJ1-1)
CASSFLTGTTEAFF

SEQ ID NO: 287627 - protein, 10 aa, Homo sapiens
  CDR3 for alpha chain variable domain of TCR clone 143814 (TRAV16, TRAJ22)
SAMYLRQLTF

SEQ ID NO: 287628 - protein, 15 aa, Homo sapiens
  CDR3 for beta chain variable domain of TCR clone 143814 (TRBV7-9, TRBJ2-1)
CASSLVAGRYNEQFF

SEQ ID NO: 287629 - protein, 13 aa, Homo sapiens
  CDR3 for alpha chain variable domain of TCR clone 143815 (TRAV36/DV7, TRAJ37)
CAIFSSNTGKLIF

SEQ ID NO: 287630 - protein, 15 aa, Homo sapiens
  CDR3 for beta chain variable domain of TCR clone 143815 (TRBV12-4, TRBJ2-5)
CQQFFVRGRQETQYF

SEQ ID NO: 287631 - protein, 12 aa, Homo sapiens
  CDR3 for alpha chain variable domain of TCR clone 143816 (TRAV17, TRAJ30)
CATDARDDKIIF

SEQ ID NO: 287632 - protein, 17 aa, Homo sapiens
  CDR3 for beta chain variable domain of TCR clone 143816 (TRBV6-5, TRBJ2-3)
CASSYTTGTGRGDTQYF

SEQ ID NO: 287633 - protein, 14 aa, Homo sapiens
  CDR3 for alpha chain variable domain of TCR clone 143817 (TRAV13-1, TRAJ44)
CAAKATGTASKLTF

SEQ ID NO: 287634 - protein, 17 aa, Homo sapiens
  CDR3 for beta chain variable domain of TCR clone 143817 (TRBV7-3, TRBJ2-3)
WASSLMKRMRGADTQYF

SEQ ID NO: 287635 - protein, 14 aa, Homo sapiens
  CDR3 for alpha chain variable domain of TCR clone 143818 (TRAV4, TRAJ6)
CLVGEAGGSYIPIF

SEQ ID NO: 287636 - protein, 16 aa, Homo sapiens
  CDR3 for beta chain variable domain of TCR clone 143818 (TRBV7-6, TRBJ2-1)
CASSLNEGPSYNEQFF

SEQ ID NO: 287637 - protein, 10 aa, Homo sapiens
  CDR3 for alpha chain variable domain of TCR clone 143819 (TRAV23/DV6, TRAJ57)
CAARPTLSQG

SEQ ID NO: 287638 - protein, 14 aa, Homo sapiens
  CDR3 for beta chain variable domain of TCR clone 143819 (TRBV25-1, TRBJ1-1)
CASTHLGGNTEAFF

SEQ ID NO: 287639 - protein, 16 aa, Homo sapiens
  CDR3 for alpha chain variable domain of TCR clone 143820 (TRAV16, TRAJ52)
CALSAAGGTSYGKLTF

SEQ ID NO: 287640 - protein, 14 aa, Homo sapiens
  CDR3 for beta chain variable domain of TCR clone 143820 (TRBV4-2, TRBJ2-1)
CASGLDRAYNEQFF

SEQ ID NO: 287641 - protein, 11 aa, Homo sapiens
  CDR3 for alpha chain variable domain of TCR clone 143821 (TRAV17, TRAJ9)
CGFTGGFKTNF

SEQ ID NO: 287642 - protein, 14 aa, Homo sapiens
  CDR3 for beta chain variable domain of TCR clone 143821 (TRBV7-9, TRBJ2-2)
CASSLVQDTGELFF

SEQ ID NO: 287643 - protein, 13 aa, Homo sapiens
  CDR3 for alpha chain variable domain of TCR clone 143822 (TRAV36/DV7, TRAJ54)
CAVDIRGAQKLVF

SEQ ID NO: 287644 - protein, 14 aa, Homo sapiens
  CDR3 for beta chain variable domain of TCR clone 143822 (TRBV19, TRBJ2-7)
CSSNFRDTFTGMYF

SEQ ID NO: 287645 - protein, 12 aa, Homo sapiens
  CDR3 for alpha chain variable domain of TCR clone 143823 (TRAV21, TRAJ21)
CAAHLPSNKFYF

SEQ ID NO: 287646 - protein, 14 aa, Homo sapiens
  CDR3 for beta chain variable domain of TCR clone 143823 (TRBV5-7, TRBJ2-7)
CASSPTLVLYEQYF

SEQ ID NO: 287647 - protein, 14 aa, Homo sapiens
  CDR3 for alpha chain variable domain of TCR clone 143824 (TRAV12-3, TRAJ10)
SHLPLTGGGKKLTF

SEQ ID NO: 287648 - protein, 12 aa, Homo sapiens
  CDR3 for beta chain variable domain of TCR clone 143824 (TRBV7-2, TRBJ1-6)
CASSLSSSPLHF

SEQ ID NO: 287649 - protein, 14 aa, Homo sapiens
  CDR3 for alpha chain variable domain of TCR clone 143825 (TRAV8-3, TRAJ47)
CAVGAQGRGNKLVF

SEQ ID NO: 287650 - protein, 15 aa, Homo sapiens
  CDR3 for beta chain variable domain of TCR clone 143825 (TRBV15, TRBJ2-3)
RATSRDPRGTDTQYF

SEQ ID NO: 287651 - protein, 12 aa, Homo sapiens
  CDR3 for alpha chain variable domain of TCR clone 143826 (TRAV21, TRAJ23)
CAVGPQGGKLIF

SEQ ID NO: 287652 - protein, 14 aa, Homo sapiens
  CDR3 for beta chain variable domain of TCR clone 143826 (TRBV28, TRBJ1-2)
CASRIQGANYGYTF

SEQ ID NO: 287653 - protein, 13 aa, Homo sapiens
  CDR3 for alpha chain variable domain of TCR clone 143827 (TRAV12-3, TRAJ13)
CAMSSGGYQKVTF

SEQ ID NO: 287654 - protein, 14 aa, Homo sapiens
  CDR3 for beta chain variable domain of TCR clone 143827 (TRBV19, TRBJ2-2)
CASSTLHRSGELFF

SEQ ID NO: 287655 - protein, 14 aa, Homo sapiens
  CDR3 for alpha chain variable domain of TCR clone 143828 (TRAV26-1, TRAJ38)
CIADNAGNNRKLIW

SEQ ID NO: 287656 - protein, 17 aa, Homo sapiens
  CDR3 for beta chain variable domain of TCR clone 143828 (TRBV24-1, TRBJ2-4)
CATSDAEARGVRNIQYF

SEQ ID NO: 287657 - protein, 14 aa, Homo sapiens
  CDR3 for alpha chain variable domain of TCR clone 143829 (TRAV12-2, TRAJ17)
CAVNIKAAGNKLTF

SEQ ID NO: 287658 - protein, 16 aa, Homo sapiens
  CDR3 for beta chain variable domain of TCR clone 143829 (TRBV20-1, TRBJ2-6)
CSASSQGYDGANVLTV

SEQ ID NO: 287659 - protein, 14 aa, Homo sapiens
  CDR3 for alpha chain variable domain of TCR clone 143830 (TRAV26-1, TRAJ38)
CIADNAGNNRKLIC

SEQ ID NO: 287660 - protein, 13 aa, Homo sapiens
  CDR3 for beta chain variable domain of TCR clone 143830 (TRBV2, TRBJ1-5)
CATAGPGNQPQHF

SEQ ID NO: 287661 - protein, 14 aa, Homo sapiens
  CDR3 for alpha chain variable domain of TCR clone 143831 (TRAV17, TRAJ32)
CATDPGGATNKLIF

SEQ ID NO: 287662 - protein, 14 aa, Homo sapiens
  CDR3 for beta chain variable domain of TCR clone 143831 (TRBV2, TRBJ1-5)
CASSETRGGQPQHF

SEQ ID NO: 287663 - protein, 12 aa, Homo sapiens
  CDR3 for alpha chain variable domain of TCR clone 143832 (TRAV38-1, TRAJ47)
CAFVTYGNKLVF

SEQ ID NO: 287664 - protein, 15 aa, Homo sapiens
  CDR3 for beta chain variable domain of TCR clone 143832 (TRBV20-1, TRBJ2-7)
CSARKGLAESYEQYF

SEQ ID NO: 287665 - protein, 14 aa, Homo sapiens
  CDR3 for alpha chain variable domain of TCR clone 143833 (TRAV13-2, TRAJ17)
CAENGKAAGNKLTF

SEQ ID NO: 287666 - protein, 17 aa, Homo sapiens
  CDR3 for beta chain variable domain of TCR clone 143833 (TRBV11-2, TRBJ2-1)
CASSLYPPGVEYNEQFF

SEQ ID NO: 287667 - protein, 15 aa, Homo sapiens
  CDR3 for alpha chain variable domain of TCR clone 143834 (TRAV27, TRAJ53)
CRAMNSGGSKYKLTF

SEQ ID NO: 287668 - protein, 14 aa, Homo sapiens
  CDR3 for beta chain variable domain of TCR clone 143834 (TRBV7-3, TRBJ2-1)
CASSLAGGTNEQFF

SEQ ID NO: 287669 - protein, 16 aa, Homo sapiens
  CDR3 for alpha chain variable domain of TCR clone 143835 (TRAV30, TRAJ24)
CGTEIVDADSWGKFKF

SEQ ID NO: 287670 - protein, 13 aa, Homo sapiens
  CDR3 for beta chain variable domain of TCR clone 143835 (TRBV7-9, TRBJ2-3)
CASSPGSTDTQYF

SEQ ID NO: 287671 - protein, 14 aa, Homo sapiens
  CDR3 for alpha chain variable domain of TCR clone 143836 (TRAV12-3, TRAJ10)
SHLPPTGGGNKLTF

SEQ ID NO: 287672 - protein, 16 aa, Homo sapiens
  CDR3 for beta chain variable domain of TCR clone 143836 (TRBV18, TRBJ1-3)
CASSLGILNGENTIYF

SEQ ID NO: 287673 - protein, 13 aa, Homo sapiens
  CDR3 for alpha chain variable domain of TCR clone 143837 (TRAV20, TRAJ49)
CAVQVRTGNQFYF

SEQ ID NO: 287674 - protein, 14 aa, Homo sapiens
  CDR3 for beta chain variable domain of TCR clone 143837 (TRBV7-2, TRBJ2-7)
CASSPKTSFYEQYF

SEQ ID NO: 287675 - protein, 14 aa, Homo sapiens
  CDR3 for alpha chain variable domain of TCR clone 143838 (TRAV16, TRAJ8)
CALLLNTGFKKLVF

SEQ ID NO: 287676 - protein, 15 aa, Homo sapiens
  CDR3 for beta chain variable domain of TCR clone 143838 (TRBV7-7, TRBJ2-2)
CATSKLAKNTGGLFF

SEQ ID NO: 287677 - protein, 17 aa, Homo sapiens
  CDR3 for alpha chain variable domain of TCR clone 143839 (TRAV21, TRAJ52)
CAVGANAGGTSYGKLTF

SEQ ID NO: 287678 - protein, 13 aa, Homo sapiens
  CDR3 for beta chain variable domain of TCR clone 143839 (TRBV2, TRBJ2-7)
CASSGAAAYEQYF

SEQ ID NO: 287679 - protein, 13 aa, Homo sapiens
  CDR3 for alpha chain variable domain of TCR clone 143840 (TRAV20, TRAJ20)
CAVRDFNDYKLSF

SEQ ID NO: 287680 - protein, 14 aa, Homo sapiens
  CDR3 for beta chain variable domain of TCR clone 143840 (TRBV19, TRBJ1-2)
CASSPTGGAGGYTF

SEQ ID NO: 287681 - protein, 13 aa, Homo sapiens
  CDR3 for alpha chain variable domain of TCR clone 143841 (TRAV21, TRAJ37)
CAVSSGNTGKLIF

SEQ ID NO: 287682 - protein, 14 aa, Homo sapiens
  CDR3 for beta chain variable domain of TCR clone 143841 (TRBV7-2, TRBJ2-2)
CASRGQGAAGELFF

SEQ ID NO: 287683 - protein, 13 aa, Homo sapiens
  CDR3 for alpha chain variable domain of TCR clone 143842 (TRAV38-1, TRAJ52)
CAFRGTSYGKLTF

SEQ ID NO: 287684 - protein, 15 aa, Homo sapiens
  CDR3 for beta chain variable domain of TCR clone 143842 (TRBV6-6, TRBJ2-7)
CASSYSYGGSYEQYF

SEQ ID NO: 287685 - protein, 18 aa, Homo sapiens
  CDR3 for alpha chain variable domain of TCR clone 143843 (TRAV26-2, TRAJ54)
CILRDVEVGIQGAQKLVF

SEQ ID NO: 287686 - protein, 15 aa, Homo sapiens
  CDR3 for beta chain variable domain of TCR clone 143843 (TRBV20-1, TRBJ2-7)
CSARDRVSGMDEQCF

SEQ ID NO: 287687 - protein, 15 aa, Homo sapiens
  CDR3 for alpha chain variable domain of TCR clone 143844 (TRAV27, TRAJ38)
CAARRNAGNNRKLIW

SEQ ID NO: 287688 - protein, 17 aa, Homo sapiens
  CDR3 for beta chain variable domain of TCR clone 143844 (TRBV12-4, TRBJ2-7)
CASSQRTSGTTSSTSGR

SEQ ID NO: 287689 - protein, 10 aa, Homo sapiens
  CDR3 for alpha chain variable domain of TCR clone 143845 (TRAV23/DV6, TRAJ57)
CAARSTLSQG

SEQ ID NO: 287690 - protein, 15 aa, Homo sapiens
  CDR3 for beta chain variable domain of TCR clone 143845 (TRBV27, TRBJ1-4)
CASSAQQDLNEKLFF

SEQ ID NO: 287691 - protein, 16 aa, Homo sapiens
  CDR3 for alpha chain variable domain of TCR clone 143846 (TRAV4, TRAJ9)
CLVGDPNRPGGFKTIF

SEQ ID NO: 287692 - protein, 16 aa, Homo sapiens
  CDR3 for beta chain variable domain of TCR clone 143846 (TRBV28, TRBJ1-4)
CASSPPYRGRNEKLFF

SEQ ID NO: 287693 - protein, 11 aa, Homo sapiens
  CDR3 for alpha chain variable domain of TCR clone 143847 (TRAV38-1, TRAJ43)
CAFMKHNIGRH

SEQ ID NO: 287694 - protein, 11 aa, Homo sapiens
  CDR3 for beta chain variable domain of TCR clone 143847 (TRBV7-9, TRBJ2-3)
CASSYTDTQYF

SEQ ID NO: 287695 - protein, 16 aa, Homo sapiens
  CDR3 for alpha chain variable domain of TCR clone 143848 (TRAV3, TRAJ10)
CAVRDMRAGGGNKLTF

SEQ ID NO: 287696 - protein, 21 aa, Homo sapiens
  CDR3 for beta chain variable domain of TCR clone 143848 (TRBV24-1, TRBJ2-5)
ESAIPNQTALYFCATRETQYF

SEQ ID NO: 287697 - protein, 14 aa, Homo sapiens
  CDR3 for alpha chain variable domain of TCR clone 143849 (TRAV26-1, TRAJ38)
CIADNAGNNRKLIW

SEQ ID NO: 287698 - protein, 15 aa, Homo sapiens
  CDR3 for beta chain variable domain of TCR clone 143849 (TRBV20-1, TRBJ2-7)
CSARDRVSGMDEQYY

SEQ ID NO: 287699 - protein, 15 aa, Homo sapiens
  CDR3 for alpha chain variable domain of TCR clone 143850 (TRAV21, TRAJ24)
CAARSSTDSWGKLQF

SEQ ID NO: 287700 - protein, 15 aa, Homo sapiens
  CDR3 for beta chain variable domain of TCR clone 143850 (TRBV27, TRBJ1-6)
CASSFDRGLGSPLHF

SEQ ID NO: 287701 - protein, 16 aa, Homo sapiens
  CDR3 for alpha chain variable domain of TCR clone 143851 (TRAV4, TRAJ22)
FRVGDLYSGSARQLTF

SEQ ID NO: 287702 - protein, 16 aa, Homo sapiens
  CDR3 for beta chain variable domain of TCR clone 143851 (TRBV7-9, TRBJ2-1)
CASSDVAGGSYNEQFF

SEQ ID NO: 287703 - protein, 11 aa, Homo sapiens
  CDR3 for alpha chain variable domain of TCR clone 143852 (TRAV35, TRAJ30)
CAGPGDDKIIF

SEQ ID NO: 287704 - protein, 15 aa, Homo sapiens
  CDR3 for beta chain variable domain of TCR clone 143852 (TRBV18, TRBJ2-1)
CASSPPSASYNEQFF

SEQ ID NO: 287705 - protein, 11 aa, Homo sapiens
  CDR3 for alpha chain variable domain of TCR clone 143853 (TRAV2, TRAJ13)
CASGGYQKVTF

SEQ ID NO: 287706 - protein, 18 aa, Homo sapiens
  CDR3 for beta chain variable domain of TCR clone 143853 (TRBV4-1, TRBJ2-7)
CASSQDTGAGSGLNEQYF

SEQ ID NO: 287707 - protein, 13 aa, Homo sapiens
  CDR3 for alpha chain variable domain of TCR clone 143854 (TRAV13-1, TRAJ43)
CAASLSHNNDMRF

SEQ ID NO: 287708 - protein, 15 aa, Homo sapiens
  CDR3 for beta chain variable domain of TCR clone 143854 (TRBV5-1, TRBJ2-1)
YASSQAGYWWNEQFF

SEQ ID NO: 287709 - protein, 14 aa, Homo sapiens
  CDR3 for alpha chain variable domain of TCR clone 143855 (TRAV1-2, TRAJ16)
CAVNRFSDGPKLLF

SEQ ID NO: 287710 - protein, 16 aa, Homo sapiens
  CDR3 for beta chain variable domain of TCR clone 143855 (TRBV7-3, TRBJ2-2)
CASSLKRGTLSGELFF

SEQ ID NO: 287711 - protein, 15 aa, Homo sapiens
  CDR3 for alpha chain variable domain of TCR clone 143856 (TRAV21, TRAJ53)
CATLNSGGSNYKLTF

SEQ ID NO: 287712 - protein, 13 aa, Homo sapiens
  CDR3 for beta chain variable domain of TCR clone 143856 (TRBV4-1, TRBJ2-2)
CASSQENTGELFC

SEQ ID NO: 287713 - protein, 14 aa, Homo sapiens
  CDR3 for alpha chain variable domain of TCR clone 143857 (TRAV13-1, TRAJ39)
CAASYNNAGNMLTF

SEQ ID NO: 287714 - protein, 16 aa, Homo sapiens
  CDR3 for beta chain variable domain of TCR clone 143857 (TRBV2, TRBJ2-1)
CASSVGGSLSYNEQFF

SEQ ID NO: 287715 - protein, 15 aa, Homo sapiens
  CDR3 for alpha chain variable domain of TCR clone 143858 (TRAV12-3, TRAJ42)
CAMITSVGSQGNLIF

SEQ ID NO: 287716 - protein, 16 aa, Homo sapiens
  CDR3 for beta chain variable domain of TCR clone 143858 (TRBV7-9, TRBJ2-1)
CSSSLGTGWDYNEQFF

SEQ ID NO: 287717 - protein, 14 aa, Homo sapiens
  CDR3 for alpha chain variable domain of TCR clone 143859 (TRAV12-3, TRAJ10)
SHLPLTGGGNKLTF

SEQ ID NO: 287718 - protein, 15 aa, Homo sapiens
  CDR3 for beta chain variable domain of TCR clone 143859 (TRBV10-2, TRBJ2-6)
CASSEEGTGANVLTF

SEQ ID NO: 287719 - protein, 12 aa, Homo sapiens
  CDR3 for alpha chain variable domain of TCR clone 143860 (TRAV12-2, TRAJ47)
CAVAEYANKLVF

SEQ ID NO: 287720 - protein, 14 aa, Homo sapiens
  CDR3 for beta chain variable domain of TCR clone 143860 (TRBV20-1, TRBJ1-1)
CSAMGGTANTEAFF

SEQ ID NO: 287721 - protein, 12 aa, Homo sapiens
  CDR3 for alpha chain variable domain of TCR clone 143861 (TRAV8-3, TRAJ20)
CAVGANDHKLSF

SEQ ID NO: 287722 - protein, 16 aa, Homo sapiens
  CDR3 for beta chain variable domain of TCR clone 143861 (TRBV12-4, TRBJ1-5)
CASSRPVGGSNQPQHF

SEQ ID NO: 287723 - protein, 14 aa, Homo sapiens
  CDR3 for alpha chain variable domain of TCR clone 143862 (TRAV8-2, TRAJ4)
CVVSPSGGYNKLIF

SEQ ID NO: 287724 - protein, 14 aa, Homo sapiens
  CDR3 for beta chain variable domain of TCR clone 143862 (TRBV6-1, TRBJ1-3)
CASVQGGGGNTIYF

SEQ ID NO: 287725 - protein, 16 aa, Homo sapiens
  CDR3 for alpha chain variable domain of TCR clone 143863 (TRAV20, TRAJ6)
CAVQAGGTGGSYIPTF

SEQ ID NO: 287726 - protein, 14 aa, Homo sapiens
  CDR3 for beta chain variable domain of TCR clone 143863 (TRBV4-1, TRBJ2-2)
CASSQAVNTGELFF

SEQ ID NO: 287727 - protein, 15 aa, Homo sapiens
  CDR3 for alpha chain variable domain of TCR clone 143864 (TRAV12-3, TRAJ11)
CAMSEENSGYGTLPF

SEQ ID NO: 287728 - protein, 13 aa, Homo sapiens
  CDR3 for beta chain variable domain of TCR clone 143864 (TRBV12-4, TRBJ2-1)
CASSFHSGSEQFF

SEQ ID NO: 287729 - protein, 17 aa, Homo sapiens
  CDR3 for alpha chain variable domain of TCR clone 143865 (TRAV4, TRAJ42)
RLVGVLNYVGSQGNLIF

SEQ ID NO: 287730 - protein, 12 aa, Homo sapiens
  CDR3 for beta chain variable domain of TCR clone 143865 (TRBV20-1, TRBJ2-1)
CSAQYTYNEQFF

SEQ ID NO: 287731 - protein, 13 aa, Homo sapiens
  CDR3 for alpha chain variable domain of TCR clone 143866 (TRAV36/DV7, TRAJ53)
CALSGGSNYKLTF

SEQ ID NO: 287732 - protein, 12 aa, Homo sapiens
  CDR3 for beta chain variable domain of TCR clone 143866 (TRBV28, TRBJ2-7)
CHSLPSRYEQYF

SEQ ID NO: 287733 - protein, 13 aa, Homo sapiens
  CDR3 for alpha chain variable domain of TCR clone 143867 (TRAV12-3, TRAJ43)
CAMIRPNNNNMRF

SEQ ID NO: 287734 - protein, 12 aa, Homo sapiens
  CDR3 for beta chain variable domain of TCR clone 143867 (TRBV11-3, TRBJ2-5)
CASSLGQETQYF

SEQ ID NO: 287735 - protein, 16 aa, Homo sapiens
  CDR3 for alpha chain variable domain of TCR clone 143868 (TRAV3, TRAJ40)
CAVRDRIASETYKYIF

SEQ ID NO: 287736 - protein, 14 aa, Homo sapiens
  CDR3 for beta chain variable domain of TCR clone 143868 (TRBV4-2, TRBJ2-1)
CASGLDRAYNEQFF

SEQ ID NO: 287737 - protein, 13 aa, Homo sapiens
  CDR3 for alpha chain variable domain of TCR clone 143869 (TRAV27, TRAJ45)
CRSSGGGADGLTF

SEQ ID NO: 287738 - protein, 14 aa, Homo sapiens
  CDR3 for beta chain variable domain of TCR clone 143869 (TRBV7-9, TRBJ2-1)
CASSSMVGFGEQLF

SEQ ID NO: 287739 - protein, 14 aa, Homo sapiens
  CDR3 for alpha chain variable domain of TCR clone 143870 (TRAV35, TRAJ33)
CAGSSQDSNDQLIW

SEQ ID NO: 287740 - protein, 15 aa, Homo sapiens
  CDR3 for beta chain variable domain of TCR clone 143870 (TRBV5-1, TRBJ1-4)
FAPAAWKDGNEKLFF

SEQ ID NO: 287741 - protein, 14 aa, Homo sapiens
  CDR3 for alpha chain variable domain of TCR clone 143871 (TRAV1-2, TRAJ8)
CAVREDTVFQKLVF

SEQ ID NO: 287742 - protein, 15 aa, Homo sapiens
  CDR3 for beta chain variable domain of TCR clone 143871 (TRBV20-1, TRBJ2-7)
CSARDRVSGMDEQYF

SEQ ID NO: 287743 - protein, 23 aa, Homo sapiens
  CDR3 for alpha chain variable domain of TCR clone 143872 (TRAV8-4, TRAJ9)
CAVTFNTGGFKNYLWSRNKTMCY

SEQ ID NO: 287744 - protein, 15 aa, Homo sapiens
  CDR3 for beta chain variable domain of TCR clone 143872 (TRBV7-9, TRBJ2-2)
CASSPETGAGGELFF

SEQ ID NO: 287745 - protein, 17 aa, Homo sapiens
  CDR3 for alpha chain variable domain of TCR clone 143873 (TRAV3, TRAJ6)
CAVCRRTDTGGSYIPTF

SEQ ID NO: 287746 - protein, 18 aa, Homo sapiens
  CDR3 for beta chain variable domain of TCR clone 143873 (TRBV7-2, TRBJ2-3)
CASSLEASRGRKADTQYF

SEQ ID NO: 287747 - protein, 13 aa, Homo sapiens
  CDR3 for alpha chain variable domain of TCR clone 143874 (TRAV21, TRAJ27)
CAARPGNASKSTF

SEQ ID NO: 287748 - protein, 15 aa, Homo sapiens
  CDR3 for beta chain variable domain of TCR clone 143874 (TRBV11-3, TRBJ2-7)
CASSPGPASSYEQYF

SEQ ID NO: 287749 - protein, 14 aa, Homo sapiens
  CDR3 for alpha chain variable domain of TCR clone 143875 (TRAV1-2, TRAJ16)
CAVNRFSDGQKLLF

SEQ ID NO: 287750 - protein, 12 aa, Homo sapiens
  CDR3 for beta chain variable domain of TCR clone 143875 (TRBV7-6, TRBJ2-7)
CASSLADSEQYI

SEQ ID NO: 287751 - protein, 11 aa, Homo sapiens
  CDR3 for alpha chain variable domain of TCR clone 143876 (TRAV21, TRAJ34)
CAHYNTGKLIF

SEQ ID NO: 287752 - protein, 13 aa, Homo sapiens
  CDR3 for beta chain variable domain of TCR clone 143876 (TRBV20-1, TRBJ2-7)
GSADPGATYEQYF

SEQ ID NO: 287753 - protein, 14 aa, Homo sapiens
  CDR3 for alpha chain variable domain of TCR clone 143877 (TRAV12-2, TRAJ40)
CAVKIPSGSYKYIF

SEQ ID NO: 287754 - protein, 17 aa, Homo sapiens
  CDR3 for beta chain variable domain of TCR clone 143877 (TRBV13, TRBJ2-3)
CASSLSRVAGGRNTQYF

SEQ ID NO: 287755 - protein, 11 aa, Homo sapiens
  CDR3 for alpha chain variable domain of TCR clone 143878 (TRAV26-1, TRAJ27)
CIAPNAGKSTF

SEQ ID NO: 287756 - protein, 18 aa, Homo sapiens
  CDR3 for beta chain variable domain of TCR clone 143878 (TRBV7-9, TRBJ2-6)
CASSFPGAGISGANVLTF

SEQ ID NO: 287757 - protein, 18 aa, Homo sapiens
  CDR3 for alpha chain variable domain of TCR clone 143879 (TRAV13-1, TRAJ52)
CAAKNPNAGGTSSGKLTF

SEQ ID NO: 287758 - protein, 15 aa, Homo sapiens
  CDR3 for beta chain variable domain of TCR clone 143879 (TRBV6-1, TRBJ2-3)
CASSERGGITDTQYF

SEQ ID NO: 287759 - protein, 13 aa, Homo sapiens
  CDR3 for alpha chain variable domain of TCR clone 143880 (TRAV27, TRAJ41)
CAGEGNSGYALNF

SEQ ID NO: 287760 - protein, 15 aa, Homo sapiens
  CDR3 for beta chain variable domain of TCR clone 143880 (TRBV10-3, TRBJ1-1)
CAISDRGGMNTEAFF

SEQ ID NO: 287761 - protein, 11 aa, Homo sapiens
  CDR3 for alpha chain variable domain of TCR clone 143881 (TRAV2, TRAJ13)
CASGGYQKVTF

SEQ ID NO: 287762 - protein, 16 aa, Homo sapiens
  CDR3 for beta chain variable domain of TCR clone 143881 (TRBV19, TRBJ2-1)
RASSMGGGSSYNEQFF

SEQ ID NO: 287763 - protein, 16 aa, Homo sapiens
  CDR3 for alpha chain variable domain of TCR clone 143882 (TRAV30, TRAJ24)
CGTEIVGADSWGKFQF

SEQ ID NO: 287764 - protein, 16 aa, Homo sapiens
  CDR3 for beta chain variable domain of TCR clone 143882 (TRBV20-1, TRBJ1-1)
CSASALTQGMNTEAFF

SEQ ID NO: 287765 - protein, 13 aa, Homo sapiens
  CDR3 for alpha chain variable domain of TCR clone 143883 (TRAV12-3, TRAJ7)
CAMTPYGNNRLVF

SEQ ID NO: 287766 - protein, 16 aa, Homo sapiens
  CDR3 for beta chain variable domain of TCR clone 143883 (TRBV20-1, TRBJ1-4)
CSASPYGGELNEKLFF

SEQ ID NO: 287767 - protein, 10 aa, Homo sapiens
  CDR3 for alpha chain variable domain of TCR clone 143884 (TRAV23/DV6, TRAJ57)
CSASSTLSQG

SEQ ID NO: 287768 - protein, 17 aa, Homo sapiens
  CDR3 for beta chain variable domain of TCR clone 143884 (TRBV4-2, TRBJ1-1)
CASTQFGGGSGNTEAFF

SEQ ID NO: 287769 - protein, 13 aa, Homo sapiens
  CDR3 for alpha chain variable domain of TCR clone 143885 (TRAV12-1, TRAJ15)
CVAQNQAGTALIF

SEQ ID NO: 287770 - protein, 14 aa, Homo sapiens
  CDR3 for beta chain variable domain of TCR clone 143885 (TRBV19, TRBJ2-7)
CASTVQGRPYEQYF

SEQ ID NO: 287771 - protein, 15 aa, Homo sapiens
  CDR3 for alpha chain variable domain of TCR clone 143886 (TRAV27, TRAJ38)
CAEGRNAGKNRKLIW

SEQ ID NO: 287772 - protein, 13 aa, Homo sapiens
  CDR3 for beta chain variable domain of TCR clone 143886 (TRBV12-5, TRBJ2-3)
CASGDRQSDTQYF

SEQ ID NO: 287773 - protein, 14 aa, Homo sapiens
  CDR3 for alpha chain variable domain of TCR clone 143887 (TRAV17, TRAJ35)
CATDRPGFGNVLHC

SEQ ID NO: 287774 - protein, 19 aa, Homo sapiens
  CDR3 for beta chain variable domain of TCR clone 143887 (TRBV11-3, TRBJ2-2)
CASSTRTGAKTTNTGELFF

SEQ ID NO: 287775 - protein, 12 aa, Homo sapiens
  CDR3 for alpha chain variable domain of TCR clone 143888 (TRAV13-2, TRAJ23)
CAERHRGGKLIF

SEQ ID NO: 287776 - protein, 13 aa, Homo sapiens
  CDR3 for beta chain variable domain of TCR clone 143888 (TRBV19, TRBJ1-2)
CASSVPGQDGHTF

SEQ ID NO: 287777 - protein, 14 aa, Homo sapiens
  CDR3 for alpha chain variable domain of TCR clone 143889 (TRAV8-4, TRAJ8)
CAVSEDTGFQILVF

SEQ ID NO: 287778 - protein, 12 aa, Homo sapiens
  CDR3 for beta chain variable domain of TCR clone 143889 (TRBV14, TRBJ1-1)
CASRPYETEAFF

SEQ ID NO: 287779 - protein, 14 aa, Homo sapiens
  CDR3 for alpha chain variable domain of TCR clone 143890 (TRAV12-3, TRAJ57)
CARALEGGSEKLVF

SEQ ID NO: 287780 - protein, 15 aa, Homo sapiens
  CDR3 for beta chain variable domain of TCR clone 143890 (TRBV19, TRBJ1-1)
CASTSGQIQNTEAFF

SEQ ID NO: 287781 - protein, 16 aa, Homo sapiens
  CDR3 for alpha chain variable domain of TCR clone 143891 (TRAV30, TRAJ49)
SAAQRVGPNTGNQFYF

SEQ ID NO: 287782 - protein, 15 aa, Homo sapiens
  CDR3 for beta chain variable domain of TCR clone 143891 (TRBV2, TRBJ2-1)
CASSELAGSYNERFF

SEQ ID NO: 287783 - protein, 10 aa, Homo sapiens
  CDR3 for alpha chain variable domain of TCR clone 143892 (TRAV12-2, TRAJ22)
FAVNETQLTF

SEQ ID NO: 287784 - protein, 15 aa, Homo sapiens
  CDR3 for beta chain variable domain of TCR clone 143892 (TRBV27, TRBJ2-1)
CASSNGGGSSNEQFF

SEQ ID NO: 287785 - protein, 14 aa, Homo sapiens
  CDR3 for alpha chain variable domain of TCR clone 143893 (TRAV1-2, TRAJ16)
CAVNRFSDGQKLLF

SEQ ID NO: 287786 - protein, 16 aa, Homo sapiens
  CDR3 for beta chain variable domain of TCR clone 143893 (TRBV20-1, TRBJ2-3)
CSALAFDTGDPDTQYF

SEQ ID NO: 287787 - protein, 10 aa, Homo sapiens
  CDR3 for alpha chain variable domain of TCR clone 143894 (TRAV21, TRAJ31)
CAVDNARLMF

SEQ ID NO: 287788 - protein, 15 aa, Homo sapiens
  CDR3 for beta chain variable domain of TCR clone 143894 (TRBV6-3, TRBJ2-7)
CASSSPGTVFYEQYF

SEQ ID NO: 287789 - protein, 13 aa, Homo sapiens
  CDR3 for alpha chain variable domain of TCR clone 143895 (TRAV13-2, TRAJ13)
CAERPGGYQKVTF

SEQ ID NO: 287790 - protein, 11 aa, Homo sapiens
  CDR3 for beta chain variable domain of TCR clone 143895 (TRBV5-4, TRBJ2-5)
CQQLDQGDQYF

SEQ ID NO: 287791 - protein, 14 aa, Homo sapiens
  CDR3 for alpha chain variable domain of TCR clone 143896 (TRAV1-2, TRAJ8)
CAVREDTGFPKLVF

SEQ ID NO: 287792 - protein, 15 aa, Homo sapiens
  CDR3 for beta chain variable domain of TCR clone 143896 (TRBV6-3, TRBJ2-7)
CASSAPGTVFYEQYF

SEQ ID NO: 287793 - protein, 16 aa, Homo sapiens
  CDR3 for alpha chain variable domain of TCR clone 143897 (TRAV13-1, TRAJ45)
CAASWESGGGADGLNF

SEQ ID NO: 287794 - protein, 14 aa, Homo sapiens
  CDR3 for beta chain variable domain of TCR clone 143897 (TRBV12-4, TRBJ1-3)
CASGQTVSGNTIYF

SEQ ID NO: 287795 - protein, 18 aa, Homo sapiens
  CDR3 for alpha chain variable domain of TCR clone 143898 (TRAV21, TRAJ52)
CAVRPSPAGGTSDGKLTF

SEQ ID NO: 287796 - protein, 12 aa, Homo sapiens
  CDR3 for beta chain variable domain of TCR clone 143898 (TRBV11-2, TRBJ2-2)
CASSLGGGELFF

SEQ ID NO: 287797 - protein, 14 aa, Homo sapiens
  CDR3 for alpha chain variable domain of TCR clone 143899 (TRAV12-2, TRAJ13)
CAVKKTGGYQKVTF

SEQ ID NO: 287798 - protein, 13 aa, Homo sapiens
  CDR3 for beta chain variable domain of TCR clone 143899 (TRBV11-1, TRBJ2-1)
CASSLEDDTIRFF

SEQ ID NO: 287799 - protein, 13 aa, Homo sapiens
  CDR3 for alpha chain variable domain of TCR clone 143900 (TRAV1-1, TRAJ13)
CAVNSGGYQKVTF

SEQ ID NO: 287800 - protein, 12 aa, Homo sapiens
  CDR3 for beta chain variable domain of TCR clone 143900 (TRBV28, TRBJ2-1)
CASSVQINEHFF

SEQ ID NO: 287801 - protein, 15 aa, Homo sapiens
  CDR3 for alpha chain variable domain of TCR clone 143901 (TRAV35, TRAJ50)
CPGQLRKTSYDKVIF

SEQ ID NO: 287802 - protein, 12 aa, Homo sapiens
  CDR3 for beta chain variable domain of TCR clone 143901 (TRBV5-1, TRBJ2-5)
CASSLGLETQYF

SEQ ID NO: 287803 - protein, 14 aa, Homo sapiens
  CDR3 for alpha chain variable domain of TCR clone 143902 (TRAV12-2, TRAJ22)
CAVRFSGSAWQLTF

SEQ ID NO: 287804 - protein, 13 aa, Homo sapiens
  CDR3 for beta chain variable domain of TCR clone 143902 (TRBV6-1, TRBJ2-1)
CASTGTGLNEQFF

SEQ ID NO: 287805 - protein, 16 aa, Homo sapiens
  CDR3 for alpha chain variable domain of TCR clone 143903 (TRAV1-2, TRAJ10)
CAVRGVLTGGGNKLTF

SEQ ID NO: 287806 - protein, 14 aa, Homo sapiens
  CDR3 for beta chain variable domain of TCR clone 143903 (TRBV7-7, TRBJ1-2)
CASSQTGSTYGYTF

SEQ ID NO: 287807 - protein, 14 aa, Homo sapiens
  CDR3 for alpha chain variable domain of TCR clone 143904 (TRAV12-2, TRAJ13)
CAVKKTGGYQKVTF

SEQ ID NO: 287808 - protein, 19 aa, Homo sapiens
  CDR3 for beta chain variable domain of TCR clone 143904 (TRBV5-1, TRBJ2-3)
CASSLTRIAADWSTDTQYF

SEQ ID NO: 287809 - protein, 13 aa, Homo sapiens
  CDR3 for alpha chain variable domain of TCR clone 143905 (TRAV4, TRAJ42)
CLVGGGSQGNLIF

SEQ ID NO: 287810 - protein, 16 aa, Homo sapiens
  CDR3 for beta chain variable domain of TCR clone 143905 (TRBV5-1, TRBJ2-3)
CGSSLQGRVGADTQYF

SEQ ID NO: 287811 - protein, 16 aa, Homo sapiens
  CDR3 for alpha chain variable domain of TCR clone 143906 (TRAV35, TRAJ28)
RAGQRYSGAGSYQLTF

SEQ ID NO: 287812 - protein, 14 aa, Homo sapiens
  CDR3 for beta chain variable domain of TCR clone 143906 (TRBV18, TRBJ2-7)
CASSPRGGAYEQYF

SEQ ID NO: 287813 - protein, 13 aa, Homo sapiens
  CDR3 for alpha chain variable domain of TCR clone 143907 (TRAV23/DV6, TRAJ58)
CAATGTSGARLTF

SEQ ID NO: 287814 - protein, 13 aa, Homo sapiens
  CDR3 for beta chain variable domain of TCR clone 143907 (TRBV5-5, TRBJ1-2)
CASSFWRGEDYTF

SEQ ID NO: 287815 - protein, 16 aa, Homo sapiens
  CDR3 for alpha chain variable domain of TCR clone 143908 (TRAV16, TRAJ52)
CALSGVGGTSYGKLTF

SEQ ID NO: 287816 - protein, 14 aa, Homo sapiens
  CDR3 for beta chain variable domain of TCR clone 143908 (TRBV19, TRBJ1-2)
CASSLQGQAYGYPF

SEQ ID NO: 287817 - protein, 14 aa, Homo sapiens
  CDR3 for alpha chain variable domain of TCR clone 143909 (TRAV1-2, TRAJ16)
CTVNRFSDGQKQLF

SEQ ID NO: 287818 - protein, 13 aa, Homo sapiens
  CDR3 for beta chain variable domain of TCR clone 143909 (TRBV12-4, TRBJ2-5)
CASSLGGSRTQYF

SEQ ID NO: 287819 - protein, 11 aa, Homo sapiens
  CDR3 for alpha chain variable domain of TCR clone 143910 (TRAV29/DV5, TRAJ43)
CAAKTNNAMRF

SEQ ID NO: 287820 - protein, 14 aa, Homo sapiens
  CDR3 for beta chain variable domain of TCR clone 143910 (TRBV11-2, TRBJ2-7)
CASSPSTTSYEQYF

SEQ ID NO: 287821 - protein, 14 aa, Homo sapiens
  CDR3 for alpha chain variable domain of TCR clone 143911 (TRAV29/DV5, TRAJ36)
CAARRKTGANNLFF

SEQ ID NO: 287822 - protein, 15 aa, Homo sapiens
  CDR3 for beta chain variable domain of TCR clone 143911 (TRBV11-1, TRBJ2-7)
CASSLNYGASYEQYF

SEQ ID NO: 287823 - protein, 13 aa, Homo sapiens
  CDR3 for alpha chain variable domain of TCR clone 143912 (TRAV20, TRAJ45)
CAVKKRRCRRTHL

SEQ ID NO: 287824 - protein, 14 aa, Homo sapiens
  CDR3 for beta chain variable domain of TCR clone 143912 (TRBV15, TRBJ2-5)
CATSIWGLGETQYF

SEQ ID NO: 287825 - protein, 11 aa, Homo sapiens
  CDR3 for alpha chain variable domain of TCR clone 143913 (TRAV1-1, TRAJ23)
CAVRHGGKLIF

SEQ ID NO: 287826 - protein, 14 aa, Homo sapiens
  CDR3 for beta chain variable domain of TCR clone 143913 (TRBV19, TRBJ2-1)
CASPTFVLCGEQFF

SEQ ID NO: 287827 - protein, 14 aa, Homo sapiens
  CDR3 for alpha chain variable domain of TCR clone 143914 (TRAV12-2, TRAJ40)
CAVKIPSGTYKYIF

SEQ ID NO: 287828 - protein, 15 aa, Homo sapiens
  CDR3 for beta chain variable domain of TCR clone 143914 (TRBV7-8, TRBJ2-3)
CASRKLRDHTDTQYF

SEQ ID NO: 287829 - protein, 15 aa, Homo sapiens
  CDR3 for alpha chain variable domain of TCR clone 143915 (TRAV8-3, TRAJ45)
CASSYSGGGATDSPL

SEQ ID NO: 287830 - protein, 13 aa, Homo sapiens
  CDR3 for beta chain variable domain of TCR clone 143915 (TRBV10-3, TRBJ2-7)
CASKLAVNYEQYF

SEQ ID NO: 287831 - protein, 14 aa, Homo sapiens
  CDR3 for alpha chain variable domain of TCR clone 143916 (TRAV34, TRAJ22)
CGADTSGSARQLTF

SEQ ID NO: 287832 - protein, 17 aa, Homo sapiens
  CDR3 for beta chain variable domain of TCR clone 143916 (TRBV20-1, TRBJ2-2)
CSASGSGQGGLTGELFF

SEQ ID NO: 287833 - protein, 12 aa, Homo sapiens
  CDR3 for alpha chain variable domain of TCR clone 143917 (TRAV8-3, TRAJ26)
CAGDNHGQNFVF

SEQ ID NO: 287834 - protein, 14 aa, Homo sapiens
  CDR3 for beta chain variable domain of TCR clone 143917 (TRBV7-2, TRBJ2-7)
CASRSQGAAYEQYF

SEQ ID NO: 287835 - protein, 14 aa, Homo sapiens
  CDR3 for alpha chain variable domain of TCR clone 143918 (TRAV13-2, TRAJ22)
CADGTLGSARQLTL

SEQ ID NO: 287836 - protein, 15 aa, Homo sapiens
  CDR3 for beta chain variable domain of TCR clone 143918 (TRBV6-3, TRBJ2-7)
CASSSPGTVFYEQYF

SEQ ID NO: 287837 - protein, 16 aa, Homo sapiens
  CDR3 for alpha chain variable domain of TCR clone 143919 (TRAV30, TRAJ24)
CGKEIVDADSWGKFQF

SEQ ID NO: 287838 - protein, 12 aa, Homo sapiens
  CDR3 for beta chain variable domain of TCR clone 143919 (TRBV12-4, TRBJ2-3)
CASSSTTDTQYF

SEQ ID NO: 287839 - protein, 15 aa, Homo sapiens
  CDR3 for alpha chain variable domain of TCR clone 143920 (TRAV26-1, TRAJ44)
CIVRANTGTASKLTF

SEQ ID NO: 287840 - protein, 12 aa, Homo sapiens
  CDR3 for beta chain variable domain of TCR clone 143920 (TRBV2, TRBJ2-1)
GRGLPYYNEQFF

SEQ ID NO: 287841 - protein, 13 aa, Homo sapiens
  CDR3 for alpha chain variable domain of TCR clone 143921 (TRAV21, TRAJ47)
CAVSGLYGNKLVF

SEQ ID NO: 287842 - protein, 17 aa, Homo sapiens
  CDR3 for beta chain variable domain of TCR clone 143921 (TRBV15, TRBJ2-3)
CATSGTTSEQGTDTQYF

SEQ ID NO: 287843 - protein, 10 aa, Homo sapiens
  CDR3 for alpha chain variable domain of TCR clone 143922 (TRAV23/DV6, TRAJ31)
CARGGARLML

SEQ ID NO: 287844 - protein, 14 aa, Homo sapiens
  CDR3 for beta chain variable domain of TCR clone 143922 (TRBV7-8, TRBJ1-2)
CASSPDSLSYGYTF

SEQ ID NO: 287845 - protein, 12 aa, Homo sapiens
  CDR3 for alpha chain variable domain of TCR clone 143923 (TRAV8-3, TRAJ20)
CAVGANVYKLSF

SEQ ID NO: 287846 - protein, 15 aa, Homo sapiens
  CDR3 for beta chain variable domain of TCR clone 143923 (TRBV11-2, TRBJ2-1)
CASSLGTSGLNEQFF

SEQ ID NO: 287847 - protein, 14 aa, Homo sapiens
  CDR3 for alpha chain variable domain of TCR clone 143924 (TRAV23/DV6, TRAJ17)
CAARGRAAGNTLTF

SEQ ID NO: 287848 - protein, 12 aa, Homo sapiens
  CDR3 for beta chain variable domain of TCR clone 143924 (TRBV7-9, TRBJ2-3)
CASSSITDTQYF

SEQ ID NO: 287849 - protein, 13 aa, Homo sapiens
  CDR3 for alpha chain variable domain of TCR clone 143925 (TRAV29/DV5, TRAJ31)
CAARRNNNARLMF

SEQ ID NO: 287850 - protein, 16 aa, Homo sapiens
  CDR3 for beta chain variable domain of TCR clone 143925 (TRBV20-1, TRBJ1-4)
CSAPGQGLLTNEKLLF

SEQ ID NO: 287851 - protein, 15 aa, Homo sapiens
  CDR3 for alpha chain variable domain of TCR clone 143926 (TRAV3, TRAJ5)
CAVRDRKTGRRALTF

SEQ ID NO: 287852 - protein, 15 aa, Homo sapiens
  CDR3 for beta chain variable domain of TCR clone 143926 (TRBV28, TRBJ2-1)
CASSFAQGSADEQFF

SEQ ID NO: 287853 - protein, 14 aa, Homo sapiens
  CDR3 for alpha chain variable domain of TCR clone 143927 (TRAV17, TRAJ57)
CATDPQGGSEKLVF

SEQ ID NO: 287854 - protein, 11 aa, Homo sapiens
  CDR3 for beta chain variable domain of TCR clone 143927 (TRBV19, TRBJ1-1)
CASSIGSEAFF

SEQ ID NO: 287855 - protein, 15 aa, Homo sapiens
  CDR3 for alpha chain variable domain of TCR clone 143928 (TRAV27, TRAJ38)
CAARRNAGNNRKLIW

SEQ ID NO: 287856 - protein, 16 aa, Homo sapiens
  CDR3 for beta chain variable domain of TCR clone 143928 (TRBV12-4, TRBJ2-1)
CASTEQGMDRSNEQFF

SEQ ID NO: 287857 - protein, 13 aa, Homo sapiens
  CDR3 for alpha chain variable domain of TCR clone 143929 (TRAV17, TRAJ9)
CATDGTGGFKTIF

SEQ ID NO: 287858 - protein, 14 aa, Homo sapiens
  CDR3 for beta chain variable domain of TCR clone 143929 (TRBV3-1, TRBJ2-5)
CASSQGPDQETQYF

SEQ ID NO: 287859 - protein, 11 aa, Homo sapiens
  CDR3 for alpha chain variable domain of TCR clone 143930 (TRAV3, TRAJ21)
CAVGNFNNFYF

SEQ ID NO: 287860 - protein, 13 aa, Homo sapiens
  CDR3 for beta chain variable domain of TCR clone 143930 (TRBV9, TRBJ2-1)
CASSVGQGGEQFF

SEQ ID NO: 287861 - protein, 14 aa, Homo sapiens
  CDR3 for alpha chain variable domain of TCR clone 143931 (TRAV9-2, TRAJ39)
CALYIYNAGNMLTF

SEQ ID NO: 287862 - protein, 17 aa, Homo sapiens
  CDR3 for beta chain variable domain of TCR clone 143931 (TRBV28, TRBJ2-5)
CASNTPEGDALQETQYF

SEQ ID NO: 287863 - protein, 14 aa, Homo sapiens
  CDR3 for alpha chain variable domain of TCR clone 143932 (TRAV20, TRAJ29)
CAVQAWVGNTPLIF

SEQ ID NO: 287864 - protein, 15 aa, Homo sapiens
  CDR3 for beta chain variable domain of TCR clone 143932 (TRBV29-1, TRBJ2-7)
CSVEFFDRGSYEQYF

SEQ ID NO: 287865 - protein, 15 aa, Homo sapiens
  CDR3 for alpha chain variable domain of TCR clone 143933 (TRAV12-2, TRAJ53)
CAVNGGGGSKYKLTF

SEQ ID NO: 287866 - protein, 12 aa, Homo sapiens
  CDR3 for beta chain variable domain of TCR clone 143933 (TRBV7-6, TRBJ2-5)
CASSLSQETQYF

SEQ ID NO: 287867 - protein, 14 aa, Homo sapiens
  CDR3 for alpha chain variable domain of TCR clone 143934 (TRAV23/DV6, TRAJ40)
CAASLTSGTYKYIF

SEQ ID NO: 287868 - protein, 14 aa, Homo sapiens
  CDR3 for beta chain variable domain of TCR clone 143934 (TRBV5-1, TRBJ2-3)
CASSRGQGCGTQYF

SEQ ID NO: 287869 - protein, 14 aa, Homo sapiens
  CDR3 for alpha chain variable domain of TCR clone 143935 (TRAV36/DV7, TRAJ53)
EGENSGGSNYKLTF

SEQ ID NO: 287870 - protein, 15 aa, Homo sapiens
  CDR3 for beta chain variable domain of TCR clone 143935 (TRBV6-1, TRBJ2-5)
CASSEGWGIQETQYF

SEQ ID NO: 287871 - protein, 14 aa, Homo sapiens
  CDR3 for alpha chain variable domain of TCR clone 143936 (TRAV12-3, TRAJ10)
SHPPLTGGGNKLTF

SEQ ID NO: 287872 - protein, 16 aa, Homo sapiens
  CDR3 for beta chain variable domain of TCR clone 143936 (TRBV12-4, TRBJ1-6)
CASNLQGKGSPLHLGT

SEQ ID NO: 287873 - protein, 15 aa, Homo sapiens
  CDR3 for alpha chain variable domain of TCR clone 143937 (TRAV3, TRAJ13)
CAVRVYSGGYQKVTF

SEQ ID NO: 287874 - protein, 16 aa, Homo sapiens
  CDR3 for beta chain variable domain of TCR clone 143937 (TRBV7-8, TRBJ2-4)
CASSAERTLAKNMQYF

SEQ ID NO: 287875 - protein, 11 aa, Homo sapiens
  CDR3 for alpha chain variable domain of TCR clone 143938 (TRAV1-1, TRAJ23)
CAVRQGGELIF

SEQ ID NO: 287876 - protein, 14 aa, Homo sapiens
  CDR3 for beta chain variable domain of TCR clone 143938 (TRBV5-1, TRBJ2-7)
CASSRGESLYEQYF

SEQ ID NO: 287877 - protein, 14 aa, Homo sapiens
  CDR3 for alpha chain variable domain of TCR clone 143939 (TRAV1-2, TRAJ16)
CAVNRFSYGQKLLF

SEQ ID NO: 287878 - protein, 11 aa, Homo sapiens
  CDR3 for beta chain variable domain of TCR clone 143939 (TRBV29-1, TRBJ2-5)
CSEDRTGTQYF

SEQ ID NO: 287879 - protein, 12 aa, Homo sapiens
  CDR3 for alpha chain variable domain of TCR clone 143940 (TRAV9-2, TRAJ20)
CALSEGDYKLSF

SEQ ID NO: 287880 - protein, 13 aa, Homo sapiens
  CDR3 for beta chain variable domain of TCR clone 143940 (TRBV11-2, TRBJ1-6)
CGSSLAGVSPLHF

SEQ ID NO: 287881 - protein, 13 aa, Homo sapiens
  CDR3 for alpha chain variable domain of TCR clone 143941 (TRAV12-1, TRAJ43)
CVVSHHNNDDMRF

SEQ ID NO: 287882 - protein, 14 aa, Homo sapiens
  CDR3 for beta chain variable domain of TCR clone 143941 (TRBV5-5, TRBJ2-2)
CASSLLGDTGELFF

SEQ ID NO: 287883 - protein, 13 aa, Homo sapiens
  CDR3 for alpha chain variable domain of TCR clone 143942 (TRAV3, TRAJ20)
CAVRSLNDYKRSF

SEQ ID NO: 287884 - protein, 13 aa, Homo sapiens
  CDR3 for beta chain variable domain of TCR clone 143942 (TRBV6-1, TRBJ2-1)
CAGMDPTNNEHFF

SEQ ID NO: 287885 - protein, 14 aa, Homo sapiens
  CDR3 for alpha chain variable domain of TCR clone 143943 (TRAV27, TRAJ13)
CMSSNSGGYQKVTF

SEQ ID NO: 287886 - protein, 14 aa, Homo sapiens
  CDR3 for beta chain variable domain of TCR clone 143943 (TRBV7-6, TRBJ2-1)
CASSLGGGADEQFF

SEQ ID NO: 287887 - protein, 14 aa, Homo sapiens
  CDR3 for alpha chain variable domain of TCR clone 143944 (TRAV3, TRAJ33)
SAVRDMDSNYQLIW

SEQ ID NO: 287888 - protein, 19 aa, Homo sapiens
  CDR3 for beta chain variable domain of TCR clone 143944 (TRBV7-3, TRBJ1-2)
CASSFPQGNDGELWLHLRF

SEQ ID NO: 287889 - protein, 14 aa, Homo sapiens
  CDR3 for alpha chain variable domain of TCR clone 143945 (TRAV29/DV5, TRAJ37)
CAASGPGNTGNLIF

SEQ ID NO: 287890 - protein, 17 aa, Homo sapiens
  CDR3 for beta chain variable domain of TCR clone 143945 (TRBV4-1, TRBJ2-7)
CASSPFLTSGGVVEQYF

SEQ ID NO: 287891 - protein, 15 aa, Homo sapiens
  CDR3 for alpha chain variable domain of TCR clone 143946 (TRAV35, TRAJ40)
CAGQLGTSRTYTYIF

SEQ ID NO: 287892 - protein, 14 aa, Homo sapiens
  CDR3 for beta chain variable domain of TCR clone 143946 (TRBV7-3, TRBJ2-1)
CASSLAGGTNEQFF

SEQ ID NO: 287893 - protein, 14 aa, Homo sapiens
  CDR3 for alpha chain variable domain of TCR clone 143947 (TRAV26-1, TRAJ38)
CIADNACNNRKLLW

SEQ ID NO: 287894 - protein, 14 aa, Homo sapiens
  CDR3 for beta chain variable domain of TCR clone 143947 (TRBV7-3, TRBJ1-1)
CASSLGTGYTEAFF

SEQ ID NO: 287895 - protein, 14 aa, Homo sapiens
  CDR3 for alpha chain variable domain of TCR clone 143948 (TRAV12-3, TRAJ10)
SHLPLTGGGNKLTF

SEQ ID NO: 287896 - protein, 15 aa, Homo sapiens
  CDR3 for beta chain variable domain of TCR clone 143948 (TRBV27, TRBJ2-7)
CASSPDQDRLYEQYF

SEQ ID NO: 287897 - protein, 14 aa, Homo sapiens
  CDR3 for alpha chain variable domain of TCR clone 143949 (TRAV1-2, TRAJ8)
CAVREDTGFQKLVF

SEQ ID NO: 287898 - protein, 13 aa, Homo sapiens
  CDR3 for beta chain variable domain of TCR clone 143949 (TRBV20-1, TRBJ1-4)
CSARTPYNEELFF

SEQ ID NO: 287899 - protein, 15 aa, Homo sapiens
  CDR3 for alpha chain variable domain of TCR clone 143950 (TRAV12-1, TRAJ45)
CVVLSGGGGADGPTF

SEQ ID NO: 287900 - protein, 14 aa, Homo sapiens
  CDR3 for beta chain variable domain of TCR clone 143950 (TRBV11-2, TRBJ2-5)
CASSRTGGIETQYF

SEQ ID NO: 287901 - protein, 12 aa, Homo sapiens
  CDR3 for alpha chain variable domain of TCR clone 143951 (TRAV12-3, TRAJ17)
CAMTLTGSKLTF

SEQ ID NO: 287902 - protein, 15 aa, Homo sapiens
  CDR3 for beta chain variable domain of TCR clone 143951 (TRBV20-1, TRBJ2-7)
CSARDRVSGMNEQYF

SEQ ID NO: 287903 - protein, 12 aa, Homo sapiens
  CDR3 for alpha chain variable domain of TCR clone 143952 (TRAV26-1, TRAJ35)
CIGLSFGNVLHC

SEQ ID NO: 287904 - protein, 12 aa, Homo sapiens
  CDR3 for beta chain variable domain of TCR clone 143952 (TRBV7-9, TRBJ1-5)
CASSPQGQPQHF

SEQ ID NO: 287905 - protein, 13 aa, Homo sapiens
  CDR3 for alpha chain variable domain of TCR clone 143953 (TRAV26-1, TRAJ40)
CIVATSGTYKYIF

SEQ ID NO: 287906 - protein, 12 aa, Homo sapiens
  CDR3 for beta chain variable domain of TCR clone 143953 (TRBV3-1, TRBJ2-1)
CASSQGSSGQFF

SEQ ID NO: 287907 - protein, 17 aa, Homo sapiens
  CDR3 for alpha chain variable domain of TCR clone 143954 (TRAV3, TRAJ42)
CAVRDRDYGGSQGNLIF

SEQ ID NO: 287908 - protein, 19 aa, Homo sapiens
  CDR3 for beta chain variable domain of TCR clone 143954 (TRBV7-9, TRBJ2-6)
CASSLESATVLPGANVLAF

SEQ ID NO: 287909 - protein, 16 aa, Homo sapiens
  CDR3 for alpha chain variable domain of TCR clone 143955 (TRAV12-1, TRAJ8)
CVVNGRGNTGFQKLVF

SEQ ID NO: 287910 - protein, 15 aa, Homo sapiens
  CDR3 for beta chain variable domain of TCR clone 143955 (TRBV6-1, TRBJ1-2)
CASNPGRGGPYGYTF

SEQ ID NO: 287911 - protein, 16 aa, Homo sapiens
  CDR3 for alpha chain variable domain of TCR clone 143956 (TRAV20, TRAJ22)
CAVQASSSGSARQLTF

SEQ ID NO: 287912 - protein, 12 aa, Homo sapiens
  CDR3 for beta chain variable domain of TCR clone 143956 (TRBV7-2, TRBJ2-1)
CASSPQDIEQFF

SEQ ID NO: 287913 - protein, 14 aa, Homo sapiens
  CDR3 for alpha chain variable domain of TCR clone 143957 (TRAV3, TRAJ7)
CAVREEEREQQTRF

SEQ ID NO: 287914 - protein, 16 aa, Homo sapiens
  CDR3 for beta chain variable domain of TCR clone 143957 (TRBV7-8, TRBJ2-6)
CASRVGDSSGANVLTF

SEQ ID NO: 287915 - protein, 13 aa, Homo sapiens
  CDR3 for alpha chain variable domain of TCR clone 143958 (TRAV27, TRAJ45)
CRSSGGGADGLTF

SEQ ID NO: 287916 - protein, 16 aa, Homo sapiens
  CDR3 for beta chain variable domain of TCR clone 143958 (TRBV29-1, TRBJ2-7)
CSVEDAEDGTAYEQYF

SEQ ID NO: 287917 - protein, 14 aa, Homo sapiens
  CDR3 for alpha chain variable domain of TCR clone 143959 (TRAV38-1, TRAJ39)
CAFAYNNAGNMLTF

SEQ ID NO: 287918 - protein, 15 aa, Homo sapiens
  CDR3 for beta chain variable domain of TCR clone 143959 (TRBV19, TRBJ2-6)
CASSIGPSGANVVTF

SEQ ID NO: 287919 - protein, 15 aa, Homo sapiens
  CDR3 for alpha chain variable domain of TCR clone 143960 (TRAV17, TRAJ56)
CATEPFTGANSKLTF

SEQ ID NO: 287920 - protein, 15 aa, Homo sapiens
  CDR3 for beta chain variable domain of TCR clone 143960 (TRBV18, TRBJ2-3)
CASSPLAGETDTQYF

SEQ ID NO: 287921 - protein, 18 aa, Homo sapiens
  CDR3 for alpha chain variable domain of TCR clone 143961 (TRAV29/DV5, TRAJ52)
CAAIQGAAGGTSYGKLTF

SEQ ID NO: 287922 - protein, 14 aa, Homo sapiens
  CDR3 for beta chain variable domain of TCR clone 143961 (TRBV3-1, TRBJ2-1)
CASATSGSYNEQFF

SEQ ID NO: 287923 - protein, 14 aa, Homo sapiens
  CDR3 for alpha chain variable domain of TCR clone 143962 (TRAV2, TRAJ9)
CAVEDRSGGFKTIF

SEQ ID NO: 287924 - protein, 15 aa, Homo sapiens
  CDR3 for beta chain variable domain of TCR clone 143962 (TRBV5-1, TRBJ1-1)
CASSSTTGTNTEAFF

SEQ ID NO: 287925 - protein, 14 aa, Homo sapiens
  CDR3 for alpha chain variable domain of TCR clone 143963 (TRAV12-2, TRAJ13)
CAVKKTGGYQKVTF

SEQ ID NO: 287926 - protein, 15 aa, Homo sapiens
  CDR3 for beta chain variable domain of TCR clone 143963 (TRBV20-1, TRBJ2-1)
CSARGIGGIYNEQFF

SEQ ID NO: 287927 - protein, 16 aa, Homo sapiens
  CDR3 for alpha chain variable domain of TCR clone 143964 (TRAV16, TRAJ4)
CALSRMFSGGYNKLIF

SEQ ID NO: 287928 - protein, 14 aa, Homo sapiens
  CDR3 for beta chain variable domain of TCR clone 143964 (TRBV11-2, TRBJ2-7)
CASSSTGEGYEQYF

SEQ ID NO: 287929 - protein, 15 aa, Homo sapiens
  CDR3 for alpha chain variable domain of TCR clone 143965 (TRAV26-1, TRAJ24)
CIVREDTDSWGKLQF

SEQ ID NO: 287930 - protein, 18 aa, Homo sapiens
  CDR3 for beta chain variable domain of TCR clone 143965 (TRBV6-6, TRBJ1-3)
CASSYSKWDAISGNTIYF

SEQ ID NO: 287931 - protein, 13 aa, Homo sapiens
  CDR3 for alpha chain variable domain of TCR clone 143966 (TRAV17, TRAJ9)
CATDYTGGFKTIF

SEQ ID NO: 287932 - protein, 15 aa, Homo sapiens
  CDR3 for beta chain variable domain of TCR clone 143966 (TRBV7-7, TRBJ2-1)
CASSLASTSYNEQFF

SEQ ID NO: 287933 - protein, 16 aa, Homo sapiens
  CDR3 for alpha chain variable domain of TCR clone 143967 (TRAV12-1, TRAJ53)
CVVTSVAGGSNYKLTF

SEQ ID NO: 287934 - protein, 15 aa, Homo sapiens
  CDR3 for beta chain variable domain of TCR clone 143967 (TRBV7-3, TRBJ2-2)
CASSETGQGTGELFF

SEQ ID NO: 287935 - protein, 14 aa, Homo sapiens
  CDR3 for alpha chain variable domain of TCR clone 143968 (TRAV9-2, TRAJ39)
CALYIYNAGNMLTC

SEQ ID NO: 287936 - protein, 14 aa, Homo sapiens
  CDR3 for beta chain variable domain of TCR clone 143968 (TRBV6-3, TRBJ2-7)
CASSYSTGGDEQYF

SEQ ID NO: 287937 - protein, 13 aa, Homo sapiens
  CDR3 for alpha chain variable domain of TCR clone 143969 (TRAV8-2, TRAJ49)
CVLSPSTGNQFYF

SEQ ID NO: 287938 - protein, 14 aa, Homo sapiens
  CDR3 for beta chain variable domain of TCR clone 143969 (TRBV11-2, TRBJ2-7)
CASSRSGGAGEQYF

SEQ ID NO: 287939 - protein, 15 aa, Homo sapiens
  CDR3 for alpha chain variable domain of TCR clone 143970 (TRAV8-3, TRAJ6)
CAVGEDRGGSYIPTF

SEQ ID NO: 287940 - protein, 12 aa, Homo sapiens
  CDR3 for beta chain variable domain of TCR clone 143970 (TRBV12-4, TRBJ2-7)
CASSLGGYEQYF

SEQ ID NO: 287941 - protein, 12 aa, Homo sapiens
  CDR3 for alpha chain variable domain of TCR clone 143971 (TRAV3, TRAJ27)
CAVGDKAGKSTF

SEQ ID NO: 287942 - protein, 14 aa, Homo sapiens
  CDR3 for beta chain variable domain of TCR clone 143971 (TRBV5-1, TRBJ1-2)
CASSVDSTNYGYTF

SEQ ID NO: 287943 - protein, 13 aa, Homo sapiens
  CDR3 for alpha chain variable domain of TCR clone 143972 (TRAV3, TRAJ27)
CAVRPLGAGKSTF

SEQ ID NO: 287944 - protein, 13 aa, Homo sapiens
  CDR3 for beta chain variable domain of TCR clone 143972 (TRBV18, TRBJ1-1)
CASSPGRNTEAFF

SEQ ID NO: 287945 - protein, 13 aa, Homo sapiens
  CDR3 for alpha chain variable domain of TCR clone 143973 (TRAV8-1, TRAJ30)
CAVNSNRDDKIIF

SEQ ID NO: 287946 - protein, 12 aa, Homo sapiens
  CDR3 for beta chain variable domain of TCR clone 143973 (TRBV20-1, TRBJ1-1)
QCSTWGATEAFF

SEQ ID NO: 287947 - protein, 12 aa, Homo sapiens
  CDR3 for alpha chain variable domain of TCR clone 143974 (TRAV3, TRAJ26)
CAVRDYGQNFVF

SEQ ID NO: 287948 - protein, 16 aa, Homo sapiens
  CDR3 for beta chain variable domain of TCR clone 143974 (TRBV11-2, TRBJ1-2)
SASSPSAREANYGYTF

SEQ ID NO: 287949 - protein, 16 aa, Homo sapiens
  CDR3 for alpha chain variable domain of TCR clone 143975 (TRAV14/DV4, TRAJ54)
CAMREGRIQGAQKLVF

SEQ ID NO: 287950 - protein, 13 aa, Homo sapiens
  CDR3 for beta chain variable domain of TCR clone 143975 (TRBV19, TRBJ2-7)
CASSIDRTYEQYF

SEQ ID NO: 287951 - protein, 16 aa, Homo sapiens
  CDR3 for alpha chain variable domain of TCR clone 143976 (TRAV27, TRAJ53)
CAAPEGSGGSNYKLTF

SEQ ID NO: 287952 - protein, 14 aa, Homo sapiens
  CDR3 for beta chain variable domain of TCR clone 143976 (TRBV4-3, TRBJ1-5)
CASSQGRQGWPHHF

SEQ ID NO: 287953 - protein, 13 aa, Homo sapiens
  CDR3 for alpha chain variable domain of TCR clone 143977 (TRAV8-3, TRAJ44)
CAVVPGTASKLIF

SEQ ID NO: 287954 - protein, 14 aa, Homo sapiens
  CDR3 for beta chain variable domain of TCR clone 143977 (TRBV11-2, TRBJ2-3)
CASRRLARTDTQYF

SEQ ID NO: 287955 - protein, 14 aa, Homo sapiens
  CDR3 for alpha chain variable domain of TCR clone 143978 (TRAV12-2, TRAJ13)
CAVKKTGGYQKVTF

SEQ ID NO: 287956 - protein, 16 aa, Homo sapiens
  CDR3 for beta chain variable domain of TCR clone 143978 (TRBV4-2, TRBJ2-1)
CASSQGEGRTVNEQFF

SEQ ID NO: 287957 - protein, 15 aa, Homo sapiens
  CDR3 for alpha chain variable domain of TCR clone 143979 (TRAV8-2, TRAJ15)
CVVTMGNQAGTALIF

SEQ ID NO: 287958 - protein, 15 aa, Homo sapiens
  CDR3 for beta chain variable domain of TCR clone 143979 (TRBV2, TRBJ2-7)
CASSEGLARSYEQYF

SEQ ID NO: 287959 - protein, 15 aa, Homo sapiens
  CDR3 for alpha chain variable domain of TCR clone 143980 (TRAV21, TRAJ53)
CATLNSGGSNYKLTF

SEQ ID NO: 287960 - protein, 14 aa, Homo sapiens
  CDR3 for beta chain variable domain of TCR clone 143980 (TRBV20-1, TRBJ1-2)
CSARPGTALYGYTF

SEQ ID NO: 287961 - protein, 17 aa, Homo sapiens
  CDR3 for alpha chain variable domain of TCR clone 143981 (TRAV26-1, TRAJ37)
CIVRVITVSSNTGKLIF

SEQ ID NO: 287962 - protein, 16 aa, Homo sapiens
  CDR3 for beta chain variable domain of TCR clone 143981 (TRBV4-1, TRBJ2-3)
CASSQRAGGLTDTQYF

SEQ ID NO: 287963 - protein, 14 aa, Homo sapiens
  CDR3 for alpha chain variable domain of TCR clone 143982 (TRAV20, TRAJ56)
CAVQFVGANSKLTF

SEQ ID NO: 287964 - protein, 15 aa, Homo sapiens
  CDR3 for beta chain variable domain of TCR clone 143982 (TRBV7-9, TRBJ2-2)
CASSPETGAGGELFF

SEQ ID NO: 287965 - protein, 16 aa, Homo sapiens
  CDR3 for alpha chain variable domain of TCR clone 143983 (TRAV26-1, TRAJ38)
CIVRAYNAGNNRKLIW

SEQ ID NO: 287966 - protein, 15 aa, Homo sapiens
  CDR3 for beta chain variable domain of TCR clone 143983 (TRBV6-3, TRBJ2-7)
CDSSSPGTVFYEQYF

SEQ ID NO: 287967 - protein, 12 aa, Homo sapiens
  CDR3 for alpha chain variable domain of TCR clone 143984 (TRAV25, TRAJ29)
CAGHSGNTPLVF

SEQ ID NO: 287968 - protein, 13 aa, Homo sapiens
  CDR3 for beta chain variable domain of TCR clone 143984 (TRBV4-2, TRBJ1-1)
CASSQAGNTEAFF

SEQ ID NO: 287969 - protein, 12 aa, Homo sapiens
  CDR3 for alpha chain variable domain of TCR clone 143985 (TRAV26-1, TRAJ36)
CIVRVRADNLFF

SEQ ID NO: 287970 - protein, 14 aa, Homo sapiens
  CDR3 for beta chain variable domain of TCR clone 143985 (TRBV12-5, TRBJ2-5)
CASGSRTHQDTQYF

SEQ ID NO: 287971 - protein, 10 aa, Homo sapiens
  CDR3 for alpha chain variable domain of TCR clone 143986 (TRAV24, TRAJ23)
CAFLGGKLIF

SEQ ID NO: 287972 - protein, 14 aa, Homo sapiens
  CDR3 for beta chain variable domain of TCR clone 143986 (TRBV7-2, TRBJ2-5)
CASSFTQGQETQYF

SEQ ID NO: 287973 - protein, 17 aa, Homo sapiens
  CDR3 for alpha chain variable domain of TCR clone 143987 (TRAV3, TRAJ6)
CAVRDGTRVGGSYIPTF

SEQ ID NO: 287974 - protein, 12 aa, Homo sapiens
  CDR3 for beta chain variable domain of TCR clone 143987 (TRBV11-2, TRBJ2-2)
CASSLGGGELFF

SEQ ID NO: 287975 - protein, 14 aa, Homo sapiens
  CDR3 for alpha chain variable domain of TCR clone 143988 (TRAV23/DV6, TRAJ45)
CAASWGGGADGLTL

SEQ ID NO: 287976 - protein, 15 aa, Homo sapiens
  CDR3 for beta chain variable domain of TCR clone 143988 (TRBV4-2, TRBJ1-2)
CASSRNTGAGYGYTF

SEQ ID NO: 287977 - protein, 13 aa, Homo sapiens
  CDR3 for alpha chain variable domain of TCR clone 143989 (TRAV21, TRAJ11)
CAVPNSGYSTLTF

SEQ ID NO: 287978 - protein, 13 aa, Homo sapiens
  CDR3 for beta chain variable domain of TCR clone 143989 (TRBV7-2, TRBJ1-1)
SASNLKGAKVAFF

SEQ ID NO: 287979 - protein, 15 aa, Homo sapiens
  CDR3 for alpha chain variable domain of TCR clone 143990 (TRAV16, TRAJ10)
FALRELTGGGNKLTF

SEQ ID NO: 287980 - protein, 14 aa, Homo sapiens
  CDR3 for beta chain variable domain of TCR clone 143990 (TRBV5-5, TRBJ2-7)
CASSLGQGTYEQYF

SEQ ID NO: 287981 - protein, 14 aa, Homo sapiens
  CDR3 for alpha chain variable domain of TCR clone 143991 (TRAV12-1, TRAJ49)
CVVRSSNTGNQFYF

SEQ ID NO: 287982 - protein, 14 aa, Homo sapiens
  CDR3 for beta chain variable domain of TCR clone 143991 (TRBV4-1, TRBJ1-1)
CASSPTGIHTEAFF

SEQ ID NO: 287983 - protein, 18 aa, Homo sapiens
  CDR3 for alpha chain variable domain of TCR clone 143992 (TRAV21, TRAJ52)
CAVRPSPAVGTSYGKLTF

SEQ ID NO: 287984 - protein, 17 aa, Homo sapiens
  CDR3 for beta chain variable domain of TCR clone 143992 (TRBV13, TRBJ2-3)
RASSLSRVAGGRNTQYF

SEQ ID NO: 287985 - protein, 15 aa, Homo sapiens
  CDR3 for alpha chain variable domain of TCR clone 143993 (TRAV12-2, TRAJ43)
CAFDMRFGPGTRLTV

SEQ ID NO: 287986 - protein, 17 aa, Homo sapiens
  CDR3 for beta chain variable domain of TCR clone 143993 (TRBV13, TRBJ2-3)
CASSLSRVAGGRNTQYI

SEQ ID NO: 287987 - protein, 14 aa, Homo sapiens
  CDR3 for alpha chain variable domain of TCR clone 143994 (TRAV13-1, TRAJ35)
CAASKGGFGNVLHC

SEQ ID NO: 287988 - protein, 15 aa, Homo sapiens
  CDR3 for beta chain variable domain of TCR clone 143994 (TRBV20-1, TRBJ2-3)
CSARLSGFYTDTQYF

SEQ ID NO: 287989 - protein, 11 aa, Homo sapiens
  CDR3 for alpha chain variable domain of TCR clone 143995 (TRAV29/DV5, TRAJ49)
CAAVPGNQFYF

SEQ ID NO: 287990 - protein, 13 aa, Homo sapiens
  CDR3 for beta chain variable domain of TCR clone 143995 (TRBV18, TRBJ2-5)
CASSLQGQETQYF

SEQ ID NO: 287991 - protein, 11 aa, Homo sapiens
  CDR3 for alpha chain variable domain of TCR clone 143996 (TRAV24, TRAJ34)
CAFPVTDKLIF

SEQ ID NO: 287992 - protein, 13 aa, Homo sapiens
  CDR3 for beta chain variable domain of TCR clone 143996 (TRBV7-2, TRBJ1-6)
CASSLKFDSPLHF

SEQ ID NO: 287993 - protein, 11 aa, Homo sapiens
  CDR3 for alpha chain variable domain of TCR clone 143997 (TRAV12-3, TRAJ43)
CAMSVSNDMRF

SEQ ID NO: 287994 - protein, 12 aa, Homo sapiens
  CDR3 for beta chain variable domain of TCR clone 143997 (TRBV20-1, TRBJ1-1)
QCYTWGGTEAFF

SEQ ID NO: 287995 - protein, 12 aa, Homo sapiens
  CDR3 for alpha chain variable domain of TCR clone 143998 (TRAV1-2, TRAJ9)
CAGYTGGFKTIF

SEQ ID NO: 287996 - protein, 15 aa, Homo sapiens
  CDR3 for beta chain variable domain of TCR clone 143998 (TRBV11-2, TRBJ2-1)
CASSPAGQSLDEQFF

SEQ ID NO: 287997 - protein, 12 aa, Homo sapiens
  CDR3 for alpha chain variable domain of TCR clone 143999 (TRAV27, TRAJ13)
CAGSGGYQKVTF

SEQ ID NO: 287998 - protein, 15 aa, Homo sapiens
  CDR3 for beta chain variable domain of TCR clone 143999 (TRBV20-1, TRBJ2-6)
CSARDRGPGANVLTF

SEQ ID NO: 287999 - protein, 13 aa, Homo sapiens
  CDR3 for alpha chain variable domain of TCR clone 144000 (TRAV12-2, TRAJ31)
CAVKADNNARLMF

SEQ ID NO: 288000 - protein, 15 aa, Homo sapiens
  CDR3 for beta chain variable domain of TCR clone 144000 (TRBV20-1, TRBJ2-7)
CSARDRVSGMDEQYF

SEQ ID NO: 288001 - protein, 13 aa, Homo sapiens
  CDR3 for alpha chain variable domain of TCR clone 144001 (TRAV36/DV7, TRAJ54)
CAVLIQGAQKLVF

SEQ ID NO: 288002 - protein, 20 aa, Homo sapiens
  CDR3 for beta chain variable domain of TCR clone 144001 (TRBV23-1, TRBJ2-1)
TVSRRQQACPAGGGGNEQFF

SEQ ID NO: 288003 - protein, 14 aa, Homo sapiens
  CDR3 for alpha chain variable domain of TCR clone 144002 (TRAV36/DV7, TRAJ44)
CCGANTGTASKLTF

SEQ ID NO: 288004 - protein, 15 aa, Homo sapiens
  CDR3 for beta chain variable domain of TCR clone 144002 (TRBV5-1, TRBJ2-2)
CASSSQGGNTGELFF

SEQ ID NO: 288005 - protein, 12 aa, Homo sapiens
  CDR3 for alpha chain variable domain of TCR clone 144003 (TRAV12-3, TRAJ17)
CAMTLTGNKLTF

SEQ ID NO: 288006 - protein, 18 aa, Homo sapiens
  CDR3 for beta chain variable domain of TCR clone 144003 (TRBV4-3, TRBJ1-6)
CASSQATPASSYNSPLHF

SEQ ID NO: 288007 - protein, 14 aa, Homo sapiens
  CDR3 for alpha chain variable domain of TCR clone 144004 (TRAV26-1, TRAJ49)
CIVRPSNTGNQFYF

SEQ ID NO: 288008 - protein, 15 aa, Homo sapiens
  CDR3 for beta chain variable domain of TCR clone 144004 (TRBV19, TRBJ1-1)
CTSMGFRDVNTEAFF

SEQ ID NO: 288009 - protein, 13 aa, Homo sapiens
  CDR3 for alpha chain variable domain of TCR clone 144005 (TRAV13-1, TRAJ39)
CVASIWAGNMLTF

SEQ ID NO: 288010 - protein, 15 aa, Homo sapiens
  CDR3 for beta chain variable domain of TCR clone 144005 (TRBV7-9, TRBJ1-1)
CASSLLEQGGTEAFF

SEQ ID NO: 288011 - protein, 14 aa, Homo sapiens
  CDR3 for alpha chain variable domain of TCR clone 144006 (TRAV2, TRAJ20)
CAVEDGTNDYKLSF

SEQ ID NO: 288012 - protein, 16 aa, Homo sapiens
  CDR3 for beta chain variable domain of TCR clone 144006 (TRBV7-8, TRBJ2-1)
CASSLVGGGPYNEQFF

SEQ ID NO: 288013 - protein, 12 aa, Homo sapiens
  CDR3 for alpha chain variable domain of TCR clone 144007 (TRAV13-2, TRAJ8)
FAPWLGFQKLVF

SEQ ID NO: 288014 - protein, 16 aa, Homo sapiens
  CDR3 for beta chain variable domain of TCR clone 144007 (TRBV5-1, TRBJ2-7)
CASSLEGLAGLYEQYF

SEQ ID NO: 288015 - protein, 13 aa, Homo sapiens
  CDR3 for alpha chain variable domain of TCR clone 144008 (TRAV27, TRAJ18)
CAGRGSTLGRLYF

SEQ ID NO: 288016 - protein, 17 aa, Homo sapiens
  CDR3 for beta chain variable domain of TCR clone 144008 (TRBV7-8, TRBJ2-6)
CASSAGTGGAGANVLTF

SEQ ID NO: 288017 - protein, 11 aa, Homo sapiens
  CDR3 for alpha chain variable domain of TCR clone 144009 (TRAV1-2, TRAJ31)
CAVNNNARLMF

SEQ ID NO: 288018 - protein, 15 aa, Homo sapiens
  CDR3 for beta chain variable domain of TCR clone 144009 (TRBV28, TRBJ2-1)
CAGSTIAGGRSEQFF

SEQ ID NO: 288019 - protein, 12 aa, Homo sapiens
  CDR3 for alpha chain variable domain of TCR clone 144010 (TRAV12-3, TRAJ21)
GAMFNNFNKFYF

SEQ ID NO: 288020 - protein, 14 aa, Homo sapiens
  CDR3 for beta chain variable domain of TCR clone 144010 (TRBV28, TRBJ2-1)
CASSIQGTVGEQFF

SEQ ID NO: 288021 - protein, 14 aa, Homo sapiens
  CDR3 for alpha chain variable domain of TCR clone 144011 (TRAV26-1, TRAJ45)
CIEVTGGGDDGLTF

SEQ ID NO: 288022 - protein, 12 aa, Homo sapiens
  CDR3 for beta chain variable domain of TCR clone 144011 (TRBV12-4, TRBJ2-7)
CASSLGGYEQYF

SEQ ID NO: 288023 - protein, 14 aa, Homo sapiens
  CDR3 for alpha chain variable domain of TCR clone 144012 (TRAV13-1, TRAJ44)
CAAKATGTANKLTF

SEQ ID NO: 288024 - protein, 15 aa, Homo sapiens
  CDR3 for beta chain variable domain of TCR clone 144012 (TRBV6-1, TRBJ2-1)
CASSELRGQYNEQFF

SEQ ID NO: 288025 - protein, 13 aa, Homo sapiens
  CDR3 for alpha chain variable domain of TCR clone 144013 (TRAV21, TRAJ27)
CAARPGNAGKSTF

SEQ ID NO: 288026 - protein, 18 aa, Homo sapiens
  CDR3 for beta chain variable domain of TCR clone 144013 (TRBV7-8, TRBJ2-1)
CASSPAEGLAGGLNEQFF

SEQ ID NO: 288027 - protein, 15 aa, Homo sapiens
  CDR3 for alpha chain variable domain of TCR clone 144014 (TRAV13-1, TRAJ32)
CAASIYGRATNKLIF

SEQ ID NO: 288028 - protein, 12 aa, Homo sapiens
  CDR3 for beta chain variable domain of TCR clone 144014 (TRBV7-6, TRBJ2-3)
CASSTGTDTQYF

SEQ ID NO: 288029 - protein, 18 aa, Homo sapiens
  CDR3 for alpha chain variable domain of TCR clone 144015 (TRAV21, TRAJ52)
CAVRPSPAGGTSYGKLTF

SEQ ID NO: 288030 - protein, 17 aa, Homo sapiens
  CDR3 for beta chain variable domain of TCR clone 144015 (TRBV25-1, TRBJ2-1)
GASSAYGQGRGVYEQFF

SEQ ID NO: 288031 - protein, 15 aa, Homo sapiens
  CDR3 for alpha chain variable domain of TCR clone 144016 (TRAV8-3, TRAJ45)
FASSYSGGGADGLTF

SEQ ID NO: 288032 - protein, 13 aa, Homo sapiens
  CDR3 for beta chain variable domain of TCR clone 144016 (TRBV10-3, TRBJ2-7)
CASKLAVNYEQYV

SEQ ID NO: 288033 - protein, 17 aa, Homo sapiens
  CDR3 for alpha chain variable domain of TCR clone 144017 (TRAV29/DV5, TRAJ45)
CAADGPFSGGGADGLTF

SEQ ID NO: 288034 - protein, 12 aa, Homo sapiens
  CDR3 for beta chain variable domain of TCR clone 144017 (TRBV7-9, TRBJ2-7)
CASSLEGYEQYF

SEQ ID NO: 288035 - protein, 12 aa, Homo sapiens
  CDR3 for alpha chain variable domain of TCR clone 144018 (TRAV21, TRAJ21)
CAAHLPSNKFYF

SEQ ID NO: 288036 - protein, 17 aa, Homo sapiens
  CDR3 for beta chain variable domain of TCR clone 144018 (TRBV6-5, TRBJ2-7)
CASSYSPLAGNTYEQYF

SEQ ID NO: 288037 - protein, 12 aa, Homo sapiens
  CDR3 for alpha chain variable domain of TCR clone 144019 (TRAV1-1, TRAJ9)
CAVDTGGFKTIF

SEQ ID NO: 288038 - protein, 15 aa, Homo sapiens
  CDR3 for beta chain variable domain of TCR clone 144019 (TRBV6-3, TRBJ2-7)
CASSSPGTVLYEQYF

SEQ ID NO: 288039 - protein, 14 aa, Homo sapiens
  CDR3 for alpha chain variable domain of TCR clone 144020 (TRAV12-1, TRAJ42)
CVVIYGGSQGNLIF

SEQ ID NO: 288040 - protein, 14 aa, Homo sapiens
  CDR3 for beta chain variable domain of TCR clone 144020 (TRBV7-2, TRBJ1-2)
CASSQTGSTYGYTF

SEQ ID NO: 288041 - protein, 13 aa, Homo sapiens
  CDR3 for alpha chain variable domain of TCR clone 144021 (TRAV13-2, TRAJ48)
CAEMDFGNEKLTL

SEQ ID NO: 288042 - protein, 14 aa, Homo sapiens
  CDR3 for beta chain variable domain of TCR clone 144021 (TRBV19, TRBJ1-5)
CASGTEVYNQPQHF

SEQ ID NO: 288043 - protein, 19 aa, Homo sapiens
  CDR3 for alpha chain variable domain of TCR clone 144022 (TRAV1-2, TRAJ26)
CLLPLCCERPDNYGQNFVF

SEQ ID NO: 288044 - protein, 15 aa, Homo sapiens
  CDR3 for beta chain variable domain of TCR clone 144022 (TRBV9, TRBJ2-1)
CASSLAGSSYNEQFF

SEQ ID NO: 288045 - protein, 14 aa, Homo sapiens
  CDR3 for alpha chain variable domain of TCR clone 144023 (TRAV1-2, TRAJ24)
CAVLTTESWGKFQF

SEQ ID NO: 288046 - protein, 15 aa, Homo sapiens
  CDR3 for beta chain variable domain of TCR clone 144023 (TRBV6-6, TRBJ2-7)
CASSYSYGGSYEQYF

SEQ ID NO: 288047 - protein, 14 aa, Homo sapiens
  CDR3 for alpha chain variable domain of TCR clone 144024 (TRAV1-2, TRAJ33)
CAVRAPDSNYQLIW

SEQ ID NO: 288048 - protein, 15 aa, Homo sapiens
  CDR3 for beta chain variable domain of TCR clone 144024 (TRBV27, TRBJ2-7)
CASTKRRPEYYEQYF

SEQ ID NO: 288049 - protein, 10 aa, Homo sapiens
  CDR3 for alpha chain variable domain of TCR clone 144025 (TRAV2, TRAJ34)
CAVVNDKLIF

SEQ ID NO: 288050 - protein, 15 aa, Homo sapiens
  CDR3 for beta chain variable domain of TCR clone 144025 (TRBV3-1, TRBJ2-2)
CASSQDWARAGELFF

SEQ ID NO: 288051 - protein, 14 aa, Homo sapiens
  CDR3 for alpha chain variable domain of TCR clone 144026 (TRAV12-2, TRAJ33)
CAVKRARSNYQLIW

SEQ ID NO: 288052 - protein, 14 aa, Homo sapiens
  CDR3 for beta chain variable domain of TCR clone 144026 (TRBV13, TRBJ2-7)
CASSIKGASYEQYF

SEQ ID NO: 288053 - protein, 18 aa, Homo sapiens
  CDR3 for alpha chain variable domain of TCR clone 144027 (TRAV20, TRAJ4)
CAVQPYYMFSGGYNKLIF

SEQ ID NO: 288054 - protein, 13 aa, Homo sapiens
  CDR3 for beta chain variable domain of TCR clone 144027 (TRBV19, TRBJ2-3)
CATRDKITDTQYF

SEQ ID NO: 288055 - protein, 13 aa, Homo sapiens
  CDR3 for alpha chain variable domain of TCR clone 144028 (TRAV39, TRAJ33)
CAANPDSNYQLIW

SEQ ID NO: 288056 - protein, 12 aa, Homo sapiens
  CDR3 for beta chain variable domain of TCR clone 144028 (TRBV18, TRBJ1-1)
CQLRGRNTEAFF

SEQ ID NO: 288057 - protein, 17 aa, Homo sapiens
  CDR3 for alpha chain variable domain of TCR clone 144029 (TRAV14/DV4, TRAJ45)
CAMREKYSGGGADGLTF

SEQ ID NO: 288058 - protein, 11 aa, Homo sapiens
  CDR3 for beta chain variable domain of TCR clone 144029 (TRBV29-1, TRBJ2-7)
CSVDRDSEQYF

SEQ ID NO: 288059 - protein, 16 aa, Homo sapiens
  CDR3 for alpha chain variable domain of TCR clone 144030 (TRAV17, TRAJ52)
CATSNAGGTSYGKLAF

SEQ ID NO: 288060 - protein, 13 aa, Homo sapiens
  CDR3 for beta chain variable domain of TCR clone 144030 (TRBV27, TRBJ1-6)
CASSLVVVSPLHF

SEQ ID NO: 288061 - protein, 14 aa, Homo sapiens
  CDR3 for alpha chain variable domain of TCR clone 144031 (TRAV12-2, TRAJ13)
CAVKKTGGDQKVTF

SEQ ID NO: 288062 - protein, 13 aa, Homo sapiens
  CDR3 for beta chain variable domain of TCR clone 144031 (TRBV2, TRBJ2-7)
CASSVGGSGEQYF

SEQ ID NO: 288063 - protein, 13 aa, Homo sapiens
  CDR3 for alpha chain variable domain of TCR clone 144032 (TRAV12-2, TRAJ40)
CAVKRTGTYKYIF

SEQ ID NO: 288064 - protein, 14 aa, Homo sapiens
  CDR3 for beta chain variable domain of TCR clone 144032 (TRBV11-3, TRBJ2-7)
RASSPDRNTYEQYF

SEQ ID NO: 288065 - protein, 12 aa, Homo sapiens
  CDR3 for alpha chain variable domain of TCR clone 144033 (TRAV29/DV5, TRAJ34)
CAARHNTDTLIF

SEQ ID NO: 288066 - protein, 15 aa, Homo sapiens
  CDR3 for beta chain variable domain of TCR clone 144033 (TRBV19, TRBJ2-7)
CASSPAGSGEALRYF

SEQ ID NO: 288067 - protein, 16 aa, Homo sapiens
  CDR3 for alpha chain variable domain of TCR clone 144034 (TRAV30, TRAJ24)
CGTEIVDADSWGKFQF

SEQ ID NO: 288068 - protein, 15 aa, Homo sapiens
  CDR3 for beta chain variable domain of TCR clone 144034 (TRBV20-1, TRBJ2-7)
CSARDRDSGMDEQYF

SEQ ID NO: 288069 - protein, 15 aa, Homo sapiens
  CDR3 for alpha chain variable domain of TCR clone 144035 (TRAV12-1, TRAJ44)
CVADLPTGTASKLTF

SEQ ID NO: 288070 - protein, 13 aa, Homo sapiens
  CDR3 for beta chain variable domain of TCR clone 144035 (TRBV6-5, TRBJ2-5)
GASSPQGGETQYF

SEQ ID NO: 288071 - protein, 16 aa, Homo sapiens
  CDR3 for alpha chain variable domain of TCR clone 144036 (TRAV30, TRAJ24)
CGTEIVDAGSWGKFQF

SEQ ID NO: 288072 - protein, 14 aa, Homo sapiens
  CDR3 for beta chain variable domain of TCR clone 144036 (TRBV12-5, TRBJ2-5)
CASGSRTHQETQNF

SEQ ID NO: 288073 - protein, 13 aa, Homo sapiens
  CDR3 for alpha chain variable domain of TCR clone 144037 (TRAV8-6, TRAJ40)
CAVSVTGTYKYII

SEQ ID NO: 288074 - protein, 15 aa, Homo sapiens
  CDR3 for beta chain variable domain of TCR clone 144037 (TRBV4-1, TRBJ2-3)
CASGRGQGIPDTQYF

SEQ ID NO: 288075 - protein, 20 aa, Homo sapiens
  CDR3 for alpha chain variable domain of TCR clone 144038 (TRAV26-1, TRAJ42)
CCVLLHRQTYYGGSQGNLIF

SEQ ID NO: 288076 - protein, 14 aa, Homo sapiens
  CDR3 for beta chain variable domain of TCR clone 144038 (TRBV7-2, TRBJ2-1)
CASSPGLAGNEQFF

SEQ ID NO: 288077 - protein, 17 aa, Homo sapiens
  CDR3 for alpha chain variable domain of TCR clone 144039 (TRAV36/DV7, TRAJ52)
CAVAQRAGGTSYGKLTF

SEQ ID NO: 288078 - protein, 15 aa, Homo sapiens
  CDR3 for beta chain variable domain of TCR clone 144039 (TRBV7-9, TRBJ1-5)
CASSQGHQPNQPQHF

SEQ ID NO: 288079 - protein, 15 aa, Homo sapiens
  CDR3 for alpha chain variable domain of TCR clone 144040 (TRAV3, TRAJ45)
CAVRTPWGGADGLTF

SEQ ID NO: 288080 - protein, 16 aa, Homo sapiens
  CDR3 for beta chain variable domain of TCR clone 144040 (TRBV6-1, TRBJ2-2)
SASSFGQGANTGELFF

SEQ ID NO: 288081 - protein, 13 aa, Homo sapiens
  CDR3 for alpha chain variable domain of TCR clone 144041 (TRAV13-1, TRAJ39)
CSKYSNAGNMLTF

SEQ ID NO: 288082 - protein, 15 aa, Homo sapiens
  CDR3 for beta chain variable domain of TCR clone 144041 (TRBV7-8, TRBJ2-1)
CASSLADSLYNEQFF

SEQ ID NO: 288083 - protein, 11 aa, Homo sapiens
  CDR3 for alpha chain variable domain of TCR clone 144042 (TRAV13-2, TRAJ31)
CAENMDASLMF

SEQ ID NO: 288084 - protein, 15 aa, Homo sapiens
  CDR3 for beta chain variable domain of TCR clone 144042 (TRBV7-8, TRBJ1-2)
CASSLVRDGGLGYTF

SEQ ID NO: 288085 - protein, 10 aa, Homo sapiens
  CDR3 for alpha chain variable domain of TCR clone 144043 (TRAV13-1, TRAJ30)
CSARDDKIIF

SEQ ID NO: 288086 - protein, 15 aa, Homo sapiens
  CDR3 for beta chain variable domain of TCR clone 144043 (TRBV7-9, TRBJ1-2)
CASSLDREPNYGYTF

SEQ ID NO: 288087 - protein, 15 aa, Homo sapiens
  CDR3 for alpha chain variable domain of TCR clone 144044 (TRAV13-2, TRAJ45)
CVEHHSGGCADGLTF

SEQ ID NO: 288088 - protein, 15 aa, Homo sapiens
  CDR3 for beta chain variable domain of TCR clone 144044 (TRBV7-2, TRBJ2-7)
CASSLALGSAYEQYF

SEQ ID NO: 288089 - protein, 13 aa, Homo sapiens
  CDR3 for alpha chain variable domain of TCR clone 144045 (TRAV30, TRAJ39)
CGTEKNAGNMLTF

SEQ ID NO: 288090 - protein, 12 aa, Homo sapiens
  CDR3 for beta chain variable domain of TCR clone 144045 (TRBV28, TRBJ2-6)
CAIQAGANVLTF

SEQ ID NO: 288091 - protein, 13 aa, Homo sapiens
  CDR3 for alpha chain variable domain of TCR clone 144046 (TRAV21, TRAJ36)
CVVIKTGANTLFF

SEQ ID NO: 288092 - protein, 13 aa, Homo sapiens
  CDR3 for beta chain variable domain of TCR clone 144046 (TRBV29-1, TRBJ2-3)
CSATRGGRDTQYF

SEQ ID NO: 288093 - protein, 14 aa, Homo sapiens
  CDR3 for alpha chain variable domain of TCR clone 144047 (TRAV12-2, TRAJ13)
CAVKKTGGYQKVTF

SEQ ID NO: 288094 - protein, 14 aa, Homo sapiens
  CDR3 for beta chain variable domain of TCR clone 144047 (TRBV20-1, TRBJ2-2)
SAVLVPRAPGSCFF

SEQ ID NO: 288095 - protein, 13 aa, Homo sapiens
  CDR3 for alpha chain variable domain of TCR clone 144048 (TRAV35, TRAJ44)
CAGLSGTASKLTF

SEQ ID NO: 288096 - protein, 18 aa, Homo sapiens
  CDR3 for beta chain variable domain of TCR clone 144048 (TRBV6-6, TRBJ1-3)
CASSYSKWDSISGNTIYF

SEQ ID NO: 288097 - protein, 13 aa, Homo sapiens
  CDR3 for alpha chain variable domain of TCR clone 144049 (TRAV3, TRAJ5)
CSASDTGRRALTF

SEQ ID NO: 288098 - protein, 12 aa, Homo sapiens
  CDR3 for beta chain variable domain of TCR clone 144049 (TRBV28, TRBJ2-3)
CASSLYRDTQYF

SEQ ID NO: 288099 - protein, 13 aa, Homo sapiens
  CDR3 for alpha chain variable domain of TCR clone 144050 (TRAV20, TRAJ29)
CAVQAGGNTPLVF

SEQ ID NO: 288100 - protein, 15 aa, Homo sapiens
  CDR3 for beta chain variable domain of TCR clone 144050 (TRBV10-2, TRBJ2-5)
CASRGSGGPQETQYF

SEQ ID NO: 288101 - protein, 14 aa, Homo sapiens
  CDR3 for alpha chain variable domain of TCR clone 144051 (TRAV17, TRAJ39)
CATDPVRAGNMLTF

SEQ ID NO: 288102 - protein, 15 aa, Homo sapiens
  CDR3 for beta chain variable domain of TCR clone 144051 (TRBV13, TRBJ1-5)
CASSFGQGGVQPRHL

SEQ ID NO: 288103 - protein, 14 aa, Homo sapiens
  CDR3 for alpha chain variable domain of TCR clone 144052 (TRAV1-2, TRAJ16)
CAVNRFSDGQKLLF

SEQ ID NO: 288104 - protein, 13 aa, Homo sapiens
  CDR3 for beta chain variable domain of TCR clone 144052 (TRBV4-1, TRBJ2-1)
CASSQAGDDEQFF

SEQ ID NO: 288105 - protein, 14 aa, Homo sapiens
  CDR3 for alpha chain variable domain of TCR clone 144053 (TRAV1-2, TRAJ8)
CAVREDTGFQKLVF

SEQ ID NO: 288106 - protein, 16 aa, Homo sapiens
  CDR3 for beta chain variable domain of TCR clone 144053 (TRBV18, TRBJ2-7)
CASSPSTSGRNHEQYF

SEQ ID NO: 288107 - protein, 11 aa, Homo sapiens
  CDR3 for alpha chain variable domain of TCR clone 144054 (TRAV35, TRAJ30)
CAPGGDDKIIS

SEQ ID NO: 288108 - protein, 15 aa, Homo sapiens
  CDR3 for beta chain variable domain of TCR clone 144054 (TRBV20-1, TRBJ2-1)
CSASSAGSSYNEQFF

SEQ ID NO: 288109 - protein, 15 aa, Homo sapiens
  CDR3 for alpha chain variable domain of TCR clone 144055 (TRAV17, TRAJ54)
CATEKLGQGAQKRVF

SEQ ID NO: 288110 - protein, 16 aa, Homo sapiens
  CDR3 for beta chain variable domain of TCR clone 144055 (TRBV9, TRBJ1-2)
CASSVEEKVSPYGYTF

SEQ ID NO: 288111 - protein, 15 aa, Homo sapiens
  CDR3 for alpha chain variable domain of TCR clone 144056 (TRAV21, TRAJ53)
CATLNSGGSNYKLTF

SEQ ID NO: 288112 - protein, 12 aa, Homo sapiens
  CDR3 for beta chain variable domain of TCR clone 144056 (TRBV7-9, TRBJ1-4)
CASSTDREKLFF

SEQ ID NO: 288113 - protein, 14 aa, Homo sapiens
  CDR3 for alpha chain variable domain of TCR clone 144057 (TRAV2, TRAJ9)
CAVEDRSGGFKTIF

SEQ ID NO: 288114 - protein, 14 aa, Homo sapiens
  CDR3 for beta chain variable domain of TCR clone 144057 (TRBV5-4, TRBJ2-2)
CASRLDGGTGELFF

SEQ ID NO: 288115 - protein, 17 aa, Homo sapiens
  CDR3 for alpha chain variable domain of TCR clone 144058 (TRAV8-6, TRAJ58)
CAVSSWVGETSGSRLTF

SEQ ID NO: 288116 - protein, 17 aa, Homo sapiens
  CDR3 for beta chain variable domain of TCR clone 144058 (TRBV11-2, TRBJ2-1)
CARSLYPPGVEYNEQFF

SEQ ID NO: 288117 - protein, 15 aa, Homo sapiens
  CDR3 for alpha chain variable domain of TCR clone 144059 (TRAV12-3, TRAJ48)
CAMSASNFGNEKLTF

SEQ ID NO: 288118 - protein, 13 aa, Homo sapiens
  CDR3 for beta chain variable domain of TCR clone 144059 (TRBV24-1, TRBJ2-1)
CATRRGARNEQFF

SEQ ID NO: 288119 - protein, 15 aa, Homo sapiens
  CDR3 for alpha chain variable domain of TCR clone 144060 (TRAV3, TRAJ4)
CAVRDGTGGYNKLII

SEQ ID NO: 288120 - protein, 16 aa, Homo sapiens
  CDR3 for beta chain variable domain of TCR clone 144060 (TRBV27, TRBJ2-2)
CASSSSGVSNTGELFF

SEQ ID NO: 288121 - protein, 14 aa, Homo sapiens
  CDR3 for alpha chain variable domain of TCR clone 144061 (TRAV12-1, TRAJ34)
CVVNLDYNTDKLIF

SEQ ID NO: 288122 - protein, 13 aa, Homo sapiens
  CDR3 for beta chain variable domain of TCR clone 144061 (TRBV7-2, TRBJ2-1)
CASSLGVYNEQFF

SEQ ID NO: 288123 - protein, 17 aa, Homo sapiens
  CDR3 for alpha chain variable domain of TCR clone 144062 (TRAV8-6, TRAJ4)
CAVSDLGVAGGYNKLIF

SEQ ID NO: 288124 - protein, 13 aa, Homo sapiens
  CDR3 for beta chain variable domain of TCR clone 144062 (TRBV10-3, TRBJ1-2)
CAISERDSYGYTF

SEQ ID NO: 288125 - protein, 17 aa, Homo sapiens
  CDR3 for alpha chain variable domain of TCR clone 144063 (TRAV26-1, TRAJ46)
IASSESEKKSSGDKLTF

SEQ ID NO: 288126 - protein, 13 aa, Homo sapiens
  CDR3 for beta chain variable domain of TCR clone 144063 (TRBV11-3, TRBJ2-3)
CASSHDTKDTQYF

SEQ ID NO: 288127 - protein, 12 aa, Homo sapiens
  CDR3 for alpha chain variable domain of TCR clone 144064 (TRAV17, TRAJ43)
CATDAFPADMRF

SEQ ID NO: 288128 - protein, 14 aa, Homo sapiens
  CDR3 for beta chain variable domain of TCR clone 144064 (TRBV20-1, TRBJ2-3)
CSARDGVSTDTQYF

SEQ ID NO: 288129 - protein, 17 aa, Homo sapiens
  CDR3 for alpha chain variable domain of TCR clone 144065 (TRAV1-2, TRAJ8)
CAVRDPDENTGFQKLLF

SEQ ID NO: 288130 - protein, 16 aa, Homo sapiens
  CDR3 for beta chain variable domain of TCR clone 144065 (TRBV7-9, TRBJ2-2)
CASSGFGGANTGELFF

SEQ ID NO: 288131 - protein, 13 aa, Homo sapiens
  CDR3 for alpha chain variable domain of TCR clone 144066 (TRAV36/DV7, TRAJ49)
FAVEANTGNQFYF

SEQ ID NO: 288132 - protein, 13 aa, Homo sapiens
  CDR3 for beta chain variable domain of TCR clone 144066 (TRBV10-3, TRBJ2-7)
CASKLAVNYEQYF

SEQ ID NO: 288133 - protein, 13 aa, Homo sapiens
  CDR3 for alpha chain variable domain of TCR clone 144067 (TRAV17, TRAJ5)
CALRGTGSRALTF

SEQ ID NO: 288134 - protein, 18 aa, Homo sapiens
  CDR3 for beta chain variable domain of TCR clone 144067 (TRBV12-5, TRBJ2-5)
CASGSRTHKRPSTSGQAR

SEQ ID NO: 288135 - protein, 12 aa, Homo sapiens
  CDR3 for alpha chain variable domain of TCR clone 144068 (TRAV13-2, TRAJ8)
CAPWLGFQKLVF

SEQ ID NO: 288136 - protein, 14 aa, Homo sapiens
  CDR3 for beta chain variable domain of TCR clone 144068 (TRBV18, TRBJ1-5)
CASSRQQRYQPQHF

SEQ ID NO: 288137 - protein, 14 aa, Homo sapiens
  CDR3 for alpha chain variable domain of TCR clone 144069 (TRAV5, TRAJ4)
CAASFSGGYNKLIF

SEQ ID NO: 288138 - protein, 19 aa, Homo sapiens
  CDR3 for beta chain variable domain of TCR clone 144069 (TRBV2, TRBJ2-7)
CAGSDDETSGRANDYEQYF

SEQ ID NO: 288139 - protein, 15 aa, Homo sapiens
  CDR3 for alpha chain variable domain of TCR clone 144070 (TRAV12-2, TRAJ43)
CAFDLRFGAGTRLTV

SEQ ID NO: 288140 - protein, 17 aa, Homo sapiens
  CDR3 for beta chain variable domain of TCR clone 144070 (TRBV13, TRBJ2-3)
CASSLSRVAGGRNTQYF

SEQ ID NO: 288141 - protein, 15 aa, Homo sapiens
  CDR3 for alpha chain variable domain of TCR clone 144071 (TRAV8-3, TRAJ15)
CAVGSPNQAGTSLIF

SEQ ID NO: 288142 - protein, 14 aa, Homo sapiens
  CDR3 for beta chain variable domain of TCR clone 144071 (TRBV20-1, TRBJ2-1)
CSPNDEASYNEQFF

SEQ ID NO: 288143 - protein, 14 aa, Homo sapiens
  CDR3 for alpha chain variable domain of TCR clone 144072 (TRAV12-3, TRAJ10)
SHLPLTGGGNKLTF

SEQ ID NO: 288144 - protein, 15 aa, Homo sapiens
  CDR3 for beta chain variable domain of TCR clone 144072 (TRBV7-9, TRBJ1-6)
CASSSPGRGNSHLHF

SEQ ID NO: 288145 - protein, 16 aa, Homo sapiens
  CDR3 for alpha chain variable domain of TCR clone 144073 (TRAV3, TRAJ10)
CAVRGMRAGGGNKLTF

SEQ ID NO: 288146 - protein, 15 aa, Homo sapiens
  CDR3 for beta chain variable domain of TCR clone 144073 (TRBV11-2, TRBJ1-6)
CASTGFGTAVSPLHF

SEQ ID NO: 288147 - protein, 16 aa, Homo sapiens
  CDR3 for alpha chain variable domain of TCR clone 144074 (TRAV12-2, TRAJ40)
CAVIRGGTSGTYKYIF

SEQ ID NO: 288148 - protein, 16 aa, Homo sapiens
  CDR3 for beta chain variable domain of TCR clone 144074 (TRBV7-9, TRBJ2-1)
CASCDVAGGSYNEQFF

SEQ ID NO: 288149 - protein, 17 aa, Homo sapiens
  CDR3 for alpha chain variable domain of TCR clone 144075 (TRAV4, TRAJ13)
CLVGAQGSSGGYQKVTF

SEQ ID NO: 288150 - protein, 18 aa, Homo sapiens
  CDR3 for beta chain variable domain of TCR clone 144075 (TRBV15, TRBJ2-3)
CATSRDGARSWDTDTQYF

SEQ ID NO: 288151 - protein, 13 aa, Homo sapiens
  CDR3 for alpha chain variable domain of TCR clone 144076 (TRAV17, TRAJ39)
CAISTNAGNMLTF

SEQ ID NO: 288152 - protein, 13 aa, Homo sapiens
  CDR3 for beta chain variable domain of TCR clone 144076 (TRBV15, TRBJ1-6)
CATSGGLNSPLYF

SEQ ID NO: 288153 - protein, 14 aa, Homo sapiens
  CDR3 for alpha chain variable domain of TCR clone 144077 (TRAV16, TRAJ42)
CALLAGGSQGNLIF

SEQ ID NO: 288154 - protein, 16 aa, Homo sapiens
  CDR3 for beta chain variable domain of TCR clone 144077 (TRBV12-4, TRBJ1-5)
CASSRPVGGSNQPQHF

SEQ ID NO: 288155 - protein, 15 aa, Homo sapiens
  CDR3 for alpha chain variable domain of TCR clone 144078 (TRAV25, TRAJ52)
CAGRPGGTSYGKLTF

SEQ ID NO: 288156 - protein, 16 aa, Homo sapiens
  CDR3 for beta chain variable domain of TCR clone 144078 (TRBV24-1, TRBJ2-3)
CATSDPGTGATDTQYF

SEQ ID NO: 288157 - protein, 14 aa, Homo sapiens
  CDR3 for alpha chain variable domain of TCR clone 144079 (TRAV38-1, TRAJ45)
CASHSGGGADGLTF

SEQ ID NO: 288158 - protein, 13 aa, Homo sapiens
  CDR3 for beta chain variable domain of TCR clone 144079 (TRBV10-3, TRBJ1-2)
CAISERDSYSYTF

SEQ ID NO: 288159 - protein, 11 aa, Homo sapiens
  CDR3 for alpha chain variable domain of TCR clone 144080 (TRAV12-3, TRAJ43)
CAMSVSNDMRF

SEQ ID NO: 288160 - protein, 13 aa, Homo sapiens
  CDR3 for beta chain variable domain of TCR clone 144080 (TRBV20-1, TRBJ2-7)
CSATHTSGYEQYF

SEQ ID NO: 288161 - protein, 14 aa, Homo sapiens
  CDR3 for alpha chain variable domain of TCR clone 144081 (TRAV21, TRAJ22)
CAVFFSGSARQLTF

SEQ ID NO: 288162 - protein, 14 aa, Homo sapiens
  CDR3 for beta chain variable domain of TCR clone 144081 (TRBV19, TRBJ1-1)
CASSIREMNAEAFF

SEQ ID NO: 288163 - protein, 13 aa, Homo sapiens
  CDR3 for alpha chain variable domain of TCR clone 144082 (TRAV16, TRAJ4)
CALRTGGYNKLIF

SEQ ID NO: 288164 - protein, 12 aa, Homo sapiens
  CDR3 for beta chain variable domain of TCR clone 144082 (TRBV7-8, TRBJ2-7)
CASSLGDREQYF

SEQ ID NO: 288165 - protein, 14 aa, Homo sapiens
  CDR3 for alpha chain variable domain of TCR clone 144083 (TRAV26-1, TRAJ49)
CIVRLTKTGNQFYF

SEQ ID NO: 288166 - protein, 13 aa, Homo sapiens
  CDR3 for beta chain variable domain of TCR clone 144083 (TRBV4-1, TRBJ2-7)
CASSQGQAYEQYF

SEQ ID NO: 288167 - protein, 21 aa, Homo sapiens
  CDR3 for alpha chain variable domain of TCR clone 144084 (TRAV12-1, TRAJ37)
CVVNGGLWQHRQTNLLARDNF

SEQ ID NO: 288168 - protein, 12 aa, Homo sapiens
  CDR3 for beta chain variable domain of TCR clone 144084 (TRBV20-1, TRBJ1-2)
CSAPGFNYGYTF

SEQ ID NO: 288169 - protein, 14 aa, Homo sapiens
  CDR3 for alpha chain variable domain of TCR clone 144085 (TRAV12-3, TRAJ20)
CAMSAWRGDYKLSF

SEQ ID NO: 288170 - protein, 14 aa, Homo sapiens
  CDR3 for beta chain variable domain of TCR clone 144085 (TRBV7-3, TRBJ2-3)
CAISPSARTDTQYF

SEQ ID NO: 288171 - protein, 19 aa, Homo sapiens
  CDR3 for alpha chain variable domain of TCR clone 144086 (TRAV3, TRAJ6)
CAVRDRNPSRSVGSYIPTF

SEQ ID NO: 288172 - protein, 15 aa, Homo sapiens
  CDR3 for beta chain variable domain of TCR clone 144086 (TRBV18, TRBJ2-7)
CASSPTFMDSYEQFF

SEQ ID NO: 288173 - protein, 14 aa, Homo sapiens
  CDR3 for alpha chain variable domain of TCR clone 144087 (TRAV26-1, TRAJ38)
CIADNAGNNRKLIW

SEQ ID NO: 288174 - protein, 17 aa, Homo sapiens
  CDR3 for beta chain variable domain of TCR clone 144087 (TRBV7-9, TRBJ2-3)
CASSPTVAGDLTDTQYL

SEQ ID NO: 288175 - protein, 13 aa, Homo sapiens
  CDR3 for alpha chain variable domain of TCR clone 144088 (TRAV8-3, TRAJ6)
CAVGLGGSYIPTF

SEQ ID NO: 288176 - protein, 14 aa, Homo sapiens
  CDR3 for beta chain variable domain of TCR clone 144088 (TRBV11-2, TRBJ1-1)
CASSTQRGRTEAFF

SEQ ID NO: 288177 - protein, 12 aa, Homo sapiens
  CDR3 for alpha chain variable domain of TCR clone 144089 (TRAV12-3, TRAJ40)
CAMSSGTYKYIF

SEQ ID NO: 288178 - protein, 12 aa, Homo sapiens
  CDR3 for beta chain variable domain of TCR clone 144089 (TRBV7-3, TRBJ2-7)
CASSLEGYEQYF

SEQ ID NO: 288179 - protein, 14 aa, Homo sapiens
  CDR3 for alpha chain variable domain of TCR clone 144090 (TRAV1-2, TRAJ8)
CAVREDTGFQKLVF

SEQ ID NO: 288180 - protein, 12 aa, Homo sapiens
  CDR3 for beta chain variable domain of TCR clone 144090 (TRBV4-3, TRBJ2-1)
CASSLSGYEQFF

SEQ ID NO: 288181 - protein, 18 aa, Homo sapiens
  CDR3 for alpha chain variable domain of TCR clone 144091 (TRAV26-1, TRAJ23)
CIVRVGLEVWNQGGKLIF

SEQ ID NO: 288182 - protein, 18 aa, Homo sapiens
  CDR3 for beta chain variable domain of TCR clone 144091 (TRBV10-2, TRBJ2-2)
CISAPAVHRQADAGELFF

SEQ ID NO: 288183 - protein, 14 aa, Homo sapiens
  CDR3 for alpha chain variable domain of TCR clone 144092 (TRAV35, TRAJ13)
CAGSPSGGYQKVTF

SEQ ID NO: 288184 - protein, 17 aa, Homo sapiens
  CDR3 for beta chain variable domain of TCR clone 144092 (TRBV18, TRBJ1-5)
CQLTTCRVRQNNPPQHF

SEQ ID NO: 288185 - protein, 15 aa, Homo sapiens
  CDR3 for alpha chain variable domain of TCR clone 144093 (TRAV12-3, TRAJ3)
CAMSEGYSSASKIIF

SEQ ID NO: 288186 - protein, 13 aa, Homo sapiens
  CDR3 for beta chain variable domain of TCR clone 144093 (TRBV7-2, TRBJ1-1)
CASNLKGAKVAFF

SEQ ID NO: 288187 - protein, 14 aa, Homo sapiens
  CDR3 for alpha chain variable domain of TCR clone 144094 (TRAV13-1, TRAJ44)
CAAKATGNASKLAF

SEQ ID NO: 288188 - protein, 14 aa, Homo sapiens
  CDR3 for beta chain variable domain of TCR clone 144094 (TRBV19, TRBJ2-2)
CASSTLHRSGELFF

SEQ ID NO: 288189 - protein, 15 aa, Homo sapiens
  CDR3 for alpha chain variable domain of TCR clone 144095 (TRAV12-2, TRAJ43)
CAFDMRFGAGTRLTV

SEQ ID NO: 288190 - protein, 16 aa, Homo sapiens
  CDR3 for beta chain variable domain of TCR clone 144095 (TRBV19, TRBJ2-3)
CASSPEWDRGTDTQYF

SEQ ID NO: 288191 - protein, 13 aa, Homo sapiens
  CDR3 for alpha chain variable domain of TCR clone 144096 (TRAV8-6, TRAJ50)
FAVIKTSYDKVIF

SEQ ID NO: 288192 - protein, 15 aa, Homo sapiens
  CDR3 for beta chain variable domain of TCR clone 144096 (TRBV7-2, TRBJ2-2)
CASRRPGQNTGELFS

SEQ ID NO: 288193 - protein, 14 aa, Homo sapiens
  CDR3 for alpha chain variable domain of TCR clone 144097 (TRAV26-1, TRAJ38)
CIADNAGNNRKLIW

SEQ ID NO: 288194 - protein, 13 aa, Homo sapiens
  CDR3 for beta chain variable domain of TCR clone 144097 (TRBV20-1, TRBJ1-1)
CSAGGGGNTKAFF

SEQ ID NO: 288195 - protein, 13 aa, Homo sapiens
  CDR3 for alpha chain variable domain of TCR clone 144098 (TRAV27, TRAJ49)
CAPRPYTGNQFYF

SEQ ID NO: 288196 - protein, 13 aa, Homo sapiens
  CDR3 for beta chain variable domain of TCR clone 144098 (TRBV7-2, TRBJ2-5)
CASSQTSVETQYF

SEQ ID NO: 288197 - protein, 14 aa, Homo sapiens
  CDR3 for alpha chain variable domain of TCR clone 144099 (TRAV8-1, TRAJ5)
CAVRTDTGRRALTF

SEQ ID NO: 288198 - protein, 18 aa, Homo sapiens
  CDR3 for beta chain variable domain of TCR clone 144099 (TRBV11-2, TRBJ2-6)
CASSLNPFLGTGANVLTF

SEQ ID NO: 288199 - protein, 16 aa, Homo sapiens
  CDR3 for alpha chain variable domain of TCR clone 144100 (TRAV16, TRAJ42)
CARKMNYGVSQGNLIF

SEQ ID NO: 288200 - protein, 15 aa, Homo sapiens
  CDR3 for beta chain variable domain of TCR clone 144100 (TRBV20-1, TRBJ2-7)
CSAREGRDSLYEQYF

SEQ ID NO: 288201 - protein, 13 aa, Homo sapiens
  CDR3 for alpha chain variable domain of TCR clone 144101 (TRAV4, TRAJ42)
CLVGGGSRGNLIF

SEQ ID NO: 288202 - protein, 16 aa, Homo sapiens
  CDR3 for beta chain variable domain of TCR clone 144101 (TRBV5-1, TRBJ2-3)
CASSLQGRVGADTQYF

SEQ ID NO: 288203 - protein, 16 aa, Homo sapiens
  CDR3 for alpha chain variable domain of TCR clone 144102 (TRAV8-3, TRAJ44)
CAVGTLMTGTASKLTF

SEQ ID NO: 288204 - protein, 13 aa, Homo sapiens
  CDR3 for beta chain variable domain of TCR clone 144102 (TRBV7-2, TRBJ1-1)
CASNLKGAKVAFF

SEQ ID NO: 288205 - protein, 13 aa, Homo sapiens
  CDR3 for alpha chain variable domain of TCR clone 144103 (TRAV12-1, TRAJ29)
CVVRNSGNTPLDF

SEQ ID NO: 288206 - protein, 14 aa, Homo sapiens
  CDR3 for beta chain variable domain of TCR clone 144103 (TRBV7-2, TRBJ2-7)
CASRSQGAAYEQYF

SEQ ID NO: 288207 - protein, 15 aa, Homo sapiens
  CDR3 for alpha chain variable domain of TCR clone 144104 (TRAV3, TRAJ4)
CAVRDGPGGYNNLIF

SEQ ID NO: 288208 - protein, 16 aa, Homo sapiens
  CDR3 for beta chain variable domain of TCR clone 144104 (TRBV27, TRBJ2-2)
CASSSSGVSNTGELFF

SEQ ID NO: 288209 - protein, 13 aa, Homo sapiens
  CDR3 for alpha chain variable domain of TCR clone 144105 (TRAV12-2, TRAJ9)
CAVKWAGGFKTIL

SEQ ID NO: 288210 - protein, 15 aa, Homo sapiens
  CDR3 for beta chain variable domain of TCR clone 144105 (TRBV5-1, TRBJ1-4)
CASGLTADSDEKLFF

SEQ ID NO: 288211 - protein, 13 aa, Homo sapiens
  CDR3 for alpha chain variable domain of TCR clone 144106 (TRAV17, TRAJ9)
CATDYTGGFKTIF

SEQ ID NO: 288212 - protein, 14 aa, Homo sapiens
  CDR3 for beta chain variable domain of TCR clone 144106 (TRBV25-1, TRBJ1-1)
CASTQLGGNTEAFF

SEQ ID NO: 288213 - protein, 16 aa, Homo sapiens
  CDR3 for alpha chain variable domain of TCR clone 144107 (TRAV8-2, TRAJ7)
CVVSEGPYYGNNRLAF

SEQ ID NO: 288214 - protein, 15 aa, Homo sapiens
  CDR3 for beta chain variable domain of TCR clone 144107 (TRBV27, TRBJ2-3)
CASSLGLASTDTQYF

SEQ ID NO: 288215 - protein, 16 aa, Homo sapiens
  CDR3 for alpha chain variable domain of TCR clone 144108 (TRAV27, TRAJ48)
TAAQPGDTGLYLHLTF

SEQ ID NO: 288216 - protein, 13 aa, Homo sapiens
  CDR3 for beta chain variable domain of TCR clone 144108 (TRBV7-2, TRBJ2-5)
CASSQTSVETQYF

SEQ ID NO: 288217 - protein, 14 aa, Homo sapiens
  CDR3 for alpha chain variable domain of TCR clone 144109 (TRAV12-2, TRAJ6)
CASKWGGGSYIPTF

SEQ ID NO: 288218 - protein, 15 aa, Homo sapiens
  CDR3 for beta chain variable domain of TCR clone 144109 (TRBV9, TRBJ1-6)
CASSVAGTGDSPLHF

SEQ ID NO: 288219 - protein, 13 aa, Homo sapiens
  CDR3 for alpha chain variable domain of TCR clone 144110 (TRAV21, TRAJ45)
CAVMGGGADGLTF

SEQ ID NO: 288220 - protein, 17 aa, Homo sapiens
  CDR3 for beta chain variable domain of TCR clone 144110 (TRBV28, TRBJ2-5)
CASSTPEGDALEETQYF

SEQ ID NO: 288221 - protein, 13 aa, Homo sapiens
  CDR3 for alpha chain variable domain of TCR clone 144111 (TRAV1-2, TRAJ9)
CAALNTGGFTTIF

SEQ ID NO: 288222 - protein, 16 aa, Homo sapiens
  CDR3 for beta chain variable domain of TCR clone 144111 (TRBV28, TRBJ1-4)
CASSSRTGAANEKLFF

SEQ ID NO: 288223 - protein, 14 aa, Homo sapiens
  CDR3 for alpha chain variable domain of TCR clone 144112 (TRAV1-2, TRAJ16)
CAVNRFSDGQRLLF

SEQ ID NO: 288224 - protein, 13 aa, Homo sapiens
  CDR3 for beta chain variable domain of TCR clone 144112 (TRBV7-6, TRBJ1-2)
CASSLVADYGYTF

SEQ ID NO: 288225 - protein, 13 aa, Homo sapiens
  CDR3 for alpha chain variable domain of TCR clone 144113 (TRAV20, TRAJ37)
CAGCSSNTGKLIF

SEQ ID NO: 288226 - protein, 14 aa, Homo sapiens
  CDR3 for beta chain variable domain of TCR clone 144113 (TRBV5-4, TRBJ1-6)
CASSLWSDNSPLHF

SEQ ID NO: 288227 - protein, 13 aa, Homo sapiens
  CDR3 for alpha chain variable domain of TCR clone 144114 (TRAV8-3, TRAJ36)
CAVGATGANNLFF

SEQ ID NO: 288228 - protein, 17 aa, Homo sapiens
  CDR3 for beta chain variable domain of TCR clone 144114 (TRBV24-1, TRBJ2-4)
CATSDTEARGVRNIQYF

SEQ ID NO: 288229 - protein, 13 aa, Homo sapiens
  CDR3 for alpha chain variable domain of TCR clone 144115 (TRAV8-3, TRAJ43)
CAVGPDNNHDMRF

SEQ ID NO: 288230 - protein, 19 aa, Homo sapiens
  CDR3 for beta chain variable domain of TCR clone 144115 (TRBV7-2, TRBJ2-3)
CASSFLSRNWGGGTDTQYF

SEQ ID NO: 288231 - protein, 14 aa, Homo sapiens
  CDR3 for alpha chain variable domain of TCR clone 144116 (TRAV13-2, TRAJ10)
CAETLPGGGNKLTF

SEQ ID NO: 288232 - protein, 13 aa, Homo sapiens
  CDR3 for beta chain variable domain of TCR clone 144116 (TRBV20-1, TRBJ2-5)
CSARGDYQETQYF

SEQ ID NO: 288233 - protein, 13 aa, Homo sapiens
  CDR3 for alpha chain variable domain of TCR clone 144117 (TRAV16, TRAJ22)
SAMLAGSARHLTF

SEQ ID NO: 288234 - protein, 18 aa, Homo sapiens
  CDR3 for beta chain variable domain of TCR clone 144117 (TRBV7-2, TRBJ2-3)
CASSLETSRGRKADTQYF

SEQ ID NO: 288235 - protein, 13 aa, Homo sapiens
  CDR3 for alpha chain variable domain of TCR clone 144118 (TRAV8-4, TRAJ36)
CAVSEGGANNLFF

SEQ ID NO: 288236 - protein, 11 aa, Homo sapiens
  CDR3 for beta chain variable domain of TCR clone 144118 (TRBV28, TRBJ2-7)
CASGPLPEQYF

SEQ ID NO: 288237 - protein, 14 aa, Homo sapiens
  CDR3 for alpha chain variable domain of TCR clone 144119 (TRAV12-3, TRAJ21)
CVATDLYNFNKFYF

SEQ ID NO: 288238 - protein, 13 aa, Homo sapiens
  CDR3 for beta chain variable domain of TCR clone 144119 (TRBV19, TRBJ2-2)
CASSSKNTGELFF

SEQ ID NO: 288239 - protein, 23 aa, Homo sapiens
  CDR3 for alpha chain variable domain of TCR clone 144120 (TRAV26-1, )
CIADNAGTNYIQNPDPAVYQLRD

SEQ ID NO: 288240 - protein, 13 aa, Homo sapiens
  CDR3 for beta chain variable domain of TCR clone 144120 (TRBV20-1, TRBJ1-1)
CSARGGGNTEAFF

SEQ ID NO: 288241 - protein, 13 aa, Homo sapiens
  CDR3 for alpha chain variable domain of TCR clone 144121 (TRAV21, TRAJ49)
CAVRQSTGNQFYF

SEQ ID NO: 288242 - protein, 15 aa, Homo sapiens
  CDR3 for beta chain variable domain of TCR clone 144121 (TRBV20-1, TRBJ2-5)
CSARDARGAQETQYF

SEQ ID NO: 288243 - protein, 14 aa, Homo sapiens
  CDR3 for alpha chain variable domain of TCR clone 144122 (TRAV17, TRAJ6)
CATDASGGSYIPTF

SEQ ID NO: 288244 - protein, 13 aa, Homo sapiens
  CDR3 for beta chain variable domain of TCR clone 144122 (TRBV20-1, TRBJ1-1)
CSARGGGNTEAFF

SEQ ID NO: 288245 - protein, 13 aa, Homo sapiens
  CDR3 for alpha chain variable domain of TCR clone 144123 (TRAV27, TRAJ39)
CAGVNNAGNMLTF

SEQ ID NO: 288246 - protein, 15 aa, Homo sapiens
  CDR3 for beta chain variable domain of TCR clone 144123 (TRBV4-1, TRBJ2-5)
CASSQWDLYQETQYF

SEQ ID NO: 288247 - protein, 14 aa, Homo sapiens
  CDR3 for alpha chain variable domain of TCR clone 144124 (TRAV1-2, TRAJ8)
CAVREDTGFQKLVF

SEQ ID NO: 288248 - protein, 16 aa, Homo sapiens
  CDR3 for beta chain variable domain of TCR clone 144124 (TRBV27, TRBJ2-2)
CGSSFRGLVRTGELFF

SEQ ID NO: 288249 - protein, 13 aa, Homo sapiens
  CDR3 for alpha chain variable domain of TCR clone 144125 (TRAV27, TRAJ39)
CAGVNNAGNMLTF

SEQ ID NO: 288250 - protein, 16 aa, Homo sapiens
  CDR3 for beta chain variable domain of TCR clone 144125 (TRBV20-1, TRBJ2-1)
CSAPGLAGSYSDEQFF

SEQ ID NO: 288251 - protein, 14 aa, Homo sapiens
  CDR3 for alpha chain variable domain of TCR clone 144126 (TRAV12-2, TRAJ36)
CAVNPPTGANNLFF

SEQ ID NO: 288252 - protein, 14 aa, Homo sapiens
  CDR3 for beta chain variable domain of TCR clone 144126 (TRBV19, TRBJ2-1)
CASPTFVLSGEQFF

SEQ ID NO: 288253 - protein, 13 aa, Homo sapiens
  CDR3 for alpha chain variable domain of TCR clone 144127 (TRAV27, TRAJ49)
CAPRPYTGNQFYF

SEQ ID NO: 288254 - protein, 16 aa, Homo sapiens
  CDR3 for beta chain variable domain of TCR clone 144127 (TRBV28, TRBJ2-7)
CASSLFFETGGPEQYF

SEQ ID NO: 288255 - protein, 15 aa, Homo sapiens
  CDR3 for alpha chain variable domain of TCR clone 144128 (TRAV12-2, TRAJ53)
GAVNGGGGSNYKLTF

SEQ ID NO: 288256 - protein, 14 aa, Homo sapiens
  CDR3 for beta chain variable domain of TCR clone 144128 (TRBV6-1, TRBJ1-3)
CASVQGGGGNTIYF

SEQ ID NO: 288257 - protein, 11 aa, Homo sapiens
  CDR3 for alpha chain variable domain of TCR clone 144129 (TRAV2, TRAJ33)
CAVESNYQLIW

SEQ ID NO: 288258 - protein, 14 aa, Homo sapiens
  CDR3 for beta chain variable domain of TCR clone 144129 (TRBV6-5, TRBJ1-2)
CASSYDGTGGGYTF

SEQ ID NO: 288259 - protein, 15 aa, Homo sapiens
  CDR3 for alpha chain variable domain of TCR clone 144130 (TRAV1-2, TRAJ8)
CAVRDRNTGFQKLVF

SEQ ID NO: 288260 - protein, 12 aa, Homo sapiens
  CDR3 for beta chain variable domain of TCR clone 144130 (TRBV14, TRBJ2-5)
CASSQLKETQYF

SEQ ID NO: 288261 - protein, 11 aa, Homo sapiens
  CDR3 for alpha chain variable domain of TCR clone 144131 (TRAV2, TRAJ13)
CASGGYQKVTF

SEQ ID NO: 288262 - protein, 15 aa, Homo sapiens
  CDR3 for beta chain variable domain of TCR clone 144131 (TRBV28, TRBJ1-3)
CASSMCWASGNTIYF

SEQ ID NO: 288263 - protein, 14 aa, Homo sapiens
  CDR3 for alpha chain variable domain of TCR clone 144132 (TRAV8-2, TRAJ4)
CVVSPSGGYNKLIF

SEQ ID NO: 288264 - protein, 13 aa, Homo sapiens
  CDR3 for beta chain variable domain of TCR clone 144132 (TRBV7-8, TRBJ2-7)
CASSLTGGREQYF

SEQ ID NO: 288265 - protein, 13 aa, Homo sapiens
  CDR3 for alpha chain variable domain of TCR clone 144133 (TRAV13-1, TRAJ47)
CAATLTGGNKLVF

SEQ ID NO: 288266 - protein, 14 aa, Homo sapiens
  CDR3 for beta chain variable domain of TCR clone 144133 (TRBV2, TRBJ2-1)
CASSDRAYYNEQFF

SEQ ID NO: 288267 - protein, 12 aa, Homo sapiens
  CDR3 for alpha chain variable domain of TCR clone 144134 (TRAV8-3, TRAJ41)
CAVGALGYAHNF

SEQ ID NO: 288268 - protein, 16 aa, Homo sapiens
  CDR3 for beta chain variable domain of TCR clone 144134 (TRBV7-6, TRBJ2-3)
CASSDSRGEGTDTQYF

SEQ ID NO: 288269 - protein, 16 aa, Homo sapiens
  CDR3 for alpha chain variable domain of TCR clone 144135 (TRAV1-2, TRAJ40)
CAVRGSRTSGTHKYIF

SEQ ID NO: 288270 - protein, 14 aa, Homo sapiens
  CDR3 for beta chain variable domain of TCR clone 144135 (TRBV4-1, TRBJ2-3)
CASSQDSGTDTQYF

SEQ ID NO: 288271 - protein, 14 aa, Homo sapiens
  CDR3 for alpha chain variable domain of TCR clone 144136 (TRAV13-1, TRAJ35)
CAASKGGFGNVLHC

SEQ ID NO: 288272 - protein, 15 aa, Homo sapiens
  CDR3 for beta chain variable domain of TCR clone 144136 (TRBV7-8, TRBJ1-5)
CASSLERRGLEPQHF

SEQ ID NO: 288273 - protein, 17 aa, Homo sapiens
  CDR3 for alpha chain variable domain of TCR clone 144137 (TRAV3, TRAJ42)
CAVRDRDFGGSQGNLIF

SEQ ID NO: 288274 - protein, 14 aa, Homo sapiens
  CDR3 for beta chain variable domain of TCR clone 144137 (TRBV7-2, TRBJ2-7)
CASRSQGAAYEQYF

SEQ ID NO: 288275 - protein, 18 aa, Homo sapiens
  CDR3 for alpha chain variable domain of TCR clone 144138 (TRAV29/DV5, TRAJ52)
CAAGFRGAGGTSYGKLTF

SEQ ID NO: 288276 - protein, 13 aa, Homo sapiens
  CDR3 for beta chain variable domain of TCR clone 144138 (TRBV12-4, TRBJ2-7)
CASSPTETYEQYF

SEQ ID NO: 288277 - protein, 17 aa, Homo sapiens
  CDR3 for alpha chain variable domain of TCR clone 144139 (TRAV3, TRAJ6)
CAVRDGPRAGGSYIPTF

SEQ ID NO: 288278 - protein, 15 aa, Homo sapiens
  CDR3 for beta chain variable domain of TCR clone 144139 (TRBV11-3, TRBJ2-7)
CASSPVPASSYEQYV

SEQ ID NO: 288279 - protein, 13 aa, Homo sapiens
  CDR3 for alpha chain variable domain of TCR clone 144140 (TRAV23/DV6, TRAJ16)
CAASISDGQKLLF

SEQ ID NO: 288280 - protein, 15 aa, Homo sapiens
  CDR3 for beta chain variable domain of TCR clone 144140 (TRBV2, TRBJ2-1)
CASSELAGSYNEQFF

SEQ ID NO: 288281 - protein, 16 aa, Homo sapiens
  CDR3 for alpha chain variable domain of TCR clone 144141 (TRAV23/DV6, TRAJ9)
CAASIGGNTGGFKTIF

SEQ ID NO: 288282 - protein, 14 aa, Homo sapiens
  CDR3 for beta chain variable domain of TCR clone 144141 (TRBV9, TRBJ2-7)
CASSVGVGSYTQYF

SEQ ID NO: 288283 - protein, 12 aa, Homo sapiens
  CDR3 for alpha chain variable domain of TCR clone 144142 (TRAV8-1, TRAJ23)
CAVGNQGGKLIF

SEQ ID NO: 288284 - protein, 16 aa, Homo sapiens
  CDR3 for beta chain variable domain of TCR clone 144142 (TRBV7-3, TRBJ2-2)
CASSLKRGTLSGELFF

SEQ ID NO: 288285 - protein, 13 aa, Homo sapiens
  CDR3 for alpha chain variable domain of TCR clone 144143 (TRAV12-2, TRAJ39)
CAVNNNAGNMLTF

SEQ ID NO: 288286 - protein, 12 aa, Homo sapiens
  CDR3 for beta chain variable domain of TCR clone 144143 (TRBV7-6, TRBJ2-5)
CASSLSQETQYF

SEQ ID NO: 288287 - protein, 16 aa, Homo sapiens
  CDR3 for alpha chain variable domain of TCR clone 144144 (TRAV8-3, TRAJ44)
CAVGASNTGTASKLTF

SEQ ID NO: 288288 - protein, 15 aa, Homo sapiens
  CDR3 for beta chain variable domain of TCR clone 144144 (TRBV27, TRBJ1-5)
CASTLNRRSNQPQHF

SEQ ID NO: 288289 - protein, 12 aa, Homo sapiens
  CDR3 for alpha chain variable domain of TCR clone 144145 (TRAV17, TRAJ20)
CATALNDYKLSF

SEQ ID NO: 288290 - protein, 14 aa, Homo sapiens
  CDR3 for beta chain variable domain of TCR clone 144145 (TRBV10-3, TRBJ2-7)
CTCAHGADSGEQYF

SEQ ID NO: 288291 - protein, 12 aa, Homo sapiens
  CDR3 for alpha chain variable domain of TCR clone 144146 (TRAV29/DV5, TRAJ49)
CAATDTGNQFYF

SEQ ID NO: 288292 - protein, 14 aa, Homo sapiens
  CDR3 for beta chain variable domain of TCR clone 144146 (TRBV7-9, TRBJ2-2)
CARSLVQDTGELFF

SEQ ID NO: 288293 - protein, 10 aa, Homo sapiens
  CDR3 for alpha chain variable domain of TCR clone 144147 (TRAV27, TRAJ57)
CAGGSEKLAF

SEQ ID NO: 288294 - protein, 11 aa, Homo sapiens
  CDR3 for beta chain variable domain of TCR clone 144147 (TRBV11-2, TRBJ1-1)
CASSINTEAFF

SEQ ID NO: 288295 - protein, 12 aa, Homo sapiens
  CDR3 for alpha chain variable domain of TCR clone 144148 (TRAV2, TRAJ5)
CALDTGRRALTF

SEQ ID NO: 288296 - protein, 15 aa, Homo sapiens
  CDR3 for beta chain variable domain of TCR clone 144148 (TRBV10-3, TRBJ2-1)
FAISDVQDRAYEQFF

SEQ ID NO: 288297 - protein, 13 aa, Homo sapiens
  CDR3 for alpha chain variable domain of TCR clone 144149 (TRAV27, TRAJ29)
CAGAHSGNTPLVF

SEQ ID NO: 288298 - protein, 14 aa, Homo sapiens
  CDR3 for beta chain variable domain of TCR clone 144149 (TRBV7-9, TRBJ2-7)
CASSMGQGSGEQYF

SEQ ID NO: 288299 - protein, 15 aa, Homo sapiens
  CDR3 for alpha chain variable domain of TCR clone 144150 (TRAV3, TRAJ5)
CAVRDLDTGRRALTF

SEQ ID NO: 288300 - protein, 14 aa, Homo sapiens
  CDR3 for beta chain variable domain of TCR clone 144150 (TRBV4-2, TRBJ1-2)
CASSQDRREGGYTF

SEQ ID NO: 288301 - protein, 11 aa, Homo sapiens
  CDR3 for alpha chain variable domain of TCR clone 144151 (TRAV12-1, TRAJ30)
CVVNGQDKIIF

SEQ ID NO: 288302 - protein, 15 aa, Homo sapiens
  CDR3 for beta chain variable domain of TCR clone 144151 (TRBV28, TRBJ2-5)
CASSSGRTIQENQYF

SEQ ID NO: 288303 - protein, 14 aa, Homo sapiens
  CDR3 for alpha chain variable domain of TCR clone 144152 (TRAV1-2, TRAJ16)
CAVRSASDGQKLLF

SEQ ID NO: 288304 - protein, 14 aa, Homo sapiens
  CDR3 for beta chain variable domain of TCR clone 144152 (TRBV4-1, TRBJ2-2)
CASSQAVNTGELFF

SEQ ID NO: 288305 - protein, 14 aa, Homo sapiens
  CDR3 for alpha chain variable domain of TCR clone 144153 (TRAV21, TRAJ35)
CAVMPIGFGNVLHC

SEQ ID NO: 288306 - protein, 14 aa, Homo sapiens
  CDR3 for beta chain variable domain of TCR clone 144153 (TRBV7-2, TRBJ2-7)
CASSPETSFYEQYF

SEQ ID NO: 288307 - protein, 14 aa, Homo sapiens
  CDR3 for alpha chain variable domain of TCR clone 144154 (TRAV8-6, TRAJ52)
CAVIGGTSYGKLTF

SEQ ID NO: 288308 - protein, 13 aa, Homo sapiens
  CDR3 for beta chain variable domain of TCR clone 144154 (TRBV4-1, TRBJ1-1)
CASNRKMNTEAFF

SEQ ID NO: 288309 - protein, 12 aa, Homo sapiens
  CDR3 for alpha chain variable domain of TCR clone 144155 (TRAV12-3, TRAJ17)
CAMTLTGKKLTF

SEQ ID NO: 288310 - protein, 15 aa, Homo sapiens
  CDR3 for beta chain variable domain of TCR clone 144155 (TRBV20-1, TRBJ2-7)
CSARDRVAGMDEQYF

SEQ ID NO: 288311 - protein, 14 aa, Homo sapiens
  CDR3 for alpha chain variable domain of TCR clone 144156 (TRAV26-2, TRAJ31)
CILIPGNNNARLMF

SEQ ID NO: 288312 - protein, 16 aa, Homo sapiens
  CDR3 for beta chain variable domain of TCR clone 144156 (TRBV7-3, TRBJ2-1)
CASSLGSGSSNNEQFF

SEQ ID NO: 288313 - protein, 14 aa, Homo sapiens
  CDR3 for alpha chain variable domain of TCR clone 144157 (TRAV35, TRAJ22)
CAGLRPCSARQLTF

SEQ ID NO: 288314 - protein, 15 aa, Homo sapiens
  CDR3 for beta chain variable domain of TCR clone 144157 (TRBV12-4, TRBJ2-5)
CASRPPTGLQETQYF

SEQ ID NO: 288315 - protein, 13 aa, Homo sapiens
  CDR3 for alpha chain variable domain of TCR clone 144158 (TRAV12-1, TRAJ40)
CVVPTSGTYKYIF

SEQ ID NO: 288316 - protein, 18 aa, Homo sapiens
  CDR3 for beta chain variable domain of TCR clone 144158 (TRBV7-6, TRBJ2-1)
CASSRRTSGMGSYNEQFF

SEQ ID NO: 288317 - protein, 14 aa, Homo sapiens
  CDR3 for alpha chain variable domain of TCR clone 144159 (TRAV1-2, TRAJ16)
CAVNRFSDCQKLLF

SEQ ID NO: 288318 - protein, 14 aa, Homo sapiens
  CDR3 for beta chain variable domain of TCR clone 144159 (TRBV14, TRBJ2-1)
CASSQVQGRGEQFF

SEQ ID NO: 288319 - protein, 14 aa, Homo sapiens
  CDR3 for alpha chain variable domain of TCR clone 144160 (TRAV35, TRAJ22)
CAGLRPGSARQLTF

SEQ ID NO: 288320 - protein, 15 aa, Homo sapiens
  CDR3 for beta chain variable domain of TCR clone 144160 (TRBV20-1, TRBJ2-7)
CSARDRVSGMDEQYI

SEQ ID NO: 288321 - protein, 11 aa, Homo sapiens
  CDR3 for alpha chain variable domain of TCR clone 144161 (TRAV12-3, TRAJ27)
CAMANAGKSTF

SEQ ID NO: 288322 - protein, 15 aa, Homo sapiens
  CDR3 for beta chain variable domain of TCR clone 144161 (TRBV4-1, TRBJ2-2)
CASSEGQGITGELFF

SEQ ID NO: 288323 - protein, 14 aa, Homo sapiens
  CDR3 for alpha chain variable domain of TCR clone 144162 (TRAV1-2, TRAJ8)
CAVREDTGFQKLVF

SEQ ID NO: 288324 - protein, 14 aa, Homo sapiens
  CDR3 for beta chain variable domain of TCR clone 144162 (TRBV28, TRBJ1-2)
CASSFGTEAYGYTF

SEQ ID NO: 288325 - protein, 16 aa, Homo sapiens
  CDR3 for alpha chain variable domain of TCR clone 144163 (TRAV12-3, TRAJ53)
CAMSPGSGGSNYKLTF

SEQ ID NO: 288326 - protein, 11 aa, Homo sapiens
  CDR3 for beta chain variable domain of TCR clone 144163 (TRBV4-1, TRBJ2-7)
QPSCGGDEQYF

SEQ ID NO: 288327 - protein, 13 aa, Homo sapiens
  CDR3 for alpha chain variable domain of TCR clone 144164 (TRAV36/DV7, TRAJ7)
CAGTRYGNNRLDF

SEQ ID NO: 288328 - protein, 14 aa, Homo sapiens
  CDR3 for beta chain variable domain of TCR clone 144164 (TRBV19, TRBJ2-1)
CASPTFVLSGEQFF

SEQ ID NO: 288329 - protein, 12 aa, Homo sapiens
  CDR3 for alpha chain variable domain of TCR clone 144165 (TRAV8-6, TRAJ8)
CAVTPGFQKLVF

SEQ ID NO: 288330 - protein, 14 aa, Homo sapiens
  CDR3 for beta chain variable domain of TCR clone 144165 (TRBV27, TRBJ2-2)
CASSLGAATGELFF

SEQ ID NO: 288331 - protein, 13 aa, Homo sapiens
  CDR3 for alpha chain variable domain of TCR clone 144166 (TRAV2, TRAJ40)
CAVVTSGTYKYIF

SEQ ID NO: 288332 - protein, 16 aa, Homo sapiens
  CDR3 for beta chain variable domain of TCR clone 144166 (TRBV13, TRBJ2-1)
CASSLTSGTSNGEQFF

SEQ ID NO: 288333 - protein, 16 aa, Homo sapiens
  CDR3 for alpha chain variable domain of TCR clone 144167 (TRAV12-3, TRAJ53)
CAMSPGSGGSNNKLTF

SEQ ID NO: 288334 - protein, 14 aa, Homo sapiens
  CDR3 for beta chain variable domain of TCR clone 144167 (TRBV7-6, TRBJ2-3)
CASSLGTVTDTQYF

SEQ ID NO: 288335 - protein, 13 aa, Homo sapiens
  CDR3 for alpha chain variable domain of TCR clone 144168 (TRAV12-2, TRAJ6)
CGVNVSRKLHTYI

SEQ ID NO: 288336 - protein, 12 aa, Homo sapiens
  CDR3 for beta chain variable domain of TCR clone 144168 (TRBV29-1, TRBJ2-3)
CSVTGRADTQYF

SEQ ID NO: 288337 - protein, 16 aa, Homo sapiens
  CDR3 for alpha chain variable domain of TCR clone 144169 (TRAV16, TRAJ4)
CALNRMFSGGYNKLIF

SEQ ID NO: 288338 - protein, 16 aa, Homo sapiens
  CDR3 for beta chain variable domain of TCR clone 144169 (TRBV24-1, TRBJ2-3)
CATSDPGTRATDTQYF

SEQ ID NO: 288339 - protein, 16 aa, Homo sapiens
  CDR3 for alpha chain variable domain of TCR clone 144170 (TRAV20, TRAJ52)
CAVLPDGGTSYGKLTF

SEQ ID NO: 288340 - protein, 12 aa, Homo sapiens
  CDR3 for beta chain variable domain of TCR clone 144170 (TRBV19, TRBJ2-1)
CASCQISNEQFF

SEQ ID NO: 288341 - protein, 17 aa, Homo sapiens
  CDR3 for alpha chain variable domain of TCR clone 144171 (TRAV29/DV5, TRAJ45)
CAADGPFSGGGADGLTF

SEQ ID NO: 288342 - protein, 15 aa, Homo sapiens
  CDR3 for beta chain variable domain of TCR clone 144171 (TRBV19, TRBJ1-5)
CASSMRGYSPSILVM

SEQ ID NO: 288343 - protein, 16 aa, Homo sapiens
  CDR3 for alpha chain variable domain of TCR clone 144172 (TRAV16, TRAJ4)
CALSRMFSGGDNKLLF

SEQ ID NO: 288344 - protein, 16 aa, Homo sapiens
  CDR3 for beta chain variable domain of TCR clone 144172 (TRBV24-1, TRBJ2-3)
CATSDPGTGATDTQYF

SEQ ID NO: 288345 - protein, 12 aa, Homo sapiens
  CDR3 for alpha chain variable domain of TCR clone 144173 (TRAV21, TRAJ31)
CAVWGNNARLMF

SEQ ID NO: 288346 - protein, 16 aa, Homo sapiens
  CDR3 for beta chain variable domain of TCR clone 144173 (TRBV7-3, TRBJ2-2)
CASSLKRGTLSGELFF

SEQ ID NO: 288347 - protein, 12 aa, Homo sapiens
  CDR3 for alpha chain variable domain of TCR clone 144174 (TRAV23/DV6, TRAJ30)
CAASKGDDKIIF

SEQ ID NO: 288348 - protein, 15 aa, Homo sapiens
  CDR3 for beta chain variable domain of TCR clone 144174 (TRBV11-3, TRBJ2-7)
CASSLGDRGSYEQYF

SEQ ID NO: 288349 - protein, 14 aa, Homo sapiens
  CDR3 for alpha chain variable domain of TCR clone 144175 (TRAV8-3, TRAJ21)
CAVGLNHRSDKFYF

SEQ ID NO: 288350 - protein, 11 aa, Homo sapiens
  CDR3 for beta chain variable domain of TCR clone 144175 (TRBV6-3, TRBJ2-3)
CATGQADTQYF

SEQ ID NO: 288351 - protein, 20 aa, Homo sapiens
  CDR3 for alpha chain variable domain of TCR clone 144176 (TRAV26-1, TRAJ42)
CCVLLHRQTYYGGSPGTLIF

SEQ ID NO: 288352 - protein, 16 aa, Homo sapiens
  CDR3 for beta chain variable domain of TCR clone 144176 (TRBV7-3, TRBJ2-2)
CASSLKRGTLSGELFF

SEQ ID NO: 288353 - protein, 13 aa, Homo sapiens
  CDR3 for alpha chain variable domain of TCR clone 144177 (TRAV8-4, TRAJ9)
CAVSETRGFKTIF

SEQ ID NO: 288354 - protein, 14 aa, Homo sapiens
  CDR3 for beta chain variable domain of TCR clone 144177 (TRBV13, TRBJ2-5)
CASSLERVGETQYF

SEQ ID NO: 288355 - protein, 15 aa, Homo sapiens
  CDR3 for alpha chain variable domain of TCR clone 144178 (TRAV26-1, TRAJ22)
CIVRVSFWFCKATDL

SEQ ID NO: 288356 - protein, 13 aa, Homo sapiens
  CDR3 for beta chain variable domain of TCR clone 144178 (TRBV7-9, TRBJ1-2)
RASSLKQNYGYSF

SEQ ID NO: 288357 - protein, 13 aa, Homo sapiens
  CDR3 for alpha chain variable domain of TCR clone 144179 (TRAV12-1, TRAJ39)
CGDDNNAGNMLTF

SEQ ID NO: 288358 - protein, 18 aa, Homo sapiens
  CDR3 for beta chain variable domain of TCR clone 144179 (TRBV25-1, TRBJ1-2)
CASSGLQNGQGLIFGYTF

SEQ ID NO: 288359 - protein, 19 aa, Homo sapiens
  CDR3 for alpha chain variable domain of TCR clone 144180 (TRAV29/DV5, TRAJ49)
CSVLLCSKLTVDTGNQFYF

SEQ ID NO: 288360 - protein, 15 aa, Homo sapiens
  CDR3 for beta chain variable domain of TCR clone 144180 (TRBV6-5, TRBJ2-1)
CASSYDARAGNEQFF

SEQ ID NO: 288361 - protein, 15 aa, Homo sapiens
  CDR3 for alpha chain variable domain of TCR clone 144181 (TRAV27, TRAJ38)
CAARRNAGNNRKLVW

SEQ ID NO: 288362 - protein, 14 aa, Homo sapiens
  CDR3 for beta chain variable domain of TCR clone 144181 (TRBV13, TRBJ2-7)
CASSLKGASYEQYF

SEQ ID NO: 288363 - protein, 15 aa, Homo sapiens
  CDR3 for alpha chain variable domain of TCR clone 144182 (TRAV38-1, TRAJ37)
CAFIHGSGNTGTLIF

SEQ ID NO: 288364 - protein, 14 aa, Homo sapiens
  CDR3 for beta chain variable domain of TCR clone 144182 (TRBV29-1, TRBJ2-5)
CSVETSGSGETQYF

SEQ ID NO: 288365 - protein, 13 aa, Homo sapiens
  CDR3 for alpha chain variable domain of TCR clone 144183 (TRAV36/DV7, TRAJ49)
CAGDSNTGNQFYF

SEQ ID NO: 288366 - protein, 13 aa, Homo sapiens
  CDR3 for beta chain variable domain of TCR clone 144183 (TRBV7-3, TRBJ1-1)
CASSQDWGAEAFF

SEQ ID NO: 288367 - protein, 18 aa, Homo sapiens
  CDR3 for alpha chain variable domain of TCR clone 144184 (TRAV13-1, TRAJ52)
CAAKNPNAGGTSYGKLPF

SEQ ID NO: 288368 - protein, 15 aa, Homo sapiens
  CDR3 for beta chain variable domain of TCR clone 144184 (TRBV5-1, TRBJ2-1)
CASSPPRAPYNEQFF

SEQ ID NO: 288369 - protein, 14 aa, Homo sapiens
  CDR3 for alpha chain variable domain of TCR clone 144185 (TRAV8-4, TRAJ4)
CCEPFSGGYNKLIF

SEQ ID NO: 288370 - protein, 13 aa, Homo sapiens
  CDR3 for beta chain variable domain of TCR clone 144185 (TRBV12-5, TRBJ2-3)
CASGDRQSDTQYF

SEQ ID NO: 288371 - protein, 14 aa, Homo sapiens
  CDR3 for alpha chain variable domain of TCR clone 144186 (TRAV12-3, TRAJ10)
SHLPLTGGGNKLTF

SEQ ID NO: 288372 - protein, 16 aa, Homo sapiens
  CDR3 for beta chain variable domain of TCR clone 144186 (TRBV5-7, TRBJ1-5)
CASSWQQDREYQPQHF

SEQ ID NO: 288373 - protein, 14 aa, Homo sapiens
  CDR3 for alpha chain variable domain of TCR clone 144187 (TRAV13-2, TRAJ10)
CAENITGGGNKLTF

SEQ ID NO: 288374 - protein, 11 aa, Homo sapiens
  CDR3 for beta chain variable domain of TCR clone 144187 (TRBV7-2, TRBJ2-7)
CASSLGGGQIG

SEQ ID NO: 288375 - protein, 12 aa, Homo sapiens
  CDR3 for alpha chain variable domain of TCR clone 144188 (TRAV36/DV7, TRAJ54)
CAVVRGAQKLVF

SEQ ID NO: 288376 - protein, 16 aa, Homo sapiens
  CDR3 for beta chain variable domain of TCR clone 144188 (TRBV2, TRBJ2-7)
CASRKGSLGLVYEQYF

SEQ ID NO: 288377 - protein, 11 aa, Homo sapiens
  CDR3 for alpha chain variable domain of TCR clone 144189 (TRAV2, TRAJ33)
CAVESNYQLIW

SEQ ID NO: 288378 - protein, 15 aa, Homo sapiens
  CDR3 for beta chain variable domain of TCR clone 144189 (TRBV2, TRBJ2-3)
CASSERSGHTDTQYF

SEQ ID NO: 288379 - protein, 19 aa, Homo sapiens
  CDR3 for alpha chain variable domain of TCR clone 144190 (TRAV2, TRAJ20)
ILQVREADAAVYRDCKLSF

SEQ ID NO: 288380 - protein, 16 aa, Homo sapiens
  CDR3 for beta chain variable domain of TCR clone 144190 (TRBV9, TRBJ2-2)
CASSAMGKGNTGQLFF

SEQ ID NO: 288381 - protein, 12 aa, Homo sapiens
  CDR3 for alpha chain variable domain of TCR clone 144191 (TRAV1-2, TRAJ33)
CAALDSNYQLIW

SEQ ID NO: 288382 - protein, 12 aa, Homo sapiens
  CDR3 for beta chain variable domain of TCR clone 144191 (TRBV28, TRBJ2-6)
CAIQAGANVLTF

SEQ ID NO: 288383 - protein, 13 aa, Homo sapiens
  CDR3 for alpha chain variable domain of TCR clone 144192 (TRAV12-1, TRAJ16)
CVVHGPDGQKLLF

SEQ ID NO: 288384 - protein, 13 aa, Homo sapiens
  CDR3 for beta chain variable domain of TCR clone 144192 (TRBV2, TRBJ1-1)
CARNPTGGFHAFF

SEQ ID NO: 288385 - protein, 12 aa, Homo sapiens
  CDR3 for alpha chain variable domain of TCR clone 144193 (TRAV29/DV5, TRAJ49)
CAATDTGNQFYI

SEQ ID NO: 288386 - protein, 12 aa, Homo sapiens
  CDR3 for beta chain variable domain of TCR clone 144193 (TRBV12-4, TRBJ2-7)
CASSLGGYEQYF

SEQ ID NO: 288387 - protein, 13 aa, Homo sapiens
  CDR3 for alpha chain variable domain of TCR clone 144194 (TRAV35, TRAJ43)
CAGYPYNNNDMRF

SEQ ID NO: 288388 - protein, 15 aa, Homo sapiens
  CDR3 for beta chain variable domain of TCR clone 144194 (TRBV25-1, TRBJ1-4)
CASSKRIATNEKLYF

SEQ ID NO: 288389 - protein, 17 aa, Homo sapiens
  CDR3 for alpha chain variable domain of TCR clone 144195 (TRAV12-2, TRAJ36)
CAVKDNLFFGTGTRLTV

SEQ ID NO: 288390 - protein, 15 aa, Homo sapiens
  CDR3 for beta chain variable domain of TCR clone 144195 (TRBV28, TRBJ2-2)
CASTVAGANTGELFF

SEQ ID NO: 288391 - protein, 17 aa, Homo sapiens
  CDR3 for alpha chain variable domain of TCR clone 144196 (TRAV16, TRAJ58)
CIAVLSNGETSGSRLTF

SEQ ID NO: 288392 - protein, 16 aa, Homo sapiens
  CDR3 for beta chain variable domain of TCR clone 144196 (TRBV19, TRBJ2-5)
CASSIDGTGLEETQYF

SEQ ID NO: 288393 - protein, 15 aa, Homo sapiens
  CDR3 for alpha chain variable domain of TCR clone 144197 (TRAV26-1, TRAJ29)
CIVRVEGSGNTPLVF

SEQ ID NO: 288394 - protein, 12 aa, Homo sapiens
  CDR3 for beta chain variable domain of TCR clone 144197 (TRBV5-4, TRBJ2-5)
CASSSTRETQYF

SEQ ID NO: 288395 - protein, 13 aa, Homo sapiens
  CDR3 for alpha chain variable domain of TCR clone 144198 (TRAV17, TRAJ9)
CATDGTGGFKTIF

SEQ ID NO: 288396 - protein, 14 aa, Homo sapiens
  CDR3 for beta chain variable domain of TCR clone 144198 (TRBV6-1, TRBJ1-3)
CASVQGGGGNTIYF

SEQ ID NO: 288397 - protein, 12 aa, Homo sapiens
  CDR3 for alpha chain variable domain of TCR clone 144199 (TRAV12-3, TRAJ17)
CAMTLTGNRITF

SEQ ID NO: 288398 - protein, 15 aa, Homo sapiens
  CDR3 for beta chain variable domain of TCR clone 144199 (TRBV20-1, TRBJ2-7)
CSARDRVSGMDEQYF

SEQ ID NO: 288399 - protein, 19 aa, Homo sapiens
  CDR3 for alpha chain variable domain of TCR clone 144200 (TRAV17, TRAJ42)
CFLLLCYGPGGGSQGNLIF

SEQ ID NO: 288400 - protein, 15 aa, Homo sapiens
  CDR3 for beta chain variable domain of TCR clone 144200 (TRBV4-1, TRBJ2-1)
CASSQAAGGNNEQFF

SEQ ID NO: 288401 - protein, 17 aa, Homo sapiens
  CDR3 for alpha chain variable domain of TCR clone 144201 (TRAV3, TRAJ42)
CAARDRDYGGSQGNLIF

SEQ ID NO: 288402 - protein, 14 aa, Homo sapiens
  CDR3 for beta chain variable domain of TCR clone 144201 (TRBV4-1, TRBJ2-2)
CASSQAVNTGELFF

SEQ ID NO: 288403 - protein, 14 aa, Homo sapiens
  CDR3 for alpha chain variable domain of TCR clone 144202 (TRAV13-1, TRAJ44)
CAAKATGTASKLTF

SEQ ID NO: 288404 - protein, 17 aa, Homo sapiens
  CDR3 for beta chain variable domain of TCR clone 144202 (TRBV15, TRBJ1-2)
CATSRGPRTGRWLHLRF

SEQ ID NO: 288405 - protein, 18 aa, Homo sapiens
  CDR3 for alpha chain variable domain of TCR clone 144203 (TRAV26-2, TRAJ54)
CILRDVEVGIQGAEKLVF

SEQ ID NO: 288406 - protein, 17 aa, Homo sapiens
  CDR3 for beta chain variable domain of TCR clone 144203 (TRBV20-1, TRBJ1-5)
CSASLSPGQGGNQPQHF

SEQ ID NO: 288407 - protein, 14 aa, Homo sapiens
  CDR3 for alpha chain variable domain of TCR clone 144204 (TRAV17, TRAJ6)
CATDASGGSYIPTF

SEQ ID NO: 288408 - protein, 14 aa, Homo sapiens
  CDR3 for beta chain variable domain of TCR clone 144204 (TRBV19, TRBJ2-7)
CASTVQGRPYEQYF

SEQ ID NO: 288409 - protein, 15 aa, Homo sapiens
  CDR3 for alpha chain variable domain of TCR clone 144205 (TRAV26-1, TRAJ29)
CIVRVEGSGNTPLVF

SEQ ID NO: 288410 - protein, 15 aa, Homo sapiens
  CDR3 for beta chain variable domain of TCR clone 144205 (TRBV7-9, TRBJ1-5)
CASNQGHQPNQTQHF

SEQ ID NO: 288411 - protein, 14 aa, Homo sapiens
  CDR3 for alpha chain variable domain of TCR clone 144206 (TRAV1-2, TRAJ16)
CAVNRFSYGQKLLF

SEQ ID NO: 288412 - protein, 15 aa, Homo sapiens
  CDR3 for beta chain variable domain of TCR clone 144206 (TRBV2, TRBJ2-1)
CASSEEQEGDNEQFF

SEQ ID NO: 288413 - protein, 12 aa, Homo sapiens
  CDR3 for alpha chain variable domain of TCR clone 144207 (TRAV20, TRAJ56)
CAVTGANSKLTF

SEQ ID NO: 288414 - protein, 15 aa, Homo sapiens
  CDR3 for beta chain variable domain of TCR clone 144207 (TRBV28, TRBJ2-1)
CASRVGLDEYNEQFF

SEQ ID NO: 288415 - protein, 14 aa, Homo sapiens
  CDR3 for alpha chain variable domain of TCR clone 144208 (TRAV2, TRAJ9)
CAVEERSGGFKTIF

SEQ ID NO: 288416 - protein, 16 aa, Homo sapiens
  CDR3 for beta chain variable domain of TCR clone 144208 (TRBV12-5, TRBJ2-5)
CASGPRTSGNQETQYF

SEQ ID NO: 288417 - protein, 15 aa, Homo sapiens
  CDR3 for alpha chain variable domain of TCR clone 144209 (TRAV35, TRAJ58)
CAGRRQETSSSRLTF

SEQ ID NO: 288418 - protein, 11 aa, Homo sapiens
  CDR3 for beta chain variable domain of TCR clone 144209 (TRBV11-2, TRBJ1-1)
CASSINTEAFF

SEQ ID NO: 288419 - protein, 14 aa, Homo sapiens
  CDR3 for alpha chain variable domain of TCR clone 144210 (TRAV21, TRAJ58)
CAVRRGGSGARLTF

SEQ ID NO: 288420 - protein, 13 aa, Homo sapiens
  CDR3 for beta chain variable domain of TCR clone 144210 (TRBV7-2, TRBJ1-6)
CASSLKFDSPLHF

SEQ ID NO: 288421 - protein, 14 aa, Homo sapiens
  CDR3 for alpha chain variable domain of TCR clone 144211 (TRAV20, TRAJ29)
CAVQAWVGNTLLVF

SEQ ID NO: 288422 - protein, 15 aa, Homo sapiens
  CDR3 for beta chain variable domain of TCR clone 144211 (TRBV29-1, TRBJ2-7)
CSVEFFDRGSYEQYF

SEQ ID NO: 288423 - protein, 13 aa, Homo sapiens
  CDR3 for alpha chain variable domain of TCR clone 144212 (TRAV39, TRAJ33)
CAVDRDSNYQLIL

SEQ ID NO: 288424 - protein, 16 aa, Homo sapiens
  CDR3 for beta chain variable domain of TCR clone 144212 (TRBV6-1, TRBJ2-3)
CASSEVIGQGTDTQYF

SEQ ID NO: 288425 - protein, 18 aa, Homo sapiens
  CDR3 for alpha chain variable domain of TCR clone 144213 (TRAV13-1, TRAJ52)
CAAKNPTAGGTSYGKLTF

SEQ ID NO: 288426 - protein, 15 aa, Homo sapiens
  CDR3 for beta chain variable domain of TCR clone 144213 (TRBV28, TRBJ2-1)
CASSIIAGGRSEQFF

SEQ ID NO: 288427 - protein, 14 aa, Homo sapiens
  CDR3 for alpha chain variable domain of TCR clone 144214 (TRAV23/DV6, TRAJ13)
CAASETGGYQKDNF

SEQ ID NO: 288428 - protein, 13 aa, Homo sapiens
  CDR3 for beta chain variable domain of TCR clone 144214 (TRBV29-1, TRBJ2-1)
CSVEGGRVDEQFF

SEQ ID NO: 288429 - protein, 13 aa, Homo sapiens
  CDR3 for alpha chain variable domain of TCR clone 144215 (TRAV12-2, TRAJ20)
CAVYPSNDYKLSF

SEQ ID NO: 288430 - protein, 15 aa, Homo sapiens
  CDR3 for beta chain variable domain of TCR clone 144215 (TRBV5-8, TRBJ2-2)
CASSLDRGATGELFF

SEQ ID NO: 288431 - protein, 13 aa, Homo sapiens
  CDR3 for alpha chain variable domain of TCR clone 144216 (TRAV21, TRAJ20)
CAVGLRVVYKLSF

SEQ ID NO: 288432 - protein, 13 aa, Homo sapiens
  CDR3 for beta chain variable domain of TCR clone 144216 (TRBV6-1, TRBJ1-1)
CASSRQGNTGAFF

SEQ ID NO: 288433 - protein, 12 aa, Homo sapiens
  CDR3 for alpha chain variable domain of TCR clone 144217 (TRAV27, TRAJ13)
CAGVRGYQKVTF

SEQ ID NO: 288434 - protein, 16 aa, Homo sapiens
  CDR3 for beta chain variable domain of TCR clone 144217 (TRBV28, TRBJ2-1)
CASSSSYSGSLKEQFF

SEQ ID NO: 288435 - protein, 16 aa, Homo sapiens
  CDR3 for alpha chain variable domain of TCR clone 144218 (TRAV12-2, TRAJ13)
CAVKKTGGYRKLPLEL

SEQ ID NO: 288436 - protein, 15 aa, Homo sapiens
  CDR3 for beta chain variable domain of TCR clone 144218 (TRBV27, TRBJ2-1)
CASSNGGRSSNEQFF

SEQ ID NO: 288437 - protein, 13 aa, Homo sapiens
  CDR3 for alpha chain variable domain of TCR clone 144219 (TRAV12-1, TRAJ9)
CVVLNTGGFKTIF

SEQ ID NO: 288438 - protein, 13 aa, Homo sapiens
  CDR3 for beta chain variable domain of TCR clone 144219 (TRBV20-1, TRBJ1-1)
CSARGGGNTEEFF

SEQ ID NO: 288439 - protein, 17 aa, Homo sapiens
  CDR3 for alpha chain variable domain of TCR clone 144220 (TRAV13-1, TRAJ5)
CSNPSLSRDTSRRALTF

SEQ ID NO: 288440 - protein, 17 aa, Homo sapiens
  CDR3 for beta chain variable domain of TCR clone 144220 (TRBV24-1, TRBJ2-1)
CATSDVSTSGTYNEQFF

SEQ ID NO: 288441 - protein, 13 aa, Homo sapiens
  CDR3 for alpha chain variable domain of TCR clone 144221 (TRAV21, TRAJ57)
CAVTQGGSEKLVF

SEQ ID NO: 288442 - protein, 13 aa, Homo sapiens
  CDR3 for beta chain variable domain of TCR clone 144221 (TRBV25-1, TRBJ2-5)
CASSPPARGEEYF

SEQ ID NO: 288443 - protein, 17 aa, Homo sapiens
  CDR3 for alpha chain variable domain of TCR clone 144222 (TRAV21, TRAJ52)
CAVGTNAGGTSYGKLTF

SEQ ID NO: 288444 - protein, 13 aa, Homo sapiens
  CDR3 for beta chain variable domain of TCR clone 144222 (TRBV5-1, TRBJ1-2)
CASSFSGNLGYAF

SEQ ID NO: 288445 - protein, 14 aa, Homo sapiens
  CDR3 for alpha chain variable domain of TCR clone 144223 (TRAV9-2, TRAJ39)
CVLYIYNAGNMLTF

SEQ ID NO: 288446 - protein, 13 aa, Homo sapiens
  CDR3 for beta chain variable domain of TCR clone 144223 (TRBV4-2, TRBJ1-1)
CASSQAGNTEAFF

SEQ ID NO: 288447 - protein, 17 aa, Homo sapiens
  CDR3 for alpha chain variable domain of TCR clone 144224 (TRAV21, TRAJ52)
CAVDTNAGGTSYGKLPF

SEQ ID NO: 288448 - protein, 12 aa, Homo sapiens
  CDR3 for beta chain variable domain of TCR clone 144224 (TRBV14, TRBJ2-7)
CASSRLKGEQYF

SEQ ID NO: 288449 - protein, 14 aa, Homo sapiens
  CDR3 for alpha chain variable domain of TCR clone 144225 (TRAV12-2, TRAJ17)
CAVLFKAAGNKLTF

SEQ ID NO: 288450 - protein, 16 aa, Homo sapiens
  CDR3 for beta chain variable domain of TCR clone 144225 (TRBV4-1, TRBJ2-3)
CASSQSTSGAEDTQYF

SEQ ID NO: 288451 - protein, 11 aa, Homo sapiens
  CDR3 for alpha chain variable domain of TCR clone 144226 (TRAV1-2, TRAJ20)
CAVANDYKLSF

SEQ ID NO: 288452 - protein, 14 aa, Homo sapiens
  CDR3 for beta chain variable domain of TCR clone 144226 (TRBV2, TRBJ2-5)
CASSEVLAQETQYF

SEQ ID NO: 288453 - protein, 14 aa, Homo sapiens
  CDR3 for alpha chain variable domain of TCR clone 144227 (TRAV12-2, TRAJ13)
CAVKKTGGYQKVTF

SEQ ID NO: 288454 - protein, 17 aa, Homo sapiens
  CDR3 for beta chain variable domain of TCR clone 144227 (TRBV13, TRBJ2-3)
WASSLSRVAGGRNTQYF

SEQ ID NO: 288455 - protein, 12 aa, Homo sapiens
  CDR3 for alpha chain variable domain of TCR clone 144228 (TRAV13-2, TRAJ23)
CAERHRGGKLIF

SEQ ID NO: 288456 - protein, 13 aa, Homo sapiens
  CDR3 for beta chain variable domain of TCR clone 144228 (TRBV10-3, TRBJ2-7)
CASKLAVNYEQHF

SEQ ID NO: 288457 - protein, 14 aa, Homo sapiens
  CDR3 for alpha chain variable domain of TCR clone 144229 (TRAV35, TRAJ46)
CAGPQKSSGDKLTF

SEQ ID NO: 288458 - protein, 18 aa, Homo sapiens
  CDR3 for beta chain variable domain of TCR clone 144229 (TRBV11-2, TRBJ2-6)
CASSLNPFLGTGANVLTF

SEQ ID NO: 288459 - protein, 12 aa, Homo sapiens
  CDR3 for alpha chain variable domain of TCR clone 144230 (TRAV8-3, TRAJ20)
CAVGANDYKLSF

SEQ ID NO: 288460 - protein, 17 aa, Homo sapiens
  CDR3 for beta chain variable domain of TCR clone 144230 (TRBV7-8, TRBJ2-6)
CASSAGTGGAGANVLTF

SEQ ID NO: 288461 - protein, 15 aa, Homo sapiens
  CDR3 for alpha chain variable domain of TCR clone 144231 (TRAV2, TRAJ15)
CAVGGPNQAGTALFF

SEQ ID NO: 288462 - protein, 13 aa, Homo sapiens
  CDR3 for beta chain variable domain of TCR clone 144231 (TRBV2, TRBJ1-5)
CATAGPGNQPQHF

SEQ ID NO: 288463 - protein, 15 aa, Homo sapiens
  CDR3 for alpha chain variable domain of TCR clone 144232 (TRAV4, TRAJ39)
CLVGPNNNAGNMLTF

SEQ ID NO: 288464 - protein, 14 aa, Homo sapiens
  CDR3 for beta chain variable domain of TCR clone 144232 (TRBV6-1, TRBJ1-3)
CASVQGGGGNTMYF

SEQ ID NO: 288465 - protein, 14 aa, Homo sapiens
  CDR3 for alpha chain variable domain of TCR clone 144233 (TRAV12-1, TRAJ17)
RVVNYKAAGNKLTF

SEQ ID NO: 288466 - protein, 13 aa, Homo sapiens
  CDR3 for beta chain variable domain of TCR clone 144233 (TRBV27, TRBJ1-1)
CASSLSIGAEAFF

SEQ ID NO: 288467 - protein, 12 aa, Homo sapiens
  CDR3 for alpha chain variable domain of TCR clone 144234 (TRAV17, TRAJ57)
CATDGGSEKLVF

SEQ ID NO: 288468 - protein, 12 aa, Homo sapiens
  CDR3 for beta chain variable domain of TCR clone 144234 (TRBV28, TRBJ2-7)
CASTGNHYEQYF

SEQ ID NO: 288469 - protein, 14 aa, Homo sapiens
  CDR3 for alpha chain variable domain of TCR clone 144235 (TRAV3, TRAJ26)
CAVRDYNYGQNFVF

SEQ ID NO: 288470 - protein, 15 aa, Homo sapiens
  CDR3 for beta chain variable domain of TCR clone 144235 (TRBV20-1, TRBJ2-5)
CSANPPGRGGETQYF

SEQ ID NO: 288471 - protein, 10 aa, Homo sapiens
  CDR3 for alpha chain variable domain of TCR clone 144236 (TRAV29/DV5, TRAJ54)
LIQRAQKLVF

SEQ ID NO: 288472 - protein, 18 aa, Homo sapiens
  CDR3 for beta chain variable domain of TCR clone 144236 (TRBV3-1, TRBJ1-2)
CASSQDVIGWNGDYGYTF

SEQ ID NO: 288473 - protein, 15 aa, Homo sapiens
  CDR3 for alpha chain variable domain of TCR clone 144237 (TRAV23/DV6, TRAJ12)
CAAIDLGAMDSSYKL

SEQ ID NO: 288474 - protein, 16 aa, Homo sapiens
  CDR3 for beta chain variable domain of TCR clone 144237 (TRBV19, TRBJ2-2)
CASRSPGTGATGELFF

SEQ ID NO: 288475 - protein, 10 aa, Homo sapiens
  CDR3 for alpha chain variable domain of TCR clone 144238 (TRAV36/DV7, TRAJ48)
CAVGNEKLTF

SEQ ID NO: 288476 - protein, 11 aa, Homo sapiens
  CDR3 for beta chain variable domain of TCR clone 144238 (TRBV12-4, TRBJ2-3)
CASTATDTQYF

SEQ ID NO: 288477 - protein, 12 aa, Homo sapiens
  CDR3 for alpha chain variable domain of TCR clone 144239 (TRAV16, TRAJ9)
CPLRAGGFKTIF

SEQ ID NO: 288478 - protein, 13 aa, Homo sapiens
  CDR3 for beta chain variable domain of TCR clone 144239 (TRBV4-3, TRBJ1-1)
CASSQVEGSMAFF

SEQ ID NO: 288479 - protein, 10 aa, Homo sapiens
  CDR3 for alpha chain variable domain of TCR clone 144240 (TRAV36/DV7, TRAJ13)
CAAGYQKVTF

SEQ ID NO: 288480 - protein, 16 aa, Homo sapiens
  CDR3 for beta chain variable domain of TCR clone 144240 (TRBV2, TRBJ2-3)
CASSTSVEGVTDTQYF

SEQ ID NO: 288481 - protein, 14 aa, Homo sapiens
  CDR3 for alpha chain variable domain of TCR clone 144241 (TRAV2, TRAJ9)
CAVEDRGGGFKTIF

SEQ ID NO: 288482 - protein, 13 aa, Homo sapiens
  CDR3 for beta chain variable domain of TCR clone 144241 (TRBV12-4, TRBJ1-5)
CASSPDRAQPQHF

SEQ ID NO: 288483 - protein, 15 aa, Homo sapiens
  CDR3 for alpha chain variable domain of TCR clone 144242 (TRAV25, TRAJ53)
CAATWGGGSNYKLTF

SEQ ID NO: 288484 - protein, 14 aa, Homo sapiens
  CDR3 for beta chain variable domain of TCR clone 144242 (TRBV7-2, TRBJ1-1)
CASSFLTGTTEAFF

SEQ ID NO: 288485 - protein, 15 aa, Homo sapiens
  CDR3 for alpha chain variable domain of TCR clone 144243 (TRAV3, TRAJ22)
CAVRDRGGSARQLTF

SEQ ID NO: 288486 - protein, 15 aa, Homo sapiens
  CDR3 for beta chain variable domain of TCR clone 144243 (TRBV19, TRBJ2-4)
CASRGPRRGENSQYF

SEQ ID NO: 288487 - protein, 16 aa, Homo sapiens
  CDR3 for alpha chain variable domain of TCR clone 144244 (TRAV12-2, TRAJ37)
CAVKERGSSNTGKLIF

SEQ ID NO: 288488 - protein, 12 aa, Homo sapiens
  CDR3 for beta chain variable domain of TCR clone 144244 (TRBV10-1, TRBJ1-5)
CASSDSNQPQHF

SEQ ID NO: 288489 - protein, 13 aa, Homo sapiens
  CDR3 for alpha chain variable domain of TCR clone 144245 (TRAV21, TRAJ27)
CAARTGNAGKSTF

SEQ ID NO: 288490 - protein, 13 aa, Homo sapiens
  CDR3 for beta chain variable domain of TCR clone 144245 (TRBV7-6, TRBJ2-1)
CQQLGGGADEQFF

SEQ ID NO: 288491 - protein, 12 aa, Homo sapiens
  CDR3 for alpha chain variable domain of TCR clone 144246 (TRAV4, TRAJ6)
CFAPGGSYIPTF

SEQ ID NO: 288492 - protein, 17 aa, Homo sapiens
  CDR3 for beta chain variable domain of TCR clone 144246 (TRBV20-1, TRBJ2-2)
CSASGSGQGGLTGELFF

SEQ ID NO: 288493 - protein, 16 aa, Homo sapiens
  CDR3 for alpha chain variable domain of TCR clone 144247 (TRAV23/DV6, TRAJ9)
CAASIGGSTGGFQTIF

SEQ ID NO: 288494 - protein, 14 aa, Homo sapiens
  CDR3 for beta chain variable domain of TCR clone 144247 (TRBV9, TRBJ2-7)
CASSVGVGSYEQYF

SEQ ID NO: 288495 - protein, 11 aa, Homo sapiens
  CDR3 for alpha chain variable domain of TCR clone 144248 (TRAV23/DV6, TRAJ48)
CAPRWGEKSTF

SEQ ID NO: 288496 - protein, 13 aa, Homo sapiens
  CDR3 for beta chain variable domain of TCR clone 144248 (TRBV12-4, TRBJ2-5)
CASSPGAEETQYF

SEQ ID NO: 288497 - protein, 14 aa, Homo sapiens
  CDR3 for alpha chain variable domain of TCR clone 144249 (TRAV1-2, TRAJ16)
CAVNRFSDGQKLLF

SEQ ID NO: 288498 - protein, 14 aa, Homo sapiens
  CDR3 for beta chain variable domain of TCR clone 144249 (TRBV10-3, TRBJ2-1)
CAISSDLAYNEQFF

SEQ ID NO: 288499 - protein, 15 aa, Homo sapiens
  CDR3 for alpha chain variable domain of TCR clone 144250 (TRAV17, TRAJ4)
FVTGTWSGGYNKLIF

SEQ ID NO: 288500 - protein, 13 aa, Homo sapiens
  CDR3 for beta chain variable domain of TCR clone 144250 (TRBV6-6, TRBJ2-7)
CASSPKHLAEQYF

SEQ ID NO: 288501 - protein, 13 aa, Homo sapiens
  CDR3 for alpha chain variable domain of TCR clone 144251 (TRAV17, TRAJ5)
CALRGTGRRALTF

SEQ ID NO: 288502 - protein, 13 aa, Homo sapiens
  CDR3 for beta chain variable domain of TCR clone 144251 (TRBV4-2, TRBJ1-1)
CTSSQAGNTEAFF

SEQ ID NO: 288503 - protein, 15 aa, Homo sapiens
  CDR3 for alpha chain variable domain of TCR clone 144252 (TRAV23/DV6, TRAJ12)
CAAIDLGAMDSSYKL

SEQ ID NO: 288504 - protein, 12 aa, Homo sapiens
  CDR3 for beta chain variable domain of TCR clone 144252 (TRBV10-3, TRBJ2-2)
CDIRENTGELFF

SEQ ID NO: 288505 - protein, 12 aa, Homo sapiens
  CDR3 for alpha chain variable domain of TCR clone 144253 (TRAV21, TRAJ33)
CAKMDSNYQLIW

SEQ ID NO: 288506 - protein, 15 aa, Homo sapiens
  CDR3 for beta chain variable domain of TCR clone 144253 (TRBV12-4, TRBJ2-5)
CASSPPAGLPETQYF

SEQ ID NO: 288507 - protein, 14 aa, Homo sapiens
  CDR3 for alpha chain variable domain of TCR clone 144254 (TRAV13-2, TRAJ17)
CAENTKAAGNKLTF

SEQ ID NO: 288508 - protein, 15 aa, Homo sapiens
  CDR3 for beta chain variable domain of TCR clone 144254 (TRBV27, TRBJ2-1)
CASSNGGGSSNEQFF

SEQ ID NO: 288509 - protein, 15 aa, Homo sapiens
  CDR3 for alpha chain variable domain of TCR clone 144255 (TRAV20, TRAJ40)
CAVQRGTSGTYKYIF

SEQ ID NO: 288510 - protein, 13 aa, Homo sapiens
  CDR3 for beta chain variable domain of TCR clone 144255 (TRBV3-1, TRBJ1-1)
CASSQLQGAEAFF

SEQ ID NO: 288511 - protein, 10 aa, Homo sapiens
  CDR3 for alpha chain variable domain of TCR clone 144256 (TRAV36/DV7, TRAJ48)
CAVGNEKLTF

SEQ ID NO: 288512 - protein, 15 aa, Homo sapiens
  CDR3 for beta chain variable domain of TCR clone 144256 (TRBV6-3, TRBJ2-7)
CASSSPGTVFYEQYF

SEQ ID NO: 288513 - protein, 12 aa, Homo sapiens
  CDR3 for alpha chain variable domain of TCR clone 144257 (TRAV1-1, TRAJ20)
CAVREDDYKLSF

SEQ ID NO: 288514 - protein, 15 aa, Homo sapiens
  CDR3 for beta chain variable domain of TCR clone 144257 (TRBV5-7, TRBJ2-7)
CASSLPGQVVYEQYF

SEQ ID NO: 288515 - protein, 13 aa, Homo sapiens
  CDR3 for alpha chain variable domain of TCR clone 144258 (TRAV1-1, TRAJ13)
CAVNSGGYQKVTF

SEQ ID NO: 288516 - protein, 11 aa, Homo sapiens
  CDR3 for beta chain variable domain of TCR clone 144258 (TRBV28, TRBJ2-1)
CQQCPINEQFF

SEQ ID NO: 288517 - protein, 11 aa, Homo sapiens
  CDR3 for alpha chain variable domain of TCR clone 144259 (TRAV2, TRAJ33)
CAVDSNYQLIW

SEQ ID NO: 288518 - protein, 14 aa, Homo sapiens
  CDR3 for beta chain variable domain of TCR clone 144259 (TRBV11-2, TRBJ2-3)
CASSRLARTDQQYF

SEQ ID NO: 288519 - protein, 14 aa, Homo sapiens
  CDR3 for alpha chain variable domain of TCR clone 144260 (TRAV12-3, TRAJ10)
SHLPLTGGGNKLTF

SEQ ID NO: 288520 - protein, 12 aa, Homo sapiens
  CDR3 for beta chain variable domain of TCR clone 144260 (TRBV11-2, TRBJ2-2)
CAISLGGGELFF

SEQ ID NO: 288521 - protein, 12 aa, Homo sapiens
  CDR3 for alpha chain variable domain of TCR clone 144261 (TRAV12-1, TRAJ29)
CVADSGNTPLVF

SEQ ID NO: 288522 - protein, 12 aa, Homo sapiens
  CDR3 for beta chain variable domain of TCR clone 144261 (TRBV2, TRBJ2-7)
CARKRGSYEQYF

SEQ ID NO: 288523 - protein, 15 aa, Homo sapiens
  CDR3 for alpha chain variable domain of TCR clone 144262 (TRAV12-3, TRAJ6)
CAMSATTGGSYIPTF

SEQ ID NO: 288524 - protein, 15 aa, Homo sapiens
  CDR3 for beta chain variable domain of TCR clone 144262 (TRBV2, TRBJ2-7)
CASSELERGGVEQYF

SEQ ID NO: 288525 - protein, 13 aa, Homo sapiens
  CDR3 for alpha chain variable domain of TCR clone 144263 (TRAV8-3, TRAJ36)
CAVGATGANNLFF

SEQ ID NO: 288526 - protein, 13 aa, Homo sapiens
  CDR3 for beta chain variable domain of TCR clone 144263 (TRBV12-4, TRBJ1-2)
FASSLRQGKGYTF

SEQ ID NO: 288527 - protein, 13 aa, Homo sapiens
  CDR3 for alpha chain variable domain of TCR clone 144264 (TRAV8-3, TRAJ28)
CAVGAVGSYQLTS

SEQ ID NO: 288528 - protein, 13 aa, Homo sapiens
  CDR3 for beta chain variable domain of TCR clone 144264 (TRBV7-2, TRBJ1-6)
CASSLKFDSPLHF

SEQ ID NO: 288529 - protein, 19 aa, Homo sapiens
  CDR3 for alpha chain variable domain of TCR clone 144265 (TRAV26-1, TRAJ28)
CIVRVAHAYSGAGSYQLTF

SEQ ID NO: 288530 - protein, 13 aa, Homo sapiens
  CDR3 for beta chain variable domain of TCR clone 144265 (TRBV12-5, TRBJ2-3)
CASGDRQSDTQYF

SEQ ID NO: 288531 - protein, 18 aa, Homo sapiens
  CDR3 for alpha chain variable domain of TCR clone 144266 (TRAV21, TRAJ52)
FAVRPSPAGGTSYGKMTF

SEQ ID NO: 288532 - protein, 17 aa, Homo sapiens
  CDR3 for beta chain variable domain of TCR clone 144266 (TRBV13, TRBJ2-3)
CASSLSRVAGGRNTQYF

SEQ ID NO: 288533 - protein, 13 aa, Homo sapiens
  CDR3 for alpha chain variable domain of TCR clone 144267 (TRAV2, TRAJ40)
CAVVTSGTYKYIF

SEQ ID NO: 288534 - protein, 14 aa, Homo sapiens
  CDR3 for beta chain variable domain of TCR clone 144267 (TRBV20-1, TRBJ2-1)
CSAHPGLPYNEQFF

SEQ ID NO: 288535 - protein, 15 aa, Homo sapiens
  CDR3 for alpha chain variable domain of TCR clone 144268 (TRAV17, TRAJ57)
CASGPSQGGSEKLVF

SEQ ID NO: 288536 - protein, 16 aa, Homo sapiens
  CDR3 for beta chain variable domain of TCR clone 144268 (TRBV12-4, TRBJ1-5)
CASSRPVGGSKQPQHF

SEQ ID NO: 288537 - protein, 14 aa, Homo sapiens
  CDR3 for alpha chain variable domain of TCR clone 144269 (TRAV23/DV6, TRAJ4)
CAANLSGGYNKLIF

SEQ ID NO: 288538 - protein, 17 aa, Homo sapiens
  CDR3 for beta chain variable domain of TCR clone 144269 (TRBV24-1, TRBJ2-1)
CATSDPRASGRLNEQFF

SEQ ID NO: 288539 - protein, 12 aa, Homo sapiens
  CDR3 for alpha chain variable domain of TCR clone 144270 (TRAV21, TRAJ42)
CAVGGSQGNLIF

SEQ ID NO: 288540 - protein, 14 aa, Homo sapiens
  CDR3 for beta chain variable domain of TCR clone 144270 (TRBV12-4, TRBJ1-1)
CASSLGTVGTEAFF

SEQ ID NO: 288541 - protein, 23 aa, Homo sapiens
  CDR3 for alpha chain variable domain of TCR clone 144271 (TRAV26-1, TRAJ38)
CIADNAGNNHIQNPDPAVYQRRD

SEQ ID NO: 288542 - protein, 13 aa, Homo sapiens
  CDR3 for beta chain variable domain of TCR clone 144271 (TRBV20-1, TRBJ1-1)
CSARGGGNTEALF

SEQ ID NO: 288543 - protein, 11 aa, Homo sapiens
  CDR3 for alpha chain variable domain of TCR clone 144272 (TRAV25, TRAJ11)
CRGFRIQHLTF

SEQ ID NO: 288544 - protein, 14 aa, Homo sapiens
  CDR3 for beta chain variable domain of TCR clone 144272 (TRBV5-8, TRBJ2-3)
CASSLGQGTDTQYF

SEQ ID NO: 288545 - protein, 16 aa, Homo sapiens
  CDR3 for alpha chain variable domain of TCR clone 144273 (TRAV20, TRAJ22)
CAVQASSSGSARRLTF

SEQ ID NO: 288546 - protein, 13 aa, Homo sapiens
  CDR3 for beta chain variable domain of TCR clone 144273 (TRBV7-2, TRBJ2-5)
CASSQTSVETQYF

SEQ ID NO: 288547 - protein, 19 aa, Homo sapiens
  CDR3 for alpha chain variable domain of TCR clone 144274 (TRAV1-2, TRAJ26)
CLLPLCCERPDNYGQTFVF

SEQ ID NO: 288548 - protein, 15 aa, Homo sapiens
  CDR3 for beta chain variable domain of TCR clone 144274 (TRBV9, TRBJ1-6)
CASSVAGTGDSPLHF

SEQ ID NO: 288549 - protein, 15 aa, Homo sapiens
  CDR3 for alpha chain variable domain of TCR clone 144275 (TRAV3, TRAJ42)
CAVRGGTGTQGNLIF

SEQ ID NO: 288550 - protein, 14 aa, Homo sapiens
  CDR3 for beta chain variable domain of TCR clone 144275 (TRBV19, TRBJ1-2)
CASSSLFARDVYTF

SEQ ID NO: 288551 - protein, 13 aa, Homo sapiens
  CDR3 for alpha chain variable domain of TCR clone 144276 (TRAV2, TRAJ15)
CAVASQAGTALFF

SEQ ID NO: 288552 - protein, 18 aa, Homo sapiens
  CDR3 for beta chain variable domain of TCR clone 144276 (TRBV12-4, TRBJ2-2)
CASSLVAGTRGRTGELFF

SEQ ID NO: 288553 - protein, 13 aa, Homo sapiens
  CDR3 for alpha chain variable domain of TCR clone 144277 (TRAV12-1, TRAJ16)
CVVNGPDGQKLLF

SEQ ID NO: 288554 - protein, 18 aa, Homo sapiens
  CDR3 for beta chain variable domain of TCR clone 144277 (TRBV20-1, TRBJ2-3)
CSASGLAGGPGTTDTQYF

SEQ ID NO: 288555 - protein, 16 aa, Homo sapiens
  CDR3 for alpha chain variable domain of TCR clone 144278 (TRAV3, TRAJ37)
CAVRPHGSGNTGKLIF

SEQ ID NO: 288556 - protein, 18 aa, Homo sapiens
  CDR3 for beta chain variable domain of TCR clone 144278 (TRBV7-3, TRBJ2-3)
CASSSTGTYPGSTDTQYF

SEQ ID NO: 288557 - protein, 14 aa, Homo sapiens
  CDR3 for alpha chain variable domain of TCR clone 144279 (TRAV20, TRAJ42)
CDVQAGGSQRKLIF

SEQ ID NO: 288558 - protein, 14 aa, Homo sapiens
  CDR3 for beta chain variable domain of TCR clone 144279 (TRBV28, TRBJ1-2)
CASRIQGANYGYTF

SEQ ID NO: 288559 - protein, 11 aa, Homo sapiens
  CDR3 for alpha chain variable domain of TCR clone 144280 (TRAV23/DV6, TRAJ58)
CAARLLRGETS

SEQ ID NO: 288560 - protein, 13 aa, Homo sapiens
  CDR3 for beta chain variable domain of TCR clone 144280 (TRBV11-2, TRBJ2-7)
CASSLGDSYEQYF

SEQ ID NO: 288561 - protein, 14 aa, Homo sapiens
  CDR3 for alpha chain variable domain of TCR clone 144281 (TRAV2, TRAJ9)
CAVEDRSGGFKTIF

SEQ ID NO: 288562 - protein, 18 aa, Homo sapiens
  CDR3 for beta chain variable domain of TCR clone 144281 (TRBV7-3, TRBJ2-5)
CAGSFRGGGDPVLRARHA

SEQ ID NO: 288563 - protein, 14 aa, Homo sapiens
  CDR3 for alpha chain variable domain of TCR clone 144282 (TRAV1-2, TRAJ8)
CAVREDTGFKKLVL

SEQ ID NO: 288564 - protein, 15 aa, Homo sapiens
  CDR3 for beta chain variable domain of TCR clone 144282 (TRBV6-3, TRBJ2-7)
CASSSPGTVSYEQYF

SEQ ID NO: 288565 - protein, 14 aa, Homo sapiens
  CDR3 for alpha chain variable domain of TCR clone 144283 (TRAV35, TRAJ22)
RAGLRPGSARQLTF

SEQ ID NO: 288566 - protein, 16 aa, Homo sapiens
  CDR3 for beta chain variable domain of TCR clone 144283 (TRBV10-3, TRBJ2-2)
CAISESRGFGSGELFF

SEQ ID NO: 288567 - protein, 15 aa, Homo sapiens
  CDR3 for alpha chain variable domain of TCR clone 144284 (TRAV9-2, TRAJ21)
CALLDTTSTNFTLDL

SEQ ID NO: 288568 - protein, 13 aa, Homo sapiens
  CDR3 for beta chain variable domain of TCR clone 144284 (TRBV10-3, TRBJ1-2)
CAINADLNYGYTF

SEQ ID NO: 288569 - protein, 14 aa, Homo sapiens
  CDR3 for alpha chain variable domain of TCR clone 144285 (TRAV2, TRAJ37)
CAVDFTSNTGKLIF

SEQ ID NO: 288570 - protein, 16 aa, Homo sapiens
  CDR3 for beta chain variable domain of TCR clone 144285 (TRBV7-2, TRBJ2-1)
CASSPGSGGNYNEQFF

SEQ ID NO: 288571 - protein, 13 aa, Homo sapiens
  CDR3 for alpha chain variable domain of TCR clone 144286 (TRAV8-1, TRAJ34)
CAVNAGNTDKLVF

SEQ ID NO: 288572 - protein, 13 aa, Homo sapiens
  CDR3 for beta chain variable domain of TCR clone 144286 (TRBV20-1, TRBJ2-1)
CSAGAGTYNEQFF

SEQ ID NO: 288573 - protein, 10 aa, Homo sapiens
  CDR3 for alpha chain variable domain of TCR clone 144287 (TRAV8-4, TRAJ43)
CAVSADDLRF

SEQ ID NO: 288574 - protein, 15 aa, Homo sapiens
  CDR3 for beta chain variable domain of TCR clone 144287 (TRBV5-1, TRBJ2-3)
CASSVTSGATDTQYF

SEQ ID NO: 288575 - protein, 15 aa, Homo sapiens
  CDR3 for alpha chain variable domain of TCR clone 144288 (TRAV38-2/DV8, TRAJ15)
CAYKGANQAGTALIF

SEQ ID NO: 288576 - protein, 12 aa, Homo sapiens
  CDR3 for beta chain variable domain of TCR clone 144288 (TRBV7-8, TRBJ2-7)
CASSLGDREQYF

SEQ ID NO: 288577 - protein, 13 aa, Homo sapiens
  CDR3 for alpha chain variable domain of TCR clone 144289 (TRAV8-6, TRAJ49)
CAVITNTGNKFYF

SEQ ID NO: 288578 - protein, 13 aa, Homo sapiens
  CDR3 for beta chain variable domain of TCR clone 144289 (TRBV7-9, TRBJ1-2)
CASSLKQNYGYTF

SEQ ID NO: 288579 - protein, 15 aa, Homo sapiens
  CDR3 for alpha chain variable domain of TCR clone 144290 (TRAV12-2, TRAJ32)
CAVNHYGGATNKLIF

SEQ ID NO: 288580 - protein, 14 aa, Homo sapiens
  CDR3 for beta chain variable domain of TCR clone 144290 (TRBV27, TRBJ2-1)
CATSFGREANEQFF

SEQ ID NO: 288581 - protein, 14 aa, Homo sapiens
  CDR3 for alpha chain variable domain of TCR clone 144291 (TRAV23/DV6, TRAJ17)
CAASIGAAGNKLTF

SEQ ID NO: 288582 - protein, 11 aa, Homo sapiens
  CDR3 for beta chain variable domain of TCR clone 144291 (TRBV20-1, TRBJ2-5)
SAGGAGETQYF

SEQ ID NO: 288583 - protein, 20 aa, Homo sapiens
  CDR3 for alpha chain variable domain of TCR clone 144292 (TRAV30, TRAJ32)
RNLLRRHREGYGGATNKLIF

SEQ ID NO: 288584 - protein, 13 aa, Homo sapiens
  CDR3 for beta chain variable domain of TCR clone 144292 (TRBV10-3, TRBJ2-7)
CASKLAVNYEQYF

SEQ ID NO: 288585 - protein, 15 aa, Homo sapiens
  CDR3 for alpha chain variable domain of TCR clone 144293 (TRAV27, TRAJ38)
CAARRNAGTNRKLIC

SEQ ID NO: 288586 - protein, 15 aa, Homo sapiens
  CDR3 for beta chain variable domain of TCR clone 144293 (TRBV5-1, TRBJ2-1)
CASSPPRAPYNEQFF

SEQ ID NO: 288587 - protein, 14 aa, Homo sapiens
  CDR3 for alpha chain variable domain of TCR clone 144294 (TRAV1-2, TRAJ16)
CAVNRFSDVQKLFF

SEQ ID NO: 288588 - protein, 14 aa, Homo sapiens
  CDR3 for beta chain variable domain of TCR clone 144294 (TRBV7-9, TRBJ2-2)
CASSLGHRTGELFF

SEQ ID NO: 288589 - protein, 14 aa, Homo sapiens
  CDR3 for alpha chain variable domain of TCR clone 144295 (TRAV23/DV6, TRAJ58)
CAGMGETSGSRLTF

SEQ ID NO: 288590 - protein, 13 aa, Homo sapiens
  CDR3 for beta chain variable domain of TCR clone 144295 (TRBV28, TRBJ2-7)
CASRSSGVYEQYF

SEQ ID NO: 288591 - protein, 13 aa, Homo sapiens
  CDR3 for alpha chain variable domain of TCR clone 144296 (TRAV5, TRAJ30)
CAEIANRDDKIIF

SEQ ID NO: 288592 - protein, 13 aa, Homo sapiens
  CDR3 for beta chain variable domain of TCR clone 144296 (TRBV11-2, TRBJ2-5)
CASSSTGEETQYF

SEQ ID NO: 288593 - protein, 13 aa, Homo sapiens
  CDR3 for alpha chain variable domain of TCR clone 144297 (TRAV21, TRAJ32)
CAVSGGATNKLIF

SEQ ID NO: 288594 - protein, 18 aa, Homo sapiens
  CDR3 for beta chain variable domain of TCR clone 144297 (TRBV23-1, TRBJ2-5)
TVSLRQQSMAPAHNEQFF

SEQ ID NO: 288595 - protein, 16 aa, Homo sapiens
  CDR3 for alpha chain variable domain of TCR clone 144298 (TRAV25, TRAJ53)
CAGPKGSGGSNYKLTL

SEQ ID NO: 288596 - protein, 17 aa, Homo sapiens
  CDR3 for beta chain variable domain of TCR clone 144298 (TRBV27, TRBJ2-7)
CASSISPTGLHPTEQYF

SEQ ID NO: 288597 - protein, 15 aa, Homo sapiens
  CDR3 for alpha chain variable domain of TCR clone 144299 (TRAV8-4, TRAJ6)
CAVSAPSGGSYIPTF

SEQ ID NO: 288598 - protein, 15 aa, Homo sapiens
  CDR3 for beta chain variable domain of TCR clone 144299 (TRBV7-3, TRBJ2-2)
CASKANGANTGELFF

SEQ ID NO: 288599 - protein, 14 aa, Homo sapiens
  CDR3 for alpha chain variable domain of TCR clone 144300 (TRAV26-1, TRAJ38)
CIADNAGNNRKRIW

SEQ ID NO: 288600 - protein, 14 aa, Homo sapiens
  CDR3 for beta chain variable domain of TCR clone 144300 (TRBV18, TRBJ2-7)
CASSPRGGSYEQYF

SEQ ID NO: 288601 - protein, 12 aa, Homo sapiens
  CDR3 for alpha chain variable domain of TCR clone 144301 (TRAV12-3, TRAJ34)
FAMGYNTDKLIF

SEQ ID NO: 288602 - protein, 14 aa, Homo sapiens
  CDR3 for beta chain variable domain of TCR clone 144301 (TRBV4-1, TRBJ2-2)
CASSQAVNTGELFF

SEQ ID NO: 288603 - protein, 14 aa, Homo sapiens
  CDR3 for alpha chain variable domain of TCR clone 144302 (TRAV13-1, TRAJ3)
CAASKSSSASKIIF

SEQ ID NO: 288604 - protein, 16 aa, Homo sapiens
  CDR3 for beta chain variable domain of TCR clone 144302 (TRBV19, TRBJ2-1)
CASSKAGPSSYNEQFF

SEQ ID NO: 288605 - protein, 15 aa, Homo sapiens
  CDR3 for alpha chain variable domain of TCR clone 144303 (TRAV29/DV5, TRAJ10)
CAAFGVTGGGNKLTF

SEQ ID NO: 288606 - protein, 19 aa, Homo sapiens
  CDR3 for beta chain variable domain of TCR clone 144303 (TRBV25-1, TRBJ2-2)
CAILVYRVDRGRKTGELFF

SEQ ID NO: 288607 - protein, 13 aa, Homo sapiens
  CDR3 for alpha chain variable domain of TCR clone 144304 (TRAV13-2, TRAJ53)
CAEYMGSNCKLTF

SEQ ID NO: 288608 - protein, 13 aa, Homo sapiens
  CDR3 for beta chain variable domain of TCR clone 144304 (TRBV4-1, TRBJ2-2)
CASSQENTGELFF

SEQ ID NO: 288609 - protein, 18 aa, Homo sapiens
  CDR3 for alpha chain variable domain of TCR clone 144305 (TRAV29/DV5, TRAJ52)
CAAGFRDAGGTSYGKLTF

SEQ ID NO: 288610 - protein, 16 aa, Homo sapiens
  CDR3 for beta chain variable domain of TCR clone 144305 (TRBV2, TRBJ2-1)
CASSDFPGQPYNEQFF

SEQ ID NO: 288611 - protein, 13 aa, Homo sapiens
  CDR3 for alpha chain variable domain of TCR clone 144306 (TRAV17, TRAJ9)
CATAITGGFKTIF

SEQ ID NO: 288612 - protein, 15 aa, Homo sapiens
  CDR3 for beta chain variable domain of TCR clone 144306 (TRBV2, TRBJ2-1)
CASSELAGSYNEQFF

SEQ ID NO: 288613 - protein, 15 aa, Homo sapiens
  CDR3 for alpha chain variable domain of TCR clone 144307 (TRAV12-3, TRAJ6)
CAMSATTGGSYIPTF

SEQ ID NO: 288614 - protein, 15 aa, Homo sapiens
  CDR3 for beta chain variable domain of TCR clone 144307 (TRBV28, TRBJ2-5)
CASSPPGSYQETQYF

SEQ ID NO: 288615 - protein, 12 aa, Homo sapiens
  CDR3 for alpha chain variable domain of TCR clone 144308 (TRAV25, TRAJ35)
CTGIGFGNVLHC

SEQ ID NO: 288616 - protein, 15 aa, Homo sapiens
  CDR3 for beta chain variable domain of TCR clone 144308 (TRBV20-1, TRBJ2-5)
CSAPPRTGFGETQYF

SEQ ID NO: 288617 - protein, 13 aa, Homo sapiens
  CDR3 for alpha chain variable domain of TCR clone 144309 (TRAV3, TRAJ43)
CAVKSRNNNDMRF

SEQ ID NO: 288618 - protein, 16 aa, Homo sapiens
  CDR3 for beta chain variable domain of TCR clone 144309 (TRBV7-9, TRBJ2-3)
CASSFSVAGGTDTQYF

SEQ ID NO: 288619 - protein, 15 aa, Homo sapiens
  CDR3 for alpha chain variable domain of TCR clone 144310 (TRAV26-1, TRAJ29)
CIVIVEGSGNTPLVF

SEQ ID NO: 288620 - protein, 14 aa, Homo sapiens
  CDR3 for beta chain variable domain of TCR clone 144310 (TRBV2, TRBJ2-7)
CASSLTSGGYEQYF

SEQ ID NO: 288621 - protein, 15 aa, Homo sapiens
  CDR3 for alpha chain variable domain of TCR clone 144311 (TRAV23/DV6, TRAJ44)
CAARTLTGTASKLTF

SEQ ID NO: 288622 - protein, 20 aa, Homo sapiens
  CDR3 for beta chain variable domain of TCR clone 144311 (TRBV5-1, TRBJ2-3)
CASSLWLAGAITTRTDTQYF

SEQ ID NO: 288623 - protein, 14 aa, Homo sapiens
  CDR3 for alpha chain variable domain of TCR clone 144312 (TRAV1-2, TRAJ16)
CAVNRFSDGQKLLF

SEQ ID NO: 288624 - protein, 11 aa, Homo sapiens
  CDR3 for beta chain variable domain of TCR clone 144312 (TRBV29-1, TRBJ2-7)
CSEDRTGTQYF

SEQ ID NO: 288625 - protein, 11 aa, Homo sapiens
  CDR3 for alpha chain variable domain of TCR clone 144313 (TRAV2, TRAJ33)
CAVESNYQLIW

SEQ ID NO: 288626 - protein, 13 aa, Homo sapiens
  CDR3 for beta chain variable domain of TCR clone 144313 (TRBV19, TRBJ2-7)
CASSIDRTYEQYF

SEQ ID NO: 288627 - protein, 14 aa, Homo sapiens
  CDR3 for alpha chain variable domain of TCR clone 144314 (TRAV1-2, TRAJ16)
CAVNRFSDGQKLFF

SEQ ID NO: 288628 - protein, 16 aa, Homo sapiens
  CDR3 for beta chain variable domain of TCR clone 144314 (TRBV3-1, TRBJ2-5)
CASSPRQFNGFGTQYF

SEQ ID NO: 288629 - protein, 11 aa, Homo sapiens
  CDR3 for alpha chain variable domain of TCR clone 144315 (TRAV1-2, TRAJ20)
CAVANDYKLSF

SEQ ID NO: 288630 - protein, 18 aa, Homo sapiens
  CDR3 for beta chain variable domain of TCR clone 144315 (TRBV20-1, TRBJ2-6)
CSAETTPAHGSGANDLTF

SEQ ID NO: 288631 - protein, 14 aa, Homo sapiens
  CDR3 for alpha chain variable domain of TCR clone 144316 (TRAV12-3, TRAJ5)
CAMSTYTGRRALTF

SEQ ID NO: 288632 - protein, 13 aa, Homo sapiens
  CDR3 for beta chain variable domain of TCR clone 144316 (TRBV28, TRBJ2-3)
CASSAGGGDTQYF

SEQ ID NO: 288633 - protein, 13 aa, Homo sapiens
  CDR3 for alpha chain variable domain of TCR clone 144317 (TRAV12-2, TRAJ34)
CAVRGYNTDKLIF

SEQ ID NO: 288634 - protein, 18 aa, Homo sapiens
  CDR3 for beta chain variable domain of TCR clone 144317 (TRBV11-2, TRBJ2-3)
CASSLGGASRGAPNTRYF

SEQ ID NO: 288635 - protein, 14 aa, Homo sapiens
  CDR3 for alpha chain variable domain of TCR clone 144318 (TRAV34, TRAJ44)
CGADGTGTASKLTF

SEQ ID NO: 288636 - protein, 15 aa, Homo sapiens
  CDR3 for beta chain variable domain of TCR clone 144318 (TRBV2, TRBJ2-1)
CASSEEREGDNEQFF

SEQ ID NO: 288637 - protein, 15 aa, Homo sapiens
  CDR3 for alpha chain variable domain of TCR clone 144319 (TRAV36/DV7, TRAJ38)
CAVRGVAGNNRKLVW

SEQ ID NO: 288638 - protein, 14 aa, Homo sapiens
  CDR3 for beta chain variable domain of TCR clone 144319 (TRBV6-6, TRBJ1-3)
CASSRQGSGNTIYF

SEQ ID NO: 288639 - protein, 14 aa, Homo sapiens
  CDR3 for alpha chain variable domain of TCR clone 144320 (TRAV26-1, TRAJ57)
CIRAGQGGSEKLVF

SEQ ID NO: 288640 - protein, 13 aa, Homo sapiens
  CDR3 for beta chain variable domain of TCR clone 144320 (TRBV19, TRBJ2-7)
CASSLMTSYEQYF

SEQ ID NO: 288641 - protein, 20 aa, Homo sapiens
  CDR3 for alpha chain variable domain of TCR clone 144321 (TRAV21, TRAJ4)
AASQPGDSATLAGGYNKLIF

SEQ ID NO: 288642 - protein, 17 aa, Homo sapiens
  CDR3 for beta chain variable domain of TCR clone 144321 (TRBV11-2, TRBJ2-1)
CASSLYPPGVEYNEQFF

SEQ ID NO: 288643 - protein, 13 aa, Homo sapiens
  CDR3 for alpha chain variable domain of TCR clone 144322 (TRAV13-1, TRAJ11)
GAAVLAGYSTLTF

SEQ ID NO: 288644 - protein, 17 aa, Homo sapiens
  CDR3 for beta chain variable domain of TCR clone 144322 (TRBV25-1, TRBJ2-7)
CASSDARVVFSSYEQYF

SEQ ID NO: 288645 - protein, 13 aa, Homo sapiens
  CDR3 for alpha chain variable domain of TCR clone 144323 (TRAV5, TRAJ11)
CAETTSGYSTLTF

SEQ ID NO: 288646 - protein, 15 aa, Homo sapiens
  CDR3 for beta chain variable domain of TCR clone 144323 (TRBV4-1, TRBJ1-4)
CASSDTGGTNEKLFF

SEQ ID NO: 288647 - protein, 14 aa, Homo sapiens
  CDR3 for alpha chain variable domain of TCR clone 144324 (TRAV29/DV5, TRAJ28)
CAATEGAGGYQLTF

SEQ ID NO: 288648 - protein, 15 aa, Homo sapiens
  CDR3 for beta chain variable domain of TCR clone 144324 (TRBV7-8, TRBJ2-1)
CASSLHGGPYNEQFF

SEQ ID NO: 288649 - protein, 11 aa, Homo sapiens
  CDR3 for alpha chain variable domain of TCR clone 144325 (TRAV2, TRAJ13)
CASGGYQKVTF

SEQ ID NO: 288650 - protein, 15 aa, Homo sapiens
  CDR3 for beta chain variable domain of TCR clone 144325 (TRBV7-6, TRBJ2-2)
CASSSHGLASGELFF

SEQ ID NO: 288651 - protein, 17 aa, Homo sapiens
  CDR3 for alpha chain variable domain of TCR clone 144326 (TRAV8-6, TRAJ58)
CAVSSWVEETSGSRLTF

SEQ ID NO: 288652 - protein, 14 aa, Homo sapiens
  CDR3 for beta chain variable domain of TCR clone 144326 (TRBV4-2, TRBJ2-1)
CASGLDRAYNEQFF

SEQ ID NO: 288653 - protein, 12 aa, Homo sapiens
  CDR3 for alpha chain variable domain of TCR clone 144327 (TRAV8-3, TRAJ20)
CAVGGGDYKLSF

SEQ ID NO: 288654 - protein, 14 aa, Homo sapiens
  CDR3 for beta chain variable domain of TCR clone 144327 (TRBV6-1, TRBJ1-3)
CASVQGGGGNTIYF

SEQ ID NO: 288655 - protein, 14 aa, Homo sapiens
  CDR3 for alpha chain variable domain of TCR clone 144328 (TRAV2, TRAJ9)
CAVEDRSGGFQTIF

SEQ ID NO: 288656 - protein, 13 aa, Homo sapiens
  CDR3 for beta chain variable domain of TCR clone 144328 (TRBV7-9, TRBJ1-2)
CASSLKQNYGYTF

SEQ ID NO: 288657 - protein, 15 aa, Homo sapiens
  CDR3 for alpha chain variable domain of TCR clone 144329 (TRAV21, TRAJ24)
CATRSSTDSWGNCSL

SEQ ID NO: 288658 - protein, 13 aa, Homo sapiens
  CDR3 for beta chain variable domain of TCR clone 144329 (TRBV11-2, TRBJ2-5)
CASSSTGEETQYF

SEQ ID NO: 288659 - protein, 15 aa, Homo sapiens
  CDR3 for alpha chain variable domain of TCR clone 144330 (TRAV25, TRAJ53)
CPTSNSGGSNYKLTF

SEQ ID NO: 288660 - protein, 13 aa, Homo sapiens
  CDR3 for beta chain variable domain of TCR clone 144330 (TRBV18, TRBJ1-1)
CASSGGRNTEAFF

SEQ ID NO: 288661 - protein, 12 aa, Homo sapiens
  CDR3 for alpha chain variable domain of TCR clone 144331 (TRAV13-2, TRAJ42)
CAEGGSQGNLIF

SEQ ID NO: 288662 - protein, 13 aa, Homo sapiens
  CDR3 for beta chain variable domain of TCR clone 144331 (TRBV4-2, TRBJ1-1)
CASSQAGNTEAFF

SEQ ID NO: 288663 - protein, 18 aa, Homo sapiens
  CDR3 for alpha chain variable domain of TCR clone 144332 (TRAV26-2, TRAJ54)
CILRDVEVGIQGAQKLVF

SEQ ID NO: 288664 - protein, 11 aa, Homo sapiens
  CDR3 for beta chain variable domain of TCR clone 144332 (TRBV29-1, TRBJ2-5)
CSEDRTGTQYF

SEQ ID NO: 288665 - protein, 14 aa, Homo sapiens
  CDR3 for alpha chain variable domain of TCR clone 144333 (TRAV12-2, TRAJ17)
CAVNIKAAGNKLTF

SEQ ID NO: 288666 - protein, 13 aa, Homo sapiens
  CDR3 for beta chain variable domain of TCR clone 144333 (TRBV2, TRBJ1-1)
CASRWTVNTEAFF

SEQ ID NO: 288667 - protein, 14 aa, Homo sapiens
  CDR3 for alpha chain variable domain of TCR clone 144334 (TRAV12-2, TRAJ17)
CAVLFKAAGNKLTF

SEQ ID NO: 288668 - protein, 17 aa, Homo sapiens
  CDR3 for beta chain variable domain of TCR clone 144334 (TRBV20-1, TRBJ2-1)
CSASSSGLAGSYNEQLF

SEQ ID NO: 288669 - protein, 12 aa, Homo sapiens
  CDR3 for alpha chain variable domain of TCR clone 144335 (TRAV2, TRAJ23)
CAVEDVGGKLIF

SEQ ID NO: 288670 - protein, 15 aa, Homo sapiens
  CDR3 for beta chain variable domain of TCR clone 144335 (TRBV20-1, TRBJ2-1)
CSARGIGGAYNEQFF

SEQ ID NO: 288671 - protein, 15 aa, Homo sapiens
  CDR3 for alpha chain variable domain of TCR clone 144336 (TRAV8-3, TRAJ45)
CASSYSGGGADGLTF

SEQ ID NO: 288672 - protein, 13 aa, Homo sapiens
  CDR3 for beta chain variable domain of TCR clone 144336 (TRBV7-9, TRBJ2-7)
CDSSFAGAYEQYF

SEQ ID NO: 288673 - protein, 16 aa, Homo sapiens
  CDR3 for alpha chain variable domain of TCR clone 144337 (TRAV1-2, TRAJ10)
CAVRVVLTGGGNKLTF

SEQ ID NO: 288674 - protein, 20 aa, Homo sapiens
  CDR3 for beta chain variable domain of TCR clone 144337 (TRBV7-8, TRBJ2-2)
CASSHLFPGPTIHITGELFF

SEQ ID NO: 288675 - protein, 11 aa, Homo sapiens
  CDR3 for alpha chain variable domain of TCR clone 144338 (TRAV13-1, TRAJ21)
CSKGRLQQILL

SEQ ID NO: 288676 - protein, 19 aa, Homo sapiens
  CDR3 for beta chain variable domain of TCR clone 144338 (TRBV2, TRBJ2-7)
CASSDDETSGRANDYEQYF

SEQ ID NO: 288677 - protein, 12 aa, Homo sapiens
  CDR3 for alpha chain variable domain of TCR clone 144339 (TRAV8-6, TRAJ36)
CAVSDWLGQTTS

SEQ ID NO: 288678 - protein, 19 aa, Homo sapiens
  CDR3 for beta chain variable domain of TCR clone 144339 (TRBV19, TRBJ2-5)
CASSIGQVTDFLLGETQYF

SEQ ID NO: 288679 - protein, 18 aa, Homo sapiens
  CDR3 for alpha chain variable domain of TCR clone 144340 (TRAV13-1, TRAJ52)
CAASKRSAGGTSYGKLKF

SEQ ID NO: 288680 - protein, 14 aa, Homo sapiens
  CDR3 for beta chain variable domain of TCR clone 144340 (TRBV5-8, TRBJ2-3)
CASSLGQGTDTQYF

SEQ ID NO: 288681 - protein, 11 aa, Homo sapiens
  CDR3 for alpha chain variable domain of TCR clone 144341 (TRAV2, TRAJ13)
CASGGYQEVTF

SEQ ID NO: 288682 - protein, 16 aa, Homo sapiens
  CDR3 for beta chain variable domain of TCR clone 144341 (TRBV7-9, TRBJ1-2)
CASSISLDRGGYGYTF

SEQ ID NO: 288683 - protein, 16 aa, Homo sapiens
  CDR3 for alpha chain variable domain of TCR clone 144342 (TRAV30, TRAJ24)
CGTEIVDADRWGKFQV

SEQ ID NO: 288684 - protein, 14 aa, Homo sapiens
  CDR3 for beta chain variable domain of TCR clone 144342 (TRBV12-5, TRBJ2-5)
CASGSRTHQETQYF

SEQ ID NO: 288685 - protein, 16 aa, Homo sapiens
  CDR3 for alpha chain variable domain of TCR clone 144343 (TRAV14/DV4, TRAJ53)
CAMREGGGGSNYKLTF

SEQ ID NO: 288686 - protein, 14 aa, Homo sapiens
  CDR3 for beta chain variable domain of TCR clone 144343 (TRBV7-9, TRBJ2-5)
CASSLAFGQETQYF

SEQ ID NO: 288687 - protein, 14 aa, Homo sapiens
  CDR3 for alpha chain variable domain of TCR clone 144344 (TRAV29/DV5, TRAJ49)
CAASARILGNQFYF

SEQ ID NO: 288688 - protein, 15 aa, Homo sapiens
  CDR3 for beta chain variable domain of TCR clone 144344 (TRBV9, TRBJ1-6)
CASSVAGTGDSPLHF

SEQ ID NO: 288689 - protein, 11 aa, Homo sapiens
  CDR3 for alpha chain variable domain of TCR clone 144345 (TRAV21, TRAJ11)
CAVNGYSTLTF

SEQ ID NO: 288690 - protein, 13 aa, Homo sapiens
  CDR3 for beta chain variable domain of TCR clone 144345 (TRBV5-5, TRBJ1-2)
CASSFWRGEDYTF

SEQ ID NO: 288691 - protein, 17 aa, Homo sapiens
  CDR3 for alpha chain variable domain of TCR clone 144346 (TRAV26-2, TRAJ42)
CILRDESYGGNQGNLIF

SEQ ID NO: 288692 - protein, 15 aa, Homo sapiens
  CDR3 for beta chain variable domain of TCR clone 144346 (TRBV6-6, TRBJ2-7)
CASSYSYGGSYEQYF

SEQ ID NO: 288693 - protein, 18 aa, Homo sapiens
  CDR3 for alpha chain variable domain of TCR clone 144347 (TRAV16, TRAJ52)
CALSGVDAGGTSYGKLTF

SEQ ID NO: 288694 - protein, 16 aa, Homo sapiens
  CDR3 for beta chain variable domain of TCR clone 144347 (TRBV29-1, TRBJ2-7)
CSVEVVGTSGSYEQYF

SEQ ID NO: 288695 - protein, 14 aa, Homo sapiens
  CDR3 for alpha chain variable domain of TCR clone 144348 (TRAV12-3, TRAJ20)
CAMSARRGDYKLSF

SEQ ID NO: 288696 - protein, 15 aa, Homo sapiens
  CDR3 for beta chain variable domain of TCR clone 144348 (TRBV5-1, TRBJ1-1)
CASSSRTGRNTEAFF

SEQ ID NO: 288697 - protein, 11 aa, Homo sapiens
  CDR3 for alpha chain variable domain of TCR clone 144349 (TRAV17, TRAJ31)
CATSNNARLMF

SEQ ID NO: 288698 - protein, 16 aa, Homo sapiens
  CDR3 for beta chain variable domain of TCR clone 144349 (TRBV7-8, TRBJ2-4)
CASSAERTLAKNIQFF

SEQ ID NO: 288699 - protein, 14 aa, Homo sapiens
  CDR3 for alpha chain variable domain of TCR clone 144350 (TRAV12-3, TRAJ9)
CAMSVETGGFKTIF

SEQ ID NO: 288700 - protein, 17 aa, Homo sapiens
  CDR3 for beta chain variable domain of TCR clone 144350 (TRBV7-9, TRBJ2-6)
CASSFGAGYSGANVLTF

SEQ ID NO: 288701 - protein, 11 aa, Homo sapiens
  CDR3 for alpha chain variable domain of TCR clone 144351 (TRAV12-3, TRAJ27)
CAKANAGKSTF

SEQ ID NO: 288702 - protein, 13 aa, Homo sapiens
  CDR3 for beta chain variable domain of TCR clone 144351 (TRBV20-1, TRBJ1-1)
CSARVGGNTEAFF

SEQ ID NO: 288703 - protein, 14 aa, Homo sapiens
  CDR3 for alpha chain variable domain of TCR clone 144352 (TRAV12-2, TRAJ9)
CAVNMEGGGFKTIF

SEQ ID NO: 288704 - protein, 14 aa, Homo sapiens
  CDR3 for beta chain variable domain of TCR clone 144352 (TRBV27, TRBJ2-3)
CASRKGGRKDTQYF

SEQ ID NO: 288705 - protein, 14 aa, Homo sapiens
  CDR3 for alpha chain variable domain of TCR clone 144353 (TRAV8-3, TRAJ13)
CAVGAQEGYQKVNF

SEQ ID NO: 288706 - protein, 13 aa, Homo sapiens
  CDR3 for beta chain variable domain of TCR clone 144353 (TRBV11-2, TRBJ2-5)
CASSSTGEETQYF

SEQ ID NO: 288707 - protein, 10 aa, Homo sapiens
  CDR3 for alpha chain variable domain of TCR clone 144354 (TRAV1-2, TRAJ31)
CVSEDARLMF

SEQ ID NO: 288708 - protein, 13 aa, Homo sapiens
  CDR3 for beta chain variable domain of TCR clone 144354 (TRBV11-2, TRBJ2-7)
CASSLGDSYEQYF

SEQ ID NO: 288709 - protein, 12 aa, Homo sapiens
  CDR3 for alpha chain variable domain of TCR clone 144355 (TRAV2, TRAJ33)
CAVWGSNYQLIW

SEQ ID NO: 288710 - protein, 16 aa, Homo sapiens
  CDR3 for beta chain variable domain of TCR clone 144355 (TRBV20-1, TRBJ1-4)
CSAPGQGLLTNEELFF

SEQ ID NO: 288711 - protein, 17 aa, Homo sapiens
  CDR3 for alpha chain variable domain of TCR clone 144356 (TRAV3, TRAJ42)
CAVRDRDYGGSQGNLIF

SEQ ID NO: 288712 - protein, 15 aa, Homo sapiens
  CDR3 for beta chain variable domain of TCR clone 144356 (TRBV18, TRBJ2-7)
CSSSPTVTPNYEQYF

SEQ ID NO: 288713 - protein, 11 aa, Homo sapiens
  CDR3 for alpha chain variable domain of TCR clone 144357 (TRAV12-2, TRAJ44)
CGYRHCSKLTF

SEQ ID NO: 288714 - protein, 17 aa, Homo sapiens
  CDR3 for beta chain variable domain of TCR clone 144357 (TRBV20-1, TRBJ1-1)
CSARGTGGSYGNTGAFF

SEQ ID NO: 288715 - protein, 16 aa, Homo sapiens
  CDR3 for alpha chain variable domain of TCR clone 144358 (TRAV26-1, TRAJ32)
CIVRPNYGGATNKLLF

SEQ ID NO: 288716 - protein, 14 aa, Homo sapiens
  CDR3 for beta chain variable domain of TCR clone 144358 (TRBV27, TRBJ1-1)
CASSLLSGLSEAFF

SEQ ID NO: 288717 - protein, 12 aa, Homo sapiens
  CDR3 for alpha chain variable domain of TCR clone 144359 (TRAV38-2/DV8, TRAJ57)
CVWKGGSEKLVF

SEQ ID NO: 288718 - protein, 13 aa, Homo sapiens
  CDR3 for beta chain variable domain of TCR clone 144359 (TRBV5-1, TRBJ1-5)
CASSLAQDQPQHF

SEQ ID NO: 288719 - protein, 21 aa, Homo sapiens
  CDR3 for alpha chain variable domain of TCR clone 144360 (TRAV29/DV5, TRAJ52)
CSVLLCSKREAGGTSYGKLTF

SEQ ID NO: 288720 - protein, 15 aa, Homo sapiens
  CDR3 for beta chain variable domain of TCR clone 144360 (TRBV6-1, TRBJ2-1)
CASRELRGQYNEQFF

SEQ ID NO: 288721 - protein, 12 aa, Homo sapiens
  CDR3 for alpha chain variable domain of TCR clone 144361 (TRAV21, TRAJ49)
CAVNDGGNQFYF

SEQ ID NO: 288722 - protein, 14 aa, Homo sapiens
  CDR3 for beta chain variable domain of TCR clone 144361 (TRBV18, TRBJ2-7)
CASSHRGGSYEQYF

SEQ ID NO: 288723 - protein, 13 aa, Homo sapiens
  CDR3 for alpha chain variable domain of TCR clone 144362 (TRAV8-3, TRAJ37)
CAVGSGNTGKLVF

SEQ ID NO: 288724 - protein, 11 aa, Homo sapiens
  CDR3 for beta chain variable domain of TCR clone 144362 (TRBV29-1, TRBJ1-1)
CSLQENTEAFF

SEQ ID NO: 288725 - protein, 14 aa, Homo sapiens
  CDR3 for alpha chain variable domain of TCR clone 144363 (TRAV12-3, TRAJ10)
SHLPLTGGGNKLTF

SEQ ID NO: 288726 - protein, 14 aa, Homo sapiens
  CDR3 for beta chain variable domain of TCR clone 144363 (TRBV5-1, TRBJ1-1)
CASSLTRRSTEAFF

SEQ ID NO: 288727 - protein, 11 aa, Homo sapiens
  CDR3 for alpha chain variable domain of TCR clone 144364 (TRAV12-1, TRAJ21)
CVVYNFNKFYF

SEQ ID NO: 288728 - protein, 14 aa, Homo sapiens
  CDR3 for beta chain variable domain of TCR clone 144364 (TRBV19, TRBJ2-7)
CASSRGQGAIEQYF

SEQ ID NO: 288729 - protein, 14 aa, Homo sapiens
  CDR3 for alpha chain variable domain of TCR clone 144365 (TRAV12-3, TRAJ12)
CAMSEVDSSYKLIF

SEQ ID NO: 288730 - protein, 12 aa, Homo sapiens
  CDR3 for beta chain variable domain of TCR clone 144365 (TRBV18, TRBJ1-4)
CASSPSQEKLFF

SEQ ID NO: 288731 - protein, 14 aa, Homo sapiens
  CDR3 for alpha chain variable domain of TCR clone 144366 (TRAV17, TRAJ57)
CATDPQGGSEKLVF

SEQ ID NO: 288732 - protein, 16 aa, Homo sapiens
  CDR3 for beta chain variable domain of TCR clone 144366 (TRBV13, TRBJ2-2)
CASSPRTGEHIGELFF

SEQ ID NO: 288733 - protein, 16 aa, Homo sapiens
  CDR3 for alpha chain variable domain of TCR clone 144367 (TRAV30, TRAJ24)
CGTEIVDAGSWGKFQF

SEQ ID NO: 288734 - protein, 16 aa, Homo sapiens
  CDR3 for beta chain variable domain of TCR clone 144367 (TRBV12-5, TRBJ2-5)
CASGPRTSGNQETQYF

SEQ ID NO: 288735 - protein, 15 aa, Homo sapiens
  CDR3 for alpha chain variable domain of TCR clone 144368 (TRAV13-2, TRAJ10)
CAENRDTRGGNKLTF

SEQ ID NO: 288736 - protein, 16 aa, Homo sapiens
  CDR3 for beta chain variable domain of TCR clone 144368 (TRBV2, TRBJ1-3)
CASSRTGGSTGNTIYF

SEQ ID NO: 288737 - protein, 13 aa, Homo sapiens
  CDR3 for alpha chain variable domain of TCR clone 144369 (TRAV27, TRAJ49)
CAPRPYTGNQFYF

SEQ ID NO: 288738 - protein, 16 aa, Homo sapiens
  CDR3 for beta chain variable domain of TCR clone 144369 (TRBV20-1, TRBJ1-4)
CSAPGQGLLTNEKLFF

SEQ ID NO: 288739 - protein, 14 aa, Homo sapiens
  CDR3 for alpha chain variable domain of TCR clone 144370 (TRAV8-3, TRAJ35)
CALVPQGFGNVLHC

SEQ ID NO: 288740 - protein, 15 aa, Homo sapiens
  CDR3 for beta chain variable domain of TCR clone 144370 (TRBV6-1, TRBJ2-2)
CASSAGQGYTGELFF

SEQ ID NO: 288741 - protein, 13 aa, Homo sapiens
  CDR3 for alpha chain variable domain of TCR clone 144371 (TRAV26-2, TRAJ37)
CIRGSSNTGKLIF

SEQ ID NO: 288742 - protein, 15 aa, Homo sapiens
  CDR3 for beta chain variable domain of TCR clone 144371 (TRBV15, TRBJ1-5)
CATSRDPVSNQPQHF

SEQ ID NO: 288743 - protein, 12 aa, Homo sapiens
  CDR3 for alpha chain variable domain of TCR clone 144372 (TRAV13-1, TRAJ20)
CAASMGDYTLSF

SEQ ID NO: 288744 - protein, 15 aa, Homo sapiens
  CDR3 for beta chain variable domain of TCR clone 144372 (TRBV11-3, TRBJ2-3)
CASNGGLDSTDTQYF

SEQ ID NO: 288745 - protein, 13 aa, Homo sapiens
  CDR3 for alpha chain variable domain of TCR clone 144373 (TRAV17, TRAJ22)
CAHHSGSSRQLTF

SEQ ID NO: 288746 - protein, 17 aa, Homo sapiens
  CDR3 for beta chain variable domain of TCR clone 144373 (TRBV15, TRBJ1-4)
CATSRYGTGDPNEKLFF

SEQ ID NO: 288747 - protein, 13 aa, Homo sapiens
  CDR3 for alpha chain variable domain of TCR clone 144374 (TRAV13-1, TRAJ43)
CAASKNNNNDMRF

SEQ ID NO: 288748 - protein, 14 aa, Homo sapiens
  CDR3 for beta chain variable domain of TCR clone 144374 (TRBV7-6, TRBJ2-3)
CASSLGTVTDTQYF

SEQ ID NO: 288749 - protein, 14 aa, Homo sapiens
  CDR3 for alpha chain variable domain of TCR clone 144375 (TRAV8-3, TRAJ4)
CAVGAAGGYNKLIF

SEQ ID NO: 288750 - protein, 15 aa, Homo sapiens
  CDR3 for beta chain variable domain of TCR clone 144375 (TRBV6-5, TRBJ2-1)
CASSYDTGAGNEQFF

SEQ ID NO: 288751 - protein, 15 aa, Homo sapiens
  CDR3 for alpha chain variable domain of TCR clone 144376 (TRAV27, TRAJ38)
CEARRNAGNNRKLIW

SEQ ID NO: 288752 - protein, 14 aa, Homo sapiens
  CDR3 for beta chain variable domain of TCR clone 144376 (TRBV7-8, TRBJ2-3)
CASSLEAGTDTQYF

SEQ ID NO: 288753 - protein, 12 aa, Homo sapiens
  CDR3 for alpha chain variable domain of TCR clone 144377 (TRAV26-2, TRAJ48)
CILRKGNEKLTF

SEQ ID NO: 288754 - protein, 14 aa, Homo sapiens
  CDR3 for beta chain variable domain of TCR clone 144377 (TRBV28, TRBJ2-7)
CASSTLRGRFEQYV

SEQ ID NO: 288755 - protein, 16 aa, Homo sapiens
  CDR3 for alpha chain variable domain of TCR clone 144378 (TRAV12-3, TRAJ53)
CAMSPGRGGSNYKMTF

SEQ ID NO: 288756 - protein, 11 aa, Homo sapiens
  CDR3 for beta chain variable domain of TCR clone 144378 (TRBV29-1, TRBJ2-5)
CSEDRTGTQYF

SEQ ID NO: 288757 - protein, 15 aa, Homo sapiens
  CDR3 for alpha chain variable domain of TCR clone 144379 (TRAV12-1, TRAJ44)
CVVFVNTGTASKLTF

SEQ ID NO: 288758 - protein, 17 aa, Homo sapiens
  CDR3 for beta chain variable domain of TCR clone 144379 (TRBV7-8, TRBJ2-6)
CGSSAGTGGAGANVLTF

SEQ ID NO: 288759 - protein, 14 aa, Homo sapiens
  CDR3 for alpha chain variable domain of TCR clone 144380 (TRAV12-2, TRAJ4)
CAEDLSGGYNKLIF

SEQ ID NO: 288760 - protein, 13 aa, Homo sapiens
  CDR3 for beta chain variable domain of TCR clone 144380 (TRBV7-9, TRBJ1-2)
CASRLKQNYGYTF

SEQ ID NO: 288761 - protein, 15 aa, Homo sapiens
  CDR3 for alpha chain variable domain of TCR clone 144381 (TRAV25, TRAJ52)
CAGRPGGTSYGKLTF

SEQ ID NO: 288762 - protein, 17 aa, Homo sapiens
  CDR3 for beta chain variable domain of TCR clone 144381 (TRBV7-8, TRBJ2-6)
CASSAGTGCAGANGLTF

SEQ ID NO: 288763 - protein, 13 aa, Homo sapiens
  CDR3 for alpha chain variable domain of TCR clone 144382 (TRAV3, TRAJ30)
CAVRDIPDDKIIF

SEQ ID NO: 288764 - protein, 16 aa, Homo sapiens
  CDR3 for beta chain variable domain of TCR clone 144382 (TRBV4-1, TRBJ2-3)
CASSQSTSGAEDTQYF

SEQ ID NO: 288765 - protein, 13 aa, Homo sapiens
  CDR3 for alpha chain variable domain of TCR clone 144383 (TRAV8-3, TRAJ44)
FAVVPGTASKLTF

SEQ ID NO: 288766 - protein, 14 aa, Homo sapiens
  CDR3 for beta chain variable domain of TCR clone 144383 (TRBV11-2, TRBJ2-3)
CASSRLARTDTQYF

SEQ ID NO: 288767 - protein, 12 aa, Homo sapiens
  CDR3 for alpha chain variable domain of TCR clone 144384 (TRAV2, TRAJ10)
CASTGGGNKLTF

SEQ ID NO: 288768 - protein, 20 aa, Homo sapiens
  CDR3 for beta chain variable domain of TCR clone 144384 (TRBV7-8, TRBJ2-2)
CASSHLCPGPTIHITGELFF

SEQ ID NO: 288769 - protein, 16 aa, Homo sapiens
  CDR3 for alpha chain variable domain of TCR clone 144385 (TRAV27, TRAJ13)
CAGAKSDSGGYQKVTF

SEQ ID NO: 288770 - protein, 15 aa, Homo sapiens
  CDR3 for beta chain variable domain of TCR clone 144385 (TRBV29-1, TRBJ2-1)
CSVGRHALFYNAQFF

SEQ ID NO: 288771 - protein, 15 aa, Homo sapiens
  CDR3 for alpha chain variable domain of TCR clone 144386 (TRAV12-1, TRAJ45)
CVVLSGGGGADGLTF

SEQ ID NO: 288772 - protein, 15 aa, Homo sapiens
  CDR3 for beta chain variable domain of TCR clone 144386 (TRBV7-9, TRBJ1-5)
CASSQGHQPNQPQHF

SEQ ID NO: 288773 - protein, 14 aa, Homo sapiens
  CDR3 for alpha chain variable domain of TCR clone 144387 (TRAV1-2, TRAJ8)
CAVREDTGFQKLVF

SEQ ID NO: 288774 - protein, 11 aa, Homo sapiens
  CDR3 for beta chain variable domain of TCR clone 144387 (TRBV20-1, TRBJ2-7)
CSARLSYEQYF

SEQ ID NO: 288775 - protein, 14 aa, Homo sapiens
  CDR3 for alpha chain variable domain of TCR clone 144388 (TRAV12-3, TRAJ10)
SHLPLTGGVNKLTF

SEQ ID NO: 288776 - protein, 15 aa, Homo sapiens
  CDR3 for beta chain variable domain of TCR clone 144388 (TRBV10-2, TRBJ2-6)
CASSEQGTGANVLTF

SEQ ID NO: 288777 - protein, 12 aa, Homo sapiens
  CDR3 for alpha chain variable domain of TCR clone 144389 (TRAV2, TRAJ31)
CAVEDNNARLVF

SEQ ID NO: 288778 - protein, 13 aa, Homo sapiens
  CDR3 for beta chain variable domain of TCR clone 144389 (TRBV12-4, TRBJ2-1)
CASSHYTDNEQFF

SEQ ID NO: 288779 - protein, 16 aa, Homo sapiens
  CDR3 for alpha chain variable domain of TCR clone 144390 (TRAV8-1, TRAJ18)
CAVNAGRGSTLGRLYF

SEQ ID NO: 288780 - protein, 15 aa, Homo sapiens
  CDR3 for beta chain variable domain of TCR clone 144390 (TRBV7-8, TRBJ2-5)
CASTPRGASGETQYF

SEQ ID NO: 288781 - protein, 15 aa, Homo sapiens
  CDR3 for alpha chain variable domain of TCR clone 144391 (TRAV19, TRAJ23)
CALSEVGNQGGKLIF

SEQ ID NO: 288782 - protein, 18 aa, Homo sapiens
  CDR3 for beta chain variable domain of TCR clone 144391 (TRBV20-1, TRBJ2-3)
CSASGLAGGPGTTDTQYF

SEQ ID NO: 288783 - protein, 10 aa, Homo sapiens
  CDR3 for alpha chain variable domain of TCR clone 144392 (TRAV38-1, TRAJ34)
CAFMHDKLIF

SEQ ID NO: 288784 - protein, 14 aa, Homo sapiens
  CDR3 for beta chain variable domain of TCR clone 144392 (TRBV7-2, TRBJ2-2)
CASSLNSNTGELFF

SEQ ID NO: 288785 - protein, 15 aa, Homo sapiens
  CDR3 for alpha chain variable domain of TCR clone 144393 (TRAV4, TRAJ10)
CLVGDGSGGGNKLTF

SEQ ID NO: 288786 - protein, 15 aa, Homo sapiens
  CDR3 for beta chain variable domain of TCR clone 144393 (TRBV27, TRBJ2-3)
SASSSLAGVIDTQYF

SEQ ID NO: 288787 - protein, 14 aa, Homo sapiens
  CDR3 for alpha chain variable domain of TCR clone 144394 (TRAV1-2, TRAJ16)
CAVNRVSDGQKLLF

SEQ ID NO: 288788 - protein, 14 aa, Homo sapiens
  CDR3 for beta chain variable domain of TCR clone 144394 (TRBV12-4, TRBJ1-1)
CASSLGTGGTEAFF

SEQ ID NO: 288789 - protein, 14 aa, Homo sapiens
  CDR3 for alpha chain variable domain of TCR clone 144395 (TRAV13-2, TRAJ41)
CAERPDWAGYALNF

SEQ ID NO: 288790 - protein, 11 aa, Homo sapiens
  CDR3 for beta chain variable domain of TCR clone 144395 (TRBV11-2, TRBJ2-2)
CASSLPGELFF

SEQ ID NO: 288791 - protein, 15 aa, Homo sapiens
  CDR3 for alpha chain variable domain of TCR clone 144396 (TRAV26-1, TRAJ17)
CIVRVVKAAGNKLTF

SEQ ID NO: 288792 - protein, 15 aa, Homo sapiens
  CDR3 for beta chain variable domain of TCR clone 144396 (TRBV6-1, TRBJ2-1)
CASSELRGQYNEQFF

SEQ ID NO: 288793 - protein, 12 aa, Homo sapiens
  CDR3 for alpha chain variable domain of TCR clone 144397 (TRAV13-1, TRAJ21)
CAAKEGLNKFYF

SEQ ID NO: 288794 - protein, 14 aa, Homo sapiens
  CDR3 for beta chain variable domain of TCR clone 144397 (TRBV5-4, TRBJ1-1)
CASSLDSRRDAAFF

SEQ ID NO: 288795 - protein, 20 aa, Homo sapiens
  CDR3 for alpha chain variable domain of TCR clone 144398 (TRAV8-3, TRAJ44)
LSTSVLWVRLYTGTASKLTF

SEQ ID NO: 288796 - protein, 16 aa, Homo sapiens
  CDR3 for beta chain variable domain of TCR clone 144398 (TRBV28, TRBJ1-5)
CASSFRGGYSNQPQHF

SEQ ID NO: 288797 - protein, 17 aa, Homo sapiens
  CDR3 for alpha chain variable domain of TCR clone 144399 (TRAV3, TRAJ6)
CAVRDGPRAGGSYIRTV

SEQ ID NO: 288798 - protein, 14 aa, Homo sapiens
  CDR3 for beta chain variable domain of TCR clone 144399 (TRBV7-2, TRBJ2-7)
CASSPKTSFYEQYF

SEQ ID NO: 288799 - protein, 17 aa, Homo sapiens
  CDR3 for alpha chain variable domain of TCR clone 144400 (TRAV3, TRAJ6)
CAVRDGPRAGGSYIPTC

SEQ ID NO: 288800 - protein, 17 aa, Homo sapiens
  CDR3 for beta chain variable domain of TCR clone 144400 (TRBV20-1, TRBJ1-5)
CSASLSPGQGGNQPQHF

SEQ ID NO: 288801 - protein, 17 aa, Homo sapiens
  CDR3 for alpha chain variable domain of TCR clone 144401 (TRAV3, TRAJ6)
CAVRDGPRAGGSNLPTF

SEQ ID NO: 288802 - protein, 14 aa, Homo sapiens
  CDR3 for beta chain variable domain of TCR clone 144401 (TRBV7-2, TRBJ2-7)
CASSPKTSFYEQYF

SEQ ID NO: 288803 - protein, 17 aa, Homo sapiens
  CDR3 for alpha chain variable domain of TCR clone 144402 (TRAV23/DV6, TRAJ57)
CAASSTLSQGGSENLVF

SEQ ID NO: 288804 - protein, 14 aa, Homo sapiens
  CDR3 for beta chain variable domain of TCR clone 144402 (TRBV25-1, TRBJ1-1)
CASTPLGGNTEAFF

SEQ ID NO: 288805 - protein, 14 aa, Homo sapiens
  CDR3 for alpha chain variable domain of TCR clone 144403 (TRAV1-2, TRAJ8)
CAVREDTGFQKLVF

SEQ ID NO: 288806 - protein, 14 aa, Homo sapiens
  CDR3 for beta chain variable domain of TCR clone 144403 (TRBV7-6, TRBJ2-3)
CASSLGPVTDTQYF

SEQ ID NO: 288807 - protein, 11 aa, Homo sapiens
  CDR3 for alpha chain variable domain of TCR clone 144404 (TRAV21, TRAJ34)
CAHYNTDKLVF

SEQ ID NO: 288808 - protein, 13 aa, Homo sapiens
  CDR3 for beta chain variable domain of TCR clone 144404 (TRBV7-6, TRBJ1-2)
CASSLVADYGYSF

SEQ ID NO: 288809 - protein, 10 aa, Homo sapiens
  CDR3 for alpha chain variable domain of TCR clone 144405 (TRAV12-2, TRAJ36)
CGTNNLFFGT

SEQ ID NO: 288810 - protein, 15 aa, Homo sapiens
  CDR3 for beta chain variable domain of TCR clone 144405 (TRBV12-4, TRBJ2-5)
CASSPPTGLQETQYF

SEQ ID NO: 288811 - protein, 15 aa, Homo sapiens
  CDR3 for alpha chain variable domain of TCR clone 144406 (TRAV13-1, TRAJ17)
CAASIERAAGNKLTF

SEQ ID NO: 288812 - protein, 13 aa, Homo sapiens
  CDR3 for beta chain variable domain of TCR clone 144406 (TRBV7-9, TRBJ1-2)
CASSLKQNYGYTF

SEQ ID NO: 288813 - protein, 13 aa, Homo sapiens
  CDR3 for alpha chain variable domain of TCR clone 144407 (TRAV2, TRAJ40)
CAVVTSGTYKYIF

SEQ ID NO: 288814 - protein, 14 aa, Homo sapiens
  CDR3 for beta chain variable domain of TCR clone 144407 (TRBV19, TRBJ2-1)
CASPTFVLSGQQLF

SEQ ID NO: 288815 - protein, 12 aa, Homo sapiens
  CDR3 for alpha chain variable domain of TCR clone 144408 (TRAV26-1, TRAJ26)
CIVYNYGQNFVF

SEQ ID NO: 288816 - protein, 15 aa, Homo sapiens
  CDR3 for beta chain variable domain of TCR clone 144408 (TRBV7-2, TRBJ2-3)
CASSLRGGSTETQYF

SEQ ID NO: 288817 - protein, 12 aa, Homo sapiens
  CDR3 for alpha chain variable domain of TCR clone 144409 (TRAV8-3, TRAJ26)
CAGDNYGQNFVF

SEQ ID NO: 288818 - protein, 17 aa, Homo sapiens
  CDR3 for beta chain variable domain of TCR clone 144409 (TRBV7-8, TRBJ2-6)
CAGSAGTGGAGANVLTF

SEQ ID NO: 288819 - protein, 14 aa, Homo sapiens
  CDR3 for alpha chain variable domain of TCR clone 144410 (TRAV17, TRAJ57)
CATDPQGGSEKLVF

SEQ ID NO: 288820 - protein, 13 aa, Homo sapiens
  CDR3 for beta chain variable domain of TCR clone 144410 (TRBV19, TRBJ1-2)
CASSIVGARGYTF

SEQ ID NO: 288821 - protein, 14 aa, Homo sapiens
  CDR3 for alpha chain variable domain of TCR clone 144411 (TRAV8-4, TRAJ8)
CAGIGNTGFQKLVF

SEQ ID NO: 288822 - protein, 16 aa, Homo sapiens
  CDR3 for beta chain variable domain of TCR clone 144411 (TRBV9, TRBJ2-1)
CASSVEGDGSYNEQFF

SEQ ID NO: 288823 - protein, 14 aa, Homo sapiens
  CDR3 for alpha chain variable domain of TCR clone 144412 (TRAV29/DV5, TRAJ5)
CAASGDTGRRALTF

SEQ ID NO: 288824 - protein, 15 aa, Homo sapiens
  CDR3 for beta chain variable domain of TCR clone 144412 (TRBV7-9, TRBJ2-7)
CASSLALAEAYEQYF

SEQ ID NO: 288825 - protein, 14 aa, Homo sapiens
  CDR3 for alpha chain variable domain of TCR clone 144413 (TRAV8-1, TRAJ36)
CAVNSPTGANNLFF

SEQ ID NO: 288826 - protein, 15 aa, Homo sapiens
  CDR3 for beta chain variable domain of TCR clone 144413 (TRBV7-2, TRBJ2-3)
CASSLEQGVTDTQYF

SEQ ID NO: 288827 - protein, 21 aa, Homo sapiens
  CDR3 for alpha chain variable domain of TCR clone 144414 (TRAV1-1, TRAJ6)
CLLLLRCERLERTGGSYIPTF

SEQ ID NO: 288828 - protein, 13 aa, Homo sapiens
  CDR3 for beta chain variable domain of TCR clone 144414 (TRBV7-3, TRBJ1-1)
CASSQDWGAEAFF

SEQ ID NO: 288829 - protein, 14 aa, Homo sapiens
  CDR3 for alpha chain variable domain of TCR clone 144415 (TRAV36/DV7, TRAJ44)
CCGANTGTASKLTF

SEQ ID NO: 288830 - protein, 14 aa, Homo sapiens
  CDR3 for beta chain variable domain of TCR clone 144415 (TRBV4-1, TRBJ2-2)
CASSQAVNTGELFF

SEQ ID NO: 288831 - protein, 14 aa, Homo sapiens
  CDR3 for alpha chain variable domain of TCR clone 144416 (TRAV17, TRAJ6)
CATDASGGSYIPTF

SEQ ID NO: 288832 - protein, 16 aa, Homo sapiens
  CDR3 for beta chain variable domain of TCR clone 144416 (TRBV20-1, TRBJ1-2)
CSASMGQGVANYGYTF

SEQ ID NO: 288833 - protein, 14 aa, Homo sapiens
  CDR3 for alpha chain variable domain of TCR clone 144417 (TRAV8-3, TRAJ6)
CAVGSSGGSYIPTF

SEQ ID NO: 288834 - protein, 12 aa, Homo sapiens
  CDR3 for beta chain variable domain of TCR clone 144417 (TRBV11-2, TRBJ2-2)
CASSLPTGELFF

SEQ ID NO: 288835 - protein, 13 aa, Homo sapiens
  CDR3 for alpha chain variable domain of TCR clone 144418 (TRAV38-1, TRAJ31)
CAFMNFNNARLMF

SEQ ID NO: 288836 - protein, 15 aa, Homo sapiens
  CDR3 for beta chain variable domain of TCR clone 144418 (TRBV20-1, TRBJ2-7)
CSARDRVSGMDGQYF

SEQ ID NO: 288837 - protein, 12 aa, Homo sapiens
  CDR3 for alpha chain variable domain of TCR clone 144419 (TRAV4, TRAJ21)
CLAVDNFNKFYF

SEQ ID NO: 288838 - protein, 17 aa, Homo sapiens
  CDR3 for beta chain variable domain of TCR clone 144419 (TRBV3-1, TRBJ2-7)
CASSQDLTGLSSYEQYF

SEQ ID NO: 288839 - protein, 13 aa, Homo sapiens
  CDR3 for alpha chain variable domain of TCR clone 144420 (TRAV36/DV7, TRAJ49)
CAGDSNTGNQFYF

SEQ ID NO: 288840 - protein, 16 aa, Homo sapiens
  CDR3 for beta chain variable domain of TCR clone 144420 (TRBV12-5, TRBJ2-5)
CASGPRTSGNQETQYF

SEQ ID NO: 288841 - protein, 17 aa, Homo sapiens
  CDR3 for alpha chain variable domain of TCR clone 144421 (TRAV13-1, TRAJ31)
CAPRDRLMFGDGTQLVV

SEQ ID NO: 288842 - protein, 14 aa, Homo sapiens
  CDR3 for beta chain variable domain of TCR clone 144421 (TRBV5-7, TRBJ2-4)
CASTLSGVKNIQYF

SEQ ID NO: 288843 - protein, 14 aa, Homo sapiens
  CDR3 for alpha chain variable domain of TCR clone 144422 (TRAV13-1, TRAJ44)
CAAKATGTASKLTF

SEQ ID NO: 288844 - protein, 17 aa, Homo sapiens
  CDR3 for beta chain variable domain of TCR clone 144422 (TRBV7-3, TRBJ2-3)
CASSLMKRKRGADTQYF

SEQ ID NO: 288845 - protein, 13 aa, Homo sapiens
  CDR3 for alpha chain variable domain of TCR clone 144423 (TRAV26-1, TRAJ9)
CIVRPRKDWRLQN

SEQ ID NO: 288846 - protein, 12 aa, Homo sapiens
  CDR3 for beta chain variable domain of TCR clone 144423 (TRBV11-2, TRBJ2-5)
CASSLGQETQYF

SEQ ID NO: 288847 - protein, 15 aa, Homo sapiens
  CDR3 for alpha chain variable domain of TCR clone 144424 (TRAV16, TRAJ39)
CALSPSNNAGNMLTF

SEQ ID NO: 288848 - protein, 14 aa, Homo sapiens
  CDR3 for beta chain variable domain of TCR clone 144424 (TRBV7-7, TRBJ2-7)
CASGPGGPTYEQYF

SEQ ID NO: 288849 - protein, 14 aa, Homo sapiens
  CDR3 for alpha chain variable domain of TCR clone 144425 (TRAV1-2, TRAJ8)
CAVREDTGFQKRVF

SEQ ID NO: 288850 - protein, 14 aa, Homo sapiens
  CDR3 for beta chain variable domain of TCR clone 144425 (TRBV7-9, TRBJ1-1)
CASTPLQSYTEAFF

SEQ ID NO: 288851 - protein, 11 aa, Homo sapiens
  CDR3 for alpha chain variable domain of TCR clone 144426 (TRAV21, TRAJ11)
CAVNGYSTLTF

SEQ ID NO: 288852 - protein, 16 aa, Homo sapiens
  CDR3 for beta chain variable domain of TCR clone 144426 (TRBV19, TRBJ2-1)
CASSKAGPSSYNQQFF

SEQ ID NO: 288853 - protein, 15 aa, Homo sapiens
  CDR3 for alpha chain variable domain of TCR clone 144427 (TRAV8-2, TRAJ40)
CVVLGTTSGTYKYIF

SEQ ID NO: 288854 - protein, 16 aa, Homo sapiens
  CDR3 for beta chain variable domain of TCR clone 144427 (TRBV19, TRBJ2-1)
CASSKAGPSSYNEQFF

SEQ ID NO: 288855 - protein, 14 aa, Homo sapiens
  CDR3 for alpha chain variable domain of TCR clone 144428 (TRAV12-2, TRAJ13)
CAVKKTGGYQKVTF

SEQ ID NO: 288856 - protein, 16 aa, Homo sapiens
  CDR3 for beta chain variable domain of TCR clone 144428 (TRBV7-3, TRBJ2-2)
CASSLKRGTLSGELCF

SEQ ID NO: 288857 - protein, 16 aa, Homo sapiens
  CDR3 for alpha chain variable domain of TCR clone 144429 (TRAV16, TRAJ57)
CARYLITQGGSEKLVF

SEQ ID NO: 288858 - protein, 17 aa, Homo sapiens
  CDR3 for beta chain variable domain of TCR clone 144429 (TRBV24-1, TRBJ2-4)
CATSDAEARGVRNIQYF

SEQ ID NO: 288859 - protein, 16 aa, Homo sapiens
  CDR3 for alpha chain variable domain of TCR clone 144430 (TRAV22, TRAJ45)
CAVERGKRGGADGLTF

SEQ ID NO: 288860 - protein, 13 aa, Homo sapiens
  CDR3 for beta chain variable domain of TCR clone 144430 (TRBV27, TRBJ1-1)
CASSLPIGAEAFF

SEQ ID NO: 288861 - protein, 14 aa, Homo sapiens
  CDR3 for alpha chain variable domain of TCR clone 144431 (TRAV20, TRAJ47)
CAVTFGEYGNKLVF

SEQ ID NO: 288862 - protein, 15 aa, Homo sapiens
  CDR3 for beta chain variable domain of TCR clone 144431 (TRBV11-2, TRBJ2-1)
CASSLGTSGLNEQFF

SEQ ID NO: 288863 - protein, 13 aa, Homo sapiens
  CDR3 for alpha chain variable domain of TCR clone 144432 (TRAV29/DV5, TRAJ31)
CAASRNNNARLMF

SEQ ID NO: 288864 - protein, 15 aa, Homo sapiens
  CDR3 for beta chain variable domain of TCR clone 144432 (TRBV4-1, TRBJ2-1)
CASSQVLAGGDEQFF

SEQ ID NO: 288865 - protein, 19 aa, Homo sapiens
  CDR3 for alpha chain variable domain of TCR clone 144433 (TRAV8-6, TRAJ8)
LSTSVLWDPMNTGFQKLLF

SEQ ID NO: 288866 - protein, 13 aa, Homo sapiens
  CDR3 for beta chain variable domain of TCR clone 144433 (TRBV10-2, TRBJ2-3)
CASSESGDHTQYF

SEQ ID NO: 288867 - protein, 14 aa, Homo sapiens
  CDR3 for alpha chain variable domain of TCR clone 144434 (TRAV13-1, TRAJ45)
CAVIGGGGADGLTF

SEQ ID NO: 288868 - protein, 16 aa, Homo sapiens
  CDR3 for beta chain variable domain of TCR clone 144434 (TRBV7-2, TRBJ1-1)
CASSLGAGWTNTDAFF

SEQ ID NO: 288869 - protein, 14 aa, Homo sapiens
  CDR3 for alpha chain variable domain of TCR clone 144435 (TRAV27, TRAJ22)
CAGLPSGCARQLTF

SEQ ID NO: 288870 - protein, 17 aa, Homo sapiens
  CDR3 for beta chain variable domain of TCR clone 144435 (TRBV12-4, TRBJ1-1)
CASSLSGFRTMNTEAFF

SEQ ID NO: 288871 - protein, 11 aa, Homo sapiens
  CDR3 for alpha chain variable domain of TCR clone 144436 (TRAV1-2, TRAJ20)
CAVANDYKLSF

SEQ ID NO: 288872 - protein, 16 aa, Homo sapiens
  CDR3 for beta chain variable domain of TCR clone 144436 (TRBV7-2, TRBJ1-2)
CASSSNQDRRGHGYTF

SEQ ID NO: 288873 - protein, 16 aa, Homo sapiens
  CDR3 for alpha chain variable domain of TCR clone 144437 (TRAV3, TRAJ5)
CAVRNLRDTGRRALTF

SEQ ID NO: 288874 - protein, 16 aa, Homo sapiens
  CDR3 for beta chain variable domain of TCR clone 144437 (TRBV4-2, TRBJ2-7)
CASSQEGLANSYEQYF

SEQ ID NO: 288875 - protein, 13 aa, Homo sapiens
  CDR3 for alpha chain variable domain of TCR clone 144438 (TRAV12-1, TRAJ39)
CVVNYNAGNMLTF

SEQ ID NO: 288876 - protein, 17 aa, Homo sapiens
  CDR3 for beta chain variable domain of TCR clone 144438 (TRBV7-8, TRBJ2-6)
CASSAGTGGAGANVLTF

SEQ ID NO: 288877 - protein, 15 aa, Homo sapiens
  CDR3 for alpha chain variable domain of TCR clone 144439 (TRAV13-2, TRAJ10)
CAENRDTGGGNKLTF

SEQ ID NO: 288878 - protein, 16 aa, Homo sapiens
  CDR3 for beta chain variable domain of TCR clone 144439 (TRBV2, TRBJ1-3)
CASSRTRGSTGNTIYF

SEQ ID NO: 288879 - protein, 16 aa, Homo sapiens
  CDR3 for alpha chain variable domain of TCR clone 144440 (TRAV8-3, TRAJ44)
CAVGASNTGTASKLTF

SEQ ID NO: 288880 - protein, 15 aa, Homo sapiens
  CDR3 for beta chain variable domain of TCR clone 144440 (TRBV27, TRBJ1-5)
CASTFNRGSNQPQQF

SEQ ID NO: 288881 - protein, 11 aa, Homo sapiens
  CDR3 for alpha chain variable domain of TCR clone 144441 (TRAV12-3, TRAJ43)
CAMSVSNDMRF

SEQ ID NO: 288882 - protein, 13 aa, Homo sapiens
  CDR3 for beta chain variable domain of TCR clone 144441 (TRBV5-4, TRBJ2-5)
CASSEDNQETQYF

SEQ ID NO: 288883 - protein, 12 aa, Homo sapiens
  CDR3 for alpha chain variable domain of TCR clone 144442 (TRAV12-1, TRAJ29)
CVADSGTTPLVF

SEQ ID NO: 288884 - protein, 12 aa, Homo sapiens
  CDR3 for beta chain variable domain of TCR clone 144442 (TRBV2, TRBJ2-7)
CASKRGSYEQYF

SEQ ID NO: 288885 - protein, 16 aa, Homo sapiens
  CDR3 for alpha chain variable domain of TCR clone 144443 (TRAV38-2/DV8, TRAJ57)
CAYRSVGQGGSEKLVF

SEQ ID NO: 288886 - protein, 13 aa, Homo sapiens
  CDR3 for beta chain variable domain of TCR clone 144443 (TRBV19, TRBJ1-5)
CASSIEPVQPQHF

SEQ ID NO: 288887 - protein, 15 aa, Homo sapiens
  CDR3 for alpha chain variable domain of TCR clone 144444 (TRAV12-2, TRAJ43)
CAFDMRFGAGTRLTV

SEQ ID NO: 288888 - protein, 12 aa, Homo sapiens
  CDR3 for beta chain variable domain of TCR clone 144444 (TRBV11-2, TRBJ2-1)
CASSPGNNEQFF

SEQ ID NO: 288889 - protein, 14 aa, Homo sapiens
  CDR3 for alpha chain variable domain of TCR clone 144445 (TRAV4, TRAJ17)
CLVGDMAAGNKLTF

SEQ ID NO: 288890 - protein, 15 aa, Homo sapiens
  CDR3 for beta chain variable domain of TCR clone 144445 (TRBV5-5, TRBJ1-5)
CASSSTPGSNQPQHV

SEQ ID NO: 288891 - protein, 17 aa, Homo sapiens
  CDR3 for alpha chain variable domain of TCR clone 144446 (TRAV1-2, TRAJ27)
CAVRDKTGDTNAGKSTF

SEQ ID NO: 288892 - protein, 15 aa, Homo sapiens
  CDR3 for beta chain variable domain of TCR clone 144446 (TRBV6-3, TRBJ2-7)
CASSSPGTVFYEQYF

SEQ ID NO: 288893 - protein, 13 aa, Homo sapiens
  CDR3 for alpha chain variable domain of TCR clone 144447 (TRAV8-6, TRAJ13)
CAVRDGGYQKVTF

SEQ ID NO: 288894 - protein, 15 aa, Homo sapiens
  CDR3 for beta chain variable domain of TCR clone 144447 (TRBV7-9, TRBJ2-2)
CASIPEGTSAGELFF

SEQ ID NO: 288895 - protein, 13 aa, Homo sapiens
  CDR3 for alpha chain variable domain of TCR clone 144448 (TRAV13-1, TRAJ42)
CAASELWRKPRKS

SEQ ID NO: 288896 - protein, 15 aa, Homo sapiens
  CDR3 for beta chain variable domain of TCR clone 144448 (TRBV20-1, TRBJ2-1)
CSASSAGSSYNEQFF

SEQ ID NO: 288897 - protein, 15 aa, Homo sapiens
  CDR3 for alpha chain variable domain of TCR clone 144449 (TRAV8-1, TRAJ6)
CAVNTPPGGSYIPTF

SEQ ID NO: 288898 - protein, 18 aa, Homo sapiens
  CDR3 for beta chain variable domain of TCR clone 144449 (TRBV11-2, TRBJ2-7)
CASSWRTVQTGQSYEQYF

SEQ ID NO: 288899 - protein, 14 aa, Homo sapiens
  CDR3 for alpha chain variable domain of TCR clone 144450 (TRAV8-1, TRAJ13)
CAVKSSGGYQKVTF

SEQ ID NO: 288900 - protein, 13 aa, Homo sapiens
  CDR3 for beta chain variable domain of TCR clone 144450 (TRBV28, TRBJ1-1)
CASSKQGWTEAFF

SEQ ID NO: 288901 - protein, 14 aa, Homo sapiens
  CDR3 for alpha chain variable domain of TCR clone 144451 (TRAV23/DV6, TRAJ49)
CAASKSFVGNQFYF

SEQ ID NO: 288902 - protein, 13 aa, Homo sapiens
  CDR3 for beta chain variable domain of TCR clone 144451 (TRBV28, TRBJ1-1)
CASSKQGWTEAFF

SEQ ID NO: 288903 - protein, 18 aa, Homo sapiens
  CDR3 for alpha chain variable domain of TCR clone 144452 (TRAV21, TRAJ52)
CAVRPSPAAGTSYGKLTF

SEQ ID NO: 288904 - protein, 16 aa, Homo sapiens
  CDR3 for beta chain variable domain of TCR clone 144452 (TRBV7-3, TRBJ2-1)
CASSLEGYRSYNEQFF

SEQ ID NO: 288905 - protein, 13 aa, Homo sapiens
  CDR3 for alpha chain variable domain of TCR clone 144453 (TRAV26-2, TRAJ37)
CICGSSNTGKLIF

SEQ ID NO: 288906 - protein, 16 aa, Homo sapiens
  CDR3 for beta chain variable domain of TCR clone 144453 (TRBV7-2, TRBJ2-5)
CASSPGGARRGETQYF

SEQ ID NO: 288907 - protein, 15 aa, Homo sapiens
  CDR3 for alpha chain variable domain of TCR clone 144454 (TRAV8-3, TRAJ45)
CASSYSGGGADGLTF

SEQ ID NO: 288908 - protein, 13 aa, Homo sapiens
  CDR3 for beta chain variable domain of TCR clone 144454 (TRBV7-9, TRBJ2-5)
CASSPVGQETQYF

SEQ ID NO: 288909 - protein, 12 aa, Homo sapiens
  CDR3 for alpha chain variable domain of TCR clone 144455 (TRAV21, TRAJ13)
PGPSGGYQKVTF

SEQ ID NO: 288910 - protein, 15 aa, Homo sapiens
  CDR3 for beta chain variable domain of TCR clone 144455 (TRBV27, TRBJ2-5)
CASSLCPRGGETQYF

SEQ ID NO: 288911 - protein, 18 aa, Homo sapiens
  CDR3 for alpha chain variable domain of TCR clone 144456 (TRAV26-2, TRAJ54)
CILRDVEVGNQGAQKLVF

SEQ ID NO: 288912 - protein, 15 aa, Homo sapiens
  CDR3 for beta chain variable domain of TCR clone 144456 (TRBV29-1, TRBJ2-1)
CSVPTGLALYNEQFF

SEQ ID NO: 288913 - protein, 11 aa, Homo sapiens
  CDR3 for alpha chain variable domain of TCR clone 144457 (TRAV21, TRAJ9)
CAVPGGFKTIL

SEQ ID NO: 288914 - protein, 12 aa, Homo sapiens
  CDR3 for beta chain variable domain of TCR clone 144457 (TRBV20-1, TRBJ2-3)
CSARVGTDTQYF

SEQ ID NO: 288915 - protein, 12 aa, Homo sapiens
  CDR3 for alpha chain variable domain of TCR clone 144458 (TRAV13-1, TRAJ39)
CRSIWAGNMLTF

SEQ ID NO: 288916 - protein, 15 aa, Homo sapiens
  CDR3 for beta chain variable domain of TCR clone 144458 (TRBV7-9, TRBJ1-1)
CASSLLEQGGTEAFF

SEQ ID NO: 288917 - protein, 14 aa, Homo sapiens
  CDR3 for alpha chain variable domain of TCR clone 144459 (TRAV3, TRAJ5)
CAVRLDTGRRALTF

SEQ ID NO: 288918 - protein, 16 aa, Homo sapiens
  CDR3 for beta chain variable domain of TCR clone 144459 (TRBV6-5, TRBJ1-6)
CASSKALQRYNSPLHF

SEQ ID NO: 288919 - protein, 15 aa, Homo sapiens
  CDR3 for alpha chain variable domain of TCR clone 144460 (TRAV17, TRAJ22)
CATAPISGSARQLTF

SEQ ID NO: 288920 - protein, 13 aa, Homo sapiens
  CDR3 for beta chain variable domain of TCR clone 144460 (TRBV6-5, TRBJ1-2)
CASSLDTYYCYTF

SEQ ID NO: 288921 - protein, 16 aa, Homo sapiens
  CDR3 for alpha chain variable domain of TCR clone 144461 (TRAV26-1, TRAJ37)
CIVRGDGSGNTGKLIF

SEQ ID NO: 288922 - protein, 17 aa, Homo sapiens
  CDR3 for beta chain variable domain of TCR clone 144461 (TRBV4-1, TRBJ2-7)
CASSRDPLGVSGWEQYF

SEQ ID NO: 288923 - protein, 11 aa, Homo sapiens
  CDR3 for alpha chain variable domain of TCR clone 144462 (TRAV21, TRAJ31)
CAVRNNARLMF

SEQ ID NO: 288924 - protein, 15 aa, Homo sapiens
  CDR3 for beta chain variable domain of TCR clone 144462 (TRBV20-1, TRBJ2-7)
CSARDRVSGMDEQHF

SEQ ID NO: 288925 - protein, 15 aa, Homo sapiens
  CDR3 for alpha chain variable domain of TCR clone 144463 (TRAV17, TRAJ4)
CATGTWSGGYNKLIF

SEQ ID NO: 288926 - protein, 13 aa, Homo sapiens
  CDR3 for beta chain variable domain of TCR clone 144463 (TRBV7-2, TRBJ2-7)
CASSSPSGSEQYF

SEQ ID NO: 288927 - protein, 13 aa, Homo sapiens
  CDR3 for alpha chain variable domain of TCR clone 144464 (TRAV8-4, TRAJ48)
CAVSDPGNEKLTF

SEQ ID NO: 288928 - protein, 17 aa, Homo sapiens
  CDR3 for beta chain variable domain of TCR clone 144464 (TRBV7-8, TRBJ1-2)
CASSLRPLQGHLYGYIF

SEQ ID NO: 288929 - protein, 17 aa, Homo sapiens
  CDR3 for alpha chain variable domain of TCR clone 144465 (TRAV3, TRAJ6)
CAVGDGPRAGGSYIPTF

SEQ ID NO: 288930 - protein, 14 aa, Homo sapiens
  CDR3 for beta chain variable domain of TCR clone 144465 (TRBV7-2, TRBJ2-7)
CASSPKTSFYEQCF

SEQ ID NO: 288931 - protein, 13 aa, Homo sapiens
  CDR3 for alpha chain variable domain of TCR clone 144466 (TRAV8-4, TRAJ30)
CAASGNRDDKIIF

SEQ ID NO: 288932 - protein, 13 aa, Homo sapiens
  CDR3 for beta chain variable domain of TCR clone 144466 (TRBV3-1, TRBJ2-2)
CASLARGSGELFF

SEQ ID NO: 288933 - protein, 13 aa, Homo sapiens
  CDR3 for alpha chain variable domain of TCR clone 144467 (TRAV16, TRAJ48)
CSPLNFGNEKLTF

SEQ ID NO: 288934 - protein, 13 aa, Homo sapiens
  CDR3 for beta chain variable domain of TCR clone 144467 (TRBV7-9, TRBJ2-1)
CASSQAGGDEQFF

SEQ ID NO: 288935 - protein, 16 aa, Homo sapiens
  CDR3 for alpha chain variable domain of TCR clone 144468 (TRAV13-1, TRAJ39)
CAASIVMQATCSPLEG

SEQ ID NO: 288936 - protein, 16 aa, Homo sapiens
  CDR3 for beta chain variable domain of TCR clone 144468 (TRBV20-1, TRBJ1-4)
CSAPGQGLLTNGKLFF

SEQ ID NO: 288937 - protein, 13 aa, Homo sapiens
  CDR3 for alpha chain variable domain of TCR clone 144469 (TRAV13-1, TRAJ39)
CAASIWAGNMLTF

SEQ ID NO: 288938 - protein, 12 aa, Homo sapiens
  CDR3 for beta chain variable domain of TCR clone 144469 (TRBV11-2, TRBJ2-5)
CASSLGQETQYF

SEQ ID NO: 288939 - protein, 15 aa, Homo sapiens
  CDR3 for alpha chain variable domain of TCR clone 144470 (TRAV17, TRAJ57)
CATGPSQVGSEKLVF

SEQ ID NO: 288940 - protein, 16 aa, Homo sapiens
  CDR3 for beta chain variable domain of TCR clone 144470 (TRBV12-4, TRBJ1-5)
CASSRPVGGSNQAQHF

SEQ ID NO: 288941 - protein, 15 aa, Homo sapiens
  CDR3 for alpha chain variable domain of TCR clone 144471 (TRAV8-3, TRAJ37)
CAVGGLSSNTGKLIF

SEQ ID NO: 288942 - protein, 15 aa, Homo sapiens
  CDR3 for beta chain variable domain of TCR clone 144471 (TRBV10-3, TRBJ2-7)
RATREQGLRSYEQYF

SEQ ID NO: 288943 - protein, 13 aa, Homo sapiens
  CDR3 for alpha chain variable domain of TCR clone 144472 (TRAV17, TRAJ34)
CATDLYNTDKLIF

SEQ ID NO: 288944 - protein, 15 aa, Homo sapiens
  CDR3 for beta chain variable domain of TCR clone 144472 (TRBV20-1, TRBJ2-3)
CSATGTSGFTDTHYF

SEQ ID NO: 288945 - protein, 14 aa, Homo sapiens
  CDR3 for alpha chain variable domain of TCR clone 144473 (TRAV12-2, TRAJ40)
CAVKIPSGTYKYIF

SEQ ID NO: 288946 - protein, 16 aa, Homo sapiens
  CDR3 for beta chain variable domain of TCR clone 144473 (TRBV28, TRBJ2-7)
CASSQWVATGDLSQYF

SEQ ID NO: 288947 - protein, 12 aa, Homo sapiens
  CDR3 for alpha chain variable domain of TCR clone 144474 (TRAV8-3, TRAJ26)
CAGDNYGQNFVI

SEQ ID NO: 288948 - protein, 15 aa, Homo sapiens
  CDR3 for beta chain variable domain of TCR clone 144474 (TRBV9, TRBJ2-1)
CASSLAGSSYNEQFF

SEQ ID NO: 288949 - protein, 14 aa, Homo sapiens
  CDR3 for alpha chain variable domain of TCR clone 144475 (TRAV8-4, TRAJ13)
CAVTLSGGYQKVTF

SEQ ID NO: 288950 - protein, 16 aa, Homo sapiens
  CDR3 for beta chain variable domain of TCR clone 144475 (TRBV27, TRBJ2-5)
CASSFGPGGTKETHYF

SEQ ID NO: 288951 - protein, 15 aa, Homo sapiens
  CDR3 for alpha chain variable domain of TCR clone 144476 (TRAV27, TRAJ38)
CAARRNAGTNRKLIW

SEQ ID NO: 288952 - protein, 13 aa, Homo sapiens
  CDR3 for beta chain variable domain of TCR clone 144476 (TRBV20-1, TRBJ1-1)
CSARGGGNTEAFF

SEQ ID NO: 288953 - protein, 11 aa, Homo sapiens
  CDR3 for alpha chain variable domain of TCR clone 144477 (TRAV38-1, TRAJ35)
CAFMSLDRIWE

SEQ ID NO: 288954 - protein, 13 aa, Homo sapiens
  CDR3 for beta chain variable domain of TCR clone 144477 (TRBV4-1, TRBJ2-5)
CASSQEVQETQYF

SEQ ID NO: 288955 - protein, 12 aa, Homo sapiens
  CDR3 for alpha chain variable domain of TCR clone 144478 (TRAV8-3, TRAJ26)
CAGDNYGQNLVF

SEQ ID NO: 288956 - protein, 12 aa, Homo sapiens
  CDR3 for beta chain variable domain of TCR clone 144478 (TRBV11-2, TRBJ2-2)
CASSLGGGELFI

SEQ ID NO: 288957 - protein, 14 aa, Homo sapiens
  CDR3 for alpha chain variable domain of TCR clone 144479 (TRAV1-2, TRAJ8)
CAVREDTGFQKLVF

SEQ ID NO: 288958 - protein, 16 aa, Homo sapiens
  CDR3 for beta chain variable domain of TCR clone 144479 (TRBV24-1, TRBJ2-3)
CATSDRRQDLTDTQYF

SEQ ID NO: 288959 - protein, 14 aa, Homo sapiens
  CDR3 for alpha chain variable domain of TCR clone 144480 (TRAV12-3, TRAJ10)
SHLPLTGGENKLTF

SEQ ID NO: 288960 - protein, 15 aa, Homo sapiens
  CDR3 for beta chain variable domain of TCR clone 144480 (TRBV10-2, TRBJ2-6)
CASSEQGTGANVLTF

SEQ ID NO: 288961 - protein, 12 aa, Homo sapiens
  CDR3 for alpha chain variable domain of TCR clone 144481 (TRAV12-3, TRAJ41)
CAMSYSGYALNL

SEQ ID NO: 288962 - protein, 15 aa, Homo sapiens
  CDR3 for beta chain variable domain of TCR clone 144481 (TRBV5-1, TRBJ2-1)
CASSPPRAAYNEQFF

SEQ ID NO: 288963 - protein, 12 aa, Homo sapiens
  CDR3 for alpha chain variable domain of TCR clone 144482 (TRAV17, TRAJ28)
WDSGAGSYKLTF

SEQ ID NO: 288964 - protein, 13 aa, Homo sapiens
  CDR3 for beta chain variable domain of TCR clone 144482 (TRBV11-3, TRBJ1-1)
CASSRQPNTEAFF

SEQ ID NO: 288965 - protein, 13 aa, Homo sapiens
  CDR3 for alpha chain variable domain of TCR clone 144483 (TRAV14/DV4, TRAJ22)
CAMRDLSARQLTF

SEQ ID NO: 288966 - protein, 18 aa, Homo sapiens
  CDR3 for beta chain variable domain of TCR clone 144483 (TRBV19, TRBJ1-5)
CASSKAQVSIHSNQPQHF

SEQ ID NO: 288967 - protein, 23 aa, Homo sapiens
  CDR3 for alpha chain variable domain of TCR clone 144484 (TRAV26-1, )
CIADNAGDNHIQNTDPAVYQLRD

SEQ ID NO: 288968 - protein, 12 aa, Homo sapiens
  CDR3 for beta chain variable domain of TCR clone 144484 (TRBV11-2, TRBJ2-2)
CASSLGGGELFF

SEQ ID NO: 288969 - protein, 15 aa, Homo sapiens
  CDR3 for alpha chain variable domain of TCR clone 144485 (TRAV8-6, TRAJ10)
CAVSDQAGGGNKLTF

SEQ ID NO: 288970 - protein, 17 aa, Homo sapiens
  CDR3 for beta chain variable domain of TCR clone 144485 (TRBV19, TRBJ1-1)
CASSIAGRGLMNTEAFF

SEQ ID NO: 288971 - protein, 14 aa, Homo sapiens
  CDR3 for alpha chain variable domain of TCR clone 144486 (TRAV12-2, TRAJ13)
CAVKTTGGYQKVTF

SEQ ID NO: 288972 - protein, 14 aa, Homo sapiens
  CDR3 for beta chain variable domain of TCR clone 144486 (TRBV27, TRBJ2-1)
CQQYGGGSSNEQFF

SEQ ID NO: 288973 - protein, 13 aa, Homo sapiens
  CDR3 for alpha chain variable domain of TCR clone 144487 (TRAV27, TRAJ6)
CAGGTRGIYIPTF

SEQ ID NO: 288974 - protein, 15 aa, Homo sapiens
  CDR3 for beta chain variable domain of TCR clone 144487 (TRBV5-7, TRBJ2-7)
CASSLGPGRGHEQYF

SEQ ID NO: 288975 - protein, 16 aa, Homo sapiens
  CDR3 for alpha chain variable domain of TCR clone 144488 (TRAV8-3, TRAJ8)
CAVPRDGNTGFQTLVF

SEQ ID NO: 288976 - protein, 15 aa, Homo sapiens
  CDR3 for beta chain variable domain of TCR clone 144488 (TRBV7-8, TRBJ2-1)
CASSPSGTIYNEQFF

SEQ ID NO: 288977 - protein, 12 aa, Homo sapiens
  CDR3 for alpha chain variable domain of TCR clone 144489 (TRAV21, TRAJ39)
CAADNAGNMLTF

SEQ ID NO: 288978 - protein, 13 aa, Homo sapiens
  CDR3 for beta chain variable domain of TCR clone 144489 (TRBV7-2, TRBJ2-4)
CASSREHANIQYF

SEQ ID NO: 288979 - protein, 13 aa, Homo sapiens
  CDR3 for alpha chain variable domain of TCR clone 144490 (TRAV17, TRAJ54)
CAAGIQGAQKLEF

SEQ ID NO: 288980 - protein, 14 aa, Homo sapiens
  CDR3 for beta chain variable domain of TCR clone 144490 (TRBV11-2, TRBJ1-2)
CASSLGTANYGYTF

SEQ ID NO: 288981 - protein, 17 aa, Homo sapiens
  CDR3 for alpha chain variable domain of TCR clone 144491 (TRAV3, TRAJ6)
CAVIDGPRAGGSYIPTF

SEQ ID NO: 288982 - protein, 19 aa, Homo sapiens
  CDR3 for beta chain variable domain of TCR clone 144491 (TRBV25-1, TRBJ2-2)
CAILVYRVDRGRKTGELFF

SEQ ID NO: 288983 - protein, 14 aa, Homo sapiens
  CDR3 for alpha chain variable domain of TCR clone 144492 (TRAV12-2, TRAJ13)
CAVKKTGGYQKVTF

SEQ ID NO: 288984 - protein, 13 aa, Homo sapiens
  CDR3 for beta chain variable domain of TCR clone 144492 (TRBV7-7, TRBJ2-3)
CASSLSRADTQYF

SEQ ID NO: 288985 - protein, 13 aa, Homo sapiens
  CDR3 for alpha chain variable domain of TCR clone 144493 (TRAV13-1, TRAJ20)
CAARVSNYYKLSF

SEQ ID NO: 288986 - protein, 12 aa, Homo sapiens
  CDR3 for beta chain variable domain of TCR clone 144493 (TRBV20-1, TRBJ2-1)
CSARLGTDEQFF

SEQ ID NO: 288987 - protein, 15 aa, Homo sapiens
  CDR3 for alpha chain variable domain of TCR clone 144494 (TRAV3, TRAJ47)
CAVRDIGEYGNKLVF

SEQ ID NO: 288988 - protein, 16 aa, Homo sapiens
  CDR3 for beta chain variable domain of TCR clone 144494 (TRBV28, TRBJ2-7)
CASSSGTSGRGYEQYF

SEQ ID NO: 288989 - protein, 15 aa, Homo sapiens
  CDR3 for alpha chain variable domain of TCR clone 144495 (TRAV21, TRAJ37)
CAVRPTLSNTGKLIF

SEQ ID NO: 288990 - protein, 12 aa, Homo sapiens
  CDR3 for beta chain variable domain of TCR clone 144495 (TRBV5-1, TRBJ2-7)
CASSLDSYEQYF

SEQ ID NO: 288991 - protein, 17 aa, Homo sapiens
  CDR3 for alpha chain variable domain of TCR clone 144496 (TRAV3, TRAJ42)
CAVRDRDYGGSQGNLSF

SEQ ID NO: 288992 - protein, 15 aa, Homo sapiens
  CDR3 for beta chain variable domain of TCR clone 144496 (TRBV6-6, TRBJ2-7)
CASSYSYGGAYEQYF

SEQ ID NO: 288993 - protein, 12 aa, Homo sapiens
  CDR3 for alpha chain variable domain of TCR clone 144497 (TRAV1-1, TRAJ39)
CAVPVVGNMLTF

SEQ ID NO: 288994 - protein, 13 aa, Homo sapiens
  CDR3 for beta chain variable domain of TCR clone 144497 (TRBV4-1, TRBJ1-1)
CARSRKMNTEAFF

SEQ ID NO: 288995 - protein, 12 aa, Homo sapiens
  CDR3 for alpha chain variable domain of TCR clone 144498 (TRAV25, TRAJ11)
CAGASGYSTLTF

SEQ ID NO: 288996 - protein, 14 aa, Homo sapiens
  CDR3 for beta chain variable domain of TCR clone 144498 (TRBV5-8, TRBJ2-3)
CASSLGKGTDTQYF

SEQ ID NO: 288997 - protein, 16 aa, Homo sapiens
  CDR3 for alpha chain variable domain of TCR clone 144499 (TRAV30, TRAJ24)
CGTEIVDADSCGKFQF

SEQ ID NO: 288998 - protein, 15 aa, Homo sapiens
  CDR3 for beta chain variable domain of TCR clone 144499 (TRBV19, TRBJ2-4)
CASRGPRRVENIQYF

SEQ ID NO: 288999 - protein, 13 aa, Homo sapiens
  CDR3 for alpha chain variable domain of TCR clone 144500 (TRAV22, TRAJ12)
CAVLMDSSYKLIF

SEQ ID NO: 289000 - protein, 14 aa, Homo sapiens
  CDR3 for beta chain variable domain of TCR clone 144500 (TRBV7-2, TRBJ1-1)
CASSFLTGTTEAFF

SEQ ID NO: 289001 - protein, 14 aa, Homo sapiens
  CDR3 for alpha chain variable domain of TCR clone 144501 (TRAV38-1, TRAJ40)
CALRPTSGTYKYIC

SEQ ID NO: 289002 - protein, 16 aa, Homo sapiens
  CDR3 for beta chain variable domain of TCR clone 144501 (TRBV6-1, TRBJ1-2)
CASSGAWQGRSHGYTF

SEQ ID NO: 289003 - protein, 13 aa, Homo sapiens
  CDR3 for alpha chain variable domain of TCR clone 144502 (TRAV12-1, TRAJ16)
CVVNGPDGQKLLF

SEQ ID NO: 289004 - protein, 13 aa, Homo sapiens
  CDR3 for beta chain variable domain of TCR clone 144502 (TRBV7-9, TRBJ2-1)
CASSLDVGNEQFF

SEQ ID NO: 289005 - protein, 13 aa, Homo sapiens
  CDR3 for alpha chain variable domain of TCR clone 144503 (TRAV8-3, TRAJ48)
CAVVPFGNEKLTF

SEQ ID NO: 289006 - protein, 12 aa, Homo sapiens
  CDR3 for beta chain variable domain of TCR clone 144503 (TRBV11-2, TRBJ2-2)
CASSLGGGELFF

SEQ ID NO: 289007 - protein, 12 aa, Homo sapiens
  CDR3 for alpha chain variable domain of TCR clone 144504 (TRAV12-3, TRAJ17)
CAMTLKGNKLTF

SEQ ID NO: 289008 - protein, 16 aa, Homo sapiens
  CDR3 for beta chain variable domain of TCR clone 144504 (TRBV29-1, TRBJ2-7)
CSVEDAEDGTAYEQYF

SEQ ID NO: 289009 - protein, 11 aa, Homo sapiens
  CDR3 for alpha chain variable domain of TCR clone 144505 (TRAV1-1, TRAJ23)
CAVRQGGKLIF

SEQ ID NO: 289010 - protein, 13 aa, Homo sapiens
  CDR3 for beta chain variable domain of TCR clone 144505 (TRBV7-8, TRBJ2-2)
CASCHLFPGRLSI

SEQ ID NO: 289011 - protein, 13 aa, Homo sapiens
  CDR3 for alpha chain variable domain of TCR clone 144506 (TRAV12-3, TRAJ40)
CAISDSGTYKYIF

SEQ ID NO: 289012 - protein, 22 aa, Homo sapiens
  CDR3 for beta chain variable domain of TCR clone 144506 (TRBV14, TRBJ1-5)
CASSQDGVTPYLPPIGNQPQHF

SEQ ID NO: 289013 - protein, 13 aa, Homo sapiens
  CDR3 for alpha chain variable domain of TCR clone 144507 (TRAV12-1, TRAJ11)
CVVNRAGYSTLTF

SEQ ID NO: 289014 - protein, 15 aa, Homo sapiens
  CDR3 for beta chain variable domain of TCR clone 144507 (TRBV7-3, TRBJ2-2)
CAISETGQGTGELFF

SEQ ID NO: 289015 - protein, 12 aa, Homo sapiens
  CDR3 for alpha chain variable domain of TCR clone 144508 (TRAV12-3, TRAJ17)
CAMTLTGNKLTF

SEQ ID NO: 289016 - protein, 15 aa, Homo sapiens
  CDR3 for beta chain variable domain of TCR clone 144508 (TRBV20-1, TRBJ2-7)
CSARGRVYGMDEQYF

SEQ ID NO: 289017 - protein, 13 aa, Homo sapiens
  CDR3 for alpha chain variable domain of TCR clone 144509 (TRAV12-1, TRAJ16)
CVVSGPDGQKLLF

SEQ ID NO: 289018 - protein, 13 aa, Homo sapiens
  CDR3 for beta chain variable domain of TCR clone 144509 (TRBV2, TRBJ1-1)
CARNPTGGFHALF

SEQ ID NO: 289019 - protein, 17 aa, Homo sapiens
  CDR3 for alpha chain variable domain of TCR clone 144510 (TRAV3, TRAJ42)
CAVRDRAYGGSQGNLIF

SEQ ID NO: 289020 - protein, 16 aa, Homo sapiens
  CDR3 for beta chain variable domain of TCR clone 144510 (TRBV9, TRBJ2-1)
CASSVGGGGNYNEQFF

SEQ ID NO: 289021 - protein, 15 aa, Homo sapiens
  CDR3 for alpha chain variable domain of TCR clone 144511 (TRAV25, TRAJ53)
CAATGGGGSNYKLTV

SEQ ID NO: 289022 - protein, 11 aa, Homo sapiens
  CDR3 for beta chain variable domain of TCR clone 144511 (TRBV11-3, TRBJ2-2)
CASSSGGELFF

SEQ ID NO: 289023 - protein, 15 aa, Homo sapiens
  CDR3 for alpha chain variable domain of TCR clone 144512 (TRAV12-3, TRAJ6)
CAMSATTGGSYIPPF

SEQ ID NO: 289024 - protein, 16 aa, Homo sapiens
  CDR3 for beta chain variable domain of TCR clone 144512 (TRBV20-1, TRBJ1-2)
CSGSMGQGVANYGYTF

SEQ ID NO: 289025 - protein, 12 aa, Homo sapiens
  CDR3 for alpha chain variable domain of TCR clone 144513 (TRAV1-1, TRAJ33)
CVASDSNYQLIW

SEQ ID NO: 289026 - protein, 18 aa, Homo sapiens
  CDR3 for beta chain variable domain of TCR clone 144513 (TRBV20-1, TRBJ2-2)
CSARVQTARPSGTGELFF

SEQ ID NO: 289027 - protein, 14 aa, Homo sapiens
  CDR3 for alpha chain variable domain of TCR clone 144514 (TRAV9-2, TRAJ39)
CALYIYNAGNMLTF

SEQ ID NO: 289028 - protein, 14 aa, Homo sapiens
  CDR3 for beta chain variable domain of TCR clone 144514 (TRBV27, TRBJ1-1)
CASSPQGKRAEAFF

SEQ ID NO: 289029 - protein, 14 aa, Homo sapiens
  CDR3 for alpha chain variable domain of TCR clone 144515 (TRAV23/DV6, TRAJ40)
CAASLTSGTYKYLF

SEQ ID NO: 289030 - protein, 14 aa, Homo sapiens
  CDR3 for beta chain variable domain of TCR clone 144515 (TRBV5-1, TRBJ2-3)
CASSRGQGGGTQYF

SEQ ID NO: 289031 - protein, 18 aa, Homo sapiens
  CDR3 for alpha chain variable domain of TCR clone 144516 (TRAV26-1, TRAJ30)
CCVLLHRQSTNRDDKIIF

SEQ ID NO: 289032 - protein, 18 aa, Homo sapiens
  CDR3 for beta chain variable domain of TCR clone 144516 (TRBV4-1, TRBJ1-5)
RASSQDPRGQGLNQPQHF

SEQ ID NO: 289033 - protein, 15 aa, Homo sapiens
  CDR3 for alpha chain variable domain of TCR clone 144517 (TRAV26-1, TRAJ29)
CIVRVEGAGNTPLVF

SEQ ID NO: 289034 - protein, 14 aa, Homo sapiens
  CDR3 for beta chain variable domain of TCR clone 144517 (TRBV18, TRBJ2-5)
CASSPGVPQETQYF

SEQ ID NO: 289035 - protein, 13 aa, Homo sapiens
  CDR3 for alpha chain variable domain of TCR clone 144518 (TRAV2, TRAJ29)
CAAQTSGNTPLVF

SEQ ID NO: 289036 - protein, 14 aa, Homo sapiens
  CDR3 for beta chain variable domain of TCR clone 144518 (TRBV7-9, TRBJ2-4)
CASSLAMGGNMQYF

SEQ ID NO: 289037 - protein, 15 aa, Homo sapiens
  CDR3 for alpha chain variable domain of TCR clone 144519 (TRAV38-1, TRAJ37)
CAFIFGSGNTGKLIF

SEQ ID NO: 289038 - protein, 12 aa, Homo sapiens
  CDR3 for beta chain variable domain of TCR clone 144519 (TRBV7-9, TRBJ2-7)
CASSLEGYEPYF

SEQ ID NO: 289039 - protein, 11 aa, Homo sapiens
  CDR3 for alpha chain variable domain of TCR clone 144520 (TRAV26-1, TRAJ37)
CIVRAGRKLIF

SEQ ID NO: 289040 - protein, 14 aa, Homo sapiens
  CDR3 for beta chain variable domain of TCR clone 144520 (TRBV9, TRBJ2-4)
CASSPSGTSGFQYF

SEQ ID NO: 289041 - protein, 13 aa, Homo sapiens
  CDR3 for alpha chain variable domain of TCR clone 144521 (TRAV39, TRAJ58)
CAGEETSGSRLTF

SEQ ID NO: 289042 - protein, 13 aa, Homo sapiens
  CDR3 for beta chain variable domain of TCR clone 144521 (TRBV15, TRBJ2-7)
CATSTTRHYEQYF

SEQ ID NO: 289043 - protein, 14 aa, Homo sapiens
  CDR3 for alpha chain variable domain of TCR clone 144522 (TRAV12-3, TRAJ5)
CAVNRSTGRRALTF

SEQ ID NO: 289044 - protein, 12 aa, Homo sapiens
  CDR3 for beta chain variable domain of TCR clone 144522 (TRBV19, TRBJ1-5)
CPSSIAQQPQHF

SEQ ID NO: 289045 - protein, 10 aa, Homo sapiens
  CDR3 for alpha chain variable domain of TCR clone 144523 (TRAV26-1, TRAJ22)
RSGSARQLTF

SEQ ID NO: 289046 - protein, 13 aa, Homo sapiens
  CDR3 for beta chain variable domain of TCR clone 144523 (TRBV7-9, TRBJ1-2)
CASSLKQNYSYTF

SEQ ID NO: 289047 - protein, 13 aa, Homo sapiens
  CDR3 for alpha chain variable domain of TCR clone 144524 (TRAV20, TRAJ20)
CAVQAGSGYKLSF

SEQ ID NO: 289048 - protein, 13 aa, Homo sapiens
  CDR3 for beta chain variable domain of TCR clone 144524 (TRBV3-1, TRBJ2-3)
CASSQGGGDTHYF

SEQ ID NO: 289049 - protein, 20 aa, Homo sapiens
  CDR3 for alpha chain variable domain of TCR clone 144525 (TRAV26-1, TRAJ42)
CCVLLHRQTYYGGSQGNLIF

SEQ ID NO: 289050 - protein, 17 aa, Homo sapiens
  CDR3 for beta chain variable domain of TCR clone 144525 (TRBV4-1, TRBJ2-3)
CASSQGYVSGGTDTQYF

SEQ ID NO: 289051 - protein, 13 aa, Homo sapiens
  CDR3 for alpha chain variable domain of TCR clone 144526 (TRAV12-3, TRAJ13)
CAMSSGGYQKVTF

SEQ ID NO: 289052 - protein, 14 aa, Homo sapiens
  CDR3 for beta chain variable domain of TCR clone 144526 (TRBV2, TRBJ2-1)
CASRTVSSYNEQFF

SEQ ID NO: 289053 - protein, 13 aa, Homo sapiens
  CDR3 for alpha chain variable domain of TCR clone 144527 (TRAV2, TRAJ29)
YAAQNSGNTPLVF

SEQ ID NO: 289054 - protein, 14 aa, Homo sapiens
  CDR3 for beta chain variable domain of TCR clone 144527 (TRBV7-9, TRBJ2-4)
CASSLAMGGNIQYF

SEQ ID NO: 289055 - protein, 11 aa, Homo sapiens
  CDR3 for alpha chain variable domain of TCR clone 144528 (TRAV12-1, TRAJ15)
CVVNAGTALIF

SEQ ID NO: 289056 - protein, 16 aa, Homo sapiens
  CDR3 for beta chain variable domain of TCR clone 144528 (TRBV28, TRBJ2-1)
CASSSRVRDSYNEQVF

SEQ ID NO: 289057 - protein, 18 aa, Homo sapiens
  CDR3 for alpha chain variable domain of TCR clone 144529 (TRAV21, TRAJ52)
CAVRPSPAGGTSYGKLSF

SEQ ID NO: 289058 - protein, 15 aa, Homo sapiens
  CDR3 for beta chain variable domain of TCR clone 144529 (TRBV7-9, TRBJ2-7)
CASSSSGLAVYEQYF

SEQ ID NO: 289059 - protein, 14 aa, Homo sapiens
  CDR3 for alpha chain variable domain of TCR clone 144530 (TRAV27, TRAJ23)
CAGLSYDQGGKLIF

SEQ ID NO: 289060 - protein, 15 aa, Homo sapiens
  CDR3 for beta chain variable domain of TCR clone 144530 (TRBV20-1, TRBJ2-7)
CSARDRVSGMDEQYF

SEQ ID NO: 289061 - protein, 12 aa, Homo sapiens
  CDR3 for alpha chain variable domain of TCR clone 144531 (TRAV2, TRAJ31)
CAVEDNNARLMF

SEQ ID NO: 289062 - protein, 17 aa, Homo sapiens
  CDR3 for beta chain variable domain of TCR clone 144531 (TRBV5-1, TRBJ2-5)
CASSLAETSGFQETQYF

SEQ ID NO: 289063 - protein, 16 aa, Homo sapiens
  CDR3 for alpha chain variable domain of TCR clone 144532 (TRAV12-1, TRAJ42)
CVVTPYYGGSQGNPIF

SEQ ID NO: 289064 - protein, 13 aa, Homo sapiens
  CDR3 for beta chain variable domain of TCR clone 144532 (TRBV2, TRBJ1-1)
CASSEGGNTEAFF

SEQ ID NO: 289065 - protein, 15 aa, Homo sapiens
  CDR3 for alpha chain variable domain of TCR clone 144533 (TRAV12-2, TRAJ53)
CAVNGGGGSNYKLTF

SEQ ID NO: 289066 - protein, 20 aa, Homo sapiens
  CDR3 for beta chain variable domain of TCR clone 144533 (TRBV4-1, TRBJ2-5)
CASPPGGAETRDPVLRARHA

SEQ ID NO: 289067 - protein, 11 aa, Homo sapiens
  CDR3 for alpha chain variable domain of TCR clone 144534 (TRAV22, TRAJ30)
CAGNRDDKIIF

SEQ ID NO: 289068 - protein, 17 aa, Homo sapiens
  CDR3 for beta chain variable domain of TCR clone 144534 (TRBV11-2, TRBJ2-1)
CASSLYPPGVEYNEQFF

SEQ ID NO: 289069 - protein, 14 aa, Homo sapiens
  CDR3 for alpha chain variable domain of TCR clone 144535 (TRAV26-1, TRAJ38)
CIADNAVNNRKLIW

SEQ ID NO: 289070 - protein, 17 aa, Homo sapiens
  CDR3 for beta chain variable domain of TCR clone 144535 (TRBV15, TRBJ1-1)
CATSRVGGADGDTEAFF

SEQ ID NO: 289071 - protein, 13 aa, Homo sapiens
  CDR3 for alpha chain variable domain of TCR clone 144536 (TRAV13-1, TRAJ11)
CAAVLAGYSILTF

SEQ ID NO: 289072 - protein, 17 aa, Homo sapiens
  CDR3 for beta chain variable domain of TCR clone 144536 (TRBV25-1, TRBJ2-7)
CASSDARVVFSSYEQYF

SEQ ID NO: 289073 - protein, 14 aa, Homo sapiens
  CDR3 for alpha chain variable domain of TCR clone 144537 (TRAV12-2, TRAJ13)
CAVKKTGGYQKVTF

SEQ ID NO: 289074 - protein, 23 aa, Homo sapiens
  CDR3 for beta chain variable domain of TCR clone 144537 (TRBV7-3, TRBJ1-6)
CASSLTSRDEASDPSSYNSPLHF

SEQ ID NO: 289075 - protein, 16 aa, Homo sapiens
  CDR3 for alpha chain variable domain of TCR clone 144538 (TRAV38-1, TRAJ37)
CAFMKYGGGNTGKLIF

SEQ ID NO: 289076 - protein, 14 aa, Homo sapiens
  CDR3 for beta chain variable domain of TCR clone 144538 (TRBV19, TRBJ2-2)
CASSTLHRSGELFF

SEQ ID NO: 289077 - protein, 13 aa, Homo sapiens
  CDR3 for alpha chain variable domain of TCR clone 144539 (TRAV1-1, TRAJ31)
CASYLNNNARLMF

SEQ ID NO: 289078 - protein, 16 aa, Homo sapiens
  CDR3 for beta chain variable domain of TCR clone 144539 (TRBV27, TRBJ2-2)
CASSFRGLVRTGELFF

SEQ ID NO: 289079 - protein, 18 aa, Homo sapiens
  CDR3 for alpha chain variable domain of TCR clone 144540 (TRAV21, TRAJ52)
CAVRPSPAGGTSYGKLTF

SEQ ID NO: 289080 - protein, 17 aa, Homo sapiens
  CDR3 for beta chain variable domain of TCR clone 144540 (TRBV7-8, TRBJ1-2)
CASSLRPLQGHLYGYTF

SEQ ID NO: 289081 - protein, 15 aa, Homo sapiens
  CDR3 for alpha chain variable domain of TCR clone 144541 (TRAV26-1, TRAJ39)
CIVRDGSNAGNMLTF

SEQ ID NO: 289082 - protein, 13 aa, Homo sapiens
  CDR3 for beta chain variable domain of TCR clone 144541 (TRBV7-9, TRBJ1-2)
CASSLKQNYGYTF

SEQ ID NO: 289083 - protein, 15 aa, Homo sapiens
  CDR3 for alpha chain variable domain of TCR clone 144542 (TRAV13-1, TRAJ5)
CAVSPIDTGRGALTF

SEQ ID NO: 289084 - protein, 18 aa, Homo sapiens
  CDR3 for beta chain variable domain of TCR clone 144542 (TRBV4-1, TRBJ2-2)
CASSFRTSGGEGPGELFF

SEQ ID NO: 289085 - protein, 12 aa, Homo sapiens
  CDR3 for alpha chain variable domain of TCR clone 144543 (TRAV13-1, TRAJ48)
CAANFGNEKLTF

SEQ ID NO: 289086 - protein, 16 aa, Homo sapiens
  CDR3 for beta chain variable domain of TCR clone 144543 (TRBV20-1, TRBJ2-1)
CSARDRRLAGSDEQFF

SEQ ID NO: 289087 - protein, 12 aa, Homo sapiens
  CDR3 for alpha chain variable domain of TCR clone 144544 (TRAV13-1, TRAJ27)
CAAHTNAGKSTF

SEQ ID NO: 289088 - protein, 19 aa, Homo sapiens
  CDR3 for beta chain variable domain of TCR clone 144544 (TRBV23-1, TRBJ2-7)
CASILLRDRARAVLRAGHQ

SEQ ID NO: 289089 - protein, 17 aa, Homo sapiens
  CDR3 for alpha chain variable domain of TCR clone 144545 (TRAV3, TRAJ6)
CAVRDGPRAGGSYIHTF

SEQ ID NO: 289090 - protein, 15 aa, Homo sapiens
  CDR3 for beta chain variable domain of TCR clone 144545 (TRBV5-1, TRBJ2-1)
CASSPPRAPYNEQFF

SEQ ID NO: 289091 - protein, 15 aa, Homo sapiens
  CDR3 for alpha chain variable domain of TCR clone 144546 (TRAV26-1, TRAJ29)
CIVRVQGSGNTPLVL

SEQ ID NO: 289092 - protein, 15 aa, Homo sapiens
  CDR3 for beta chain variable domain of TCR clone 144546 (TRBV7-9, TRBJ1-5)
CASSQGHQPNQPQHF

SEQ ID NO: 289093 - protein, 15 aa, Homo sapiens
  CDR3 for alpha chain variable domain of TCR clone 144547 (TRAV27, TRAJ38)
CAARRNAGNNRKLIL

SEQ ID NO: 289094 - protein, 15 aa, Homo sapiens
  CDR3 for beta chain variable domain of TCR clone 144547 (TRBV4-1, TRBJ1-4)
CASSDTGGTNEKLFF

SEQ ID NO: 289095 - protein, 12 aa, Homo sapiens
  CDR3 for alpha chain variable domain of TCR clone 144548 (TRAV12-3, TRAJ40)
CVMTSGTYKYIF

SEQ ID NO: 289096 - protein, 15 aa, Homo sapiens
  CDR3 for beta chain variable domain of TCR clone 144548 (TRBV7-3, TRBJ2-2)
CASSLTGQGTGELFF

SEQ ID NO: 289097 - protein, 14 aa, Homo sapiens
  CDR3 for alpha chain variable domain of TCR clone 144549 (TRAV27, TRAJ12)
CAGARMDSSYKLIF

SEQ ID NO: 289098 - protein, 18 aa, Homo sapiens
  CDR3 for beta chain variable domain of TCR clone 144549 (TRBV10-3, TRBJ2-7)
CASSESGRPSGGRVEQYF

SEQ ID NO: 289099 - protein, 14 aa, Homo sapiens
  CDR3 for alpha chain variable domain of TCR clone 144550 (TRAV8-1, TRAJ5)
CAVRTDTGRRALTF

SEQ ID NO: 289100 - protein, 14 aa, Homo sapiens
  CDR3 for beta chain variable domain of TCR clone 144550 (TRBV7-2, TRBJ2-7)
CASRSQGAAYEQYF

SEQ ID NO: 289101 - protein, 14 aa, Homo sapiens
  CDR3 for alpha chain variable domain of TCR clone 144551 (TRAV8-1, TRAJ5)
CAVSMDTGRIALTF

SEQ ID NO: 289102 - protein, 15 aa, Homo sapiens
  CDR3 for beta chain variable domain of TCR clone 144551 (TRBV19, TRBJ2-4)
CASRGPRRGENIQYF

SEQ ID NO: 289103 - protein, 14 aa, Homo sapiens
  CDR3 for alpha chain variable domain of TCR clone 144552 (TRAV13-1, TRAJ44)
CAAKVTGTASKLTF

SEQ ID NO: 289104 - protein, 17 aa, Homo sapiens
  CDR3 for beta chain variable domain of TCR clone 144552 (TRBV7-3, TRBJ2-3)
CASSLMKRMRGADTQYF

SEQ ID NO: 289105 - protein, 13 aa, Homo sapiens
  CDR3 for alpha chain variable domain of TCR clone 144553 (TRAV8-3, TRAJ36)
CAVGATGANNLFF

SEQ ID NO: 289106 - protein, 15 aa, Homo sapiens
  CDR3 for beta chain variable domain of TCR clone 144553 (TRBV11-2, TRBJ2-1)
CASSLGTSGLNEQFF

SEQ ID NO: 289107 - protein, 17 aa, Homo sapiens
  CDR3 for alpha chain variable domain of TCR clone 144554 (TRAV23/DV6, TRAJ57)
CAASSTLSQGGCEKLVF

SEQ ID NO: 289108 - protein, 14 aa, Homo sapiens
  CDR3 for beta chain variable domain of TCR clone 144554 (TRBV25-1, TRBJ1-1)
CASTHLGGNTEAFF

SEQ ID NO: 289109 - protein, 17 aa, Homo sapiens
  CDR3 for alpha chain variable domain of TCR clone 144555 (TRAV21, TRAJ52)
CAVGVNAGGTSYGKLTF

SEQ ID NO: 289110 - protein, 13 aa, Homo sapiens
  CDR3 for beta chain variable domain of TCR clone 144555 (TRBV5-1, TRBJ1-2)
RASSFQGNYGYTF

SEQ ID NO: 289111 - protein, 12 aa, Homo sapiens
  CDR3 for alpha chain variable domain of TCR clone 144556 (TRAV13-1, TRAJ21)
CVAKEGFNKFYF

SEQ ID NO: 289112 - protein, 16 aa, Homo sapiens
  CDR3 for beta chain variable domain of TCR clone 144556 (TRBV5-4, TRBJ2-3)
CASQQPGAGGADTQYF

SEQ ID NO: 289113 - protein, 14 aa, Homo sapiens
  CDR3 for alpha chain variable domain of TCR clone 144557 (TRAV12-3, TRAJ57)
CAMSAWGGSEKLVF

SEQ ID NO: 289114 - protein, 13 aa, Homo sapiens
  CDR3 for beta chain variable domain of TCR clone 144557 (TRBV7-7, TRBJ1-1)
CASSLGANTEAFF

SEQ ID NO: 289115 - protein, 13 aa, Homo sapiens
  CDR3 for alpha chain variable domain of TCR clone 144558 (TRAV21, TRAJ57)
CAVTQGGSEKLVF

SEQ ID NO: 289116 - protein, 15 aa, Homo sapiens
  CDR3 for beta chain variable domain of TCR clone 144558 (TRBV7-9, TRBJ1-4)
CASSARTGGNEKLFF

SEQ ID NO: 289117 - protein, 13 aa, Homo sapiens
  CDR3 for alpha chain variable domain of TCR clone 144559 (TRAV38-2/DV8, TRAJ34)
CAYRTWNTDKLIF

SEQ ID NO: 289118 - protein, 15 aa, Homo sapiens
  CDR3 for beta chain variable domain of TCR clone 144559 (TRBV7-8, TRBJ1-1)
CASSLGDSRNTEAFF

SEQ ID NO: 289119 - protein, 11 aa, Homo sapiens
  CDR3 for alpha chain variable domain of TCR clone 144560 (TRAV12-3, TRAJ11)
CAMKGYSTLTC

SEQ ID NO: 289120 - protein, 16 aa, Homo sapiens
  CDR3 for beta chain variable domain of TCR clone 144560 (TRBV11-2, TRBJ2-3)
CARSLGVSGGQDTQYF

SEQ ID NO: 289121 - protein, 12 aa, Homo sapiens
  CDR3 for alpha chain variable domain of TCR clone 144561 (TRAV16, TRAJ10)
CSRTGGGNKLTF

SEQ ID NO: 289122 - protein, 15 aa, Homo sapiens
  CDR3 for beta chain variable domain of TCR clone 144561 (TRBV6-3, TRBJ2-7)
CASSSPGTVFYELYF

SEQ ID NO: 289123 - protein, 13 aa, Homo sapiens
  CDR3 for alpha chain variable domain of TCR clone 144562 (TRAV27, TRAJ37)
CAGGPSNTGKLIF

SEQ ID NO: 289124 - protein, 15 aa, Homo sapiens
  CDR3 for beta chain variable domain of TCR clone 144562 (TRBV12-4, TRBJ2-5)
CASSPPTGLQETQYF

SEQ ID NO: 289125 - protein, 12 aa, Homo sapiens
  CDR3 for alpha chain variable domain of TCR clone 144563 (TRAV12-3, TRAJ17)
CAMTLTGNELTF

SEQ ID NO: 289126 - protein, 16 aa, Homo sapiens
  CDR3 for beta chain variable domain of TCR clone 144563 (TRBV15, TRBJ2-3)
CATSRDLGIVTDTQYF

SEQ ID NO: 289127 - protein, 12 aa, Homo sapiens
  CDR3 for alpha chain variable domain of TCR clone 144564 (TRAV12-3, TRAJ17)
CAMTLTGNKLTF

SEQ ID NO: 289128 - protein, 15 aa, Homo sapiens
  CDR3 for beta chain variable domain of TCR clone 144564 (TRBV5-1, TRBJ2-5)
CAGSFKGGDQETQYF

SEQ ID NO: 289129 - protein, 12 aa, Homo sapiens
  CDR3 for alpha chain variable domain of TCR clone 144565 (TRAV13-2, TRAJ58)
CAERRVDSRLTF

SEQ ID NO: 289130 - protein, 15 aa, Homo sapiens
  CDR3 for beta chain variable domain of TCR clone 144565 (TRBV5-1, TRBJ2-5)
CASSSGREMVETQYF

SEQ ID NO: 289131 - protein, 14 aa, Homo sapiens
  CDR3 for alpha chain variable domain of TCR clone 144566 (TRAV20, TRAJ18)
CAVGRGSTLGRLYF

SEQ ID NO: 289132 - protein, 14 aa, Homo sapiens
  CDR3 for beta chain variable domain of TCR clone 144566 (TRBV19, TRBJ2-1)
CASPTVVLSGEQFF

SEQ ID NO: 289133 - protein, 14 aa, Homo sapiens
  CDR3 for alpha chain variable domain of TCR clone 144567 (TRAV12-2, TRAJ17)
CAVLFKAAGSQLTF

SEQ ID NO: 289134 - protein, 17 aa, Homo sapiens
  CDR3 for beta chain variable domain of TCR clone 144567 (TRBV20-1, TRBJ2-2)
CSASGSGQGGLTGELFF

SEQ ID NO: 289135 - protein, 14 aa, Homo sapiens
  CDR3 for alpha chain variable domain of TCR clone 144568 (TRAV12-2, TRAJ52)
CRCAGGTSHGTLTF

SEQ ID NO: 289136 - protein, 13 aa, Homo sapiens
  CDR3 for beta chain variable domain of TCR clone 144568 (TRBV11-2, TRBJ2-1)
CASSLRLTHEQFF

SEQ ID NO: 289137 - protein, 12 aa, Homo sapiens
  CDR3 for alpha chain variable domain of TCR clone 144569 (TRAV12-2, TRAJ21)
CAVNRNFNKFYF

SEQ ID NO: 289138 - protein, 12 aa, Homo sapiens
  CDR3 for beta chain variable domain of TCR clone 144569 (TRBV12-5, TRBJ2-5)
CASGQGVETQYF

SEQ ID NO: 289139 - protein, 11 aa, Homo sapiens
  CDR3 for alpha chain variable domain of TCR clone 144570 (TRAV3, TRAJ21)
CAVGNFNKFYF

SEQ ID NO: 289140 - protein, 17 aa, Homo sapiens
  CDR3 for beta chain variable domain of TCR clone 144570 (TRBV24-1, TRBJ2-1)
CATSDVSTRGTYNEQFF

SEQ ID NO: 289141 - protein, 18 aa, Homo sapiens
  CDR3 for alpha chain variable domain of TCR clone 144571 (TRAV13-1, TRAJ52)
CAASKRSAGGTSYGKLTF

SEQ ID NO: 289142 - protein, 15 aa, Homo sapiens
  CDR3 for beta chain variable domain of TCR clone 144571 (TRBV5-8, TRBJ1-5)
CASSLVRTGNQPQHF

SEQ ID NO: 289143 - protein, 13 aa, Homo sapiens
  CDR3 for alpha chain variable domain of TCR clone 144572 (TRAV3, TRAJ41)
CAVSSNSGYALNF

SEQ ID NO: 289144 - protein, 13 aa, Homo sapiens
  CDR3 for beta chain variable domain of TCR clone 144572 (TRBV20-1, TRBJ2-2)
CSALRGGGGELFF

SEQ ID NO: 289145 - protein, 13 aa, Homo sapiens
  CDR3 for alpha chain variable domain of TCR clone 144573 (TRAV13-1, TRAJ29)
CAASIGLNTPLVF

SEQ ID NO: 289146 - protein, 15 aa, Homo sapiens
  CDR3 for beta chain variable domain of TCR clone 144573 (TRBV9, TRBJ1-6)
CASSVAGTGDSPLHF

SEQ ID NO: 289147 - protein, 11 aa, Homo sapiens
  CDR3 for alpha chain variable domain of TCR clone 144574 (TRAV3, TRAJ21)
CAVGNFNKFYF

SEQ ID NO: 289148 - protein, 13 aa, Homo sapiens
  CDR3 for beta chain variable domain of TCR clone 144574 (TRBV7-3, TRBJ2-1)
CASSLDSYNEQFF

SEQ ID NO: 289149 - protein, 14 aa, Homo sapiens
  CDR3 for alpha chain variable domain of TCR clone 144575 (TRAV12-1, TRAJ9)
CVVTGYTGGFKTIC

SEQ ID NO: 289150 - protein, 13 aa, Homo sapiens
  CDR3 for beta chain variable domain of TCR clone 144575 (TRBV20-1, TRBJ1-1)
CSARAGGNTEAFF

SEQ ID NO: 289151 - protein, 11 aa, Homo sapiens
  CDR3 for alpha chain variable domain of TCR clone 144576 (TRAV21, TRAJ34)
CAVTNTDKLIF

SEQ ID NO: 289152 - protein, 12 aa, Homo sapiens
  CDR3 for beta chain variable domain of TCR clone 144576 (TRBV7-9, TRBJ1-1)
CACSLVRGEAFF

SEQ ID NO: 289153 - protein, 13 aa, Homo sapiens
  CDR3 for alpha chain variable domain of TCR clone 144577 (TRAV13-1, TRAJ40)
CAARTSGTYKYSC

SEQ ID NO: 289154 - protein, 17 aa, Homo sapiens
  CDR3 for beta chain variable domain of TCR clone 144577 (TRBV4-1, TRBJ2-3)
CARSHGYVSGGTDTQYF

SEQ ID NO: 289155 - protein, 12 aa, Homo sapiens
  CDR3 for alpha chain variable domain of TCR clone 144578 (TRAV13-1, TRAJ21)
CAAKEGFNKFYF

SEQ ID NO: 289156 - protein, 14 aa, Homo sapiens
  CDR3 for beta chain variable domain of TCR clone 144578 (TRBV20-1, TRBJ2-7)
CSAPELAGVGEQYL

SEQ ID NO: 289157 - protein, 13 aa, Homo sapiens
  CDR3 for alpha chain variable domain of TCR clone 144579 (TRAV27, TRAJ45)
CRSSGGGADGLTF

SEQ ID NO: 289158 - protein, 10 aa, Homo sapiens
  CDR3 for beta chain variable domain of TCR clone 144579 (TRBV11-2, TRBJ2-1)
PQGSSNEQFF

SEQ ID NO: 289159 - protein, 15 aa, Homo sapiens
  CDR3 for alpha chain variable domain of TCR clone 144580 (TRAV21, TRAJ32)
CAVNSYGGATNKLIF

SEQ ID NO: 289160 - protein, 15 aa, Homo sapiens
  CDR3 for beta chain variable domain of TCR clone 144580 (TRBV11-3, TRBJ2-3)
CASLKDGREGDTQYF

SEQ ID NO: 289161 - protein, 15 aa, Homo sapiens
  CDR3 for alpha chain variable domain of TCR clone 144581 (TRAV17, TRAJ23)
CATDAEDNQGRKLIF

SEQ ID NO: 289162 - protein, 12 aa, Homo sapiens
  CDR3 for beta chain variable domain of TCR clone 144581 (TRBV2, TRBJ2-1)
CAKREGYNEQFF

SEQ ID NO: 289163 - protein, 11 aa, Homo sapiens
  CDR3 for alpha chain variable domain of TCR clone 144582 (TRAV1-1, TRAJ20)
CAAFNDYKLSF

SEQ ID NO: 289164 - protein, 14 aa, Homo sapiens
  CDR3 for beta chain variable domain of TCR clone 144582 (TRBV19, TRBJ2-1)
CASSKDRGQDEQFF

SEQ ID NO: 289165 - protein, 18 aa, Homo sapiens
  CDR3 for alpha chain variable domain of TCR clone 144583 (TRAV13-1, TRAJ52)
CEAKNPNAGGTSYGKLTF

SEQ ID NO: 289166 - protein, 17 aa, Homo sapiens
  CDR3 for beta chain variable domain of TCR clone 144583 (TRBV11-2, TRBJ2-1)
CASSLYPPGVEYNEQFF

SEQ ID NO: 289167 - protein, 13 aa, Homo sapiens
  CDR3 for alpha chain variable domain of TCR clone 144584 (TRAV13-1, TRAJ5)
CAPKGTGRRALTF

SEQ ID NO: 289168 - protein, 14 aa, Homo sapiens
  CDR3 for beta chain variable domain of TCR clone 144584 (TRBV7-2, TRBJ2-7)
CASSPKTSFYEQYF

SEQ ID NO: 289169 - protein, 14 aa, Homo sapiens
  CDR3 for alpha chain variable domain of TCR clone 144585 (TRAV35, TRAJ38)
CAGSNAGNNLKLIW

SEQ ID NO: 289170 - protein, 12 aa, Homo sapiens
  CDR3 for beta chain variable domain of TCR clone 144585 (TRBV19, TRBJ2-7)
CASTDRGYEQYF

SEQ ID NO: 289171 - protein, 14 aa, Homo sapiens
  CDR3 for alpha chain variable domain of TCR clone 144586 (TRAV23/DV6, TRAJ13)
CAAMYSGGYQTVTF

SEQ ID NO: 289172 - protein, 16 aa, Homo sapiens
  CDR3 for beta chain variable domain of TCR clone 144586 (TRBV9, TRBJ2-1)
CASSALGGIGNNEQFF

SEQ ID NO: 289173 - protein, 12 aa, Homo sapiens
  CDR3 for alpha chain variable domain of TCR clone 144587 (TRAV13-1, TRAJ53)
AASGGSNYKLTF

SEQ ID NO: 289174 - protein, 18 aa, Homo sapiens
  CDR3 for beta chain variable domain of TCR clone 144587 (TRBV4-1, TRBJ2-3)
CASSHQLAGGRSTDTQYF

SEQ ID NO: 289175 - protein, 15 aa, Homo sapiens
  CDR3 for alpha chain variable domain of TCR clone 144588 (TRAV8-4, TRAJ13)
CAVSDWGGGYQKVTF

SEQ ID NO: 289176 - protein, 15 aa, Homo sapiens
  CDR3 for beta chain variable domain of TCR clone 144588 (TRBV25-1, TRBJ1-4)
CASSPGDSTNENLFF

SEQ ID NO: 289177 - protein, 16 aa, Homo sapiens
  CDR3 for alpha chain variable domain of TCR clone 144589 (TRAV8-1, TRAJ42)
CAVTSRYGGSQGNLIF

SEQ ID NO: 289178 - protein, 12 aa, Homo sapiens
  CDR3 for beta chain variable domain of TCR clone 144589 (TRBV6-3, TRBJ2-7)
CASSRGRRGLYF

SEQ ID NO: 289179 - protein, 14 aa, Homo sapiens
  CDR3 for alpha chain variable domain of TCR clone 144590 (TRAV26-1, TRAJ38)
CIADNTGNNRKLIW

SEQ ID NO: 289180 - protein, 17 aa, Homo sapiens
  CDR3 for beta chain variable domain of TCR clone 144590 (TRBV7-9, TRBJ2-3)
CASSPTVAGDLTDTQYF

SEQ ID NO: 289181 - protein, 13 aa, Homo sapiens
  CDR3 for alpha chain variable domain of TCR clone 144591 (TRAV2, TRAJ40)
CAVVTSGTYKYIF

SEQ ID NO: 289182 - protein, 14 aa, Homo sapiens
  CDR3 for beta chain variable domain of TCR clone 144591 (TRBV11-2, TRBJ2-1)
CASSLEVANNEQFF

SEQ ID NO: 289183 - protein, 11 aa, Homo sapiens
  CDR3 for alpha chain variable domain of TCR clone 144592 (TRAV2, TRAJ13)
CASGGYQKVTF

SEQ ID NO: 289184 - protein, 13 aa, Homo sapiens
  CDR3 for beta chain variable domain of TCR clone 144592 (TRBV20-1, TRBJ2-2)
CSASATGTGELFF

SEQ ID NO: 289185 - protein, 15 aa, Homo sapiens
  CDR3 for alpha chain variable domain of TCR clone 144593 (TRAV13-1, TRAJ5)
CAVSPIDTGRRALTF

SEQ ID NO: 289186 - protein, 11 aa, Homo sapiens
  CDR3 for beta chain variable domain of TCR clone 144593 (TRBV19, TRBJ1-1)
CASSIGSEAFF

SEQ ID NO: 289187 - protein, 16 aa, Homo sapiens
  CDR3 for alpha chain variable domain of TCR clone 144594 (TRAV13-2, TRAJ28)
CAEKSYSGAGSYQLTS

SEQ ID NO: 289188 - protein, 16 aa, Homo sapiens
  CDR3 for beta chain variable domain of TCR clone 144594 (TRBV19, TRBJ2-1)
CASSKAGPSSYNEQFF

SEQ ID NO: 289189 - protein, 13 aa, Homo sapiens
  CDR3 for alpha chain variable domain of TCR clone 144595 (TRAV26-1, TRAJ30)
CIVNMNRDDKIIF

SEQ ID NO: 289190 - protein, 16 aa, Homo sapiens
  CDR3 for beta chain variable domain of TCR clone 144595 (TRBV16, TRBJ2-7)
CASSRPAGGSSSEQYF

SEQ ID NO: 289191 - protein, 11 aa, Homo sapiens
  CDR3 for alpha chain variable domain of TCR clone 144596 (TRAV3, TRAJ21)
CAVGNFNKFYF

SEQ ID NO: 289192 - protein, 15 aa, Homo sapiens
  CDR3 for beta chain variable domain of TCR clone 144596 (TRBV7-2, TRBJ2-1)
CASSLVRGGQNEQFF

SEQ ID NO: 289193 - protein, 13 aa, Homo sapiens
  CDR3 for alpha chain variable domain of TCR clone 144597 (TRAV13-1, TRAJ5)
CAASDTGRRALTS

SEQ ID NO: 289194 - protein, 12 aa, Homo sapiens
  CDR3 for beta chain variable domain of TCR clone 144597 (TRBV28, TRBJ2-3)
CASSLHRDTQYF

SEQ ID NO: 289195 - protein, 14 aa, Homo sapiens
  CDR3 for alpha chain variable domain of TCR clone 144598 (TRAV35, TRAJ36)
CAGPRIGAQPLLWD

SEQ ID NO: 289196 - protein, 15 aa, Homo sapiens
  CDR3 for beta chain variable domain of TCR clone 144598 (TRBV28, TRBJ2-5)
CASSPPWSYQETQYF

SEQ ID NO: 289197 - protein, 18 aa, Homo sapiens
  CDR3 for alpha chain variable domain of TCR clone 144599 (TRAV21, TRAJ52)
CAVRPSLAGGPSYGKLTF

SEQ ID NO: 289198 - protein, 17 aa, Homo sapiens
  CDR3 for beta chain variable domain of TCR clone 144599 (TRBV13, TRBJ2-3)
CASSLSRVAGGRNTQYF

SEQ ID NO: 289199 - protein, 14 aa, Homo sapiens
  CDR3 for alpha chain variable domain of TCR clone 144600 (TRAV1-2, TRAJ8)
CALREDTGFQKLVF

SEQ ID NO: 289200 - protein, 16 aa, Homo sapiens
  CDR3 for beta chain variable domain of TCR clone 144600 (TRBV27, TRBJ2-2)
CASSSSGVSNTGELFF

SEQ ID NO: 289201 - protein, 12 aa, Homo sapiens
  CDR3 for alpha chain variable domain of TCR clone 144601 (TRAV1-1, TRAJ24)
CAVRGSWGKFQF

SEQ ID NO: 289202 - protein, 14 aa, Homo sapiens
  CDR3 for beta chain variable domain of TCR clone 144601 (TRBV7-3, TRBJ2-1)
CASSLAGGTNEQFF

SEQ ID NO: 289203 - protein, 15 aa, Homo sapiens
  CDR3 for alpha chain variable domain of TCR clone 144602 (TRAV2, TRAJ32)
CAVANYGGATNKLIF

SEQ ID NO: 289204 - protein, 15 aa, Homo sapiens
  CDR3 for beta chain variable domain of TCR clone 144602 (TRBV7-7, TRBJ2-5)
CASSQLERAEETQYC

SEQ ID NO: 289205 - protein, 14 aa, Homo sapiens
  CDR3 for alpha chain variable domain of TCR clone 144603 (TRAV38-1, TRAJ40)
CALRPTSGTYKYIF

SEQ ID NO: 289206 - protein, 16 aa, Homo sapiens
  CDR3 for beta chain variable domain of TCR clone 144603 (TRBV20-1, TRBJ1-1)
CSARALTQGMNTEAFF

SEQ ID NO: 289207 - protein, 15 aa, Homo sapiens
  CDR3 for alpha chain variable domain of TCR clone 144604 (TRAV20, TRAJ50)
CAVRQMKTSYDKVIF

SEQ ID NO: 289208 - protein, 17 aa, Homo sapiens
  CDR3 for beta chain variable domain of TCR clone 144604 (TRBV28, TRBJ2-7)
FASSPLHRASGVYEQYF

SEQ ID NO: 289209 - protein, 11 aa, Homo sapiens
  CDR3 for alpha chain variable domain of TCR clone 144605 (TRAV13-1, TRAJ49)
CACVGGNQFYF

SEQ ID NO: 289210 - protein, 15 aa, Homo sapiens
  CDR3 for beta chain variable domain of TCR clone 144605 (TRBV5-1, TRBJ2-7)
CASSLNGGPAREQYF

SEQ ID NO: 289211 - protein, 16 aa, Homo sapiens
  CDR3 for alpha chain variable domain of TCR clone 144606 (TRAV30, TRAJ24)
CGTEIVDADSWWKFQF

SEQ ID NO: 289212 - protein, 13 aa, Homo sapiens
  CDR3 for beta chain variable domain of TCR clone 144606 (TRBV7-3, TRBJ1-1)
CASSQDWGAEAFF

SEQ ID NO: 289213 - protein, 15 aa, Homo sapiens
  CDR3 for alpha chain variable domain of TCR clone 144607 (TRAV26-2, TRAJ45)
CILRDRVDQEEVLTD

SEQ ID NO: 289214 - protein, 16 aa, Homo sapiens
  CDR3 for beta chain variable domain of TCR clone 144607 (TRBV7-2, TRBJ2-3)
CASSLVALYSTDTQYF

SEQ ID NO: 289215 - protein, 12 aa, Homo sapiens
  CDR3 for alpha chain variable domain of TCR clone 144608 (TRAV2, TRAJ10)
CASTGGGNKLTF

SEQ ID NO: 289216 - protein, 12 aa, Homo sapiens
  CDR3 for beta chain variable domain of TCR clone 144608 (TRBV27, TRBJ2-5)
CASSPTGETQYF

SEQ ID NO: 289217 - protein, 14 aa, Homo sapiens
  CDR3 for alpha chain variable domain of TCR clone 144609 (TRAV26-1, TRAJ21)
CIVRVVYNFNKFYF

SEQ ID NO: 289218 - protein, 15 aa, Homo sapiens
  CDR3 for beta chain variable domain of TCR clone 144609 (TRBV7-3, TRBJ2-1)
CASSPTGGGEVEQFF

SEQ ID NO: 289219 - protein, 14 aa, Homo sapiens
  CDR3 for alpha chain variable domain of TCR clone 144610 (TRAV12-2, TRAJ13)
CAVKKTGGYQKVTF

SEQ ID NO: 289220 - protein, 16 aa, Homo sapiens
  CDR3 for beta chain variable domain of TCR clone 144610 (TRBV2, TRBJ2-1)
CASRSPEGGKYNEQFF

SEQ ID NO: 289221 - protein, 16 aa, Homo sapiens
  CDR3 for alpha chain variable domain of TCR clone 144611 (TRAV17, TRAJ28)
CATASVSGAGIYQLTF

SEQ ID NO: 289222 - protein, 11 aa, Homo sapiens
  CDR3 for beta chain variable domain of TCR clone 144611 (TRBV7-9, TRBJ2-5)
CASSLGETQYF

SEQ ID NO: 289223 - protein, 14 aa, Homo sapiens
  CDR3 for alpha chain variable domain of TCR clone 144612 (TRAV12-2, TRAJ13)
CAVKKTGGYQKVTF

SEQ ID NO: 289224 - protein, 15 aa, Homo sapiens
  CDR3 for beta chain variable domain of TCR clone 144612 (TRBV20-1, TRBJ2-7)
CSARDRVSGMDEQYV

SEQ ID NO: 289225 - protein, 10 aa, Homo sapiens
  CDR3 for alpha chain variable domain of TCR clone 144613 (TRAV16, TRAJ26)
QRNYGQNFVF

SEQ ID NO: 289226 - protein, 15 aa, Homo sapiens
  CDR3 for beta chain variable domain of TCR clone 144613 (TRBV7-2, TRBJ2-3)
CASSLTGTSTDTQYF

SEQ ID NO: 289227 - protein, 15 aa, Homo sapiens
  CDR3 for alpha chain variable domain of TCR clone 144614 (TRAV8-3, TRAJ32)
CAVGPYGGAQNKLIF

SEQ ID NO: 289228 - protein, 14 aa, Homo sapiens
  CDR3 for beta chain variable domain of TCR clone 144614 (TRBV29-1, TRBJ2-2)
CSVLAETNTGELFF

SEQ ID NO: 289229 - protein, 12 aa, Homo sapiens
  CDR3 for alpha chain variable domain of TCR clone 144615 (TRAV30, TRAJ43)
CGTEERGNDMRF

SEQ ID NO: 289230 - protein, 13 aa, Homo sapiens
  CDR3 for beta chain variable domain of TCR clone 144615 (TRBV12-4, TRBJ1-2)
CASSLRQGKGYTF

SEQ ID NO: 289231 - protein, 14 aa, Homo sapiens
  CDR3 for alpha chain variable domain of TCR clone 144616 (TRAV23/DV6, TRAJ8)
CAASKNTGFQKLVF

SEQ ID NO: 289232 - protein, 15 aa, Homo sapiens
  CDR3 for beta chain variable domain of TCR clone 144616 (TRBV7-8, TRBJ2-1)
CASSLHGGPYNEQFF

SEQ ID NO: 289233 - protein, 14 aa, Homo sapiens
  CDR3 for alpha chain variable domain of TCR clone 144617 (TRAV3, TRAJ21)
CAVESQANFHKFYF

SEQ ID NO: 289234 - protein, 18 aa, Homo sapiens
  CDR3 for beta chain variable domain of TCR clone 144617 (TRBV7-9, TRBJ2-1)
CASSLAVSGTSGRNEQFF

SEQ ID NO: 289235 - protein, 14 aa, Homo sapiens
  CDR3 for alpha chain variable domain of TCR clone 144618 (TRAV23/DV6, TRAJ24)
CAASLSDSWGKLQF

SEQ ID NO: 289236 - protein, 13 aa, Homo sapiens
  CDR3 for beta chain variable domain of TCR clone 144618 (TRBV11-2, TRBJ2-5)
CASSFSSQETQYF

SEQ ID NO: 289237 - protein, 14 aa, Homo sapiens
  CDR3 for alpha chain variable domain of TCR clone 144619 (TRAV4, TRAJ9)
CLVGSGTGGFKTIF

SEQ ID NO: 289238 - protein, 14 aa, Homo sapiens
  CDR3 for beta chain variable domain of TCR clone 144619 (TRBV6-3, TRBJ1-1)
CASSNLLPGAEAFF

SEQ ID NO: 289239 - protein, 17 aa, Homo sapiens
  CDR3 for alpha chain variable domain of TCR clone 144620 (TRAV3, TRAJ42)
CAVRDRDYGGSQGNLIF

SEQ ID NO: 289240 - protein, 14 aa, Homo sapiens
  CDR3 for beta chain variable domain of TCR clone 144620 (TRBV7-8, TRBJ1-2)
CASSPDSLSYGYTF

SEQ ID NO: 289241 - protein, 15 aa, Homo sapiens
  CDR3 for alpha chain variable domain of TCR clone 144621 (TRAV34, TRAJ38)
CGADFTPGNNRKLIW

SEQ ID NO: 289242 - protein, 16 aa, Homo sapiens
  CDR3 for beta chain variable domain of TCR clone 144621 (TRBV12-5, TRBJ2-5)
CASGPRTSGTQETQYF

SEQ ID NO: 289243 - protein, 12 aa, Homo sapiens
  CDR3 for alpha chain variable domain of TCR clone 144622 (TRAV1-2, TRAJ33)
CAALDSHYQLIW

SEQ ID NO: 289244 - protein, 14 aa, Homo sapiens
  CDR3 for beta chain variable domain of TCR clone 144622 (TRBV20-1, TRBJ2-1)
CSAQIGGSANEQFF

SEQ ID NO: 289245 - protein, 13 aa, Homo sapiens
  CDR3 for alpha chain variable domain of TCR clone 144623 (TRAV25, TRAJ26)
CAGMDNYGQNFVF

SEQ ID NO: 289246 - protein, 14 aa, Homo sapiens
  CDR3 for beta chain variable domain of TCR clone 144623 (TRBV4-1, TRBJ2-2)
CASSQAVNTGELFF

SEQ ID NO: 289247 - protein, 14 aa, Homo sapiens
  CDR3 for alpha chain variable domain of TCR clone 144624 (TRAV8-2, TRAJ37)
CVVSISGNTGKLIF

SEQ ID NO: 289248 - protein, 13 aa, Homo sapiens
  CDR3 for beta chain variable domain of TCR clone 144624 (TRBV4-2, TRBJ1-1)
CASSQAGNTEAFF

SEQ ID NO: 289249 - protein, 10 aa, Homo sapiens
  CDR3 for alpha chain variable domain of TCR clone 144625 (TRAV23/DV6, TRAJ57)
CAASSTLSQG

SEQ ID NO: 289250 - protein, 14 aa, Homo sapiens
  CDR3 for beta chain variable domain of TCR clone 144625 (TRBV15, TRBJ2-3)
CATRSGTSTDTQYV

SEQ ID NO: 289251 - protein, 10 aa, Homo sapiens
  CDR3 for alpha chain variable domain of TCR clone 144626 (TRAV17, TRAJ36)
CATVAGNLFF

SEQ ID NO: 289252 - protein, 13 aa, Homo sapiens
  CDR3 for beta chain variable domain of TCR clone 144626 (TRBV4-2, TRBJ1-1)
CASSQAGNTEAFF

SEQ ID NO: 289253 - protein, 15 aa, Homo sapiens
  CDR3 for alpha chain variable domain of TCR clone 144627 (TRAV27, TRAJ38)
CAGRFNAGNNRKLIW

SEQ ID NO: 289254 - protein, 17 aa, Homo sapiens
  CDR3 for beta chain variable domain of TCR clone 144627 (TRBV4-1, TRBJ1-4)
CASSQEGPRGVEEKLFF

SEQ ID NO: 289255 - protein, 14 aa, Homo sapiens
  CDR3 for alpha chain variable domain of TCR clone 144628 (TRAV8-3, TRAJ47)
CAVGAQGYGNKLVF

SEQ ID NO: 289256 - protein, 15 aa, Homo sapiens
  CDR3 for beta chain variable domain of TCR clone 144628 (TRBV20-1, TRBJ1-1)
CSAFYAGTENTEAFF

SEQ ID NO: 289257 - protein, 14 aa, Homo sapiens
  CDR3 for alpha chain variable domain of TCR clone 144629 (TRAV12-1, TRAJ38)
CGELKAGNNRKLIW

SEQ ID NO: 289258 - protein, 15 aa, Homo sapiens
  CDR3 for beta chain variable domain of TCR clone 144629 (TRBV18, TRBJ2-1)
CASSPPGAAYNEQFF

SEQ ID NO: 289259 - protein, 13 aa, Homo sapiens
  CDR3 for alpha chain variable domain of TCR clone 144630 (TRAV13-1, TRAJ39)
CSKYSNAGNMLTF

SEQ ID NO: 289260 - protein, 14 aa, Homo sapiens
  CDR3 for beta chain variable domain of TCR clone 144630 (TRBV7-8, TRBJ2-3)
CASSLEAGTDTQYF

SEQ ID NO: 289261 - protein, 16 aa, Homo sapiens
  CDR3 for alpha chain variable domain of TCR clone 144631 (TRAV12-3, TRAJ53)
CAMSPGSGGSNYKLTF

SEQ ID NO: 289262 - protein, 16 aa, Homo sapiens
  CDR3 for beta chain variable domain of TCR clone 144631 (TRBV20-1, TRBJ2-3)
CSARLLASGNTDTQYF

SEQ ID NO: 289263 - protein, 11 aa, Homo sapiens
  CDR3 for alpha chain variable domain of TCR clone 144632 (TRAV35, TRAJ30)
CAPGGDDTIIF

SEQ ID NO: 289264 - protein, 14 aa, Homo sapiens
  CDR3 for beta chain variable domain of TCR clone 144632 (TRBV7-6, TRBJ2-1)
CASSLGGGADEQFF

SEQ ID NO: 289265 - protein, 17 aa, Homo sapiens
  CDR3 for alpha chain variable domain of TCR clone 144633 (TRAV20, TRAJ57)
CAVQAIVAQGGSEKLVF

SEQ ID NO: 289266 - protein, 13 aa, Homo sapiens
  CDR3 for beta chain variable domain of TCR clone 144633 (TRBV20-1, TRBJ2-5)
CSAFVGGGENQYF

SEQ ID NO: 289267 - protein, 14 aa, Homo sapiens
  CDR3 for alpha chain variable domain of TCR clone 144634 (TRAV9-2, TRAJ39)
CALYIYNAGNMLTF

SEQ ID NO: 289268 - protein, 12 aa, Homo sapiens
  CDR3 for beta chain variable domain of TCR clone 144634 (TRBV7-9, TRBJ2-7)
CASSLFDYEQYF

SEQ ID NO: 289269 - protein, 15 aa, Homo sapiens
  CDR3 for alpha chain variable domain of TCR clone 144635 (TRAV26-1, TRAJ20)
CIVRVAARGDYKPSF

SEQ ID NO: 289270 - protein, 15 aa, Homo sapiens
  CDR3 for beta chain variable domain of TCR clone 144635 (TRBV29-1, TRBJ2-1)
CSVEGGQGAYNEQFF

SEQ ID NO: 289271 - protein, 13 aa, Homo sapiens
  CDR3 for alpha chain variable domain of TCR clone 144636 (TRAV3, TRAJ27)
CAVRPLGAGKSTF

SEQ ID NO: 289272 - protein, 16 aa, Homo sapiens
  CDR3 for beta chain variable domain of TCR clone 144636 (TRBV7-3, TRBJ2-3)
CASSLSGYRPEDTQYF

SEQ ID NO: 289273 - protein, 15 aa, Homo sapiens
  CDR3 for alpha chain variable domain of TCR clone 144637 (TRAV13-1, TRAJ50)
CAAKGSATSYDRVIF

SEQ ID NO: 289274 - protein, 13 aa, Homo sapiens
  CDR3 for beta chain variable domain of TCR clone 144637 (TRBV20-1, TRBJ2-3)
CSARAGGRDTQYF

SEQ ID NO: 289275 - protein, 12 aa, Homo sapiens
  CDR3 for alpha chain variable domain of TCR clone 144638 (TRAV25, TRAJ7)
CAGSYGNNRLAF

SEQ ID NO: 289276 - protein, 17 aa, Homo sapiens
  CDR3 for beta chain variable domain of TCR clone 144638 (TRBV7-2, TRBJ2-1)
CASSLGPPWGGLDEQFF

SEQ ID NO: 289277 - protein, 13 aa, Homo sapiens
  CDR3 for alpha chain variable domain of TCR clone 144639 (TRAV8-2, TRAJ47)
CVVGEREGNKLVF

SEQ ID NO: 289278 - protein, 16 aa, Homo sapiens
  CDR3 for beta chain variable domain of TCR clone 144639 (TRBV5-1, TRBJ1-1)
CASSKTGTEVGTEAFF

SEQ ID NO: 289279 - protein, 13 aa, Homo sapiens
  CDR3 for alpha chain variable domain of TCR clone 144640 (TRAV12-3, TRAJ13)
CAMTSGGYQKVTF

SEQ ID NO: 289280 - protein, 13 aa, Homo sapiens
  CDR3 for beta chain variable domain of TCR clone 144640 (TRBV7-9, TRBJ1-2)
CASSVKQNYGYSF

SEQ ID NO: 289281 - protein, 17 aa, Homo sapiens
  CDR3 for alpha chain variable domain of TCR clone 144641 (TRAV26-1, TRAJ37)
CIVRVITVSSNTGKLIF

SEQ ID NO: 289282 - protein, 12 aa, Homo sapiens
  CDR3 for beta chain variable domain of TCR clone 144641 (TRBV19, TRBJ2-7)
CASTDRDYEQYF

SEQ ID NO: 289283 - protein, 11 aa, Homo sapiens
  CDR3 for alpha chain variable domain of TCR clone 144642 (TRAV3, TRAJ21)
CAVGNFNKFYF

SEQ ID NO: 289284 - protein, 15 aa, Homo sapiens
  CDR3 for beta chain variable domain of TCR clone 144642 (TRBV19, TRBJ2-1)
CASSRPGQNYNEQFF

SEQ ID NO: 289285 - protein, 18 aa, Homo sapiens
  CDR3 for alpha chain variable domain of TCR clone 144643 (TRAV29/DV5, TRAJ52)
CAAGFRGAGGTSYGKLTF

SEQ ID NO: 289286 - protein, 17 aa, Homo sapiens
  CDR3 for beta chain variable domain of TCR clone 144643 (TRBV12-4, TRBJ2-1)
CASSPGLAGGRINEQFF

SEQ ID NO: 289287 - protein, 16 aa, Homo sapiens
  CDR3 for alpha chain variable domain of TCR clone 144644 (TRAV3, TRAJ37)
CAVRGKGSGKTGKLIF

SEQ ID NO: 289288 - protein, 15 aa, Homo sapiens
  CDR3 for beta chain variable domain of TCR clone 144644 (TRBV7-9, TRBJ1-6)
CASSSPGRGNSPLHF

SEQ ID NO: 289289 - protein, 12 aa, Homo sapiens
  CDR3 for alpha chain variable domain of TCR clone 144645 (TRAV12-1, TRAJ6)
CGVSERSYIPTF

SEQ ID NO: 289290 - protein, 21 aa, Homo sapiens
  CDR3 for beta chain variable domain of TCR clone 144645 (TRBV7-3, TRBJ2-1)
GGTQPCISVPAAYGLAGAQFF

SEQ ID NO: 289291 - protein, 13 aa, Homo sapiens
  CDR3 for alpha chain variable domain of TCR clone 144646 (TRAV27, TRAJ43)
CAGSGNNNNDMRF

SEQ ID NO: 289292 - protein, 15 aa, Homo sapiens
  CDR3 for beta chain variable domain of TCR clone 144646 (TRBV20-1, TRBJ2-7)
CSARDRVSGMDEQYF

SEQ ID NO: 289293 - protein, 14 aa, Homo sapiens
  CDR3 for alpha chain variable domain of TCR clone 144647 (TRAV12-3, TRAJ10)
SHLPLTGGGNKLTF

SEQ ID NO: 289294 - protein, 13 aa, Homo sapiens
  CDR3 for beta chain variable domain of TCR clone 144647 (TRBV9, TRBJ2-1)
CASSPSGGNEHFF

SEQ ID NO: 289295 - protein, 12 aa, Homo sapiens
  CDR3 for alpha chain variable domain of TCR clone 144648 (TRAV12-1, TRAJ40)
CVFYSGTYKYIF

SEQ ID NO: 289296 - protein, 16 aa, Homo sapiens
  CDR3 for beta chain variable domain of TCR clone 144648 (TRBV15, TRBJ1-4)
CATSRDSPPGREKLFF

SEQ ID NO: 289297 - protein, 15 aa, Homo sapiens
  CDR3 for alpha chain variable domain of TCR clone 144649 (TRAV4, TRAJ15)
CLVGDIRRAGTALIF

SEQ ID NO: 289298 - protein, 11 aa, Homo sapiens
  CDR3 for beta chain variable domain of TCR clone 144649 (TRBV12-4, TRBJ2-3)
CASTATDTQYF

SEQ ID NO: 289299 - protein, 15 aa, Homo sapiens
  CDR3 for alpha chain variable domain of TCR clone 144650 (TRAV34, TRAJ38)
CGADFTPGNNCKLIW

SEQ ID NO: 289300 - protein, 16 aa, Homo sapiens
  CDR3 for beta chain variable domain of TCR clone 144650 (TRBV12-5, TRBJ2-5)
CASGPRTSGNQETQYF

SEQ ID NO: 289301 - protein, 13 aa, Homo sapiens
  CDR3 for alpha chain variable domain of TCR clone 144651 (TRAV12-3, TRAJ13)
CAMTSGGYQKVTF

SEQ ID NO: 289302 - protein, 16 aa, Homo sapiens
  CDR3 for beta chain variable domain of TCR clone 144651 (TRBV7-9, TRBJ2-3)
CASSPWREVGTDTQYF

SEQ ID NO: 289303 - protein, 14 aa, Homo sapiens
  CDR3 for alpha chain variable domain of TCR clone 144652 (TRAV16, TRAJ17)
FALSGRAAGNKLTV

SEQ ID NO: 289304 - protein, 15 aa, Homo sapiens
  CDR3 for beta chain variable domain of TCR clone 144652 (TRBV3-1, TRBJ1-2)
CASSPTRLPEGGYTF

SEQ ID NO: 289305 - protein, 11 aa, Homo sapiens
  CDR3 for alpha chain variable domain of TCR clone 144653 (TRAV17, TRAJ9)
CATTGGFKTIF

SEQ ID NO: 289306 - protein, 14 aa, Homo sapiens
  CDR3 for beta chain variable domain of TCR clone 144653 (TRBV11-2, TRBJ2-3)
CASSLYAGRDTQYF

SEQ ID NO: 289307 - protein, 13 aa, Homo sapiens
  CDR3 for alpha chain variable domain of TCR clone 144654 (TRAV20, TRAJ20)
CTVRWVRDYKLSF

SEQ ID NO: 289308 - protein, 14 aa, Homo sapiens
  CDR3 for beta chain variable domain of TCR clone 144654 (TRBV19, TRBJ2-2)
CASTVTANTGELFF

SEQ ID NO: 289309 - protein, 16 aa, Homo sapiens
  CDR3 for alpha chain variable domain of TCR clone 144655 (TRAV30, TRAJ24)
CGTELVDADSWGKFQF

SEQ ID NO: 289310 - protein, 14 aa, Homo sapiens
  CDR3 for beta chain variable domain of TCR clone 144655 (TRBV12-5, TRBJ2-5)
CASGARTHQETQYF

SEQ ID NO: 289311 - protein, 12 aa, Homo sapiens
  CDR3 for alpha chain variable domain of TCR clone 144656 (TRAV12-3, TRAJ17)
CAMTLKGNKLNF

SEQ ID NO: 289312 - protein, 15 aa, Homo sapiens
  CDR3 for beta chain variable domain of TCR clone 144656 (TRBV20-1, TRBJ2-7)
CSARDRVSGMDEQYF

SEQ ID NO: 289313 - protein, 14 aa, Homo sapiens
  CDR3 for alpha chain variable domain of TCR clone 144657 (TRAV16, TRAJ54)
CALSLIKGAQKLVF

SEQ ID NO: 289314 - protein, 17 aa, Homo sapiens
  CDR3 for beta chain variable domain of TCR clone 144657 (TRBV11-2, TRBJ2-4)
CASSSVGPGGHRNIQYF

SEQ ID NO: 289315 - protein, 13 aa, Homo sapiens
  CDR3 for alpha chain variable domain of TCR clone 144658 (TRAV14/DV4, TRAJ20)
CAMREGRDYKLSF

SEQ ID NO: 289316 - protein, 15 aa, Homo sapiens
  CDR3 for beta chain variable domain of TCR clone 144658 (TRBV7-3, TRBJ2-1)
CASSLSSGSLDEQFF

SEQ ID NO: 289317 - protein, 15 aa, Homo sapiens
  CDR3 for alpha chain variable domain of TCR clone 144659 (TRAV1-2, TRAJ38)
CAVSENAGNNRKLSW

SEQ ID NO: 289318 - protein, 16 aa, Homo sapiens
  CDR3 for beta chain variable domain of TCR clone 144659 (TRBV4-1, TRBJ2-7)
CASSLTAGQATYEQYF

SEQ ID NO: 289319 - protein, 13 aa, Homo sapiens
  CDR3 for alpha chain variable domain of TCR clone 144660 (TRAV2, TRAJ20)
CAVEGPSEYKHSF

SEQ ID NO: 289320 - protein, 16 aa, Homo sapiens
  CDR3 for beta chain variable domain of TCR clone 144660 (TRBV25-1, TRBJ2-7)
CASSELTGGGIYEQYF

SEQ ID NO: 289321 - protein, 15 aa, Homo sapiens
  CDR3 for alpha chain variable domain of TCR clone 144661 (TRAV21, TRAJ24)
CAARSSTDSWGKLQF

SEQ ID NO: 289322 - protein, 14 aa, Homo sapiens
  CDR3 for beta chain variable domain of TCR clone 144661 (TRBV11-2, TRBJ2-7)
CASSPKTSFYEHYF

SEQ ID NO: 289323 - protein, 17 aa, Homo sapiens
  CDR3 for alpha chain variable domain of TCR clone 144662 (TRAV23/DV6, TRAJ57)
CAASSTLSQGGSDKLAF

SEQ ID NO: 289324 - protein, 14 aa, Homo sapiens
  CDR3 for beta chain variable domain of TCR clone 144662 (TRBV25-1, TRBJ1-1)
CASTHLGGNTEAFF

SEQ ID NO: 289325 - protein, 14 aa, Homo sapiens
  CDR3 for alpha chain variable domain of TCR clone 144663 (TRAV38-1, TRAJ42)
CAFPAGGSQGNLIF

SEQ ID NO: 289326 - protein, 14 aa, Homo sapiens
  CDR3 for beta chain variable domain of TCR clone 144663 (TRBV7-2, TRBJ2-7)
CASSPKTSFYEQSV

SEQ ID NO: 289327 - protein, 16 aa, Homo sapiens
  CDR3 for alpha chain variable domain of TCR clone 144664 (TRAV3, TRAJ10)
CAVRDMRAGGGNKLTF

SEQ ID NO: 289328 - protein, 16 aa, Homo sapiens
  CDR3 for beta chain variable domain of TCR clone 144664 (TRBV7-8, TRBJ2-6)
CASRVGDSSGANVLTF

SEQ ID NO: 289329 - protein, 16 aa, Homo sapiens
  CDR3 for alpha chain variable domain of TCR clone 144665 (TRAV30, TRAJ24)
CGTEIVDTDSWGKFPF

SEQ ID NO: 289330 - protein, 14 aa, Homo sapiens
  CDR3 for beta chain variable domain of TCR clone 144665 (TRBV12-5, TRBJ2-5)
CASGSRTHQETQYF

SEQ ID NO: 289331 - protein, 21 aa, Homo sapiens
  CDR3 for alpha chain variable domain of TCR clone 144666 (TRAV12-1, TRAJ32)
SSVIQPPTSMNYGGATNKLIF

SEQ ID NO: 289332 - protein, 16 aa, Homo sapiens
  CDR3 for beta chain variable domain of TCR clone 144666 (TRBV4-1, TRBJ2-7)
CASSQGQFLSSYEQYF

SEQ ID NO: 289333 - protein, 13 aa, Homo sapiens
  CDR3 for alpha chain variable domain of TCR clone 144667 (TRAV3, TRAJ30)
CAVRDGGDDKIIF

SEQ ID NO: 289334 - protein, 16 aa, Homo sapiens
  CDR3 for beta chain variable domain of TCR clone 144667 (TRBV7-3, TRBJ2-2)
CASSLKRGTLSGELFF

SEQ ID NO: 289335 - protein, 13 aa, Homo sapiens
  CDR3 for alpha chain variable domain of TCR clone 144668 (TRAV13-1, TRAJ5)
CAARVTGRRALTF

SEQ ID NO: 289336 - protein, 15 aa, Homo sapiens
  CDR3 for beta chain variable domain of TCR clone 144668 (TRBV11-2, TRBJ2-2)
CASSSDRVNAGELFF

SEQ ID NO: 289337 - protein, 13 aa, Homo sapiens
  CDR3 for alpha chain variable domain of TCR clone 144669 (TRAV1-2, TRAJ9)
CAALNTGGYKTIF

SEQ ID NO: 289338 - protein, 13 aa, Homo sapiens
  CDR3 for beta chain variable domain of TCR clone 144669 (TRBV7-9, TRBJ1-2)
CASSLKQNYGYTF

SEQ ID NO: 289339 - protein, 13 aa, Homo sapiens
  CDR3 for alpha chain variable domain of TCR clone 144670 (TRAV21, TRAJ57)
CAVTQGGSEKLVF

SEQ ID NO: 289340 - protein, 17 aa, Homo sapiens
  CDR3 for beta chain variable domain of TCR clone 144670 (TRBV13, TRBJ2-3)
CASSLSMVAGGRNTQYF

SEQ ID NO: 289341 - protein, 16 aa, Homo sapiens
  CDR3 for alpha chain variable domain of TCR clone 144671 (TRAV12-1, TRAJ4)
CVVRRLPAGGYNKLIF

SEQ ID NO: 289342 - protein, 12 aa, Homo sapiens
  CDR3 for beta chain variable domain of TCR clone 144671 (TRBV19, TRBJ2-1)
CASSMQDTEQFF

SEQ ID NO: 289343 - protein, 13 aa, Homo sapiens
  CDR3 for alpha chain variable domain of TCR clone 144672 (TRAV3, TRAJ7)
CAVSSYGNNRLAF

SEQ ID NO: 289344 - protein, 13 aa, Homo sapiens
  CDR3 for beta chain variable domain of TCR clone 144672 (TRBV15, TRBJ2-7)
CATSTTGHYEQYF

SEQ ID NO: 289345 - protein, 12 aa, Homo sapiens
  CDR3 for alpha chain variable domain of TCR clone 144673 (TRAV12-1, TRAJ6)
CVVSERSYIPTF

SEQ ID NO: 289346 - protein, 15 aa, Homo sapiens
  CDR3 for beta chain variable domain of TCR clone 144673 (TRBV5-1, TRBJ2-3)
CASSLETASTDTQYF

SEQ ID NO: 289347 - protein, 14 aa, Homo sapiens
  CDR3 for alpha chain variable domain of TCR clone 144674 (TRAV23/DV6, TRAJ10)
CAAAISGGGTKLTF

SEQ ID NO: 289348 - protein, 12 aa, Homo sapiens
  CDR3 for beta chain variable domain of TCR clone 144674 (TRBV28, TRBJ2-7)
CASSVPPYEQYF

SEQ ID NO: 289349 - protein, 13 aa, Homo sapiens
  CDR3 for alpha chain variable domain of TCR clone 144675 (TRAV13-1, TRAJ21)
CAASIYNFNKFYF

SEQ ID NO: 289350 - protein, 14 aa, Homo sapiens
  CDR3 for beta chain variable domain of TCR clone 144675 (TRBV23-1, TRBJ2-5)
CASSFLRSQETQYF

SEQ ID NO: 289351 - protein, 12 aa, Homo sapiens
  CDR3 for alpha chain variable domain of TCR clone 144676 (TRAV38-1, TRAJ20)
CAFIWNDYKLSF

SEQ ID NO: 289352 - protein, 14 aa, Homo sapiens
  CDR3 for beta chain variable domain of TCR clone 144676 (TRBV19, TRBJ2-1)
CASSMGSGTTEQFF

SEQ ID NO: 289353 - protein, 14 aa, Homo sapiens
  CDR3 for alpha chain variable domain of TCR clone 144677 (TRAV2, TRAJ9)
CAVEDRSGGFKTIF

SEQ ID NO: 289354 - protein, 14 aa, Homo sapiens
  CDR3 for beta chain variable domain of TCR clone 144677 (TRBV10-3, TRBJ2-7)
CHQCGTSETYEQYF

SEQ ID NO: 289355 - protein, 13 aa, Homo sapiens
  CDR3 for alpha chain variable domain of TCR clone 144678 (TRAV1-2, TRAJ11)
CAVRREGYSTLTF

SEQ ID NO: 289356 - protein, 16 aa, Homo sapiens
  CDR3 for beta chain variable domain of TCR clone 144678 (TRBV15, TRBJ1-2)
CATSRGPRTGGGGYTF

SEQ ID NO: 289357 - protein, 14 aa, Homo sapiens
  CDR3 for alpha chain variable domain of TCR clone 144679 (TRAV1-2, TRAJ16)
CAVNRFSDGQKLLS

SEQ ID NO: 289358 - protein, 15 aa, Homo sapiens
  CDR3 for beta chain variable domain of TCR clone 144679 (TRBV7-9, TRBJ1-6)
CASSSPGRGNSHLHF

SEQ ID NO: 289359 - protein, 12 aa, Homo sapiens
  CDR3 for alpha chain variable domain of TCR clone 144680 (TRAV12-1, TRAJ40)
CVFYSGTYKYIF

SEQ ID NO: 289360 - protein, 11 aa, Homo sapiens
  CDR3 for beta chain variable domain of TCR clone 144680 (TRBV7-8, TRBJ2-7)
CASSLSLEQYF

SEQ ID NO: 289361 - protein, 14 aa, Homo sapiens
  CDR3 for alpha chain variable domain of TCR clone 144681 (TRAV12-3, TRAJ10)
SHLPLTGGGNKLTF

SEQ ID NO: 289362 - protein, 13 aa, Homo sapiens
  CDR3 for beta chain variable domain of TCR clone 144681 (TRBV12-5, TRBJ2-3)
CASGDRQPDTQYF

SEQ ID NO: 289363 - protein, 16 aa, Homo sapiens
  CDR3 for alpha chain variable domain of TCR clone 144682 (TRAV14/DV4, TRAJ53)
CAMREGGGGSNYKLTF

SEQ ID NO: 289364 - protein, 12 aa, Homo sapiens
  CDR3 for beta chain variable domain of TCR clone 144682 (TRBV11-2, TRBJ2-2)
CDSSLGGGELFF

SEQ ID NO: 289365 - protein, 17 aa, Homo sapiens
  CDR3 for alpha chain variable domain of TCR clone 144683 (TRAV23/DV6, TRAJ58)
CAARLLRGETSGSRWTF

SEQ ID NO: 289366 - protein, 13 aa, Homo sapiens
  CDR3 for beta chain variable domain of TCR clone 144683 (TRBV6-4, TRBJ1-5)
CASSADLNQPQHF

SEQ ID NO: 289367 - protein, 13 aa, Homo sapiens
  CDR3 for alpha chain variable domain of TCR clone 144684 (TRAV8-2, TRAJ9)
CVVRATGGFKTIF

SEQ ID NO: 289368 - protein, 15 aa, Homo sapiens
  CDR3 for beta chain variable domain of TCR clone 144684 (TRBV6-5, TRBJ2-1)
CASSYDAGAGNEQFF

SEQ ID NO: 289369 - protein, 14 aa, Homo sapiens
  CDR3 for alpha chain variable domain of TCR clone 144685 (TRAV1-2, TRAJ16)
CAVNRFSDGQKLLF

SEQ ID NO: 289370 - protein, 18 aa, Homo sapiens
  CDR3 for beta chain variable domain of TCR clone 144685 (TRBV11-2, TRBJ2-3)
CASNLGGASRGAPNTQYF

SEQ ID NO: 289371 - protein, 10 aa, Homo sapiens
  CDR3 for alpha chain variable domain of TCR clone 144686 (TRAV12-1, TRAJ20)
CVVNPRKLSF

SEQ ID NO: 289372 - protein, 15 aa, Homo sapiens
  CDR3 for beta chain variable domain of TCR clone 144686 (TRBV12-4, TRBJ2-5)
CASSPPTGLQETQYF

SEQ ID NO: 289373 - protein, 16 aa, Homo sapiens
  CDR3 for alpha chain variable domain of TCR clone 144687 (TRAV20, TRAJ53)
CAVQGNSGGSKYKLTF

SEQ ID NO: 289374 - protein, 14 aa, Homo sapiens
  CDR3 for beta chain variable domain of TCR clone 144687 (TRBV6-5, TRBJ2-7)
CASSPHRGLREQYF

SEQ ID NO: 289375 - protein, 16 aa, Homo sapiens
  CDR3 for alpha chain variable domain of TCR clone 144688 (TRAV30, TRAJ24)
CGTEIVDADSWGKFQL

SEQ ID NO: 289376 - protein, 14 aa, Homo sapiens
  CDR3 for beta chain variable domain of TCR clone 144688 (TRBV12-5, TRBJ2-5)
CASGSRTHQEAQYF

SEQ ID NO: 289377 - protein, 11 aa, Homo sapiens
  CDR3 for alpha chain variable domain of TCR clone 144689 (TRAV35, TRAJ34)
CWARNTDKLIF

SEQ ID NO: 289378 - protein, 13 aa, Homo sapiens
  CDR3 for beta chain variable domain of TCR clone 144689 (TRBV7-8, TRBJ2-7)
CASSLTGGREQYF

SEQ ID NO: 289379 - protein, 12 aa, Homo sapiens
  CDR3 for alpha chain variable domain of TCR clone 144690 (TRAV12-1, TRAJ40)
CVVYSGTYKYIF

SEQ ID NO: 289380 - protein, 17 aa, Homo sapiens
  CDR3 for beta chain variable domain of TCR clone 144690 (TRBV11-2, TRBJ2-3)
CQQLRGGLAGGSYTQYF

SEQ ID NO: 289381 - protein, 14 aa, Homo sapiens
  CDR3 for alpha chain variable domain of TCR clone 144691 (TRAV12-2, TRAJ13)
CAVKKTGGYQKVTF

SEQ ID NO: 289382 - protein, 12 aa, Homo sapiens
  CDR3 for beta chain variable domain of TCR clone 144691 (TRBV13, TRBJ2-1)
CASSLGAQEQFF

SEQ ID NO: 289383 - protein, 13 aa, Homo sapiens
  CDR3 for alpha chain variable domain of TCR clone 144692 (TRAV12-3, TRAJ20)
CAMRRSNDYKLSF

SEQ ID NO: 289384 - protein, 14 aa, Homo sapiens
  CDR3 for beta chain variable domain of TCR clone 144692 (TRBV7-2, TRBJ2-7)
CASSPKTSFYEQYF

SEQ ID NO: 289385 - protein, 16 aa, Homo sapiens
  CDR3 for alpha chain variable domain of TCR clone 144693 (TRAV3, TRAJ37)
CAVRGKGSGNTGKLIF

SEQ ID NO: 289386 - protein, 15 aa, Homo sapiens
  CDR3 for beta chain variable domain of TCR clone 144693 (TRBV5-1, TRBJ1-1)
CPSSLNDFKNTEAFF

SEQ ID NO: 289387 - protein, 11 aa, Homo sapiens
  CDR3 for alpha chain variable domain of TCR clone 144694 (TRAV21, TRAJ39)
LLVNAGNMLTF

SEQ ID NO: 289388 - protein, 15 aa, Homo sapiens
  CDR3 for beta chain variable domain of TCR clone 144694 (TRBV5-1, TRBJ2-2)
CASSLRQGDTGELFF

SEQ ID NO: 289389 - protein, 14 aa, Homo sapiens
  CDR3 for alpha chain variable domain of TCR clone 144695 (TRAV12-3, TRAJ42)
CAMNYGGSQGNLIF

SEQ ID NO: 289390 - protein, 13 aa, Homo sapiens
  CDR3 for beta chain variable domain of TCR clone 144695 (TRBV20-1, TRBJ2-2)
CSASAAGTGELFF

SEQ ID NO: 289391 - protein, 15 aa, Homo sapiens
  CDR3 for alpha chain variable domain of TCR clone 144696 (TRAV26-1, TRAJ22)
CIVRVSFWICKVTDL

SEQ ID NO: 289392 - protein, 13 aa, Homo sapiens
  CDR3 for beta chain variable domain of TCR clone 144696 (TRBV7-9, TRBJ1-2)
CASSLKQNYGYTF

SEQ ID NO: 289393 - protein, 13 aa, Homo sapiens
  CDR3 for alpha chain variable domain of TCR clone 144697 (TRAV9-2, TRAJ33)
CALRMDSNYQLIW

SEQ ID NO: 289394 - protein, 14 aa, Homo sapiens
  CDR3 for beta chain variable domain of TCR clone 144697 (TRBV6-5, TRBJ1-5)
CASSFRQFNQPQHF

SEQ ID NO: 289395 - protein, 14 aa, Homo sapiens
  CDR3 for alpha chain variable domain of TCR clone 144698 (TRAV26-1, TRAJ44)
CIVKSTGTASKLTF

SEQ ID NO: 289396 - protein, 15 aa, Homo sapiens
  CDR3 for beta chain variable domain of TCR clone 144698 (TRBV7-9, TRBJ1-5)
CASSQGHQPNQPQHF

SEQ ID NO: 289397 - protein, 12 aa, Homo sapiens
  CDR3 for alpha chain variable domain of TCR clone 144699 (TRAV21, TRAJ29)
CAVTSGITPLVF

SEQ ID NO: 289398 - protein, 15 aa, Homo sapiens
  CDR3 for beta chain variable domain of TCR clone 144699 (TRBV12-4, TRBJ1-2)
CASRLGVAGNYGYSF

SEQ ID NO: 289399 - protein, 14 aa, Homo sapiens
  CDR3 for alpha chain variable domain of TCR clone 144700 (TRAV35, TRAJ50)
CAGHRRTSYDKVIF

SEQ ID NO: 289400 - protein, 13 aa, Homo sapiens
  CDR3 for beta chain variable domain of TCR clone 144700 (TRBV14, TRBJ1-2)
CASSEDRRYGYTF

SEQ ID NO: 289401 - protein, 19 aa, Homo sapiens
  CDR3 for alpha chain variable domain of TCR clone 144701 (TRAV26-1, TRAJ28)
CIVRVAHAYSGAGSYQLTF

SEQ ID NO: 289402 - protein, 12 aa, Homo sapiens
  CDR3 for beta chain variable domain of TCR clone 144701 (TRBV27, TRBJ2-2)
YASKLFTGELFF

SEQ ID NO: 289403 - protein, 12 aa, Homo sapiens
  CDR3 for alpha chain variable domain of TCR clone 144702 (TRAV3, TRAJ20)
CTVRDPDYKLSF

SEQ ID NO: 289404 - protein, 15 aa, Homo sapiens
  CDR3 for beta chain variable domain of TCR clone 144702 (TRBV6-5, TRBJ2-5)
CASSPLAGGIETQYF

SEQ ID NO: 289405 - protein, 16 aa, Homo sapiens
  CDR3 for alpha chain variable domain of TCR clone 144703 (TRAV1-2, TRAJ10)
CAVRGVLTGGGNKLTF

SEQ ID NO: 289406 - protein, 17 aa, Homo sapiens
  CDR3 for beta chain variable domain of TCR clone 144703 (TRBV7-7, TRBJ1-1)
CASIGDRPNLGVTEAFF

SEQ ID NO: 289407 - protein, 13 aa, Homo sapiens
  CDR3 for alpha chain variable domain of TCR clone 144704 (TRAV23/DV6, TRAJ43)
CAASMGGNKDMRF

SEQ ID NO: 289408 - protein, 11 aa, Homo sapiens
  CDR3 for beta chain variable domain of TCR clone 144704 (TRBV12-4, TRBJ2-3)
CASTATDTQYF

SEQ ID NO: 289409 - protein, 14 aa, Homo sapiens
  CDR3 for alpha chain variable domain of TCR clone 144705 (TRAV13-1, TRAJ35)
RAARKGGFGNVLHC

SEQ ID NO: 289410 - protein, 13 aa, Homo sapiens
  CDR3 for beta chain variable domain of TCR clone 144705 (TRBV7-3, TRBJ1-1)
CASSQDWGAEAFF

SEQ ID NO: 289411 - protein, 14 aa, Homo sapiens
  CDR3 for alpha chain variable domain of TCR clone 144706 (TRAV9-2, TRAJ39)
CALYIYNAGNMLTF

SEQ ID NO: 289412 - protein, 13 aa, Homo sapiens
  CDR3 for beta chain variable domain of TCR clone 144706 (TRBV11-2, TRBJ1-2)
CASSLDSPSGYTF

SEQ ID NO: 289413 - protein, 12 aa, Homo sapiens
  CDR3 for alpha chain variable domain of TCR clone 144707 (TRAV1-2, TRAJ29)
CAVPSGNTPLVF

SEQ ID NO: 289414 - protein, 13 aa, Homo sapiens
  CDR3 for beta chain variable domain of TCR clone 144707 (TRBV5-4, TRBJ1-1)
CASSVDLGTEASF

SEQ ID NO: 289415 - protein, 16 aa, Homo sapiens
  CDR3 for alpha chain variable domain of TCR clone 144708 (TRAV12-3, TRAJ53)
CAMSPWSGGSNYKLTF

SEQ ID NO: 289416 - protein, 12 aa, Homo sapiens
  CDR3 for beta chain variable domain of TCR clone 144708 (TRBV11-2, TRBJ2-2)
CASSLGGGELFF

SEQ ID NO: 289417 - protein, 11 aa, Homo sapiens
  CDR3 for alpha chain variable domain of TCR clone 144709 (TRAV12-2, TRAJ49)
CAVTGGNQFYF

SEQ ID NO: 289418 - protein, 16 aa, Homo sapiens
  CDR3 for beta chain variable domain of TCR clone 144709 (TRBV19, TRBJ1-2)
CASSIGSNRDGYSYTF

SEQ ID NO: 289419 - protein, 13 aa, Homo sapiens
  CDR3 for alpha chain variable domain of TCR clone 144710 (TRAV13-1, TRAJ30)
SVQEMNRDDKIIF

SEQ ID NO: 289420 - protein, 13 aa, Homo sapiens
  CDR3 for beta chain variable domain of TCR clone 144710 (TRBV7-8, TRBJ2-1)
CASSAGTGNEQFF

SEQ ID NO: 289421 - protein, 14 aa, Homo sapiens
  CDR3 for alpha chain variable domain of TCR clone 144711 (TRAV17, TRAJ16)
CATADFSDGQKLLF

SEQ ID NO: 289422 - protein, 12 aa, Homo sapiens
  CDR3 for beta chain variable domain of TCR clone 144711 (TRBV7-9, TRBJ1-1)
CASSLVRGEAFF

SEQ ID NO: 289423 - protein, 14 aa, Homo sapiens
  CDR3 for alpha chain variable domain of TCR clone 144712 (TRAV1-2, TRAJ8)
CAVREDTGFQKLVF

SEQ ID NO: 289424 - protein, 14 aa, Homo sapiens
  CDR3 for beta chain variable domain of TCR clone 144712 (TRBV15, TRBJ2-3)
CATRRGTSTDTQYF

SEQ ID NO: 289425 - protein, 14 aa, Homo sapiens
  CDR3 for alpha chain variable domain of TCR clone 144713 (TRAV1-2, TRAJ8)
CAVREDTGLQKLVL

SEQ ID NO: 289426 - protein, 13 aa, Homo sapiens
  CDR3 for beta chain variable domain of TCR clone 144713 (TRBV19, TRBJ1-2)
CASSVPGQDGYTF

SEQ ID NO: 289427 - protein, 15 aa, Homo sapiens
  CDR3 for alpha chain variable domain of TCR clone 144714 (TRAV12-1, TRAJ23)
CGERSRCNQGGKLIF

SEQ ID NO: 289428 - protein, 15 aa, Homo sapiens
  CDR3 for beta chain variable domain of TCR clone 144714 (TRBV5-1, TRBJ2-3)
CASSVTSGSTDTQYF

SEQ ID NO: 289429 - protein, 14 aa, Homo sapiens
  CDR3 for alpha chain variable domain of TCR clone 144715 (TRAV38-1, TRAJ40)
CALRPTSGTYKYIF

SEQ ID NO: 289430 - protein, 16 aa, Homo sapiens
  CDR3 for beta chain variable domain of TCR clone 144715 (TRBV12-4, TRBJ1-5)
CASSRPVGGSNQPQHF

SEQ ID NO: 289431 - protein, 13 aa, Homo sapiens
  CDR3 for alpha chain variable domain of TCR clone 144716 (TRAV21, TRAJ37)
CAVSSGNTCKLIF

SEQ ID NO: 289432 - protein, 17 aa, Homo sapiens
  CDR3 for beta chain variable domain of TCR clone 144716 (TRBV5-1, TRBJ2-5)
CSSSLLGLAANQETQYF

SEQ ID NO: 289433 - protein, 12 aa, Homo sapiens
  CDR3 for alpha chain variable domain of TCR clone 144717 (TRAV13-1, TRAJ49)
CAAPNTGNQFYF

SEQ ID NO: 289434 - protein, 17 aa, Homo sapiens
  CDR3 for beta chain variable domain of TCR clone 144717 (TRBV25-1, TRBJ2-7)
CGSSDARVVFSSYEQYF

SEQ ID NO: 289435 - protein, 13 aa, Homo sapiens
  CDR3 for alpha chain variable domain of TCR clone 144718 (TRAV12-1, TRAJ26)
CAVRRNYGQNFVF

SEQ ID NO: 289436 - protein, 14 aa, Homo sapiens
  CDR3 for beta chain variable domain of TCR clone 144718 (TRBV12-4, TRBJ1-1)
CASTWTGHDTEAFF

SEQ ID NO: 289437 - protein, 14 aa, Homo sapiens
  CDR3 for alpha chain variable domain of TCR clone 144719 (TRAV38-2/DV8, TRAJ54)
AAMYQIQGAQKLVF

SEQ ID NO: 289438 - protein, 14 aa, Homo sapiens
  CDR3 for beta chain variable domain of TCR clone 144719 (TRBV4-1, TRBJ2-2)
CASSQAVNTGELFF

SEQ ID NO: 289439 - protein, 14 aa, Homo sapiens
  CDR3 for alpha chain variable domain of TCR clone 144720 (TRAV12-2, TRAJ40)
CAAKIPSGTYKYIF

SEQ ID NO: 289440 - protein, 13 aa, Homo sapiens
  CDR3 for beta chain variable domain of TCR clone 144720 (TRBV7-9, TRBJ1-2)
CASSLKQNYGYTF

SEQ ID NO: 289441 - protein, 14 aa, Homo sapiens
  CDR3 for alpha chain variable domain of TCR clone 144721 (TRAV24, TRAJ16)
CAFPPFSDGQKLLF

SEQ ID NO: 289442 - protein, 12 aa, Homo sapiens
  CDR3 for beta chain variable domain of TCR clone 144721 (TRBV19, TRBJ1-1)
CASTSVGGEAFF

SEQ ID NO: 289443 - protein, 15 aa, Homo sapiens
  CDR3 for alpha chain variable domain of TCR clone 144722 (TRAV3, TRAJ27)
GAVRDPLTNAGKSTF

SEQ ID NO: 289444 - protein, 15 aa, Homo sapiens
  CDR3 for beta chain variable domain of TCR clone 144722 (TRBV28, TRBJ2-1)
CASSIIAGGRSEQFF

SEQ ID NO: 289445 - protein, 15 aa, Homo sapiens
  CDR3 for alpha chain variable domain of TCR clone 144723 (TRAV12-2, TRAJ23)
CAVKPIYNQGGKLIF

SEQ ID NO: 289446 - protein, 15 aa, Homo sapiens
  CDR3 for beta chain variable domain of TCR clone 144723 (TRBV5-1, TRBJ1-2)
CASSLVGGQRQGYTF

SEQ ID NO: 289447 - protein, 13 aa, Homo sapiens
  CDR3 for alpha chain variable domain of TCR clone 144724 (TRAV8-3, TRAJ4)
WPVFSGGYNKLIF

SEQ ID NO: 289448 - protein, 13 aa, Homo sapiens
  CDR3 for beta chain variable domain of TCR clone 144724 (TRBV20-1, TRBJ1-3)
CSAGAYSGNTIYF

SEQ ID NO: 289449 - protein, 13 aa, Homo sapiens
  CDR3 for alpha chain variable domain of TCR clone 144725 (TRAV16, TRAJ22)
SAMLAGSARQLTF

SEQ ID NO: 289450 - protein, 17 aa, Homo sapiens
  CDR3 for beta chain variable domain of TCR clone 144725 (TRBV4-1, TRBJ1-4)
CASSQEGPRGVEEKLFF

SEQ ID NO: 289451 - protein, 15 aa, Homo sapiens
  CDR3 for alpha chain variable domain of TCR clone 144726 (TRAV26-1, TRAJ22)
CIVRVSFWFCKATDL

SEQ ID NO: 289452 - protein, 15 aa, Homo sapiens
  CDR3 for beta chain variable domain of TCR clone 144726 (TRBV20-1, TRBJ1-5)
CSAKPPGQGPQPQHF

SEQ ID NO: 289453 - protein, 18 aa, Homo sapiens
  CDR3 for alpha chain variable domain of TCR clone 144727 (TRAV1-1, TRAJ12)
CLLLLRCERGDSSYKLIF

SEQ ID NO: 289454 - protein, 15 aa, Homo sapiens
  CDR3 for beta chain variable domain of TCR clone 144727 (TRBV18, TRBJ2-5)
CASTDRGPRQGTQYF

SEQ ID NO: 289455 - protein, 13 aa, Homo sapiens
  CDR3 for alpha chain variable domain of TCR clone 144728 (TRAV13-1, TRAJ21)
CAASIYNFSKFYF

SEQ ID NO: 289456 - protein, 20 aa, Homo sapiens
  CDR3 for beta chain variable domain of TCR clone 144728 (TRBV7-8, TRBJ2-2)
CASSHLFPGPTIHITGELFF

SEQ ID NO: 289457 - protein, 12 aa, Homo sapiens
  CDR3 for alpha chain variable domain of TCR clone 144729 (TRAV12-1, TRAJ40)
CVVYSGTYKYIF

SEQ ID NO: 289458 - protein, 16 aa, Homo sapiens
  CDR3 for beta chain variable domain of TCR clone 144729 (TRBV28, TRBJ1-5)
CASSLTGQGWNQPQHF

SEQ ID NO: 289459 - protein, 15 aa, Homo sapiens
  CDR3 for alpha chain variable domain of TCR clone 144730 (TRAV2, TRAJ22)
CAVPSRGGSARQLTF

SEQ ID NO: 289460 - protein, 11 aa, Homo sapiens
  CDR3 for beta chain variable domain of TCR clone 144730 (TRBV27, TRBJ2-3)
CASSLGDTHYF

SEQ ID NO: 289461 - protein, 13 aa, Homo sapiens
  CDR3 for alpha chain variable domain of TCR clone 144731 (TRAV13-1, TRAJ6)
CAASKGGSYIPTF

SEQ ID NO: 289462 - protein, 14 aa, Homo sapiens
  CDR3 for beta chain variable domain of TCR clone 144731 (TRBV7-2, TRBJ2-1)
CASSLGVGYNSSSS

SEQ ID NO: 289463 - protein, 13 aa, Homo sapiens
  CDR3 for alpha chain variable domain of TCR clone 144732 (TRAV1-2, TRAJ9)
CAALNTGGFKTIF

SEQ ID NO: 289464 - protein, 16 aa, Homo sapiens
  CDR3 for beta chain variable domain of TCR clone 144732 (TRBV2, TRBJ1-4)
CASNLLQGATNEKLFF

SEQ ID NO: 289465 - protein, 13 aa, Homo sapiens
  CDR3 for alpha chain variable domain of TCR clone 144733 (TRAV17, TRAJ26)
CATVDNYGQNFVF

SEQ ID NO: 289466 - protein, 15 aa, Homo sapiens
  CDR3 for beta chain variable domain of TCR clone 144733 (TRBV9, TRBJ1-6)
CASSVAGTGDSPLDF

SEQ ID NO: 289467 - protein, 17 aa, Homo sapiens
  CDR3 for alpha chain variable domain of TCR clone 144734 (TRAV3, TRAJ42)
CAVRDRDYGGSQGNLIF

SEQ ID NO: 289468 - protein, 19 aa, Homo sapiens
  CDR3 for beta chain variable domain of TCR clone 144734 (TRBV25-1, TRBJ2-2)
CAILVYRVDRGRKTGELFF

SEQ ID NO: 289469 - protein, 16 aa, Homo sapiens
  CDR3 for alpha chain variable domain of TCR clone 144735 (TRAV3, TRAJ18)
FAVRDGRGSTLGRLYF

SEQ ID NO: 289470 - protein, 17 aa, Homo sapiens
  CDR3 for beta chain variable domain of TCR clone 144735 (TRBV5-1, TRBJ2-3)
CASSKIGLADRTDTQYF

SEQ ID NO: 289471 - protein, 13 aa, Homo sapiens
  CDR3 for alpha chain variable domain of TCR clone 144736 (TRAV21, TRAJ37)
CSVSSGNTGKLIF

SEQ ID NO: 289472 - protein, 17 aa, Homo sapiens
  CDR3 for beta chain variable domain of TCR clone 144736 (TRBV5-1, TRBJ2-5)
CASSLLGLAANQETQYF

SEQ ID NO: 289473 - protein, 19 aa, Homo sapiens
  CDR3 for alpha chain variable domain of TCR clone 144737 (TRAV21, TRAJ20)
SLVTQPPTSVLPNDYKLSF

SEQ ID NO: 289474 - protein, 14 aa, Homo sapiens
  CDR3 for beta chain variable domain of TCR clone 144737 (TRBV19, TRBJ2-7)
CASSMGQGAIEQYF

SEQ ID NO: 289475 - protein, 12 aa, Homo sapiens
  CDR3 for alpha chain variable domain of TCR clone 144738 (TRAV3, TRAJ20)
CAVRDPDYKLRF

SEQ ID NO: 289476 - protein, 13 aa, Homo sapiens
  CDR3 for beta chain variable domain of TCR clone 144738 (TRBV19, TRBJ1-2)
CASSVPGQDGYTF

SEQ ID NO: 289477 - protein, 16 aa, Homo sapiens
  CDR3 for alpha chain variable domain of TCR clone 144739 (TRAV30, TRAJ24)
CGTEIVDADSGGKFQF

SEQ ID NO: 289478 - protein, 13 aa, Homo sapiens
  CDR3 for beta chain variable domain of TCR clone 144739 (TRBV19, TRBJ1-2)
CASSVPGQDGYTF

SEQ ID NO: 289479 - protein, 16 aa, Homo sapiens
  CDR3 for alpha chain variable domain of TCR clone 144740 (TRAV1-2, TRAJ10)
CAVRGVLTGGGNKLTF

SEQ ID NO: 289480 - protein, 16 aa, Homo sapiens
  CDR3 for beta chain variable domain of TCR clone 144740 (TRBV7-9, TRBJ2-1)
CASSDVAGGSYNEQFF

SEQ ID NO: 289481 - protein, 13 aa, Homo sapiens
  CDR3 for alpha chain variable domain of TCR clone 144741 (TRAV12-3, TRAJ33)
CAMRAGSNYQLIW

SEQ ID NO: 289482 - protein, 16 aa, Homo sapiens
  CDR3 for beta chain variable domain of TCR clone 144741 (TRBV11-2, TRBJ1-2)
CASSLDTGGADYGYTF

SEQ ID NO: 289483 - protein, 16 aa, Homo sapiens
  CDR3 for alpha chain variable domain of TCR clone 144742 (TRAV13-2, TRAJ28)
CAEKSYSGAGSYQLTF

SEQ ID NO: 289484 - protein, 16 aa, Homo sapiens
  CDR3 for beta chain variable domain of TCR clone 144742 (TRBV19, TRBJ2-1)
YASSKAGPSSYNEQFF

SEQ ID NO: 289485 - protein, 12 aa, Homo sapiens
  CDR3 for alpha chain variable domain of TCR clone 144743 (TRAV21, TRAJ33)
CAIQDSNYQLIW

SEQ ID NO: 289486 - protein, 14 aa, Homo sapiens
  CDR3 for beta chain variable domain of TCR clone 144743 (TRBV28, TRBJ2-1)
CASSPGEGGNEQFF

SEQ ID NO: 289487 - protein, 14 aa, Homo sapiens
  CDR3 for alpha chain variable domain of TCR clone 144744 (TRAV27, TRAJ36)
CAGPPKRGAKNLFF

SEQ ID NO: 289488 - protein, 15 aa, Homo sapiens
  CDR3 for beta chain variable domain of TCR clone 144744 (TRBV18, TRBJ2-7)
CASSPASTPNYEQYF

SEQ ID NO: 289489 - protein, 16 aa, Homo sapiens
  CDR3 for alpha chain variable domain of TCR clone 144745 (TRAV23/DV6, TRAJ9)
CAASIGGNTGGFKTIF

SEQ ID NO: 289490 - protein, 15 aa, Homo sapiens
  CDR3 for beta chain variable domain of TCR clone 144745 (TRBV6-3, TRBJ2-7)
CASSSPGTVPYEQYF

SEQ ID NO: 289491 - protein, 12 aa, Homo sapiens
  CDR3 for alpha chain variable domain of TCR clone 144746 (TRAV12-3, TRAJ17)
CAMTITGNKLTF

SEQ ID NO: 289492 - protein, 16 aa, Homo sapiens
  CDR3 for beta chain variable domain of TCR clone 144746 (TRBV19, TRBJ2-1)
CASSKAGPSSYNEQFF

SEQ ID NO: 289493 - protein, 12 aa, Homo sapiens
  CDR3 for alpha chain variable domain of TCR clone 144747 (TRAV12-2, TRAJ21)
CAPSDNFNKFYF

SEQ ID NO: 289494 - protein, 13 aa, Homo sapiens
  CDR3 for beta chain variable domain of TCR clone 144747 (TRBV12-5, TRBJ2-3)
CASGDRQSDTQYF

SEQ ID NO: 289495 - protein, 15 aa, Homo sapiens
  CDR3 for alpha chain variable domain of TCR clone 144748 (TRAV23/DV6, TRAJ45)
CAAKNGGGGADGLTF

SEQ ID NO: 289496 - protein, 12 aa, Homo sapiens
  CDR3 for beta chain variable domain of TCR clone 144748 (TRBV5-1, TRBJ2-5)
CASSFSWETQYF

SEQ ID NO: 289497 - protein, 14 aa, Homo sapiens
  CDR3 for alpha chain variable domain of TCR clone 144749 (TRAV3, TRAJ33)
CAARDMDSNYQLIW

SEQ ID NO: 289498 - protein, 17 aa, Homo sapiens
  CDR3 for beta chain variable domain of TCR clone 144749 (TRBV7-3, TRBJ1-2)
CASSFPQGNDGELWLHL

SEQ ID NO: 289499 - protein, 12 aa, Homo sapiens
  CDR3 for alpha chain variable domain of TCR clone 144750 (TRAV27, TRAJ35)
CAGADFGNVLHC

SEQ ID NO: 289500 - protein, 14 aa, Homo sapiens
  CDR3 for beta chain variable domain of TCR clone 144750 (TRBV20-1, TRBJ2-4)
CSASGRVGENIQYF

SEQ ID NO: 289501 - protein, 13 aa, Homo sapiens
  CDR3 for alpha chain variable domain of TCR clone 144751 (TRAV13-1, TRAJ39)
CAASIVMQATCSP

SEQ ID NO: 289502 - protein, 16 aa, Homo sapiens
  CDR3 for beta chain variable domain of TCR clone 144751 (TRBV20-1, TRBJ1-4)
CSATGQGLLTNEKLFF

SEQ ID NO: 289503 - protein, 15 aa, Homo sapiens
  CDR3 for alpha chain variable domain of TCR clone 144752 (TRAV23/DV6, TRAJ4)
CAASPLRGGSNKLIF

SEQ ID NO: 289504 - protein, 15 aa, Homo sapiens
  CDR3 for beta chain variable domain of TCR clone 144752 (TRBV7-9, TRBJ1-6)
CASSSPGRGNSPLHF

SEQ ID NO: 289505 - protein, 16 aa, Homo sapiens
  CDR3 for alpha chain variable domain of TCR clone 144753 (TRAV3, TRAJ37)
CAVRGKGSGNTGKLIF

SEQ ID NO: 289506 - protein, 17 aa, Homo sapiens
  CDR3 for beta chain variable domain of TCR clone 144753 (TRBV24-1, TRBJ2-4)
CATSDAEARGVRNIQYF

SEQ ID NO: 289507 - protein, 14 aa, Homo sapiens
  CDR3 for alpha chain variable domain of TCR clone 144754 (TRAV1-2, TRAJ16)
CAVNRFSDGQKLLF

SEQ ID NO: 289508 - protein, 13 aa, Homo sapiens
  CDR3 for beta chain variable domain of TCR clone 144754 (TRBV15, TRBJ2-1)
CATSGRLANEQFF

SEQ ID NO: 289509 - protein, 10 aa, Homo sapiens
  CDR3 for alpha chain variable domain of TCR clone 144755 (TRAV13-1, TRAJ26)
CAPYGQNFVF

SEQ ID NO: 289510 - protein, 13 aa, Homo sapiens
  CDR3 for beta chain variable domain of TCR clone 144755 (TRBV20-1, TRBJ2-2)
CSALSGGAGELFF

SEQ ID NO: 289511 - protein, 14 aa, Homo sapiens
  CDR3 for alpha chain variable domain of TCR clone 144756 (TRAV12-2, TRAJ6)
CASKWGGGSYIPTF

SEQ ID NO: 289512 - protein, 15 aa, Homo sapiens
  CDR3 for beta chain variable domain of TCR clone 144756 (TRBV9, TRBJ2-1)
CASSLAGSSYNEQFF

SEQ ID NO: 289513 - protein, 17 aa, Homo sapiens
  CDR3 for alpha chain variable domain of TCR clone 144757 (TRAV27, TRAJ52)
CAGAGWACGTSYGKLTF

SEQ ID NO: 289514 - protein, 16 aa, Homo sapiens
  CDR3 for beta chain variable domain of TCR clone 144757 (TRBV19, TRBJ2-1)
CASSKAGPSSYNEQFF

SEQ ID NO: 289515 - protein, 12 aa, Homo sapiens
  CDR3 for alpha chain variable domain of TCR clone 144758 (TRAV27, TRAJ21)
CAGVRQLQQILL

SEQ ID NO: 289516 - protein, 16 aa, Homo sapiens
  CDR3 for beta chain variable domain of TCR clone 144758 (TRBV7-9, TRBJ1-4)
CASSLEGQSGKLFLAV

SEQ ID NO: 289517 - protein, 12 aa, Homo sapiens
  CDR3 for alpha chain variable domain of TCR clone 144759 (TRAV35, TRAJ12)
CAGMDSSYKLIS

SEQ ID NO: 289518 - protein, 14 aa, Homo sapiens
  CDR3 for beta chain variable domain of TCR clone 144759 (TRBV28, TRBJ2-5)
CASSLYRGTETQYF

SEQ ID NO: 289519 - protein, 15 aa, Homo sapiens
  CDR3 for alpha chain variable domain of TCR clone 144760 (TRAV8-6, TRAJ10)
CAVSSKGGGGNKLTF

SEQ ID NO: 289520 - protein, 15 aa, Homo sapiens
  CDR3 for beta chain variable domain of TCR clone 144760 (TRBV2, TRBJ2-7)
CASSEGLARSYEQYF

SEQ ID NO: 289521 - protein, 17 aa, Homo sapiens
  CDR3 for alpha chain variable domain of TCR clone 144761 (TRAV23/DV6, TRAJ58)
CAARLLRGETSGSMLTF

SEQ ID NO: 289522 - protein, 14 aa, Homo sapiens
  CDR3 for beta chain variable domain of TCR clone 144761 (TRBV2, TRBJ2-7)
CASSLTSGGYEQYF

SEQ ID NO: 289523 - protein, 15 aa, Homo sapiens
  CDR3 for alpha chain variable domain of TCR clone 144762 (TRAV3, TRAJ5)
CAVRDRDTGRRALTF

SEQ ID NO: 289524 - protein, 15 aa, Homo sapiens
  CDR3 for beta chain variable domain of TCR clone 144762 (TRBV20-1, TRBJ2-1)
CSARSPGGPGNEQFF

SEQ ID NO: 289525 - protein, 12 aa, Homo sapiens
  CDR3 for alpha chain variable domain of TCR clone 144763 (TRAV8-3, TRAJ26)
CAGDNYDQNFVF

SEQ ID NO: 289526 - protein, 13 aa, Homo sapiens
  CDR3 for beta chain variable domain of TCR clone 144763 (TRBV10-3, TRBJ2-7)
CASKLAVNYEQYF

SEQ ID NO: 289527 - protein, 12 aa, Homo sapiens
  CDR3 for alpha chain variable domain of TCR clone 144764 (TRAV23/DV6, TRAJ17)
CARGSCRQQLNF

SEQ ID NO: 289528 - protein, 14 aa, Homo sapiens
  CDR3 for beta chain variable domain of TCR clone 144764 (TRBV7-2, TRBJ1-2)
CASSQTGSTYGYTF

SEQ ID NO: 289529 - protein, 13 aa, Homo sapiens
  CDR3 for alpha chain variable domain of TCR clone 144765 (TRAV27, TRAJ49)
CSPRPYTGNKFYF

SEQ ID NO: 289530 - protein, 16 aa, Homo sapiens
  CDR3 for beta chain variable domain of TCR clone 144765 (TRBV4-1, TRBJ1-2)
CASSQDAGQVLYGYTF

SEQ ID NO: 289531 - protein, 10 aa, Homo sapiens
  CDR3 for alpha chain variable domain of TCR clone 144766 (TRAV8-4, TRAJ43)
CAVSADDMRF

SEQ ID NO: 289532 - protein, 16 aa, Homo sapiens
  CDR3 for beta chain variable domain of TCR clone 144766 (TRBV12-5, TRBJ2-5)
CASGPRTSGNQETQYV

SEQ ID NO: 289533 - protein, 15 aa, Homo sapiens
  CDR3 for alpha chain variable domain of TCR clone 144767 (TRAV12-1, TRAJ4)
CVVNPFSGGYNKLIF

SEQ ID NO: 289534 - protein, 16 aa, Homo sapiens
  CDR3 for beta chain variable domain of TCR clone 144767 (TRBV5-1, TRBJ1-1)
CASSKTGTEVGTEEFF

SEQ ID NO: 289535 - protein, 16 aa, Homo sapiens
  CDR3 for alpha chain variable domain of TCR clone 144768 (TRAV20, TRAJ22)
CAVQASSSGSPRQLTF

SEQ ID NO: 289536 - protein, 13 aa, Homo sapiens
  CDR3 for beta chain variable domain of TCR clone 144768 (TRBV7-2, TRBJ2-5)
CASSQTSVETQYF

SEQ ID NO: 289537 - protein, 14 aa, Homo sapiens
  CDR3 for alpha chain variable domain of TCR clone 144769 (TRAV2, TRAJ9)
CAVEDRSGGFTTIF

SEQ ID NO: 289538 - protein, 16 aa, Homo sapiens
  CDR3 for beta chain variable domain of TCR clone 144769 (TRBV20-1, TRBJ2-3)
CSAVRDRGPIADTQYF

SEQ ID NO: 289539 - protein, 17 aa, Homo sapiens
  CDR3 for alpha chain variable domain of TCR clone 144770 (TRAV3, TRAJ6)
CAVRDVPRAGGSYIPTF

SEQ ID NO: 289540 - protein, 15 aa, Homo sapiens
  CDR3 for beta chain variable domain of TCR clone 144770 (TRBV7-6, TRBJ2-3)
CASSPIIYSTDTQYF

SEQ ID NO: 289541 - protein, 15 aa, Homo sapiens
  CDR3 for alpha chain variable domain of TCR clone 144771 (TRAV2, TRAJ24)
CAVVRLKNSWGKLQF

SEQ ID NO: 289542 - protein, 17 aa, Homo sapiens
  CDR3 for beta chain variable domain of TCR clone 144771 (TRBV13, TRBJ2-3)
CPSSLSRVAGGRNTQYF

SEQ ID NO: 289543 - protein, 14 aa, Homo sapiens
  CDR3 for alpha chain variable domain of TCR clone 144772 (TRAV12-3, TRAJ10)
SHLPLTGGGNKLTF

SEQ ID NO: 289544 - protein, 11 aa, Homo sapiens
  CDR3 for beta chain variable domain of TCR clone 144772 (TRBV6-3, TRBJ2-3)
CAAGQADTQYF

SEQ ID NO: 289545 - protein, 10 aa, Homo sapiens
  CDR3 for alpha chain variable domain of TCR clone 144773 (TRAV3, TRAJ30)
CAVREIEIIF

SEQ ID NO: 289546 - protein, 12 aa, Homo sapiens
  CDR3 for beta chain variable domain of TCR clone 144773 (TRBV20-1, TRBJ2-3)
CSAEGAGDTQYF

SEQ ID NO: 289547 - protein, 12 aa, Homo sapiens
  CDR3 for alpha chain variable domain of TCR clone 144774 (TRAV12-3, TRAJ17)
CAMTLTGNKLTF

SEQ ID NO: 289548 - protein, 15 aa, Homo sapiens
  CDR3 for beta chain variable domain of TCR clone 144774 (TRBV20-1, TRBJ2-7)
CVARDRVSGMDEQYF

SEQ ID NO: 289549 - protein, 17 aa, Homo sapiens
  CDR3 for alpha chain variable domain of TCR clone 144775 (TRAV4, TRAJ22)
CCVLLPRGGGSARHLTF

SEQ ID NO: 289550 - protein, 14 aa, Homo sapiens
  CDR3 for beta chain variable domain of TCR clone 144775 (TRBV20-1, TRBJ1-1)
CSARAVNGYTEAFF

SEQ ID NO: 289551 - protein, 12 aa, Homo sapiens
  CDR3 for alpha chain variable domain of TCR clone 144776 (TRAV8-2, TRAJ45)
CVQGGGADGPTF

SEQ ID NO: 289552 - protein, 15 aa, Homo sapiens
  CDR3 for beta chain variable domain of TCR clone 144776 (TRBV19, TRBJ1-1)
CASSIRRQMNTEAFF

SEQ ID NO: 289553 - protein, 16 aa, Homo sapiens
  CDR3 for alpha chain variable domain of TCR clone 144777 (TRAV8-1, TRAJ42)
CAVTSRNGGSQGNLIF

SEQ ID NO: 289554 - protein, 12 aa, Homo sapiens
  CDR3 for beta chain variable domain of TCR clone 144777 (TRBV6-3, TRBJ2-7)
CASSLGRRGLYF

SEQ ID NO: 289555 - protein, 11 aa, Homo sapiens
  CDR3 for alpha chain variable domain of TCR clone 144778 (TRAV35, TRAJ30)
CAGLRDDKIIF

SEQ ID NO: 289556 - protein, 14 aa, Homo sapiens
  CDR3 for beta chain variable domain of TCR clone 144778 (TRBV25-1, TRBJ1-1)
CASTHLGGNTEAFF

SEQ ID NO: 289557 - protein, 12 aa, Homo sapiens
  CDR3 for alpha chain variable domain of TCR clone 144779 (TRAV13-1, TRAJ5)
CAAKAGRRALTF

SEQ ID NO: 289558 - protein, 15 aa, Homo sapiens
  CDR3 for beta chain variable domain of TCR clone 144779 (TRBV18, TRBJ2-1)
CASLPDRGRDNEQFF

SEQ ID NO: 289559 - protein, 14 aa, Homo sapiens
  CDR3 for alpha chain variable domain of TCR clone 144780 (TRAV13-1, TRAJ4)
RAATLPSGYNKLIF

SEQ ID NO: 289560 - protein, 14 aa, Homo sapiens
  CDR3 for beta chain variable domain of TCR clone 144780 (TRBV19, TRBJ2-1)
CASPTFVLSGEQFF

SEQ ID NO: 289561 - protein, 15 aa, Homo sapiens
  CDR3 for alpha chain variable domain of TCR clone 144781 (TRAV26-1, TRAJ39)
CIVRDGSNAGNMLTF

SEQ ID NO: 289562 - protein, 14 aa, Homo sapiens
  CDR3 for beta chain variable domain of TCR clone 144781 (TRBV10-3, TRBJ1-2)
CAIRAGTGDYGYAF

SEQ ID NO: 289563 - protein, 14 aa, Homo sapiens
  CDR3 for alpha chain variable domain of TCR clone 144782 (TRAV1-2, TRAJ8)
CAVREDTGFQKLVF

SEQ ID NO: 289564 - protein, 15 aa, Homo sapiens
  CDR3 for beta chain variable domain of TCR clone 144782 (TRBV7-9, TRBJ2-2)
CASGTLDTFPGELFF

SEQ ID NO: 289565 - protein, 12 aa, Homo sapiens
  CDR3 for alpha chain variable domain of TCR clone 144783 (TRAV12-3, TRAJ17)
CAVTLTGNKLTF

SEQ ID NO: 289566 - protein, 15 aa, Homo sapiens
  CDR3 for beta chain variable domain of TCR clone 144783 (TRBV12-4, TRBJ2-5)
CASSTPTGLQETQYF

SEQ ID NO: 289567 - protein, 15 aa, Homo sapiens
  CDR3 for alpha chain variable domain of TCR clone 144784 (TRAV26-1, TRAJ4)
CIVRRISGGYNKLIF

SEQ ID NO: 289568 - protein, 15 aa, Homo sapiens
  CDR3 for beta chain variable domain of TCR clone 144784 (TRBV5-1, TRBJ2-7)
CASSLRGTRSYEQYF

SEQ ID NO: 289569 - protein, 15 aa, Homo sapiens
  CDR3 for alpha chain variable domain of TCR clone 144785 (TRAV8-3, TRAJ45)
CASSYSGGGADGLTF

SEQ ID NO: 289570 - protein, 13 aa, Homo sapiens
  CDR3 for beta chain variable domain of TCR clone 144785 (TRBV14, TRBJ2-7)
CASSQDRRYEQYF

SEQ ID NO: 289571 - protein, 15 aa, Homo sapiens
  CDR3 for alpha chain variable domain of TCR clone 144786 (TRAV1-2, TRAJ12)
CADARWMDSSYQLTF

SEQ ID NO: 289572 - protein, 11 aa, Homo sapiens
  CDR3 for beta chain variable domain of TCR clone 144786 (TRBV29-1, TRBJ2-5)
CSEDRTGTQYF

SEQ ID NO: 289573 - protein, 12 aa, Homo sapiens
  CDR3 for alpha chain variable domain of TCR clone 144787 (TRAV13-1, TRAJ21)
CAAKEGFNKFYF

SEQ ID NO: 289574 - protein, 14 aa, Homo sapiens
  CDR3 for beta chain variable domain of TCR clone 144787 (TRBV5-4, TRBJ1-1)
CASSLDNRRDEAFF

SEQ ID NO: 289575 - protein, 15 aa, Homo sapiens
  CDR3 for alpha chain variable domain of TCR clone 144788 (TRAV8-4, TRAJ3)
CAVTGESLVQQCFQD

SEQ ID NO: 289576 - protein, 13 aa, Homo sapiens
  CDR3 for beta chain variable domain of TCR clone 144788 (TRBV7-3, TRBJ1-1)
CASSQDWGAEAFF

SEQ ID NO: 289577 - protein, 15 aa, Homo sapiens
  CDR3 for alpha chain variable domain of TCR clone 144789 (TRAV3, TRAJ22)
CAVRDRGGSARQLTF

SEQ ID NO: 289578 - protein, 18 aa, Homo sapiens
  CDR3 for beta chain variable domain of TCR clone 144789 (TRBV11-2, TRBJ2-3)
CASSLGGASRGAPNTQYF

SEQ ID NO: 289579 - protein, 14 aa, Homo sapiens
  CDR3 for alpha chain variable domain of TCR clone 144790 (TRAV8-3, TRAJ36)
CAVGPITGANNLFF

SEQ ID NO: 289580 - protein, 15 aa, Homo sapiens
  CDR3 for beta chain variable domain of TCR clone 144790 (TRBV4-1, TRBJ2-1)
CASSQDPGNYSEQFF

SEQ ID NO: 289581 - protein, 17 aa, Homo sapiens
  CDR3 for alpha chain variable domain of TCR clone 144791 (TRAV16, TRAJ42)
CALGPKLYGGSQGNLIC

SEQ ID NO: 289582 - protein, 13 aa, Homo sapiens
  CDR3 for beta chain variable domain of TCR clone 144791 (TRBV19, TRBJ1-5)
CASSTRRDQPQHF

SEQ ID NO: 289583 - protein, 14 aa, Homo sapiens
  CDR3 for alpha chain variable domain of TCR clone 144792 (TRAV35, TRAJ46)
CAGPQKSSGDKLTF

SEQ ID NO: 289584 - protein, 12 aa, Homo sapiens
  CDR3 for beta chain variable domain of TCR clone 144792 (TRBV7-9, TRBJ2-7)
CASSLEGYEQYF

SEQ ID NO: 289585 - protein, 13 aa, Homo sapiens
  CDR3 for alpha chain variable domain of TCR clone 144793 (TRAV8-3, TRAJ47)
CSVSMEYGNKLVF

SEQ ID NO: 289586 - protein, 14 aa, Homo sapiens
  CDR3 for beta chain variable domain of TCR clone 144793 (TRBV2, TRBJ1-5)
CASSGTGFNQPQHF

SEQ ID NO: 289587 - protein, 14 aa, Homo sapiens
  CDR3 for alpha chain variable domain of TCR clone 144794 (TRAV20, TRAJ42)
CAVQARGSQGNLIF

SEQ ID NO: 289588 - protein, 14 aa, Homo sapiens
  CDR3 for beta chain variable domain of TCR clone 144794 (TRBV20-1, TRBJ2-7)
CSAWTALSSYEQYF

SEQ ID NO: 289589 - protein, 16 aa, Homo sapiens
  CDR3 for alpha chain variable domain of TCR clone 144795 (TRAV17, TRAJ52)
CATSNAGGTSYGKLTF

SEQ ID NO: 289590 - protein, 13 aa, Homo sapiens
  CDR3 for beta chain variable domain of TCR clone 144795 (TRBV2, TRBJ2-5)
CASGTPYQETQYF

SEQ ID NO: 289591 - protein, 14 aa, Homo sapiens
  CDR3 for alpha chain variable domain of TCR clone 144796 (TRAV12-3, TRAJ10)
SHLPLTGGGSKLTF

SEQ ID NO: 289592 - protein, 13 aa, Homo sapiens
  CDR3 for beta chain variable domain of TCR clone 144796 (TRBV20-1, TRBJ2-1)
CSASTGTSNEQFF

SEQ ID NO: 289593 - protein, 15 aa, Homo sapiens
  CDR3 for alpha chain variable domain of TCR clone 144797 (TRAV12-3, TRAJ6)
CAMSATTGGSYIPTF

SEQ ID NO: 289594 - protein, 16 aa, Homo sapiens
  CDR3 for beta chain variable domain of TCR clone 144797 (TRBV7-8, TRBJ2-5)
CASSFGGQPAQETQYF

SEQ ID NO: 289595 - protein, 14 aa, Homo sapiens
  CDR3 for alpha chain variable domain of TCR clone 144798 (TRAV8-3, TRAJ4)
CAVGASGGYNKLIF

SEQ ID NO: 289596 - protein, 16 aa, Homo sapiens
  CDR3 for beta chain variable domain of TCR clone 144798 (TRBV4-3, TRBJ2-2)
CPSSHLQGSGTGELFF

SEQ ID NO: 289597 - protein, 15 aa, Homo sapiens
  CDR3 for alpha chain variable domain of TCR clone 144799 (TRAV8-3, TRAJ45)
CASSYSGGGADGLTF

SEQ ID NO: 289598 - protein, 14 aa, Homo sapiens
  CDR3 for beta chain variable domain of TCR clone 144799 (TRBV9, TRBJ1-2)
CASSVSTRSYGYTF

SEQ ID NO: 289599 - protein, 13 aa, Homo sapiens
  CDR3 for alpha chain variable domain of TCR clone 144800 (TRAV23/DV6, TRAJ15)
CSKLHQAGTALIF

SEQ ID NO: 289600 - protein, 14 aa, Homo sapiens
  CDR3 for beta chain variable domain of TCR clone 144800 (TRBV7-2, TRBJ2-2)
CASRGQGAAGELFF

SEQ ID NO: 289601 - protein, 16 aa, Homo sapiens
  CDR3 for alpha chain variable domain of TCR clone 144801 (TRAV12-3, TRAJ53)
CAMSPVSGGSNYNLTF

SEQ ID NO: 289602 - protein, 11 aa, Homo sapiens
  CDR3 for beta chain variable domain of TCR clone 144801 (TRBV29-1, TRBJ2-5)
CSEDRTGTQYF

SEQ ID NO: 289603 - protein, 18 aa, Homo sapiens
  CDR3 for alpha chain variable domain of TCR clone 144802 (TRAV21, TRAJ52)
GAVRPSPAGGTSYGKLTF

SEQ ID NO: 289604 - protein, 19 aa, Homo sapiens
  CDR3 for beta chain variable domain of TCR clone 144802 (TRBV7-2, TRBJ2-3)
CASSFLSRNWGGGTDTQYF

SEQ ID NO: 289605 - protein, 12 aa, Homo sapiens
  CDR3 for alpha chain variable domain of TCR clone 144803 (TRAV29/DV5, TRAJ49)
CVATDTGNQFYF

SEQ ID NO: 289606 - protein, 13 aa, Homo sapiens
  CDR3 for beta chain variable domain of TCR clone 144803 (TRBV7-3, TRBJ1-1)
CASSQDWGAEAFF

SEQ ID NO: 289607 - protein, 12 aa, Homo sapiens
  CDR3 for alpha chain variable domain of TCR clone 144804 (TRAV27, TRAJ11)
CAGASGYSTLTF

SEQ ID NO: 289608 - protein, 14 aa, Homo sapiens
  CDR3 for beta chain variable domain of TCR clone 144804 (TRBV7-6, TRBJ2-3)
CASSVAGGTDTQYF

SEQ ID NO: 289609 - protein, 14 aa, Homo sapiens
  CDR3 for alpha chain variable domain of TCR clone 144805 (TRAV12-2, TRAJ40)
CAVKIPSGTYKYTF

SEQ ID NO: 289610 - protein, 14 aa, Homo sapiens
  CDR3 for beta chain variable domain of TCR clone 144805 (TRBV20-1, TRBJ1-1)
CSEQTRIGGTEAFF

SEQ ID NO: 289611 - protein, 13 aa, Homo sapiens
  CDR3 for alpha chain variable domain of TCR clone 144806 (TRAV2, TRAJ15)
CAVASQAGTALIF

SEQ ID NO: 289612 - protein, 16 aa, Homo sapiens
  CDR3 for beta chain variable domain of TCR clone 144806 (TRBV12-5, TRBJ2-5)
CASGPRTRGNQETQYF

SEQ ID NO: 289613 - protein, 14 aa, Homo sapiens
  CDR3 for alpha chain variable domain of TCR clone 144807 (TRAV12-2, TRAJ13)
CAVKKTGGHQKVTF

SEQ ID NO: 289614 - protein, 13 aa, Homo sapiens
  CDR3 for beta chain variable domain of TCR clone 144807 (TRBV20-1, TRBJ1-1)
CSARGGGNTEAFF

SEQ ID NO: 289615 - protein, 14 aa, Homo sapiens
  CDR3 for alpha chain variable domain of TCR clone 144808 (TRAV8-2, TRAJ4)
CVVSPSGGYNKLIF

SEQ ID NO: 289616 - protein, 16 aa, Homo sapiens
  CDR3 for beta chain variable domain of TCR clone 144808 (TRBV11-2, TRBJ2-7)
CASSTVTAPKTYEQYF

SEQ ID NO: 289617 - protein, 13 aa, Homo sapiens
  CDR3 for alpha chain variable domain of TCR clone 144809 (TRAV29/DV5, TRAJ47)
CAASAKYGNKLVF

SEQ ID NO: 289618 - protein, 15 aa, Homo sapiens
  CDR3 for beta chain variable domain of TCR clone 144809 (TRBV7-9, TRBJ1-4)
CASSARTGGNDKLFF

SEQ ID NO: 289619 - protein, 15 aa, Homo sapiens
  CDR3 for alpha chain variable domain of TCR clone 144810 (TRAV27, TRAJ38)
CAARRNAGNNRKPIW

SEQ ID NO: 289620 - protein, 17 aa, Homo sapiens
  CDR3 for beta chain variable domain of TCR clone 144810 (TRBV13, TRBJ2-3)
CASSLSRVAGGRNTQYF

SEQ ID NO: 289621 - protein, 13 aa, Homo sapiens
  CDR3 for alpha chain variable domain of TCR clone 144811 (TRAV13-2, TRAJ48)
CAEMDFGNGKLTF

SEQ ID NO: 289622 - protein, 15 aa, Homo sapiens
  CDR3 for beta chain variable domain of TCR clone 144811 (TRBV7-9, TRBJ1-6)
CASSPPGRGNSPLHF

SEQ ID NO: 289623 - protein, 12 aa, Homo sapiens
  CDR3 for alpha chain variable domain of TCR clone 144812 (TRAV12-2, TRAJ10)
WGITGGGNKLTF

SEQ ID NO: 289624 - protein, 14 aa, Homo sapiens
  CDR3 for beta chain variable domain of TCR clone 144812 (TRBV7-6, TRBJ2-3)
CASSVAGGTDTQYF

SEQ ID NO: 289625 - protein, 16 aa, Homo sapiens
  CDR3 for alpha chain variable domain of TCR clone 144813 (TRAV3, TRAJ42)
CAVRGIEGGSQGNLIF

SEQ ID NO: 289626 - protein, 14 aa, Homo sapiens
  CDR3 for beta chain variable domain of TCR clone 144813 (TRBV18, TRBJ1-1)
CASSPPTGRTEAFF

SEQ ID NO: 289627 - protein, 13 aa, Homo sapiens
  CDR3 for alpha chain variable domain of TCR clone 144814 (TRAV17, TRAJ22)
CAHLSGSARQLTF

SEQ ID NO: 289628 - protein, 14 aa, Homo sapiens
  CDR3 for beta chain variable domain of TCR clone 144814 (TRBV16, TRBJ1-1)
CASSQAGPNTEAFF

SEQ ID NO: 289629 - protein, 14 aa, Homo sapiens
  CDR3 for alpha chain variable domain of TCR clone 144815 (TRAV29/DV5, TRAJ32)
CAAAYGGAKNKLIF

SEQ ID NO: 289630 - protein, 14 aa, Homo sapiens
  CDR3 for beta chain variable domain of TCR clone 144815 (TRBV20-1, TRBJ1-1)
CSAQTRIGGTEAFF

SEQ ID NO: 289631 - protein, 12 aa, Homo sapiens
  CDR3 for alpha chain variable domain of TCR clone 144816 (TRAV16, TRAJ15)
CARWQAGTALIF

SEQ ID NO: 289632 - protein, 14 aa, Homo sapiens
  CDR3 for beta chain variable domain of TCR clone 144816 (TRBV19, TRBJ2-1)
CASPTFVLSGEQFF

SEQ ID NO: 289633 - protein, 16 aa, Homo sapiens
  CDR3 for alpha chain variable domain of TCR clone 144817 (TRAV3, TRAJ10)
CAVRDMRAGGGNKLTF

SEQ ID NO: 289634 - protein, 13 aa, Homo sapiens
  CDR3 for beta chain variable domain of TCR clone 144817 (TRBV18, TRBJ2-5)
CASSLQGQETQYF

SEQ ID NO: 289635 - protein, 14 aa, Homo sapiens
  CDR3 for alpha chain variable domain of TCR clone 144818 (TRAV35, TRAJ40)
CAGSTSSGTYKYIF

SEQ ID NO: 289636 - protein, 13 aa, Homo sapiens
  CDR3 for beta chain variable domain of TCR clone 144818 (TRBV20-1, TRBJ1-6)
CSAPLGVGSPLHF

SEQ ID NO: 289637 - protein, 11 aa, Homo sapiens
  CDR3 for alpha chain variable domain of TCR clone 144819 (TRAV12-1, TRAJ43)
CVEYDNNDMRF

SEQ ID NO: 289638 - protein, 16 aa, Homo sapiens
  CDR3 for beta chain variable domain of TCR clone 144819 (TRBV5-4, TRBJ2-1)
CASSLVGSGRDNEQFF

SEQ ID NO: 289639 - protein, 13 aa, Homo sapiens
  CDR3 for alpha chain variable domain of TCR clone 144820 (TRAV21, TRAJ27)
CAARPGNAGKSTF

SEQ ID NO: 289640 - protein, 14 aa, Homo sapiens
  CDR3 for beta chain variable domain of TCR clone 144820 (TRBV7-6, TRBJ2-3)
CASSLETVTETQYF

SEQ ID NO: 289641 - protein, 15 aa, Homo sapiens
  CDR3 for alpha chain variable domain of TCR clone 144821 (TRAV3, TRAJ39)
CAVRDRYKAGTMPTF

SEQ ID NO: 289642 - protein, 18 aa, Homo sapiens
  CDR3 for beta chain variable domain of TCR clone 144821 (TRBV4-3, TRBJ2-1)
CASSQDLASGTTYNEQFF

SEQ ID NO: 289643 - protein, 14 aa, Homo sapiens
  CDR3 for alpha chain variable domain of TCR clone 144822 (TRAV13-2, TRAJ43)
CAEIPTYNNNGMRF

SEQ ID NO: 289644 - protein, 15 aa, Homo sapiens
  CDR3 for beta chain variable domain of TCR clone 144822 (TRBV7-9, TRBJ2-2)
CARGPLDTFPGELFF

SEQ ID NO: 289645 - protein, 13 aa, Homo sapiens
  CDR3 for alpha chain variable domain of TCR clone 144823 (TRAV26-1, TRAJ48)
CIVRVVGDEQLTF

SEQ ID NO: 289646 - protein, 16 aa, Homo sapiens
  CDR3 for beta chain variable domain of TCR clone 144823 (TRBV12-5, TRBJ2-5)
CASGPRTSGNQETQYF

SEQ ID NO: 289647 - protein, 14 aa, Homo sapiens
  CDR3 for alpha chain variable domain of TCR clone 144824 (TRAV4, TRAJ33)
CLVGDVQSNYQLIW

SEQ ID NO: 289648 - protein, 14 aa, Homo sapiens
  CDR3 for beta chain variable domain of TCR clone 144824 (TRBV19, TRBJ2-2)
CATTGHANTGELFF

SEQ ID NO: 289649 - protein, 15 aa, Homo sapiens
  CDR3 for alpha chain variable domain of TCR clone 144825 (TRAV13-1, TRAJ44)
CAASRGGGTASKLTF

SEQ ID NO: 289650 - protein, 14 aa, Homo sapiens
  CDR3 for beta chain variable domain of TCR clone 144825 (TRBV7-2, TRBJ2-5)
CARSPRGSSETQYF

SEQ ID NO: 289651 - protein, 16 aa, Homo sapiens
  CDR3 for alpha chain variable domain of TCR clone 144826 (TRAV8-3, TRAJ13)
CAVGAYPSGGYQKVTF

SEQ ID NO: 289652 - protein, 18 aa, Homo sapiens
  CDR3 for beta chain variable domain of TCR clone 144826 (TRBV28, TRBJ2-1)
CASSSPSGLAGAIYEQFF

SEQ ID NO: 289653 - protein, 14 aa, Homo sapiens
  CDR3 for alpha chain variable domain of TCR clone 144827 (TRAV1-2, TRAJ8)
CAVREDTGFQILVF

SEQ ID NO: 289654 - protein, 15 aa, Homo sapiens
  CDR3 for beta chain variable domain of TCR clone 144827 (TRBV6-1, TRBJ2-3)
CASSERGGITDTQYF

SEQ ID NO: 289655 - protein, 17 aa, Homo sapiens
  CDR3 for alpha chain variable domain of TCR clone 144828 (TRAV4, TRAJ18)
GLVGERSVGSTLGRLYF

SEQ ID NO: 289656 - protein, 18 aa, Homo sapiens
  CDR3 for beta chain variable domain of TCR clone 144828 (TRBV11-2, TRBJ2-3)
CASSLGGASRGAPNTQYF

SEQ ID NO: 289657 - protein, 14 aa, Homo sapiens
  CDR3 for alpha chain variable domain of TCR clone 144829 (TRAV1-2, TRAJ29)
CAVRELTSATPLVF

SEQ ID NO: 289658 - protein, 17 aa, Homo sapiens
  CDR3 for beta chain variable domain of TCR clone 144829 (TRBV4-1, TRBJ2-3)
CASSQGYVSGGTDTQYF

SEQ ID NO: 289659 - protein, 16 aa, Homo sapiens
  CDR3 for alpha chain variable domain of TCR clone 144830 (TRAV1-2, TRAJ27)
CAVREPQTPMQANQPL

SEQ ID NO: 289660 - protein, 13 aa, Homo sapiens
  CDR3 for beta chain variable domain of TCR clone 144830 (TRBV6-1, TRBJ1-2)
CASSAREGYGYSF

SEQ ID NO: 289661 - protein, 14 aa, Homo sapiens
  CDR3 for alpha chain variable domain of TCR clone 144831 (TRAV20, TRAJ29)
CAVQPWVGKTPLAF

SEQ ID NO: 289662 - protein, 15 aa, Homo sapiens
  CDR3 for beta chain variable domain of TCR clone 144831 (TRBV29-1, TRBJ2-7)
CSVEFFDRGSYEQYF

SEQ ID NO: 289663 - protein, 20 aa, Homo sapiens
  CDR3 for alpha chain variable domain of TCR clone 144832 (TRAV12-1, TRAJ42)
TSVIQPPTSVKGGSQGNLIF

SEQ ID NO: 289664 - protein, 18 aa, Homo sapiens
  CDR3 for beta chain variable domain of TCR clone 144832 (TRBV11-2, TRBJ2-3)
CASSLGGASRGAPNTQYF

SEQ ID NO: 289665 - protein, 13 aa, Homo sapiens
  CDR3 for alpha chain variable domain of TCR clone 144833 (TRAV1-1, TRAJ9)
FAAKNTGGFKTTF

SEQ ID NO: 289666 - protein, 13 aa, Homo sapiens
  CDR3 for beta chain variable domain of TCR clone 144833 (TRBV7-9, TRBJ1-2)
CASSLKQNYGYTF

SEQ ID NO: 289667 - protein, 14 aa, Homo sapiens
  CDR3 for alpha chain variable domain of TCR clone 144834 (TRAV2, TRAJ23)
CAALEYNQGGKIIF

SEQ ID NO: 289668 - protein, 16 aa, Homo sapiens
  CDR3 for beta chain variable domain of TCR clone 144834 (TRBV20-1, TRBJ2-3)
CSARDSVFPSTDTQYF

SEQ ID NO: 289669 - protein, 13 aa, Homo sapiens
  CDR3 for alpha chain variable domain of TCR clone 144835 (TRAV13-2, TRAJ48)
CAEMDFGNEKLTF

SEQ ID NO: 289670 - protein, 15 aa, Homo sapiens
  CDR3 for beta chain variable domain of TCR clone 144835 (TRBV2, TRBJ2-1)
CASSETGGNYNEQFF

SEQ ID NO: 289671 - protein, 16 aa, Homo sapiens
  CDR3 for alpha chain variable domain of TCR clone 144836 (TRAV12-3, TRAJ53)
CAMSPGSGGSNYKLTF

SEQ ID NO: 289672 - protein, 14 aa, Homo sapiens
  CDR3 for beta chain variable domain of TCR clone 144836 (TRBV28, TRBJ1-1)
CASSPRTRWAEAFF

SEQ ID NO: 289673 - protein, 13 aa, Homo sapiens
  CDR3 for alpha chain variable domain of TCR clone 144837 (TRAV1-1, TRAJ29)
CAAPQIQETHLLS

SEQ ID NO: 289674 - protein, 14 aa, Homo sapiens
  CDR3 for beta chain variable domain of TCR clone 144837 (TRBV7-2, TRBJ2-3)
CASSFVMPTDTQYF

SEQ ID NO: 289675 - protein, 13 aa, Homo sapiens
  CDR3 for alpha chain variable domain of TCR clone 144838 (TRAV12-2, TRAJ39)
CAVNNNAGNMLTF

SEQ ID NO: 289676 - protein, 15 aa, Homo sapiens
  CDR3 for beta chain variable domain of TCR clone 144838 (TRBV19, TRBJ1-2)
CASSVGQVLNYGYTF

SEQ ID NO: 289677 - protein, 13 aa, Homo sapiens
  CDR3 for alpha chain variable domain of TCR clone 144839 (TRAV13-1, TRAJ21)
CAASKGNFNKFYF

SEQ ID NO: 289678 - protein, 15 aa, Homo sapiens
  CDR3 for beta chain variable domain of TCR clone 144839 (TRBV27, TRBJ1-5)
CASSLGTGFDQPQHF

SEQ ID NO: 289679 - protein, 11 aa, Homo sapiens
  CDR3 for alpha chain variable domain of TCR clone 144840 (TRAV9-2, TRAJ49)
CALSAGNQFYF

SEQ ID NO: 289680 - protein, 15 aa, Homo sapiens
  CDR3 for beta chain variable domain of TCR clone 144840 (TRBV4-1, TRBJ2-3)
CASSRGQGIPDTQYF

SEQ ID NO: 289681 - protein, 15 aa, Homo sapiens
  CDR3 for alpha chain variable domain of TCR clone 144841 (TRAV12-2, TRAJ53)
CAVNTGGGSNYKLTF

SEQ ID NO: 289682 - protein, 15 aa, Homo sapiens
  CDR3 for beta chain variable domain of TCR clone 144841 (TRBV5-1, TRBJ2-5)
FASSLGLGEIKTQYF

SEQ ID NO: 289683 - protein, 13 aa, Homo sapiens
  CDR3 for alpha chain variable domain of TCR clone 144842 (TRAV36/DV7, TRAJ49)
CAGDSNTGNQFYF

SEQ ID NO: 289684 - protein, 15 aa, Homo sapiens
  CDR3 for beta chain variable domain of TCR clone 144842 (TRBV15, TRBJ2-2)
CATSSEGADTGELFF

SEQ ID NO: 289685 - protein, 14 aa, Homo sapiens
  CDR3 for alpha chain variable domain of TCR clone 144843 (TRAV1-2, TRAJ16)
CAVNRLSDGEKLLF

SEQ ID NO: 289686 - protein, 14 aa, Homo sapiens
  CDR3 for beta chain variable domain of TCR clone 144843 (TRBV13, TRBJ2-5)
CASSLGRGQETQYF

SEQ ID NO: 289687 - protein, 13 aa, Homo sapiens
  CDR3 for alpha chain variable domain of TCR clone 144844 (TRAV1-1, TRAJ9)
CAAKNTGVFKTIF

SEQ ID NO: 289688 - protein, 16 aa, Homo sapiens
  CDR3 for beta chain variable domain of TCR clone 144844 (TRBV12-5, TRBJ2-5)
CASGPRTSGNQETQYF

SEQ ID NO: 289689 - protein, 19 aa, Homo sapiens
  CDR3 for alpha chain variable domain of TCR clone 144845 (TRAV2, TRAJ20)
ILQVREADATVYRDCKLSF

SEQ ID NO: 289690 - protein, 13 aa, Homo sapiens
  CDR3 for beta chain variable domain of TCR clone 144845 (TRBV15, TRBJ1-6)
CATSGGLNTPLHF

SEQ ID NO: 289691 - protein, 14 aa, Homo sapiens
  CDR3 for alpha chain variable domain of TCR clone 144846 (TRAV26-1, TRAJ45)
RIEVTGGGADGLTF

SEQ ID NO: 289692 - protein, 13 aa, Homo sapiens
  CDR3 for beta chain variable domain of TCR clone 144846 (TRBV7-6, TRBJ1-2)
CASSLVADYGYTF

SEQ ID NO: 289693 - protein, 14 aa, Homo sapiens
  CDR3 for alpha chain variable domain of TCR clone 144847 (TRAV4, TRAJ43)
CLVGPMYNNNDMRF

SEQ ID NO: 289694 - protein, 21 aa, Homo sapiens
  CDR3 for beta chain variable domain of TCR clone 144847 (TRBV11-1, TRBJ2-1)
CASSARDRLRPEGPSYNEQFF

SEQ ID NO: 289695 - protein, 14 aa, Homo sapiens
  CDR3 for alpha chain variable domain of TCR clone 144848 (TRAV13-1, TRAJ44)
CAAKATGTASKLIF

SEQ ID NO: 289696 - protein, 14 aa, Homo sapiens
  CDR3 for beta chain variable domain of TCR clone 144848 (TRBV19, TRBJ2-2)
CASSTLHRSGELFF

SEQ ID NO: 289697 - protein, 18 aa, Homo sapiens
  CDR3 for alpha chain variable domain of TCR clone 144849 (TRAV21, TRAJ52)
CAVRPSPVGGTSYGKLTF

SEQ ID NO: 289698 - protein, 14 aa, Homo sapiens
  CDR3 for beta chain variable domain of TCR clone 144849 (TRBV4-1, TRBJ2-2)
CASSQAVNTGELFF

SEQ ID NO: 289699 - protein, 15 aa, Homo sapiens
  CDR3 for alpha chain variable domain of TCR clone 144850 (TRAV12-1, TRAJ44)
CVVFVNTGTASKLTF

SEQ ID NO: 289700 - protein, 11 aa, Homo sapiens
  CDR3 for beta chain variable domain of TCR clone 144850 (TRBV7-9, TRBJ2-6)
CASPRANVLTF

SEQ ID NO: 289701 - protein, 16 aa, Homo sapiens
  CDR3 for alpha chain variable domain of TCR clone 144851 (TRAV8-2, TRAJ7)
CVVSEGPYYGNNRPAF

SEQ ID NO: 289702 - protein, 15 aa, Homo sapiens
  CDR3 for beta chain variable domain of TCR clone 144851 (TRBV27, TRBJ2-3)
CASSLGLAATDTQYF

SEQ ID NO: 289703 - protein, 15 aa, Homo sapiens
  CDR3 for alpha chain variable domain of TCR clone 144852 (TRAV13-1, TRAJ18)
CAARDRGSTLGRLYF

SEQ ID NO: 289704 - protein, 13 aa, Homo sapiens
  CDR3 for beta chain variable domain of TCR clone 144852 (TRBV12-4, TRBJ1-2)
CASSLRQGKGYTF

SEQ ID NO: 289705 - protein, 21 aa, Homo sapiens
  CDR3 for alpha chain variable domain of TCR clone 144853 (TRAV12-1, TRAJ32)
SSVIQPPTSMNYGGATNKLIF

SEQ ID NO: 289706 - protein, 15 aa, Homo sapiens
  CDR3 for beta chain variable domain of TCR clone 144853 (TRBV7-9, TRBJ2-2)
CASGPLDTVPGELFF

SEQ ID NO: 289707 - protein, 15 aa, Homo sapiens
  CDR3 for alpha chain variable domain of TCR clone 144854 (TRAV16, TRAJ4)
CALEDPSGGYNKLIF

SEQ ID NO: 289708 - protein, 13 aa, Homo sapiens
  CDR3 for beta chain variable domain of TCR clone 144854 (TRBV7-3, TRBJ2-7)
YASSQAGGYEQYF

SEQ ID NO: 289709 - protein, 17 aa, Homo sapiens
  CDR3 for alpha chain variable domain of TCR clone 144855 (TRAV12-1, TRAJ13)
CVVNKRGEFWGLPESYL

SEQ ID NO: 289710 - protein, 13 aa, Homo sapiens
  CDR3 for beta chain variable domain of TCR clone 144855 (TRBV12-4, TRBJ2-7)
CASSPTETYEQYF

SEQ ID NO: 289711 - protein, 12 aa, Homo sapiens
  CDR3 for alpha chain variable domain of TCR clone 144856 (TRAV17, TRAJ57)
CATDGGSEKLVF

SEQ ID NO: 289712 - protein, 15 aa, Homo sapiens
  CDR3 for beta chain variable domain of TCR clone 144856 (TRBV7-9, TRBJ2-7)
CASSQEWAPSYEQYF

SEQ ID NO: 289713 - protein, 14 aa, Homo sapiens
  CDR3 for alpha chain variable domain of TCR clone 144857 (TRAV13-1, TRAJ35)
CAASKGGFGNVLHC

SEQ ID NO: 289714 - protein, 15 aa, Homo sapiens
  CDR3 for beta chain variable domain of TCR clone 144857 (TRBV28, TRBJ2-1)
CASSGLAEADNEQFF

SEQ ID NO: 289715 - protein, 13 aa, Homo sapiens
  CDR3 for alpha chain variable domain of TCR clone 144858 (TRAV3, TRAJ27)
CAVRPLGAGKSTV

SEQ ID NO: 289716 - protein, 13 aa, Homo sapiens
  CDR3 for beta chain variable domain of TCR clone 144858 (TRBV7-9, TRBJ2-3)
CASGPGSTDTQYF

SEQ ID NO: 289717 - protein, 14 aa, Homo sapiens
  CDR3 for alpha chain variable domain of TCR clone 144859 (TRAV12-3, TRAJ34)
CEWAITPTSSSLGL

SEQ ID NO: 289718 - protein, 14 aa, Homo sapiens
  CDR3 for beta chain variable domain of TCR clone 144859 (TRBV4-1, TRBJ2-2)
CASSQAVNTGELFF

SEQ ID NO: 289719 - protein, 11 aa, Homo sapiens
  CDR3 for alpha chain variable domain of TCR clone 144860 (TRAV17, TRAJ36)
CAPTGVNNLFF

SEQ ID NO: 289720 - protein, 13 aa, Homo sapiens
  CDR3 for beta chain variable domain of TCR clone 144860 (TRBV20-1, TRBJ1-1)
CSAPPGGHTEAFF

SEQ ID NO: 289721 - protein, 12 aa, Homo sapiens
  CDR3 for alpha chain variable domain of TCR clone 144861 (TRAV12-1, TRAJ40)
CVVYSGTYKYIF

SEQ ID NO: 289722 - protein, 16 aa, Homo sapiens
  CDR3 for beta chain variable domain of TCR clone 144861 (TRBV7-3, TRBJ2-1)
CASSLEGYRSYNEQFF

SEQ ID NO: 289723 - protein, 13 aa, Homo sapiens
  CDR3 for alpha chain variable domain of TCR clone 144862 (TRAV3, TRAJ3)
CAVADSSASKIIF

SEQ ID NO: 289724 - protein, 13 aa, Homo sapiens
  CDR3 for beta chain variable domain of TCR clone 144862 (TRBV19, TRBJ2-7)
CASRKAGGSEQYF

SEQ ID NO: 289725 - protein, 14 aa, Homo sapiens
  CDR3 for alpha chain variable domain of TCR clone 144863 (TRAV29/DV5, TRAJ36)
CAARRKTGANNHFF

SEQ ID NO: 289726 - protein, 13 aa, Homo sapiens
  CDR3 for beta chain variable domain of TCR clone 144863 (TRBV15, TRBJ1-2)
CATSMTANYGYTF

SEQ ID NO: 289727 - protein, 13 aa, Homo sapiens
  CDR3 for alpha chain variable domain of TCR clone 144864 (TRAV38-1, TRAJ7)
CAFMMDGNNRLAF

SEQ ID NO: 289728 - protein, 17 aa, Homo sapiens
  CDR3 for beta chain variable domain of TCR clone 144864 (TRBV20-1, TRBJ2-1)
CSASSSGLAGSYNEQFF

SEQ ID NO: 289729 - protein, 16 aa, Homo sapiens
  CDR3 for alpha chain variable domain of TCR clone 144865 (TRAV21, TRAJ37)
CAVRAAGSSNTGKLIF

SEQ ID NO: 289730 - protein, 13 aa, Homo sapiens
  CDR3 for beta chain variable domain of TCR clone 144865 (TRBV7-9, TRBJ2-5)
RASLPSGRETQYF

SEQ ID NO: 289731 - protein, 16 aa, Homo sapiens
  CDR3 for alpha chain variable domain of TCR clone 144866 (TRAV30, TRAJ24)
CGTEIVDADSWGKFQF

SEQ ID NO: 289732 - protein, 15 aa, Homo sapiens
  CDR3 for beta chain variable domain of TCR clone 144866 (TRBV15, TRBJ1-4)
CATSRDMGSYEKLFF

SEQ ID NO: 289733 - protein, 13 aa, Homo sapiens
  CDR3 for alpha chain variable domain of TCR clone 144867 (TRAV13-1, TRAJ49)
CAASVLRGNQFYF

SEQ ID NO: 289734 - protein, 13 aa, Homo sapiens
  CDR3 for beta chain variable domain of TCR clone 144867 (TRBV29-1, TRBJ1-1)
CSVGDSRNTEAFF

SEQ ID NO: 289735 - protein, 14 aa, Homo sapiens
  CDR3 for alpha chain variable domain of TCR clone 144868 (TRAV12-3, TRAJ10)
SHLPLPGGGNKLTF

SEQ ID NO: 289736 - protein, 17 aa, Homo sapiens
  CDR3 for beta chain variable domain of TCR clone 144868 (TRBV27, TRBJ2-5)
CASRLRPGQGVQETQYF

SEQ ID NO: 289737 - protein, 13 aa, Homo sapiens
  CDR3 for alpha chain variable domain of TCR clone 144869 (TRAV12-2, TRAJ20)
CAVYPSNDYKLSF

SEQ ID NO: 289738 - protein, 14 aa, Homo sapiens
  CDR3 for beta chain variable domain of TCR clone 144869 (TRBV28, TRBJ1-1)
CASSFPRKNTEAFF

SEQ ID NO: 289739 - protein, 14 aa, Homo sapiens
  CDR3 for alpha chain variable domain of TCR clone 144870 (TRAV8-1, TRAJ5)
CAVRTDTDRRALTF

SEQ ID NO: 289740 - protein, 15 aa, Homo sapiens
  CDR3 for beta chain variable domain of TCR clone 144870 (TRBV7-3, TRBJ2-1)
CASSPTGGGEVEQFF

SEQ ID NO: 289741 - protein, 14 aa, Homo sapiens
  CDR3 for alpha chain variable domain of TCR clone 144871 (TRAV17, TRAJ22)
CATSPSGSARQLTF

SEQ ID NO: 289742 - protein, 15 aa, Homo sapiens
  CDR3 for beta chain variable domain of TCR clone 144871 (TRBV4-1, TRBJ2-5)
YASSRWDLYQETQYF

SEQ ID NO: 289743 - protein, 14 aa, Homo sapiens
  CDR3 for alpha chain variable domain of TCR clone 144872 (TRAV1-2, TRAJ16)
CAVNRCSDGQKLPF

SEQ ID NO: 289744 - protein, 12 aa, Homo sapiens
  CDR3 for beta chain variable domain of TCR clone 144872 (TRBV7-9, TRBJ2-7)
CASSFGSYEQYF

SEQ ID NO: 289745 - protein, 14 aa, Homo sapiens
  CDR3 for alpha chain variable domain of TCR clone 144873 (TRAV12-2, TRAJ17)
YAVLFKAAGNKLTF

SEQ ID NO: 289746 - protein, 17 aa, Homo sapiens
  CDR3 for beta chain variable domain of TCR clone 144873 (TRBV11-2, TRBJ2-1)
CASSLYPPGVEYNEQFF

SEQ ID NO: 289747 - protein, 14 aa, Homo sapiens
  CDR3 for alpha chain variable domain of TCR clone 144874 (TRAV8-2, TRAJ4)
CVVSPSSGYNKLIF

SEQ ID NO: 289748 - protein, 15 aa, Homo sapiens
  CDR3 for beta chain variable domain of TCR clone 144874 (TRBV4-1, TRBJ1-4)
CASSDTGGTDEKLFF

SEQ ID NO: 289749 - protein, 14 aa, Homo sapiens
  CDR3 for alpha chain variable domain of TCR clone 144875 (TRAV8-1, TRAJ9)
CAVNAWTGGFKTIF

SEQ ID NO: 289750 - protein, 13 aa, Homo sapiens
  CDR3 for beta chain variable domain of TCR clone 144875 (TRBV7-9, TRBJ1-2)
CASSLKQNYGYTF

SEQ ID NO: 289751 - protein, 10 aa, Homo sapiens
  CDR3 for alpha chain variable domain of TCR clone 144876 (TRAV26-1, TRAJ40)
CIAGTYKYIF

SEQ ID NO: 289752 - protein, 15 aa, Homo sapiens
  CDR3 for beta chain variable domain of TCR clone 144876 (TRBV7-3, TRBJ2-1)
CASSPTGGGEVEQFF

SEQ ID NO: 289753 - protein, 15 aa, Homo sapiens
  CDR3 for alpha chain variable domain of TCR clone 144877 (TRAV3, TRAJ13)
CAVRVYSGGYQKVTF

SEQ ID NO: 289754 - protein, 16 aa, Homo sapiens
  CDR3 for beta chain variable domain of TCR clone 144877 (TRBV12-4, TRBJ1-5)
CASSRPVGGSNQPQHF

SEQ ID NO: 289755 - protein, 13 aa, Homo sapiens
  CDR3 for alpha chain variable domain of TCR clone 144878 (TRAV3, TRAJ20)
CAVRDTGDYKLTF

SEQ ID NO: 289756 - protein, 12 aa, Homo sapiens
  CDR3 for beta chain variable domain of TCR clone 144878 (TRBV29-1, TRBJ2-3)
CSVTGGADTQYF

SEQ ID NO: 289757 - protein, 14 aa, Homo sapiens
  CDR3 for alpha chain variable domain of TCR clone 144879 (TRAV12-2, TRAJ13)
CAVKKTGGYQKVTF

SEQ ID NO: 289758 - protein, 16 aa, Homo sapiens
  CDR3 for beta chain variable domain of TCR clone 144879 (TRBV23-1, TRBJ2-5)
TVSLRQQSQGQETQYF

SEQ ID NO: 289759 - protein, 11 aa, Homo sapiens
  CDR3 for alpha chain variable domain of TCR clone 144880 (TRAV23/DV6, TRAJ48)
CAPRWGEKLTV

SEQ ID NO: 289760 - protein, 14 aa, Homo sapiens
  CDR3 for beta chain variable domain of TCR clone 144880 (TRBV29-1, TRBJ1-3)
CSVADRVVGNTIYF

SEQ ID NO: 289761 - protein, 12 aa, Homo sapiens
  CDR3 for alpha chain variable domain of TCR clone 144881 (TRAV8-3, TRAJ15)
CAGNQAGTALIF

SEQ ID NO: 289762 - protein, 17 aa, Homo sapiens
  CDR3 for beta chain variable domain of TCR clone 144881 (TRBV13, TRBJ2-3)
CASSLSRVAGGRNTQYF

SEQ ID NO: 289763 - protein, 14 aa, Homo sapiens
  CDR3 for alpha chain variable domain of TCR clone 144882 (TRAV1-2, TRAJ16)
CAVNRLSDGQKLLF

SEQ ID NO: 289764 - protein, 16 aa, Homo sapiens
  CDR3 for beta chain variable domain of TCR clone 144882 (TRBV6-1, TRBJ2-5)
CASSETLDRGAETQYF

SEQ ID NO: 289765 - protein, 14 aa, Homo sapiens
  CDR3 for alpha chain variable domain of TCR clone 144883 (TRAV2, TRAJ29)
CAGPFQYGDTPLVF

SEQ ID NO: 289766 - protein, 18 aa, Homo sapiens
  CDR3 for beta chain variable domain of TCR clone 144883 (TRBV6-1, TRBJ1-6)
CASSGSDGRRINNSPLHF

SEQ ID NO: 289767 - protein, 13 aa, Homo sapiens
  CDR3 for alpha chain variable domain of TCR clone 144884 (TRAV1-2, TRAJ9)
VSVLNTGGFKTIF

SEQ ID NO: 289768 - protein, 13 aa, Homo sapiens
  CDR3 for beta chain variable domain of TCR clone 144884 (TRBV19, TRBJ2-7)
CASRKAGGSEQYF

SEQ ID NO: 289769 - protein, 12 aa, Homo sapiens
  CDR3 for alpha chain variable domain of TCR clone 144885 (TRAV12-2, TRAJ20)
CRVPSNDYKLSF

SEQ ID NO: 289770 - protein, 15 aa, Homo sapiens
  CDR3 for beta chain variable domain of TCR clone 144885 (TRBV27, TRBJ2-5)
CASSLYPRGGETQYF

SEQ ID NO: 289771 - protein, 14 aa, Homo sapiens
  CDR3 for alpha chain variable domain of TCR clone 144886 (TRAV1-2, TRAJ16)
CTVNRFSDGQKLLF

SEQ ID NO: 289772 - protein, 11 aa, Homo sapiens
  CDR3 for beta chain variable domain of TCR clone 144886 (TRBV12-4, TRBJ2-3)
CASTATDTQYF

SEQ ID NO: 289773 - protein, 13 aa, Homo sapiens
  CDR3 for alpha chain variable domain of TCR clone 144887 (TRAV12-3, TRAJ7)
CAMSASGNNRVAF

SEQ ID NO: 289774 - protein, 14 aa, Homo sapiens
  CDR3 for beta chain variable domain of TCR clone 144887 (TRBV13, TRBJ2-5)
CASSLGPRGETQYF

SEQ ID NO: 289775 - protein, 13 aa, Homo sapiens
  CDR3 for alpha chain variable domain of TCR clone 144888 (TRAV12-2, TRAJ20)
CAVYPSNAYKPSF

SEQ ID NO: 289776 - protein, 15 aa, Homo sapiens
  CDR3 for beta chain variable domain of TCR clone 144888 (TRBV6-1, TRBJ2-5)
CASSEGWGIQETQYF

SEQ ID NO: 289777 - protein, 17 aa, Homo sapiens
  CDR3 for alpha chain variable domain of TCR clone 144889 (TRAV23/DV6, TRAJ58)
CAASLLRGETSGSRLTF

SEQ ID NO: 289778 - protein, 18 aa, Homo sapiens
  CDR3 for beta chain variable domain of TCR clone 144889 (TRBV19, TRBJ2-4)
CASTPVGRDREWVNIQYF

SEQ ID NO: 289779 - protein, 14 aa, Homo sapiens
  CDR3 for alpha chain variable domain of TCR clone 144890 (TRAV3, TRAJ42)
CCETLGGSKGNLIF

SEQ ID NO: 289780 - protein, 14 aa, Homo sapiens
  CDR3 for beta chain variable domain of TCR clone 144890 (TRBV19, TRBJ2-5)
CASSSSGIQETQYF

SEQ ID NO: 289781 - protein, 12 aa, Homo sapiens
  CDR3 for alpha chain variable domain of TCR clone 144891 (TRAV8-3, TRAJ20)
CAVDFNDYKLSL

SEQ ID NO: 289782 - protein, 13 aa, Homo sapiens
  CDR3 for beta chain variable domain of TCR clone 144891 (TRBV5-7, TRBJ2-3)
CASSLGRTDTQYF

SEQ ID NO: 289783 - protein, 13 aa, Homo sapiens
  CDR3 for alpha chain variable domain of TCR clone 144892 (TRAV29/DV5, TRAJ52)
CAAGFRGAGGTSY

SEQ ID NO: 289784 - protein, 16 aa, Homo sapiens
  CDR3 for beta chain variable domain of TCR clone 144892 (TRBV7-3, TRBJ2-2)
CASSSKRGTLSGELFF

SEQ ID NO: 289785 - protein, 15 aa, Homo sapiens
  CDR3 for alpha chain variable domain of TCR clone 144893 (TRAV17, TRAJ56)
CATEPFTGANSKLTS

SEQ ID NO: 289786 - protein, 14 aa, Homo sapiens
  CDR3 for beta chain variable domain of TCR clone 144893 (TRBV19, TRBJ2-1)
CASPTFVLSGEQFF

SEQ ID NO: 289787 - protein, 12 aa, Homo sapiens
  CDR3 for alpha chain variable domain of TCR clone 144894 (TRAV35, TRAJ30)
CAGQLADDKNIF

SEQ ID NO: 289788 - protein, 17 aa, Homo sapiens
  CDR3 for beta chain variable domain of TCR clone 144894 (TRBV4-2, TRBJ2-5)
CASSPGRWRNFQETQYF

SEQ ID NO: 289789 - protein, 16 aa, Homo sapiens
  CDR3 for alpha chain variable domain of TCR clone 144895 (TRAV30, TRAJ48)
CGTEIKSNFGNEKLTF

SEQ ID NO: 289790 - protein, 12 aa, Homo sapiens
  CDR3 for beta chain variable domain of TCR clone 144895 (TRBV28, TRBJ2-6)
CAIQAGANVLTF

SEQ ID NO: 289791 - protein, 14 aa, Homo sapiens
  CDR3 for alpha chain variable domain of TCR clone 144896 (TRAV29/DV5, TRAJ36)
CTARRKTGATNLFF

SEQ ID NO: 289792 - protein, 14 aa, Homo sapiens
  CDR3 for beta chain variable domain of TCR clone 144896 (TRBV12-5, TRBJ2-5)
CASGSRTHQETQYF

SEQ ID NO: 289793 - protein, 12 aa, Homo sapiens
  CDR3 for alpha chain variable domain of TCR clone 144897 (TRAV8-3, TRAJ20)
CAVDFNDYKLSF

SEQ ID NO: 289794 - protein, 16 aa, Homo sapiens
  CDR3 for beta chain variable domain of TCR clone 144897 (TRBV2, TRBJ1-2)
CASSEGQANSGYGYTF

SEQ ID NO: 289795 - protein, 11 aa, Homo sapiens
  CDR3 for alpha chain variable domain of TCR clone 144898 (TRAV8-2, TRAJ26)
CVVTLLLGSEF

SEQ ID NO: 289796 - protein, 15 aa, Homo sapiens
  CDR3 for beta chain variable domain of TCR clone 144898 (TRBV11-2, TRBJ2-2)
CDSSSDRVNAGELFF

SEQ ID NO: 289797 - protein, 15 aa, Homo sapiens
  CDR3 for alpha chain variable domain of TCR clone 144899 (TRAV23/DV6, TRAJ17)
CSASGYGAAGNKLTF

SEQ ID NO: 289798 - protein, 16 aa, Homo sapiens
  CDR3 for beta chain variable domain of TCR clone 144899 (TRBV5-1, TRBJ2-3)
CASSLGLAVYTDTQYF

SEQ ID NO: 289799 - protein, 18 aa, Homo sapiens
  CDR3 for alpha chain variable domain of TCR clone 144900 (TRAV9-2, TRAJ52)
CALSRHNACGTSYGKLTF

SEQ ID NO: 289800 - protein, 15 aa, Homo sapiens
  CDR3 for beta chain variable domain of TCR clone 144900 (TRBV27, TRBJ2-1)
CASSNGGGSSNEQFF

SEQ ID NO: 289801 - protein, 15 aa, Homo sapiens
  CDR3 for alpha chain variable domain of TCR clone 144901 (TRAV3, TRAJ3)
CAVRDRDSSASKGIF

SEQ ID NO: 289802 - protein, 18 aa, Homo sapiens
  CDR3 for beta chain variable domain of TCR clone 144901 (TRBV25-1, TRBJ1-2)
CASSGLQNGQGLIFGYTF

SEQ ID NO: 289803 - protein, 13 aa, Homo sapiens
  CDR3 for alpha chain variable domain of TCR clone 144902 (TRAV1-2, TRAJ9)
CDALNTGGFKTIF

SEQ ID NO: 289804 - protein, 13 aa, Homo sapiens
  CDR3 for beta chain variable domain of TCR clone 144902 (TRBV19, TRBJ1-2)
CASSVPGQDGYIF

SEQ ID NO: 289805 - protein, 15 aa, Homo sapiens
  CDR3 for alpha chain variable domain of TCR clone 144903 (TRAV8-4, TRAJ48)
CAVSAAYFANEKLTF

SEQ ID NO: 289806 - protein, 12 aa, Homo sapiens
  CDR3 for beta chain variable domain of TCR clone 144903 (TRBV3-1, TRBJ2-5)
CASSQRGETQYF

SEQ ID NO: 289807 - protein, 14 aa, Homo sapiens
  CDR3 for alpha chain variable domain of TCR clone 144904 (TRAV12-2, TRAJ13)
CAVKKTGGYQNVTF

SEQ ID NO: 289808 - protein, 14 aa, Homo sapiens
  CDR3 for beta chain variable domain of TCR clone 144904 (TRBV7-2, TRBJ2-7)
CASSPKTSFYEQYF

SEQ ID NO: 289809 - protein, 14 aa, Homo sapiens
  CDR3 for alpha chain variable domain of TCR clone 144905 (TRAV17, TRAJ53)
CATDAGGSNYKLTF

SEQ ID NO: 289810 - protein, 13 aa, Homo sapiens
  CDR3 for beta chain variable domain of TCR clone 144905 (TRBV28, TRBJ2-7)
CASTPGLAGEQYF

SEQ ID NO: 289811 - protein, 13 aa, Homo sapiens
  CDR3 for alpha chain variable domain of TCR clone 144906 (TRAV35, TRAJ48)
GRSKVFGNEKLTL

SEQ ID NO: 289812 - protein, 14 aa, Homo sapiens
  CDR3 for beta chain variable domain of TCR clone 144906 (TRBV20-1, TRBJ2-5)
CSALVPGYQETQYF

SEQ ID NO: 289813 - protein, 13 aa, Homo sapiens
  CDR3 for alpha chain variable domain of TCR clone 144907 (TRAV26-2, TRAJ43)
CFLRAVNNNDMRF

SEQ ID NO: 289814 - protein, 15 aa, Homo sapiens
  CDR3 for beta chain variable domain of TCR clone 144907 (TRBV7-2, TRBJ2-1)
CASTRGTGIYNEQFF

SEQ ID NO: 289815 - protein, 14 aa, Homo sapiens
  CDR3 for alpha chain variable domain of TCR clone 144908 (TRAV12-2, TRAJ13)
CAVKKTGGYQKVTF

SEQ ID NO: 289816 - protein, 12 aa, Homo sapiens
  CDR3 for beta chain variable domain of TCR clone 144908 (TRBV6-5, TRBJ2-7)
CASRKGHYEQYF

SEQ ID NO: 289817 - protein, 12 aa, Homo sapiens
  CDR3 for alpha chain variable domain of TCR clone 144909 (TRAV17, TRAJ36)
CATLTAAKNLFF

SEQ ID NO: 289818 - protein, 15 aa, Homo sapiens
  CDR3 for beta chain variable domain of TCR clone 144909 (TRBV19, TRBJ1-2)
CASSTKTDTNYGYTF

SEQ ID NO: 289819 - protein, 13 aa, Homo sapiens
  CDR3 for alpha chain variable domain of TCR clone 144910 (TRAV12-1, TRAJ31)
CVVIPNNNARLMF

SEQ ID NO: 289820 - protein, 15 aa, Homo sapiens
  CDR3 for beta chain variable domain of TCR clone 144910 (TRBV19, TRBJ1-2)
CASSLGGETPYGYAF

SEQ ID NO: 289821 - protein, 11 aa, Homo sapiens
  CDR3 for alpha chain variable domain of TCR clone 144911 (TRAV2, TRAJ33)
CAVESNYQLIW

SEQ ID NO: 289822 - protein, 13 aa, Homo sapiens
  CDR3 for beta chain variable domain of TCR clone 144911 (TRBV24-1, TRBJ2-2)
CATSDWSTGELFF

SEQ ID NO: 289823 - protein, 15 aa, Homo sapiens
  CDR3 for alpha chain variable domain of TCR clone 144912 (TRAV3, TRAJ22)
CAVRDRGGSARQLTF

SEQ ID NO: 289824 - protein, 13 aa, Homo sapiens
  CDR3 for beta chain variable domain of TCR clone 144912 (TRBV5-5, TRBJ1-2)
CAISFWRGEDYTF

SEQ ID NO: 289825 - protein, 10 aa, Homo sapiens
  CDR3 for alpha chain variable domain of TCR clone 144913 (TRAV12-1, TRAJ43)
CVVHNNDMRF

SEQ ID NO: 289826 - protein, 20 aa, Homo sapiens
  CDR3 for beta chain variable domain of TCR clone 144913 (TRBV28, TRBJ2-1)
CASTPIGRSPGLAGGNEQFF

SEQ ID NO: 289827 - protein, 18 aa, Homo sapiens
  CDR3 for alpha chain variable domain of TCR clone 144914 (TRAV21, TRAJ52)
CAVRPSPAGGTSYGKLTF

SEQ ID NO: 289828 - protein, 15 aa, Homo sapiens
  CDR3 for beta chain variable domain of TCR clone 144914 (TRBV20-1, TRBJ1-5)
CSAFKSGQRNQPQHF

SEQ ID NO: 289829 - protein, 16 aa, Homo sapiens
  CDR3 for alpha chain variable domain of TCR clone 144915 (TRAV1-2, TRAJ10)
GAVRGVLTGGGNKLTF

SEQ ID NO: 289830 - protein, 17 aa, Homo sapiens
  CDR3 for beta chain variable domain of TCR clone 144915 (TRBV13, TRBJ2-3)
CASSLSRVAGGRNTQYF

SEQ ID NO: 289831 - protein, 14 aa, Homo sapiens
  CDR3 for alpha chain variable domain of TCR clone 144916 (TRAV12-3, TRAJ10)
SHLPLTGGGNKLTF

SEQ ID NO: 289832 - protein, 15 aa, Homo sapiens
  CDR3 for beta chain variable domain of TCR clone 144916 (TRBV5-1, TRBJ2-1)
CASKGLAGVYNEQFF

SEQ ID NO: 289833 - protein, 15 aa, Homo sapiens
  CDR3 for alpha chain variable domain of TCR clone 144917 (TRAV12-2, TRAJ32)
CAVNHYGGATNKLIS

SEQ ID NO: 289834 - protein, 13 aa, Homo sapiens
  CDR3 for beta chain variable domain of TCR clone 144917 (TRBV7-9, TRBJ1-2)
CASSLKQNYGYTF

SEQ ID NO: 289835 - protein, 12 aa, Homo sapiens
  CDR3 for alpha chain variable domain of TCR clone 144918 (TRAV27, TRAJ42)
CAGGGSQGNLIF

SEQ ID NO: 289836 - protein, 13 aa, Homo sapiens
  CDR3 for beta chain variable domain of TCR clone 144918 (TRBV19, TRBJ2-7)
CASSIRSSYEHYF

SEQ ID NO: 289837 - protein, 16 aa, Homo sapiens
  CDR3 for alpha chain variable domain of TCR clone 144919 (TRAV3, TRAJ10)
CAVRDMRAGGGNKLTF

SEQ ID NO: 289838 - protein, 13 aa, Homo sapiens
  CDR3 for beta chain variable domain of TCR clone 144919 (TRBV7-2, TRBJ1-4)
CASSLAGLEKLFF

SEQ ID NO: 289839 - protein, 19 aa, Homo sapiens
  CDR3 for alpha chain variable domain of TCR clone 144920 (TRAV26-2, TRAJ40)
CCVLLHPERRVPGTYKYIF

SEQ ID NO: 289840 - protein, 15 aa, Homo sapiens
  CDR3 for beta chain variable domain of TCR clone 144920 (TRBV20-1, TRBJ2-2)
CSAIPGHSNTGELFF

SEQ ID NO: 289841 - protein, 15 aa, Homo sapiens
  CDR3 for alpha chain variable domain of TCR clone 144921 (TRAV12-1, TRAJ44)
CVVFVNTGTASKLTF

SEQ ID NO: 289842 - protein, 10 aa, Homo sapiens
  CDR3 for beta chain variable domain of TCR clone 144921 (TRBV15, TRBJ2-7)
AETGGYEQYF

SEQ ID NO: 289843 - protein, 11 aa, Homo sapiens
  CDR3 for alpha chain variable domain of TCR clone 144922 (TRAV21, TRAJ34)
CAVTNTDKLIF

SEQ ID NO: 289844 - protein, 15 aa, Homo sapiens
  CDR3 for beta chain variable domain of TCR clone 144922 (TRBV7-2, TRBJ2-1)
CASTHGTGIYNEQFF

SEQ ID NO: 289845 - protein, 12 aa, Homo sapiens
  CDR3 for alpha chain variable domain of TCR clone 144923 (TRAV12-3, TRAJ40)
CAVTSGTYKYIF

SEQ ID NO: 289846 - protein, 13 aa, Homo sapiens
  CDR3 for beta chain variable domain of TCR clone 144923 (TRBV12-5, TRBJ2-3)
CASGDRQSDTQYF

SEQ ID NO: 289847 - protein, 13 aa, Homo sapiens
  CDR3 for alpha chain variable domain of TCR clone 144924 (TRAV13-1, TRAJ17)
CAAAGAAGNKLTF

SEQ ID NO: 289848 - protein, 14 aa, Homo sapiens
  CDR3 for beta chain variable domain of TCR clone 144924 (TRBV11-2, TRBJ1-3)
CASSLTQGRNTIYF

SEQ ID NO: 289849 - protein, 15 aa, Homo sapiens
  CDR3 for alpha chain variable domain of TCR clone 144925 (TRAV26-1, TRAJ44)
CIVRIGTGTASKLTF

SEQ ID NO: 289850 - protein, 15 aa, Homo sapiens
  CDR3 for beta chain variable domain of TCR clone 144925 (TRBV7-6, TRBJ2-1)
CASSSLTGEGNEQFF

SEQ ID NO: 289851 - protein, 15 aa, Homo sapiens
  CDR3 for alpha chain variable domain of TCR clone 144926 (TRAV12-1, TRAJ43)
CVVNRGRYNNNDMRF

SEQ ID NO: 289852 - protein, 16 aa, Homo sapiens
  CDR3 for beta chain variable domain of TCR clone 144926 (TRBV19, TRBJ2-3)
CASSFYTTCIGDTQYF

SEQ ID NO: 289853 - protein, 13 aa, Homo sapiens
  CDR3 for alpha chain variable domain of TCR clone 144927 (TRAV12-1, TRAJ40)
CVLPTSGTYKYIF

SEQ ID NO: 289854 - protein, 18 aa, Homo sapiens
  CDR3 for beta chain variable domain of TCR clone 144927 (TRBV7-6, TRBJ2-1)
CASSPRTSGMRSYNEQFF

SEQ ID NO: 289855 - protein, 14 aa, Homo sapiens
  CDR3 for alpha chain variable domain of TCR clone 144928 (TRAV26-1, TRAJ34)
CIVRVAYNTDKLII

SEQ ID NO: 289856 - protein, 15 aa, Homo sapiens
  CDR3 for beta chain variable domain of TCR clone 144928 (TRBV20-1, TRBJ2-7)
CSARVPAAYFYEQYF

SEQ ID NO: 289857 - protein, 11 aa, Homo sapiens
  CDR3 for alpha chain variable domain of TCR clone 144929 (TRAV12-1, TRAJ15)
CVVNAGTALIF

SEQ ID NO: 289858 - protein, 16 aa, Homo sapiens
  CDR3 for beta chain variable domain of TCR clone 144929 (TRBV28, TRBJ2-1)
CASSSRVRDSYNEQIF

SEQ ID NO: 289859 - protein, 13 aa, Homo sapiens
  CDR3 for alpha chain variable domain of TCR clone 144930 (TRAV12-1, TRAJ9)
CVVLNTGGFKTIF

SEQ ID NO: 289860 - protein, 15 aa, Homo sapiens
  CDR3 for beta chain variable domain of TCR clone 144930 (TRBV19, TRBJ1-2)
CASSVGQVLNYGYTF

SEQ ID NO: 289861 - protein, 14 aa, Homo sapiens
  CDR3 for alpha chain variable domain of TCR clone 144931 (TRAV12-1, TRAJ29)
FVVNEGSGNTPLVF

SEQ ID NO: 289862 - protein, 13 aa, Homo sapiens
  CDR3 for beta chain variable domain of TCR clone 144931 (TRBV7-9, TRBJ2-3)
CASSPGSTDTQYF

SEQ ID NO: 289863 - protein, 14 aa, Homo sapiens
  CDR3 for alpha chain variable domain of TCR clone 144932 (TRAV12-3, TRAJ15)
CAMTLNQAGTALIF

SEQ ID NO: 289864 - protein, 14 aa, Homo sapiens
  CDR3 for beta chain variable domain of TCR clone 144932 (TRBV4-1, TRBJ2-2)
CASSQAVNTGELFF

SEQ ID NO: 289865 - protein, 15 aa, Homo sapiens
  CDR3 for alpha chain variable domain of TCR clone 144933 (TRAV12-2, TRAJ53)
CAVNGGGGSHYKLTF

SEQ ID NO: 289866 - protein, 15 aa, Homo sapiens
  CDR3 for beta chain variable domain of TCR clone 144933 (TRBV20-1, TRBJ2-7)
CSARDRVSGMDEQYF

SEQ ID NO: 289867 - protein, 16 aa, Homo sapiens
  CDR3 for alpha chain variable domain of TCR clone 144934 (TRAV12-3, TRAJ53)
CAMSPGSGGSNYKLTF

SEQ ID NO: 289868 - protein, 14 aa, Homo sapiens
  CDR3 for beta chain variable domain of TCR clone 144934 (TRBV12-4, TRBJ2-3)
CASSGQGSTDTQYF

SEQ ID NO: 289869 - protein, 13 aa, Homo sapiens
  CDR3 for alpha chain variable domain of TCR clone 144935 (TRAV24, TRAJ13)
CAFDSGGYQKVTF

SEQ ID NO: 289870 - protein, 14 aa, Homo sapiens
  CDR3 for beta chain variable domain of TCR clone 144935 (TRBV5-4, TRBJ2-1)
CASSLEQGLNEQFF

SEQ ID NO: 289871 - protein, 14 aa, Homo sapiens
  CDR3 for alpha chain variable domain of TCR clone 144936 (TRAV13-2, TRAJ43)
CAQIPTYNNNDMRF

SEQ ID NO: 289872 - protein, 15 aa, Homo sapiens
  CDR3 for beta chain variable domain of TCR clone 144936 (TRBV7-9, TRBJ2-2)
CASGPLDTFPGELFF

SEQ ID NO: 289873 - protein, 13 aa, Homo sapiens
  CDR3 for alpha chain variable domain of TCR clone 144937 (TRAV8-4, TRAJ9)
CAVSETGCFKTIF

SEQ ID NO: 289874 - protein, 14 aa, Homo sapiens
  CDR3 for beta chain variable domain of TCR clone 144937 (TRBV18, TRBJ2-3)
CASSGLADTDTQYF

SEQ ID NO: 289875 - protein, 14 aa, Homo sapiens
  CDR3 for alpha chain variable domain of TCR clone 144938 (TRAV27, TRAJ36)
CAGPPKRGANRLFF

SEQ ID NO: 289876 - protein, 15 aa, Homo sapiens
  CDR3 for beta chain variable domain of TCR clone 144938 (TRBV18, TRBJ2-7)
CASSPASTPNYEQYF

SEQ ID NO: 289877 - protein, 14 aa, Homo sapiens
  CDR3 for alpha chain variable domain of TCR clone 144939 (TRAV12-2, TRAJ13)
CAGKKTGGYQKVTF

SEQ ID NO: 289878 - protein, 15 aa, Homo sapiens
  CDR3 for beta chain variable domain of TCR clone 144939 (TRBV27, TRBJ2-1)
CASSNGGGFSNEQFF

SEQ ID NO: 289879 - protein, 17 aa, Homo sapiens
  CDR3 for alpha chain variable domain of TCR clone 144940 (TRAV26-1, TRAJ37)
CIVRVITVSSNTGKLIF

SEQ ID NO: 289880 - protein, 15 aa, Homo sapiens
  CDR3 for beta chain variable domain of TCR clone 144940 (TRBV10-1, TRBJ2-3)
CASSATSGGFDAQYF

SEQ ID NO: 289881 - protein, 15 aa, Homo sapiens
  CDR3 for alpha chain variable domain of TCR clone 144941 (TRAV17, TRAJ57)
CSTGPSQGGSEKLVF

SEQ ID NO: 289882 - protein, 14 aa, Homo sapiens
  CDR3 for beta chain variable domain of TCR clone 144941 (TRBV12-5, TRBJ2-5)
RASGSRTHQETQYF

SEQ ID NO: 289883 - protein, 13 aa, Homo sapiens
  CDR3 for alpha chain variable domain of TCR clone 144942 (TRAV12-2, TRAJ42)
CAVKRGSQGNLIF

SEQ ID NO: 289884 - protein, 13 aa, Homo sapiens
  CDR3 for beta chain variable domain of TCR clone 144942 (TRBV7-9, TRBJ2-3)
CASSPGPTDTQYF

SEQ ID NO: 289885 - protein, 11 aa, Homo sapiens
  CDR3 for alpha chain variable domain of TCR clone 144943 (TRAV3, TRAJ21)
CAVGNFNKFYF

SEQ ID NO: 289886 - protein, 14 aa, Homo sapiens
  CDR3 for beta chain variable domain of TCR clone 144943 (TRBV12-5, TRBJ2-5)
CACGSRTHQETQYF

SEQ ID NO: 289887 - protein, 13 aa, Homo sapiens
  CDR3 for alpha chain variable domain of TCR clone 144944 (TRAV39, TRAJ33)
CAANPDSNYQLIW

SEQ ID NO: 289888 - protein, 13 aa, Homo sapiens
  CDR3 for beta chain variable domain of TCR clone 144944 (TRBV18, TRBJ1-1)
CVSSGGRNTEAFF

SEQ ID NO: 289889 - protein, 11 aa, Homo sapiens
  CDR3 for alpha chain variable domain of TCR clone 144945 (TRAV17, TRAJ31)
CATSNNARLMF

SEQ ID NO: 289890 - protein, 16 aa, Homo sapiens
  CDR3 for beta chain variable domain of TCR clone 144945 (TRBV7-8, TRBJ2-4)
CASSAERTLSKNIQYF

SEQ ID NO: 289891 - protein, 20 aa, Homo sapiens
  CDR3 for alpha chain variable domain of TCR clone 144946 (TRAV1-1, TRAJ4)
CLLLLRCEGFLSGGYNKLIF

SEQ ID NO: 289892 - protein, 13 aa, Homo sapiens
  CDR3 for beta chain variable domain of TCR clone 144946 (TRBV5-1, TRBJ1-2)
CASSSTGVYGYTF

SEQ ID NO: 289893 - protein, 14 aa, Homo sapiens
  CDR3 for alpha chain variable domain of TCR clone 144947 (TRAV8-2, TRAJ4)
CVVSPSGGYNKLIF

SEQ ID NO: 289894 - protein, 15 aa, Homo sapiens
  CDR3 for beta chain variable domain of TCR clone 144947 (TRBV10-3, TRBJ1-3)
CAISDSQGAGNTIYF

SEQ ID NO: 289895 - protein, 16 aa, Homo sapiens
  CDR3 for alpha chain variable domain of TCR clone 144948 (TRAV14/DV4, TRAJ53)
CAMREGGGGSNYKLTF

SEQ ID NO: 289896 - protein, 13 aa, Homo sapiens
  CDR3 for beta chain variable domain of TCR clone 144948 (TRBV27, TRBJ2-7)
CASSFVSSYEQYF

SEQ ID NO: 289897 - protein, 14 aa, Homo sapiens
  CDR3 for alpha chain variable domain of TCR clone 144949 (TRAV38-1, TRAJ45)
CAYYSGGGADGLTF

SEQ ID NO: 289898 - protein, 15 aa, Homo sapiens
  CDR3 for beta chain variable domain of TCR clone 144949 (TRBV19, TRBJ1-1)
CASTSGQIQNTEAFF

SEQ ID NO: 289899 - protein, 16 aa, Homo sapiens
  CDR3 for alpha chain variable domain of TCR clone 144950 (TRAV23/DV6, TRAJ9)
CAASIGGNTGGFKTIF

SEQ ID NO: 289900 - protein, 15 aa, Homo sapiens
  CDR3 for beta chain variable domain of TCR clone 144950 (TRBV6-3, TRBJ2-7)
CASSSPGTVLDEQYF

SEQ ID NO: 289901 - protein, 16 aa, Homo sapiens
  CDR3 for alpha chain variable domain of TCR clone 144951 (TRAV12-3, TRAJ53)
CAMSPGSGGSNYKLTF

SEQ ID NO: 289902 - protein, 15 aa, Homo sapiens
  CDR3 for beta chain variable domain of TCR clone 144951 (TRBV7-2, TRBJ2-1)
CASSSGLAGGNEQLF

SEQ ID NO: 289903 - protein, 12 aa, Homo sapiens
  CDR3 for alpha chain variable domain of TCR clone 144952 (TRAV13-1, TRAJ42)
SVLRGSQGNLIF

SEQ ID NO: 289904 - protein, 13 aa, Homo sapiens
  CDR3 for beta chain variable domain of TCR clone 144952 (TRBV2, TRBJ1-4)
CASSELGVEKPFF

SEQ ID NO: 289905 - protein, 14 aa, Homo sapiens
  CDR3 for alpha chain variable domain of TCR clone 144953 (TRAV2, TRAJ37)
WAVDFPSNTGKLIF

SEQ ID NO: 289906 - protein, 15 aa, Homo sapiens
  CDR3 for beta chain variable domain of TCR clone 144953 (TRBV20-1, TRBJ1-1)
CSASRGVTGNTEAFF

SEQ ID NO: 289907 - protein, 17 aa, Homo sapiens
  CDR3 for alpha chain variable domain of TCR clone 144954 (TRAV13-1, TRAJ52)
CAANSGAGGTSYGKLTF

SEQ ID NO: 289908 - protein, 17 aa, Homo sapiens
  CDR3 for beta chain variable domain of TCR clone 144954 (TRBV11-2, TRBJ2-1)
CASSLYPPGVEYNEQFF

SEQ ID NO: 289909 - protein, 16 aa, Homo sapiens
  CDR3 for alpha chain variable domain of TCR clone 144955 (TRAV1-1, TRAJ45)
CSVGAYSGGGADGLTF

SEQ ID NO: 289910 - protein, 13 aa, Homo sapiens
  CDR3 for beta chain variable domain of TCR clone 144955 (TRBV20-1, TRBJ1-2)
CSARGTADYGYTF

SEQ ID NO: 289911 - protein, 14 aa, Homo sapiens
  CDR3 for alpha chain variable domain of TCR clone 144956 (TRAV16, TRAJ17)
CALSGRAAGNKLTF

SEQ ID NO: 289912 - protein, 15 aa, Homo sapiens
  CDR3 for beta chain variable domain of TCR clone 144956 (TRBV19, TRBJ1-5)
CASSIVWADNQPQHF

SEQ ID NO: 289913 - protein, 14 aa, Homo sapiens
  CDR3 for alpha chain variable domain of TCR clone 144957 (TRAV12-3, TRAJ10)
SHLPLTGGGNKLTF

SEQ ID NO: 289914 - protein, 17 aa, Homo sapiens
  CDR3 for beta chain variable domain of TCR clone 144957 (TRBV13, TRBJ2-3)
CASSLSRGAGGRNTQYF

SEQ ID NO: 289915 - protein, 14 aa, Homo sapiens
  CDR3 for alpha chain variable domain of TCR clone 144958 (TRAV1-2, TRAJ8)
CAVREETGFQKLVF

SEQ ID NO: 289916 - protein, 16 aa, Homo sapiens
  CDR3 for beta chain variable domain of TCR clone 144958 (TRBV4-1, TRBJ1-4)
CASSQDLRRGGEKLFF

SEQ ID NO: 289917 - protein, 14 aa, Homo sapiens
  CDR3 for alpha chain variable domain of TCR clone 144959 (TRAV8-3, TRAJ23)
CAVIIYNQGGKLIF

SEQ ID NO: 289918 - protein, 14 aa, Homo sapiens
  CDR3 for beta chain variable domain of TCR clone 144959 (TRBV11-2, TRBJ2-3)
CASSLYAGRDTQYF

SEQ ID NO: 289919 - protein, 14 aa, Homo sapiens
  CDR3 for alpha chain variable domain of TCR clone 144960 (TRAV25, TRAJ22)
CAVRSSGSARQLTF

SEQ ID NO: 289920 - protein, 13 aa, Homo sapiens
  CDR3 for beta chain variable domain of TCR clone 144960 (TRBV27, TRBJ1-1)
CASSLSIGAEAFF

SEQ ID NO: 289921 - protein, 15 aa, Homo sapiens
  CDR3 for alpha chain variable domain of TCR clone 144961 (TRAV12-2, TRAJ53)
CAVNGGGGSNYKLKF

SEQ ID NO: 289922 - protein, 14 aa, Homo sapiens
  CDR3 for beta chain variable domain of TCR clone 144961 (TRBV12-5, TRBJ2-5)
CASGSRTHQETQYF

SEQ ID NO: 289923 - protein, 15 aa, Homo sapiens
  CDR3 for alpha chain variable domain of TCR clone 144962 (TRAV17, TRAJ48)
CATDETNFGNEKLTF

SEQ ID NO: 289924 - protein, 14 aa, Homo sapiens
  CDR3 for beta chain variable domain of TCR clone 144962 (TRBV10-3, TRBJ1-3)
CAIRGQEAGNTIYF

SEQ ID NO: 289925 - protein, 14 aa, Homo sapiens
  CDR3 for alpha chain variable domain of TCR clone 144963 (TRAV14/DV4, TRAJ42)
CPRGSLRSQGNLIF

SEQ ID NO: 289926 - protein, 17 aa, Homo sapiens
  CDR3 for beta chain variable domain of TCR clone 144963 (TRBV7-2, TRBJ2-2)
CASSPRGAGEGTGELFF

SEQ ID NO: 289927 - protein, 16 aa, Homo sapiens
  CDR3 for alpha chain variable domain of TCR clone 144964 (TRAV8-3, TRAJ44)
CAVGTLITGTASKLTF

SEQ ID NO: 289928 - protein, 13 aa, Homo sapiens
  CDR3 for beta chain variable domain of TCR clone 144964 (TRBV11-2, TRBJ2-1)
CASSLRLTHEQFF

SEQ ID NO: 289929 - protein, 14 aa, Homo sapiens
  CDR3 for alpha chain variable domain of TCR clone 144965 (TRAV26-1, TRAJ38)
CIADNAGNNRKLIW

SEQ ID NO: 289930 - protein, 13 aa, Homo sapiens
  CDR3 for beta chain variable domain of TCR clone 144965 (TRBV2, TRBJ2-1)
CASTRDRNNEQFF

SEQ ID NO: 289931 - protein, 14 aa, Homo sapiens
  CDR3 for alpha chain variable domain of TCR clone 144966 (TRAV26-1, TRAJ11)
CIVPLYSGYSTLTF

SEQ ID NO: 289932 - protein, 13 aa, Homo sapiens
  CDR3 for beta chain variable domain of TCR clone 144966 (TRBV10-3, TRBJ2-7)
CSSKLAVNYEQYF

SEQ ID NO: 289933 - protein, 15 aa, Homo sapiens
  CDR3 for alpha chain variable domain of TCR clone 144967 (TRAV12-1, TRAJ23)
CGERSRCNQGGKLIF

SEQ ID NO: 289934 - protein, 13 aa, Homo sapiens
  CDR3 for beta chain variable domain of TCR clone 144967 (TRBV7-6, TRBJ1-2)
CASSLVADYGYTF

SEQ ID NO: 289935 - protein, 13 aa, Homo sapiens
  CDR3 for alpha chain variable domain of TCR clone 144968 (TRAV1-2, TRAJ9)
CAVLNTGGFKTIF

SEQ ID NO: 289936 - protein, 15 aa, Homo sapiens
  CDR3 for beta chain variable domain of TCR clone 144968 (TRBV3-1, TRBJ2-5)
CASSRGLALRESQYF

SEQ ID NO: 289937 - protein, 14 aa, Homo sapiens
  CDR3 for alpha chain variable domain of TCR clone 144969 (TRAV12-1, TRAJ15)
CVVNRNQAGTALIF

SEQ ID NO: 289938 - protein, 12 aa, Homo sapiens
  CDR3 for beta chain variable domain of TCR clone 144969 (TRBV28, TRBJ2-3)
CASSLYRDTQYF

SEQ ID NO: 289939 - protein, 17 aa, Homo sapiens
  CDR3 for alpha chain variable domain of TCR clone 144970 (TRAV3, TRAJ42)
YAVRDRDYGGSQGNLIF

SEQ ID NO: 289940 - protein, 15 aa, Homo sapiens
  CDR3 for beta chain variable domain of TCR clone 144970 (TRBV6-6, TRBJ2-7)
CASSYSYGGSYKQYF

SEQ ID NO: 289941 - protein, 15 aa, Homo sapiens
  CDR3 for alpha chain variable domain of TCR clone 144971 (TRAV17, TRAJ56)
CATEPFTGANSKVTF

SEQ ID NO: 289942 - protein, 15 aa, Homo sapiens
  CDR3 for beta chain variable domain of TCR clone 144971 (TRBV28, TRBJ1-5)
CASSRTGGYVQPQHF

SEQ ID NO: 289943 - protein, 15 aa, Homo sapiens
  CDR3 for alpha chain variable domain of TCR clone 144972 (TRAV35, TRAJ23)
CTGQRGYNQGGKLIF

SEQ ID NO: 289944 - protein, 16 aa, Homo sapiens
  CDR3 for beta chain variable domain of TCR clone 144972 (TRBV27, TRBJ2-1)
CASSSRLAGNYNEQFF

SEQ ID NO: 289945 - protein, 12 aa, Homo sapiens
  CDR3 for alpha chain variable domain of TCR clone 144973 (TRAV27, TRAJ35)
CAGADFGNVLQC

SEQ ID NO: 289946 - protein, 16 aa, Homo sapiens
  CDR3 for beta chain variable domain of TCR clone 144973 (TRBV6-1, TRBJ2-1)
CASILRQGSSYNEQFF

SEQ ID NO: 289947 - protein, 12 aa, Homo sapiens
  CDR3 for alpha chain variable domain of TCR clone 144974 (TRAV13-1, TRAJ21)
CAAKEGFNKFYF

SEQ ID NO: 289948 - protein, 16 aa, Homo sapiens
  CDR3 for beta chain variable domain of TCR clone 144974 (TRBV4-1, TRBJ2-5)
CASSHADRAGGETQHF

SEQ ID NO: 289949 - protein, 12 aa, Homo sapiens
  CDR3 for alpha chain variable domain of TCR clone 144975 (TRAV21, TRAJ39)
CAADNAGNMLTF

SEQ ID NO: 289950 - protein, 12 aa, Homo sapiens
  CDR3 for beta chain variable domain of TCR clone 144975 (TRBV5-4, TRBJ2-7)
CARSWAGQGENF

SEQ ID NO: 289951 - protein, 12 aa, Homo sapiens
  CDR3 for alpha chain variable domain of TCR clone 144976 (TRAV1-1, TRAJ8)
CAGGTGFQKLVF

SEQ ID NO: 289952 - protein, 15 aa, Homo sapiens
  CDR3 for beta chain variable domain of TCR clone 144976 (TRBV7-9, TRBJ1-4)
CASSRTGGFTEKLFF

SEQ ID NO: 289953 - protein, 15 aa, Homo sapiens
  CDR3 for alpha chain variable domain of TCR clone 144977 (TRAV3, TRAJ11)
CAVRDRGSGYSTLTF

SEQ ID NO: 289954 - protein, 15 aa, Homo sapiens
  CDR3 for beta chain variable domain of TCR clone 144977 (TRBV11-3, TRBJ2-7)
CASSPGPASSYEQYF

SEQ ID NO: 289955 - protein, 13 aa, Homo sapiens
  CDR3 for alpha chain variable domain of TCR clone 144978 (TRAV38-2/DV8, TRAJ34)
CPYRTWNTDKLIF

SEQ ID NO: 289956 - protein, 18 aa, Homo sapiens
  CDR3 for beta chain variable domain of TCR clone 144978 (TRBV6-6, TRBJ1-3)
CASSYSKWDSISGNTIYF

SEQ ID NO: 289957 - protein, 12 aa, Homo sapiens
  CDR3 for alpha chain variable domain of TCR clone 144979 (TRAV12-1, TRAJ40)
CVVHSGTYKYIF

SEQ ID NO: 289958 - protein, 15 aa, Homo sapiens
  CDR3 for beta chain variable domain of TCR clone 144979 (TRBV7-9, TRBJ1-6)
CASSSPGRGNSPLHF

SEQ ID NO: 289959 - protein, 21 aa, Homo sapiens
  CDR3 for alpha chain variable domain of TCR clone 144980 (TRAV1-1, TRAJ6)
CLLLLRCERLERTGGSYIPTF

SEQ ID NO: 289960 - protein, 19 aa, Homo sapiens
  CDR3 for beta chain variable domain of TCR clone 144980 (TRBV7-2, TRBJ2-3)
CASSFLSRNWGGGTDTQYF

SEQ ID NO: 289961 - protein, 13 aa, Homo sapiens
  CDR3 for alpha chain variable domain of TCR clone 144981 (TRAV3, TRAJ27)
CALRPLGAGKSTF

SEQ ID NO: 289962 - protein, 16 aa, Homo sapiens
  CDR3 for beta chain variable domain of TCR clone 144981 (TRBV10-3, TRBJ2-1)
CAISLTSGNSYNEQFF

SEQ ID NO: 289963 - protein, 16 aa, Homo sapiens
  CDR3 for alpha chain variable domain of TCR clone 144982 (TRAV30, TRAJ24)
CGTEIVDADSWGKFQF

SEQ ID NO: 289964 - protein, 13 aa, Homo sapiens
  CDR3 for beta chain variable domain of TCR clone 144982 (TRBV18, TRBJ2-3)
CASSPTNGDTQYF

SEQ ID NO: 289965 - protein, 11 aa, Homo sapiens
  CDR3 for alpha chain variable domain of TCR clone 144983 (TRAV17, TRAJ36)
CAPTGANNLFF

SEQ ID NO: 289966 - protein, 17 aa, Homo sapiens
  CDR3 for beta chain variable domain of TCR clone 144983 (TRBV10-3, TRBJ2-2)
CAISESGAGGLVGELFF

SEQ ID NO: 289967 - protein, 14 aa, Homo sapiens
  CDR3 for alpha chain variable domain of TCR clone 144984 (TRAV8-3, TRAJ4)
CAVGASGGYNKPIF

SEQ ID NO: 289968 - protein, 17 aa, Homo sapiens
  CDR3 for beta chain variable domain of TCR clone 144984 (TRBV11-2, TRBJ2-1)
CASSLYPPGVEYNEQFF

SEQ ID NO: 289969 - protein, 14 aa, Homo sapiens
  CDR3 for alpha chain variable domain of TCR clone 144985 (TRAV8-4, TRAJ17)
CAVSDQAAGNKLTF

SEQ ID NO: 289970 - protein, 15 aa, Homo sapiens
  CDR3 for beta chain variable domain of TCR clone 144985 (TRBV7-2, TRBJ1-2)
CASSLAPDRGLGYSF

SEQ ID NO: 289971 - protein, 14 aa, Homo sapiens
  CDR3 for alpha chain variable domain of TCR clone 144986 (TRAV12-3, TRAJ42)
CAMNYGGSLGNLIF

SEQ ID NO: 289972 - protein, 15 aa, Homo sapiens
  CDR3 for beta chain variable domain of TCR clone 144986 (TRBV5-7, TRBJ1-5)
CASSYGKLWDQPQHF

SEQ ID NO: 289973 - protein, 18 aa, Homo sapiens
  CDR3 for alpha chain variable domain of TCR clone 144987 (TRAV26-1, TRAJ23)
CIVRVGLEVWNQGGKRIF

SEQ ID NO: 289974 - protein, 16 aa, Homo sapiens
  CDR3 for beta chain variable domain of TCR clone 144987 (TRBV12-4, TRBJ2-5)
CASSFSVRGRQETQYF

SEQ ID NO: 289975 - protein, 12 aa, Homo sapiens
  CDR3 for alpha chain variable domain of TCR clone 144988 (TRAV1-1, TRAJ9)
CAVDTGGFKTIF

SEQ ID NO: 289976 - protein, 15 aa, Homo sapiens
  CDR3 for beta chain variable domain of TCR clone 144988 (TRBV20-1, TRBJ2-5)
CSAEGTGGLQETQYF

SEQ ID NO: 289977 - protein, 13 aa, Homo sapiens
  CDR3 for alpha chain variable domain of TCR clone 144989 (TRAV27, TRAJ41)
CAGEGNSGYALNF

SEQ ID NO: 289978 - protein, 13 aa, Homo sapiens
  CDR3 for beta chain variable domain of TCR clone 144989 (TRBV10-3, TRBJ2-7)
CASKRAVNYEQYF

SEQ ID NO: 289979 - protein, 14 aa, Homo sapiens
  CDR3 for alpha chain variable domain of TCR clone 144990 (TRAV29/DV5, TRAJ22)
CAASATGSARQLTI

SEQ ID NO: 289980 - protein, 14 aa, Homo sapiens
  CDR3 for beta chain variable domain of TCR clone 144990 (TRBV19, TRBJ2-1)
CASSPGLAPNEQFF

SEQ ID NO: 289981 - protein, 23 aa, Homo sapiens
  CDR3 for alpha chain variable domain of TCR clone 144991 (TRAV8-4, TRAJ38)
CARLNAGNNHIQNPDPAVYQLRD

SEQ ID NO: 289982 - protein, 13 aa, Homo sapiens
  CDR3 for beta chain variable domain of TCR clone 144991 (TRBV6-1, TRBJ2-7)
CASSEPLYEQYFG

SEQ ID NO: 289983 - protein, 12 aa, Homo sapiens
  CDR3 for alpha chain variable domain of TCR clone 144992 (TRAV35, TRAJ49)
CAGWNTGNQFYC

SEQ ID NO: 289984 - protein, 16 aa, Homo sapiens
  CDR3 for beta chain variable domain of TCR clone 144992 (TRBV5-1, TRBJ2-2)
CASSLWDTTNTGELFF

SEQ ID NO: 289985 - protein, 14 aa, Homo sapiens
  CDR3 for alpha chain variable domain of TCR clone 144993 (TRAV12-3, TRAJ10)
SHLPLTGGGNKLTF

SEQ ID NO: 289986 - protein, 15 aa, Homo sapiens
  CDR3 for beta chain variable domain of TCR clone 144993 (TRBV28, TRBJ2-1)
CASRVGLDEYNEQFF

SEQ ID NO: 289987 - protein, 14 aa, Homo sapiens
  CDR3 for alpha chain variable domain of TCR clone 144994 (TRAV8-1, TRAJ15)
CAVNGQQAGTALIF

SEQ ID NO: 289988 - protein, 14 aa, Homo sapiens
  CDR3 for beta chain variable domain of TCR clone 144994 (TRBV7-6, TRBJ2-3)
CASSLGTVTDTQYF

SEQ ID NO: 289989 - protein, 14 aa, Homo sapiens
  CDR3 for alpha chain variable domain of TCR clone 144995 (TRAV12-2, TRAJ13)
CAVKKTGGYQKVTF

SEQ ID NO: 289990 - protein, 15 aa, Homo sapiens
  CDR3 for beta chain variable domain of TCR clone 144995 (TRBV7-9, TRBJ1-3)
CASSFRGSPGNTIYF

SEQ ID NO: 289991 - protein, 18 aa, Homo sapiens
  CDR3 for alpha chain variable domain of TCR clone 144996 (TRAV13-1, TRAJ52)
CAADFPNAGGTSYGNLTF

SEQ ID NO: 289992 - protein, 14 aa, Homo sapiens
  CDR3 for beta chain variable domain of TCR clone 144996 (TRBV11-2, TRBJ2-3)
CASSLYAGRDTQYF

SEQ ID NO: 289993 - protein, 11 aa, Homo sapiens
  CDR3 for alpha chain variable domain of TCR clone 144997 (TRAV2, TRAJ21)
CAVFNFNKFYF

SEQ ID NO: 289994 - protein, 16 aa, Homo sapiens
  CDR3 for beta chain variable domain of TCR clone 144997 (TRBV19, TRBJ2-1)
CASSNAGPSSYNEQFF

SEQ ID NO: 289995 - protein, 14 aa, Homo sapiens
  CDR3 for alpha chain variable domain of TCR clone 144998 (TRAV12-3, TRAJ42)
CAMNYGGSQGNLIF

SEQ ID NO: 289996 - protein, 12 aa, Homo sapiens
  CDR3 for beta chain variable domain of TCR clone 144998 (TRBV11-2, TRBJ2-2)
CASSLGGGELFL

SEQ ID NO: 289997 - protein, 14 aa, Homo sapiens
  CDR3 for alpha chain variable domain of TCR clone 144999 (TRAV20, TRAJ29)
GAVQAWVGNTPLVF

SEQ ID NO: 289998 - protein, 15 aa, Homo sapiens
  CDR3 for beta chain variable domain of TCR clone 144999 (TRBV29-1, TRBJ2-7)
CSVEFFDRGSYEQYF

SEQ ID NO: 289999 - protein, 17 aa, Homo sapiens
  CDR3 for alpha chain variable domain of TCR clone 145000 (TRAV13-1, TRAJ52)
YAASSGAGGTSYGKLTF

SEQ ID NO: 290000 - protein, 12 aa, Homo sapiens
  CDR3 for beta chain variable domain of TCR clone 145000 (TRBV11-2, TRBJ2-2)
CASSLGGGELFF

SEQ ID NO: 290001 - protein, 12 aa, Homo sapiens
  CDR3 for alpha chain variable domain of TCR clone 145001 (TRAV23/DV6, TRAJ16)
CAARGRGQKLLF

SEQ ID NO: 290002 - protein, 19 aa, Homo sapiens
  CDR3 for beta chain variable domain of TCR clone 145001 (TRBV7-2, TRBJ2-3)
CASSFLSRNWGGGTETQYF

SEQ ID NO: 290003 - protein, 21 aa, Homo sapiens
  CDR3 for alpha chain variable domain of TCR clone 145002 (TRAV30, TRAJ43)
GLPAQLLRNLLPIIELNDMRF

SEQ ID NO: 290004 - protein, 14 aa, Homo sapiens
  CDR3 for beta chain variable domain of TCR clone 145002 (TRBV27, TRBJ2-1)
CSSRHLGGGKEQFF

SEQ ID NO: 290005 - protein, 14 aa, Homo sapiens
  CDR3 for alpha chain variable domain of TCR clone 145003 (TRAV23/DV6, TRAJ4)
CAPNLSGGYNKLIF

SEQ ID NO: 290006 - protein, 11 aa, Homo sapiens
  CDR3 for beta chain variable domain of TCR clone 145003 (TRBV7-9, TRBJ2-3)
CASSPTDTQYF

SEQ ID NO: 290007 - protein, 14 aa, Homo sapiens
  CDR3 for alpha chain variable domain of TCR clone 145004 (TRAV4, TRAJ20)
CLVGDFINDYKPSF

SEQ ID NO: 290008 - protein, 14 aa, Homo sapiens
  CDR3 for beta chain variable domain of TCR clone 145004 (TRBV12-5, TRBJ2-5)
CASGSRTHQETQYF

SEQ ID NO: 290009 - protein, 11 aa, Homo sapiens
  CDR3 for alpha chain variable domain of TCR clone 145005 (TRAV13-1, TRAJ30)
CAASRDDKIIF

SEQ ID NO: 290010 - protein, 15 aa, Homo sapiens
  CDR3 for beta chain variable domain of TCR clone 145005 (TRBV18, TRBJ1-1)
CASYPSSWVNTEAFF

SEQ ID NO: 290011 - protein, 14 aa, Homo sapiens
  CDR3 for alpha chain variable domain of TCR clone 145006 (TRAV12-2, TRAJ13)
CAVKKTGGYQKVTF

SEQ ID NO: 290012 - protein, 15 aa, Homo sapiens
  CDR3 for beta chain variable domain of TCR clone 145006 (TRBV20-1, TRBJ2-1)
CSARGIGGTYNEQFF

SEQ ID NO: 290013 - protein, 14 aa, Homo sapiens
  CDR3 for alpha chain variable domain of TCR clone 145007 (TRAV13-1, TRAJ9)
CAASALTGGFKTNF

SEQ ID NO: 290014 - protein, 16 aa, Homo sapiens
  CDR3 for beta chain variable domain of TCR clone 145007 (TRBV7-8, TRBJ2-4)
CASSAGRTLAKNIQYF

SEQ ID NO: 290015 - protein, 11 aa, Homo sapiens
  CDR3 for alpha chain variable domain of TCR clone 145008 (TRAV12-2, TRAJ29)
CAVTLRSTLVF

SEQ ID NO: 290016 - protein, 15 aa, Homo sapiens
  CDR3 for beta chain variable domain of TCR clone 145008 (TRBV4-1, TRBJ2-5)
CASSQWDLYQETQYF

SEQ ID NO: 290017 - protein, 13 aa, Homo sapiens
  CDR3 for alpha chain variable domain of TCR clone 145009 (TRAV9-2, TRAJ53)
CALSGGINYKLTF

SEQ ID NO: 290018 - protein, 17 aa, Homo sapiens
  CDR3 for beta chain variable domain of TCR clone 145009 (TRBV11-2, TRBJ2-1)
CASSLYPPGVEYNEQFF

SEQ ID NO: 290019 - protein, 12 aa, Homo sapiens
  CDR3 for alpha chain variable domain of TCR clone 145010 (TRAV29/DV5, TRAJ34)
CAASGNTDKLIF

SEQ ID NO: 290020 - protein, 15 aa, Homo sapiens
  CDR3 for beta chain variable domain of TCR clone 145010 (TRBV7-2, TRBJ2-3)
CASSLNLRDTDTQYF

SEQ ID NO: 290021 - protein, 13 aa, Homo sapiens
  CDR3 for alpha chain variable domain of TCR clone 145011 (TRAV20, TRAJ48)
CAVQGVGNEQLTF

SEQ ID NO: 290022 - protein, 14 aa, Homo sapiens
  CDR3 for beta chain variable domain of TCR clone 145011 (TRBV27, TRBJ2-7)
CASSFRDGPYEQYF

SEQ ID NO: 290023 - protein, 15 aa, Homo sapiens
  CDR3 for alpha chain variable domain of TCR clone 145012 (TRAV12-3, TRAJ6)
CAMSATSVGSYIPTF

SEQ ID NO: 290024 - protein, 11 aa, Homo sapiens
  CDR3 for beta chain variable domain of TCR clone 145012 (TRBV20-1, TRBJ1-5)
CSAQGDQPQHF

SEQ ID NO: 290025 - protein, 13 aa, Homo sapiens
  CDR3 for alpha chain variable domain of TCR clone 145013 (TRAV26-1, TRAJ48)
CIVRVVGDEKLTF

SEQ ID NO: 290026 - protein, 19 aa, Homo sapiens
  CDR3 for beta chain variable domain of TCR clone 145013 (TRBV11-3, TRBJ2-2)
CASSTRPGAKTTNAGELFF

SEQ ID NO: 290027 - protein, 10 aa, Homo sapiens
  CDR3 for alpha chain variable domain of TCR clone 145014 (TRAV1-2, TRAJ31)
CAFFDARLMF

SEQ ID NO: 290028 - protein, 14 aa, Homo sapiens
  CDR3 for beta chain variable domain of TCR clone 145014 (TRBV12-4, TRBJ1-1)
CASSSARGYTEAFF

SEQ ID NO: 290029 - protein, 13 aa, Homo sapiens
  CDR3 for alpha chain variable domain of TCR clone 145015 (TRAV1-1, TRAJ9)
CAAKNTGGFKTIF

SEQ ID NO: 290030 - protein, 16 aa, Homo sapiens
  CDR3 for beta chain variable domain of TCR clone 145015 (TRBV12-4, TRBJ1-5)
CASSRPVGGSNQPQHF

SEQ ID NO: 290031 - protein, 14 aa, Homo sapiens
  CDR3 for alpha chain variable domain of TCR clone 145016 (TRAV12-3, TRAJ27)
CAMSSTPNAGKSTF

SEQ ID NO: 290032 - protein, 15 aa, Homo sapiens
  CDR3 for beta chain variable domain of TCR clone 145016 (TRBV7-2, TRBJ1-5)
CASSLGRQRSQPQHF

SEQ ID NO: 290033 - protein, 16 aa, Homo sapiens
  CDR3 for alpha chain variable domain of TCR clone 145017 (TRAV26-1, TRAJ36)
CIVRVPDQTGTNNLFF

SEQ ID NO: 290034 - protein, 12 aa, Homo sapiens
  CDR3 for beta chain variable domain of TCR clone 145017 (TRBV29-1, TRBJ2-3)
CSVTGGADTQYF

SEQ ID NO: 290035 - protein, 12 aa, Homo sapiens
  CDR3 for alpha chain variable domain of TCR clone 145018 (TRAV13-1, TRAJ53)
AASGGSNYKLKF

SEQ ID NO: 290036 - protein, 15 aa, Homo sapiens
  CDR3 for beta chain variable domain of TCR clone 145018 (TRBV20-1, TRBJ2-7)
CSARDRVSGMDEQYF

SEQ ID NO: 290037 - protein, 14 aa, Homo sapiens
  CDR3 for alpha chain variable domain of TCR clone 145019 (TRAV26-1, TRAJ38)
CIDDNAANNRKLIW

SEQ ID NO: 290038 - protein, 13 aa, Homo sapiens
  CDR3 for beta chain variable domain of TCR clone 145019 (TRBV20-1, TRBJ1-1)
CSARGGGNTEAFF

SEQ ID NO: 290039 - protein, 15 aa, Homo sapiens
  CDR3 for alpha chain variable domain of TCR clone 145020 (TRAV8-6, TRAJ10)
CAVSSKGGGGNKLTF

SEQ ID NO: 290040 - protein, 13 aa, Homo sapiens
  CDR3 for beta chain variable domain of TCR clone 145020 (TRBV12-4, TRBJ2-5)
CASRLAVQETQYF

SEQ ID NO: 290041 - protein, 11 aa, Homo sapiens
  CDR3 for alpha chain variable domain of TCR clone 145021 (TRAV1-2, TRAJ31)
CAVNNNASLMF

SEQ ID NO: 290042 - protein, 15 aa, Homo sapiens
  CDR3 for beta chain variable domain of TCR clone 145021 (TRBV28, TRBJ2-1)
CASSIIAGGRSEQLF

SEQ ID NO: 290043 - protein, 14 aa, Homo sapiens
  CDR3 for alpha chain variable domain of TCR clone 145022 (TRAV1-2, TRAJ16)
CAVNRFSDGKKLLF

SEQ ID NO: 290044 - protein, 15 aa, Homo sapiens
  CDR3 for beta chain variable domain of TCR clone 145022 (TRBV9, TRBJ1-6)
CSSSVAGTGDSLLHF

SEQ ID NO: 290045 - protein, 12 aa, Homo sapiens
  CDR3 for alpha chain variable domain of TCR clone 145023 (TRAV21, TRAJ11)
CAVRGGTSTLTF

SEQ ID NO: 290046 - protein, 15 aa, Homo sapiens
  CDR3 for beta chain variable domain of TCR clone 145023 (TRBV6-1, TRBJ2-7)
CASSEPIAATTEQYF

SEQ ID NO: 290047 - protein, 13 aa, Homo sapiens
  CDR3 for alpha chain variable domain of TCR clone 145024 (TRAV35, TRAJ56)
CAGPTGANSKLTF

SEQ ID NO: 290048 - protein, 16 aa, Homo sapiens
  CDR3 for beta chain variable domain of TCR clone 145024 (TRBV12-4, TRBJ2-3)
CASSFPSNTNTDTQCF

SEQ ID NO: 290049 - protein, 16 aa, Homo sapiens
  CDR3 for alpha chain variable domain of TCR clone 145025 (TRAV25, TRAJ24)
CAQRRGTTDSWGKLQF

SEQ ID NO: 290050 - protein, 14 aa, Homo sapiens
  CDR3 for beta chain variable domain of TCR clone 145025 (TRBV6-6, TRBJ1-5)
CASSYGPAKQPQHF

SEQ ID NO: 290051 - protein, 11 aa, Homo sapiens
  CDR3 for alpha chain variable domain of TCR clone 145026 (TRAV3, TRAJ21)
CAVANFNKFYF

SEQ ID NO: 290052 - protein, 16 aa, Homo sapiens
  CDR3 for beta chain variable domain of TCR clone 145026 (TRBV19, TRBJ2-1)
CASIKAGPSSYNEQFF

SEQ ID NO: 290053 - protein, 18 aa, Homo sapiens
  CDR3 for alpha chain variable domain of TCR clone 145027 (TRAV21, TRAJ52)
CAVRPSPAGGTSYGKLTL

SEQ ID NO: 290054 - protein, 13 aa, Homo sapiens
  CDR3 for beta chain variable domain of TCR clone 145027 (TRBV20-1, TRBJ2-5)
CSARGDYQETQYF

SEQ ID NO: 290055 - protein, 14 aa, Homo sapiens
  CDR3 for alpha chain variable domain of TCR clone 145028 (TRAV12-3, TRAJ10)
SHLPLTGGGNKLTF

SEQ ID NO: 290056 - protein, 13 aa, Homo sapiens
  CDR3 for beta chain variable domain of TCR clone 145028 (TRBV20-1, TRBJ2-2)
RSASAAGTGELFF

SEQ ID NO: 290057 - protein, 15 aa, Homo sapiens
  CDR3 for alpha chain variable domain of TCR clone 145029 (TRAV13-1, TRAJ3)
CAASRLASSASKIIF

SEQ ID NO: 290058 - protein, 16 aa, Homo sapiens
  CDR3 for beta chain variable domain of TCR clone 145029 (TRBV25-1, TRBJ1-5)
CASGAPTVNSNQPQHF

SEQ ID NO: 290059 - protein, 17 aa, Homo sapiens
  CDR3 for alpha chain variable domain of TCR clone 145030 (TRAV3, TRAJ6)
CAVRDGPRAGGSYIPTF

SEQ ID NO: 290060 - protein, 14 aa, Homo sapiens
  CDR3 for beta chain variable domain of TCR clone 145030 (TRBV7-3, TRBJ2-3)
CASSLTGGTDTQYF

SEQ ID NO: 290061 - protein, 14 aa, Homo sapiens
  CDR3 for alpha chain variable domain of TCR clone 145031 (TRAV26-1, TRAJ44)
CIYPLPGTASKLTF

SEQ ID NO: 290062 - protein, 16 aa, Homo sapiens
  CDR3 for beta chain variable domain of TCR clone 145031 (TRBV19, TRBJ2-1)
CASSKAGPSSYNEQFF

SEQ ID NO: 290063 - protein, 21 aa, Homo sapiens
  CDR3 for alpha chain variable domain of TCR clone 145032 (TRAV9-2, )
CALIQIGDIQNPDPAVYPLRD

SEQ ID NO: 290064 - protein, 17 aa, Homo sapiens
  CDR3 for beta chain variable domain of TCR clone 145032 (TRBV7-8, TRBJ2-6)
CASSAGTGGAGANVLTF

SEQ ID NO: 290065 - protein, 16 aa, Homo sapiens
  CDR3 for alpha chain variable domain of TCR clone 145033 (TRAV8-4, TRAJ52)
CAVRLEGGTSYGKLTF

SEQ ID NO: 290066 - protein, 15 aa, Homo sapiens
  CDR3 for beta chain variable domain of TCR clone 145033 (TRBV7-2, TRBJ1-2)
CASSPRAGWNYGYTF

SEQ ID NO: 290067 - protein, 17 aa, Homo sapiens
  CDR3 for alpha chain variable domain of TCR clone 145034 (TRAV3, TRAJ6)
CAVRDGPRAGGRYIHTF

SEQ ID NO: 290068 - protein, 14 aa, Homo sapiens
  CDR3 for beta chain variable domain of TCR clone 145034 (TRBV7-2, TRBJ2-7)
CASSPKTSFYEQYF

SEQ ID NO: 290069 - protein, 16 aa, Homo sapiens
  CDR3 for alpha chain variable domain of TCR clone 145035 (TRAV30, TRAJ24)
CGTEIVDADSWGKFQL

SEQ ID NO: 290070 - protein, 13 aa, Homo sapiens
  CDR3 for beta chain variable domain of TCR clone 145035 (TRBV18, TRBJ1-2)
CASSASATEGYTF

SEQ ID NO: 290071 - protein, 14 aa, Homo sapiens
  CDR3 for alpha chain variable domain of TCR clone 145036 (TRAV20, TRAJ37)
CAVQSSSNTGKLIF

SEQ ID NO: 290072 - protein, 13 aa, Homo sapiens
  CDR3 for beta chain variable domain of TCR clone 145036 (TRBV19, TRBJ2-7)
CASSLTTSYEQYF

SEQ ID NO: 290073 - protein, 16 aa, Homo sapiens
  CDR3 for alpha chain variable domain of TCR clone 145037 (TRAV8-1, TRAJ33)
CAVNARGGDSNYQLIW

SEQ ID NO: 290074 - protein, 15 aa, Homo sapiens
  CDR3 for beta chain variable domain of TCR clone 145037 (TRBV7-3, TRBJ2-1)
CASSPTGGGEVEQFF

SEQ ID NO: 290075 - protein, 10 aa, Homo sapiens
  CDR3 for alpha chain variable domain of TCR clone 145038 (TRAV16, TRAJ22)
SAMYLRQMTF

SEQ ID NO: 290076 - protein, 15 aa, Homo sapiens
  CDR3 for beta chain variable domain of TCR clone 145038 (TRBV7-9, TRBJ1-6)
CASSSPGRGNSPLHI

SEQ ID NO: 290077 - protein, 13 aa, Homo sapiens
  CDR3 for alpha chain variable domain of TCR clone 145039 (TRAV12-3, TRAJ9)
CAMRNTGGFKTIF

SEQ ID NO: 290078 - protein, 17 aa, Homo sapiens
  CDR3 for beta chain variable domain of TCR clone 145039 (TRBV12-4, TRBJ2-7)
CASSCHGWDRASYEQYF

SEQ ID NO: 290079 - protein, 18 aa, Homo sapiens
  CDR3 for alpha chain variable domain of TCR clone 145040 (TRAV13-1, TRAJ52)
CAAKNPNAGGTSYGKLTF

SEQ ID NO: 290080 - protein, 15 aa, Homo sapiens
  CDR3 for beta chain variable domain of TCR clone 145040 (TRBV6-5, TRBJ2-1)
CASSYDAGAGNEQFF

SEQ ID NO: 290081 - protein, 19 aa, Homo sapiens
  CDR3 for alpha chain variable domain of TCR clone 145041 (TRAV26-1, TRAJ22)
CCLLLHRWVFSGSARQLTF

SEQ ID NO: 290082 - protein, 19 aa, Homo sapiens
  CDR3 for beta chain variable domain of TCR clone 145041 (TRBV19, TRBJ2-5)
CASSIGQVTDFFLGETQYF

SEQ ID NO: 290083 - protein, 14 aa, Homo sapiens
  CDR3 for alpha chain variable domain of TCR clone 145042 (TRAV26-1, TRAJ38)
CIADNAGNNRKLIW

SEQ ID NO: 290084 - protein, 17 aa, Homo sapiens
  CDR3 for beta chain variable domain of TCR clone 145042 (TRBV19, TRBJ1-5)
CASNPNRGPGSNQPQHF

SEQ ID NO: 290085 - protein, 16 aa, Homo sapiens
  CDR3 for alpha chain variable domain of TCR clone 145043 (TRAV8-1, TRAJ39)
WAVNVPSYNAGNMLTF

SEQ ID NO: 290086 - protein, 15 aa, Homo sapiens
  CDR3 for beta chain variable domain of TCR clone 145043 (TRBV4-1, TRBJ2-3)
CASRSTRAGTDTQYF

SEQ ID NO: 290087 - protein, 13 aa, Homo sapiens
  CDR3 for alpha chain variable domain of TCR clone 145044 (TRAV2, TRAJ40)
CAVVTSGTYKYIF

SEQ ID NO: 290088 - protein, 14 aa, Homo sapiens
  CDR3 for beta chain variable domain of TCR clone 145044 (TRBV19, TRBJ2-1)
CASLTFVWSGEQFF

SEQ ID NO: 290089 - protein, 12 aa, Homo sapiens
  CDR3 for alpha chain variable domain of TCR clone 145045 (TRAV12-3, TRAJ17)
CAMTLTGNKLTF

SEQ ID NO: 290090 - protein, 22 aa, Homo sapiens
  CDR3 for beta chain variable domain of TCR clone 145045 (TRBV11-2, TRBJ1-4)
CASSLDITRRGIPRKDNEKLFF

SEQ ID NO: 290091 - protein, 15 aa, Homo sapiens
  CDR3 for alpha chain variable domain of TCR clone 145046 (TRAV38-2/DV8, TRAJ45)
CAYWDSGGGADGLIF

SEQ ID NO: 290092 - protein, 14 aa, Homo sapiens
  CDR3 for beta chain variable domain of TCR clone 145046 (TRBV7-2, TRBJ2-7)
CASRSQGAAYEQYF

SEQ ID NO: 290093 - protein, 12 aa, Homo sapiens
  CDR3 for alpha chain variable domain of TCR clone 145047 (TRAV16, TRAJ10)
CSRTGGGNKITF

SEQ ID NO: 290094 - protein, 12 aa, Homo sapiens
  CDR3 for beta chain variable domain of TCR clone 145047 (TRBV2, TRBJ1-1)
YCRWTVNTEAFF

SEQ ID NO: 290095 - protein, 15 aa, Homo sapiens
  CDR3 for alpha chain variable domain of TCR clone 145048 (TRAV38-1, TRAJ37)
CAFIYGSRNTGKLIF

SEQ ID NO: 290096 - protein, 12 aa, Homo sapiens
  CDR3 for beta chain variable domain of TCR clone 145048 (TRBV7-9, TRBJ2-7)
CASSFGSYEQYF

SEQ ID NO: 290097 - protein, 13 aa, Homo sapiens
  CDR3 for alpha chain variable domain of TCR clone 145049 (TRAV35, TRAJ57)
CAGSQGGPEKLVF

SEQ ID NO: 290098 - protein, 14 aa, Homo sapiens
  CDR3 for beta chain variable domain of TCR clone 145049 (TRBV25-1, TRBJ1-1)
CASTHLGGNTEAFF

SEQ ID NO: 290099 - protein, 14 aa, Homo sapiens
  CDR3 for alpha chain variable domain of TCR clone 145050 (TRAV26-1, TRAJ45)
CIEVTGGGAAGLTF

SEQ ID NO: 290100 - protein, 12 aa, Homo sapiens
  CDR3 for beta chain variable domain of TCR clone 145050 (TRBV12-4, TRBJ2-7)
CASSLGGYEQYF

SEQ ID NO: 290101 - protein, 12 aa, Homo sapiens
  CDR3 for alpha chain variable domain of TCR clone 145051 (TRAV8-6, TRAJ43)
CAVGHNNNELRF

SEQ ID NO: 290102 - protein, 14 aa, Homo sapiens
  CDR3 for beta chain variable domain of TCR clone 145051 (TRBV10-3, TRBJ1-1)
CAISDGSGVTEAFF

SEQ ID NO: 290103 - protein, 13 aa, Homo sapiens
  CDR3 for alpha chain variable domain of TCR clone 145052 (TRAV35, TRAJ42)
CAGFPGSQGNLIL

SEQ ID NO: 290104 - protein, 14 aa, Homo sapiens
  CDR3 for beta chain variable domain of TCR clone 145052 (TRBV29-1, TRBJ2-2)
CSVLAETNTGELFF

SEQ ID NO: 290105 - protein, 15 aa, Homo sapiens
  CDR3 for alpha chain variable domain of TCR clone 145053 (TRAV4, TRAJ31)
CCVLLPRGPDARLVF

SEQ ID NO: 290106 - protein, 15 aa, Homo sapiens
  CDR3 for beta chain variable domain of TCR clone 145053 (TRBV7-8, TRBJ1-2)
CASSLVLDEGLGYTF

SEQ ID NO: 290107 - protein, 14 aa, Homo sapiens
  CDR3 for alpha chain variable domain of TCR clone 145054 (TRAV17, TRAJ56)
CATDAKGANSKLTF

SEQ ID NO: 290108 - protein, 16 aa, Homo sapiens
  CDR3 for beta chain variable domain of TCR clone 145054 (TRBV12-5, TRBJ2-5)
CASGPRTSGNQETQYF

SEQ ID NO: 290109 - protein, 10 aa, Homo sapiens
  CDR3 for alpha chain variable domain of TCR clone 145055 (TRAV16, TRAJ22)
SAMYLRQLTF

SEQ ID NO: 290110 - protein, 15 aa, Homo sapiens
  CDR3 for beta chain variable domain of TCR clone 145055 (TRBV7-9, TRBJ1-6)
CASSSPGRGNSPHRF

SEQ ID NO: 290111 - protein, 16 aa, Homo sapiens
  CDR3 for alpha chain variable domain of TCR clone 145056 (TRAV35, TRAJ20)
CWTDPSSGFNDYKLSF

SEQ ID NO: 290112 - protein, 16 aa, Homo sapiens
  CDR3 for beta chain variable domain of TCR clone 145056 (TRBV4-3, TRBJ1-6)
CASSAQPGGEGSPLHF

SEQ ID NO: 290113 - protein, 14 aa, Homo sapiens
  CDR3 for alpha chain variable domain of TCR clone 145057 (TRAV8-3, TRAJ44)
CAVEDTGTTSKLTF

SEQ ID NO: 290114 - protein, 15 aa, Homo sapiens
  CDR3 for beta chain variable domain of TCR clone 145057 (TRBV7-2, TRBJ1-1)
CASSSPGGEETEAFF

SEQ ID NO: 290115 - protein, 13 aa, Homo sapiens
  CDR3 for alpha chain variable domain of TCR clone 145058 (TRAV8-6, TRAJ21)
CAVSPSSFNKFYF

SEQ ID NO: 290116 - protein, 14 aa, Homo sapiens
  CDR3 for beta chain variable domain of TCR clone 145058 (TRBV7-9, TRBJ2-5)
CASRLDTAQETQYF

SEQ ID NO: 290117 - protein, 18 aa, Homo sapiens
  CDR3 for alpha chain variable domain of TCR clone 145059 (TRAV21, TRAJ52)
CAVRPSPAGGTSYGKLTF

SEQ ID NO: 290118 - protein, 13 aa, Homo sapiens
  CDR3 for beta chain variable domain of TCR clone 145059 (TRBV20-1, TRBJ1-1)
CSARGGANTEAFF

SEQ ID NO: 290119 - protein, 15 aa, Homo sapiens
  CDR3 for alpha chain variable domain of TCR clone 145060 (TRAV8-6, TRAJ6)
CAVRFTSGGSYIPTF

SEQ ID NO: 290120 - protein, 14 aa, Homo sapiens
  CDR3 for beta chain variable domain of TCR clone 145060 (TRBV6-1, TRBJ1-3)
CASSEDRGIDTIYF

SEQ ID NO: 290121 - protein, 15 aa, Homo sapiens
  CDR3 for alpha chain variable domain of TCR clone 145061 (TRAV12-1, TRAJ44)
CVVFVNTGTASKLTF

SEQ ID NO: 290122 - protein, 13 aa, Homo sapiens
  CDR3 for beta chain variable domain of TCR clone 145061 (TRBV20-1, TRBJ1-1)
CSARGGGNTEAFF

SEQ ID NO: 290123 - protein, 12 aa, Homo sapiens
  CDR3 for alpha chain variable domain of TCR clone 145062 (TRAV29/DV5, TRAJ15)
CASNQARTALIF

SEQ ID NO: 290124 - protein, 15 aa, Homo sapiens
  CDR3 for beta chain variable domain of TCR clone 145062 (TRBV11-2, TRBJ2-2)
CASSSDRVNAGELFF

SEQ ID NO: 290125 - protein, 12 aa, Homo sapiens
  CDR3 for alpha chain variable domain of TCR clone 145063 (TRAV5, TRAJ3)
CAEDSSASNIIF

SEQ ID NO: 290126 - protein, 12 aa, Homo sapiens
  CDR3 for beta chain variable domain of TCR clone 145063 (TRBV12-4, TRBJ2-1)
CASSPGRNEQFF

SEQ ID NO: 290127 - protein, 12 aa, Homo sapiens
  CDR3 for alpha chain variable domain of TCR clone 145064 (TRAV9-2, TRAJ20)
CALSSDDYKLSF

SEQ ID NO: 290128 - protein, 17 aa, Homo sapiens
  CDR3 for beta chain variable domain of TCR clone 145064 (TRBV12-4, TRBJ1-1)
CASSLSGFRTMNTEAFF

SEQ ID NO: 290129 - protein, 15 aa, Homo sapiens
  CDR3 for alpha chain variable domain of TCR clone 145065 (TRAV8-4, TRAJ42)
CAVSDDRGSQGNLIL

SEQ ID NO: 290130 - protein, 17 aa, Homo sapiens
  CDR3 for beta chain variable domain of TCR clone 145065 (TRBV11-2, TRBJ2-1)
CASSLYPPGVEYNEQFF

SEQ ID NO: 290131 - protein, 10 aa, Homo sapiens
  CDR3 for alpha chain variable domain of TCR clone 145066 (TRAV2, TRAJ15)
RGQAGTALIS

SEQ ID NO: 290132 - protein, 12 aa, Homo sapiens
  CDR3 for beta chain variable domain of TCR clone 145066 (TRBV11-2, TRBJ2-2)
CASSLGGGELFF

SEQ ID NO: 290133 - protein, 12 aa, Homo sapiens
  CDR3 for alpha chain variable domain of TCR clone 145067 (TRAV21, TRAJ39)
CAADNAGNMLTF

SEQ ID NO: 290134 - protein, 16 aa, Homo sapiens
  CDR3 for beta chain variable domain of TCR clone 145067 (TRBV7-2, TRBJ2-5)
CASSSKWLSGQETQYF

SEQ ID NO: 290135 - protein, 17 aa, Homo sapiens
  CDR3 for alpha chain variable domain of TCR clone 145068 (TRAV13-1, )
CAANIQNPDPAVYHLRD

SEQ ID NO: 290136 - protein, 14 aa, Homo sapiens
  CDR3 for beta chain variable domain of TCR clone 145068 (TRBV19, TRBJ2-7)
CASSIGPNSYEQYF

SEQ ID NO: 290137 - protein, 13 aa, Homo sapiens
  CDR3 for alpha chain variable domain of TCR clone 145069 (TRAV12-3, TRAJ29)
CALGPPGNTPLVF

SEQ ID NO: 290138 - protein, 12 aa, Homo sapiens
  CDR3 for beta chain variable domain of TCR clone 145069 (TRBV11-2, TRBJ2-5)
CASSLGQETQYF

SEQ ID NO: 290139 - protein, 16 aa, Homo sapiens
  CDR3 for alpha chain variable domain of TCR clone 145070 (TRAV12-3, TRAJ53)
CAISPGSGGSNYKLTL

SEQ ID NO: 290140 - protein, 14 aa, Homo sapiens
  CDR3 for beta chain variable domain of TCR clone 145070 (TRBV4-2, TRBJ2-1)
CASGLDRAYNEQFF

SEQ ID NO: 290141 - protein, 14 aa, Homo sapiens
  CDR3 for alpha chain variable domain of TCR clone 145071 (TRAV8-6, TRAJ54)
CAVSLIQGAQKLVF

SEQ ID NO: 290142 - protein, 15 aa, Homo sapiens
  CDR3 for beta chain variable domain of TCR clone 145071 (TRBV7-2, TRBJ2-7)
CASSLSSGRTYEQYF

SEQ ID NO: 290143 - protein, 14 aa, Homo sapiens
  CDR3 for alpha chain variable domain of TCR clone 145072 (TRAV17, TRAJ45)
SATASGGGADGLTF

SEQ ID NO: 290144 - protein, 16 aa, Homo sapiens
  CDR3 for beta chain variable domain of TCR clone 145072 (TRBV4-3, TRBJ2-2)
CASSHLQGSGTGELFF

SEQ ID NO: 290145 - protein, 14 aa, Homo sapiens
  CDR3 for alpha chain variable domain of TCR clone 145073 (TRAV27, TRAJ36)
CAGPPKRGANNLFF

SEQ ID NO: 290146 - protein, 15 aa, Homo sapiens
  CDR3 for beta chain variable domain of TCR clone 145073 (TRBV18, TRBJ2-7)
CASSPTSTPNYEQYF

SEQ ID NO: 290147 - protein, 13 aa, Homo sapiens
  CDR3 for alpha chain variable domain of TCR clone 145074 (TRAV21, TRAJ45)
CAVMGGGADGLTF

SEQ ID NO: 290148 - protein, 13 aa, Homo sapiens
  CDR3 for beta chain variable domain of TCR clone 145074 (TRBV7-3, TRBJ2-1)
CASSPVAYNEQFF

SEQ ID NO: 290149 - protein, 16 aa, Homo sapiens
  CDR3 for alpha chain variable domain of TCR clone 145075 (TRAV22, TRAJ45)
CAVERGKRGGADGLTF

SEQ ID NO: 290150 - protein, 16 aa, Homo sapiens
  CDR3 for beta chain variable domain of TCR clone 145075 (TRBV19, TRBJ2-1)
CASSKAGPSSYNEQFF

SEQ ID NO: 290151 - protein, 15 aa, Homo sapiens
  CDR3 for alpha chain variable domain of TCR clone 145076 (TRAV23/DV6, TRAJ33)
CAASNSGGGNYQLIW

SEQ ID NO: 290152 - protein, 13 aa, Homo sapiens
  CDR3 for beta chain variable domain of TCR clone 145076 (TRBV24-1, TRBJ2-2)
CATSDWSTGELFF

SEQ ID NO: 290153 - protein, 15 aa, Homo sapiens
  CDR3 for alpha chain variable domain of TCR clone 145077 (TRAV12-3, TRAJ6)
CAMSATTGGSYIPTF

SEQ ID NO: 290154 - protein, 16 aa, Homo sapiens
  CDR3 for beta chain variable domain of TCR clone 145077 (TRBV7-7, TRBJ2-1)
CASSLASGTSYNEQFF

SEQ ID NO: 290155 - protein, 14 aa, Homo sapiens
  CDR3 for alpha chain variable domain of TCR clone 145078 (TRAV21, TRAJ15)
CAVSLNQVGTALIF

SEQ ID NO: 290156 - protein, 11 aa, Homo sapiens
  CDR3 for beta chain variable domain of TCR clone 145078 (TRBV20-1, TRBJ2-7)
CSARTSYEQYF

SEQ ID NO: 290157 - protein, 14 aa, Homo sapiens
  CDR3 for alpha chain variable domain of TCR clone 145079 (TRAV16, TRAJ8)
CALLLNTGFQKLVF

SEQ ID NO: 290158 - protein, 15 aa, Homo sapiens
  CDR3 for beta chain variable domain of TCR clone 145079 (TRBV7-7, TRBJ2-2)
CATSKLAKSTGELFF

SEQ ID NO: 290159 - protein, 14 aa, Homo sapiens
  CDR3 for alpha chain variable domain of TCR clone 145080 (TRAV12-3, TRAJ10)
SHLPLTGGGNKLTF

SEQ ID NO: 290160 - protein, 12 aa, Homo sapiens
  CDR3 for beta chain variable domain of TCR clone 145080 (TRBV5-5, TRBJ1-2)
CASSFGLYGYTF

SEQ ID NO: 290161 - protein, 15 aa, Homo sapiens
  CDR3 for alpha chain variable domain of TCR clone 145081 (TRAV8-2, TRAJ50)
CVVSDRGTSYDKVIF

SEQ ID NO: 290162 - protein, 13 aa, Homo sapiens
  CDR3 for beta chain variable domain of TCR clone 145081 (TRBV19, TRBJ1-2)
CASSVPGQDGYTF

SEQ ID NO: 290163 - protein, 15 aa, Homo sapiens
  CDR3 for alpha chain variable domain of TCR clone 145082 (TRAV3, TRAJ5)
CAVRDLDTGRRALTF

SEQ ID NO: 290164 - protein, 15 aa, Homo sapiens
  CDR3 for beta chain variable domain of TCR clone 145082 (TRBV28, TRBJ2-4)
CAAGSGTLLMGIQYF

SEQ ID NO: 290165 - protein, 13 aa, Homo sapiens
  CDR3 for alpha chain variable domain of TCR clone 145083 (TRAV12-2, TRAJ15)
CAVFNQAGTALIF

SEQ ID NO: 290166 - protein, 14 aa, Homo sapiens
  CDR3 for beta chain variable domain of TCR clone 145083 (TRBV7-8, TRBJ1-5)
CASGRGGADKHQHF

SEQ ID NO: 290167 - protein, 15 aa, Homo sapiens
  CDR3 for alpha chain variable domain of TCR clone 145084 (TRAV13-1, TRAJ11)
CAASNRNSGYSTLTF

SEQ ID NO: 290168 - protein, 11 aa, Homo sapiens
  CDR3 for beta chain variable domain of TCR clone 145084 (TRBV20-1, TRBJ2-7)
CSARLSYEQYC

SEQ ID NO: 290169 - protein, 11 aa, Homo sapiens
  CDR3 for alpha chain variable domain of TCR clone 145085 (TRAV27, TRAJ47)
CRSNQGNKLVF

SEQ ID NO: 290170 - protein, 14 aa, Homo sapiens
  CDR3 for beta chain variable domain of TCR clone 145085 (TRBV11-2, TRBJ2-3)
CASSRLARTDTQYF

SEQ ID NO: 290171 - protein, 17 aa, Homo sapiens
  CDR3 for alpha chain variable domain of TCR clone 145086 (TRAV3, TRAJ12)
CAVRDGGRMDSSYKLIF

SEQ ID NO: 290172 - protein, 14 aa, Homo sapiens
  CDR3 for beta chain variable domain of TCR clone 145086 (TRBV6-1, TRBJ2-7)
CASSGGSYLYEQYF

SEQ ID NO: 290173 - protein, 14 aa, Homo sapiens
  CDR3 for alpha chain variable domain of TCR clone 145087 (TRAV13-1, TRAJ35)
CAASRGGFGNVLHC

SEQ ID NO: 290174 - protein, 15 aa, Homo sapiens
  CDR3 for beta chain variable domain of TCR clone 145087 (TRBV12-4, TRBJ1-2)
CASSLAHRDGQAYTF

SEQ ID NO: 290175 - protein, 13 aa, Homo sapiens
  CDR3 for alpha chain variable domain of TCR clone 145088 (TRAV9-2, TRAJ49)
CALRHFTGNQFYF

SEQ ID NO: 290176 - protein, 16 aa, Homo sapiens
  CDR3 for beta chain variable domain of TCR clone 145088 (TRBV7-9, TRBJ2-1)
CASSPWLGSSYNEQFF

SEQ ID NO: 290177 - protein, 16 aa, Homo sapiens
  CDR3 for alpha chain variable domain of TCR clone 145089 (TRAV4, TRAJ9)
CLVGAPNRPGGFKPIF

SEQ ID NO: 290178 - protein, 14 aa, Homo sapiens
  CDR3 for beta chain variable domain of TCR clone 145089 (TRBV20-1, TRBJ1-1)
CSAQTRIGGTEAFF

SEQ ID NO: 290179 - protein, 12 aa, Homo sapiens
  CDR3 for alpha chain variable domain of TCR clone 145090 (TRAV13-1, TRAJ21)
CAAKEGFNKFYF

SEQ ID NO: 290180 - protein, 14 aa, Homo sapiens
  CDR3 for beta chain variable domain of TCR clone 145090 (TRBV5-1, TRBJ2-7)
CASSRGEPLYEQYF

SEQ ID NO: 290181 - protein, 16 aa, Homo sapiens
  CDR3 for alpha chain variable domain of TCR clone 145091 (TRAV1-2, TRAJ10)
CAVRGVLTGGGNKLTF

SEQ ID NO: 290182 - protein, 15 aa, Homo sapiens
  CDR3 for beta chain variable domain of TCR clone 145091 (TRBV7-8, TRBJ2-2)
CASSRETVGTGELFF

SEQ ID NO: 290183 - protein, 10 aa, Homo sapiens
  CDR3 for alpha chain variable domain of TCR clone 145092 (TRAV8-6, TRAJ34)
CAVNTDKLIF

SEQ ID NO: 290184 - protein, 13 aa, Homo sapiens
  CDR3 for beta chain variable domain of TCR clone 145092 (TRBV10-3, TRBJ2-7)
CASKLAVNYEQYF

SEQ ID NO: 290185 - protein, 17 aa, Homo sapiens
  CDR3 for alpha chain variable domain of TCR clone 145093 (TRAV26-1, TRAJ11)
CIVRVGRRNSGYSTLTF

SEQ ID NO: 290186 - protein, 15 aa, Homo sapiens
  CDR3 for beta chain variable domain of TCR clone 145093 (TRBV27, TRBJ2-5)
CASSLIPSGGETQYF

SEQ ID NO: 290187 - protein, 11 aa, Homo sapiens
  CDR3 for alpha chain variable domain of TCR clone 145094 (TRAV1-1, TRAJ23)
CAVRQGGKLIF

SEQ ID NO: 290188 - protein, 16 aa, Homo sapiens
  CDR3 for beta chain variable domain of TCR clone 145094 (TRBV7-9, TRBJ1-1)
CASSLGHGNTKLSLDK

SEQ ID NO: 290189 - protein, 17 aa, Homo sapiens
  CDR3 for alpha chain variable domain of TCR clone 145095 (TRAV17, TRAJ52)
CATERPSGGTSYGKMTF

SEQ ID NO: 290190 - protein, 13 aa, Homo sapiens
  CDR3 for beta chain variable domain of TCR clone 145095 (TRBV7-9, TRBJ1-2)
CASSLKQNYGYTF

SEQ ID NO: 290191 - protein, 14 aa, Homo sapiens
  CDR3 for alpha chain variable domain of TCR clone 145096 (TRAV12-2, TRAJ13)
CAVKKTGGYQKGTF

SEQ ID NO: 290192 - protein, 13 aa, Homo sapiens
  CDR3 for beta chain variable domain of TCR clone 145096 (TRBV7-9, TRBJ1-2)
CASSLKQNYGYTF

SEQ ID NO: 290193 - protein, 14 aa, Homo sapiens
  CDR3 for alpha chain variable domain of TCR clone 145097 (TRAV12-2, TRAJ53)
CAVKGGGSNYKLTF

SEQ ID NO: 290194 - protein, 14 aa, Homo sapiens
  CDR3 for beta chain variable domain of TCR clone 145097 (TRBV7-7, TRBJ2-2)
CATRQDSDTGKLFF

SEQ ID NO: 290195 - protein, 12 aa, Homo sapiens
  CDR3 for alpha chain variable domain of TCR clone 145098 (TRAV21, TRAJ33)
CAKMDSNYQLIW

SEQ ID NO: 290196 - protein, 13 aa, Homo sapiens
  CDR3 for beta chain variable domain of TCR clone 145098 (TRBV5-1, TRBJ1-2)
CASSFSGNLGYTF

SEQ ID NO: 290197 - protein, 14 aa, Homo sapiens
  CDR3 for alpha chain variable domain of TCR clone 145099 (TRAV13-1, TRAJ35)
CAASKGGFGNVLHC

SEQ ID NO: 290198 - protein, 18 aa, Homo sapiens
  CDR3 for beta chain variable domain of TCR clone 145099 (TRBV12-4, TRBJ2-2)
CASSLVAGTRGRTGELFF

SEQ ID NO: 290199 - protein, 15 aa, Homo sapiens
  CDR3 for alpha chain variable domain of TCR clone 145100 (TRAV34, TRAJ38)
CGADFTPGNNRKLSW

SEQ ID NO: 290200 - protein, 12 aa, Homo sapiens
  CDR3 for beta chain variable domain of TCR clone 145100 (TRBV7-9, TRBJ2-7)
CATRTDAYEQYF

SEQ ID NO: 290201 - protein, 13 aa, Homo sapiens
  CDR3 for alpha chain variable domain of TCR clone 145101 (TRAV1-1, TRAJ13)
CAVNSGGYQKATF

SEQ ID NO: 290202 - protein, 12 aa, Homo sapiens
  CDR3 for beta chain variable domain of TCR clone 145101 (TRBV28, TRBJ2-1)
CASSVQINEQFF

SEQ ID NO: 290203 - protein, 13 aa, Homo sapiens
  CDR3 for alpha chain variable domain of TCR clone 145102 (TRAV30, TRAJ34)
CGTVGYNTNKLIF

SEQ ID NO: 290204 - protein, 16 aa, Homo sapiens
  CDR3 for beta chain variable domain of TCR clone 145102 (TRBV7-9, TRBJ1-2)
CASSLGFSSGEDGYTF

SEQ ID NO: 290205 - protein, 14 aa, Homo sapiens
  CDR3 for alpha chain variable domain of TCR clone 145103 (TRAV20, TRAJ4)
CAVQGFWWLQKADF

SEQ ID NO: 290206 - protein, 18 aa, Homo sapiens
  CDR3 for beta chain variable domain of TCR clone 145103 (TRBV19, TRBJ1-5)
CASSKGQVSIHSNQPQHF

SEQ ID NO: 290207 - protein, 11 aa, Homo sapiens
  CDR3 for alpha chain variable domain of TCR clone 145104 (TRAV13-1, TRAJ39)
CASHSGNMLTF

SEQ ID NO: 290208 - protein, 14 aa, Homo sapiens
  CDR3 for beta chain variable domain of TCR clone 145104 (TRBV11-2, TRBJ1-5)
CASSLDRGRQPQHF

SEQ ID NO: 290209 - protein, 13 aa, Homo sapiens
  CDR3 for alpha chain variable domain of TCR clone 145105 (TRAV8-3, TRAJ28)
CAVGAVGSYQTTF

SEQ ID NO: 290210 - protein, 14 aa, Homo sapiens
  CDR3 for beta chain variable domain of TCR clone 145105 (TRBV7-2, TRBJ2-7)
CASRSQGAAYEQYF

SEQ ID NO: 290211 - protein, 12 aa, Homo sapiens
  CDR3 for alpha chain variable domain of TCR clone 145106 (TRAV1-1, TRAJ9)
CAADTGGFKTIF

SEQ ID NO: 290212 - protein, 14 aa, Homo sapiens
  CDR3 for beta chain variable domain of TCR clone 145106 (TRBV7-8, TRBJ2-5)
CASSATGGQETQYF

SEQ ID NO: 290213 - protein, 13 aa, Homo sapiens
  CDR3 for alpha chain variable domain of TCR clone 145107 (TRAV35, TRAJ39)
CAGPEYAGNMLTF

SEQ ID NO: 290214 - protein, 16 aa, Homo sapiens
  CDR3 for beta chain variable domain of TCR clone 145107 (TRBV2, TRBJ2-3)
CASSTSVEGVTDTQYF

SEQ ID NO: 290215 - protein, 14 aa, Homo sapiens
  CDR3 for alpha chain variable domain of TCR clone 145108 (TRAV1-2, TRAJ16)
CAVNRFSDGQKLLF

SEQ ID NO: 290216 - protein, 15 aa, Homo sapiens
  CDR3 for beta chain variable domain of TCR clone 145108 (TRBV28, TRBJ2-1)
CASSIIAGGRGEQFL

SEQ ID NO: 290217 - protein, 12 aa, Homo sapiens
  CDR3 for alpha chain variable domain of TCR clone 145109 (TRAV1-2, TRAJ7)
CAVAYGNNRLAF

SEQ ID NO: 290218 - protein, 17 aa, Homo sapiens
  CDR3 for beta chain variable domain of TCR clone 145109 (TRBV13, TRBJ2-3)
CASSLSRVAGGRNTQYF

SEQ ID NO: 290219 - protein, 17 aa, Homo sapiens
  CDR3 for alpha chain variable domain of TCR clone 145110 (TRAV3, TRAJ6)
CAVRDGPRAGGSYIPTF

SEQ ID NO: 290220 - protein, 13 aa, Homo sapiens
  CDR3 for beta chain variable domain of TCR clone 145110 (TRBV24-1, TRBJ2-1)
CATSAGPYNEQFF

SEQ ID NO: 290221 - protein, 10 aa, Homo sapiens
  CDR3 for alpha chain variable domain of TCR clone 145111 (TRAV16, TRAJ22)
SAMYLRQLTF

SEQ ID NO: 290222 - protein, 15 aa, Homo sapiens
  CDR3 for beta chain variable domain of TCR clone 145111 (TRBV19, TRBJ2-7)
CASSPAGSGEALRYF

SEQ ID NO: 290223 - protein, 15 aa, Homo sapiens
  CDR3 for alpha chain variable domain of TCR clone 145112 (TRAV12-2, TRAJ53)
CAVNGGGGGNYKLTF

SEQ ID NO: 290224 - protein, 13 aa, Homo sapiens
  CDR3 for beta chain variable domain of TCR clone 145112 (TRBV3-1, TRBJ1-1)
CASSQGVITEAFF

SEQ ID NO: 290225 - protein, 15 aa, Homo sapiens
  CDR3 for alpha chain variable domain of TCR clone 145113 (TRAV14/DV4, TRAJ12)
CAMREERDSSYKLIF

SEQ ID NO: 290226 - protein, 16 aa, Homo sapiens
  CDR3 for beta chain variable domain of TCR clone 145113 (TRBV11-2, TRBJ1-2)
CASSLDTGGADYGYPF

SEQ ID NO: 290227 - protein, 12 aa, Homo sapiens
  CDR3 for alpha chain variable domain of TCR clone 145114 (TRAV21, TRAJ23)
CAVMLQGGKLIF

SEQ ID NO: 290228 - protein, 14 aa, Homo sapiens
  CDR3 for beta chain variable domain of TCR clone 145114 (TRBV7-9, TRBJ1-4)
SAITEGEANEKLFF

SEQ ID NO: 290229 - protein, 18 aa, Homo sapiens
  CDR3 for alpha chain variable domain of TCR clone 145115 (TRAV21, TRAJ52)
CAVRPSPAGGTSYGKMTF

SEQ ID NO: 290230 - protein, 17 aa, Homo sapiens
  CDR3 for beta chain variable domain of TCR clone 145115 (TRBV13, TRBJ2-3)
CASSLSRVARGRNTQYF

SEQ ID NO: 290231 - protein, 12 aa, Homo sapiens
  CDR3 for alpha chain variable domain of TCR clone 145116 (TRAV13-2, TRAJ23)
CAERHRGGKLIF

SEQ ID NO: 290232 - protein, 13 aa, Homo sapiens
  CDR3 for beta chain variable domain of TCR clone 145116 (TRBV10-3, TRBJ2-1)
CASKLAVNYEQYF

SEQ ID NO: 290233 - protein, 12 aa, Homo sapiens
  CDR3 for alpha chain variable domain of TCR clone 145117 (TRAV13-1, TRAJ17)
CAARTAGNKLTF

SEQ ID NO: 290234 - protein, 14 aa, Homo sapiens
  CDR3 for beta chain variable domain of TCR clone 145117 (TRBV7-9, TRBJ1-4)
CAITEGEANEKLFF

SEQ ID NO: 290235 - protein, 15 aa, Homo sapiens
  CDR3 for alpha chain variable domain of TCR clone 145118 (TRAV4, TRAJ39)
CLVGPNNNAGNMLTF

SEQ ID NO: 290236 - protein, 13 aa, Homo sapiens
  CDR3 for beta chain variable domain of TCR clone 145118 (TRBV19, TRBJ1-2)
CASSVPGQDGYTF

SEQ ID NO: 290237 - protein, 14 aa, Homo sapiens
  CDR3 for alpha chain variable domain of TCR clone 145119 (TRAV20, TRAJ56)
CAVQFGGANSKLTF

SEQ ID NO: 290238 - protein, 14 aa, Homo sapiens
  CDR3 for beta chain variable domain of TCR clone 145119 (TRBV7-8, TRBJ1-2)
CASSPDSLSYGYTF

SEQ ID NO: 290239 - protein, 14 aa, Homo sapiens
  CDR3 for alpha chain variable domain of TCR clone 145120 (TRAV1-2, TRAJ16)
CAVNRFSDGQKLLL

SEQ ID NO: 290240 - protein, 14 aa, Homo sapiens
  CDR3 for beta chain variable domain of TCR clone 145120 (TRBV7-9, TRBJ2-3)
CASSLEDGTDTQYF

SEQ ID NO: 290241 - protein, 15 aa, Homo sapiens
  CDR3 for alpha chain variable domain of TCR clone 145121 (TRAV20, TRAJ4)
CAVEGSSGGYNTLIF

SEQ ID NO: 290242 - protein, 14 aa, Homo sapiens
  CDR3 for beta chain variable domain of TCR clone 145121 (TRBV7-8, TRBJ2-7)
CASTLGGALGEQYF

SEQ ID NO: 290243 - protein, 16 aa, Homo sapiens
  CDR3 for alpha chain variable domain of TCR clone 145122 (TRAV1-1, TRAJ28)
CAVRDDSGAGSYQLTF

SEQ ID NO: 290244 - protein, 15 aa, Homo sapiens
  CDR3 for beta chain variable domain of TCR clone 145122 (TRBV28, TRBJ2-5)
CASSQTSGSLEIQYF

SEQ ID NO: 290245 - protein, 19 aa, Homo sapiens
  CDR3 for alpha chain variable domain of TCR clone 145123 (TRAV2, TRAJ20)
ILQVREEDAAVYRDCKLSF

SEQ ID NO: 290246 - protein, 13 aa, Homo sapiens
  CDR3 for beta chain variable domain of TCR clone 145123 (TRBV15, TRBJ1-6)
CATSGGLNSPLHF

SEQ ID NO: 290247 - protein, 15 aa, Homo sapiens
  CDR3 for alpha chain variable domain of TCR clone 145124 (TRAV3, TRAJ13)
CAVRDIAGGYQNVTF

SEQ ID NO: 290248 - protein, 13 aa, Homo sapiens
  CDR3 for beta chain variable domain of TCR clone 145124 (TRBV2, TRBJ2-2)
CASSKKNTGELFL

SEQ ID NO: 290249 - protein, 15 aa, Homo sapiens
  CDR3 for alpha chain variable domain of TCR clone 145125 (TRAV3, TRAJ22)
CAVRDRGGSARQLNF

SEQ ID NO: 290250 - protein, 14 aa, Homo sapiens
  CDR3 for beta chain variable domain of TCR clone 145125 (TRBV20-1, TRBJ1-1)
CSAQTRIGGTEAFF

SEQ ID NO: 290251 - protein, 14 aa, Homo sapiens
  CDR3 for alpha chain variable domain of TCR clone 145126 (TRAV14/DV4, TRAJ15)
CAMRRDQAGTALIF

SEQ ID NO: 290252 - protein, 15 aa, Homo sapiens
  CDR3 for beta chain variable domain of TCR clone 145126 (TRBV5-7, TRBJ1-5)
CAGSYGKLWDQPQHF

SEQ ID NO: 290253 - protein, 16 aa, Homo sapiens
  CDR3 for alpha chain variable domain of TCR clone 145127 (TRAV12-2, TRAJ45)
CAVKRNPGGGADGLTF

SEQ ID NO: 290254 - protein, 12 aa, Homo sapiens
  CDR3 for beta chain variable domain of TCR clone 145127 (TRBV6-1, TRBJ2-5)
CASSEGRETHYF

SEQ ID NO: 290255 - protein, 14 aa, Homo sapiens
  CDR3 for alpha chain variable domain of TCR clone 145128 (TRAV12-2, TRAJ17)
CAVNIKAAGNKLNF

SEQ ID NO: 290256 - protein, 13 aa, Homo sapiens
  CDR3 for beta chain variable domain of TCR clone 145128 (TRBV7-8, TRBJ2-7)
CASSLTGGREQYF

SEQ ID NO: 290257 - protein, 15 aa, Homo sapiens
  CDR3 for alpha chain variable domain of TCR clone 145129 (TRAV21, TRAJ53)
CATLNSGGSNYQLTF

SEQ ID NO: 290258 - protein, 12 aa, Homo sapiens
  CDR3 for beta chain variable domain of TCR clone 145129 (TRBV2, TRBJ2-1)
CAYGPPGNEQFF

SEQ ID NO: 290259 - protein, 15 aa, Homo sapiens
  CDR3 for alpha chain variable domain of TCR clone 145130 (TRAV17, TRAJ56)
CATEPFTGANSKLTF

SEQ ID NO: 290260 - protein, 14 aa, Homo sapiens
  CDR3 for beta chain variable domain of TCR clone 145130 (TRBV19, TRBJ2-1)
CASPSFVLSGEQFF

SEQ ID NO: 290261 - protein, 18 aa, Homo sapiens
  CDR3 for alpha chain variable domain of TCR clone 145131 (TRAV8-4, TRAJ52)
CAVTRANAGGTSYGKLTF

SEQ ID NO: 290262 - protein, 16 aa, Homo sapiens
  CDR3 for beta chain variable domain of TCR clone 145131 (TRBV6-1, TRBJ2-5)
CASSETLDRGAETQYF

SEQ ID NO: 290263 - protein, 13 aa, Homo sapiens
  CDR3 for alpha chain variable domain of TCR clone 145132 (TRAV3, TRAJ16)
CAVRDRNGQNLLF

SEQ ID NO: 290264 - protein, 15 aa, Homo sapiens
  CDR3 for beta chain variable domain of TCR clone 145132 (TRBV5-1, TRBJ2-1)
CASSPPRAPYNEQFF

SEQ ID NO: 290265 - protein, 13 aa, Homo sapiens
  CDR3 for alpha chain variable domain of TCR clone 145133 (TRAV12-3, TRAJ43)
CAMRPYNNNDMRF

SEQ ID NO: 290266 - protein, 16 aa, Homo sapiens
  CDR3 for beta chain variable domain of TCR clone 145133 (TRBV11-2, TRBJ2-1)
CASSLLLLSSYNEQFI

SEQ ID NO: 290267 - protein, 12 aa, Homo sapiens
  CDR3 for alpha chain variable domain of TCR clone 145134 (TRAV1-2, TRAJ33)
CAALDSNYQLIW

SEQ ID NO: 290268 - protein, 15 aa, Homo sapiens
  CDR3 for beta chain variable domain of TCR clone 145134 (TRBV7-6, TRBJ2-1)
CASSSLAGEGNEQFF

SEQ ID NO: 290269 - protein, 14 aa, Homo sapiens
  CDR3 for alpha chain variable domain of TCR clone 145135 (TRAV38-1, TRAJ29)
CAFITPSGNTPLVF

SEQ ID NO: 290270 - protein, 16 aa, Homo sapiens
  CDR3 for beta chain variable domain of TCR clone 145135 (TRBV20-1, TRBJ2-2)
CSASASGMPGAGELFF

SEQ ID NO: 290271 - protein, 13 aa, Homo sapiens
  CDR3 for alpha chain variable domain of TCR clone 145136 (TRAV1-1, TRAJ5)
CAVRQAGRRALTF

SEQ ID NO: 290272 - protein, 13 aa, Homo sapiens
  CDR3 for beta chain variable domain of TCR clone 145136 (TRBV7-3, TRBJ2-5)
CASSFRGGETQYF

SEQ ID NO: 290273 - protein, 11 aa, Homo sapiens
  CDR3 for alpha chain variable domain of TCR clone 145137 (TRAV2, TRAJ13)
CASGGYPKVTF

SEQ ID NO: 290274 - protein, 13 aa, Homo sapiens
  CDR3 for beta chain variable domain of TCR clone 145137 (TRBV4-2, TRBJ1-1)
CASSQAGNTEAFF

SEQ ID NO: 290275 - protein, 15 aa, Homo sapiens
  CDR3 for alpha chain variable domain of TCR clone 145138 (TRAV35, TRAJ41)
CAGQLFSNSGYAPNF

SEQ ID NO: 290276 - protein, 14 aa, Homo sapiens
  CDR3 for beta chain variable domain of TCR clone 145138 (TRBV7-2, TRBJ1-2)
CASSRGGTNYGYTF

SEQ ID NO: 290277 - protein, 19 aa, Homo sapiens
  CDR3 for alpha chain variable domain of TCR clone 145139 (TRAV2, TRAJ20)
ILQVREADAAVYRDCKLSF

SEQ ID NO: 290278 - protein, 15 aa, Homo sapiens
  CDR3 for beta chain variable domain of TCR clone 145139 (TRBV4-1, TRBJ1-4)
CASRDTGGTNEKLFF

SEQ ID NO: 290279 - protein, 15 aa, Homo sapiens
  CDR3 for alpha chain variable domain of TCR clone 145140 (TRAV38-1, TRAJ37)
CAFIHGSGNTGKLTF

SEQ ID NO: 290280 - protein, 14 aa, Homo sapiens
  CDR3 for beta chain variable domain of TCR clone 145140 (TRBV7-2, TRBJ2-7)
CASRSQGAAYEQYF

SEQ ID NO: 290281 - protein, 14 aa, Homo sapiens
  CDR3 for alpha chain variable domain of TCR clone 145141 (TRAV13-1, TRAJ44)
CAAKATGTASKLTF

SEQ ID NO: 290282 - protein, 13 aa, Homo sapiens
  CDR3 for beta chain variable domain of TCR clone 145141 (TRBV13, TRBJ2-5)
CASSPEVGETQYF

SEQ ID NO: 290283 - protein, 13 aa, Homo sapiens
  CDR3 for alpha chain variable domain of TCR clone 145142 (TRAV30, TRAJ24)
CGTVTDSWGKLQF

SEQ ID NO: 290284 - protein, 14 aa, Homo sapiens
  CDR3 for beta chain variable domain of TCR clone 145142 (TRBV6-3, TRBJ2-2)
CASTDTPETGELFF

SEQ ID NO: 290285 - protein, 19 aa, Homo sapiens
  CDR3 for alpha chain variable domain of TCR clone 145143 (TRAV38-1, TRAJ53)
CAFMKHGLESGGSNYKLTF

SEQ ID NO: 290286 - protein, 16 aa, Homo sapiens
  CDR3 for beta chain variable domain of TCR clone 145143 (TRBV20-1, TRBJ1-4)
CSAPGQGLLTNEKLFF

SEQ ID NO: 290287 - protein, 13 aa, Homo sapiens
  CDR3 for alpha chain variable domain of TCR clone 145144 (TRAV13-1, TRAJ21)
CAASIYNFNKFYF

SEQ ID NO: 290288 - protein, 14 aa, Homo sapiens
  CDR3 for beta chain variable domain of TCR clone 145144 (TRBV10-3, TRBJ2-1)
CAISDRGGVTEQFF

SEQ ID NO: 290289 - protein, 13 aa, Homo sapiens
  CDR3 for alpha chain variable domain of TCR clone 145145 (TRAV35, TRAJ42)
CAGFPGSQRNLIF

SEQ ID NO: 290290 - protein, 14 aa, Homo sapiens
  CDR3 for beta chain variable domain of TCR clone 145145 (TRBV19, TRBJ2-1)
CASPTVVLSGEQFF

SEQ ID NO: 290291 - protein, 17 aa, Homo sapiens
  CDR3 for alpha chain variable domain of TCR clone 145146 (TRAV3, TRAJ6)
CAVRDGPRAGGNYIPTL

SEQ ID NO: 290292 - protein, 14 aa, Homo sapiens
  CDR3 for beta chain variable domain of TCR clone 145146 (TRBV7-2, TRBJ2-7)
CASSPKTSFYEQYF

SEQ ID NO: 290293 - protein, 13 aa, Homo sapiens
  CDR3 for alpha chain variable domain of TCR clone 145147 (TRAV29/DV5, TRAJ31)
CAASRNNNTRLMF

SEQ ID NO: 290294 - protein, 17 aa, Homo sapiens
  CDR3 for beta chain variable domain of TCR clone 145147 (TRBV20-1, TRBJ2-1)
CSARDPLAGVWDNEQFF

SEQ ID NO: 290295 - protein, 13 aa, Homo sapiens
  CDR3 for alpha chain variable domain of TCR clone 145148 (TRAV12-2, TRAJ42)
CAVKRGSQGNLIF

SEQ ID NO: 290296 - protein, 14 aa, Homo sapiens
  CDR3 for beta chain variable domain of TCR clone 145148 (TRBV18, TRBJ2-1)
CASSPQGRFNEQFF

SEQ ID NO: 290297 - protein, 14 aa, Homo sapiens
  CDR3 for alpha chain variable domain of TCR clone 145149 (TRAV12-2, TRAJ13)
CAVKKTGGYQKVTF

SEQ ID NO: 290298 - protein, 15 aa, Homo sapiens
  CDR3 for beta chain variable domain of TCR clone 145149 (TRBV27, TRBJ2-1)
CSSSNGGGSSNEQFL

SEQ ID NO: 290299 - protein, 17 aa, Homo sapiens
  CDR3 for alpha chain variable domain of TCR clone 145150 (TRAV4, TRAJ13)
CLVGVQGSSGGYQKVTF

SEQ ID NO: 290300 - protein, 18 aa, Homo sapiens
  CDR3 for beta chain variable domain of TCR clone 145150 (TRBV15, TRBJ2-3)
CATSRDVARSWDTDTQYF

SEQ ID NO: 290301 - protein, 14 aa, Homo sapiens
  CDR3 for alpha chain variable domain of TCR clone 145151 (TRAV27, TRAJ15)
CAGFDNQAGTALIF

SEQ ID NO: 290302 - protein, 17 aa, Homo sapiens
  CDR3 for beta chain variable domain of TCR clone 145151 (TRBV24-1, TRBJ2-1)
CATSDVSTSGTYNEQFF

SEQ ID NO: 290303 - protein, 19 aa, Homo sapiens
  CDR3 for alpha chain variable domain of TCR clone 145152 (TRAV10, TRAJ45)
PTSVWCGGYSGGGADGLTF

SEQ ID NO: 290304 - protein, 14 aa, Homo sapiens
  CDR3 for beta chain variable domain of TCR clone 145152 (TRBV7-8, TRBJ2-3)
CASSLDAGTDTQYF

SEQ ID NO: 290305 - protein, 13 aa, Homo sapiens
  CDR3 for alpha chain variable domain of TCR clone 145153 (TRAV12-1, TRAJ53)
CVVNAESNYKLTF

SEQ ID NO: 290306 - protein, 15 aa, Homo sapiens
  CDR3 for beta chain variable domain of TCR clone 145153 (TRBV6-3, TRBJ2-7)
CASSSPGTVFYEQYF

SEQ ID NO: 290307 - protein, 14 aa, Homo sapiens
  CDR3 for alpha chain variable domain of TCR clone 145154 (TRAV13-1, TRAJ9)
CAASARTGGFKTIF

SEQ ID NO: 290308 - protein, 13 aa, Homo sapiens
  CDR3 for beta chain variable domain of TCR clone 145154 (TRBV20-1, TRBJ1-1)
CSAGTVGNTEAFF

SEQ ID NO: 290309 - protein, 13 aa, Homo sapiens
  CDR3 for alpha chain variable domain of TCR clone 145155 (TRAV3, TRAJ27)
CALRPLGAGKSTF

SEQ ID NO: 290310 - protein, 13 aa, Homo sapiens
  CDR3 for beta chain variable domain of TCR clone 145155 (TRBV7-9, TRBJ2-3)
CASSPGSTETQYF

SEQ ID NO: 290311 - protein, 13 aa, Homo sapiens
  CDR3 for alpha chain variable domain of TCR clone 145156 (TRAV8-3, TRAJ43)
CAFGPDNNNDIRF

SEQ ID NO: 290312 - protein, 12 aa, Homo sapiens
  CDR3 for beta chain variable domain of TCR clone 145156 (TRBV7-2, TRBJ1-6)
CASSLSSSPLHF

SEQ ID NO: 290313 - protein, 12 aa, Homo sapiens
  CDR3 for alpha chain variable domain of TCR clone 145157 (TRAV12-2, TRAJ8)
CAAGTGFQKLVF

SEQ ID NO: 290314 - protein, 16 aa, Homo sapiens
  CDR3 for beta chain variable domain of TCR clone 145157 (TRBV13, TRBJ2-2)
CASSPRTGEHTGELFF

SEQ ID NO: 290315 - protein, 15 aa, Homo sapiens
  CDR3 for alpha chain variable domain of TCR clone 145158 (TRAV3, TRAJ4)
CAVRDGTGGYNKLIF

SEQ ID NO: 290316 - protein, 16 aa, Homo sapiens
  CDR3 for beta chain variable domain of TCR clone 145158 (TRBV12-4, TRBJ2-7)
CASSLIGGTGTYEQYF

SEQ ID NO: 290317 - protein, 16 aa, Homo sapiens
  CDR3 for alpha chain variable domain of TCR clone 145159 (TRAV4, TRAJ22)
CLVGDLYSGSARQLTF

SEQ ID NO: 290318 - protein, 16 aa, Homo sapiens
  CDR3 for beta chain variable domain of TCR clone 145159 (TRBV7-9, TRBJ2-1)
GASSDVAGGSYNEQFF

SEQ ID NO: 290319 - protein, 18 aa, Homo sapiens
  CDR3 for alpha chain variable domain of TCR clone 145160 (TRAV13-1, TRAJ52)
CAAKNPNAGGTSYGKLTF

SEQ ID NO: 290320 - protein, 14 aa, Homo sapiens
  CDR3 for beta chain variable domain of TCR clone 145160 (TRBV15, TRBJ2-3)
CATRSGTSTDTQYF

SEQ ID NO: 290321 - protein, 13 aa, Homo sapiens
  CDR3 for alpha chain variable domain of TCR clone 145161 (TRAV20, TRAJ54)
CAVRAGGAQKLVF

SEQ ID NO: 290322 - protein, 14 aa, Homo sapiens
  CDR3 for beta chain variable domain of TCR clone 145161 (TRBV20-1, TRBJ2-7)
CSAKTGTGGYEQYF

SEQ ID NO: 290323 - protein, 13 aa, Homo sapiens
  CDR3 for alpha chain variable domain of TCR clone 145162 (TRAV12-1, TRAJ31)
CVVNMNNNARLMF

SEQ ID NO: 290324 - protein, 15 aa, Homo sapiens
  CDR3 for beta chain variable domain of TCR clone 145162 (TRBV4-1, TRBJ1-2)
CACSQGQGAAYGYTF

SEQ ID NO: 290325 - protein, 12 aa, Homo sapiens
  CDR3 for alpha chain variable domain of TCR clone 145163 (TRAV9-2, TRAJ26)
CALRGYGQNFVF

SEQ ID NO: 290326 - protein, 14 aa, Homo sapiens
  CDR3 for beta chain variable domain of TCR clone 145163 (TRBV7-8, TRBJ2-3)
CASSLEAGTDTQYF

SEQ ID NO: 290327 - protein, 17 aa, Homo sapiens
  CDR3 for alpha chain variable domain of TCR clone 145164 (TRAV12-3, TRAJ6)
CAMSAREGAGGSYIPTF

SEQ ID NO: 290328 - protein, 12 aa, Homo sapiens
  CDR3 for beta chain variable domain of TCR clone 145164 (TRBV12-4, TRBJ2-3)
CASSTLPDTQYF

SEQ ID NO: 290329 - protein, 13 aa, Homo sapiens
  CDR3 for alpha chain variable domain of TCR clone 145165 (TRAV4, TRAJ42)
CLVGGGSQGNLIF

SEQ ID NO: 290330 - protein, 14 aa, Homo sapiens
  CDR3 for beta chain variable domain of TCR clone 145165 (TRBV11-2, TRBJ1-2)
CASSLGTANYGDTF

SEQ ID NO: 290331 - protein, 12 aa, Homo sapiens
  CDR3 for alpha chain variable domain of TCR clone 145166 (TRAV30, TRAJ43)
CGTEERGNDMRF

SEQ ID NO: 290332 - protein, 11 aa, Homo sapiens
  CDR3 for beta chain variable domain of TCR clone 145166 (TRBV29-1, TRBJ2-5)
CREDRTGTQYF

SEQ ID NO: 290333 - protein, 13 aa, Homo sapiens
  CDR3 for alpha chain variable domain of TCR clone 145167 (TRAV8-3, TRAJ28)
CAVGAVGSYQLTF

SEQ ID NO: 290334 - protein, 16 aa, Homo sapiens
  CDR3 for beta chain variable domain of TCR clone 145167 (TRBV2, TRBJ2-1)
CASSVGGSLSYNEQFF

SEQ ID NO: 290335 - protein, 15 aa, Homo sapiens
  CDR3 for alpha chain variable domain of TCR clone 145168 (TRAV27, TRAJ33)
CAGADSMDSNYQLIW

SEQ ID NO: 290336 - protein, 13 aa, Homo sapiens
  CDR3 for beta chain variable domain of TCR clone 145168 (TRBV28, TRBJ1-2)
CASSLQGRGGYTF

SEQ ID NO: 290337 - protein, 14 aa, Homo sapiens
  CDR3 for alpha chain variable domain of TCR clone 145169 (TRAV8-1, TRAJ5)
CSVSMDTGRRALTF

SEQ ID NO: 290338 - protein, 15 aa, Homo sapiens
  CDR3 for beta chain variable domain of TCR clone 145169 (TRBV19, TRBJ2-4)
CASRGPRRGENIQYF

SEQ ID NO: 290339 - protein, 15 aa, Homo sapiens
  CDR3 for alpha chain variable domain of TCR clone 145170 (TRAV20, TRAJ6)
CAVRLQSGGSYIPTF

SEQ ID NO: 290340 - protein, 12 aa, Homo sapiens
  CDR3 for beta chain variable domain of TCR clone 145170 (TRBV7-8, TRBJ2-7)
CASSLGDREQYF

SEQ ID NO: 290341 - protein, 17 aa, Homo sapiens
  CDR3 for alpha chain variable domain of TCR clone 145171 (TRAV3, TRAJ6)
CAVRDGPRAGGSYIPKF

SEQ ID NO: 290342 - protein, 18 aa, Homo sapiens
  CDR3 for beta chain variable domain of TCR clone 145171 (TRBV7-3, TRBJ2-3)
CASSSTRTYPGSTDTQYF

SEQ ID NO: 290343 - protein, 15 aa, Homo sapiens
  CDR3 for alpha chain variable domain of TCR clone 145172 (TRAV8-2, TRAJ16)
CVVSDGFSDGQKLLF

SEQ ID NO: 290344 - protein, 15 aa, Homo sapiens
  CDR3 for beta chain variable domain of TCR clone 145172 (TRBV12-4, TRBJ2-5)
CASSPPTGRQETQYF

SEQ ID NO: 290345 - protein, 19 aa, Homo sapiens
  CDR3 for alpha chain variable domain of TCR clone 145173 (TRAV2, TRAJ20)
ILQVREADAAVYRDCKLSF

SEQ ID NO: 290346 - protein, 13 aa, Homo sapiens
  CDR3 for beta chain variable domain of TCR clone 145173 (TRBV15, TRBJ1-6)
CATSRGLNSPLHF

SEQ ID NO: 290347 - protein, 14 aa, Homo sapiens
  CDR3 for alpha chain variable domain of TCR clone 145174 (TRAV8-3, TRAJ6)
CAVGASGGSYIPTF

SEQ ID NO: 290348 - protein, 17 aa, Homo sapiens
  CDR3 for beta chain variable domain of TCR clone 145174 (TRBV18, TRBJ2-2)
CASSPSDPWQITGELFF

SEQ ID NO: 290349 - protein, 16 aa, Homo sapiens
  CDR3 for alpha chain variable domain of TCR clone 145175 (TRAV16, TRAJ42)
CALSGLLGGSQGNLIF

SEQ ID NO: 290350 - protein, 15 aa, Homo sapiens
  CDR3 for beta chain variable domain of TCR clone 145175 (TRBV19, TRBJ1-2)
CASSPGQVANYGYTF

SEQ ID NO: 290351 - protein, 14 aa, Homo sapiens
  CDR3 for alpha chain variable domain of TCR clone 145176 (TRAV1-2, TRAJ16)
CAVNRFSDVQKLLF

SEQ ID NO: 290352 - protein, 15 aa, Homo sapiens
  CDR3 for beta chain variable domain of TCR clone 145176 (TRBV27, TRBJ2-3)
CASSSLAGVIDTQYF

SEQ ID NO: 290353 - protein, 15 aa, Homo sapiens
  CDR3 for alpha chain variable domain of TCR clone 145177 (TRAV27, TRAJ38)
CAARRNAGNNRKLIW

SEQ ID NO: 290354 - protein, 17 aa, Homo sapiens
  CDR3 for beta chain variable domain of TCR clone 145177 (TRBV13, TRBJ2-3)
CASSLSRVAWGRNTQYF

SEQ ID NO: 290355 - protein, 16 aa, Homo sapiens
  CDR3 for alpha chain variable domain of TCR clone 145178 (TRAV12-1, TRAJ43)
CVVNPHRYGAGTRLTV

SEQ ID NO: 290356 - protein, 13 aa, Homo sapiens
  CDR3 for beta chain variable domain of TCR clone 145178 (TRBV12-4, TRBJ1-2)
CASSSGPNYGYTF

SEQ ID NO: 290357 - protein, 13 aa, Homo sapiens
  CDR3 for alpha chain variable domain of TCR clone 145179 (TRAV23/DV6, TRAJ57)
ATLSQGGSEKLVF

SEQ ID NO: 290358 - protein, 14 aa, Homo sapiens
  CDR3 for beta chain variable domain of TCR clone 145179 (TRBV27, TRBJ2-1)
CASSRRGAFNEQFF

SEQ ID NO: 290359 - protein, 15 aa, Homo sapiens
  CDR3 for alpha chain variable domain of TCR clone 145180 (TRAV25, TRAJ52)
CAGRPGGTSYGKLTF

SEQ ID NO: 290360 - protein, 15 aa, Homo sapiens
  CDR3 for beta chain variable domain of TCR clone 145180 (TRBV19, TRBJ2-5)
CASHGLAGAQDTQYF

SEQ ID NO: 290361 - protein, 15 aa, Homo sapiens
  CDR3 for alpha chain variable domain of TCR clone 145181 (TRAV17, TRAJ57)
CATGPSQGGSEKLVF

SEQ ID NO: 290362 - protein, 15 aa, Homo sapiens
  CDR3 for beta chain variable domain of TCR clone 145181 (TRBV11-3, TRBJ1-1)
CASSLSRTGGLSLDK

SEQ ID NO: 290363 - protein, 12 aa, Homo sapiens
  CDR3 for alpha chain variable domain of TCR clone 145182 (TRAV13-1, TRAJ17)
CAARPAGNKLTF

SEQ ID NO: 290364 - protein, 15 aa, Homo sapiens
  CDR3 for beta chain variable domain of TCR clone 145182 (TRBV7-6, TRBJ1-1)
CASSPQGGANTEAFF

SEQ ID NO: 290365 - protein, 14 aa, Homo sapiens
  CDR3 for alpha chain variable domain of TCR clone 145183 (TRAV13-1, TRAJ40)
CAASMTSGTYKYIF

SEQ ID NO: 290366 - protein, 15 aa, Homo sapiens
  CDR3 for beta chain variable domain of TCR clone 145183 (TRBV11-2, TRBJ2-1)
CASSKNRGLIYEQFF

SEQ ID NO: 290367 - protein, 16 aa, Homo sapiens
  CDR3 for alpha chain variable domain of TCR clone 145184 (TRAV30, TRAJ24)
CGTEIVDTDSWGNFQF

SEQ ID NO: 290368 - protein, 14 aa, Homo sapiens
  CDR3 for beta chain variable domain of TCR clone 145184 (TRBV12-5, TRBJ2-5)
CASGSRTHQETQYF

SEQ ID NO: 290369 - protein, 14 aa, Homo sapiens
  CDR3 for alpha chain variable domain of TCR clone 145185 (TRAV12-3, TRAJ10)
SHLPLTGGGNKLTF

SEQ ID NO: 290370 - protein, 11 aa, Homo sapiens
  CDR3 for beta chain variable domain of TCR clone 145185 (TRBV20-1, TRBJ2-5)
CRADRAETQYF

SEQ ID NO: 290371 - protein, 15 aa, Homo sapiens
  CDR3 for alpha chain variable domain of TCR clone 145186 (TRAV3, TRAJ5)
CAVRDLDTGRRALTF

SEQ ID NO: 290372 - protein, 16 aa, Homo sapiens
  CDR3 for beta chain variable domain of TCR clone 145186 (TRBV7-2, TRBJ2-5)
CASSPGGARRGETQYF

SEQ ID NO: 290373 - protein, 13 aa, Homo sapiens
  CDR3 for alpha chain variable domain of TCR clone 145187 (TRAV2, TRAJ40)
CAVVTSGTYKYIF

SEQ ID NO: 290374 - protein, 16 aa, Homo sapiens
  CDR3 for beta chain variable domain of TCR clone 145187 (TRBV19, TRBJ2-2)
CDSRPPGTGATGELFF

SEQ ID NO: 290375 - protein, 11 aa, Homo sapiens
  CDR3 for alpha chain variable domain of TCR clone 145188 (TRAV35, TRAJ34)
CWARNTDKLIF

SEQ ID NO: 290376 - protein, 16 aa, Homo sapiens
  CDR3 for beta chain variable domain of TCR clone 145188 (TRBV11-2, TRBJ2-7)
CASSPTTGGVSYEQYF

SEQ ID NO: 290377 - protein, 13 aa, Homo sapiens
  CDR3 for alpha chain variable domain of TCR clone 145189 (TRAV35, TRAJ33)
CAGQLYGVYQLIW

SEQ ID NO: 290378 - protein, 14 aa, Homo sapiens
  CDR3 for beta chain variable domain of TCR clone 145189 (TRBV7-2, TRBJ1-1)
CASSLGGAGTEAFC

SEQ ID NO: 290379 - protein, 19 aa, Homo sapiens
  CDR3 for alpha chain variable domain of TCR clone 145190 (TRAV1-2, TRAJ16)
LSYNVLDGLEEKDGQKLLF

SEQ ID NO: 290380 - protein, 19 aa, Homo sapiens
  CDR3 for beta chain variable domain of TCR clone 145190 (TRBV25-1, TRBJ2-2)
CAILVYRVDRGRKTGELFF

SEQ ID NO: 290381 - protein, 16 aa, Homo sapiens
  CDR3 for alpha chain variable domain of TCR clone 145191 (TRAV38-1, TRAJ37)
CAFKGDGSSNTGKLIF

SEQ ID NO: 290382 - protein, 16 aa, Homo sapiens
  CDR3 for beta chain variable domain of TCR clone 145191 (TRBV7-9, TRBJ1-2)
CASSLGFSSGEDGYTF

SEQ ID NO: 290383 - protein, 16 aa, Homo sapiens
  CDR3 for alpha chain variable domain of TCR clone 145192 (TRAV30, TRAJ24)
GGTEIVDADSWGKFQF

SEQ ID NO: 290384 - protein, 14 aa, Homo sapiens
  CDR3 for beta chain variable domain of TCR clone 145192 (TRBV20-1, TRBJ1-1)
CSAQTRIGGTEAFF

SEQ ID NO: 290385 - protein, 14 aa, Homo sapiens
  CDR3 for alpha chain variable domain of TCR clone 145193 (TRAV12-2, TRAJ45)
CAVNKGGGADGLTF

SEQ ID NO: 290386 - protein, 13 aa, Homo sapiens
  CDR3 for beta chain variable domain of TCR clone 145193 (TRBV7-8, TRBJ2-1)
CASSLERLGEQFF

SEQ ID NO: 290387 - protein, 12 aa, Homo sapiens
  CDR3 for alpha chain variable domain of TCR clone 145194 (TRAV12-3, TRAJ17)
CAMTLTGNKLTF

SEQ ID NO: 290388 - protein, 15 aa, Homo sapiens
  CDR3 for beta chain variable domain of TCR clone 145194 (TRBV7-2, TRBJ2-1)
CASSLASGRVNEQFF

SEQ ID NO: 290389 - protein, 11 aa, Homo sapiens
  CDR3 for alpha chain variable domain of TCR clone 145195 (TRAV21, TRAJ34)
CAVTNTDKLIF

SEQ ID NO: 290390 - protein, 13 aa, Homo sapiens
  CDR3 for beta chain variable domain of TCR clone 145195 (TRBV7-9, TRBJ2-5)
CASLPSGRETQYF

SEQ ID NO: 290391 - protein, 23 aa, Homo sapiens
  CDR3 for alpha chain variable domain of TCR clone 145196 (TRAV26-1, TRAJ38)
CIADNAGNNRIQNPDPAVYQLRD

SEQ ID NO: 290392 - protein, 17 aa, Homo sapiens
  CDR3 for beta chain variable domain of TCR clone 145196 (TRBV11-2, TRBJ2-6)
CASSRRDIFSGANVLTF

SEQ ID NO: 290393 - protein, 11 aa, Homo sapiens
  CDR3 for alpha chain variable domain of TCR clone 145197 (TRAV13-1, TRAJ43)
CAASGTNDMRF

SEQ ID NO: 290394 - protein, 14 aa, Homo sapiens
  CDR3 for beta chain variable domain of TCR clone 145197 (TRBV4-1, TRBJ1-1)
CASSPPGVNTEAFF

SEQ ID NO: 290395 - protein, 17 aa, Homo sapiens
  CDR3 for alpha chain variable domain of TCR clone 145198 (TRAV17, TRAJ52)
CATDLVGGGTSYGKLTF

SEQ ID NO: 290396 - protein, 16 aa, Homo sapiens
  CDR3 for beta chain variable domain of TCR clone 145198 (TRBV12-4, TRBJ2-3)
CASSLRLAETTDTQYF

SEQ ID NO: 290397 - protein, 15 aa, Homo sapiens
  CDR3 for alpha chain variable domain of TCR clone 145199 (TRAV13-1, TRAJ52)
CAASSPSTSYGKLTF

SEQ ID NO: 290398 - protein, 15 aa, Homo sapiens
  CDR3 for beta chain variable domain of TCR clone 145199 (TRBV11-2, TRBJ2-1)
CASSLGTSGLNEQFF

SEQ ID NO: 290399 - protein, 18 aa, Homo sapiens
  CDR3 for alpha chain variable domain of TCR clone 145200 (TRAV26-2, TRAJ54)
CILRDVEVGIQGAQKLVF

SEQ ID NO: 290400 - protein, 17 aa, Homo sapiens
  CDR3 for beta chain variable domain of TCR clone 145200 (TRBV20-1, TRBJ1-5)
CSASLSPGQGGNQPQHV

SEQ ID NO: 290401 - protein, 15 aa, Homo sapiens
  CDR3 for alpha chain variable domain of TCR clone 145201 (TRAV3, TRAJ12)
CALRDIRDSSYKLIF

SEQ ID NO: 290402 - protein, 15 aa, Homo sapiens
  CDR3 for beta chain variable domain of TCR clone 145201 (TRBV27, TRBJ2-7)
CASSLRNEQGYEQYF

SEQ ID NO: 290403 - protein, 13 aa, Homo sapiens
  CDR3 for alpha chain variable domain of TCR clone 145202 (TRAV27, TRAJ8)
CAGGPTGFQKLVF

SEQ ID NO: 290404 - protein, 11 aa, Homo sapiens
  CDR3 for beta chain variable domain of TCR clone 145202 (TRBV19, TRBJ1-1)
CASSIGSEAFF

SEQ ID NO: 290405 - protein, 14 aa, Homo sapiens
  CDR3 for alpha chain variable domain of TCR clone 145203 (TRAV8-4, TRAJ17)
CAVSSPAAGNKLTF

SEQ ID NO: 290406 - protein, 14 aa, Homo sapiens
  CDR3 for beta chain variable domain of TCR clone 145203 (TRBV10-3, TRBJ2-5)
CAISVGGVYENQYF

SEQ ID NO: 290407 - protein, 15 aa, Homo sapiens
  CDR3 for alpha chain variable domain of TCR clone 145204 (TRAV17, TRAJ16)
CATALRFSEGQKLLF

SEQ ID NO: 290408 - protein, 15 aa, Homo sapiens
  CDR3 for beta chain variable domain of TCR clone 145204 (TRBV20-1, TRBJ1-1)
CSASRGVTGNTEAFF

SEQ ID NO: 290409 - protein, 12 aa, Homo sapiens
  CDR3 for alpha chain variable domain of TCR clone 145205 (TRAV17, TRAJ49)
CATVTTGNQFYF

SEQ ID NO: 290410 - protein, 12 aa, Homo sapiens
  CDR3 for beta chain variable domain of TCR clone 145205 (TRBV20-1, TRBJ2-1)
CSAQYTYNEQFF

SEQ ID NO: 290411 - protein, 13 aa, Homo sapiens
  CDR3 for alpha chain variable domain of TCR clone 145206 (TRAV38-1, TRAJ42)
CARWAGSQGNLIF

SEQ ID NO: 290412 - protein, 17 aa, Homo sapiens
  CDR3 for beta chain variable domain of TCR clone 145206 (TRBV20-1, TRBJ2-1)
CSARDPLAGVWDNEQFF

SEQ ID NO: 290413 - protein, 14 aa, Homo sapiens
  CDR3 for alpha chain variable domain of TCR clone 145207 (TRAV1-2, TRAJ16)
CAVNRFSDGQKLLF

SEQ ID NO: 290414 - protein, 14 aa, Homo sapiens
  CDR3 for beta chain variable domain of TCR clone 145207 (TRBV19, TRBJ1-2)
CASSLQGQAYGYTF

SEQ ID NO: 290415 - protein, 17 aa, Homo sapiens
  CDR3 for alpha chain variable domain of TCR clone 145208 (TRAV3, TRAJ38)
CAVRDFLNAGNNRKLIW

SEQ ID NO: 290416 - protein, 14 aa, Homo sapiens
  CDR3 for beta chain variable domain of TCR clone 145208 (TRBV5-5, TRBJ1-5)
CASSGQGVDQPQHF

SEQ ID NO: 290417 - protein, 20 aa, Homo sapiens
  CDR3 for alpha chain variable domain of TCR clone 145209 (TRAV13-1, TRAJ6)
CAAVAYIWKRNQPYCSSVYP

SEQ ID NO: 290418 - protein, 14 aa, Homo sapiens
  CDR3 for beta chain variable domain of TCR clone 145209 (TRBV28, TRBJ2-3)
CASSLTDLLDTQYF

SEQ ID NO: 290419 - protein, 13 aa, Homo sapiens
  CDR3 for alpha chain variable domain of TCR clone 145210 (TRAV20, TRAJ9)
CAVPDTGGFKTIF

SEQ ID NO: 290420 - protein, 14 aa, Homo sapiens
  CDR3 for beta chain variable domain of TCR clone 145210 (TRBV7-2, TRBJ2-5)
CASSPRGGSETQYF

SEQ ID NO: 290421 - protein, 13 aa, Homo sapiens
  CDR3 for alpha chain variable domain of TCR clone 145211 (TRAV27, TRAJ57)
CAGFQGGSEKLVF

SEQ ID NO: 290422 - protein, 14 aa, Homo sapiens
  CDR3 for beta chain variable domain of TCR clone 145211 (TRBV20-1, TRBJ1-2)
CSGRKNGRAYGYTF

SEQ ID NO: 290423 - protein, 15 aa, Homo sapiens
  CDR3 for alpha chain variable domain of TCR clone 145212 (TRAV8-3, TRAJ42)
CAVGSQAGSQGNLIF

SEQ ID NO: 290424 - protein, 14 aa, Homo sapiens
  CDR3 for beta chain variable domain of TCR clone 145212 (TRBV12-5, TRBJ2-5)
CASGSRTHQETQYF

SEQ ID NO: 290425 - protein, 14 aa, Homo sapiens
  CDR3 for alpha chain variable domain of TCR clone 145213 (TRAV12-2, TRAJ13)
CAVKKTGGYQKVTF

SEQ ID NO: 290426 - protein, 12 aa, Homo sapiens
  CDR3 for beta chain variable domain of TCR clone 145213 (TRBV27, TRBJ2-7)
CASSIKREEQYF

SEQ ID NO: 290427 - protein, 14 aa, Homo sapiens
  CDR3 for alpha chain variable domain of TCR clone 145214 (TRAV12-3, TRAJ42)
CAMNYGGSQGNPIF

SEQ ID NO: 290428 - protein, 15 aa, Homo sapiens
  CDR3 for beta chain variable domain of TCR clone 145214 (TRBV11-2, TRBJ2-2)
CASRGLAANTGELFF

SEQ ID NO: 290429 - protein, 14 aa, Homo sapiens
  CDR3 for alpha chain variable domain of TCR clone 145215 (TRAV20, TRAJ9)
CAVQASTGGFKTIF

SEQ ID NO: 290430 - protein, 15 aa, Homo sapiens
  CDR3 for beta chain variable domain of TCR clone 145215 (TRBV11-3, TRBJ2-3)
CASLKDGREGDTQYF

SEQ ID NO: 290431 - protein, 14 aa, Homo sapiens
  CDR3 for alpha chain variable domain of TCR clone 145216 (TRAV8-3, TRAJ9)
CAVVYNTGGFKTIF

SEQ ID NO: 290432 - protein, 22 aa, Homo sapiens
  CDR3 for beta chain variable domain of TCR clone 145216 (TRBV7-3, TRBJ2-2)
GGTQPCISVPAAQEDTPGSCFF

SEQ ID NO: 290433 - protein, 14 aa, Homo sapiens
  CDR3 for alpha chain variable domain of TCR clone 145217 (TRAV12-3, TRAJ10)
SRLPLTGGGNKLTF

SEQ ID NO: 290434 - protein, 12 aa, Homo sapiens
  CDR3 for beta chain variable domain of TCR clone 145217 (TRBV7-8, TRBJ2-7)
CASSLGDREQYF

SEQ ID NO: 290435 - protein, 16 aa, Homo sapiens
  CDR3 for alpha chain variable domain of TCR clone 145218 (TRAV20, TRAJ22)
CAVRLVSSGSARQLTF

SEQ ID NO: 290436 - protein, 17 aa, Homo sapiens
  CDR3 for beta chain variable domain of TCR clone 145218 (TRBV11-2, TRBJ2-1)
CASSLYPPGVEYNEQFF

SEQ ID NO: 290437 - protein, 13 aa, Homo sapiens
  CDR3 for alpha chain variable domain of TCR clone 145219 (TRAV8-3, TRAJ28)
CGVGAVGSYQLTF

SEQ ID NO: 290438 - protein, 14 aa, Homo sapiens
  CDR3 for beta chain variable domain of TCR clone 145219 (TRBV25-1, TRBJ1-1)
CASTHLGGNTEAFF

SEQ ID NO: 290439 - protein, 12 aa, Homo sapiens
  CDR3 for alpha chain variable domain of TCR clone 145220 (TRAV5, TRAJ37)
CVETPQTGKLIF

SEQ ID NO: 290440 - protein, 17 aa, Homo sapiens
  CDR3 for beta chain variable domain of TCR clone 145220 (TRBV29-1, TRBJ2-3)
CSVNAFRASGGVDTQYF

SEQ ID NO: 290441 - protein, 15 aa, Homo sapiens
  CDR3 for alpha chain variable domain of TCR clone 145221 (TRAV21, TRAJ40)
CAVRPQTSGTYKYIF

SEQ ID NO: 290442 - protein, 14 aa, Homo sapiens
  CDR3 for beta chain variable domain of TCR clone 145221 (TRBV13, TRBJ2-5)
CASSLGPRGETQYF

SEQ ID NO: 290443 - protein, 11 aa, Homo sapiens
  CDR3 for alpha chain variable domain of TCR clone 145222 (TRAV13-1, TRAJ49)
CAARIGNQFYF

SEQ ID NO: 290444 - protein, 10 aa, Homo sapiens
  CDR3 for beta chain variable domain of TCR clone 145222 (TRBV11-2, TRBJ2-1)
PGVEYNEQFF

SEQ ID NO: 290445 - protein, 18 aa, Homo sapiens
  CDR3 for alpha chain variable domain of TCR clone 145223 (TRAV21, TRAJ52)
CAVRPSPAGGTSYGKLTF

SEQ ID NO: 290446 - protein, 13 aa, Homo sapiens
  CDR3 for beta chain variable domain of TCR clone 145223 (TRBV7-3, TRBJ1-1)
CASSQDWGGEAFF

SEQ ID NO: 290447 - protein, 14 aa, Homo sapiens
  CDR3 for alpha chain variable domain of TCR clone 145224 (TRAV17, TRAJ31)
CATVLRNNNARLMF

SEQ ID NO: 290448 - protein, 14 aa, Homo sapiens
  CDR3 for beta chain variable domain of TCR clone 145224 (TRBV12-4, TRBJ1-1)
CASSLGTGGTEAFF

SEQ ID NO: 290449 - protein, 14 aa, Homo sapiens
  CDR3 for alpha chain variable domain of TCR clone 145225 (TRAV3, TRAJ9)
CAVRGNTGGFKTIF

SEQ ID NO: 290450 - protein, 14 aa, Homo sapiens
  CDR3 for beta chain variable domain of TCR clone 145225 (TRBV15, TRBJ2-1)
CATSGVEEYNEQFF

SEQ ID NO: 290451 - protein, 14 aa, Homo sapiens
  CDR3 for alpha chain variable domain of TCR clone 145226 (TRAV3, TRAJ32)
CCERRAGATNKLIF

SEQ ID NO: 290452 - protein, 15 aa, Homo sapiens
  CDR3 for beta chain variable domain of TCR clone 145226 (TRBV6-3, TRBJ2-7)
CASSSPGTVFYEQYF

SEQ ID NO: 290453 - protein, 14 aa, Homo sapiens
  CDR3 for alpha chain variable domain of TCR clone 145227 (TRAV8-3, TRAJ20)
CAVGPRGNDYKLSF

SEQ ID NO: 290454 - protein, 11 aa, Homo sapiens
  CDR3 for beta chain variable domain of TCR clone 145227 (TRBV10-3, TRBJ2-2)
CATKGTGELVF

SEQ ID NO: 290455 - protein, 12 aa, Homo sapiens
  CDR3 for alpha chain variable domain of TCR clone 145228 (TRAV17, TRAJ53)
CATEGSNYKLTF

SEQ ID NO: 290456 - protein, 12 aa, Homo sapiens
  CDR3 for beta chain variable domain of TCR clone 145228 (TRBV11-2, TRBJ2-2)
CASSLGGGELFF

SEQ ID NO: 290457 - protein, 13 aa, Homo sapiens
  CDR3 for alpha chain variable domain of TCR clone 145229 (TRAV12-1, TRAJ42)
CGGVGGSQGNLIF

SEQ ID NO: 290458 - protein, 13 aa, Homo sapiens
  CDR3 for beta chain variable domain of TCR clone 145229 (TRBV10-3, TRBJ1-1)
CAIIPEGGTEAFF

SEQ ID NO: 290459 - protein, 16 aa, Homo sapiens
  CDR3 for alpha chain variable domain of TCR clone 145230 (TRAV30, TRAJ24)
CGTEIVDADSWGKFQF

SEQ ID NO: 290460 - protein, 14 aa, Homo sapiens
  CDR3 for beta chain variable domain of TCR clone 145230 (TRBV7-3, TRBJ1-1)
CASGLGTGYTEAFF

SEQ ID NO: 290461 - protein, 15 aa, Homo sapiens
  CDR3 for alpha chain variable domain of TCR clone 145231 (TRAV12-3, TRAJ22)
CAMRTISGSARQLTF

SEQ ID NO: 290462 - protein, 16 aa, Homo sapiens
  CDR3 for beta chain variable domain of TCR clone 145231 (TRBV20-1, TRBJ2-2)
CSAGRPGTGNTGELFF

SEQ ID NO: 290463 - protein, 14 aa, Homo sapiens
  CDR3 for alpha chain variable domain of TCR clone 145232 (TRAV1-2, TRAJ8)
CAVREDTGFQKLVF

SEQ ID NO: 290464 - protein, 15 aa, Homo sapiens
  CDR3 for beta chain variable domain of TCR clone 145232 (TRBV13, TRBJ2-5)
CASSLPGGIQETQYF

SEQ ID NO: 290465 - protein, 14 aa, Homo sapiens
  CDR3 for alpha chain variable domain of TCR clone 145233 (TRAV23/DV6, TRAJ13)
CAAMYSGGYQKVTF

SEQ ID NO: 290466 - protein, 14 aa, Homo sapiens
  CDR3 for beta chain variable domain of TCR clone 145233 (TRBV7-9, TRBJ2-1)
CASSPRDSRYEQFF

SEQ ID NO: 290467 - protein, 12 aa, Homo sapiens
  CDR3 for alpha chain variable domain of TCR clone 145234 (TRAV8-4, TRAJ37)
CAVRSNTGELIF

SEQ ID NO: 290468 - protein, 13 aa, Homo sapiens
  CDR3 for beta chain variable domain of TCR clone 145234 (TRBV11-2, TRBJ2-2)
CASGRDREEELFF

SEQ ID NO: 290469 - protein, 15 aa, Homo sapiens
  CDR3 for alpha chain variable domain of TCR clone 145235 (TRAV12-1, TRAJ9)
CVVSRGDTGGFKTIF

SEQ ID NO: 290470 - protein, 13 aa, Homo sapiens
  CDR3 for beta chain variable domain of TCR clone 145235 (TRBV2, TRBJ1-4)
CASSERAGEKLFF

SEQ ID NO: 290471 - protein, 12 aa, Homo sapiens
  CDR3 for alpha chain variable domain of TCR clone 145236 (TRAV3, TRAJ43)
CAVRDPNNDMRF

SEQ ID NO: 290472 - protein, 15 aa, Homo sapiens
  CDR3 for beta chain variable domain of TCR clone 145236 (TRBV4-3, TRBJ2-7)
CASSQGGRGIYEQYF

SEQ ID NO: 290473 - protein, 12 aa, Homo sapiens
  CDR3 for alpha chain variable domain of TCR clone 145237 (TRAV21, TRAJ33)
CAKMDSNYQLIW

SEQ ID NO: 290474 - protein, 13 aa, Homo sapiens
  CDR3 for beta chain variable domain of TCR clone 145237 (TRBV12-4, TRBJ2-5)
CASSPGTEETQYS

SEQ ID NO: 290475 - protein, 16 aa, Homo sapiens
  CDR3 for alpha chain variable domain of TCR clone 145238 (TRAV3, TRAJ37)
RAVRGKGSGNTGKLIF

SEQ ID NO: 290476 - protein, 16 aa, Homo sapiens
  CDR3 for beta chain variable domain of TCR clone 145238 (TRBV12-4, TRBJ1-5)
CASSRPVGGSNQHQHF

SEQ ID NO: 290477 - protein, 12 aa, Homo sapiens
  CDR3 for alpha chain variable domain of TCR clone 145239 (TRAV12-3, TRAJ17)
CAMTLTGNKLTF

SEQ ID NO: 290478 - protein, 15 aa, Homo sapiens
  CDR3 for beta chain variable domain of TCR clone 145239 (TRBV20-1, TRBJ2-7)
YSASDRVSGMDEQYF

SEQ ID NO: 290479 - protein, 16 aa, Homo sapiens
  CDR3 for alpha chain variable domain of TCR clone 145240 (TRAV3, TRAJ37)
CAVRPHGSGNPGKIIF

SEQ ID NO: 290480 - protein, 17 aa, Homo sapiens
  CDR3 for beta chain variable domain of TCR clone 145240 (TRBV5-1, TRBJ2-5)
CASSPVALGQNQETQYF

SEQ ID NO: 290481 - protein, 14 aa, Homo sapiens
  CDR3 for alpha chain variable domain of TCR clone 145241 (TRAV8-6, TRAJ3)
CAVSRYSSASKIIF

SEQ ID NO: 290482 - protein, 20 aa, Homo sapiens
  CDR3 for beta chain variable domain of TCR clone 145241 (TRBV7-8, TRBJ2-2)
CASSHLFPGPTIHITGELFF

SEQ ID NO: 290483 - protein, 13 aa, Homo sapiens
  CDR3 for alpha chain variable domain of TCR clone 145242 (TRAV1-2, TRAJ17)
CAVGKAAGNKPTF

SEQ ID NO: 290484 - protein, 15 aa, Homo sapiens
  CDR3 for beta chain variable domain of TCR clone 145242 (TRBV7-9, TRBJ2-1)
CASSGTGGDYNEQFF

SEQ ID NO: 290485 - protein, 15 aa, Homo sapiens
  CDR3 for alpha chain variable domain of TCR clone 145243 (TRAV8-3, TRAJ7)
CAVGSISYGNNRLAF

SEQ ID NO: 290486 - protein, 12 aa, Homo sapiens
  CDR3 for beta chain variable domain of TCR clone 145243 (TRBV29-1, TRBJ2-3)
CSVTGGADTQYF

SEQ ID NO: 290487 - protein, 13 aa, Homo sapiens
  CDR3 for alpha chain variable domain of TCR clone 145244 (TRAV13-1, TRAJ41)
CADAPNSRYALNF

SEQ ID NO: 290488 - protein, 13 aa, Homo sapiens
  CDR3 for beta chain variable domain of TCR clone 145244 (TRBV19, TRBJ2-7)
CASEGTTTYEQYF

SEQ ID NO: 290489 - protein, 17 aa, Homo sapiens
  CDR3 for alpha chain variable domain of TCR clone 145245 (TRAV3, TRAJ28)
CAVREAYSGAGSYQVTF

SEQ ID NO: 290490 - protein, 17 aa, Homo sapiens
  CDR3 for beta chain variable domain of TCR clone 145245 (TRBV20-1, TRBJ2-1)
CSASSSGLAGSYNEQFF

SEQ ID NO: 290491 - protein, 14 aa, Homo sapiens
  CDR3 for alpha chain variable domain of TCR clone 145246 (TRAV13-1, TRAJ3)
CAASKSSSASKIVF

SEQ ID NO: 290492 - protein, 13 aa, Homo sapiens
  CDR3 for beta chain variable domain of TCR clone 145246 (TRBV25-1, TRBJ2-5)
CASSESGRETQYF

SEQ ID NO: 290493 - protein, 13 aa, Homo sapiens
  CDR3 for alpha chain variable domain of TCR clone 145247 (TRAV2, TRAJ13)
CAVESGGYQKVTF

SEQ ID NO: 290494 - protein, 14 aa, Homo sapiens
  CDR3 for beta chain variable domain of TCR clone 145247 (TRBV12-5, TRBJ2-5)
CASGSRTHQETQYF

SEQ ID NO: 290495 - protein, 14 aa, Homo sapiens
  CDR3 for alpha chain variable domain of TCR clone 145248 (TRAV12-2, TRAJ44)
CDVNPAGTASKLTF

SEQ ID NO: 290496 - protein, 15 aa, Homo sapiens
  CDR3 for beta chain variable domain of TCR clone 145248 (TRBV5-1, TRBJ2-1)
CASSPPRAPYNEQFF

SEQ ID NO: 290497 - protein, 14 aa, Homo sapiens
  CDR3 for alpha chain variable domain of TCR clone 145249 (TRAV26-1, TRAJ38)
CIADNAGNNRKLIW

SEQ ID NO: 290498 - protein, 12 aa, Homo sapiens
  CDR3 for beta chain variable domain of TCR clone 145249 (TRBV20-1, TRBJ2-1)
CSARLGPDEQFF

SEQ ID NO: 290499 - protein, 12 aa, Homo sapiens
  CDR3 for alpha chain variable domain of TCR clone 145250 (TRAV8-6, TRAJ33)
CAVTDSNYQLIW

SEQ ID NO: 290500 - protein, 15 aa, Homo sapiens
  CDR3 for beta chain variable domain of TCR clone 145250 (TRBV4-3, TRBJ1-2)
CASSRGQGRNDGYTF

SEQ ID NO: 290501 - protein, 14 aa, Homo sapiens
  CDR3 for alpha chain variable domain of TCR clone 145251 (TRAV16, TRAJ42)
CALLAGGSQGNLIF

SEQ ID NO: 290502 - protein, 17 aa, Homo sapiens
  CDR3 for beta chain variable domain of TCR clone 145251 (TRBV13, TRBJ2-3)
CASSLSRVAGGRNTQYF

SEQ ID NO: 290503 - protein, 14 aa, Homo sapiens
  CDR3 for alpha chain variable domain of TCR clone 145252 (TRAV27, TRAJ42)
CAGGDGGSQGNLIV

SEQ ID NO: 290504 - protein, 14 aa, Homo sapiens
  CDR3 for beta chain variable domain of TCR clone 145252 (TRBV19, TRBJ1-2)
CASSRQGSSIGYTF

SEQ ID NO: 290505 - protein, 18 aa, Homo sapiens
  CDR3 for alpha chain variable domain of TCR clone 145253 (TRAV21, TRAJ52)
CAVRPSPAGGTSYGKLTF

SEQ ID NO: 290506 - protein, 15 aa, Homo sapiens
  CDR3 for beta chain variable domain of TCR clone 145253 (TRBV4-1, TRBJ2-5)
CASSQWDLYQETQYF

SEQ ID NO: 290507 - protein, 15 aa, Homo sapiens
  CDR3 for alpha chain variable domain of TCR clone 145254 (TRAV2, TRAJ13)
CCLLLCFRGLQKVTF

SEQ ID NO: 290508 - protein, 15 aa, Homo sapiens
  CDR3 for beta chain variable domain of TCR clone 145254 (TRBV6-1, TRBJ2-2)
CASSRLRGDTGELFF

SEQ ID NO: 290509 - protein, 12 aa, Homo sapiens
  CDR3 for alpha chain variable domain of TCR clone 145255 (TRAV1-1, TRAJ24)
CAVRGSWGNSSL

SEQ ID NO: 290510 - protein, 16 aa, Homo sapiens
  CDR3 for beta chain variable domain of TCR clone 145255 (TRBV27, TRBJ2-5)
CASSSQTSGFQETQYF

SEQ ID NO: 290511 - protein, 12 aa, Homo sapiens
  CDR3 for alpha chain variable domain of TCR clone 145256 (TRAV13-1, TRAJ5)
CAAKAGGRALTF

SEQ ID NO: 290512 - protein, 13 aa, Homo sapiens
  CDR3 for beta chain variable domain of TCR clone 145256 (TRBV7-9, TRBJ1-2)
CASSLKQNYGYTF

SEQ ID NO: 290513 - protein, 14 aa, Homo sapiens
  CDR3 for alpha chain variable domain of TCR clone 145257 (TRAV14/DV4, TRAJ15)
CAMRRDQAGNALIF

SEQ ID NO: 290514 - protein, 16 aa, Homo sapiens
  CDR3 for beta chain variable domain of TCR clone 145257 (TRBV15, TRBJ2-3)
CATSRDLGIVTDTQYF

SEQ ID NO: 290515 - protein, 11 aa, Homo sapiens
  CDR3 for alpha chain variable domain of TCR clone 145258 (TRAV12-1, TRAJ21)
CVVYNCNKFYF

SEQ ID NO: 290516 - protein, 14 aa, Homo sapiens
  CDR3 for beta chain variable domain of TCR clone 145258 (TRBV19, TRBJ2-7)
CASSMGQGAIEQYF

SEQ ID NO: 290517 - protein, 15 aa, Homo sapiens
  CDR3 for alpha chain variable domain of TCR clone 145259 (TRAV17, TRAJ23)
CATDAEDNAGGKLIF

SEQ ID NO: 290518 - protein, 12 aa, Homo sapiens
  CDR3 for beta chain variable domain of TCR clone 145259 (TRBV2, TRBJ2-1)
CAKREGYNEQFF

SEQ ID NO: 290519 - protein, 13 aa, Homo sapiens
  CDR3 for alpha chain variable domain of TCR clone 145260 (TRAV20, TRAJ31)
CAVQAWNNARLMF

SEQ ID NO: 290520 - protein, 13 aa, Homo sapiens
  CDR3 for beta chain variable domain of TCR clone 145260 (TRBV12-4, TRBJ1-2)
CASSLRQGKCYTF

SEQ ID NO: 290521 - protein, 10 aa, Homo sapiens
  CDR3 for alpha chain variable domain of TCR clone 145261 (TRAV1-2, TRAJ31)
CAFFDARLMF

SEQ ID NO: 290522 - protein, 15 aa, Homo sapiens
  CDR3 for beta chain variable domain of TCR clone 145261 (TRBV4-1, TRBJ1-4)
CASSDTGGTNEELFF

SEQ ID NO: 290523 - protein, 12 aa, Homo sapiens
  CDR3 for alpha chain variable domain of TCR clone 145262 (TRAV38-1, TRAJ34)
CAFMKETDKLIF

SEQ ID NO: 290524 - protein, 17 aa, Homo sapiens
  CDR3 for beta chain variable domain of TCR clone 145262 (TRBV7-8, TRBJ2-6)
CASSAGTGGAGANVLAF

SEQ ID NO: 290525 - protein, 14 aa, Homo sapiens
  CDR3 for alpha chain variable domain of TCR clone 145263 (TRAV1-2, TRAJ8)
CAVREDTGFQKLVF

SEQ ID NO: 290526 - protein, 15 aa, Homo sapiens
  CDR3 for beta chain variable domain of TCR clone 145263 (TRBV10-2, TRBJ2-6)
CASSERGTGANVLTF

SEQ ID NO: 290527 - protein, 14 aa, Homo sapiens
  CDR3 for alpha chain variable domain of TCR clone 145264 (TRAV1-1, TRAJ27)
CAVIYNTNASKSTL

SEQ ID NO: 290528 - protein, 15 aa, Homo sapiens
  CDR3 for beta chain variable domain of TCR clone 145264 (TRBV7-2, TRBJ2-1)
CASSSGLAGGNEQFF

SEQ ID NO: 290529 - protein, 14 aa, Homo sapiens
  CDR3 for alpha chain variable domain of TCR clone 145265 (TRAV13-1, TRAJ35)
CAASKGGFGNVLHC

SEQ ID NO: 290530 - protein, 15 aa, Homo sapiens
  CDR3 for beta chain variable domain of TCR clone 145265 (TRBV7-9, TRBJ2-7)
CASSPGGGLTYEQYV

SEQ ID NO: 290531 - protein, 14 aa, Homo sapiens
  CDR3 for alpha chain variable domain of TCR clone 145266 (TRAV16, TRAJ15)
CALSFNQAGTALIF

SEQ ID NO: 290532 - protein, 18 aa, Homo sapiens
  CDR3 for beta chain variable domain of TCR clone 145266 (TRBV9, TRBJ2-7)
CISVPAAQDLRSPYEQYF

SEQ ID NO: 290533 - protein, 14 aa, Homo sapiens
  CDR3 for alpha chain variable domain of TCR clone 145267 (TRAV12-2, TRAJ36)
CAVKISTGANHLFF

SEQ ID NO: 290534 - protein, 14 aa, Homo sapiens
  CDR3 for beta chain variable domain of TCR clone 145267 (TRBV20-1, TRBJ2-3)
CSARGGTSTDTQYF

SEQ ID NO: 290535 - protein, 12 aa, Homo sapiens
  CDR3 for alpha chain variable domain of TCR clone 145268 (TRAV12-3, TRAJ20)
CAMVRGDYKLSF

SEQ ID NO: 290536 - protein, 14 aa, Homo sapiens
  CDR3 for beta chain variable domain of TCR clone 145268 (TRBV19, TRBJ2-1)
CASPTFVLSGEQFL

SEQ ID NO: 290537 - protein, 16 aa, Homo sapiens
  CDR3 for alpha chain variable domain of TCR clone 145269 (TRAV3, TRAJ18)
CAVRDGRGSTLGRLYF

SEQ ID NO: 290538 - protein, 13 aa, Homo sapiens
  CDR3 for beta chain variable domain of TCR clone 145269 (TRBV5-5, TRBJ2-7)
CASSSQTRQRQYF

SEQ ID NO: 290539 - protein, 13 aa, Homo sapiens
  CDR3 for alpha chain variable domain of TCR clone 145270 (TRAV2, TRAJ40)
CAVVTSETYKYIF

SEQ ID NO: 290540 - protein, 14 aa, Homo sapiens
  CDR3 for beta chain variable domain of TCR clone 145270 (TRBV19, TRBJ2-1)
CASPTCVLSGEQFF

SEQ ID NO: 290541 - protein, 12 aa, Homo sapiens
  CDR3 for alpha chain variable domain of TCR clone 145271 (TRAV12-2, TRAJ9)
CRERTGGFKTIF

SEQ ID NO: 290542 - protein, 17 aa, Homo sapiens
  CDR3 for beta chain variable domain of TCR clone 145271 (TRBV4-1, TRBJ2-1)
CASSHRDSGSSYNEQFF

SEQ ID NO: 290543 - protein, 15 aa, Homo sapiens
  CDR3 for alpha chain variable domain of TCR clone 145272 (TRAV3, TRAJ29)
CAVRAPLSGNTPLVF

SEQ ID NO: 290544 - protein, 15 aa, Homo sapiens
  CDR3 for beta chain variable domain of TCR clone 145272 (TRBV28, TRBJ1-1)
CASRIRGGLNTEAFF

SEQ ID NO: 290545 - protein, 11 aa, Homo sapiens
  CDR3 for alpha chain variable domain of TCR clone 145273 (TRAV1-2, TRAJ20)
CAVANDYKLSF

SEQ ID NO: 290546 - protein, 17 aa, Homo sapiens
  CDR3 for beta chain variable domain of TCR clone 145273 (TRBV7-2, TRBJ2-2)
CASSPRGAGEGTGELLV

SEQ ID NO: 290547 - protein, 16 aa, Homo sapiens
  CDR3 for alpha chain variable domain of TCR clone 145274 (TRAV13-1, TRAJ22)
CAAKGGRSGSARRLTF

SEQ ID NO: 290548 - protein, 15 aa, Homo sapiens
  CDR3 for beta chain variable domain of TCR clone 145274 (TRBV9, TRBJ1-6)
CASSVAGTGDSPLHF

SEQ ID NO: 290549 - protein, 14 aa, Homo sapiens
  CDR3 for alpha chain variable domain of TCR clone 145275 (TRAV13-1, TRAJ44)
CAAKATGTASKLTF

SEQ ID NO: 290550 - protein, 17 aa, Homo sapiens
  CDR3 for beta chain variable domain of TCR clone 145275 (TRBV7-3, TRBJ2-3)
RARSLMKRMRGADTQYF

SEQ ID NO: 290551 - protein, 13 aa, Homo sapiens
  CDR3 for alpha chain variable domain of TCR clone 145276 (TRAV2, TRAJ21)
CAVEDLNFNKFYF

SEQ ID NO: 290552 - protein, 15 aa, Homo sapiens
  CDR3 for beta chain variable domain of TCR clone 145276 (TRBV28, TRBJ2-5)
RASSPGQGSIETQYF

SEQ ID NO: 290553 - protein, 12 aa, Homo sapiens
  CDR3 for alpha chain variable domain of TCR clone 145277 (TRAV27, TRAJ36)
ASTPAGANNLFF

SEQ ID NO: 290554 - protein, 14 aa, Homo sapiens
  CDR3 for beta chain variable domain of TCR clone 145277 (TRBV7-6, TRBJ1-6)
CASSQAGGGSPLHF

SEQ ID NO: 290555 - protein, 13 aa, Homo sapiens
  CDR3 for alpha chain variable domain of TCR clone 145278 (TRAV12-2, TRAJ3)
CAFQYSSASKIIF

SEQ ID NO: 290556 - protein, 11 aa, Homo sapiens
  CDR3 for beta chain variable domain of TCR clone 145278 (TRBV20-1, TRBJ2-3)
CSGTSSTTQYS

SEQ ID NO: 290557 - protein, 17 aa, Homo sapiens
  CDR3 for alpha chain variable domain of TCR clone 145279 (TRAV8-6, TRAJ58)
CAVCSWVGETSGSRLTF

SEQ ID NO: 290558 - protein, 14 aa, Homo sapiens
  CDR3 for beta chain variable domain of TCR clone 145279 (TRBV4-2, TRBJ2-1)
CASGLDRAYNEQFF

SEQ ID NO: 290559 - protein, 12 aa, Homo sapiens
  CDR3 for alpha chain variable domain of TCR clone 145280 (TRAV12-3, TRAJ17)
CAMTLTGNKLTF

SEQ ID NO: 290560 - protein, 20 aa, Homo sapiens
  CDR3 for beta chain variable domain of TCR clone 145280 (TRBV7-8, TRBJ2-2)
CASSHLFPGPTIHITGELVF

SEQ ID NO: 290561 - protein, 13 aa, Homo sapiens
  CDR3 for alpha chain variable domain of TCR clone 145281 (TRAV8-3, TRAJ44)
CAVVPGTASKLTF

SEQ ID NO: 290562 - protein, 14 aa, Homo sapiens
  CDR3 for beta chain variable domain of TCR clone 145281 (TRBV12-4, TRBJ2-1)
CASSLGQGASEQFF

SEQ ID NO: 290563 - protein, 16 aa, Homo sapiens
  CDR3 for alpha chain variable domain of TCR clone 145282 (TRAV26-1, TRAJ45)
CIVEKYSGGGADGLTF

SEQ ID NO: 290564 - protein, 15 aa, Homo sapiens
  CDR3 for beta chain variable domain of TCR clone 145282 (TRBV15, TRBJ2-7)
CHQQRPIQQAYGQYF

SEQ ID NO: 290565 - protein, 14 aa, Homo sapiens
  CDR3 for alpha chain variable domain of TCR clone 145283 (TRAV26-1, TRAJ6)
CIVSPVGGSYIPTF

SEQ ID NO: 290566 - protein, 16 aa, Homo sapiens
  CDR3 for beta chain variable domain of TCR clone 145283 (TRBV4-1, TRBJ2-5)
CASSSGLAGVLGTQYV

SEQ ID NO: 290567 - protein, 13 aa, Homo sapiens
  CDR3 for alpha chain variable domain of TCR clone 145284 (TRAV26-2, TRAJ43)
CILRAVNNNDMRF

SEQ ID NO: 290568 - protein, 15 aa, Homo sapiens
  CDR3 for beta chain variable domain of TCR clone 145284 (TRBV5-7, TRBJ1-5)
CASSYGKLWDQPQHF

SEQ ID NO: 290569 - protein, 14 aa, Homo sapiens
  CDR3 for alpha chain variable domain of TCR clone 145285 (TRAV17, TRAJ57)
CATDPQGGSEKLVF

SEQ ID NO: 290570 - protein, 13 aa, Homo sapiens
  CDR3 for beta chain variable domain of TCR clone 145285 (TRBV12-4, TRBJ1-2)
CASSLRQGKGYTF

SEQ ID NO: 290571 - protein, 15 aa, Homo sapiens
  CDR3 for alpha chain variable domain of TCR clone 145286 (TRAV25, TRAJ52)
CAGRPGGTSYGKLTF

SEQ ID NO: 290572 - protein, 15 aa, Homo sapiens
  CDR3 for beta chain variable domain of TCR clone 145286 (TRBV7-2, TRBJ2-1)
CASSSGLAGGNEQFF

SEQ ID NO: 290573 - protein, 13 aa, Homo sapiens
  CDR3 for alpha chain variable domain of TCR clone 145287 (TRAV29/DV5, TRAJ29)
CAASAAGNTPLVF

SEQ ID NO: 290574 - protein, 15 aa, Homo sapiens
  CDR3 for beta chain variable domain of TCR clone 145287 (TRBV7-9, TRBJ1-5)
CASSQGHQPNQPQHF

SEQ ID NO: 290575 - protein, 11 aa, Homo sapiens
  CDR3 for alpha chain variable domain of TCR clone 145288 (TRAV3, TRAJ21)
CAVGNFNKFYF

SEQ ID NO: 290576 - protein, 16 aa, Homo sapiens
  CDR3 for beta chain variable domain of TCR clone 145288 (TRBV19, TRBJ2-1)
CASSRAGPRSYNEQFF

SEQ ID NO: 290577 - protein, 14 aa, Homo sapiens
  CDR3 for alpha chain variable domain of TCR clone 145289 (TRAV12-2, TRAJ13)
CAVKTTGGYQRVTF

SEQ ID NO: 290578 - protein, 15 aa, Homo sapiens
  CDR3 for beta chain variable domain of TCR clone 145289 (TRBV27, TRBJ2-1)
CASSNGGGSSNEQFF

SEQ ID NO: 290579 - protein, 11 aa, Homo sapiens
  CDR3 for alpha chain variable domain of TCR clone 145290 (TRAV12-2, TRAJ31)
CAVTRWARLMF

SEQ ID NO: 290580 - protein, 14 aa, Homo sapiens
  CDR3 for beta chain variable domain of TCR clone 145290 (TRBV7-9, TRBJ2-5)
CASSLDTAQETQYF

SEQ ID NO: 290581 - protein, 18 aa, Homo sapiens
  CDR3 for alpha chain variable domain of TCR clone 145291 (TRAV21, TRAJ52)
CAVRPSPAGGTSYGKLTF

SEQ ID NO: 290582 - protein, 16 aa, Homo sapiens
  CDR3 for beta chain variable domain of TCR clone 145291 (TRBV7-2, TRBJ2-3)
CASSLVALYSTDTQYF

SEQ ID NO: 290583 - protein, 14 aa, Homo sapiens
  CDR3 for alpha chain variable domain of TCR clone 145292 (TRAV1-2, TRAJ16)
CAVNRFSDCQKLLF

SEQ ID NO: 290584 - protein, 14 aa, Homo sapiens
  CDR3 for beta chain variable domain of TCR clone 145292 (TRBV7-3, TRBJ1-1)
CASSLGTGYTEAFF

SEQ ID NO: 290585 - protein, 14 aa, Homo sapiens
  CDR3 for alpha chain variable domain of TCR clone 145293 (TRAV8-4, TRAJ17)
CAVSDQAAGNKLTF

SEQ ID NO: 290586 - protein, 17 aa, Homo sapiens
  CDR3 for beta chain variable domain of TCR clone 145293 (TRBV13, TRBJ2-3)
CASSLSRVAGGRNTQYF

SEQ ID NO: 290587 - protein, 14 aa, Homo sapiens
  CDR3 for alpha chain variable domain of TCR clone 145294 (TRAV13-1, TRAJ35)
CAASKGGFGNVLHC

SEQ ID NO: 290588 - protein, 14 aa, Homo sapiens
  CDR3 for beta chain variable domain of TCR clone 145294 (TRBV12-4, TRBJ1-1)
CASSFDRVNTEAFF

SEQ ID NO: 290589 - protein, 14 aa, Homo sapiens
  CDR3 for alpha chain variable domain of TCR clone 145295 (TRAV26-1, TRAJ38)
CIADNAGNNRKLIW

SEQ ID NO: 290590 - protein, 15 aa, Homo sapiens
  CDR3 for beta chain variable domain of TCR clone 145295 (TRBV5-4, TRBJ2-2)
CASRYGDLNTGELFF

SEQ ID NO: 290591 - protein, 15 aa, Homo sapiens
  CDR3 for alpha chain variable domain of TCR clone 145296 (TRAV12-3, TRAJ18)
CAISDRGSTLGRLYF

SEQ ID NO: 290592 - protein, 14 aa, Homo sapiens
  CDR3 for beta chain variable domain of TCR clone 145296 (TRBV11-2, TRBJ2-3)
CASSSIASTDTQYF

SEQ ID NO: 290593 - protein, 15 aa, Homo sapiens
  CDR3 for alpha chain variable domain of TCR clone 145297 (TRAV13-1, TRAJ18)
CAASGGGSTLGRLYF

SEQ ID NO: 290594 - protein, 13 aa, Homo sapiens
  CDR3 for beta chain variable domain of TCR clone 145297 (TRBV18, TRBJ2-1)
CASGIASNNEQFF

SEQ ID NO: 290595 - protein, 18 aa, Homo sapiens
  CDR3 for alpha chain variable domain of TCR clone 145298 (TRAV17, TRAJ45)
CATSLDLYSGGGANGLTF

SEQ ID NO: 290596 - protein, 16 aa, Homo sapiens
  CDR3 for beta chain variable domain of TCR clone 145298 (TRBV4-2, TRBJ1-1)
CASSQAGFGMNTEAFF

SEQ ID NO: 290597 - protein, 15 aa, Homo sapiens
  CDR3 for alpha chain variable domain of TCR clone 145299 (TRAV26-1, TRAJ22)
CIVRVSFWFCKATDL

SEQ ID NO: 290598 - protein, 13 aa, Homo sapiens
  CDR3 for beta chain variable domain of TCR clone 145299 (TRBV7-9, TRBJ1-2)
CASSLKQNYGYHF

SEQ ID NO: 290599 - protein, 14 aa, Homo sapiens
  CDR3 for alpha chain variable domain of TCR clone 145300 (TRAV12-1, TRAJ29)
CLVNEGSGNKPLVF

SEQ ID NO: 290600 - protein, 13 aa, Homo sapiens
  CDR3 for beta chain variable domain of TCR clone 145300 (TRBV7-9, TRBJ2-3)
CASSPGSTDTQYF

SEQ ID NO: 290601 - protein, 13 aa, Homo sapiens
  CDR3 for alpha chain variable domain of TCR clone 145301 (TRAV2, TRAJ40)
CAVVTTGTYKYII

SEQ ID NO: 290602 - protein, 14 aa, Homo sapiens
  CDR3 for beta chain variable domain of TCR clone 145301 (TRBV19, TRBJ2-1)
CASPTFVLSGEQFF

SEQ ID NO: 290603 - protein, 10 aa, Homo sapiens
  CDR3 for alpha chain variable domain of TCR clone 145302 (TRAV16, TRAJ22)
SAMYLRQLTF

SEQ ID NO: 290604 - protein, 15 aa, Homo sapiens
  CDR3 for beta chain variable domain of TCR clone 145302 (TRBV7-9, TRBJ1-6)
CASSSPGRGNSPLHI

SEQ ID NO: 290605 - protein, 14 aa, Homo sapiens
  CDR3 for alpha chain variable domain of TCR clone 145303 (TRAV20, TRAJ56)
CAVQFGGANSKLTF

SEQ ID NO: 290606 - protein, 14 aa, Homo sapiens
  CDR3 for beta chain variable domain of TCR clone 145303 (TRBV2, TRBJ2-7)
CASTVGRSSYEQYF

SEQ ID NO: 290607 - protein, 17 aa, Homo sapiens
  CDR3 for alpha chain variable domain of TCR clone 145304 (TRAV13-1, TRAJ53)
CAASWKSSGGSNYKLTF

SEQ ID NO: 290608 - protein, 16 aa, Homo sapiens
  CDR3 for beta chain variable domain of TCR clone 145304 (TRBV7-3, TRBJ2-2)
CASSLKRGTLSGELFF

SEQ ID NO: 290609 - protein, 14 aa, Homo sapiens
  CDR3 for alpha chain variable domain of TCR clone 145305 (TRAV1-2, TRAJ8)
CAVREDTGFQKRVF

SEQ ID NO: 290610 - protein, 16 aa, Homo sapiens
  CDR3 for beta chain variable domain of TCR clone 145305 (TRBV7-9, TRBJ2-1)
CASSDVAGGSYNEQFF

SEQ ID NO: 290611 - protein, 16 aa, Homo sapiens
  CDR3 for alpha chain variable domain of TCR clone 145306 (TRAV13-1, TRAJ45)
CAARGSRNGGADGLTF

SEQ ID NO: 290612 - protein, 13 aa, Homo sapiens
  CDR3 for beta chain variable domain of TCR clone 145306 (TRBV12-4, TRBJ2-5)
CASRKRGKETQYF

SEQ ID NO: 290613 - protein, 17 aa, Homo sapiens
  CDR3 for alpha chain variable domain of TCR clone 145307 (TRAV3, TRAJ12)
CAVRDGGRMDSSYKLIF

SEQ ID NO: 290614 - protein, 14 aa, Homo sapiens
  CDR3 for beta chain variable domain of TCR clone 145307 (TRBV7-9, TRBJ1-2)
CASSQQGANYGYTF

SEQ ID NO: 290615 - protein, 14 aa, Homo sapiens
  CDR3 for alpha chain variable domain of TCR clone 145308 (TRAV12-3, TRAJ58)
CAMSTETSGSRLTF

SEQ ID NO: 290616 - protein, 13 aa, Homo sapiens
  CDR3 for beta chain variable domain of TCR clone 145308 (TRBV27, TRBJ2-3)
CAGSWGRTDTQYF

SEQ ID NO: 290617 - protein, 16 aa, Homo sapiens
  CDR3 for alpha chain variable domain of TCR clone 145309 (TRAV30, TRAJ24)
CGTEIVDAGSWGKFQF

SEQ ID NO: 290618 - protein, 16 aa, Homo sapiens
  CDR3 for beta chain variable domain of TCR clone 145309 (TRBV6-3, TRBJ1-1)
CASTDLGTVPNTEAFF

SEQ ID NO: 290619 - protein, 16 aa, Homo sapiens
  CDR3 for alpha chain variable domain of TCR clone 145310 (TRAV30, TRAJ24)
CGTEIVDADSWGKFQF

SEQ ID NO: 290620 - protein, 14 aa, Homo sapiens
  CDR3 for beta chain variable domain of TCR clone 145310 (TRBV12-5, TRBJ2-5)
CASGSRTHQDTQHF

SEQ ID NO: 290621 - protein, 14 aa, Homo sapiens
  CDR3 for alpha chain variable domain of TCR clone 145311 (TRAV29/DV5, TRAJ4)
CSATVLGGYNKLIF

SEQ ID NO: 290622 - protein, 17 aa, Homo sapiens
  CDR3 for beta chain variable domain of TCR clone 145311 (TRBV11-2, TRBJ2-1)
CASSLYPPGVEYNEQFF

SEQ ID NO: 290623 - protein, 12 aa, Homo sapiens
  CDR3 for alpha chain variable domain of TCR clone 145312 (TRAV2, TRAJ33)
CAVPDSNYQLIW

SEQ ID NO: 290624 - protein, 15 aa, Homo sapiens
  CDR3 for beta chain variable domain of TCR clone 145312 (TRBV28, TRBJ2-1)
CASSIIAGGRSEQFF

SEQ ID NO: 290625 - protein, 17 aa, Homo sapiens
  CDR3 for alpha chain variable domain of TCR clone 145313 (TRAV26-2, TRAJ42)
CILRDVGYGGSQGNLIF

SEQ ID NO: 290626 - protein, 12 aa, Homo sapiens
  CDR3 for beta chain variable domain of TCR clone 145313 (TRBV7-6, TRBJ2-5)
CASSLSQETQYF

SEQ ID NO: 290627 - protein, 13 aa, Homo sapiens
  CDR3 for alpha chain variable domain of TCR clone 145314 (TRAV1-2, TRAJ9)
CAVLNTGGFKTIF

SEQ ID NO: 290628 - protein, 14 aa, Homo sapiens
  CDR3 for beta chain variable domain of TCR clone 145314 (TRBV20-1, TRBJ2-3)
CSARGGTSTDTQYG

SEQ ID NO: 290629 - protein, 19 aa, Homo sapiens
  CDR3 for alpha chain variable domain of TCR clone 145315 (TRAV26-1, TRAJ52)
CIVRAHRNAGGTSYGKLTF

SEQ ID NO: 290630 - protein, 15 aa, Homo sapiens
  CDR3 for beta chain variable domain of TCR clone 145315 (TRBV6-1, TRBJ2-5)
CASPRWGTEGQTQYF

SEQ ID NO: 290631 - protein, 13 aa, Homo sapiens
  CDR3 for alpha chain variable domain of TCR clone 145316 (TRAV8-3, TRAJ6)
CAVEKGGSYIPTF

SEQ ID NO: 290632 - protein, 13 aa, Homo sapiens
  CDR3 for beta chain variable domain of TCR clone 145316 (TRBV10-3, TRBJ1-2)
CAISERDSYGCTF

SEQ ID NO: 290633 - protein, 14 aa, Homo sapiens
  CDR3 for alpha chain variable domain of TCR clone 145317 (TRAV12-1, TRAJ22)
CVVPYRGSARQLSF

SEQ ID NO: 290634 - protein, 15 aa, Homo sapiens
  CDR3 for beta chain variable domain of TCR clone 145317 (TRBV12-4, TRBJ2-1)
CASSLGTSAVNEQFF

SEQ ID NO: 290635 - protein, 13 aa, Homo sapiens
  CDR3 for alpha chain variable domain of TCR clone 145318 (TRAV12-3, TRAJ41)
CAIAPNSGYALNF

SEQ ID NO: 290636 - protein, 14 aa, Homo sapiens
  CDR3 for beta chain variable domain of TCR clone 145318 (TRBV19, TRBJ1-5)
CASSQGYSNQPQHF

SEQ ID NO: 290637 - protein, 14 aa, Homo sapiens
  CDR3 for alpha chain variable domain of TCR clone 145319 (TRAV17, TRAJ16)
CATADFLDGKKLLF

SEQ ID NO: 290638 - protein, 15 aa, Homo sapiens
  CDR3 for beta chain variable domain of TCR clone 145319 (TRBV18, TRBJ2-1)
CASSPPSASYNEQFF

SEQ ID NO: 290639 - protein, 16 aa, Homo sapiens
  CDR3 for alpha chain variable domain of TCR clone 145320 (TRAV3, TRAJ37)
CAVRPHGSGNTAKLIF

SEQ ID NO: 290640 - protein, 15 aa, Homo sapiens
  CDR3 for beta chain variable domain of TCR clone 145320 (TRBV20-1, TRBJ2-7)
CSARDRVSGMDEQYF

SEQ ID NO: 290641 - protein, 20 aa, Homo sapiens
  CDR3 for alpha chain variable domain of TCR clone 145321 (TRAV26-1, TRAJ36)
CCVLLHRQSLLSNWGNNLFF

SEQ ID NO: 290642 - protein, 13 aa, Homo sapiens
  CDR3 for beta chain variable domain of TCR clone 145321 (TRBV5-5, TRBJ1-5)
CASSLGIGGDQHF

SEQ ID NO: 290643 - protein, 14 aa, Homo sapiens
  CDR3 for alpha chain variable domain of TCR clone 145322 (TRAV1-2, TRAJ16)
CAVNRFSDGQKLLF

SEQ ID NO: 290644 - protein, 13 aa, Homo sapiens
  CDR3 for beta chain variable domain of TCR clone 145322 (TRBV5-7, TRBJ1-2)
CASSLGVFNGYTF

SEQ ID NO: 290645 - protein, 12 aa, Homo sapiens
  CDR3 for alpha chain variable domain of TCR clone 145323 (TRAV12-2, TRAJ42)
CAVGGSQGNLIF

SEQ ID NO: 290646 - protein, 12 aa, Homo sapiens
  CDR3 for beta chain variable domain of TCR clone 145323 (TRBV6-3, TRBJ2-1)
CASSGSYNEQFF

SEQ ID NO: 290647 - protein, 13 aa, Homo sapiens
  CDR3 for alpha chain variable domain of TCR clone 145324 (TRAV3, TRAJ15)
CAVRDQAGTALTV

SEQ ID NO: 290648 - protein, 15 aa, Homo sapiens
  CDR3 for beta chain variable domain of TCR clone 145324 (TRBV11-1, TRBJ2-7)
CASSLNYGASYEQYF

SEQ ID NO: 290649 - protein, 13 aa, Homo sapiens
  CDR3 for alpha chain variable domain of TCR clone 145325 (TRAV12-2, TRAJ31)
CAVKADNNARLMF

SEQ ID NO: 290650 - protein, 15 aa, Homo sapiens
  CDR3 for beta chain variable domain of TCR clone 145325 (TRBV15, TRBJ1-5)
CATSREQGGNQTQHF

SEQ ID NO: 290651 - protein, 15 aa, Homo sapiens
  CDR3 for alpha chain variable domain of TCR clone 145326 (TRAV4, TRAJ39)
CLVGPNNSAGNMLTF

SEQ ID NO: 290652 - protein, 11 aa, Homo sapiens
  CDR3 for beta chain variable domain of TCR clone 145326 (TRBV13, TRBJ2-2)
CASSPRTGEHT

SEQ ID NO: 290653 - protein, 14 aa, Homo sapiens
  CDR3 for alpha chain variable domain of TCR clone 145327 (TRAV8-3, TRAJ21)
CALGARANFNKFYF

SEQ ID NO: 290654 - protein, 16 aa, Homo sapiens
  CDR3 for beta chain variable domain of TCR clone 145327 (TRBV20-1, TRBJ2-1)
CSARDLAGHSYNEQFF

SEQ ID NO: 290655 - protein, 13 aa, Homo sapiens
  CDR3 for alpha chain variable domain of TCR clone 145328 (TRAV17, TRAJ4)
CATKSGDYNKLIF

SEQ ID NO: 290656 - protein, 14 aa, Homo sapiens
  CDR3 for beta chain variable domain of TCR clone 145328 (TRBV20-1, TRBJ1-5)
CSARDDRGNHPQHF

SEQ ID NO: 290657 - protein, 15 aa, Homo sapiens
  CDR3 for alpha chain variable domain of TCR clone 145329 (TRAV12-3, TRAJ6)
CAMSATTGGSYIPTF

SEQ ID NO: 290658 - protein, 16 aa, Homo sapiens
  CDR3 for beta chain variable domain of TCR clone 145329 (TRBV20-1, TRBJ1-2)
CSASMGQGVSNYGYIF

SEQ ID NO: 290659 - protein, 18 aa, Homo sapiens
  CDR3 for alpha chain variable domain of TCR clone 145330 (TRAV12-3, TRAJ52)
CAMSVGGAGGTSYGKLTF

SEQ ID NO: 290660 - protein, 16 aa, Homo sapiens
  CDR3 for beta chain variable domain of TCR clone 145330 (TRBV7-9, TRBJ1-3)
CASSLGAGSSGNTIYF

SEQ ID NO: 290661 - protein, 15 aa, Homo sapiens
  CDR3 for alpha chain variable domain of TCR clone 145331 (TRAV26-2, TRAJ45)
CILRERVDQEEVLTD

SEQ ID NO: 290662 - protein, 15 aa, Homo sapiens
  CDR3 for beta chain variable domain of TCR clone 145331 (TRBV7-6, TRBJ2-5)
CASSKPTGPQETQYF

SEQ ID NO: 290663 - protein, 16 aa, Homo sapiens
  CDR3 for alpha chain variable domain of TCR clone 145332 (TRAV23/DV6, TRAJ48)
CAASGVVNFGNEKLTF

SEQ ID NO: 290664 - protein, 18 aa, Homo sapiens
  CDR3 for beta chain variable domain of TCR clone 145332 (TRBV12-4, TRBJ2-2)
CASSLVAGTRGRTGELFF

SEQ ID NO: 290665 - protein, 10 aa, Homo sapiens
  CDR3 for alpha chain variable domain of TCR clone 145333 (TRAV26-1, TRAJ40)
CIAGTYKYIF

SEQ ID NO: 290666 - protein, 11 aa, Homo sapiens
  CDR3 for beta chain variable domain of TCR clone 145333 (TRBV19, TRBJ1-1)
CASSIGSEAFF

SEQ ID NO: 290667 - protein, 12 aa, Homo sapiens
  CDR3 for alpha chain variable domain of TCR clone 145334 (TRAV3, TRAJ39)
FAVIEWSNMLTF

SEQ ID NO: 290668 - protein, 16 aa, Homo sapiens
  CDR3 for beta chain variable domain of TCR clone 145334 (TRBV12-5, TRBJ2-5)
CASGPRTSGNQETQYF

SEQ ID NO: 290669 - protein, 13 aa, Homo sapiens
  CDR3 for alpha chain variable domain of TCR clone 145335 (TRAV2, TRAJ40)
CAVVTSGTYKYIF

SEQ ID NO: 290670 - protein, 13 aa, Homo sapiens
  CDR3 for beta chain variable domain of TCR clone 145335 (TRBV15, TRBJ2-7)
CATSTTGHYEQYF

SEQ ID NO: 290671 - protein, 13 aa, Homo sapiens
  CDR3 for alpha chain variable domain of TCR clone 145336 (TRAV17, TRAJ5)
CAPMDTGRRALTF

SEQ ID NO: 290672 - protein, 15 aa, Homo sapiens
  CDR3 for beta chain variable domain of TCR clone 145336 (TRBV4-1, TRBJ1-4)
CASSDTGGTNEKLFF

SEQ ID NO: 290673 - protein, 12 aa, Homo sapiens
  CDR3 for alpha chain variable domain of TCR clone 145337 (TRAV21, TRAJ30)
CAVMNRDDKLIF

SEQ ID NO: 290674 - protein, 17 aa, Homo sapiens
  CDR3 for beta chain variable domain of TCR clone 145337 (TRBV5-1, TRBJ1-1)
CASRPIRTGGVNTEAFF

SEQ ID NO: 290675 - protein, 14 aa, Homo sapiens
  CDR3 for alpha chain variable domain of TCR clone 145338 (TRAV8-1, TRAJ5)
CAVRTDTDRRALTF

SEQ ID NO: 290676 - protein, 14 aa, Homo sapiens
  CDR3 for beta chain variable domain of TCR clone 145338 (TRBV7-8, TRBJ2-3)
CASSFPDGQGTQYF

SEQ ID NO: 290677 - protein, 18 aa, Homo sapiens
  CDR3 for alpha chain variable domain of TCR clone 145339 (TRAV21, TRAJ52)
CALRPSPAGGTSYGELTF

SEQ ID NO: 290678 - protein, 17 aa, Homo sapiens
  CDR3 for beta chain variable domain of TCR clone 145339 (TRBV13, TRBJ2-3)
CASSLSRVAGGRNRQYF

SEQ ID NO: 290679 - protein, 14 aa, Homo sapiens
  CDR3 for alpha chain variable domain of TCR clone 145340 (TRAV1-2, TRAJ8)
CAVREDTGFQKLVF

SEQ ID NO: 290680 - protein, 15 aa, Homo sapiens
  CDR3 for beta chain variable domain of TCR clone 145340 (TRBV12-4, TRBJ2-5)
CAISPPTGLQETQYF

SEQ ID NO: 290681 - protein, 14 aa, Homo sapiens
  CDR3 for alpha chain variable domain of TCR clone 145341 (TRAV8-3, TRAJ4)
CAVGAAGCYNKLIF

SEQ ID NO: 290682 - protein, 15 aa, Homo sapiens
  CDR3 for beta chain variable domain of TCR clone 145341 (TRBV20-1, TRBJ2-5)
CSAPPRTGFGETQYF

SEQ ID NO: 290683 - protein, 12 aa, Homo sapiens
  CDR3 for alpha chain variable domain of TCR clone 145342 (TRAV1-1, TRAJ39)
CAVPVVGNMPTF

SEQ ID NO: 290684 - protein, 15 aa, Homo sapiens
  CDR3 for beta chain variable domain of TCR clone 145342 (TRBV27, TRBJ2-1)
CASSNGGGSSNEQFF

SEQ ID NO: 290685 - protein, 13 aa, Homo sapiens
  CDR3 for alpha chain variable domain of TCR clone 145343 (TRAV13-1, TRAJ6)
CAASSGGSYIPTF

SEQ ID NO: 290686 - protein, 14 aa, Homo sapiens
  CDR3 for beta chain variable domain of TCR clone 145343 (TRBV20-1, TRBJ2-4)
CSAVAGGPGNIQYY

SEQ ID NO: 290687 - protein, 13 aa, Homo sapiens
  CDR3 for alpha chain variable domain of TCR clone 145344 (TRAV26-1, TRAJ48)
CIVRVVGDEKLTL

SEQ ID NO: 290688 - protein, 19 aa, Homo sapiens
  CDR3 for beta chain variable domain of TCR clone 145344 (TRBV11-3, TRBJ2-2)
CASSTRPGAKTTNTGELFF

SEQ ID NO: 290689 - protein, 12 aa, Homo sapiens
  CDR3 for alpha chain variable domain of TCR clone 145345 (TRAV35, TRAJ39)
LAPNNAGNMLTF

SEQ ID NO: 290690 - protein, 13 aa, Homo sapiens
  CDR3 for beta chain variable domain of TCR clone 145345 (TRBV4-1, TRBJ2-1)
CASSQAGGDEQFF

SEQ ID NO: 290691 - protein, 13 aa, Homo sapiens
  CDR3 for alpha chain variable domain of TCR clone 145346 (TRAV12-2, TRAJ45)
RAVNRGGADGLTF

SEQ ID NO: 290692 - protein, 16 aa, Homo sapiens
  CDR3 for beta chain variable domain of TCR clone 145346 (TRBV2, TRBJ1-1)
CASSPTLGGASTEAFF

SEQ ID NO: 290693 - protein, 13 aa, Homo sapiens
  CDR3 for alpha chain variable domain of TCR clone 145347 (TRAV26-1, TRAJ48)
CIVLRVRNEKLTF

SEQ ID NO: 290694 - protein, 14 aa, Homo sapiens
  CDR3 for beta chain variable domain of TCR clone 145347 (TRBV20-1, TRBJ1-5)
CSARDISKNQTQHF

SEQ ID NO: 290695 - protein, 13 aa, Homo sapiens
  CDR3 for alpha chain variable domain of TCR clone 145348 (TRAV13-1, TRAJ53)
CAASKGSNYKLTF

SEQ ID NO: 290696 - protein, 12 aa, Homo sapiens
  CDR3 for beta chain variable domain of TCR clone 145348 (TRBV6-3, TRBJ2-1)
CASSGSYNEQFF

SEQ ID NO: 290697 - protein, 15 aa, Homo sapiens
  CDR3 for alpha chain variable domain of TCR clone 145349 (TRAV17, TRAJ45)
CATAYSGGAAVGLTF

SEQ ID NO: 290698 - protein, 14 aa, Homo sapiens
  CDR3 for beta chain variable domain of TCR clone 145349 (TRBV7-8, TRBJ2-3)
CASSLEAGTDTQYF

SEQ ID NO: 290699 - protein, 12 aa, Homo sapiens
  CDR3 for alpha chain variable domain of TCR clone 145350 (TRAV24, TRAJ47)
CAFGEYGNKLVF

SEQ ID NO: 290700 - protein, 14 aa, Homo sapiens
  CDR3 for beta chain variable domain of TCR clone 145350 (TRBV19, TRBJ2-5)
CASSMTGQQETQYF

SEQ ID NO: 290701 - protein, 12 aa, Homo sapiens
  CDR3 for alpha chain variable domain of TCR clone 145351 (TRAV3, TRAJ27)
CAVRDGAGKSTF

SEQ ID NO: 290702 - protein, 17 aa, Homo sapiens
  CDR3 for beta chain variable domain of TCR clone 145351 (TRBV13, TRBJ2-3)
CASSLSRVAGGRNTQYF

SEQ ID NO: 290703 - protein, 15 aa, Homo sapiens
  CDR3 for alpha chain variable domain of TCR clone 145352 (TRAV17, TRAJ56)
CATDANTGANSKLAF

SEQ ID NO: 290704 - protein, 14 aa, Homo sapiens
  CDR3 for beta chain variable domain of TCR clone 145352 (TRBV19, TRBJ1-5)
CASSLGTGGQPQHF

SEQ ID NO: 290705 - protein, 13 aa, Homo sapiens
  CDR3 for alpha chain variable domain of TCR clone 145353 (TRAV12-1, TRAJ9)
CVVLDTGGFKTIF

SEQ ID NO: 290706 - protein, 13 aa, Homo sapiens
  CDR3 for beta chain variable domain of TCR clone 145353 (TRBV20-1, TRBJ1-1)
CSARGGGNTEAFF

SEQ ID NO: 290707 - protein, 14 aa, Homo sapiens
  CDR3 for alpha chain variable domain of TCR clone 145354 (TRAV26-1, TRAJ39)
CIVRAYNAGNMPTF

SEQ ID NO: 290708 - protein, 16 aa, Homo sapiens
  CDR3 for beta chain variable domain of TCR clone 145354 (TRBV15, TRBJ2-7)
CATSRDFGAAVYEQYF

SEQ ID NO: 290709 - protein, 12 aa, Homo sapiens
  CDR3 for alpha chain variable domain of TCR clone 145355 (TRAV8-6, TRAJ43)
CAVSHNNNDMSF

SEQ ID NO: 290710 - protein, 13 aa, Homo sapiens
  CDR3 for beta chain variable domain of TCR clone 145355 (TRBV7-3, TRBJ1-1)
CASSQDWGAEAFF

SEQ ID NO: 290711 - protein, 14 aa, Homo sapiens
  CDR3 for alpha chain variable domain of TCR clone 145356 (TRAV12-3, TRAJ10)
SHLPLTGGGNKLTF

SEQ ID NO: 290712 - protein, 14 aa, Homo sapiens
  CDR3 for beta chain variable domain of TCR clone 145356 (TRBV7-8, TRBJ2-3)
CASSLEAETDTQYF

SEQ ID NO: 290713 - protein, 15 aa, Homo sapiens
  CDR3 for alpha chain variable domain of TCR clone 145357 (TRAV21, TRAJ53)
CATLNSGVSNYKLTF

SEQ ID NO: 290714 - protein, 16 aa, Homo sapiens
  CDR3 for beta chain variable domain of TCR clone 145357 (TRBV20-1, TRBJ1-4)
CSAPGQGLLTNEKLFF

SEQ ID NO: 290715 - protein, 16 aa, Homo sapiens
  CDR3 for alpha chain variable domain of TCR clone 145358 (TRAV35, TRAJ28)
CAGYLYSGAGSYQLTF

SEQ ID NO: 290716 - protein, 16 aa, Homo sapiens
  CDR3 for beta chain variable domain of TCR clone 145358 (TRBV5-1, TRBJ2-1)
CASSHGLAGPQNEHFF

SEQ ID NO: 290717 - protein, 16 aa, Homo sapiens
  CDR3 for alpha chain variable domain of TCR clone 145359 (TRAV12-1, TRAJ43)
CVVNPHRFGSGTRLTV

SEQ ID NO: 290718 - protein, 13 aa, Homo sapiens
  CDR3 for beta chain variable domain of TCR clone 145359 (TRBV12-4, TRBJ1-2)
CASSSGPNYGYTF

SEQ ID NO: 290719 - protein, 17 aa, Homo sapiens
  CDR3 for alpha chain variable domain of TCR clone 145360 (TRAV12-1, TRAJ53)
CVAGAIVGGGSHYKLTF

SEQ ID NO: 290720 - protein, 14 aa, Homo sapiens
  CDR3 for beta chain variable domain of TCR clone 145360 (TRBV5-1, TRBJ1-4)
CASSLDRTHEKLFF

SEQ ID NO: 290721 - protein, 13 aa, Homo sapiens
  CDR3 for alpha chain variable domain of TCR clone 145361 (TRAV21, TRAJ20)
CAVGLRVDYKLSF

SEQ ID NO: 290722 - protein, 11 aa, Homo sapiens
  CDR3 for beta chain variable domain of TCR clone 145361 (TRBV7-9, TRBJ2-5)
CASSLGETQYF

SEQ ID NO: 290723 - protein, 14 aa, Homo sapiens
  CDR3 for alpha chain variable domain of TCR clone 145362 (TRAV8-4, TRAJ13)
CAVTLSGGYQKVTF

SEQ ID NO: 290724 - protein, 17 aa, Homo sapiens
  CDR3 for beta chain variable domain of TCR clone 145362 (TRBV7-8, TRBJ1-2)
CASSLRPLQGHLYGYTF

SEQ ID NO: 290725 - protein, 14 aa, Homo sapiens
  CDR3 for alpha chain variable domain of TCR clone 145363 (TRAV1-2, TRAJ8)
CAVREATGCQKLVF

SEQ ID NO: 290726 - protein, 15 aa, Homo sapiens
  CDR3 for beta chain variable domain of TCR clone 145363 (TRBV6-3, TRBJ2-7)
CASSSPGTVFYEQYF

SEQ ID NO: 290727 - protein, 14 aa, Homo sapiens
  CDR3 for alpha chain variable domain of TCR clone 145364 (TRAV16, TRAJ32)
CAQKSGGATNKLIF

SEQ ID NO: 290728 - protein, 13 aa, Homo sapiens
  CDR3 for beta chain variable domain of TCR clone 145364 (TRBV15, TRBJ1-6)
CATSGGLNSPLHF

SEQ ID NO: 290729 - protein, 14 aa, Homo sapiens
  CDR3 for alpha chain variable domain of TCR clone 145365 (TRAV38-1, TRAJ43)
CAFMKHNNNNDMRF

SEQ ID NO: 290730 - protein, 14 aa, Homo sapiens
  CDR3 for beta chain variable domain of TCR clone 145365 (TRBV2, TRBJ2-1)
CASRTGSSYNEQFF

SEQ ID NO: 290731 - protein, 16 aa, Homo sapiens
  CDR3 for alpha chain variable domain of TCR clone 145366 (TRAV4, TRAJ18)
CCVLLIGGSTLGRLYF

SEQ ID NO: 290732 - protein, 16 aa, Homo sapiens
  CDR3 for beta chain variable domain of TCR clone 145366 (TRBV10-3, TRBJ2-1)
CAISGVGDGGGGEQFF

SEQ ID NO: 290733 - protein, 11 aa, Homo sapiens
  CDR3 for alpha chain variable domain of TCR clone 145367 (TRAV3, TRAJ21)
FAVGNFNKFYF

SEQ ID NO: 290734 - protein, 15 aa, Homo sapiens
  CDR3 for beta chain variable domain of TCR clone 145367 (TRBV29-1, TRBJ2-1)
CSVEGGPASYDEQFF

SEQ ID NO: 290735 - protein, 14 aa, Homo sapiens
  CDR3 for alpha chain variable domain of TCR clone 145368 (TRAV12-1, TRAJ34)
CVVNLDYNTDKLIF

SEQ ID NO: 290736 - protein, 13 aa, Homo sapiens
  CDR3 for beta chain variable domain of TCR clone 145368 (TRBV7-6, TRBJ2-1)
CQQLGGGADEQFF

SEQ ID NO: 290737 - protein, 14 aa, Homo sapiens
  CDR3 for alpha chain variable domain of TCR clone 145369 (TRAV2, TRAJ23)
CAVGLRNQGGKLIF

SEQ ID NO: 290738 - protein, 15 aa, Homo sapiens
  CDR3 for beta chain variable domain of TCR clone 145369 (TRBV5-1, TRBJ1-4)
FAPAAWKDGNEKLFF

SEQ ID NO: 290739 - protein, 12 aa, Homo sapiens
  CDR3 for alpha chain variable domain of TCR clone 145370 (TRAV1-1, TRAJ8)
CAGGTGFQKLVF

SEQ ID NO: 290740 - protein, 14 aa, Homo sapiens
  CDR3 for beta chain variable domain of TCR clone 145370 (TRBV2, TRBJ1-5)
CASSENRGGQPQHF

SEQ ID NO: 290741 - protein, 16 aa, Homo sapiens
  CDR3 for alpha chain variable domain of TCR clone 145371 (TRAV16, TRAJ4)
CALSRMFSGGYNKLIF

SEQ ID NO: 290742 - protein, 15 aa, Homo sapiens
  CDR3 for beta chain variable domain of TCR clone 145371 (TRBV19, TRBJ2-1)
CASSRAVFSYNEQFF

SEQ ID NO: 290743 - protein, 14 aa, Homo sapiens
  CDR3 for alpha chain variable domain of TCR clone 145372 (TRAV12-1, TRAJ17)
CVVNYKATGNKLTF

SEQ ID NO: 290744 - protein, 17 aa, Homo sapiens
  CDR3 for beta chain variable domain of TCR clone 145372 (TRBV20-1, TRBJ2-1)
GSASSSGLAGSYNEQFF

SEQ ID NO: 290745 - protein, 17 aa, Homo sapiens
  CDR3 for alpha chain variable domain of TCR clone 145373 (TRAV3, TRAJ6)
CAVRDGPRAGGSYIHTF

SEQ ID NO: 290746 - protein, 17 aa, Homo sapiens
  CDR3 for beta chain variable domain of TCR clone 145373 (TRBV11-2, TRBJ2-1)
CASSLYPPGVEYNEQFF

SEQ ID NO: 290747 - protein, 18 aa, Homo sapiens
  CDR3 for alpha chain variable domain of TCR clone 145374 (TRAV12-3, TRAJ52)
CAMSVGGAVGTSYGKLTF

SEQ ID NO: 290748 - protein, 15 aa, Homo sapiens
  CDR3 for beta chain variable domain of TCR clone 145374 (TRBV7-2, TRBJ2-2)
CANRRPGQNTGELFF

SEQ ID NO: 290749 - protein, 14 aa, Homo sapiens
  CDR3 for alpha chain variable domain of TCR clone 145375 (TRAV9-2, TRAJ39)
CALYIYNAGNMLTF

SEQ ID NO: 290750 - protein, 13 aa, Homo sapiens
  CDR3 for beta chain variable domain of TCR clone 145375 (TRBV11-3, TRBJ1-1)
CASSRQPNAEAFF

SEQ ID NO: 290751 - protein, 16 aa, Homo sapiens
  CDR3 for alpha chain variable domain of TCR clone 145376 (TRAV12-3, TRAJ53)
CSMSVGSGGSNYKLTF

SEQ ID NO: 290752 - protein, 13 aa, Homo sapiens
  CDR3 for beta chain variable domain of TCR clone 145376 (TRBV7-6, TRBJ1-2)
CASSLVADYGYTF

SEQ ID NO: 290753 - protein, 12 aa, Homo sapiens
  CDR3 for alpha chain variable domain of TCR clone 145377 (TRAV21, TRAJ13)
PGPSGGYQKVTF

SEQ ID NO: 290754 - protein, 15 aa, Homo sapiens
  CDR3 for beta chain variable domain of TCR clone 145377 (TRBV7-9, TRBJ1-6)
CASSSPGRGNSTLHL

SEQ ID NO: 290755 - protein, 14 aa, Homo sapiens
  CDR3 for alpha chain variable domain of TCR clone 145378 (TRAV12-2, TRAJ6)
CASKWGGGSYIPTF

SEQ ID NO: 290756 - protein, 17 aa, Homo sapiens
  CDR3 for beta chain variable domain of TCR clone 145378 (TRBV4-1, TRBJ2-7)
CASSRDPLGVRGGEQYF

SEQ ID NO: 290757 - protein, 18 aa, Homo sapiens
  CDR3 for alpha chain variable domain of TCR clone 145379 (TRAV21, TRAJ52)
CAVRPSPAGGTSYGKLTF

SEQ ID NO: 290758 - protein, 12 aa, Homo sapiens
  CDR3 for beta chain variable domain of TCR clone 145379 (TRBV7-8, TRBJ2-7)
CASEGGPHGQYF

SEQ ID NO: 290759 - protein, 13 aa, Homo sapiens
  CDR3 for alpha chain variable domain of TCR clone 145380 (TRAV21, TRAJ27)
CAARPGNAGNSTF

SEQ ID NO: 290760 - protein, 15 aa, Homo sapiens
  CDR3 for beta chain variable domain of TCR clone 145380 (TRBV20-1, TRBJ2-7)
CSAGDRVSGMDEQYF

SEQ ID NO: 290761 - protein, 15 aa, Homo sapiens
  CDR3 for alpha chain variable domain of TCR clone 145381 (TRAV12-3, TRAJ13)
CAMSARSGGYQKVTL

SEQ ID NO: 290762 - protein, 18 aa, Homo sapiens
  CDR3 for beta chain variable domain of TCR clone 145381 (TRBV3-1, TRBJ2-7)
CASSQEGGGRSWHYEQYF

SEQ ID NO: 290763 - protein, 12 aa, Homo sapiens
  CDR3 for alpha chain variable domain of TCR clone 145382 (TRAV2, TRAJ3)
CAVRSSASKIIF

SEQ ID NO: 290764 - protein, 15 aa, Homo sapiens
  CDR3 for beta chain variable domain of TCR clone 145382 (TRBV6-1, TRBJ2-3)
CASSERGGITDTQYF

SEQ ID NO: 290765 - protein, 13 aa, Homo sapiens
  CDR3 for alpha chain variable domain of TCR clone 145383 (TRAV2, TRAJ29)
CAAGNSGNTPLVF

SEQ ID NO: 290766 - protein, 14 aa, Homo sapiens
  CDR3 for beta chain variable domain of TCR clone 145383 (TRBV7-2, TRBJ2-1)
CASSLGVGYNEQFF

SEQ ID NO: 290767 - protein, 13 aa, Homo sapiens
  CDR3 for alpha chain variable domain of TCR clone 145384 (TRAV2, TRAJ27)
CAVGAPMQANQPL

SEQ ID NO: 290768 - protein, 13 aa, Homo sapiens
  CDR3 for beta chain variable domain of TCR clone 145384 (TRBV10-2, TRBJ2-3)
CASSESGDHTQYF

SEQ ID NO: 290769 - protein, 14 aa, Homo sapiens
  CDR3 for alpha chain variable domain of TCR clone 145385 (TRAV38-1, TRAJ11)
CAFMKHEGYSTLTF

SEQ ID NO: 290770 - protein, 15 aa, Homo sapiens
  CDR3 for beta chain variable domain of TCR clone 145385 (TRBV5-4, TRBJ2-3)
CASSLYRGRTDTQYF

SEQ ID NO: 290771 - protein, 15 aa, Homo sapiens
  CDR3 for alpha chain variable domain of TCR clone 145386 (TRAV8-1, TRAJ6)
CAVNTPPGGSYIPTF

SEQ ID NO: 290772 - protein, 15 aa, Homo sapiens
  CDR3 for beta chain variable domain of TCR clone 145386 (TRBV11-2, TRBJ2-2)
CASSSDRVNAGELFS

SEQ ID NO: 290773 - protein, 14 aa, Homo sapiens
  CDR3 for alpha chain variable domain of TCR clone 145387 (TRAV38-2/DV8, TRAJ23)
CAYRSQNQGGKLIF

SEQ ID NO: 290774 - protein, 15 aa, Homo sapiens
  CDR3 for beta chain variable domain of TCR clone 145387 (TRBV19, TRBJ1-5)
CASSIVWADNQPQHF

SEQ ID NO: 290775 - protein, 14 aa, Homo sapiens
  CDR3 for alpha chain variable domain of TCR clone 145388 (TRAV8-6, TRAJ29)
CAVSRASGNTPLVF

SEQ ID NO: 290776 - protein, 13 aa, Homo sapiens
  CDR3 for beta chain variable domain of TCR clone 145388 (TRBV19, TRBJ1-5)
CASSEGSNQPQHY

SEQ ID NO: 290777 - protein, 14 aa, Homo sapiens
  CDR3 for alpha chain variable domain of TCR clone 145389 (TRAV12-2, TRAJ23)
CAVGGYNQGGKLIF

SEQ ID NO: 290778 - protein, 13 aa, Homo sapiens
  CDR3 for beta chain variable domain of TCR clone 145389 (TRBV7-9, TRBJ1-2)
CASSLKQNYGYTF

SEQ ID NO: 290779 - protein, 15 aa, Homo sapiens
  CDR3 for alpha chain variable domain of TCR clone 145390 (TRAV19, TRAJ23)
CALSEVGNQGGKLIF

SEQ ID NO: 290780 - protein, 16 aa, Homo sapiens
  CDR3 for beta chain variable domain of TCR clone 145390 (TRBV4-1, TRBJ2-7)
CASSQNDRDNSYEQYF

SEQ ID NO: 290781 - protein, 13 aa, Homo sapiens
  CDR3 for alpha chain variable domain of TCR clone 145391 (TRAV26-2, TRAJ54)
CIPRVGGAQKRVF

SEQ ID NO: 290782 - protein, 16 aa, Homo sapiens
  CDR3 for beta chain variable domain of TCR clone 145391 (TRBV4-1, TRBJ1-1)
CASSSMSERPNTEAFF

SEQ ID NO: 290783 - protein, 12 aa, Homo sapiens
  CDR3 for alpha chain variable domain of TCR clone 145392 (TRAV12-1, TRAJ40)
CVVYSGTYKYIF

SEQ ID NO: 290784 - protein, 18 aa, Homo sapiens
  CDR3 for beta chain variable domain of TCR clone 145392 (TRBV11-2, TRBJ2-3)
CASSLGGASRGAHNTRYF

SEQ ID NO: 290785 - protein, 10 aa, Homo sapiens
  CDR3 for alpha chain variable domain of TCR clone 145393 (TRAV26-1, TRAJ22)
RSGSERQLTF

SEQ ID NO: 290786 - protein, 16 aa, Homo sapiens
  CDR3 for beta chain variable domain of TCR clone 145393 (TRBV24-1, TRBJ2-3)
CATSDPGTGATDTQYF

SEQ ID NO: 290787 - protein, 12 aa, Homo sapiens
  CDR3 for alpha chain variable domain of TCR clone 145394 (TRAV13-2, TRAJ23)
CTERHRGGKLIL

SEQ ID NO: 290788 - protein, 15 aa, Homo sapiens
  CDR3 for beta chain variable domain of TCR clone 145394 (TRBV15, TRBJ2-1)
CATSRPGQGLHEQFF

SEQ ID NO: 290789 - protein, 11 aa, Homo sapiens
  CDR3 for alpha chain variable domain of TCR clone 145395 (TRAV1-2, TRAJ11)
CAVRGYSTLTF

SEQ ID NO: 290790 - protein, 15 aa, Homo sapiens
  CDR3 for beta chain variable domain of TCR clone 145395 (TRBV2, TRBJ2-1)
CASSELAGSYNEQFF

SEQ ID NO: 290791 - protein, 17 aa, Homo sapiens
  CDR3 for alpha chain variable domain of TCR clone 145396 (TRAV3, TRAJ6)
CAVRDGPRAGGSYIPTF

SEQ ID NO: 290792 - protein, 15 aa, Homo sapiens
  CDR3 for beta chain variable domain of TCR clone 145396 (TRBV5-7, TRBJ1-5)
CASSYGKLWDQTQHF

SEQ ID NO: 290793 - protein, 14 aa, Homo sapiens
  CDR3 for alpha chain variable domain of TCR clone 145397 (TRAV8-3, TRAJ39)
CAVGANNAGNMLTF

SEQ ID NO: 290794 - protein, 19 aa, Homo sapiens
  CDR3 for beta chain variable domain of TCR clone 145397 (TRBV25-1, TRBJ2-2)
CAILVYRVDRGRKTGELFS

SEQ ID NO: 290795 - protein, 13 aa, Homo sapiens
  CDR3 for alpha chain variable domain of TCR clone 145398 (TRAV17, TRAJ9)
CATASTGGFKTIF

SEQ ID NO: 290796 - protein, 15 aa, Homo sapiens
  CDR3 for beta chain variable domain of TCR clone 145398 (TRBV7-2, TRBJ2-2)
CASRRPGQNTGELFF

SEQ ID NO: 290797 - protein, 16 aa, Homo sapiens
  CDR3 for alpha chain variable domain of TCR clone 145399 (TRAV8-3, TRAJ13)
CAVGAYPSGGYQKVTF

SEQ ID NO: 290798 - protein, 14 aa, Homo sapiens
  CDR3 for beta chain variable domain of TCR clone 145399 (TRBV7-2, TRBJ2-1)
CASSLGVGYNEQFF

SEQ ID NO: 290799 - protein, 15 aa, Homo sapiens
  CDR3 for alpha chain variable domain of TCR clone 145400 (TRAV3, TRAJ3)
CAVRDGHSSASKIIF

SEQ ID NO: 290800 - protein, 14 aa, Homo sapiens
  CDR3 for beta chain variable domain of TCR clone 145400 (TRBV28, TRBJ1-4)
CASGFGTLDEKLFF

SEQ ID NO: 290801 - protein, 14 aa, Homo sapiens
  CDR3 for alpha chain variable domain of TCR clone 145401 (TRAV9-2, TRAJ39)
CALYIYNAGNMLTF

SEQ ID NO: 290802 - protein, 13 aa, Homo sapiens
  CDR3 for beta chain variable domain of TCR clone 145401 (TRBV7-3, TRBJ2-3)
SLSGHRPEDTQYF

SEQ ID NO: 290803 - protein, 14 aa, Homo sapiens
  CDR3 for alpha chain variable domain of TCR clone 145402 (TRAV1-2, TRAJ8)
CAVREDTGFQNLVF

SEQ ID NO: 290804 - protein, 14 aa, Homo sapiens
  CDR3 for beta chain variable domain of TCR clone 145402 (TRBV19, TRBJ2-1)
CASPTFVLSGEQFF

SEQ ID NO: 290805 - protein, 12 aa, Homo sapiens
  CDR3 for alpha chain variable domain of TCR clone 145403 (TRAV12-3, TRAJ20)
CAMVIGDYKLSF

SEQ ID NO: 290806 - protein, 16 aa, Homo sapiens
  CDR3 for beta chain variable domain of TCR clone 145403 (TRBV5-1, TRBJ2-3)
CASSLGLAVYTDTQYF

SEQ ID NO: 290807 - protein, 15 aa, Homo sapiens
  CDR3 for alpha chain variable domain of TCR clone 145404 (TRAV14/DV4, TRAJ10)
RAMRELTGGGNKLTF

SEQ ID NO: 290808 - protein, 13 aa, Homo sapiens
  CDR3 for beta chain variable domain of TCR clone 145404 (TRBV4-1, TRBJ2-7)
CASSQGQAYEQYF

SEQ ID NO: 290809 - protein, 12 aa, Homo sapiens
  CDR3 for alpha chain variable domain of TCR clone 145405 (TRAV21, TRAJ11)
CAATSGYSTLTF

SEQ ID NO: 290810 - protein, 13 aa, Homo sapiens
  CDR3 for beta chain variable domain of TCR clone 145405 (TRBV11-2, TRBJ1-4)
CASSPGTLEKLFF

SEQ ID NO: 290811 - protein, 16 aa, Homo sapiens
  CDR3 for alpha chain variable domain of TCR clone 145406 (TRAV8-3, TRAJ4)
CAVGAAGGYNKLILEQ

SEQ ID NO: 290812 - protein, 16 aa, Homo sapiens
  CDR3 for beta chain variable domain of TCR clone 145406 (TRBV7-9, TRBJ2-1)
CASSDVAGGSYNEQFF

SEQ ID NO: 290813 - protein, 14 aa, Homo sapiens
  CDR3 for alpha chain variable domain of TCR clone 145407 (TRAV12-3, TRAJ10)
SHLPVTGGGNKLTF

SEQ ID NO: 290814 - protein, 14 aa, Homo sapiens
  CDR3 for beta chain variable domain of TCR clone 145407 (TRBV6-1, TRBJ1-3)
CASVQGGGGNTIYF

SEQ ID NO: 290815 - protein, 16 aa, Homo sapiens
  CDR3 for alpha chain variable domain of TCR clone 145408 (TRAV12-3, TRAJ57)
CAMSYGTQCGSEKLVF

SEQ ID NO: 290816 - protein, 15 aa, Homo sapiens
  CDR3 for beta chain variable domain of TCR clone 145408 (TRBV9, TRBJ1-6)
CASSVAGTGDSPLHF

SEQ ID NO: 290817 - protein, 14 aa, Homo sapiens
  CDR3 for alpha chain variable domain of TCR clone 145409 (TRAV1-2, TRAJ16)
CAVNRFSDGQKLLF

SEQ ID NO: 290818 - protein, 15 aa, Homo sapiens
  CDR3 for beta chain variable domain of TCR clone 145409 (TRBV6-5, TRBJ2-1)
CASRGDFDSYNEQFF

SEQ ID NO: 290819 - protein, 16 aa, Homo sapiens
  CDR3 for alpha chain variable domain of TCR clone 145410 (TRAV30, TRAJ24)
CGTEIVDADSWGKFQF

SEQ ID NO: 290820 - protein, 15 aa, Homo sapiens
  CDR3 for beta chain variable domain of TCR clone 145410 (TRBV27, TRBJ2-1)
CASSNGGGSSNEQVF

SEQ ID NO: 290821 - protein, 17 aa, Homo sapiens
  CDR3 for alpha chain variable domain of TCR clone 145411 (TRAV3, TRAJ42)
CAVRDRDDGGSQGNLIF

SEQ ID NO: 290822 - protein, 17 aa, Homo sapiens
  CDR3 for beta chain variable domain of TCR clone 145411 (TRBV7-9, TRBJ2-3)
CASSPTVAGDLTDTQYF

SEQ ID NO: 290823 - protein, 13 aa, Homo sapiens
  CDR3 for alpha chain variable domain of TCR clone 145412 (TRAV8-3, TRAJ44)
CAVVPGTASKLTF

SEQ ID NO: 290824 - protein, 12 aa, Homo sapiens
  CDR3 for beta chain variable domain of TCR clone 145412 (TRBV7-8, TRBJ2-7)
CASSLGDRGQYF

SEQ ID NO: 290825 - protein, 14 aa, Homo sapiens
  CDR3 for alpha chain variable domain of TCR clone 145413 (TRAV4, TRAJ9)
CLVGSGTGGFKTIF

SEQ ID NO: 290826 - protein, 15 aa, Homo sapiens
  CDR3 for beta chain variable domain of TCR clone 145413 (TRBV9, TRBJ1-6)
CASSVAGTGDSPLHF

SEQ ID NO: 290827 - protein, 11 aa, Homo sapiens
  CDR3 for alpha chain variable domain of TCR clone 145414 (TRAV1-1, TRAJ23)
CAVRQGGKLIF

SEQ ID NO: 290828 - protein, 15 aa, Homo sapiens
  CDR3 for beta chain variable domain of TCR clone 145414 (TRBV7-9, TRBJ2-1)
CASSLGWGRANEQFF

SEQ ID NO: 290829 - protein, 14 aa, Homo sapiens
  CDR3 for alpha chain variable domain of TCR clone 145415 (TRAV14/DV4, TRAJ23)
CAMRYYNQGGKLIF

SEQ ID NO: 290830 - protein, 13 aa, Homo sapiens
  CDR3 for beta chain variable domain of TCR clone 145415 (TRBV27, TRBJ1-1)
CASSLSIGAEAFF

SEQ ID NO: 290831 - protein, 13 aa, Homo sapiens
  CDR3 for alpha chain variable domain of TCR clone 145416 (TRAV12-1, TRAJ29)
CVVVVSGNTALVF

SEQ ID NO: 290832 - protein, 13 aa, Homo sapiens
  CDR3 for beta chain variable domain of TCR clone 145416 (TRBV7-8, TRBJ2-7)
CASSFAGFYEQYF

SEQ ID NO: 290833 - protein, 15 aa, Homo sapiens
  CDR3 for alpha chain variable domain of TCR clone 145417 (TRAV35, TRAJ58)
CAGRRQETSGSRLTF

SEQ ID NO: 290834 - protein, 12 aa, Homo sapiens
  CDR3 for beta chain variable domain of TCR clone 145417 (TRBV9, TRBJ2-2)
CASSARTGELFF

SEQ ID NO: 290835 - protein, 14 aa, Homo sapiens
  CDR3 for alpha chain variable domain of TCR clone 145418 (TRAV4, TRAJ26)
CLVGPHNYGQTFGF

SEQ ID NO: 290836 - protein, 17 aa, Homo sapiens
  CDR3 for beta chain variable domain of TCR clone 145418 (TRBV24-1, TRBJ2-1)
CATSDVSTSGTYNEQFF

SEQ ID NO: 290837 - protein, 15 aa, Homo sapiens
  CDR3 for alpha chain variable domain of TCR clone 145419 (TRAV8-3, TRAJ23)
CAVGDRYNQGGKLIF

SEQ ID NO: 290838 - protein, 13 aa, Homo sapiens
  CDR3 for beta chain variable domain of TCR clone 145419 (TRBV12-5, TRBJ2-3)
CASGDRQSDTQYF

SEQ ID NO: 290839 - protein, 15 aa, Homo sapiens
  CDR3 for alpha chain variable domain of TCR clone 145420 (TRAV3, TRAJ10)
CAVRDGTGGGNKLTF

SEQ ID NO: 290840 - protein, 15 aa, Homo sapiens
  CDR3 for beta chain variable domain of TCR clone 145420 (TRBV9, TRBJ1-6)
CASSVAGTGDSPLHF

SEQ ID NO: 290841 - protein, 13 aa, Homo sapiens
  CDR3 for alpha chain variable domain of TCR clone 145421 (TRAV21, TRAJ57)
CAVTQGGSERLVL

SEQ ID NO: 290842 - protein, 16 aa, Homo sapiens
  CDR3 for beta chain variable domain of TCR clone 145421 (TRBV29-1, TRBJ2-7)
CSVEDAEDGTAYEQYF

SEQ ID NO: 290843 - protein, 12 aa, Homo sapiens
  CDR3 for alpha chain variable domain of TCR clone 145422 (TRAV17, TRAJ30)
CVPERRDDKIIF

SEQ ID NO: 290844 - protein, 17 aa, Homo sapiens
  CDR3 for beta chain variable domain of TCR clone 145422 (TRBV13, TRBJ2-3)
CASSLSRVAGGRNTQYF

SEQ ID NO: 290845 - protein, 13 aa, Homo sapiens
  CDR3 for alpha chain variable domain of TCR clone 145423 (TRAV20, TRAJ37)
CARCSSNTGKLIF

SEQ ID NO: 290846 - protein, 11 aa, Homo sapiens
  CDR3 for beta chain variable domain of TCR clone 145423 (TRBV12-4, TRBJ2-3)
CASTATDMQYF

SEQ ID NO: 290847 - protein, 11 aa, Homo sapiens
  CDR3 for alpha chain variable domain of TCR clone 145424 (TRAV6, TRAJ41)
CALNSGYALNF

SEQ ID NO: 290848 - protein, 14 aa, Homo sapiens
  CDR3 for beta chain variable domain of TCR clone 145424 (TRBV5-4, TRBJ1-1)
CASSLDSRRDEAFF

SEQ ID NO: 290849 - protein, 13 aa, Homo sapiens
  CDR3 for alpha chain variable domain of TCR clone 145425 (TRAV38-1, TRAJ42)
CARWGGSQGNLIF

SEQ ID NO: 290850 - protein, 15 aa, Homo sapiens
  CDR3 for beta chain variable domain of TCR clone 145425 (TRBV12-4, TRBJ1-2)
CASSPITGGGYGYTF

SEQ ID NO: 290851 - protein, 15 aa, Homo sapiens
  CDR3 for alpha chain variable domain of TCR clone 145426 (TRAV3, TRAJ17)
CAVSPKEAAGNKLSF

SEQ ID NO: 290852 - protein, 12 aa, Homo sapiens
  CDR3 for beta chain variable domain of TCR clone 145426 (TRBV7-9, TRBJ1-6)
CASSLMTSPLHF

SEQ ID NO: 290853 - protein, 15 aa, Homo sapiens
  CDR3 for alpha chain variable domain of TCR clone 145427 (TRAV1-2, TRAJ17)
CAVRGYGAAGNKLTF

SEQ ID NO: 290854 - protein, 14 aa, Homo sapiens
  CDR3 for beta chain variable domain of TCR clone 145427 (TRBV7-6, TRBJ2-3)
CASSVGTVTDTQYF

SEQ ID NO: 290855 - protein, 18 aa, Homo sapiens
  CDR3 for alpha chain variable domain of TCR clone 145428 (TRAV26-2, TRAJ54)
CILRDVEVGIQGAQKLVF

SEQ ID NO: 290856 - protein, 11 aa, Homo sapiens
  CDR3 for beta chain variable domain of TCR clone 145428 (TRBV6-3, TRBJ2-3)
CATGQADTQYF

SEQ ID NO: 290857 - protein, 14 aa, Homo sapiens
  CDR3 for alpha chain variable domain of TCR clone 145429 (TRAV12-1, TRAJ17)
CVVKYEAAGNKLTF

SEQ ID NO: 290858 - protein, 17 aa, Homo sapiens
  CDR3 for beta chain variable domain of TCR clone 145429 (TRBV20-1, TRBJ2-1)
CSASSSGLAGSYNEQFF

SEQ ID NO: 290859 - protein, 15 aa, Homo sapiens
  CDR3 for alpha chain variable domain of TCR clone 145430 (TRAV12-3, TRAJ6)
CSMSATTGGSYIPTF

SEQ ID NO: 290860 - protein, 15 aa, Homo sapiens
  CDR3 for beta chain variable domain of TCR clone 145430 (TRBV5-1, TRBJ2-7)
CASSLNGGPAREQYF

SEQ ID NO: 290861 - protein, 17 aa, Homo sapiens
  CDR3 for alpha chain variable domain of TCR clone 145431 (TRAV3, TRAJ6)
CAVRDGPRAGGRDIPKF

SEQ ID NO: 290862 - protein, 14 aa, Homo sapiens
  CDR3 for beta chain variable domain of TCR clone 145431 (TRBV7-2, TRBJ2-7)
CASSPKTSFYEQYF

SEQ ID NO: 290863 - protein, 14 aa, Homo sapiens
  CDR3 for alpha chain variable domain of TCR clone 145432 (TRAV12-3, TRAJ35)
CAMSLLGFGNVLHC

SEQ ID NO: 290864 - protein, 12 aa, Homo sapiens
  CDR3 for beta chain variable domain of TCR clone 145432 (TRBV12-4, TRBJ1-1)
CASSLAGLEASF

SEQ ID NO: 290865 - protein, 14 aa, Homo sapiens
  CDR3 for alpha chain variable domain of TCR clone 145433 (TRAV1-2, TRAJ16)
CAVNRFSDGQKLLY

SEQ ID NO: 290866 - protein, 15 aa, Homo sapiens
  CDR3 for beta chain variable domain of TCR clone 145433 (TRBV9, TRBJ1-6)
CASSVAGTGDPPLHF

SEQ ID NO: 290867 - protein, 16 aa, Homo sapiens
  CDR3 for alpha chain variable domain of TCR clone 145434 (TRAV30, TRAJ24)
CSTEIVDADSWVKFQF

SEQ ID NO: 290868 - protein, 14 aa, Homo sapiens
  CDR3 for beta chain variable domain of TCR clone 145434 (TRBV12-5, TRBJ2-5)
CASGSRTHQETQYF

SEQ ID NO: 290869 - protein, 13 aa, Homo sapiens
  CDR3 for alpha chain variable domain of TCR clone 145435 (TRAV12-3, TRAJ43)
CAMIRPNNNDMRF

SEQ ID NO: 290870 - protein, 12 aa, Homo sapiens
  CDR3 for beta chain variable domain of TCR clone 145435 (TRBV11-2, TRBJ2-5)
CASSLGQETQSF

SEQ ID NO: 290871 - protein, 13 aa, Homo sapiens
  CDR3 for alpha chain variable domain of TCR clone 145436 (TRAV2, TRAJ40)
CAVVTSGTYEYIF

SEQ ID NO: 290872 - protein, 13 aa, Homo sapiens
  CDR3 for beta chain variable domain of TCR clone 145436 (TRBV6-1, TRBJ1-1)
CASSRQGNTEAFF

SEQ ID NO: 290873 - protein, 16 aa, Homo sapiens
  CDR3 for alpha chain variable domain of TCR clone 145437 (TRAV38-1, TRAJ42)
CAFRLVRGGSQGNLIF

SEQ ID NO: 290874 - protein, 16 aa, Homo sapiens
  CDR3 for beta chain variable domain of TCR clone 145437 (TRBV24-1, TRBJ2-3)
CATSDPGTGATDTQYF

SEQ ID NO: 290875 - protein, 14 aa, Homo sapiens
  CDR3 for alpha chain variable domain of TCR clone 145438 (TRAV38-1, TRAJ29)
CAFITPSGNTPLVF

SEQ ID NO: 290876 - protein, 12 aa, Homo sapiens
  CDR3 for beta chain variable domain of TCR clone 145438 (TRBV11-1, TRBJ2-2)
CASSLGAGELFF

SEQ ID NO: 290877 - protein, 15 aa, Homo sapiens
  CDR3 for alpha chain variable domain of TCR clone 145439 (TRAV3, TRAJ9)
CAVRDSNTGGFKTIF

SEQ ID NO: 290878 - protein, 17 aa, Homo sapiens
  CDR3 for beta chain variable domain of TCR clone 145439 (TRBV15, TRBJ1-4)
CATSRYGTGDPNEKLFF

SEQ ID NO: 290879 - protein, 13 aa, Homo sapiens
  CDR3 for alpha chain variable domain of TCR clone 145440 (TRAV21, TRAJ20)
CAVGLRVDYKLSF

SEQ ID NO: 290880 - protein, 16 aa, Homo sapiens
  CDR3 for beta chain variable domain of TCR clone 145440 (TRBV7-8, TRBJ2-6)
CASRVGDSSGANVLTF

SEQ ID NO: 290881 - protein, 15 aa, Homo sapiens
  CDR3 for alpha chain variable domain of TCR clone 145441 (TRAV25, TRAJ53)
CPTSNSGGSNYKLTF

SEQ ID NO: 290882 - protein, 14 aa, Homo sapiens
  CDR3 for beta chain variable domain of TCR clone 145441 (TRBV11-2, TRBJ2-3)
CASSRLARTDKQYF

SEQ ID NO: 290883 - protein, 12 aa, Homo sapiens
  CDR3 for alpha chain variable domain of TCR clone 145442 (TRAV12-3, TRAJ17)
CAMTLTRNKLTF

SEQ ID NO: 290884 - protein, 12 aa, Homo sapiens
  CDR3 for beta chain variable domain of TCR clone 145442 (TRBV11-2, TRBJ2-2)
CASSLGGGELFF

SEQ ID NO: 290885 - protein, 11 aa, Homo sapiens
  CDR3 for alpha chain variable domain of TCR clone 145443 (TRAV21, TRAJ41)
CAVRSGYALNF

SEQ ID NO: 290886 - protein, 18 aa, Homo sapiens
  CDR3 for beta chain variable domain of TCR clone 145443 (TRBV6-6, TRBJ1-3)
CASSYSKWDSISGNTIYF

SEQ ID NO: 290887 - protein, 11 aa, Homo sapiens
  CDR3 for alpha chain variable domain of TCR clone 145444 (TRAV1-2, TRAJ20)
CAVSNDYKLSF

SEQ ID NO: 290888 - protein, 13 aa, Homo sapiens
  CDR3 for beta chain variable domain of TCR clone 145444 (TRBV4-1, TRBJ2-5)
CASSLTRGETQYF

SEQ ID NO: 290889 - protein, 15 aa, Homo sapiens
  CDR3 for alpha chain variable domain of TCR clone 145445 (TRAV25, TRAJ52)
RAGTSGGTSYGKLTC

SEQ ID NO: 290890 - protein, 16 aa, Homo sapiens
  CDR3 for beta chain variable domain of TCR clone 145445 (TRBV15, TRBJ1-2)
CATSRGPRTGGGGYTF

SEQ ID NO: 290891 - protein, 13 aa, Homo sapiens
  CDR3 for alpha chain variable domain of TCR clone 145446 (TRAV3, TRAJ26)
CAVRVAEGQNFVF

SEQ ID NO: 290892 - protein, 15 aa, Homo sapiens
  CDR3 for beta chain variable domain of TCR clone 145446 (TRBV2, TRBJ1-5)
CASSPGPTGNQHQHF

SEQ ID NO: 290893 - protein, 14 aa, Homo sapiens
  CDR3 for alpha chain variable domain of TCR clone 145447 (TRAV16, TRAJ31)
CSKWRRGDNARLMF

SEQ ID NO: 290894 - protein, 16 aa, Homo sapiens
  CDR3 for beta chain variable domain of TCR clone 145447 (TRBV28, TRBJ2-7)
CSSSLFFETGGPEQYF

SEQ ID NO: 290895 - protein, 13 aa, Homo sapiens
  CDR3 for alpha chain variable domain of TCR clone 145448 (TRAV13-2, TRAJ54)
CAENYQGAQKLVF

SEQ ID NO: 290896 - protein, 13 aa, Homo sapiens
  CDR3 for beta chain variable domain of TCR clone 145448 (TRBV7-3, TRBJ2-5)
CASSFRGGETQYF

SEQ ID NO: 290897 - protein, 14 aa, Homo sapiens
  CDR3 for alpha chain variable domain of TCR clone 145449 (TRAV16, TRAJ33)
CALSAMDSNYQLIW

SEQ ID NO: 290898 - protein, 13 aa, Homo sapiens
  CDR3 for beta chain variable domain of TCR clone 145449 (TRBV15, TRBJ1-6)
CATSGGLNSPLHF

SEQ ID NO: 290899 - protein, 13 aa, Homo sapiens
  CDR3 for alpha chain variable domain of TCR clone 145450 (TRAV25, TRAJ26)
CAVMDNYGQNFVF

SEQ ID NO: 290900 - protein, 15 aa, Homo sapiens
  CDR3 for beta chain variable domain of TCR clone 145450 (TRBV10-3, TRBJ2-1)
CAIRNGTSGHNEQFF

SEQ ID NO: 290901 - protein, 14 aa, Homo sapiens
  CDR3 for alpha chain variable domain of TCR clone 145451 (TRAV13-1, TRAJ13)
CAASLSGGYQKVTF

SEQ ID NO: 290902 - protein, 14 aa, Homo sapiens
  CDR3 for beta chain variable domain of TCR clone 145451 (TRBV28, TRBJ2-1)
CASSRPGLRDEQFF

SEQ ID NO: 290903 - protein, 10 aa, Homo sapiens
  CDR3 for alpha chain variable domain of TCR clone 145452 (TRAV12-2, TRAJ48)
CAVTSGKLTF

SEQ ID NO: 290904 - protein, 17 aa, Homo sapiens
  CDR3 for beta chain variable domain of TCR clone 145452 (TRBV11-1, TRBJ2-7)
CASSLTGSFGLDYEQYF

SEQ ID NO: 290905 - protein, 14 aa, Homo sapiens
  CDR3 for alpha chain variable domain of TCR clone 145453 (TRAV13-2, TRAJ22)
CADGTLGSARTLTF

SEQ ID NO: 290906 - protein, 16 aa, Homo sapiens
  CDR3 for beta chain variable domain of TCR clone 145453 (TRBV19, TRBJ2-1)
CASSSKGTRSYNEQSF

SEQ ID NO: 290907 - protein, 16 aa, Homo sapiens
  CDR3 for alpha chain variable domain of TCR clone 145454 (TRAV3, TRAJ10)
CAVRDMRAGGGNKPTF

SEQ ID NO: 290908 - protein, 15 aa, Homo sapiens
  CDR3 for beta chain variable domain of TCR clone 145454 (TRBV11-2, TRBJ2-1)
CASSLGTSGLNEQFF

SEQ ID NO: 290909 - protein, 17 aa, Homo sapiens
  CDR3 for alpha chain variable domain of TCR clone 145455 (TRAV12-1, TRAJ42)
CVVMRMNYGGSPGNLIF

SEQ ID NO: 290910 - protein, 13 aa, Homo sapiens
  CDR3 for beta chain variable domain of TCR clone 145455 (TRBV7-2, TRBJ1-1)
CASSLARPAEAFF

SEQ ID NO: 290911 - protein, 14 aa, Homo sapiens
  CDR3 for alpha chain variable domain of TCR clone 145456 (TRAV16, TRAJ33)
CALSAMDSNYQLIW

SEQ ID NO: 290912 - protein, 15 aa, Homo sapiens
  CDR3 for beta chain variable domain of TCR clone 145456 (TRBV28, TRBJ2-7)
CASSLAAYPIYEQYF

SEQ ID NO: 290913 - protein, 13 aa, Homo sapiens
  CDR3 for alpha chain variable domain of TCR clone 145457 (TRAV3, TRAJ3)
CAVRAPGASKIIF

SEQ ID NO: 290914 - protein, 18 aa, Homo sapiens
  CDR3 for beta chain variable domain of TCR clone 145457 (TRBV12-4, TRBJ2-5)
CASSPSGGRDPVLRARHA

SEQ ID NO: 290915 - protein, 14 aa, Homo sapiens
  CDR3 for alpha chain variable domain of TCR clone 145458 (TRAV27, TRAJ52)
CAGAGGTSYGKLKF

SEQ ID NO: 290916 - protein, 16 aa, Homo sapiens
  CDR3 for beta chain variable domain of TCR clone 145458 (TRBV7-3, TRBJ2-2)
CASSLKRGTLSGELFF

SEQ ID NO: 290917 - protein, 15 aa, Homo sapiens
  CDR3 for alpha chain variable domain of TCR clone 145459 (TRAV26-1, TRAJ29)
CIVRVEGSGNTPLVF

SEQ ID NO: 290918 - protein, 15 aa, Homo sapiens
  CDR3 for beta chain variable domain of TCR clone 145459 (TRBV11-2, TRBJ2-1)
CASSSPSTRYNEQFF

SEQ ID NO: 290919 - protein, 12 aa, Homo sapiens
  CDR3 for alpha chain variable domain of TCR clone 145460 (TRAV17, TRAJ20)
CATDSNDYKLSF

SEQ ID NO: 290920 - protein, 16 aa, Homo sapiens
  CDR3 for beta chain variable domain of TCR clone 145460 (TRBV7-2, TRBJ1-2)
CASSLNQDRRGHGYTF

SEQ ID NO: 290921 - protein, 12 aa, Homo sapiens
  CDR3 for alpha chain variable domain of TCR clone 145461 (TRAV17, TRAJ57)
CATDGGSEKLVF

SEQ ID NO: 290922 - protein, 10 aa, Homo sapiens
  CDR3 for beta chain variable domain of TCR clone 145461 (TRBV12-4, TRBJ1-2)
CASSFIWLDL

SEQ ID NO: 290923 - protein, 11 aa, Homo sapiens
  CDR3 for alpha chain variable domain of TCR clone 145462 (TRAV23/DV6, TRAJ40)
CAASLTRNLQI

SEQ ID NO: 290924 - protein, 14 aa, Homo sapiens
  CDR3 for beta chain variable domain of TCR clone 145462 (TRBV5-1, TRBJ2-3)
CASSRGQGGGTQYF

SEQ ID NO: 290925 - protein, 13 aa, Homo sapiens
  CDR3 for alpha chain variable domain of TCR clone 145463 (TRAV22, TRAJ57)
CAVLQGGSEKLVF

SEQ ID NO: 290926 - protein, 13 aa, Homo sapiens
  CDR3 for beta chain variable domain of TCR clone 145463 (TRBV2, TRBJ2-3)
CASGRGRTDTQYF

SEQ ID NO: 290927 - protein, 14 aa, Homo sapiens
  CDR3 for alpha chain variable domain of TCR clone 145464 (TRAV9-2, TRAJ39)
CALYIYNAGNMLTF

SEQ ID NO: 290928 - protein, 12 aa, Homo sapiens
  CDR3 for beta chain variable domain of TCR clone 145464 (TRBV7-6, TRBJ2-5)
CASSLSQETQYF

SEQ ID NO: 290929 - protein, 13 aa, Homo sapiens
  CDR3 for alpha chain variable domain of TCR clone 145465 (TRAV8-3, TRAJ42)
CAVDGGSQGNLIF

SEQ ID NO: 290930 - protein, 15 aa, Homo sapiens
  CDR3 for beta chain variable domain of TCR clone 145465 (TRBV6-5, TRBJ2-1)
CASSYDAGAGNEQFF

SEQ ID NO: 290931 - protein, 14 aa, Homo sapiens
  CDR3 for alpha chain variable domain of TCR clone 145466 (TRAV12-2, TRAJ13)
CAVKKTGGYQKVTF

SEQ ID NO: 290932 - protein, 12 aa, Homo sapiens
  CDR3 for beta chain variable domain of TCR clone 145466 (TRBV12-4, TRBJ2-3)
CASSTLPDTQYF

SEQ ID NO: 290933 - protein, 18 aa, Homo sapiens
  CDR3 for alpha chain variable domain of TCR clone 145467 (TRAV26-1, TRAJ23)
CIVRVGLEVWNQGGKLIF

SEQ ID NO: 290934 - protein, 16 aa, Homo sapiens
  CDR3 for beta chain variable domain of TCR clone 145467 (TRBV20-1, TRBJ1-4)
CSAPGQGLLTNEKLFF

SEQ ID NO: 290935 - protein, 10 aa, Homo sapiens
  CDR3 for alpha chain variable domain of TCR clone 145468 (TRAV12-3, TRAJ49)
CAMNDDQFDF

SEQ ID NO: 290936 - protein, 15 aa, Homo sapiens
  CDR3 for beta chain variable domain of TCR clone 145468 (TRBV9, TRBJ1-6)
CASSVAGTGDSPLHF

SEQ ID NO: 290937 - protein, 13 aa, Homo sapiens
  CDR3 for alpha chain variable domain of TCR clone 145469 (TRAV8-6, TRAJ49)
CAVITNTGNQVYF

SEQ ID NO: 290938 - protein, 14 aa, Homo sapiens
  CDR3 for beta chain variable domain of TCR clone 145469 (TRBV27, TRBJ2-2)
CASRPGVNTGELFF

SEQ ID NO: 290939 - protein, 12 aa, Homo sapiens
  CDR3 for alpha chain variable domain of TCR clone 145470 (TRAV21, TRAJ49)
CAVNDGGNQFYL

SEQ ID NO: 290940 - protein, 14 aa, Homo sapiens
  CDR3 for beta chain variable domain of TCR clone 145470 (TRBV18, TRBJ2-7)
CASSPRGGSYEQYF

SEQ ID NO: 290941 - protein, 11 aa, Homo sapiens
  CDR3 for alpha chain variable domain of TCR clone 145471 (TRAV35, TRAJ30)
CAPGGDDKIIF

SEQ ID NO: 290942 - protein, 15 aa, Homo sapiens
  CDR3 for beta chain variable domain of TCR clone 145471 (TRBV9, TRBJ1-6)
CASSVAGTGDSPRHF

SEQ ID NO: 290943 - protein, 12 aa, Homo sapiens
  CDR3 for alpha chain variable domain of TCR clone 145472 (TRAV8-6, TRAJ43)
CAVSNNINDMRF

SEQ ID NO: 290944 - protein, 15 aa, Homo sapiens
  CDR3 for beta chain variable domain of TCR clone 145472 (TRBV7-3, TRBJ2-6)
CASSLGGSGANVLTF

SEQ ID NO: 290945 - protein, 12 aa, Homo sapiens
  CDR3 for alpha chain variable domain of TCR clone 145473 (TRAV12-1, TRAJ23)
CVVNNQGGKLIF

SEQ ID NO: 290946 - protein, 19 aa, Homo sapiens
  CDR3 for beta chain variable domain of TCR clone 145473 (TRBV25-1, TRBJ2-2)
CAILVYRVDRGRKTGELFF

SEQ ID NO: 290947 - protein, 16 aa, Homo sapiens
  CDR3 for alpha chain variable domain of TCR clone 145474 (TRAV30, TRAJ24)
CGTEIVDADSWGKFQC

SEQ ID NO: 290948 - protein, 14 aa, Homo sapiens
  CDR3 for beta chain variable domain of TCR clone 145474 (TRBV13, TRBJ2-1)
CASSPRPRYNEQFF

SEQ ID NO: 290949 - protein, 13 aa, Homo sapiens
  CDR3 for alpha chain variable domain of TCR clone 145475 (TRAV8-3, TRAJ43)
CAVGPANNNDMRF

SEQ ID NO: 290950 - protein, 12 aa, Homo sapiens
  CDR3 for beta chain variable domain of TCR clone 145475 (TRBV7-2, TRBJ1-6)
CASSLSSPPLHF

SEQ ID NO: 290951 - protein, 12 aa, Homo sapiens
  CDR3 for alpha chain variable domain of TCR clone 145476 (TRAV1-2, TRAJ42)
CVAGGSQGNLLF

SEQ ID NO: 290952 - protein, 14 aa, Homo sapiens
  CDR3 for beta chain variable domain of TCR clone 145476 (TRBV5-4, TRBJ2-5)
CASSLVRGQETQYF

SEQ ID NO: 290953 - protein, 16 aa, Homo sapiens
  CDR3 for alpha chain variable domain of TCR clone 145477 (TRAV21, TRAJ52)
CAVTNAGGTIYGKLTF

SEQ ID NO: 290954 - protein, 13 aa, Homo sapiens
  CDR3 for beta chain variable domain of TCR clone 145477 (TRBV20-1, TRBJ2-3)
CSARLAGTDTQYF

SEQ ID NO: 290955 - protein, 14 aa, Homo sapiens
  CDR3 for alpha chain variable domain of TCR clone 145478 (TRAV35, TRAJ41)
CAGKTSNSGYALNF

SEQ ID NO: 290956 - protein, 17 aa, Homo sapiens
  CDR3 for beta chain variable domain of TCR clone 145478 (TRBV11-2, TRBJ2-3)
CASSPTGTGGLTDTQYF

SEQ ID NO: 290957 - protein, 14 aa, Homo sapiens
  CDR3 for alpha chain variable domain of TCR clone 145479 (TRAV38-1, TRAJ29)
CAFITPSGNTPLVF

SEQ ID NO: 290958 - protein, 14 aa, Homo sapiens
  CDR3 for beta chain variable domain of TCR clone 145479 (TRBV18, TRBJ2-7)
CASSPRGGANEQYF

SEQ ID NO: 290959 - protein, 14 aa, Homo sapiens
  CDR3 for alpha chain variable domain of TCR clone 145480 (TRAV3, TRAJ7)
CAVREEEREQKTRF

SEQ ID NO: 290960 - protein, 12 aa, Homo sapiens
  CDR3 for beta chain variable domain of TCR clone 145480 (TRBV7-8, TRBJ2-7)
CASSLGDRGQYF

SEQ ID NO: 290961 - protein, 12 aa, Homo sapiens
  CDR3 for alpha chain variable domain of TCR clone 145481 (TRAV3, TRAJ6)
CAVRDSRRKLRT

SEQ ID NO: 290962 - protein, 15 aa, Homo sapiens
  CDR3 for beta chain variable domain of TCR clone 145481 (TRBV18, TRBJ2-7)
CASSPLQGRTYEQYF

SEQ ID NO: 290963 - protein, 14 aa, Homo sapiens
  CDR3 for alpha chain variable domain of TCR clone 145482 (TRAV8-3, TRAJ39)
CAVGANNAGNMLTF

SEQ ID NO: 290964 - protein, 15 aa, Homo sapiens
  CDR3 for beta chain variable domain of TCR clone 145482 (TRBV7-6, TRBJ1-2)
CASSSGGRGGYGYTF

SEQ ID NO: 290965 - protein, 13 aa, Homo sapiens
  CDR3 for alpha chain variable domain of TCR clone 145483 (TRAV12-3, TRAJ54)
CALVPQGPQKLVF

SEQ ID NO: 290966 - protein, 15 aa, Homo sapiens
  CDR3 for beta chain variable domain of TCR clone 145483 (TRBV4-1, TRBJ2-2)
CASSQDSRGTGELFF

SEQ ID NO: 290967 - protein, 17 aa, Homo sapiens
  CDR3 for alpha chain variable domain of TCR clone 145484 (TRAV8-2, )
CVVNIQNPDPAVYELRD

SEQ ID NO: 290968 - protein, 14 aa, Homo sapiens
  CDR3 for beta chain variable domain of TCR clone 145484 (TRBV7-9, TRBJ2-5)
CASSLVGGEETQYF

SEQ ID NO: 290969 - protein, 17 aa, Homo sapiens
  CDR3 for alpha chain variable domain of TCR clone 145485 (TRAV3, TRAJ12)
CAVRDGGRMDSSYKLIF

SEQ ID NO: 290970 - protein, 15 aa, Homo sapiens
  CDR3 for beta chain variable domain of TCR clone 145485 (TRBV4-3, TRBJ1-1)
CASSQELGRGTEAFF

SEQ ID NO: 290971 - protein, 11 aa, Homo sapiens
  CDR3 for alpha chain variable domain of TCR clone 145486 (TRAV4, TRAJ23)
CLVPPGGKLIF

SEQ ID NO: 290972 - protein, 15 aa, Homo sapiens
  CDR3 for beta chain variable domain of TCR clone 145486 (TRBV7-9, TRBJ1-6)
CASSSPGRGNSPLHF

SEQ ID NO: 290973 - protein, 17 aa, Homo sapiens
  CDR3 for alpha chain variable domain of TCR clone 145487 (TRAV20, TRAJ28)
CAVQGGYSGAGSYQLSF

SEQ ID NO: 290974 - protein, 15 aa, Homo sapiens
  CDR3 for beta chain variable domain of TCR clone 145487 (TRBV19, TRBJ1-1)
CASTSGQIQDTEAFF

SEQ ID NO: 290975 - protein, 16 aa, Homo sapiens
  CDR3 for alpha chain variable domain of TCR clone 145488 (TRAV30, TRAJ24)
CGTEIVDADSWGKFQC

SEQ ID NO: 290976 - protein, 15 aa, Homo sapiens
  CDR3 for beta chain variable domain of TCR clone 145488 (TRBV5-1, TRBJ1-1)
CASSLAPRGNTEAFF

SEQ ID NO: 290977 - protein, 15 aa, Homo sapiens
  CDR3 for alpha chain variable domain of TCR clone 145489 (TRAV14/DV4, TRAJ28)
CAKLFSGAGSYQLTF

SEQ ID NO: 290978 - protein, 13 aa, Homo sapiens
  CDR3 for beta chain variable domain of TCR clone 145489 (TRBV12-4, TRBJ2-7)
CASSFAPTAEQYF

SEQ ID NO: 290979 - protein, 12 aa, Homo sapiens
  CDR3 for alpha chain variable domain of TCR clone 145490 (TRAV16, TRAJ22)
CALEVSARQLTF

SEQ ID NO: 290980 - protein, 14 aa, Homo sapiens
  CDR3 for beta chain variable domain of TCR clone 145490 (TRBV11-2, TRBJ2-3)
CASSSIASTETQYF

SEQ ID NO: 290981 - protein, 16 aa, Homo sapiens
  CDR3 for alpha chain variable domain of TCR clone 145491 (TRAV30, TRAJ24)
CGTEIVDADSRGKFKF

SEQ ID NO: 290982 - protein, 14 aa, Homo sapiens
  CDR3 for beta chain variable domain of TCR clone 145491 (TRBV12-5, TRBJ2-5)
RASGSRTHQETQYF

SEQ ID NO: 290983 - protein, 15 aa, Homo sapiens
  CDR3 for alpha chain variable domain of TCR clone 145492 (TRAV26-1, TRAJ29)
CIVRVEGSGNTPLVF

SEQ ID NO: 290984 - protein, 12 aa, Homo sapiens
  CDR3 for beta chain variable domain of TCR clone 145492 (TRBV6-1, TRBJ2-1)
CATYGLNNEQFF

SEQ ID NO: 290985 - protein, 15 aa, Homo sapiens
  CDR3 for alpha chain variable domain of TCR clone 145493 (TRAV8-4, TRAJ37)
CAVSRGSGNTGKLIF

SEQ ID NO: 290986 - protein, 16 aa, Homo sapiens
  CDR3 for beta chain variable domain of TCR clone 145493 (TRBV7-3, TRBJ2-1)
RASSLEGYRSYNEQFF

SEQ ID NO: 290987 - protein, 14 aa, Homo sapiens
  CDR3 for alpha chain variable domain of TCR clone 145494 (TRAV3, TRAJ27)
CAVRDDTNAGKSTF

SEQ ID NO: 290988 - protein, 15 aa, Homo sapiens
  CDR3 for beta chain variable domain of TCR clone 145494 (TRBV7-7, TRBJ2-2)
CATSKLAKTTGELFF

SEQ ID NO: 290989 - protein, 14 aa, Homo sapiens
  CDR3 for alpha chain variable domain of TCR clone 145495 (TRAV3, TRAJ6)
YAVRDPWGSYIPTF

SEQ ID NO: 290990 - protein, 15 aa, Homo sapiens
  CDR3 for beta chain variable domain of TCR clone 145495 (TRBV19, TRBJ1-6)
CASSTQGAVGSPLHF

SEQ ID NO: 290991 - protein, 13 aa, Homo sapiens
  CDR3 for alpha chain variable domain of TCR clone 145496 (TRAV13-1, TRAJ49)
CAAVVRGGNQFYF

SEQ ID NO: 290992 - protein, 14 aa, Homo sapiens
  CDR3 for beta chain variable domain of TCR clone 145496 (TRBV7-2, TRBJ2-1)
CASSRGGTYNEQFF

SEQ ID NO: 290993 - protein, 14 aa, Homo sapiens
  CDR3 for alpha chain variable domain of TCR clone 145497 (TRAV2, TRAJ9)
CAVEDRSGGFKTIF

SEQ ID NO: 290994 - protein, 16 aa, Homo sapiens
  CDR3 for beta chain variable domain of TCR clone 145497 (TRBV7-3, TRBJ2-1)
CASSLEGYRAYNEQFF

SEQ ID NO: 290995 - protein, 13 aa, Homo sapiens
  CDR3 for alpha chain variable domain of TCR clone 145498 (TRAV20, TRAJ42)
CAVQGGSQGNLIF

SEQ ID NO: 290996 - protein, 15 aa, Homo sapiens
  CDR3 for beta chain variable domain of TCR clone 145498 (TRBV10-1, TRBJ2-1)
CASSEWWGTYNEQFF

SEQ ID NO: 290997 - protein, 11 aa, Homo sapiens
  CDR3 for alpha chain variable domain of TCR clone 145499 (TRAV12-2, TRAJ49)
CALHVGNQFYF

SEQ ID NO: 290998 - protein, 13 aa, Homo sapiens
  CDR3 for beta chain variable domain of TCR clone 145499 (TRBV4-1, TRBJ1-1)
CASSQLGTGEAFF

SEQ ID NO: 290999 - protein, 11 aa, Homo sapiens
  CDR3 for alpha chain variable domain of TCR clone 145500 (TRAV12-1, TRAJ21)
CVVNNFNKFYF

SEQ ID NO: 291000 - protein, 14 aa, Homo sapiens
  CDR3 for beta chain variable domain of TCR clone 145500 (TRBV18, TRBJ2-7)
CDSSPRGGAYEQYF

SEQ ID NO: 291001 - protein, 17 aa, Homo sapiens
  CDR3 for alpha chain variable domain of TCR clone 145501 (TRAV13-1, TRAJ52)
CAASSGAGGTSSGKLTF

SEQ ID NO: 291002 - protein, 17 aa, Homo sapiens
  CDR3 for beta chain variable domain of TCR clone 145501 (TRBV11-2, TRBJ2-1)
CASSLYPPGVEYNEQVF

SEQ ID NO: 291003 - protein, 15 aa, Homo sapiens
  CDR3 for alpha chain variable domain of TCR clone 145502 (TRAV20, TRAJ53)
CALQASGGSNYKLTF

SEQ ID NO: 291004 - protein, 14 aa, Homo sapiens
  CDR3 for beta chain variable domain of TCR clone 145502 (TRBV7-2, TRBJ1-2)
CASSQTGSTYGYTF

SEQ ID NO: 291005 - protein, 11 aa, Homo sapiens
  CDR3 for alpha chain variable domain of TCR clone 145503 (TRAV12-1, TRAJ43)
CLEYDNNDMRF

SEQ ID NO: 291006 - protein, 15 aa, Homo sapiens
  CDR3 for beta chain variable domain of TCR clone 145503 (TRBV18, TRBJ2-5)
CASSPRASEAETQYF

SEQ ID NO: 291007 - protein, 11 aa, Homo sapiens
  CDR3 for alpha chain variable domain of TCR clone 145504 (TRAV4, TRAJ28)
CLVGDNRAGTL

SEQ ID NO: 291008 - protein, 13 aa, Homo sapiens
  CDR3 for beta chain variable domain of TCR clone 145504 (TRBV20-1, TRBJ2-7)
CSATHTSGYEQYF

SEQ ID NO: 291009 - protein, 12 aa, Homo sapiens
  CDR3 for alpha chain variable domain of TCR clone 145505 (TRAV12-3, TRAJ17)
CAMTLTGNNLTF

SEQ ID NO: 291010 - protein, 15 aa, Homo sapiens
  CDR3 for beta chain variable domain of TCR clone 145505 (TRBV20-1, TRBJ2-7)
CSARDRVAGMDEQYF

SEQ ID NO: 291011 - protein, 16 aa, Homo sapiens
  CDR3 for alpha chain variable domain of TCR clone 145506 (TRAV17, TRAJ35)
CATAVGGIGFGNVLHC

SEQ ID NO: 291012 - protein, 16 aa, Homo sapiens
  CDR3 for beta chain variable domain of TCR clone 145506 (TRBV6-5, TRBJ2-7)
CASSSDPTSGFYEQYF

SEQ ID NO: 291013 - protein, 15 aa, Homo sapiens
  CDR3 for alpha chain variable domain of TCR clone 145507 (TRAV17, TRAJ35)
CATAFVIGFGNVPHC

SEQ ID NO: 291014 - protein, 16 aa, Homo sapiens
  CDR3 for beta chain variable domain of TCR clone 145507 (TRBV11-2, TRBJ2-7)
CASSPLAGGPRYEQYF

SEQ ID NO: 291015 - protein, 15 aa, Homo sapiens
  CDR3 for alpha chain variable domain of TCR clone 145508 (TRAV29/DV5, TRAJ24)
CAASGATDSWGKFQL

SEQ ID NO: 291016 - protein, 15 aa, Homo sapiens
  CDR3 for beta chain variable domain of TCR clone 145508 (TRBV11-2, TRBJ1-6)
CASTLRGTGNSPLHF

SEQ ID NO: 291017 - protein, 13 aa, Homo sapiens
  CDR3 for alpha chain variable domain of TCR clone 145509 (TRAV36/DV7, TRAJ38)
CVANAGNNRKLLW

SEQ ID NO: 291018 - protein, 14 aa, Homo sapiens
  CDR3 for beta chain variable domain of TCR clone 145509 (TRBV19, TRBJ2-1)
CASPTFVLSGEQFF

SEQ ID NO: 291019 - protein, 13 aa, Homo sapiens
  CDR3 for alpha chain variable domain of TCR clone 145510 (TRAV12-1, TRAJ31)
CVVNMNNNAGLMF

SEQ ID NO: 291020 - protein, 15 aa, Homo sapiens
  CDR3 for beta chain variable domain of TCR clone 145510 (TRBV27, TRBJ1-5)
CASSLGTGFDQPQHF

SEQ ID NO: 291021 - protein, 16 aa, Homo sapiens
  CDR3 for alpha chain variable domain of TCR clone 145511 (TRAV8-1, TRAJ42)
CAVTSMYGGSRGNLIF

SEQ ID NO: 291022 - protein, 12 aa, Homo sapiens
  CDR3 for beta chain variable domain of TCR clone 145511 (TRBV6-3, TRBJ2-7)
CASSLGRRGLYF

SEQ ID NO: 291023 - protein, 13 aa, Homo sapiens
  CDR3 for alpha chain variable domain of TCR clone 145512 (TRAV2, TRAJ40)
CAVVDSGTYKYIF

SEQ ID NO: 291024 - protein, 14 aa, Homo sapiens
  CDR3 for beta chain variable domain of TCR clone 145512 (TRBV15, TRBJ1-1)
CATSRDLRVTEAFF

SEQ ID NO: 291025 - protein, 14 aa, Homo sapiens
  CDR3 for alpha chain variable domain of TCR clone 145513 (TRAV2, TRAJ9)
CAVEDRSGGFKTIF

SEQ ID NO: 291026 - protein, 14 aa, Homo sapiens
  CDR3 for beta chain variable domain of TCR clone 145513 (TRBV18, TRBJ1-5)
CASSRQQRKQPQHF

SEQ ID NO: 291027 - protein, 14 aa, Homo sapiens
  CDR3 for alpha chain variable domain of TCR clone 145514 (TRAV29/DV5, TRAJ36)
CAARRKTGANNLFL

SEQ ID NO: 291028 - protein, 14 aa, Homo sapiens
  CDR3 for beta chain variable domain of TCR clone 145514 (TRBV12-5, TRBJ2-5)
CASGSRTHQETQFF

SEQ ID NO: 291029 - protein, 13 aa, Homo sapiens
  CDR3 for alpha chain variable domain of TCR clone 145515 (TRAV21, TRAJ40)
CAVRPSRAYKYIF

SEQ ID NO: 291030 - protein, 12 aa, Homo sapiens
  CDR3 for beta chain variable domain of TCR clone 145515 (TRBV14, TRBJ2-5)
CASIQLKETQYF

SEQ ID NO: 291031 - protein, 12 aa, Homo sapiens
  CDR3 for alpha chain variable domain of TCR clone 145516 (TRAV21, TRAJ11)
CAATSGYSTLTF

SEQ ID NO: 291032 - protein, 14 aa, Homo sapiens
  CDR3 for beta chain variable domain of TCR clone 145516 (TRBV20-1, TRBJ2-7)
CSGPELAGVGEQYF

SEQ ID NO: 291033 - protein, 14 aa, Homo sapiens
  CDR3 for alpha chain variable domain of TCR clone 145517 (TRAV23/DV6, TRAJ5)
CSAKRPAGRIALTF

SEQ ID NO: 291034 - protein, 15 aa, Homo sapiens
  CDR3 for beta chain variable domain of TCR clone 145517 (TRBV27, TRBJ1-5)
CASSSSGTGNQPQHF

SEQ ID NO: 291035 - protein, 12 aa, Homo sapiens
  CDR3 for alpha chain variable domain of TCR clone 145518 (TRAV17, TRAJ20)
CATASNDYKLSF

SEQ ID NO: 291036 - protein, 15 aa, Homo sapiens
  CDR3 for beta chain variable domain of TCR clone 145518 (TRBV28, TRBJ2-3)
CASSPDRQGANTQYF

SEQ ID NO: 291037 - protein, 14 aa, Homo sapiens
  CDR3 for alpha chain variable domain of TCR clone 145519 (TRAV23/DV6, TRAJ9)
CASKYWRLQNYLCS

SEQ ID NO: 291038 - protein, 14 aa, Homo sapiens
  CDR3 for beta chain variable domain of TCR clone 145519 (TRBV6-1, TRBJ2-7)
CARTRTGDYYEQYF

SEQ ID NO: 291039 - protein, 13 aa, Homo sapiens
  CDR3 for alpha chain variable domain of TCR clone 145520 (TRAV35, TRAJ43)
WAGYPYNNNDMRF

SEQ ID NO: 291040 - protein, 15 aa, Homo sapiens
  CDR3 for beta chain variable domain of TCR clone 145520 (TRBV25-1, TRBJ1-4)
CASSKRIATNEKLFF

SEQ ID NO: 291041 - protein, 13 aa, Homo sapiens
  CDR3 for alpha chain variable domain of TCR clone 145521 (TRAV36/DV7, TRAJ37)
CAVFSSNTGKLTF

SEQ ID NO: 291042 - protein, 12 aa, Homo sapiens
  CDR3 for beta chain variable domain of TCR clone 145521 (TRBV11-2, TRBJ2-2)
CAGSLGGGELFF

SEQ ID NO: 291043 - protein, 11 aa, Homo sapiens
  CDR3 for alpha chain variable domain of TCR clone 145522 (TRAV21, TRAJ20)
CCRVNDYKLSV

SEQ ID NO: 291044 - protein, 15 aa, Homo sapiens
  CDR3 for beta chain variable domain of TCR clone 145522 (TRBV2, TRBJ2-2)
CASSRQGPNTGELFF

SEQ ID NO: 291045 - protein, 21 aa, Homo sapiens
  CDR3 for alpha chain variable domain of TCR clone 145523 (TRAV6, TRAJ36)
CARQTTSSLGMERDSPLFPIS

SEQ ID NO: 291046 - protein, 14 aa, Homo sapiens
  CDR3 for beta chain variable domain of TCR clone 145523 (TRBV10-2, TRBJ1-5)
CASSSTGRNQPQHF

SEQ ID NO: 291047 - protein, 13 aa, Homo sapiens
  CDR3 for alpha chain variable domain of TCR clone 145524 (TRAV21, TRAJ57)
CAVTQGGSEMLVF

SEQ ID NO: 291048 - protein, 15 aa, Homo sapiens
  CDR3 for beta chain variable domain of TCR clone 145524 (TRBV7-3, TRBJ2-3)
WANSLTSGVGDTQYF

SEQ ID NO: 291049 - protein, 14 aa, Homo sapiens
  CDR3 for alpha chain variable domain of TCR clone 145525 (TRAV16, TRAJ33)
CALSAMDSNYQLIW

SEQ ID NO: 291050 - protein, 15 aa, Homo sapiens
  CDR3 for beta chain variable domain of TCR clone 145525 (TRBV6-5, TRBJ2-3)
CASSLNGDYTDTQYF

SEQ ID NO: 291051 - protein, 14 aa, Homo sapiens
  CDR3 for alpha chain variable domain of TCR clone 145526 (TRAV1-2, TRAJ16)
CAVNRFSHGQKLLF

SEQ ID NO: 291052 - protein, 13 aa, Homo sapiens
  CDR3 for beta chain variable domain of TCR clone 145526 (TRBV7-9, TRBJ1-2)
CASSLKQNYGYTF

SEQ ID NO: 291053 - protein, 12 aa, Homo sapiens
  CDR3 for alpha chain variable domain of TCR clone 145527 (TRAV16, TRAJ21)
FALLGNFNKFYF

SEQ ID NO: 291054 - protein, 15 aa, Homo sapiens
  CDR3 for beta chain variable domain of TCR clone 145527 (TRBV3-1, TRBJ2-2)
CASSQAVRETGELFF

SEQ ID NO: 291055 - protein, 17 aa, Homo sapiens
  CDR3 for alpha chain variable domain of TCR clone 145528 (TRAV26-1, TRAJ37)
CIVRVITVSSNTGTLIF

SEQ ID NO: 291056 - protein, 14 aa, Homo sapiens
  CDR3 for beta chain variable domain of TCR clone 145528 (TRBV7-8, TRBJ1-2)
CASSPDSLSYGYTF

SEQ ID NO: 291057 - protein, 16 aa, Homo sapiens
  CDR3 for alpha chain variable domain of TCR clone 145529 (TRAV14/DV4, TRAJ20)
CAMREGRSRDDYKLSF

SEQ ID NO: 291058 - protein, 15 aa, Homo sapiens
  CDR3 for beta chain variable domain of TCR clone 145529 (TRBV19, TRBJ1-1)
CASTSGQIQNTEAFF

SEQ ID NO: 291059 - protein, 14 aa, Homo sapiens
  CDR3 for alpha chain variable domain of TCR clone 145530 (TRAV12-1, TRAJ43)
CVVNGRSNNNDMRF

SEQ ID NO: 291060 - protein, 13 aa, Homo sapiens
  CDR3 for beta chain variable domain of TCR clone 145530 (TRBV27, TRBJ1-1)
CASSLSIGAEDFF

SEQ ID NO: 291061 - protein, 11 aa, Homo sapiens
  CDR3 for alpha chain variable domain of TCR clone 145531 (TRAV4, TRAJ23)
CLVAPGGKLIF

SEQ ID NO: 291062 - protein, 15 aa, Homo sapiens
  CDR3 for beta chain variable domain of TCR clone 145531 (TRBV7-2, TRBJ2-1)
CPSSFQADEYNEQFF

SEQ ID NO: 291063 - protein, 14 aa, Homo sapiens
  CDR3 for alpha chain variable domain of TCR clone 145532 (TRAV29/DV5, TRAJ36)
CAARRKTGANNLFF

SEQ ID NO: 291064 - protein, 12 aa, Homo sapiens
  CDR3 for beta chain variable domain of TCR clone 145532 (TRBV7-8, TRBJ2-4)
CASSLGGNIQYF

SEQ ID NO: 291065 - protein, 13 aa, Homo sapiens
  CDR3 for alpha chain variable domain of TCR clone 145533 (TRAV12-3, TRAJ40)
SAMSDSGTYKYIF

SEQ ID NO: 291066 - protein, 14 aa, Homo sapiens
  CDR3 for beta chain variable domain of TCR clone 145533 (TRBV7-2, TRBJ1-5)
CASSTQGAGQPQHF

SEQ ID NO: 291067 - protein, 14 aa, Homo sapiens
  CDR3 for alpha chain variable domain of TCR clone 145534 (TRAV1-2, TRAJ37)
CAVRSKSNTGKLIF

SEQ ID NO: 291068 - protein, 13 aa, Homo sapiens
  CDR3 for beta chain variable domain of TCR clone 145534 (TRBV7-2, TRBJ2-7)
CASSSPSGSEQYF

SEQ ID NO: 291069 - protein, 14 aa, Homo sapiens
  CDR3 for alpha chain variable domain of TCR clone 145535 (TRAV1-2, TRAJ8)
CAVREDTGFQKLVF

SEQ ID NO: 291070 - protein, 18 aa, Homo sapiens
  CDR3 for beta chain variable domain of TCR clone 145535 (TRBV4-1, TRBJ2-3)
CASSHQLAGGRSTDTQYF

SEQ ID NO: 291071 - protein, 10 aa, Homo sapiens
  CDR3 for alpha chain variable domain of TCR clone 145536 (TRAV8-4, TRAJ11)
CAVSLHTLTF

SEQ ID NO: 291072 - protein, 13 aa, Homo sapiens
  CDR3 for beta chain variable domain of TCR clone 145536 (TRBV7-7, TRBJ2-2)
CASSLTSAGELFF

SEQ ID NO: 291073 - protein, 14 aa, Homo sapiens
  CDR3 for alpha chain variable domain of TCR clone 145537 (TRAV26-1, TRAJ21)
CIVRVVYNFNKFYF

SEQ ID NO: 291074 - protein, 13 aa, Homo sapiens
  CDR3 for beta chain variable domain of TCR clone 145537 (TRBV28, TRBJ2-7)
CASSPSGTYEQYF

SEQ ID NO: 291075 - protein, 17 aa, Homo sapiens
  CDR3 for alpha chain variable domain of TCR clone 145538 (TRAV23/DV6, TRAJ57)
CAAGSTLSQGGSEKLVF

SEQ ID NO: 291076 - protein, 14 aa, Homo sapiens
  CDR3 for beta chain variable domain of TCR clone 145538 (TRBV25-1, TRBJ1-1)
CASTHLGGNTEAFS

SEQ ID NO: 291077 - protein, 11 aa, Homo sapiens
  CDR3 for alpha chain variable domain of TCR clone 145539 (TRAV12-3, TRAJ43)
CAMSVSNDMRF

SEQ ID NO: 291078 - protein, 13 aa, Homo sapiens
  CDR3 for beta chain variable domain of TCR clone 145539 (TRBV20-1, TRBJ1-6)
CSAPLGVGSPLHF

SEQ ID NO: 291079 - protein, 10 aa, Homo sapiens
  CDR3 for alpha chain variable domain of TCR clone 145540 (TRAV8-4, TRAJ43)
CAVRADDMRF

SEQ ID NO: 291080 - protein, 15 aa, Homo sapiens
  CDR3 for beta chain variable domain of TCR clone 145540 (TRBV28, TRBJ2-7)
CASSQLGAGGHEQYF

SEQ ID NO: 291081 - protein, 14 aa, Homo sapiens
  CDR3 for alpha chain variable domain of TCR clone 145541 (TRAV12-1, TRAJ23)
CVEIVYNQGGKLIF

SEQ ID NO: 291082 - protein, 13 aa, Homo sapiens
  CDR3 for beta chain variable domain of TCR clone 145541 (TRBV11-2, TRBJ2-5)
CASSFSSQETQYF

SEQ ID NO: 291083 - protein, 11 aa, Homo sapiens
  CDR3 for alpha chain variable domain of TCR clone 145542 (TRAV21, TRAJ9)
CVVPGGFKTIF

SEQ ID NO: 291084 - protein, 17 aa, Homo sapiens
  CDR3 for beta chain variable domain of TCR clone 145542 (TRBV7-9, TRBJ2-5)
CATSGGARDPVLRARHA

SEQ ID NO: 291085 - protein, 10 aa, Homo sapiens
  CDR3 for alpha chain variable domain of TCR clone 145543 (TRAV26-1, TRAJ40)
CITGTYKYIF

SEQ ID NO: 291086 - protein, 15 aa, Homo sapiens
  CDR3 for beta chain variable domain of TCR clone 145543 (TRBV19, TRBJ2-1)
CASSSPGVPLDEQFF

SEQ ID NO: 291087 - protein, 14 aa, Homo sapiens
  CDR3 for alpha chain variable domain of TCR clone 145544 (TRAV26-1, TRAJ21)
CIVRVVYNFNNFYF

SEQ ID NO: 291088 - protein, 17 aa, Homo sapiens
  CDR3 for beta chain variable domain of TCR clone 145544 (TRBV11-2, TRBJ2-1)
CASSLYPPGVEYNEQFF

SEQ ID NO: 291089 - protein, 11 aa, Homo sapiens
  CDR3 for alpha chain variable domain of TCR clone 145545 (TRAV4, TRAJ23)
CLVAPGGKLIF

SEQ ID NO: 291090 - protein, 15 aa, Homo sapiens
  CDR3 for beta chain variable domain of TCR clone 145545 (TRBV2, TRBJ2-1)
CASSEEREGDNEQFF

SEQ ID NO: 291091 - protein, 15 aa, Homo sapiens
  CDR3 for alpha chain variable domain of TCR clone 145546 (TRAV26-1, TRAJ29)
CIFRVEGSGNTPLVF

SEQ ID NO: 291092 - protein, 15 aa, Homo sapiens
  CDR3 for beta chain variable domain of TCR clone 145546 (TRBV7-9, TRBJ1-5)
CASSQGPQPNQPQHF

SEQ ID NO: 291093 - protein, 12 aa, Homo sapiens
  CDR3 for alpha chain variable domain of TCR clone 145547 (TRAV13-1, TRAJ27)
CAAHSNAGKSTF

SEQ ID NO: 291094 - protein, 12 aa, Homo sapiens
  CDR3 for beta chain variable domain of TCR clone 145547 (TRBV19, TRBJ1-5)
CASSIAQQPQHF

SEQ ID NO: 291095 - protein, 13 aa, Homo sapiens
  CDR3 for alpha chain variable domain of TCR clone 145548 (TRAV17, TRAJ9)
CATDYTGDFKTIF

SEQ ID NO: 291096 - protein, 15 aa, Homo sapiens
  CDR3 for beta chain variable domain of TCR clone 145548 (TRBV6-3, TRBJ2-7)
CASSSPGTVFYEQYF

SEQ ID NO: 291097 - protein, 14 aa, Homo sapiens
  CDR3 for alpha chain variable domain of TCR clone 145549 (TRAV1-2, TRAJ8)
CAVREDTGFQQLVF

SEQ ID NO: 291098 - protein, 12 aa, Homo sapiens
  CDR3 for beta chain variable domain of TCR clone 145549 (TRBV7-8, TRBJ2-7)
CASSRGDREQYF

SEQ ID NO: 291099 - protein, 12 aa, Homo sapiens
  CDR3 for alpha chain variable domain of TCR clone 145550 (TRAV17, TRAJ12)
CATLRSSYKLIF

SEQ ID NO: 291100 - protein, 12 aa, Homo sapiens
  CDR3 for beta chain variable domain of TCR clone 145550 (TRBV20-1, TRBJ2-5)
CSAGGAGETQYF

SEQ ID NO: 291101 - protein, 14 aa, Homo sapiens
  CDR3 for alpha chain variable domain of TCR clone 145551 (TRAV8-2, TRAJ26)
CVVRDCNYGQNFVF

SEQ ID NO: 291102 - protein, 12 aa, Homo sapiens
  CDR3 for beta chain variable domain of TCR clone 145551 (TRBV5-4, TRBJ2-5)
CASNRAGETQYF

SEQ ID NO: 291103 - protein, 13 aa, Homo sapiens
  CDR3 for alpha chain variable domain of TCR clone 145552 (TRAV13-2, TRAJ5)
CAESDTGRRALTF

SEQ ID NO: 291104 - protein, 14 aa, Homo sapiens
  CDR3 for beta chain variable domain of TCR clone 145552 (TRBV2, TRBJ1-1)
CASTQAGENTEAFF

SEQ ID NO: 291105 - protein, 16 aa, Homo sapiens
  CDR3 for alpha chain variable domain of TCR clone 145553 (TRAV12-3, TRAJ58)
CAMMDTEETSGPRLTF

SEQ ID NO: 291106 - protein, 22 aa, Homo sapiens
  CDR3 for beta chain variable domain of TCR clone 145553 (TRBV23-1, TRBJ2-7)
CASSRRLDSGQGYVGGGYEQYF

SEQ ID NO: 291107 - protein, 11 aa, Homo sapiens
  CDR3 for alpha chain variable domain of TCR clone 145554 (TRAV26-1, TRAJ27)
CIDPNAGKSTF

SEQ ID NO: 291108 - protein, 18 aa, Homo sapiens
  CDR3 for beta chain variable domain of TCR clone 145554 (TRBV7-9, TRBJ2-6)
GASSFPGAGISGANVLTF

SEQ ID NO: 291109 - protein, 13 aa, Homo sapiens
  CDR3 for alpha chain variable domain of TCR clone 145555 (TRAV2, TRAJ5)
CAVPDTGRRALTF

SEQ ID NO: 291110 - protein, 13 aa, Homo sapiens
  CDR3 for beta chain variable domain of TCR clone 145555 (TRBV27, TRBJ1-1)
CASSLSIGAEAFF

SEQ ID NO: 291111 - protein, 17 aa, Homo sapiens
  CDR3 for alpha chain variable domain of TCR clone 145556 (TRAV13-1, TRAJ52)
CAASSGAGGTSYGKLTF

SEQ ID NO: 291112 - protein, 18 aa, Homo sapiens
  CDR3 for beta chain variable domain of TCR clone 145556 (TRBV28, TRBJ2-1)
CASSSTSGRANSYNEQFF

SEQ ID NO: 291113 - protein, 14 aa, Homo sapiens
  CDR3 for alpha chain variable domain of TCR clone 145557 (TRAV12-1, TRAJ17)
CVVNYKAAGNKLTF

SEQ ID NO: 291114 - protein, 17 aa, Homo sapiens
  CDR3 for beta chain variable domain of TCR clone 145557 (TRBV20-1, TRBJ2-1)
CSASSSELARSYNEQFF

SEQ ID NO: 291115 - protein, 14 aa, Homo sapiens
  CDR3 for alpha chain variable domain of TCR clone 145558 (TRAV8-2, TRAJ45)
CVVSAGGGADELTF

SEQ ID NO: 291116 - protein, 12 aa, Homo sapiens
  CDR3 for beta chain variable domain of TCR clone 145558 (TRBV12-4, TRBJ2-1)
CASSLVRVEQFF

SEQ ID NO: 291117 - protein, 14 aa, Homo sapiens
  CDR3 for alpha chain variable domain of TCR clone 145559 (TRAV4, TRAJ30)
CLVGDMNRGDKIIF

SEQ ID NO: 291118 - protein, 14 aa, Homo sapiens
  CDR3 for beta chain variable domain of TCR clone 145559 (TRBV19, TRBJ2-7)
CASSIQEWSYEQYF

SEQ ID NO: 291119 - protein, 14 aa, Homo sapiens
  CDR3 for alpha chain variable domain of TCR clone 145560 (TRAV1-2, TRAJ16)
CAVNRFSDGQKLLF

SEQ ID NO: 291120 - protein, 13 aa, Homo sapiens
  CDR3 for beta chain variable domain of TCR clone 145560 (TRBV19, TRBJ1-2)
CASSVPGQHGYTF

SEQ ID NO: 291121 - protein, 11 aa, Homo sapiens
  CDR3 for alpha chain variable domain of TCR clone 145561 (TRAV3, TRAJ17)
PRGAAGNKLTF

SEQ ID NO: 291122 - protein, 15 aa, Homo sapiens
  CDR3 for beta chain variable domain of TCR clone 145561 (TRBV7-6, TRBJ2-1)
CQSAPGPSSYNEQFF

SEQ ID NO: 291123 - protein, 11 aa, Homo sapiens
  CDR3 for alpha chain variable domain of TCR clone 145562 (TRAV3, TRAJ21)
CAVGNFNKFYF

SEQ ID NO: 291124 - protein, 14 aa, Homo sapiens
  CDR3 for beta chain variable domain of TCR clone 145562 (TRBV7-2, TRBJ2-3)
CASSLGGGERYAVF

SEQ ID NO: 291125 - protein, 14 aa, Homo sapiens
  CDR3 for alpha chain variable domain of TCR clone 145563 (TRAV13-2, TRAJ32)
CAENHGGATNKLIF

SEQ ID NO: 291126 - protein, 15 aa, Homo sapiens
  CDR3 for beta chain variable domain of TCR clone 145563 (TRBV5-1, TRBJ2-2)
CASSLFGQNTGELFF

SEQ ID NO: 291127 - protein, 18 aa, Homo sapiens
  CDR3 for alpha chain variable domain of TCR clone 145564 (TRAV21, TRAJ52)
CAVRPSPAGGTSYGKLTF

SEQ ID NO: 291128 - protein, 12 aa, Homo sapiens
  CDR3 for beta chain variable domain of TCR clone 145564 (TRBV13, TRBJ2-5)
CASSSAQETQYF

SEQ ID NO: 291129 - protein, 15 aa, Homo sapiens
  CDR3 for alpha chain variable domain of TCR clone 145565 (TRAV20, TRAJ4)
CAVEGSSGGYNKLIF

SEQ ID NO: 291130 - protein, 14 aa, Homo sapiens
  CDR3 for beta chain variable domain of TCR clone 145565 (TRBV7-8, TRBJ2-7)
CARTLGGALGEQYF

SEQ ID NO: 291131 - protein, 16 aa, Homo sapiens
  CDR3 for alpha chain variable domain of TCR clone 145566 (TRAV8-3, TRAJ42)
CAVGEGNGGSQGNLIF

SEQ ID NO: 291132 - protein, 15 aa, Homo sapiens
  CDR3 for beta chain variable domain of TCR clone 145566 (TRBV6-6, TRBJ2-7)
CASSYSYGGSYEQYF

SEQ ID NO: 291133 - protein, 14 aa, Homo sapiens
  CDR3 for alpha chain variable domain of TCR clone 145567 (TRAV17, TRAJ15)
CATGPNQAGTALIF

SEQ ID NO: 291134 - protein, 15 aa, Homo sapiens
  CDR3 for beta chain variable domain of TCR clone 145567 (TRBV11-2, TRBJ2-2)
CASSSDWVNAGELFF

SEQ ID NO: 291135 - protein, 13 aa, Homo sapiens
  CDR3 for alpha chain variable domain of TCR clone 145568 (TRAV2, TRAJ40)
CAVVTSGTYKYIF

SEQ ID NO: 291136 - protein, 14 aa, Homo sapiens
  CDR3 for beta chain variable domain of TCR clone 145568 (TRBV19, TRBJ2-1)
CASPTFVMSGEQFL

SEQ ID NO: 291137 - protein, 12 aa, Homo sapiens
  CDR3 for alpha chain variable domain of TCR clone 145569 (TRAV26-1, TRAJ48)
FIAVFGNEKLTF

SEQ ID NO: 291138 - protein, 17 aa, Homo sapiens
  CDR3 for beta chain variable domain of TCR clone 145569 (TRBV7-6, TRBJ2-1)
CASSFGLAGGTYNEQFF

SEQ ID NO: 291139 - protein, 16 aa, Homo sapiens
  CDR3 for alpha chain variable domain of TCR clone 145570 (TRAV21, TRAJ37)
CAVRPRGSSNTGKLIF

SEQ ID NO: 291140 - protein, 16 aa, Homo sapiens
  CDR3 for beta chain variable domain of TCR clone 145570 (TRBV2, TRBJ2-3)
CASSTSVEGVTDTQYF

SEQ ID NO: 291141 - protein, 16 aa, Homo sapiens
  CDR3 for alpha chain variable domain of TCR clone 145571 (TRAV3, TRAJ10)
CAVRDMRAGGGNKITF

SEQ ID NO: 291142 - protein, 18 aa, Homo sapiens
  CDR3 for beta chain variable domain of TCR clone 145571 (TRBV12-4, TRBJ2-2)
CASSLVAGTRGRTGELFF

SEQ ID NO: 291143 - protein, 21 aa, Homo sapiens
  CDR3 for alpha chain variable domain of TCR clone 145572 (TRAV8-3, TRAJ6)
CAVGGEEATYLHLVEEPALLF

SEQ ID NO: 291144 - protein, 14 aa, Homo sapiens
  CDR3 for beta chain variable domain of TCR clone 145572 (TRBV5-1, TRBJ2-7)
CASSRGESLYEQYF

SEQ ID NO: 291145 - protein, 13 aa, Homo sapiens
  CDR3 for alpha chain variable domain of TCR clone 145573 (TRAV20, TRAJ40)
CAVPFSGTYKYIF

SEQ ID NO: 291146 - protein, 15 aa, Homo sapiens
  CDR3 for beta chain variable domain of TCR clone 145573 (TRBV27, TRBJ2-7)
CASRFWGQGADEQYF

SEQ ID NO: 291147 - protein, 14 aa, Homo sapiens
  CDR3 for alpha chain variable domain of TCR clone 145574 (TRAV13-1, TRAJ8)
CAASEDTGFQKLVF

SEQ ID NO: 291148 - protein, 13 aa, Homo sapiens
  CDR3 for beta chain variable domain of TCR clone 145574 (TRBV19, TRBJ1-5)
CASSARRDQPQHF

SEQ ID NO: 291149 - protein, 14 aa, Homo sapiens
  CDR3 for alpha chain variable domain of TCR clone 145575 (TRAV8-4, TRAJ13)
CAVTLSGGYQKVTF

SEQ ID NO: 291150 - protein, 13 aa, Homo sapiens
  CDR3 for beta chain variable domain of TCR clone 145575 (TRBV4-1, TRBJ2-4)
CASSQVGIDIQYF

SEQ ID NO: 291151 - protein, 15 aa, Homo sapiens
  CDR3 for alpha chain variable domain of TCR clone 145576 (TRAV9-2, TRAJ57)
CALSPNQGGSEKLVF

SEQ ID NO: 291152 - protein, 17 aa, Homo sapiens
  CDR3 for beta chain variable domain of TCR clone 145576 (TRBV20-1, TRBJ2-1)
CSAPPRLAGTRYNEQFF

SEQ ID NO: 291153 - protein, 13 aa, Homo sapiens
  CDR3 for alpha chain variable domain of TCR clone 145577 (TRAV13-1, TRAJ6)
CAASKGGSYIPTF

SEQ ID NO: 291154 - protein, 17 aa, Homo sapiens
  CDR3 for beta chain variable domain of TCR clone 145577 (TRBV18, TRBJ2-1)
CASSKGLSGGADNEQFF

SEQ ID NO: 291155 - protein, 12 aa, Homo sapiens
  CDR3 for alpha chain variable domain of TCR clone 145578 (TRAV13-2, TRAJ23)
CAERHRGGKLIF

SEQ ID NO: 291156 - protein, 15 aa, Homo sapiens
  CDR3 for beta chain variable domain of TCR clone 145578 (TRBV5-1, TRBJ2-1)
CASSPPRAPYNEQFF

SEQ ID NO: 291157 - protein, 13 aa, Homo sapiens
  CDR3 for alpha chain variable domain of TCR clone 145579 (TRAV21, TRAJ15)
CAVANQAGTALIF

SEQ ID NO: 291158 - protein, 14 aa, Homo sapiens
  CDR3 for beta chain variable domain of TCR clone 145579 (TRBV27, TRBJ2-2)
FASSLGAATGELFF

SEQ ID NO: 291159 - protein, 13 aa, Homo sapiens
  CDR3 for alpha chain variable domain of TCR clone 145580 (TRAV3, TRAJ21)
CAVREPDFNKFYF

SEQ ID NO: 291160 - protein, 16 aa, Homo sapiens
  CDR3 for beta chain variable domain of TCR clone 145580 (TRBV5-1, TRBJ2-3)
CASRLGLAVYTDTQYF

SEQ ID NO: 291161 - protein, 11 aa, Homo sapiens
  CDR3 for alpha chain variable domain of TCR clone 145581 (TRAV26-1, TRAJ37)
CIVRVGRKLIF

SEQ ID NO: 291162 - protein, 13 aa, Homo sapiens
  CDR3 for beta chain variable domain of TCR clone 145581 (TRBV7-9, TRBJ1-2)
CARSLKQNYGYTF

SEQ ID NO: 291163 - protein, 12 aa, Homo sapiens
  CDR3 for alpha chain variable domain of TCR clone 145582 (TRAV27, TRAJ35)
CAGADFGNVLHC

SEQ ID NO: 291164 - protein, 12 aa, Homo sapiens
  CDR3 for beta chain variable domain of TCR clone 145582 (TRBV19, TRBJ1-4)
CASKDWPGGLFF

SEQ ID NO: 291165 - protein, 12 aa, Homo sapiens
  CDR3 for alpha chain variable domain of TCR clone 145583 (TRAV35, TRAJ39)
LAPNNAGNMLTF

SEQ ID NO: 291166 - protein, 16 aa, Homo sapiens
  CDR3 for beta chain variable domain of TCR clone 145583 (TRBV2, TRBJ2-3)
CASSLGLAVYTDTQYF

SEQ ID NO: 291167 - protein, 13 aa, Homo sapiens
  CDR3 for alpha chain variable domain of TCR clone 145584 (TRAV2, TRAJ21)
CAVEDNNFNKFYF

SEQ ID NO: 291168 - protein, 15 aa, Homo sapiens
  CDR3 for beta chain variable domain of TCR clone 145584 (TRBV19, TRBJ1-1)
CASTSGQIQNTEAFF

SEQ ID NO: 291169 - protein, 11 aa, Homo sapiens
  CDR3 for alpha chain variable domain of TCR clone 145585 (TRAV4, TRAJ31)
CLVGDNARLKF

SEQ ID NO: 291170 - protein, 16 aa, Homo sapiens
  CDR3 for beta chain variable domain of TCR clone 145585 (TRBV7-2, TRBJ2-5)
CASSSKWLSGQEAQYF

SEQ ID NO: 291171 - protein, 12 aa, Homo sapiens
  CDR3 for alpha chain variable domain of TCR clone 145586 (TRAV2, TRAJ40)
CCGYLGTYKYIF

SEQ ID NO: 291172 - protein, 16 aa, Homo sapiens
  CDR3 for beta chain variable domain of TCR clone 145586 (TRBV28, TRBJ2-2)
CASSLEGGSNTGELFF

SEQ ID NO: 291173 - protein, 16 aa, Homo sapiens
  CDR3 for alpha chain variable domain of TCR clone 145587 (TRAV30, TRAJ24)
CGTEIVDSDSWGKFQF

SEQ ID NO: 291174 - protein, 14 aa, Homo sapiens
  CDR3 for beta chain variable domain of TCR clone 145587 (TRBV12-5, TRBJ2-5)
CAGGSRTHQETQYF

SEQ ID NO: 291175 - protein, 17 aa, Homo sapiens
  CDR3 for alpha chain variable domain of TCR clone 145588 (TRAV23/DV6, )
CAADIQNPDPAVYQLRG

SEQ ID NO: 291176 - protein, 14 aa, Homo sapiens
  CDR3 for beta chain variable domain of TCR clone 145588 (TRBV5-7, TRBJ1-6)
CASSFAGHNSPLHF

SEQ ID NO: 291177 - protein, 12 aa, Homo sapiens
  CDR3 for alpha chain variable domain of TCR clone 145589 (TRAV1-2, TRAJ33)
CAVMDSSYQLIW

SEQ ID NO: 291178 - protein, 11 aa, Homo sapiens
  CDR3 for beta chain variable domain of TCR clone 145589 (TRBV6-5, TRBJ1-1)
CASSRTGEAFF

SEQ ID NO: 291179 - protein, 12 aa, Homo sapiens
  CDR3 for alpha chain variable domain of TCR clone 145590 (TRAV12-1, TRAJ32)
CVVKGATNKLIC

SEQ ID NO: 291180 - protein, 15 aa, Homo sapiens
  CDR3 for beta chain variable domain of TCR clone 145590 (TRBV20-1, TRBJ2-3)
CSASGTSGYTDTQYF

SEQ ID NO: 291181 - protein, 14 aa, Homo sapiens
  CDR3 for alpha chain variable domain of TCR clone 145591 (TRAV26-1, TRAJ34)
CIVRVAYNTDKLIF

SEQ ID NO: 291182 - protein, 15 aa, Homo sapiens
  CDR3 for beta chain variable domain of TCR clone 145591 (TRBV7-3, TRBJ2-1)
CASSPAGGGEVEQFF

SEQ ID NO: 291183 - protein, 13 aa, Homo sapiens
  CDR3 for alpha chain variable domain of TCR clone 145592 (TRAV1-2, TRAJ9)
CAALNTGGFKTIF

SEQ ID NO: 291184 - protein, 15 aa, Homo sapiens
  CDR3 for beta chain variable domain of TCR clone 145592 (TRBV19, TRBJ1-5)
CASSIVWADNQPQHF

SEQ ID NO: 291185 - protein, 12 aa, Homo sapiens
  CDR3 for alpha chain variable domain of TCR clone 145593 (TRAV12-1, TRAJ26)
CVVDNYSQNFVF

SEQ ID NO: 291186 - protein, 14 aa, Homo sapiens
  CDR3 for beta chain variable domain of TCR clone 145593 (TRBV2, TRBJ2-1)
CASSEELAVNRQFF

SEQ ID NO: 291187 - protein, 11 aa, Homo sapiens
  CDR3 for alpha chain variable domain of TCR clone 145594 (TRAV8-3, TRAJ16)
CAVVPCQKLLF

SEQ ID NO: 291188 - protein, 20 aa, Homo sapiens
  CDR3 for beta chain variable domain of TCR clone 145594 (TRBV28, TRBJ2-1)
CASTPIGRSPGLAGGNEQFF

SEQ ID NO: 291189 - protein, 15 aa, Homo sapiens
  CDR3 for alpha chain variable domain of TCR clone 145595 (TRAV26-1, TRAJ48)
CIARWSWFGNEKITF

SEQ ID NO: 291190 - protein, 12 aa, Homo sapiens
  CDR3 for beta chain variable domain of TCR clone 145595 (TRBV19, TRBJ2-5)
CASSISEETQYF

SEQ ID NO: 291191 - protein, 13 aa, Homo sapiens
  CDR3 for alpha chain variable domain of TCR clone 145596 (TRAV20, TRAJ9)
CSVPDTGGFKTIF

SEQ ID NO: 291192 - protein, 15 aa, Homo sapiens
  CDR3 for beta chain variable domain of TCR clone 145596 (TRBV27, TRBJ2-7)
CASSKAGRGGYEQYF

SEQ ID NO: 291193 - protein, 10 aa, Homo sapiens
  CDR3 for alpha chain variable domain of TCR clone 145597 (TRAV1-2, TRAJ23)
CAAWAGKLIL

SEQ ID NO: 291194 - protein, 14 aa, Homo sapiens
  CDR3 for beta chain variable domain of TCR clone 145597 (TRBV20-1, TRBJ2-7)
CSAKTGTGGYEQYF

SEQ ID NO: 291195 - protein, 12 aa, Homo sapiens
  CDR3 for alpha chain variable domain of TCR clone 145598 (TRAV12-1, TRAJ40)
CVVYSGTYKYIF

SEQ ID NO: 291196 - protein, 14 aa, Homo sapiens
  CDR3 for beta chain variable domain of TCR clone 145598 (TRBV7-8, TRBJ2-7)
CASSPRDRVYEQYF

SEQ ID NO: 291197 - protein, 12 aa, Homo sapiens
  CDR3 for alpha chain variable domain of TCR clone 145599 (TRAV3, TRAJ31)
CAVRPRGLRLMF

SEQ ID NO: 291198 - protein, 17 aa, Homo sapiens
  CDR3 for beta chain variable domain of TCR clone 145599 (TRBV7-9, TRBJ1-5)
CASSASQGGYSNQPQHF

SEQ ID NO: 291199 - protein, 11 aa, Homo sapiens
  CDR3 for alpha chain variable domain of TCR clone 145600 (TRAV8-4, TRAJ20)
CAVTNVLTTTS

SEQ ID NO: 291200 - protein, 16 aa, Homo sapiens
  CDR3 for beta chain variable domain of TCR clone 145600 (TRBV6-1, TRBJ1-2)
CASSGAWQGRSHGYTV

SEQ ID NO: 291201 - protein, 13 aa, Homo sapiens
  CDR3 for alpha chain variable domain of TCR clone 145601 (TRAV12-1, TRAJ21)
CVVTLYNFNKFYF

SEQ ID NO: 291202 - protein, 20 aa, Homo sapiens
  CDR3 for beta chain variable domain of TCR clone 145601 (TRBV7-8, TRBJ2-1)
CASSLAHSLAGVRSYNEQFF

SEQ ID NO: 291203 - protein, 12 aa, Homo sapiens
  CDR3 for alpha chain variable domain of TCR clone 145602 (TRAV13-2, TRAJ39)
CAENNAGNMPTF

SEQ ID NO: 291204 - protein, 13 aa, Homo sapiens
  CDR3 for beta chain variable domain of TCR clone 145602 (TRBV7-6, TRBJ1-1)
CASSLKLGTEAFF

SEQ ID NO: 291205 - protein, 14 aa, Homo sapiens
  CDR3 for alpha chain variable domain of TCR clone 145603 (TRAV12-1, TRAJ22)
CVVTTSGSARQLTF

SEQ ID NO: 291206 - protein, 13 aa, Homo sapiens
  CDR3 for beta chain variable domain of TCR clone 145603 (TRBV7-9, TRBJ1-2)
CASSLKQNYGYTF

SEQ ID NO: 291207 - protein, 13 aa, Homo sapiens
  CDR3 for alpha chain variable domain of TCR clone 145604 (TRAV13-2, TRAJ54)
CAENYQGAQKLVF

SEQ ID NO: 291208 - protein, 16 aa, Homo sapiens
  CDR3 for beta chain variable domain of TCR clone 145604 (TRBV19, TRBJ2-7)
CASSLIAGTYFYEQYF

SEQ ID NO: 291209 - protein, 18 aa, Homo sapiens
  CDR3 for alpha chain variable domain of TCR clone 145605 (TRAV21, TRAJ52)
CAVRPSPAGGTSYGKLTF

SEQ ID NO: 291210 - protein, 13 aa, Homo sapiens
  CDR3 for beta chain variable domain of TCR clone 145605 (TRBV29-1, TRBJ2-2)
CSVYRDDTGELFF

SEQ ID NO: 291211 - protein, 16 aa, Homo sapiens
  CDR3 for alpha chain variable domain of TCR clone 145606 (TRAV23/DV6, TRAJ9)
CAASIGGNTGSLKTIF

SEQ ID NO: 291212 - protein, 14 aa, Homo sapiens
  CDR3 for beta chain variable domain of TCR clone 145606 (TRBV9, TRBJ2-7)
RASSVGVGSCEQYF

SEQ ID NO: 291213 - protein, 15 aa, Homo sapiens
  CDR3 for alpha chain variable domain of TCR clone 145607 (TRAV13-1, TRAJ17)
CAASIHGGCRQQANF

SEQ ID NO: 291214 - protein, 14 aa, Homo sapiens
  CDR3 for beta chain variable domain of TCR clone 145607 (TRBV20-1, TRBJ2-4)
CSARDRGQGGIQYL

SEQ ID NO: 291215 - protein, 12 aa, Homo sapiens
  CDR3 for alpha chain variable domain of TCR clone 145608 (TRAV29/DV5, TRAJ15)
SASNQAGTALIF

SEQ ID NO: 291216 - protein, 15 aa, Homo sapiens
  CDR3 for beta chain variable domain of TCR clone 145608 (TRBV11-2, TRBJ2-2)
CASSSDRVNAGELFF

SEQ ID NO: 291217 - protein, 16 aa, Homo sapiens
  CDR3 for alpha chain variable domain of TCR clone 145609 (TRAV30, TRAJ24)
CGTEIVDADSWGKFKF

SEQ ID NO: 291218 - protein, 13 aa, Homo sapiens
  CDR3 for beta chain variable domain of TCR clone 145609 (TRBV18, TRBJ1-1)
CASSGGRNTEAFF

SEQ ID NO: 291219 - protein, 13 aa, Homo sapiens
  CDR3 for alpha chain variable domain of TCR clone 145610 (TRAV17, TRAJ9)
CATDYTGGFKTIF

SEQ ID NO: 291220 - protein, 11 aa, Homo sapiens
  CDR3 for beta chain variable domain of TCR clone 145610 (TRBV18, TRBJ2-5)
CASSPRETQYF

SEQ ID NO: 291221 - protein, 12 aa, Homo sapiens
  CDR3 for alpha chain variable domain of TCR clone 145611 (TRAV26-1, TRAJ26)
CIVYNYGQNFVF

SEQ ID NO: 291222 - protein, 15 aa, Homo sapiens
  CDR3 for beta chain variable domain of TCR clone 145611 (TRBV7-2, TRBJ2-3)
CASSLRGGSTDTQHF

SEQ ID NO: 291223 - protein, 10 aa, Homo sapiens
  CDR3 for alpha chain variable domain of TCR clone 145612 (TRAV8-4, TRAJ43)
CAGSADDMRF

SEQ ID NO: 291224 - protein, 15 aa, Homo sapiens
  CDR3 for beta chain variable domain of TCR clone 145612 (TRBV5-1, TRBJ2-3)
CASSVASGSTDTQYF

SEQ ID NO: 291225 - protein, 12 aa, Homo sapiens
  CDR3 for alpha chain variable domain of TCR clone 145613 (TRAV12-3, TRAJ20)
CAMVRGDYKLSV

SEQ ID NO: 291226 - protein, 17 aa, Homo sapiens
  CDR3 for beta chain variable domain of TCR clone 145613 (TRBV28, TRBJ2-5)
CASSTTEGDALQETQYF

SEQ ID NO: 291227 - protein, 17 aa, Homo sapiens
  CDR3 for alpha chain variable domain of TCR clone 145614 (TRAV3, TRAJ6)
CAVRDGPRAGGSDIPTF

SEQ ID NO: 291228 - protein, 14 aa, Homo sapiens
  CDR3 for beta chain variable domain of TCR clone 145614 (TRBV7-2, TRBJ2-7)
CASSPKTSFYGQYF

SEQ ID NO: 291229 - protein, 13 aa, Homo sapiens
  CDR3 for alpha chain variable domain of TCR clone 145615 (TRAV20, TRAJ48)
CAVQGVGNKKLTF

SEQ ID NO: 291230 - protein, 15 aa, Homo sapiens
  CDR3 for beta chain variable domain of TCR clone 145615 (TRBV20-1, TRBJ2-7)
CSARDRVSGMDEQYF

SEQ ID NO: 291231 - protein, 12 aa, Homo sapiens
  CDR3 for alpha chain variable domain of TCR clone 145616 (TRAV21, TRAJ54)
CASGGGAQKLVF

SEQ ID NO: 291232 - protein, 14 aa, Homo sapiens
  CDR3 for beta chain variable domain of TCR clone 145616 (TRBV7-8, TRBJ2-7)
CASSPRDRVYEQYF

SEQ ID NO: 291233 - protein, 14 aa, Homo sapiens
  CDR3 for alpha chain variable domain of TCR clone 145617 (TRAV1-2, TRAJ16)
CAVKRFSDGQKLLF

SEQ ID NO: 291234 - protein, 15 aa, Homo sapiens
  CDR3 for beta chain variable domain of TCR clone 145617 (TRBV12-4, TRBJ2-5)
CASSPPTGLQETQYF

SEQ ID NO: 291235 - protein, 14 aa, Homo sapiens
  CDR3 for alpha chain variable domain of TCR clone 145618 (TRAV13-1, TRAJ44)
CAAKATGTASKLTF

SEQ ID NO: 291236 - protein, 13 aa, Homo sapiens
  CDR3 for beta chain variable domain of TCR clone 145618 (TRBV20-1, TRBJ1-1)
CSAPLGGGTEAFF

SEQ ID NO: 291237 - protein, 12 aa, Homo sapiens
  CDR3 for alpha chain variable domain of TCR clone 145619 (TRAV12-3, TRAJ4)
CAMTGAGTRLAV

SEQ ID NO: 291238 - protein, 14 aa, Homo sapiens
  CDR3 for beta chain variable domain of TCR clone 145619 (TRBV10-3, TRBJ1-1)
CAMSDTDRGVEAFF

SEQ ID NO: 291239 - protein, 11 aa, Homo sapiens
  CDR3 for alpha chain variable domain of TCR clone 145620 (TRAV12-3, TRAJ43)
CAMSVSNDMRL

SEQ ID NO: 291240 - protein, 13 aa, Homo sapiens
  CDR3 for beta chain variable domain of TCR clone 145620 (TRBV20-1, TRBJ1-1)
CSAPLVGGTEAFF

SEQ ID NO: 291241 - protein, 18 aa, Homo sapiens
  CDR3 for alpha chain variable domain of TCR clone 145621 (TRAV26-2, TRAJ45)
CILRGDKYSGGGADGLTF

SEQ ID NO: 291242 - protein, 14 aa, Homo sapiens
  CDR3 for beta chain variable domain of TCR clone 145621 (TRBV7-2, TRBJ2-7)
CASRSQGAAYEQYF

SEQ ID NO: 291243 - protein, 13 aa, Homo sapiens
  CDR3 for alpha chain variable domain of TCR clone 145622 (TRAV21, TRAJ27)
CAARPAMQANQPL

SEQ ID NO: 291244 - protein, 13 aa, Homo sapiens
  CDR3 for beta chain variable domain of TCR clone 145622 (TRBV18, TRBJ2-7)
CASQSGGGYEQYF

SEQ ID NO: 291245 - protein, 14 aa, Homo sapiens
  CDR3 for alpha chain variable domain of TCR clone 145623 (TRAV12-1, TRAJ17)
CVVNYKAAGNKLTL

SEQ ID NO: 291246 - protein, 17 aa, Homo sapiens
  CDR3 for beta chain variable domain of TCR clone 145623 (TRBV20-1, TRBJ2-1)
CSASSSVLAGSYNEQFF

SEQ ID NO: 291247 - protein, 15 aa, Homo sapiens
  CDR3 for alpha chain variable domain of TCR clone 145624 (TRAV23/DV6, TRAJ18)
CAARYRGSTLGRLYF

SEQ ID NO: 291248 - protein, 15 aa, Homo sapiens
  CDR3 for beta chain variable domain of TCR clone 145624 (TRBV4-1, TRBJ2-7)
CASSQQGQGFDEQYF

SEQ ID NO: 291249 - protein, 14 aa, Homo sapiens
  CDR3 for alpha chain variable domain of TCR clone 145625 (TRAV13-1, TRAJ40)
CAASMTSGTYKYIF

SEQ ID NO: 291250 - protein, 15 aa, Homo sapiens
  CDR3 for beta chain variable domain of TCR clone 145625 (TRBV7-3, TRBJ2-1)
CASSPTGGGEVLQFF

SEQ ID NO: 291251 - protein, 12 aa, Homo sapiens
  CDR3 for alpha chain variable domain of TCR clone 145626 (TRAV13-1, TRAJ11)
CAGPSGYSTFTF

SEQ ID NO: 291252 - protein, 13 aa, Homo sapiens
  CDR3 for beta chain variable domain of TCR clone 145626 (TRBV12-4, TRBJ1-5)
CASSPDRAQPQHF

SEQ ID NO: 291253 - protein, 15 aa, Homo sapiens
  CDR3 for alpha chain variable domain of TCR clone 145627 (TRAV26-2, TRAJ57)
CILRDIWGGAEKLVF

SEQ ID NO: 291254 - protein, 15 aa, Homo sapiens
  CDR3 for beta chain variable domain of TCR clone 145627 (TRBV2, TRBJ2-1)
CASDIGLAGEGEQFF

SEQ ID NO: 291255 - protein, 17 aa, Homo sapiens
  CDR3 for alpha chain variable domain of TCR clone 145628 (TRAV3, TRAJ38)
CAVRDCLNAGNNRKLIW

SEQ ID NO: 291256 - protein, 16 aa, Homo sapiens
  CDR3 for beta chain variable domain of TCR clone 145628 (TRBV4-3, TRBJ2-2)
CASSHLQGSGTGELFF

SEQ ID NO: 291257 - protein, 12 aa, Homo sapiens
  CDR3 for alpha chain variable domain of TCR clone 145629 (TRAV35, TRAJ30)
CAGQLADDKIIF

SEQ ID NO: 291258 - protein, 13 aa, Homo sapiens
  CDR3 for beta chain variable domain of TCR clone 145629 (TRBV12-4, TRBJ2-7)
CASSPTETYEQYF

SEQ ID NO: 291259 - protein, 14 aa, Homo sapiens
  CDR3 for alpha chain variable domain of TCR clone 145630 (TRAV35, TRAJ22)
CAGLRPGSVSQLTF

SEQ ID NO: 291260 - protein, 15 aa, Homo sapiens
  CDR3 for beta chain variable domain of TCR clone 145630 (TRBV12-4, TRBJ2-5)
CASSPPTGLQETQYF

SEQ ID NO: 291261 - protein, 13 aa, Homo sapiens
  CDR3 for alpha chain variable domain of TCR clone 145631 (TRAV22, TRAJ26)
CAVEHNYGQNFVF

SEQ ID NO: 291262 - protein, 13 aa, Homo sapiens
  CDR3 for beta chain variable domain of TCR clone 145631 (TRBV7-3, TRBJ1-1)
CASSQDWGAEAFF

SEQ ID NO: 291263 - protein, 13 aa, Homo sapiens
  CDR3 for alpha chain variable domain of TCR clone 145632 (TRAV12-1, TRAJ7)
CVVNMRGNNRLAL

SEQ ID NO: 291264 - protein, 16 aa, Homo sapiens
  CDR3 for beta chain variable domain of TCR clone 145632 (TRBV20-1, TRBJ1-4)
CSAPGQGLLTNEKLFF

SEQ ID NO: 291265 - protein, 15 aa, Homo sapiens
  CDR3 for alpha chain variable domain of TCR clone 145633 (TRAV27, TRAJ38)
CAARRNAGNNRKLIW

SEQ ID NO: 291266 - protein, 16 aa, Homo sapiens
  CDR3 for beta chain variable domain of TCR clone 145633 (TRBV5-1, TRBJ2-5)
CASSLSLAGAQETQYF

SEQ ID NO: 291267 - protein, 16 aa, Homo sapiens
  CDR3 for alpha chain variable domain of TCR clone 145634 (TRAV14/DV4, TRAJ12)
CAMREVLMDSSYKLIF

SEQ ID NO: 291268 - protein, 13 aa, Homo sapiens
  CDR3 for beta chain variable domain of TCR clone 145634 (TRBV7-2, TRBJ2-7)
CASSSPSGSEQYF

SEQ ID NO: 291269 - protein, 18 aa, Homo sapiens
  CDR3 for alpha chain variable domain of TCR clone 145635 (TRAV26-2, TRAJ45)
CILRWGGYSGGGADGLTF

SEQ ID NO: 291270 - protein, 17 aa, Homo sapiens
  CDR3 for beta chain variable domain of TCR clone 145635 (TRBV28, TRBJ2-3)
CASSPTPAGGRVDTQYF

SEQ ID NO: 291271 - protein, 12 aa, Homo sapiens
  CDR3 for alpha chain variable domain of TCR clone 145636 (TRAV35, TRAJ30)
CAGLNRDDKIIF

SEQ ID NO: 291272 - protein, 14 aa, Homo sapiens
  CDR3 for beta chain variable domain of TCR clone 145636 (TRBV18, TRBJ2-3)
CQLATSGRDRYAVF

SEQ ID NO: 291273 - protein, 12 aa, Homo sapiens
  CDR3 for alpha chain variable domain of TCR clone 145637 (TRAV13-1, TRAJ53)
AASGGSKYKLTL

SEQ ID NO: 291274 - protein, 15 aa, Homo sapiens
  CDR3 for beta chain variable domain of TCR clone 145637 (TRBV5-1, TRBJ2-1)
CASSPPRAPYNEQFF

SEQ ID NO: 291275 - protein, 14 aa, Homo sapiens
  CDR3 for alpha chain variable domain of TCR clone 145638 (TRAV2, TRAJ9)
CAAEDRSGGFKTIF

SEQ ID NO: 291276 - protein, 15 aa, Homo sapiens
  CDR3 for beta chain variable domain of TCR clone 145638 (TRBV6-6, TRBJ2-7)
CASSYSYGGSYEQYF

SEQ ID NO: 291277 - protein, 13 aa, Homo sapiens
  CDR3 for alpha chain variable domain of TCR clone 145639 (TRAV12-2, TRAJ7)
CAGLIYGNNRLAF

SEQ ID NO: 291278 - protein, 16 aa, Homo sapiens
  CDR3 for beta chain variable domain of TCR clone 145639 (TRBV24-1, TRBJ2-3)
CATSDPGTGATDTQYF

SEQ ID NO: 291279 - protein, 14 aa, Homo sapiens
  CDR3 for alpha chain variable domain of TCR clone 145640 (TRAV1-1, TRAJ27)
CAVIYNTNTGKSTF

SEQ ID NO: 291280 - protein, 13 aa, Homo sapiens
  CDR3 for beta chain variable domain of TCR clone 145640 (TRBV7-9, TRBJ1-2)
CASSLKQNYGYTF

SEQ ID NO: 291281 - protein, 18 aa, Homo sapiens
  CDR3 for alpha chain variable domain of TCR clone 145641 (TRAV13-1, TRAJ52)
CAAKNPNAGGTSYGKLTF

SEQ ID NO: 291282 - protein, 14 aa, Homo sapiens
  CDR3 for beta chain variable domain of TCR clone 145641 (TRBV19, TRBJ2-2)
CASTVTANTGELFF

SEQ ID NO: 291283 - protein, 22 aa, Homo sapiens
  CDR3 for alpha chain variable domain of TCR clone 145642 (TRAV26-1, TRAJ30)
CIVRVRTEMTRSSLEKGHDFIF

SEQ ID NO: 291284 - protein, 18 aa, Homo sapiens
  CDR3 for beta chain variable domain of TCR clone 145642 (TRBV4-1, TRBJ1-5)
YASSQDPRGQGLNQPQHF

SEQ ID NO: 291285 - protein, 11 aa, Homo sapiens
  CDR3 for alpha chain variable domain of TCR clone 145643 (TRAV35, TRAJ30)
CAGPGDDKLIF

SEQ ID NO: 291286 - protein, 18 aa, Homo sapiens
  CDR3 for beta chain variable domain of TCR clone 145643 (TRBV7-6, TRBJ2-1)
CASSPRTSGMSSYNEQFF

SEQ ID NO: 291287 - protein, 13 aa, Homo sapiens
  CDR3 for alpha chain variable domain of TCR clone 145644 (TRAV13-2, TRAJ48)
CAEMDFGNVKLTF

SEQ ID NO: 291288 - protein, 15 aa, Homo sapiens
  CDR3 for beta chain variable domain of TCR clone 145644 (TRBV20-1, TRBJ2-7)
CSARDRVSGMDEQYF

SEQ ID NO: 291289 - protein, 14 aa, Homo sapiens
  CDR3 for alpha chain variable domain of TCR clone 145645 (TRAV27, TRAJ15)
CAGFDNPAGTALTF

SEQ ID NO: 291290 - protein, 11 aa, Homo sapiens
  CDR3 for beta chain variable domain of TCR clone 145645 (TRBV29-1, TRBJ1-1)
CSVEVGTRTFF

SEQ ID NO: 291291 - protein, 14 aa, Homo sapiens
  CDR3 for alpha chain variable domain of TCR clone 145646 (TRAV23/DV6, TRAJ39)
CAASMRGAGNMLTF

SEQ ID NO: 291292 - protein, 14 aa, Homo sapiens
  CDR3 for beta chain variable domain of TCR clone 145646 (TRBV10-3, TRBJ2-3)
CSISVTRSRDTQYF

SEQ ID NO: 291293 - protein, 15 aa, Homo sapiens
  CDR3 for alpha chain variable domain of TCR clone 145647 (TRAV12-3, TRAJ6)
CAMSATTGGSYIPTF

SEQ ID NO: 291294 - protein, 16 aa, Homo sapiens
  CDR3 for beta chain variable domain of TCR clone 145647 (TRBV20-1, TRBJ1-2)
CGASMGQGFANYGYTF

SEQ ID NO: 291295 - protein, 16 aa, Homo sapiens
  CDR3 for alpha chain variable domain of TCR clone 145648 (TRAV23/DV6, TRAJ21)
CAASSGGGTTSTNFTL

SEQ ID NO: 291296 - protein, 16 aa, Homo sapiens
  CDR3 for beta chain variable domain of TCR clone 145648 (TRBV7-9, TRBJ2-1)
CASSDVAGGSYNEQFF

SEQ ID NO: 291297 - protein, 13 aa, Homo sapiens
  CDR3 for alpha chain variable domain of TCR clone 145649 (TRAV2, TRAJ15)
CAVAPQAGTALIF

SEQ ID NO: 291298 - protein, 12 aa, Homo sapiens
  CDR3 for beta chain variable domain of TCR clone 145649 (TRBV11-2, TRBJ2-2)
CASSLPTGELFF

SEQ ID NO: 291299 - protein, 17 aa, Homo sapiens
  CDR3 for alpha chain variable domain of TCR clone 145650 (TRAV4, TRAJ18)
CLVGERSVGSTLGRLYF

SEQ ID NO: 291300 - protein, 14 aa, Homo sapiens
  CDR3 for beta chain variable domain of TCR clone 145650 (TRBV6-5, TRBJ1-2)
CASSYDGTGGGYTL

SEQ ID NO: 291301 - protein, 12 aa, Homo sapiens
  CDR3 for alpha chain variable domain of TCR clone 145651 (TRAV23/DV6, TRAJ30)
CAESKGDDKIIF

SEQ ID NO: 291302 - protein, 15 aa, Homo sapiens
  CDR3 for beta chain variable domain of TCR clone 145651 (TRBV20-1, TRBJ2-7)
CSARDRVSGMDEQYF

SEQ ID NO: 291303 - protein, 16 aa, Homo sapiens
  CDR3 for alpha chain variable domain of TCR clone 145652 (TRAV12-3, TRAJ53)
CAMSQGSGGSNYKLTF

SEQ ID NO: 291304 - protein, 17 aa, Homo sapiens
  CDR3 for beta chain variable domain of TCR clone 145652 (TRBV28, TRBJ2-5)
RASSTPEGDALQETQYF

SEQ ID NO: 291305 - protein, 23 aa, Homo sapiens
  CDR3 for alpha chain variable domain of TCR clone 145653 (TRAV13-2, TRAJ39)
SLQIAATQPRDSVRNNAGSMLTF

SEQ ID NO: 291306 - protein, 13 aa, Homo sapiens
  CDR3 for beta chain variable domain of TCR clone 145653 (TRBV20-1, TRBJ2-7)
CSAPGLADYEQYF

SEQ ID NO: 291307 - protein, 16 aa, Homo sapiens
  CDR3 for alpha chain variable domain of TCR clone 145654 (TRAV3, TRAJ37)
CAVRGKGSGNTGKLIF

SEQ ID NO: 291308 - protein, 21 aa, Homo sapiens
  CDR3 for beta chain variable domain of TCR clone 145654 (TRBV15, TRBJ2-1)
AWGTQPCTCGPPAEVDTARFF

SEQ ID NO: 291309 - protein, 13 aa, Homo sapiens
  CDR3 for alpha chain variable domain of TCR clone 145655 (TRAV13-1, TRAJ21)
CAASIYNFNKFYF

SEQ ID NO: 291310 - protein, 14 aa, Homo sapiens
  CDR3 for beta chain variable domain of TCR clone 145655 (TRBV4-2, TRBJ2-1)
CASGLDRAYNEQFF

SEQ ID NO: 291311 - protein, 14 aa, Homo sapiens
  CDR3 for alpha chain variable domain of TCR clone 145656 (TRAV12-3, TRAJ10)
SHLPLTGGGHKLTF

SEQ ID NO: 291312 - protein, 13 aa, Homo sapiens
  CDR3 for beta chain variable domain of TCR clone 145656 (TRBV11-2, TRBJ2-5)
CASSRGPSETQYF

SEQ ID NO: 291313 - protein, 13 aa, Homo sapiens
  CDR3 for alpha chain variable domain of TCR clone 145657 (TRAV3, TRAJ21)
CAVREPDFNKFSF

SEQ ID NO: 291314 - protein, 12 aa, Homo sapiens
  CDR3 for beta chain variable domain of TCR clone 145657 (TRBV5-1, TRBJ2-4)
LAGEWTKNIQYF

SEQ ID NO: 291315 - protein, 21 aa, Homo sapiens
  CDR3 for alpha chain variable domain of TCR clone 145658 (TRAV3, TRAJ17)
CAVRARRGGRSCRQQANFWRM

SEQ ID NO: 291316 - protein, 14 aa, Homo sapiens
  CDR3 for beta chain variable domain of TCR clone 145658 (TRBV4-1, TRBJ2-2)
CASSQAVNTGELFF

SEQ ID NO: 291317 - protein, 15 aa, Homo sapiens
  CDR3 for alpha chain variable domain of TCR clone 145659 (TRAV13-1, TRAJ6)
CAASRGAGGSYIPTF

SEQ ID NO: 291318 - protein, 12 aa, Homo sapiens
  CDR3 for beta chain variable domain of TCR clone 145659 (TRBV19, TRBJ1-4)
CASSNSMEKLFF

SEQ ID NO: 291319 - protein, 12 aa, Homo sapiens
  CDR3 for alpha chain variable domain of TCR clone 145660 (TRAV13-1, TRAJ22)
CVPRGFCKANDL

SEQ ID NO: 291320 - protein, 14 aa, Homo sapiens
  CDR3 for beta chain variable domain of TCR clone 145660 (TRBV19, TRBJ2-1)
CASPTFVLSGEQFF

SEQ ID NO: 291321 - protein, 13 aa, Homo sapiens
  CDR3 for alpha chain variable domain of TCR clone 145661 (TRAV13-1, TRAJ13)
CAASKGGYEKVTF

SEQ ID NO: 291322 - protein, 16 aa, Homo sapiens
  CDR3 for beta chain variable domain of TCR clone 145661 (TRBV18, TRBJ1-2)
CASSPPERVTIYGYTF

SEQ ID NO: 291323 - protein, 19 aa, Homo sapiens
  CDR3 for alpha chain variable domain of TCR clone 145662 (TRAV27, TRAJ36)
RPSLVIQASTPAGANNLFF

SEQ ID NO: 291324 - protein, 13 aa, Homo sapiens
  CDR3 for beta chain variable domain of TCR clone 145662 (TRBV7-9, TRBJ2-3)
CASSPGSTDTQYF

SEQ ID NO: 291325 - protein, 16 aa, Homo sapiens
  CDR3 for alpha chain variable domain of TCR clone 145663 (TRAV14/DV4, TRAJ48)
CAMREGGNFGNEKLTF

SEQ ID NO: 291326 - protein, 13 aa, Homo sapiens
  CDR3 for beta chain variable domain of TCR clone 145663 (TRBV19, TRBJ1-2)
CASSVPGQDGYTF

SEQ ID NO: 291327 - protein, 14 aa, Homo sapiens
  CDR3 for alpha chain variable domain of TCR clone 145664 (TRAV8-3, TRAJ39)
CAVGANNAGNMLTF

SEQ ID NO: 291328 - protein, 13 aa, Homo sapiens
  CDR3 for beta chain variable domain of TCR clone 145664 (TRBV3-1, TRBJ2-5)
CASSPMLSETQYF

SEQ ID NO: 291329 - protein, 15 aa, Homo sapiens
  CDR3 for alpha chain variable domain of TCR clone 145665 (TRAV38-2/DV8, TRAJ48)
CAYRSRGFGNEKLTF

SEQ ID NO: 291330 - protein, 16 aa, Homo sapiens
  CDR3 for beta chain variable domain of TCR clone 145665 (TRBV28, TRBJ2-7)
CASSPWVATGDLSQYF

SEQ ID NO: 291331 - protein, 13 aa, Homo sapiens
  CDR3 for alpha chain variable domain of TCR clone 145666 (TRAV13-1, TRAJ40)
CAASTSGTYKSIF

SEQ ID NO: 291332 - protein, 16 aa, Homo sapiens
  CDR3 for beta chain variable domain of TCR clone 145666 (TRBV9, TRBJ2-1)
CASSAYFLGGPSEQFF

SEQ ID NO: 291333 - protein, 11 aa, Homo sapiens
  CDR3 for alpha chain variable domain of TCR clone 145667 (TRAV17, TRAJ9)
CGFTGGFTTIF

SEQ ID NO: 291334 - protein, 13 aa, Homo sapiens
  CDR3 for beta chain variable domain of TCR clone 145667 (TRBV7-9, TRBJ1-1)
CASSLVSASEAFF

SEQ ID NO: 291335 - protein, 14 aa, Homo sapiens
  CDR3 for alpha chain variable domain of TCR clone 145668 (TRAV1-2, TRAJ8)
CAVREDTGFQKLVF

SEQ ID NO: 291336 - protein, 13 aa, Homo sapiens
  CDR3 for beta chain variable domain of TCR clone 145668 (TRBV7-9, TRBJ1-2)
CSGSLKQNYGYAF

SEQ ID NO: 291337 - protein, 14 aa, Homo sapiens
  CDR3 for alpha chain variable domain of TCR clone 145669 (TRAV4, TRAJ17)
CLVGDPLLGNKLTF

SEQ ID NO: 291338 - protein, 20 aa, Homo sapiens
  CDR3 for beta chain variable domain of TCR clone 145669 (TRBV20-1, TRBJ2-1)
CSARPYSVAGGPSYYNEQFF

SEQ ID NO: 291339 - protein, 14 aa, Homo sapiens
  CDR3 for alpha chain variable domain of TCR clone 145670 (TRAV26-1, TRAJ39)
CIVRGSRAGNMLTF

SEQ ID NO: 291340 - protein, 12 aa, Homo sapiens
  CDR3 for beta chain variable domain of TCR clone 145670 (TRBV7-8, TRBJ2-7)
CASSLGDREQYF

SEQ ID NO: 291341 - protein, 18 aa, Homo sapiens
  CDR3 for alpha chain variable domain of TCR clone 145671 (TRAV21, TRAJ52)
CVVRPSPAGGTSYGKLTF

SEQ ID NO: 291342 - protein, 14 aa, Homo sapiens
  CDR3 for beta chain variable domain of TCR clone 145671 (TRBV20-1, TRBJ2-1)
CSAQIGGSANEQFF

SEQ ID NO: 291343 - protein, 15 aa, Homo sapiens
  CDR3 for alpha chain variable domain of TCR clone 145672 (TRAV12-1, TRAJ15)
CVVTRANQEGTALIF

SEQ ID NO: 291344 - protein, 14 aa, Homo sapiens
  CDR3 for beta chain variable domain of TCR clone 145672 (TRBV5-1, TRBJ1-1)
CASSLVSINTEAFF

SEQ ID NO: 291345 - protein, 15 aa, Homo sapiens
  CDR3 for alpha chain variable domain of TCR clone 145673 (TRAV1-2, TRAJ35)
CAVRDPGGFGYVLHC

SEQ ID NO: 291346 - protein, 14 aa, Homo sapiens
  CDR3 for beta chain variable domain of TCR clone 145673 (TRBV5-1, TRBJ2-1)
CASSLDDRFDEQFF

SEQ ID NO: 291347 - protein, 12 aa, Homo sapiens
  CDR3 for alpha chain variable domain of TCR clone 145674 (TRAV3, TRAJ43)
CAVSDPNNDMRF

SEQ ID NO: 291348 - protein, 15 aa, Homo sapiens
  CDR3 for beta chain variable domain of TCR clone 145674 (TRBV4-3, TRBJ2-7)
CASSQGDWGDYEQYF

SEQ ID NO: 291349 - protein, 16 aa, Homo sapiens
  CDR3 for alpha chain variable domain of TCR clone 145675 (TRAV30, TRAJ24)
CGTEIVDADSWGKFQF

SEQ ID NO: 291350 - protein, 13 aa, Homo sapiens
  CDR3 for beta chain variable domain of TCR clone 145675 (TRBV4-1, TRBJ2-5)
CASSLTRGETQYF

SEQ ID NO: 291351 - protein, 13 aa, Homo sapiens
  CDR3 for alpha chain variable domain of TCR clone 145676 (TRAV12-3, TRAJ33)
CAMSVNSNYQLIW

SEQ ID NO: 291352 - protein, 14 aa, Homo sapiens
  CDR3 for beta chain variable domain of TCR clone 145676 (TRBV20-1, TRBJ2-7)
CSARRSGSSYEQYF

SEQ ID NO: 291353 - protein, 11 aa, Homo sapiens
  CDR3 for alpha chain variable domain of TCR clone 145677 (TRAV35, TRAJ34)
CWARNTDKLIF

SEQ ID NO: 291354 - protein, 15 aa, Homo sapiens
  CDR3 for beta chain variable domain of TCR clone 145677 (TRBV7-9, TRBJ1-6)
CASSSPGRGNSTLHF

SEQ ID NO: 291355 - protein, 12 aa, Homo sapiens
  CDR3 for alpha chain variable domain of TCR clone 145678 (TRAV13-2, TRAJ8)
CAPWLGFQKLVF

SEQ ID NO: 291356 - protein, 14 aa, Homo sapiens
  CDR3 for beta chain variable domain of TCR clone 145678 (TRBV18, TRBJ1-5)
CASSRQQRHQPQHF

SEQ ID NO: 291357 - protein, 12 aa, Homo sapiens
  CDR3 for alpha chain variable domain of TCR clone 145679 (TRAV21, TRAJ11)
CAATSGYSTLTF

SEQ ID NO: 291358 - protein, 13 aa, Homo sapiens
  CDR3 for beta chain variable domain of TCR clone 145679 (TRBV18, TRBJ2-7)
CASSRSGSYEQYF

SEQ ID NO: 291359 - protein, 13 aa, Homo sapiens
  CDR3 for alpha chain variable domain of TCR clone 145680 (TRAV20, TRAJ20)
CAVQAGSGYKLSF

SEQ ID NO: 291360 - protein, 14 aa, Homo sapiens
  CDR3 for beta chain variable domain of TCR clone 145680 (TRBV19, TRBJ2-3)
CASSAPRGTDTQYF

SEQ ID NO: 291361 - protein, 12 aa, Homo sapiens
  CDR3 for alpha chain variable domain of TCR clone 145681 (TRAV17, TRAJ20)
CATALNDYTLSF

SEQ ID NO: 291362 - protein, 12 aa, Homo sapiens
  CDR3 for beta chain variable domain of TCR clone 145681 (TRBV10-3, TRBJ2-7)
CAHGTDSGEHYF

SEQ ID NO: 291363 - protein, 14 aa, Homo sapiens
  CDR3 for alpha chain variable domain of TCR clone 145682 (TRAV12-2, TRAJ13)
CAVKKTGGYQKATF

SEQ ID NO: 291364 - protein, 14 aa, Homo sapiens
  CDR3 for beta chain variable domain of TCR clone 145682 (TRBV7-2, TRBJ2-7)
CASSPKTSFYEQCF

SEQ ID NO: 291365 - protein, 16 aa, Homo sapiens
  CDR3 for alpha chain variable domain of TCR clone 145683 (TRAV3, TRAJ37)
CAVRPHGSGNTGKLIF

SEQ ID NO: 291366 - protein, 17 aa, Homo sapiens
  CDR3 for beta chain variable domain of TCR clone 145683 (TRBV20-1, TRBJ2-1)
CSASSAGLAGSYNEQSF

SEQ ID NO: 291367 - protein, 15 aa, Homo sapiens
  CDR3 for alpha chain variable domain of TCR clone 145684 (TRAV8-3, TRAJ23)
CAVGARYNQGGKLIF

SEQ ID NO: 291368 - protein, 17 aa, Homo sapiens
  CDR3 for beta chain variable domain of TCR clone 145684 (TRBV4-1, TRBJ1-4)
CASSQEGPRGVEEKLFF

SEQ ID NO: 291369 - protein, 12 aa, Homo sapiens
  CDR3 for alpha chain variable domain of TCR clone 145685 (TRAV21, TRAJ43)
CAVSWNDNDMRF

SEQ ID NO: 291370 - protein, 15 aa, Homo sapiens
  CDR3 for beta chain variable domain of TCR clone 145685 (TRBV20-1, TRBJ2-1)
CSASPPSGGYNEQFF

SEQ ID NO: 291371 - protein, 17 aa, Homo sapiens
  CDR3 for alpha chain variable domain of TCR clone 145686 (TRAV3, TRAJ42)
CAVRNRDYGGSQGNLIF

SEQ ID NO: 291372 - protein, 15 aa, Homo sapiens
  CDR3 for beta chain variable domain of TCR clone 145686 (TRBV6-6, TRBJ2-7)
CASSYSYGGSYEQYF

SEQ ID NO: 291373 - protein, 14 aa, Homo sapiens
  CDR3 for alpha chain variable domain of TCR clone 145687 (TRAV23/DV6, TRAJ13)
CAASVTGGYQKVTF

SEQ ID NO: 291374 - protein, 13 aa, Homo sapiens
  CDR3 for beta chain variable domain of TCR clone 145687 (TRBV29-1, TRBJ2-1)
CSVEGGRVNEQFF

SEQ ID NO: 291375 - protein, 15 aa, Homo sapiens
  CDR3 for alpha chain variable domain of TCR clone 145688 (TRAV3, TRAJ23)
CAVRDRGNQGGKLIF

SEQ ID NO: 291376 - protein, 14 aa, Homo sapiens
  CDR3 for beta chain variable domain of TCR clone 145688 (TRBV5-1, TRBJ2-7)
CASSFASGVNEQYF

SEQ ID NO: 291377 - protein, 14 aa, Homo sapiens
  CDR3 for alpha chain variable domain of TCR clone 145689 (TRAV1-2, TRAJ8)
CSVREDTGFQKLVF

SEQ ID NO: 291378 - protein, 15 aa, Homo sapiens
  CDR3 for beta chain variable domain of TCR clone 145689 (TRBV28, TRBJ2-1)
CASSIIAGGRSEQFF

SEQ ID NO: 291379 - protein, 15 aa, Homo sapiens
  CDR3 for alpha chain variable domain of TCR clone 145690 (TRAV26-1, TRAJ44)
CIVRIGTGTASKLTF

SEQ ID NO: 291380 - protein, 15 aa, Homo sapiens
  CDR3 for beta chain variable domain of TCR clone 145690 (TRBV7-6, TRBJ2-1)
CVSSSLAGEGNEQFF

SEQ ID NO: 291381 - protein, 13 aa, Homo sapiens
  CDR3 for alpha chain variable domain of TCR clone 145691 (TRAV12-2, TRAJ13)
CREEDWGYQKVTF

SEQ ID NO: 291382 - protein, 12 aa, Homo sapiens
  CDR3 for beta chain variable domain of TCR clone 145691 (TRBV29-1, TRBJ2-3)
CSVTGGADTQYF

SEQ ID NO: 291383 - protein, 14 aa, Homo sapiens
  CDR3 for alpha chain variable domain of TCR clone 145692 (TRAV3, TRAJ21)
CALGRGSTNFTLHL

SEQ ID NO: 291384 - protein, 14 aa, Homo sapiens
  CDR3 for beta chain variable domain of TCR clone 145692 (TRBV7-9, TRBJ2-4)
CASSLAMGGNIQYF

SEQ ID NO: 291385 - protein, 14 aa, Homo sapiens
  CDR3 for alpha chain variable domain of TCR clone 145693 (TRAV23/DV6, TRAJ37)
CAASTSSNTGNIIF

SEQ ID NO: 291386 - protein, 13 aa, Homo sapiens
  CDR3 for beta chain variable domain of TCR clone 145693 (TRBV7-7, TRBJ1-1)
CASSLGANTEAFF

SEQ ID NO: 291387 - protein, 13 aa, Homo sapiens
  CDR3 for alpha chain variable domain of TCR clone 145694 (TRAV23/DV6, TRAJ34)
CAAIENNTDKLIF

SEQ ID NO: 291388 - protein, 13 aa, Homo sapiens
  CDR3 for beta chain variable domain of TCR clone 145694 (TRBV29-1, TRBJ2-7)
RSVGPSGGYEQYF

SEQ ID NO: 291389 - protein, 13 aa, Homo sapiens
  CDR3 for alpha chain variable domain of TCR clone 145695 (TRAV21, TRAJ27)
CAARPGNAGKSTF

SEQ ID NO: 291390 - protein, 13 aa, Homo sapiens
  CDR3 for beta chain variable domain of TCR clone 145695 (TRBV20-1, TRBJ2-5)
CSAPTSGQETQYF

SEQ ID NO: 291391 - protein, 16 aa, Homo sapiens
  CDR3 for alpha chain variable domain of TCR clone 145696 (TRAV16, TRAJ4)
CALSRMFSGGYNKLIF

SEQ ID NO: 291392 - protein, 14 aa, Homo sapiens
  CDR3 for beta chain variable domain of TCR clone 145696 (TRBV9, TRBJ2-7)
CASSVGVGSYEQYF

SEQ ID NO: 291393 - protein, 12 aa, Homo sapiens
  CDR3 for alpha chain variable domain of TCR clone 145697 (TRAV12-1, TRAJ20)
CVVHPDDYKLSF

SEQ ID NO: 291394 - protein, 12 aa, Homo sapiens
  CDR3 for beta chain variable domain of TCR clone 145697 (TRBV11-2, TRBJ2-2)
CASSLGGGELFF

SEQ ID NO: 291395 - protein, 15 aa, Homo sapiens
  CDR3 for alpha chain variable domain of TCR clone 145698 (TRAV26-1, TRAJ56)
CIVRVATGATSKLTF

SEQ ID NO: 291396 - protein, 17 aa, Homo sapiens
  CDR3 for beta chain variable domain of TCR clone 145698 (TRBV13, TRBJ2-3)
CASSLSRVAGGRNTQYF

SEQ ID NO: 291397 - protein, 14 aa, Homo sapiens
  CDR3 for alpha chain variable domain of TCR clone 145699 (TRAV30, TRAJ33)
CGTVAPRSNYQLIW

SEQ ID NO: 291398 - protein, 15 aa, Homo sapiens
  CDR3 for beta chain variable domain of TCR clone 145699 (TRBV10-3, TRBJ2-1)
CATNGGPGQGDEQFF

SEQ ID NO: 291399 - protein, 14 aa, Homo sapiens
  CDR3 for alpha chain variable domain of TCR clone 145700 (TRAV1-2, TRAJ16)
CAVNRFSDGPKLLF

SEQ ID NO: 291400 - protein, 16 aa, Homo sapiens
  CDR3 for beta chain variable domain of TCR clone 145700 (TRBV11-2, TRBJ1-2)
CASSLDTGGADCGYTF

SEQ ID NO: 291401 - protein, 15 aa, Homo sapiens
  CDR3 for alpha chain variable domain of TCR clone 145701 (TRAV12-2, TRAJ53)
CAVNGGGGRNYKLTF

SEQ ID NO: 291402 - protein, 12 aa, Homo sapiens
  CDR3 for beta chain variable domain of TCR clone 145701 (TRBV7-6, TRBJ2-5)
CASSLSQETQYF

SEQ ID NO: 291403 - protein, 17 aa, Homo sapiens
  CDR3 for alpha chain variable domain of TCR clone 145702 (TRAV3, TRAJ38)
CAVRDCLNAGNNRKLIW

SEQ ID NO: 291404 - protein, 13 aa, Homo sapiens
  CDR3 for beta chain variable domain of TCR clone 145702 (TRBV7-2, TRBJ2-2)
CASSSAVTGELFF

SEQ ID NO: 291405 - protein, 11 aa, Homo sapiens
  CDR3 for alpha chain variable domain of TCR clone 145703 (TRAV3, TRAJ21)
CAVGNFNKFYF

SEQ ID NO: 291406 - protein, 16 aa, Homo sapiens
  CDR3 for beta chain variable domain of TCR clone 145703 (TRBV19, TRBJ2-1)
CASSKAGPSSYNEQCV

SEQ ID NO: 291407 - protein, 15 aa, Homo sapiens
  CDR3 for alpha chain variable domain of TCR clone 145704 (TRAV3, TRAJ20)
CAVRDIKLSGYKLSF

SEQ ID NO: 291408 - protein, 15 aa, Homo sapiens
  CDR3 for beta chain variable domain of TCR clone 145704 (TRBV5-1, TRBJ2-2)
CASSSQGGNTGELFF

SEQ ID NO: 291409 - protein, 18 aa, Homo sapiens
  CDR3 for alpha chain variable domain of TCR clone 145705 (TRAV21, TRAJ52)
CAVRPSPAGGTSFGKLKL

SEQ ID NO: 291410 - protein, 15 aa, Homo sapiens
  CDR3 for beta chain variable domain of TCR clone 145705 (TRBV7-9, TRBJ2-7)
CASSSSGLAVYEQYF

SEQ ID NO: 291411 - protein, 14 aa, Homo sapiens
  CDR3 for alpha chain variable domain of TCR clone 145706 (TRAV12-2, TRAJ40)
CAVKIPSGTYKYIF

SEQ ID NO: 291412 - protein, 17 aa, Homo sapiens
  CDR3 for beta chain variable domain of TCR clone 145706 (TRBV13, TRBJ2-3)
CARSLSRVAGGRNTQYF

SEQ ID NO: 291413 - protein, 11 aa, Homo sapiens
  CDR3 for alpha chain variable domain of TCR clone 145707 (TRAV1-2, TRAJ20)
CAVANDYKLSF

SEQ ID NO: 291414 - protein, 15 aa, Homo sapiens
  CDR3 for beta chain variable domain of TCR clone 145707 (TRBV28, TRBJ2-7)
CASSPGGRGFYEQYF

SEQ ID NO: 291415 - protein, 14 aa, Homo sapiens
  CDR3 for alpha chain variable domain of TCR clone 145708 (TRAV1-2, TRAJ16)
CAVNRFSDGHKLLF

SEQ ID NO: 291416 - protein, 17 aa, Homo sapiens
  CDR3 for beta chain variable domain of TCR clone 145708 (TRBV20-1, TRBJ2-2)
CSASGSGQGGLTGELFF

SEQ ID NO: 291417 - protein, 16 aa, Homo sapiens
  CDR3 for alpha chain variable domain of TCR clone 145709 (TRAV12-3, TRAJ53)
CAISPGSGGSNYKLTF

SEQ ID NO: 291418 - protein, 16 aa, Homo sapiens
  CDR3 for beta chain variable domain of TCR clone 145709 (TRBV9, TRBJ2-1)
CASSVGGGGNYNEQFF

SEQ ID NO: 291419 - protein, 13 aa, Homo sapiens
  CDR3 for alpha chain variable domain of TCR clone 145710 (TRAV12-1, TRAJ16)
CVVNTRNGQKLLF

SEQ ID NO: 291420 - protein, 15 aa, Homo sapiens
  CDR3 for beta chain variable domain of TCR clone 145710 (TRBV9, TRBJ1-6)
CASSVAGTGDSPLHF

SEQ ID NO: 291421 - protein, 15 aa, Homo sapiens
  CDR3 for alpha chain variable domain of TCR clone 145711 (TRAV9-2, TRAJ49)
CALSPPDHTGNQFYF

SEQ ID NO: 291422 - protein, 14 aa, Homo sapiens
  CDR3 for beta chain variable domain of TCR clone 145711 (TRBV15, TRBJ2-7)
CVTPAETGGYEQYF

SEQ ID NO: 291423 - protein, 13 aa, Homo sapiens
  CDR3 for alpha chain variable domain of TCR clone 145712 (TRAV12-2, TRAJ39)
CAVNNNAGNMLTF

SEQ ID NO: 291424 - protein, 13 aa, Homo sapiens
  CDR3 for beta chain variable domain of TCR clone 145712 (TRBV2, TRBJ1-5)
CAIAGPGNQPQHF

SEQ ID NO: 291425 - protein, 14 aa, Homo sapiens
  CDR3 for alpha chain variable domain of TCR clone 145713 (TRAV17, TRAJ57)
CATDPQGGSEKLVF

SEQ ID NO: 291426 - protein, 15 aa, Homo sapiens
  CDR3 for beta chain variable domain of TCR clone 145713 (TRBV20-1, TRBJ2-1)
CSASSAGSSYNEQFF

SEQ ID NO: 291427 - protein, 15 aa, Homo sapiens
  CDR3 for alpha chain variable domain of TCR clone 145714 (TRAV13-1, TRAJ17)
CAASIERAAGNKLTF

SEQ ID NO: 291428 - protein, 16 aa, Homo sapiens
  CDR3 for beta chain variable domain of TCR clone 145714 (TRBV10-3, TRBJ2-1)
CAISGVGDGGGGEQFF

SEQ ID NO: 291429 - protein, 15 aa, Homo sapiens
  CDR3 for alpha chain variable domain of TCR clone 145715 (TRAV8-3, TRAJ45)
RASSYSGGGADGRTF

SEQ ID NO: 291430 - protein, 13 aa, Homo sapiens
  CDR3 for beta chain variable domain of TCR clone 145715 (TRBV20-1, TRBJ1-1)
CSAPLGGGTEAFF

SEQ ID NO: 291431 - protein, 15 aa, Homo sapiens
  CDR3 for alpha chain variable domain of TCR clone 145716 (TRAV2, TRAJ9)
CAVEDRGTGGFKTIF

SEQ ID NO: 291432 - protein, 15 aa, Homo sapiens
  CDR3 for beta chain variable domain of TCR clone 145716 (TRBV7-3, TRBJ2-1)
CASSPTGGGEVEQFF

SEQ ID NO: 291433 - protein, 11 aa, Homo sapiens
  CDR3 for alpha chain variable domain of TCR clone 145717 (TRAV8-2, TRAJ26)
CVVTLLLGSEF

SEQ ID NO: 291434 - protein, 15 aa, Homo sapiens
  CDR3 for beta chain variable domain of TCR clone 145717 (TRBV11-2, TRBJ2-2)
CASSSDRVNAGELFC

SEQ ID NO: 291435 - protein, 15 aa, Homo sapiens
  CDR3 for alpha chain variable domain of TCR clone 145718 (TRAV3, TRAJ22)
CAVRDRGGSARQLTF

SEQ ID NO: 291436 - protein, 14 aa, Homo sapiens
  CDR3 for beta chain variable domain of TCR clone 145718 (TRBV5-4, TRBJ2-3)
PASSRGRGADTQYF

SEQ ID NO: 291437 - protein, 13 aa, Homo sapiens
  CDR3 for alpha chain variable domain of TCR clone 145719 (TRAV27, TRAJ6)
CAGGTRGSYIPTF

SEQ ID NO: 291438 - protein, 16 aa, Homo sapiens
  CDR3 for beta chain variable domain of TCR clone 145719 (TRBV5-7, TRBJ2-7)
CASSLGPGRGHEQYFG

SEQ ID NO: 291439 - protein, 13 aa, Homo sapiens
  CDR3 for alpha chain variable domain of TCR clone 145720 (TRAV1-1, TRAJ33)
CAVRRDSNYQLIW

SEQ ID NO: 291440 - protein, 16 aa, Homo sapiens
  CDR3 for beta chain variable domain of TCR clone 145720 (TRBV6-1, TRBJ2-2)
CASSAFRGGDTGELFL

SEQ ID NO: 291441 - protein, 14 aa, Homo sapiens
  CDR3 for alpha chain variable domain of TCR clone 145721 (TRAV35, TRAJ42)
CAGRCGGSQGNLIF

SEQ ID NO: 291442 - protein, 15 aa, Homo sapiens
  CDR3 for beta chain variable domain of TCR clone 145721 (TRBV7-9, TRBJ2-1)
CASSLGWGRANEQFF

SEQ ID NO: 291443 - protein, 14 aa, Homo sapiens
  CDR3 for alpha chain variable domain of TCR clone 145722 (TRAV8-4, TRAJ13)
CAVTLSGGYQKVTF

SEQ ID NO: 291444 - protein, 18 aa, Homo sapiens
  CDR3 for beta chain variable domain of TCR clone 145722 (TRBV19, TRBJ2-6)
CASIGPTSGGSGANVLTF

SEQ ID NO: 291445 - protein, 15 aa, Homo sapiens
  CDR3 for alpha chain variable domain of TCR clone 145723 (TRAV36/DV7, TRAJ44)
CAVCRNTGTASKLTF

SEQ ID NO: 291446 - protein, 14 aa, Homo sapiens
  CDR3 for beta chain variable domain of TCR clone 145723 (TRBV7-2, TRBJ2-7)
CASSPKTSFYEQYF

SEQ ID NO: 291447 - protein, 14 aa, Homo sapiens
  CDR3 for alpha chain variable domain of TCR clone 145724 (TRAV12-1, TRAJ4)
CVVPLNSGYNKLIF

SEQ ID NO: 291448 - protein, 13 aa, Homo sapiens
  CDR3 for beta chain variable domain of TCR clone 145724 (TRBV27, TRBJ2-7)
CASGRGGAYEQYF

SEQ ID NO: 291449 - protein, 18 aa, Homo sapiens
  CDR3 for alpha chain variable domain of TCR clone 145725 (TRAV21, TRAJ52)
CAVRPSPAGGTSYGKLTF

SEQ ID NO: 291450 - protein, 13 aa, Homo sapiens
  CDR3 for beta chain variable domain of TCR clone 145725 (TRBV7-2, TRBJ1-5)
CASSLGIREPQHS

SEQ ID NO: 291451 - protein, 12 aa, Homo sapiens
  CDR3 for alpha chain variable domain of TCR clone 145726 (TRAV2, TRAJ31)
CAVEDNNARLMF

SEQ ID NO: 291452 - protein, 19 aa, Homo sapiens
  CDR3 for beta chain variable domain of TCR clone 145726 (TRBV7-8, TRBJ2-2)
CQQPFISRADYPYHRELFF

SEQ ID NO: 291453 - protein, 13 aa, Homo sapiens
  CDR3 for alpha chain variable domain of TCR clone 145727 (TRAV17, TRAJ5)
CAPMDTGRRALTF

SEQ ID NO: 291454 - protein, 13 aa, Homo sapiens
  CDR3 for beta chain variable domain of TCR clone 145727 (TRBV7-9, TRBJ2-3)
CASSPGSTDTQYF

SEQ ID NO: 291455 - protein, 13 aa, Homo sapiens
  CDR3 for alpha chain variable domain of TCR clone 145728 (TRAV26-1, )
CIVSHRVEGFWNQ

SEQ ID NO: 291456 - protein, 14 aa, Homo sapiens
  CDR3 for beta chain variable domain of TCR clone 145728 (TRBV20-1, TRBJ2-7)
YSAWTALSSYEQYF

SEQ ID NO: 291457 - protein, 14 aa, Homo sapiens
  CDR3 for alpha chain variable domain of TCR clone 145729 (TRAV1-2, TRAJ8)
CAVREDTGFEKLVF

SEQ ID NO: 291458 - protein, 12 aa, Homo sapiens
  CDR3 for beta chain variable domain of TCR clone 145729 (TRBV2, TRBJ2-1)
CAYGPPGNEQFF

SEQ ID NO: 291459 - protein, 14 aa, Homo sapiens
  CDR3 for alpha chain variable domain of TCR clone 145730 (TRAV16, TRAJ33)
CALSAMDSNYQIIW

SEQ ID NO: 291460 - protein, 12 aa, Homo sapiens
  CDR3 for beta chain variable domain of TCR clone 145730 (TRBV5-1, TRBJ1-2)
CASSQDTYGYTF

SEQ ID NO: 291461 - protein, 16 aa, Homo sapiens
  CDR3 for alpha chain variable domain of TCR clone 145731 (TRAV1-2, TRAJ40)
CAVRGSRTSGTYKYIF

SEQ ID NO: 291462 - protein, 14 aa, Homo sapiens
  CDR3 for beta chain variable domain of TCR clone 145731 (TRBV12-5, TRBJ2-5)
CASGSRTHQETQYF

SEQ ID NO: 291463 - protein, 16 aa, Homo sapiens
  CDR3 for alpha chain variable domain of TCR clone 145732 (TRAV13-1, TRAJ18)
CAASRMRGSTLGRLYF

SEQ ID NO: 291464 - protein, 16 aa, Homo sapiens
  CDR3 for beta chain variable domain of TCR clone 145732 (TRBV27, TRBJ1-1)
CASSSRGLTGYTEAFF

SEQ ID NO: 291465 - protein, 15 aa, Homo sapiens
  CDR3 for alpha chain variable domain of TCR clone 145733 (TRAV1-2, TRAJ26)
CAVRDLITMVRILSL

SEQ ID NO: 291466 - protein, 13 aa, Homo sapiens
  CDR3 for beta chain variable domain of TCR clone 145733 (TRBV20-1, TRBJ2-2)
CSASAAGTGELFF

SEQ ID NO: 291467 - protein, 14 aa, Homo sapiens
  CDR3 for alpha chain variable domain of TCR clone 145734 (TRAV12-2, TRAJ17)
CAVLFKAAGNKLTF

SEQ ID NO: 291468 - protein, 12 aa, Homo sapiens
  CDR3 for beta chain variable domain of TCR clone 145734 (TRBV9, TRBJ2-2)
CASSARTGELFF

SEQ ID NO: 291469 - protein, 17 aa, Homo sapiens
  CDR3 for alpha chain variable domain of TCR clone 145735 (TRAV3, TRAJ6)
CAVRDGPRAGRSSIPTF

SEQ ID NO: 291470 - protein, 14 aa, Homo sapiens
  CDR3 for beta chain variable domain of TCR clone 145735 (TRBV7-2, TRBJ2-7)
CASSPKTSFYEQYF

SEQ ID NO: 291471 - protein, 16 aa, Homo sapiens
  CDR3 for alpha chain variable domain of TCR clone 145736 (TRAV3, TRAJ18)
CAVRDGRGSTLGRPYL

SEQ ID NO: 291472 - protein, 15 aa, Homo sapiens
  CDR3 for beta chain variable domain of TCR clone 145736 (TRBV7-9, TRBJ1-6)
CASSSPGRGNSPLHF

SEQ ID NO: 291473 - protein, 14 aa, Homo sapiens
  CDR3 for alpha chain variable domain of TCR clone 145737 (TRAV29/DV5, TRAJ32)
CAAAYGGATNQLIF

SEQ ID NO: 291474 - protein, 15 aa, Homo sapiens
  CDR3 for beta chain variable domain of TCR clone 145737 (TRBV27, TRBJ2-7)
CASSTAGTGSYEQYF

SEQ ID NO: 291475 - protein, 12 aa, Homo sapiens
  CDR3 for alpha chain variable domain of TCR clone 145738 (TRAV29/DV5, TRAJ43)
CAAPYNNNHMRF

SEQ ID NO: 291476 - protein, 17 aa, Homo sapiens
  CDR3 for beta chain variable domain of TCR clone 145738 (TRBV19, TRBJ2-6)
CASSTGQVFSGANVLTF

SEQ ID NO: 291477 - protein, 15 aa, Homo sapiens
  CDR3 for alpha chain variable domain of TCR clone 145739 (TRAV8-4, TRAJ3)
CAVTGENLVQQCFQD

SEQ ID NO: 291478 - protein, 16 aa, Homo sapiens
  CDR3 for beta chain variable domain of TCR clone 145739 (TRBV4-2, TRBJ1-1)
CASSQAGFGMNTESFF

SEQ ID NO: 291479 - protein, 12 aa, Homo sapiens
  CDR3 for alpha chain variable domain of TCR clone 145740 (TRAV12-3, TRAJ17)
CAMTLTGNKLTF

SEQ ID NO: 291480 - protein, 15 aa, Homo sapiens
  CDR3 for beta chain variable domain of TCR clone 145740 (TRBV20-1, TRBJ2-7)
CSARDLVSGMDEQYV

SEQ ID NO: 291481 - protein, 15 aa, Homo sapiens
  CDR3 for alpha chain variable domain of TCR clone 145741 (TRAV3, TRAJ5)
CAVRDLDTVRRALTF

SEQ ID NO: 291482 - protein, 16 aa, Homo sapiens
  CDR3 for beta chain variable domain of TCR clone 145741 (TRBV20-1, TRBJ1-2)
CSASMGQGVANYGYTF

SEQ ID NO: 291483 - protein, 12 aa, Homo sapiens
  CDR3 for alpha chain variable domain of TCR clone 145742 (TRAV20, TRAJ39)
CAVGNAGNMLPF

SEQ ID NO: 291484 - protein, 16 aa, Homo sapiens
  CDR3 for beta chain variable domain of TCR clone 145742 (TRBV15, TRBJ1-2)
CATSRGPRTGGGGYTF

SEQ ID NO: 291485 - protein, 13 aa, Homo sapiens
  CDR3 for alpha chain variable domain of TCR clone 145743 (TRAV27, TRAJ49)
CAPRPYTVNHFYF

SEQ ID NO: 291486 - protein, 16 aa, Homo sapiens
  CDR3 for beta chain variable domain of TCR clone 145743 (TRBV4-1, TRBJ1-2)
CASSQDAGQVLYGYTF

SEQ ID NO: 291487 - protein, 14 aa, Homo sapiens
  CDR3 for alpha chain variable domain of TCR clone 145744 (TRAV9-2, TRAJ39)
CALYFYNAGNMLTF

SEQ ID NO: 291488 - protein, 14 aa, Homo sapiens
  CDR3 for beta chain variable domain of TCR clone 145744 (TRBV7-9, TRBJ2-1)
CASSPRDSLYEQFF

SEQ ID NO: 291489 - protein, 14 aa, Homo sapiens
  CDR3 for alpha chain variable domain of TCR clone 145745 (TRAV1-2, TRAJ8)
CAVREDTGFQKLVF

SEQ ID NO: 291490 - protein, 15 aa, Homo sapiens
  CDR3 for beta chain variable domain of TCR clone 145745 (TRBV7-3, TRBJ2-2)
CASSETGQGTGDLFF

SEQ ID NO: 291491 - protein, 12 aa, Homo sapiens
  CDR3 for alpha chain variable domain of TCR clone 145746 (TRAV12-2, TRAJ9)
CAVYNGGFKTIF

SEQ ID NO: 291492 - protein, 16 aa, Homo sapiens
  CDR3 for beta chain variable domain of TCR clone 145746 (TRBV5-1, TRBJ2-7)
CASSYASTSSGGEQYF

SEQ ID NO: 291493 - protein, 16 aa, Homo sapiens
  CDR3 for alpha chain variable domain of TCR clone 145747 (TRAV3, TRAJ10)
CAVRDMRAGGGNKLTF

SEQ ID NO: 291494 - protein, 12 aa, Homo sapiens
  CDR3 for beta chain variable domain of TCR clone 145747 (TRBV19, TRBJ2-1)
CASSQISNEQFF

SEQ ID NO: 291495 - protein, 15 aa, Homo sapiens
  CDR3 for alpha chain variable domain of TCR clone 145748 (TRAV1-2, TRAJ10)
CAVSGFTGGGNKLTF

SEQ ID NO: 291496 - protein, 15 aa, Homo sapiens
  CDR3 for beta chain variable domain of TCR clone 145748 (TRBV10-2, TRBJ2-6)
CASSEQGTGANVLTF

SEQ ID NO: 291497 - protein, 13 aa, Homo sapiens
  CDR3 for alpha chain variable domain of TCR clone 145749 (TRAV1-2, TRAJ39)
CAVKDNAGNMLTF

SEQ ID NO: 291498 - protein, 14 aa, Homo sapiens
  CDR3 for beta chain variable domain of TCR clone 145749 (TRBV9, TRBJ2-1)
CASSPRTSSMSSSS

SEQ ID NO: 291499 - protein, 16 aa, Homo sapiens
  CDR3 for alpha chain variable domain of TCR clone 145750 (TRAV35, TRAJ28)
CAGYIYSGAGSYQLTF

SEQ ID NO: 291500 - protein, 16 aa, Homo sapiens
  CDR3 for beta chain variable domain of TCR clone 145750 (TRBV5-1, TRBJ2-1)
CASSYGLAGPQNEQFF

SEQ ID NO: 291501 - protein, 14 aa, Homo sapiens
  CDR3 for alpha chain variable domain of TCR clone 145751 (TRAV17, TRAJ33)
CATDARRSHYQLIW

SEQ ID NO: 291502 - protein, 14 aa, Homo sapiens
  CDR3 for beta chain variable domain of TCR clone 145751 (TRBV25-1, TRBJ1-4)
CASSGGGQPEKLFF

SEQ ID NO: 291503 - protein, 14 aa, Homo sapiens
  CDR3 for alpha chain variable domain of TCR clone 145752 (TRAV12-2, TRAJ9)
CAVNMEGGGFKTIF

SEQ ID NO: 291504 - protein, 14 aa, Homo sapiens
  CDR3 for beta chain variable domain of TCR clone 145752 (TRBV5-1, TRBJ1-1)
CASSSAVGSGEAFF

SEQ ID NO: 291505 - protein, 11 aa, Homo sapiens
  CDR3 for alpha chain variable domain of TCR clone 145753 (TRAV38-2/DV8, TRAJ31)
CAYFSNARLTF

SEQ ID NO: 291506 - protein, 13 aa, Homo sapiens
  CDR3 for beta chain variable domain of TCR clone 145753 (TRBV20-1, TRBJ2-7)
CSARDGKSYEQYF

SEQ ID NO: 291507 - protein, 12 aa, Homo sapiens
  CDR3 for alpha chain variable domain of TCR clone 145754 (TRAV13-1, TRAJ21)
CAAKEGFNKFYF

SEQ ID NO: 291508 - protein, 12 aa, Homo sapiens
  CDR3 for beta chain variable domain of TCR clone 145754 (TRBV9, TRBJ2-2)
CASSVVNGELFF

SEQ ID NO: 291509 - protein, 15 aa, Homo sapiens
  CDR3 for alpha chain variable domain of TCR clone 145755 (TRAV13-1, TRAJ3)
CAASKLASGASRLIF

SEQ ID NO: 291510 - protein, 16 aa, Homo sapiens
  CDR3 for beta chain variable domain of TCR clone 145755 (TRBV25-1, TRBJ1-5)
CASGAPTVNSNQPQHF

SEQ ID NO: 291511 - protein, 12 aa, Homo sapiens
  CDR3 for alpha chain variable domain of TCR clone 145756 (TRAV12-3, TRAJ40)
CAMSSGTYKYIF

SEQ ID NO: 291512 - protein, 18 aa, Homo sapiens
  CDR3 for beta chain variable domain of TCR clone 145756 (TRBV5-1, TRBJ1-6)
CASSVGGGYGERNSPLHF

SEQ ID NO: 291513 - protein, 14 aa, Homo sapiens
  CDR3 for alpha chain variable domain of TCR clone 145757 (TRAV13-1, TRAJ39)
LSSKYSNAGNMLTF

SEQ ID NO: 291514 - protein, 15 aa, Homo sapiens
  CDR3 for beta chain variable domain of TCR clone 145757 (TRBV6-3, TRBJ2-7)
CASSSPGTVFYEQYF

SEQ ID NO: 291515 - protein, 16 aa, Homo sapiens
  CDR3 for alpha chain variable domain of TCR clone 145758 (TRAV12-2, TRAJ32)
CAVNLGRGGATNKLIF

SEQ ID NO: 291516 - protein, 15 aa, Homo sapiens
  CDR3 for beta chain variable domain of TCR clone 145758 (TRBV20-1, TRBJ2-7)
CSARGPLAGGREQHF

SEQ ID NO: 291517 - protein, 15 aa, Homo sapiens
  CDR3 for alpha chain variable domain of TCR clone 145759 (TRAV20, TRAJ50)
SAVRQMKTSYDKVIF

SEQ ID NO: 291518 - protein, 17 aa, Homo sapiens
  CDR3 for beta chain variable domain of TCR clone 145759 (TRBV28, TRBJ2-7)
CASSPLHRDSGVYEQYF

SEQ ID NO: 291519 - protein, 11 aa, Homo sapiens
  CDR3 for alpha chain variable domain of TCR clone 145760 (TRAV20, TRAJ23)
CACNQGGKLIF

SEQ ID NO: 291520 - protein, 20 aa, Homo sapiens
  CDR3 for beta chain variable domain of TCR clone 145760 (TRBV7-8, TRBJ2-5)
CASSFGATRPRDPVLRARRA

SEQ ID NO: 291521 - protein, 19 aa, Homo sapiens
  CDR3 for alpha chain variable domain of TCR clone 145761 (TRAV26-1, TRAJ28)
CIVRVAHAYSGAGSYQLPF

SEQ ID NO: 291522 - protein, 17 aa, Homo sapiens
  CDR3 for beta chain variable domain of TCR clone 145761 (TRBV9, TRBJ2-2)
CASSVGGQGTDTGELFF

SEQ ID NO: 291523 - protein, 12 aa, Homo sapiens
  CDR3 for alpha chain variable domain of TCR clone 145762 (TRAV30, TRAJ43)
CGTEERGNDMRF

SEQ ID NO: 291524 - protein, 11 aa, Homo sapiens
  CDR3 for beta chain variable domain of TCR clone 145762 (TRBV29-1, TRBJ2-5)
CSEDRAGTQYF

SEQ ID NO: 291525 - protein, 13 aa, Homo sapiens
  CDR3 for alpha chain variable domain of TCR clone 145763 (TRAV23/DV6, TRAJ34)
CAAIENNTDKLIF

SEQ ID NO: 291526 - protein, 13 aa, Homo sapiens
  CDR3 for beta chain variable domain of TCR clone 145763 (TRBV29-1, TRBJ2-7)
CSVGHSGGYEQYF

SEQ ID NO: 291527 - protein, 13 aa, Homo sapiens
  CDR3 for alpha chain variable domain of TCR clone 145764 (TRAV13-2, TRAJ48)
CGEMDFGNEKLTF

SEQ ID NO: 291528 - protein, 15 aa, Homo sapiens
  CDR3 for beta chain variable domain of TCR clone 145764 (TRBV7-9, TRBJ1-6)
CASSSPGRGNSPLHF

SEQ ID NO: 291529 - protein, 16 aa, Homo sapiens
  CDR3 for alpha chain variable domain of TCR clone 145765 (TRAV35, TRAJ28)
CAGQKYSGAGSYQLTF

SEQ ID NO: 291530 - protein, 13 aa, Homo sapiens
  CDR3 for beta chain variable domain of TCR clone 145765 (TRBV19, TRBJ1-2)
CASSQGQVYGDTF

SEQ ID NO: 291531 - protein, 13 aa, Homo sapiens
  CDR3 for alpha chain variable domain of TCR clone 145766 (TRAV9-2, TRAJ9)
CALSDTGCFKTIF

SEQ ID NO: 291532 - protein, 14 aa, Homo sapiens
  CDR3 for beta chain variable domain of TCR clone 145766 (TRBV7-9, TRBJ2-1)
CTSSPRDSLYEQFF

SEQ ID NO: 291533 - protein, 18 aa, Homo sapiens
  CDR3 for alpha chain variable domain of TCR clone 145767 (TRAV9-2, TRAJ52)
CALSRHNAGGTSYGKLTF

SEQ ID NO: 291534 - protein, 16 aa, Homo sapiens
  CDR3 for beta chain variable domain of TCR clone 145767 (TRBV19, TRBJ2-1)
CASSKARPSSYNEQFF

SEQ ID NO: 291535 - protein, 14 aa, Homo sapiens
  CDR3 for alpha chain variable domain of TCR clone 145768 (TRAV8-2, TRAJ4)
CVVSPAGGYNKLIF

SEQ ID NO: 291536 - protein, 16 aa, Homo sapiens
  CDR3 for beta chain variable domain of TCR clone 145768 (TRBV7-3, TRBJ2-1)
CASSLEGYRSYNEQFF

SEQ ID NO: 291537 - protein, 15 aa, Homo sapiens
  CDR3 for alpha chain variable domain of TCR clone 145769 (TRAV21, TRAJ18)
CAVRDRGSTLGRLYF

SEQ ID NO: 291538 - protein, 13 aa, Homo sapiens
  CDR3 for beta chain variable domain of TCR clone 145769 (TRBV10-3, TRBJ2-7)
CASKLAVNYEQYF

SEQ ID NO: 291539 - protein, 12 aa, Homo sapiens
  CDR3 for alpha chain variable domain of TCR clone 145770 (TRAV26-2, TRAJ21)
CILKGNFKKFYF

SEQ ID NO: 291540 - protein, 14 aa, Homo sapiens
  CDR3 for beta chain variable domain of TCR clone 145770 (TRBV12-4, TRBJ1-1)
CASSLGTGGTEAFF

SEQ ID NO: 291541 - protein, 14 aa, Homo sapiens
  CDR3 for alpha chain variable domain of TCR clone 145771 (TRAV12-1, TRAJ43)
CVVNGRSNNNDMRF

SEQ ID NO: 291542 - protein, 10 aa, Homo sapiens
  CDR3 for beta chain variable domain of TCR clone 145771 (TRBV28, TRBJ2-5)
CKQSSWTQYF

SEQ ID NO: 291543 - protein, 15 aa, Homo sapiens
  CDR3 for alpha chain variable domain of TCR clone 145772 (TRAV12-2, TRAJ4)
CAVGRFAGGYNKLIF

SEQ ID NO: 291544 - protein, 14 aa, Homo sapiens
  CDR3 for beta chain variable domain of TCR clone 145772 (TRBV4-2, TRBJ2-1)
CASSQEIRGNEQFF

SEQ ID NO: 291545 - protein, 13 aa, Homo sapiens
  CDR3 for alpha chain variable domain of TCR clone 145773 (TRAV1-2, TRAJ9)
CAALNTGGFKTIF

SEQ ID NO: 291546 - protein, 13 aa, Homo sapiens
  CDR3 for beta chain variable domain of TCR clone 145773 (TRBV2, TRBJ1-5)
CATAGPGNQPQHF

SEQ ID NO: 291547 - protein, 12 aa, Homo sapiens
  CDR3 for alpha chain variable domain of TCR clone 145774 (TRAV13-1, TRAJ48)
CAANFENEKLTF

SEQ ID NO: 291548 - protein, 13 aa, Homo sapiens
  CDR3 for beta chain variable domain of TCR clone 145774 (TRBV7-3, TRBJ1-1)
CASSQDWGAEAFF

SEQ ID NO: 291549 - protein, 14 aa, Homo sapiens
  CDR3 for alpha chain variable domain of TCR clone 145775 (TRAV6, TRAJ6)
CALPTSGGSYIPTF

SEQ ID NO: 291550 - protein, 16 aa, Homo sapiens
  CDR3 for beta chain variable domain of TCR clone 145775 (TRBV7-2, TRBJ2-7)
CASSLDLSGGAYEQYF

SEQ ID NO: 291551 - protein, 14 aa, Homo sapiens
  CDR3 for alpha chain variable domain of TCR clone 145776 (TRAV1-2, TRAJ8)
CAVREDTGFQKLVF

SEQ ID NO: 291552 - protein, 16 aa, Homo sapiens
  CDR3 for beta chain variable domain of TCR clone 145776 (TRBV6-1, TRBJ2-5)
CASSETLDRGAETQYL

SEQ ID NO: 291553 - protein, 14 aa, Homo sapiens
  CDR3 for alpha chain variable domain of TCR clone 145777 (TRAV1-2, TRAJ8)
CAVREDTGFQKLVF

SEQ ID NO: 291554 - protein, 14 aa, Homo sapiens
  CDR3 for beta chain variable domain of TCR clone 145777 (TRBV29-1, TRBJ2-5)
CSVETSGSGKTQYF

SEQ ID NO: 291555 - protein, 14 aa, Homo sapiens
  CDR3 for alpha chain variable domain of TCR clone 145778 (TRAV13-1, TRAJ10)
CAAKEPGGGNKLTV

SEQ ID NO: 291556 - protein, 14 aa, Homo sapiens
  CDR3 for beta chain variable domain of TCR clone 145778 (TRBV6-6, TRBJ2-7)
CASSDSGAGYEQYF

SEQ ID NO: 291557 - protein, 14 aa, Homo sapiens
  CDR3 for alpha chain variable domain of TCR clone 145779 (TRAV35, TRAJ22)
CAGLRPGSARQLTF

SEQ ID NO: 291558 - protein, 13 aa, Homo sapiens
  CDR3 for beta chain variable domain of TCR clone 145779 (TRBV12-4, TRBJ2-5)
CSPPTGLQETQYF

SEQ ID NO: 291559 - protein, 13 aa, Homo sapiens
  CDR3 for alpha chain variable domain of TCR clone 145780 (TRAV12-3, TRAJ16)
CAVQLSDGQKLLF

SEQ ID NO: 291560 - protein, 12 aa, Homo sapiens
  CDR3 for beta chain variable domain of TCR clone 145780 (TRBV18, TRBJ2-7)
CASSTAMGEQYF

SEQ ID NO: 291561 - protein, 15 aa, Homo sapiens
  CDR3 for alpha chain variable domain of TCR clone 145781 (TRAV20, TRAJ53)
CAVQASGGSDYKLTF

SEQ ID NO: 291562 - protein, 14 aa, Homo sapiens
  CDR3 for beta chain variable domain of TCR clone 145781 (TRBV7-2, TRBJ1-2)
CASSQTGSTYGYTF

SEQ ID NO: 291563 - protein, 15 aa, Homo sapiens
  CDR3 for alpha chain variable domain of TCR clone 145782 (TRAV27, TRAJ38)
CAARRNAGNNRKLIW

SEQ ID NO: 291564 - protein, 17 aa, Homo sapiens
  CDR3 for beta chain variable domain of TCR clone 145782 (TRBV13, TRBJ2-3)
CASGLSRVAGGRNTQYF

SEQ ID NO: 291565 - protein, 12 aa, Homo sapiens
  CDR3 for alpha chain variable domain of TCR clone 145783 (TRAV13-1, TRAJ20)
CAASMGDYKLSC

SEQ ID NO: 291566 - protein, 15 aa, Homo sapiens
  CDR3 for beta chain variable domain of TCR clone 145783 (TRBV11-3, TRBJ2-3)
CASNGGLDSTDTQYF

SEQ ID NO: 291567 - protein, 12 aa, Homo sapiens
  CDR3 for alpha chain variable domain of TCR clone 145784 (TRAV8-4, TRAJ31)
CAVSDSNARIMF

SEQ ID NO: 291568 - protein, 14 aa, Homo sapiens
  CDR3 for beta chain variable domain of TCR clone 145784 (TRBV20-1, TRBJ2-7)
CSAKRGRSAYEQYF

SEQ ID NO: 291569 - protein, 16 aa, Homo sapiens
  CDR3 for alpha chain variable domain of TCR clone 145785 (TRAV1-2, TRAJ10)
CAVRGVLTGGGNKLTF

SEQ ID NO: 291570 - protein, 15 aa, Homo sapiens
  CDR3 for beta chain variable domain of TCR clone 145785 (TRBV7-9, TRBJ2-7)
CASSLALAEAYEQYF

SEQ ID NO: 291571 - protein, 16 aa, Homo sapiens
  CDR3 for alpha chain variable domain of TCR clone 145786 (TRAV30, TRAJ24)
CGTEIVDADSWGKFQF

SEQ ID NO: 291572 - protein, 15 aa, Homo sapiens
  CDR3 for beta chain variable domain of TCR clone 145786 (TRBV4-1, TRBJ1-4)
CASSDTGGTNKKLFF

SEQ ID NO: 291573 - protein, 13 aa, Homo sapiens
  CDR3 for alpha chain variable domain of TCR clone 145787 (TRAV12-2, TRAJ52)
CAVSGTSYGKLTF

SEQ ID NO: 291574 - protein, 13 aa, Homo sapiens
  CDR3 for beta chain variable domain of TCR clone 145787 (TRBV19, TRBJ2-7)
CASRKAGGSEQYF

SEQ ID NO: 291575 - protein, 14 aa, Homo sapiens
  CDR3 for alpha chain variable domain of TCR clone 145788 (TRAV4, TRAJ37)
CLVVVAGNTGKLIF

SEQ ID NO: 291576 - protein, 17 aa, Homo sapiens
  CDR3 for beta chain variable domain of TCR clone 145788 (TRBV13, TRBJ2-3)
CASSLSRVAGGRNTQYF

SEQ ID NO: 291577 - protein, 14 aa, Homo sapiens
  CDR3 for alpha chain variable domain of TCR clone 145789 (TRAV12-2, TRAJ5)
CAVNRSTGRRALIF

SEQ ID NO: 291578 - protein, 12 aa, Homo sapiens
  CDR3 for beta chain variable domain of TCR clone 145789 (TRBV19, TRBJ1-5)
CASSIAQQPQHF

SEQ ID NO: 291579 - protein, 13 aa, Homo sapiens
  CDR3 for alpha chain variable domain of TCR clone 145790 (TRAV38-2/DV8, TRAJ34)
CAYRTWNTDKLIF

SEQ ID NO: 291580 - protein, 14 aa, Homo sapiens
  CDR3 for beta chain variable domain of TCR clone 145790 (TRBV7-8, TRBJ1-2)
CASSPDSLSYGYTF

SEQ ID NO: 291581 - protein, 14 aa, Homo sapiens
  CDR3 for alpha chain variable domain of TCR clone 145791 (TRAV3, TRAJ6)
CAVRDWGGSYIPTF

SEQ ID NO: 291582 - protein, 15 aa, Homo sapiens
  CDR3 for beta chain variable domain of TCR clone 145791 (TRBV5-1, TRBJ2-1)
CASSPPRAAYNEQFF

SEQ ID NO: 291583 - protein, 12 aa, Homo sapiens
  CDR3 for alpha chain variable domain of TCR clone 145792 (TRAV8-3, )
CAVVTTRIPDIQ

SEQ ID NO: 291584 - protein, 14 aa, Homo sapiens
  CDR3 for beta chain variable domain of TCR clone 145792 (TRBV11-2, TRBJ2-7)
CASSPSTTSYEQYF

SEQ ID NO: 291585 - protein, 15 aa, Homo sapiens
  CDR3 for alpha chain variable domain of TCR clone 145793 (TRAV29/DV5, TRAJ53)
CAASASGGSNDKLTF

SEQ ID NO: 291586 - protein, 19 aa, Homo sapiens
  CDR3 for beta chain variable domain of TCR clone 145793 (TRBV5-1, TRBJ2-3)
CASSLWLAGGITTTDTQYF

SEQ ID NO: 291587 - protein, 14 aa, Homo sapiens
  CDR3 for alpha chain variable domain of TCR clone 145794 (TRAV12-1, TRAJ9)
CVVNRRTGGFKTIL

SEQ ID NO: 291588 - protein, 16 aa, Homo sapiens
  CDR3 for beta chain variable domain of TCR clone 145794 (TRBV4-1, TRBJ2-3)
CASSQSTSGAEDTQYF

SEQ ID NO: 291589 - protein, 12 aa, Homo sapiens
  CDR3 for alpha chain variable domain of TCR clone 145795 (TRAV4, TRAJ26)
CLVGDYGQNFVF

SEQ ID NO: 291590 - protein, 17 aa, Homo sapiens
  CDR3 for beta chain variable domain of TCR clone 145795 (TRBV7-3, TRBJ2-3)
CASSLMKRMRGADTQYF

SEQ ID NO: 291591 - protein, 14 aa, Homo sapiens
  CDR3 for alpha chain variable domain of TCR clone 145796 (TRAV38-1, TRAJ45)
FASHSGGGADGLTF

SEQ ID NO: 291592 - protein, 13 aa, Homo sapiens
  CDR3 for beta chain variable domain of TCR clone 145796 (TRBV7-9, TRBJ2-2)
CASSSAGTGELFF

SEQ ID NO: 291593 - protein, 12 aa, Homo sapiens
  CDR3 for alpha chain variable domain of TCR clone 145797 (TRAV3, TRAJ43)
CAVRDPNNDMRF

SEQ ID NO: 291594 - protein, 15 aa, Homo sapiens
  CDR3 for beta chain variable domain of TCR clone 145797 (TRBV27, TRBJ1-5)
CGSSLGTGFDQHQHF

SEQ ID NO: 291595 - protein, 13 aa, Homo sapiens
  CDR3 for alpha chain variable domain of TCR clone 145798 (TRAV20, TRAJ29)
CAVQAVANTPLVF

SEQ ID NO: 291596 - protein, 15 aa, Homo sapiens
  CDR3 for beta chain variable domain of TCR clone 145798 (TRBV10-2, TRBJ2-5)
CASRGSGGPQETQYF

SEQ ID NO: 291597 - protein, 13 aa, Homo sapiens
  CDR3 for alpha chain variable domain of TCR clone 145799 (TRAV8-3, TRAJ42)
CAVGAGSQGNLIF

SEQ ID NO: 291598 - protein, 13 aa, Homo sapiens
  CDR3 for beta chain variable domain of TCR clone 145799 (TRBV4-2, TRBJ1-1)
CASSQAGNTEAFF

SEQ ID NO: 291599 - protein, 17 aa, Homo sapiens
  CDR3 for alpha chain variable domain of TCR clone 145800 (TRAV3, TRAJ6)
CAVRDGPRAGGSHIPTF

SEQ ID NO: 291600 - protein, 17 aa, Homo sapiens
  CDR3 for beta chain variable domain of TCR clone 145800 (TRBV27, TRBJ2-6)
CASSLTGFASGANVLTF

SEQ ID NO: 291601 - protein, 14 aa, Homo sapiens
  CDR3 for alpha chain variable domain of TCR clone 145801 (TRAV12-1, TRAJ26)
CVVNSWVTMVNFVF

SEQ ID NO: 291602 - protein, 13 aa, Homo sapiens
  CDR3 for beta chain variable domain of TCR clone 145801 (TRBV10-3, TRBJ2-7)
CASKLAVNYEQYF

SEQ ID NO: 291603 - protein, 14 aa, Homo sapiens
  CDR3 for alpha chain variable domain of TCR clone 145802 (TRAV1-2, TRAJ16)
CAVNRFSDGQRLLF

SEQ ID NO: 291604 - protein, 15 aa, Homo sapiens
  CDR3 for beta chain variable domain of TCR clone 145802 (TRBV12-4, TRBJ2-5)
CASSPRTGLQETQYF

SEQ ID NO: 291605 - protein, 12 aa, Homo sapiens
  CDR3 for alpha chain variable domain of TCR clone 145803 (TRAV12-3, TRAJ39)
CAMTQAGNMLTF

SEQ ID NO: 291606 - protein, 16 aa, Homo sapiens
  CDR3 for beta chain variable domain of TCR clone 145803 (TRBV12-5, TRBJ2-5)
CASGPRTSGNQETQYF

SEQ ID NO: 291607 - protein, 13 aa, Homo sapiens
  CDR3 for alpha chain variable domain of TCR clone 145804 (TRAV3, TRAJ20)
CAVRDTPRYKLSF

SEQ ID NO: 291608 - protein, 16 aa, Homo sapiens
  CDR3 for beta chain variable domain of TCR clone 145804 (TRBV12-4, TRBJ2-7)
CASSLIGGTGTYEQYF

SEQ ID NO: 291609 - protein, 15 aa, Homo sapiens
  CDR3 for alpha chain variable domain of TCR clone 145805 (TRAV12-1, TRAJ15)
CVVTRANQAGTALIF

SEQ ID NO: 291610 - protein, 14 aa, Homo sapiens
  CDR3 for beta chain variable domain of TCR clone 145805 (TRBV5-1, TRBJ1-1)
CASSWVSINTEAFF

SEQ ID NO: 291611 - protein, 12 aa, Homo sapiens
  CDR3 for alpha chain variable domain of TCR clone 145806 (TRAV12-2, TRAJ9)
CAVTGGGFKTIF

SEQ ID NO: 291612 - protein, 13 aa, Homo sapiens
  CDR3 for beta chain variable domain of TCR clone 145806 (TRBV7-2, TRBJ2-5)
CASSLYRQETQYF

SEQ ID NO: 291613 - protein, 12 aa, Homo sapiens
  CDR3 for alpha chain variable domain of TCR clone 145807 (TRAV13-1, TRAJ49)
CAASPMGNQFYF

SEQ ID NO: 291614 - protein, 17 aa, Homo sapiens
  CDR3 for beta chain variable domain of TCR clone 145807 (TRBV11-2, TRBJ2-1)
CASSLYPPGVEYNEQIF

SEQ ID NO: 291615 - protein, 14 aa, Homo sapiens
  CDR3 for alpha chain variable domain of TCR clone 145808 (TRAV26-1, TRAJ54)
CIVRRTQGAQKLVF

SEQ ID NO: 291616 - protein, 14 aa, Homo sapiens
  CDR3 for beta chain variable domain of TCR clone 145808 (TRBV11-2, TRBJ1-2)
CASSLGTANYGYTF

SEQ ID NO: 291617 - protein, 14 aa, Homo sapiens
  CDR3 for alpha chain variable domain of TCR clone 145809 (TRAV12-1, TRAJ30)
CVVNIGGRDDKSIF

SEQ ID NO: 291618 - protein, 14 aa, Homo sapiens
  CDR3 for beta chain variable domain of TCR clone 145809 (TRBV20-1, TRBJ2-1)
CSAQIGGSANEQFF

SEQ ID NO: 291619 - protein, 15 aa, Homo sapiens
  CDR3 for alpha chain variable domain of TCR clone 145810 (TRAV25, TRAJ52)
CAGTSGGTGYGKLTF

SEQ ID NO: 291620 - protein, 16 aa, Homo sapiens
  CDR3 for beta chain variable domain of TCR clone 145810 (TRBV15, TRBJ1-2)
CATSRGPRTGGGGYTF

SEQ ID NO: 291621 - protein, 18 aa, Homo sapiens
  CDR3 for alpha chain variable domain of TCR clone 145811 (TRAV26-1, TRAJ52)
CIVRVEGAGGTSYGKLTF

SEQ ID NO: 291622 - protein, 13 aa, Homo sapiens
  CDR3 for beta chain variable domain of TCR clone 145811 (TRBV7-3, TRBJ1-2)
CDSSLKRGYGYAF

SEQ ID NO: 291623 - protein, 13 aa, Homo sapiens
  CDR3 for alpha chain variable domain of TCR clone 145812 (TRAV30, TRAJ24)
CGTVTDSWGKLQF

SEQ ID NO: 291624 - protein, 16 aa, Homo sapiens
  CDR3 for beta chain variable domain of TCR clone 145812 (TRBV27, TRBJ2-2)
CASSFRGLVRTGELFF

SEQ ID NO: 291625 - protein, 10 aa, Homo sapiens
  CDR3 for alpha chain variable domain of TCR clone 145813 (TRAV3, TRAJ30)
CSVREIEIIF

SEQ ID NO: 291626 - protein, 12 aa, Homo sapiens
  CDR3 for beta chain variable domain of TCR clone 145813 (TRBV20-1, TRBJ2-3)
CSADGAGDTQYF

SEQ ID NO: 291627 - protein, 14 aa, Homo sapiens
  CDR3 for alpha chain variable domain of TCR clone 145814 (TRAV38-1, TRAJ29)
CAFITPSGNTPLVF

SEQ ID NO: 291628 - protein, 17 aa, Homo sapiens
  CDR3 for beta chain variable domain of TCR clone 145814 (TRBV24-1, TRBJ2-1)
CATSDVSTSGTYNEQFF

SEQ ID NO: 291629 - protein, 15 aa, Homo sapiens
  CDR3 for alpha chain variable domain of TCR clone 145815 (TRAV3, TRAJ22)
CAVIDRGGSARQLTF

SEQ ID NO: 291630 - protein, 16 aa, Homo sapiens
  CDR3 for beta chain variable domain of TCR clone 145815 (TRBV11-2, TRBJ2-1)
CASARGSYSHHNEQFF

SEQ ID NO: 291631 - protein, 14 aa, Homo sapiens
  CDR3 for alpha chain variable domain of TCR clone 145816 (TRAV12-2, TRAJ9)
CAVNLNTGGFQTIF

SEQ ID NO: 291632 - protein, 17 aa, Homo sapiens
  CDR3 for beta chain variable domain of TCR clone 145816 (TRBV20-1, TRBJ2-2)
CSASRQVGQGYTGELFF

SEQ ID NO: 291633 - protein, 13 aa, Homo sapiens
  CDR3 for alpha chain variable domain of TCR clone 145817 (TRAV21, TRAJ13)
CAVNSGGYQKVTF

SEQ ID NO: 291634 - protein, 13 aa, Homo sapiens
  CDR3 for beta chain variable domain of TCR clone 145817 (TRBV7-7, TRBJ2-3)
CASSLSRADTQYF

SEQ ID NO: 291635 - protein, 12 aa, Homo sapiens
  CDR3 for alpha chain variable domain of TCR clone 145818 (TRAV13-1, TRAJ27)
CSAHTNAGKSTF

SEQ ID NO: 291636 - protein, 14 aa, Homo sapiens
  CDR3 for beta chain variable domain of TCR clone 145818 (TRBV19, TRBJ2-2)
CTSSGQGIAGELFF

SEQ ID NO: 291637 - protein, 14 aa, Homo sapiens
  CDR3 for alpha chain variable domain of TCR clone 145819 (TRAV23/DV6, TRAJ39)
CAASIGKAGNMLTF

SEQ ID NO: 291638 - protein, 14 aa, Homo sapiens
  CDR3 for beta chain variable domain of TCR clone 145819 (TRBV7-3, TRBJ1-1)
CASSLKGGNTEAFF

SEQ ID NO: 291639 - protein, 14 aa, Homo sapiens
  CDR3 for alpha chain variable domain of TCR clone 145820 (TRAV38-1, TRAJ29)
CAFITPSGNTPLVF

SEQ ID NO: 291640 - protein, 13 aa, Homo sapiens
  CDR3 for beta chain variable domain of TCR clone 145820 (TRBV11-2, TRBJ2-2)
CASSLQNTGELFF

SEQ ID NO: 291641 - protein, 17 aa, Homo sapiens
  CDR3 for alpha chain variable domain of TCR clone 145821 (TRAV3, TRAJ6)
CAVSPRTDTGGSYIPTF

SEQ ID NO: 291642 - protein, 18 aa, Homo sapiens
  CDR3 for beta chain variable domain of TCR clone 145821 (TRBV7-2, TRBJ2-3)
CASSLETSRGRKADTQYF

SEQ ID NO: 291643 - protein, 17 aa, Homo sapiens
  CDR3 for alpha chain variable domain of TCR clone 145822 (TRAV3, TRAJ42)
CAVSDRDYGGSQGNLIF

SEQ ID NO: 291644 - protein, 18 aa, Homo sapiens
  CDR3 for beta chain variable domain of TCR clone 145822 (TRBV20-1, TRBJ2-3)
CSASGLAGGPGATDTQYF

SEQ ID NO: 291645 - protein, 14 aa, Homo sapiens
  CDR3 for alpha chain variable domain of TCR clone 145823 (TRAV35, TRAJ50)
CAGHRKTSYDKAIF

SEQ ID NO: 291646 - protein, 13 aa, Homo sapiens
  CDR3 for beta chain variable domain of TCR clone 145823 (TRBV7-7, TRBJ2-3)
CASSLGRADTQYF

SEQ ID NO: 291647 - protein, 12 aa, Homo sapiens
  CDR3 for alpha chain variable domain of TCR clone 145824 (TRAV12-3, TRAJ17)
CAMTLTGNNLPL

SEQ ID NO: 291648 - protein, 15 aa, Homo sapiens
  CDR3 for beta chain variable domain of TCR clone 145824 (TRBV20-1, TRBJ2-7)
CSARDRVSGMDEQYF

SEQ ID NO: 291649 - protein, 13 aa, Homo sapiens
  CDR3 for alpha chain variable domain of TCR clone 145825 (TRAV8-1, TRAJ28)
CVVSGAGSYQLTF

SEQ ID NO: 291650 - protein, 14 aa, Homo sapiens
  CDR3 for beta chain variable domain of TCR clone 145825 (TRBV19, TRBJ2-5)
CASSMTGQQETQYF

SEQ ID NO: 291651 - protein, 16 aa, Homo sapiens
  CDR3 for alpha chain variable domain of TCR clone 145826 (TRAV14/DV4, TRAJ54)
CAMREGRIQGAQKLVL

SEQ ID NO: 291652 - protein, 18 aa, Homo sapiens
  CDR3 for beta chain variable domain of TCR clone 145826 (TRBV18, TRBJ1-3)
CASSPRGGAGPSGNTIYF

SEQ ID NO: 291653 - protein, 17 aa, Homo sapiens
  CDR3 for alpha chain variable domain of TCR clone 145827 (TRAV12-3, TRAJ6)
CAMSARGGAGGSYIPTC

SEQ ID NO: 291654 - protein, 12 aa, Homo sapiens
  CDR3 for beta chain variable domain of TCR clone 145827 (TRBV12-4, TRBJ2-3)
CASSTLPDTQYF

SEQ ID NO: 291655 - protein, 14 aa, Homo sapiens
  CDR3 for alpha chain variable domain of TCR clone 145828 (TRAV17, TRAJ12)
CAILPMDSSYKLIF

SEQ ID NO: 291656 - protein, 11 aa, Homo sapiens
  CDR3 for beta chain variable domain of TCR clone 145828 (TRBV19, TRBJ1-1)
CGSSIGSEAFF

SEQ ID NO: 291657 - protein, 14 aa, Homo sapiens
  CDR3 for alpha chain variable domain of TCR clone 145829 (TRAV12-2, TRAJ13)
CAVKKTGGYQKVTC

SEQ ID NO: 291658 - protein, 15 aa, Homo sapiens
  CDR3 for beta chain variable domain of TCR clone 145829 (TRBV20-1, TRBJ2-7)
CSARDRVSGMDEQYF

SEQ ID NO: 291659 - protein, 12 aa, Homo sapiens
  CDR3 for alpha chain variable domain of TCR clone 145830 (TRAV12-2, TRAJ3)
CAVSSSASKIIF

SEQ ID NO: 291660 - protein, 12 aa, Homo sapiens
  CDR3 for beta chain variable domain of TCR clone 145830 (TRBV11-2, TRBJ2-1)
CASSPGNNEQFF

SEQ ID NO: 291661 - protein, 17 aa, Homo sapiens
  CDR3 for alpha chain variable domain of TCR clone 145831 (TRAV26-2, TRAJ42)
CILRDVGDVGSQGNLIF

SEQ ID NO: 291662 - protein, 16 aa, Homo sapiens
  CDR3 for beta chain variable domain of TCR clone 145831 (TRBV12-4, TRBJ2-7)
CASSLIGGTGTYEQYF

SEQ ID NO: 291663 - protein, 14 aa, Homo sapiens
  CDR3 for alpha chain variable domain of TCR clone 145832 (TRAV8-6, TRAJ30)
CAVRPVNRDDKIVF

SEQ ID NO: 291664 - protein, 15 aa, Homo sapiens
  CDR3 for beta chain variable domain of TCR clone 145832 (TRBV5-1, TRBJ2-5)
CASSLGLAEQETQYF

SEQ ID NO: 291665 - protein, 14 aa, Homo sapiens
  CDR3 for alpha chain variable domain of TCR clone 145833 (TRAV26-1, TRAJ39)
CIVRGSRAGNMLTF

SEQ ID NO: 291666 - protein, 15 aa, Homo sapiens
  CDR3 for beta chain variable domain of TCR clone 145833 (TRBV7-9, TRBJ1-5)
CASSQGHQSNQPQHF

SEQ ID NO: 291667 - protein, 15 aa, Homo sapiens
  CDR3 for alpha chain variable domain of TCR clone 145834 (TRAV17, TRAJ13)
CATDAGSVGYQKVTF

SEQ ID NO: 291668 - protein, 17 aa, Homo sapiens
  CDR3 for beta chain variable domain of TCR clone 145834 (TRBV11-2, TRBJ2-1)
CASSLYPPGAEYNEQFF

SEQ ID NO: 291669 - protein, 14 aa, Homo sapiens
  CDR3 for alpha chain variable domain of TCR clone 145835 (TRAV29/DV5, TRAJ28)
CAARAGAGSDQLTF

SEQ ID NO: 291670 - protein, 13 aa, Homo sapiens
  CDR3 for beta chain variable domain of TCR clone 145835 (TRBV7-2, TRBJ1-5)
CASSFARNQPQHF

SEQ ID NO: 291671 - protein, 12 aa, Homo sapiens
  CDR3 for alpha chain variable domain of TCR clone 145836 (TRAV13-1, TRAJ53)
AASGGSNYKLTF

SEQ ID NO: 291672 - protein, 15 aa, Homo sapiens
  CDR3 for beta chain variable domain of TCR clone 145836 (TRBV5-1, TRBJ2-1)
CASCPPRAPYNEQFF

SEQ ID NO: 291673 - protein, 18 aa, Homo sapiens
  CDR3 for alpha chain variable domain of TCR clone 145837 (TRAV1-2, TRAJ18)
CAERDMGDRGSTLGRLYF

SEQ ID NO: 291674 - protein, 16 aa, Homo sapiens
  CDR3 for beta chain variable domain of TCR clone 145837 (TRBV29-1, TRBJ1-2)
CSVEANRDIANYGYTF

SEQ ID NO: 291675 - protein, 12 aa, Homo sapiens
  CDR3 for alpha chain variable domain of TCR clone 145838 (TRAV12-2, TRAJ20)
CAVRPSDYKLSF

SEQ ID NO: 291676 - protein, 16 aa, Homo sapiens
  CDR3 for beta chain variable domain of TCR clone 145838 (TRBV12-5, TRBJ2-5)
CASGPRTSGNQETQYF

SEQ ID NO: 291677 - protein, 16 aa, Homo sapiens
  CDR3 for alpha chain variable domain of TCR clone 145839 (TRAV30, TRAJ24)
CGTEIVDADSSGKFQF

SEQ ID NO: 291678 - protein, 15 aa, Homo sapiens
  CDR3 for beta chain variable domain of TCR clone 145839 (TRBV20-1, TRBJ2-7)
CSARDRVSGMDEQYF

SEQ ID NO: 291679 - protein, 12 aa, Homo sapiens
  CDR3 for alpha chain variable domain of TCR clone 145840 (TRAV21, TRAJ33)
CAKMDSNYQLIW

SEQ ID NO: 291680 - protein, 12 aa, Homo sapiens
  CDR3 for beta chain variable domain of TCR clone 145840 (TRBV19, TRBJ2-1)
CASSMQDTEQFF

SEQ ID NO: 291681 - protein, 17 aa, Homo sapiens
  CDR3 for alpha chain variable domain of TCR clone 145841 (TRAV2, TRAJ22)
ILQVREADAAEQRQLTF

SEQ ID NO: 291682 - protein, 11 aa, Homo sapiens
  CDR3 for beta chain variable domain of TCR clone 145841 (TRBV6-3, TRBJ2-3)
CATGQADTQYF

SEQ ID NO: 291683 - protein, 18 aa, Homo sapiens
  CDR3 for alpha chain variable domain of TCR clone 145842 (TRAV12-3, TRAJ52)
CAMSVGGAGGTSYGKLTF

SEQ ID NO: 291684 - protein, 14 aa, Homo sapiens
  CDR3 for beta chain variable domain of TCR clone 145842 (TRBV7-3, TRBJ2-1)
CASSLAGGTNEQFF

SEQ ID NO: 291685 - protein, 13 aa, Homo sapiens
  CDR3 for alpha chain variable domain of TCR clone 145843 (TRAV26-1, TRAJ36)
CIAVRRGANNLFF

SEQ ID NO: 291686 - protein, 18 aa, Homo sapiens
  CDR3 for beta chain variable domain of TCR clone 145843 (TRBV27, TRBJ2-1)
CQQFRNSSPGAAGNEQFF

SEQ ID NO: 291687 - protein, 12 aa, Homo sapiens
  CDR3 for alpha chain variable domain of TCR clone 145844 (TRAV12-2, TRAJ9)
CAVTGGGFKTIF

SEQ ID NO: 291688 - protein, 14 aa, Homo sapiens
  CDR3 for beta chain variable domain of TCR clone 145844 (TRBV7-2, TRBJ2-7)
CASSPKTSFYEQYF

SEQ ID NO: 291689 - protein, 14 aa, Homo sapiens
  CDR3 for alpha chain variable domain of TCR clone 145845 (TRAV12-1, TRAJ12)
CVVNGRDSSYKLIF

SEQ ID NO: 291690 - protein, 13 aa, Homo sapiens
  CDR3 for beta chain variable domain of TCR clone 145845 (TRBV28, TRBJ2-2)
CDSIRESTGELFF

SEQ ID NO: 291691 - protein, 13 aa, Homo sapiens
  CDR3 for alpha chain variable domain of TCR clone 145846 (TRAV12-1, TRAJ29)
CVVRNSGNTPLAF

SEQ ID NO: 291692 - protein, 17 aa, Homo sapiens
  CDR3 for beta chain variable domain of TCR clone 145846 (TRBV20-1, TRBJ2-1)
CSASSSGLAGSYNEQFF

SEQ ID NO: 291693 - protein, 14 aa, Homo sapiens
  CDR3 for alpha chain variable domain of TCR clone 145847 (TRAV8-3, TRAJ39)
CAVGANNAVNMLTF

SEQ ID NO: 291694 - protein, 12 aa, Homo sapiens
  CDR3 for beta chain variable domain of TCR clone 145847 (TRBV28, TRBJ1-3)
CASVSSGNTIYF

SEQ ID NO: 291695 - protein, 13 aa, Homo sapiens
  CDR3 for alpha chain variable domain of TCR clone 145848 (TRAV41, TRAJ54)
CAVRIQRAQKLVF

SEQ ID NO: 291696 - protein, 14 aa, Homo sapiens
  CDR3 for beta chain variable domain of TCR clone 145848 (TRBV2, TRBJ2-1)
CASRTGSSYNEQFF

SEQ ID NO: 291697 - protein, 11 aa, Homo sapiens
  CDR3 for alpha chain variable domain of TCR clone 145849 (TRAV36/DV7, TRAJ45)
SGGGGSDGLTF

SEQ ID NO: 291698 - protein, 13 aa, Homo sapiens
  CDR3 for beta chain variable domain of TCR clone 145849 (TRBV28, TRBJ2-7)
CASSPSGTYEQYF

SEQ ID NO: 291699 - protein, 16 aa, Homo sapiens
  CDR3 for alpha chain variable domain of TCR clone 145850 (TRAV30, TRAJ24)
CGTEIVDADSWGKFQF

SEQ ID NO: 291700 - protein, 16 aa, Homo sapiens
  CDR3 for beta chain variable domain of TCR clone 145850 (TRBV7-3, TRBJ2-3)
ELSLMKGMRGADTQYF

SEQ ID NO: 291701 - protein, 14 aa, Homo sapiens
  CDR3 for alpha chain variable domain of TCR clone 145851 (TRAV1-2, TRAJ29)
CAVRELTSATPLVF

SEQ ID NO: 291702 - protein, 13 aa, Homo sapiens
  CDR3 for beta chain variable domain of TCR clone 145851 (TRBV7-6, TRBJ1-2)
CASSLVADYGYTF

SEQ ID NO: 291703 - protein, 17 aa, Homo sapiens
  CDR3 for alpha chain variable domain of TCR clone 145852 (TRAV3, TRAJ12)
CAVSDGGRMDSSYKLIF

SEQ ID NO: 291704 - protein, 13 aa, Homo sapiens
  CDR3 for beta chain variable domain of TCR clone 145852 (TRBV15, TRBJ1-6)
CATSGGLNSPLHF

SEQ ID NO: 291705 - protein, 16 aa, Homo sapiens
  CDR3 for alpha chain variable domain of TCR clone 145853 (TRAV30, TRAJ24)
CGTEIVDADSRGKFQF

SEQ ID NO: 291706 - protein, 13 aa, Homo sapiens
  CDR3 for beta chain variable domain of TCR clone 145853 (TRBV7-2, TRBJ1-4)
CASSLAGLEKLFF

SEQ ID NO: 291707 - protein, 14 aa, Homo sapiens
  CDR3 for alpha chain variable domain of TCR clone 145854 (TRAV12-1, TRAJ30)
CVVYIGNRDDKIIF

SEQ ID NO: 291708 - protein, 14 aa, Homo sapiens
  CDR3 for beta chain variable domain of TCR clone 145854 (TRBV7-9, TRBJ2-5)
CASSPRPSGETQYF

SEQ ID NO: 291709 - protein, 13 aa, Homo sapiens
  CDR3 for alpha chain variable domain of TCR clone 145855 (TRAV20, TRAJ34)
CAVSSYNTDKLIF

SEQ ID NO: 291710 - protein, 13 aa, Homo sapiens
  CDR3 for beta chain variable domain of TCR clone 145855 (TRBV7-9, TRBJ1-2)
CANSLKQNYGYTF

SEQ ID NO: 291711 - protein, 14 aa, Homo sapiens
  CDR3 for alpha chain variable domain of TCR clone 145856 (TRAV1-2, TRAJ16)
CAVNRFSDGQKLLF

SEQ ID NO: 291712 - protein, 15 aa, Homo sapiens
  CDR3 for beta chain variable domain of TCR clone 145856 (TRBV7-8, TRBJ2-5)
CASSPGQLFQETQYF

SEQ ID NO: 291713 - protein, 21 aa, Homo sapiens
  CDR3 for alpha chain variable domain of TCR clone 145857 (TRAV1-1, TRAJ6)
CLLLLRCERLERTGGSYIPTF

SEQ ID NO: 291714 - protein, 13 aa, Homo sapiens
  CDR3 for beta chain variable domain of TCR clone 145857 (TRBV7-9, TRBJ2-3)
CASSPGSTDTQYF

SEQ ID NO: 291715 - protein, 12 aa, Homo sapiens
  CDR3 for alpha chain variable domain of TCR clone 145858 (TRAV13-1, TRAJ42)
VNYGGSQGNLIF

SEQ ID NO: 291716 - protein, 15 aa, Homo sapiens
  CDR3 for beta chain variable domain of TCR clone 145858 (TRBV20-1, TRBJ2-1)
CSASSAGSSYNERFF

SEQ ID NO: 291717 - protein, 14 aa, Homo sapiens
  CDR3 for alpha chain variable domain of TCR clone 145859 (TRAV12-1, TRAJ12)
CVVNGRDSSYKLIF

SEQ ID NO: 291718 - protein, 13 aa, Homo sapiens
  CDR3 for beta chain variable domain of TCR clone 145859 (TRBV6-1, TRBJ2-1)
CAGMDPTNNEQFF

SEQ ID NO: 291719 - protein, 14 aa, Homo sapiens
  CDR3 for alpha chain variable domain of TCR clone 145860 (TRAV26-1, TRAJ26)
CIVRATFLGQGFVF

SEQ ID NO: 291720 - protein, 16 aa, Homo sapiens
  CDR3 for beta chain variable domain of TCR clone 145860 (TRBV12-4, TRBJ2-7)
CASRSTGTGPSYEQYF

SEQ ID NO: 291721 - protein, 11 aa, Homo sapiens
  CDR3 for alpha chain variable domain of TCR clone 145861 (TRAV2, TRAJ33)
CAVESNYQLIW

SEQ ID NO: 291722 - protein, 15 aa, Homo sapiens
  CDR3 for beta chain variable domain of TCR clone 145861 (TRBV20-1, TRBJ1-1)
CSASRGVTGNTEAFF

SEQ ID NO: 291723 - protein, 20 aa, Homo sapiens
  CDR3 for alpha chain variable domain of TCR clone 145862 (TRAV26-1, TRAJ42)
CCVLLHRQTYYGGSLGNLIF

SEQ ID NO: 291724 - protein, 16 aa, Homo sapiens
  CDR3 for beta chain variable domain of TCR clone 145862 (TRBV7-3, TRBJ2-2)
CASSLKRGTLSGELFF

SEQ ID NO: 291725 - protein, 14 aa, Homo sapiens
  CDR3 for alpha chain variable domain of TCR clone 145863 (TRAV29/DV5, TRAJ22)
CAASDSGSARQLTF

SEQ ID NO: 291726 - protein, 15 aa, Homo sapiens
  CDR3 for beta chain variable domain of TCR clone 145863 (TRBV7-9, TRBJ1-1)
CASSLLEQGGTEAFL

SEQ ID NO: 291727 - protein, 17 aa, Homo sapiens
  CDR3 for alpha chain variable domain of TCR clone 145864 (TRAV27, TRAJ26)
CAGARAPLDNYGQNFVF

SEQ ID NO: 291728 - protein, 15 aa, Homo sapiens
  CDR3 for beta chain variable domain of TCR clone 145864 (TRBV11-2, TRBJ2-5)
CASSPRSGGLEPQYF

SEQ ID NO: 291729 - protein, 12 aa, Homo sapiens
  CDR3 for alpha chain variable domain of TCR clone 145865 (TRAV16, TRAJ34)
CSYGYNTDKLIF

SEQ ID NO: 291730 - protein, 13 aa, Homo sapiens
  CDR3 for beta chain variable domain of TCR clone 145865 (TRBV6-1, TRBJ2-1)
CASREDGGHEQFF

SEQ ID NO: 291731 - protein, 17 aa, Homo sapiens
  CDR3 for alpha chain variable domain of TCR clone 145866 (TRAV26-1, TRAJ58)
CIVRVGAEETSGSRLTF

SEQ ID NO: 291732 - protein, 18 aa, Homo sapiens
  CDR3 for beta chain variable domain of TCR clone 145866 (TRBV7-9, TRBJ2-7)
WASSLTTSGSRTWYEQYF

SEQ ID NO: 291733 - protein, 12 aa, Homo sapiens
  CDR3 for alpha chain variable domain of TCR clone 145867 (TRAV12-1, TRAJ40)
CVVYSGTYKYIF

SEQ ID NO: 291734 - protein, 13 aa, Homo sapiens
  CDR3 for beta chain variable domain of TCR clone 145867 (TRBV19, TRBJ2-7)
CASSPRQSYEQYF

SEQ ID NO: 291735 - protein, 13 aa, Homo sapiens
  CDR3 for alpha chain variable domain of TCR clone 145868 (TRAV30, TRAJ24)
CGTVTDSWGKLQF

SEQ ID NO: 291736 - protein, 14 aa, Homo sapiens
  CDR3 for beta chain variable domain of TCR clone 145868 (TRBV20-1, TRBJ2-4)
CSASGRVGENIQYF

SEQ ID NO: 291737 - protein, 13 aa, Homo sapiens
  CDR3 for alpha chain variable domain of TCR clone 145869 (TRAV3, TRAJ21)
CAVREPDFNKFYF

SEQ ID NO: 291738 - protein, 14 aa, Homo sapiens
  CDR3 for beta chain variable domain of TCR clone 145869 (TRBV4-1, TRBJ2-2)
CASRQAVNTGELFF

SEQ ID NO: 291739 - protein, 14 aa, Homo sapiens
  CDR3 for alpha chain variable domain of TCR clone 145870 (TRAV12-2, TRAJ13)
CAVKKTGGYRKVTF

SEQ ID NO: 291740 - protein, 13 aa, Homo sapiens
  CDR3 for beta chain variable domain of TCR clone 145870 (TRBV19, TRBJ1-2)
CASSVPGQDSYTF

SEQ ID NO: 291741 - protein, 15 aa, Homo sapiens
  CDR3 for alpha chain variable domain of TCR clone 145871 (TRAV8-2, TRAJ40)
CVVLGTTSGTYKYIF

SEQ ID NO: 291742 - protein, 16 aa, Homo sapiens
  CDR3 for beta chain variable domain of TCR clone 145871 (TRBV7-3, TRBJ2-1)
CASSLEGYRSYNEKFF

SEQ ID NO: 291743 - protein, 13 aa, Homo sapiens
  CDR3 for alpha chain variable domain of TCR clone 145872 (TRAV39, TRAJ58)
CAGEETSGSRLTF

SEQ ID NO: 291744 - protein, 16 aa, Homo sapiens
  CDR3 for beta chain variable domain of TCR clone 145872 (TRBV11-2, TRBJ2-7)
CASSPTTGGVSYEQYF

SEQ ID NO: 291745 - protein, 14 aa, Homo sapiens
  CDR3 for alpha chain variable domain of TCR clone 145873 (TRAV8-2, TRAJ4)
CVVSPSGGYNKLIF

SEQ ID NO: 291746 - protein, 14 aa, Homo sapiens
  CDR3 for beta chain variable domain of TCR clone 145873 (TRBV19, TRBJ2-5)
CASSSSGIQETQYC

SEQ ID NO: 291747 - protein, 13 aa, Homo sapiens
  CDR3 for alpha chain variable domain of TCR clone 145874 (TRAV23/DV6, TRAJ58)
CAARIIRGSRLTF

SEQ ID NO: 291748 - protein, 13 aa, Homo sapiens
  CDR3 for beta chain variable domain of TCR clone 145874 (TRBV2, TRBJ1-6)
CADSGSYNSPLHF

SEQ ID NO: 291749 - protein, 14 aa, Homo sapiens
  CDR3 for alpha chain variable domain of TCR clone 145875 (TRAV12-2, TRAJ40)
CAVKIPSATYKYIF

SEQ ID NO: 291750 - protein, 17 aa, Homo sapiens
  CDR3 for beta chain variable domain of TCR clone 145875 (TRBV20-1, TRBJ2-1)
CSAFSGTSGSLYNEQFF

SEQ ID NO: 291751 - protein, 16 aa, Homo sapiens
  CDR3 for alpha chain variable domain of TCR clone 145876 (TRAV27, TRAJ52)
CAGAPDGGTSYGKLTF

SEQ ID NO: 291752 - protein, 15 aa, Homo sapiens
  CDR3 for beta chain variable domain of TCR clone 145876 (TRBV6-3, TRBJ2-7)
CASSSPGTVFYEQYF

SEQ ID NO: 291753 - protein, 14 aa, Homo sapiens
  CDR3 for alpha chain variable domain of TCR clone 145877 (TRAV1-2, TRAJ16)
CAVNRFSDCQKLLL

SEQ ID NO: 291754 - protein, 14 aa, Homo sapiens
  CDR3 for beta chain variable domain of TCR clone 145877 (TRBV19, TRBJ2-1)
CASPTFVLSGEQFF

SEQ ID NO: 291755 - protein, 16 aa, Homo sapiens
  CDR3 for alpha chain variable domain of TCR clone 145878 (TRAV27, TRAJ52)
CAGAGAGGTSNGKLTF

SEQ ID NO: 291756 - protein, 17 aa, Homo sapiens
  CDR3 for beta chain variable domain of TCR clone 145878 (TRBV24-1, TRBJ2-3)
CATSAWPSGEDTDTQYF

SEQ ID NO: 291757 - protein, 12 aa, Homo sapiens
  CDR3 for alpha chain variable domain of TCR clone 145879 (TRAV17, TRAJ4)
CATDGGYDKLIF

SEQ ID NO: 291758 - protein, 14 aa, Homo sapiens
  CDR3 for beta chain variable domain of TCR clone 145879 (TRBV7-2, TRBJ2-7)
CASSPKTSFYEQYF

SEQ ID NO: 291759 - protein, 16 aa, Homo sapiens
  CDR3 for alpha chain variable domain of TCR clone 145880 (TRAV12-3, TRAJ45)
CAMGWGSGGGADGLTF

SEQ ID NO: 291760 - protein, 15 aa, Homo sapiens
  CDR3 for beta chain variable domain of TCR clone 145880 (TRBV3-1, TRBJ1-2)
CASSHPGIPGYGYTF

SEQ ID NO: 291761 - protein, 20 aa, Homo sapiens
  CDR3 for alpha chain variable domain of TCR clone 145881 (TRAV30, TRAJ54)
SAAQSRSETQVVQGAQKLVF

SEQ ID NO: 291762 - protein, 11 aa, Homo sapiens
  CDR3 for beta chain variable domain of TCR clone 145881 (TRBV25-1, TRBJ2-4)
CESRDQNIQYF

SEQ ID NO: 291763 - protein, 12 aa, Homo sapiens
  CDR3 for alpha chain variable domain of TCR clone 145882 (TRAV2, TRAJ13)
TTVLPGVTKVTF

SEQ ID NO: 291764 - protein, 16 aa, Homo sapiens
  CDR3 for beta chain variable domain of TCR clone 145882 (TRBV6-1, TRBJ2-5)
CASSETLDRGAETQYF

SEQ ID NO: 291765 - protein, 14 aa, Homo sapiens
  CDR3 for alpha chain variable domain of TCR clone 145883 (TRAV4, TRAJ6)
FLVGEAGGSYIPTF

SEQ ID NO: 291766 - protein, 16 aa, Homo sapiens
  CDR3 for beta chain variable domain of TCR clone 145883 (TRBV7-6, TRBJ2-1)
CASSLNEGPSYNEQFF

SEQ ID NO: 291767 - protein, 14 aa, Homo sapiens
  CDR3 for alpha chain variable domain of TCR clone 145884 (TRAV12-3, TRAJ41)
CAMSAGNSGYALNF

SEQ ID NO: 291768 - protein, 15 aa, Homo sapiens
  CDR3 for beta chain variable domain of TCR clone 145884 (TRBV6-3, TRBJ2-7)
CASSSPGTVFYEQYF

SEQ ID NO: 291769 - protein, 13 aa, Homo sapiens
  CDR3 for alpha chain variable domain of TCR clone 145885 (TRAV13-1, TRAJ39)
CAARIWAGNMLTL

SEQ ID NO: 291770 - protein, 13 aa, Homo sapiens
  CDR3 for beta chain variable domain of TCR clone 145885 (TRBV11-2, TRBJ1-3)
CASSLEPVNTIYF

SEQ ID NO: 291771 - protein, 12 aa, Homo sapiens
  CDR3 for alpha chain variable domain of TCR clone 145886 (TRAV12-3, TRAJ40)
CVVYSGTYKYIF

SEQ ID NO: 291772 - protein, 12 aa, Homo sapiens
  CDR3 for beta chain variable domain of TCR clone 145886 (TRBV2, TRBJ1-2)
CASSGQTYGYTF

SEQ ID NO: 291773 - protein, 13 aa, Homo sapiens
  CDR3 for alpha chain variable domain of TCR clone 145887 (TRAV17, TRAJ54)
CATSWGGAQKLVS

SEQ ID NO: 291774 - protein, 15 aa, Homo sapiens
  CDR3 for beta chain variable domain of TCR clone 145887 (TRBV4-3, TRBJ2-3)
CASSPSLLSTDTQYF

SEQ ID NO: 291775 - protein, 15 aa, Homo sapiens
  CDR3 for alpha chain variable domain of TCR clone 145888 (TRAV21, TRAJ53)
CATLNSGGSNYKLTF

SEQ ID NO: 291776 - protein, 17 aa, Homo sapiens
  CDR3 for beta chain variable domain of TCR clone 145888 (TRBV4-1, TRBJ2-3)
CASSQGYVSGRTDTQYF

SEQ ID NO: 291777 - protein, 15 aa, Homo sapiens
  CDR3 for alpha chain variable domain of TCR clone 145889 (TRAV38-1, TRAJ37)
CAFIFGSGNTGKLIF

SEQ ID NO: 291778 - protein, 12 aa, Homo sapiens
  CDR3 for beta chain variable domain of TCR clone 145889 (TRBV7-9, TRBJ2-7)
CASSLEGYERYS

SEQ ID NO: 291779 - protein, 13 aa, Homo sapiens
  CDR3 for alpha chain variable domain of TCR clone 145890 (TRAV8-4, TRAJ48)
CAVSDPGNEKLTF

SEQ ID NO: 291780 - protein, 13 aa, Homo sapiens
  CDR3 for beta chain variable domain of TCR clone 145890 (TRBV7-3, TRBJ1-5)
CASSLDSNQPQHF

SEQ ID NO: 291781 - protein, 19 aa, Homo sapiens
  CDR3 for alpha chain variable domain of TCR clone 145891 (TRAV29/DV5, TRAJ49)
CSVLLCSKLTVDTGNQYYF

SEQ ID NO: 291782 - protein, 17 aa, Homo sapiens
  CDR3 for beta chain variable domain of TCR clone 145891 (TRBV13, TRBJ2-3)
CASSLSRVAGGRNTQYF

SEQ ID NO: 291783 - protein, 13 aa, Homo sapiens
  CDR3 for alpha chain variable domain of TCR clone 145892 (TRAV8-6, TRAJ49)
CAVITNTGNQFYF

SEQ ID NO: 291784 - protein, 12 aa, Homo sapiens
  CDR3 for beta chain variable domain of TCR clone 145892 (TRBV18, TRBJ2-3)
CASSPYTDTQYF

SEQ ID NO: 291785 - protein, 12 aa, Homo sapiens
  CDR3 for alpha chain variable domain of TCR clone 145893 (TRAV13-2, TRAJ23)
CSERHRGGKLIF

SEQ ID NO: 291786 - protein, 16 aa, Homo sapiens
  CDR3 for beta chain variable domain of TCR clone 145893 (TRBV27, TRBJ2-2)
CASSLSGFWVTGELFF

SEQ ID NO: 291787 - protein, 15 aa, Homo sapiens
  CDR3 for alpha chain variable domain of TCR clone 145894 (TRAV8-2, TRAJ40)
CVVLGTTSGTYKYIF

SEQ ID NO: 291788 - protein, 16 aa, Homo sapiens
  CDR3 for beta chain variable domain of TCR clone 145894 (TRBV7-3, TRBJ2-1)
CAISLEGYRSYNEQLF

SEQ ID NO: 291789 - protein, 15 aa, Homo sapiens
  CDR3 for alpha chain variable domain of TCR clone 145895 (TRAV2, TRAJ22)
CAVPSRGGSARQLTV

SEQ ID NO: 291790 - protein, 16 aa, Homo sapiens
  CDR3 for beta chain variable domain of TCR clone 145895 (TRBV15, TRBJ2-3)
CATSRDLGIVTDTQYF

SEQ ID NO: 291791 - protein, 16 aa, Homo sapiens
  CDR3 for alpha chain variable domain of TCR clone 145896 (TRAV8-6, TRAJ58)
CAVSDHTETSGSRLTF

SEQ ID NO: 291792 - protein, 13 aa, Homo sapiens
  CDR3 for beta chain variable domain of TCR clone 145896 (TRBV12-4, TRBJ1-2)
CASSLDSNYGYTF

SEQ ID NO: 291793 - protein, 14 aa, Homo sapiens
  CDR3 for alpha chain variable domain of TCR clone 145897 (TRAV1-2, TRAJ8)
CAVREDTGFQKLVF

SEQ ID NO: 291794 - protein, 13 aa, Homo sapiens
  CDR3 for beta chain variable domain of TCR clone 145897 (TRBV29-1, TRBJ1-1)
CSVGDSRNTEDFF

SEQ ID NO: 291795 - protein, 13 aa, Homo sapiens
  CDR3 for alpha chain variable domain of TCR clone 145898 (TRAV3, TRAJ21)
CAVREPDFNKFYF

SEQ ID NO: 291796 - protein, 15 aa, Homo sapiens
  CDR3 for beta chain variable domain of TCR clone 145898 (TRBV6-1, TRBJ2-1)
CASSELRGQYNEQFF

SEQ ID NO: 291797 - protein, 15 aa, Homo sapiens
  CDR3 for alpha chain variable domain of TCR clone 145899 (TRAV8-3, TRAJ11)
CAVGLLNSGYSTLTF

SEQ ID NO: 291798 - protein, 14 aa, Homo sapiens
  CDR3 for beta chain variable domain of TCR clone 145899 (TRBV5-1, TRBJ2-3)
CASSPNVGTDTQYF

SEQ ID NO: 291799 - protein, 14 aa, Homo sapiens
  CDR3 for alpha chain variable domain of TCR clone 145900 (TRAV16, TRAJ54)
CALSLIQGAQKPVS

SEQ ID NO: 291800 - protein, 15 aa, Homo sapiens
  CDR3 for beta chain variable domain of TCR clone 145900 (TRBV20-1, TRBJ2-7)
CSARDRVSGMDEQYF

SEQ ID NO: 291801 - protein, 14 aa, Homo sapiens
  CDR3 for alpha chain variable domain of TCR clone 145901 (TRAV3, TRAJ37)
CDVKESGNTGKLIF

SEQ ID NO: 291802 - protein, 14 aa, Homo sapiens
  CDR3 for beta chain variable domain of TCR clone 145901 (TRBV2, TRBJ1-5)
CASSENRGGQPQHF

SEQ ID NO: 291803 - protein, 12 aa, Homo sapiens
  CDR3 for alpha chain variable domain of TCR clone 145902 (TRAV14/DV4, TRAJ50)
CAMREGNSKVIF

SEQ ID NO: 291804 - protein, 16 aa, Homo sapiens
  CDR3 for beta chain variable domain of TCR clone 145902 (TRBV28, TRBJ2-3)
CARSLSGQTSTDTQYF

SEQ ID NO: 291805 - protein, 14 aa, Homo sapiens
  CDR3 for alpha chain variable domain of TCR clone 145903 (TRAV13-2, TRAJ11)
CAETGYSGYSTLTF

SEQ ID NO: 291806 - protein, 13 aa, Homo sapiens
  CDR3 for beta chain variable domain of TCR clone 145903 (TRBV7-7, TRBJ2-3)
CASSLSRADTQYF

SEQ ID NO: 291807 - protein, 17 aa, Homo sapiens
  CDR3 for alpha chain variable domain of TCR clone 145904 (TRAV38-1, TRAJ45)
CAFTRSHSGGGADGLTF

SEQ ID NO: 291808 - protein, 15 aa, Homo sapiens
  CDR3 for beta chain variable domain of TCR clone 145904 (TRBV7-2, TRBJ2-3)
CASSLVVRGPDTQYF

SEQ ID NO: 291809 - protein, 13 aa, Homo sapiens
  CDR3 for alpha chain variable domain of TCR clone 145905 (TRAV21, TRAJ23)
CTVSYNQGGRLIF

SEQ ID NO: 291810 - protein, 14 aa, Homo sapiens
  CDR3 for beta chain variable domain of TCR clone 145905 (TRBV7-2, TRBJ2-3)
CASSLTSGTDTQYF

SEQ ID NO: 291811 - protein, 12 aa, Homo sapiens
  CDR3 for alpha chain variable domain of TCR clone 145906 (TRAV30, TRAJ43)
CGTEERGNDMRF

SEQ ID NO: 291812 - protein, 15 aa, Homo sapiens
  CDR3 for beta chain variable domain of TCR clone 145906 (TRBV18, TRBJ2-1)
CASLPDRGRDNEQFF

SEQ ID NO: 291813 - protein, 12 aa, Homo sapiens
  CDR3 for alpha chain variable domain of TCR clone 145907 (TRAV3, TRAJ20)
CAVRDHDSKPSF

SEQ ID NO: 291814 - protein, 13 aa, Homo sapiens
  CDR3 for beta chain variable domain of TCR clone 145907 (TRBV9, TRBJ2-7)
CASSVGQGGEQYF

SEQ ID NO: 291815 - protein, 16 aa, Homo sapiens
  CDR3 for alpha chain variable domain of TCR clone 145908 (TRAV21, TRAJ17)
CAVRPGEEAAGNKLTF

SEQ ID NO: 291816 - protein, 16 aa, Homo sapiens
  CDR3 for beta chain variable domain of TCR clone 145908 (TRBV2, TRBJ2-7)
CASSGAWTGPSYEQYF

SEQ ID NO: 291817 - protein, 13 aa, Homo sapiens
  CDR3 for alpha chain variable domain of TCR clone 145909 (TRAV17, TRAJ22)
CAHHSGSARQLTF

SEQ ID NO: 291818 - protein, 16 aa, Homo sapiens
  CDR3 for beta chain variable domain of TCR clone 145909 (TRBV4-1, TRBJ1-2)
CGSSQDAGQVLYGYTF

SEQ ID NO: 291819 - protein, 14 aa, Homo sapiens
  CDR3 for alpha chain variable domain of TCR clone 145910 (TRAV12-2, TRAJ11)
CAVKWNSGYSTLTF

SEQ ID NO: 291820 - protein, 13 aa, Homo sapiens
  CDR3 for beta chain variable domain of TCR clone 145910 (TRBV4-3, TRBJ1-1)
CASGPTGNTEAFF

SEQ ID NO: 291821 - protein, 16 aa, Homo sapiens
  CDR3 for alpha chain variable domain of TCR clone 145911 (TRAV8-6, TRAJ28)
CAVTSKPGAGSYQLTF

SEQ ID NO: 291822 - protein, 16 aa, Homo sapiens
  CDR3 for beta chain variable domain of TCR clone 145911 (TRBV12-4, TRBJ2-5)
CASSWRPSGDSETQYF

SEQ ID NO: 291823 - protein, 15 aa, Homo sapiens
  CDR3 for alpha chain variable domain of TCR clone 145912 (TRAV26-1, TRAJ23)
CIVRVAGYQGGKLNF

SEQ ID NO: 291824 - protein, 15 aa, Homo sapiens
  CDR3 for beta chain variable domain of TCR clone 145912 (TRBV9, TRBJ1-6)
CASSVAGTGDSPLHF

SEQ ID NO: 291825 - protein, 14 aa, Homo sapiens
  CDR3 for alpha chain variable domain of TCR clone 145913 (TRAV9-2, TRAJ39)
CALYIYNAGSMLTF

SEQ ID NO: 291826 - protein, 16 aa, Homo sapiens
  CDR3 for beta chain variable domain of TCR clone 145913 (TRBV19, TRBJ2-2)
CASRSPGTGATGELFF

SEQ ID NO: 291827 - protein, 14 aa, Homo sapiens
  CDR3 for alpha chain variable domain of TCR clone 145914 (TRAV8-3, TRAJ35)
CAVGARGFGNVLHC

SEQ ID NO: 291828 - protein, 12 aa, Homo sapiens
  CDR3 for beta chain variable domain of TCR clone 145914 (TRBV11-2, TRBJ2-2)
CASSLGGGELFF

SEQ ID NO: 291829 - protein, 17 aa, Homo sapiens
  CDR3 for alpha chain variable domain of TCR clone 145915 (TRAV2, TRAJ22)
ILQVREADAAEQRQLTF

SEQ ID NO: 291830 - protein, 14 aa, Homo sapiens
  CDR3 for beta chain variable domain of TCR clone 145915 (TRBV7-2, TRBJ2-7)
CASRSQGAAYEQYF

SEQ ID NO: 291831 - protein, 18 aa, Homo sapiens
  CDR3 for alpha chain variable domain of TCR clone 145916 (TRAV21, TRAJ52)
CAVRPSPAGGTSYGKLTF

SEQ ID NO: 291832 - protein, 14 aa, Homo sapiens
  CDR3 for beta chain variable domain of TCR clone 145916 (TRBV19, TRBJ2-1)
CASSKDRGQDEQFF

SEQ ID NO: 291833 - protein, 11 aa, Homo sapiens
  CDR3 for alpha chain variable domain of TCR clone 145917 (TRAV3, TRAJ21)
CAVGNFNKCYF

SEQ ID NO: 291834 - protein, 13 aa, Homo sapiens
  CDR3 for beta chain variable domain of TCR clone 145917 (TRBV9, TRBJ2-1)
CASSVGQGGEQFF

SEQ ID NO: 291835 - protein, 15 aa, Homo sapiens
  CDR3 for alpha chain variable domain of TCR clone 145918 (TRAV23/DV6, TRAJ33)
CAASNSGGGNYQLIW

SEQ ID NO: 291836 - protein, 16 aa, Homo sapiens
  CDR3 for beta chain variable domain of TCR clone 145918 (TRBV19, TRBJ2-1)
CASSKAGPSSYNEQFF

SEQ ID NO: 291837 - protein, 12 aa, Homo sapiens
  CDR3 for alpha chain variable domain of TCR clone 145919 (TRAV8-2, TRAJ13)
SDLSGGYQKVTF

SEQ ID NO: 291838 - protein, 16 aa, Homo sapiens
  CDR3 for beta chain variable domain of TCR clone 145919 (TRBV27, TRBJ2-2)
CASSFRGLARTGELFF

SEQ ID NO: 291839 - protein, 17 aa, Homo sapiens
  CDR3 for alpha chain variable domain of TCR clone 145920 (TRAV14/DV4, TRAJ28)
CAMREGYSGAGSYQLTF

SEQ ID NO: 291840 - protein, 15 aa, Homo sapiens
  CDR3 for beta chain variable domain of TCR clone 145920 (TRBV4-1, TRBJ2-5)
CASSQWDLYQETQYF

SEQ ID NO: 291841 - protein, 14 aa, Homo sapiens
  CDR3 for alpha chain variable domain of TCR clone 145921 (TRAV3, TRAJ7)
CAVREEEREQQTRF

SEQ ID NO: 291842 - protein, 11 aa, Homo sapiens
  CDR3 for beta chain variable domain of TCR clone 145921 (TRBV20-1, TRBJ1-5)
CSAQGDQPQHF

SEQ ID NO: 291843 - protein, 12 aa, Homo sapiens
  CDR3 for alpha chain variable domain of TCR clone 145922 (TRAV22, TRAJ36)
CAVGTGANNLFF

SEQ ID NO: 291844 - protein, 14 aa, Homo sapiens
  CDR3 for beta chain variable domain of TCR clone 145922 (TRBV7-9, TRBJ1-4)
CASSLEGQSEKLFF

SEQ ID NO: 291845 - protein, 15 aa, Homo sapiens
  CDR3 for alpha chain variable domain of TCR clone 145923 (TRAV26-1, TRAJ22)
CIVRVSFWFCTATDL

SEQ ID NO: 291846 - protein, 12 aa, Homo sapiens
  CDR3 for beta chain variable domain of TCR clone 145923 (TRBV11-2, TRBJ2-2)
CASSLGGGELFF

SEQ ID NO: 291847 - protein, 14 aa, Homo sapiens
  CDR3 for alpha chain variable domain of TCR clone 145924 (TRAV23/DV6, TRAJ23)
CAAGPYNQGGKLIL

SEQ ID NO: 291848 - protein, 17 aa, Homo sapiens
  CDR3 for beta chain variable domain of TCR clone 145924 (TRBV4-2, TRBJ1-1)
CASSQVATGGMNTEAFF

SEQ ID NO: 291849 - protein, 13 aa, Homo sapiens
  CDR3 for alpha chain variable domain of TCR clone 145925 (TRAV20, TRAJ42)
CAVQGGSQGNLIF

SEQ ID NO: 291850 - protein, 15 aa, Homo sapiens
  CDR3 for beta chain variable domain of TCR clone 145925 (TRBV10-1, TRBJ2-1)
CASSEWLGTYNEQFF

SEQ ID NO: 291851 - protein, 18 aa, Homo sapiens
  CDR3 for alpha chain variable domain of TCR clone 145926 (TRAV26-1, TRAJ22)
CIVRVALISSGSARQLTF

SEQ ID NO: 291852 - protein, 18 aa, Homo sapiens
  CDR3 for beta chain variable domain of TCR clone 145926 (TRBV11-2, TRBJ2-3)
CASSLGGASRGAPNTQYF

SEQ ID NO: 291853 - protein, 13 aa, Homo sapiens
  CDR3 for alpha chain variable domain of TCR clone 145927 (TRAV1-1, TRAJ23)
CAVVANQGGKLIF

SEQ ID NO: 291854 - protein, 14 aa, Homo sapiens
  CDR3 for beta chain variable domain of TCR clone 145927 (TRBV28, TRBJ1-2)
CASRIQGANYGYTF

SEQ ID NO: 291855 - protein, 13 aa, Homo sapiens
  CDR3 for alpha chain variable domain of TCR clone 145928 (TRAV4, TRAJ33)
CLVGVMNNYQLIW

SEQ ID NO: 291856 - protein, 14 aa, Homo sapiens
  CDR3 for beta chain variable domain of TCR clone 145928 (TRBV7-9, TRBJ1-1)
CASSLGGANTEAFF

SEQ ID NO: 291857 - protein, 14 aa, Homo sapiens
  CDR3 for alpha chain variable domain of TCR clone 145929 (TRAV13-1, TRAJ44)
CAAKATGTARKLTF

SEQ ID NO: 291858 - protein, 14 aa, Homo sapiens
  CDR3 for beta chain variable domain of TCR clone 145929 (TRBV19, TRBJ2-2)
CDSSTLHRSGELFF

SEQ ID NO: 291859 - protein, 14 aa, Homo sapiens
  CDR3 for alpha chain variable domain of TCR clone 145930 (TRAV12-3, TRAJ10)
SHLPLTGGGNKLTF

SEQ ID NO: 291860 - protein, 15 aa, Homo sapiens
  CDR3 for beta chain variable domain of TCR clone 145930 (TRBV10-2, TRBJ2-6)
CASGEQGTGANVLTF

SEQ ID NO: 291861 - protein, 14 aa, Homo sapiens
  CDR3 for alpha chain variable domain of TCR clone 145931 (TRAV1-2, TRAJ6)
CAVRSSGGSYIPTF

SEQ ID NO: 291862 - protein, 13 aa, Homo sapiens
  CDR3 for beta chain variable domain of TCR clone 145931 (TRBV19, TRBJ2-7)
RASSPRQSYEQYF

SEQ ID NO: 291863 - protein, 12 aa, Homo sapiens
  CDR3 for alpha chain variable domain of TCR clone 145932 (TRAV13-2, TRAJ23)
CAERHRGGKLIF

SEQ ID NO: 291864 - protein, 15 aa, Homo sapiens
  CDR3 for beta chain variable domain of TCR clone 145932 (TRBV7-3, TRBJ2-2)
CQQLKAGTLSGELFF

SEQ ID NO: 291865 - protein, 12 aa, Homo sapiens
  CDR3 for alpha chain variable domain of TCR clone 145933 (TRAV26-1, TRAJ48)
CIVSGGNEKLTF

SEQ ID NO: 291866 - protein, 14 aa, Homo sapiens
  CDR3 for beta chain variable domain of TCR clone 145933 (TRBV14, TRBJ2-1)
CASSQVQGRGEQFF

SEQ ID NO: 291867 - protein, 12 aa, Homo sapiens
  CDR3 for alpha chain variable domain of TCR clone 145934 (TRAV13-1, TRAJ48)
CAANFGNEKLTF

SEQ ID NO: 291868 - protein, 14 aa, Homo sapiens
  CDR3 for beta chain variable domain of TCR clone 145934 (TRBV4-1, TRBJ2-7)
CASSPVAGGDEQYF

SEQ ID NO: 291869 - protein, 23 aa, Homo sapiens
  CDR3 for alpha chain variable domain of TCR clone 145935 (TRAV26-1, TRAJ38)
CIADNAGNNHIQNPDPAVYQLRD

SEQ ID NO: 291870 - protein, 16 aa, Homo sapiens
  CDR3 for beta chain variable domain of TCR clone 145935 (TRBV20-1, TRBJ2-1)
CSAPGLAGSYSDEQFF

SEQ ID NO: 291871 - protein, 14 aa, Homo sapiens
  CDR3 for alpha chain variable domain of TCR clone 145936 (TRAV27, TRAJ35)
CAASKGGFGNVLHC

SEQ ID NO: 291872 - protein, 13 aa, Homo sapiens
  CDR3 for beta chain variable domain of TCR clone 145936 (TRBV7-3, TRBJ1-1)
CASSQDWGAEAFF

SEQ ID NO: 291873 - protein, 14 aa, Homo sapiens
  CDR3 for alpha chain variable domain of TCR clone 145937 (TRAV12-3, TRAJ54)
CAMRGIQGAQKLVF

SEQ ID NO: 291874 - protein, 13 aa, Homo sapiens
  CDR3 for beta chain variable domain of TCR clone 145937 (TRBV19, TRBJ1-1)
CASSPSNGGEASF

SEQ ID NO: 291875 - protein, 10 aa, Homo sapiens
  CDR3 for alpha chain variable domain of TCR clone 145938 (TRAV30, TRAJ48)
CGIGNEKLTF

SEQ ID NO: 291876 - protein, 14 aa, Homo sapiens
  CDR3 for beta chain variable domain of TCR clone 145938 (TRBV7-6, TRBJ2-3)
SASSVAGGTDTQYF

SEQ ID NO: 291877 - protein, 17 aa, Homo sapiens
  CDR3 for alpha chain variable domain of TCR clone 145939 (TRAV8-2, )
CVVNIQNPDPAVYQLRD

SEQ ID NO: 291878 - protein, 14 aa, Homo sapiens
  CDR3 for beta chain variable domain of TCR clone 145939 (TRBV7-9, TRBJ2-5)
CTSSLVGGEETQYF

SEQ ID NO: 291879 - protein, 13 aa, Homo sapiens
  CDR3 for alpha chain variable domain of TCR clone 145940 (TRAV8-6, TRAJ49)
RAVITNTGNQFYF

SEQ ID NO: 291880 - protein, 16 aa, Homo sapiens
  CDR3 for beta chain variable domain of TCR clone 145940 (TRBV20-1, TRBJ2-1)
CSALTWTSGSYNEKFF

SEQ ID NO: 291881 - protein, 15 aa, Homo sapiens
  CDR3 for alpha chain variable domain of TCR clone 145941 (TRAV3, TRAJ45)
CAVRTPWGGADGLTF

SEQ ID NO: 291882 - protein, 13 aa, Homo sapiens
  CDR3 for beta chain variable domain of TCR clone 145941 (TRBV11-2, TRBJ2-5)
CASSFSSQETQYF

SEQ ID NO: 291883 - protein, 15 aa, Homo sapiens
  CDR3 for alpha chain variable domain of TCR clone 145942 (TRAV8-4, TRAJ40)
CAVSDDTSGTYKYIF

SEQ ID NO: 291884 - protein, 16 aa, Homo sapiens
  CDR3 for beta chain variable domain of TCR clone 145942 (TRBV13, TRBJ2-2)
CASSEVFGANTGELFF

SEQ ID NO: 291885 - protein, 14 aa, Homo sapiens
  CDR3 for alpha chain variable domain of TCR clone 145943 (TRAV12-2, TRAJ53)
CAVKGGGSNYKLTF

SEQ ID NO: 291886 - protein, 17 aa, Homo sapiens
  CDR3 for beta chain variable domain of TCR clone 145943 (TRBV7-2, TRBJ1-4)
CASSFKAWPTTDEKLFF

SEQ ID NO: 291887 - protein, 13 aa, Homo sapiens
  CDR3 for alpha chain variable domain of TCR clone 145944 (TRAV36/DV7, TRAJ49)
CAVAANTGNQFYF

SEQ ID NO: 291888 - protein, 14 aa, Homo sapiens
  CDR3 for beta chain variable domain of TCR clone 145944 (TRBV20-1, TRBJ2-5)
CSASSGRAAETQYF

SEQ ID NO: 291889 - protein, 16 aa, Homo sapiens
  CDR3 for alpha chain variable domain of TCR clone 145945 (TRAV12-2, TRAJ52)
CRLANAGGTSYGKLTF

SEQ ID NO: 291890 - protein, 15 aa, Homo sapiens
  CDR3 for beta chain variable domain of TCR clone 145945 (TRBV7-9, TRBJ1-5)
CASSQGHQPNQPQHF

SEQ ID NO: 291891 - protein, 13 aa, Homo sapiens
  CDR3 for alpha chain variable domain of TCR clone 145946 (TRAV16, TRAJ27)
CALGGPMQANQPL

SEQ ID NO: 291892 - protein, 15 aa, Homo sapiens
  CDR3 for beta chain variable domain of TCR clone 145946 (TRBV18, TRBJ2-1)
CASSPPSASYNEQFF

SEQ ID NO: 291893 - protein, 18 aa, Homo sapiens
  CDR3 for alpha chain variable domain of TCR clone 145947 (TRAV21, TRAJ52)
CAVRPSPAGGTSYGKPTF

SEQ ID NO: 291894 - protein, 17 aa, Homo sapiens
  CDR3 for beta chain variable domain of TCR clone 145947 (TRBV13, TRBJ2-3)
CASSLPRVAGGRNTQYF

SEQ ID NO: 291895 - protein, 12 aa, Homo sapiens
  CDR3 for alpha chain variable domain of TCR clone 145948 (TRAV26-1, TRAJ35)
CTGLSFGNVLHC

SEQ ID NO: 291896 - protein, 17 aa, Homo sapiens
  CDR3 for beta chain variable domain of TCR clone 145948 (TRBV11-3, TRBJ2-5)
CASSLPGVRGGKETQYF

SEQ ID NO: 291897 - protein, 13 aa, Homo sapiens
  CDR3 for alpha chain variable domain of TCR clone 145949 (TRAV17, TRAJ40)
CATRSPGTYKYIF

SEQ ID NO: 291898 - protein, 16 aa, Homo sapiens
  CDR3 for beta chain variable domain of TCR clone 145949 (TRBV10-3, TRBJ2-7)
CAISADFADRPYEQYF

SEQ ID NO: 291899 - protein, 15 aa, Homo sapiens
  CDR3 for alpha chain variable domain of TCR clone 145950 (TRAV21, TRAJ32)
CAVNSYGGATNKLIF

SEQ ID NO: 291900 - protein, 18 aa, Homo sapiens
  CDR3 for beta chain variable domain of TCR clone 145950 (TRBV7-9, TRBJ2-1)
CASSTGLAEGSSYDEQFF

SEQ ID NO: 291901 - protein, 13 aa, Homo sapiens
  CDR3 for alpha chain variable domain of TCR clone 145951 (TRAV21, TRAJ27)
CAARPGNAGKSTF

SEQ ID NO: 291902 - protein, 12 aa, Homo sapiens
  CDR3 for beta chain variable domain of TCR clone 145951 (TRBV24-1, TRBJ1-1)
CATLYPDTEAFF

SEQ ID NO: 291903 - protein, 12 aa, Homo sapiens
  CDR3 for alpha chain variable domain of TCR clone 145952 (TRAV12-3, TRAJ29)
CAAGEGNTPLVF

SEQ ID NO: 291904 - protein, 11 aa, Homo sapiens
  CDR3 for beta chain variable domain of TCR clone 145952 (TRBV18, TRBJ2-1)
AAGAGDNEQFF

SEQ ID NO: 291905 - protein, 15 aa, Homo sapiens
  CDR3 for alpha chain variable domain of TCR clone 145953 (TRAV27, TRAJ38)
CAARRNAGNNRKLNW

SEQ ID NO: 291906 - protein, 13 aa, Homo sapiens
  CDR3 for beta chain variable domain of TCR clone 145953 (TRBV12-5, TRBJ2-3)
CASGDRQSDTQYF

SEQ ID NO: 291907 - protein, 14 aa, Homo sapiens
  CDR3 for alpha chain variable domain of TCR clone 145954 (TRAV12-2, TRAJ45)
CAVNKGGGADGLPF

SEQ ID NO: 291908 - protein, 16 aa, Homo sapiens
  CDR3 for beta chain variable domain of TCR clone 145954 (TRBV20-1, TRBJ1-1)
CSARALTQGMNTEAFF

SEQ ID NO: 291909 - protein, 16 aa, Homo sapiens
  CDR3 for alpha chain variable domain of TCR clone 145955 (TRAV30, TRAJ26)
CGTESVGDNYGQHFVF

SEQ ID NO: 291910 - protein, 13 aa, Homo sapiens
  CDR3 for beta chain variable domain of TCR clone 145955 (TRBV19, TRBJ1-2)
CASSISEDYGYTF

SEQ ID NO: 291911 - protein, 18 aa, Homo sapiens
  CDR3 for alpha chain variable domain of TCR clone 145956 (TRAV13-1, TRAJ52)
CAAKNPNAGGTSNGKLTF

SEQ ID NO: 291912 - protein, 18 aa, Homo sapiens
  CDR3 for beta chain variable domain of TCR clone 145956 (TRBV12-4, TRBJ2-4)
CASSRTGAVDVAKNIQYF

SEQ ID NO: 291913 - protein, 12 aa, Homo sapiens
  CDR3 for alpha chain variable domain of TCR clone 145957 (TRAV1-2, TRAJ33)
CAVRDSNYQLIW

SEQ ID NO: 291914 - protein, 16 aa, Homo sapiens
  CDR3 for beta chain variable domain of TCR clone 145957 (TRBV29-1, TRBJ2-6)
CSVSTGAPSGANDLTF

SEQ ID NO: 291915 - protein, 16 aa, Homo sapiens
  CDR3 for alpha chain variable domain of TCR clone 145958 (TRAV3, TRAJ10)
CAVRDMRAGGGNKLTF

SEQ ID NO: 291916 - protein, 13 aa, Homo sapiens
  CDR3 for beta chain variable domain of TCR clone 145958 (TRBV7-9, TRBJ1-2)
CASSLKQKYGYTF

SEQ ID NO: 291917 - protein, 12 aa, Homo sapiens
  CDR3 for alpha chain variable domain of TCR clone 145959 (TRAV3, TRAJ27)
CAVRDKAGKLIF

SEQ ID NO: 291918 - protein, 14 aa, Homo sapiens
  CDR3 for beta chain variable domain of TCR clone 145959 (TRBV5-1, TRBJ1-2)
CASSVDSTNYGYTF

SEQ ID NO: 291919 - protein, 13 aa, Homo sapiens
  CDR3 for alpha chain variable domain of TCR clone 145960 (TRAV3, TRAJ21)
CAVREPDFNKFYF

SEQ ID NO: 291920 - protein, 16 aa, Homo sapiens
  CDR3 for beta chain variable domain of TCR clone 145960 (TRBV4-2, TRBJ2-4)
CASSQELRRAKNIQYF

SEQ ID NO: 291921 - protein, 13 aa, Homo sapiens
  CDR3 for alpha chain variable domain of TCR clone 145961 (TRAV26-1, TRAJ31)
CIVRVEGNARLMF

SEQ ID NO: 291922 - protein, 17 aa, Homo sapiens
  CDR3 for beta chain variable domain of TCR clone 145961 (TRBV11-2, TRBJ2-1)
CASSLYPPGVEYNEQFF

SEQ ID NO: 291923 - protein, 13 aa, Homo sapiens
  CDR3 for alpha chain variable domain of TCR clone 145962 (TRAV2, TRAJ40)
CAVVTSLTYKYIF

SEQ ID NO: 291924 - protein, 14 aa, Homo sapiens
  CDR3 for beta chain variable domain of TCR clone 145962 (TRBV19, TRBJ2-1)
GAMPTGVGSGEQVG

SEQ ID NO: 291925 - protein, 15 aa, Homo sapiens
  CDR3 for alpha chain variable domain of TCR clone 145963 (TRAV13-1, TRAJ5)
CAASKADTGRKALTF

SEQ ID NO: 291926 - protein, 16 aa, Homo sapiens
  CDR3 for beta chain variable domain of TCR clone 145963 (TRBV7-2, TRBJ2-1)
CASSLGRTSGDNELFF

SEQ ID NO: 291927 - protein, 15 aa, Homo sapiens
  CDR3 for alpha chain variable domain of TCR clone 145964 (TRAV4, TRAJ39)
CLVGPNNNAGNMLTF

SEQ ID NO: 291928 - protein, 15 aa, Homo sapiens
  CDR3 for beta chain variable domain of TCR clone 145964 (TRBV10-2, TRBJ2-6)
CASSEQGTGANVLTF

SEQ ID NO: 291929 - protein, 14 aa, Homo sapiens
  CDR3 for alpha chain variable domain of TCR clone 145965 (TRAV12-2, TRAJ53)
CRERGGGSNYNLTF

SEQ ID NO: 291930 - protein, 14 aa, Homo sapiens
  CDR3 for beta chain variable domain of TCR clone 145965 (TRBV19, TRBJ2-2)
CASSTLHRSGELFF

SEQ ID NO: 291931 - protein, 16 aa, Homo sapiens
  CDR3 for alpha chain variable domain of TCR clone 145966 (TRAV21, TRAJ52)
CAVTNAGGTSYGKLTF

SEQ ID NO: 291932 - protein, 13 aa, Homo sapiens
  CDR3 for beta chain variable domain of TCR clone 145966 (TRBV20-1, TRBJ2-3)
CSARLAGTDMQYF

SEQ ID NO: 291933 - protein, 13 aa, Homo sapiens
  CDR3 for alpha chain variable domain of TCR clone 145967 (TRAV1-2, TRAJ9)
CAALNTGGFRTIF

SEQ ID NO: 291934 - protein, 15 aa, Homo sapiens
  CDR3 for beta chain variable domain of TCR clone 145967 (TRBV6-6, TRBJ2-7)
CASSYSYGGSYEQYF

SEQ ID NO: 291935 - protein, 14 aa, Homo sapiens
  CDR3 for alpha chain variable domain of TCR clone 145968 (TRAV8-3, TRAJ4)
CAVGAAGGYNKLIF

SEQ ID NO: 291936 - protein, 16 aa, Homo sapiens
  CDR3 for beta chain variable domain of TCR clone 145968 (TRBV4-1, TRBJ1-2)
CASSQDAGQVLYGYTF

SEQ ID NO: 291937 - protein, 12 aa, Homo sapiens
  CDR3 for alpha chain variable domain of TCR clone 145969 (TRAV21, TRAJ13)
PGPSGGYQKVTF

SEQ ID NO: 291938 - protein, 18 aa, Homo sapiens
  CDR3 for beta chain variable domain of TCR clone 145969 (TRBV4-1, TRBJ1-5)
CASSQGGILLISPSILVM

SEQ ID NO: 291939 - protein, 18 aa, Homo sapiens
  CDR3 for alpha chain variable domain of TCR clone 145970 (TRAV13-1, TRAJ52)
CAASKRRAGGTSYGKLTF

SEQ ID NO: 291940 - protein, 14 aa, Homo sapiens
  CDR3 for beta chain variable domain of TCR clone 145970 (TRBV7-2, TRBJ2-7)
CASSPKTSFYEQYF

SEQ ID NO: 291941 - protein, 14 aa, Homo sapiens
  CDR3 for alpha chain variable domain of TCR clone 145971 (TRAV2, TRAJ22)
CAVEDSGSAGQLTF

SEQ ID NO: 291942 - protein, 15 aa, Homo sapiens
  CDR3 for beta chain variable domain of TCR clone 145971 (TRBV28, TRBJ1-2)
CASSLPVGHGDGYTF

SEQ ID NO: 291943 - protein, 19 aa, Homo sapiens
  CDR3 for alpha chain variable domain of TCR clone 145972 (TRAV38-1, TRAJ53)
CAFMKHGLEIGGSNYKLTF

SEQ ID NO: 291944 - protein, 13 aa, Homo sapiens
  CDR3 for beta chain variable domain of TCR clone 145972 (TRBV19, TRBJ2-7)
CASSPRQSYEQYF

SEQ ID NO: 291945 - protein, 13 aa, Homo sapiens
  CDR3 for alpha chain variable domain of TCR clone 145973 (TRAV8-3, TRAJ48)
CAVMPFGIEKLTF

SEQ ID NO: 291946 - protein, 15 aa, Homo sapiens
  CDR3 for beta chain variable domain of TCR clone 145973 (TRBV11-2, TRBJ2-1)
CASSSPSTRYNEQFF

SEQ ID NO: 291947 - protein, 13 aa, Homo sapiens
  CDR3 for alpha chain variable domain of TCR clone 145974 (TRAV12-2, TRAJ24)
CAVSTDSWGKLQF

SEQ ID NO: 291948 - protein, 12 aa, Homo sapiens
  CDR3 for beta chain variable domain of TCR clone 145974 (TRBV7-9, TRBJ2-7)
CATRTDAYEQYF

SEQ ID NO: 291949 - protein, 14 aa, Homo sapiens
  CDR3 for alpha chain variable domain of TCR clone 145975 (TRAV8-6, TRAJ49)
CAVSVRYTGNQFSF

SEQ ID NO: 291950 - protein, 19 aa, Homo sapiens
  CDR3 for beta chain variable domain of TCR clone 145975 (TRBV28, TRBJ2-1)
CASSFSIRGSGRARYEQFF

SEQ ID NO: 291951 - protein, 14 aa, Homo sapiens
  CDR3 for alpha chain variable domain of TCR clone 145976 (TRAV3, TRAJ21)
CALGRGSTNFTLDL

SEQ ID NO: 291952 - protein, 14 aa, Homo sapiens
  CDR3 for beta chain variable domain of TCR clone 145976 (TRBV7-9, TRBJ2-4)
CASSLAMGGSIQYF

SEQ ID NO: 291953 - protein, 17 aa, Homo sapiens
  CDR3 for alpha chain variable domain of TCR clone 145977 (TRAV26-2, TRAJ37)
CILRDRGGSSNTGKLIF

SEQ ID NO: 291954 - protein, 13 aa, Homo sapiens
  CDR3 for beta chain variable domain of TCR clone 145977 (TRBV7-9, TRBJ1-2)
CASSLKQNYGYTF

SEQ ID NO: 291955 - protein, 13 aa, Homo sapiens
  CDR3 for alpha chain variable domain of TCR clone 145978 (TRAV8-1, TRAJ30)
CAVIMNRDDKIIF

SEQ ID NO: 291956 - protein, 13 aa, Homo sapiens
  CDR3 for beta chain variable domain of TCR clone 145978 (TRBV2, TRBJ1-1)
CASSVLMNTEAFF

SEQ ID NO: 291957 - protein, 14 aa, Homo sapiens
  CDR3 for alpha chain variable domain of TCR clone 145979 (TRAV12-2, TRAJ33)
CAVKRARSNYQLIW

SEQ ID NO: 291958 - protein, 15 aa, Homo sapiens
  CDR3 for beta chain variable domain of TCR clone 145979 (TRBV24-1, TRBJ2-5)
CATSETTGAVGAQYF

SEQ ID NO: 291959 - protein, 13 aa, Homo sapiens
  CDR3 for alpha chain variable domain of TCR clone 145980 (TRAV22, TRAJ29)
CAVGGSGNTPLVF

SEQ ID NO: 291960 - protein, 16 aa, Homo sapiens
  CDR3 for beta chain variable domain of TCR clone 145980 (TRBV12-5, TRBJ2-5)
CASGPRTSGDQETQYF

SEQ ID NO: 291961 - protein, 11 aa, Homo sapiens
  CDR3 for alpha chain variable domain of TCR clone 145981 (TRAV1-1, TRAJ23)
CAVRQGGKLIF

SEQ ID NO: 291962 - protein, 14 aa, Homo sapiens
  CDR3 for beta chain variable domain of TCR clone 145981 (TRBV19, TRBJ2-1)
CASPTFVLSGEQFL

SEQ ID NO: 291963 - protein, 12 aa, Homo sapiens
  CDR3 for alpha chain variable domain of TCR clone 145982 (TRAV17, TRAJ4)
CATDGGYNKLIF

SEQ ID NO: 291964 - protein, 13 aa, Homo sapiens
  CDR3 for beta chain variable domain of TCR clone 145982 (TRBV6-1, TRBJ1-2)
CASSAREGYGYTF

SEQ ID NO: 291965 - protein, 10 aa, Homo sapiens
  CDR3 for alpha chain variable domain of TCR clone 145983 (TRAV30, TRAJ16)
CGTGGQKLLF

SEQ ID NO: 291966 - protein, 13 aa, Homo sapiens
  CDR3 for beta chain variable domain of TCR clone 145983 (TRBV27, TRBJ1-4)
CASSLMGDEKLFF

SEQ ID NO: 291967 - protein, 14 aa, Homo sapiens
  CDR3 for alpha chain variable domain of TCR clone 145984 (TRAV12-2, TRAJ40)
CAVKIPSGTYKYIF

SEQ ID NO: 291968 - protein, 13 aa, Homo sapiens
  CDR3 for beta chain variable domain of TCR clone 145984 (TRBV7-2, TRBJ2-7)
CASSQTSVETQYF

SEQ ID NO: 291969 - protein, 11 aa, Homo sapiens
  CDR3 for alpha chain variable domain of TCR clone 145985 (TRAV12-2, TRAJ21)
CAVRNFNKFYF

SEQ ID NO: 291970 - protein, 16 aa, Homo sapiens
  CDR3 for beta chain variable domain of TCR clone 145985 (TRBV7-3, TRBJ2-2)
CASSFLPSGYTGELFF

SEQ ID NO: 291971 - protein, 10 aa, Homo sapiens
  CDR3 for alpha chain variable domain of TCR clone 145986 (TRAV13-1, TRAJ8)
CAAPFQKLEF

SEQ ID NO: 291972 - protein, 20 aa, Homo sapiens
  CDR3 for beta chain variable domain of TCR clone 145986 (TRBV3-1, TRBJ2-6)
CASSPRPGLEGGAGANVLTF

SEQ ID NO: 291973 - protein, 14 aa, Homo sapiens
  CDR3 for alpha chain variable domain of TCR clone 145987 (TRAV23/DV6, TRAJ4)
CAAPSSGGYNKLIF

SEQ ID NO: 291974 - protein, 14 aa, Homo sapiens
  CDR3 for beta chain variable domain of TCR clone 145987 (TRBV18, TRBJ2-7)
CASSPRGGAYEQYF

SEQ ID NO: 291975 - protein, 13 aa, Homo sapiens
  CDR3 for alpha chain variable domain of TCR clone 145988 (TRAV36/DV7, TRAJ49)
CAGDSNTGNHFYF

SEQ ID NO: 291976 - protein, 12 aa, Homo sapiens
  CDR3 for beta chain variable domain of TCR clone 145988 (TRBV11-2, TRBJ2-2)
CASSLGGGELFF

SEQ ID NO: 291977 - protein, 15 aa, Homo sapiens
  CDR3 for alpha chain variable domain of TCR clone 145989 (TRAV9-2, TRAJ18)
CALSGRGPTLGRLYF

SEQ ID NO: 291978 - protein, 14 aa, Homo sapiens
  CDR3 for beta chain variable domain of TCR clone 145989 (TRBV4-2, TRBJ1-2)
CASSQDRREGGYTF

SEQ ID NO: 291979 - protein, 15 aa, Homo sapiens
  CDR3 for alpha chain variable domain of TCR clone 145990 (TRAV8-3, TRAJ27)
CAVGPSKTNAGKSTF

SEQ ID NO: 291980 - protein, 16 aa, Homo sapiens
  CDR3 for beta chain variable domain of TCR clone 145990 (TRBV4-1, TRBJ2-6)
CASSQDGGPGANVLTF

SEQ ID NO: 291981 - protein, 16 aa, Homo sapiens
  CDR3 for alpha chain variable domain of TCR clone 145991 (TRAV30, TRAJ24)
CGTEIVDADSWGKFQF

SEQ ID NO: 291982 - protein, 14 aa, Homo sapiens
  CDR3 for beta chain variable domain of TCR clone 145991 (TRBV12-5, TRBJ2-5)
CATASRTHQETQYF

SEQ ID NO: 291983 - protein, 16 aa, Homo sapiens
  CDR3 for alpha chain variable domain of TCR clone 145992 (TRAV39, TRAJ32)
CAVDMEYGSATNKLIF

SEQ ID NO: 291984 - protein, 14 aa, Homo sapiens
  CDR3 for beta chain variable domain of TCR clone 145992 (TRBV9, TRBJ2-4)
CASSPSGTSGFQYF

SEQ ID NO: 291985 - protein, 15 aa, Homo sapiens
  CDR3 for alpha chain variable domain of TCR clone 145993 (TRAV3, TRAJ32)
CAVSSYGGATNKLIF

SEQ ID NO: 291986 - protein, 13 aa, Homo sapiens
  CDR3 for beta chain variable domain of TCR clone 145993 (TRBV2, TRBJ2-7)
CASSVGGSGEQYF

SEQ ID NO: 291987 - protein, 14 aa, Homo sapiens
  CDR3 for alpha chain variable domain of TCR clone 145994 (TRAV8-2, TRAJ4)
CVVSPSGGYNKLSF

SEQ ID NO: 291988 - protein, 15 aa, Homo sapiens
  CDR3 for beta chain variable domain of TCR clone 145994 (TRBV4-1, TRBJ1-4)
CARSDTGGTNEKLFF

SEQ ID NO: 291989 - protein, 18 aa, Homo sapiens
  CDR3 for alpha chain variable domain of TCR clone 145995 (TRAV21, TRAJ53)
CAVKGGENSGGSNYKLTF

SEQ ID NO: 291990 - protein, 12 aa, Homo sapiens
  CDR3 for beta chain variable domain of TCR clone 145995 (TRBV11-2, TRBJ2-2)
CASSLGGGELFF

SEQ ID NO: 291991 - protein, 12 aa, Homo sapiens
  CDR3 for alpha chain variable domain of TCR clone 145996 (TRAV12-3, TRAJ17)
CAMTLTGNRLTF

SEQ ID NO: 291992 - protein, 17 aa, Homo sapiens
  CDR3 for beta chain variable domain of TCR clone 145996 (TRBV7-8, TRBJ2-6)
CASSAGTGGAGANVPTF

SEQ ID NO: 291993 - protein, 14 aa, Homo sapiens
  CDR3 for alpha chain variable domain of TCR clone 145997 (TRAV1-1, TRAJ27)
CAVIYNTNAGKSTF

SEQ ID NO: 291994 - protein, 17 aa, Homo sapiens
  CDR3 for beta chain variable domain of TCR clone 145997 (TRBV15, TRBJ1-1)
CATSRVGGADGDTEAFF

SEQ ID NO: 291995 - protein, 16 aa, Homo sapiens
  CDR3 for alpha chain variable domain of TCR clone 145998 (TRAV13-1, TRAJ18)
CAASRMRGSALGRLYF

SEQ ID NO: 291996 - protein, 16 aa, Homo sapiens
  CDR3 for beta chain variable domain of TCR clone 145998 (TRBV27, TRBJ1-1)
CASSSRGRTGYTEAFF

SEQ ID NO: 291997 - protein, 13 aa, Homo sapiens
  CDR3 for alpha chain variable domain of TCR clone 145999 (TRAV8-4, TRAJ53)
CAVSDSSNYKLTF

SEQ ID NO: 291998 - protein, 15 aa, Homo sapiens
  CDR3 for beta chain variable domain of TCR clone 145999 (TRBV28, TRBJ2-1)
CASSIIAGGRSEQFF

SEQ ID NO: 291999 - protein, 14 aa, Homo sapiens
  CDR3 for alpha chain variable domain of TCR clone 146000 (TRAV16, TRAJ20)
CALSGRAAGNKLSF

SEQ ID NO: 292000 - protein, 14 aa, Homo sapiens
  CDR3 for beta chain variable domain of TCR clone 146000 (TRBV7-6, TRBJ2-3)
CASSLGTVTDTQYF

SEQ ID NO: 292001 - protein, 15 aa, Homo sapiens
  CDR3 for alpha chain variable domain of TCR clone 146001 (TRAV3, TRAJ22)
CAVRDRGGSARQLTF

SEQ ID NO: 292002 - protein, 14 aa, Homo sapiens
  CDR3 for beta chain variable domain of TCR clone 146001 (TRBV19, TRBJ2-1)
CASSRLASLNEQFF

SEQ ID NO: 292003 - protein, 15 aa, Homo sapiens
  CDR3 for alpha chain variable domain of TCR clone 146002 (TRAV12-3, TRAJ8)
CAMSLLNTGFQKLVF

SEQ ID NO: 292004 - protein, 11 aa, Homo sapiens
  CDR3 for beta chain variable domain of TCR clone 146002 (TRBV10-3, TRBJ2-7)
CAISEGLEQYF

SEQ ID NO: 292005 - protein, 15 aa, Homo sapiens
  CDR3 for alpha chain variable domain of TCR clone 146003 (TRAV12-1, TRAJ44)
CVVDAYTGTASKLTF

SEQ ID NO: 292006 - protein, 14 aa, Homo sapiens
  CDR3 for beta chain variable domain of TCR clone 146003 (TRBV5-1, TRBJ1-2)
CASSLEPVNYGYTF

SEQ ID NO: 292007 - protein, 12 aa, Homo sapiens
  CDR3 for alpha chain variable domain of TCR clone 146004 (TRAV12-2, TRAJ10)
WGVTGGGNKLTF

SEQ ID NO: 292008 - protein, 13 aa, Homo sapiens
  CDR3 for beta chain variable domain of TCR clone 146004 (TRBV19, TRBJ2-5)
CASSIHSQETQYF

SEQ ID NO: 292009 - protein, 18 aa, Homo sapiens
  CDR3 for alpha chain variable domain of TCR clone 146005 (TRAV13-1, TRAJ52)
CAASKRSAGGTSYGKLTF

SEQ ID NO: 292010 - protein, 12 aa, Homo sapiens
  CDR3 for beta chain variable domain of TCR clone 146005 (TRBV11-2, TRBJ2-2)
CASSLGGGERFF

SEQ ID NO: 292011 - protein, 17 aa, Homo sapiens
  CDR3 for alpha chain variable domain of TCR clone 146006 (TRAV3, TRAJ42)
CAVRDRDYGGSQGNLIF

SEQ ID NO: 292012 - protein, 14 aa, Homo sapiens
  CDR3 for beta chain variable domain of TCR clone 146006 (TRBV19, TRBJ2-2)
CASSTGQGAGELFF

SEQ ID NO: 292013 - protein, 15 aa, Homo sapiens
  CDR3 for alpha chain variable domain of TCR clone 146007 (TRAV3, TRAJ12)
CAVRDIRDSSYKLIF

SEQ ID NO: 292014 - protein, 18 aa, Homo sapiens
  CDR3 for beta chain variable domain of TCR clone 146007 (TRBV13, TRBJ2-1)
CASSLGTASLFSYNEQFF

SEQ ID NO: 292015 - protein, 14 aa, Homo sapiens
  CDR3 for alpha chain variable domain of TCR clone 146008 (TRAV1-1, TRAJ23)
CAVSIYNQGGKLIF

SEQ ID NO: 292016 - protein, 15 aa, Homo sapiens
  CDR3 for beta chain variable domain of TCR clone 146008 (TRBV9, TRBJ1-6)
CASSVAGTGDSPLHL

SEQ ID NO: 292017 - protein, 14 aa, Homo sapiens
  CDR3 for alpha chain variable domain of TCR clone 146009 (TRAV12-3, TRAJ41)
CAMSAGNSGYALNF

SEQ ID NO: 292018 - protein, 15 aa, Homo sapiens
  CDR3 for beta chain variable domain of TCR clone 146009 (TRBV11-3, TRBJ2-5)
CASSLRGRVQETQYF

SEQ ID NO: 292019 - protein, 13 aa, Homo sapiens
  CDR3 for alpha chain variable domain of TCR clone 146010 (TRAV2, TRAJ15)
CAVASQAGTALIF

SEQ ID NO: 292020 - protein, 15 aa, Homo sapiens
  CDR3 for beta chain variable domain of TCR clone 146010 (TRBV7-9, TRBJ1-2)
CASSDIGGIVYGYTF

SEQ ID NO: 292021 - protein, 18 aa, Homo sapiens
  CDR3 for alpha chain variable domain of TCR clone 146011 (TRAV13-2, TRAJ32)
CAENMNYGGATNKLILEL

SEQ ID NO: 292022 - protein, 14 aa, Homo sapiens
  CDR3 for beta chain variable domain of TCR clone 146011 (TRBV15, TRBJ2-5)
CATSSTGYQETQYF

SEQ ID NO: 292023 - protein, 14 aa, Homo sapiens
  CDR3 for alpha chain variable domain of TCR clone 146012 (TRAV14/DV4, TRAJ54)
CAMGEAPGAQKLVF

SEQ ID NO: 292024 - protein, 15 aa, Homo sapiens
  CDR3 for beta chain variable domain of TCR clone 146012 (TRBV5-1, TRBJ2-7)
CASSLNGGPAREQYF

SEQ ID NO: 292025 - protein, 13 aa, Homo sapiens
  CDR3 for alpha chain variable domain of TCR clone 146013 (TRAV17, TRAJ22)
CAHHSGSARQLTF

SEQ ID NO: 292026 - protein, 14 aa, Homo sapiens
  CDR3 for beta chain variable domain of TCR clone 146013 (TRBV16, TRBJ1-1)
CASSQAGPNPEAFF

SEQ ID NO: 292027 - protein, 13 aa, Homo sapiens
  CDR3 for alpha chain variable domain of TCR clone 146014 (TRAV2, TRAJ43)
TTVLKRGNNDMRF

SEQ ID NO: 292028 - protein, 16 aa, Homo sapiens
  CDR3 for beta chain variable domain of TCR clone 146014 (TRBV4-1, TRBJ2-7)
CSSSQEWTSGPLEQYF

SEQ ID NO: 292029 - protein, 15 aa, Homo sapiens
  CDR3 for alpha chain variable domain of TCR clone 146015 (TRAV26-1, TRAJ56)
CIVRVDNGANSKLTF

SEQ ID NO: 292030 - protein, 15 aa, Homo sapiens
  CDR3 for beta chain variable domain of TCR clone 146015 (TRBV20-1, TRBJ2-7)
CSARDPTEGGHEQYF

SEQ ID NO: 292031 - protein, 14 aa, Homo sapiens
  CDR3 for alpha chain variable domain of TCR clone 146016 (TRAV1-2, TRAJ16)
CAVNRFSDGQKLLF

SEQ ID NO: 292032 - protein, 13 aa, Homo sapiens
  CDR3 for beta chain variable domain of TCR clone 146016 (TRBV7-3, TRBJ1-1)
CASCQDWGAEAFF

SEQ ID NO: 292033 - protein, 17 aa, Homo sapiens
  CDR3 for alpha chain variable domain of TCR clone 146017 (TRAV4, TRAJ13)
CLVGVQGSYGGYQKVTF

SEQ ID NO: 292034 - protein, 12 aa, Homo sapiens
  CDR3 for beta chain variable domain of TCR clone 146017 (TRBV7-8, TRBJ2-7)
CASSLGDREQYF

SEQ ID NO: 292035 - protein, 13 aa, Homo sapiens
  CDR3 for alpha chain variable domain of TCR clone 146018 (TRAV38-2/DV8, TRAJ34)
CAYRNYNTDKLIF

SEQ ID NO: 292036 - protein, 14 aa, Homo sapiens
  CDR3 for beta chain variable domain of TCR clone 146018 (TRBV5-5, TRBJ1-5)
CASSGQGVDQPQHF

SEQ ID NO: 292037 - protein, 14 aa, Homo sapiens
  CDR3 for alpha chain variable domain of TCR clone 146019 (TRAV23/DV6, TRAJ4)
CAANLSGGYNKLIF

SEQ ID NO: 292038 - protein, 10 aa, Homo sapiens
  CDR3 for beta chain variable domain of TCR clone 146019 (TRBV7-9, TRBJ2-3)
CRSPTDTQYF

SEQ ID NO: 292039 - protein, 20 aa, Homo sapiens
  CDR3 for alpha chain variable domain of TCR clone 146020 (TRAV26-1, TRAJ42)
CCVLLHRQTYYGGSQGNLIF

SEQ ID NO: 292040 - protein, 16 aa, Homo sapiens
  CDR3 for beta chain variable domain of TCR clone 146020 (TRBV9, TRBJ2-1)
CASSVGGGGNYNEQFF

SEQ ID NO: 292041 - protein, 15 aa, Homo sapiens
  CDR3 for alpha chain variable domain of TCR clone 146021 (TRAV2, TRAJ9)
CAVDDRGTGGFKTIF

SEQ ID NO: 292042 - protein, 14 aa, Homo sapiens
  CDR3 for beta chain variable domain of TCR clone 146021 (TRBV11-1, TRBJ2-7)
CASTFAVPSYEQYF

SEQ ID NO: 292043 - protein, 18 aa, Homo sapiens
  CDR3 for alpha chain variable domain of TCR clone 146022 (TRAV29/DV5, TRAJ52)
CAAGFRGAGGTSYGKLTF

SEQ ID NO: 292044 - protein, 11 aa, Homo sapiens
  CDR3 for beta chain variable domain of TCR clone 146022 (TRBV12-4, TRBJ2-3)
CASTATDTQYF

SEQ ID NO: 292045 - protein, 21 aa, Homo sapiens
  CDR3 for alpha chain variable domain of TCR clone 146023 (TRAV12-1, TRAJ41)
CVVPELKFRVCTQLRQRNLAV

SEQ ID NO: 292046 - protein, 12 aa, Homo sapiens
  CDR3 for beta chain variable domain of TCR clone 146023 (TRBV14, TRBJ2-5)
CASSQLKETQYF

SEQ ID NO: 292047 - protein, 12 aa, Homo sapiens
  CDR3 for alpha chain variable domain of TCR clone 146024 (TRAV3, TRAJ39)
CAVIEWSNMLTF

SEQ ID NO: 292048 - protein, 16 aa, Homo sapiens
  CDR3 for beta chain variable domain of TCR clone 146024 (TRBV7-3, TRBJ2-2)
CASSLKRGTLSGELFF

SEQ ID NO: 292049 - protein, 12 aa, Homo sapiens
  CDR3 for alpha chain variable domain of TCR clone 146025 (TRAV12-2, TRAJ16)
CAVAPDVQKLLF

SEQ ID NO: 292050 - protein, 13 aa, Homo sapiens
  CDR3 for beta chain variable domain of TCR clone 146025 (TRBV6-1, TRBJ1-1)
CASSVTGRLEAFF

SEQ ID NO: 292051 - protein, 15 aa, Homo sapiens
  CDR3 for alpha chain variable domain of TCR clone 146026 (TRAV12-2, TRAJ53)
CAVNGGGGSNYKLTF

SEQ ID NO: 292052 - protein, 16 aa, Homo sapiens
  CDR3 for beta chain variable domain of TCR clone 146026 (TRBV6-1, TRBJ1-2)
CASSGAWQGRSNGYTF

SEQ ID NO: 292053 - protein, 16 aa, Homo sapiens
  CDR3 for alpha chain variable domain of TCR clone 146027 (TRAV12-2, TRAJ10)
CAVNGVLTGGGNKLTF

SEQ ID NO: 292054 - protein, 12 aa, Homo sapiens
  CDR3 for beta chain variable domain of TCR clone 146027 (TRBV28, TRBJ2-7)
CASSFSSYEQYF

SEQ ID NO: 292055 - protein, 13 aa, Homo sapiens
  CDR3 for alpha chain variable domain of TCR clone 146028 (TRAV21, TRAJ57)
CAVTQGGSEKLVL

SEQ ID NO: 292056 - protein, 17 aa, Homo sapiens
  CDR3 for beta chain variable domain of TCR clone 146028 (TRBV11-2, TRBJ2-1)
CASSLYPPGVEYNEQFF

SEQ ID NO: 292057 - protein, 13 aa, Homo sapiens
  CDR3 for alpha chain variable domain of TCR clone 146029 (TRAV27, TRAJ57)
CRSAQGGSEKLVF

SEQ ID NO: 292058 - protein, 15 aa, Homo sapiens
  CDR3 for beta chain variable domain of TCR clone 146029 (TRBV6-3, TRBJ2-7)
CASSSPGTVFYEQYF

SEQ ID NO: 292059 - protein, 13 aa, Homo sapiens
  CDR3 for alpha chain variable domain of TCR clone 146030 (TRAV27, TRAJ41)
CAGKENSGYALNF

SEQ ID NO: 292060 - protein, 14 aa, Homo sapiens
  CDR3 for beta chain variable domain of TCR clone 146030 (TRBV7-2, TRBJ1-1)
CASSFLTGTTEAFF

SEQ ID NO: 292061 - protein, 12 aa, Homo sapiens
  CDR3 for alpha chain variable domain of TCR clone 146031 (TRAV8-3, TRAJ26)
CAGDNYGQNFVF

SEQ ID NO: 292062 - protein, 17 aa, Homo sapiens
  CDR3 for beta chain variable domain of TCR clone 146031 (TRBV7-8, TRBJ2-6)
CASSAGTGGGGANVLTF

SEQ ID NO: 292063 - protein, 16 aa, Homo sapiens
  CDR3 for alpha chain variable domain of TCR clone 146032 (TRAV30, TRAJ26)
CGTESVGDNYGQNFVF

SEQ ID NO: 292064 - protein, 17 aa, Homo sapiens
  CDR3 for beta chain variable domain of TCR clone 146032 (TRBV11-2, TRBJ2-1)
CASSLYPPGVEYNEQFF

SEQ ID NO: 292065 - protein, 12 aa, Homo sapiens
  CDR3 for alpha chain variable domain of TCR clone 146033 (TRAV5, TRAJ27)
CAENTNAGKSTF

SEQ ID NO: 292066 - protein, 14 aa, Homo sapiens
  CDR3 for beta chain variable domain of TCR clone 146033 (TRBV12-5, TRBJ2-5)
CASGSRTHQETQYF

SEQ ID NO: 292067 - protein, 13 aa, Homo sapiens
  CDR3 for alpha chain variable domain of TCR clone 146034 (TRAV3, TRAJ27)
CAVRPLGAGKSTF

SEQ ID NO: 292068 - protein, 12 aa, Homo sapiens
  CDR3 for beta chain variable domain of TCR clone 146034 (TRBV7-9, TRBJ2-7)
CATRTGAYEQYF

SEQ ID NO: 292069 - protein, 14 aa, Homo sapiens
  CDR3 for alpha chain variable domain of TCR clone 146035 (TRAV17, TRAJ34)
CATDSLDGTDKLIF

SEQ ID NO: 292070 - protein, 12 aa, Homo sapiens
  CDR3 for beta chain variable domain of TCR clone 146035 (TRBV5-1, TRBJ1-2)
CASSQDTYGYTF

SEQ ID NO: 292071 - protein, 17 aa, Homo sapiens
  CDR3 for alpha chain variable domain of TCR clone 146036 (TRAV27, TRAJ42)
CAERVIYYGGSQGNLIF

SEQ ID NO: 292072 - protein, 16 aa, Homo sapiens
  CDR3 for beta chain variable domain of TCR clone 146036 (TRBV7-8, TRBJ1-3)
CASSPLGGNPGNTIYF

SEQ ID NO: 292073 - protein, 11 aa, Homo sapiens
  CDR3 for alpha chain variable domain of TCR clone 146037 (TRAV1-2, TRAJ20)
CAVANDYKLSF

SEQ ID NO: 292074 - protein, 14 aa, Homo sapiens
  CDR3 for beta chain variable domain of TCR clone 146037 (TRBV7-2, TRBJ2-2)
CASRGQGAAGELFF

SEQ ID NO: 292075 - protein, 21 aa, Homo sapiens
  CDR3 for alpha chain variable domain of TCR clone 146038 (TRAV4, TRAJ5)
CLVGPDPGHGQESTYFWDLNK

SEQ ID NO: 292076 - protein, 15 aa, Homo sapiens
  CDR3 for beta chain variable domain of TCR clone 146038 (TRBV27, TRBJ2-5)
CASSLIPSGGETQYF

SEQ ID NO: 292077 - protein, 15 aa, Homo sapiens
  CDR3 for alpha chain variable domain of TCR clone 146039 (TRAV2, TRAJ9)
CAVEDRGTGGFKTIF

SEQ ID NO: 292078 - protein, 16 aa, Homo sapiens
  CDR3 for beta chain variable domain of TCR clone 146039 (TRBV4-1, TRBJ1-4)
CASSQVGVATNEKLFF

SEQ ID NO: 292079 - protein, 13 aa, Homo sapiens
  CDR3 for alpha chain variable domain of TCR clone 146040 (TRAV6, TRAJ45)
SPFSGGGADGLTF

SEQ ID NO: 292080 - protein, 11 aa, Homo sapiens
  CDR3 for beta chain variable domain of TCR clone 146040 (TRBV11-2, TRBJ1-1)
CASSINTEAFF

SEQ ID NO: 292081 - protein, 12 aa, Homo sapiens
  CDR3 for alpha chain variable domain of TCR clone 146041 (TRAV2, TRAJ13)
CSLSGGYQKVTF

SEQ ID NO: 292082 - protein, 16 aa, Homo sapiens
  CDR3 for beta chain variable domain of TCR clone 146041 (TRBV29-1, TRBJ2-7)
CSVEVVGTSGGYEQYF

SEQ ID NO: 292083 - protein, 13 aa, Homo sapiens
  CDR3 for alpha chain variable domain of TCR clone 146042 (TRAV17, TRAJ23)
CATDKNQGGKLIF

SEQ ID NO: 292084 - protein, 14 aa, Homo sapiens
  CDR3 for beta chain variable domain of TCR clone 146042 (TRBV7-7, TRBJ2-7)
CASSLGRGVGEQYF

SEQ ID NO: 292085 - protein, 12 aa, Homo sapiens
  CDR3 for alpha chain variable domain of TCR clone 146043 (TRAV1-2, TRAJ29)
CVVPSGNTPLVF

SEQ ID NO: 292086 - protein, 12 aa, Homo sapiens
  CDR3 for beta chain variable domain of TCR clone 146043 (TRBV12-4, TRBJ2-7)
CASSLGGYEQYF

SEQ ID NO: 292087 - protein, 16 aa, Homo sapiens
  CDR3 for alpha chain variable domain of TCR clone 146044 (TRAV12-3, TRAJ53)
CGMSPGSGGSNYKLTF

SEQ ID NO: 292088 - protein, 11 aa, Homo sapiens
  CDR3 for beta chain variable domain of TCR clone 146044 (TRBV29-1, TRBJ2-5)
CSEDRTGTQYF

SEQ ID NO: 292089 - protein, 14 aa, Homo sapiens
  CDR3 for alpha chain variable domain of TCR clone 146045 (TRAV38-2/DV8, TRAJ23)
CAYRSQNQGGKLIF

SEQ ID NO: 292090 - protein, 17 aa, Homo sapiens
  CDR3 for beta chain variable domain of TCR clone 146045 (TRBV11-2, TRBJ2-1)
CASSLYPPGVEHNEQFF

SEQ ID NO: 292091 - protein, 12 aa, Homo sapiens
  CDR3 for alpha chain variable domain of TCR clone 146046 (TRAV12-3, TRAJ17)
CAMTLIGNKLTF

SEQ ID NO: 292092 - protein, 13 aa, Homo sapiens
  CDR3 for beta chain variable domain of TCR clone 146046 (TRBV27, TRBJ2-1)
CASRTLGVGEQFF

SEQ ID NO: 292093 - protein, 14 aa, Homo sapiens
  CDR3 for alpha chain variable domain of TCR clone 146047 (TRAV13-1, TRAJ10)
CAAKEPGGGNKLTF

SEQ ID NO: 292094 - protein, 15 aa, Homo sapiens
  CDR3 for beta chain variable domain of TCR clone 146047 (TRBV27, TRBJ2-1)
CASSNGGGSSNEPFF

SEQ ID NO: 292095 - protein, 16 aa, Homo sapiens
  CDR3 for alpha chain variable domain of TCR clone 146048 (TRAV38-1, TRAJ32)
CAFMKGGGGATNKLSF

SEQ ID NO: 292096 - protein, 13 aa, Homo sapiens
  CDR3 for beta chain variable domain of TCR clone 146048 (TRBV20-1, TRBJ2-5)
CSAREAFQETQYF

SEQ ID NO: 292097 - protein, 11 aa, Homo sapiens
  CDR3 for alpha chain variable domain of TCR clone 146049 (TRAV35, TRAJ30)
CAGPGDDKIIF

SEQ ID NO: 292098 - protein, 14 aa, Homo sapiens
  CDR3 for beta chain variable domain of TCR clone 146049 (TRBV7-6, TRBJ1-6)
CVSSQAGGGSPLHF

SEQ ID NO: 292099 - protein, 14 aa, Homo sapiens
  CDR3 for alpha chain variable domain of TCR clone 146050 (TRAV8-4, TRAJ22)
CAVSPSGSARQLTF

SEQ ID NO: 292100 - protein, 13 aa, Homo sapiens
  CDR3 for beta chain variable domain of TCR clone 146050 (TRBV10-3, TRBJ2-7)
CASKLAVNYEQYF

SEQ ID NO: 292101 - protein, 18 aa, Homo sapiens
  CDR3 for alpha chain variable domain of TCR clone 146051 (TRAV38-2/DV8, TRAJ42)
CAYRSADLTGGSQGNRIF

SEQ ID NO: 292102 - protein, 12 aa, Homo sapiens
  CDR3 for beta chain variable domain of TCR clone 146051 (TRBV11-2, TRBJ2-2)
CASSLGGGELFF

SEQ ID NO: 292103 - protein, 12 aa, Homo sapiens
  CDR3 for alpha chain variable domain of TCR clone 146052 (TRAV13-1, TRAJ21)
CAAKEGFNKFYF

SEQ ID NO: 292104 - protein, 14 aa, Homo sapiens
  CDR3 for beta chain variable domain of TCR clone 146052 (TRBV20-1, TRBJ1-3)
CSASPTGAGNTIYF

SEQ ID NO: 292105 - protein, 22 aa, Homo sapiens
  CDR3 for alpha chain variable domain of TCR clone 146053 (TRAV34, TRAJ40)
PAQPCRHLPLWSGPSGTYKYIF

SEQ ID NO: 292106 - protein, 15 aa, Homo sapiens
  CDR3 for beta chain variable domain of TCR clone 146053 (TRBV6-1, TRBJ2-1)
CASSEAAYYYNEQFF

SEQ ID NO: 292107 - protein, 14 aa, Homo sapiens
  CDR3 for alpha chain variable domain of TCR clone 146054 (TRAV2, TRAJ22)
CAVGRGGSARQLTF

SEQ ID NO: 292108 - protein, 15 aa, Homo sapiens
  CDR3 for beta chain variable domain of TCR clone 146054 (TRBV12-4, TRBJ1-1)
CASSLAVSRGAEAFF

SEQ ID NO: 292109 - protein, 14 aa, Homo sapiens
  CDR3 for alpha chain variable domain of TCR clone 146055 (TRAV17, TRAJ6)
CATDASGGSYIPTF

SEQ ID NO: 292110 - protein, 14 aa, Homo sapiens
  CDR3 for beta chain variable domain of TCR clone 146055 (TRBV7-8, TRBJ2-3)
CASSFPDGQDTQYF

SEQ ID NO: 292111 - protein, 14 aa, Homo sapiens
  CDR3 for alpha chain variable domain of TCR clone 146056 (TRAV8-2, TRAJ4)
CVVSPSGGYNKLIF

SEQ ID NO: 292112 - protein, 11 aa, Homo sapiens
  CDR3 for beta chain variable domain of TCR clone 146056 (TRBV11-2, TRBJ2-2)
CASSLPGELFF

SEQ ID NO: 292113 - protein, 11 aa, Homo sapiens
  CDR3 for alpha chain variable domain of TCR clone 146057 (TRAV35, TRAJ30)
CAGLRDDKIIF

SEQ ID NO: 292114 - protein, 13 aa, Homo sapiens
  CDR3 for beta chain variable domain of TCR clone 146057 (TRBV27, TRBJ2-7)
CASSLTTGYEQYF

SEQ ID NO: 292115 - protein, 18 aa, Homo sapiens
  CDR3 for alpha chain variable domain of TCR clone 146058 (TRAV12-3, TRAJ52)
CAMSAGGAGGTSYGKLTF

SEQ ID NO: 292116 - protein, 14 aa, Homo sapiens
  CDR3 for beta chain variable domain of TCR clone 146058 (TRBV20-1, TRBJ1-5)
CSAPGTGVGQPQHF

SEQ ID NO: 292117 - protein, 17 aa, Homo sapiens
  CDR3 for alpha chain variable domain of TCR clone 146059 (TRAV3, TRAJ28)
CAVREAYSGAGCYQLTF

SEQ ID NO: 292118 - protein, 18 aa, Homo sapiens
  CDR3 for beta chain variable domain of TCR clone 146059 (TRBV27, TRBJ2-1)
CASGNRAVGVGSKNEQFF

SEQ ID NO: 292119 - protein, 15 aa, Homo sapiens
  CDR3 for alpha chain variable domain of TCR clone 146060 (TRAV21, TRAJ53)
CASLNSGGSNYKLTF

SEQ ID NO: 292120 - protein, 16 aa, Homo sapiens
  CDR3 for beta chain variable domain of TCR clone 146060 (TRBV11-2, TRBJ2-7)
CASSLAPTGVNYEQYF

SEQ ID NO: 292121 - protein, 15 aa, Homo sapiens
  CDR3 for alpha chain variable domain of TCR clone 146061 (TRAV1-2, TRAJ12)
CVVIPEVDSSYKLIF

SEQ ID NO: 292122 - protein, 12 aa, Homo sapiens
  CDR3 for beta chain variable domain of TCR clone 146061 (TRBV11-2, TRBJ2-2)
CASSLPTGELFF

SEQ ID NO: 292123 - protein, 16 aa, Homo sapiens
  CDR3 for alpha chain variable domain of TCR clone 146062 (TRAV30, TRAJ24)
CGTEIVDADSWGKFQF

SEQ ID NO: 292124 - protein, 16 aa, Homo sapiens
  CDR3 for beta chain variable domain of TCR clone 146062 (TRBV6-1, TRBJ2-1)
CASILRQGSSHNEQFF

SEQ ID NO: 292125 - protein, 16 aa, Homo sapiens
  CDR3 for alpha chain variable domain of TCR clone 146063 (TRAV23/DV6, TRAJ9)
CAASIGGNTGGFKTII

SEQ ID NO: 292126 - protein, 18 aa, Homo sapiens
  CDR3 for beta chain variable domain of TCR clone 146063 (TRBV7-9, TRBJ2-7)
CASSLTTSGSRTWYEQYF

SEQ ID NO: 292127 - protein, 18 aa, Homo sapiens
  CDR3 for alpha chain variable domain of TCR clone 146064 (TRAV12-2, TRAJ52)
CAVRPSPAGGTSYGKLTF

SEQ ID NO: 292128 - protein, 14 aa, Homo sapiens
  CDR3 for beta chain variable domain of TCR clone 146064 (TRBV19, TRBJ2-1)
CASPTFVLSGEQFF

SEQ ID NO: 292129 - protein, 17 aa, Homo sapiens
  CDR3 for alpha chain variable domain of TCR clone 146065 (TRAV8-6, TRAJ52)
CAVTRNAGGTSYGKLTF

SEQ ID NO: 292130 - protein, 13 aa, Homo sapiens
  CDR3 for beta chain variable domain of TCR clone 146065 (TRBV7-9, TRBJ1-2)
CASSLEQNYGYTF

SEQ ID NO: 292131 - protein, 16 aa, Homo sapiens
  CDR3 for alpha chain variable domain of TCR clone 146066 (TRAV3, TRAJ37)
CAVRPHGSGNTGTLIF

SEQ ID NO: 292132 - protein, 14 aa, Homo sapiens
  CDR3 for beta chain variable domain of TCR clone 146066 (TRBV25-1, TRBJ1-1)
CASTHPGGNTEAFF

SEQ ID NO: 292133 - protein, 13 aa, Homo sapiens
  CDR3 for alpha chain variable domain of TCR clone 146067 (TRAV2, TRAJ33)
CAVEDGSNYQLIW

SEQ ID NO: 292134 - protein, 14 aa, Homo sapiens
  CDR3 for beta chain variable domain of TCR clone 146067 (TRBV4-1, TRBJ2-2)
CASSQAVNTGELFF

SEQ ID NO: 292135 - protein, 13 aa, Homo sapiens
  CDR3 for alpha chain variable domain of TCR clone 146068 (TRAV8-1, TRAJ28)
CAVSGAGSYQLTF

SEQ ID NO: 292136 - protein, 14 aa, Homo sapiens
  CDR3 for beta chain variable domain of TCR clone 146068 (TRBV7-2, TRBJ2-2)
CASRGQGAAGELCF

SEQ ID NO: 292137 - protein, 16 aa, Homo sapiens
  CDR3 for alpha chain variable domain of TCR clone 146069 (TRAV12-3, TRAJ53)
CAMSPGSGGSNHKLTF

SEQ ID NO: 292138 - protein, 14 aa, Homo sapiens
  CDR3 for beta chain variable domain of TCR clone 146069 (TRBV18, TRBJ2-7)
CASSPRGGAYEQYF

SEQ ID NO: 292139 - protein, 15 aa, Homo sapiens
  CDR3 for alpha chain variable domain of TCR clone 146070 (TRAV3, TRAJ5)
CALRDLDTGRRALTF

SEQ ID NO: 292140 - protein, 13 aa, Homo sapiens
  CDR3 for beta chain variable domain of TCR clone 146070 (TRBV12-4, TRBJ2-7)
CASSPTETCEQYF

SEQ ID NO: 292141 - protein, 16 aa, Homo sapiens
  CDR3 for alpha chain variable domain of TCR clone 146071 (TRAV12-3, TRAJ53)
CAMSPGSGGSNYKLTF

SEQ ID NO: 292142 - protein, 16 aa, Homo sapiens
  CDR3 for beta chain variable domain of TCR clone 146071 (TRBV4-1, TRBJ2-7)
CASSPSGGGADNEQYF

SEQ ID NO: 292143 - protein, 14 aa, Homo sapiens
  CDR3 for alpha chain variable domain of TCR clone 146072 (TRAV38-2/DV8, TRAJ29)
WSYRSRSGNTPLFF

SEQ ID NO: 292144 - protein, 17 aa, Homo sapiens
  CDR3 for beta chain variable domain of TCR clone 146072 (TRBV6-1, TRBJ1-2)
CASSGTHSQRGNYGYTF

SEQ ID NO: 292145 - protein, 11 aa, Homo sapiens
  CDR3 for alpha chain variable domain of TCR clone 146073 (TRAV12-1, TRAJ8)
CVVTGFQKLVF

SEQ ID NO: 292146 - protein, 13 aa, Homo sapiens
  CDR3 for beta chain variable domain of TCR clone 146073 (TRBV20-1, TRBJ1-1)
CSAGTVGNTEAFF

SEQ ID NO: 292147 - protein, 10 aa, Homo sapiens
  CDR3 for alpha chain variable domain of TCR clone 146074 (TRAV26-1, TRAJ22)
CIAGSRQLTF

SEQ ID NO: 292148 - protein, 17 aa, Homo sapiens
  CDR3 for beta chain variable domain of TCR clone 146074 (TRBV5-4, TRBJ1-1)
CDSFPPKGRLQNTEAFF

SEQ ID NO: 292149 - protein, 18 aa, Homo sapiens
  CDR3 for alpha chain variable domain of TCR clone 146075 (TRAV9-2, TRAJ13)
CQTQRCTEPSGGYQKVTF

SEQ ID NO: 292150 - protein, 13 aa, Homo sapiens
  CDR3 for beta chain variable domain of TCR clone 146075 (TRBV5-7, TRBJ2-5)
CASRSSGGGTQHF

SEQ ID NO: 292151 - protein, 10 aa, Homo sapiens
  CDR3 for alpha chain variable domain of TCR clone 146076 (TRAV12-3, TRAJ49)
CAMNDDQFSF

SEQ ID NO: 292152 - protein, 18 aa, Homo sapiens
  CDR3 for beta chain variable domain of TCR clone 146076 (TRBV15, TRBJ2-3)
CATSRDGARSWDTDTQYF

SEQ ID NO: 292153 - protein, 16 aa, Homo sapiens
  CDR3 for alpha chain variable domain of TCR clone 146077 (TRAV27, TRAJ53)
CAAPEGSGGSNYKLTF

SEQ ID NO: 292154 - protein, 11 aa, Homo sapiens
  CDR3 for beta chain variable domain of TCR clone 146077 (TRBV25-1, TRBJ1-1)
PTWGGNTEAFF

SEQ ID NO: 292155 - protein, 14 aa, Homo sapiens
  CDR3 for alpha chain variable domain of TCR clone 146078 (TRAV8-6, TRAJ4)
CAVSGSGRYNKLIF

SEQ ID NO: 292156 - protein, 13 aa, Homo sapiens
  CDR3 for beta chain variable domain of TCR clone 146078 (TRBV3-1, TRBJ2-5)
CASSPGLQETQYF

SEQ ID NO: 292157 - protein, 14 aa, Homo sapiens
  CDR3 for alpha chain variable domain of TCR clone 146079 (TRAV1-2, TRAJ16)
CSVNRFSDGQKLLF

SEQ ID NO: 292158 - protein, 17 aa, Homo sapiens
  CDR3 for beta chain variable domain of TCR clone 146079 (TRBV7-3, TRBJ2-3)
CASSLMKRMRGADTQYF

SEQ ID NO: 292159 - protein, 11 aa, Homo sapiens
  CDR3 for alpha chain variable domain of TCR clone 146080 (TRAV2, TRAJ31)
CAAGPPARLMF

SEQ ID NO: 292160 - protein, 15 aa, Homo sapiens
  CDR3 for beta chain variable domain of TCR clone 146080 (TRBV7-2, TRBJ2-1)
CASSSRTSREDEQFF

SEQ ID NO: 292161 - protein, 12 aa, Homo sapiens
  CDR3 for alpha chain variable domain of TCR clone 146081 (TRAV12-3, TRAJ17)
CAMTFTGNKLTF

SEQ ID NO: 292162 - protein, 12 aa, Homo sapiens
  CDR3 for beta chain variable domain of TCR clone 146081 (TRBV4-1, TRBJ2-3)
FASSQGTDTQYF

SEQ ID NO: 292163 - protein, 16 aa, Homo sapiens
  CDR3 for alpha chain variable domain of TCR clone 146082 (TRAV3, TRAJ42)
CAVRDIEGGSHGNLIF

SEQ ID NO: 292164 - protein, 15 aa, Homo sapiens
  CDR3 for beta chain variable domain of TCR clone 146082 (TRBV9, TRBJ2-2)
CASSDFAGASGELFF

SEQ ID NO: 292165 - protein, 23 aa, Homo sapiens
  CDR3 for alpha chain variable domain of TCR clone 146083 (TRAV26-1, TRAJ38)
CIADNAGNNHIQNPDPAVYQLRD

SEQ ID NO: 292166 - protein, 13 aa, Homo sapiens
  CDR3 for beta chain variable domain of TCR clone 146083 (TRBV24-1, TRBJ2-2)
CATSDWSAGELFF

SEQ ID NO: 292167 - protein, 14 aa, Homo sapiens
  CDR3 for alpha chain variable domain of TCR clone 146084 (TRAV4, TRAJ30)
CLVGDMNRDDQIIF

SEQ ID NO: 292168 - protein, 16 aa, Homo sapiens
  CDR3 for beta chain variable domain of TCR clone 146084 (TRBV20-1, TRBJ1-4)
CSAPGQGLLTNEKLFF

SEQ ID NO: 292169 - protein, 16 aa, Homo sapiens
  CDR3 for alpha chain variable domain of TCR clone 146085 (TRAV12-1, TRAJ12)
CVVNTLLMDSSYKLIF

SEQ ID NO: 292170 - protein, 15 aa, Homo sapiens
  CDR3 for beta chain variable domain of TCR clone 146085 (TRBV28, TRBJ2-1)
CASSIIAGGRSEQFF

SEQ ID NO: 292171 - protein, 16 aa, Homo sapiens
  CDR3 for alpha chain variable domain of TCR clone 146086 (TRAV30, TRAJ24)
CGTETVDADSWGRFQF

SEQ ID NO: 292172 - protein, 14 aa, Homo sapiens
  CDR3 for beta chain variable domain of TCR clone 146086 (TRBV12-5, TRBJ2-5)
CASGSRTHQETQYF

SEQ ID NO: 292173 - protein, 15 aa, Homo sapiens
  CDR3 for alpha chain variable domain of TCR clone 146087 (TRAV29/DV5, TRAJ24)
CAASGATASWGKFHF

SEQ ID NO: 292174 - protein, 12 aa, Homo sapiens
  CDR3 for beta chain variable domain of TCR clone 146087 (TRBV11-2, TRBJ2-2)
CASSLPTGELFF

SEQ ID NO: 292175 - protein, 10 aa, Homo sapiens
  CDR3 for alpha chain variable domain of TCR clone 146088 (TRAV13-1, TRAJ7)
LIGGNNRLAF

SEQ ID NO: 292176 - protein, 15 aa, Homo sapiens
  CDR3 for beta chain variable domain of TCR clone 146088 (TRBV7-9, TRBJ1-1)
CDSSLLEQGGTEAFF

SEQ ID NO: 292177 - protein, 14 aa, Homo sapiens
  CDR3 for alpha chain variable domain of TCR clone 146089 (TRAV12-2, TRAJ40)
CAVKTPSGTYKYIF

SEQ ID NO: 292178 - protein, 17 aa, Homo sapiens
  CDR3 for beta chain variable domain of TCR clone 146089 (TRBV11-2, TRBJ2-1)
CASSLYPPGVEYNEQFF

SEQ ID NO: 292179 - protein, 15 aa, Homo sapiens
  CDR3 for alpha chain variable domain of TCR clone 146090 (TRAV20, TRAJ40)
CAVQRGTSGTYKYIF

SEQ ID NO: 292180 - protein, 14 aa, Homo sapiens
  CDR3 for beta chain variable domain of TCR clone 146090 (TRBV7-6, TRBJ2-3)
CASSLGTVTDTQYF

SEQ ID NO: 292181 - protein, 14 aa, Homo sapiens
  CDR3 for alpha chain variable domain of TCR clone 146091 (TRAV21, TRAJ28)
CAVGAGAGSYQLTF

SEQ ID NO: 292182 - protein, 14 aa, Homo sapiens
  CDR3 for beta chain variable domain of TCR clone 146091 (TRBV18, TRBJ1-4)
CASSPGPNGEKLFF

SEQ ID NO: 292183 - protein, 14 aa, Homo sapiens
  CDR3 for alpha chain variable domain of TCR clone 146092 (TRAV12-2, TRAJ13)
CAVKKTGGYQKVTF

SEQ ID NO: 292184 - protein, 14 aa, Homo sapiens
  CDR3 for beta chain variable domain of TCR clone 146092 (TRBV10-3, TRBJ2-1)
CAISSDLAYNEPFF

SEQ ID NO: 292185 - protein, 15 aa, Homo sapiens
  CDR3 for alpha chain variable domain of TCR clone 146093 (TRAV26-1, TRAJ21)
CIVRVPNYNFNKFYF

SEQ ID NO: 292186 - protein, 14 aa, Homo sapiens
  CDR3 for beta chain variable domain of TCR clone 146093 (TRBV7-9, TRBJ2-7)
CASSPKTSFYEQYF

SEQ ID NO: 292187 - protein, 18 aa, Homo sapiens
  CDR3 for alpha chain variable domain of TCR clone 146094 (TRAV21, TRAJ52)
CAVRPSPAGGTSYGKLTL

SEQ ID NO: 292188 - protein, 17 aa, Homo sapiens
  CDR3 for beta chain variable domain of TCR clone 146094 (TRBV25-1, TRBJ2-1)
CASSAYGQGRGVYEQFF

SEQ ID NO: 292189 - protein, 14 aa, Homo sapiens
  CDR3 for alpha chain variable domain of TCR clone 146095 (TRAV1-2, TRAJ16)
CAVNRFSDGQKLLF

SEQ ID NO: 292190 - protein, 14 aa, Homo sapiens
  CDR3 for beta chain variable domain of TCR clone 146095 (TRBV20-1, TRBJ2-2)
GSAPDTANTGELFF

SEQ ID NO: 292191 - protein, 18 aa, Homo sapiens
  CDR3 for alpha chain variable domain of TCR clone 146096 (TRAV1-1, TRAJ37)
CLLLLRCEIASNTGKLIF

SEQ ID NO: 292192 - protein, 16 aa, Homo sapiens
  CDR3 for beta chain variable domain of TCR clone 146096 (TRBV9, TRBJ2-2)
CASSAMGKGNTGELFF

SEQ ID NO: 292193 - protein, 14 aa, Homo sapiens
  CDR3 for alpha chain variable domain of TCR clone 146097 (TRAV21, TRAJ35)
CAVMPIGFGNVLHC

SEQ ID NO: 292194 - protein, 11 aa, Homo sapiens
  CDR3 for beta chain variable domain of TCR clone 146097 (TRBV7-9, TRBJ2-7)
CASIKREEQYF

SEQ ID NO: 292195 - protein, 13 aa, Homo sapiens
  CDR3 for alpha chain variable domain of TCR clone 146098 (TRAV35, TRAJ42)
CAGFPGSQGILIF

SEQ ID NO: 292196 - protein, 14 aa, Homo sapiens
  CDR3 for beta chain variable domain of TCR clone 146098 (TRBV19, TRBJ2-1)
CASPTFVLSGEQFF

SEQ ID NO: 292197 - protein, 14 aa, Homo sapiens
  CDR3 for alpha chain variable domain of TCR clone 146099 (TRAV4, TRAJ11)
CLVGPRGGYSTLTF

SEQ ID NO: 292198 - protein, 12 aa, Homo sapiens
  CDR3 for beta chain variable domain of TCR clone 146099 (TRBV6-3, TRBJ2-7)
CASSLTPYEQYF

SEQ ID NO: 292199 - protein, 15 aa, Homo sapiens
  CDR3 for alpha chain variable domain of TCR clone 146100 (TRAV12-1, TRAJ41)
CVVNSRTGSGYALNI

SEQ ID NO: 292200 - protein, 11 aa, Homo sapiens
  CDR3 for beta chain variable domain of TCR clone 146100 (TRBV6-4, TRBJ2-1)
CASSDSYAQFF

SEQ ID NO: 292201 - protein, 13 aa, Homo sapiens
  CDR3 for alpha chain variable domain of TCR clone 146101 (TRAV3, TRAJ27)
CAVRPLGAGKSTF

SEQ ID NO: 292202 - protein, 16 aa, Homo sapiens
  CDR3 for beta chain variable domain of TCR clone 146101 (TRBV5-1, TRBJ2-3)
CASSLALAVVSDTQYF

SEQ ID NO: 292203 - protein, 16 aa, Homo sapiens
  CDR3 for alpha chain variable domain of TCR clone 146102 (TRAV3, TRAJ23)
CAVKIGIYNQGGKLIF

SEQ ID NO: 292204 - protein, 14 aa, Homo sapiens
  CDR3 for beta chain variable domain of TCR clone 146102 (TRBV19, TRBJ2-1)
CASKDPGLANEQFF

SEQ ID NO: 292205 - protein, 16 aa, Homo sapiens
  CDR3 for alpha chain variable domain of TCR clone 146103 (TRAV3, TRAJ10)
CAVRDMRAGGGNKLTF

SEQ ID NO: 292206 - protein, 20 aa, Homo sapiens
  CDR3 for beta chain variable domain of TCR clone 146103 (TRBV11-3, TRBJ2-7)
FASSQRTSGSLRAVLRAGHQ

SEQ ID NO: 292207 - protein, 16 aa, Homo sapiens
  CDR3 for alpha chain variable domain of TCR clone 146104 (TRAV38-2/DV8, TRAJ33)
CAYRTGLFVSNYQLIC

SEQ ID NO: 292208 - protein, 13 aa, Homo sapiens
  CDR3 for beta chain variable domain of TCR clone 146104 (TRBV27, TRBJ1-4)
CASSLMGDEKLFF

SEQ ID NO: 292209 - protein, 11 aa, Homo sapiens
  CDR3 for alpha chain variable domain of TCR clone 146105 (TRAV8-3, TRAJ3)
CAATLKQCFQD

SEQ ID NO: 292210 - protein, 15 aa, Homo sapiens
  CDR3 for beta chain variable domain of TCR clone 146105 (TRBV7-6, TRBJ1-6)
CASSLQARFNSPLHF

SEQ ID NO: 292211 - protein, 14 aa, Homo sapiens
  CDR3 for alpha chain variable domain of TCR clone 146106 (TRAV27, TRAJ50)
CAGGRKTSYDKVIF

SEQ ID NO: 292212 - protein, 11 aa, Homo sapiens
  CDR3 for beta chain variable domain of TCR clone 146106 (TRBV12-4, TRBJ2-3)
CASSSVRGMYF

SEQ ID NO: 292213 - protein, 11 aa, Homo sapiens
  CDR3 for alpha chain variable domain of TCR clone 146107 (TRAV23/DV6, TRAJ48)
CAPRWGEKLTF

SEQ ID NO: 292214 - protein, 13 aa, Homo sapiens
  CDR3 for beta chain variable domain of TCR clone 146107 (TRBV7-9, TRBJ1-2)
CASSVKQNYGYTF

SEQ ID NO: 292215 - protein, 14 aa, Homo sapiens
  CDR3 for alpha chain variable domain of TCR clone 146108 (TRAV16, TRAJ15)
CALSGHQAGTALIF

SEQ ID NO: 292216 - protein, 12 aa, Homo sapiens
  CDR3 for beta chain variable domain of TCR clone 146108 (TRBV18, TRBJ2-5)
CASSPSKETQYF

SEQ ID NO: 292217 - protein, 15 aa, Homo sapiens
  CDR3 for alpha chain variable domain of TCR clone 146109 (TRAV12-3, TRAJ6)
CSMSATSGGSYIPTF

SEQ ID NO: 292218 - protein, 13 aa, Homo sapiens
  CDR3 for beta chain variable domain of TCR clone 146109 (TRBV7-9, TRBJ1-2)
CASSLKQNYGYTF

SEQ ID NO: 292219 - protein, 13 aa, Homo sapiens
  CDR3 for alpha chain variable domain of TCR clone 146110 (TRAV8-3, TRAJ36)
CAVGATGANNLFF

SEQ ID NO: 292220 - protein, 11 aa, Homo sapiens
  CDR3 for beta chain variable domain of TCR clone 146110 (TRBV7-9, TRBJ1-5)
CQQPQGQPQHF

SEQ ID NO: 292221 - protein, 15 aa, Homo sapiens
  CDR3 for alpha chain variable domain of TCR clone 146111 (TRAV23/DV6, TRAJ45)
CAASSAGGGADGLTF

SEQ ID NO: 292222 - protein, 15 aa, Homo sapiens
  CDR3 for beta chain variable domain of TCR clone 146111 (TRBV24-1, TRBJ2-3)
CATAFPGDGVDTQYF

SEQ ID NO: 292223 - protein, 10 aa, Homo sapiens
  CDR3 for alpha chain variable domain of TCR clone 146112 (TRAV13-1, TRAJ43)
CAASKNDMRF

SEQ ID NO: 292224 - protein, 13 aa, Homo sapiens
  CDR3 for beta chain variable domain of TCR clone 146112 (TRBV7-3, TRBJ1-1)
CASSQDWGAEAFF

SEQ ID NO: 292225 - protein, 17 aa, Homo sapiens
  CDR3 for alpha chain variable domain of TCR clone 146113 (TRAV1-2, TRAJ18)
CAVSLRGRGSTLGRLYF

SEQ ID NO: 292226 - protein, 11 aa, Homo sapiens
  CDR3 for beta chain variable domain of TCR clone 146113 (TRBV11-2, TRBJ1-1)
CASSINTEAFF

SEQ ID NO: 292227 - protein, 11 aa, Homo sapiens
  CDR3 for alpha chain variable domain of TCR clone 146114 (TRAV17, TRAJ9)
CGCTGGFKTIF

SEQ ID NO: 292228 - protein, 12 aa, Homo sapiens
  CDR3 for beta chain variable domain of TCR clone 146114 (TRBV29-1, TRBJ2-3)
CSVTGGADTQYF

SEQ ID NO: 292229 - protein, 15 aa, Homo sapiens
  CDR3 for alpha chain variable domain of TCR clone 146115 (TRAV8-3, TRAJ11)
CAVGLLYSGYSTLTF

SEQ ID NO: 292230 - protein, 16 aa, Homo sapiens
  CDR3 for beta chain variable domain of TCR clone 146115 (TRBV6-6, TRBJ2-1)
CASSYSFSGSYNEQFF

SEQ ID NO: 292231 - protein, 14 aa, Homo sapiens
  CDR3 for alpha chain variable domain of TCR clone 146116 (TRAV12-2, TRAJ6)
CAVIASGGSYIPTF

SEQ ID NO: 292232 - protein, 13 aa, Homo sapiens
  CDR3 for beta chain variable domain of TCR clone 146116 (TRBV18, TRBJ2-5)
CASSLQGQETQYF

SEQ ID NO: 292233 - protein, 14 aa, Homo sapiens
  CDR3 for alpha chain variable domain of TCR clone 146117 (TRAV13-1, TRAJ35)
CAASKGGFGNVVHC

SEQ ID NO: 292234 - protein, 13 aa, Homo sapiens
  CDR3 for beta chain variable domain of TCR clone 146117 (TRBV7-3, TRBJ1-1)
CASSQDWGAEAFF

SEQ ID NO: 292235 - protein, 17 aa, Homo sapiens
  CDR3 for alpha chain variable domain of TCR clone 146118 (TRAV38-2/DV8, TRAJ45)
CAYRSRYSGGGADGLPF

SEQ ID NO: 292236 - protein, 15 aa, Homo sapiens
  CDR3 for beta chain variable domain of TCR clone 146118 (TRBV19, TRBJ2-1)
CASIKGRGPYNEQFF

SEQ ID NO: 292237 - protein, 18 aa, Homo sapiens
  CDR3 for alpha chain variable domain of TCR clone 146119 (TRAV21, TRAJ53)
CAVTGGENSGGSNYKLTF

SEQ ID NO: 292238 - protein, 12 aa, Homo sapiens
  CDR3 for beta chain variable domain of TCR clone 146119 (TRBV11-2, TRBJ2-2)
CASSLPTGELFF

SEQ ID NO: 292239 - protein, 14 aa, Homo sapiens
  CDR3 for alpha chain variable domain of TCR clone 146120 (TRAV16, TRAJ37)
CALDISGNTGKLIF

SEQ ID NO: 292240 - protein, 12 aa, Homo sapiens
  CDR3 for beta chain variable domain of TCR clone 146120 (TRBV24-1, TRBJ1-1)
CATLYPDTEAFF

SEQ ID NO: 292241 - protein, 16 aa, Homo sapiens
  CDR3 for alpha chain variable domain of TCR clone 146121 (TRAV26-1, TRAJ23)
CSVRVERYNQGGKLIF

SEQ ID NO: 292242 - protein, 15 aa, Homo sapiens
  CDR3 for beta chain variable domain of TCR clone 146121 (TRBV18, TRBJ2-7)
CASSPRGGKGYEQYF

SEQ ID NO: 292243 - protein, 16 aa, Homo sapiens
  CDR3 for alpha chain variable domain of TCR clone 146122 (TRAV8-3, TRAJ13)
CAVGPYPSGGYQKVTF

SEQ ID NO: 292244 - protein, 15 aa, Homo sapiens
  CDR3 for beta chain variable domain of TCR clone 146122 (TRBV19, TRBJ1-5)
CASSIVWADNQPQHF

SEQ ID NO: 292245 - protein, 13 aa, Homo sapiens
  CDR3 for alpha chain variable domain of TCR clone 146123 (TRAV8-3, TRAJ28)
CAVGAVGSDQLTF

SEQ ID NO: 292246 - protein, 14 aa, Homo sapiens
  CDR3 for beta chain variable domain of TCR clone 146123 (TRBV7-2, TRBJ2-7)
CASRSQGAPYEQYF

SEQ ID NO: 292247 - protein, 14 aa, Homo sapiens
  CDR3 for alpha chain variable domain of TCR clone 146124 (TRAV12-3, TRAJ10)
RHLPLTGGGSKLTF

SEQ ID NO: 292248 - protein, 15 aa, Homo sapiens
  CDR3 for beta chain variable domain of TCR clone 146124 (TRBV7-9, TRBJ1-6)
CASSSPGRGNSPLHF

SEQ ID NO: 292249 - protein, 14 aa, Homo sapiens
  CDR3 for alpha chain variable domain of TCR clone 146125 (TRAV1-2, TRAJ8)
CAVREDTGFTKLVF

SEQ ID NO: 292250 - protein, 15 aa, Homo sapiens
  CDR3 for beta chain variable domain of TCR clone 146125 (TRBV19, TRBJ2-1)
CASSTGTSSYNEQFF

SEQ ID NO: 292251 - protein, 13 aa, Homo sapiens
  CDR3 for alpha chain variable domain of TCR clone 146126 (TRAV14/DV4, TRAJ20)
CAMRESNDYKLSF

SEQ ID NO: 292252 - protein, 15 aa, Homo sapiens
  CDR3 for beta chain variable domain of TCR clone 146126 (TRBV7-9, TRBJ1-1)
CASSRPGTANTEASF

SEQ ID NO: 292253 - protein, 14 aa, Homo sapiens
  CDR3 for alpha chain variable domain of TCR clone 146127 (TRAV34, TRAJ44)
CGADGTGTASKLTF

SEQ ID NO: 292254 - protein, 15 aa, Homo sapiens
  CDR3 for beta chain variable domain of TCR clone 146127 (TRBV11-2, TRBJ2-3)
CASSPGGGATDTQYF

SEQ ID NO: 292255 - protein, 14 aa, Homo sapiens
  CDR3 for alpha chain variable domain of TCR clone 146128 (TRAV12-2, TRAJ40)
CAVKIPSGTYKYIF

SEQ ID NO: 292256 - protein, 12 aa, Homo sapiens
  CDR3 for beta chain variable domain of TCR clone 146128 (TRBV7-3, TRBJ2-1)
CASSFQSGPQFF

SEQ ID NO: 292257 - protein, 17 aa, Homo sapiens
  CDR3 for alpha chain variable domain of TCR clone 146129 (TRAV21, TRAJ52)
CAVRPSAGGTSYGKLTF

SEQ ID NO: 292258 - protein, 17 aa, Homo sapiens
  CDR3 for beta chain variable domain of TCR clone 146129 (TRBV13, TRBJ2-3)
CASSLSRVAGGRNTQYF

SEQ ID NO: 292259 - protein, 15 aa, Homo sapiens
  CDR3 for alpha chain variable domain of TCR clone 146130 (TRAV2, TRAJ28)
CAVPYSGAGSYQLTF

SEQ ID NO: 292260 - protein, 14 aa, Homo sapiens
  CDR3 for beta chain variable domain of TCR clone 146130 (TRBV6-1, TRBJ2-7)
CASIGSGISYEQYF

SEQ ID NO: 292261 - protein, 11 aa, Homo sapiens
  CDR3 for alpha chain variable domain of TCR clone 146131 (TRAV13-2, TRAJ23)
CAESPRGKLIF

SEQ ID NO: 292262 - protein, 18 aa, Homo sapiens
  CDR3 for beta chain variable domain of TCR clone 146131 (TRBV6-5, TRBJ1-1)
CASSYSARGGTGGTEAFF

SEQ ID NO: 292263 - protein, 14 aa, Homo sapiens
  CDR3 for alpha chain variable domain of TCR clone 146132 (TRAV23/DV6, TRAJ22)
CAASVSGSARQLTF

SEQ ID NO: 292264 - protein, 16 aa, Homo sapiens
  CDR3 for beta chain variable domain of TCR clone 146132 (TRBV19, TRBJ2-2)
CASSVPGQGLAGELFF

SEQ ID NO: 292265 - protein, 14 aa, Homo sapiens
  CDR3 for alpha chain variable domain of TCR clone 146133 (TRAV35, TRAJ33)
CAGSSQDSNYQLIW

SEQ ID NO: 292266 - protein, 16 aa, Homo sapiens
  CDR3 for beta chain variable domain of TCR clone 146133 (TRBV13, TRBJ2-2)
CASSPRTGERTGELFF

SEQ ID NO: 292267 - protein, 14 aa, Homo sapiens
  CDR3 for alpha chain variable domain of TCR clone 146134 (TRAV12-3, TRAJ56)
CAMSVTGADSKLTF

SEQ ID NO: 292268 - protein, 17 aa, Homo sapiens
  CDR3 for beta chain variable domain of TCR clone 146134 (TRBV20-1, TRBJ2-3)
CSASLLGRGGSADTQYF

SEQ ID NO: 292269 - protein, 16 aa, Homo sapiens
  CDR3 for alpha chain variable domain of TCR clone 146135 (TRAV30, TRAJ24)
CGTEIVDADSWGKFQF

SEQ ID NO: 292270 - protein, 16 aa, Homo sapiens
  CDR3 for beta chain variable domain of TCR clone 146135 (TRBV7-6, TRBJ2-7)
CASSLESREVGDEQYF

SEQ ID NO: 292271 - protein, 16 aa, Homo sapiens
  CDR3 for alpha chain variable domain of TCR clone 146136 (TRAV12-1, TRAJ13)
CVVNLEVSGGYQKVTF

SEQ ID NO: 292272 - protein, 16 aa, Homo sapiens
  CDR3 for beta chain variable domain of TCR clone 146136 (TRBV24-1, TRBJ2-6)
CATSDRRAAGANVLTF

SEQ ID NO: 292273 - protein, 14 aa, Homo sapiens
  CDR3 for alpha chain variable domain of TCR clone 146137 (TRAV1-2, TRAJ16)
SAVNRFSDGQKLLF

SEQ ID NO: 292274 - protein, 12 aa, Homo sapiens
  CDR3 for beta chain variable domain of TCR clone 146137 (TRBV5-1, TRBJ2-7)
CASSSTTYEQYF

SEQ ID NO: 292275 - protein, 15 aa, Homo sapiens
  CDR3 for alpha chain variable domain of TCR clone 146138 (TRAV14/DV4, TRAJ33)
CAMREGRDSNYQLIW

SEQ ID NO: 292276 - protein, 14 aa, Homo sapiens
  CDR3 for beta chain variable domain of TCR clone 146138 (TRBV5-1, TRBJ2-7)
CASSRGESLYEQYF

SEQ ID NO: 292277 - protein, 11 aa, Homo sapiens
  CDR3 for alpha chain variable domain of TCR clone 146139 (TRAV2, TRAJ13)
CASGDYQKVTF

SEQ ID NO: 292278 - protein, 13 aa, Homo sapiens
  CDR3 for beta chain variable domain of TCR clone 146139 (TRBV7-9, TRBJ1-2)
CASSLKQNYGYTF

SEQ ID NO: 292279 - protein, 14 aa, Homo sapiens
  CDR3 for alpha chain variable domain of TCR clone 146140 (TRAV1-2, TRAJ16)
CAVNRFSDGQKLFF

SEQ ID NO: 292280 - protein, 14 aa, Homo sapiens
  CDR3 for beta chain variable domain of TCR clone 146140 (TRBV11-2, TRBJ2-5)
CASSRTGGIETQYF

SEQ ID NO: 292281 - protein, 14 aa, Homo sapiens
  CDR3 for alpha chain variable domain of TCR clone 146141 (TRAV35, TRAJ33)
CWPRGRDSNYQLIW

SEQ ID NO: 292282 - protein, 11 aa, Homo sapiens
  CDR3 for beta chain variable domain of TCR clone 146141 (TRBV10-3, TRBJ2-7)
RAICEGLEQYF

SEQ ID NO: 292283 - protein, 16 aa, Homo sapiens
  CDR3 for alpha chain variable domain of TCR clone 146142 (TRAV8-3, TRAJ13)
CAVGAYPSGGYQKVTF

SEQ ID NO: 292284 - protein, 16 aa, Homo sapiens
  CDR3 for beta chain variable domain of TCR clone 146142 (TRBV13, TRBJ2-3)
CQQPLQGSGGRNTQYF

SEQ ID NO: 292285 - protein, 15 aa, Homo sapiens
  CDR3 for alpha chain variable domain of TCR clone 146143 (TRAV2, TRAJ13)
FATPSYSGGYQKVTF

SEQ ID NO: 292286 - protein, 13 aa, Homo sapiens
  CDR3 for beta chain variable domain of TCR clone 146143 (TRBV14, TRBJ1-5)
CASSQDRRGPQHF

SEQ ID NO: 292287 - protein, 12 aa, Homo sapiens
  CDR3 for alpha chain variable domain of TCR clone 146144 (TRAV17, TRAJ12)
CATLRGSYKLIF

SEQ ID NO: 292288 - protein, 16 aa, Homo sapiens
  CDR3 for beta chain variable domain of TCR clone 146144 (TRBV28, TRBJ2-7)
CASSLFFETGGPERYF

SEQ ID NO: 292289 - protein, 18 aa, Homo sapiens
  CDR3 for alpha chain variable domain of TCR clone 146145 (TRAV26-2, TRAJ17)
CCVLLHPAINAAGNKLTF

SEQ ID NO: 292290 - protein, 15 aa, Homo sapiens
  CDR3 for beta chain variable domain of TCR clone 146145 (TRBV27, TRBJ2-7)
CASSTAGTGSYEQYF

SEQ ID NO: 292291 - protein, 12 aa, Homo sapiens
  CDR3 for alpha chain variable domain of TCR clone 146146 (TRAV8-4, TRAJ37)
CAKSSNAGKLIF

SEQ ID NO: 292292 - protein, 15 aa, Homo sapiens
  CDR3 for beta chain variable domain of TCR clone 146146 (TRBV7-9, TRBJ2-7)
CASSSSGLAVYEQYF

SEQ ID NO: 292293 - protein, 12 aa, Homo sapiens
  CDR3 for alpha chain variable domain of TCR clone 146147 (TRAV1-1, TRAJ43)
CAPRVSSNDMRF

SEQ ID NO: 292294 - protein, 15 aa, Homo sapiens
  CDR3 for beta chain variable domain of TCR clone 146147 (TRBV5-1, TRBJ2-6)
CASSLGDFTTYEQYF

SEQ ID NO: 292295 - protein, 16 aa, Homo sapiens
  CDR3 for alpha chain variable domain of TCR clone 146148 (TRAV3, TRAJ10)
CAVRDMRAGGGHKLTF

SEQ ID NO: 292296 - protein, 16 aa, Homo sapiens
  CDR3 for beta chain variable domain of TCR clone 146148 (TRBV12-4, TRBJ1-5)
CASSRPVGGSNQPQHF

SEQ ID NO: 292297 - protein, 16 aa, Homo sapiens
  CDR3 for alpha chain variable domain of TCR clone 146149 (TRAV3, TRAJ10)
CAVRAMRAGGGNKLTF

SEQ ID NO: 292298 - protein, 16 aa, Homo sapiens
  CDR3 for beta chain variable domain of TCR clone 146149 (TRBV19, TRBJ2-2)
CASSFPGQGLAGELFF

SEQ ID NO: 292299 - protein, 13 aa, Homo sapiens
  CDR3 for alpha chain variable domain of TCR clone 146150 (TRAV3, TRAJ6)
CAVRDGGSYIPTF

SEQ ID NO: 292300 - protein, 17 aa, Homo sapiens
  CDR3 for beta chain variable domain of TCR clone 146150 (TRBV3-1, TRBJ1-1)
CASSQAAGGAGNTEAFF

SEQ ID NO: 292301 - protein, 13 aa, Homo sapiens
  CDR3 for alpha chain variable domain of TCR clone 146151 (TRAV27, TRAJ8)
CAGGPSGFQKLVF

SEQ ID NO: 292302 - protein, 15 aa, Homo sapiens
  CDR3 for beta chain variable domain of TCR clone 146151 (TRBV6-1, TRBJ2-7)
CASSESMGDFYEQYF

SEQ ID NO: 292303 - protein, 14 aa, Homo sapiens
  CDR3 for alpha chain variable domain of TCR clone 146152 (TRAV26-1, TRAJ45)
CIEVTGGGADGLTF

SEQ ID NO: 292304 - protein, 11 aa, Homo sapiens
  CDR3 for beta chain variable domain of TCR clone 146152 (TRBV7-9, TRBJ2-3)
CASSYTDTQYF

SEQ ID NO: 292305 - protein, 15 aa, Homo sapiens
  CDR3 for alpha chain variable domain of TCR clone 146153 (TRAV30, TRAJ13)
CGTQGVTGGYQKGTF

SEQ ID NO: 292306 - protein, 17 aa, Homo sapiens
  CDR3 for beta chain variable domain of TCR clone 146153 (TRBV20-1, TRBJ2-2)
CSARVKRTHVRSGELFF

SEQ ID NO: 292307 - protein, 14 aa, Homo sapiens
  CDR3 for alpha chain variable domain of TCR clone 146154 (TRAV35, TRAJ53)
GRVNSGGSNYKPTF

SEQ ID NO: 292308 - protein, 14 aa, Homo sapiens
  CDR3 for beta chain variable domain of TCR clone 146154 (TRBV7-3, TRBJ2-2)
CASSLLGSTGELFF

SEQ ID NO: 292309 - protein, 14 aa, Homo sapiens
  CDR3 for alpha chain variable domain of TCR clone 146155 (TRAV12-1, TRAJ36)
CVGNYWCKQPLLWD

SEQ ID NO: 292310 - protein, 13 aa, Homo sapiens
  CDR3 for beta chain variable domain of TCR clone 146155 (TRBV14, TRBJ1-1)
CASSREFGTEAFF

SEQ ID NO: 292311 - protein, 12 aa, Homo sapiens
  CDR3 for alpha chain variable domain of TCR clone 146156 (TRAV23/DV6, TRAJ30)
CEASKGDDKIIF

SEQ ID NO: 292312 - protein, 17 aa, Homo sapiens
  CDR3 for beta chain variable domain of TCR clone 146156 (TRBV13, TRBJ2-3)
CASSLSRVAGGRNTQYF

SEQ ID NO: 292313 - protein, 11 aa, Homo sapiens
  CDR3 for alpha chain variable domain of TCR clone 146157 (TRAV3, TRAJ21)
CAVGNFNKFYF

SEQ ID NO: 292314 - protein, 13 aa, Homo sapiens
  CDR3 for beta chain variable domain of TCR clone 146157 (TRBV11-2, TRBJ2-7)
CASSTSRSLEQYF

SEQ ID NO: 292315 - protein, 11 aa, Homo sapiens
  CDR3 for alpha chain variable domain of TCR clone 146158 (TRAV2, TRAJ13)
CASGGYQKVTF

SEQ ID NO: 292316 - protein, 12 aa, Homo sapiens
  CDR3 for beta chain variable domain of TCR clone 146158 (TRBV5-1, TRBJ2-1)
CASIGGYNEQFF

SEQ ID NO: 292317 - protein, 17 aa, Homo sapiens
  CDR3 for alpha chain variable domain of TCR clone 146159 (TRAV3, TRAJ42)
CAVRARDYGGSKGNLIF

SEQ ID NO: 292318 - protein, 15 aa, Homo sapiens
  CDR3 for beta chain variable domain of TCR clone 146159 (TRBV6-6, TRBJ2-7)
CASSYSYGGSYEQYF

SEQ ID NO: 292319 - protein, 15 aa, Homo sapiens
  CDR3 for alpha chain variable domain of TCR clone 146160 (TRAV8-4, TRAJ37)
CAVSRGSGNTGKLIF

SEQ ID NO: 292320 - protein, 13 aa, Homo sapiens
  CDR3 for beta chain variable domain of TCR clone 146160 (TRBV7-9, TRBJ1-2)
CASSLKQNYGYTF

SEQ ID NO: 292321 - protein, 12 aa, Homo sapiens
  CDR3 for alpha chain variable domain of TCR clone 146161 (TRAV9-2, TRAJ36)
CALKKGANNLFF

SEQ ID NO: 292322 - protein, 15 aa, Homo sapiens
  CDR3 for beta chain variable domain of TCR clone 146161 (TRBV7-3, TRBJ2-1)
CASSPTGGGEVEQFF

SEQ ID NO: 292323 - protein, 13 aa, Homo sapiens
  CDR3 for alpha chain variable domain of TCR clone 146162 (TRAV8-3, TRAJ36)
CAVGANGANNLFF

SEQ ID NO: 292324 - protein, 13 aa, Homo sapiens
  CDR3 for beta chain variable domain of TCR clone 146162 (TRBV6-1, TRBJ1-1)
CASSRQGNTEAFF

SEQ ID NO: 292325 - protein, 18 aa, Homo sapiens
  CDR3 for alpha chain variable domain of TCR clone 146163 (TRAV29/DV5, TRAJ52)
CAAGFRGAGGTSYGKLTF

SEQ ID NO: 292326 - protein, 13 aa, Homo sapiens
  CDR3 for beta chain variable domain of TCR clone 146163 (TRBV19, TRBJ1-5)
CASSEGSNQPQHF

SEQ ID NO: 292327 - protein, 16 aa, Homo sapiens
  CDR3 for alpha chain variable domain of TCR clone 146164 (TRAV26-1, TRAJ53)
CIVRVAMGGSNYKLTF

SEQ ID NO: 292328 - protein, 14 aa, Homo sapiens
  CDR3 for beta chain variable domain of TCR clone 146164 (TRBV7-9, TRBJ2-4)
CASSLAMGGNIQYF

SEQ ID NO: 292329 - protein, 13 aa, Homo sapiens
  CDR3 for alpha chain variable domain of TCR clone 146165 (TRAV3, TRAJ21)
CAVIPPPFNKFYF

SEQ ID NO: 292330 - protein, 19 aa, Homo sapiens
  CDR3 for beta chain variable domain of TCR clone 146165 (TRBV19, TRBJ2-2)
CASTRPGLAGGRVTGELFF

SEQ ID NO: 292331 - protein, 12 aa, Homo sapiens
  CDR3 for alpha chain variable domain of TCR clone 146166 (TRAV13-1, TRAJ27)
CAAHTNAGKSTF

SEQ ID NO: 292332 - protein, 14 aa, Homo sapiens
  CDR3 for beta chain variable domain of TCR clone 146166 (TRBV18, TRBJ2-7)
CASSPRGGAYEQYF

SEQ ID NO: 292333 - protein, 15 aa, Homo sapiens
  CDR3 for alpha chain variable domain of TCR clone 146167 (TRAV26-1, TRAJ22)
CIVRVSFWFCKATDL

SEQ ID NO: 292334 - protein, 17 aa, Homo sapiens
  CDR3 for beta chain variable domain of TCR clone 146167 (TRBV7-3, TRBJ2-3)
CASSLMKRMRGADTQYF

SEQ ID NO: 292335 - protein, 15 aa, Homo sapiens
  CDR3 for alpha chain variable domain of TCR clone 146168 (TRAV2, TRAJ24)
CAVVRLKNSWGKLQF

SEQ ID NO: 292336 - protein, 16 aa, Homo sapiens
  CDR3 for beta chain variable domain of TCR clone 146168 (TRBV7-7, TRBJ2-3)
CASSPGTGGSTDTQYF

SEQ ID NO: 292337 - protein, 13 aa, Homo sapiens
  CDR3 for alpha chain variable domain of TCR clone 146169 (TRAV2, TRAJ40)
CAVVTSGTYKYIF

SEQ ID NO: 292338 - protein, 13 aa, Homo sapiens
  CDR3 for beta chain variable domain of TCR clone 146169 (TRBV11-2, TRBJ2-7)
CASSGTRPYEQYF

SEQ ID NO: 292339 - protein, 15 aa, Homo sapiens
  CDR3 for alpha chain variable domain of TCR clone 146170 (TRAV26-1, TRAJ44)
CIVRANTGTASKLTF

SEQ ID NO: 292340 - protein, 13 aa, Homo sapiens
  CDR3 for beta chain variable domain of TCR clone 146170 (TRBV18, TRBJ1-1)
CASSPETKPEAFF

SEQ ID NO: 292341 - protein, 15 aa, Homo sapiens
  CDR3 for alpha chain variable domain of TCR clone 146171 (TRAV8-2, TRAJ15)
CVVTMGNQAGTALIF

SEQ ID NO: 292342 - protein, 17 aa, Homo sapiens
  CDR3 for beta chain variable domain of TCR clone 146171 (TRBV12-4, TRBJ2-1)
CASSPGLAGGRINEQFF

SEQ ID NO: 292343 - protein, 11 aa, Homo sapiens
  CDR3 for alpha chain variable domain of TCR clone 146172 (TRAV3, TRAJ21)
CAVGNFNKFYF

SEQ ID NO: 292344 - protein, 17 aa, Homo sapiens
  CDR3 for beta chain variable domain of TCR clone 146172 (TRBV7-8, TRBJ2-7)
CASSFTSGRPPSYEQYF

SEQ ID NO: 292345 - protein, 16 aa, Homo sapiens
  CDR3 for alpha chain variable domain of TCR clone 146173 (TRAV13-1, TRAJ48)
CAASIFGNFGTEKLTF

SEQ ID NO: 292346 - protein, 14 aa, Homo sapiens
  CDR3 for beta chain variable domain of TCR clone 146173 (TRBV24-1, TRBJ1-1)
CATSIPRGDTEAFF

SEQ ID NO: 292347 - protein, 14 aa, Homo sapiens
  CDR3 for alpha chain variable domain of TCR clone 146174 (TRAV3, TRAJ9)
CAVRLNTGGFKTIF

SEQ ID NO: 292348 - protein, 15 aa, Homo sapiens
  CDR3 for beta chain variable domain of TCR clone 146174 (TRBV7-2, TRBJ2-1)
CARSLASGRVNEQFF

SEQ ID NO: 292349 - protein, 15 aa, Homo sapiens
  CDR3 for alpha chain variable domain of TCR clone 146175 (TRAV30, TRAJ13)
CGTKGVTGGYQKVTF

SEQ ID NO: 292350 - protein, 17 aa, Homo sapiens
  CDR3 for beta chain variable domain of TCR clone 146175 (TRBV20-1, TRBJ2-2)
CSARVKRTHVRSGELFF

SEQ ID NO: 292351 - protein, 10 aa, Homo sapiens
  CDR3 for alpha chain variable domain of TCR clone 146176 (TRAV26-1, TRAJ22)
CSGFARQLTF

SEQ ID NO: 292352 - protein, 13 aa, Homo sapiens
  CDR3 for beta chain variable domain of TCR clone 146176 (TRBV7-9, TRBJ1-2)
CASSLKQNYGYTF

SEQ ID NO: 292353 - protein, 12 aa, Homo sapiens
  CDR3 for alpha chain variable domain of TCR clone 146177 (TRAV8-3, TRAJ20)
CAVGANDYKLSF

SEQ ID NO: 292354 - protein, 17 aa, Homo sapiens
  CDR3 for beta chain variable domain of TCR clone 146177 (TRBV20-1, TRBJ2-2)
CSASGSGQGELTGELFF

SEQ ID NO: 292355 - protein, 14 aa, Homo sapiens
  CDR3 for alpha chain variable domain of TCR clone 146178 (TRAV13-1, TRAJ44)
CAAKATGTASKLTF

SEQ ID NO: 292356 - protein, 13 aa, Homo sapiens
  CDR3 for beta chain variable domain of TCR clone 146178 (TRBV19, TRBJ2-1)
PVSRVGGPNEQFF

SEQ ID NO: 292357 - protein, 21 aa, Homo sapiens
  CDR3 for alpha chain variable domain of TCR clone 146179 (TRAV12-1, TRAJ37)
CVVNGGLWQHRQTNLWPRDNF

SEQ ID NO: 292358 - protein, 12 aa, Homo sapiens
  CDR3 for beta chain variable domain of TCR clone 146179 (TRBV20-1, TRBJ1-2)
CSAPGFNYGYTF

SEQ ID NO: 292359 - protein, 12 aa, Homo sapiens
  CDR3 for alpha chain variable domain of TCR clone 146180 (TRAV20, TRAJ39)
CAVGNAGNMLTF

SEQ ID NO: 292360 - protein, 13 aa, Homo sapiens
  CDR3 for beta chain variable domain of TCR clone 146180 (TRBV19, TRBJ1-2)
CASSVPGQDGYTF

SEQ ID NO: 292361 - protein, 15 aa, Homo sapiens
  CDR3 for alpha chain variable domain of TCR clone 146181 (TRAV8-2, TRAJ40)
CVVLGTTSGTYKYNF

SEQ ID NO: 292362 - protein, 16 aa, Homo sapiens
  CDR3 for beta chain variable domain of TCR clone 146181 (TRBV7-3, TRBJ2-1)
CASSLECYRSYNEQFF

SEQ ID NO: 292363 - protein, 14 aa, Homo sapiens
  CDR3 for alpha chain variable domain of TCR clone 146182 (TRAV1-2, TRAJ16)
CAVNRFSDVQKLLF

SEQ ID NO: 292364 - protein, 15 aa, Homo sapiens
  CDR3 for beta chain variable domain of TCR clone 146182 (TRBV4-1, TRBJ2-5)
CASSQWELYQETQYF

SEQ ID NO: 292365 - protein, 14 aa, Homo sapiens
  CDR3 for alpha chain variable domain of TCR clone 146183 (TRAV12-1, TRAJ17)
CVVNYKAAGNKLTF

SEQ ID NO: 292366 - protein, 14 aa, Homo sapiens
  CDR3 for beta chain variable domain of TCR clone 146183 (TRBV7-8, TRBJ2-3)
CASSLEAGTDAQYF

SEQ ID NO: 292367 - protein, 15 aa, Homo sapiens
  CDR3 for alpha chain variable domain of TCR clone 146184 (TRAV3, TRAJ47)
CAVRDIGEYGNKLVF

SEQ ID NO: 292368 - protein, 14 aa, Homo sapiens
  CDR3 for beta chain variable domain of TCR clone 146184 (TRBV13, TRBJ2-5)
CASSLERVGDTQYF

SEQ ID NO: 292369 - protein, 15 aa, Homo sapiens
  CDR3 for alpha chain variable domain of TCR clone 146185 (TRAV39, TRAJ48)
CAVDPRGFGNEKLTF

SEQ ID NO: 292370 - protein, 13 aa, Homo sapiens
  CDR3 for beta chain variable domain of TCR clone 146185 (TRBV19, TRBJ1-2)
CASSVPGQDGYTF

SEQ ID NO: 292371 - protein, 13 aa, Homo sapiens
  CDR3 for alpha chain variable domain of TCR clone 146186 (TRAV13-1, TRAJ49)
CAAMLYTGNQFYF

SEQ ID NO: 292372 - protein, 15 aa, Homo sapiens
  CDR3 for beta chain variable domain of TCR clone 146186 (TRBV12-4, TRBJ1-5)
CASTRGSGFGQPHHF

SEQ ID NO: 292373 - protein, 15 aa, Homo sapiens
  CDR3 for alpha chain variable domain of TCR clone 146187 (TRAV27, TRAJ50)
CAGVGRGNSYDKVIF

SEQ ID NO: 292374 - protein, 14 aa, Homo sapiens
  CDR3 for beta chain variable domain of TCR clone 146187 (TRBV7-2, TRBJ1-1)
CASSFYDLNTEAFF

SEQ ID NO: 292375 - protein, 14 aa, Homo sapiens
  CDR3 for alpha chain variable domain of TCR clone 146188 (TRAV1-2, TRAJ16)
YAVNRFSDGQKLLF

SEQ ID NO: 292376 - protein, 11 aa, Homo sapiens
  CDR3 for beta chain variable domain of TCR clone 146188 (TRBV11-3, TRBJ2-2)
CASSLPGELFF

SEQ ID NO: 292377 - protein, 14 aa, Homo sapiens
  CDR3 for alpha chain variable domain of TCR clone 146189 (TRAV29/DV5, TRAJ20)
CAASAPIEDYKLSF

SEQ ID NO: 292378 - protein, 13 aa, Homo sapiens
  CDR3 for beta chain variable domain of TCR clone 146189 (TRBV12-4, TRBJ2-2)
CASSPLPPGELFF

SEQ ID NO: 292379 - protein, 22 aa, Homo sapiens
  CDR3 for alpha chain variable domain of TCR clone 146190 (TRAV8-6, TRAJ38)
CAVRNAGNNHIQNPDPAVYQLR

SEQ ID NO: 292380 - protein, 15 aa, Homo sapiens
  CDR3 for beta chain variable domain of TCR clone 146190 (TRBV4-1, TRBJ2-2)
CASSEGQGITGELFF

SEQ ID NO: 292381 - protein, 14 aa, Homo sapiens
  CDR3 for alpha chain variable domain of TCR clone 146191 (TRAV26-1, TRAJ38)
CIADNAGTNRKLIW

SEQ ID NO: 292382 - protein, 16 aa, Homo sapiens
  CDR3 for beta chain variable domain of TCR clone 146191 (TRBV19, TRBJ2-1)
CASSKAGPSSYNEQFF

SEQ ID NO: 292383 - protein, 12 aa, Homo sapiens
  CDR3 for alpha chain variable domain of TCR clone 146192 (TRAV29/DV5, TRAJ15)
CASNQAGTALIF

SEQ ID NO: 292384 - protein, 15 aa, Homo sapiens
  CDR3 for beta chain variable domain of TCR clone 146192 (TRBV11-2, TRBJ2-2)
CTSSSDRVNAGELFF

SEQ ID NO: 292385 - protein, 13 aa, Homo sapiens
  CDR3 for alpha chain variable domain of TCR clone 146193 (TRAV12-2, TRAJ35)
CAESAGFGNVLHC

SEQ ID NO: 292386 - protein, 14 aa, Homo sapiens
  CDR3 for beta chain variable domain of TCR clone 146193 (TRBV28, TRBJ2-5)
CASSLRGLEETQYF

SEQ ID NO: 292387 - protein, 16 aa, Homo sapiens
  CDR3 for alpha chain variable domain of TCR clone 146194 (TRAV27, TRAJ53)
CAAHGGRGGSNYKLTF

SEQ ID NO: 292388 - protein, 15 aa, Homo sapiens
  CDR3 for beta chain variable domain of TCR clone 146194 (TRBV20-1, TRBJ1-1)
CSASRGVTGNTEAFF

SEQ ID NO: 292389 - protein, 12 aa, Homo sapiens
  CDR3 for alpha chain variable domain of TCR clone 146195 (TRAV35, TRAJ31)
CAAASNNARLMF

SEQ ID NO: 292390 - protein, 14 aa, Homo sapiens
  CDR3 for beta chain variable domain of TCR clone 146195 (TRBV2, TRBJ2-2)
CASSLFGGNGELFF

SEQ ID NO: 292391 - protein, 13 aa, Homo sapiens
  CDR3 for alpha chain variable domain of TCR clone 146196 (TRAV21, TRAJ27)
CAARPGNAGKSTF

SEQ ID NO: 292392 - protein, 13 aa, Homo sapiens
  CDR3 for beta chain variable domain of TCR clone 146196 (TRBV12-4, TRBJ1-2)
CASSLRQGKGYTF

SEQ ID NO: 292393 - protein, 17 aa, Homo sapiens
  CDR3 for alpha chain variable domain of TCR clone 146197 (TRAV3, TRAJ6)
CSLRDGPRAGGSYIPTF

SEQ ID NO: 292394 - protein, 14 aa, Homo sapiens
  CDR3 for beta chain variable domain of TCR clone 146197 (TRBV7-2, TRBJ2-7)
CASSPKTSFYEQYF

SEQ ID NO: 292395 - protein, 15 aa, Homo sapiens
  CDR3 for alpha chain variable domain of TCR clone 146198 (TRAV26-1, TRAJ17)
CISQSCRQQANFCRR

SEQ ID NO: 292396 - protein, 16 aa, Homo sapiens
  CDR3 for beta chain variable domain of TCR clone 146198 (TRBV28, TRBJ1-4)
CASSSRTGAANEKLFF

SEQ ID NO: 292397 - protein, 14 aa, Homo sapiens
  CDR3 for alpha chain variable domain of TCR clone 146199 (TRAV26-1, TRAJ38)
CIADNGGNNRKLIC

SEQ ID NO: 292398 - protein, 13 aa, Homo sapiens
  CDR3 for beta chain variable domain of TCR clone 146199 (TRBV20-1, TRBJ1-1)
CSARGGGNTEAFF

SEQ ID NO: 292399 - protein, 11 aa, Homo sapiens
  CDR3 for alpha chain variable domain of TCR clone 146200 (TRAV39, TRAJ49)
CAVDISTQFYF

SEQ ID NO: 292400 - protein, 11 aa, Homo sapiens
  CDR3 for beta chain variable domain of TCR clone 146200 (TRBV7-8, TRBJ2-7)
CASSLSLEQYF

SEQ ID NO: 292401 - protein, 14 aa, Homo sapiens
  CDR3 for alpha chain variable domain of TCR clone 146201 (TRAV20, TRAJ6)
CAVQERGGSYIPTF

SEQ ID NO: 292402 - protein, 14 aa, Homo sapiens
  CDR3 for beta chain variable domain of TCR clone 146201 (TRBV19, TRBJ2-1)
CASPTFVLSGEQFF

SEQ ID NO: 292403 - protein, 13 aa, Homo sapiens
  CDR3 for alpha chain variable domain of TCR clone 146202 (TRAV3, TRAJ36)
CAVRDTGANNLFF

SEQ ID NO: 292404 - protein, 15 aa, Homo sapiens
  CDR3 for beta chain variable domain of TCR clone 146202 (TRBV24-1, TRBJ2-1)
CATSGSGGVYNEQFF

SEQ ID NO: 292405 - protein, 16 aa, Homo sapiens
  CDR3 for alpha chain variable domain of TCR clone 146203 (TRAV30, TRAJ24)
CGTAIVDADSWGKFQF

SEQ ID NO: 292406 - protein, 15 aa, Homo sapiens
  CDR3 for beta chain variable domain of TCR clone 146203 (TRBV6-3, TRBJ2-7)
CASSSPGTVFYEQYF

SEQ ID NO: 292407 - protein, 12 aa, Homo sapiens
  CDR3 for alpha chain variable domain of TCR clone 146204 (TRAV1-2, TRAJ29)
CAVPSGNTPLVF

SEQ ID NO: 292408 - protein, 13 aa, Homo sapiens
  CDR3 for beta chain variable domain of TCR clone 146204 (TRBV5-4, TRBJ1-1)
CASSADLGTEAFF

SEQ ID NO: 292409 - protein, 10 aa, Homo sapiens
  CDR3 for alpha chain variable domain of TCR clone 146205 (TRAV5, TRAJ34)
CAEDTDKLIF

SEQ ID NO: 292410 - protein, 14 aa, Homo sapiens
  CDR3 for beta chain variable domain of TCR clone 146205 (TRBV7-9, TRBJ2-1)
CASSPLDSLYEQFF

SEQ ID NO: 292411 - protein, 16 aa, Homo sapiens
  CDR3 for alpha chain variable domain of TCR clone 146206 (TRAV23/DV6, TRAJ52)
CAARPSGGTSYGKLTF

SEQ ID NO: 292412 - protein, 15 aa, Homo sapiens
  CDR3 for beta chain variable domain of TCR clone 146206 (TRBV5-1, TRBJ2-5)
CASSFRGGDQETQYF

SEQ ID NO: 292413 - protein, 13 aa, Homo sapiens
  CDR3 for alpha chain variable domain of TCR clone 146207 (TRAV12-1, TRAJ26)
CVVRRNYGQNFVF

SEQ ID NO: 292414 - protein, 15 aa, Homo sapiens
  CDR3 for beta chain variable domain of TCR clone 146207 (TRBV28, TRBJ2-1)
CASSRMAGGRSEQFF

SEQ ID NO: 292415 - protein, 14 aa, Homo sapiens
  CDR3 for alpha chain variable domain of TCR clone 146208 (TRAV16, TRAJ3)
CALSQYSSASKIIF

SEQ ID NO: 292416 - protein, 16 aa, Homo sapiens
  CDR3 for beta chain variable domain of TCR clone 146208 (TRBV7-3, TRBJ2-1)
CASSFTGRRSYNEQFF

SEQ ID NO: 292417 - protein, 17 aa, Homo sapiens
  CDR3 for alpha chain variable domain of TCR clone 146209 (TRAV3, TRAJ6)
CAVRDGPRAGGSYIPTF

SEQ ID NO: 292418 - protein, 13 aa, Homo sapiens
  CDR3 for beta chain variable domain of TCR clone 146209 (TRBV5-7, TRBJ1-2)
CASSVGTGYGYTF

SEQ ID NO: 292419 - protein, 13 aa, Homo sapiens
  CDR3 for alpha chain variable domain of TCR clone 146210 (TRAV1-2, TRAJ9)
CAALNTGGFKTIF

SEQ ID NO: 292420 - protein, 13 aa, Homo sapiens
  CDR3 for beta chain variable domain of TCR clone 146210 (TRBV24-1, TRBJ2-1)
CATSAGPYNEQFF

SEQ ID NO: 292421 - protein, 12 aa, Homo sapiens
  CDR3 for alpha chain variable domain of TCR clone 146211 (TRAV17, TRAJ17)
CAKDAESNKLTF

SEQ ID NO: 292422 - protein, 14 aa, Homo sapiens
  CDR3 for beta chain variable domain of TCR clone 146211 (TRBV7-2, TRBJ2-1)
CASSLVAGGNEQFF

SEQ ID NO: 292423 - protein, 17 aa, Homo sapiens
  CDR3 for alpha chain variable domain of TCR clone 146212 (TRAV3, TRAJ42)
CAVRDRDYGGSQGNLIF

SEQ ID NO: 292424 - protein, 19 aa, Homo sapiens
  CDR3 for beta chain variable domain of TCR clone 146212 (TRBV5-1, TRBJ2-2)
CASSLAPGLAGVRTGELFF

SEQ ID NO: 292425 - protein, 12 aa, Homo sapiens
  CDR3 for alpha chain variable domain of TCR clone 146213 (TRAV12-3, TRAJ33)
CAMSVNSNYQLM

SEQ ID NO: 292426 - protein, 13 aa, Homo sapiens
  CDR3 for beta chain variable domain of TCR clone 146213 (TRBV7-2, TRBJ2-2)
CASSLAVTGELFF

SEQ ID NO: 292427 - protein, 16 aa, Homo sapiens
  CDR3 for alpha chain variable domain of TCR clone 146214 (TRAV3, TRAJ27)
CAVRDPQGTNAGKSTF

SEQ ID NO: 292428 - protein, 17 aa, Homo sapiens
  CDR3 for beta chain variable domain of TCR clone 146214 (TRBV4-1, TRBJ2-7)
CASSQGRGLQASYEQYF

SEQ ID NO: 292429 - protein, 14 aa, Homo sapiens
  CDR3 for alpha chain variable domain of TCR clone 146215 (TRAV8-3, TRAJ23)
CAVIIYNQGGKLIF

SEQ ID NO: 292430 - protein, 15 aa, Homo sapiens
  CDR3 for beta chain variable domain of TCR clone 146215 (TRBV19, TRBJ2-2)
CASSPRTGWTGELFF

SEQ ID NO: 292431 - protein, 13 aa, Homo sapiens
  CDR3 for alpha chain variable domain of TCR clone 146216 (TRAV12-1, TRAJ40)
CVVPTSGTSKYIS

SEQ ID NO: 292432 - protein, 18 aa, Homo sapiens
  CDR3 for beta chain variable domain of TCR clone 146216 (TRBV7-6, TRBJ2-1)
CASSPRTSGMSSYNEQFF

SEQ ID NO: 292433 - protein, 17 aa, Homo sapiens
  CDR3 for alpha chain variable domain of TCR clone 146217 (TRAV21, TRAJ52)
CAVGVNAGGTSYGKLTF

SEQ ID NO: 292434 - protein, 13 aa, Homo sapiens
  CDR3 for beta chain variable domain of TCR clone 146217 (TRBV5-1, TRBJ1-2)
GASSFQGNYGYTF

SEQ ID NO: 292435 - protein, 13 aa, Homo sapiens
  CDR3 for alpha chain variable domain of TCR clone 146218 (TRAV26-1, TRAJ29)
CIVRRSGNTPLVF

SEQ ID NO: 292436 - protein, 13 aa, Homo sapiens
  CDR3 for beta chain variable domain of TCR clone 146218 (TRBV19, TRBJ2-7)
CASSTKQGYEQYF

SEQ ID NO: 292437 - protein, 13 aa, Homo sapiens
  CDR3 for alpha chain variable domain of TCR clone 146219 (TRAV13-1, TRAJ39)
CAASIWAGKVLTF

SEQ ID NO: 292438 - protein, 13 aa, Homo sapiens
  CDR3 for beta chain variable domain of TCR clone 146219 (TRBV7-9, TRBJ1-2)
CASSLKQNYGYTF

SEQ ID NO: 292439 - protein, 14 aa, Homo sapiens
  CDR3 for alpha chain variable domain of TCR clone 146220 (TRAV13-2, TRAJ26)
CAENLGNYGQNFVF

SEQ ID NO: 292440 - protein, 16 aa, Homo sapiens
  CDR3 for beta chain variable domain of TCR clone 146220 (TRBV19, TRBJ2-3)
CASSPGLLASTDTQYF

SEQ ID NO: 292441 - protein, 14 aa, Homo sapiens
  CDR3 for alpha chain variable domain of TCR clone 146221 (TRAV35, TRAJ22)
CAGPRPGSARQQTF

SEQ ID NO: 292442 - protein, 14 aa, Homo sapiens
  CDR3 for beta chain variable domain of TCR clone 146221 (TRBV11-3, TRBJ2-3)
CASSSGQGPDTQYF

SEQ ID NO: 292443 - protein, 17 aa, Homo sapiens
  CDR3 for alpha chain variable domain of TCR clone 146222 (TRAV13-1, TRAJ52)
CAASSGAGGTSYGKLTF

SEQ ID NO: 292444 - protein, 14 aa, Homo sapiens
  CDR3 for beta chain variable domain of TCR clone 146222 (TRBV12-5, TRBJ2-5)
CASGSRTHEETQYF

SEQ ID NO: 292445 - protein, 12 aa, Homo sapiens
  CDR3 for alpha chain variable domain of TCR clone 146223 (TRAV26-1, TRAJ36)
CIVRVRADNLFF

SEQ ID NO: 292446 - protein, 20 aa, Homo sapiens
  CDR3 for beta chain variable domain of TCR clone 146223 (TRBV7-8, TRBJ2-2)
CASGHLFPGPTIHITGELFF

SEQ ID NO: 292447 - protein, 14 aa, Homo sapiens
  CDR3 for alpha chain variable domain of TCR clone 146224 (TRAV8-4, TRAJ23)
CAVSAPGSGGKLIF

SEQ ID NO: 292448 - protein, 16 aa, Homo sapiens
  CDR3 for beta chain variable domain of TCR clone 146224 (TRBV4-1, TRBJ2-5)
CASSQAIAASSATQYF

SEQ ID NO: 292449 - protein, 11 aa, Homo sapiens
  CDR3 for alpha chain variable domain of TCR clone 146225 (TRAV21, TRAJ48)
CAVDGNEKLTF

SEQ ID NO: 292450 - protein, 15 aa, Homo sapiens
  CDR3 for beta chain variable domain of TCR clone 146225 (TRBV27, TRBJ2-1)
CASSNGGGSANEQFF

SEQ ID NO: 292451 - protein, 14 aa, Homo sapiens
  CDR3 for alpha chain variable domain of TCR clone 146226 (TRAV26-1, TRAJ38)
CIADNVGNNRKLIW

SEQ ID NO: 292452 - protein, 15 aa, Homo sapiens
  CDR3 for beta chain variable domain of TCR clone 146226 (TRBV20-1, TRBJ1-1)
CSASRGVTGNTEAFF

SEQ ID NO: 292453 - protein, 15 aa, Homo sapiens
  CDR3 for alpha chain variable domain of TCR clone 146227 (TRAV12-3, TRAJ6)
CAMSATTGGSYIPTF

SEQ ID NO: 292454 - protein, 13 aa, Homo sapiens
  CDR3 for beta chain variable domain of TCR clone 146227 (TRBV12-4, TRBJ2-2)
CASSITGSGELFF

SEQ ID NO: 292455 - protein, 13 aa, Homo sapiens
  CDR3 for alpha chain variable domain of TCR clone 146228 (TRAV12-3, TRAJ50)
CARCGTSYDKVIF

SEQ ID NO: 292456 - protein, 14 aa, Homo sapiens
  CDR3 for beta chain variable domain of TCR clone 146228 (TRBV6-5, TRBJ1-1)
CASSYGQGDTEAFF

SEQ ID NO: 292457 - protein, 13 aa, Homo sapiens
  CDR3 for alpha chain variable domain of TCR clone 146229 (TRAV21, TRAJ40)
CAVQVSGTYKYIF

SEQ ID NO: 292458 - protein, 15 aa, Homo sapiens
  CDR3 for beta chain variable domain of TCR clone 146229 (TRBV25-1, TRBJ1-1)
CASREGGQGDTEAFF

SEQ ID NO: 292459 - protein, 10 aa, Homo sapiens
  CDR3 for alpha chain variable domain of TCR clone 146230 (TRAV30, TRAJ48)
CGIGNEKLTF

SEQ ID NO: 292460 - protein, 15 aa, Homo sapiens
  CDR3 for beta chain variable domain of TCR clone 146230 (TRBV6-6, TRBJ1-1)
CASSPRGDVETEAFF

SEQ ID NO: 292461 - protein, 10 aa, Homo sapiens
  CDR3 for alpha chain variable domain of TCR clone 146231 (TRAV25, TRAJ34)
CAENTDKLIF

SEQ ID NO: 292462 - protein, 17 aa, Homo sapiens
  CDR3 for beta chain variable domain of TCR clone 146231 (TRBV24-1, TRBJ2-1)
CATSDVSTSGTYNEQFF

SEQ ID NO: 292463 - protein, 14 aa, Homo sapiens
  CDR3 for alpha chain variable domain of TCR clone 146232 (TRAV1-2, TRAJ16)
CAVNRFSVGQKLLF

SEQ ID NO: 292464 - protein, 15 aa, Homo sapiens
  CDR3 for beta chain variable domain of TCR clone 146232 (TRBV7-2, TRBJ2-1)
CASSLVGSSYNEQFF

SEQ ID NO: 292465 - protein, 14 aa, Homo sapiens
  CDR3 for alpha chain variable domain of TCR clone 146233 (TRAV8-4, TRAJ54)
CAVSEVLGAQKLVF

SEQ ID NO: 292466 - protein, 16 aa, Homo sapiens
  CDR3 for beta chain variable domain of TCR clone 146233 (TRBV24-1, TRBJ2-3)
CATSDPGTGATDTQYF

SEQ ID NO: 292467 - protein, 14 aa, Homo sapiens
  CDR3 for alpha chain variable domain of TCR clone 146234 (TRAV12-2, TRAJ40)
CAVKIPSGTYKYIF

SEQ ID NO: 292468 - protein, 16 aa, Homo sapiens
  CDR3 for beta chain variable domain of TCR clone 146234 (TRBV6-3, TRBJ2-1)
CASSYRRGDSYNEQFF

SEQ ID NO: 292469 - protein, 15 aa, Homo sapiens
  CDR3 for alpha chain variable domain of TCR clone 146235 (TRAV29/DV5, TRAJ42)
CAAKTDGGSQGNLIF

SEQ ID NO: 292470 - protein, 15 aa, Homo sapiens
  CDR3 for beta chain variable domain of TCR clone 146235 (TRBV5-1, TRBJ2-2)
CASSSQGGNTAELFF

SEQ ID NO: 292471 - protein, 11 aa, Homo sapiens
  CDR3 for alpha chain variable domain of TCR clone 146236 (TRAV12-1, TRAJ30)
CVVNGQDKIIF

SEQ ID NO: 292472 - protein, 13 aa, Homo sapiens
  CDR3 for beta chain variable domain of TCR clone 146236 (TRBV11-2, TRBJ2-5)
CASSSTGEETQYF

SEQ ID NO: 292473 - protein, 16 aa, Homo sapiens
  CDR3 for alpha chain variable domain of TCR clone 146237 (TRAV17, TRAJ36)
CATVSLNWGKQPLLWA

SEQ ID NO: 292474 - protein, 13 aa, Homo sapiens
  CDR3 for beta chain variable domain of TCR clone 146237 (TRBV4-1, TRBJ1-1)
CASSQLGTGEAFC

SEQ ID NO: 292475 - protein, 15 aa, Homo sapiens
  CDR3 for alpha chain variable domain of TCR clone 146238 (TRAV3, TRAJ36)
CAVRASQTGANNLFF

SEQ ID NO: 292476 - protein, 15 aa, Homo sapiens
  CDR3 for beta chain variable domain of TCR clone 146238 (TRBV3-1, TRBJ2-1)
CASSQDDTPRGEQFF

SEQ ID NO: 292477 - protein, 16 aa, Homo sapiens
  CDR3 for alpha chain variable domain of TCR clone 146239 (TRAV12-3, TRAJ53)
CAMSPGSGGSNYTLTF

SEQ ID NO: 292478 - protein, 15 aa, Homo sapiens
  CDR3 for beta chain variable domain of TCR clone 146239 (TRBV27, TRBJ2-1)
CASSNGGGSSNEQFF

SEQ ID NO: 292479 - protein, 12 aa, Homo sapiens
  CDR3 for alpha chain variable domain of TCR clone 146240 (TRAV26-1, TRAJ36)
CIVRVRADNLFF

SEQ ID NO: 292480 - protein, 15 aa, Homo sapiens
  CDR3 for beta chain variable domain of TCR clone 146240 (TRBV10-3, TRBJ2-5)
CAISEFGRGQETQYF

SEQ ID NO: 292481 - protein, 14 aa, Homo sapiens
  CDR3 for alpha chain variable domain of TCR clone 146241 (TRAV8-3, TRAJ4)
CSVGASGGYNKLIF

SEQ ID NO: 292482 - protein, 17 aa, Homo sapiens
  CDR3 for beta chain variable domain of TCR clone 146241 (TRBV11-2, TRBJ2-1)
CASSLYPPGVEYNEQFF

SEQ ID NO: 292483 - protein, 14 aa, Homo sapiens
  CDR3 for alpha chain variable domain of TCR clone 146242 (TRAV13-1, TRAJ39)
CAASKNNAGNMLTF

SEQ ID NO: 292484 - protein, 15 aa, Homo sapiens
  CDR3 for beta chain variable domain of TCR clone 146242 (TRBV7-9, TRBJ1-6)
CASSSPGRGNSPLHV

SEQ ID NO: 292485 - protein, 14 aa, Homo sapiens
  CDR3 for alpha chain variable domain of TCR clone 146243 (TRAV4, TRAJ32)
CLVNYGGATNKPIF

SEQ ID NO: 292486 - protein, 14 aa, Homo sapiens
  CDR3 for beta chain variable domain of TCR clone 146243 (TRBV15, TRBJ2-5)
CATSGGTRTETQYF

SEQ ID NO: 292487 - protein, 10 aa, Homo sapiens
  CDR3 for alpha chain variable domain of TCR clone 146244 (TRAV2, TRAJ34)
CAVVNDKLIF

SEQ ID NO: 292488 - protein, 16 aa, Homo sapiens
  CDR3 for beta chain variable domain of TCR clone 146244 (TRBV28, TRBJ2-2)
CASSLEGGSNTGELFF

SEQ ID NO: 292489 - protein, 12 aa, Homo sapiens
  CDR3 for alpha chain variable domain of TCR clone 146245 (TRAV1-1, TRAJ39)
CAVPVVGNMLTL

SEQ ID NO: 292490 - protein, 12 aa, Homo sapiens
  CDR3 for beta chain variable domain of TCR clone 146245 (TRBV2, TRBJ1-2)
CASSGQTYGYTF

SEQ ID NO: 292491 - protein, 15 aa, Homo sapiens
  CDR3 for alpha chain variable domain of TCR clone 146246 (TRAV8-2, TRAJ40)
CVVLGTTSGTYKYIF

SEQ ID NO: 292492 - protein, 12 aa, Homo sapiens
  CDR3 for beta chain variable domain of TCR clone 146246 (TRBV11-2, TRBJ2-1)
CASSPGNNEQFF

SEQ ID NO: 292493 - protein, 15 aa, Homo sapiens
  CDR3 for alpha chain variable domain of TCR clone 146247 (TRAV27, TRAJ53)
CRAINSGGSNYKLTF

SEQ ID NO: 292494 - protein, 13 aa, Homo sapiens
  CDR3 for beta chain variable domain of TCR clone 146247 (TRBV7-3, TRBJ2-1)
CRQLSGGTNEQFF

SEQ ID NO: 292495 - protein, 16 aa, Homo sapiens
  CDR3 for alpha chain variable domain of TCR clone 146248 (TRAV3, TRAJ28)
CAVLPRSGAGSYQLTF

SEQ ID NO: 292496 - protein, 13 aa, Homo sapiens
  CDR3 for beta chain variable domain of TCR clone 146248 (TRBV7-2, TRBJ1-1)
CASNLKGAKVAFF

SEQ ID NO: 292497 - protein, 13 aa, Homo sapiens
  CDR3 for alpha chain variable domain of TCR clone 146249 (TRAV21, TRAJ20)
CAVGLRVDYKLSF

SEQ ID NO: 292498 - protein, 16 aa, Homo sapiens
  CDR3 for beta chain variable domain of TCR clone 146249 (TRBV6-5, TRBJ2-1)
CASSETLAGHYNEQFF

SEQ ID NO: 292499 - protein, 13 aa, Homo sapiens
  CDR3 for alpha chain variable domain of TCR clone 146250 (TRAV27, TRAJ45)
CRSSGGGADGLTF

SEQ ID NO: 292500 - protein, 15 aa, Homo sapiens
  CDR3 for beta chain variable domain of TCR clone 146250 (TRBV9, TRBJ2-2)
CASSDFAGAAGELFF

SEQ ID NO: 292501 - protein, 11 aa, Homo sapiens
  CDR3 for alpha chain variable domain of TCR clone 146251 (TRAV1-2, TRAJ20)
CAVSNDYKLSF

SEQ ID NO: 292502 - protein, 16 aa, Homo sapiens
  CDR3 for beta chain variable domain of TCR clone 146251 (TRBV6-3, TRBJ1-2)
FASSYSRRASNYGYTF

SEQ ID NO: 292503 - protein, 14 aa, Homo sapiens
  CDR3 for alpha chain variable domain of TCR clone 146252 (TRAV12-1, TRAJ17)
CAVNYKAAGDKLTF

SEQ ID NO: 292504 - protein, 17 aa, Homo sapiens
  CDR3 for beta chain variable domain of TCR clone 146252 (TRBV20-1, TRBJ2-1)
CSASSSGLAGSYNEQFF

SEQ ID NO: 292505 - protein, 14 aa, Homo sapiens
  CDR3 for alpha chain variable domain of TCR clone 146253 (TRAV12-1, TRAJ31)
CVANNRDNNARLMF

SEQ ID NO: 292506 - protein, 16 aa, Homo sapiens
  CDR3 for beta chain variable domain of TCR clone 146253 (TRBV3-1, TRBJ2-3)
CASSRRAAGGRDTQYF

SEQ ID NO: 292507 - protein, 13 aa, Homo sapiens
  CDR3 for alpha chain variable domain of TCR clone 146254 (TRAV1-1, TRAJ9)
CAAKNTGGFKTIF

SEQ ID NO: 292508 - protein, 14 aa, Homo sapiens
  CDR3 for beta chain variable domain of TCR clone 146254 (TRBV20-1, TRBJ2-1)
CSAQIGVSADEQFF

SEQ ID NO: 292509 - protein, 13 aa, Homo sapiens
  CDR3 for alpha chain variable domain of TCR clone 146255 (TRAV13-1, TRAJ11)
CAAVLAGYSTLTF

SEQ ID NO: 292510 - protein, 12 aa, Homo sapiens
  CDR3 for beta chain variable domain of TCR clone 146255 (TRBV7-9, TRBJ1-4)
CASSTDREKLFF

SEQ ID NO: 292511 - protein, 14 aa, Homo sapiens
  CDR3 for alpha chain variable domain of TCR clone 146256 (TRAV2, TRAJ29)
CAVTPPSGNTPLVF

SEQ ID NO: 292512 - protein, 13 aa, Homo sapiens
  CDR3 for beta chain variable domain of TCR clone 146256 (TRBV2, TRBJ2-5)
CASGTPYQETQYF

SEQ ID NO: 292513 - protein, 14 aa, Homo sapiens
  CDR3 for alpha chain variable domain of TCR clone 146257 (TRAV1-2, TRAJ16)
CAVNRFSDGQKLLF

SEQ ID NO: 292514 - protein, 13 aa, Homo sapiens
  CDR3 for beta chain variable domain of TCR clone 146257 (TRBV5-7, TRBJ2-2)
CASTNIDTGELFF

SEQ ID NO: 292515 - protein, 13 aa, Homo sapiens
  CDR3 for alpha chain variable domain of TCR clone 146258 (TRAV16, TRAJ28)
CALTGAGSYKLTF

SEQ ID NO: 292516 - protein, 16 aa, Homo sapiens
  CDR3 for beta chain variable domain of TCR clone 146258 (TRBV28, TRBJ1-5)
CASSLTGQGWNQLQHF

SEQ ID NO: 292517 - protein, 17 aa, Homo sapiens
  CDR3 for alpha chain variable domain of TCR clone 146259 (TRAV3, TRAJ28)
CAVREAYSGAGSYHLTF

SEQ ID NO: 292518 - protein, 18 aa, Homo sapiens
  CDR3 for beta chain variable domain of TCR clone 146259 (TRBV27, TRBJ2-1)
CASGNRAVGVGSKNEQFF

SEQ ID NO: 292519 - protein, 14 aa, Homo sapiens
  CDR3 for alpha chain variable domain of TCR clone 146260 (TRAV20, TRAJ40)
CAVSLTSGTYKYIF

SEQ ID NO: 292520 - protein, 13 aa, Homo sapiens
  CDR3 for beta chain variable domain of TCR clone 146260 (TRBV19, TRBJ2-7)
CASSIDRTYEQYF

SEQ ID NO: 292521 - protein, 17 aa, Homo sapiens
  CDR3 for alpha chain variable domain of TCR clone 146261 (TRAV3, TRAJ42)
CAVRDRDYGGSQGNLIF

SEQ ID NO: 292522 - protein, 13 aa, Homo sapiens
  CDR3 for beta chain variable domain of TCR clone 146261 (TRBV19, TRBJ1-2)
CASSVPGRDGYTF

SEQ ID NO: 292523 - protein, 16 aa, Homo sapiens
  CDR3 for alpha chain variable domain of TCR clone 146262 (TRAV3, TRAJ10)
CAVRDMRAGGGNKLTF

SEQ ID NO: 292524 - protein, 15 aa, Homo sapiens
  CDR3 for beta chain variable domain of TCR clone 146262 (TRBV5-1, TRBJ2-3)
CASSVTSGSTDTQYF

SEQ ID NO: 292525 - protein, 13 aa, Homo sapiens
  CDR3 for alpha chain variable domain of TCR clone 146263 (TRAV2, TRAJ40)
CAVVTSGTYKYIV

SEQ ID NO: 292526 - protein, 16 aa, Homo sapiens
  CDR3 for beta chain variable domain of TCR clone 146263 (TRBV29-1, TRBJ2-6)
CSVEDITYSGANVLTF

SEQ ID NO: 292527 - protein, 16 aa, Homo sapiens
  CDR3 for alpha chain variable domain of TCR clone 146264 (TRAV26-1, TRAJ36)
CIVRVPDQTGANNLFF

SEQ ID NO: 292528 - protein, 15 aa, Homo sapiens
  CDR3 for beta chain variable domain of TCR clone 146264 (TRBV7-3, TRBJ2-1)
CASSLGQGPFGEQFL

SEQ ID NO: 292529 - protein, 15 aa, Homo sapiens
  CDR3 for alpha chain variable domain of TCR clone 146265 (TRAV27, TRAJ38)
CAARRNAGNNRKLIW

SEQ ID NO: 292530 - protein, 13 aa, Homo sapiens
  CDR3 for beta chain variable domain of TCR clone 146265 (TRBV7-3, TRBJ2-1)
CASSLDGYNEQFF

SEQ ID NO: 292531 - protein, 12 aa, Homo sapiens
  CDR3 for alpha chain variable domain of TCR clone 146266 (TRAV21, TRAJ11)
CAATSGYSTLTF

SEQ ID NO: 292532 - protein, 15 aa, Homo sapiens
  CDR3 for beta chain variable domain of TCR clone 146266 (TRBV7-9, TRBJ1-5)
CASSQGHQPNQPQHF

SEQ ID NO: 292533 - protein, 12 aa, Homo sapiens
  CDR3 for alpha chain variable domain of TCR clone 146267 (TRAV8-1, TRAJ26)
CAVNNYGQNFVF

SEQ ID NO: 292534 - protein, 11 aa, Homo sapiens
  CDR3 for beta chain variable domain of TCR clone 146267 (TRBV29-1, TRBJ2-5)
CSEDRTGTQYF

SEQ ID NO: 292535 - protein, 15 aa, Homo sapiens
  CDR3 for alpha chain variable domain of TCR clone 146268 (TRAV1-2, TRAJ30)
RAVRPHGNRDDKIIF

SEQ ID NO: 292536 - protein, 13 aa, Homo sapiens
  CDR3 for beta chain variable domain of TCR clone 146268 (TRBV4-1, TRBJ2-7)
CASSQGQAYEQYF

SEQ ID NO: 292537 - protein, 17 aa, Homo sapiens
  CDR3 for alpha chain variable domain of TCR clone 146269 (TRAV35, TRAJ52)
CAGQLAAGGTSYGKLTF

SEQ ID NO: 292538 - protein, 12 aa, Homo sapiens
  CDR3 for beta chain variable domain of TCR clone 146269 (TRBV20-1, TRBJ2-7)
SAVLRRQSEQYF

SEQ ID NO: 292539 - protein, 13 aa, Homo sapiens
  CDR3 for alpha chain variable domain of TCR clone 146270 (TRAV1-2, TRAJ9)
CAALNTGGFATIF

SEQ ID NO: 292540 - protein, 13 aa, Homo sapiens
  CDR3 for beta chain variable domain of TCR clone 146270 (TRBV19, TRBJ1-2)
CASSVPGQDGYTF

SEQ ID NO: 292541 - protein, 14 aa, Homo sapiens
  CDR3 for alpha chain variable domain of TCR clone 146271 (TRAV2, TRAJ9)
CAEEDRSGGFKTIF

SEQ ID NO: 292542 - protein, 12 aa, Homo sapiens
  CDR3 for beta chain variable domain of TCR clone 146271 (TRBV12-4, TRBJ2-4)
CASSSSGNIQYF

SEQ ID NO: 292543 - protein, 16 aa, Homo sapiens
  CDR3 for alpha chain variable domain of TCR clone 146272 (TRAV12-3, TRAJ53)
CAMSPGSGCSNYKLTF

SEQ ID NO: 292544 - protein, 14 aa, Homo sapiens
  CDR3 for beta chain variable domain of TCR clone 146272 (TRBV6-1, TRBJ2-1)
CASAKDGFYNEQFF

SEQ ID NO: 292545 - protein, 13 aa, Homo sapiens
  CDR3 for alpha chain variable domain of TCR clone 146273 (TRAV3, TRAJ36)
CAVKRTGANNLFF

SEQ ID NO: 292546 - protein, 16 aa, Homo sapiens
  CDR3 for beta chain variable domain of TCR clone 146273 (TRBV4-1, TRBJ2-3)
CASSQSTSGAEDTQYF

SEQ ID NO: 292547 - protein, 13 aa, Homo sapiens
  CDR3 for alpha chain variable domain of TCR clone 146274 (TRAV25, TRAJ47)
CAGHREYGNKMVF

SEQ ID NO: 292548 - protein, 17 aa, Homo sapiens
  CDR3 for beta chain variable domain of TCR clone 146274 (TRBV7-8, TRBJ2-5)
CASSLASGGRFQETQYF

SEQ ID NO: 292549 - protein, 17 aa, Homo sapiens
  CDR3 for alpha chain variable domain of TCR clone 146275 (TRAV3, TRAJ38)
CAVRDCLNAGNNRKLIW

SEQ ID NO: 292550 - protein, 13 aa, Homo sapiens
  CDR3 for beta chain variable domain of TCR clone 146275 (TRBV7-9, TRBJ2-3)
CASSPGSSDTQYF

SEQ ID NO: 292551 - protein, 12 aa, Homo sapiens
  CDR3 for alpha chain variable domain of TCR clone 146276 (TRAV12-3, TRAJ17)
CAMTLTGNKLTF

SEQ ID NO: 292552 - protein, 15 aa, Homo sapiens
  CDR3 for beta chain variable domain of TCR clone 146276 (TRBV20-1, TRBJ2-7)
CSARDRVSGMYAQYF

SEQ ID NO: 292553 - protein, 16 aa, Homo sapiens
  CDR3 for alpha chain variable domain of TCR clone 146277 (TRAV13-1, TRAJ18)
CAASRMRGSTVGRLYF

SEQ ID NO: 292554 - protein, 16 aa, Homo sapiens
  CDR3 for beta chain variable domain of TCR clone 146277 (TRBV27, TRBJ1-1)
CASSSRGRTGYTEAFF

SEQ ID NO: 292555 - protein, 14 aa, Homo sapiens
  CDR3 for alpha chain variable domain of TCR clone 146278 (TRAV12-3, TRAJ33)
CAMSAGDSNYQLIW

SEQ ID NO: 292556 - protein, 13 aa, Homo sapiens
  CDR3 for beta chain variable domain of TCR clone 146278 (TRBV29-1, TRBJ2-1)
CSVEGGRVNEQFF

SEQ ID NO: 292557 - protein, 15 aa, Homo sapiens
  CDR3 for alpha chain variable domain of TCR clone 146279 (TRAV23/DV6, TRAJ44)
CAARTLTGTASKLTF

SEQ ID NO: 292558 - protein, 15 aa, Homo sapiens
  CDR3 for beta chain variable domain of TCR clone 146279 (TRBV7-2, TRBJ2-1)
CASSFQADEYNEQFF

SEQ ID NO: 292559 - protein, 12 aa, Homo sapiens
  CDR3 for alpha chain variable domain of TCR clone 146280 (TRAV13-1, TRAJ11)
CAGPSGYSTLTF

SEQ ID NO: 292560 - protein, 13 aa, Homo sapiens
  CDR3 for beta chain variable domain of TCR clone 146280 (TRBV12-4, TRBJ1-5)
CASSPDRAQPQHC

SEQ ID NO: 292561 - protein, 11 aa, Homo sapiens
  CDR3 for alpha chain variable domain of TCR clone 146281 (TRAV3, TRAJ21)
CAVGNFNKFYF

SEQ ID NO: 292562 - protein, 14 aa, Homo sapiens
  CDR3 for beta chain variable domain of TCR clone 146281 (TRBV7-2, TRBJ2-5)
CASSPLGQSETQYF

SEQ ID NO: 292563 - protein, 11 aa, Homo sapiens
  CDR3 for alpha chain variable domain of TCR clone 146282 (TRAV13-1, TRAJ39)
CASHAGNMLTF

SEQ ID NO: 292564 - protein, 14 aa, Homo sapiens
  CDR3 for beta chain variable domain of TCR clone 146282 (TRBV19, TRBJ2-1)
CASGKSTQYNEQFF

SEQ ID NO: 292565 - protein, 15 aa, Homo sapiens
  CDR3 for alpha chain variable domain of TCR clone 146283 (TRAV2, TRAJ11)
CAVGGRNSGYSTLTF

SEQ ID NO: 292566 - protein, 11 aa, Homo sapiens
  CDR3 for beta chain variable domain of TCR clone 146283 (TRBV11-2, TRBJ2-2)
CASSLPGELFF

SEQ ID NO: 292567 - protein, 17 aa, Homo sapiens
  CDR3 for alpha chain variable domain of TCR clone 146284 (TRAV23/DV6, TRAJ57)
CSASSTLSQGGSEKLVF

SEQ ID NO: 292568 - protein, 14 aa, Homo sapiens
  CDR3 for beta chain variable domain of TCR clone 146284 (TRBV25-1, TRBJ1-1)
CASAHLGGNTEAFF

SEQ ID NO: 292569 - protein, 19 aa, Homo sapiens
  CDR3 for alpha chain variable domain of TCR clone 146285 (TRAV9-2, TRAJ52)
CALSFSLLSGGTSYGKLKF

SEQ ID NO: 292570 - protein, 14 aa, Homo sapiens
  CDR3 for beta chain variable domain of TCR clone 146285 (TRBV7-6, TRBJ2-7)
CASSLFQDSYEQYF

SEQ ID NO: 292571 - protein, 14 aa, Homo sapiens
  CDR3 for alpha chain variable domain of TCR clone 146286 (TRAV38-1, TRAJ27)
CAFIHNTNAGKSTF

SEQ ID NO: 292572 - protein, 12 aa, Homo sapiens
  CDR3 for beta chain variable domain of TCR clone 146286 (TRBV7-8, TRBJ2-7)
CDSSLGDREQYF

SEQ ID NO: 292573 - protein, 11 aa, Homo sapiens
  CDR3 for alpha chain variable domain of TCR clone 146287 (TRAV3, TRAJ36)
CAVRDTGQTTS

SEQ ID NO: 292574 - protein, 15 aa, Homo sapiens
  CDR3 for beta chain variable domain of TCR clone 146287 (TRBV24-1, TRBJ2-1)
CATSGSGGFYNEQFF

SEQ ID NO: 292575 - protein, 12 aa, Homo sapiens
  CDR3 for alpha chain variable domain of TCR clone 146288 (TRAV8-3, TRAJ26)
CAVDNYGQNFVF

SEQ ID NO: 292576 - protein, 14 aa, Homo sapiens
  CDR3 for beta chain variable domain of TCR clone 146288 (TRBV7-2, TRBJ2-7)
CASRSQGAAYEQYF

SEQ ID NO: 292577 - protein, 15 aa, Homo sapiens
  CDR3 for alpha chain variable domain of TCR clone 146289 (TRAV21, TRAJ53)
CATLNSGGSNYKLTF

SEQ ID NO: 292578 - protein, 17 aa, Homo sapiens
  CDR3 for beta chain variable domain of TCR clone 146289 (TRBV7-8, TRBJ2-6)
CACSAGTGGAGANVLTF

SEQ ID NO: 292579 - protein, 14 aa, Homo sapiens
  CDR3 for alpha chain variable domain of TCR clone 146290 (TRAV12-3, TRAJ47)
CAMSVREYGNKLVF

SEQ ID NO: 292580 - protein, 13 aa, Homo sapiens
  CDR3 for beta chain variable domain of TCR clone 146290 (TRBV2, TRBJ2-3)
CASIIPASDTQYF

SEQ ID NO: 292581 - protein, 10 aa, Homo sapiens
  CDR3 for alpha chain variable domain of TCR clone 146291 (TRAV26-1, TRAJ40)
CIAGTYKYIF

SEQ ID NO: 292582 - protein, 13 aa, Homo sapiens
  CDR3 for beta chain variable domain of TCR clone 146291 (TRBV12-4, TRBJ2-3)
CASSSPLGGTQYF

SEQ ID NO: 292583 - protein, 14 aa, Homo sapiens
  CDR3 for alpha chain variable domain of TCR clone 146292 (TRAV12-1, TRAJ26)
CVVKGSNYGQNFVF

SEQ ID NO: 292584 - protein, 17 aa, Homo sapiens
  CDR3 for beta chain variable domain of TCR clone 146292 (TRBV7-3, TRBJ2-3)
CASSPRGQGYGTDTQYF

SEQ ID NO: 292585 - protein, 15 aa, Homo sapiens
  CDR3 for alpha chain variable domain of TCR clone 146293 (TRAV17, TRAJ29)
CATDAFRKHTSCLCK

SEQ ID NO: 292586 - protein, 13 aa, Homo sapiens
  CDR3 for beta chain variable domain of TCR clone 146293 (TRBV5-7, TRBJ2-6)
CASTSSGANVLTF

SEQ ID NO: 292587 - protein, 15 aa, Homo sapiens
  CDR3 for alpha chain variable domain of TCR clone 146294 (TRAV8-2, TRAJ16)
CVVSDGFSAGQKLLF

SEQ ID NO: 292588 - protein, 13 aa, Homo sapiens
  CDR3 for beta chain variable domain of TCR clone 146294 (TRBV7-3, TRBJ1-1)
CQQLGTGYTEAFF

SEQ ID NO: 292589 - protein, 13 aa, Homo sapiens
  CDR3 for alpha chain variable domain of TCR clone 146295 (TRAV8-3, TRAJ28)
CAVGAVGSYQLTF

SEQ ID NO: 292590 - protein, 15 aa, Homo sapiens
  CDR3 for beta chain variable domain of TCR clone 146295 (TRBV7-3, TRBJ2-1)
CASSPTVQIGNEQFF

SEQ ID NO: 292591 - protein, 16 aa, Homo sapiens
  CDR3 for alpha chain variable domain of TCR clone 146296 (TRAV30, TRAJ24)
CGTEIVDAASWGKFQF

SEQ ID NO: 292592 - protein, 13 aa, Homo sapiens
  CDR3 for beta chain variable domain of TCR clone 146296 (TRBV19, TRBJ1-2)
CASSVPGQDGYTF

SEQ ID NO: 292593 - protein, 12 aa, Homo sapiens
  CDR3 for alpha chain variable domain of TCR clone 146297 (TRAV13-1, TRAJ22)
CVPRGFCKATDL

SEQ ID NO: 292594 - protein, 17 aa, Homo sapiens
  CDR3 for beta chain variable domain of TCR clone 146297 (TRBV28, TRBJ2-5)
CASSRQGGLAGAETQYF

SEQ ID NO: 292595 - protein, 13 aa, Homo sapiens
  CDR3 for alpha chain variable domain of TCR clone 146298 (TRAV12-1, TRAJ6)
CVVFPGGSYIPTF

SEQ ID NO: 292596 - protein, 16 aa, Homo sapiens
  CDR3 for beta chain variable domain of TCR clone 146298 (TRBV27, TRBJ2-2)
CASSLSGFWVTGELFF

SEQ ID NO: 292597 - protein, 13 aa, Homo sapiens
  CDR3 for alpha chain variable domain of TCR clone 146299 (TRAV1-1, TRAJ9)
CAANNTGGFKTIF

SEQ ID NO: 292598 - protein, 14 aa, Homo sapiens
  CDR3 for beta chain variable domain of TCR clone 146299 (TRBV20-1, TRBJ2-1)
RSAQIGGSANEQFF

SEQ ID NO: 292599 - protein, 14 aa, Homo sapiens
  CDR3 for alpha chain variable domain of TCR clone 146300 (TRAV13-1, TRAJ50)
CAARSKTSYDKLIF

SEQ ID NO: 292600 - protein, 17 aa, Homo sapiens
  CDR3 for beta chain variable domain of TCR clone 146300 (TRBV13, TRBJ2-3)
CASSLSRVAGGRNTQYF

SEQ ID NO: 292601 - protein, 11 aa, Homo sapiens
  CDR3 for alpha chain variable domain of TCR clone 146301 (TRAV12-1, TRAJ30)
CVVNGQDKIIF

SEQ ID NO: 292602 - protein, 14 aa, Homo sapiens
  CDR3 for beta chain variable domain of TCR clone 146301 (TRBV18, TRBJ2-7)
CASSPRGGAYEQYF

SEQ ID NO: 292603 - protein, 12 aa, Homo sapiens
  CDR3 for alpha chain variable domain of TCR clone 146302 (TRAV12-3, TRAJ17)
CAMTLTCNKLTF

SEQ ID NO: 292604 - protein, 11 aa, Homo sapiens
  CDR3 for beta chain variable domain of TCR clone 146302 (TRBV29-1, TRBJ2-5)
CSEDRTGTQYF

SEQ ID NO: 292605 - protein, 13 aa, Homo sapiens
  CDR3 for alpha chain variable domain of TCR clone 146303 (TRAV14/DV4, TRAJ41)
CKRGSDSGYALNF

SEQ ID NO: 292606 - protein, 15 aa, Homo sapiens
  CDR3 for beta chain variable domain of TCR clone 146303 (TRBV19, TRBJ2-1)
CASSIQATSYNEQFF

SEQ ID NO: 292607 - protein, 14 aa, Homo sapiens
  CDR3 for alpha chain variable domain of TCR clone 146304 (TRAV1-2, TRAJ16)
CAVNRFSDGQKMLF

SEQ ID NO: 292608 - protein, 14 aa, Homo sapiens
  CDR3 for beta chain variable domain of TCR clone 146304 (TRBV10-2, TRBJ1-5)
CASSSTGRNQPQHF

SEQ ID NO: 292609 - protein, 11 aa, Homo sapiens
  CDR3 for alpha chain variable domain of TCR clone 146305 (TRAV1-2, TRAJ20)
CAVSNDYKLSF

SEQ ID NO: 292610 - protein, 16 aa, Homo sapiens
  CDR3 for beta chain variable domain of TCR clone 146305 (TRBV29-1, TRBJ2-6)
CSVGDITYSGANVLTF

SEQ ID NO: 292611 - protein, 10 aa, Homo sapiens
  CDR3 for alpha chain variable domain of TCR clone 146306 (TRAV13-1, TRAJ27)
WAPLARQINL

SEQ ID NO: 292612 - protein, 13 aa, Homo sapiens
  CDR3 for beta chain variable domain of TCR clone 146306 (TRBV7-3, TRBJ1-1)
CASSQDWGAEAFF

SEQ ID NO: 292613 - protein, 14 aa, Homo sapiens
  CDR3 for alpha chain variable domain of TCR clone 146307 (TRAV12-2, TRAJ17)
CAVNIKAAGNTLTF

SEQ ID NO: 292614 - protein, 13 aa, Homo sapiens
  CDR3 for beta chain variable domain of TCR clone 146307 (TRBV7-8, TRBJ2-7)
CASSLTGGREQYF

SEQ ID NO: 292615 - protein, 16 aa, Homo sapiens
  CDR3 for alpha chain variable domain of TCR clone 146308 (TRAV12-3, TRAJ53)
CAMSPGSGGSNYKQTF

SEQ ID NO: 292616 - protein, 14 aa, Homo sapiens
  CDR3 for beta chain variable domain of TCR clone 146308 (TRBV12-5, TRBJ2-5)
CASGSRTHQETQYF

SEQ ID NO: 292617 - protein, 10 aa, Homo sapiens
  CDR3 for alpha chain variable domain of TCR clone 146309 (TRAV1-2, TRAJ31)
CVSEDARLMF

SEQ ID NO: 292618 - protein, 13 aa, Homo sapiens
  CDR3 for beta chain variable domain of TCR clone 146309 (TRBV12-4, TRBJ2-5)
CASSPGTEETQYF

SEQ ID NO: 292619 - protein, 11 aa, Homo sapiens
  CDR3 for alpha chain variable domain of TCR clone 146310 (TRAV21, TRAJ11)
CAVNGYSTLTF

SEQ ID NO: 292620 - protein, 14 aa, Homo sapiens
  CDR3 for beta chain variable domain of TCR clone 146310 (TRBV7-9, TRBJ2-1)
CASSLASGSNEQFF

SEQ ID NO: 292621 - protein, 13 aa, Homo sapiens
  CDR3 for alpha chain variable domain of TCR clone 146311 (TRAV35, TRAJ48)
GRSRVFGNEKLTF

SEQ ID NO: 292622 - protein, 17 aa, Homo sapiens
  CDR3 for beta chain variable domain of TCR clone 146311 (TRBV5-7, TRBJ2-5)
CASSVGRNRGVAETQYF

SEQ ID NO: 292623 - protein, 18 aa, Homo sapiens
  CDR3 for alpha chain variable domain of TCR clone 146312 (TRAV17, TRAJ45)
CATSLDLYSGGGADALTF

SEQ ID NO: 292624 - protein, 15 aa, Homo sapiens
  CDR3 for beta chain variable domain of TCR clone 146312 (TRBV11-2, TRBJ2-1)
CASSKNRGLIYEQFF

SEQ ID NO: 292625 - protein, 14 aa, Homo sapiens
  CDR3 for alpha chain variable domain of TCR clone 146313 (TRAV1-2, TRAJ16)
CAVRGFSDGQKLLF

SEQ ID NO: 292626 - protein, 13 aa, Homo sapiens
  CDR3 for beta chain variable domain of TCR clone 146313 (TRBV12-4, TRBJ1-2)
CASSSGLTVISTF

SEQ ID NO: 292627 - protein, 13 aa, Homo sapiens
  CDR3 for alpha chain variable domain of TCR clone 146314 (TRAV13-1, TRAJ10)
CAAPTGGVNKLTF

SEQ ID NO: 292628 - protein, 15 aa, Homo sapiens
  CDR3 for beta chain variable domain of TCR clone 146314 (TRBV19, TRBJ1-4)
CASSPGTATNEKLFF

SEQ ID NO: 292629 - protein, 14 aa, Homo sapiens
  CDR3 for alpha chain variable domain of TCR clone 146315 (TRAV12-2, TRAJ40)
CAVKIPSGTYKYIF

SEQ ID NO: 292630 - protein, 17 aa, Homo sapiens
  CDR3 for beta chain variable domain of TCR clone 146315 (TRBV19, TRBJ2-7)
CASSISFYDSYPYEQYF

SEQ ID NO: 292631 - protein, 16 aa, Homo sapiens
  CDR3 for alpha chain variable domain of TCR clone 146316 (TRAV3, TRAJ37)
CAGRGRGSGNTGKLIF

SEQ ID NO: 292632 - protein, 13 aa, Homo sapiens
  CDR3 for beta chain variable domain of TCR clone 146316 (TRBV14, TRBJ2-1)
CASSQDRRNEQFF

SEQ ID NO: 292633 - protein, 13 aa, Homo sapiens
  CDR3 for alpha chain variable domain of TCR clone 146317 (TRAV27, TRAJ3)
ASLRGGSASKIIF

SEQ ID NO: 292634 - protein, 13 aa, Homo sapiens
  CDR3 for beta chain variable domain of TCR clone 146317 (TRBV7-9, TRBJ1-2)
CASSLKQNYGYTF

SEQ ID NO: 292635 - protein, 17 aa, Homo sapiens
  CDR3 for alpha chain variable domain of TCR clone 146318 (TRAV3, TRAJ6)
CAVRDGPRAGGSYIPTF

SEQ ID NO: 292636 - protein, 14 aa, Homo sapiens
  CDR3 for beta chain variable domain of TCR clone 146318 (TRBV20-1, TRBJ1-1)
CSAMGGTANTEAFF

SEQ ID NO: 292637 - protein, 14 aa, Homo sapiens
  CDR3 for alpha chain variable domain of TCR clone 146319 (TRAV34, TRAJ44)
CGADGTGTASKLTF

SEQ ID NO: 292638 - protein, 16 aa, Homo sapiens
  CDR3 for beta chain variable domain of TCR clone 146319 (TRBV12-4, TRBJ1-5)
CASSSGPRGSNQPQHF

SEQ ID NO: 292639 - protein, 10 aa, Homo sapiens
  CDR3 for alpha chain variable domain of TCR clone 146320 (TRAV12-3, TRAJ18)
CAMSAEAQPW

SEQ ID NO: 292640 - protein, 11 aa, Homo sapiens
  CDR3 for beta chain variable domain of TCR clone 146320 (TRBV20-1, TRBJ2-1)
CSLSSGSEQFF

SEQ ID NO: 292641 - protein, 14 aa, Homo sapiens
  CDR3 for alpha chain variable domain of TCR clone 146321 (TRAV23/DV6, TRAJ17)
CSASVQAAGNKLTF

SEQ ID NO: 292642 - protein, 18 aa, Homo sapiens
  CDR3 for beta chain variable domain of TCR clone 146321 (TRBV20-1, TRBJ2-7)
CSAGLPPRGGGSPYEQYF

SEQ ID NO: 292643 - protein, 14 aa, Homo sapiens
  CDR3 for alpha chain variable domain of TCR clone 146322 (TRAV12-3, TRAJ35)
CAMSLIGFGNVLHC

SEQ ID NO: 292644 - protein, 15 aa, Homo sapiens
  CDR3 for beta chain variable domain of TCR clone 146322 (TRBV5-1, TRBJ2-7)
CASSLNGGPAREQYF

SEQ ID NO: 292645 - protein, 16 aa, Homo sapiens
  CDR3 for alpha chain variable domain of TCR clone 146323 (TRAV16, TRAJ52)
CALSAAGGNSYGKLTF

SEQ ID NO: 292646 - protein, 12 aa, Homo sapiens
  CDR3 for beta chain variable domain of TCR clone 146323 (TRBV12-4, TRBJ1-3)
CASSFSGNTIYF

SEQ ID NO: 292647 - protein, 10 aa, Homo sapiens
  CDR3 for alpha chain variable domain of TCR clone 146324 (TRAV36/DV7, TRAJ31)
CAAGEARLMF

SEQ ID NO: 292648 - protein, 13 aa, Homo sapiens
  CDR3 for beta chain variable domain of TCR clone 146324 (TRBV6-5, TRBJ2-1)
CASSYELSNEQFF

SEQ ID NO: 292649 - protein, 15 aa, Homo sapiens
  CDR3 for alpha chain variable domain of TCR clone 146325 (TRAV21, TRAJ24)
CAARSSTDSWGKLQF

SEQ ID NO: 292650 - protein, 15 aa, Homo sapiens
  CDR3 for beta chain variable domain of TCR clone 146325 (TRBV29-1, TRBJ2-2)
CSVGVSGSPAGELFF

SEQ ID NO: 292651 - protein, 14 aa, Homo sapiens
  CDR3 for alpha chain variable domain of TCR clone 146326 (TRAV25, TRAJ23)
CAGQGDNQGGKLIF

SEQ ID NO: 292652 - protein, 12 aa, Homo sapiens
  CDR3 for beta chain variable domain of TCR clone 146326 (TRBV7-9, TRBJ1-1)
CASSLVRGETFF

SEQ ID NO: 292653 - protein, 14 aa, Homo sapiens
  CDR3 for alpha chain variable domain of TCR clone 146327 (TRAV13-1, TRAJ35)
CEASKGGFGNVLHC

SEQ ID NO: 292654 - protein, 14 aa, Homo sapiens
  CDR3 for beta chain variable domain of TCR clone 146327 (TRBV19, TRBJ2-1)
CASPTFVLSGEQFF

SEQ ID NO: 292655 - protein, 13 aa, Homo sapiens
  CDR3 for alpha chain variable domain of TCR clone 146328 (TRAV12-3, TRAJ7)
CAMSASWNNRLAF

SEQ ID NO: 292656 - protein, 14 aa, Homo sapiens
  CDR3 for beta chain variable domain of TCR clone 146328 (TRBV13, TRBJ2-5)
CASSLGPRGETQYF

SEQ ID NO: 292657 - protein, 12 aa, Homo sapiens
  CDR3 for alpha chain variable domain of TCR clone 146329 (TRAV13-1, TRAJ11)
CAGPSGYSTLTF

SEQ ID NO: 292658 - protein, 14 aa, Homo sapiens
  CDR3 for beta chain variable domain of TCR clone 146329 (TRBV20-1, TRBJ2-4)
CSARDRGQGGIQYF

SEQ ID NO: 292659 - protein, 11 aa, Homo sapiens
  CDR3 for alpha chain variable domain of TCR clone 146330 (TRAV8-3, TRAJ42)
NYGGSQGNLIF

SEQ ID NO: 292660 - protein, 15 aa, Homo sapiens
  CDR3 for beta chain variable domain of TCR clone 146330 (TRBV2, TRBJ2-7)
CASSEGLARSYEQYF

SEQ ID NO: 292661 - protein, 15 aa, Homo sapiens
  CDR3 for alpha chain variable domain of TCR clone 146331 (TRAV20, TRAJ53)
CAVQASGGSNYKLTF

SEQ ID NO: 292662 - protein, 13 aa, Homo sapiens
  CDR3 for beta chain variable domain of TCR clone 146331 (TRBV19, TRBJ2-5)
CASSMGGAGTQYF

SEQ ID NO: 292663 - protein, 12 aa, Homo sapiens
  CDR3 for alpha chain variable domain of TCR clone 146332 (TRAV4, TRAJ6)
CLAPGGSYIPTF

SEQ ID NO: 292664 - protein, 17 aa, Homo sapiens
  CDR3 for beta chain variable domain of TCR clone 146332 (TRBV20-1, TRBJ2-2)
CSASGSGQGGLTGELFL

SEQ ID NO: 292665 - protein, 19 aa, Homo sapiens
  CDR3 for alpha chain variable domain of TCR clone 146333 (TRAV8-4, TRAJ3)
CAVTGENLVQQCFQDNLWF

SEQ ID NO: 292666 - protein, 16 aa, Homo sapiens
  CDR3 for beta chain variable domain of TCR clone 146333 (TRBV4-2, TRBJ1-1)
CASSQAGFGMNTEAFF

SEQ ID NO: 292667 - protein, 12 aa, Homo sapiens
  CDR3 for alpha chain variable domain of TCR clone 146334 (TRAV21, TRAJ23)
CAVGPQGEKLIF

SEQ ID NO: 292668 - protein, 13 aa, Homo sapiens
  CDR3 for beta chain variable domain of TCR clone 146334 (TRBV20-1, TRBJ2-7)
CSARTGAGYEQYF

SEQ ID NO: 292669 - protein, 11 aa, Homo sapiens
  CDR3 for alpha chain variable domain of TCR clone 146335 (TRAV21, TRAJ34)
CAHYNTDKLIF

SEQ ID NO: 292670 - protein, 13 aa, Homo sapiens
  CDR3 for beta chain variable domain of TCR clone 146335 (TRBV7-9, TRBJ1-2)
CASSPKTGYGYTC

SEQ ID NO: 292671 - protein, 12 aa, Homo sapiens
  CDR3 for alpha chain variable domain of TCR clone 146336 (TRAV16, TRAJ26)
CALRSYGQNFVF

SEQ ID NO: 292672 - protein, 13 aa, Homo sapiens
  CDR3 for beta chain variable domain of TCR clone 146336 (TRBV28, TRBJ2-1)
CASTLLSVDEQFF

SEQ ID NO: 292673 - protein, 17 aa, Homo sapiens
  CDR3 for alpha chain variable domain of TCR clone 146337 (TRAV3, TRAJ6)
CAVRDGPRAGGSYLPPF

SEQ ID NO: 292674 - protein, 14 aa, Homo sapiens
  CDR3 for beta chain variable domain of TCR clone 146337 (TRBV7-2, TRBJ2-7)
CASSPKTSFYEQYF

SEQ ID NO: 292675 - protein, 12 aa, Homo sapiens
  CDR3 for alpha chain variable domain of TCR clone 146338 (TRAV8-4, TRAJ43)
CAVGVYNNDMRF

SEQ ID NO: 292676 - protein, 13 aa, Homo sapiens
  CDR3 for beta chain variable domain of TCR clone 146338 (TRBV7-9, TRBJ1-2)
CASSLKQNYGYTF

SEQ ID NO: 292677 - protein, 15 aa, Homo sapiens
  CDR3 for alpha chain variable domain of TCR clone 146339 (TRAV17, TRAJ57)
CATGPSQGGSEKLVF

SEQ ID NO: 292678 - protein, 18 aa, Homo sapiens
  CDR3 for beta chain variable domain of TCR clone 146339 (TRBV28, TRBJ2-5)
CASSFPNFGTGGGETQYF

SEQ ID NO: 292679 - protein, 11 aa, Homo sapiens
  CDR3 for alpha chain variable domain of TCR clone 146340 (TRAV17, TRAJ54)
CATDANQGARS

SEQ ID NO: 292680 - protein, 12 aa, Homo sapiens
  CDR3 for beta chain variable domain of TCR clone 146340 (TRBV7-9, TRBJ2-7)
CASSIKREEQYF

SEQ ID NO: 292681 - protein, 11 aa, Homo sapiens
  CDR3 for alpha chain variable domain of TCR clone 146341 (TRAV12-3, TRAJ43)
CAMSASNDMRF

SEQ ID NO: 292682 - protein, 13 aa, Homo sapiens
  CDR3 for beta chain variable domain of TCR clone 146341 (TRBV28, TRBJ2-5)
CASSFAGGETQYF

SEQ ID NO: 292683 - protein, 14 aa, Homo sapiens
  CDR3 for alpha chain variable domain of TCR clone 146342 (TRAV1-2, TRAJ16)
CAVNRFSDGQKLLF

SEQ ID NO: 292684 - protein, 15 aa, Homo sapiens
  CDR3 for beta chain variable domain of TCR clone 146342 (TRBV27, TRBJ2-1)
CVSSNGGGSSNEQFF

SEQ ID NO: 292685 - protein, 13 aa, Homo sapiens
  CDR3 for alpha chain variable domain of TCR clone 146343 (TRAV9-2, TRAJ39)
CALYIYNAGNMLT

SEQ ID NO: 292686 - protein, 13 aa, Homo sapiens
  CDR3 for beta chain variable domain of TCR clone 146343 (TRBV7-3, TRBJ1-1)
CASSLTQGTEAFF

SEQ ID NO: 292687 - protein, 13 aa, Homo sapiens
  CDR3 for alpha chain variable domain of TCR clone 146344 (TRAV17, TRAJ5)
CATKDTGRRALTF

SEQ ID NO: 292688 - protein, 15 aa, Homo sapiens
  CDR3 for beta chain variable domain of TCR clone 146344 (TRBV20-1, TRBJ2-5)
CSATRTSGSLETQYF

SEQ ID NO: 292689 - protein, 13 aa, Homo sapiens
  CDR3 for alpha chain variable domain of TCR clone 146345 (TRAV12-3, TRAJ40)
CAMSARVTYKYIF

SEQ ID NO: 292690 - protein, 16 aa, Homo sapiens
  CDR3 for beta chain variable domain of TCR clone 146345 (TRBV20-1, TRBJ2-3)
CSGEAGLAGGQETQYF

SEQ ID NO: 292691 - protein, 17 aa, Homo sapiens
  CDR3 for alpha chain variable domain of TCR clone 146346 (TRAV12-2, TRAJ52)
CAVNPYAGGTSYGKPTF

SEQ ID NO: 292692 - protein, 16 aa, Homo sapiens
  CDR3 for beta chain variable domain of TCR clone 146346 (TRBV5-5, TRBJ2-2)
CASSGRREGATGELFC

SEQ ID NO: 292693 - protein, 13 aa, Homo sapiens
  CDR3 for alpha chain variable domain of TCR clone 146347 (TRAV35, TRAJ44)
CAGLSGTASKLTF

SEQ ID NO: 292694 - protein, 17 aa, Homo sapiens
  CDR3 for beta chain variable domain of TCR clone 146347 (TRBV20-1, TRBJ2-2)
CSASGSGQGGLTGELFF

SEQ ID NO: 292695 - protein, 14 aa, Homo sapiens
  CDR3 for alpha chain variable domain of TCR clone 146348 (TRAV24, TRAJ42)
CALSYGGSQGNLIF

SEQ ID NO: 292696 - protein, 14 aa, Homo sapiens
  CDR3 for beta chain variable domain of TCR clone 146348 (TRBV11-2, TRBJ1-2)
CASSLGTANYGYTF

SEQ ID NO: 292697 - protein, 13 aa, Homo sapiens
  CDR3 for alpha chain variable domain of TCR clone 146349 (TRAV22, TRAJ49)
CAVGMYTGNQFYF

SEQ ID NO: 292698 - protein, 16 aa, Homo sapiens
  CDR3 for beta chain variable domain of TCR clone 146349 (TRBV7-2, TRBJ2-5)
CASSSKWLSGQETQYF

SEQ ID NO: 292699 - protein, 11 aa, Homo sapiens
  CDR3 for alpha chain variable domain of TCR clone 146350 (TRAV13-1, TRAJ27)
CAAYNAGKSTF

SEQ ID NO: 292700 - protein, 12 aa, Homo sapiens
  CDR3 for beta chain variable domain of TCR clone 146350 (TRBV12-5, TRBJ2-5)
CASGQGVETQYF

SEQ ID NO: 292701 - protein, 13 aa, Homo sapiens
  CDR3 for alpha chain variable domain of TCR clone 146351 (TRAV26-1, TRAJ33)
CIVRVEGNYQLIW

SEQ ID NO: 292702 - protein, 15 aa, Homo sapiens
  CDR3 for beta chain variable domain of TCR clone 146351 (TRBV6-1, TRBJ2-1)
CASSEAAYSYNEQFF

SEQ ID NO: 292703 - protein, 14 aa, Homo sapiens
  CDR3 for alpha chain variable domain of TCR clone 146352 (TRAV26-1, TRAJ38)
CIADNAGTNRKLIW

SEQ ID NO: 292704 - protein, 12 aa, Homo sapiens
  CDR3 for beta chain variable domain of TCR clone 146352 (TRBV29-1, TRBJ2-3)
CSVTGGADTQYF

SEQ ID NO: 292705 - protein, 14 aa, Homo sapiens
  CDR3 for alpha chain variable domain of TCR clone 146353 (TRAV12-3, TRAJ10)
SHLPLTGGGNKLTF

SEQ ID NO: 292706 - protein, 16 aa, Homo sapiens
  CDR3 for beta chain variable domain of TCR clone 146353 (TRBV13, TRBJ2-2)
CASSSRTGEHTGELFF

SEQ ID NO: 292707 - protein, 17 aa, Homo sapiens
  CDR3 for alpha chain variable domain of TCR clone 146354 (TRAV19, TRAJ20)
CALSEAPRGRTTTSSAF

SEQ ID NO: 292708 - protein, 15 aa, Homo sapiens
  CDR3 for beta chain variable domain of TCR clone 146354 (TRBV10-3, TRBJ2-3)
CAISLTSGGTDTQYF

SEQ ID NO: 292709 - protein, 14 aa, Homo sapiens
  CDR3 for alpha chain variable domain of TCR clone 146355 (TRAV1-1, TRAJ28)
CAAPSGAGSYQLTF

SEQ ID NO: 292710 - protein, 14 aa, Homo sapiens
  CDR3 for beta chain variable domain of TCR clone 146355 (TRBV27, TRBJ2-5)
CASSRTFLVDTQYF

SEQ ID NO: 292711 - protein, 15 aa, Homo sapiens
  CDR3 for alpha chain variable domain of TCR clone 146356 (TRAV2, TRAJ28)
CAVPYSGAGSYQRTF

SEQ ID NO: 292712 - protein, 17 aa, Homo sapiens
  CDR3 for beta chain variable domain of TCR clone 146356 (TRBV20-1, TRBJ2-4)
CSARDWASGGRENIQYF

SEQ ID NO: 292713 - protein, 13 aa, Homo sapiens
  CDR3 for alpha chain variable domain of TCR clone 146357 (TRAV12-3, TRAJ13)
CAMSSGGYQKVTL

SEQ ID NO: 292714 - protein, 14 aa, Homo sapiens
  CDR3 for beta chain variable domain of TCR clone 146357 (TRBV20-1, TRBJ2-2)
CSALYRGGTGELFF

SEQ ID NO: 292715 - protein, 14 aa, Homo sapiens
  CDR3 for alpha chain variable domain of TCR clone 146358 (TRAV21, TRAJ35)
CAVMPIGFGNVLHC

SEQ ID NO: 292716 - protein, 15 aa, Homo sapiens
  CDR3 for beta chain variable domain of TCR clone 146358 (TRBV11-2, TRBJ2-2)
CASSSDRVNAGELFF

SEQ ID NO: 292717 - protein, 12 aa, Homo sapiens
  CDR3 for alpha chain variable domain of TCR clone 146359 (TRAV12-3, TRAJ17)
CAMSLTGNKLTF

SEQ ID NO: 292718 - protein, 13 aa, Homo sapiens
  CDR3 for beta chain variable domain of TCR clone 146359 (TRBV7-3, TRBJ1-1)
CASSQDWGAEAFF

SEQ ID NO: 292719 - protein, 15 aa, Homo sapiens
  CDR3 for alpha chain variable domain of TCR clone 146360 (TRAV12-1, TRAJ45)
CVVLSGGGGADGLTF

SEQ ID NO: 292720 - protein, 11 aa, Homo sapiens
  CDR3 for beta chain variable domain of TCR clone 146360 (TRBV29-1, TRBJ2-5)
CSEDRTGTQYF

SEQ ID NO: 292721 - protein, 13 aa, Homo sapiens
  CDR3 for alpha chain variable domain of TCR clone 146361 (TRAV12-3, TRAJ56)
CAMSFGANSKLTF

SEQ ID NO: 292722 - protein, 13 aa, Homo sapiens
  CDR3 for beta chain variable domain of TCR clone 146361 (TRBV29-1, TRBJ1-1)
CSVGDSRNTEAFF

SEQ ID NO: 292723 - protein, 17 aa, Homo sapiens
  CDR3 for alpha chain variable domain of TCR clone 146362 (TRAV13-1, TRAJ4)
CSKYWTPPPGGSNKLIF

SEQ ID NO: 292724 - protein, 12 aa, Homo sapiens
  CDR3 for beta chain variable domain of TCR clone 146362 (TRBV2, TRBJ2-1)
CAYGPPGNEQFF

SEQ ID NO: 292725 - protein, 17 aa, Homo sapiens
  CDR3 for alpha chain variable domain of TCR clone 146363 (TRAV12-2, TRAJ53)
CAPLTDSQEGSNYKLTF

SEQ ID NO: 292726 - protein, 12 aa, Homo sapiens
  CDR3 for beta chain variable domain of TCR clone 146363 (TRBV19, TRBJ2-1)
CASSMQDTEQFF

SEQ ID NO: 292727 - protein, 12 aa, Homo sapiens
  CDR3 for alpha chain variable domain of TCR clone 146364 (TRAV26-1, TRAJ36)
CIVRVRADNLFF

SEQ ID NO: 292728 - protein, 17 aa, Homo sapiens
  CDR3 for beta chain variable domain of TCR clone 146364 (TRBV19, TRBJ2-7)
CASSISFYDSYPYEQYF

SEQ ID NO: 292729 - protein, 17 aa, Homo sapiens
  CDR3 for alpha chain variable domain of TCR clone 146365 (TRAV12-3, TRAJ26)
CAMSWGRWDNYGQNFVF

SEQ ID NO: 292730 - protein, 12 aa, Homo sapiens
  CDR3 for beta chain variable domain of TCR clone 146365 (TRBV19, TRBJ1-1)
CASSTTGIEAFF

SEQ ID NO: 292731 - protein, 16 aa, Homo sapiens
  CDR3 for alpha chain variable domain of TCR clone 146366 (TRAV13-2, TRAJ28)
CAEKSYSGAGSYPLTF

SEQ ID NO: 292732 - protein, 16 aa, Homo sapiens
  CDR3 for beta chain variable domain of TCR clone 146366 (TRBV19, TRBJ2-1)
CASSKAGPSSYNEQFF

SEQ ID NO: 292733 - protein, 13 aa, Homo sapiens
  CDR3 for alpha chain variable domain of TCR clone 146367 (TRAV26-1, TRAJ30)
CIVRGESNDKIIF

SEQ ID NO: 292734 - protein, 15 aa, Homo sapiens
  CDR3 for beta chain variable domain of TCR clone 146367 (TRBV6-1, TRBJ2-3)
CASSERGGITDTQYF

SEQ ID NO: 292735 - protein, 13 aa, Homo sapiens
  CDR3 for alpha chain variable domain of TCR clone 146368 (TRAV13-1, TRAJ6)
CAASKGGSYIPTF

SEQ ID NO: 292736 - protein, 14 aa, Homo sapiens
  CDR3 for beta chain variable domain of TCR clone 146368 (TRBV7-8, TRBJ2-3)
CASSLEAGTDTQYF

SEQ ID NO: 292737 - protein, 12 aa, Homo sapiens
  CDR3 for alpha chain variable domain of TCR clone 146369 (TRAV8-3, TRAJ26)
CAGDNYGQNFVF

SEQ ID NO: 292738 - protein, 12 aa, Homo sapiens
  CDR3 for beta chain variable domain of TCR clone 146369 (TRBV11-2, TRBJ2-2)
CASSLGGGELFC

SEQ ID NO: 292739 - protein, 12 aa, Homo sapiens
  CDR3 for alpha chain variable domain of TCR clone 146370 (TRAV26-1, TRAJ36)
CIVRGRADNLFF

SEQ ID NO: 292740 - protein, 13 aa, Homo sapiens
  CDR3 for beta chain variable domain of TCR clone 146370 (TRBV11-2, TRBJ2-5)
CARSRGPSETQYF

SEQ ID NO: 292741 - protein, 14 aa, Homo sapiens
  CDR3 for alpha chain variable domain of TCR clone 146371 (TRAV12-2, TRAJ44)
CAVNPAGTASKLTF

SEQ ID NO: 292742 - protein, 17 aa, Homo sapiens
  CDR3 for beta chain variable domain of TCR clone 146371 (TRBV20-1, TRBJ2-7)
CSARDPEGDHREYEQYF

SEQ ID NO: 292743 - protein, 14 aa, Homo sapiens
  CDR3 for alpha chain variable domain of TCR clone 146372 (TRAV12-1, TRAJ52)
CVGNAGGSYGKLTF

SEQ ID NO: 292744 - protein, 14 aa, Homo sapiens
  CDR3 for beta chain variable domain of TCR clone 146372 (TRBV7-3, TRBJ2-2)
CASSPDPSGRELFF

SEQ ID NO: 292745 - protein, 12 aa, Homo sapiens
  CDR3 for alpha chain variable domain of TCR clone 146373 (TRAV12-1, TRAJ40)
CVFYPGTYKYIF

SEQ ID NO: 292746 - protein, 18 aa, Homo sapiens
  CDR3 for beta chain variable domain of TCR clone 146373 (TRBV12-4, TRBJ2-2)
CASSSVAGTRGRTGELFF

SEQ ID NO: 292747 - protein, 12 aa, Homo sapiens
  CDR3 for alpha chain variable domain of TCR clone 146374 (TRAV13-2, TRAJ8)
CAPWLGFQSLVF

SEQ ID NO: 292748 - protein, 14 aa, Homo sapiens
  CDR3 for beta chain variable domain of TCR clone 146374 (TRBV18, TRBJ2-7)
CASSPRGGAYEQYF

SEQ ID NO: 292749 - protein, 19 aa, Homo sapiens
  CDR3 for alpha chain variable domain of TCR clone 146375 (TRAV26-2, TRAJ40)
CCVLLHPERRVPGTYKYIF

SEQ ID NO: 292750 - protein, 15 aa, Homo sapiens
  CDR3 for beta chain variable domain of TCR clone 146375 (TRBV28, TRBJ1-3)
CASSMGWASGNTIYF

SEQ ID NO: 292751 - protein, 13 aa, Homo sapiens
  CDR3 for alpha chain variable domain of TCR clone 146376 (TRAV27, TRAJ41)
CAGEGNSGYALNF

SEQ ID NO: 292752 - protein, 16 aa, Homo sapiens
  CDR3 for beta chain variable domain of TCR clone 146376 (TRBV20-1, TRBJ1-2)
CSASMGQGVANYGYTF

SEQ ID NO: 292753 - protein, 15 aa, Homo sapiens
  CDR3 for alpha chain variable domain of TCR clone 146377 (TRAV17, TRAJ35)
CATAFVIGFGNVLHC

SEQ ID NO: 292754 - protein, 15 aa, Homo sapiens
  CDR3 for beta chain variable domain of TCR clone 146377 (TRBV6-3, TRBJ2-7)
CASSSPGTVFYEQYF

SEQ ID NO: 292755 - protein, 13 aa, Homo sapiens
  CDR3 for alpha chain variable domain of TCR clone 146378 (TRAV21, TRAJ27)
CAARHGNAGKSTF

SEQ ID NO: 292756 - protein, 14 aa, Homo sapiens
  CDR3 for beta chain variable domain of TCR clone 146378 (TRBV11-2, TRBJ2-7)
CASSLGAGAYEQYF

SEQ ID NO: 292757 - protein, 14 aa, Homo sapiens
  CDR3 for alpha chain variable domain of TCR clone 146379 (TRAV1-2, TRAJ16)
CAVNRLSDGQKLLF

SEQ ID NO: 292758 - protein, 15 aa, Homo sapiens
  CDR3 for beta chain variable domain of TCR clone 146379 (TRBV6-3, TRBJ2-2)
CASSFLATLTGELFF

SEQ ID NO: 292759 - protein, 13 aa, Homo sapiens
  CDR3 for alpha chain variable domain of TCR clone 146380 (TRAV20, TRAJ35)
CAVQEGFGNVLPC

SEQ ID NO: 292760 - protein, 14 aa, Homo sapiens
  CDR3 for beta chain variable domain of TCR clone 146380 (TRBV5-1, TRBJ1-1)
CASSSATGGTEAFF

SEQ ID NO: 292761 - protein, 14 aa, Homo sapiens
  CDR3 for alpha chain variable domain of TCR clone 146381 (TRAV27, TRAJ23)
PHLGAKDQGGKLIF

SEQ ID NO: 292762 - protein, 13 aa, Homo sapiens
  CDR3 for beta chain variable domain of TCR clone 146381 (TRBV7-3, TRBJ1-1)
CASSQDWGAEAFF

SEQ ID NO: 292763 - protein, 18 aa, Homo sapiens
  CDR3 for alpha chain variable domain of TCR clone 146382 (TRAV21, TRAJ53)
CAVKGGENSGGSNYKLTF

SEQ ID NO: 292764 - protein, 13 aa, Homo sapiens
  CDR3 for beta chain variable domain of TCR clone 146382 (TRBV18, TRBJ2-1)
RASSPPSSNEQFF

SEQ ID NO: 292765 - protein, 13 aa, Homo sapiens
  CDR3 for alpha chain variable domain of TCR clone 146383 (TRAV27, TRAJ41)
CAGEGNSGYALNF

SEQ ID NO: 292766 - protein, 15 aa, Homo sapiens
  CDR3 for beta chain variable domain of TCR clone 146383 (TRBV27, TRBJ2-1)
CASSNGGGSSNEQFF

SEQ ID NO: 292767 - protein, 13 aa, Homo sapiens
  CDR3 for alpha chain variable domain of TCR clone 146384 (TRAV12-1, TRAJ35)
CVVRGGFGNVLHC

SEQ ID NO: 292768 - protein, 13 aa, Homo sapiens
  CDR3 for beta chain variable domain of TCR clone 146384 (TRBV19, TRBJ2-1)
CASTNSDVGEQFF

SEQ ID NO: 292769 - protein, 14 aa, Homo sapiens
  CDR3 for alpha chain variable domain of TCR clone 146385 (TRAV3, TRAJ33)
CAVRDMDSNYQLIW

SEQ ID NO: 292770 - protein, 19 aa, Homo sapiens
  CDR3 for beta chain variable domain of TCR clone 146385 (TRBV7-3, TRBJ1-2)
CASSFPQGNDGELWLQLRF

SEQ ID NO: 292771 - protein, 16 aa, Homo sapiens
  CDR3 for alpha chain variable domain of TCR clone 146386 (TRAV23/DV6, TRAJ9)
CAASIGGNTGGFKTIF

SEQ ID NO: 292772 - protein, 12 aa, Homo sapiens
  CDR3 for beta chain variable domain of TCR clone 146386 (TRBV6-3, TRBJ2-7)
CASSEPGYEQYF

SEQ ID NO: 292773 - protein, 16 aa, Homo sapiens
  CDR3 for alpha chain variable domain of TCR clone 146387 (TRAV3, TRAJ5)
CAVRHLMDTGRRALTF

SEQ ID NO: 292774 - protein, 16 aa, Homo sapiens
  CDR3 for beta chain variable domain of TCR clone 146387 (TRBV12-5, TRBJ2-5)
CASGPRTSGNQETQYF

SEQ ID NO: 292775 - protein, 14 aa, Homo sapiens
  CDR3 for alpha chain variable domain of TCR clone 146388 (TRAV13-1, TRAJ40)
CAASMTPGTYNYIF

SEQ ID NO: 292776 - protein, 15 aa, Homo sapiens
  CDR3 for beta chain variable domain of TCR clone 146388 (TRBV7-3, TRBJ2-1)
CASSPTGGGEVEQFF

SEQ ID NO: 292777 - protein, 16 aa, Homo sapiens
  CDR3 for alpha chain variable domain of TCR clone 146389 (TRAV16, TRAJ42)
CARTMNYGGSQGNLIF

SEQ ID NO: 292778 - protein, 15 aa, Homo sapiens
  CDR3 for beta chain variable domain of TCR clone 146389 (TRBV20-1, TRBJ2-7)
CSAREGRDSLYEQYF

SEQ ID NO: 292779 - protein, 13 aa, Homo sapiens
  CDR3 for alpha chain variable domain of TCR clone 146390 (TRAV30, TRAJ6)
CGFIEGGSYITTF

SEQ ID NO: 292780 - protein, 15 aa, Homo sapiens
  CDR3 for beta chain variable domain of TCR clone 146390 (TRBV20-1, TRBJ2-1)
CSARGIGGTYNEQFF

SEQ ID NO: 292781 - protein, 13 aa, Homo sapiens
  CDR3 for alpha chain variable domain of TCR clone 146391 (TRAV12-2, TRAJ24)
CAVSTDSWGKLQF

SEQ ID NO: 292782 - protein, 15 aa, Homo sapiens
  CDR3 for beta chain variable domain of TCR clone 146391 (TRBV6-1, TRBJ2-4)
CASSEAVWTINIQYF

SEQ ID NO: 292783 - protein, 13 aa, Homo sapiens
  CDR3 for alpha chain variable domain of TCR clone 146392 (TRAV13-1, TRAJ21)
CAASIYKFNKFYF

SEQ ID NO: 292784 - protein, 15 aa, Homo sapiens
  CDR3 for beta chain variable domain of TCR clone 146392 (TRBV27, TRBJ1-4)
CASSLMGDEKLFLAV

SEQ ID NO: 292785 - protein, 12 aa, Homo sapiens
  CDR3 for alpha chain variable domain of TCR clone 146393 (TRAV12-2, TRAJ16)
CAVNLDGQKLLF

SEQ ID NO: 292786 - protein, 17 aa, Homo sapiens
  CDR3 for beta chain variable domain of TCR clone 146393 (TRBV19, TRBJ2-7)
CASSISFYDSYPYEQYF

SEQ ID NO: 292787 - protein, 14 aa, Homo sapiens
  CDR3 for alpha chain variable domain of TCR clone 146394 (TRAV17, TRAJ57)
CATDPQGGSEKLVF

SEQ ID NO: 292788 - protein, 18 aa, Homo sapiens
  CDR3 for beta chain variable domain of TCR clone 146394 (TRBV6-6, TRBJ1-3)
CAGSYSKWDSISGNTMYF

SEQ ID NO: 292789 - protein, 15 aa, Homo sapiens
  CDR3 for alpha chain variable domain of TCR clone 146395 (TRAV8-3, TRAJ11)
CAVGLLNSGYSTLTF

SEQ ID NO: 292790 - protein, 13 aa, Homo sapiens
  CDR3 for beta chain variable domain of TCR clone 146395 (TRBV7-2, TRBJ2-5)
CASSQTSVETQYF

SEQ ID NO: 292791 - protein, 17 aa, Homo sapiens
  CDR3 for alpha chain variable domain of TCR clone 146396 (TRAV3, TRAJ6)
CAVRGGPRAGGSYIPTV

SEQ ID NO: 292792 - protein, 14 aa, Homo sapiens
  CDR3 for beta chain variable domain of TCR clone 146396 (TRBV7-2, TRBJ2-7)
CASSPKTSFYEQYF

SEQ ID NO: 292793 - protein, 11 aa, Homo sapiens
  CDR3 for alpha chain variable domain of TCR clone 146397 (TRAV13-1, TRAJ5)
CAPKGRRALTF

SEQ ID NO: 292794 - protein, 17 aa, Homo sapiens
  CDR3 for beta chain variable domain of TCR clone 146397 (TRBV28, TRBJ2-5)
CASSTPEGDALQDTQYF

SEQ ID NO: 292795 - protein, 16 aa, Homo sapiens
  CDR3 for alpha chain variable domain of TCR clone 146398 (TRAV30, TRAJ24)
CGTEMVDADSWGKFQF

SEQ ID NO: 292796 - protein, 12 aa, Homo sapiens
  CDR3 for beta chain variable domain of TCR clone 146398 (TRBV11-2, TRBJ2-2)
CASSLPTGELFL

SEQ ID NO: 292797 - protein, 12 aa, Homo sapiens
  CDR3 for alpha chain variable domain of TCR clone 146399 (TRAV2, TRAJ34)
CAVERNTDKLIF

SEQ ID NO: 292798 - protein, 13 aa, Homo sapiens
  CDR3 for beta chain variable domain of TCR clone 146399 (TRBV12-4, TRBJ1-2)
CASSLRQGKGYTF

SEQ ID NO: 292799 - protein, 14 aa, Homo sapiens
  CDR3 for alpha chain variable domain of TCR clone 146400 (TRAV12-2, TRAJ48)
CAVNAFFGNEKLTF

SEQ ID NO: 292800 - protein, 13 aa, Homo sapiens
  CDR3 for beta chain variable domain of TCR clone 146400 (TRBV28, TRBJ2-7)
CAVAQQGLDEQYF

SEQ ID NO: 292801 - protein, 14 aa, Homo sapiens
  CDR3 for alpha chain variable domain of TCR clone 146401 (TRAV16, TRAJ15)
CALSFNQAGTALIF

SEQ ID NO: 292802 - protein, 12 aa, Homo sapiens
  CDR3 for beta chain variable domain of TCR clone 146401 (TRBV11-2, TRBJ2-2)
CASSLGGGELFF

SEQ ID NO: 292803 - protein, 13 aa, Homo sapiens
  CDR3 for alpha chain variable domain of TCR clone 146402 (TRAV21, TRAJ27)
CAARPGNAGKSTF

SEQ ID NO: 292804 - protein, 17 aa, Homo sapiens
  CDR3 for beta chain variable domain of TCR clone 146402 (TRBV2, TRBJ2-3)
CASSDAGGPQIRSILAQ

SEQ ID NO: 292805 - protein, 14 aa, Homo sapiens
  CDR3 for alpha chain variable domain of TCR clone 146403 (TRAV1-2, TRAJ16)
CAVNRFSDCQKLLF

SEQ ID NO: 292806 - protein, 14 aa, Homo sapiens
  CDR3 for beta chain variable domain of TCR clone 146403 (TRBV7-2, TRBJ2-5)
CASSPLGQSETQYF

SEQ ID NO: 292807 - protein, 15 aa, Homo sapiens
  CDR3 for alpha chain variable domain of TCR clone 146404 (TRAV17, TRAJ56)
CATDANTEANSKLTF

SEQ ID NO: 292808 - protein, 16 aa, Homo sapiens
  CDR3 for beta chain variable domain of TCR clone 146404 (TRBV7-3, TRBJ2-2)
CASSLKRGTLSGELFF

SEQ ID NO: 292809 - protein, 12 aa, Homo sapiens
  CDR3 for alpha chain variable domain of TCR clone 146405 (TRAV13-1, TRAJ15)
CAASQAGTALIF

SEQ ID NO: 292810 - protein, 14 aa, Homo sapiens
  CDR3 for beta chain variable domain of TCR clone 146405 (TRBV19, TRBJ2-2)
CTSSTLHRSGELFF

SEQ ID NO: 292811 - protein, 14 aa, Homo sapiens
  CDR3 for alpha chain variable domain of TCR clone 146406 (TRAV8-4, TRAJ8)
CAVSLNTGFQKLVF

SEQ ID NO: 292812 - protein, 13 aa, Homo sapiens
  CDR3 for beta chain variable domain of TCR clone 146406 (TRBV7-9, TRBJ2-3)
CASSPGSTDTQYL

SEQ ID NO: 292813 - protein, 17 aa, Homo sapiens
  CDR3 for alpha chain variable domain of TCR clone 146407 (TRAV13-1, TRAJ52)
CAASSGAGGTSYGKLTC

SEQ ID NO: 292814 - protein, 15 aa, Homo sapiens
  CDR3 for beta chain variable domain of TCR clone 146407 (TRBV2, TRBJ2-1)
CASSELAGGYNEQFF

SEQ ID NO: 292815 - protein, 13 aa, Homo sapiens
  CDR3 for alpha chain variable domain of TCR clone 146408 (TRAV8-3, TRAJ48)
CAVVPFGNEKLTY

SEQ ID NO: 292816 - protein, 12 aa, Homo sapiens
  CDR3 for beta chain variable domain of TCR clone 146408 (TRBV11-2, TRBJ2-2)
CASSLGGGELFF

SEQ ID NO: 292817 - protein, 14 aa, Homo sapiens
  CDR3 for alpha chain variable domain of TCR clone 146409 (TRAV1-2, TRAJ16)
CAVHRFSDGQKLLF

SEQ ID NO: 292818 - protein, 13 aa, Homo sapiens
  CDR3 for beta chain variable domain of TCR clone 146409 (TRBV27, TRBJ1-1)
CASSLSIGAEAFF

SEQ ID NO: 292819 - protein, 14 aa, Homo sapiens
  CDR3 for alpha chain variable domain of TCR clone 146410 (TRAV26-1, TRAJ34)
CIVRESYNTDKLIF

SEQ ID NO: 292820 - protein, 17 aa, Homo sapiens
  CDR3 for beta chain variable domain of TCR clone 146410 (TRBV6-1, TRBJ1-5)
CASSEAEFIRARQPQHF

SEQ ID NO: 292821 - protein, 13 aa, Homo sapiens
  CDR3 for alpha chain variable domain of TCR clone 146411 (TRAV20, TRAJ20)
CAVRWVRDSKLSF

SEQ ID NO: 292822 - protein, 14 aa, Homo sapiens
  CDR3 for beta chain variable domain of TCR clone 146411 (TRBV19, TRBJ2-2)
CASTVTANTGELFF

SEQ ID NO: 292823 - protein, 13 aa, Homo sapiens
  CDR3 for alpha chain variable domain of TCR clone 146412 (TRAV3, TRAJ26)
CAVRPTPGQNFVF

SEQ ID NO: 292824 - protein, 16 aa, Homo sapiens
  CDR3 for beta chain variable domain of TCR clone 146412 (TRBV10-3, TRBJ1-1)
CAISDPRTGGNTEAFF

SEQ ID NO: 292825 - protein, 13 aa, Homo sapiens
  CDR3 for alpha chain variable domain of TCR clone 146413 (TRAV30, TRAJ34)
CGTVGYNTDKLIF

SEQ ID NO: 292826 - protein, 16 aa, Homo sapiens
  CDR3 for beta chain variable domain of TCR clone 146413 (TRBV7-9, TRBJ1-2)
CASSLGFSSGEDGYTY

SEQ ID NO: 292827 - protein, 13 aa, Homo sapiens
  CDR3 for alpha chain variable domain of TCR clone 146414 (TRAV8-2, TRAJ21)
CVVSSYNFNKFYF

SEQ ID NO: 292828 - protein, 14 aa, Homo sapiens
  CDR3 for beta chain variable domain of TCR clone 146414 (TRBV15, TRBJ2-3)
CATSRGGSTDTQYF

SEQ ID NO: 292829 - protein, 12 aa, Homo sapiens
  CDR3 for alpha chain variable domain of TCR clone 146415 (TRAV8-1, TRAJ26)
CAVNNYGKNFVF

SEQ ID NO: 292830 - protein, 15 aa, Homo sapiens
  CDR3 for beta chain variable domain of TCR clone 146415 (TRBV20-1, TRBJ1-1)
CSASWDRFLNTEAFF

SEQ ID NO: 292831 - protein, 16 aa, Homo sapiens
  CDR3 for alpha chain variable domain of TCR clone 146416 (TRAV16, TRAJ52)
CALSAAGVTSYGKLTF

SEQ ID NO: 292832 - protein, 16 aa, Homo sapiens
  CDR3 for beta chain variable domain of TCR clone 146416 (TRBV12-4, TRBJ1-5)
CASSRPVGGSNQPQHF

SEQ ID NO: 292833 - protein, 12 aa, Homo sapiens
  CDR3 for alpha chain variable domain of TCR clone 146417 (TRAV21, TRAJ29)
CAVTSGNTPLVF

SEQ ID NO: 292834 - protein, 15 aa, Homo sapiens
  CDR3 for beta chain variable domain of TCR clone 146417 (TRBV20-1, TRBJ2-7)
CSARDRVSGMDEQYF

SEQ ID NO: 292835 - protein, 14 aa, Homo sapiens
  CDR3 for alpha chain variable domain of TCR clone 146418 (TRAV1-2, TRAJ16)
CAVNRFSDGQKLLF

SEQ ID NO: 292836 - protein, 17 aa, Homo sapiens
  CDR3 for beta chain variable domain of TCR clone 146418 (TRBV28, TRBJ2-5)
CASSLGGEGGGQETQYF

SEQ ID NO: 292837 - protein, 14 aa, Homo sapiens
  CDR3 for alpha chain variable domain of TCR clone 146419 (TRAV1-2, TRAJ16)
CAVNRVSDGQKLRF

SEQ ID NO: 292838 - protein, 17 aa, Homo sapiens
  CDR3 for beta chain variable domain of TCR clone 146419 (TRBV7-8, TRBJ2-6)
CASSAGTGGAGANVLTF

SEQ ID NO: 292839 - protein, 14 aa, Homo sapiens
  CDR3 for alpha chain variable domain of TCR clone 146420 (TRAV12-2, TRAJ5)
CAVNRSTGRRALTF

SEQ ID NO: 292840 - protein, 14 aa, Homo sapiens
  CDR3 for beta chain variable domain of TCR clone 146420 (TRBV18, TRBJ2-5)
CASSPGVSEETQYF

SEQ ID NO: 292841 - protein, 15 aa, Homo sapiens
  CDR3 for alpha chain variable domain of TCR clone 146421 (TRAV8-6, TRAJ6)
GAVSGESGGSYIPTF

SEQ ID NO: 292842 - protein, 14 aa, Homo sapiens
  CDR3 for beta chain variable domain of TCR clone 146421 (TRBV9, TRBJ2-4)
CASSPSGTSGFQYF

SEQ ID NO: 292843 - protein, 14 aa, Homo sapiens
  CDR3 for alpha chain variable domain of TCR clone 146422 (TRAV12-3, TRAJ10)
SHLPLTGGGNKLTF

SEQ ID NO: 292844 - protein, 17 aa, Homo sapiens
  CDR3 for beta chain variable domain of TCR clone 146422 (TRBV28, TRBJ2-5)
GASSTPEGDALQETQYF

SEQ ID NO: 292845 - protein, 14 aa, Homo sapiens
  CDR3 for alpha chain variable domain of TCR clone 146423 (TRAV17, TRAJ24)
CATLTTDSWGKFQF

SEQ ID NO: 292846 - protein, 16 aa, Homo sapiens
  CDR3 for beta chain variable domain of TCR clone 146423 (TRBV4-3, TRBJ2-7)
CASSQDGGSLRGEQYF

SEQ ID NO: 292847 - protein, 14 aa, Homo sapiens
  CDR3 for alpha chain variable domain of TCR clone 146424 (TRAV1-2, TRAJ8)
CAVREDTGFLKLVF

SEQ ID NO: 292848 - protein, 15 aa, Homo sapiens
  CDR3 for beta chain variable domain of TCR clone 146424 (TRBV6-1, TRBJ2-3)
CASSERGGITDTQYF

SEQ ID NO: 292849 - protein, 14 aa, Homo sapiens
  CDR3 for alpha chain variable domain of TCR clone 146425 (TRAV12-2, TRAJ9)
CAVNMEGGGFKTIF

SEQ ID NO: 292850 - protein, 14 aa, Homo sapiens
  CDR3 for beta chain variable domain of TCR clone 146425 (TRBV5-1, TRBJ1-1)
CASSLQGASAEAFF

SEQ ID NO: 292851 - protein, 12 aa, Homo sapiens
  CDR3 for alpha chain variable domain of TCR clone 146426 (TRAV8-3, TRAJ6)
CAVAGGSYILTF

SEQ ID NO: 292852 - protein, 14 aa, Homo sapiens
  CDR3 for beta chain variable domain of TCR clone 146426 (TRBV27, TRBJ2-7)
CASATGTERREQYF

SEQ ID NO: 292853 - protein, 19 aa, Homo sapiens
  CDR3 for alpha chain variable domain of TCR clone 146427 (TRAV1-2, TRAJ26)
CLLPLCCERPDNYGQNFVF

SEQ ID NO: 292854 - protein, 18 aa, Homo sapiens
  CDR3 for beta chain variable domain of TCR clone 146427 (TRBV20-1, TRBJ2-3)
CSASGLAGGPGTTDTQYF

SEQ ID NO: 292855 - protein, 13 aa, Homo sapiens
  CDR3 for alpha chain variable domain of TCR clone 146428 (TRAV2, TRAJ27)
CAVEAPMQANQPL

SEQ ID NO: 292856 - protein, 13 aa, Homo sapiens
  CDR3 for beta chain variable domain of TCR clone 146428 (TRBV12-4, TRBJ1-5)
CASSPDRAQPQHF

SEQ ID NO: 292857 - protein, 10 aa, Homo sapiens
  CDR3 for alpha chain variable domain of TCR clone 146429 (TRAV13-2, TRAJ49)
CADTGNQFYF

SEQ ID NO: 292858 - protein, 15 aa, Homo sapiens
  CDR3 for beta chain variable domain of TCR clone 146429 (TRBV11-3, TRBJ2-3)
CASLKDGREGDTQYF

SEQ ID NO: 292859 - protein, 16 aa, Homo sapiens
  CDR3 for alpha chain variable domain of TCR clone 146430 (TRAV30, TRAJ24)
CGTEIVDAASWGNSSL

SEQ ID NO: 292860 - protein, 14 aa, Homo sapiens
  CDR3 for beta chain variable domain of TCR clone 146430 (TRBV12-5, TRBJ2-5)
CASGSRTHQETQYF

SEQ ID NO: 292861 - protein, 13 aa, Homo sapiens
  CDR3 for alpha chain variable domain of TCR clone 146431 (TRAV1-1, TRAJ9)
YAAKITGGFKTIF

SEQ ID NO: 292862 - protein, 14 aa, Homo sapiens
  CDR3 for beta chain variable domain of TCR clone 146431 (TRBV20-1, TRBJ2-1)
CSAQIGGSANEQFF

SEQ ID NO: 292863 - protein, 11 aa, Homo sapiens
  CDR3 for alpha chain variable domain of TCR clone 146432 (TRAV27, TRAJ20)
CAGADDYKLSF

SEQ ID NO: 292864 - protein, 13 aa, Homo sapiens
  CDR3 for beta chain variable domain of TCR clone 146432 (TRBV3-1, TRBJ2-7)
CASSLRDGYEQYF

SEQ ID NO: 292865 - protein, 12 aa, Homo sapiens
  CDR3 for alpha chain variable domain of TCR clone 146433 (TRAV12-1, TRAJ40)
CVVYSGTYKYIF

SEQ ID NO: 292866 - protein, 17 aa, Homo sapiens
  CDR3 for beta chain variable domain of TCR clone 146433 (TRBV7-2, TRBJ2-2)
CASSPRGAGEGTGELFF

SEQ ID NO: 292867 - protein, 12 aa, Homo sapiens
  CDR3 for alpha chain variable domain of TCR clone 146434 (TRAV12-1, TRAJ40)
CVVYSGTYKYIF

SEQ ID NO: 292868 - protein, 19 aa, Homo sapiens
  CDR3 for beta chain variable domain of TCR clone 146434 (TRBV7-2, TRBJ2-3)
YASSFLSRNWGGGTDTQYF

SEQ ID NO: 292869 - protein, 18 aa, Homo sapiens
  CDR3 for alpha chain variable domain of TCR clone 146435 (TRAV12-3, TRAJ52)
CAMSRTNAGGTSYGKLTF

SEQ ID NO: 292870 - protein, 16 aa, Homo sapiens
  CDR3 for beta chain variable domain of TCR clone 146435 (TRBV19, TRBJ2-1)
CASSKAGPSSYNEQFF

SEQ ID NO: 292871 - protein, 15 aa, Homo sapiens
  CDR3 for alpha chain variable domain of TCR clone 146436 (TRAV3, TRAJ22)
CAVRDRGGSARQLTF

SEQ ID NO: 292872 - protein, 13 aa, Homo sapiens
  CDR3 for beta chain variable domain of TCR clone 146436 (TRBV12-4, TRBJ1-2)
CTSVTAVSYGYTF

SEQ ID NO: 292873 - protein, 22 aa, Homo sapiens
  CDR3 for alpha chain variable domain of TCR clone 146437 (TRAV3, TRAJ38)
CAVRDCLNAGNNHIQNPDPAVY

SEQ ID NO: 292874 - protein, 14 aa, Homo sapiens
  CDR3 for beta chain variable domain of TCR clone 146437 (TRBV25-1, TRBJ1-1)
CASTHLGGNTEAFF

SEQ ID NO: 292875 - protein, 12 aa, Homo sapiens
  CDR3 for alpha chain variable domain of TCR clone 146438 (TRAV13-2, TRAJ39)
CAENNSGNMLTF

SEQ ID NO: 292876 - protein, 13 aa, Homo sapiens
  CDR3 for beta chain variable domain of TCR clone 146438 (TRBV19, TRBJ1-1)
CASSPSNGGEAFF

SEQ ID NO: 292877 - protein, 12 aa, Homo sapiens
  CDR3 for alpha chain variable domain of TCR clone 146439 (TRAV20, TRAJ54)
CAVQEGAQKLVF

SEQ ID NO: 292878 - protein, 13 aa, Homo sapiens
  CDR3 for beta chain variable domain of TCR clone 146439 (TRBV18, TRBJ1-1)
CASSGGRNTEAFF

SEQ ID NO: 292879 - protein, 16 aa, Homo sapiens
  CDR3 for alpha chain variable domain of TCR clone 146440 (TRAV12-3, TRAJ53)
CAMSPGSGGSNNKLTF

SEQ ID NO: 292880 - protein, 17 aa, Homo sapiens
  CDR3 for beta chain variable domain of TCR clone 146440 (TRBV28, TRBJ2-5)
CASSTPEGDALQETQYF

SEQ ID NO: 292881 - protein, 11 aa, Homo sapiens
  CDR3 for alpha chain variable domain of TCR clone 146441 (TRAV8-3, TRAJ15)
CAVGPGTALIF

SEQ ID NO: 292882 - protein, 18 aa, Homo sapiens
  CDR3 for beta chain variable domain of TCR clone 146441 (TRBV18, TRBJ2-3)
CGSSYTSGAAGGTDTQYF

SEQ ID NO: 292883 - protein, 13 aa, Homo sapiens
  CDR3 for alpha chain variable domain of TCR clone 146442 (TRAV12-2, TRAJ10)
CAVPTGGGNKLTF

SEQ ID NO: 292884 - protein, 13 aa, Homo sapiens
  CDR3 for beta chain variable domain of TCR clone 146442 (TRBV5-7, TRBJ1-2)
CASSLIRAPGYTF

SEQ ID NO: 292885 - protein, 11 aa, Homo sapiens
  CDR3 for alpha chain variable domain of TCR clone 146443 (TRAV22, TRAJ30)
CAGNRDDKIIF

SEQ ID NO: 292886 - protein, 14 aa, Homo sapiens
  CDR3 for beta chain variable domain of TCR clone 146443 (TRBV6-1, TRBJ1-3)
CASVQGGGGNTIYF

SEQ ID NO: 292887 - protein, 11 aa, Homo sapiens
  CDR3 for alpha chain variable domain of TCR clone 146444 (TRAV21, TRAJ33)
CAVLSNYRLIW

SEQ ID NO: 292888 - protein, 15 aa, Homo sapiens
  CDR3 for beta chain variable domain of TCR clone 146444 (TRBV11-2, TRBJ2-7)
CASSLMVGGSYEQYF

SEQ ID NO: 292889 - protein, 12 aa, Homo sapiens
  CDR3 for alpha chain variable domain of TCR clone 146445 (TRAV1-1, TRAJ43)
CAPRVSSNDMRF

SEQ ID NO: 292890 - protein, 14 aa, Homo sapiens
  CDR3 for beta chain variable domain of TCR clone 146445 (TRBV19, TRBJ2-7)
CASTVQGRPYEQYF

SEQ ID NO: 292891 - protein, 11 aa, Homo sapiens
  CDR3 for alpha chain variable domain of TCR clone 146446 (TRAV13-1, TRAJ15)
CAATPGTALIF

SEQ ID NO: 292892 - protein, 14 aa, Homo sapiens
  CDR3 for beta chain variable domain of TCR clone 146446 (TRBV7-2, TRBJ1-5)
CASSTQGAGQPQHF

SEQ ID NO: 292893 - protein, 15 aa, Homo sapiens
  CDR3 for alpha chain variable domain of TCR clone 146447 (TRAV26-1, TRAJ15)
CIVRAANQARTALIF

SEQ ID NO: 292894 - protein, 15 aa, Homo sapiens
  CDR3 for beta chain variable domain of TCR clone 146447 (TRBV20-1, TRBJ1-1)
CSARSAATANTEAFF

SEQ ID NO: 292895 - protein, 13 aa, Homo sapiens
  CDR3 for alpha chain variable domain of TCR clone 146448 (TRAV17, TRAJ4)
YATKSGGYNKLIF

SEQ ID NO: 292896 - protein, 14 aa, Homo sapiens
  CDR3 for beta chain variable domain of TCR clone 146448 (TRBV20-1, TRBJ1-5)
CSARDDRGNQPQHF

SEQ ID NO: 292897 - protein, 16 aa, Homo sapiens
  CDR3 for alpha chain variable domain of TCR clone 146449 (TRAV26-1, TRAJ50)
CIVRVEAGTAYDKVSF

SEQ ID NO: 292898 - protein, 13 aa, Homo sapiens
  CDR3 for beta chain variable domain of TCR clone 146449 (TRBV25-1, TRBJ1-2)
CASSENMGRGYTF

SEQ ID NO: 292899 - protein, 13 aa, Homo sapiens
  CDR3 for alpha chain variable domain of TCR clone 146450 (TRAV12-2, TRAJ20)
CAVYPSNDYKLSF

SEQ ID NO: 292900 - protein, 13 aa, Homo sapiens
  CDR3 for beta chain variable domain of TCR clone 146450 (TRBV20-1, TRBJ2-5)
CSVTQGNEETQYF

SEQ ID NO: 292901 - protein, 13 aa, Homo sapiens
  CDR3 for alpha chain variable domain of TCR clone 146451 (TRAV16, TRAJ5)
CALTNTGRRALTF

SEQ ID NO: 292902 - protein, 14 aa, Homo sapiens
  CDR3 for beta chain variable domain of TCR clone 146451 (TRBV11-2, TRBJ2-3)
CASSRLARTDTQYF

SEQ ID NO: 292903 - protein, 14 aa, Homo sapiens
  CDR3 for alpha chain variable domain of TCR clone 146452 (TRAV12-3, TRAJ47)
CAMSVREYGNKLVF

SEQ ID NO: 292904 - protein, 15 aa, Homo sapiens
  CDR3 for beta chain variable domain of TCR clone 146452 (TRBV20-1, TRBJ2-2)
CSARDTRLDTGELFF

SEQ ID NO: 292905 - protein, 19 aa, Homo sapiens
  CDR3 for alpha chain variable domain of TCR clone 146453 (TRAV29/DV5, TRAJ53)
CSVLLCSKPDRGSNYKMTF

SEQ ID NO: 292906 - protein, 15 aa, Homo sapiens
  CDR3 for beta chain variable domain of TCR clone 146453 (TRBV19, TRBJ2-4)
CASSIGLAGANIQYF

SEQ ID NO: 292907 - protein, 14 aa, Homo sapiens
  CDR3 for alpha chain variable domain of TCR clone 146454 (TRAV8-2, TRAJ11)
CVVSEKSGYSTLTS

SEQ ID NO: 292908 - protein, 16 aa, Homo sapiens
  CDR3 for beta chain variable domain of TCR clone 146454 (TRBV28, TRBJ2-1)
CASSSPEYPQDNEQFF

SEQ ID NO: 292909 - protein, 14 aa, Homo sapiens
  CDR3 for alpha chain variable domain of TCR clone 146455 (TRAV21, TRAJ15)
CAVSLNQAGTALIF

SEQ ID NO: 292910 - protein, 13 aa, Homo sapiens
  CDR3 for beta chain variable domain of TCR clone 146455 (TRBV7-3, TRBJ1-1)
CASSQDWGAEAFF

SEQ ID NO: 292911 - protein, 11 aa, Homo sapiens
  CDR3 for alpha chain variable domain of TCR clone 146456 (TRAV2, TRAJ13)
CASGGYQKVTF

SEQ ID NO: 292912 - protein, 17 aa, Homo sapiens
  CDR3 for beta chain variable domain of TCR clone 146456 (TRBV4-1, TRBJ2-7)
CASSQPTSGSRGYEQYF

SEQ ID NO: 292913 - protein, 12 aa, Homo sapiens
  CDR3 for alpha chain variable domain of TCR clone 146457 (TRAV6, TRAJ27)
CSRIRGAGKSTF

SEQ ID NO: 292914 - protein, 17 aa, Homo sapiens
  CDR3 for beta chain variable domain of TCR clone 146457 (TRBV20-1, TRBJ2-2)
CSASGSGQGGLTGELFF

SEQ ID NO: 292915 - protein, 14 aa, Homo sapiens
  CDR3 for alpha chain variable domain of TCR clone 146458 (TRAV12-2, TRAJ17)
CAVLFKAAGNKLTF

SEQ ID NO: 292916 - protein, 17 aa, Homo sapiens
  CDR3 for beta chain variable domain of TCR clone 146458 (TRBV11-2, TRBJ2-1)
RASSLYPPGVEYNEQFF

SEQ ID NO: 292917 - protein, 11 aa, Homo sapiens
  CDR3 for alpha chain variable domain of TCR clone 146459 (TRAV35, TRAJ34)
CWARNTDKLIF

SEQ ID NO: 292918 - protein, 14 aa, Homo sapiens
  CDR3 for beta chain variable domain of TCR clone 146459 (TRBV7-3, TRBJ2-1)
CASSLAGGTNEQFF

SEQ ID NO: 292919 - protein, 14 aa, Homo sapiens
  CDR3 for alpha chain variable domain of TCR clone 146460 (TRAV17, TRAJ57)
CATDPQGGSAKLVF

SEQ ID NO: 292920 - protein, 16 aa, Homo sapiens
  CDR3 for beta chain variable domain of TCR clone 146460 (TRBV20-1, TRBJ1-4)
CSAPGQGLLTNEKLFF

SEQ ID NO: 292921 - protein, 14 aa, Homo sapiens
  CDR3 for alpha chain variable domain of TCR clone 146461 (TRAV14/DV4, TRAJ15)
CAMRRDQAGTALIF

SEQ ID NO: 292922 - protein, 13 aa, Homo sapiens
  CDR3 for beta chain variable domain of TCR clone 146461 (TRBV7-9, TRBJ2-5)
CASLPSGRETQYF

SEQ ID NO: 292923 - protein, 14 aa, Homo sapiens
  CDR3 for alpha chain variable domain of TCR clone 146462 (TRAV12-2, TRAJ44)
CAVNPAGTASKLTF

SEQ ID NO: 292924 - protein, 11 aa, Homo sapiens
  CDR3 for beta chain variable domain of TCR clone 146462 (TRBV6-1, TRBJ2-1)
CASISSNEQFF

SEQ ID NO: 292925 - protein, 14 aa, Homo sapiens
  CDR3 for alpha chain variable domain of TCR clone 146463 (TRAV16, TRAJ44)
CALSTTGTASKLTF

SEQ ID NO: 292926 - protein, 14 aa, Homo sapiens
  CDR3 for beta chain variable domain of TCR clone 146463 (TRBV20-1, TRBJ2-7)
SSAISREASYEQYF

SEQ ID NO: 292927 - protein, 15 aa, Homo sapiens
  CDR3 for alpha chain variable domain of TCR clone 146464 (TRAV12-1, TRAJ44)
CVVFVNTGTASKLTF

SEQ ID NO: 292928 - protein, 15 aa, Homo sapiens
  CDR3 for beta chain variable domain of TCR clone 146464 (TRBV28, TRBJ2-5)
CASSPPWSYQETQYF

SEQ ID NO: 292929 - protein, 15 aa, Homo sapiens
  CDR3 for alpha chain variable domain of TCR clone 146465 (TRAV1-2, TRAJ13)
CAVRGCSGGYQKVTF

SEQ ID NO: 292930 - protein, 15 aa, Homo sapiens
  CDR3 for beta chain variable domain of TCR clone 146465 (TRBV11-3, TRBJ1-3)
CASSLSGTSGNTIYF

SEQ ID NO: 292931 - protein, 15 aa, Homo sapiens
  CDR3 for alpha chain variable domain of TCR clone 146466 (TRAV13-1, TRAJ10)
CAATILTGGGNKLTF

SEQ ID NO: 292932 - protein, 12 aa, Homo sapiens
  CDR3 for beta chain variable domain of TCR clone 146466 (TRBV2, TRBJ2-1)
CAYGPPGNEQFF

SEQ ID NO: 292933 - protein, 12 aa, Homo sapiens
  CDR3 for alpha chain variable domain of TCR clone 146467 (TRAV1-2, TRAJ33)
CAVIDSNYQLIW

SEQ ID NO: 292934 - protein, 14 aa, Homo sapiens
  CDR3 for beta chain variable domain of TCR clone 146467 (TRBV20-1, TRBJ1-1)
CSAREGRLHTEAFF

SEQ ID NO: 292935 - protein, 13 aa, Homo sapiens
  CDR3 for alpha chain variable domain of TCR clone 146468 (TRAV17, TRAJ9)
CATAITGGFKTIF

SEQ ID NO: 292936 - protein, 16 aa, Homo sapiens
  CDR3 for beta chain variable domain of TCR clone 146468 (TRBV15, TRBJ2-1)
CATRRNLAGGYNKQFF

SEQ ID NO: 292937 - protein, 12 aa, Homo sapiens
  CDR3 for alpha chain variable domain of TCR clone 146469 (TRAV3, TRAJ20)
CAVRDHDYKLSF

SEQ ID NO: 292938 - protein, 16 aa, Homo sapiens
  CDR3 for beta chain variable domain of TCR clone 146469 (TRBV7-9, TRBJ1-2)
CASSLGFSSGEDGYTF

SEQ ID NO: 292939 - protein, 13 aa, Homo sapiens
  CDR3 for alpha chain variable domain of TCR clone 146470 (TRAV8-6, TRAJ49)
CAVITNTGNQIYF

SEQ ID NO: 292940 - protein, 14 aa, Homo sapiens
  CDR3 for beta chain variable domain of TCR clone 146470 (TRBV27, TRBJ2-2)
CASRPGVNTGELFF

SEQ ID NO: 292941 - protein, 11 aa, Homo sapiens
  CDR3 for alpha chain variable domain of TCR clone 146471 (TRAV12-3, TRAJ43)
YAMSVSNDMRF

SEQ ID NO: 292942 - protein, 14 aa, Homo sapiens
  CDR3 for beta chain variable domain of TCR clone 146471 (TRBV20-1, TRBJ1-1)
SAVLHLGGGTEAFF

SEQ ID NO: 292943 - protein, 13 aa, Homo sapiens
  CDR3 for alpha chain variable domain of TCR clone 146472 (TRAV20, TRAJ49)
CAVQARTGDQFYF

SEQ ID NO: 292944 - protein, 14 aa, Homo sapiens
  CDR3 for beta chain variable domain of TCR clone 146472 (TRBV5-1, TRBJ1-1)
CASSLQGASTEALF

SEQ ID NO: 292945 - protein, 12 aa, Homo sapiens
  CDR3 for alpha chain variable domain of TCR clone 146473 (TRAV16, TRAJ49)
CALDEGGNQFYF

SEQ ID NO: 292946 - protein, 14 aa, Homo sapiens
  CDR3 for beta chain variable domain of TCR clone 146473 (TRBV7-9, TRBJ2-1)
CASRPTGLRNEQFF

SEQ ID NO: 292947 - protein, 14 aa, Homo sapiens
  CDR3 for alpha chain variable domain of TCR clone 146474 (TRAV26-1, TRAJ39)
CIVFTDNAGNMLTF

SEQ ID NO: 292948 - protein, 15 aa, Homo sapiens
  CDR3 for beta chain variable domain of TCR clone 146474 (TRBV19, TRBJ2-4)
CISSLTGLTKNIQYF

SEQ ID NO: 292949 - protein, 15 aa, Homo sapiens
  CDR3 for alpha chain variable domain of TCR clone 146475 (TRAV13-2, TRAJ53)
CAERGRRGSNYKLTF

SEQ ID NO: 292950 - protein, 14 aa, Homo sapiens
  CDR3 for beta chain variable domain of TCR clone 146475 (TRBV4-1, TRBJ2-2)
CASSQYPDTGELFF

SEQ ID NO: 292951 - protein, 14 aa, Homo sapiens
  CDR3 for alpha chain variable domain of TCR clone 146476 (TRAV20, TRAJ42)
SAVQAGGSQGNLIF

SEQ ID NO: 292952 - protein, 14 aa, Homo sapiens
  CDR3 for beta chain variable domain of TCR clone 146476 (TRBV28, TRBJ1-2)
CASRIQGANYGYTF

SEQ ID NO: 292953 - protein, 12 aa, Homo sapiens
  CDR3 for alpha chain variable domain of TCR clone 146477 (TRAV25, TRAJ11)
FAGASGYSTLTF

SEQ ID NO: 292954 - protein, 14 aa, Homo sapiens
  CDR3 for beta chain variable domain of TCR clone 146477 (TRBV5-8, TRBJ2-3)
CASSLGQGTDTQYF

SEQ ID NO: 292955 - protein, 11 aa, Homo sapiens
  CDR3 for alpha chain variable domain of TCR clone 146478 (TRAV12-3, TRAJ49)
CAMSSGNQFYL

SEQ ID NO: 292956 - protein, 17 aa, Homo sapiens
  CDR3 for beta chain variable domain of TCR clone 146478 (TRBV5-7, TRBJ2-7)
CASSLWRVLAGSYEQYF

SEQ ID NO: 292957 - protein, 12 aa, Homo sapiens
  CDR3 for alpha chain variable domain of TCR clone 146479 (TRAV13-1, TRAJ20)
CATSMGNYKLSF

SEQ ID NO: 292958 - protein, 15 aa, Homo sapiens
  CDR3 for beta chain variable domain of TCR clone 146479 (TRBV11-3, TRBJ2-3)
CASNGGLDSTDTQYF

SEQ ID NO: 292959 - protein, 11 aa, Homo sapiens
  CDR3 for alpha chain variable domain of TCR clone 146480 (TRAV3, TRAJ21)
CAVGNFNQFYF

SEQ ID NO: 292960 - protein, 16 aa, Homo sapiens
  CDR3 for beta chain variable domain of TCR clone 146480 (TRBV19, TRBJ2-1)
CASSKAGPRSYNEKFF

SEQ ID NO: 292961 - protein, 12 aa, Homo sapiens
  CDR3 for alpha chain variable domain of TCR clone 146481 (TRAV17, TRAJ20)
CATDGDDYKLSF

SEQ ID NO: 292962 - protein, 13 aa, Homo sapiens
  CDR3 for beta chain variable domain of TCR clone 146481 (TRBV6-5, TRBJ2-5)
LASGGSYQETQYF

SEQ ID NO: 292963 - protein, 13 aa, Homo sapiens
  CDR3 for alpha chain variable domain of TCR clone 146482 (TRAV2, TRAJ40)
CAVVTLGTYKYIF

SEQ ID NO: 292964 - protein, 17 aa, Homo sapiens
  CDR3 for beta chain variable domain of TCR clone 146482 (TRBV7-3, TRBJ2-3)
CASSLMKRMRGADTQYF

SEQ ID NO: 292965 - protein, 14 aa, Homo sapiens
  CDR3 for alpha chain variable domain of TCR clone 146483 (TRAV12-3, TRAJ54)
CAMRGIQGAQKLVF

SEQ ID NO: 292966 - protein, 13 aa, Homo sapiens
  CDR3 for beta chain variable domain of TCR clone 146483 (TRBV19, TRBJ1-1)
CASSPSNGGEAFV

SEQ ID NO: 292967 - protein, 15 aa, Homo sapiens
  CDR3 for alpha chain variable domain of TCR clone 146484 (TRAV1-2, TRAJ6)
CAERSGNRRKLHTYI

SEQ ID NO: 292968 - protein, 13 aa, Homo sapiens
  CDR3 for beta chain variable domain of TCR clone 146484 (TRBV28, TRBJ2-7)
CASTPGLAGEQYF

SEQ ID NO: 292969 - protein, 13 aa, Homo sapiens
  CDR3 for alpha chain variable domain of TCR clone 146485 (TRAV27, TRAJ41)
RAGEGNSGHALNF

SEQ ID NO: 292970 - protein, 14 aa, Homo sapiens
  CDR3 for beta chain variable domain of TCR clone 146485 (TRBV7-2, TRBJ1-1)
CASSFLTGTTEAFF

SEQ ID NO: 292971 - protein, 16 aa, Homo sapiens
  CDR3 for alpha chain variable domain of TCR clone 146486 (TRAV12-2, TRAJ50)
CAVGTATKTSYDKVIF

SEQ ID NO: 292972 - protein, 15 aa, Homo sapiens
  CDR3 for beta chain variable domain of TCR clone 146486 (TRBV10-1, TRBJ2-1)
CASSEWRGTYNEQFF

SEQ ID NO: 292973 - protein, 15 aa, Homo sapiens
  CDR3 for alpha chain variable domain of TCR clone 146487 (TRAV8-3, TRAJ45)
CASSYSGGGADGLTF

SEQ ID NO: 292974 - protein, 13 aa, Homo sapiens
  CDR3 for beta chain variable domain of TCR clone 146487 (TRBV29-1, TRBJ2-3)
SAALQGGADTQYF

SEQ ID NO: 292975 - protein, 15 aa, Homo sapiens
  CDR3 for alpha chain variable domain of TCR clone 146488 (TRAV12-3, TRAJ53)
CNERPIEGSNYKLTF

SEQ ID NO: 292976 - protein, 20 aa, Homo sapiens
  CDR3 for beta chain variable domain of TCR clone 146488 (TRBV28, TRBJ2-1)
CASTPIGRSPGLAGGNEQFF

SEQ ID NO: 292977 - protein, 15 aa, Homo sapiens
  CDR3 for alpha chain variable domain of TCR clone 146489 (TRAV26-2, TRAJ28)
CILVASGAGSYQLTF

SEQ ID NO: 292978 - protein, 11 aa, Homo sapiens
  CDR3 for beta chain variable domain of TCR clone 146489 (TRBV25-1, TRBJ2-7)
CASSTSYEQYF

SEQ ID NO: 292979 - protein, 14 aa, Homo sapiens
  CDR3 for alpha chain variable domain of TCR clone 146490 (TRAV23/DV6, TRAJ37)
CAASTSRNTGKLIF

SEQ ID NO: 292980 - protein, 14 aa, Homo sapiens
  CDR3 for beta chain variable domain of TCR clone 146490 (TRBV7-2, TRBJ2-7)
CASSPKTSFYEQYF

SEQ ID NO: 292981 - protein, 14 aa, Homo sapiens
  CDR3 for alpha chain variable domain of TCR clone 146491 (TRAV12-2, TRAJ17)
CAALFTAAGNKLTF

SEQ ID NO: 292982 - protein, 16 aa, Homo sapiens
  CDR3 for beta chain variable domain of TCR clone 146491 (TRBV20-1, TRBJ2-2)
CSASASGILGAGELFF

SEQ ID NO: 292983 - protein, 11 aa, Homo sapiens
  CDR3 for alpha chain variable domain of TCR clone 146492 (TRAV2, TRAJ21)
CAVFNFNNFYF

SEQ ID NO: 292984 - protein, 12 aa, Homo sapiens
  CDR3 for beta chain variable domain of TCR clone 146492 (TRBV18, TRBJ2-1)
CASSADEDEQFF

SEQ ID NO: 292985 - protein, 10 aa, Homo sapiens
  CDR3 for alpha chain variable domain of TCR clone 146493 (TRAV21, TRAJ31)
CAVDNARLMF

SEQ ID NO: 292986 - protein, 13 aa, Homo sapiens
  CDR3 for beta chain variable domain of TCR clone 146493 (TRBV4-1, TRBJ1-1)
CASSRTMNTEAFF

SEQ ID NO: 292987 - protein, 15 aa, Homo sapiens
  CDR3 for alpha chain variable domain of TCR clone 146494 (TRAV13-1, TRAJ44)
CAASRGGGTASKLTF

SEQ ID NO: 292988 - protein, 15 aa, Homo sapiens
  CDR3 for beta chain variable domain of TCR clone 146494 (TRBV11-2, TRBJ2-1)
CASSLGTSGLNEQFF

SEQ ID NO: 292989 - protein, 18 aa, Homo sapiens
  CDR3 for alpha chain variable domain of TCR clone 146495 (TRAV1-1, TRAJ37)
CLLLLRCEVASNTGKLIF

SEQ ID NO: 292990 - protein, 12 aa, Homo sapiens
  CDR3 for beta chain variable domain of TCR clone 146495 (TRBV7-8, TRBJ2-1)
CASSLGHNEQFF

SEQ ID NO: 292991 - protein, 14 aa, Homo sapiens
  CDR3 for alpha chain variable domain of TCR clone 146496 (TRAV30, TRAJ33)
CGTVAPRSNYQLIW

SEQ ID NO: 292992 - protein, 16 aa, Homo sapiens
  CDR3 for beta chain variable domain of TCR clone 146496 (TRBV7-3, TRBJ2-2)
CASSLKRGTLSGELFF

SEQ ID NO: 292993 - protein, 18 aa, Homo sapiens
  CDR3 for alpha chain variable domain of TCR clone 146497 (TRAV13-1, TRAJ52)
CAAKNPNAGGTSYGKLTF

SEQ ID NO: 292994 - protein, 13 aa, Homo sapiens
  CDR3 for beta chain variable domain of TCR clone 146497 (TRBV7-3, TRBJ2-1)
CASSPVAYNEQFF

SEQ ID NO: 292995 - protein, 13 aa, Homo sapiens
  CDR3 for alpha chain variable domain of TCR clone 146498 (TRAV2, TRAJ40)
CTVVTSGTYKYIL

SEQ ID NO: 292996 - protein, 14 aa, Homo sapiens
  CDR3 for beta chain variable domain of TCR clone 146498 (TRBV19, TRBJ2-1)
CASPTFVLSGEQFF

SEQ ID NO: 292997 - protein, 14 aa, Homo sapiens
  CDR3 for alpha chain variable domain of TCR clone 146499 (TRAV17, TRAJ39)
SATDPVRAGNMLTF

SEQ ID NO: 292998 - protein, 13 aa, Homo sapiens
  CDR3 for beta chain variable domain of TCR clone 146499 (TRBV19, TRBJ1-2)
CASSVPGQDGYTF

SEQ ID NO: 292999 - protein, 15 aa, Homo sapiens
  CDR3 for alpha chain variable domain of TCR clone 146500 (TRAV3, TRAJ4)
CAVRDGTGGYNKLIF

SEQ ID NO: 293000 - protein, 13 aa, Homo sapiens
  CDR3 for beta chain variable domain of TCR clone 146500 (TRBV2, TRBJ2-2)
CASRAWRTGELFF

SEQ ID NO: 293001 - protein, 15 aa, Homo sapiens
  CDR3 for alpha chain variable domain of TCR clone 146501 (TRAV13-1, TRAJ16)
CAARYQMARSCPLQG

SEQ ID NO: 293002 - protein, 13 aa, Homo sapiens
  CDR3 for beta chain variable domain of TCR clone 146501 (TRBV4-1, TRBJ2-1)
CASSQAGGDAQFF

SEQ ID NO: 293003 - protein, 18 aa, Homo sapiens
  CDR3 for alpha chain variable domain of TCR clone 146502 (TRAV21, TRAJ52)
CAVRPSPAGGTSYGKRTF

SEQ ID NO: 293004 - protein, 13 aa, Homo sapiens
  CDR3 for beta chain variable domain of TCR clone 146502 (TRBV7-3, TRBJ1-1)
CASSQDWGAEAFF

SEQ ID NO: 293005 - protein, 11 aa, Homo sapiens
  CDR3 for alpha chain variable domain of TCR clone 146503 (TRAV17, TRAJ9)
CVTTGGLKTIF

SEQ ID NO: 293006 - protein, 14 aa, Homo sapiens
  CDR3 for beta chain variable domain of TCR clone 146503 (TRBV7-9, TRBJ2-2)
CASSGLADTGELFF

SEQ ID NO: 293007 - protein, 15 aa, Homo sapiens
  CDR3 for alpha chain variable domain of TCR clone 146504 (TRAV3, TRAJ22)
CAVRDRGGSARQLTF

SEQ ID NO: 293008 - protein, 16 aa, Homo sapiens
  CDR3 for beta chain variable domain of TCR clone 146504 (TRBV5-4, TRBJ2-3)
CASQQPGSGGADTQYF

SEQ ID NO: 293009 - protein, 23 aa, Homo sapiens
  CDR3 for alpha chain variable domain of TCR clone 146505 (TRAV26-1, )
CIADNAGNNNIQNPDPAVYQLRD

SEQ ID NO: 293010 - protein, 12 aa, Homo sapiens
  CDR3 for beta chain variable domain of TCR clone 146505 (TRBV11-3, TRBJ2-2)
CASSLGGGELFF

SEQ ID NO: 293011 - protein, 15 aa, Homo sapiens
  CDR3 for alpha chain variable domain of TCR clone 146506 (TRAV17, TRAJ37)
CATDGGSSNSGKLIF

SEQ ID NO: 293012 - protein, 15 aa, Homo sapiens
  CDR3 for beta chain variable domain of TCR clone 146506 (TRBV28, TRBJ2-5)
CASSSGRTIQETQYF

SEQ ID NO: 293013 - protein, 16 aa, Homo sapiens
  CDR3 for alpha chain variable domain of TCR clone 146507 (TRAV12-1, TRAJ43)
CVVNPHRFGAGTRLTV

SEQ ID NO: 293014 - protein, 15 aa, Homo sapiens
  CDR3 for beta chain variable domain of TCR clone 146507 (TRBV9, TRBJ1-6)
CASSVAGTGDSPLHF

SEQ ID NO: 293015 - protein, 10 aa, Homo sapiens
  CDR3 for alpha chain variable domain of TCR clone 146508 (TRAV16, TRAJ22)
SAMYLRQLTF

SEQ ID NO: 293016 - protein, 17 aa, Homo sapiens
  CDR3 for beta chain variable domain of TCR clone 146508 (TRBV7-9, TRBJ1-6)
CASSSPDVETHPSTLGT

SEQ ID NO: 293017 - protein, 12 aa, Homo sapiens
  CDR3 for alpha chain variable domain of TCR clone 146509 (TRAV1-1, TRAJ8)
CAGGTGFQKLVF

SEQ ID NO: 293018 - protein, 16 aa, Homo sapiens
  CDR3 for beta chain variable domain of TCR clone 146509 (TRBV12-5, TRBJ2-5)
CASGPRTSGNQETQDF

SEQ ID NO: 293019 - protein, 14 aa, Homo sapiens
  CDR3 for alpha chain variable domain of TCR clone 146510 (TRAV16, TRAJ33)
CALSAMDSNYQLIW

SEQ ID NO: 293020 - protein, 16 aa, Homo sapiens
  CDR3 for beta chain variable domain of TCR clone 146510 (TRBV12-4, TRBJ2-3)
CASSFPSNTNRDTQYF

SEQ ID NO: 293021 - protein, 13 aa, Homo sapiens
  CDR3 for alpha chain variable domain of TCR clone 146511 (TRAV8-3, TRAJ48)
CAVVPFGNEKLTI

SEQ ID NO: 293022 - protein, 19 aa, Homo sapiens
  CDR3 for beta chain variable domain of TCR clone 146511 (TRBV25-1, TRBJ2-2)
CAILVYRVDRGRKTGELFF

SEQ ID NO: 293023 - protein, 12 aa, Homo sapiens
  CDR3 for alpha chain variable domain of TCR clone 146512 (TRAV12-2, TRAJ10)
WGVTGGGNKLTF

SEQ ID NO: 293024 - protein, 17 aa, Homo sapiens
  CDR3 for beta chain variable domain of TCR clone 146512 (TRBV28, TRBJ2-2)
CASSLATGMGDAGELFF

SEQ ID NO: 293025 - protein, 14 aa, Homo sapiens
  CDR3 for alpha chain variable domain of TCR clone 146513 (TRAV1-2, TRAJ16)
CAVNRFSDGQKPLF

SEQ ID NO: 293026 - protein, 15 aa, Homo sapiens
  CDR3 for beta chain variable domain of TCR clone 146513 (TRBV9, TRBJ1-6)
CASRVAGTGDSPLHF

SEQ ID NO: 293027 - protein, 16 aa, Homo sapiens
  CDR3 for alpha chain variable domain of TCR clone 146514 (TRAV12-1, TRAJ53)
CVATSVAGGSNYKLTF

SEQ ID NO: 293028 - protein, 16 aa, Homo sapiens
  CDR3 for beta chain variable domain of TCR clone 146514 (TRBV6-6, TRBJ2-3)
CASSYSYAGSTDTQYF

SEQ ID NO: 293029 - protein, 18 aa, Homo sapiens
  CDR3 for alpha chain variable domain of TCR clone 146515 (TRAV21, TRAJ52)
CAVRPSPAGGTSYGKLTF

SEQ ID NO: 293030 - protein, 14 aa, Homo sapiens
  CDR3 for beta chain variable domain of TCR clone 146515 (TRBV18, TRBJ1-1)
CASSPPTGRTEAFF

SEQ ID NO: 293031 - protein, 11 aa, Homo sapiens
  CDR3 for alpha chain variable domain of TCR clone 146516 (TRAV2, TRAJ33)
CAVDSNYQLIW

SEQ ID NO: 293032 - protein, 15 aa, Homo sapiens
  CDR3 for beta chain variable domain of TCR clone 146516 (TRBV28, TRBJ2-5)
CASSSGRTIQETQYF

SEQ ID NO: 293033 - protein, 16 aa, Homo sapiens
  CDR3 for alpha chain variable domain of TCR clone 146517 (TRAV3, TRAJ10)
CAVRDMRAGGGNKPTF

SEQ ID NO: 293034 - protein, 14 aa, Homo sapiens
  CDR3 for beta chain variable domain of TCR clone 146517 (TRBV7-2, TRBJ1-1)
CASSFLTGTTEAFF

SEQ ID NO: 293035 - protein, 15 aa, Homo sapiens
  CDR3 for alpha chain variable domain of TCR clone 146518 (TRAV8-4, TRAJ45)
WAVIWTGGGADGLTF

SEQ ID NO: 293036 - protein, 12 aa, Homo sapiens
  CDR3 for beta chain variable domain of TCR clone 146518 (TRBV29-1, TRBJ2-7)
CSVGPSGDEQYF

SEQ ID NO: 293037 - protein, 13 aa, Homo sapiens
  CDR3 for alpha chain variable domain of TCR clone 146519 (TRAV23/DV6, TRAJ47)
CAASMTRGNKLVF

SEQ ID NO: 293038 - protein, 13 aa, Homo sapiens
  CDR3 for beta chain variable domain of TCR clone 146519 (TRBV9, TRBJ2-2)
CASSTVSSGELFF

SEQ ID NO: 293039 - protein, 14 aa, Homo sapiens
  CDR3 for alpha chain variable domain of TCR clone 146520 (TRAV25, TRAJ45)
CARESGGGSDGLTF

SEQ ID NO: 293040 - protein, 12 aa, Homo sapiens
  CDR3 for beta chain variable domain of TCR clone 146520 (TRBV7-9, TRBJ2-7)
CASSFDSYEQYF

SEQ ID NO: 293041 - protein, 15 aa, Homo sapiens
  CDR3 for alpha chain variable domain of TCR clone 146521 (TRAV17, TRAJ57)
CATGPSQGGSEKLVF

SEQ ID NO: 293042 - protein, 15 aa, Homo sapiens
  CDR3 for beta chain variable domain of TCR clone 146521 (TRBV20-1, TRBJ2-3)
CSARPSGFYTDTQYF

SEQ ID NO: 293043 - protein, 14 aa, Homo sapiens
  CDR3 for alpha chain variable domain of TCR clone 146522 (TRAV12-3, TRAJ58)
CAMSTETSGSTLTY

SEQ ID NO: 293044 - protein, 13 aa, Homo sapiens
  CDR3 for beta chain variable domain of TCR clone 146522 (TRBV27, TRBJ2-3)
CASSWGRTDTQYF

SEQ ID NO: 293045 - protein, 12 aa, Homo sapiens
  CDR3 for alpha chain variable domain of TCR clone 146523 (TRAV21, TRAJ12)
CAVMDSSYKLIF

SEQ ID NO: 293046 - protein, 16 aa, Homo sapiens
  CDR3 for beta chain variable domain of TCR clone 146523 (TRBV25-1, TRBJ1-3)
CQQCSRDILSGNTIYF

SEQ ID NO: 293047 - protein, 15 aa, Homo sapiens
  CDR3 for alpha chain variable domain of TCR clone 146524 (TRAV26-1, TRAJ48)
CIVRVGDFGNEKLTF

SEQ ID NO: 293048 - protein, 16 aa, Homo sapiens
  CDR3 for beta chain variable domain of TCR clone 146524 (TRBV4-1, TRBJ2-3)
CASSQRAGVLTDTQYF

SEQ ID NO: 293049 - protein, 16 aa, Homo sapiens
  CDR3 for alpha chain variable domain of TCR clone 146525 (TRAV26-2, TRAJ48)
CILRPPFNFGNETLTF

SEQ ID NO: 293050 - protein, 15 aa, Homo sapiens
  CDR3 for beta chain variable domain of TCR clone 146525 (TRBV20-1, TRBJ2-3)
CSARVEGTYTDTQYF

SEQ ID NO: 293051 - protein, 16 aa, Homo sapiens
  CDR3 for alpha chain variable domain of TCR clone 146526 (TRAV30, TRAJ24)
CSTEIVDADSWGKFQV

SEQ ID NO: 293052 - protein, 14 aa, Homo sapiens
  CDR3 for beta chain variable domain of TCR clone 146526 (TRBV12-5, TRBJ2-5)
CASGSRTHQETQYF

SEQ ID NO: 293053 - protein, 13 aa, Homo sapiens
  CDR3 for alpha chain variable domain of TCR clone 146527 (TRAV12-3, TRAJ54)
CAMSVQGAQKLVF

SEQ ID NO: 293054 - protein, 13 aa, Homo sapiens
  CDR3 for beta chain variable domain of TCR clone 146527 (TRBV2, TRBJ1-6)
CADPGSYNSPLHF

SEQ ID NO: 293055 - protein, 15 aa, Homo sapiens
  CDR3 for alpha chain variable domain of TCR clone 146528 (TRAV3, TRAJ4)
CAVRDGTGGYNKLIF

SEQ ID NO: 293056 - protein, 15 aa, Homo sapiens
  CDR3 for beta chain variable domain of TCR clone 146528 (TRBV19, TRBJ2-7)
CASSPAGSGEALRYF

SEQ ID NO: 293057 - protein, 16 aa, Homo sapiens
  CDR3 for alpha chain variable domain of TCR clone 146529 (TRAV16, TRAJ15)
CITVLSFNQAGTALIF

SEQ ID NO: 293058 - protein, 14 aa, Homo sapiens
  CDR3 for beta chain variable domain of TCR clone 146529 (TRBV19, TRBJ2-2)
CATTGHANTGELFF

SEQ ID NO: 293059 - protein, 16 aa, Homo sapiens
  CDR3 for alpha chain variable domain of TCR clone 146530 (TRAV17, TRAJ28)
CATDEYSGAGSYQLTF

SEQ ID NO: 293060 - protein, 13 aa, Homo sapiens
  CDR3 for beta chain variable domain of TCR clone 146530 (TRBV7-9, TRBJ1-2)
CASRTGPNYRHTF

SEQ ID NO: 293061 - protein, 10 aa, Homo sapiens
  CDR3 for alpha chain variable domain of TCR clone 146531 (TRAV30, TRAJ20)
CGTDDYKLSF

SEQ ID NO: 293062 - protein, 13 aa, Homo sapiens
  CDR3 for beta chain variable domain of TCR clone 146531 (TRBV19, TRBJ1-3)
CASRLSLGNTIYF

SEQ ID NO: 293063 - protein, 15 aa, Homo sapiens
  CDR3 for alpha chain variable domain of TCR clone 146532 (TRAV12-2, TRAJ57)
CAVSRGQGGSEKLVF

SEQ ID NO: 293064 - protein, 15 aa, Homo sapiens
  CDR3 for beta chain variable domain of TCR clone 146532 (TRBV5-1, TRBJ2-1)
CASSPPRATYNEQFF

SEQ ID NO: 293065 - protein, 14 aa, Homo sapiens
  CDR3 for alpha chain variable domain of TCR clone 146533 (TRAV27, TRAJ45)
CAGAQEEVLTDSPL

SEQ ID NO: 293066 - protein, 17 aa, Homo sapiens
  CDR3 for beta chain variable domain of TCR clone 146533 (TRBV10-3, TRBJ2-4)
CTSVPSVNKGSKNIQYF

SEQ ID NO: 293067 - protein, 12 aa, Homo sapiens
  CDR3 for alpha chain variable domain of TCR clone 146534 (TRAV1-2, TRAJ33)
CAALDSNYQLIW

SEQ ID NO: 293068 - protein, 15 aa, Homo sapiens
  CDR3 for beta chain variable domain of TCR clone 146534 (TRBV10-3, TRBJ2-3)
CAISLTSGGTETQYF

SEQ ID NO: 293069 - protein, 16 aa, Homo sapiens
  CDR3 for alpha chain variable domain of TCR clone 146535 (TRAV3, TRAJ5)
CAVRNLMDTGRRALTF

SEQ ID NO: 293070 - protein, 14 aa, Homo sapiens
  CDR3 for beta chain variable domain of TCR clone 146535 (TRBV4-2, TRBJ2-1)
CASGLDRAYNEQFF

SEQ ID NO: 293071 - protein, 15 aa, Homo sapiens
  CDR3 for alpha chain variable domain of TCR clone 146536 (TRAV1-2, TRAJ9)
CAMRDDGTGGFKTIF

SEQ ID NO: 293072 - protein, 16 aa, Homo sapiens
  CDR3 for beta chain variable domain of TCR clone 146536 (TRBV7-3, TRBJ2-2)
CASSLKRGTLSGELFF

SEQ ID NO: 293073 - protein, 16 aa, Homo sapiens
  CDR3 for alpha chain variable domain of TCR clone 146537 (TRAV30, TRAJ49)
SAAQRVGPNTGNQFYF

SEQ ID NO: 293074 - protein, 15 aa, Homo sapiens
  CDR3 for beta chain variable domain of TCR clone 146537 (TRBV6-1, TRBJ2-6)
CASSSRPSGANVLTF

SEQ ID NO: 293075 - protein, 11 aa, Homo sapiens
  CDR3 for alpha chain variable domain of TCR clone 146538 (TRAV1-2, TRAJ40)
CAVPGTYKYIF

SEQ ID NO: 293076 - protein, 11 aa, Homo sapiens
  CDR3 for beta chain variable domain of TCR clone 146538 (TRBV29-1, TRBJ2-7)
VGTGGSYEQYF

SEQ ID NO: 293077 - protein, 16 aa, Homo sapiens
  CDR3 for alpha chain variable domain of TCR clone 146539 (TRAV8-4, TRAJ34)
CAVSDPPTPTSSSLGL

SEQ ID NO: 293078 - protein, 14 aa, Homo sapiens
  CDR3 for beta chain variable domain of TCR clone 146539 (TRBV20-1, TRBJ2-5)
CSARHGRAGETQYF

SEQ ID NO: 293079 - protein, 13 aa, Homo sapiens
  CDR3 for alpha chain variable domain of TCR clone 146540 (TRAV13-1, TRAJ36)
CAASNSGTNNLFF

SEQ ID NO: 293080 - protein, 20 aa, Homo sapiens
  CDR3 for beta chain variable domain of TCR clone 146540 (TRBV7-8, TRBJ2-2)
CASSHLFPGPTIHITGELFF

SEQ ID NO: 293081 - protein, 17 aa, Homo sapiens
  CDR3 for alpha chain variable domain of TCR clone 146541 (TRAV3, TRAJ6)
CAVRDGPRARGSYIPTF

SEQ ID NO: 293082 - protein, 14 aa, Homo sapiens
  CDR3 for beta chain variable domain of TCR clone 146541 (TRBV4-1, TRBJ2-2)
CASSQAVNTGELLF

SEQ ID NO: 293083 - protein, 14 aa, Homo sapiens
  CDR3 for alpha chain variable domain of TCR clone 146542 (TRAV13-1, TRAJ40)
CTAHPTSGTYKYIF

SEQ ID NO: 293084 - protein, 12 aa, Homo sapiens
  CDR3 for beta chain variable domain of TCR clone 146542 (TRBV11-2, TRBJ2-2)
CASSLGGGELFF

SEQ ID NO: 293085 - protein, 15 aa, Homo sapiens
  CDR3 for alpha chain variable domain of TCR clone 146543 (TRAV27, TRAJ38)
CAARRNAGNNRKLIG

SEQ ID NO: 293086 - protein, 13 aa, Homo sapiens
  CDR3 for beta chain variable domain of TCR clone 146543 (TRBV12-5, TRBJ2-3)
CASGDRQLDTQYF

SEQ ID NO: 293087 - protein, 11 aa, Homo sapiens
  CDR3 for alpha chain variable domain of TCR clone 146544 (TRAV25, TRAJ49)
CAGGTGNQFYF

SEQ ID NO: 293088 - protein, 12 aa, Homo sapiens
  CDR3 for beta chain variable domain of TCR clone 146544 (TRBV6-5, TRBJ2-1)
CASRNDPGQQFF

SEQ ID NO: 293089 - protein, 11 aa, Homo sapiens
  CDR3 for alpha chain variable domain of TCR clone 146545 (TRAV13-1, TRAJ30)
CAASRDDKIIF

SEQ ID NO: 293090 - protein, 15 aa, Homo sapiens
  CDR3 for beta chain variable domain of TCR clone 146545 (TRBV6-3, TRBJ2-7)
CASSSPGTVFYEQYF

SEQ ID NO: 293091 - protein, 17 aa, Homo sapiens
  CDR3 for alpha chain variable domain of TCR clone 146546 (TRAV13-1, TRAJ52)
CAAGRNAGGPSYGKLTF

SEQ ID NO: 293092 - protein, 13 aa, Homo sapiens
  CDR3 for beta chain variable domain of TCR clone 146546 (TRBV7-2, TRBJ1-1)
CASNLKGAKVAFF

SEQ ID NO: 293093 - protein, 12 aa, Homo sapiens
  CDR3 for alpha chain variable domain of TCR clone 146547 (TRAV1-1, TRAJ9)
CAVDTGGFKTIF

SEQ ID NO: 293094 - protein, 15 aa, Homo sapiens
  CDR3 for beta chain variable domain of TCR clone 146547 (TRBV7-9, TRBJ1-6)
CASSSPGRGNSPLHF

SEQ ID NO: 293095 - protein, 12 aa, Homo sapiens
  CDR3 for alpha chain variable domain of TCR clone 146548 (TRAV13-1, TRAJ49)
WAASIWGNQFYF

SEQ ID NO: 293096 - protein, 14 aa, Homo sapiens
  CDR3 for beta chain variable domain of TCR clone 146548 (TRBV12-4, TRBJ1-1)
CASSLDGLNTEAFF

SEQ ID NO: 293097 - protein, 15 aa, Homo sapiens
  CDR3 for alpha chain variable domain of TCR clone 146549 (TRAV8-3, TRAJ6)
CAVGEDSGGSYIPTF

SEQ ID NO: 293098 - protein, 14 aa, Homo sapiens
  CDR3 for beta chain variable domain of TCR clone 146549 (TRBV27, TRBJ2-2)
CASLRSPPGGELFF

SEQ ID NO: 293099 - protein, 11 aa, Homo sapiens
  CDR3 for alpha chain variable domain of TCR clone 146550 (TRAV3, TRAJ21)
CAVGNSNKFYF

SEQ ID NO: 293100 - protein, 14 aa, Homo sapiens
  CDR3 for beta chain variable domain of TCR clone 146550 (TRBV29-1, TRBJ2-2)
CSGRGSVNTGELFV

SEQ ID NO: 293101 - protein, 16 aa, Homo sapiens
  CDR3 for alpha chain variable domain of TCR clone 146551 (TRAV3, TRAJ32)
CAVRENYGGATNKLIF

SEQ ID NO: 293102 - protein, 12 aa, Homo sapiens
  CDR3 for beta chain variable domain of TCR clone 146551 (TRBV20-1, TRBJ1-2)
CSVTPEGYGYSF

SEQ ID NO: 293103 - protein, 17 aa, Homo sapiens
  CDR3 for alpha chain variable domain of TCR clone 146552 (TRAV3, TRAJ6)
CAVRDGPRAGGSYIPTF

SEQ ID NO: 293104 - protein, 19 aa, Homo sapiens
  CDR3 for beta chain variable domain of TCR clone 146552 (TRBV25-1, TRBJ2-2)
CAILVYRVDRGRKTGELFF

SEQ ID NO: 293105 - protein, 14 aa, Homo sapiens
  CDR3 for alpha chain variable domain of TCR clone 146553 (TRAV8-4, TRAJ16)
CAVSPVGRWPEAAL

SEQ ID NO: 293106 - protein, 15 aa, Homo sapiens
  CDR3 for beta chain variable domain of TCR clone 146553 (TRBV7-3, TRBJ1-6)
CASSLGRGAGSPLLF

SEQ ID NO: 293107 - protein, 15 aa, Homo sapiens
  CDR3 for alpha chain variable domain of TCR clone 146554 (TRAV13-1, TRAJ17)
CAASIERAAGNKLTF

SEQ ID NO: 293108 - protein, 13 aa, Homo sapiens
  CDR3 for beta chain variable domain of TCR clone 146554 (TRBV4-1, TRBJ2-2)
RQQPRVNTGELFF

SEQ ID NO: 293109 - protein, 18 aa, Homo sapiens
  CDR3 for alpha chain variable domain of TCR clone 146555 (TRAV21, TRAJ52)
CAVRPSPAGGTSYVKLTF

SEQ ID NO: 293110 - protein, 14 aa, Homo sapiens
  CDR3 for beta chain variable domain of TCR clone 146555 (TRBV6-1, TRBJ1-3)
CASVQGGGGNTIYF

SEQ ID NO: 293111 - protein, 14 aa, Homo sapiens
  CDR3 for alpha chain variable domain of TCR clone 146556 (TRAV17, TRAJ56)
CATVPAGANSKLTF

SEQ ID NO: 293112 - protein, 13 aa, Homo sapiens
  CDR3 for beta chain variable domain of TCR clone 146556 (TRBV12-4, TRBJ2-2)
CASSNTGSGELFF

SEQ ID NO: 293113 - protein, 14 aa, Homo sapiens
  CDR3 for alpha chain variable domain of TCR clone 146557 (TRAV2, TRAJ16)
CAVERGSDGQKLLF

SEQ ID NO: 293114 - protein, 12 aa, Homo sapiens
  CDR3 for beta chain variable domain of TCR clone 146557 (TRBV6-5, TRBJ2-5)
CASYIYGYEQYF

SEQ ID NO: 293115 - protein, 16 aa, Homo sapiens
  CDR3 for alpha chain variable domain of TCR clone 146558 (TRAV4, TRAJ9)
CRVGDPNRPGGFKTIF

SEQ ID NO: 293116 - protein, 16 aa, Homo sapiens
  CDR3 for beta chain variable domain of TCR clone 146558 (TRBV28, TRBJ1-4)
CASSPPYRGRSEKLFF

SEQ ID NO: 293117 - protein, 14 aa, Homo sapiens
  CDR3 for alpha chain variable domain of TCR clone 146559 (TRAV25, TRAJ27)
CAGPGNTNAGKSTF

SEQ ID NO: 293118 - protein, 16 aa, Homo sapiens
  CDR3 for beta chain variable domain of TCR clone 146559 (TRBV4-1, TRBJ2-6)
CASSQDGGPGANVLTV

SEQ ID NO: 293119 - protein, 15 aa, Homo sapiens
  CDR3 for alpha chain variable domain of TCR clone 146560 (TRAV38-1, TRAJ57)
CAFMDSQGGSEKLVF

SEQ ID NO: 293120 - protein, 12 aa, Homo sapiens
  CDR3 for beta chain variable domain of TCR clone 146560 (TRBV19, TRBJ2-1)
CGSSMQDTEQFF

SEQ ID NO: 293121 - protein, 13 aa, Homo sapiens
  CDR3 for alpha chain variable domain of TCR clone 146561 (TRAV12-1, TRAJ33)
CGDAPDSNYQLIW

SEQ ID NO: 293122 - protein, 15 aa, Homo sapiens
  CDR3 for beta chain variable domain of TCR clone 146561 (TRBV11-2, TRBJ2-2)
CASRGLAANTGELFF

SEQ ID NO: 293123 - protein, 14 aa, Homo sapiens
  CDR3 for alpha chain variable domain of TCR clone 146562 (TRAV21, TRAJ35)
CAVMPIGFGNVLHC

SEQ ID NO: 293124 - protein, 12 aa, Homo sapiens
  CDR3 for beta chain variable domain of TCR clone 146562 (TRBV5-1, TRBJ1-1)
CASSQGNTEAFF

SEQ ID NO: 293125 - protein, 14 aa, Homo sapiens
  CDR3 for alpha chain variable domain of TCR clone 146563 (TRAV12-1, TRAJ17)
CVVNYKAAGNKLTF

SEQ ID NO: 293126 - protein, 17 aa, Homo sapiens
  CDR3 for beta chain variable domain of TCR clone 146563 (TRBV20-1, TRBJ2-1)
CSSSSSGLAGPYNEQFF

SEQ ID NO: 293127 - protein, 14 aa, Homo sapiens
  CDR3 for alpha chain variable domain of TCR clone 146564 (TRAV12-2, TRAJ27)
CAVLVGPMQANQPL

SEQ ID NO: 293128 - protein, 17 aa, Homo sapiens
  CDR3 for beta chain variable domain of TCR clone 146564 (TRBV13, TRBJ2-3)
CASSLSRVAGGRNTQYF

SEQ ID NO: 293129 - protein, 13 aa, Homo sapiens
  CDR3 for alpha chain variable domain of TCR clone 146565 (TRAV13-1, TRAJ43)
CAASKNNNKEMRF

SEQ ID NO: 293130 - protein, 14 aa, Homo sapiens
  CDR3 for beta chain variable domain of TCR clone 146565 (TRBV14, TRBJ2-1)
CASSQVQGRGEQFL

SEQ ID NO: 293131 - protein, 13 aa, Homo sapiens
  CDR3 for alpha chain variable domain of TCR clone 146566 (TRAV17, TRAJ54)
CAAGIQGAQKLVF

SEQ ID NO: 293132 - protein, 16 aa, Homo sapiens
  CDR3 for beta chain variable domain of TCR clone 146566 (TRBV7-9, TRBJ2-1)
CTSSDVAGGSYNEQFF

SEQ ID NO: 293133 - protein, 14 aa, Homo sapiens
  CDR3 for alpha chain variable domain of TCR clone 146567 (TRAV1-2, TRAJ16)
CAVNRFSDGQKLLF

SEQ ID NO: 293134 - protein, 15 aa, Homo sapiens
  CDR3 for beta chain variable domain of TCR clone 146567 (TRBV5-5, TRBJ2-1)
CASSPEAETYNEQFF

SEQ ID NO: 293135 - protein, 15 aa, Homo sapiens
  CDR3 for alpha chain variable domain of TCR clone 146568 (TRAV12-1, TRAJ45)
CVVLSGGGGADGLTL

SEQ ID NO: 293136 - protein, 16 aa, Homo sapiens
  CDR3 for beta chain variable domain of TCR clone 146568 (TRBV6-5, TRBJ2-1)
CASSETLAGHYNEQFF

SEQ ID NO: 293137 - protein, 14 aa, Homo sapiens
  CDR3 for alpha chain variable domain of TCR clone 146569 (TRAV26-1, TRAJ38)
CIADNAGNNSKLIW

SEQ ID NO: 293138 - protein, 13 aa, Homo sapiens
  CDR3 for beta chain variable domain of TCR clone 146569 (TRBV15, TRBJ1-6)
CATSGGLNSPLHF

SEQ ID NO: 293139 - protein, 14 aa, Homo sapiens
  CDR3 for alpha chain variable domain of TCR clone 146570 (TRAV35, TRAJ13)
CAGSPSGGYQKVTF

SEQ ID NO: 293140 - protein, 14 aa, Homo sapiens
  CDR3 for beta chain variable domain of TCR clone 146570 (TRBV7-9, TRBJ2-2)
CASSGLADTGELFF

SEQ ID NO: 293141 - protein, 12 aa, Homo sapiens
  CDR3 for alpha chain variable domain of TCR clone 146571 (TRAV21, TRAJ23)
CAVMLQGGKLIF

SEQ ID NO: 293142 - protein, 13 aa, Homo sapiens
  CDR3 for beta chain variable domain of TCR clone 146571 (TRBV25-1, TRBJ2-5)
CASSESGRETQYF

SEQ ID NO: 293143 - protein, 13 aa, Homo sapiens
  CDR3 for alpha chain variable domain of TCR clone 146572 (TRAV16, TRAJ22)
SAMLAGSARQLTF

SEQ ID NO: 293144 - protein, 11 aa, Homo sapiens
  CDR3 for beta chain variable domain of TCR clone 146572 (TRBV7-8, TRBJ2-7)
CASSLSLEQYF

SEQ ID NO: 293145 - protein, 13 aa, Homo sapiens
  CDR3 for alpha chain variable domain of TCR clone 146573 (TRAV1-2, TRAJ9)
CAALNTGGFKTIF

SEQ ID NO: 293146 - protein, 14 aa, Homo sapiens
  CDR3 for beta chain variable domain of TCR clone 146573 (TRBV7-2, TRBJ2-3)
CASSLAEASDTQYF

SEQ ID NO: 293147 - protein, 14 aa, Homo sapiens
  CDR3 for alpha chain variable domain of TCR clone 146574 (TRAV26-1, TRAJ22)
CIVRVYGSARQLTF

SEQ ID NO: 293148 - protein, 13 aa, Homo sapiens
  CDR3 for beta chain variable domain of TCR clone 146574 (TRBV13, TRBJ2-1)
CASILGGRGEQFF

SEQ ID NO: 293149 - protein, 13 aa, Homo sapiens
  CDR3 for alpha chain variable domain of TCR clone 146575 (TRAV8-3, TRAJ48)
CAVVPFGNENLTF

SEQ ID NO: 293150 - protein, 15 aa, Homo sapiens
  CDR3 for beta chain variable domain of TCR clone 146575 (TRBV11-2, TRBJ2-1)
CASSSPSTRYNEEFF

SEQ ID NO: 293151 - protein, 14 aa, Homo sapiens
  CDR3 for alpha chain variable domain of TCR clone 146576 (TRAV17, TRAJ22)
CATVLSGSARPLTF

SEQ ID NO: 293152 - protein, 14 aa, Homo sapiens
  CDR3 for beta chain variable domain of TCR clone 146576 (TRBV19, TRBJ2-1)
CASPTFVLSGEQFF

SEQ ID NO: 293153 - protein, 16 aa, Homo sapiens
  CDR3 for alpha chain variable domain of TCR clone 146577 (TRAV27, TRAJ52)
CAGAGAGGTSYGKLTI

SEQ ID NO: 293154 - protein, 17 aa, Homo sapiens
  CDR3 for beta chain variable domain of TCR clone 146577 (TRBV24-1, TRBJ2-3)
CATSDLPSGEDTDTQYF

SEQ ID NO: 293155 - protein, 15 aa, Homo sapiens
  CDR3 for alpha chain variable domain of TCR clone 146578 (TRAV1-2, TRAJ18)
CAVRGEAQPWGGYSL

SEQ ID NO: 293156 - protein, 19 aa, Homo sapiens
  CDR3 for beta chain variable domain of TCR clone 146578 (TRBV6-3, TRBJ1-2)
CASSYSKGRTGPPNYGYTF

SEQ ID NO: 293157 - protein, 15 aa, Homo sapiens
  CDR3 for alpha chain variable domain of TCR clone 146579 (TRAV26-1, TRAJ15)
CIVRMANQSGTALIF

SEQ ID NO: 293158 - protein, 15 aa, Homo sapiens
  CDR3 for beta chain variable domain of TCR clone 146579 (TRBV20-1, TRBJ1-1)
CSARKAETSNTEAFF

SEQ ID NO: 293159 - protein, 12 aa, Homo sapiens
  CDR3 for alpha chain variable domain of TCR clone 146580 (TRAV3, TRAJ43)
CAVRDPNNDMRF

SEQ ID NO: 293160 - protein, 13 aa, Homo sapiens
  CDR3 for beta chain variable domain of TCR clone 146580 (TRBV27, TRBJ2-1)
CASRTLGVGEQFF

SEQ ID NO: 293161 - protein, 11 aa, Homo sapiens
  CDR3 for alpha chain variable domain of TCR clone 146581 (TRAV13-1, TRAJ39)
CASHAGNMLTF

SEQ ID NO: 293162 - protein, 16 aa, Homo sapiens
  CDR3 for beta chain variable domain of TCR clone 146581 (TRBV5-1, TRBJ2-2)
CASSLGGTGSTGELFF

SEQ ID NO: 293163 - protein, 14 aa, Homo sapiens
  CDR3 for alpha chain variable domain of TCR clone 146582 (TRAV1-2, TRAJ8)
CAVKEDTGFQKLVF

SEQ ID NO: 293164 - protein, 14 aa, Homo sapiens
  CDR3 for beta chain variable domain of TCR clone 146582 (TRBV19, TRBJ2-1)
CASPTFVLSGEQFF

SEQ ID NO: 293165 - protein, 14 aa, Homo sapiens
  CDR3 for alpha chain variable domain of TCR clone 146583 (TRAV12-2, TRAJ45)
CALPERGGADGLTF

SEQ ID NO: 293166 - protein, 11 aa, Homo sapiens
  CDR3 for beta chain variable domain of TCR clone 146583 (TRBV12-4, TRBJ2-3)
CASTATDTQYF

SEQ ID NO: 293167 - protein, 12 aa, Homo sapiens
  CDR3 for alpha chain variable domain of TCR clone 146584 (TRAV35, TRAJ31)
CAAASNNARLMF

SEQ ID NO: 293168 - protein, 14 aa, Homo sapiens
  CDR3 for beta chain variable domain of TCR clone 146584 (TRBV2, TRBJ2-2)
CASSLFGGNGEMFF

SEQ ID NO: 293169 - protein, 13 aa, Homo sapiens
  CDR3 for alpha chain variable domain of TCR clone 146585 (TRAV13-2, TRAJ53)
CAENMGSNYKLTF

SEQ ID NO: 293170 - protein, 12 aa, Homo sapiens
  CDR3 for beta chain variable domain of TCR clone 146585 (TRBV24-1, TRBJ1-1)
CATLYPDTEAFF

SEQ ID NO: 293171 - protein, 14 aa, Homo sapiens
  CDR3 for alpha chain variable domain of TCR clone 146586 (TRAV1-2, TRAJ16)
CAVNRFSDGQKLLL

SEQ ID NO: 293172 - protein, 14 aa, Homo sapiens
  CDR3 for beta chain variable domain of TCR clone 146586 (TRBV7-9, TRBJ2-2)
CASSLGHRTGELFF

SEQ ID NO: 293173 - protein, 15 aa, Homo sapiens
  CDR3 for alpha chain variable domain of TCR clone 146587 (TRAV26-1, TRAJ23)
CIVRVAGYQGGKLIF

SEQ ID NO: 293174 - protein, 15 aa, Homo sapiens
  CDR3 for beta chain variable domain of TCR clone 146587 (TRBV7-3, TRBJ2-2)
CASSETGQGTGELFF

SEQ ID NO: 293175 - protein, 15 aa, Homo sapiens
  CDR3 for alpha chain variable domain of TCR clone 146588 (TRAV8-4, TRAJ10)
CAVSDQMGGGNKLTS

SEQ ID NO: 293176 - protein, 13 aa, Homo sapiens
  CDR3 for beta chain variable domain of TCR clone 146588 (TRBV14, TRBJ2-7)
CASSQDRRYEQYF

SEQ ID NO: 293177 - protein, 15 aa, Homo sapiens
  CDR3 for alpha chain variable domain of TCR clone 146589 (TRAV12-3, TRAJ6)
CAMSASTGGSYIPKF

SEQ ID NO: 293178 - protein, 16 aa, Homo sapiens
  CDR3 for beta chain variable domain of TCR clone 146589 (TRBV20-1, TRBJ1-2)
CSASMGQGVANYGYTF

SEQ ID NO: 293179 - protein, 13 aa, Homo sapiens
  CDR3 for alpha chain variable domain of TCR clone 146590 (TRAV17, TRAJ22)
CAHHSGSARQLTF

SEQ ID NO: 293180 - protein, 14 aa, Homo sapiens
  CDR3 for beta chain variable domain of TCR clone 146590 (TRBV16, TRBJ1-1)
CASSQAGPNTEAYF

SEQ ID NO: 293181 - protein, 14 aa, Homo sapiens
  CDR3 for alpha chain variable domain of TCR clone 146591 (TRAV38-1, TRAJ40)
CAFRPTSGTYKYIF

SEQ ID NO: 293182 - protein, 14 aa, Homo sapiens
  CDR3 for beta chain variable domain of TCR clone 146591 (TRBV5-4, TRBJ1-1)
CASSLDSRRDEAFF

SEQ ID NO: 293183 - protein, 16 aa, Homo sapiens
  CDR3 for alpha chain variable domain of TCR clone 146592 (TRAV13-2, TRAJ37)
CAENIRGSSNTGKLIF

SEQ ID NO: 293184 - protein, 15 aa, Homo sapiens
  CDR3 for beta chain variable domain of TCR clone 146592 (TRBV5-1, TRBJ2-7)
CASSPQGRHLDEQYF

SEQ ID NO: 293185 - protein, 15 aa, Homo sapiens
  CDR3 for alpha chain variable domain of TCR clone 146593 (TRAV19, TRAJ9)
CALSEARTGGFKTIF

SEQ ID NO: 293186 - protein, 17 aa, Homo sapiens
  CDR3 for beta chain variable domain of TCR clone 146593 (TRBV28, TRBJ2-5)
CASSTPEGEALQETQYF

SEQ ID NO: 293187 - protein, 13 aa, Homo sapiens
  CDR3 for alpha chain variable domain of TCR clone 146594 (TRAV1-2, TRAJ9)
CAALNTGGFKTIF

SEQ ID NO: 293188 - protein, 17 aa, Homo sapiens
  CDR3 for beta chain variable domain of TCR clone 146594 (TRBV7-9, TRBJ2-6)
CASSFGAGYSGANVLTF

SEQ ID NO: 293189 - protein, 15 aa, Homo sapiens
  CDR3 for alpha chain variable domain of TCR clone 146595 (TRAV26-1, TRAJ29)
CIVRVEGSGNPPLGF

SEQ ID NO: 293190 - protein, 15 aa, Homo sapiens
  CDR3 for beta chain variable domain of TCR clone 146595 (TRBV7-9, TRBJ1-5)
CASSQGHQPNQPQHF

SEQ ID NO: 293191 - protein, 16 aa, Homo sapiens
  CDR3 for alpha chain variable domain of TCR clone 146596 (TRAV8-3, TRAJ10)
CAVGPGITGGGNKLTF

SEQ ID NO: 293192 - protein, 13 aa, Homo sapiens
  CDR3 for beta chain variable domain of TCR clone 146596 (TRBV18, TRBJ1-1)
CASSPGPSGEAFF

SEQ ID NO: 293193 - protein, 16 aa, Homo sapiens
  CDR3 for alpha chain variable domain of TCR clone 146597 (TRAV8-3, TRAJ13)
CAVGAYPSGGYHKVTF

SEQ ID NO: 293194 - protein, 14 aa, Homo sapiens
  CDR3 for beta chain variable domain of TCR clone 146597 (TRBV18, TRBJ2-5)
CASSPRASSETQYF

SEQ ID NO: 293195 - protein, 14 aa, Homo sapiens
  CDR3 for alpha chain variable domain of TCR clone 146598 (TRAV2, TRAJ37)
CAVDFTSNTGKIIF

SEQ ID NO: 293196 - protein, 14 aa, Homo sapiens
  CDR3 for beta chain variable domain of TCR clone 146598 (TRBV7-2, TRBJ2-7)
CASSPKTSFYEQYF

SEQ ID NO: 293197 - protein, 14 aa, Homo sapiens
  CDR3 for alpha chain variable domain of TCR clone 146599 (TRAV13-1, TRAJ20)
CAARPGSNDYKRSF

SEQ ID NO: 293198 - protein, 13 aa, Homo sapiens
  CDR3 for beta chain variable domain of TCR clone 146599 (TRBV20-1, TRBJ1-1)
CSAPPGGHTEAFF

SEQ ID NO: 293199 - protein, 13 aa, Homo sapiens
  CDR3 for alpha chain variable domain of TCR clone 146600 (TRAV12-2, TRAJ6)
CAVNVSRKLHTYI

SEQ ID NO: 293200 - protein, 12 aa, Homo sapiens
  CDR3 for beta chain variable domain of TCR clone 146600 (TRBV27, TRBJ2-1)
CASRGFYNEQFF

SEQ ID NO: 293201 - protein, 14 aa, Homo sapiens
  CDR3 for alpha chain variable domain of TCR clone 146601 (TRAV26-1, TRAJ38)
CIADNAGNNRKLIW

SEQ ID NO: 293202 - protein, 13 aa, Homo sapiens
  CDR3 for beta chain variable domain of TCR clone 146601 (TRBV20-1, TRBJ1-1)
CSARGGGNTEAFP

SEQ ID NO: 293203 - protein, 15 aa, Homo sapiens
  CDR3 for alpha chain variable domain of TCR clone 146602 (TRAV2, TRAJ22)
CAVPSRGGSARQLTF

SEQ ID NO: 293204 - protein, 16 aa, Homo sapiens
  CDR3 for beta chain variable domain of TCR clone 146602 (TRBV12-4, TRBJ1-5)
CASSRTVGGSNQPQHF

SEQ ID NO: 293205 - protein, 14 aa, Homo sapiens
  CDR3 for alpha chain variable domain of TCR clone 146603 (TRAV13-1, TRAJ45)
CAAIGGGGADGLTF

SEQ ID NO: 293206 - protein, 16 aa, Homo sapiens
  CDR3 for beta chain variable domain of TCR clone 146603 (TRBV7-2, TRBJ1-1)
CASSLGAGWTNTDAFF

SEQ ID NO: 293207 - protein, 12 aa, Homo sapiens
  CDR3 for alpha chain variable domain of TCR clone 146604 (TRAV13-2, TRAJ23)
CAERHGGGKLIF

SEQ ID NO: 293208 - protein, 16 aa, Homo sapiens
  CDR3 for beta chain variable domain of TCR clone 146604 (TRBV20-1, TRBJ1-4)
CSAPGQGLVTNEKLFF

SEQ ID NO: 293209 - protein, 14 aa, Homo sapiens
  CDR3 for alpha chain variable domain of TCR clone 146605 (TRAV12-1, TRAJ17)
CVVNYKAAGNELTF

SEQ ID NO: 293210 - protein, 14 aa, Homo sapiens
  CDR3 for beta chain variable domain of TCR clone 146605 (TRBV28, TRBJ2-1)
CASSPSTGYNEQFF

SEQ ID NO: 293211 - protein, 12 aa, Homo sapiens
  CDR3 for alpha chain variable domain of TCR clone 146606 (TRAV1-2, TRAJ29)
CAVPSGNTPLFF

SEQ ID NO: 293212 - protein, 12 aa, Homo sapiens
  CDR3 for beta chain variable domain of TCR clone 146606 (TRBV12-4, TRBJ2-7)
CASSLGGYEQYF

SEQ ID NO: 293213 - protein, 15 aa, Homo sapiens
  CDR3 for alpha chain variable domain of TCR clone 146607 (TRAV12-1, TRAJ5)
CVVNMLDTGRRALTF

SEQ ID NO: 293214 - protein, 12 aa, Homo sapiens
  CDR3 for beta chain variable domain of TCR clone 146607 (TRBV11-2, TRBJ2-2)
CASSLGGGELFF

SEQ ID NO: 293215 - protein, 14 aa, Homo sapiens
  CDR3 for alpha chain variable domain of TCR clone 146608 (TRAV23/DV6, TRAJ4)
CAASLSGGYNKLIF

SEQ ID NO: 293216 - protein, 11 aa, Homo sapiens
  CDR3 for beta chain variable domain of TCR clone 146608 (TRBV7-9, TRBJ2-3)
CASSPTDTQYF

SEQ ID NO: 293217 - protein, 15 aa, Homo sapiens
  CDR3 for alpha chain variable domain of TCR clone 146609 (TRAV3, TRAJ22)
CAVRDRGGSARQLTF

SEQ ID NO: 293218 - protein, 15 aa, Homo sapiens
  CDR3 for beta chain variable domain of TCR clone 146609 (TRBV20-1, TRBJ1-1)
CSASRGVTGNTESFF

SEQ ID NO: 293219 - protein, 14 aa, Homo sapiens
  CDR3 for alpha chain variable domain of TCR clone 146610 (TRAV13-1, TRAJ44)
CAAKATATASKLTF

SEQ ID NO: 293220 - protein, 17 aa, Homo sapiens
  CDR3 for beta chain variable domain of TCR clone 146610 (TRBV7-3, TRBJ2-3)
RASSLMKRMRGADTQYF

SEQ ID NO: 293221 - protein, 13 aa, Homo sapiens
  CDR3 for alpha chain variable domain of TCR clone 146611 (TRAV30, TRAJ34)
CGTVGNNTDKLIF

SEQ ID NO: 293222 - protein, 16 aa, Homo sapiens
  CDR3 for beta chain variable domain of TCR clone 146611 (TRBV7-9, TRBJ1-2)
CASSLGFCSGEDGYTF

SEQ ID NO: 293223 - protein, 12 aa, Homo sapiens
  CDR3 for alpha chain variable domain of TCR clone 146612 (TRAV23/DV6, TRAJ30)
CAASKGDDKIIF

SEQ ID NO: 293224 - protein, 12 aa, Homo sapiens
  CDR3 for beta chain variable domain of TCR clone 146612 (TRBV29-1, TRBJ2-1)
KGQESSYNEQFF

SEQ ID NO: 293225 - protein, 10 aa, Homo sapiens
  CDR3 for alpha chain variable domain of TCR clone 146613 (TRAV12-3, TRAJ49)
CAMNDDTFYF

SEQ ID NO: 293226 - protein, 13 aa, Homo sapiens
  CDR3 for beta chain variable domain of TCR clone 146613 (TRBV12-4, TRBJ1-1)
CASSPGTGFEAFF

SEQ ID NO: 293227 - protein, 17 aa, Homo sapiens
  CDR3 for alpha chain variable domain of TCR clone 146614 (TRAV4, TRAJ42)
CLVGVLNYGGSQGNLIF

SEQ ID NO: 293228 - protein, 12 aa, Homo sapiens
  CDR3 for beta chain variable domain of TCR clone 146614 (TRBV20-1, TRBJ2-1)
CSAQYTYNEPFF

SEQ ID NO: 293229 - protein, 15 aa, Homo sapiens
  CDR3 for alpha chain variable domain of TCR clone 146615 (TRAV1-1, TRAJ23)
CAVSEGPGRKAYLRT

SEQ ID NO: 293230 - protein, 14 aa, Homo sapiens
  CDR3 for beta chain variable domain of TCR clone 146615 (TRBV10-2, TRBJ2-1)
CASSEGTSEYEQFF

SEQ ID NO: 293231 - protein, 15 aa, Homo sapiens
  CDR3 for alpha chain variable domain of TCR clone 146616 (TRAV3, TRAJ22)
CAVRDRGGSARQLTF

SEQ ID NO: 293232 - protein, 16 aa, Homo sapiens
  CDR3 for beta chain variable domain of TCR clone 146616 (TRBV28, TRBJ2-7)
CASSLFFETGGPEQYF

SEQ ID NO: 293233 - protein, 11 aa, Homo sapiens
  CDR3 for alpha chain variable domain of TCR clone 146617 (TRAV17, TRAJ36)
CAPTGAHNLFF

SEQ ID NO: 293234 - protein, 17 aa, Homo sapiens
  CDR3 for beta chain variable domain of TCR clone 146617 (TRBV11-2, TRBJ2-1)
CASSLYPPGVEYNEQFF

SEQ ID NO: 293235 - protein, 17 aa, Homo sapiens
  CDR3 for alpha chain variable domain of TCR clone 146618 (TRAV26-1, TRAJ28)
CIVRVPDSGAGSYQLTF

SEQ ID NO: 293236 - protein, 19 aa, Homo sapiens
  CDR3 for beta chain variable domain of TCR clone 146618 (TRBV28, TRBJ2-7)
CASSPLPAGANPTSSTSGR

SEQ ID NO: 293237 - protein, 13 aa, Homo sapiens
  CDR3 for alpha chain variable domain of TCR clone 146619 (TRAV27, TRAJ41)
CAGEGNSGYALNF

SEQ ID NO: 293238 - protein, 12 aa, Homo sapiens
  CDR3 for beta chain variable domain of TCR clone 146619 (TRBV29-1, TRBJ1-3)
CSTRDSGNTIYF

SEQ ID NO: 293239 - protein, 15 aa, Homo sapiens
  CDR3 for alpha chain variable domain of TCR clone 146620 (TRAV3, TRAJ3)
CAVRDMSSSASKIIF

SEQ ID NO: 293240 - protein, 17 aa, Homo sapiens
  CDR3 for beta chain variable domain of TCR clone 146620 (TRBV24-1, TRBJ2-1)
CATSGVSTSGTYNEQFF

SEQ ID NO: 293241 - protein, 13 aa, Homo sapiens
  CDR3 for alpha chain variable domain of TCR clone 146621 (TRAV30, TRAJ24)
CGTVTDSWGKLQF

SEQ ID NO: 293242 - protein, 15 aa, Homo sapiens
  CDR3 for beta chain variable domain of TCR clone 146621 (TRBV25-1, TRBJ1-4)
CASSPGDSTSEKLFF

SEQ ID NO: 293243 - protein, 11 aa, Homo sapiens
  CDR3 for alpha chain variable domain of TCR clone 146622 (TRAV12-2, TRAJ43)
CSAYNNNDMRF

SEQ ID NO: 293244 - protein, 14 aa, Homo sapiens
  CDR3 for beta chain variable domain of TCR clone 146622 (TRBV7-8, TRBJ1-2)
CASSAGAAIYGYTF

SEQ ID NO: 293245 - protein, 15 aa, Homo sapiens
  CDR3 for alpha chain variable domain of TCR clone 146623 (TRAV3, TRAJ3)
CCERPRYSSASKIIF

SEQ ID NO: 293246 - protein, 16 aa, Homo sapiens
  CDR3 for beta chain variable domain of TCR clone 146623 (TRBV19, TRBJ1-5)
CASSIDRGGPRQPQHS

SEQ ID NO: 293247 - protein, 13 aa, Homo sapiens
  CDR3 for alpha chain variable domain of TCR clone 146624 (TRAV29/DV5, TRAJ31)
GAASRNNNARLMF

SEQ ID NO: 293248 - protein, 12 aa, Homo sapiens
  CDR3 for beta chain variable domain of TCR clone 146624 (TRBV14, TRBJ2-7)
CASSLYKDEQYF

SEQ ID NO: 293249 - protein, 13 aa, Homo sapiens
  CDR3 for alpha chain variable domain of TCR clone 146625 (TRAV8-3, TRAJ48)
CAVVRFGNEKLTF

SEQ ID NO: 293250 - protein, 16 aa, Homo sapiens
  CDR3 for beta chain variable domain of TCR clone 146625 (TRBV20-1, TRBJ2-5)
CSARDFASGIEETQYF

SEQ ID NO: 293251 - protein, 15 aa, Homo sapiens
  CDR3 for alpha chain variable domain of TCR clone 146626 (TRAV3, TRAJ13)
CAVRVYSGGYQKVTF

SEQ ID NO: 293252 - protein, 13 aa, Homo sapiens
  CDR3 for beta chain variable domain of TCR clone 146626 (TRBV28, TRBJ2-5)
CASSFAGGETQYF

SEQ ID NO: 293253 - protein, 11 aa, Homo sapiens
  CDR3 for alpha chain variable domain of TCR clone 146627 (TRAV12-2, TRAJ54)
CAVERAQKLVF

SEQ ID NO: 293254 - protein, 17 aa, Homo sapiens
  CDR3 for beta chain variable domain of TCR clone 146627 (TRBV18, TRBJ1-3)
CASSPYPTGPSGNTIYF

SEQ ID NO: 293255 - protein, 16 aa, Homo sapiens
  CDR3 for alpha chain variable domain of TCR clone 146628 (TRAV26-1, TRAJ53)
CIVRVAMGGSNYKLTF

SEQ ID NO: 293256 - protein, 12 aa, Homo sapiens
  CDR3 for beta chain variable domain of TCR clone 146628 (TRBV7-9, TRBJ1-5)
CASSPQGHPQHF

SEQ ID NO: 293257 - protein, 12 aa, Homo sapiens
  CDR3 for alpha chain variable domain of TCR clone 146629 (TRAV23/DV6, TRAJ53)
CAASKLGSGGSN

SEQ ID NO: 293258 - protein, 18 aa, Homo sapiens
  CDR3 for beta chain variable domain of TCR clone 146629 (TRBV11-2, TRBJ2-3)
CASSFGGASRGAPNTQYF

SEQ ID NO: 293259 - protein, 11 aa, Homo sapiens
  CDR3 for alpha chain variable domain of TCR clone 146630 (TRAV12-2, TRAJ31)
CAVTRWARLMF

SEQ ID NO: 293260 - protein, 15 aa, Homo sapiens
  CDR3 for beta chain variable domain of TCR clone 146630 (TRBV19, TRBJ2-7)
CASSIGGGLGNEQYF

SEQ ID NO: 293261 - protein, 21 aa, Homo sapiens
  CDR3 for alpha chain variable domain of TCR clone 146631 (TRAV1-1, TRAJ22)
CLLLLRCERSGSSGSARQLTF

SEQ ID NO: 293262 - protein, 14 aa, Homo sapiens
  CDR3 for beta chain variable domain of TCR clone 146631 (TRBV4-1, TRBJ2-2)
CASSQAVNTGELFF

SEQ ID NO: 293263 - protein, 12 aa, Homo sapiens
  CDR3 for alpha chain variable domain of TCR clone 146632 (TRAV12-1, TRAJ40)
CVFYSGTYKYIF

SEQ ID NO: 293264 - protein, 13 aa, Homo sapiens
  CDR3 for beta chain variable domain of TCR clone 146632 (TRBV7-9, TRBJ1-2)
CASSPKTGYGYTF

SEQ ID NO: 293265 - protein, 14 aa, Homo sapiens
  CDR3 for alpha chain variable domain of TCR clone 146633 (TRAV8-6, TRAJ54)
CAVSPALGAQKLVF

SEQ ID NO: 293266 - protein, 15 aa, Homo sapiens
  CDR3 for beta chain variable domain of TCR clone 146633 (TRBV28, TRBJ1-3)
CASGATGNSGNTIYF

SEQ ID NO: 293267 - protein, 12 aa, Homo sapiens
  CDR3 for alpha chain variable domain of TCR clone 146634 (TRAV26-1, TRAJ26)
CIVFIYGQNFVF

SEQ ID NO: 293268 - protein, 13 aa, Homo sapiens
  CDR3 for beta chain variable domain of TCR clone 146634 (TRBV27, TRBJ1-1)
CASSLSIGAKAFF

SEQ ID NO: 293269 - protein, 14 aa, Homo sapiens
  CDR3 for alpha chain variable domain of TCR clone 146635 (TRAV3, TRAJ28)
CAVRSGAGSYQLTF

SEQ ID NO: 293270 - protein, 16 aa, Homo sapiens
  CDR3 for beta chain variable domain of TCR clone 146635 (TRBV4-1, TRBJ2-7)
CASSQEWTSGPLEQYF

SEQ ID NO: 293271 - protein, 22 aa, Homo sapiens
  CDR3 for alpha chain variable domain of TCR clone 146636 (TRAV16, )
CALRTQIPDIQNPDPAVYQLRD

SEQ ID NO: 293272 - protein, 14 aa, Homo sapiens
  CDR3 for beta chain variable domain of TCR clone 146636 (TRBV19, TRBJ2-1)
CASPTFVLSGEQFF

SEQ ID NO: 293273 - protein, 13 aa, Homo sapiens
  CDR3 for alpha chain variable domain of TCR clone 146637 (TRAV1-2, TRAJ9)
CAALNTGGFKTIF

SEQ ID NO: 293274 - protein, 16 aa, Homo sapiens
  CDR3 for beta chain variable domain of TCR clone 146637 (TRBV6-1, TRBJ2-5)
CASSERTGGTWETQYF

SEQ ID NO: 293275 - protein, 16 aa, Homo sapiens
  CDR3 for alpha chain variable domain of TCR clone 146638 (TRAV14/DV4, TRAJ53)
CAMREGGGGSNYKLTF

SEQ ID NO: 293276 - protein, 16 aa, Homo sapiens
  CDR3 for beta chain variable domain of TCR clone 146638 (TRBV12-4, TRBJ1-5)
CASSRPVGGSNQPQHF

SEQ ID NO: 293277 - protein, 16 aa, Homo sapiens
  CDR3 for alpha chain variable domain of TCR clone 146639 (TRAV3, TRAJ3)
CAVRDRAKSSASRIIF

SEQ ID NO: 293278 - protein, 13 aa, Homo sapiens
  CDR3 for beta chain variable domain of TCR clone 146639 (TRBV10-3, TRBJ2-7)
CASKLAVNYEQYF

SEQ ID NO: 293279 - protein, 13 aa, Homo sapiens
  CDR3 for alpha chain variable domain of TCR clone 146640 (TRAV13-2, TRAJ30)
CAETSNRDDKIIF

SEQ ID NO: 293280 - protein, 13 aa, Homo sapiens
  CDR3 for beta chain variable domain of TCR clone 146640 (TRBV20-1, TRBJ1-1)
CSARGGGNTKAFF

SEQ ID NO: 293281 - protein, 14 aa, Homo sapiens
  CDR3 for alpha chain variable domain of TCR clone 146641 (TRAV12-1, TRAJ30)
CVPTGTNRDDKIIF

SEQ ID NO: 293282 - protein, 11 aa, Homo sapiens
  CDR3 for beta chain variable domain of TCR clone 146641 (TRBV4-1, TRBJ2-2)
CAIEHTGELFF

SEQ ID NO: 293283 - protein, 14 aa, Homo sapiens
  CDR3 for alpha chain variable domain of TCR clone 146642 (TRAV1-2, TRAJ16)
CAVNRFSDGQKLLF

SEQ ID NO: 293284 - protein, 20 aa, Homo sapiens
  CDR3 for beta chain variable domain of TCR clone 146642 (TRBV7-8, TRBJ2-2)
CASSHLFPGPTIHITGELFL

SEQ ID NO: 293285 - protein, 15 aa, Homo sapiens
  CDR3 for alpha chain variable domain of TCR clone 146643 (TRAV3, TRAJ5)
CAVRDLDPGRTALTF

SEQ ID NO: 293286 - protein, 13 aa, Homo sapiens
  CDR3 for beta chain variable domain of TCR clone 146643 (TRBV12-4, TRBJ2-7)
CASSPTETYEQYF

SEQ ID NO: 293287 - protein, 16 aa, Homo sapiens
  CDR3 for alpha chain variable domain of TCR clone 146644 (TRAV30, TRAJ24)
CGTEIVDADSWGKFQF

SEQ ID NO: 293288 - protein, 15 aa, Homo sapiens
  CDR3 for beta chain variable domain of TCR clone 146644 (TRBV11-3, TRBJ2-5)
CASSLRGRVQETQYF

SEQ ID NO: 293289 - protein, 13 aa, Homo sapiens
  CDR3 for alpha chain variable domain of TCR clone 146645 (TRAV13-1, TRAJ39)
CAASIWAGNMLTF

SEQ ID NO: 293290 - protein, 16 aa, Homo sapiens
  CDR3 for beta chain variable domain of TCR clone 146645 (TRBV13, TRBJ2-2)
CASSTRTGEHTGELFF

SEQ ID NO: 293291 - protein, 14 aa, Homo sapiens
  CDR3 for alpha chain variable domain of TCR clone 146646 (TRAV13-1, TRAJ13)
CAASRVGVYQKVTF

SEQ ID NO: 293292 - protein, 17 aa, Homo sapiens
  CDR3 for beta chain variable domain of TCR clone 146646 (TRBV15, TRBJ1-5)
CATSRAPPGTRNQPQHF

SEQ ID NO: 293293 - protein, 16 aa, Homo sapiens
  CDR3 for alpha chain variable domain of TCR clone 146647 (TRAV3, TRAJ21)
CAVRDIERGNFNKFYF

SEQ ID NO: 293294 - protein, 14 aa, Homo sapiens
  CDR3 for beta chain variable domain of TCR clone 146647 (TRBV4-1, TRBJ2-7)
CASSPVAGGDEQYF

SEQ ID NO: 293295 - protein, 12 aa, Homo sapiens
  CDR3 for alpha chain variable domain of TCR clone 146648 (TRAV8-3, TRAJ27)
CAVGVEGGKSTF

SEQ ID NO: 293296 - protein, 14 aa, Homo sapiens
  CDR3 for beta chain variable domain of TCR clone 146648 (TRBV2, TRBJ2-1)
CASRLIVGHDEQFF

SEQ ID NO: 293297 - protein, 16 aa, Homo sapiens
  CDR3 for alpha chain variable domain of TCR clone 146649 (TRAV38-2/DV8, TRAJ47)
CAYRSALMEYGNKLVF

SEQ ID NO: 293298 - protein, 14 aa, Homo sapiens
  CDR3 for beta chain variable domain of TCR clone 146649 (TRBV19, TRBJ2-7)
CASSIFAGTYEQYF

SEQ ID NO: 293299 - protein, 11 aa, Homo sapiens
  CDR3 for alpha chain variable domain of TCR clone 146650 (TRAV21, TRAJ9)
CAVPGGFKTIF

SEQ ID NO: 293300 - protein, 12 aa, Homo sapiens
  CDR3 for beta chain variable domain of TCR clone 146650 (TRBV20-1, TRBJ2-3)
CSARVGTDTQYF

SEQ ID NO: 293301 - protein, 12 aa, Homo sapiens
  CDR3 for alpha chain variable domain of TCR clone 146651 (TRAV12-3, TRAJ17)
CAMTLTGNKLTF

SEQ ID NO: 293302 - protein, 13 aa, Homo sapiens
  CDR3 for beta chain variable domain of TCR clone 146651 (TRBV5-1, TRBJ1-1)
CASSADWDPEAVF

SEQ ID NO: 293303 - protein, 15 aa, Homo sapiens
  CDR3 for alpha chain variable domain of TCR clone 146652 (TRAV21, TRAJ24)
CAARSSTDSWGKLQF

SEQ ID NO: 293304 - protein, 13 aa, Homo sapiens
  CDR3 for beta chain variable domain of TCR clone 146652 (TRBV14, TRBJ2-7)
CASSQDRRYEQYF

SEQ ID NO: 293305 - protein, 14 aa, Homo sapiens
  CDR3 for alpha chain variable domain of TCR clone 146653 (TRAV8-3, TRAJ39)
CAVESWNAGNMLTL

SEQ ID NO: 293306 - protein, 13 aa, Homo sapiens
  CDR3 for beta chain variable domain of TCR clone 146653 (TRBV7-9, TRBJ1-2)
CASSLKQNYGYTF

SEQ ID NO: 293307 - protein, 10 aa, Homo sapiens
  CDR3 for alpha chain variable domain of TCR clone 146654 (TRAV30, TRAJ48)
CGIGNEKLTF

SEQ ID NO: 293308 - protein, 17 aa, Homo sapiens
  CDR3 for beta chain variable domain of TCR clone 146654 (TRBV20-1, TRBJ2-1)
CSAPPRLAGTRYNEQFF

SEQ ID NO: 293309 - protein, 14 aa, Homo sapiens
  CDR3 for alpha chain variable domain of TCR clone 146655 (TRAV35, TRAJ53)
CAGNSGGSNYKLTF

SEQ ID NO: 293310 - protein, 15 aa, Homo sapiens
  CDR3 for beta chain variable domain of TCR clone 146655 (TRBV20-1, TRBJ2-7)
CSARDRVSGMDEQYF

SEQ ID NO: 293311 - protein, 13 aa, Homo sapiens
  CDR3 for alpha chain variable domain of TCR clone 146656 (TRAV2, TRAJ40)
CAVVTSGTYKYIF

SEQ ID NO: 293312 - protein, 13 aa, Homo sapiens
  CDR3 for beta chain variable domain of TCR clone 146656 (TRBV7-2, TRBJ2-2)
CASSSVRAGELFF

SEQ ID NO: 293313 - protein, 13 aa, Homo sapiens
  CDR3 for alpha chain variable domain of TCR clone 146657 (TRAV13-1, TRAJ39)
CSKYSNAGNMLTF

SEQ ID NO: 293314 - protein, 14 aa, Homo sapiens
  CDR3 for beta chain variable domain of TCR clone 146657 (TRBV18, TRBJ2-7)
CASSSRTLAYEQYF

SEQ ID NO: 293315 - protein, 14 aa, Homo sapiens
  CDR3 for alpha chain variable domain of TCR clone 146658 (TRAV30, TRAJ33)
CGTVAPRSNYQLIW

SEQ ID NO: 293316 - protein, 16 aa, Homo sapiens
  CDR3 for beta chain variable domain of TCR clone 146658 (TRBV28, TRBJ2-6)
CASSNRRGSGANVLTF

SEQ ID NO: 293317 - protein, 12 aa, Homo sapiens
  CDR3 for alpha chain variable domain of TCR clone 146659 (TRAV2, TRAJ43)
CAVEVDNNDMRF

SEQ ID NO: 293318 - protein, 17 aa, Homo sapiens
  CDR3 for beta chain variable domain of TCR clone 146659 (TRBV7-3, TRBJ2-3)
CASSLMKRMRGADTQYF

SEQ ID NO: 293319 - protein, 13 aa, Homo sapiens
  CDR3 for alpha chain variable domain of TCR clone 146660 (TRAV9-2, TRAJ53)
CALSGGSNYKLTV

SEQ ID NO: 293320 - protein, 17 aa, Homo sapiens
  CDR3 for beta chain variable domain of TCR clone 146660 (TRBV11-2, TRBJ2-1)
CASSLYPPGVEYNEQFF

SEQ ID NO: 293321 - protein, 13 aa, Homo sapiens
  CDR3 for alpha chain variable domain of TCR clone 146661 (TRAV17, TRAJ8)
CATGPVGFQKLVF

SEQ ID NO: 293322 - protein, 15 aa, Homo sapiens
  CDR3 for beta chain variable domain of TCR clone 146661 (TRBV20-1, TRBJ2-5)
CSAGRLPSAQETQYF

SEQ ID NO: 293323 - protein, 12 aa, Homo sapiens
  CDR3 for alpha chain variable domain of TCR clone 146662 (TRAV12-2, TRAJ10)
WGVTGGGNKLTF

SEQ ID NO: 293324 - protein, 15 aa, Homo sapiens
  CDR3 for beta chain variable domain of TCR clone 146662 (TRBV6-5, TRBJ1-1)
CASTLRLGSGTEAFF

SEQ ID NO: 293325 - protein, 13 aa, Homo sapiens
  CDR3 for alpha chain variable domain of TCR clone 146663 (TRAV2, TRAJ40)
CAVVTSGTYKYIF

SEQ ID NO: 293326 - protein, 14 aa, Homo sapiens
  CDR3 for beta chain variable domain of TCR clone 146663 (TRBV19, TRBJ2-1)
CSSLTFVLSGEQFF

SEQ ID NO: 293327 - protein, 15 aa, Homo sapiens
  CDR3 for alpha chain variable domain of TCR clone 146664 (TRAV4, TRAJ39)
CLVGPNNNAGNMLTF

SEQ ID NO: 293328 - protein, 12 aa, Homo sapiens
  CDR3 for beta chain variable domain of TCR clone 146664 (TRBV12-4, TRBJ2-7)
CASNPGVGEQYF

SEQ ID NO: 293329 - protein, 23 aa, Homo sapiens
  CDR3 for alpha chain variable domain of TCR clone 146665 (TRAV12-2, TRAJ36)
SLLIRDSQPSDSATLERANNLFF

SEQ ID NO: 293330 - protein, 19 aa, Homo sapiens
  CDR3 for beta chain variable domain of TCR clone 146665 (TRBV11-3, TRBJ2-2)
CASSTRPGAKTTNTGELFF

SEQ ID NO: 293331 - protein, 14 aa, Homo sapiens
  CDR3 for alpha chain variable domain of TCR clone 146666 (TRAV1-2, TRAJ8)
CAVREDTGFQKLVF

SEQ ID NO: 293332 - protein, 15 aa, Homo sapiens
  CDR3 for beta chain variable domain of TCR clone 146666 (TRBV7-2, TRBJ2-3)
CASSLVVRGPDTQYV

SEQ ID NO: 293333 - protein, 12 aa, Homo sapiens
  CDR3 for alpha chain variable domain of TCR clone 146667 (TRAV12-1, TRAJ40)
GVVYSGTYKYIF

SEQ ID NO: 293334 - protein, 18 aa, Homo sapiens
  CDR3 for beta chain variable domain of TCR clone 146667 (TRBV11-2, TRBJ2-3)
CASSLGRASRGAPNTQYF

SEQ ID NO: 293335 - protein, 19 aa, Homo sapiens
  CDR3 for alpha chain variable domain of TCR clone 146668 (TRAV26-1, TRAJ52)
CIVRAHRNACGTSSGKLTF

SEQ ID NO: 293336 - protein, 15 aa, Homo sapiens
  CDR3 for beta chain variable domain of TCR clone 146668 (TRBV29-1, TRBJ2-1)
CSGRDRKSSYNERFF

SEQ ID NO: 293337 - protein, 16 aa, Homo sapiens
  CDR3 for alpha chain variable domain of TCR clone 146669 (TRAV35, TRAJ28)
CAGRRGGWELPTHFRE

SEQ ID NO: 293338 - protein, 15 aa, Homo sapiens
  CDR3 for beta chain variable domain of TCR clone 146669 (TRBV5-1, TRBJ2-1)
CASSPPRAPYNEQFF

SEQ ID NO: 293339 - protein, 16 aa, Homo sapiens
  CDR3 for alpha chain variable domain of TCR clone 146670 (TRAV30, TRAJ24)
CGTEIVDADSWGKFQF

SEQ ID NO: 293340 - protein, 14 aa, Homo sapiens
  CDR3 for beta chain variable domain of TCR clone 146670 (TRBV12-5, TRBJ2-5)
CAGGSRTHQETQYV

SEQ ID NO: 293341 - protein, 14 aa, Homo sapiens
  CDR3 for alpha chain variable domain of TCR clone 146671 (TRAV8-3, TRAJ44)
CTVGNTGTASKLTF

SEQ ID NO: 293342 - protein, 15 aa, Homo sapiens
  CDR3 for beta chain variable domain of TCR clone 146671 (TRBV28, TRBJ2-7)
CASSFRGQGRYEQYF

SEQ ID NO: 293343 - protein, 14 aa, Homo sapiens
  CDR3 for alpha chain variable domain of TCR clone 146672 (TRAV34, TRAJ22)
CGADTSGSARQQTF

SEQ ID NO: 293344 - protein, 16 aa, Homo sapiens
  CDR3 for beta chain variable domain of TCR clone 146672 (TRBV2, TRBJ2-3)
CQHRGAPRRWTDTQYF

SEQ ID NO: 293345 - protein, 12 aa, Homo sapiens
  CDR3 for alpha chain variable domain of TCR clone 146673 (TRAV29/DV5, TRAJ43)
CAAPYNNNDMRF

SEQ ID NO: 293346 - protein, 17 aa, Homo sapiens
  CDR3 for beta chain variable domain of TCR clone 146673 (TRBV19, TRBJ2-6)
CASSTGQVFSGANDLSF

SEQ ID NO: 293347 - protein, 14 aa, Homo sapiens
  CDR3 for alpha chain variable domain of TCR clone 146674 (TRAV12-3, TRAJ31)
CAMRLRNNNARLMF

SEQ ID NO: 293348 - protein, 15 aa, Homo sapiens
  CDR3 for beta chain variable domain of TCR clone 146674 (TRBV5-7, TRBJ2-7)
CASSEPGSGWREQCF

SEQ ID NO: 293349 - protein, 14 aa, Homo sapiens
  CDR3 for alpha chain variable domain of TCR clone 146675 (TRAV12-3, TRAJ57)
CAMSAWGGSEKLVL

SEQ ID NO: 293350 - protein, 14 aa, Homo sapiens
  CDR3 for beta chain variable domain of TCR clone 146675 (TRBV18, TRBJ2-5)
CASSPGVSQETQYF

SEQ ID NO: 293351 - protein, 16 aa, Homo sapiens
  CDR3 for alpha chain variable domain of TCR clone 146676 (TRAV21, TRAJ22)
CAVKKVSSGSARQLTF

SEQ ID NO: 293352 - protein, 14 aa, Homo sapiens
  CDR3 for beta chain variable domain of TCR clone 146676 (TRBV19, TRBJ2-2)
CATTGHANTGELFF

SEQ ID NO: 293353 - protein, 14 aa, Homo sapiens
  CDR3 for alpha chain variable domain of TCR clone 146677 (TRAV12-2, TRAJ17)
CAVLFKAAGIKLTF

SEQ ID NO: 293354 - protein, 14 aa, Homo sapiens
  CDR3 for beta chain variable domain of TCR clone 146677 (TRBV15, TRBJ1-2)
CATSRDVDRVGYTF

SEQ ID NO: 293355 - protein, 15 aa, Homo sapiens
  CDR3 for alpha chain variable domain of TCR clone 146678 (TRAV8-4, TRAJ37)
CAVSRGSGNTGKLIF

SEQ ID NO: 293356 - protein, 16 aa, Homo sapiens
  CDR3 for beta chain variable domain of TCR clone 146678 (TRBV7-3, TRBJ2-3)
CASSFSGYRPEDTQYF

SEQ ID NO: 293357 - protein, 23 aa, Homo sapiens
  CDR3 for alpha chain variable domain of TCR clone 146679 (TRAV25, TRAJ39)
TATQTTDVGTYFWENNAGNMLTF

SEQ ID NO: 293358 - protein, 13 aa, Homo sapiens
  CDR3 for beta chain variable domain of TCR clone 146679 (TRBV5-5, TRBJ1-2)
CASSFWRGEDYTF

SEQ ID NO: 293359 - protein, 11 aa, Homo sapiens
  CDR3 for alpha chain variable domain of TCR clone 146680 (TRAV13-1, TRAJ43)
CAAHNNNDMRF

SEQ ID NO: 293360 - protein, 15 aa, Homo sapiens
  CDR3 for beta chain variable domain of TCR clone 146680 (TRBV6-1, TRBJ2-3)
CASSERGGITDTQYF

SEQ ID NO: 293361 - protein, 12 aa, Homo sapiens
  CDR3 for alpha chain variable domain of TCR clone 146681 (TRAV8-3, TRAJ20)
CAVGANDYKLSF

SEQ ID NO: 293362 - protein, 13 aa, Homo sapiens
  CDR3 for beta chain variable domain of TCR clone 146681 (TRBV19, TRBJ2-2)
CASSSKNTGELFF

SEQ ID NO: 293363 - protein, 12 aa, Homo sapiens
  CDR3 for alpha chain variable domain of TCR clone 146682 (TRAV27, TRAJ35)
CAGADFGNVLHC

SEQ ID NO: 293364 - protein, 13 aa, Homo sapiens
  CDR3 for beta chain variable domain of TCR clone 146682 (TRBV7-3, TRBJ1-1)
CASSQDWGAEAFY

SEQ ID NO: 293365 - protein, 15 aa, Homo sapiens
  CDR3 for alpha chain variable domain of TCR clone 146683 (TRAV38-1, TRAJ43)
CAFMKPNSGRHALWS

SEQ ID NO: 293366 - protein, 11 aa, Homo sapiens
  CDR3 for beta chain variable domain of TCR clone 146683 (TRBV7-9, TRBJ2-3)
CASSYTDTQYF

SEQ ID NO: 293367 - protein, 15 aa, Homo sapiens
  CDR3 for alpha chain variable domain of TCR clone 146684 (TRAV10, TRAJ6)
CVVSGGSGGSYIPTF

SEQ ID NO: 293368 - protein, 15 aa, Homo sapiens
  CDR3 for beta chain variable domain of TCR clone 146684 (TRBV7-9, TRBJ1-5)
CASSQGHQPNQPQHF

SEQ ID NO: 293369 - protein, 12 aa, Homo sapiens
  CDR3 for alpha chain variable domain of TCR clone 146685 (TRAV8-3, TRAJ4)
PAFSGGYNKLIF

SEQ ID NO: 293370 - protein, 14 aa, Homo sapiens
  CDR3 for beta chain variable domain of TCR clone 146685 (TRBV19, TRBJ2-1)
CASPTFVLSGEQFF

SEQ ID NO: 293371 - protein, 11 aa, Homo sapiens
  CDR3 for alpha chain variable domain of TCR clone 146686 (TRAV12-2, TRAJ29)
CAVTLRSPLFF

SEQ ID NO: 293372 - protein, 14 aa, Homo sapiens
  CDR3 for beta chain variable domain of TCR clone 146686 (TRBV9, TRBJ1-2)
CASSVSTRSYGYTF

SEQ ID NO: 293373 - protein, 16 aa, Homo sapiens
  CDR3 for alpha chain variable domain of TCR clone 146687 (TRAV30, TRAJ24)
CGTEIVDADSWGKFQV

SEQ ID NO: 293374 - protein, 17 aa, Homo sapiens
  CDR3 for beta chain variable domain of TCR clone 146687 (TRBV20-1, TRBJ2-1)
CSASSSGLAGSYNEQFF

SEQ ID NO: 293375 - protein, 15 aa, Homo sapiens
  CDR3 for alpha chain variable domain of TCR clone 146688 (TRAV8-6, TRAJ6)
CAVSGESGGGYIPTF

SEQ ID NO: 293376 - protein, 14 aa, Homo sapiens
  CDR3 for beta chain variable domain of TCR clone 146688 (TRBV9, TRBJ2-4)
CASSPSGTSGFQYF

SEQ ID NO: 293377 - protein, 14 aa, Homo sapiens
  CDR3 for alpha chain variable domain of TCR clone 146689 (TRAV9-2, TRAJ39)
CALYIYNAGNMLTF

SEQ ID NO: 293378 - protein, 17 aa, Homo sapiens
  CDR3 for beta chain variable domain of TCR clone 146689 (TRBV18, TRBJ1-5)
CASSPTMGQGTNQPQHF

SEQ ID NO: 293379 - protein, 15 aa, Homo sapiens
  CDR3 for alpha chain variable domain of TCR clone 146690 (TRAV12-3, TRAJ6)
CAMSATTGGSYIPTF

SEQ ID NO: 293380 - protein, 12 aa, Homo sapiens
  CDR3 for beta chain variable domain of TCR clone 146690 (TRBV14, TRBJ1-1)
CASSQLKGLAFF

SEQ ID NO: 293381 - protein, 14 aa, Homo sapiens
  CDR3 for alpha chain variable domain of TCR clone 146691 (TRAV38-1, TRAJ35)
CAFLTIGFGNVLLC

SEQ ID NO: 293382 - protein, 17 aa, Homo sapiens
  CDR3 for beta chain variable domain of TCR clone 146691 (TRBV28, TRBJ1-1)
CASSGDLRTESNTEAFF

SEQ ID NO: 293383 - protein, 17 aa, Homo sapiens
  CDR3 for alpha chain variable domain of TCR clone 146692 (TRAV3, TRAJ38)
CAVRDCLNAVNNRKLIW

SEQ ID NO: 293384 - protein, 14 aa, Homo sapiens
  CDR3 for beta chain variable domain of TCR clone 146692 (TRBV5-5, TRBJ1-5)
CASSGQGVDQPQHF

SEQ ID NO: 293385 - protein, 12 aa, Homo sapiens
  CDR3 for alpha chain variable domain of TCR clone 146693 (TRAV1-1, TRAJ8)
CAGGSGFQKLVF

SEQ ID NO: 293386 - protein, 15 aa, Homo sapiens
  CDR3 for beta chain variable domain of TCR clone 146693 (TRBV20-1, TRBJ2-7)
CSARDRVSGMDEQYF

SEQ ID NO: 293387 - protein, 15 aa, Homo sapiens
  CDR3 for alpha chain variable domain of TCR clone 146694 (TRAV23/DV6, TRAJ18)
CAASFRGSTLGRLSF

SEQ ID NO: 293388 - protein, 13 aa, Homo sapiens
  CDR3 for beta chain variable domain of TCR clone 146694 (TRBV28, TRBJ2-7)
CAILDRAGGEQYF

SEQ ID NO: 293389 - protein, 15 aa, Homo sapiens
  CDR3 for alpha chain variable domain of TCR clone 146695 (TRAV2, TRAJ9)
CAVEDRGTGGFKTIF

SEQ ID NO: 293390 - protein, 15 aa, Homo sapiens
  CDR3 for beta chain variable domain of TCR clone 146695 (TRBV24-1, TRBJ2-3)
CLSDPGTGATDTQYF

SEQ ID NO: 293391 - protein, 11 aa, Homo sapiens
  CDR3 for alpha chain variable domain of TCR clone 146696 (TRAV2, TRAJ13)
CASGGYQKVTF

SEQ ID NO: 293392 - protein, 16 aa, Homo sapiens
  CDR3 for beta chain variable domain of TCR clone 146696 (TRBV19, TRBJ2-1)
CSSSKAGPSSYNEQFF

SEQ ID NO: 293393 - protein, 12 aa, Homo sapiens
  CDR3 for alpha chain variable domain of TCR clone 146697 (TRAV36/DV7, TRAJ37)
CACYGNTGKLIF

SEQ ID NO: 293394 - protein, 13 aa, Homo sapiens
  CDR3 for beta chain variable domain of TCR clone 146697 (TRBV10-3, TRBJ2-7)
CASKLAVNYDQYF

SEQ ID NO: 293395 - protein, 12 aa, Homo sapiens
  CDR3 for alpha chain variable domain of TCR clone 146698 (TRAV12-3, TRAJ17)
CAMTLTGNKLTF

SEQ ID NO: 293396 - protein, 14 aa, Homo sapiens
  CDR3 for beta chain variable domain of TCR clone 146698 (TRBV28, TRBJ2-3)
CASRSRDSTDTQYF

SEQ ID NO: 293397 - protein, 11 aa, Homo sapiens
  CDR3 for alpha chain variable domain of TCR clone 146699 (TRAV17, TRAJ36)
CAPTGANNLFF

SEQ ID NO: 293398 - protein, 16 aa, Homo sapiens
  CDR3 for beta chain variable domain of TCR clone 146699 (TRBV11-2, TRBJ2-1)
CQQLIPPGVEYNEQFF

SEQ ID NO: 293399 - protein, 14 aa, Homo sapiens
  CDR3 for alpha chain variable domain of TCR clone 146700 (TRAV1-2, TRAJ8)
CAVREDTGFQKLVF

SEQ ID NO: 293400 - protein, 16 aa, Homo sapiens
  CDR3 for beta chain variable domain of TCR clone 146700 (TRBV3-1, TRBJ2-3)
CASSLGTSGGRDTQYF

SEQ ID NO: 293401 - protein, 13 aa, Homo sapiens
  CDR3 for alpha chain variable domain of TCR clone 146701 (TRAV17, TRAJ26)
CATVDNYGQNFVF

SEQ ID NO: 293402 - protein, 15 aa, Homo sapiens
  CDR3 for beta chain variable domain of TCR clone 146701 (TRBV20-1, TRBJ2-1)
CSARFSAGGLNEQFF

SEQ ID NO: 293403 - protein, 13 aa, Homo sapiens
  CDR3 for alpha chain variable domain of TCR clone 146702 (TRAV13-1, TRAJ5)
CAAEHTGRRALTF

SEQ ID NO: 293404 - protein, 13 aa, Homo sapiens
  CDR3 for beta chain variable domain of TCR clone 146702 (TRBV2, TRBJ1-4)
CTSNRGTNEKLFF

SEQ ID NO: 293405 - protein, 14 aa, Homo sapiens
  CDR3 for alpha chain variable domain of TCR clone 146703 (TRAV1-2, TRAJ6)
CAVSLSGGSYIPTF

SEQ ID NO: 293406 - protein, 15 aa, Homo sapiens
  CDR3 for beta chain variable domain of TCR clone 146703 (TRBV28, TRBJ2-7)
CARSPGGRGFYEQYF

SEQ ID NO: 293407 - protein, 23 aa, Homo sapiens
  CDR3 for alpha chain variable domain of TCR clone 146704 (TRAV10, TRAJ32)
CVVSPAVVLQTSSSLELAICLLF

SEQ ID NO: 293408 - protein, 14 aa, Homo sapiens
  CDR3 for beta chain variable domain of TCR clone 146704 (TRBV5-4, TRBJ2-2)
CASRLDGGTGELFF

SEQ ID NO: 293409 - protein, 11 aa, Homo sapiens
  CDR3 for alpha chain variable domain of TCR clone 146705 (TRAV17, TRAJ9)
CGFTGGFKTIF

SEQ ID NO: 293410 - protein, 14 aa, Homo sapiens
  CDR3 for beta chain variable domain of TCR clone 146705 (TRBV7-9, TRBJ2-2)
CASSLVQDIGELFF

SEQ ID NO: 293411 - protein, 13 aa, Homo sapiens
  CDR3 for alpha chain variable domain of TCR clone 146706 (TRAV16, TRAJ28)
CALTGAGSYQLTF

SEQ ID NO: 293412 - protein, 16 aa, Homo sapiens
  CDR3 for beta chain variable domain of TCR clone 146706 (TRBV12-4, TRBJ1-5)
CASSRPVGGSNQPQHF

SEQ ID NO: 293413 - protein, 14 aa, Homo sapiens
  CDR3 for alpha chain variable domain of TCR clone 146707 (TRAV1-2, TRAJ16)
CAVNRFSDGQKLLF

SEQ ID NO: 293414 - protein, 13 aa, Homo sapiens
  CDR3 for beta chain variable domain of TCR clone 146707 (TRBV19, TRBJ2-7)
CASSTSGSYEQCF

SEQ ID NO: 293415 - protein, 14 aa, Homo sapiens
  CDR3 for alpha chain variable domain of TCR clone 146708 (TRAV26-1, TRAJ54)
CIVRRTQGAQKLVF

SEQ ID NO: 293416 - protein, 20 aa, Homo sapiens
  CDR3 for beta chain variable domain of TCR clone 146708 (TRBV7-8, TRBJ2-3)
CASRNSGTSGKNWLAQIRSI

SEQ ID NO: 293417 - protein, 15 aa, Homo sapiens
  CDR3 for alpha chain variable domain of TCR clone 146709 (TRAV3, TRAJ13)
CAVRVYSGGYQNVTF

SEQ ID NO: 293418 - protein, 14 aa, Homo sapiens
  CDR3 for beta chain variable domain of TCR clone 146709 (TRBV6-1, TRBJ1-3)
CASVQGGGGNTIYF

SEQ ID NO: 293419 - protein, 14 aa, Homo sapiens
  CDR3 for alpha chain variable domain of TCR clone 146710 (TRAV17, TRAJ34)
CATDSLEGADKLIF

SEQ ID NO: 293420 - protein, 16 aa, Homo sapiens
  CDR3 for beta chain variable domain of TCR clone 146710 (TRBV25-1, TRBJ1-1)
CASSGDRDRGRIEAFF

SEQ ID NO: 293421 - protein, 13 aa, Homo sapiens
  CDR3 for alpha chain variable domain of TCR clone 146711 (TRAV8-3, TRAJ43)
CAVGPDNNNDMRF

SEQ ID NO: 293422 - protein, 19 aa, Homo sapiens
  CDR3 for beta chain variable domain of TCR clone 146711 (TRBV7-2, TRBJ2-3)
CASSLLSRNWGGGTDTQYF

SEQ ID NO: 293423 - protein, 14 aa, Homo sapiens
  CDR3 for alpha chain variable domain of TCR clone 146712 (TRAV1-2, TRAJ16)
CAVNRFSDGQKLLF

SEQ ID NO: 293424 - protein, 14 aa, Homo sapiens
  CDR3 for beta chain variable domain of TCR clone 146712 (TRBV14, TRBJ2-1)
CACSQVQGRGEQFF

SEQ ID NO: 293425 - protein, 14 aa, Homo sapiens
  CDR3 for alpha chain variable domain of TCR clone 146713 (TRAV13-2, TRAJ44)
CAEWRGGPASKLTF

SEQ ID NO: 293426 - protein, 13 aa, Homo sapiens
  CDR3 for beta chain variable domain of TCR clone 146713 (TRBV29-1, TRBJ2-1)
CSVDGGASDEQFF

SEQ ID NO: 293427 - protein, 12 aa, Homo sapiens
  CDR3 for alpha chain variable domain of TCR clone 146714 (TRAV21, TRAJ45)
CAAGGGADGLTF

SEQ ID NO: 293428 - protein, 14 aa, Homo sapiens
  CDR3 for beta chain variable domain of TCR clone 146714 (TRBV28, TRBJ2-5)
CASSLGDRAETQYF

SEQ ID NO: 293429 - protein, 14 aa, Homo sapiens
  CDR3 for alpha chain variable domain of TCR clone 146715 (TRAV3, TRAJ36)
CAVRDGTGANNLFF

SEQ ID NO: 293430 - protein, 16 aa, Homo sapiens
  CDR3 for beta chain variable domain of TCR clone 146715 (TRBV11-2, TRBJ2-7)
CASSTVTAPKTYEQYF

SEQ ID NO: 293431 - protein, 11 aa, Homo sapiens
  CDR3 for alpha chain variable domain of TCR clone 146716 (TRAV3, TRAJ21)
CAVGNFNKFYL

SEQ ID NO: 293432 - protein, 14 aa, Homo sapiens
  CDR3 for beta chain variable domain of TCR clone 146716 (TRBV12-4, TRBJ2-3)
CASTIAGWGDTQYF

SEQ ID NO: 293433 - protein, 18 aa, Homo sapiens
  CDR3 for alpha chain variable domain of TCR clone 146717 (TRAV21, TRAJ52)
CAVRPSPAGGTSYGKLTF

SEQ ID NO: 293434 - protein, 17 aa, Homo sapiens
  CDR3 for beta chain variable domain of TCR clone 146717 (TRBV13, TRBJ2-3)
CASGLSMVAGGRNTQYF

SEQ ID NO: 293435 - protein, 16 aa, Homo sapiens
  CDR3 for alpha chain variable domain of TCR clone 146718 (TRAV3, TRAJ27)
CALRDPQGTNAGKSTF

SEQ ID NO: 293436 - protein, 17 aa, Homo sapiens
  CDR3 for beta chain variable domain of TCR clone 146718 (TRBV4-1, TRBJ2-7)
CASSQGRGLQTAYEQYF

SEQ ID NO: 293437 - protein, 16 aa, Homo sapiens
  CDR3 for alpha chain variable domain of TCR clone 146719 (TRAV3, TRAJ42)
CAVRDIEGGSQGNLIF

SEQ ID NO: 293438 - protein, 14 aa, Homo sapiens
  CDR3 for beta chain variable domain of TCR clone 146719 (TRBV18, TRBJ1-1)
CASSPPTGRTEALF

SEQ ID NO: 293439 - protein, 14 aa, Homo sapiens
  CDR3 for alpha chain variable domain of TCR clone 146720 (TRAV13-1, TRAJ44)
CAARATGTASKLTF

SEQ ID NO: 293440 - protein, 15 aa, Homo sapiens
  CDR3 for beta chain variable domain of TCR clone 146720 (TRBV10-3, TRBJ2-1)
CVISDVQDRAYEQFF

SEQ ID NO: 293441 - protein, 13 aa, Homo sapiens
  CDR3 for alpha chain variable domain of TCR clone 146721 (TRAV27, TRAJ57)
CAGLQGGSEKLVF

SEQ ID NO: 293442 - protein, 14 aa, Homo sapiens
  CDR3 for beta chain variable domain of TCR clone 146721 (TRBV20-1, TRBJ1-2)
CSGRKDGKAYGYTF

SEQ ID NO: 293443 - protein, 19 aa, Homo sapiens
  CDR3 for alpha chain variable domain of TCR clone 146722 (TRAV2, TRAJ20)
ILQVLEADAAVYRDCKLSF

SEQ ID NO: 293444 - protein, 16 aa, Homo sapiens
  CDR3 for beta chain variable domain of TCR clone 146722 (TRBV5-1, TRBJ2-5)
CASSLALLRAGETQYF

SEQ ID NO: 293445 - protein, 14 aa, Homo sapiens
  CDR3 for alpha chain variable domain of TCR clone 146723 (TRAV34, TRAJ44)
CGADGTGTASKLTF

SEQ ID NO: 293446 - protein, 20 aa, Homo sapiens
  CDR3 for beta chain variable domain of TCR clone 146723 (TRBV7-9, TRBJ1-5)
CISVSEAGQGAPYGNQPQHF

SEQ ID NO: 293447 - protein, 14 aa, Homo sapiens
  CDR3 for alpha chain variable domain of TCR clone 146724 (TRAV8-2, TRAJ4)
RVVSPSGVYNKLIF

SEQ ID NO: 293448 - protein, 15 aa, Homo sapiens
  CDR3 for beta chain variable domain of TCR clone 146724 (TRBV4-1, TRBJ1-4)
CASSDTGGTNEKLFF

SEQ ID NO: 293449 - protein, 15 aa, Homo sapiens
  CDR3 for alpha chain variable domain of TCR clone 146725 (TRAV3, TRAJ4)
CAVRDGTGGYNKLIF

SEQ ID NO: 293450 - protein, 15 aa, Homo sapiens
  CDR3 for beta chain variable domain of TCR clone 146725 (TRBV19, TRBJ1-6)
CASSTQGAVGSPLHF

SEQ ID NO: 293451 - protein, 12 aa, Homo sapiens
  CDR3 for alpha chain variable domain of TCR clone 146726 (TRAV3, TRAJ20)
CAVRDPDYKLSF

SEQ ID NO: 293452 - protein, 13 aa, Homo sapiens
  CDR3 for beta chain variable domain of TCR clone 146726 (TRBV12-4, TRBJ1-1)
CASSPGTGFEAFF

SEQ ID NO: 293453 - protein, 12 aa, Homo sapiens
  CDR3 for alpha chain variable domain of TCR clone 146727 (TRAV12-1, TRAJ23)
CVVNNQGGKLIF

SEQ ID NO: 293454 - protein, 16 aa, Homo sapiens
  CDR3 for beta chain variable domain of TCR clone 146727 (TRBV11-1, TRBJ2-7)
CASSAQTGTLSYGQYF

SEQ ID NO: 293455 - protein, 10 aa, Homo sapiens
  CDR3 for alpha chain variable domain of TCR clone 146728 (TRAV8-4, TRAJ43)
CAVSADDMRF

SEQ ID NO: 293456 - protein, 13 aa, Homo sapiens
  CDR3 for beta chain variable domain of TCR clone 146728 (TRBV12-4, TRBJ1-2)
CASSLRQGKGYTF

SEQ ID NO: 293457 - protein, 15 aa, Homo sapiens
  CDR3 for alpha chain variable domain of TCR clone 146729 (TRAV10, TRAJ6)
CVVRPRTGGSYIHTF

SEQ ID NO: 293458 - protein, 15 aa, Homo sapiens
  CDR3 for beta chain variable domain of TCR clone 146729 (TRBV20-1, TRBJ2-7)
CSARDRVSGMDEQYF

SEQ ID NO: 293459 - protein, 13 aa, Homo sapiens
  CDR3 for alpha chain variable domain of TCR clone 146730 (TRAV26-1, TRAJ30)
CIVRVESNDKIIF

SEQ ID NO: 293460 - protein, 15 aa, Homo sapiens
  CDR3 for beta chain variable domain of TCR clone 146730 (TRBV6-1, TRBJ2-3)
CASSERGGITETQYF

SEQ ID NO: 293461 - protein, 15 aa, Homo sapiens
  CDR3 for alpha chain variable domain of TCR clone 146731 (TRAV12-2, TRAJ53)
CAVNGGGGSNYKLTF

SEQ ID NO: 293462 - protein, 13 aa, Homo sapiens
  CDR3 for beta chain variable domain of TCR clone 146731 (TRBV2, TRBJ2-7)
CASSVGGSGEQYF

SEQ ID NO: 293463 - protein, 15 aa, Homo sapiens
  CDR3 for alpha chain variable domain of TCR clone 146732 (TRAV36/DV7, TRAJ53)
WEGENSGGSHYKLTF

SEQ ID NO: 293464 - protein, 15 aa, Homo sapiens
  CDR3 for beta chain variable domain of TCR clone 146732 (TRBV6-1, TRBJ2-5)
CASSEGWGIQETQYF

SEQ ID NO: 293465 - protein, 16 aa, Homo sapiens
  CDR3 for alpha chain variable domain of TCR clone 146733 (TRAV30, TRAJ24)
CGTEILDADSWGKFRF

SEQ ID NO: 293466 - protein, 14 aa, Homo sapiens
  CDR3 for beta chain variable domain of TCR clone 146733 (TRBV12-5, TRBJ2-5)
CASGSRTHQETQYF

SEQ ID NO: 293467 - protein, 14 aa, Homo sapiens
  CDR3 for alpha chain variable domain of TCR clone 146734 (TRAV12-2, TRAJ13)
CAVKKSGGYQKVTF

SEQ ID NO: 293468 - protein, 14 aa, Homo sapiens
  CDR3 for beta chain variable domain of TCR clone 146734 (TRBV5-5, TRBJ2-7)
CASSLGQGTYEQYF

SEQ ID NO: 293469 - protein, 14 aa, Homo sapiens
  CDR3 for alpha chain variable domain of TCR clone 146735 (TRAV12-2, TRAJ24)
CAVTPADSWGKLQF

SEQ ID NO: 293470 - protein, 15 aa, Homo sapiens
  CDR3 for beta chain variable domain of TCR clone 146735 (TRBV11-2, TRBJ2-2)
CASSSDRVNAGELFF

SEQ ID NO: 293471 - protein, 12 aa, Homo sapiens
  CDR3 for alpha chain variable domain of TCR clone 146736 (TRAV8-3, TRAJ26)
CAGDNYGQNFVF

SEQ ID NO: 293472 - protein, 15 aa, Homo sapiens
  CDR3 for beta chain variable domain of TCR clone 146736 (TRBV28, TRBJ2-1)
CASSIIAGGRSEQFF

SEQ ID NO: 293473 - protein, 14 aa, Homo sapiens
  CDR3 for alpha chain variable domain of TCR clone 146737 (TRAV26-1, TRAJ34)
CIVRVAYTTDQLIF

SEQ ID NO: 293474 - protein, 15 aa, Homo sapiens
  CDR3 for beta chain variable domain of TCR clone 146737 (TRBV20-1, TRBJ2-7)
CSARVPAAYFYEQYL

SEQ ID NO: 293475 - protein, 16 aa, Homo sapiens
  CDR3 for alpha chain variable domain of TCR clone 146738 (TRAV12-2, TRAJ56)
CAVRRVVTGANSKLTF

SEQ ID NO: 293476 - protein, 11 aa, Homo sapiens
  CDR3 for beta chain variable domain of TCR clone 146738 (TRBV3-1, TRBJ2-7)
CASSQVREQYF

SEQ ID NO: 293477 - protein, 13 aa, Homo sapiens
  CDR3 for alpha chain variable domain of TCR clone 146739 (TRAV23/DV6, TRAJ24)
CAASADSGGTLQF

SEQ ID NO: 293478 - protein, 12 aa, Homo sapiens
  CDR3 for beta chain variable domain of TCR clone 146739 (TRBV5-1, TRBJ2-7)
CASSDSTYEQYF

SEQ ID NO: 293479 - protein, 11 aa, Homo sapiens
  CDR3 for alpha chain variable domain of TCR clone 146740 (TRAV21, TRAJ48)
CAVDGNEKFTF

SEQ ID NO: 293480 - protein, 16 aa, Homo sapiens
  CDR3 for beta chain variable domain of TCR clone 146740 (TRBV12-4, TRBJ1-5)
CASSSGPRGSNQPQHF

SEQ ID NO: 293481 - protein, 14 aa, Homo sapiens
  CDR3 for alpha chain variable domain of TCR clone 146741 (TRAV1-2, TRAJ8)
CAVREDSGFQKLVF

SEQ ID NO: 293482 - protein, 15 aa, Homo sapiens
  CDR3 for beta chain variable domain of TCR clone 146741 (TRBV7-9, TRBJ1-4)
CASSARTGGNEKLFF

SEQ ID NO: 293483 - protein, 14 aa, Homo sapiens
  CDR3 for alpha chain variable domain of TCR clone 146742 (TRAV8-2, TRAJ4)
CVVSPSGGYNKLIF

SEQ ID NO: 293484 - protein, 14 aa, Homo sapiens
  CDR3 for beta chain variable domain of TCR clone 146742 (TRBV19, TRBJ2-5)
CASASSGIQETQYF

SEQ ID NO: 293485 - protein, 13 aa, Homo sapiens
  CDR3 for alpha chain variable domain of TCR clone 146743 (TRAV12-1, TRAJ40)
CVVPTSGTYKYIF

SEQ ID NO: 293486 - protein, 14 aa, Homo sapiens
  CDR3 for beta chain variable domain of TCR clone 146743 (TRBV7-3, TRBJ2-1)
CASSLAGGANEQFF

SEQ ID NO: 293487 - protein, 13 aa, Homo sapiens
  CDR3 for alpha chain variable domain of TCR clone 146744 (TRAV12-2, TRAJ12)
CAVNGDSSYKLIF

SEQ ID NO: 293488 - protein, 15 aa, Homo sapiens
  CDR3 for beta chain variable domain of TCR clone 146744 (TRBV7-3, TRBJ2-1)
CASSLAGAGADEQFF

SEQ ID NO: 293489 - protein, 10 aa, Homo sapiens
  CDR3 for alpha chain variable domain of TCR clone 146745 (TRAV26-1, TRAJ11)
CIPGYSTLTF

SEQ ID NO: 293490 - protein, 12 aa, Homo sapiens
  CDR3 for beta chain variable domain of TCR clone 146745 (TRBV20-1, TRBJ1-2)
CSASREDYGYTF

SEQ ID NO: 293491 - protein, 12 aa, Homo sapiens
  CDR3 for alpha chain variable domain of TCR clone 146746 (TRAV8-3, TRAJ20)
CAVGGGDYKLSF

SEQ ID NO: 293492 - protein, 16 aa, Homo sapiens
  CDR3 for beta chain variable domain of TCR clone 146746 (TRBV25-1, TRBJ1-1)
CASSGDRDRGRIEAFF

SEQ ID NO: 293493 - protein, 12 aa, Homo sapiens
  CDR3 for alpha chain variable domain of TCR clone 146747 (TRAV27, TRAJ35)
CAGADFGNVLHC

SEQ ID NO: 293494 - protein, 16 aa, Homo sapiens
  CDR3 for beta chain variable domain of TCR clone 146747 (TRBV6-1, TRBJ2-5)
CASSETLDRGAETQYF

SEQ ID NO: 293495 - protein, 14 aa, Homo sapiens
  CDR3 for alpha chain variable domain of TCR clone 146748 (TRAV26-1, TRAJ45)
CIEVTGGGADGLTF

SEQ ID NO: 293496 - protein, 13 aa, Homo sapiens
  CDR3 for beta chain variable domain of TCR clone 146748 (TRBV7-6, TRBJ1-2)
CASSLVVDFGYTF

SEQ ID NO: 293497 - protein, 18 aa, Homo sapiens
  CDR3 for alpha chain variable domain of TCR clone 146749 (TRAV23/DV6, TRAJ21)
CAASSGGGTTSTNFTLDV

SEQ ID NO: 293498 - protein, 11 aa, Homo sapiens
  CDR3 for beta chain variable domain of TCR clone 146749 (TRBV7-8, TRBJ2-7)
CASSLSLEQYF

SEQ ID NO: 293499 - protein, 14 aa, Homo sapiens
  CDR3 for alpha chain variable domain of TCR clone 146750 (TRAV12-1, TRAJ30)
CVVNIVGRDDKIIF

SEQ ID NO: 293500 - protein, 15 aa, Homo sapiens
  CDR3 for beta chain variable domain of TCR clone 146750 (TRBV18, TRBJ1-2)
CASSPSNTPNYGYTF

SEQ ID NO: 293501 - protein, 14 aa, Homo sapiens
  CDR3 for alpha chain variable domain of TCR clone 146751 (TRAV29/DV5, TRAJ49)
CAASLSNTGNQFYF

SEQ ID NO: 293502 - protein, 21 aa, Homo sapiens
  CDR3 for beta chain variable domain of TCR clone 146751 (TRBV9, TRBJ2-5)
WASRGRLAGGPEDPVLRARHA

SEQ ID NO: 293503 - protein, 10 aa, Homo sapiens
  CDR3 for alpha chain variable domain of TCR clone 146752 (TRAV16, TRAJ22)
SAMYLRQLTF

SEQ ID NO: 293504 - protein, 15 aa, Homo sapiens
  CDR3 for beta chain variable domain of TCR clone 146752 (TRBV7-9, TRBJ1-6)
CASSSPGCGNSPLLF

SEQ ID NO: 293505 - protein, 13 aa, Homo sapiens
  CDR3 for alpha chain variable domain of TCR clone 146753 (TRAV12-3, TRAJ33)
CAMSVNSNYQLIW

SEQ ID NO: 293506 - protein, 11 aa, Homo sapiens
  CDR3 for beta chain variable domain of TCR clone 146753 (TRBV7-9, TRBJ2-1)
CASSSQNEQFF

SEQ ID NO: 293507 - protein, 15 aa, Homo sapiens
  CDR3 for alpha chain variable domain of TCR clone 146754 (TRAV17, TRAJ45)
CATAYSGGGADGLTF

SEQ ID NO: 293508 - protein, 13 aa, Homo sapiens
  CDR3 for beta chain variable domain of TCR clone 146754 (TRBV11-2, TRBJ2-1)
CASSLDLVNEQFF

SEQ ID NO: 293509 - protein, 11 aa, Homo sapiens
  CDR3 for alpha chain variable domain of TCR clone 146755 (TRAV2, TRAJ13)
CASGGYRKVTF

SEQ ID NO: 293510 - protein, 14 aa, Homo sapiens
  CDR3 for beta chain variable domain of TCR clone 146755 (TRBV18, TRBJ2-3)
CASSGLADTDTQYF

SEQ ID NO: 293511 - protein, 13 aa, Homo sapiens
  CDR3 for alpha chain variable domain of TCR clone 146756 (TRAV12-3, TRAJ30)
CAMSAKWDDKIIF

SEQ ID NO: 293512 - protein, 16 aa, Homo sapiens
  CDR3 for beta chain variable domain of TCR clone 146756 (TRBV7-8, TRBJ2-4)
CASSAERTLAKNIQYF

SEQ ID NO: 293513 - protein, 14 aa, Homo sapiens
  CDR3 for alpha chain variable domain of TCR clone 146757 (TRAV29/DV5, TRAJ45)
CAASFRGGADGLSF

SEQ ID NO: 293514 - protein, 11 aa, Homo sapiens
  CDR3 for beta chain variable domain of TCR clone 146757 (TRBV11-2, TRBJ2-2)
CASSLPGELFF

SEQ ID NO: 293515 - protein, 13 aa, Homo sapiens
  CDR3 for alpha chain variable domain of TCR clone 146758 (TRAV13-2, TRAJ48)
CAEVNFGNEKLTF

SEQ ID NO: 293516 - protein, 15 aa, Homo sapiens
  CDR3 for beta chain variable domain of TCR clone 146758 (TRBV7-9, TRBJ1-6)
CASSSPGRGNSPLHF

SEQ ID NO: 293517 - protein, 15 aa, Homo sapiens
  CDR3 for alpha chain variable domain of TCR clone 146759 (TRAV25, TRAJ28)
CAGAYSGAGSYQLTF

SEQ ID NO: 293518 - protein, 16 aa, Homo sapiens
  CDR3 for beta chain variable domain of TCR clone 146759 (TRBV19, TRBJ2-3)
CASSILWGVRTETQYF

SEQ ID NO: 293519 - protein, 14 aa, Homo sapiens
  CDR3 for alpha chain variable domain of TCR clone 146760 (TRAV1-1, TRAJ23)
CAVSIYNQGGKLIL

SEQ ID NO: 293520 - protein, 15 aa, Homo sapiens
  CDR3 for beta chain variable domain of TCR clone 146760 (TRBV5-8, TRBJ2-2)
CASSLDRGATGELFF

SEQ ID NO: 293521 - protein, 14 aa, Homo sapiens
  CDR3 for alpha chain variable domain of TCR clone 146761 (TRAV2, TRAJ9)
CAVEDRCGGFKTIF

SEQ ID NO: 293522 - protein, 16 aa, Homo sapiens
  CDR3 for beta chain variable domain of TCR clone 146761 (TRBV7-3, TRBJ2-1)
CASSLEGYRSYNEQFF

SEQ ID NO: 293523 - protein, 16 aa, Homo sapiens
  CDR3 for alpha chain variable domain of TCR clone 146762 (TRAV10, TRAJ20)
PTSVWGAMSNDYKLSF

SEQ ID NO: 293524 - protein, 17 aa, Homo sapiens
  CDR3 for beta chain variable domain of TCR clone 146762 (TRBV20-1, TRBJ2-1)
CSAPPRLAGTRYNEQFF

SEQ ID NO: 293525 - protein, 13 aa, Homo sapiens
  CDR3 for alpha chain variable domain of TCR clone 146763 (TRAV13-1, TRAJ21)
CAASIYDFNKFYF

SEQ ID NO: 293526 - protein, 14 aa, Homo sapiens
  CDR3 for beta chain variable domain of TCR clone 146763 (TRBV19, TRBJ2-1)
CASPTFVLSGEQFF

SEQ ID NO: 293527 - protein, 12 aa, Homo sapiens
  CDR3 for alpha chain variable domain of TCR clone 146764 (TRAV21, TRAJ31)
CAVWGNNARLMF

SEQ ID NO: 293528 - protein, 14 aa, Homo sapiens
  CDR3 for beta chain variable domain of TCR clone 146764 (TRBV20-1, TRBJ1-1)
CSAQTRIGGTEAFF

SEQ ID NO: 293529 - protein, 15 aa, Homo sapiens
  CDR3 for alpha chain variable domain of TCR clone 146765 (TRAV4, TRAJ39)
CLVGPNNNAGNMLTF

SEQ ID NO: 293530 - protein, 15 aa, Homo sapiens
  CDR3 for beta chain variable domain of TCR clone 146765 (TRBV7-9, TRBJ1-6)
CASSSPGRGNSPLHV

SEQ ID NO: 293531 - protein, 13 aa, Homo sapiens
  CDR3 for alpha chain variable domain of TCR clone 146766 (TRAV25, TRAJ10)
CAGRMGGGNKLTF

SEQ ID NO: 293532 - protein, 15 aa, Homo sapiens
  CDR3 for beta chain variable domain of TCR clone 146766 (TRBV19, TRBJ2-1)
CASSSPGVPLDEQFF

SEQ ID NO: 293533 - protein, 16 aa, Homo sapiens
  CDR3 for alpha chain variable domain of TCR clone 146767 (TRAV12-2, TRAJ10)
CAVNRVLTGGGNTLTF

SEQ ID NO: 293534 - protein, 12 aa, Homo sapiens
  CDR3 for beta chain variable domain of TCR clone 146767 (TRBV28, TRBJ2-7)
CASSFSSYEQYF

SEQ ID NO: 293535 - protein, 12 aa, Homo sapiens
  CDR3 for alpha chain variable domain of TCR clone 146768 (TRAV13-2, TRAJ39)
GAESREGNMLTF

SEQ ID NO: 293536 - protein, 15 aa, Homo sapiens
  CDR3 for beta chain variable domain of TCR clone 146768 (TRBV10-2, TRBJ2-6)
CVSSEQGTGANVLTF

SEQ ID NO: 293537 - protein, 16 aa, Homo sapiens
  CDR3 for alpha chain variable domain of TCR clone 146769 (TRAV30, TRAJ24)
CGTAIVDADSWGKFQF

SEQ ID NO: 293538 - protein, 14 aa, Homo sapiens
  CDR3 for beta chain variable domain of TCR clone 146769 (TRBV20-1, TRBJ2-1)
CSAQIGGSANEQFF

SEQ ID NO: 293539 - protein, 17 aa, Homo sapiens
  CDR3 for alpha chain variable domain of TCR clone 146770 (TRAV13-1, TRAJ28)
CAASPPYSGAGSYPLTF

SEQ ID NO: 293540 - protein, 12 aa, Homo sapiens
  CDR3 for beta chain variable domain of TCR clone 146770 (TRBV11-2, TRBJ2-2)
CASSLPTGELFF

SEQ ID NO: 293541 - protein, 13 aa, Homo sapiens
  CDR3 for alpha chain variable domain of TCR clone 146771 (TRAV8-6, TRAJ21)
CAVSENNFNKFYF

SEQ ID NO: 293542 - protein, 13 aa, Homo sapiens
  CDR3 for beta chain variable domain of TCR clone 146771 (TRBV12-4, TRBJ1-1)
CASSPGTGFEAFF

SEQ ID NO: 293543 - protein, 15 aa, Homo sapiens
  CDR3 for alpha chain variable domain of TCR clone 146772 (TRAV12-1, TRAJ8)
CVVNVENTGFQKLVF

SEQ ID NO: 293544 - protein, 15 aa, Homo sapiens
  CDR3 for beta chain variable domain of TCR clone 146772 (TRBV20-1, TRBJ2-7)
CSAESGTSGAYEQYF

SEQ ID NO: 293545 - protein, 12 aa, Homo sapiens
  CDR3 for alpha chain variable domain of TCR clone 146773 (TRAV23/DV6, TRAJ30)
CAASKGDDKIIF

SEQ ID NO: 293546 - protein, 17 aa, Homo sapiens
  CDR3 for beta chain variable domain of TCR clone 146773 (TRBV13, TRBJ2-3)
GASSLSRVAGGRNTQYF

SEQ ID NO: 293547 - protein, 14 aa, Homo sapiens
  CDR3 for alpha chain variable domain of TCR clone 146774 (TRAV16, TRAJ39)
CALSKNNAGNMLTF

SEQ ID NO: 293548 - protein, 17 aa, Homo sapiens
  CDR3 for beta chain variable domain of TCR clone 146774 (TRBV23-1, TRBJ1-2)
CASSNTGGGLLWLRLRF

SEQ ID NO: 293549 - protein, 15 aa, Homo sapiens
  CDR3 for alpha chain variable domain of TCR clone 146775 (TRAV27, TRAJ50)
CAGVGRRTSYDKVIF

SEQ ID NO: 293550 - protein, 14 aa, Homo sapiens
  CDR3 for beta chain variable domain of TCR clone 146775 (TRBV7-2, TRBJ1-1)
CASSFYDLNTEAFF

SEQ ID NO: 293551 - protein, 14 aa, Homo sapiens
  CDR3 for alpha chain variable domain of TCR clone 146776 (TRAV12-2, TRAJ17)
CAVLFKAAGNKLTL

SEQ ID NO: 293552 - protein, 12 aa, Homo sapiens
  CDR3 for beta chain variable domain of TCR clone 146776 (TRBV29-1, TRBJ2-3)
CSVTGGADTQYF

SEQ ID NO: 293553 - protein, 18 aa, Homo sapiens
  CDR3 for alpha chain variable domain of TCR clone 146777 (TRAV13-1, TRAJ52)
CAAKNPNAGGTSYGKLTF

SEQ ID NO: 293554 - protein, 14 aa, Homo sapiens
  CDR3 for beta chain variable domain of TCR clone 146777 (TRBV13, TRBJ2-5)
CASSLELVGETQYF

SEQ ID NO: 293555 - protein, 14 aa, Homo sapiens
  CDR3 for alpha chain variable domain of TCR clone 146778 (TRAV1-2, TRAJ16)
CAVNRFSDGQKLLS

SEQ ID NO: 293556 - protein, 15 aa, Homo sapiens
  CDR3 for beta chain variable domain of TCR clone 146778 (TRBV20-1, TRBJ2-5)
CSASGTSGGGETQYF

SEQ ID NO: 293557 - protein, 15 aa, Homo sapiens
  CDR3 for alpha chain variable domain of TCR clone 146779 (TRAV14/DV4, TRAJ10)
CAMRELTGGGNKPTF

SEQ ID NO: 293558 - protein, 17 aa, Homo sapiens
  CDR3 for beta chain variable domain of TCR clone 146779 (TRBV15, TRBJ1-2)
CATSGREIDVVNYGYTF

SEQ ID NO: 293559 - protein, 12 aa, Homo sapiens
  CDR3 for alpha chain variable domain of TCR clone 146780 (TRAV13-2, TRAJ8)
CAPWLGFQKLAF

SEQ ID NO: 293560 - protein, 13 aa, Homo sapiens
  CDR3 for beta chain variable domain of TCR clone 146780 (TRBV24-1, TRBJ2-2)
CATSDWSTGELCF

SEQ ID NO: 293561 - protein, 12 aa, Homo sapiens
  CDR3 for alpha chain variable domain of TCR clone 146781 (TRAV23/DV6, TRAJ9)
CASKYWGFKTIF

SEQ ID NO: 293562 - protein, 14 aa, Homo sapiens
  CDR3 for beta chain variable domain of TCR clone 146781 (TRBV6-1, TRBJ2-7)
CASTRTGDYYEQYF

SEQ ID NO: 293563 - protein, 13 aa, Homo sapiens
  CDR3 for alpha chain variable domain of TCR clone 146782 (TRAV8-6, TRAJ8)
CAVSNTGFQKLVF

SEQ ID NO: 293564 - protein, 19 aa, Homo sapiens
  CDR3 for beta chain variable domain of TCR clone 146782 (TRBV19, TRBJ2-5)
CASSIGQVTDFFLGETQYF

SEQ ID NO: 293565 - protein, 13 aa, Homo sapiens
  CDR3 for alpha chain variable domain of TCR clone 146783 (TRAV12-1, TRAJ16)
CVVNGPDGQKLHF

SEQ ID NO: 293566 - protein, 13 aa, Homo sapiens
  CDR3 for beta chain variable domain of TCR clone 146783 (TRBV2, TRBJ1-1)
CARNPTGGFHAFF

SEQ ID NO: 293567 - protein, 13 aa, Homo sapiens
  CDR3 for alpha chain variable domain of TCR clone 146784 (TRAV8-3, TRAJ48)
RAVVPFGNEKLTF

SEQ ID NO: 293568 - protein, 12 aa, Homo sapiens
  CDR3 for beta chain variable domain of TCR clone 146784 (TRBV29-1, TRBJ2-3)
CSVTGGADTQYF

SEQ ID NO: 293569 - protein, 11 aa, Homo sapiens
  CDR3 for alpha chain variable domain of TCR clone 146785 (TRAV2, TRAJ21)
CAVFNFNKFYF

SEQ ID NO: 293570 - protein, 15 aa, Homo sapiens
  CDR3 for beta chain variable domain of TCR clone 146785 (TRBV4-1, TRBJ1-1)
CASSQEWGHYTEAFF

SEQ ID NO: 293571 - protein, 17 aa, Homo sapiens
  CDR3 for alpha chain variable domain of TCR clone 146786 (TRAV27, TRAJ18)
CAGLHRGRGSTLGRLYF

SEQ ID NO: 293572 - protein, 14 aa, Homo sapiens
  CDR3 for beta chain variable domain of TCR clone 146786 (TRBV20-1, TRBJ1-5)
CSARGRGSNQPQHL

SEQ ID NO: 293573 - protein, 12 aa, Homo sapiens
  CDR3 for alpha chain variable domain of TCR clone 146787 (TRAV1-2, TRAJ17)
CAVRAAGNKLTF

SEQ ID NO: 293574 - protein, 16 aa, Homo sapiens
  CDR3 for beta chain variable domain of TCR clone 146787 (TRBV20-1, TRBJ2-7)
CSAPGLAGSYSDEQYF

SEQ ID NO: 293575 - protein, 15 aa, Homo sapiens
  CDR3 for alpha chain variable domain of TCR clone 146788 (TRAV20, TRAJ53)
CAVQASGGSNYKLTF

SEQ ID NO: 293576 - protein, 11 aa, Homo sapiens
  CDR3 for beta chain variable domain of TCR clone 146788 (TRBV7-6, TRBJ2-5)
CQQLKQETQYF

SEQ ID NO: 293577 - protein, 12 aa, Homo sapiens
  CDR3 for alpha chain variable domain of TCR clone 146789 (TRAV12-3, TRAJ17)
CAMVLTGNKLTF

SEQ ID NO: 293578 - protein, 15 aa, Homo sapiens
  CDR3 for beta chain variable domain of TCR clone 146789 (TRBV20-1, TRBJ2-7)
CSARDRVSGMDEQYF

SEQ ID NO: 293579 - protein, 19 aa, Homo sapiens
  CDR3 for alpha chain variable domain of TCR clone 146790 (TRAV29/DV5, TRAJ49)
CSVLLCSKLTVDTGNQFNF

SEQ ID NO: 293580 - protein, 15 aa, Homo sapiens
  CDR3 for beta chain variable domain of TCR clone 146790 (TRBV4-3, TRBJ2-2)
CASSQGGTPTGELFF

SEQ ID NO: 293581 - protein, 16 aa, Homo sapiens
  CDR3 for alpha chain variable domain of TCR clone 146791 (TRAV3, TRAJ10)
CAVRDMRAGGGNKLTF

SEQ ID NO: 293582 - protein, 12 aa, Homo sapiens
  CDR3 for beta chain variable domain of TCR clone 146791 (TRBV14, TRBJ2-7)
CASSLYKDEQYF

SEQ ID NO: 293583 - protein, 17 aa, Homo sapiens
  CDR3 for alpha chain variable domain of TCR clone 146792 (TRAV4, TRAJ22)
CCVLLPRGSGSARQLTF

SEQ ID NO: 293584 - protein, 15 aa, Homo sapiens
  CDR3 for beta chain variable domain of TCR clone 146792 (TRBV7-9, TRBJ1-6)
CASSSPGRGNSPLHF

SEQ ID NO: 293585 - protein, 17 aa, Homo sapiens
  CDR3 for alpha chain variable domain of TCR clone 146793 (TRAV16, TRAJ58)
CITVLSNGETRGSRLTF

SEQ ID NO: 293586 - protein, 13 aa, Homo sapiens
  CDR3 for beta chain variable domain of TCR clone 146793 (TRBV20-1, TRBJ2-2)
CSASAAGTGELFF

SEQ ID NO: 293587 - protein, 13 aa, Homo sapiens
  CDR3 for alpha chain variable domain of TCR clone 146794 (TRAV2, TRAJ15)
CAVASQAGTALIF

SEQ ID NO: 293588 - protein, 17 aa, Homo sapiens
  CDR3 for beta chain variable domain of TCR clone 146794 (TRBV7-6, TRBJ2-5)
CASSSPQAGDPSETQYF

SEQ ID NO: 293589 - protein, 14 aa, Homo sapiens
  CDR3 for alpha chain variable domain of TCR clone 146795 (TRAV2, TRAJ33)
CAVEDEGSNYQLIW

SEQ ID NO: 293590 - protein, 15 aa, Homo sapiens
  CDR3 for beta chain variable domain of TCR clone 146795 (TRBV9, TRBJ2-3)
CASSEQGAGRDTQYF

SEQ ID NO: 293591 - protein, 12 aa, Homo sapiens
  CDR3 for alpha chain variable domain of TCR clone 146796 (TRAV23/DV6, TRAJ30)
CAASKGDDKIIF

SEQ ID NO: 293592 - protein, 13 aa, Homo sapiens
  CDR3 for beta chain variable domain of TCR clone 146796 (TRBV20-1, TRBJ2-7)
CSATHTSGYEQYF

SEQ ID NO: 293593 - protein, 12 aa, Homo sapiens
  CDR3 for alpha chain variable domain of TCR clone 146797 (TRAV23/DV6, TRAJ30)
CAASKGDDKIIF

SEQ ID NO: 293594 - protein, 15 aa, Homo sapiens
  CDR3 for beta chain variable domain of TCR clone 146797 (TRBV29-1, TRBJ2-1)
CSGRDRKSAYNEQFF

SEQ ID NO: 293595 - protein, 15 aa, Homo sapiens
  CDR3 for alpha chain variable domain of TCR clone 146798 (TRAV21, TRAJ43)
CAVRPSKAVFDDMRF

SEQ ID NO: 293596 - protein, 13 aa, Homo sapiens
  CDR3 for beta chain variable domain of TCR clone 146798 (TRBV7-7, TRBJ2-5)
CASSRSGQETQYF

SEQ ID NO: 293597 - protein, 14 aa, Homo sapiens
  CDR3 for alpha chain variable domain of TCR clone 146799 (TRAV38-1, TRAJ40)
CALRATSGTYKYIF

SEQ ID NO: 293598 - protein, 18 aa, Homo sapiens
  CDR3 for beta chain variable domain of TCR clone 146799 (TRBV7-9, TRBJ2-1)
CASSKTGFTTTGNNEQFF

SEQ ID NO: 293599 - protein, 15 aa, Homo sapiens
  CDR3 for alpha chain variable domain of TCR clone 146800 (TRAV27, TRAJ37)
CAGIHGASNTGKLIF

SEQ ID NO: 293600 - protein, 13 aa, Homo sapiens
  CDR3 for beta chain variable domain of TCR clone 146800 (TRBV19, TRBJ2-1)
CASSIRSSWEQFF

SEQ ID NO: 293601 - protein, 16 aa, Homo sapiens
  CDR3 for alpha chain variable domain of TCR clone 146801 (TRAV14/DV4, TRAJ54)
CAMREGRVQGAQKLVF

SEQ ID NO: 293602 - protein, 16 aa, Homo sapiens
  CDR3 for beta chain variable domain of TCR clone 146801 (TRBV7-6, TRBJ1-6)
CASSLSSRIGDSPLHF

SEQ ID NO: 293603 - protein, 14 aa, Homo sapiens
  CDR3 for alpha chain variable domain of TCR clone 146802 (TRAV12-3, TRAJ39)
SATYLSNAGNMLTF

SEQ ID NO: 293604 - protein, 13 aa, Homo sapiens
  CDR3 for beta chain variable domain of TCR clone 146802 (TRBV28, TRBJ1-2)
CASSPGSRNGYAF

SEQ ID NO: 293605 - protein, 13 aa, Homo sapiens
  CDR3 for alpha chain variable domain of TCR clone 146803 (TRAV8-6, TRAJ9)
CAVCDTGGFKTIF

SEQ ID NO: 293606 - protein, 14 aa, Homo sapiens
  CDR3 for beta chain variable domain of TCR clone 146803 (TRBV2, TRBJ2-1)
CASSEALIYNEQFF

SEQ ID NO: 293607 - protein, 12 aa, Homo sapiens
  CDR3 for alpha chain variable domain of TCR clone 146804 (TRAV8-2, TRAJ45)
CVQGGGADGRTF

SEQ ID NO: 293608 - protein, 15 aa, Homo sapiens
  CDR3 for beta chain variable domain of TCR clone 146804 (TRBV19, TRBJ1-1)
CARSIRRQMNTEAFF

SEQ ID NO: 293609 - protein, 13 aa, Homo sapiens
  CDR3 for alpha chain variable domain of TCR clone 146805 (TRAV20, TRAJ34)
CAVSSYNTDKLTF

SEQ ID NO: 293610 - protein, 13 aa, Homo sapiens
  CDR3 for beta chain variable domain of TCR clone 146805 (TRBV7-9, TRBJ1-2)
CASSLKQNYGYTF

SEQ ID NO: 293611 - protein, 15 aa, Homo sapiens
  CDR3 for alpha chain variable domain of TCR clone 146806 (TRAV12-2, TRAJ53)
CAVNGGGGSNYKLTF

SEQ ID NO: 293612 - protein, 15 aa, Homo sapiens
  CDR3 for beta chain variable domain of TCR clone 146806 (TRBV28, TRBJ2-1)
CASSIIAGGRSEQFL

SEQ ID NO: 293613 - protein, 12 aa, Homo sapiens
  CDR3 for alpha chain variable domain of TCR clone 146807 (TRAV29/DV5, TRAJ49)
CAATDTGNHFYF

SEQ ID NO: 293614 - protein, 12 aa, Homo sapiens
  CDR3 for beta chain variable domain of TCR clone 146807 (TRBV12-4, TRBJ2-7)
CASSLGGYEQYF

SEQ ID NO: 293615 - protein, 15 aa, Homo sapiens
  CDR3 for alpha chain variable domain of TCR clone 146808 (TRAV8-4, TRAJ49)
CAVSDKLNTGNQFYF

SEQ ID NO: 293616 - protein, 11 aa, Homo sapiens
  CDR3 for beta chain variable domain of TCR clone 146808 (TRBV7-2, TRBJ2-7)
CASSSGLWQYF

SEQ ID NO: 293617 - protein, 15 aa, Homo sapiens
  CDR3 for alpha chain variable domain of TCR clone 146809 (TRAV4, TRAJ26)
CLVGDMNNYGQNFVF

SEQ ID NO: 293618 - protein, 16 aa, Homo sapiens
  CDR3 for beta chain variable domain of TCR clone 146809 (TRBV28, TRBJ1-4)
CASSSKTGAANEKLFF

SEQ ID NO: 293619 - protein, 15 aa, Homo sapiens
  CDR3 for alpha chain variable domain of TCR clone 146810 (TRAV27, TRAJ38)
CAARRTAGNNRKLIW

SEQ ID NO: 293620 - protein, 14 aa, Homo sapiens
  CDR3 for beta chain variable domain of TCR clone 146810 (TRBV4-1, TRBJ2-2)
CASSQAVNTGELFF

SEQ ID NO: 293621 - protein, 12 aa, Homo sapiens
  CDR3 for alpha chain variable domain of TCR clone 146811 (TRAV23/DV6, TRAJ53)
CAASKPGSGGSN

SEQ ID NO: 293622 - protein, 14 aa, Homo sapiens
  CDR3 for beta chain variable domain of TCR clone 146811 (TRBV7-9, TRBJ2-3)
CASSLEQGTNTQYF

SEQ ID NO: 293623 - protein, 16 aa, Homo sapiens
  CDR3 for alpha chain variable domain of TCR clone 146812 (TRAV26-1, TRAJ37)
CIVRGDGSGNTGKLIF

SEQ ID NO: 293624 - protein, 17 aa, Homo sapiens
  CDR3 for beta chain variable domain of TCR clone 146812 (TRBV4-1, TRBJ2-7)
CASSRDPLGVRGGEQFF

SEQ ID NO: 293625 - protein, 15 aa, Homo sapiens
  CDR3 for alpha chain variable domain of TCR clone 146813 (TRAV38-1, TRAJ37)
CAFIFGSGNTGKLIF

SEQ ID NO: 293626 - protein, 14 aa, Homo sapiens
  CDR3 for beta chain variable domain of TCR clone 146813 (TRBV4-3, TRBJ1-4)
CASSPSQRNEKLFF

SEQ ID NO: 293627 - protein, 14 aa, Homo sapiens
  CDR3 for alpha chain variable domain of TCR clone 146814 (TRAV8-1, TRAJ13)
CAVKRSGGYQKVTF

SEQ ID NO: 293628 - protein, 17 aa, Homo sapiens
  CDR3 for beta chain variable domain of TCR clone 146814 (TRBV13, TRBJ2-3)
CASSLSRVAGGRNTQYF

SEQ ID NO: 293629 - protein, 11 aa, Homo sapiens
  CDR3 for alpha chain variable domain of TCR clone 146815 (TRAV12-1, TRAJ8)
CVVTGFQKLVF

SEQ ID NO: 293630 - protein, 17 aa, Homo sapiens
  CDR3 for beta chain variable domain of TCR clone 146815 (TRBV7-8, TRBJ2-6)
CASSAGTGGAGANVLTF

SEQ ID NO: 293631 - protein, 18 aa, Homo sapiens
  CDR3 for alpha chain variable domain of TCR clone 146816 (TRAV21, TRAJ52)
CAVRPSPAGGTSYGKLTF

SEQ ID NO: 293632 - protein, 11 aa, Homo sapiens
  CDR3 for beta chain variable domain of TCR clone 146816 (TRBV11-2, TRBJ2-2)
CASSLPGKLFF

SEQ ID NO: 293633 - protein, 12 aa, Homo sapiens
  CDR3 for alpha chain variable domain of TCR clone 146817 (TRAV1-1, TRAJ9)
CAVDTGGFKTIF

SEQ ID NO: 293634 - protein, 16 aa, Homo sapiens
  CDR3 for beta chain variable domain of TCR clone 146817 (TRBV7-3, TRBJ2-2)
CASSLKRGTLSGELFF

SEQ ID NO: 293635 - protein, 14 aa, Homo sapiens
  CDR3 for alpha chain variable domain of TCR clone 146818 (TRAV26-1, TRAJ54)
CIVRRTQGAQKLVF

SEQ ID NO: 293636 - protein, 17 aa, Homo sapiens
  CDR3 for beta chain variable domain of TCR clone 146818 (TRBV7-8, TRBJ2-6)
CASSAGTGGAGANVLTF

SEQ ID NO: 293637 - protein, 14 aa, Homo sapiens
  CDR3 for alpha chain variable domain of TCR clone 146819 (TRAV35, TRAJ33)
CAGSSQDSNYQLIW

SEQ ID NO: 293638 - protein, 16 aa, Homo sapiens
  CDR3 for beta chain variable domain of TCR clone 146819 (TRBV20-1, TRBJ2-7)
CSAESGTSGAYEQYFG

SEQ ID NO: 293639 - protein, 11 aa, Homo sapiens
  CDR3 for alpha chain variable domain of TCR clone 146820 (TRAV3, TRAJ21)
CAVGNFNKFYF

SEQ ID NO: 293640 - protein, 16 aa, Homo sapiens
  CDR3 for beta chain variable domain of TCR clone 146820 (TRBV19, TRBJ2-1)
CGSSKTGPSSYNEQFF

SEQ ID NO: 293641 - protein, 13 aa, Homo sapiens
  CDR3 for alpha chain variable domain of TCR clone 146821 (TRAV1-2, TRAJ9)
CAALNTGGFKTIF

SEQ ID NO: 293642 - protein, 14 aa, Homo sapiens
  CDR3 for beta chain variable domain of TCR clone 146821 (TRBV7-2, TRBJ2-1)
CASSLVQGRNEQFF

SEQ ID NO: 293643 - protein, 13 aa, Homo sapiens
  CDR3 for alpha chain variable domain of TCR clone 146822 (TRAV1-2, TRAJ9)
CAALNTGGFKTIF

SEQ ID NO: 293644 - protein, 14 aa, Homo sapiens
  CDR3 for beta chain variable domain of TCR clone 146822 (TRBV7-2, TRBJ1-3)
CASSLSRSGNTIYF

SEQ ID NO: 293645 - protein, 12 aa, Homo sapiens
  CDR3 for alpha chain variable domain of TCR clone 146823 (TRAV12-2, TRAJ9)
CAVNTGGFKTIF

SEQ ID NO: 293646 - protein, 16 aa, Homo sapiens
  CDR3 for beta chain variable domain of TCR clone 146823 (TRBV9, TRBJ2-2)
CASSAMGKGNTGELFF

SEQ ID NO: 293647 - protein, 17 aa, Homo sapiens
  CDR3 for alpha chain variable domain of TCR clone 146824 (TRAV2, TRAJ36)
CAVEDRGNWGKQPLLWD

SEQ ID NO: 293648 - protein, 14 aa, Homo sapiens
  CDR3 for beta chain variable domain of TCR clone 146824 (TRBV7-9, TRBJ2-5)
CASSLDTTQETQYF

SEQ ID NO: 293649 - protein, 13 aa, Homo sapiens
  CDR3 for alpha chain variable domain of TCR clone 146825 (TRAV35, TRAJ20)
CAGHLSNDYKLGF

SEQ ID NO: 293650 - protein, 14 aa, Homo sapiens
  CDR3 for beta chain variable domain of TCR clone 146825 (TRBV9, TRBJ2-7)
CASSVGVGSYEQYF

SEQ ID NO: 293651 - protein, 14 aa, Homo sapiens
  CDR3 for alpha chain variable domain of TCR clone 146826 (TRAV12-3, TRAJ35)
CAMSLIGFGNVLHC

SEQ ID NO: 293652 - protein, 18 aa, Homo sapiens
  CDR3 for beta chain variable domain of TCR clone 146826 (TRBV11-2, TRBJ2-3)
CASSLGGASRGAPNTQYF

SEQ ID NO: 293653 - protein, 10 aa, Homo sapiens
  CDR3 for alpha chain variable domain of TCR clone 146827 (TRAV12-2, TRAJ43)
CAVYNNDMRF

SEQ ID NO: 293654 - protein, 14 aa, Homo sapiens
  CDR3 for beta chain variable domain of TCR clone 146827 (TRBV5-7, TRBJ2-3)
CASSLGAGSDTQYF

SEQ ID NO: 293655 - protein, 12 aa, Homo sapiens
  CDR3 for alpha chain variable domain of TCR clone 146828 (TRAV13-1, TRAJ49)
CAASPMGHQFYF

SEQ ID NO: 293656 - protein, 17 aa, Homo sapiens
  CDR3 for beta chain variable domain of TCR clone 146828 (TRBV11-2, TRBJ2-1)
CASSLYPPGVEYNEQFF

SEQ ID NO: 293657 - protein, 12 aa, Homo sapiens
  CDR3 for alpha chain variable domain of TCR clone 146829 (TRAV12-3, TRAJ17)
CAMTLTGNKLTF

SEQ ID NO: 293658 - protein, 14 aa, Homo sapiens
  CDR3 for beta chain variable domain of TCR clone 146829 (TRBV11-2, TRBJ2-3)
CASSRLAHTDTQYF

SEQ ID NO: 293659 - protein, 12 aa, Homo sapiens
  CDR3 for alpha chain variable domain of TCR clone 146830 (TRAV2, TRAJ9)
CAVGAGGFKTIF

SEQ ID NO: 293660 - protein, 15 aa, Homo sapiens
  CDR3 for beta chain variable domain of TCR clone 146830 (TRBV20-1, TRBJ1-1)
CSASWDRFLNTEAFF

SEQ ID NO: 293661 - protein, 14 aa, Homo sapiens
  CDR3 for alpha chain variable domain of TCR clone 146831 (TRAV38-1, TRAJ40)
CALRPTSGTYKYIF

SEQ ID NO: 293662 - protein, 14 aa, Homo sapiens
  CDR3 for beta chain variable domain of TCR clone 146831 (TRBV25-1, TRBJ1-1)
CASTQLGGDTEAFF

SEQ ID NO: 293663 - protein, 14 aa, Homo sapiens
  CDR3 for alpha chain variable domain of TCR clone 146832 (TRAV13-1, TRAJ44)
CAAKATGTASKLTC

SEQ ID NO: 293664 - protein, 16 aa, Homo sapiens
  CDR3 for beta chain variable domain of TCR clone 146832 (TRBV7-9, TRBJ2-6)
CASSLKGPLRANVLTF

SEQ ID NO: 293665 - protein, 14 aa, Homo sapiens
  CDR3 for alpha chain variable domain of TCR clone 146833 (TRAV12-1, TRAJ17)
CVVNYKAASNKLTF

SEQ ID NO: 293666 - protein, 15 aa, Homo sapiens
  CDR3 for beta chain variable domain of TCR clone 146833 (TRBV11-3, TRBJ2-3)
CASSAGTVVTNKQYF

SEQ ID NO: 293667 - protein, 16 aa, Homo sapiens
  CDR3 for alpha chain variable domain of TCR clone 146834 (TRAV26-1, TRAJ37)
CIVREDGSGNTGKLIV

SEQ ID NO: 293668 - protein, 17 aa, Homo sapiens
  CDR3 for beta chain variable domain of TCR clone 146834 (TRBV4-1, TRBJ2-7)
CASSRDPLGVRGGEQYF

SEQ ID NO: 293669 - protein, 18 aa, Homo sapiens
  CDR3 for alpha chain variable domain of TCR clone 146835 (TRAV21, TRAJ53)
CAVKGGENSGGSYYKLTF

SEQ ID NO: 293670 - protein, 14 aa, Homo sapiens
  CDR3 for beta chain variable domain of TCR clone 146835 (TRBV6-1, TRBJ1-5)
CASSAGAGSQPQHF

SEQ ID NO: 293671 - protein, 23 aa, Homo sapiens
  CDR3 for alpha chain variable domain of TCR clone 146836 (TRAV12-2, TRAJ36)
SLLIRDSQPSDSATLERANNLFF

SEQ ID NO: 293672 - protein, 13 aa, Homo sapiens
  CDR3 for beta chain variable domain of TCR clone 146836 (TRBV2, TRBJ2-7)
CASTGQGHYEQYF

SEQ ID NO: 293673 - protein, 14 aa, Homo sapiens
  CDR3 for alpha chain variable domain of TCR clone 146837 (TRAV26-1, TRAJ45)
CIEVTGGGADGLTF

SEQ ID NO: 293674 - protein, 18 aa, Homo sapiens
  CDR3 for beta chain variable domain of TCR clone 146837 (TRBV4-1, TRBJ1-5)
CASSQDPRGQGLNQPQHF

SEQ ID NO: 293675 - protein, 14 aa, Homo sapiens
  CDR3 for alpha chain variable domain of TCR clone 146838 (TRAV1-2, TRAJ16)
CAVNRFSDGQKLFF

SEQ ID NO: 293676 - protein, 14 aa, Homo sapiens
  CDR3 for beta chain variable domain of TCR clone 146838 (TRBV7-2, TRBJ2-7)
CASSPKTSFYEQYF

SEQ ID NO: 293677 - protein, 14 aa, Homo sapiens
  CDR3 for alpha chain variable domain of TCR clone 146839 (TRAV12-2, TRAJ13)
CAVKKTGCYQKVTF

SEQ ID NO: 293678 - protein, 12 aa, Homo sapiens
  CDR3 for beta chain variable domain of TCR clone 146839 (TRBV11-2, TRBJ2-2)
CASSLGGGELFF

SEQ ID NO: 293679 - protein, 15 aa, Homo sapiens
  CDR3 for alpha chain variable domain of TCR clone 146840 (TRAV21, TRAJ24)
CAARSSTDSWGKLQF

SEQ ID NO: 293680 - protein, 15 aa, Homo sapiens
  CDR3 for beta chain variable domain of TCR clone 146840 (TRBV28, TRBJ2-1)
CDSSIIAGGRSEQFF

SEQ ID NO: 293681 - protein, 13 aa, Homo sapiens
  CDR3 for alpha chain variable domain of TCR clone 146841 (TRAV36/DV7, TRAJ53)
FALSGGSNYKLTF

SEQ ID NO: 293682 - protein, 13 aa, Homo sapiens
  CDR3 for beta chain variable domain of TCR clone 146841 (TRBV28, TRBJ2-4)
CASSQSSKNIQYF

SEQ ID NO: 293683 - protein, 11 aa, Homo sapiens
  CDR3 for alpha chain variable domain of TCR clone 146842 (TRAV13-1, TRAJ6)
CATLGSYLPTF

SEQ ID NO: 293684 - protein, 13 aa, Homo sapiens
  CDR3 for beta chain variable domain of TCR clone 146842 (TRBV6-6, TRBJ2-1)
CASSLHQGDEQFF

SEQ ID NO: 293685 - protein, 15 aa, Homo sapiens
  CDR3 for alpha chain variable domain of TCR clone 146843 (TRAV27, TRAJ38)
CAARRNAGNHRKLIW

SEQ ID NO: 293686 - protein, 17 aa, Homo sapiens
  CDR3 for beta chain variable domain of TCR clone 146843 (TRBV20-1, TRBJ2-2)
CSAGGSGQGGLTGELFF

SEQ ID NO: 293687 - protein, 14 aa, Homo sapiens
  CDR3 for alpha chain variable domain of TCR clone 146844 (TRAV26-1, TRAJ38)
CIADNAGNNRKLIW

SEQ ID NO: 293688 - protein, 17 aa, Homo sapiens
  CDR3 for beta chain variable domain of TCR clone 146844 (TRBV7-9, TRBJ2-3)
CASSPTVAGDITDTQYF

SEQ ID NO: 293689 - protein, 15 aa, Homo sapiens
  CDR3 for alpha chain variable domain of TCR clone 146845 (TRAV13-1, TRAJ36)
CAASIRQPGANNLFF

SEQ ID NO: 293690 - protein, 15 aa, Homo sapiens
  CDR3 for beta chain variable domain of TCR clone 146845 (TRBV3-1, TRBJ2-1)
CASSQQPSGGNEQFF

SEQ ID NO: 293691 - protein, 12 aa, Homo sapiens
  CDR3 for alpha chain variable domain of TCR clone 146846 (TRAV3, TRAJ7)
CADLLWEQQTRF

SEQ ID NO: 293692 - protein, 13 aa, Homo sapiens
  CDR3 for beta chain variable domain of TCR clone 146846 (TRBV28, TRBJ1-2)
CAGRDRGNYGYTF

SEQ ID NO: 293693 - protein, 13 aa, Homo sapiens
  CDR3 for alpha chain variable domain of TCR clone 146847 (TRAV21, TRAJ27)
CAACPGNAGKSTF

SEQ ID NO: 293694 - protein, 14 aa, Homo sapiens
  CDR3 for beta chain variable domain of TCR clone 146847 (TRBV7-2, TRBJ2-7)
CASSPKTSFYEQYF

SEQ ID NO: 293695 - protein, 12 aa, Homo sapiens
  CDR3 for alpha chain variable domain of TCR clone 146848 (TRAV20, TRAJ54)
CAVQEGAQKLVF

SEQ ID NO: 293696 - protein, 13 aa, Homo sapiens
  CDR3 for beta chain variable domain of TCR clone 146848 (TRBV19, TRBJ1-2)
CASSVPGQDGYTF

SEQ ID NO: 293697 - protein, 15 aa, Homo sapiens
  CDR3 for alpha chain variable domain of TCR clone 146849 (TRAV3, TRAJ13)
CAVRVYSGGYQKVTF

SEQ ID NO: 293698 - protein, 15 aa, Homo sapiens
  CDR3 for beta chain variable domain of TCR clone 146849 (TRBV5-7, TRBJ1-2)
CASSLGVAANYSYTF

SEQ ID NO: 293699 - protein, 11 aa, Homo sapiens
  CDR3 for alpha chain variable domain of TCR clone 146850 (TRAV2, TRAJ13)
CASGGYQKVTF

SEQ ID NO: 293700 - protein, 14 aa, Homo sapiens
  CDR3 for beta chain variable domain of TCR clone 146850 (TRBV12-4, TRBJ2-3)
CASSGQGSTDTQYF

SEQ ID NO: 293701 - protein, 14 aa, Homo sapiens
  CDR3 for alpha chain variable domain of TCR clone 146851 (TRAV12-2, TRAJ17)
CSALFKAAGNKRTF

SEQ ID NO: 293702 - protein, 16 aa, Homo sapiens
  CDR3 for beta chain variable domain of TCR clone 146851 (TRBV20-1, TRBJ2-2)
CSASASGIPGAGELFF

SEQ ID NO: 293703 - protein, 23 aa, Homo sapiens
  CDR3 for alpha chain variable domain of TCR clone 146852 (TRAV26-1, TRAJ38)
CIADNAGNNHIQNPDPAVYQLRD

SEQ ID NO: 293704 - protein, 14 aa, Homo sapiens
  CDR3 for beta chain variable domain of TCR clone 146852 (TRBV25-1, TRBJ1-2)
CASSDTTGVVGYTF

SEQ ID NO: 293705 - protein, 12 aa, Homo sapiens
  CDR3 for alpha chain variable domain of TCR clone 146853 (TRAV27, TRAJ35)
CAGADFGNVLHC

SEQ ID NO: 293706 - protein, 16 aa, Homo sapiens
  CDR3 for beta chain variable domain of TCR clone 146853 (TRBV4-3, TRBJ2-1)
CASSEGILDYYNEQFF

SEQ ID NO: 293707 - protein, 15 aa, Homo sapiens
  CDR3 for alpha chain variable domain of TCR clone 146854 (TRAV8-3, TRAJ45)
CASSYSGGGADGLTF

SEQ ID NO: 293708 - protein, 18 aa, Homo sapiens
  CDR3 for beta chain variable domain of TCR clone 146854 (TRBV18, TRBJ1-3)
CASSPRGGAGPSGNTLYF

SEQ ID NO: 293709 - protein, 13 aa, Homo sapiens
  CDR3 for alpha chain variable domain of TCR clone 146855 (TRAV13-1, TRAJ10)
CAATAGGGNKLTL

SEQ ID NO: 293710 - protein, 14 aa, Homo sapiens
  CDR3 for beta chain variable domain of TCR clone 146855 (TRBV12-4, TRBJ2-7)
CASSPAGLKYEQYF

SEQ ID NO: 293711 - protein, 11 aa, Homo sapiens
  CDR3 for alpha chain variable domain of TCR clone 146856 (TRAV30, TRAJ49)
VGPNTGNQFYF

SEQ ID NO: 293712 - protein, 15 aa, Homo sapiens
  CDR3 for beta chain variable domain of TCR clone 146856 (TRBV7-2, TRBJ2-1)
CASSSGLAGGNEQFF

SEQ ID NO: 293713 - protein, 16 aa, Homo sapiens
  CDR3 for alpha chain variable domain of TCR clone 146857 (TRAV4, TRAJ18)
CCVLLIGGSTLGRLYF

SEQ ID NO: 293714 - protein, 16 aa, Homo sapiens
  CDR3 for beta chain variable domain of TCR clone 146857 (TRBV7-7, TRBJ2-5)
CASSLVASGVRETQYF

SEQ ID NO: 293715 - protein, 12 aa, Homo sapiens
  CDR3 for alpha chain variable domain of TCR clone 146858 (TRAV1-2, TRAJ9)
CAGYTGGFKTIF

SEQ ID NO: 293716 - protein, 15 aa, Homo sapiens
  CDR3 for beta chain variable domain of TCR clone 146858 (TRBV11-2, TRBJ2-1)
CASSPAGQSLNGQFF

SEQ ID NO: 293717 - protein, 13 aa, Homo sapiens
  CDR3 for alpha chain variable domain of TCR clone 146859 (TRAV2, TRAJ40)
CAVVTSGTYKYIF

SEQ ID NO: 293718 - protein, 18 aa, Homo sapiens
  CDR3 for beta chain variable domain of TCR clone 146859 (TRBV27, TRBJ2-5)
CASSPWKGQVRTLETQYF

SEQ ID NO: 293719 - protein, 14 aa, Homo sapiens
  CDR3 for alpha chain variable domain of TCR clone 146860 (TRAV26-1, TRAJ38)
CIADNAGNNRKLTW

SEQ ID NO: 293720 - protein, 14 aa, Homo sapiens
  CDR3 for beta chain variable domain of TCR clone 146860 (TRBV6-1, TRBJ1-3)
CASVQGGGGNTIYF

SEQ ID NO: 293721 - protein, 15 aa, Homo sapiens
  CDR3 for alpha chain variable domain of TCR clone 146861 (TRAV13-2, TRAJ50)
CAEEPLKTSYDKVIF

SEQ ID NO: 293722 - protein, 15 aa, Homo sapiens
  CDR3 for beta chain variable domain of TCR clone 146861 (TRBV20-1, TRBJ1-5)
CSARVSVDSNQPQHF

SEQ ID NO: 293723 - protein, 15 aa, Homo sapiens
  CDR3 for alpha chain variable domain of TCR clone 146862 (TRAV8-4, TRAJ40)
CAVSDDTSGTYKYIF

SEQ ID NO: 293724 - protein, 13 aa, Homo sapiens
  CDR3 for beta chain variable domain of TCR clone 146862 (TRBV20-1, TRBJ2-7)
CSATHTSGYEQYF

SEQ ID NO: 293725 - protein, 16 aa, Homo sapiens
  CDR3 for alpha chain variable domain of TCR clone 146863 (TRAV3, TRAJ37)
CAVTPHGSGNTGKLIF

SEQ ID NO: 293726 - protein, 17 aa, Homo sapiens
  CDR3 for beta chain variable domain of TCR clone 146863 (TRBV20-1, TRBJ2-1)
CSASSSGLAGSYNEQFF

SEQ ID NO: 293727 - protein, 16 aa, Homo sapiens
  CDR3 for alpha chain variable domain of TCR clone 146864 (TRAV12-2, TRAJ48)
CAVNPTSNFVNEKLTF

SEQ ID NO: 293728 - protein, 12 aa, Homo sapiens
  CDR3 for beta chain variable domain of TCR clone 146864 (TRBV9, TRBJ2-3)
CASSLRAGTQYF

SEQ ID NO: 293729 - protein, 14 aa, Homo sapiens
  CDR3 for alpha chain variable domain of TCR clone 146865 (TRAV12-3, TRAJ10)
SHLPLTGGGNKLTF

SEQ ID NO: 293730 - protein, 12 aa, Homo sapiens
  CDR3 for beta chain variable domain of TCR clone 146865 (TRBV11-2, TRBJ2-2)
CASSLGGGEMFF

SEQ ID NO: 293731 - protein, 13 aa, Homo sapiens
  CDR3 for alpha chain variable domain of TCR clone 146866 (TRAV21, TRAJ27)
CAARPGNAGKSTF

SEQ ID NO: 293732 - protein, 12 aa, Homo sapiens
  CDR3 for beta chain variable domain of TCR clone 146866 (TRBV14, TRBJ2-4)
CASSNLKSIQYF

SEQ ID NO: 293733 - protein, 14 aa, Homo sapiens
  CDR3 for alpha chain variable domain of TCR clone 146867 (TRAV20, TRAJ26)
CAVQAVNYGQNFVF

SEQ ID NO: 293734 - protein, 15 aa, Homo sapiens
  CDR3 for beta chain variable domain of TCR clone 146867 (TRBV20-1, TRBJ2-7)
CSAESGTSGAYEQYF

SEQ ID NO: 293735 - protein, 15 aa, Homo sapiens
  CDR3 for alpha chain variable domain of TCR clone 146868 (TRAV26-1, TRAJ29)
CIVRVEGSGNTPLVF

SEQ ID NO: 293736 - protein, 15 aa, Homo sapiens
  CDR3 for beta chain variable domain of TCR clone 146868 (TRBV6-5, TRBJ1-2)
CASSYSQAFNYGYTF

SEQ ID NO: 293737 - protein, 15 aa, Homo sapiens
  CDR3 for alpha chain variable domain of TCR clone 146869 (TRAV2, TRAJ15)
CAVEDRGQAGTALIF

SEQ ID NO: 293738 - protein, 13 aa, Homo sapiens
  CDR3 for beta chain variable domain of TCR clone 146869 (TRBV10-2, TRBJ2-7)
GASGASGGYEQYF

SEQ ID NO: 293739 - protein, 14 aa, Homo sapiens
  CDR3 for alpha chain variable domain of TCR clone 146870 (TRAV12-3, TRAJ10)
SHLPLTGGGNKLTF

SEQ ID NO: 293740 - protein, 13 aa, Homo sapiens
  CDR3 for beta chain variable domain of TCR clone 146870 (TRBV7-9, TRBJ2-3)
CDSSPGSTDTQYF

SEQ ID NO: 293741 - protein, 14 aa, Homo sapiens
  CDR3 for alpha chain variable domain of TCR clone 146871 (TRAV20, TRAJ20)
CAVRRGYNDYKLIF

SEQ ID NO: 293742 - protein, 13 aa, Homo sapiens
  CDR3 for beta chain variable domain of TCR clone 146871 (TRBV19, TRBJ2-5)
CASSETAPETQYF

SEQ ID NO: 293743 - protein, 16 aa, Homo sapiens
  CDR3 for alpha chain variable domain of TCR clone 146872 (TRAV20, TRAJ10)
CAVLRGLTGGGNKLTF

SEQ ID NO: 293744 - protein, 13 aa, Homo sapiens
  CDR3 for beta chain variable domain of TCR clone 146872 (TRBV18, TRBJ1-1)
CASSPNGDTEAFF

SEQ ID NO: 293745 - protein, 10 aa, Homo sapiens
  CDR3 for alpha chain variable domain of TCR clone 146873 (TRAV22, TRAJ15)
CAATGTALIF

SEQ ID NO: 293746 - protein, 15 aa, Homo sapiens
  CDR3 for beta chain variable domain of TCR clone 146873 (TRBV6-5, TRBJ2-7)
CASSRTSGFSYEQYF

SEQ ID NO: 293747 - protein, 13 aa, Homo sapiens
  CDR3 for alpha chain variable domain of TCR clone 146874 (TRAV12-2, TRAJ20)
CAVYPSNDYKLSF

SEQ ID NO: 293748 - protein, 15 aa, Homo sapiens
  CDR3 for beta chain variable domain of TCR clone 146874 (TRBV27, TRBJ2-5)
CASSLHPRWGETQYF

SEQ ID NO: 293749 - protein, 12 aa, Homo sapiens
  CDR3 for alpha chain variable domain of TCR clone 146875 (TRAV12-2, TRAJ9)
CAVYNGGFKTIF

SEQ ID NO: 293750 - protein, 14 aa, Homo sapiens
  CDR3 for beta chain variable domain of TCR clone 146875 (TRBV6-1, TRBJ1-5)
CASSETGMEKPQHF

SEQ ID NO: 293751 - protein, 11 aa, Homo sapiens
  CDR3 for alpha chain variable domain of TCR clone 146876 (TRAV12-1, TRAJ26)
CVVAYGQNFVF

SEQ ID NO: 293752 - protein, 15 aa, Homo sapiens
  CDR3 for beta chain variable domain of TCR clone 146876 (TRBV12-4, TRBJ2-5)
CAISGTGQAQETQYF

SEQ ID NO: 293753 - protein, 13 aa, Homo sapiens
  CDR3 for alpha chain variable domain of TCR clone 146877 (TRAV27, TRAJ6)
CAGGTRGSYIPTF

SEQ ID NO: 293754 - protein, 22 aa, Homo sapiens
  CDR3 for beta chain variable domain of TCR clone 146877 (TRBV11-2, TRBJ1-3)
CASSLSPLVRDTIYWRGKLAHC

SEQ ID NO: 293755 - protein, 12 aa, Homo sapiens
  CDR3 for alpha chain variable domain of TCR clone 146878 (TRAV17, TRAJ4)
CATDGGYNKLIF

SEQ ID NO: 293756 - protein, 13 aa, Homo sapiens
  CDR3 for beta chain variable domain of TCR clone 146878 (TRBV29-1, TRBJ2-3)
CSATRGGRDTQYF

SEQ ID NO: 293757 - protein, 13 aa, Homo sapiens
  CDR3 for alpha chain variable domain of TCR clone 146879 (TRAV29/DV5, TRAJ31)
CAASRNNNARLMF

SEQ ID NO: 293758 - protein, 12 aa, Homo sapiens
  CDR3 for beta chain variable domain of TCR clone 146879 (TRBV14, TRBJ1-1)
CASSQLKGLASF

SEQ ID NO: 293759 - protein, 18 aa, Homo sapiens
  CDR3 for alpha chain variable domain of TCR clone 146880 (TRAV13-1, TRAJ52)
CAASKRSAGDTSYGKLTF

SEQ ID NO: 293760 - protein, 14 aa, Homo sapiens
  CDR3 for beta chain variable domain of TCR clone 146880 (TRBV7-2, TRBJ2-5)
CASSTGGELKTQYF

SEQ ID NO: 293761 - protein, 13 aa, Homo sapiens
  CDR3 for alpha chain variable domain of TCR clone 146881 (TRAV27, TRAJ57)
CAGLQGGSEKLVF

SEQ ID NO: 293762 - protein, 14 aa, Homo sapiens
  CDR3 for beta chain variable domain of TCR clone 146881 (TRBV20-1, TRBJ1-2)
CSGRKDGRAYGYTF

SEQ ID NO: 293763 - protein, 14 aa, Homo sapiens
  CDR3 for alpha chain variable domain of TCR clone 146882 (TRAV1-2, TRAJ16)
CAVNRFSDGQKLLF

SEQ ID NO: 293764 - protein, 15 aa, Homo sapiens
  CDR3 for beta chain variable domain of TCR clone 146882 (TRBV5-1, TRBJ2-2)
CASSSQGGNTGDLFF

SEQ ID NO: 293765 - protein, 10 aa, Homo sapiens
  CDR3 for alpha chain variable domain of TCR clone 146883 (TRAV1-2, TRAJ31)
CVSEDARLMF

SEQ ID NO: 293766 - protein, 14 aa, Homo sapiens
  CDR3 for beta chain variable domain of TCR clone 146883 (TRBV19, TRBJ2-1)
RASPTFVLGGEQFF

SEQ ID NO: 293767 - protein, 15 aa, Homo sapiens
  CDR3 for alpha chain variable domain of TCR clone 146884 (TRAV35, TRAJ40)
CAGQLGTSGTYKYIF

SEQ ID NO: 293768 - protein, 19 aa, Homo sapiens
  CDR3 for beta chain variable domain of TCR clone 146884 (TRBV23-1, TRBJ2-7)
CASILLWDRARAVLRAGHQ

SEQ ID NO: 293769 - protein, 17 aa, Homo sapiens
  CDR3 for alpha chain variable domain of TCR clone 146885 (TRAV3, TRAJ6)
CALRDGPRAGGSYIPTF

SEQ ID NO: 293770 - protein, 15 aa, Homo sapiens
  CDR3 for beta chain variable domain of TCR clone 146885 (TRBV20-1, TRBJ2-7)
CSARDRVSGMDEQYF

SEQ ID NO: 293771 - protein, 13 aa, Homo sapiens
  CDR3 for alpha chain variable domain of TCR clone 146886 (TRAV2, TRAJ29)
CAAGNPANTPLVF

SEQ ID NO: 293772 - protein, 16 aa, Homo sapiens
  CDR3 for beta chain variable domain of TCR clone 146886 (TRBV7-9, TRBJ1-2)
CASSPGGGAINYGYTF

SEQ ID NO: 293773 - protein, 13 aa, Homo sapiens
  CDR3 for alpha chain variable domain of TCR clone 146887 (TRAV12-1, TRAJ9)
CVVLYTGGFKTIF

SEQ ID NO: 293774 - protein, 13 aa, Homo sapiens
  CDR3 for beta chain variable domain of TCR clone 146887 (TRBV7-3, TRBJ1-1)
CASSQDWGAEAFF

SEQ ID NO: 293775 - protein, 12 aa, Homo sapiens
  CDR3 for alpha chain variable domain of TCR clone 146888 (TRAV16, TRAJ26)
CALRSYGQNFVF

SEQ ID NO: 293776 - protein, 14 aa, Homo sapiens
  CDR3 for beta chain variable domain of TCR clone 146888 (TRBV10-3, TRBJ2-1)
CAIRSDLAYNEQFF

SEQ ID NO: 293777 - protein, 20 aa, Homo sapiens
  CDR3 for alpha chain variable domain of TCR clone 146889 (TRAV1-1, TRAJ4)
CLLLLRCEGFLSGGYNKLIF

SEQ ID NO: 293778 - protein, 15 aa, Homo sapiens
  CDR3 for beta chain variable domain of TCR clone 146889 (TRBV7-9, TRBJ1-4)
CASSARTGGNEKLFF

SEQ ID NO: 293779 - protein, 15 aa, Homo sapiens
  CDR3 for alpha chain variable domain of TCR clone 146890 (TRAV1-2, TRAJ28)
CAVQYSGAGSYQLTF

SEQ ID NO: 293780 - protein, 18 aa, Homo sapiens
  CDR3 for beta chain variable domain of TCR clone 146890 (TRBV6-6, TRBJ1-3)
CASSYSKWDSISGNTIYF

SEQ ID NO: 293781 - protein, 13 aa, Homo sapiens
  CDR3 for alpha chain variable domain of TCR clone 146891 (TRAV13-2, TRAJ13)
CAERPGGYQKVTF

SEQ ID NO: 293782 - protein, 12 aa, Homo sapiens
  CDR3 for beta chain variable domain of TCR clone 146891 (TRBV28, TRBJ2-7)
CASSFSSYEQYF

SEQ ID NO: 293783 - protein, 15 aa, Homo sapiens
  CDR3 for alpha chain variable domain of TCR clone 146892 (TRAV13-1, TRAJ45)
CAASGSGGGADGLTF

SEQ ID NO: 293784 - protein, 11 aa, Homo sapiens
  CDR3 for beta chain variable domain of TCR clone 146892 (TRBV19, TRBJ1-1)
CASSIGSEAFF

SEQ ID NO: 293785 - protein, 13 aa, Homo sapiens
  CDR3 for alpha chain variable domain of TCR clone 146893 (TRAV21, TRAJ27)
CAARPGNAGKSTF

SEQ ID NO: 293786 - protein, 14 aa, Homo sapiens
  CDR3 for beta chain variable domain of TCR clone 146893 (TRBV7-6, TRBJ2-1)
CASSLGGGQISSSS

SEQ ID NO: 293787 - protein, 15 aa, Homo sapiens
  CDR3 for alpha chain variable domain of TCR clone 146894 (TRAV26-1, TRAJ15)
CIVRAANQAGTALIF

SEQ ID NO: 293788 - protein, 17 aa, Homo sapiens
  CDR3 for beta chain variable domain of TCR clone 146894 (TRBV4-3, TRBJ2-1)
CASSQFSSGRASGEQFF

SEQ ID NO: 293789 - protein, 13 aa, Homo sapiens
  CDR3 for alpha chain variable domain of TCR clone 146895 (TRAV12-3, TRAJ7)
CAMSASGNNRLAF

SEQ ID NO: 293790 - protein, 13 aa, Homo sapiens
  CDR3 for beta chain variable domain of TCR clone 146895 (TRBV7-7, TRBJ2-3)
CASSLSRADTQYF

SEQ ID NO: 293791 - protein, 17 aa, Homo sapiens
  CDR3 for alpha chain variable domain of TCR clone 146896 (TRAV2, TRAJ32)
CAFNPPASGWCYKQAHL

SEQ ID NO: 293792 - protein, 12 aa, Homo sapiens
  CDR3 for beta chain variable domain of TCR clone 146896 (TRBV20-1, TRBJ2-7)
CSAITPTKEQYF

SEQ ID NO: 293793 - protein, 14 aa, Homo sapiens
  CDR3 for alpha chain variable domain of TCR clone 146897 (TRAV26-1, TRAJ34)
CIVRVAYNTDKLIF

SEQ ID NO: 293794 - protein, 15 aa, Homo sapiens
  CDR3 for beta chain variable domain of TCR clone 146897 (TRBV7-9, TRBJ1-4)
CASSRTGGFNETLFF

SEQ ID NO: 293795 - protein, 14 aa, Homo sapiens
  CDR3 for alpha chain variable domain of TCR clone 146898 (TRAV13-1, TRAJ40)
CAASMTSGTSKYIF

SEQ ID NO: 293796 - protein, 15 aa, Homo sapiens
  CDR3 for beta chain variable domain of TCR clone 146898 (TRBV7-3, TRBJ2-1)
CASSPTGGGEVEQFF

SEQ ID NO: 293797 - protein, 14 aa, Homo sapiens
  CDR3 for alpha chain variable domain of TCR clone 146899 (TRAV1-2, TRAJ16)
CAVNRFSDGQKLLF

SEQ ID NO: 293798 - protein, 15 aa, Homo sapiens
  CDR3 for beta chain variable domain of TCR clone 146899 (TRBV11-2, TRBJ2-7)
CASSLSQGSSYEQYF

SEQ ID NO: 293799 - protein, 10 aa, Homo sapiens
  CDR3 for alpha chain variable domain of TCR clone 146900 (TRAV2, TRAJ34)
CAVVNDKLIF

SEQ ID NO: 293800 - protein, 13 aa, Homo sapiens
  CDR3 for beta chain variable domain of TCR clone 146900 (TRBV19, TRBJ1-1)
CASSIGSEAFLDK

SEQ ID NO: 293801 - protein, 14 aa, Homo sapiens
  CDR3 for alpha chain variable domain of TCR clone 146901 (TRAV3, TRAJ33)
CAVRDMGSNYPLIW

SEQ ID NO: 293802 - protein, 17 aa, Homo sapiens
  CDR3 for beta chain variable domain of TCR clone 146901 (TRBV19, TRBJ2-1)
CARSIWSAQPTHNEQFS

SEQ ID NO: 293803 - protein, 11 aa, Homo sapiens
  CDR3 for alpha chain variable domain of TCR clone 146902 (TRAV1-1, TRAJ23)
CAVRQGGKLIF

SEQ ID NO: 293804 - protein, 13 aa, Homo sapiens
  CDR3 for beta chain variable domain of TCR clone 146902 (TRBV12-5, TRBJ2-3)
RASGDRQSDTQYF

SEQ ID NO: 293805 - protein, 16 aa, Homo sapiens
  CDR3 for alpha chain variable domain of TCR clone 146903 (TRAV27, TRAJ13)
CAGAKSDSGGYQKVTF

SEQ ID NO: 293806 - protein, 14 aa, Homo sapiens
  CDR3 for beta chain variable domain of TCR clone 146903 (TRBV7-8, TRBJ2-3)
CASSSRDSTDTQYF

SEQ ID NO: 293807 - protein, 11 aa, Homo sapiens
  CDR3 for alpha chain variable domain of TCR clone 146904 (TRAV2, TRAJ33)
CAVESNYQLIW

SEQ ID NO: 293808 - protein, 15 aa, Homo sapiens
  CDR3 for beta chain variable domain of TCR clone 146904 (TRBV19, TRBJ1-1)
CASTSGQIQNTEGFF

SEQ ID NO: 293809 - protein, 14 aa, Homo sapiens
  CDR3 for alpha chain variable domain of TCR clone 146905 (TRAV38-1, TRAJ29)
CAFITPSGNTPLVF

SEQ ID NO: 293810 - protein, 15 aa, Homo sapiens
  CDR3 for beta chain variable domain of TCR clone 146905 (TRBV5-1, TRBJ2-1)
CASSPPKAPYNEQFF

SEQ ID NO: 293811 - protein, 15 aa, Homo sapiens
  CDR3 for alpha chain variable domain of TCR clone 146906 (TRAV3, TRAJ9)
CAVRARHTGGFKTIF

SEQ ID NO: 293812 - protein, 15 aa, Homo sapiens
  CDR3 for beta chain variable domain of TCR clone 146906 (TRBV7-9, TRBJ1-4)
CASSARTGGNEKLFF

SEQ ID NO: 293813 - protein, 11 aa, Homo sapiens
  CDR3 for alpha chain variable domain of TCR clone 146907 (TRAV12-2, TRAJ39)
CAVNNMLTFGG

SEQ ID NO: 293814 - protein, 16 aa, Homo sapiens
  CDR3 for beta chain variable domain of TCR clone 146907 (TRBV7-9, TRBJ2-1)
CASSDVAGGSYNEQFF

SEQ ID NO: 293815 - protein, 13 aa, Homo sapiens
  CDR3 for alpha chain variable domain of TCR clone 146908 (TRAV12-1, TRAJ22)
CVVYSGSARQLTF

SEQ ID NO: 293816 - protein, 16 aa, Homo sapiens
  CDR3 for beta chain variable domain of TCR clone 146908 (TRBV6-1, TRBJ2-5)
CASSETLDRGAETQYF

SEQ ID NO: 293817 - protein, 15 aa, Homo sapiens
  CDR3 for alpha chain variable domain of TCR clone 146909 (TRAV10, TRAJ6)
CVVRPRTGGSYIPTF

SEQ ID NO: 293818 - protein, 12 aa, Homo sapiens
  CDR3 for beta chain variable domain of TCR clone 146909 (TRBV3-1, TRBJ2-2)
CDSSLFPGELFF

SEQ ID NO: 293819 - protein, 13 aa, Homo sapiens
  CDR3 for alpha chain variable domain of TCR clone 146910 (TRAV17, TRAJ4)
CATKSGGYNKLIF

SEQ ID NO: 293820 - protein, 14 aa, Homo sapiens
  CDR3 for beta chain variable domain of TCR clone 146910 (TRBV20-1, TRBJ1-5)
CSARDARGNQPQHF

SEQ ID NO: 293821 - protein, 16 aa, Homo sapiens
  CDR3 for alpha chain variable domain of TCR clone 146911 (TRAV16, TRAJ4)
CITVLSFSVGYNKLIF

SEQ ID NO: 293822 - protein, 14 aa, Homo sapiens
  CDR3 for beta chain variable domain of TCR clone 146911 (TRBV19, TRBJ2-7)
CASSMGQGAIEQYF

SEQ ID NO: 293823 - protein, 14 aa, Homo sapiens
  CDR3 for alpha chain variable domain of TCR clone 146912 (TRAV4, TRAJ10)
CLVGDTGGGNKLTF

SEQ ID NO: 293824 - protein, 13 aa, Homo sapiens
  CDR3 for beta chain variable domain of TCR clone 146912 (TRBV5-7, TRBJ2-5)
CASSLRLQETQYF

SEQ ID NO: 293825 - protein, 11 aa, Homo sapiens
  CDR3 for alpha chain variable domain of TCR clone 146913 (TRAV12-3, TRAJ27)
CAMANAGKSTF

SEQ ID NO: 293826 - protein, 14 aa, Homo sapiens
  CDR3 for beta chain variable domain of TCR clone 146913 (TRBV19, TRBJ2-1)
CASPTFVVSGEQFF

SEQ ID NO: 293827 - protein, 14 aa, Homo sapiens
  CDR3 for alpha chain variable domain of TCR clone 146914 (TRAV12-2, TRAJ53)
CAVKGGGSNYNMTF

SEQ ID NO: 293828 - protein, 15 aa, Homo sapiens
  CDR3 for beta chain variable domain of TCR clone 146914 (TRBV11-2, TRBJ2-2)
CASSLDTGNTGELFF

SEQ ID NO: 293829 - protein, 14 aa, Homo sapiens
  CDR3 for alpha chain variable domain of TCR clone 146915 (TRAV12-2, TRAJ4)
CAEDLSGGYNKLIF

SEQ ID NO: 293830 - protein, 13 aa, Homo sapiens
  CDR3 for beta chain variable domain of TCR clone 146915 (TRBV7-9, TRBJ1-2)
CASSLKQNYGYNF

SEQ ID NO: 293831 - protein, 13 aa, Homo sapiens
  CDR3 for alpha chain variable domain of TCR clone 146916 (TRAV17, TRAJ5)
CATMDTGRRALNF

SEQ ID NO: 293832 - protein, 15 aa, Homo sapiens
  CDR3 for beta chain variable domain of TCR clone 146916 (TRBV20-1, TRBJ2-5)
CSATRTSGSLETQYF

SEQ ID NO: 293833 - protein, 16 aa, Homo sapiens
  CDR3 for alpha chain variable domain of TCR clone 146917 (TRAV20, TRAJ22)
CAVQASSSGSARQLTF

SEQ ID NO: 293834 - protein, 13 aa, Homo sapiens
  CDR3 for beta chain variable domain of TCR clone 146917 (TRBV28, TRBJ2-5)
CASSFAGGETQYF

SEQ ID NO: 293835 - protein, 15 aa, Homo sapiens
  CDR3 for alpha chain variable domain of TCR clone 146918 (TRAV12-3, TRAJ49)
CAMAVTPNPGNQFYF

SEQ ID NO: 293836 - protein, 18 aa, Homo sapiens
  CDR3 for beta chain variable domain of TCR clone 146918 (TRBV4-1, TRBJ1-5)
CASSQDPRGQGLNQSQHF

SEQ ID NO: 293837 - protein, 16 aa, Homo sapiens
  CDR3 for alpha chain variable domain of TCR clone 146919 (TRAV3, TRAJ37)
CAVRGKGSGNTGELIF

SEQ ID NO: 293838 - protein, 13 aa, Homo sapiens
  CDR3 for beta chain variable domain of TCR clone 146919 (TRBV19, TRBJ1-2)
CASSVPGQDGYTF

SEQ ID NO: 293839 - protein, 18 aa, Homo sapiens
  CDR3 for alpha chain variable domain of TCR clone 146920 (TRAV13-1, TRAJ52)
CAAKNPNAGGTSYGKLTF

SEQ ID NO: 293840 - protein, 15 aa, Homo sapiens
  CDR3 for beta chain variable domain of TCR clone 146920 (TRBV6-1, TRBJ2-3)
CASSERGGITYTQYF

SEQ ID NO: 293841 - protein, 14 aa, Homo sapiens
  CDR3 for alpha chain variable domain of TCR clone 146921 (TRAV17, TRAJ57)
CATDPQGGSEKLVF

SEQ ID NO: 293842 - protein, 12 aa, Homo sapiens
  CDR3 for beta chain variable domain of TCR clone 146921 (TRBV4-1, TRBJ2-3)
CASSQGTDTQYF

SEQ ID NO: 293843 - protein, 19 aa, Homo sapiens
  CDR3 for alpha chain variable domain of TCR clone 146922 (TRAV8-3, TRAJ4)
LRTSVLWVFYSGGYTKLIF

SEQ ID NO: 293844 - protein, 14 aa, Homo sapiens
  CDR3 for beta chain variable domain of TCR clone 146922 (TRBV7-9, TRBJ2-3)
CASSLEDGTDTQYF

SEQ ID NO: 293845 - protein, 15 aa, Homo sapiens
  CDR3 for alpha chain variable domain of TCR clone 146923 (TRAV8-3, TRAJ45)
CASSYSGGGADGLTF

SEQ ID NO: 293846 - protein, 12 aa, Homo sapiens
  CDR3 for beta chain variable domain of TCR clone 146923 (TRBV12-4, TRBJ2-7)
CASSLGGYEQDF

SEQ ID NO: 293847 - protein, 14 aa, Homo sapiens
  CDR3 for alpha chain variable domain of TCR clone 146924 (TRAV1-2, TRAJ8)
CAVRKDTGSQKLVF

SEQ ID NO: 293848 - protein, 15 aa, Homo sapiens
  CDR3 for beta chain variable domain of TCR clone 146924 (TRBV6-3, TRBJ2-7)
CASSSPGTVFYEQYF

SEQ ID NO: 293849 - protein, 13 aa, Homo sapiens
  CDR3 for alpha chain variable domain of TCR clone 146925 (TRAV13-1, TRAJ12)
CAASPDSSYKWIF

SEQ ID NO: 293850 - protein, 16 aa, Homo sapiens
  CDR3 for beta chain variable domain of TCR clone 146925 (TRBV15, TRBJ2-1)
CATSRERLAGAYEQFF

SEQ ID NO: 293851 - protein, 11 aa, Homo sapiens
  CDR3 for alpha chain variable domain of TCR clone 146926 (TRAV3, TRAJ20)
CAVRDGYKLSF

SEQ ID NO: 293852 - protein, 12 aa, Homo sapiens
  CDR3 for beta chain variable domain of TCR clone 146926 (TRBV11-2, TRBJ2-2)
CASSLPTGELFF

SEQ ID NO: 293853 - protein, 12 aa, Homo sapiens
  CDR3 for alpha chain variable domain of TCR clone 146927 (TRAV9-2, TRAJ26)
CALRGYGQNFVF

SEQ ID NO: 293854 - protein, 16 aa, Homo sapiens
  CDR3 for beta chain variable domain of TCR clone 146927 (TRBV19, TRBJ2-1)
CASSKAGPSSYNEQFF

SEQ ID NO: 293855 - protein, 15 aa, Homo sapiens
  CDR3 for alpha chain variable domain of TCR clone 146928 (TRAV34, TRAJ38)
CGAGFTPGNNRKLIW

SEQ ID NO: 293856 - protein, 12 aa, Homo sapiens
  CDR3 for beta chain variable domain of TCR clone 146928 (TRBV19, TRBJ1-5)
CASRIAQQPQHF

SEQ ID NO: 293857 - protein, 12 aa, Homo sapiens
  CDR3 for alpha chain variable domain of TCR clone 146929 (TRAV35, TRAJ39)
LAPNNAGNMLPF

SEQ ID NO: 293858 - protein, 16 aa, Homo sapiens
  CDR3 for beta chain variable domain of TCR clone 146929 (TRBV2, TRBJ2-3)
CASSTSVDGVTDTQYF

SEQ ID NO: 293859 - protein, 14 aa, Homo sapiens
  CDR3 for alpha chain variable domain of TCR clone 146930 (TRAV1-2, TRAJ8)
CAVREDTGFQKLVF

SEQ ID NO: 293860 - protein, 19 aa, Homo sapiens
  CDR3 for beta chain variable domain of TCR clone 146930 (TRBV28, TRBJ2-1)
CASSFSIRGSGRTRHEQFF

SEQ ID NO: 293861 - protein, 13 aa, Homo sapiens
  CDR3 for alpha chain variable domain of TCR clone 146931 (TRAV38-2/DV8, TRAJ53)
CASGGGSNSKLTF

SEQ ID NO: 293862 - protein, 16 aa, Homo sapiens
  CDR3 for beta chain variable domain of TCR clone 146931 (TRBV28, TRBJ1-5)
CASRFRGAVQNQPQHF

SEQ ID NO: 293863 - protein, 14 aa, Homo sapiens
  CDR3 for alpha chain variable domain of TCR clone 146932 (TRAV1-2, TRAJ16)
CAVNRFSDGQQLLF

SEQ ID NO: 293864 - protein, 13 aa, Homo sapiens
  CDR3 for beta chain variable domain of TCR clone 146932 (TRBV29-1, TRBJ1-1)
CSVGDSRNTDAFF

SEQ ID NO: 293865 - protein, 13 aa, Homo sapiens
  CDR3 for alpha chain variable domain of TCR clone 146933 (TRAV26-1, TRAJ34)
CIVRPWITDKLIF

SEQ ID NO: 293866 - protein, 13 aa, Homo sapiens
  CDR3 for beta chain variable domain of TCR clone 146933 (TRBV5-1, TRBJ2-1)
CASGWGSYNEQFF

SEQ ID NO: 293867 - protein, 16 aa, Homo sapiens
  CDR3 for alpha chain variable domain of TCR clone 146934 (TRAV35, TRAJ28)
CAGQRYAGAGSYQLTF

SEQ ID NO: 293868 - protein, 13 aa, Homo sapiens
  CDR3 for beta chain variable domain of TCR clone 146934 (TRBV19, TRBJ1-2)
CASSQGQVYGYTF

SEQ ID NO: 293869 - protein, 14 aa, Homo sapiens
  CDR3 for alpha chain variable domain of TCR clone 146935 (TRAV16, TRAJ33)
CALSAMDSNYQLIW

SEQ ID NO: 293870 - protein, 14 aa, Homo sapiens
  CDR3 for beta chain variable domain of TCR clone 146935 (TRBV19, TRBJ2-1)
CASSKDRGQDEQFF

SEQ ID NO: 293871 - protein, 20 aa, Homo sapiens
  CDR3 for alpha chain variable domain of TCR clone 146936 (TRAV13-1, TRAJ28)
CAASPVPILWGWELPTHFRE

SEQ ID NO: 293872 - protein, 13 aa, Homo sapiens
  CDR3 for beta chain variable domain of TCR clone 146936 (TRBV15, TRBJ2-7)
CATSTTGHYEQYF

SEQ ID NO: 293873 - protein, 12 aa, Homo sapiens
  CDR3 for alpha chain variable domain of TCR clone 146937 (TRAV8-3, TRAJ20)
CAVGANDYKLSF

SEQ ID NO: 293874 - protein, 15 aa, Homo sapiens
  CDR3 for beta chain variable domain of TCR clone 146937 (TRBV7-3, TRBJ2-1)
CASSPTGGGEVEQFF

SEQ ID NO: 293875 - protein, 13 aa, Homo sapiens
  CDR3 for alpha chain variable domain of TCR clone 146938 (TRAV21, TRAJ27)
CAARPGNAGKSTF

SEQ ID NO: 293876 - protein, 15 aa, Homo sapiens
  CDR3 for beta chain variable domain of TCR clone 146938 (TRBV11-3, TRBJ2-7)
CASSPGPASSYGQYF

SEQ ID NO: 293877 - protein, 14 aa, Homo sapiens
  CDR3 for alpha chain variable domain of TCR clone 146939 (TRAV12-2, TRAJ24)
CAVTPADSWGKLQF

SEQ ID NO: 293878 - protein, 22 aa, Homo sapiens
  CDR3 for beta chain variable domain of TCR clone 146939 (TRBV6-4, TRBJ2-3)
CTSVLAAPTGGGRAWGTDTQYF

SEQ ID NO: 293879 - protein, 18 aa, Homo sapiens
  CDR3 for alpha chain variable domain of TCR clone 146940 (TRAV21, TRAJ52)
CAVRPSPAGGTNYGKLTF

SEQ ID NO: 293880 - protein, 13 aa, Homo sapiens
  CDR3 for beta chain variable domain of TCR clone 146940 (TRBV29-1, TRBJ2-2)
CSVYREDTGELFF

SEQ ID NO: 293881 - protein, 15 aa, Homo sapiens
  CDR3 for alpha chain variable domain of TCR clone 146941 (TRAV35, TRAJ42)
CVGQGYGGSQGNLIF

SEQ ID NO: 293882 - protein, 13 aa, Homo sapiens
  CDR3 for beta chain variable domain of TCR clone 146941 (TRBV7-2, TRBJ1-1)
CASSLVQGAEAFF

SEQ ID NO: 293883 - protein, 13 aa, Homo sapiens
  CDR3 for alpha chain variable domain of TCR clone 146942 (TRAV2, TRAJ40)
CAVVTSGTYKYIF

SEQ ID NO: 293884 - protein, 14 aa, Homo sapiens
  CDR3 for beta chain variable domain of TCR clone 146942 (TRBV19, TRBJ2-1)
CPSPTFVLSGEQSF

SEQ ID NO: 293885 - protein, 13 aa, Homo sapiens
  CDR3 for alpha chain variable domain of TCR clone 146943 (TRAV8-3, TRAJ23)
CAGIYNQGGKLIF

SEQ ID NO: 293886 - protein, 11 aa, Homo sapiens
  CDR3 for beta chain variable domain of TCR clone 146943 (TRBV11-2, TRBJ2-2)
CASSLPGELFF

SEQ ID NO: 293887 - protein, 13 aa, Homo sapiens
  CDR3 for alpha chain variable domain of TCR clone 146944 (TRAV35, TRAJ42)
CAGFPGSRGNLIF

SEQ ID NO: 293888 - protein, 14 aa, Homo sapiens
  CDR3 for beta chain variable domain of TCR clone 146944 (TRBV19, TRBJ2-1)
CASPTFVLSGEQFF

SEQ ID NO: 293889 - protein, 13 aa, Homo sapiens
  CDR3 for alpha chain variable domain of TCR clone 146945 (TRAV1-2, TRAJ9)
CAALNTGGFKTIF

SEQ ID NO: 293890 - protein, 16 aa, Homo sapiens
  CDR3 for beta chain variable domain of TCR clone 146945 (TRBV11-2, TRBJ1-1)
CASSLRQGGEHSKAFF

SEQ ID NO: 293891 - protein, 14 aa, Homo sapiens
  CDR3 for alpha chain variable domain of TCR clone 146946 (TRAV17, TRAJ15)
CATDRGQAGTALIF

SEQ ID NO: 293892 - protein, 17 aa, Homo sapiens
  CDR3 for beta chain variable domain of TCR clone 146946 (TRBV29-1, TRBJ2-1)
CSVVGLAGAYSYNAQFF

SEQ ID NO: 293893 - protein, 18 aa, Homo sapiens
  CDR3 for alpha chain variable domain of TCR clone 146947 (TRAV21, TRAJ52)
CAVRPSPAGGTSYGKLTF

SEQ ID NO: 293894 - protein, 14 aa, Homo sapiens
  CDR3 for beta chain variable domain of TCR clone 146947 (TRBV9, TRBJ1-2)
CASSVSGTLYGYTF

SEQ ID NO: 293895 - protein, 14 aa, Homo sapiens
  CDR3 for alpha chain variable domain of TCR clone 146948 (TRAV12-3, TRAJ10)
SHLPLTGGGNKLTF

SEQ ID NO: 293896 - protein, 17 aa, Homo sapiens
  CDR3 for beta chain variable domain of TCR clone 146948 (TRBV19, TRBJ2-3)
CASSIDPAGGGTDTQYF

SEQ ID NO: 293897 - protein, 16 aa, Homo sapiens
  CDR3 for alpha chain variable domain of TCR clone 146949 (TRAV26-1, TRAJ53)
CIVRVAMGGSNYKLTF

SEQ ID NO: 293898 - protein, 12 aa, Homo sapiens
  CDR3 for beta chain variable domain of TCR clone 146949 (TRBV7-9, TRBJ1-5)
CASSPPGQPQHF

SEQ ID NO: 293899 - protein, 16 aa, Homo sapiens
  CDR3 for alpha chain variable domain of TCR clone 146950 (TRAV30, TRAJ24)
CGTEIVDADSWGKFEF

SEQ ID NO: 293900 - protein, 13 aa, Homo sapiens
  CDR3 for beta chain variable domain of TCR clone 146950 (TRBV18, TRBJ1-2)
CASSASATEGYTF

SEQ ID NO: 293901 - protein, 14 aa, Homo sapiens
  CDR3 for alpha chain variable domain of TCR clone 146951 (TRAV21, TRAJ45)
CSVHSGGGADGLTF

SEQ ID NO: 293902 - protein, 14 aa, Homo sapiens
  CDR3 for beta chain variable domain of TCR clone 146951 (TRBV20-1, TRBJ2-1)
CSARRLAEANEQFF

SEQ ID NO: 293903 - protein, 18 aa, Homo sapiens
  CDR3 for alpha chain variable domain of TCR clone 146952 (TRAV13-1, TRAJ52)
CAASKRSAGGTSYGKLTF

SEQ ID NO: 293904 - protein, 14 aa, Homo sapiens
  CDR3 for beta chain variable domain of TCR clone 146952 (TRBV12-4, TRBJ1-1)
CASSLRSSGTEAFF

SEQ ID NO: 293905 - protein, 13 aa, Homo sapiens
  CDR3 for alpha chain variable domain of TCR clone 146953 (TRAV20, TRAJ37)
CAGCSSNTGKLIF

SEQ ID NO: 293906 - protein, 13 aa, Homo sapiens
  CDR3 for beta chain variable domain of TCR clone 146953 (TRBV25-1, TRBJ2-5)
CASSESGRETQYF

SEQ ID NO: 293907 - protein, 14 aa, Homo sapiens
  CDR3 for alpha chain variable domain of TCR clone 146954 (TRAV34, TRAJ44)
CGADGTGTASKLTF

SEQ ID NO: 293908 - protein, 15 aa, Homo sapiens
  CDR3 for beta chain variable domain of TCR clone 146954 (TRBV5-1, TRBJ2-7)
CASSPQGRPLDEQYF

SEQ ID NO: 293909 - protein, 16 aa, Homo sapiens
  CDR3 for alpha chain variable domain of TCR clone 146955 (TRAV17, TRAJ52)
CATDPMGGTSYGKLTF

SEQ ID NO: 293910 - protein, 17 aa, Homo sapiens
  CDR3 for beta chain variable domain of TCR clone 146955 (TRBV28, TRBJ2-7)
CASSPLRGRRWKGGQYF

SEQ ID NO: 293911 - protein, 14 aa, Homo sapiens
  CDR3 for alpha chain variable domain of TCR clone 146956 (TRAV12-2, TRAJ45)
CAVYIGGGADGLTF

SEQ ID NO: 293912 - protein, 13 aa, Homo sapiens
  CDR3 for beta chain variable domain of TCR clone 146956 (TRBV19, TRBJ2-2)
CASSIWSTGELFF

SEQ ID NO: 293913 - protein, 14 aa, Homo sapiens
  CDR3 for alpha chain variable domain of TCR clone 146957 (TRAV23/DV6, TRAJ13)
CAAMYSGGDQKVTF

SEQ ID NO: 293914 - protein, 14 aa, Homo sapiens
  CDR3 for beta chain variable domain of TCR clone 146957 (TRBV7-9, TRBJ2-1)
CASSPRDSLYEQFF

SEQ ID NO: 293915 - protein, 13 aa, Homo sapiens
  CDR3 for alpha chain variable domain of TCR clone 146958 (TRAV13-1, TRAJ21)
CAASKGNFNKFYF

SEQ ID NO: 293916 - protein, 14 aa, Homo sapiens
  CDR3 for beta chain variable domain of TCR clone 146958 (TRBV5-1, TRBJ1-1)
CASSTEGMNTEAFF

SEQ ID NO: 293917 - protein, 14 aa, Homo sapiens
  CDR3 for alpha chain variable domain of TCR clone 146959 (TRAV1-2, TRAJ16)
CAVNRLSDGQKLLF

SEQ ID NO: 293918 - protein, 14 aa, Homo sapiens
  CDR3 for beta chain variable domain of TCR clone 146959 (TRBV12-5, TRBJ2-5)
CASGSRTHQETQFF

SEQ ID NO: 293919 - protein, 15 aa, Homo sapiens
  CDR3 for alpha chain variable domain of TCR clone 146960 (TRAV35, TRAJ50)
CAGQLRKTSYDKVIF

SEQ ID NO: 293920 - protein, 12 aa, Homo sapiens
  CDR3 for beta chain variable domain of TCR clone 146960 (TRBV5-1, TRBJ2-5)
CASSLGLATQYF

SEQ ID NO: 293921 - protein, 12 aa, Homo sapiens
  CDR3 for alpha chain variable domain of TCR clone 146961 (TRAV12-2, TRAJ9)
CAVNTGGFKTIF

SEQ ID NO: 293922 - protein, 14 aa, Homo sapiens
  CDR3 for beta chain variable domain of TCR clone 146961 (TRBV5-1, TRBJ2-7)
CASSRGEALYEQYF

SEQ ID NO: 293923 - protein, 23 aa, Homo sapiens
  CDR3 for alpha chain variable domain of TCR clone 146962 (TRAV6, TRAJ34)
ISQPPSLQTQLPTSVPYTDKLIF

SEQ ID NO: 293924 - protein, 15 aa, Homo sapiens
  CDR3 for beta chain variable domain of TCR clone 146962 (TRBV11-2, TRBJ1-3)
CASSLDGTVGNTIYF

SEQ ID NO: 293925 - protein, 11 aa, Homo sapiens
  CDR3 for alpha chain variable domain of TCR clone 146963 (TRAV8-4, TRAJ34)
CAVSWTDKLIF

SEQ ID NO: 293926 - protein, 16 aa, Homo sapiens
  CDR3 for beta chain variable domain of TCR clone 146963 (TRBV6-1, TRBJ2-5)
CASSETLDRGAETQYF

SEQ ID NO: 293927 - protein, 13 aa, Homo sapiens
  CDR3 for alpha chain variable domain of TCR clone 146964 (TRAV21, TRAJ27)
CAARPGNAGKSTF

SEQ ID NO: 293928 - protein, 13 aa, Homo sapiens
  CDR3 for beta chain variable domain of TCR clone 146964 (TRBV20-1, TRBJ1-1)
GSARGGGNTEAFF

SEQ ID NO: 293929 - protein, 16 aa, Homo sapiens
  CDR3 for alpha chain variable domain of TCR clone 146965 (TRAV3, TRAJ37)
CAVRGKESGNTGKLIF

SEQ ID NO: 293930 - protein, 15 aa, Homo sapiens
  CDR3 for beta chain variable domain of TCR clone 146965 (TRBV9, TRBJ1-4)
CASSVGGSTNEKLFF

SEQ ID NO: 293931 - protein, 17 aa, Homo sapiens
  CDR3 for alpha chain variable domain of TCR clone 146966 (TRAV26-2, TRAJ42)
CILRDVGYGGSQGNIIF

SEQ ID NO: 293932 - protein, 16 aa, Homo sapiens
  CDR3 for beta chain variable domain of TCR clone 146966 (TRBV12-4, TRBJ2-7)
CASSWIGGTGTYEQYF

SEQ ID NO: 293933 - protein, 12 aa, Homo sapiens
  CDR3 for alpha chain variable domain of TCR clone 146967 (TRAV20, TRAJ39)
CAVGNAGNMLIF

SEQ ID NO: 293934 - protein, 17 aa, Homo sapiens
  CDR3 for beta chain variable domain of TCR clone 146967 (TRBV4-1, TRBJ2-3)
CASSQGYVSGGTDTQYF

SEQ ID NO: 293935 - protein, 17 aa, Homo sapiens
  CDR3 for alpha chain variable domain of TCR clone 146968 (TRAV3, TRAJ42)
CAVRDRDYGGSQGNLIF

SEQ ID NO: 293936 - protein, 16 aa, Homo sapiens
  CDR3 for beta chain variable domain of TCR clone 146968 (TRBV2, TRBJ2-1)
CASRSPAGGKYNEQFF

SEQ ID NO: 293937 - protein, 14 aa, Homo sapiens
  CDR3 for alpha chain variable domain of TCR clone 146969 (TRAV12-1, TRAJ27)
CGEHIRTNAGKSTF

SEQ ID NO: 293938 - protein, 14 aa, Homo sapiens
  CDR3 for beta chain variable domain of TCR clone 146969 (TRBV19, TRBJ2-1)
CASPTFVLSGEQFF

SEQ ID NO: 293939 - protein, 13 aa, Homo sapiens
  CDR3 for alpha chain variable domain of TCR clone 146970 (TRAV13-2, TRAJ54)
CAERYQGAQKLVF

SEQ ID NO: 293940 - protein, 16 aa, Homo sapiens
  CDR3 for beta chain variable domain of TCR clone 146970 (TRBV12-4, TRBJ2-5)
CASSFFVRGRQETQYF

SEQ ID NO: 293941 - protein, 10 aa, Homo sapiens
  CDR3 for alpha chain variable domain of TCR clone 146971 (TRAV2, TRAJ43)
CCGNNNDMRF

SEQ ID NO: 293942 - protein, 14 aa, Homo sapiens
  CDR3 for beta chain variable domain of TCR clone 146971 (TRBV5-5, TRBJ1-5)
CASSGQGVDQPQHF

SEQ ID NO: 293943 - protein, 16 aa, Homo sapiens
  CDR3 for alpha chain variable domain of TCR clone 146972 (TRAV23/DV6, TRAJ9)
CAASIGGNTGGFKTIF

SEQ ID NO: 293944 - protein, 14 aa, Homo sapiens
  CDR3 for beta chain variable domain of TCR clone 146972 (TRBV7-9, TRBJ2-5)
CASSLVGGEETQYF

SEQ ID NO: 293945 - protein, 13 aa, Homo sapiens
  CDR3 for alpha chain variable domain of TCR clone 146973 (TRAV8-1, TRAJ15)
CAVKNQAGTALIF

SEQ ID NO: 293946 - protein, 16 aa, Homo sapiens
  CDR3 for beta chain variable domain of TCR clone 146973 (TRBV28, TRBJ2-7)
CASSLFFETGGPEQYF

SEQ ID NO: 293947 - protein, 17 aa, Homo sapiens
  CDR3 for alpha chain variable domain of TCR clone 146974 (TRAV38-1, TRAJ45)
CAFMRSHSGGGADGLTF

SEQ ID NO: 293948 - protein, 15 aa, Homo sapiens
  CDR3 for beta chain variable domain of TCR clone 146974 (TRBV7-2, TRBJ2-3)
CASSLVVRGPDTQYC

SEQ ID NO: 293949 - protein, 16 aa, Homo sapiens
  CDR3 for alpha chain variable domain of TCR clone 146975 (TRAV1-2, TRAJ10)
CAVRGVLTGGGNNLTF

SEQ ID NO: 293950 - protein, 12 aa, Homo sapiens
  CDR3 for beta chain variable domain of TCR clone 146975 (TRBV7-8, TRBJ2-7)
CASSIGDREQYF

SEQ ID NO: 293951 - protein, 16 aa, Homo sapiens
  CDR3 for alpha chain variable domain of TCR clone 146976 (TRAV16, TRAJ42)
CARKMNYGGSQGNLLF

SEQ ID NO: 293952 - protein, 13 aa, Homo sapiens
  CDR3 for beta chain variable domain of TCR clone 146976 (TRBV20-1, TRBJ2-7)
CSASPPSSYEQYF

SEQ ID NO: 293953 - protein, 15 aa, Homo sapiens
  CDR3 for alpha chain variable domain of TCR clone 146977 (TRAV12-1, TRAJ44)
CVVDTPQGTTSKLTF

SEQ ID NO: 293954 - protein, 13 aa, Homo sapiens
  CDR3 for beta chain variable domain of TCR clone 146977 (TRBV27, TRBJ2-1)
CASSSGSYNEQFF

SEQ ID NO: 293955 - protein, 14 aa, Homo sapiens
  CDR3 for alpha chain variable domain of TCR clone 146978 (TRAV13-1, TRAJ3)
CAASKSSSASKIIF

SEQ ID NO: 293956 - protein, 16 aa, Homo sapiens
  CDR3 for beta chain variable domain of TCR clone 146978 (TRBV15, TRBJ2-3)
CATSRDLGIVTDTQYL

SEQ ID NO: 293957 - protein, 12 aa, Homo sapiens
  CDR3 for alpha chain variable domain of TCR clone 146979 (TRAV3, TRAJ20)
CAVRDGDYKISF

SEQ ID NO: 293958 - protein, 13 aa, Homo sapiens
  CDR3 for beta chain variable domain of TCR clone 146979 (TRBV9, TRBJ2-1)
CASSVGQGGEQFF

SEQ ID NO: 293959 - protein, 14 aa, Homo sapiens
  CDR3 for alpha chain variable domain of TCR clone 146980 (TRAV12-3, TRAJ10)
SRLPLTGGGNKLTF

SEQ ID NO: 293960 - protein, 16 aa, Homo sapiens
  CDR3 for beta chain variable domain of TCR clone 146980 (TRBV14, TRBJ2-2)
CASSRSLGDDTGELFF

SEQ ID NO: 293961 - protein, 14 aa, Homo sapiens
  CDR3 for alpha chain variable domain of TCR clone 146981 (TRAV17, TRAJ39)
CATDPVRAGNMLTF

SEQ ID NO: 293962 - protein, 15 aa, Homo sapiens
  CDR3 for beta chain variable domain of TCR clone 146981 (TRBV13, TRBJ1-5)
CASRFGQGGVQHQHF

SEQ ID NO: 293963 - protein, 15 aa, Homo sapiens
  CDR3 for alpha chain variable domain of TCR clone 146982 (TRAV8-3, TRAJ27)
CAVSPSKTHAGKSTF

SEQ ID NO: 293964 - protein, 15 aa, Homo sapiens
  CDR3 for beta chain variable domain of TCR clone 146982 (TRBV7-2, TRBJ2-1)
CASSSGLAGGNEQFF

SEQ ID NO: 293965 - protein, 14 aa, Homo sapiens
  CDR3 for alpha chain variable domain of TCR clone 146983 (TRAV12-1, TRAJ30)
CVVNIGGRDDKIIF

SEQ ID NO: 293966 - protein, 14 aa, Homo sapiens
  CDR3 for beta chain variable domain of TCR clone 146983 (TRBV7-6, TRBJ2-3)
CASSLGTVTETQYF

SEQ ID NO: 293967 - protein, 14 aa, Homo sapiens
  CDR3 for alpha chain variable domain of TCR clone 146984 (TRAV17, TRAJ16)
CPTADFSDGQKLLF

SEQ ID NO: 293968 - protein, 12 aa, Homo sapiens
  CDR3 for beta chain variable domain of TCR clone 146984 (TRBV24-1, TRBJ1-1)
CATLYPDTEAFF

SEQ ID NO: 293969 - protein, 16 aa, Homo sapiens
  CDR3 for alpha chain variable domain of TCR clone 146985 (TRAV12-2, TRAJ52)
CAVNNRGGTSYGKLTF

SEQ ID NO: 293970 - protein, 12 aa, Homo sapiens
  CDR3 for beta chain variable domain of TCR clone 146985 (TRBV11-2, TRBJ2-2)
CASSLGGGELFF

SEQ ID NO: 293971 - protein, 16 aa, Homo sapiens
  CDR3 for alpha chain variable domain of TCR clone 146986 (TRAV17, TRAJ52)
CATDGAGGTSYGKLTF

SEQ ID NO: 293972 - protein, 14 aa, Homo sapiens
  CDR3 for beta chain variable domain of TCR clone 146986 (TRBV6-1, TRBJ2-1)
CASSLELAGLWEFF

SEQ ID NO: 293973 - protein, 18 aa, Homo sapiens
  CDR3 for alpha chain variable domain of TCR clone 146987 (TRAV26-1, TRAJ52)
RIVRVAGAGGTSYGKLTF

SEQ ID NO: 293974 - protein, 13 aa, Homo sapiens
  CDR3 for beta chain variable domain of TCR clone 146987 (TRBV7-8, TRBJ1-2)
CASSAQSYYGYTF

SEQ ID NO: 293975 - protein, 13 aa, Homo sapiens
  CDR3 for alpha chain variable domain of TCR clone 146988 (TRAV21, TRAJ27)
CAARPGNAGKSTS

SEQ ID NO: 293976 - protein, 14 aa, Homo sapiens
  CDR3 for beta chain variable domain of TCR clone 146988 (TRBV7-9, TRBJ2-5)
CASSLDTAQETQYF

SEQ ID NO: 293977 - protein, 16 aa, Homo sapiens
  CDR3 for alpha chain variable domain of TCR clone 146989 (TRAV4, TRAJ18)
CCVLLIGGSTLGRLYF

SEQ ID NO: 293978 - protein, 14 aa, Homo sapiens
  CDR3 for beta chain variable domain of TCR clone 146989 (TRBV2, TRBJ2-3)
CASTAQTSTDTQYF

SEQ ID NO: 293979 - protein, 14 aa, Homo sapiens
  CDR3 for alpha chain variable domain of TCR clone 146990 (TRAV12-2, TRAJ53)
CAVKGGGSNYKLTF

SEQ ID NO: 293980 - protein, 13 aa, Homo sapiens
  CDR3 for beta chain variable domain of TCR clone 146990 (TRBV19, TRBJ1-2)
CASSVPGQDGYTF

SEQ ID NO: 293981 - protein, 18 aa, Homo sapiens
  CDR3 for alpha chain variable domain of TCR clone 146991 (TRAV26-2, TRAJ45)
CILRVDKYSGGGADGLTF

SEQ ID NO: 293982 - protein, 11 aa, Homo sapiens
  CDR3 for beta chain variable domain of TCR clone 146991 (TRBV12-4, TRBJ2-3)
CASTATDTQYF

SEQ ID NO: 293983 - protein, 14 aa, Homo sapiens
  CDR3 for alpha chain variable domain of TCR clone 146992 (TRAV9-2, TRAJ39)
CALYIYNAGNMLTF

SEQ ID NO: 293984 - protein, 18 aa, Homo sapiens
  CDR3 for beta chain variable domain of TCR clone 146992 (TRBV5-5, TRBJ1-5)
CASSLRQVKGSSNQPQHF

SEQ ID NO: 293985 - protein, 16 aa, Homo sapiens
  CDR3 for alpha chain variable domain of TCR clone 146993 (TRAV30, TRAJ24)
CGTEIVDADSWGKFQF

SEQ ID NO: 293986 - protein, 17 aa, Homo sapiens
  CDR3 for beta chain variable domain of TCR clone 146993 (TRBV20-1, TRBJ2-1)
CSARDSRRASSYNEQFF

SEQ ID NO: 293987 - protein, 14 aa, Homo sapiens
  CDR3 for alpha chain variable domain of TCR clone 146994 (TRAV12-2, TRAJ36)
CAVNPPTGANNLYF

SEQ ID NO: 293988 - protein, 13 aa, Homo sapiens
  CDR3 for beta chain variable domain of TCR clone 146994 (TRBV20-1, TRBJ1-6)
CSAPTGLGSPLHF

SEQ ID NO: 293989 - protein, 16 aa, Homo sapiens
  CDR3 for alpha chain variable domain of TCR clone 146995 (TRAV12-1, TRAJ12)
CVVNTLLMDISYKLIF

SEQ ID NO: 293990 - protein, 12 aa, Homo sapiens
  CDR3 for beta chain variable domain of TCR clone 146995 (TRBV20-1, TRBJ2-7)
CSAITPTKEQYF

SEQ ID NO: 293991 - protein, 14 aa, Homo sapiens
  CDR3 for alpha chain variable domain of TCR clone 146996 (TRAV12-2, TRAJ11)
CAGNMNSGYGTLTF

SEQ ID NO: 293992 - protein, 13 aa, Homo sapiens
  CDR3 for beta chain variable domain of TCR clone 146996 (TRBV6-1, TRBJ1-2)
CASSDSPSYGYTF

SEQ ID NO: 293993 - protein, 18 aa, Homo sapiens
  CDR3 for alpha chain variable domain of TCR clone 146997 (TRAV26-1, TRAJ30)
CCVLLHRQSTSRYDKIIF

SEQ ID NO: 293994 - protein, 18 aa, Homo sapiens
  CDR3 for beta chain variable domain of TCR clone 146997 (TRBV4-1, TRBJ1-5)
CASSQDPRGQGLNQPQHF

SEQ ID NO: 293995 - protein, 14 aa, Homo sapiens
  CDR3 for alpha chain variable domain of TCR clone 146998 (TRAV29/DV5, TRAJ44)
CAAFLVGTASKLTF

SEQ ID NO: 293996 - protein, 15 aa, Homo sapiens
  CDR3 for beta chain variable domain of TCR clone 146998 (TRBV7-3, TRBJ2-2)
CASSQTGQGTGELFF

SEQ ID NO: 293997 - protein, 15 aa, Homo sapiens
  CDR3 for alpha chain variable domain of TCR clone 146999 (TRAV2, TRAJ15)
CAVEDWGQAGTALIF

SEQ ID NO: 293998 - protein, 13 aa, Homo sapiens
  CDR3 for beta chain variable domain of TCR clone 146999 (TRBV10-2, TRBJ2-7)
CASGASGGYEQYV

SEQ ID NO: 293999 - protein, 16 aa, Homo sapiens
  CDR3 for alpha chain variable domain of TCR clone 147000 (TRAV26-2, TRAJ45)
CTTASHIGGGADGLTF

SEQ ID NO: 294000 - protein, 20 aa, Homo sapiens
  CDR3 for beta chain variable domain of TCR clone 147000 (TRBV28, TRBJ2-1)
CASTPIGRSPGLAGGNEQFF

SEQ ID NO: 294001 - protein, 19 aa, Homo sapiens
  CDR3 for alpha chain variable domain of TCR clone 147001 (TRAV13-1, TRAJ52)
CAASPYQNDGGTSYGKLTF

SEQ ID NO: 294002 - protein, 14 aa, Homo sapiens
  CDR3 for beta chain variable domain of TCR clone 147001 (TRBV19, TRBJ2-7)
CASTVQGRPYEQYF

SEQ ID NO: 294003 - protein, 15 aa, Homo sapiens
  CDR3 for alpha chain variable domain of TCR clone 147002 (TRAV8-4, TRAJ11)
CAVSRALSGYSTLAF

SEQ ID NO: 294004 - protein, 13 aa, Homo sapiens
  CDR3 for beta chain variable domain of TCR clone 147002 (TRBV10-3, TRBJ2-7)
CASKLAVNYEQYF

SEQ ID NO: 294005 - protein, 14 aa, Homo sapiens
  CDR3 for alpha chain variable domain of TCR clone 147003 (TRAV12-2, TRAJ16)
CAVNRFSDGQKLLF

SEQ ID NO: 294006 - protein, 14 aa, Homo sapiens
  CDR3 for beta chain variable domain of TCR clone 147003 (TRBV19, TRBJ2-1)
CASPTFVLSGEQFF

SEQ ID NO: 294007 - protein, 17 aa, Homo sapiens
  CDR3 for alpha chain variable domain of TCR clone 147004 (TRAV14/DV4, TRAJ42)
CAMRGKFYGGSQGNLIF

SEQ ID NO: 294008 - protein, 14 aa, Homo sapiens
  CDR3 for beta chain variable domain of TCR clone 147004 (TRBV18, TRBJ2-7)
CASSPRGGAYEQYF

SEQ ID NO: 294009 - protein, 15 aa, Homo sapiens
  CDR3 for alpha chain variable domain of TCR clone 147005 (TRAV21, TRAJ24)
CAARSSTDSWGKLQF

SEQ ID NO: 294010 - protein, 11 aa, Homo sapiens
  CDR3 for beta chain variable domain of TCR clone 147005 (TRBV10-3, TRBJ2-7)
CAISEGLEQYF

SEQ ID NO: 294011 - protein, 14 aa, Homo sapiens
  CDR3 for alpha chain variable domain of TCR clone 147006 (TRAV2, TRAJ9)
CAVEDRSGGFKTIF

SEQ ID NO: 294012 - protein, 11 aa, Homo sapiens
  CDR3 for beta chain variable domain of TCR clone 147006 (TRBV5-6, TRBJ2-5)
CASSLERTQYF

SEQ ID NO: 294013 - protein, 16 aa, Homo sapiens
  CDR3 for alpha chain variable domain of TCR clone 147007 (TRAV23/DV6, TRAJ9)
CAASIGGNTGGFKTIF

SEQ ID NO: 294014 - protein, 17 aa, Homo sapiens
  CDR3 for beta chain variable domain of TCR clone 147007 (TRBV5-5, TRBJ1-2)
CASSLGSLDGQSEGYTF

SEQ ID NO: 294015 - protein, 15 aa, Homo sapiens
  CDR3 for alpha chain variable domain of TCR clone 147008 (TRAV26-1, TRAJ39)
CIVRDGSNAGNMLAF

SEQ ID NO: 294016 - protein, 14 aa, Homo sapiens
  CDR3 for beta chain variable domain of TCR clone 147008 (TRBV10-3, TRBJ1-2)
CAIRAGTGDYGYTF

SEQ ID NO: 294017 - protein, 14 aa, Homo sapiens
  CDR3 for alpha chain variable domain of TCR clone 147009 (TRAV12-2, TRAJ13)
CAVKKTGGYQKVTF

SEQ ID NO: 294018 - protein, 13 aa, Homo sapiens
  CDR3 for beta chain variable domain of TCR clone 147009 (TRBV19, TRBJ1-2)
CAISVPGQDGCTF

SEQ ID NO: 294019 - protein, 15 aa, Homo sapiens
  CDR3 for alpha chain variable domain of TCR clone 147010 (TRAV1-2, TRAJ39)
CAVEGVDNAGNMLNF

SEQ ID NO: 294020 - protein, 13 aa, Homo sapiens
  CDR3 for beta chain variable domain of TCR clone 147010 (TRBV27, TRBJ1-6)
CASRWTGYSPLHF

SEQ ID NO: 294021 - protein, 12 aa, Homo sapiens
  CDR3 for alpha chain variable domain of TCR clone 147011 (TRAV3, TRAJ20)
CAVRDPDYKLSF

SEQ ID NO: 294022 - protein, 14 aa, Homo sapiens
  CDR3 for beta chain variable domain of TCR clone 147011 (TRBV12-4, TRBJ1-1)
CASSFSQMNTEAFF

SEQ ID NO: 294023 - protein, 14 aa, Homo sapiens
  CDR3 for alpha chain variable domain of TCR clone 147012 (TRAV12-1, TRAJ17)
CVVNYKAAGNKLTF

SEQ ID NO: 294024 - protein, 13 aa, Homo sapiens
  CDR3 for beta chain variable domain of TCR clone 147012 (TRBV7-2, TRBJ2-7)
CASSSPSGSEQYF

SEQ ID NO: 294025 - protein, 15 aa, Homo sapiens
  CDR3 for alpha chain variable domain of TCR clone 147013 (TRAV13-1, TRAJ44)
CAASLYTGTASKLTF

SEQ ID NO: 294026 - protein, 17 aa, Homo sapiens
  CDR3 for beta chain variable domain of TCR clone 147013 (TRBV19, TRBJ1-5)
CASSTGQAGYSNQPQHF

SEQ ID NO: 294027 - protein, 14 aa, Homo sapiens
  CDR3 for alpha chain variable domain of TCR clone 147014 (TRAV1-2, TRAJ8)
CAVREDTGFQKLGF

SEQ ID NO: 294028 - protein, 15 aa, Homo sapiens
  CDR3 for beta chain variable domain of TCR clone 147014 (TRBV3-1, TRBJ2-5)
CASSANLGGPETQYF

SEQ ID NO: 294029 - protein, 13 aa, Homo sapiens
  CDR3 for alpha chain variable domain of TCR clone 147015 (TRAV8-4, TRAJ9)
CAVSETGGFKTIF

SEQ ID NO: 294030 - protein, 14 aa, Homo sapiens
  CDR3 for beta chain variable domain of TCR clone 147015 (TRBV11-1, TRBJ2-7)
CASSFRQGSYEQYF

SEQ ID NO: 294031 - protein, 10 aa, Homo sapiens
  CDR3 for alpha chain variable domain of TCR clone 147016 (TRAV1-2, TRAJ31)
CVSEDDRLMF

SEQ ID NO: 294032 - protein, 14 aa, Homo sapiens
  CDR3 for beta chain variable domain of TCR clone 147016 (TRBV19, TRBJ2-1)
CASPTFVLSGEQFF

SEQ ID NO: 294033 - protein, 15 aa, Homo sapiens
  CDR3 for alpha chain variable domain of TCR clone 147017 (TRAV3, TRAJ22)
CAVRDRGGSARQLTF

SEQ ID NO: 294034 - protein, 17 aa, Homo sapiens
  CDR3 for beta chain variable domain of TCR clone 147017 (TRBV4-1, TRBJ2-7)
SASSRDPLGVRGGEQYF

SEQ ID NO: 294035 - protein, 14 aa, Homo sapiens
  CDR3 for alpha chain variable domain of TCR clone 147018 (TRAV13-1, TRAJ35)
CAASKGGFGNVLHF

SEQ ID NO: 294036 - protein, 16 aa, Homo sapiens
  CDR3 for beta chain variable domain of TCR clone 147018 (TRBV18, TRBJ1-5)
CASSPYRVEGNQPQHF

SEQ ID NO: 294037 - protein, 14 aa, Homo sapiens
  CDR3 for alpha chain variable domain of TCR clone 147019 (TRAV29/DV5, TRAJ49)
CAASAQNTGNQFYF

SEQ ID NO: 294038 - protein, 16 aa, Homo sapiens
  CDR3 for beta chain variable domain of TCR clone 147019 (TRBV12-4, TRBJ1-5)
CASRQPVEGSNQLQHF

SEQ ID NO: 294039 - protein, 14 aa, Homo sapiens
  CDR3 for alpha chain variable domain of TCR clone 147020 (TRAV1-2, TRAJ6)
CTVSLSGGSYIPTF

SEQ ID NO: 294040 - protein, 14 aa, Homo sapiens
  CDR3 for beta chain variable domain of TCR clone 147020 (TRBV13, TRBJ2-7)
CASSLSRRSYEQYF

SEQ ID NO: 294041 - protein, 16 aa, Homo sapiens
  CDR3 for alpha chain variable domain of TCR clone 147021 (TRAV22, TRAJ45)
CAVERGKREVMTDSPL

SEQ ID NO: 294042 - protein, 13 aa, Homo sapiens
  CDR3 for beta chain variable domain of TCR clone 147021 (TRBV27, TRBJ1-1)
YASSLSIGAEAFF

SEQ ID NO: 294043 - protein, 13 aa, Homo sapiens
  CDR3 for alpha chain variable domain of TCR clone 147022 (TRAV26-1, TRAJ48)
CIVRVVGDEKLIF

SEQ ID NO: 294044 - protein, 15 aa, Homo sapiens
  CDR3 for beta chain variable domain of TCR clone 147022 (TRBV28, TRBJ1-3)
CASSMGWASGNTIYF

SEQ ID NO: 294045 - protein, 15 aa, Homo sapiens
  CDR3 for alpha chain variable domain of TCR clone 147023 (TRAV8-3, TRAJ42)
CAVGARGGSQGNLIF

SEQ ID NO: 294046 - protein, 15 aa, Homo sapiens
  CDR3 for beta chain variable domain of TCR clone 147023 (TRBV27, TRBJ1-5)
CASKGQAFSAQPQHF

SEQ ID NO: 294047 - protein, 17 aa, Homo sapiens
  CDR3 for alpha chain variable domain of TCR clone 147024 (TRAV8-3, TRAJ50)
CAVGAVDTETSYDKEIF

SEQ ID NO: 294048 - protein, 13 aa, Homo sapiens
  CDR3 for beta chain variable domain of TCR clone 147024 (TRBV7-9, TRBJ2-2)
CASSSAGTGELFF

SEQ ID NO: 294049 - protein, 13 aa, Homo sapiens
  CDR3 for alpha chain variable domain of TCR clone 147025 (TRAV23/DV6, TRAJ47)
CAASMTRGNTLVF

SEQ ID NO: 294050 - protein, 14 aa, Homo sapiens
  CDR3 for beta chain variable domain of TCR clone 147025 (TRBV7-3, TRBJ1-1)
CASSLKGGNTEAFF

SEQ ID NO: 294051 - protein, 14 aa, Homo sapiens
  CDR3 for alpha chain variable domain of TCR clone 147026 (TRAV12-2, TRAJ13)
CAVKKTGGYQKVTF

SEQ ID NO: 294052 - protein, 15 aa, Homo sapiens
  CDR3 for beta chain variable domain of TCR clone 147026 (TRBV18, TRBJ2-7)
CASSPLQGRTYEQYF

SEQ ID NO: 294053 - protein, 17 aa, Homo sapiens
  CDR3 for alpha chain variable domain of TCR clone 147027 (TRAV13-2, TRAJ42)
CAEGASHYGGSQGNLIF

SEQ ID NO: 294054 - protein, 15 aa, Homo sapiens
  CDR3 for beta chain variable domain of TCR clone 147027 (TRBV7-2, TRBJ2-1)
CASTHGTGIYNEQFF

SEQ ID NO: 294055 - protein, 13 aa, Homo sapiens
  CDR3 for alpha chain variable domain of TCR clone 147028 (TRAV12-1, TRAJ16)
CVVNTRNGQKLLF

SEQ ID NO: 294056 - protein, 19 aa, Homo sapiens
  CDR3 for beta chain variable domain of TCR clone 147028 (TRBV6-1, TRBJ2-5)
CASSRFGAGGPGLEETQYL

SEQ ID NO: 294057 - protein, 15 aa, Homo sapiens
  CDR3 for alpha chain variable domain of TCR clone 147029 (TRAV27, TRAJ38)
CAARRNAGNNRKLIW

SEQ ID NO: 294058 - protein, 14 aa, Homo sapiens
  CDR3 for beta chain variable domain of TCR clone 147029 (TRBV7-8, TRBJ2-3)
CASSLEAWTDTQYF

SEQ ID NO: 294059 - protein, 13 aa, Homo sapiens
  CDR3 for alpha chain variable domain of TCR clone 147030 (TRAV12-2, TRAJ30)
CAVNLNRDDKINF

SEQ ID NO: 294060 - protein, 14 aa, Homo sapiens
  CDR3 for beta chain variable domain of TCR clone 147030 (TRBV7-8, TRBJ2-7)
CASSLGRASYEQYF

SEQ ID NO: 294061 - protein, 16 aa, Homo sapiens
  CDR3 for alpha chain variable domain of TCR clone 147031 (TRAV16, TRAJ42)
CAISGYYGGSQGNLIF

SEQ ID NO: 294062 - protein, 14 aa, Homo sapiens
  CDR3 for beta chain variable domain of TCR clone 147031 (TRBV3-1, TRBJ2-5)
CASSQAVRQETQYF

SEQ ID NO: 294063 - protein, 13 aa, Homo sapiens
  CDR3 for alpha chain variable domain of TCR clone 147032 (TRAV25, TRAJ26)
CAGMDNYGQNFVF

SEQ ID NO: 294064 - protein, 15 aa, Homo sapiens
  CDR3 for beta chain variable domain of TCR clone 147032 (TRBV7-2, TRBJ2-5)
CASSFLRGGEETQYF

SEQ ID NO: 294065 - protein, 14 aa, Homo sapiens
  CDR3 for alpha chain variable domain of TCR clone 147033 (TRAV12-3, TRAJ20)
CAMSARRGDYKLSL

SEQ ID NO: 294066 - protein, 14 aa, Homo sapiens
  CDR3 for beta chain variable domain of TCR clone 147033 (TRBV7-3, TRBJ2-3)
CASSPSARTDTQYF

SEQ ID NO: 294067 - protein, 16 aa, Homo sapiens
  CDR3 for alpha chain variable domain of TCR clone 147034 (TRAV26-1, TRAJ45)
CIVEKYSGGFADGLTF

SEQ ID NO: 294068 - protein, 15 aa, Homo sapiens
  CDR3 for beta chain variable domain of TCR clone 147034 (TRBV15, TRBJ2-7)
CHQQRPIQQAYEQYF

SEQ ID NO: 294069 - protein, 15 aa, Homo sapiens
  CDR3 for alpha chain variable domain of TCR clone 147035 (TRAV13-2, TRAJ58)
CVIAQKETSGSRLTF

SEQ ID NO: 294070 - protein, 14 aa, Homo sapiens
  CDR3 for beta chain variable domain of TCR clone 147035 (TRBV7-2, TRBJ2-3)
CASRRGLAADTQYF

SEQ ID NO: 294071 - protein, 16 aa, Homo sapiens
  CDR3 for alpha chain variable domain of TCR clone 147036 (TRAV23/DV6, TRAJ9)
CAASIGGNTGGFKTIF

SEQ ID NO: 294072 - protein, 17 aa, Homo sapiens
  CDR3 for beta chain variable domain of TCR clone 147036 (TRBV7-7, TRBJ1-4)
CASSLVGQGASNEKLFF

SEQ ID NO: 294073 - protein, 15 aa, Homo sapiens
  CDR3 for alpha chain variable domain of TCR clone 147037 (TRAV27, TRAJ38)
CAARRNAGNNRKLIF

SEQ ID NO: 294074 - protein, 13 aa, Homo sapiens
  CDR3 for beta chain variable domain of TCR clone 147037 (TRBV12-5, TRBJ2-3)
CASGDRQSDTQYF

SEQ ID NO: 294075 - protein, 14 aa, Homo sapiens
  CDR3 for alpha chain variable domain of TCR clone 147038 (TRAV14/DV4, TRAJ22)
CAMSPSGSARQLPF

SEQ ID NO: 294076 - protein, 15 aa, Homo sapiens
  CDR3 for beta chain variable domain of TCR clone 147038 (TRBV2, TRBJ2-3)
CASSERSGHTDTQYF

SEQ ID NO: 294077 - protein, 11 aa, Homo sapiens
  CDR3 for alpha chain variable domain of TCR clone 147039 (TRAV23/DV6, TRAJ43)
CAASSGNDMRF

SEQ ID NO: 294078 - protein, 15 aa, Homo sapiens
  CDR3 for beta chain variable domain of TCR clone 147039 (TRBV20-1, TRBJ2-7)
CSARDRVSGMDEQYF

SEQ ID NO: 294079 - protein, 14 aa, Homo sapiens
  CDR3 for alpha chain variable domain of TCR clone 147040 (TRAV2, TRAJ9)
CAVEDRSGGFKTIF

SEQ ID NO: 294080 - protein, 12 aa, Homo sapiens
  CDR3 for beta chain variable domain of TCR clone 147040 (TRBV7-9, TRBJ2-7)
RASSLEGYEQYF

SEQ ID NO: 294081 - protein, 14 aa, Homo sapiens
  CDR3 for alpha chain variable domain of TCR clone 147041 (TRAV16, TRAJ31)
CSKWRRGDNARLMF

SEQ ID NO: 294082 - protein, 16 aa, Homo sapiens
  CDR3 for beta chain variable domain of TCR clone 147041 (TRBV28, TRBJ2-7)
CASTLFFETGGPEQYF

SEQ ID NO: 294083 - protein, 13 aa, Homo sapiens
  CDR3 for alpha chain variable domain of TCR clone 147042 (TRAV17, TRAJ4)
CATKSGGYNKLIF

SEQ ID NO: 294084 - protein, 14 aa, Homo sapiens
  CDR3 for beta chain variable domain of TCR clone 147042 (TRBV20-1, TRBJ1-5)
CSARDDMGNQPQHF

SEQ ID NO: 294085 - protein, 16 aa, Homo sapiens
  CDR3 for alpha chain variable domain of TCR clone 147043 (TRAV8-6, TRAJ23)
CAVSDRLGNQGGKLIF

SEQ ID NO: 294086 - protein, 18 aa, Homo sapiens
  CDR3 for beta chain variable domain of TCR clone 147043 (TRBV6-1, TRBJ1-6)
CASSGSDGRRINNSPLHF

SEQ ID NO: 294087 - protein, 14 aa, Homo sapiens
  CDR3 for alpha chain variable domain of TCR clone 147044 (TRAV38-1, TRAJ40)
CALRPTSGTYKYIF

SEQ ID NO: 294088 - protein, 14 aa, Homo sapiens
  CDR3 for beta chain variable domain of TCR clone 147044 (TRBV19, TRBJ2-1)
CASPTFVLSGEQFS

SEQ ID NO: 294089 - protein, 15 aa, Homo sapiens
  CDR3 for alpha chain variable domain of TCR clone 147045 (TRAV12-1, TRAJ44)
CVVFVNTGTASKLPF

SEQ ID NO: 294090 - protein, 15 aa, Homo sapiens
  CDR3 for beta chain variable domain of TCR clone 147045 (TRBV20-1, TRBJ2-7)
CSARDRVSGMDEQYF

SEQ ID NO: 294091 - protein, 13 aa, Homo sapiens
  CDR3 for alpha chain variable domain of TCR clone 147046 (TRAV2, TRAJ40)
CAVVASGTYKYIF

SEQ ID NO: 294092 - protein, 17 aa, Homo sapiens
  CDR3 for beta chain variable domain of TCR clone 147046 (TRBV7-9, TRBJ2-3)
CASSPTVAGDLTDTQYF

SEQ ID NO: 294093 - protein, 14 aa, Homo sapiens
  CDR3 for alpha chain variable domain of TCR clone 147047 (TRAV13-1, TRAJ35)
CAASKGGFGNVLHC

SEQ ID NO: 294094 - protein, 14 aa, Homo sapiens
  CDR3 for beta chain variable domain of TCR clone 147047 (TRBV18, TRBJ1-5)
CASSPGNSNQPQHF

SEQ ID NO: 294095 - protein, 15 aa, Homo sapiens
  CDR3 for alpha chain variable domain of TCR clone 147048 (TRAV8-4, TRAJ3)
CAVTGENLVQQCFQD

SEQ ID NO: 294096 - protein, 14 aa, Homo sapiens
  CDR3 for beta chain variable domain of TCR clone 147048 (TRBV19, TRBJ2-1)
CARGARSFQWEQFF

SEQ ID NO: 294097 - protein, 13 aa, Homo sapiens
  CDR3 for alpha chain variable domain of TCR clone 147049 (TRAV3, TRAJ43)
CAVKARNNNDMRF

SEQ ID NO: 294098 - protein, 16 aa, Homo sapiens
  CDR3 for beta chain variable domain of TCR clone 147049 (TRBV7-9, TRBJ2-3)
CPSSFSVAGGTDTQYC

SEQ ID NO: 294099 - protein, 14 aa, Homo sapiens
  CDR3 for alpha chain variable domain of TCR clone 147050 (TRAV29/DV5, TRAJ36)
CAARRKTGANTLFF

SEQ ID NO: 294100 - protein, 14 aa, Homo sapiens
  CDR3 for beta chain variable domain of TCR clone 147050 (TRBV12-5, TRBJ2-5)
CDSGSRTHQETQYF

SEQ ID NO: 294101 - protein, 18 aa, Homo sapiens
  CDR3 for alpha chain variable domain of TCR clone 147051 (TRAV12-3, TRAJ52)
CAMSVGGAGGTSYGKLTF

SEQ ID NO: 294102 - protein, 14 aa, Homo sapiens
  CDR3 for beta chain variable domain of TCR clone 147051 (TRBV6-6, TRBJ2-5)
CQQSRGGLEETQYF

SEQ ID NO: 294103 - protein, 14 aa, Homo sapiens
  CDR3 for alpha chain variable domain of TCR clone 147052 (TRAV1-2, TRAJ16)
CAVNRFSDGQKLLF

SEQ ID NO: 294104 - protein, 16 aa, Homo sapiens
  CDR3 for beta chain variable domain of TCR clone 147052 (TRBV20-1, TRBJ1-4)
CSAPGQGVFTNEKLFF

SEQ ID NO: 294105 - protein, 14 aa, Homo sapiens
  CDR3 for alpha chain variable domain of TCR clone 147053 (TRAV1-2, TRAJ8)
CAVREDTGFQKLVF

SEQ ID NO: 294106 - protein, 12 aa, Homo sapiens
  CDR3 for beta chain variable domain of TCR clone 147053 (TRBV29-1, TRBJ2-3)
CSVTGGPDTQYF

SEQ ID NO: 294107 - protein, 10 aa, Homo sapiens
  CDR3 for alpha chain variable domain of TCR clone 147054 (TRAV8-4, TRAJ43)
CAVSADDMRF

SEQ ID NO: 294108 - protein, 15 aa, Homo sapiens
  CDR3 for beta chain variable domain of TCR clone 147054 (TRBV28, TRBJ1-3)
CASSVGWASGNTIYF

SEQ ID NO: 294109 - protein, 11 aa, Homo sapiens
  CDR3 for alpha chain variable domain of TCR clone 147055 (TRAV21, TRAJ34)
CAVTNTDKLIF

SEQ ID NO: 294110 - protein, 13 aa, Homo sapiens
  CDR3 for beta chain variable domain of TCR clone 147055 (TRBV20-1, TRBJ2-1)
GALAGDPYNEQFF

SEQ ID NO: 294111 - protein, 22 aa, Homo sapiens
  CDR3 for alpha chain variable domain of TCR clone 147056 (TRAV13-2, TRAJ24)
CAGTQVVVTPDIQNPDPAVYQL

SEQ ID NO: 294112 - protein, 14 aa, Homo sapiens
  CDR3 for beta chain variable domain of TCR clone 147056 (TRBV12-5, TRBJ2-5)
CASGSRTHQETQYF

SEQ ID NO: 294113 - protein, 13 aa, Homo sapiens
  CDR3 for alpha chain variable domain of TCR clone 147057 (TRAV8-3, TRAJ17)
CAVGAAAGNKLTF

SEQ ID NO: 294114 - protein, 16 aa, Homo sapiens
  CDR3 for beta chain variable domain of TCR clone 147057 (TRBV29-1, TRBJ2-6)
CSVEDITYSGANVLTF

SEQ ID NO: 294115 - protein, 14 aa, Homo sapiens
  CDR3 for alpha chain variable domain of TCR clone 147058 (TRAV14/DV4, TRAJ32)
SNVLPLTPTNKLIF

SEQ ID NO: 294116 - protein, 15 aa, Homo sapiens
  CDR3 for beta chain variable domain of TCR clone 147058 (TRBV4-1, TRBJ1-4)
CASSDTGGTNEKLFF

SEQ ID NO: 294117 - protein, 14 aa, Homo sapiens
  CDR3 for alpha chain variable domain of TCR clone 147059 (TRAV13-2, TRAJ45)
CAEMPGGGADGLTF

SEQ ID NO: 294118 - protein, 13 aa, Homo sapiens
  CDR3 for beta chain variable domain of TCR clone 147059 (TRBV2, TRBJ1-4)
CQQPGGLSLGLFF

SEQ ID NO: 294119 - protein, 15 aa, Homo sapiens
  CDR3 for alpha chain variable domain of TCR clone 147060 (TRAV27, TRAJ53)
CRAINSGGSNYKLTF

SEQ ID NO: 294120 - protein, 14 aa, Homo sapiens
  CDR3 for beta chain variable domain of TCR clone 147060 (TRBV19, TRBJ2-1)
CASPTFVLSGEQFF

SEQ ID NO: 294121 - protein, 10 aa, Homo sapiens
  CDR3 for alpha chain variable domain of TCR clone 147061 (TRAV26-1, TRAJ40)
CIAGTYKHIF

SEQ ID NO: 294122 - protein, 12 aa, Homo sapiens
  CDR3 for beta chain variable domain of TCR clone 147061 (TRBV12-4, TRBJ2-7)
CASSLGGYEQYF

SEQ ID NO: 294123 - protein, 13 aa, Homo sapiens
  CDR3 for alpha chain variable domain of TCR clone 147062 (TRAV17, TRAJ34)
CATDLYNPDKLIF

SEQ ID NO: 294124 - protein, 15 aa, Homo sapiens
  CDR3 for beta chain variable domain of TCR clone 147062 (TRBV20-1, TRBJ2-3)
CSATGTSGFTDTQYF

SEQ ID NO: 294125 - protein, 13 aa, Homo sapiens
  CDR3 for alpha chain variable domain of TCR clone 147063 (TRAV1-1, TRAJ28)
CVTSGAGSYQLTF

SEQ ID NO: 294126 - protein, 17 aa, Homo sapiens
  CDR3 for beta chain variable domain of TCR clone 147063 (TRBV18, TRBJ2-2)
CASSQRSSGLGPGELFF

SEQ ID NO: 294127 - protein, 13 aa, Homo sapiens
  CDR3 for alpha chain variable domain of TCR clone 147064 (TRAV6, TRAJ40)
CALVTSGTYKYVF

SEQ ID NO: 294128 - protein, 13 aa, Homo sapiens
  CDR3 for beta chain variable domain of TCR clone 147064 (TRBV28, TRBJ2-7)
CASRFTPRPEQYF

SEQ ID NO: 294129 - protein, 14 aa, Homo sapiens
  CDR3 for alpha chain variable domain of TCR clone 147065 (TRAV13-1, TRAJ44)
CAAKATGTASKRTF

SEQ ID NO: 294130 - protein, 13 aa, Homo sapiens
  CDR3 for beta chain variable domain of TCR clone 147065 (TRBV5-5, TRBJ1-2)
CASSFWRGEDYTF

SEQ ID NO: 294131 - protein, 17 aa, Homo sapiens
  CDR3 for alpha chain variable domain of TCR clone 147066 (TRAV3, TRAJ6)
CAVRGGPRAGGSYIPTF

SEQ ID NO: 294132 - protein, 15 aa, Homo sapiens
  CDR3 for beta chain variable domain of TCR clone 147066 (TRBV5-8, TRBJ2-2)
CASSLDRGATGELFF

SEQ ID NO: 294133 - protein, 12 aa, Homo sapiens
  CDR3 for alpha chain variable domain of TCR clone 147067 (TRAV12-1, TRAJ40)
CVVYSGTHKYIF

SEQ ID NO: 294134 - protein, 15 aa, Homo sapiens
  CDR3 for beta chain variable domain of TCR clone 147067 (TRBV27, TRBJ1-6)
CASSFDRGLGSPLHF

SEQ ID NO: 294135 - protein, 14 aa, Homo sapiens
  CDR3 for alpha chain variable domain of TCR clone 147068 (TRAV3, TRAJ21)
CALGRGSTIFTLDL

SEQ ID NO: 294136 - protein, 14 aa, Homo sapiens
  CDR3 for beta chain variable domain of TCR clone 147068 (TRBV7-9, TRBJ2-4)
CASSLAMGGNIQYF

SEQ ID NO: 294137 - protein, 15 aa, Homo sapiens
  CDR3 for alpha chain variable domain of TCR clone 147069 (TRAV38-2/DV8, TRAJ31)
CAYRTDTRNNARLMF

SEQ ID NO: 294138 - protein, 13 aa, Homo sapiens
  CDR3 for beta chain variable domain of TCR clone 147069 (TRBV28, TRBJ2-1)
CASSPLPSSEQFF

SEQ ID NO: 294139 - protein, 13 aa, Homo sapiens
  CDR3 for alpha chain variable domain of TCR clone 147070 (TRAV30, TRAJ6)
CGFIEGESYIPTF

SEQ ID NO: 294140 - protein, 16 aa, Homo sapiens
  CDR3 for beta chain variable domain of TCR clone 147070 (TRBV7-6, TRBJ2-3)
CASSARTSRGTDTQYF

SEQ ID NO: 294141 - protein, 14 aa, Homo sapiens
  CDR3 for alpha chain variable domain of TCR clone 147071 (TRAV21, TRAJ35)
CAVMPIGFGNVLHC

SEQ ID NO: 294142 - protein, 15 aa, Homo sapiens
  CDR3 for beta chain variable domain of TCR clone 147071 (TRBV10-2, TRBJ2-6)
CASSEQGTGANVLTF

SEQ ID NO: 294143 - protein, 13 aa, Homo sapiens
  CDR3 for alpha chain variable domain of TCR clone 147072 (TRAV20, TRAJ20)
CAVQAGSGYKLSF

SEQ ID NO: 294144 - protein, 13 aa, Homo sapiens
  CDR3 for beta chain variable domain of TCR clone 147072 (TRBV3-1, TRBJ2-3)
CASSQRGGDTQYF

SEQ ID NO: 294145 - protein, 11 aa, Homo sapiens
  CDR3 for alpha chain variable domain of TCR clone 147073 (TRAV35, TRAJ30)
CAGERDDMIIF

SEQ ID NO: 294146 - protein, 14 aa, Homo sapiens
  CDR3 for beta chain variable domain of TCR clone 147073 (TRBV15, TRBJ2-5)
CATSGDRGQETQYF

SEQ ID NO: 294147 - protein, 14 aa, Homo sapiens
  CDR3 for alpha chain variable domain of TCR clone 147074 (TRAV8-4, TRAJ37)
CAVSESSNTGKLIF

SEQ ID NO: 294148 - protein, 11 aa, Homo sapiens
  CDR3 for beta chain variable domain of TCR clone 147074 (TRBV19, TRBJ2-7)
CASGLSHEQYF

SEQ ID NO: 294149 - protein, 16 aa, Homo sapiens
  CDR3 for alpha chain variable domain of TCR clone 147075 (TRAV23/DV6, )
CADIQNPDPAGYQLRD

SEQ ID NO: 294150 - protein, 13 aa, Homo sapiens
  CDR3 for beta chain variable domain of TCR clone 147075 (TRBV28, TRBJ2-7)
CAIRSSGAYEQYF

SEQ ID NO: 294151 - protein, 13 aa, Homo sapiens
  CDR3 for alpha chain variable domain of TCR clone 147076 (TRAV8-6, TRAJ40)
CAVSVTGTYKYIL

SEQ ID NO: 294152 - protein, 14 aa, Homo sapiens
  CDR3 for beta chain variable domain of TCR clone 147076 (TRBV4-1, TRBJ2-3)
RQRPGQGIPDTQYF

SEQ ID NO: 294153 - protein, 13 aa, Homo sapiens
  CDR3 for alpha chain variable domain of TCR clone 147077 (TRAV12-3, TRAJ4)
CNEQAGGYNKLIF

SEQ ID NO: 294154 - protein, 15 aa, Homo sapiens
  CDR3 for beta chain variable domain of TCR clone 147077 (TRBV7-9, TRBJ2-7)
CASSLALAEAYEQYL

SEQ ID NO: 294155 - protein, 14 aa, Homo sapiens
  CDR3 for alpha chain variable domain of TCR clone 147078 (TRAV17, TRAJ23)
CATALGGQVGKLIF

SEQ ID NO: 294156 - protein, 17 aa, Homo sapiens
  CDR3 for beta chain variable domain of TCR clone 147078 (TRBV15, TRBJ1-5)
CATSRAPPGTRNQPQHF

SEQ ID NO: 294157 - protein, 14 aa, Homo sapiens
  CDR3 for alpha chain variable domain of TCR clone 147079 (TRAV3, TRAJ40)
CAVRERRGTYKYIF

SEQ ID NO: 294158 - protein, 15 aa, Homo sapiens
  CDR3 for beta chain variable domain of TCR clone 147079 (TRBV11-1, TRBJ1-3)
CASTDPRAFGNTIYF

SEQ ID NO: 294159 - protein, 16 aa, Homo sapiens
  CDR3 for alpha chain variable domain of TCR clone 147080 (TRAV3, TRAJ10)
CAVRDMRAGGGNKLTF

SEQ ID NO: 294160 - protein, 16 aa, Homo sapiens
  CDR3 for beta chain variable domain of TCR clone 147080 (TRBV4-2, TRBJ2-7)
CASSQDGVERGYEQYF

SEQ ID NO: 294161 - protein, 11 aa, Homo sapiens
  CDR3 for alpha chain variable domain of TCR clone 147081 (TRAV23/DV6, TRAJ58)
CAARLLRGETS

SEQ ID NO: 294162 - protein, 15 aa, Homo sapiens
  CDR3 for beta chain variable domain of TCR clone 147081 (TRBV24-1, TRBJ2-5)
CATSETTGAVGAQYF

SEQ ID NO: 294163 - protein, 15 aa, Homo sapiens
  CDR3 for alpha chain variable domain of TCR clone 147082 (TRAV12-3, TRAJ6)
CAMSATTGGRYIPTF

SEQ ID NO: 294164 - protein, 16 aa, Homo sapiens
  CDR3 for beta chain variable domain of TCR clone 147082 (TRBV13, TRBJ2-2)
CASSPRTGEHTGELFF

SEQ ID NO: 294165 - protein, 10 aa, Homo sapiens
  CDR3 for alpha chain variable domain of TCR clone 147083 (TRAV12-1, TRAJ37)
ARGNTGELIF

SEQ ID NO: 294166 - protein, 15 aa, Homo sapiens
  CDR3 for beta chain variable domain of TCR clone 147083 (TRBV7-2, TRBJ2-3)
CASSLEQGGKDTQYF

SEQ ID NO: 294167 - protein, 14 aa, Homo sapiens
  CDR3 for alpha chain variable domain of TCR clone 147084 (TRAV2, TRAJ9)
CAVEDRSVGFKTIF

SEQ ID NO: 294168 - protein, 17 aa, Homo sapiens
  CDR3 for beta chain variable domain of TCR clone 147084 (TRBV20-1, TRBJ2-7)
CSATRAGGVAGVEEQYF

SEQ ID NO: 294169 - protein, 11 aa, Homo sapiens
  CDR3 for alpha chain variable domain of TCR clone 147085 (TRAV21, TRAJ48)
CAVDGNEKLTF

SEQ ID NO: 294170 - protein, 15 aa, Homo sapiens
  CDR3 for beta chain variable domain of TCR clone 147085 (TRBV2, TRBJ2-1)
CASSELAGSYNEQFF

SEQ ID NO: 294171 - protein, 13 aa, Homo sapiens
  CDR3 for alpha chain variable domain of TCR clone 147086 (TRAV21, TRAJ20)
CAVALRVDYKLSF

SEQ ID NO: 294172 - protein, 13 aa, Homo sapiens
  CDR3 for beta chain variable domain of TCR clone 147086 (TRBV6-1, TRBJ1-1)
CASSRQGNTEAFF

SEQ ID NO: 294173 - protein, 13 aa, Homo sapiens
  CDR3 for alpha chain variable domain of TCR clone 147087 (TRAV1-2, TRAJ9)
CAALNTGGFKTIF

SEQ ID NO: 294174 - protein, 12 aa, Homo sapiens
  CDR3 for beta chain variable domain of TCR clone 147087 (TRBV7-2, TRBJ1-6)
CASSLSSSPLHF

SEQ ID NO: 294175 - protein, 15 aa, Homo sapiens
  CDR3 for alpha chain variable domain of TCR clone 147088 (TRAV17, TRAJ57)
CATGPSQCGSEKLVF

SEQ ID NO: 294176 - protein, 16 aa, Homo sapiens
  CDR3 for beta chain variable domain of TCR clone 147088 (TRBV7-3, TRBJ2-2)
CASSLKRGTLSGELFF

SEQ ID NO: 294177 - protein, 16 aa, Homo sapiens
  CDR3 for alpha chain variable domain of TCR clone 147089 (TRAV30, TRAJ24)
CGKEIVDADSWGKFQF

SEQ ID NO: 294178 - protein, 16 aa, Homo sapiens
  CDR3 for beta chain variable domain of TCR clone 147089 (TRBV12-5, TRBJ2-5)
CASGPRTSGNQETQYF

SEQ ID NO: 294179 - protein, 15 aa, Homo sapiens
  CDR3 for alpha chain variable domain of TCR clone 147090 (TRAV27, TRAJ38)
CAARRNAGNNRKLIW

SEQ ID NO: 294180 - protein, 14 aa, Homo sapiens
  CDR3 for beta chain variable domain of TCR clone 147090 (TRBV19, TRBJ2-1)
CASSAGLSGNEQFF

SEQ ID NO: 294181 - protein, 14 aa, Homo sapiens
  CDR3 for alpha chain variable domain of TCR clone 147091 (TRAV8-3, TRAJ15)
CAVGANQAGTALIF

SEQ ID NO: 294182 - protein, 17 aa, Homo sapiens
  CDR3 for beta chain variable domain of TCR clone 147091 (TRBV28, TRBJ2-5)
CASSRQGGLAGAETQYF

SEQ ID NO: 294183 - protein, 14 aa, Homo sapiens
  CDR3 for alpha chain variable domain of TCR clone 147092 (TRAV4, TRAJ9)
CLVGSGTGGFKTIF

SEQ ID NO: 294184 - protein, 14 aa, Homo sapiens
  CDR3 for beta chain variable domain of TCR clone 147092 (TRBV4-1, TRBJ1-1)
CASSRSGQSFEAFF

SEQ ID NO: 294185 - protein, 13 aa, Homo sapiens
  CDR3 for alpha chain variable domain of TCR clone 147093 (TRAV13-1, TRAJ39)
CSKYSNAGNMLTF

SEQ ID NO: 294186 - protein, 15 aa, Homo sapiens
  CDR3 for beta chain variable domain of TCR clone 147093 (TRBV9, TRBJ1-6)
CASSVAGTGDSPLHF

SEQ ID NO: 294187 - protein, 14 aa, Homo sapiens
  CDR3 for alpha chain variable domain of TCR clone 147094 (TRAV12-2, TRAJ40)
CAVKIPSGTYKYIF

SEQ ID NO: 294188 - protein, 13 aa, Homo sapiens
  CDR3 for beta chain variable domain of TCR clone 147094 (TRBV15, TRBJ1-1)
CAISRGIQARAFF

SEQ ID NO: 294189 - protein, 13 aa, Homo sapiens
  CDR3 for alpha chain variable domain of TCR clone 147095 (TRAV8-3, TRAJ37)
CAVPSSNTGKLIF

SEQ ID NO: 294190 - protein, 12 aa, Homo sapiens
  CDR3 for beta chain variable domain of TCR clone 147095 (TRBV2, TRBJ2-1)
CAYGPPGNEQFF

SEQ ID NO: 294191 - protein, 14 aa, Homo sapiens
  CDR3 for alpha chain variable domain of TCR clone 147096 (TRAV1-2, TRAJ16)
CAVNRFSDGQKLLF

SEQ ID NO: 294192 - protein, 13 aa, Homo sapiens
  CDR3 for beta chain variable domain of TCR clone 147096 (TRBV7-9, TRBJ2-3)
CASSPESTDTQYF

SEQ ID NO: 294193 - protein, 16 aa, Homo sapiens
  CDR3 for alpha chain variable domain of TCR clone 147097 (TRAV30, TRAJ24)
CGTEIVYADSWGKFQF

SEQ ID NO: 294194 - protein, 14 aa, Homo sapiens
  CDR3 for beta chain variable domain of TCR clone 147097 (TRBV12-5, TRBJ2-5)
CACGSRTHQETQYF

SEQ ID NO: 294195 - protein, 11 aa, Homo sapiens
  CDR3 for alpha chain variable domain of TCR clone 147098 (TRAV17, TRAJ43)
CATPRSNDMRF

SEQ ID NO: 294196 - protein, 14 aa, Homo sapiens
  CDR3 for beta chain variable domain of TCR clone 147098 (TRBV11-1, TRBJ2-7)
CARSFRQGSYEQYF

SEQ ID NO: 294197 - protein, 12 aa, Homo sapiens
  CDR3 for alpha chain variable domain of TCR clone 147099 (TRAV12-3, TRAJ20)
CAMVRGDYKLSF

SEQ ID NO: 294198 - protein, 19 aa, Homo sapiens
  CDR3 for beta chain variable domain of TCR clone 147099 (TRBV19, TRBJ2-5)
CASSIGQVTDFFLGETQYF

SEQ ID NO: 294199 - protein, 14 aa, Homo sapiens
  CDR3 for alpha chain variable domain of TCR clone 147100 (TRAV12-2, TRAJ44)
CAVNPAGTASKLTF

SEQ ID NO: 294200 - protein, 15 aa, Homo sapiens
  CDR3 for beta chain variable domain of TCR clone 147100 (TRBV10-2, TRBJ2-7)
CASWNRGQATYEQYF

SEQ ID NO: 294201 - protein, 14 aa, Homo sapiens
  CDR3 for alpha chain variable domain of TCR clone 147101 (TRAV38-1, TRAJ45)
CASHSGGGADGLTF

SEQ ID NO: 294202 - protein, 16 aa, Homo sapiens
  CDR3 for beta chain variable domain of TCR clone 147101 (TRBV6-1, TRBJ1-3)
CASVQGGVETPYILER

SEQ ID NO: 294203 - protein, 13 aa, Homo sapiens
  CDR3 for alpha chain variable domain of TCR clone 147102 (TRAV29/DV5, TRAJ44)
CAASTGTASKLTF

SEQ ID NO: 294204 - protein, 14 aa, Homo sapiens
  CDR3 for beta chain variable domain of TCR clone 147102 (TRBV7-2, TRBJ2-7)
CASRSQGAAYEQYF

SEQ ID NO: 294205 - protein, 11 aa, Homo sapiens
  CDR3 for alpha chain variable domain of TCR clone 147103 (TRAV21, TRAJ20)
CAVRDDYKLSF

SEQ ID NO: 294206 - protein, 14 aa, Homo sapiens
  CDR3 for beta chain variable domain of TCR clone 147103 (TRBV12-4, TRBJ1-1)
CASSFSQVNTEAFF

SEQ ID NO: 294207 - protein, 15 aa, Homo sapiens
  CDR3 for alpha chain variable domain of TCR clone 147104 (TRAV3, TRAJ3)
CAVRDRDSSASKIIF

SEQ ID NO: 294208 - protein, 18 aa, Homo sapiens
  CDR3 for beta chain variable domain of TCR clone 147104 (TRBV25-1, TRBJ1-2)
CASSGLQNGQGLIFGYTS

SEQ ID NO: 294209 - protein, 16 aa, Homo sapiens
  CDR3 for alpha chain variable domain of TCR clone 147105 (TRAV8-3, TRAJ18)
CAVGARRGSTLGRLYF

SEQ ID NO: 294210 - protein, 15 aa, Homo sapiens
  CDR3 for beta chain variable domain of TCR clone 147105 (TRBV7-3, TRBJ2-1)
CASSPTGGGEVEQFF

SEQ ID NO: 294211 - protein, 13 aa, Homo sapiens
  CDR3 for alpha chain variable domain of TCR clone 147106 (TRAV30, TRAJ24)
CGTVTDSWGKLQF

SEQ ID NO: 294212 - protein, 15 aa, Homo sapiens
  CDR3 for beta chain variable domain of TCR clone 147106 (TRBV19, TRBJ1-1)
CASTSGQIQNTEAFL

SEQ ID NO: 294213 - protein, 12 aa, Homo sapiens
  CDR3 for alpha chain variable domain of TCR clone 147107 (TRAV13-1, TRAJ3)
CAATGVQQCFQD

SEQ ID NO: 294214 - protein, 15 aa, Homo sapiens
  CDR3 for beta chain variable domain of TCR clone 147107 (TRBV20-1, TRBJ2-7)
CSARVPAAYFYEQYF

SEQ ID NO: 294215 - protein, 14 aa, Homo sapiens
  CDR3 for alpha chain variable domain of TCR clone 147108 (TRAV1-2, TRAJ8)
CAVREATGFQKLVF

SEQ ID NO: 294216 - protein, 18 aa, Homo sapiens
  CDR3 for beta chain variable domain of TCR clone 147108 (TRBV10-3, TRBJ2-7)
CAISESGRPSGGRVEQYF

SEQ ID NO: 294217 - protein, 13 aa, Homo sapiens
  CDR3 for alpha chain variable domain of TCR clone 147109 (TRAV21, TRAJ27)
CAARPGNAGKSTF

SEQ ID NO: 294218 - protein, 19 aa, Homo sapiens
  CDR3 for beta chain variable domain of TCR clone 147109 (TRBV7-2, TRBJ2-7)
CASSQRAAGPGTSFYEQYL

SEQ ID NO: 294219 - protein, 12 aa, Homo sapiens
  CDR3 for alpha chain variable domain of TCR clone 147110 (TRAV17, TRAJ20)
CATDSNYYKLSF

SEQ ID NO: 294220 - protein, 16 aa, Homo sapiens
  CDR3 for beta chain variable domain of TCR clone 147110 (TRBV7-2, TRBJ1-2)
CASSSNQDRRGHGYTF

SEQ ID NO: 294221 - protein, 15 aa, Homo sapiens
  CDR3 for alpha chain variable domain of TCR clone 147111 (TRAV12-3, TRAJ53)
CNEPGSGGSNYKLTF

SEQ ID NO: 294222 - protein, 14 aa, Homo sapiens
  CDR3 for beta chain variable domain of TCR clone 147111 (TRBV12-5, TRBJ2-5)
CASGSRTHQETQYF

SEQ ID NO: 294223 - protein, 21 aa, Homo sapiens
  CDR3 for alpha chain variable domain of TCR clone 147112 (TRAV3, )
CAVRPTPDIPNPDPAVYQLRD

SEQ ID NO: 294224 - protein, 15 aa, Homo sapiens
  CDR3 for beta chain variable domain of TCR clone 147112 (TRBV11-3, TRBJ2-5)
CASSDTSGGIETQYF

SEQ ID NO: 294225 - protein, 13 aa, Homo sapiens
  CDR3 for alpha chain variable domain of TCR clone 147113 (TRAV27, TRAJ54)
CAGAGQGAQKRVF

SEQ ID NO: 294226 - protein, 15 aa, Homo sapiens
  CDR3 for beta chain variable domain of TCR clone 147113 (TRBV18, TRBJ2-6)
CASSPSYAGANGLTF

SEQ ID NO: 294227 - protein, 11 aa, Homo sapiens
  CDR3 for alpha chain variable domain of TCR clone 147114 (TRAV4, TRAJ28)
NSGAGSYQLTF

SEQ ID NO: 294228 - protein, 13 aa, Homo sapiens
  CDR3 for beta chain variable domain of TCR clone 147114 (TRBV12-4, TRBJ2-6)
CASSGTGTNVLTF

SEQ ID NO: 294229 - protein, 12 aa, Homo sapiens
  CDR3 for alpha chain variable domain of TCR clone 147115 (TRAV22, TRAJ29)
CAPPSGNTPLVF

SEQ ID NO: 294230 - protein, 14 aa, Homo sapiens
  CDR3 for beta chain variable domain of TCR clone 147115 (TRBV7-2, TRBJ2-7)
CASSPKTSFYEQYF

SEQ ID NO: 294231 - protein, 16 aa, Homo sapiens
  CDR3 for alpha chain variable domain of TCR clone 147116 (TRAV12-3, TRAJ10)
CAMKKGITGGGNKLTF

SEQ ID NO: 294232 - protein, 12 aa, Homo sapiens
  CDR3 for beta chain variable domain of TCR clone 147116 (TRBV20-1, TRBJ2-7)
CSAITPAKEQYF

SEQ ID NO: 294233 - protein, 15 aa, Homo sapiens
  CDR3 for alpha chain variable domain of TCR clone 147117 (TRAV21, TRAJ24)
CAARSSTDSWGKLQF

SEQ ID NO: 294234 - protein, 15 aa, Homo sapiens
  CDR3 for beta chain variable domain of TCR clone 147117 (TRBV5-1, TRBJ2-1)
CASSPPMAPYNEQFF

SEQ ID NO: 294235 - protein, 14 aa, Homo sapiens
  CDR3 for alpha chain variable domain of TCR clone 147118 (TRAV23/DV6, TRAJ22)
CAASVSGSARQLTF

SEQ ID NO: 294236 - protein, 12 aa, Homo sapiens
  CDR3 for beta chain variable domain of TCR clone 147118 (TRBV11-2, TRBJ2-2)
CASSLGGGELFF

SEQ ID NO: 294237 - protein, 13 aa, Homo sapiens
  CDR3 for alpha chain variable domain of TCR clone 147119 (TRAV27, TRAJ6)
CAGGTRGSNIPTF

SEQ ID NO: 294238 - protein, 14 aa, Homo sapiens
  CDR3 for beta chain variable domain of TCR clone 147119 (TRBV5-1, TRBJ2-7)
CASSRGESLYEQYF

SEQ ID NO: 294239 - protein, 15 aa, Homo sapiens
  CDR3 for alpha chain variable domain of TCR clone 147120 (TRAV13-1, TRAJ27)
CAASTFNTNAGKSTF

SEQ ID NO: 294240 - protein, 16 aa, Homo sapiens
  CDR3 for beta chain variable domain of TCR clone 147120 (TRBV5-1, TRBJ1-4)
CASSLDRVGDNEKLFF

SEQ ID NO: 294241 - protein, 13 aa, Homo sapiens
  CDR3 for alpha chain variable domain of TCR clone 147121 (TRAV17, TRAJ9)
CATDYTGGFKTIF

SEQ ID NO: 294242 - protein, 13 aa, Homo sapiens
  CDR3 for beta chain variable domain of TCR clone 147121 (TRBV7-9, TRBJ1-2)
CAISLKQNYGYTF

SEQ ID NO: 294243 - protein, 14 aa, Homo sapiens
  CDR3 for alpha chain variable domain of TCR clone 147122 (TRAV12-3, TRAJ10)
SHLPLTGGGNKFTF

SEQ ID NO: 294244 - protein, 12 aa, Homo sapiens
  CDR3 for beta chain variable domain of TCR clone 147122 (TRBV11-2, TRBJ2-2)
CASSLGGGELFF

SEQ ID NO: 294245 - protein, 16 aa, Homo sapiens
  CDR3 for alpha chain variable domain of TCR clone 147123 (TRAV16, TRAJ57)
CAPYLITQGGSEKLVF

SEQ ID NO: 294246 - protein, 17 aa, Homo sapiens
  CDR3 for beta chain variable domain of TCR clone 147123 (TRBV24-1, TRBJ2-4)
CATSDAEARGVRNLQYF

SEQ ID NO: 294247 - protein, 16 aa, Homo sapiens
  CDR3 for alpha chain variable domain of TCR clone 147124 (TRAV3, TRAJ37)
CAVRPHGSGNTGKLIF

SEQ ID NO: 294248 - protein, 14 aa, Homo sapiens
  CDR3 for beta chain variable domain of TCR clone 147124 (TRBV25-1, TRBJ1-1)
CASPQLGGNTEAFF

SEQ ID NO: 294249 - protein, 17 aa, Homo sapiens
  CDR3 for alpha chain variable domain of TCR clone 147125 (TRAV3, TRAJ42)
CAVRDRDYGGSHGNPIF

SEQ ID NO: 294250 - protein, 15 aa, Homo sapiens
  CDR3 for beta chain variable domain of TCR clone 147125 (TRBV6-6, TRBJ2-7)
CASSYSYGGSYEQYF

SEQ ID NO: 294251 - protein, 14 aa, Homo sapiens
  CDR3 for alpha chain variable domain of TCR clone 147126 (TRAV8-6, TRAJ8)
CAVNENTGFQTLVF

SEQ ID NO: 294252 - protein, 11 aa, Homo sapiens
  CDR3 for beta chain variable domain of TCR clone 147126 (TRBV29-1, TRBJ2-5)
CSEDRTGTQYF

SEQ ID NO: 294253 - protein, 13 aa, Homo sapiens
  CDR3 for alpha chain variable domain of TCR clone 147127 (TRAV12-3, TRAJ13)
CAMISGGYQKVTF

SEQ ID NO: 294254 - protein, 14 aa, Homo sapiens
  CDR3 for beta chain variable domain of TCR clone 147127 (TRBV2, TRBJ2-1)
CASRTGSSYNEQFF

SEQ ID NO: 294255 - protein, 14 aa, Homo sapiens
  CDR3 for alpha chain variable domain of TCR clone 147128 (TRAV12-2, TRAJ17)
CAVLFKAAGNKLTF

SEQ ID NO: 294256 - protein, 15 aa, Homo sapiens
  CDR3 for beta chain variable domain of TCR clone 147128 (TRBV20-1, TRBJ2-2)
CSARGGQGNTGELFF

SEQ ID NO: 294257 - protein, 16 aa, Homo sapiens
  CDR3 for alpha chain variable domain of TCR clone 147129 (TRAV3, TRAJ37)
CAVRVRGSGNTGKLIF

SEQ ID NO: 294258 - protein, 16 aa, Homo sapiens
  CDR3 for beta chain variable domain of TCR clone 147129 (TRBV12-5, TRBJ2-5)
CASGPRTSGNQETQYF

SEQ ID NO: 294259 - protein, 15 aa, Homo sapiens
  CDR3 for alpha chain variable domain of TCR clone 147130 (TRAV8-3, TRAJ11)
CAVGLLNSAYSTLTF

SEQ ID NO: 294260 - protein, 16 aa, Homo sapiens
  CDR3 for beta chain variable domain of TCR clone 147130 (TRBV7-9, TRBJ1-2)
CASSLGFSSGEDGYTF

SEQ ID NO: 294261 - protein, 12 aa, Homo sapiens
  CDR3 for alpha chain variable domain of TCR clone 147131 (TRAV21, TRAJ33)
CAVQDSNYQSIW

SEQ ID NO: 294262 - protein, 14 aa, Homo sapiens
  CDR3 for beta chain variable domain of TCR clone 147131 (TRBV28, TRBJ2-1)
CASSPGEGGNEQFF

SEQ ID NO: 294263 - protein, 13 aa, Homo sapiens
  CDR3 for alpha chain variable domain of TCR clone 147132 (TRAV13-2, TRAJ48)
WAEMDFGNEKLTF

SEQ ID NO: 294264 - protein, 14 aa, Homo sapiens
  CDR3 for beta chain variable domain of TCR clone 147132 (TRBV20-1, TRBJ2-7)
CSAKRGRSSYEQYF

SEQ ID NO: 294265 - protein, 12 aa, Homo sapiens
  CDR3 for alpha chain variable domain of TCR clone 147133 (TRAV17, TRAJ12)
CATLRSSYKLLF

SEQ ID NO: 294266 - protein, 16 aa, Homo sapiens
  CDR3 for beta chain variable domain of TCR clone 147133 (TRBV28, TRBJ2-7)
CASSLFFETGGPEQYF

SEQ ID NO: 294267 - protein, 14 aa, Homo sapiens
  CDR3 for alpha chain variable domain of TCR clone 147134 (TRAV26-1, TRAJ48)
CIVRVPFGNEKLNF

SEQ ID NO: 294268 - protein, 16 aa, Homo sapiens
  CDR3 for beta chain variable domain of TCR clone 147134 (TRBV18, TRBJ2-1)
CASSPYLSIRGDEQFF

SEQ ID NO: 294269 - protein, 14 aa, Homo sapiens
  CDR3 for alpha chain variable domain of TCR clone 147135 (TRAV12-2, TRAJ13)
CAVKKTGGYQKVTF

SEQ ID NO: 294270 - protein, 14 aa, Homo sapiens
  CDR3 for beta chain variable domain of TCR clone 147135 (TRBV7-9, TRBJ2-5)
CASSLDTAQETQYF

SEQ ID NO: 294271 - protein, 14 aa, Homo sapiens
  CDR3 for alpha chain variable domain of TCR clone 147136 (TRAV8-3, TRAJ15)
CAVGRHQAGTALIF

SEQ ID NO: 294272 - protein, 12 aa, Homo sapiens
  CDR3 for beta chain variable domain of TCR clone 147136 (TRBV11-2, TRBJ2-2)
CASSLGGGELFF

SEQ ID NO: 294273 - protein, 12 aa, Homo sapiens
  CDR3 for alpha chain variable domain of TCR clone 147137 (TRAV16, TRAJ49)
CALHEGGNQIYF

SEQ ID NO: 294274 - protein, 14 aa, Homo sapiens
  CDR3 for beta chain variable domain of TCR clone 147137 (TRBV7-9, TRBJ2-1)
CASRPTGLRNEQFF

SEQ ID NO: 294275 - protein, 11 aa, Homo sapiens
  CDR3 for alpha chain variable domain of TCR clone 147138 (TRAV1-2, TRAJ20)
CAVSYDYKLSF

SEQ ID NO: 294276 - protein, 16 aa, Homo sapiens
  CDR3 for beta chain variable domain of TCR clone 147138 (TRBV29-1, TRBJ2-6)
CSVEDITYSGANVLTF

SEQ ID NO: 294277 - protein, 14 aa, Homo sapiens
  CDR3 for alpha chain variable domain of TCR clone 147139 (TRAV8-6, TRAJ49)
CAGSVRYTGNQFYF

SEQ ID NO: 294278 - protein, 19 aa, Homo sapiens
  CDR3 for beta chain variable domain of TCR clone 147139 (TRBV28, TRBJ2-1)
CASSFSIRGSGRTRYEQFF

SEQ ID NO: 294279 - protein, 14 aa, Homo sapiens
  CDR3 for alpha chain variable domain of TCR clone 147140 (TRAV8-3, TRAJ10)
CAVGNAGGGNKITF

SEQ ID NO: 294280 - protein, 12 aa, Homo sapiens
  CDR3 for beta chain variable domain of TCR clone 147140 (TRBV7-9, TRBJ2-7)
CASSLEGYEQYF

SEQ ID NO: 294281 - protein, 15 aa, Homo sapiens
  CDR3 for alpha chain variable domain of TCR clone 147141 (TRAV12-3, TRAJ6)
CAMSATTGGSYIPTF

SEQ ID NO: 294282 - protein, 13 aa, Homo sapiens
  CDR3 for beta chain variable domain of TCR clone 147141 (TRBV15, TRBJ2-7)
CATSTTGHYEQYF

SEQ ID NO: 294283 - protein, 14 aa, Homo sapiens
  CDR3 for alpha chain variable domain of TCR clone 147142 (TRAV1-2, TRAJ16)
CAVNRFSDGQKRLF

SEQ ID NO: 294284 - protein, 18 aa, Homo sapiens
  CDR3 for beta chain variable domain of TCR clone 147142 (TRBV20-1, TRBJ2-6)
CSAETTPTHGSGANVLTF

SEQ ID NO: 294285 - protein, 14 aa, Homo sapiens
  CDR3 for alpha chain variable domain of TCR clone 147143 (TRAV16, TRAJ31)
CSKWRRGDNARLMF

SEQ ID NO: 294286 - protein, 16 aa, Homo sapiens
  CDR3 for beta chain variable domain of TCR clone 147143 (TRBV28, TRBJ2-7)
CASSLYFETGGPEQYF

SEQ ID NO: 294287 - protein, 16 aa, Homo sapiens
  CDR3 for alpha chain variable domain of TCR clone 147144 (TRAV26-1, TRAJ32)
CIVRTNYGGATKELIF

SEQ ID NO: 294288 - protein, 14 aa, Homo sapiens
  CDR3 for beta chain variable domain of TCR clone 147144 (TRBV6-1, TRBJ1-3)
CASVQGGGGNTIYF

SEQ ID NO: 294289 - protein, 16 aa, Homo sapiens
  CDR3 for alpha chain variable domain of TCR clone 147145 (TRAV20, TRAJ48)
CAVPVGSNFGNEKLTF

SEQ ID NO: 294290 - protein, 15 aa, Homo sapiens
  CDR3 for beta chain variable domain of TCR clone 147145 (TRBV12-4, TRBJ2-5)
CASTLNSGRGETQYF

SEQ ID NO: 294291 - protein, 15 aa, Homo sapiens
  CDR3 for alpha chain variable domain of TCR clone 147146 (TRAV8-4, TRAJ3)
CAVTGENLVQQCFQD

SEQ ID NO: 294292 - protein, 14 aa, Homo sapiens
  CDR3 for beta chain variable domain of TCR clone 147146 (TRBV7-2, TRBJ2-7)
CASRSQGAAYEQYF

SEQ ID NO: 294293 - protein, 11 aa, Homo sapiens
  CDR3 for alpha chain variable domain of TCR clone 147147 (TRAV3, TRAJ32)
CAVREGFMVVL

SEQ ID NO: 294294 - protein, 13 aa, Homo sapiens
  CDR3 for beta chain variable domain of TCR clone 147147 (TRBV2, TRBJ1-1)
CASSEGGNTEAFF

SEQ ID NO: 294295 - protein, 14 aa, Homo sapiens
  CDR3 for alpha chain variable domain of TCR clone 147148 (TRAV26-1, TRAJ38)
CIADNAGNDRKLIW

SEQ ID NO: 294296 - protein, 13 aa, Homo sapiens
  CDR3 for beta chain variable domain of TCR clone 147148 (TRBV7-9, TRBJ2-3)
CASSPGSTDTQYF

SEQ ID NO: 294297 - protein, 13 aa, Homo sapiens
  CDR3 for alpha chain variable domain of TCR clone 147149 (TRAV8-4, TRAJ30)
CAVSVNRDDKIIF

SEQ ID NO: 294298 - protein, 17 aa, Homo sapiens
  CDR3 for beta chain variable domain of TCR clone 147149 (TRBV18, TRBJ1-3)
CASSPYPTGPSGNTIYF

SEQ ID NO: 294299 - protein, 12 aa, Homo sapiens
  CDR3 for alpha chain variable domain of TCR clone 147150 (TRAV13-2, TRAJ23)
CAERHRGGRLIF

SEQ ID NO: 294300 - protein, 16 aa, Homo sapiens
  CDR3 for beta chain variable domain of TCR clone 147150 (TRBV7-9, TRBJ1-2)
CASSLGFSSGEDGYTF

SEQ ID NO: 294301 - protein, 13 aa, Homo sapiens
  CDR3 for alpha chain variable domain of TCR clone 147151 (TRAV4, TRAJ22)
CLGGSGSARQLTF

SEQ ID NO: 294302 - protein, 15 aa, Homo sapiens
  CDR3 for beta chain variable domain of TCR clone 147151 (TRBV7-9, TRBJ1-6)
CASSAPGRGNSPLHF

SEQ ID NO: 294303 - protein, 15 aa, Homo sapiens
  CDR3 for alpha chain variable domain of TCR clone 147152 (TRAV17, TRAJ35)
CATAFVIVFGNVLHC

SEQ ID NO: 294304 - protein, 16 aa, Homo sapiens
  CDR3 for beta chain variable domain of TCR clone 147152 (TRBV11-2, TRBJ2-7)
CASSPLAGGPRYEQYF

SEQ ID NO: 294305 - protein, 12 aa, Homo sapiens
  CDR3 for alpha chain variable domain of TCR clone 147153 (TRAV12-3, TRAJ20)
CAMVRGDFKLSF

SEQ ID NO: 294306 - protein, 14 aa, Homo sapiens
  CDR3 for beta chain variable domain of TCR clone 147153 (TRBV5-5, TRBJ1-5)
CASSGQGVDQPQHF

SEQ ID NO: 294307 - protein, 14 aa, Homo sapiens
  CDR3 for alpha chain variable domain of TCR clone 147154 (TRAV12-3, TRAJ12)
CAMSEVDSSYKLIF

SEQ ID NO: 294308 - protein, 18 aa, Homo sapiens
  CDR3 for beta chain variable domain of TCR clone 147154 (TRBV27, TRBJ2-3)
CASSLSGTSGRGTDTQYF

SEQ ID NO: 294309 - protein, 14 aa, Homo sapiens
  CDR3 for alpha chain variable domain of TCR clone 147155 (TRAV1-2, TRAJ16)
CAVNRFSDGQKLLF

SEQ ID NO: 294310 - protein, 16 aa, Homo sapiens
  CDR3 for beta chain variable domain of TCR clone 147155 (TRBV12-4, TRBJ2-5)
CASSFFVRGRQATQYF

SEQ ID NO: 294311 - protein, 14 aa, Homo sapiens
  CDR3 for alpha chain variable domain of TCR clone 147156 (TRAV8-2, TRAJ37)
CVVSHTGNTGKLIF

SEQ ID NO: 294312 - protein, 14 aa, Homo sapiens
  CDR3 for beta chain variable domain of TCR clone 147156 (TRBV7-2, TRBJ2-7)
CASSPKTSFYEQYF

SEQ ID NO: 294313 - protein, 14 aa, Homo sapiens
  CDR3 for alpha chain variable domain of TCR clone 147157 (TRAV1-2, TRAJ16)
CAVNRFSDGQKLLF

SEQ ID NO: 294314 - protein, 12 aa, Homo sapiens
  CDR3 for beta chain variable domain of TCR clone 147157 (TRBV28, TRBJ2-6)
CAIQAGTNLLTF

SEQ ID NO: 294315 - protein, 15 aa, Homo sapiens
  CDR3 for alpha chain variable domain of TCR clone 147158 (TRAV16, TRAJ10)
CALRELMGGGNKLTF

SEQ ID NO: 294316 - protein, 14 aa, Homo sapiens
  CDR3 for beta chain variable domain of TCR clone 147158 (TRBV5-5, TRBJ2-7)
CASSLGQGTYEQYF

SEQ ID NO: 294317 - protein, 15 aa, Homo sapiens
  CDR3 for alpha chain variable domain of TCR clone 147159 (TRAV2, TRAJ37)
CAVEDGSSNTGKLIF

SEQ ID NO: 294318 - protein, 14 aa, Homo sapiens
  CDR3 for beta chain variable domain of TCR clone 147159 (TRBV7-2, TRBJ2-7)
CASRSQGAAYEQYF

SEQ ID NO: 294319 - protein, 15 aa, Homo sapiens
  CDR3 for alpha chain variable domain of TCR clone 147160 (TRAV3, TRAJ7)
CAVRDKDNGNNRLAF

SEQ ID NO: 294320 - protein, 19 aa, Homo sapiens
  CDR3 for beta chain variable domain of TCR clone 147160 (TRBV5-8, TRBJ2-3)
CDSSFLGTSGSHRTDTQYF

SEQ ID NO: 294321 - protein, 10 aa, Homo sapiens
  CDR3 for alpha chain variable domain of TCR clone 147161 (TRAV2, TRAJ34)
CAVVNDNLIF

SEQ ID NO: 294322 - protein, 14 aa, Homo sapiens
  CDR3 for beta chain variable domain of TCR clone 147161 (TRBV20-1, TRBJ2-3)
CSARGGTSTDTQYF

SEQ ID NO: 294323 - protein, 12 aa, Homo sapiens
  CDR3 for alpha chain variable domain of TCR clone 147162 (TRAV27, TRAJ13)
CAGAGGYQKVTF

SEQ ID NO: 294324 - protein, 14 aa, Homo sapiens
  CDR3 for beta chain variable domain of TCR clone 147162 (TRBV12-4, TRBJ2-2)
CASNQGANTGELFF

SEQ ID NO: 294325 - protein, 14 aa, Homo sapiens
  CDR3 for alpha chain variable domain of TCR clone 147163 (TRAV35, TRAJ38)
CAGSNAGNHRKLIW

SEQ ID NO: 294326 - protein, 12 aa, Homo sapiens
  CDR3 for beta chain variable domain of TCR clone 147163 (TRBV19, TRBJ2-7)
CASTDRGYEQYF

SEQ ID NO: 294327 - protein, 11 aa, Homo sapiens
  CDR3 for alpha chain variable domain of TCR clone 147164 (TRAV1-1, TRAJ30)
CAQNRDDKIIF

SEQ ID NO: 294328 - protein, 14 aa, Homo sapiens
  CDR3 for beta chain variable domain of TCR clone 147164 (TRBV15, TRBJ2-5)
CATSGDRGQETQYF

SEQ ID NO: 294329 - protein, 17 aa, Homo sapiens
  CDR3 for alpha chain variable domain of TCR clone 147165 (TRAV17, TRAJ7)
CATLGRLAFGKGNQVVV

SEQ ID NO: 294330 - protein, 17 aa, Homo sapiens
  CDR3 for beta chain variable domain of TCR clone 147165 (TRBV28, TRBJ1-1)
CASSLSGTGYENTEAFF

SEQ ID NO: 294331 - protein, 14 aa, Homo sapiens
  CDR3 for alpha chain variable domain of TCR clone 147166 (TRAV2, TRAJ3)
CAVDRYSSASKIIF

SEQ ID NO: 294332 - protein, 16 aa, Homo sapiens
  CDR3 for beta chain variable domain of TCR clone 147166 (TRBV20-1, TRBJ1-4)
CSAPGQGLLTNEKLFF

SEQ ID NO: 294333 - protein, 14 aa, Homo sapiens
  CDR3 for alpha chain variable domain of TCR clone 147167 (TRAV16, TRAJ44)
SALSTTGTASKLTF

SEQ ID NO: 294334 - protein, 18 aa, Homo sapiens
  CDR3 for beta chain variable domain of TCR clone 147167 (TRBV6-5, TRBJ1-1)
CASSYSAPGGTGGTEAFF

SEQ ID NO: 294335 - protein, 13 aa, Homo sapiens
  CDR3 for alpha chain variable domain of TCR clone 147168 (TRAV2, TRAJ16)
CAATFSDGQKLLF

SEQ ID NO: 294336 - protein, 14 aa, Homo sapiens
  CDR3 for beta chain variable domain of TCR clone 147168 (TRBV20-1, TRBJ2-1)
CSARRWGPYNEQFF

SEQ ID NO: 294337 - protein, 11 aa, Homo sapiens
  CDR3 for alpha chain variable domain of TCR clone 147169 (TRAV12-2, TRAJ29)
CAVTLRSPLVF

SEQ ID NO: 294338 - protein, 15 aa, Homo sapiens
  CDR3 for beta chain variable domain of TCR clone 147169 (TRBV27, TRBJ2-1)
CASSNGGGSSNEQFF

SEQ ID NO: 294339 - protein, 14 aa, Homo sapiens
  CDR3 for alpha chain variable domain of TCR clone 147170 (TRAV17, TRAJ57)
CATDPQGGSEKMVF

SEQ ID NO: 294340 - protein, 16 aa, Homo sapiens
  CDR3 for beta chain variable domain of TCR clone 147170 (TRBV20-1, TRBJ1-4)
CSAPGQGLLTNEKLFF

SEQ ID NO: 294341 - protein, 10 aa, Homo sapiens
  CDR3 for alpha chain variable domain of TCR clone 147171 (TRAV21, TRAJ31)
CAVDNDRLMF

SEQ ID NO: 294342 - protein, 14 aa, Homo sapiens
  CDR3 for beta chain variable domain of TCR clone 147171 (TRBV5-5, TRBJ2-2)
CASSLLGDTGELFF

SEQ ID NO: 294343 - protein, 14 aa, Homo sapiens
  CDR3 for alpha chain variable domain of TCR clone 147172 (TRAV12-1, TRAJ12)
CVVTRMDSSYQLIF

SEQ ID NO: 294344 - protein, 14 aa, Homo sapiens
  CDR3 for beta chain variable domain of TCR clone 147172 (TRBV7-2, TRBJ2-7)
CASSPKTSFYEQYF

SEQ ID NO: 294345 - protein, 15 aa, Homo sapiens
  CDR3 for alpha chain variable domain of TCR clone 147173 (TRAV8-3, TRAJ45)
CASSYSGGGADGLTF

SEQ ID NO: 294346 - protein, 13 aa, Homo sapiens
  CDR3 for beta chain variable domain of TCR clone 147173 (TRBV10-3, TRBJ2-7)
CASKLAVSYEEYF

SEQ ID NO: 294347 - protein, 10 aa, Homo sapiens
  CDR3 for alpha chain variable domain of TCR clone 147174 (TRAV35, TRAJ49)
CAGQLHQFYF

SEQ ID NO: 294348 - protein, 17 aa, Homo sapiens
  CDR3 for beta chain variable domain of TCR clone 147174 (TRBV28, TRBJ2-1)
CASSTPAGTASYNEQFF

SEQ ID NO: 294349 - protein, 14 aa, Homo sapiens
  CDR3 for alpha chain variable domain of TCR clone 147175 (TRAV1-2, TRAJ16)
CVVNRFSDGQKLLF

SEQ ID NO: 294350 - protein, 14 aa, Homo sapiens
  CDR3 for beta chain variable domain of TCR clone 147175 (TRBV7-9, TRBJ2-3)
CASSLEDGTDTQYF

SEQ ID NO: 294351 - protein, 11 aa, Homo sapiens
  CDR3 for alpha chain variable domain of TCR clone 147176 (TRAV12-3, TRAJ17)
FNDATGNKLTF

SEQ ID NO: 294352 - protein, 15 aa, Homo sapiens
  CDR3 for beta chain variable domain of TCR clone 147176 (TRBV20-1, TRBJ2-7)
CSARDRVSGMDEQYF

SEQ ID NO: 294353 - protein, 14 aa, Homo sapiens
  CDR3 for alpha chain variable domain of TCR clone 147177 (TRAV17, TRAJ22)
CATVLSGSARQLTF

SEQ ID NO: 294354 - protein, 12 aa, Homo sapiens
  CDR3 for beta chain variable domain of TCR clone 147177 (TRBV7-8, TRBJ2-7)
CASEGGPHGQYF

SEQ ID NO: 294355 - protein, 16 aa, Homo sapiens
  CDR3 for alpha chain variable domain of TCR clone 147178 (TRAV8-3, TRAJ8)
CAVPRDGNTGFQKLVS

SEQ ID NO: 294356 - protein, 14 aa, Homo sapiens
  CDR3 for beta chain variable domain of TCR clone 147178 (TRBV28, TRBJ1-1)
CASSESGRGTEAFF

SEQ ID NO: 294357 - protein, 14 aa, Homo sapiens
  CDR3 for alpha chain variable domain of TCR clone 147179 (TRAV8-4, TRAJ48)
CAVSETFGNEKLTF

SEQ ID NO: 294358 - protein, 14 aa, Homo sapiens
  CDR3 for beta chain variable domain of TCR clone 147179 (TRBV13, TRBJ2-7)
CASSLKGASCEQYF

SEQ ID NO: 294359 - protein, 14 aa, Homo sapiens
  CDR3 for alpha chain variable domain of TCR clone 147180 (TRAV1-2, TRAJ16)
CAFNRFSDGQKLLF

SEQ ID NO: 294360 - protein, 12 aa, Homo sapiens
  CDR3 for beta chain variable domain of TCR clone 147180 (TRBV11-2, TRBJ2-2)
CASSLGGGELFF

SEQ ID NO: 294361 - protein, 14 aa, Homo sapiens
  CDR3 for alpha chain variable domain of TCR clone 147181 (TRAV26-1, TRAJ39)
CVVRANNAGNMLTV

SEQ ID NO: 294362 - protein, 15 aa, Homo sapiens
  CDR3 for beta chain variable domain of TCR clone 147181 (TRBV28, TRBJ1-2)
CASSLMGGRRDGYTF

SEQ ID NO: 294363 - protein, 17 aa, Homo sapiens
  CDR3 for alpha chain variable domain of TCR clone 147182 (TRAV26-1, TRAJ27)
CIVSTPWINTNAGKSTF

SEQ ID NO: 294364 - protein, 16 aa, Homo sapiens
  CDR3 for beta chain variable domain of TCR clone 147182 (TRBV7-9, TRBJ2-1)
CSSSLDPGLAIDEQFF

SEQ ID NO: 294365 - protein, 14 aa, Homo sapiens
  CDR3 for alpha chain variable domain of TCR clone 147183 (TRAV17, TRAJ57)
CATDPQGGSEKLVF

SEQ ID NO: 294366 - protein, 18 aa, Homo sapiens
  CDR3 for beta chain variable domain of TCR clone 147183 (TRBV6-6, TRBJ1-3)
CASSYSKWDSISRNTIYF

SEQ ID NO: 294367 - protein, 13 aa, Homo sapiens
  CDR3 for alpha chain variable domain of TCR clone 147184 (TRAV17, TRAJ5)
CALRGTGRRALTF

SEQ ID NO: 294368 - protein, 15 aa, Homo sapiens
  CDR3 for beta chain variable domain of TCR clone 147184 (TRBV28, TRBJ2-1)
CASSIIAGGRSEQFF

SEQ ID NO: 294369 - protein, 20 aa, Homo sapiens
  CDR3 for alpha chain variable domain of TCR clone 147185 (TRAV2, TRAJ37)
CCFLLCCGPDGSSNTGKLIF

SEQ ID NO: 294370 - protein, 12 aa, Homo sapiens
  CDR3 for beta chain variable domain of TCR clone 147185 (TRBV11-2, TRBJ2-3)
CASRPGTDTQYF

SEQ ID NO: 294371 - protein, 17 aa, Homo sapiens
  CDR3 for alpha chain variable domain of TCR clone 147186 (TRAV12-2, TRAJ4)
CAVNVRPVSGGYNKLIF

SEQ ID NO: 294372 - protein, 14 aa, Homo sapiens
  CDR3 for beta chain variable domain of TCR clone 147186 (TRBV13, TRBJ2-2)
CTSSFQGGAGELFF

SEQ ID NO: 294373 - protein, 11 aa, Homo sapiens
  CDR3 for alpha chain variable domain of TCR clone 147187 (TRAV27, TRAJ37)
CAGTPGGKLIF

SEQ ID NO: 294374 - protein, 13 aa, Homo sapiens
  CDR3 for beta chain variable domain of TCR clone 147187 (TRBV19, TRBJ1-2)
CASSQGQVYGYTF

SEQ ID NO: 294375 - protein, 15 aa, Homo sapiens
  CDR3 for alpha chain variable domain of TCR clone 147188 (TRAV26-1, TRAJ29)
CIVRVEGSGNIPLVF

SEQ ID NO: 294376 - protein, 14 aa, Homo sapiens
  CDR3 for beta chain variable domain of TCR clone 147188 (TRBV18, TRBJ2-5)
RASSPGVSQETQYF

SEQ ID NO: 294377 - protein, 15 aa, Homo sapiens
  CDR3 for alpha chain variable domain of TCR clone 147189 (TRAV13-1, TRAJ43)
CAATPELGGNNEMRF

SEQ ID NO: 294378 - protein, 15 aa, Homo sapiens
  CDR3 for beta chain variable domain of TCR clone 147189 (TRBV10-2, TRBJ2-6)
CASSEQGTGANVLTF

SEQ ID NO: 294379 - protein, 18 aa, Homo sapiens
  CDR3 for alpha chain variable domain of TCR clone 147190 (TRAV13-1, TRAJ52)
CVAKNPNAGGTSYGKLTF

SEQ ID NO: 294380 - protein, 13 aa, Homo sapiens
  CDR3 for beta chain variable domain of TCR clone 147190 (TRBV10-1, TRBJ1-1)
CASRLRENTEAFF

SEQ ID NO: 294381 - protein, 15 aa, Homo sapiens
  CDR3 for alpha chain variable domain of TCR clone 147191 (TRAV12-3, TRAJ52)
CNGGAGGTSYGKLTS

SEQ ID NO: 294382 - protein, 13 aa, Homo sapiens
  CDR3 for beta chain variable domain of TCR clone 147191 (TRBV20-1, TRBJ2-5)
CSARGDYQETQYF

SEQ ID NO: 294383 - protein, 19 aa, Homo sapiens
  CDR3 for alpha chain variable domain of TCR clone 147192 (TRAV29/DV5, TRAJ49)
CSVLLCSKLTVDTGNQFYF

SEQ ID NO: 294384 - protein, 14 aa, Homo sapiens
  CDR3 for beta chain variable domain of TCR clone 147192 (TRBV7-2, TRBJ2-7)
CASSPKTSFYEQYF

SEQ ID NO: 294385 - protein, 13 aa, Homo sapiens
  CDR3 for alpha chain variable domain of TCR clone 147193 (TRAV8-6, TRAJ49)
CAVITNTGNQFYF

SEQ ID NO: 294386 - protein, 15 aa, Homo sapiens
  CDR3 for beta chain variable domain of TCR clone 147193 (TRBV7-3, TRBJ1-1)
CASSPRADRNTEAFF

SEQ ID NO: 294387 - protein, 17 aa, Homo sapiens
  CDR3 for alpha chain variable domain of TCR clone 147194 (TRAV26-1, TRAJ27)
CIVSTPWINTNAGKSTF

SEQ ID NO: 294388 - protein, 16 aa, Homo sapiens
  CDR3 for beta chain variable domain of TCR clone 147194 (TRBV7-9, TRBJ2-1)
CASSFDPGLAIDEQFF

SEQ ID NO: 294389 - protein, 13 aa, Homo sapiens
  CDR3 for alpha chain variable domain of TCR clone 147195 (TRAV8-3, TRAJ48)
CAVVPFGNENLTF

SEQ ID NO: 294390 - protein, 19 aa, Homo sapiens
  CDR3 for beta chain variable domain of TCR clone 147195 (TRBV25-1, TRBJ2-2)
CAILVYRVDRGRKTGELFF

SEQ ID NO: 294391 - protein, 15 aa, Homo sapiens
  CDR3 for alpha chain variable domain of TCR clone 147196 (TRAV12-2, TRAJ53)
CAVNGGGGSNYKLTF

SEQ ID NO: 294392 - protein, 16 aa, Homo sapiens
  CDR3 for beta chain variable domain of TCR clone 147196 (TRBV19, TRBJ2-2)
CASRSPGTGATGELFF

SEQ ID NO: 294393 - protein, 14 aa, Homo sapiens
  CDR3 for alpha chain variable domain of TCR clone 147197 (TRAV1-2, TRAJ16)
CAGNRFSDGQKLLF

SEQ ID NO: 294394 - protein, 14 aa, Homo sapiens
  CDR3 for beta chain variable domain of TCR clone 147197 (TRBV12-5, TRBJ2-5)
CASGSRTHQETQYF

SEQ ID NO: 294395 - protein, 16 aa, Homo sapiens
  CDR3 for alpha chain variable domain of TCR clone 147198 (TRAV3, TRAJ37)
CAVRGKGAGNTGKLIF

SEQ ID NO: 294396 - protein, 20 aa, Homo sapiens
  CDR3 for beta chain variable domain of TCR clone 147198 (TRBV7-8, TRBJ2-2)
CASSHLFPGPTIHITGELFF

SEQ ID NO: 294397 - protein, 15 aa, Homo sapiens
  CDR3 for alpha chain variable domain of TCR clone 147199 (TRAV1-2, TRAJ26)
CAVRDLITMVRILSF

SEQ ID NO: 294398 - protein, 12 aa, Homo sapiens
  CDR3 for beta chain variable domain of TCR clone 147199 (TRBV20-1, TRBJ2-1)
CSAQYTYNEQFF

SEQ ID NO: 294399 - protein, 14 aa, Homo sapiens
  CDR3 for alpha chain variable domain of TCR clone 147200 (TRAV27, TRAJ42)
CRGRLGGSQGNLIF

SEQ ID NO: 294400 - protein, 15 aa, Homo sapiens
  CDR3 for beta chain variable domain of TCR clone 147200 (TRBV20-1, TRBJ2-7)
CSARDRVSGMDEQYF

SEQ ID NO: 294401 - protein, 15 aa, Homo sapiens
  CDR3 for alpha chain variable domain of TCR clone 147201 (TRAV3, TRAJ13)
CAVRVYSGGYQKVTF

SEQ ID NO: 294402 - protein, 16 aa, Homo sapiens
  CDR3 for beta chain variable domain of TCR clone 147201 (TRBV7-2, TRBJ2-6)
CASSERRASGANVLTF

SEQ ID NO: 294403 - protein, 14 aa, Homo sapiens
  CDR3 for alpha chain variable domain of TCR clone 147202 (TRAV35, TRAJ33)
CAGSSQGSNYQLIW

SEQ ID NO: 294404 - protein, 15 aa, Homo sapiens
  CDR3 for beta chain variable domain of TCR clone 147202 (TRBV20-1, TRBJ2-7)
CSAESGNSGAYEQYF

SEQ ID NO: 294405 - protein, 17 aa, Homo sapiens
  CDR3 for alpha chain variable domain of TCR clone 147203 (TRAV3, TRAJ6)
CAVRDGPRAGGRYIPTF

SEQ ID NO: 294406 - protein, 14 aa, Homo sapiens
  CDR3 for beta chain variable domain of TCR clone 147203 (TRBV7-2, TRBJ2-7)
YASSPKTSFYEQYF

SEQ ID NO: 294407 - protein, 15 aa, Homo sapiens
  CDR3 for alpha chain variable domain of TCR clone 147204 (TRAV12-3, TRAJ10)
CASYILTGVGNKLTF

SEQ ID NO: 294408 - protein, 15 aa, Homo sapiens
  CDR3 for beta chain variable domain of TCR clone 147204 (TRBV7-2, TRBJ1-6)
CASSLGPDRGMPLHF

SEQ ID NO: 294409 - protein, 13 aa, Homo sapiens
  CDR3 for alpha chain variable domain of TCR clone 147205 (TRAV23/DV6, TRAJ24)
CAASEDSWGKLQF

SEQ ID NO: 294410 - protein, 12 aa, Homo sapiens
  CDR3 for beta chain variable domain of TCR clone 147205 (TRBV5-1, TRBJ2-7)
CASSDSTYEQYC

SEQ ID NO: 294411 - protein, 10 aa, Homo sapiens
  CDR3 for alpha chain variable domain of TCR clone 147206 (TRAV23/DV6, TRAJ3)
CAATTFALGG

SEQ ID NO: 294412 - protein, 15 aa, Homo sapiens
  CDR3 for beta chain variable domain of TCR clone 147206 (TRBV19, TRBJ1-6)
CASSTQGAVGSPLHC

SEQ ID NO: 294413 - protein, 14 aa, Homo sapiens
  CDR3 for alpha chain variable domain of TCR clone 147207 (TRAV13-1, TRAJ35)
CAASKGGFGNVLHC

SEQ ID NO: 294414 - protein, 15 aa, Homo sapiens
  CDR3 for beta chain variable domain of TCR clone 147207 (TRBV2, TRBJ2-4)
CASSGTNLAKNIQYF

SEQ ID NO: 294415 - protein, 11 aa, Homo sapiens
  CDR3 for alpha chain variable domain of TCR clone 147208 (TRAV17, TRAJ43)
CATPRSNDMRF

SEQ ID NO: 294416 - protein, 11 aa, Homo sapiens
  CDR3 for beta chain variable domain of TCR clone 147208 (TRBV11-2, TRBJ1-1)
CASSINTEAFF

SEQ ID NO: 294417 - protein, 12 aa, Homo sapiens
  CDR3 for alpha chain variable domain of TCR clone 147209 (TRAV27, TRAJ9)
CAGEPGGFKTIF

SEQ ID NO: 294418 - protein, 18 aa, Homo sapiens
  CDR3 for beta chain variable domain of TCR clone 147209 (TRBV10-2, TRBJ2-2)
CISAPAGHRQADAGELFF

SEQ ID NO: 294419 - protein, 11 aa, Homo sapiens
  CDR3 for alpha chain variable domain of TCR clone 147210 (TRAV23/DV6, TRAJ49)
CAATPGQVLRS

SEQ ID NO: 294420 - protein, 14 aa, Homo sapiens
  CDR3 for beta chain variable domain of TCR clone 147210 (TRBV7-3, TRBJ1-1)
CASSLKGGNTEAFF

SEQ ID NO: 294421 - protein, 11 aa, Homo sapiens
  CDR3 for alpha chain variable domain of TCR clone 147211 (TRAV17, TRAJ39)
CATNPYNMLTF

SEQ ID NO: 294422 - protein, 13 aa, Homo sapiens
  CDR3 for beta chain variable domain of TCR clone 147211 (TRBV7-8, TRBJ2-1)
CASTRDAVDERFF

SEQ ID NO: 294423 - protein, 17 aa, Homo sapiens
  CDR3 for alpha chain variable domain of TCR clone 147212 (TRAV3, TRAJ6)
CAVRDGPRAGGSYIPTF

SEQ ID NO: 294424 - protein, 13 aa, Homo sapiens
  CDR3 for beta chain variable domain of TCR clone 147212 (TRBV12-4, TRBJ2-1)
CASSLQIVNEQFF

SEQ ID NO: 294425 - protein, 13 aa, Homo sapiens
  CDR3 for alpha chain variable domain of TCR clone 147213 (TRAV21, TRAJ27)
CAARPGNAGKSTF

SEQ ID NO: 294426 - protein, 15 aa, Homo sapiens
  CDR3 for beta chain variable domain of TCR clone 147213 (TRBV5-5, TRBJ2-2)
CASSRQASGAGELFF

SEQ ID NO: 294427 - protein, 15 aa, Homo sapiens
  CDR3 for alpha chain variable domain of TCR clone 147214 (TRAV3, TRAJ22)
CAVRDRGGSARQLTF

SEQ ID NO: 294428 - protein, 14 aa, Homo sapiens
  CDR3 for beta chain variable domain of TCR clone 147214 (TRBV19, TRBJ1-5)
CASSLGLIGKPQHF

SEQ ID NO: 294429 - protein, 17 aa, Homo sapiens
  CDR3 for alpha chain variable domain of TCR clone 147215 (TRAV26-1, TRAJ37)
CIVRVITVSSNTGKLIF

SEQ ID NO: 294430 - protein, 19 aa, Homo sapiens
  CDR3 for beta chain variable domain of TCR clone 147215 (TRBV28, TRBJ2-7)
CASSYSGTSRLGWVYEQYF

SEQ ID NO: 294431 - protein, 10 aa, Homo sapiens
  CDR3 for alpha chain variable domain of TCR clone 147216 (TRAV1-2, TRAJ31)
CAFFDARLMF

SEQ ID NO: 294432 - protein, 17 aa, Homo sapiens
  CDR3 for beta chain variable domain of TCR clone 147216 (TRBV4-3, TRBJ1-2)
CASSSRLQAGGSVGYTF

SEQ ID NO: 294433 - protein, 16 aa, Homo sapiens
  CDR3 for alpha chain variable domain of TCR clone 147217 (TRAV12-3, TRAJ53)
CAMSPGRGGSNYKMTF

SEQ ID NO: 294434 - protein, 13 aa, Homo sapiens
  CDR3 for beta chain variable domain of TCR clone 147217 (TRBV19, TRBJ1-2)
CASSVPGQDGYTF

SEQ ID NO: 294435 - protein, 11 aa, Homo sapiens
  CDR3 for alpha chain variable domain of TCR clone 147218 (TRAV1-2, TRAJ40)
CAVPGNYKYLF

SEQ ID NO: 294436 - protein, 15 aa, Homo sapiens
  CDR3 for beta chain variable domain of TCR clone 147218 (TRBV5-7, TRBJ1-5)
CASSYGKLWDQPQHF

SEQ ID NO: 294437 - protein, 14 aa, Homo sapiens
  CDR3 for alpha chain variable domain of TCR clone 147219 (TRAV26-2, TRAJ31)
CILIPGNNNARLMF

SEQ ID NO: 294438 - protein, 16 aa, Homo sapiens
  CDR3 for beta chain variable domain of TCR clone 147219 (TRBV7-3, TRBJ2-1)
CASSLVSRSSNNEQFF

SEQ ID NO: 294439 - protein, 13 aa, Homo sapiens
  CDR3 for alpha chain variable domain of TCR clone 147220 (TRAV12-3, TRAJ9)
CAMRNTGGFKTIF

SEQ ID NO: 294440 - protein, 14 aa, Homo sapiens
  CDR3 for beta chain variable domain of TCR clone 147220 (TRBV28, TRBJ1-5)
CASSGQALYQPQHF

SEQ ID NO: 294441 - protein, 15 aa, Homo sapiens
  CDR3 for alpha chain variable domain of TCR clone 147221 (TRAV20, TRAJ53)
CAVQASGGSNYKLTS

SEQ ID NO: 294442 - protein, 12 aa, Homo sapiens
  CDR3 for beta chain variable domain of TCR clone 147221 (TRBV7-8, TRBJ2-7)
CASSLGDREQYF

SEQ ID NO: 294443 - protein, 14 aa, Homo sapiens
  CDR3 for alpha chain variable domain of TCR clone 147222 (TRAV26-1, TRAJ38)
CIADNACNNRKRIW

SEQ ID NO: 294444 - protein, 15 aa, Homo sapiens
  CDR3 for beta chain variable domain of TCR clone 147222 (TRBV20-1, TRBJ2-7)
CSARDRVSGMDEQYF

SEQ ID NO: 294445 - protein, 14 aa, Homo sapiens
  CDR3 for alpha chain variable domain of TCR clone 147223 (TRAV8-1, TRAJ13)
RAVKRSGGYQKVTF

SEQ ID NO: 294446 - protein, 22 aa, Homo sapiens
  CDR3 for beta chain variable domain of TCR clone 147223 (TRBV11-2, TRBJ1-4)
CASSLDITRRGIPRKDNEKLFF

SEQ ID NO: 294447 - protein, 16 aa, Homo sapiens
  CDR3 for alpha chain variable domain of TCR clone 147224 (TRAV17, TRAJ28)
CATDEYSGAGSCQLTF

SEQ ID NO: 294448 - protein, 13 aa, Homo sapiens
  CDR3 for beta chain variable domain of TCR clone 147224 (TRBV7-9, TRBJ1-2)
CASRTGPNYGYTF

SEQ ID NO: 294449 - protein, 19 aa, Homo sapiens
  CDR3 for alpha chain variable domain of TCR clone 147225 (TRAV23/DV6, )
CAATALIPDIQNADPAVYQ

SEQ ID NO: 294450 - protein, 16 aa, Homo sapiens
  CDR3 for beta chain variable domain of TCR clone 147225 (TRBV10-3, TRBJ2-7)
CAISPRGQEQTYEQYF

SEQ ID NO: 294451 - protein, 12 aa, Homo sapiens
  CDR3 for alpha chain variable domain of TCR clone 147226 (TRAV27, TRAJ21)
CAGVRQLQQILL

SEQ ID NO: 294452 - protein, 14 aa, Homo sapiens
  CDR3 for beta chain variable domain of TCR clone 147226 (TRBV7-9, TRBJ1-4)
CASSLEGQLEKLFF

SEQ ID NO: 294453 - protein, 13 aa, Homo sapiens
  CDR3 for alpha chain variable domain of TCR clone 147227 (TRAV36/DV7, TRAJ37)
CAVFSSNTGKLIF

SEQ ID NO: 294454 - protein, 14 aa, Homo sapiens
  CDR3 for beta chain variable domain of TCR clone 147227 (TRBV20-1, TRBJ2-7)
CSAWTALSSYEQYF

SEQ ID NO: 294455 - protein, 13 aa, Homo sapiens
  CDR3 for alpha chain variable domain of TCR clone 147228 (TRAV12-2, TRAJ9)
CAVTWAGGFKTIF

SEQ ID NO: 294456 - protein, 13 aa, Homo sapiens
  CDR3 for beta chain variable domain of TCR clone 147228 (TRBV7-3, TRBJ1-1)
CASSQDWGAEAFF

SEQ ID NO: 294457 - protein, 14 aa, Homo sapiens
  CDR3 for alpha chain variable domain of TCR clone 147229 (TRAV21, TRAJ45)
CAVVSGGGADGLTF

SEQ ID NO: 294458 - protein, 14 aa, Homo sapiens
  CDR3 for beta chain variable domain of TCR clone 147229 (TRBV20-1, TRBJ2-3)
CSALGLEAADTQYF

SEQ ID NO: 294459 - protein, 14 aa, Homo sapiens
  CDR3 for alpha chain variable domain of TCR clone 147230 (TRAV1-1, TRAJ27)
CAVIYNTNAGTSTF

SEQ ID NO: 294460 - protein, 18 aa, Homo sapiens
  CDR3 for beta chain variable domain of TCR clone 147230 (TRBV7-3, TRBJ2-1)
CASSLTLASGRAMVSSSS

SEQ ID NO: 294461 - protein, 14 aa, Homo sapiens
  CDR3 for alpha chain variable domain of TCR clone 147231 (TRAV36/DV7, TRAJ44)
CCGANTGTASKLTF

SEQ ID NO: 294462 - protein, 19 aa, Homo sapiens
  CDR3 for beta chain variable domain of TCR clone 147231 (TRBV19, TRBJ2-5)
CASSIGQVTDFFLGETQYF

SEQ ID NO: 294463 - protein, 17 aa, Homo sapiens
  CDR3 for alpha chain variable domain of TCR clone 147232 (TRAV27, TRAJ26)
CAGARAPLDNYGQNFVF

SEQ ID NO: 294464 - protein, 15 aa, Homo sapiens
  CDR3 for beta chain variable domain of TCR clone 147232 (TRBV11-2, TRBJ2-7)
CASSPRSGGLETQYF

SEQ ID NO: 294465 - protein, 11 aa, Homo sapiens
  CDR3 for alpha chain variable domain of TCR clone 147233 (TRAV12-3, TRAJ41)
CAMNAREALNF

SEQ ID NO: 294466 - protein, 14 aa, Homo sapiens
  CDR3 for beta chain variable domain of TCR clone 147233 (TRBV7-8, TRBJ2-3)
CASSLGTVTDTQYF

SEQ ID NO: 294467 - protein, 13 aa, Homo sapiens
  CDR3 for alpha chain variable domain of TCR clone 147234 (TRAV8-3, TRAJ4)
WVFYSGGYNKLIF

SEQ ID NO: 294468 - protein, 14 aa, Homo sapiens
  CDR3 for beta chain variable domain of TCR clone 147234 (TRBV7-9, TRBJ2-2)
CASSGLADTGELFF

SEQ ID NO: 294469 - protein, 10 aa, Homo sapiens
  CDR3 for alpha chain variable domain of TCR clone 147235 (TRAV12-2, TRAJ48)
CAVTSEKLTF

SEQ ID NO: 294470 - protein, 14 aa, Homo sapiens
  CDR3 for beta chain variable domain of TCR clone 147235 (TRBV7-3, TRBJ2-1)
CASSLGTSANEQFF

SEQ ID NO: 294471 - protein, 13 aa, Homo sapiens
  CDR3 for alpha chain variable domain of TCR clone 147236 (TRAV29/DV5, TRAJ54)
CAASAQGAQKLVF

SEQ ID NO: 294472 - protein, 16 aa, Homo sapiens
  CDR3 for beta chain variable domain of TCR clone 147236 (TRBV5-1, TRBJ2-2)
CASSSKLAENTGELFF

SEQ ID NO: 294473 - protein, 15 aa, Homo sapiens
  CDR3 for alpha chain variable domain of TCR clone 147237 (TRAV30, TRAJ32)
CGTEILGGATNKLIF

SEQ ID NO: 294474 - protein, 14 aa, Homo sapiens
  CDR3 for beta chain variable domain of TCR clone 147237 (TRBV4-1, TRBJ2-2)
CASSQAVNTGELFF

SEQ ID NO: 294475 - protein, 16 aa, Homo sapiens
  CDR3 for alpha chain variable domain of TCR clone 147238 (TRAV12-3, TRAJ53)
CAMRVGSGGSNYKLTF

SEQ ID NO: 294476 - protein, 11 aa, Homo sapiens
  CDR3 for beta chain variable domain of TCR clone 147238 (TRBV29-1, TRBJ2-5)
CSVASGETQYF

SEQ ID NO: 294477 - protein, 16 aa, Homo sapiens
  CDR3 for alpha chain variable domain of TCR clone 147239 (TRAV26-1, TRAJ37)
CIYARHGSSNTGKLTF

SEQ ID NO: 294478 - protein, 16 aa, Homo sapiens
  CDR3 for beta chain variable domain of TCR clone 147239 (TRBV19, TRBJ2-4)
CATGGLAGGTKNIQYF

SEQ ID NO: 294479 - protein, 14 aa, Homo sapiens
  CDR3 for alpha chain variable domain of TCR clone 147240 (TRAV12-1, TRAJ27)
CGEHIRTNAGKSTF

SEQ ID NO: 294480 - protein, 15 aa, Homo sapiens
  CDR3 for beta chain variable domain of TCR clone 147240 (TRBV19, TRBJ1-1)
CASTSGQIQNAEAFF

SEQ ID NO: 294481 - protein, 12 aa, Homo sapiens
  CDR3 for alpha chain variable domain of TCR clone 147241 (TRAV1-1, TRAJ8)
CAGGTGFQTLVF

SEQ ID NO: 294482 - protein, 16 aa, Homo sapiens
  CDR3 for beta chain variable domain of TCR clone 147241 (TRBV28, TRBJ2-2)
CASSLEGGSNTGELFF

SEQ ID NO: 294483 - protein, 13 aa, Homo sapiens
  CDR3 for alpha chain variable domain of TCR clone 147242 (TRAV30, TRAJ34)
CGTVGYNTDKLIF

SEQ ID NO: 294484 - protein, 16 aa, Homo sapiens
  CDR3 for beta chain variable domain of TCR clone 147242 (TRBV7-9, TRBJ1-2)
CASSLGFSPGEDGYSF

SEQ ID NO: 294485 - protein, 18 aa, Homo sapiens
  CDR3 for alpha chain variable domain of TCR clone 147243 (TRAV21, TRAJ52)
CAVRPSPAGGISYGKLTF

SEQ ID NO: 294486 - protein, 15 aa, Homo sapiens
  CDR3 for beta chain variable domain of TCR clone 147243 (TRBV10-3, TRBJ2-3)
CAISLTSGGTDTQYF

SEQ ID NO: 294487 - protein, 14 aa, Homo sapiens
  CDR3 for alpha chain variable domain of TCR clone 147244 (TRAV13-1, TRAJ20)
CAARPGSNDYKLSF

SEQ ID NO: 294488 - protein, 13 aa, Homo sapiens
  CDR3 for beta chain variable domain of TCR clone 147244 (TRBV20-1, TRBJ1-1)
CSAPPGGHTEDFF

SEQ ID NO: 294489 - protein, 14 aa, Homo sapiens
  CDR3 for alpha chain variable domain of TCR clone 147245 (TRAV27, TRAJ22)
CAGLPSGSARQLTF

SEQ ID NO: 294490 - protein, 16 aa, Homo sapiens
  CDR3 for beta chain variable domain of TCR clone 147245 (TRBV7-3, TRBJ2-2)
CASSLKRGTLSGELFF

SEQ ID NO: 294491 - protein, 11 aa, Homo sapiens
  CDR3 for alpha chain variable domain of TCR clone 147246 (TRAV35, TRAJ30)
CAGPGDDKIIF

SEQ ID NO: 294492 - protein, 12 aa, Homo sapiens
  CDR3 for beta chain variable domain of TCR clone 147246 (TRBV7-8, TRBJ2-7)
CASSLGDREQYF

SEQ ID NO: 294493 - protein, 14 aa, Homo sapiens
  CDR3 for alpha chain variable domain of TCR clone 147247 (TRAV6, TRAJ6)
CALPTSGGSYIPTF

SEQ ID NO: 294494 - protein, 17 aa, Homo sapiens
  CDR3 for beta chain variable domain of TCR clone 147247 (TRBV7-8, TRBJ2-6)
SASSAGTGGAGANVLTF

SEQ ID NO: 294495 - protein, 13 aa, Homo sapiens
  CDR3 for alpha chain variable domain of TCR clone 147248 (TRAV20, TRAJ33)
CAVRMHSNYQLIW

SEQ ID NO: 294496 - protein, 14 aa, Homo sapiens
  CDR3 for beta chain variable domain of TCR clone 147248 (TRBV4-2, TRBJ2-1)
CASGLDRAYNEQFF

SEQ ID NO: 294497 - protein, 16 aa, Homo sapiens
  CDR3 for alpha chain variable domain of TCR clone 147249 (TRAV17, TRAJ52)
CATDPVGGTSYGKLTF

SEQ ID NO: 294498 - protein, 16 aa, Homo sapiens
  CDR3 for beta chain variable domain of TCR clone 147249 (TRBV7-7, TRBJ2-1)
CASSLASGTSYNEQFF

SEQ ID NO: 294499 - protein, 13 aa, Homo sapiens
  CDR3 for alpha chain variable domain of TCR clone 147250 (TRAV12-3, TRAJ10)
CAVGTGGGNKLTF

SEQ ID NO: 294500 - protein, 12 aa, Homo sapiens
  CDR3 for beta chain variable domain of TCR clone 147250 (TRBV7-9, TRBJ1-1)
CASSLSGGVAFF

SEQ ID NO: 294501 - protein, 16 aa, Homo sapiens
  CDR3 for alpha chain variable domain of TCR clone 147251 (TRAV14/DV4, TRAJ54)
CAMREGRIQGAQKLVF

SEQ ID NO: 294502 - protein, 15 aa, Homo sapiens
  CDR3 for beta chain variable domain of TCR clone 147251 (TRBV11-2, TRBJ2-1)
CASSLAGGPGNEQFF

SEQ ID NO: 294503 - protein, 15 aa, Homo sapiens
  CDR3 for alpha chain variable domain of TCR clone 147252 (TRAV8-2, TRAJ28)
CVVSESGAGSYQLTF

SEQ ID NO: 294504 - protein, 16 aa, Homo sapiens
  CDR3 for beta chain variable domain of TCR clone 147252 (TRBV19, TRBJ2-2)
CASSFPGQGLAGELFF

SEQ ID NO: 294505 - protein, 14 aa, Homo sapiens
  CDR3 for alpha chain variable domain of TCR clone 147253 (TRAV9-2, TRAJ39)
CALYIYNAGNMLTF

SEQ ID NO: 294506 - protein, 16 aa, Homo sapiens
  CDR3 for beta chain variable domain of TCR clone 147253 (TRBV2, TRBJ2-4)
CASSEAPGGEQNIQYF

SEQ ID NO: 294507 - protein, 14 aa, Homo sapiens
  CDR3 for alpha chain variable domain of TCR clone 147254 (TRAV23/DV6, TRAJ22)
CAASRSGSARQLPF

SEQ ID NO: 294508 - protein, 15 aa, Homo sapiens
  CDR3 for beta chain variable domain of TCR clone 147254 (TRBV12-4, TRBJ1-1)
CASTLTEGAGSEAFF

SEQ ID NO: 294509 - protein, 12 aa, Homo sapiens
  CDR3 for alpha chain variable domain of TCR clone 147255 (TRAV12-3, TRAJ17)
CAMTLTGNKLTF

SEQ ID NO: 294510 - protein, 15 aa, Homo sapiens
  CDR3 for beta chain variable domain of TCR clone 147255 (TRBV20-1, TRBJ2-7)
CSARDRVAGMGEQYF

SEQ ID NO: 294511 - protein, 13 aa, Homo sapiens
  CDR3 for alpha chain variable domain of TCR clone 147256 (TRAV14/DV4, TRAJ16)
CAMRGTDGQRLLF

SEQ ID NO: 294512 - protein, 18 aa, Homo sapiens
  CDR3 for beta chain variable domain of TCR clone 147256 (TRBV4-1, TRBJ2-3)
CASSHQLAGGRSTDTQYF

SEQ ID NO: 294513 - protein, 17 aa, Homo sapiens
  CDR3 for alpha chain variable domain of TCR clone 147257 (TRAV3, TRAJ28)
CAVREAYSGAGSYQLTF

SEQ ID NO: 294514 - protein, 18 aa, Homo sapiens
  CDR3 for beta chain variable domain of TCR clone 147257 (TRBV27, TRBJ2-1)
CASGNRAVGVGSNNEQFF

SEQ ID NO: 294515 - protein, 14 aa, Homo sapiens
  CDR3 for alpha chain variable domain of TCR clone 147258 (TRAV23/DV6, TRAJ8)
CAASKDTGFQKLVF

SEQ ID NO: 294516 - protein, 15 aa, Homo sapiens
  CDR3 for beta chain variable domain of TCR clone 147258 (TRBV28, TRBJ2-3)
CASSPDRQGANTQYF

SEQ ID NO: 294517 - protein, 13 aa, Homo sapiens
  CDR3 for alpha chain variable domain of TCR clone 147259 (TRAV20, TRAJ49)
CAVHSNTGNQFYF

SEQ ID NO: 294518 - protein, 15 aa, Homo sapiens
  CDR3 for beta chain variable domain of TCR clone 147259 (TRBV7-3, TRBJ2-2)
CASSETGQGTGELFF

SEQ ID NO: 294519 - protein, 13 aa, Homo sapiens
  CDR3 for alpha chain variable domain of TCR clone 147260 (TRAV27, TRAJ41)
CAGEGNSGYALNF

SEQ ID NO: 294520 - protein, 16 aa, Homo sapiens
  CDR3 for beta chain variable domain of TCR clone 147260 (TRBV18, TRBJ1-1)
CASSPGVGGRGGEAFF

SEQ ID NO: 294521 - protein, 14 aa, Homo sapiens
  CDR3 for alpha chain variable domain of TCR clone 147261 (TRAV3, TRAJ34)
RAVRDINNTDKLIF

SEQ ID NO: 294522 - protein, 15 aa, Homo sapiens
  CDR3 for beta chain variable domain of TCR clone 147261 (TRBV20-1, TRBJ2-7)
CSARDRVSGMDEQYF

SEQ ID NO: 294523 - protein, 14 aa, Homo sapiens
  CDR3 for alpha chain variable domain of TCR clone 147262 (TRAV12-2, TRAJ13)
CAVKKTGGYQKATF

SEQ ID NO: 294524 - protein, 15 aa, Homo sapiens
  CDR3 for beta chain variable domain of TCR clone 147262 (TRBV7-3, TRBJ2-1)
CASSPTGGGEVEQFF

SEQ ID NO: 294525 - protein, 15 aa, Homo sapiens
  CDR3 for alpha chain variable domain of TCR clone 147263 (TRAV26-1, TRAJ44)
CIVTANTGTASKLTF

SEQ ID NO: 294526 - protein, 15 aa, Homo sapiens
  CDR3 for beta chain variable domain of TCR clone 147263 (TRBV15, TRBJ1-5)
CATSREQGGNQPQHF

SEQ ID NO: 294527 - protein, 14 aa, Homo sapiens
  CDR3 for alpha chain variable domain of TCR clone 147264 (TRAV12-3, TRAJ13)
CAMRNSGGYQKVTF

SEQ ID NO: 294528 - protein, 14 aa, Homo sapiens
  CDR3 for beta chain variable domain of TCR clone 147264 (TRBV19, TRBJ2-1)
CASKDPGLANEQFF

SEQ ID NO: 294529 - protein, 17 aa, Homo sapiens
  CDR3 for alpha chain variable domain of TCR clone 147265 (TRAV16, TRAJ58)
CITVLSNGETSGSRLTF

SEQ ID NO: 294530 - protein, 17 aa, Homo sapiens
  CDR3 for beta chain variable domain of TCR clone 147265 (TRBV18, TRBJ2-1)
CASSKGLSGGADNEPFF

SEQ ID NO: 294531 - protein, 13 aa, Homo sapiens
  CDR3 for alpha chain variable domain of TCR clone 147266 (TRAV29/DV5, TRAJ47)
FAASAEYGNKLVF

SEQ ID NO: 294532 - protein, 15 aa, Homo sapiens
  CDR3 for beta chain variable domain of TCR clone 147266 (TRBV7-9, TRBJ1-4)
CASSARTGGNENLFF

SEQ ID NO: 294533 - protein, 15 aa, Homo sapiens
  CDR3 for alpha chain variable domain of TCR clone 147267 (TRAV3, TRAJ3)
CAVRDGHSSASKIIF

SEQ ID NO: 294534 - protein, 15 aa, Homo sapiens
  CDR3 for beta chain variable domain of TCR clone 147267 (TRBV7-3, TRBJ2-1)
CASSPTGGGEVEQFF

SEQ ID NO: 294535 - protein, 17 aa, Homo sapiens
  CDR3 for alpha chain variable domain of TCR clone 147268 (TRAV8-6, TRAJ58)
CAVSSWVGETRGSRLAF

SEQ ID NO: 294536 - protein, 14 aa, Homo sapiens
  CDR3 for beta chain variable domain of TCR clone 147268 (TRBV4-2, TRBJ2-1)
CASGLDRAYNEQFF

SEQ ID NO: 294537 - protein, 13 aa, Homo sapiens
  CDR3 for alpha chain variable domain of TCR clone 147269 (TRAV23/DV6, TRAJ34)
CAALENNTDKLIF

SEQ ID NO: 294538 - protein, 13 aa, Homo sapiens
  CDR3 for beta chain variable domain of TCR clone 147269 (TRBV29-1, TRBJ2-7)
CSVGPSGGYEQYF

SEQ ID NO: 294539 - protein, 17 aa, Homo sapiens
  CDR3 for alpha chain variable domain of TCR clone 147270 (TRAV21, TRAJ3)
CHLPLCCFYSSASKIIF

SEQ ID NO: 294540 - protein, 16 aa, Homo sapiens
  CDR3 for beta chain variable domain of TCR clone 147270 (TRBV19, TRBJ2-1)
CASSKAGPSSYNEQFF

SEQ ID NO: 294541 - protein, 14 aa, Homo sapiens
  CDR3 for alpha chain variable domain of TCR clone 147271 (TRAV16, TRAJ15)
CALSFNQAGTALIF

SEQ ID NO: 294542 - protein, 13 aa, Homo sapiens
  CDR3 for beta chain variable domain of TCR clone 147271 (TRBV11-1, TRBJ1-1)
CASSLARGSQAFF

SEQ ID NO: 294543 - protein, 15 aa, Homo sapiens
  CDR3 for alpha chain variable domain of TCR clone 147272 (TRAV8-3, TRAJ45)
CASSYSGGGADGLTF

SEQ ID NO: 294544 - protein, 13 aa, Homo sapiens
  CDR3 for beta chain variable domain of TCR clone 147272 (TRBV11-2, TRBJ1-6)
CASSVAGVSPLHF

SEQ ID NO: 294545 - protein, 15 aa, Homo sapiens
  CDR3 for alpha chain variable domain of TCR clone 147273 (TRAV39, TRAJ44)
CAVDIVSGTASKLTF

SEQ ID NO: 294546 - protein, 15 aa, Homo sapiens
  CDR3 for beta chain variable domain of TCR clone 147273 (TRBV7-6, TRBJ1-5)
CASSQSSGINQPQHF

SEQ ID NO: 294547 - protein, 15 aa, Homo sapiens
  CDR3 for alpha chain variable domain of TCR clone 147274 (TRAV8-3, TRAJ45)
CASSYSGGGADGLTF

SEQ ID NO: 294548 - protein, 13 aa, Homo sapiens
  CDR3 for beta chain variable domain of TCR clone 147274 (TRBV7-8, TRBJ2-1)
CASSLERLGEQFF

SEQ ID NO: 294549 - protein, 16 aa, Homo sapiens
  CDR3 for alpha chain variable domain of TCR clone 147275 (TRAV13-1, TRAJ52)
CAAIMRGGTSYGKLTF

SEQ ID NO: 294550 - protein, 14 aa, Homo sapiens
  CDR3 for beta chain variable domain of TCR clone 147275 (TRBV19, TRBJ2-1)
CASPTFVLSGEQFF

SEQ ID NO: 294551 - protein, 13 aa, Homo sapiens
  CDR3 for alpha chain variable domain of TCR clone 147276 (TRAV12-1, TRAJ6)
CVVFPGGSYIPTF

SEQ ID NO: 294552 - protein, 15 aa, Homo sapiens
  CDR3 for beta chain variable domain of TCR clone 147276 (TRBV12-4, TRBJ2-5)
CASSPPTGLQETQYF

SEQ ID NO: 294553 - protein, 14 aa, Homo sapiens
  CDR3 for alpha chain variable domain of TCR clone 147277 (TRAV4, TRAJ12)
CLVGDADSSSKLIF

SEQ ID NO: 294554 - protein, 17 aa, Homo sapiens
  CDR3 for beta chain variable domain of TCR clone 147277 (TRBV13, TRBJ2-3)
CASSLSRVAGGRNTQYF

SEQ ID NO: 294555 - protein, 15 aa, Homo sapiens
  CDR3 for alpha chain variable domain of TCR clone 147278 (TRAV3, TRAJ3)
CSVRDMSSSASKIIF

SEQ ID NO: 294556 - protein, 17 aa, Homo sapiens
  CDR3 for beta chain variable domain of TCR clone 147278 (TRBV24-1, TRBJ2-1)
CATSDVSTSGTYNEQFF

SEQ ID NO: 294557 - protein, 16 aa, Homo sapiens
  CDR3 for alpha chain variable domain of TCR clone 147279 (TRAV16, TRAJ4)
CARSRMFSGGHNKLIF

SEQ ID NO: 294558 - protein, 16 aa, Homo sapiens
  CDR3 for beta chain variable domain of TCR clone 147279 (TRBV24-1, TRBJ2-3)
CATSDPGTGATDTQYF

SEQ ID NO: 294559 - protein, 13 aa, Homo sapiens
  CDR3 for alpha chain variable domain of TCR clone 147280 (TRAV3, TRAJ41)
CAVSSNSGYALNS

SEQ ID NO: 294560 - protein, 14 aa, Homo sapiens
  CDR3 for beta chain variable domain of TCR clone 147280 (TRBV7-2, TRBJ2-7)
CASSPKTSFYEQYF

SEQ ID NO: 294561 - protein, 14 aa, Homo sapiens
  CDR3 for alpha chain variable domain of TCR clone 147281 (TRAV1-2, TRAJ16)
CAVNRSSDGQKLLF

SEQ ID NO: 294562 - protein, 14 aa, Homo sapiens
  CDR3 for beta chain variable domain of TCR clone 147281 (TRBV5-5, TRBJ1-5)
CASSGQGVDQPQHF

SEQ ID NO: 294563 - protein, 18 aa, Homo sapiens
  CDR3 for alpha chain variable domain of TCR clone 147282 (TRAV17, TRAJ45)
CATSLDLDSGGGADGLTF

SEQ ID NO: 294564 - protein, 15 aa, Homo sapiens
  CDR3 for beta chain variable domain of TCR clone 147282 (TRBV11-2, TRBJ2-1)
CASSKNRGLIYEQFF

SEQ ID NO: 294565 - protein, 12 aa, Homo sapiens
  CDR3 for alpha chain variable domain of TCR clone 147283 (TRAV12-3, TRAJ17)
CAMTLTGNKLTF

SEQ ID NO: 294566 - protein, 15 aa, Homo sapiens
  CDR3 for beta chain variable domain of TCR clone 147283 (TRBV11-3, TRBJ2-3)
CASLKYGREGDTQYF

SEQ ID NO: 294567 - protein, 13 aa, Homo sapiens
  CDR3 for alpha chain variable domain of TCR clone 147284 (TRAV8-3, TRAJ43)
CAVGPDYNNDMRF

SEQ ID NO: 294568 - protein, 12 aa, Homo sapiens
  CDR3 for beta chain variable domain of TCR clone 147284 (TRBV7-2, TRBJ1-6)
CASSLSSSPLHF

SEQ ID NO: 294569 - protein, 16 aa, Homo sapiens
  CDR3 for alpha chain variable domain of TCR clone 147285 (TRAV2, TRAJ4)
CAVEDRFSGGYNKLIF

SEQ ID NO: 294570 - protein, 13 aa, Homo sapiens
  CDR3 for beta chain variable domain of TCR clone 147285 (TRBV7-7, TRBJ2-5)
CASSRSGEETQYF

SEQ ID NO: 294571 - protein, 14 aa, Homo sapiens
  CDR3 for alpha chain variable domain of TCR clone 147286 (TRAV17, TRAJ12)
CAIFPMDSSYKLIF

SEQ ID NO: 294572 - protein, 11 aa, Homo sapiens
  CDR3 for beta chain variable domain of TCR clone 147286 (TRBV19, TRBJ1-1)
CASSIGSEAFF

SEQ ID NO: 294573 - protein, 13 aa, Homo sapiens
  CDR3 for alpha chain variable domain of TCR clone 147287 (TRAV20, TRAJ29)
CAVQAVGNTPLVF

SEQ ID NO: 294574 - protein, 14 aa, Homo sapiens
  CDR3 for beta chain variable domain of TCR clone 147287 (TRBV10-2, TRBJ2-5)
RQQGKRGPQETQYF

SEQ ID NO: 294575 - protein, 17 aa, Homo sapiens
  CDR3 for alpha chain variable domain of TCR clone 147288 (TRAV4, TRAJ42)
CLVGVLNSGGSQGNLIF

SEQ ID NO: 294576 - protein, 12 aa, Homo sapiens
  CDR3 for beta chain variable domain of TCR clone 147288 (TRBV20-1, TRBJ2-1)
CSAQYMYNEQFF

SEQ ID NO: 294577 - protein, 15 aa, Homo sapiens
  CDR3 for alpha chain variable domain of TCR clone 147289 (TRAV25, TRAJ52)
CAGRPGGTSYGKLTF

SEQ ID NO: 294578 - protein, 14 aa, Homo sapiens
  CDR3 for beta chain variable domain of TCR clone 147289 (TRBV7-6, TRBJ2-3)
CASSLGTVTDTQYF

SEQ ID NO: 294579 - protein, 15 aa, Homo sapiens
  CDR3 for alpha chain variable domain of TCR clone 147290 (TRAV21, TRAJ53)
CATLNSGGSNYKLTF

SEQ ID NO: 294580 - protein, 14 aa, Homo sapiens
  CDR3 for beta chain variable domain of TCR clone 147290 (TRBV7-3, TRBJ2-1)
CASSLAGRTNEQFF

SEQ ID NO: 294581 - protein, 15 aa, Homo sapiens
  CDR3 for alpha chain variable domain of TCR clone 147291 (TRAV38-1, TRAJ37)
CAFIHGSGNTGKLIL

SEQ ID NO: 294582 - protein, 12 aa, Homo sapiens
  CDR3 for beta chain variable domain of TCR clone 147291 (TRBV7-9, TRBJ2-7)
CASGFGSYEQYF

SEQ ID NO: 294583 - protein, 15 aa, Homo sapiens
  CDR3 for alpha chain variable domain of TCR clone 147292 (TRAV26-1, TRAJ13)
CIVRVLSGGYQKVTF

SEQ ID NO: 294584 - protein, 10 aa, Homo sapiens
  CDR3 for beta chain variable domain of TCR clone 147292 (TRBV7-9, TRBJ1-2)
GASSLSRTMA

SEQ ID NO: 294585 - protein, 12 aa, Homo sapiens
  CDR3 for alpha chain variable domain of TCR clone 147293 (TRAV27, TRAJ36)
ASTPAGENNLFF

SEQ ID NO: 294586 - protein, 13 aa, Homo sapiens
  CDR3 for beta chain variable domain of TCR clone 147293 (TRBV7-9, TRBJ2-3)
CASSPGSTDTQYF

SEQ ID NO: 294587 - protein, 11 aa, Homo sapiens
  CDR3 for alpha chain variable domain of TCR clone 147294 (TRAV26-1, TRAJ37)
CIVRVGRKLIF

SEQ ID NO: 294588 - protein, 13 aa, Homo sapiens
  CDR3 for beta chain variable domain of TCR clone 147294 (TRBV14, TRBJ1-2)
CASSEDRRYSYTF

SEQ ID NO: 294589 - protein, 16 aa, Homo sapiens
  CDR3 for alpha chain variable domain of TCR clone 147295 (TRAV38-1, TRAJ37)
CAFKGDGSSNTGKLIF

SEQ ID NO: 294590 - protein, 13 aa, Homo sapiens
  CDR3 for beta chain variable domain of TCR clone 147295 (TRBV12-4, TRBJ2-5)
CASSLSRRETQYF

SEQ ID NO: 294591 - protein, 18 aa, Homo sapiens
  CDR3 for alpha chain variable domain of TCR clone 147296 (TRAV12-2, )
CAVEDIKNPDPAVYQLRD

SEQ ID NO: 294592 - protein, 11 aa, Homo sapiens
  CDR3 for beta chain variable domain of TCR clone 147296 (TRBV20-1, TRBJ2-7)
CSARLSYEQYF

SEQ ID NO: 294593 - protein, 16 aa, Homo sapiens
  CDR3 for alpha chain variable domain of TCR clone 147297 (TRAV35, TRAJ28)
CAGQRYSGAGSYQLTF

SEQ ID NO: 294594 - protein, 13 aa, Homo sapiens
  CDR3 for beta chain variable domain of TCR clone 147297 (TRBV19, TRBJ1-2)
RASSQGQVYGYTF

SEQ ID NO: 294595 - protein, 12 aa, Homo sapiens
  CDR3 for alpha chain variable domain of TCR clone 147298 (TRAV12-1, TRAJ40)
CVFYSGTYKYIF

SEQ ID NO: 294596 - protein, 12 aa, Homo sapiens
  CDR3 for beta chain variable domain of TCR clone 147298 (TRBV7-3, TRBJ2-1)
CAGSFINNEQFF

SEQ ID NO: 294597 - protein, 14 aa, Homo sapiens
  CDR3 for alpha chain variable domain of TCR clone 147299 (TRAV4, TRAJ17)
CLVGDMAAGNKLTF

SEQ ID NO: 294598 - protein, 14 aa, Homo sapiens
  CDR3 for beta chain variable domain of TCR clone 147299 (TRBV11-2, TRBJ2-3)
CASSRLARTDTQYF

SEQ ID NO: 294599 - protein, 17 aa, Homo sapiens
  CDR3 for alpha chain variable domain of TCR clone 147300 (TRAV3, TRAJ6)
CAVRDGPRAGGSYILTF

SEQ ID NO: 294600 - protein, 20 aa, Homo sapiens
  CDR3 for beta chain variable domain of TCR clone 147300 (TRBV28, TRBJ2-1)
GASTPIGRSPGLAGGNEQFF

SEQ ID NO: 294601 - protein, 17 aa, Homo sapiens
  CDR3 for alpha chain variable domain of TCR clone 147301 (TRAV8-6, TRAJ58)
CAVSSWVGETSGSRLTF

SEQ ID NO: 294602 - protein, 15 aa, Homo sapiens
  CDR3 for beta chain variable domain of TCR clone 147301 (TRBV15, TRBJ2-3)
CATSRDPRGTDTQYF

SEQ ID NO: 294603 - protein, 13 aa, Homo sapiens
  CDR3 for alpha chain variable domain of TCR clone 147302 (TRAV1-1, TRAJ33)
CASHMDRNYQLIW

SEQ ID NO: 294604 - protein, 16 aa, Homo sapiens
  CDR3 for beta chain variable domain of TCR clone 147302 (TRBV27, TRBJ2-7)
CASSSERRDSAYEQYF

SEQ ID NO: 294605 - protein, 15 aa, Homo sapiens
  CDR3 for alpha chain variable domain of TCR clone 147303 (TRAV17, TRAJ20)
CATDGGGSNDYKLSF

SEQ ID NO: 294606 - protein, 13 aa, Homo sapiens
  CDR3 for beta chain variable domain of TCR clone 147303 (TRBV9, TRBJ2-7)
CASSASDSYEQYF

SEQ ID NO: 294607 - protein, 18 aa, Homo sapiens
  CDR3 for alpha chain variable domain of TCR clone 147304 (TRAV21, TRAJ52)
CAVRPSPAGGTSYGKLTF

SEQ ID NO: 294608 - protein, 15 aa, Homo sapiens
  CDR3 for beta chain variable domain of TCR clone 147304 (TRBV27, TRBJ2-2)
CASSLEGPNTGELFF

SEQ ID NO: 294609 - protein, 12 aa, Homo sapiens
  CDR3 for alpha chain variable domain of TCR clone 147305 (TRAV8-3, TRAJ41)
CAVALSGYALNF

SEQ ID NO: 294610 - protein, 18 aa, Homo sapiens
  CDR3 for beta chain variable domain of TCR clone 147305 (TRBV20-1, TRBJ2-6)
CSAETTPPHGSGANVLTF

SEQ ID NO: 294611 - protein, 13 aa, Homo sapiens
  CDR3 for alpha chain variable domain of TCR clone 147306 (TRAV13-2, TRAJ15)
CAERPLAGTALIF

SEQ ID NO: 294612 - protein, 15 aa, Homo sapiens
  CDR3 for beta chain variable domain of TCR clone 147306 (TRBV11-2, TRBJ2-7)
CASGFPGTGGYEQYF

SEQ ID NO: 294613 - protein, 19 aa, Homo sapiens
  CDR3 for alpha chain variable domain of TCR clone 147307 (TRAV26-1, TRAJ52)
FIVRAHRNAGGTSYAKLTF

SEQ ID NO: 294614 - protein, 15 aa, Homo sapiens
  CDR3 for beta chain variable domain of TCR clone 147307 (TRBV29-1, TRBJ2-1)
CSGRDRKSSYNEQFF

SEQ ID NO: 294615 - protein, 16 aa, Homo sapiens
  CDR3 for alpha chain variable domain of TCR clone 147308 (TRAV21, TRAJ45)
CAVSWGSGGGADGLTF

SEQ ID NO: 294616 - protein, 12 aa, Homo sapiens
  CDR3 for beta chain variable domain of TCR clone 147308 (TRBV5-1, TRBJ2-7)
CASSFRGYEQYF

SEQ ID NO: 294617 - protein, 12 aa, Homo sapiens
  CDR3 for alpha chain variable domain of TCR clone 147309 (TRAV1-1, TRAJ8)
CAGGTGFQKLVF

SEQ ID NO: 294618 - protein, 15 aa, Homo sapiens
  CDR3 for beta chain variable domain of TCR clone 147309 (TRBV11-2, TRBJ1-6)
CASSLDPWAVSPLHF

SEQ ID NO: 294619 - protein, 16 aa, Homo sapiens
  CDR3 for alpha chain variable domain of TCR clone 147310 (TRAV1-2, TRAJ10)
CAVRGVLTGGGNKLTF

SEQ ID NO: 294620 - protein, 13 aa, Homo sapiens
  CDR3 for beta chain variable domain of TCR clone 147310 (TRBV27, TRBJ2-7)
CASSLTTGYGQYF

SEQ ID NO: 294621 - protein, 12 aa, Homo sapiens
  CDR3 for alpha chain variable domain of TCR clone 147311 (TRAV13-1, TRAJ21)
FAAKEGFNKFYF

SEQ ID NO: 294622 - protein, 12 aa, Homo sapiens
  CDR3 for beta chain variable domain of TCR clone 147311 (TRBV7-6, TRBJ2-3)
CASSTGTDTQYF

SEQ ID NO: 294623 - protein, 16 aa, Homo sapiens
  CDR3 for alpha chain variable domain of TCR clone 147312 (TRAV1-2, TRAJ10)
CAVRGVLTGGGKKLTF

SEQ ID NO: 294624 - protein, 20 aa, Homo sapiens
  CDR3 for beta chain variable domain of TCR clone 147312 (TRBV7-8, TRBJ2-2)
CASSHLFPGPTIHITGELFF

SEQ ID NO: 294625 - protein, 16 aa, Homo sapiens
  CDR3 for alpha chain variable domain of TCR clone 147313 (TRAV13-1, TRAJ18)
CAASRMRGSTLGRLYF

SEQ ID NO: 294626 - protein, 16 aa, Homo sapiens
  CDR3 for beta chain variable domain of TCR clone 147313 (TRBV27, TRBJ1-1)
CASSSRGRTVYTEAFF

SEQ ID NO: 294627 - protein, 13 aa, Homo sapiens
  CDR3 for alpha chain variable domain of TCR clone 147314 (TRAV13-2, TRAJ49)
CAENANTGNQFYF

SEQ ID NO: 294628 - protein, 12 aa, Homo sapiens
  CDR3 for beta chain variable domain of TCR clone 147314 (TRBV6-6, TRBJ2-3)
CASSSRGDTQYF

SEQ ID NO: 294629 - protein, 14 aa, Homo sapiens
  CDR3 for alpha chain variable domain of TCR clone 147315 (TRAV12-2, TRAJ53)
CAVKGGGSKYKQTF

SEQ ID NO: 294630 - protein, 15 aa, Homo sapiens
  CDR3 for beta chain variable domain of TCR clone 147315 (TRBV11-2, TRBJ2-2)
CASSLDTGNTGELFF

SEQ ID NO: 294631 - protein, 13 aa, Homo sapiens
  CDR3 for alpha chain variable domain of TCR clone 147316 (TRAV1-2, TRAJ9)
CAALNTGGFKTIF

SEQ ID NO: 294632 - protein, 13 aa, Homo sapiens
  CDR3 for beta chain variable domain of TCR clone 147316 (TRBV19, TRBJ1-2)
CASSVPGQDGETF

SEQ ID NO: 294633 - protein, 17 aa, Homo sapiens
  CDR3 for alpha chain variable domain of TCR clone 147317 (TRAV3, TRAJ6)
FAVRDGPRAGGSYIPTF

SEQ ID NO: 294634 - protein, 14 aa, Homo sapiens
  CDR3 for beta chain variable domain of TCR clone 147317 (TRBV12-5, TRBJ2-5)
CASGSRTHQETQYF

SEQ ID NO: 294635 - protein, 18 aa, Homo sapiens
  CDR3 for alpha chain variable domain of TCR clone 147318 (TRAV26-1, TRAJ30)
CCVLLHRQSTNREDKIIF

SEQ ID NO: 294636 - protein, 18 aa, Homo sapiens
  CDR3 for beta chain variable domain of TCR clone 147318 (TRBV4-1, TRBJ1-5)
CASSQDPRGQGLNQPQHF

SEQ ID NO: 294637 - protein, 14 aa, Homo sapiens
  CDR3 for alpha chain variable domain of TCR clone 147319 (TRAV1-2, TRAJ16)
CAVNRFSDGQKLLF

SEQ ID NO: 294638 - protein, 12 aa, Homo sapiens
  CDR3 for beta chain variable domain of TCR clone 147319 (TRBV5-1, TRBJ2-7)
CASSSTTYKQYF

SEQ ID NO: 294639 - protein, 15 aa, Homo sapiens
  CDR3 for alpha chain variable domain of TCR clone 147320 (TRAV10, TRAJ6)
CVVRPRTGGSYIPTF

SEQ ID NO: 294640 - protein, 13 aa, Homo sapiens
  CDR3 for beta chain variable domain of TCR clone 147320 (TRBV7-9, TRBJ1-2)
CASSLKQNYGYAF

SEQ ID NO: 294641 - protein, 12 aa, Homo sapiens
  CDR3 for alpha chain variable domain of TCR clone 147321 (TRAV2, TRAJ37)
CAVAGNTGKLIF

SEQ ID NO: 294642 - protein, 16 aa, Homo sapiens
  CDR3 for beta chain variable domain of TCR clone 147321 (TRBV28, TRBJ2-5)
CQQHARGDALQETQYF

SEQ ID NO: 294643 - protein, 14 aa, Homo sapiens
  CDR3 for alpha chain variable domain of TCR clone 147322 (TRAV29/DV5, TRAJ30)
CAARLMNREDKIIF

SEQ ID NO: 294644 - protein, 17 aa, Homo sapiens
  CDR3 for beta chain variable domain of TCR clone 147322 (TRBV12-4, TRBJ2-3)
CASSGPDLAGGADTQYF

SEQ ID NO: 294645 - protein, 18 aa, Homo sapiens
  CDR3 for alpha chain variable domain of TCR clone 147323 (TRAV29/DV5, TRAJ52)
CAAGFRGAGGTSYGHLTF

SEQ ID NO: 294646 - protein, 16 aa, Homo sapiens
  CDR3 for beta chain variable domain of TCR clone 147323 (TRBV7-3, TRBJ2-2)
CASSLKRGTLSGELFF

SEQ ID NO: 294647 - protein, 14 aa, Homo sapiens
  CDR3 for alpha chain variable domain of TCR clone 147324 (TRAV12-2, TRAJ4)
CAEDLSGGSNKLIF

SEQ ID NO: 294648 - protein, 13 aa, Homo sapiens
  CDR3 for beta chain variable domain of TCR clone 147324 (TRBV7-9, TRBJ1-2)
CASSLKQNYGYTF

SEQ ID NO: 294649 - protein, 13 aa, Homo sapiens
  CDR3 for alpha chain variable domain of TCR clone 147325 (TRAV2, TRAJ27)
CAVRPLGAGKSTF

SEQ ID NO: 294650 - protein, 13 aa, Homo sapiens
  CDR3 for beta chain variable domain of TCR clone 147325 (TRBV7-9, TRBJ2-3)
CASSPGSTDTQYF

SEQ ID NO: 294651 - protein, 13 aa, Homo sapiens
  CDR3 for alpha chain variable domain of TCR clone 147326 (TRAV3, TRAJ20)
CAVRDTPRYKLSF

SEQ ID NO: 294652 - protein, 15 aa, Homo sapiens
  CDR3 for beta chain variable domain of TCR clone 147326 (TRBV7-2, TRBJ2-1)
CASSSGLAGGNEQFF

SEQ ID NO: 294653 - protein, 14 aa, Homo sapiens
  CDR3 for alpha chain variable domain of TCR clone 147327 (TRAV3, TRAJ34)
CAVRAPGNTDKLIF

SEQ ID NO: 294654 - protein, 14 aa, Homo sapiens
  CDR3 for beta chain variable domain of TCR clone 147327 (TRBV4-1, TRBJ2-2)
CASSQAVNTGELFF

SEQ ID NO: 294655 - protein, 16 aa, Homo sapiens
  CDR3 for alpha chain variable domain of TCR clone 147328 (TRAV27, TRAJ48)
TAAQPGDTGLYLPITF

SEQ ID NO: 294656 - protein, 13 aa, Homo sapiens
  CDR3 for beta chain variable domain of TCR clone 147328 (TRBV7-2, TRBJ2-5)
CASSQTSVETQYF

SEQ ID NO: 294657 - protein, 15 aa, Homo sapiens
  CDR3 for alpha chain variable domain of TCR clone 147329 (TRAV3, TRAJ4)
CAMRDGTGGYNKLIF

SEQ ID NO: 294658 - protein, 16 aa, Homo sapiens
  CDR3 for beta chain variable domain of TCR clone 147329 (TRBV27, TRBJ2-2)
CASSSSGVSNTGELFF

SEQ ID NO: 294659 - protein, 13 aa, Homo sapiens
  CDR3 for alpha chain variable domain of TCR clone 147330 (TRAV2, TRAJ15)
CAVASQAGTALIF

SEQ ID NO: 294660 - protein, 14 aa, Homo sapiens
  CDR3 for beta chain variable domain of TCR clone 147330 (TRBV12-4, TRBJ1-1)
CASSPIRRTGEAFF

SEQ ID NO: 294661 - protein, 16 aa, Homo sapiens
  CDR3 for alpha chain variable domain of TCR clone 147331 (TRAV3, TRAJ3)
CAVRYRAKSSASKIIF

SEQ ID NO: 294662 - protein, 13 aa, Homo sapiens
  CDR3 for beta chain variable domain of TCR clone 147331 (TRBV10-3, TRBJ2-7)
CASKLAVNYEQYF

SEQ ID NO: 294663 - protein, 12 aa, Homo sapiens
  CDR3 for alpha chain variable domain of TCR clone 147332 (TRAV21, TRAJ33)
CAKMDSNYQLIR

SEQ ID NO: 294664 - protein, 14 aa, Homo sapiens
  CDR3 for beta chain variable domain of TCR clone 147332 (TRBV2, TRBJ2-7)
CASSLTAGGYEQYF

SEQ ID NO: 294665 - protein, 13 aa, Homo sapiens
  CDR3 for alpha chain variable domain of TCR clone 147333 (TRAV36/DV7, TRAJ21)
CAVEAYNFNKFYF

SEQ ID NO: 294666 - protein, 15 aa, Homo sapiens
  CDR3 for beta chain variable domain of TCR clone 147333 (TRBV5-5, TRBJ1-5)
CASSSTPGSNQPQHF

SEQ ID NO: 294667 - protein, 15 aa, Homo sapiens
  CDR3 for alpha chain variable domain of TCR clone 147334 (TRAV17, TRAJ16)
CATALRFSDAQKLLF

SEQ ID NO: 294668 - protein, 15 aa, Homo sapiens
  CDR3 for beta chain variable domain of TCR clone 147334 (TRBV20-1, TRBJ1-1)
CSASRGVTGNTEAFF

SEQ ID NO: 294669 - protein, 11 aa, Homo sapiens
  CDR3 for alpha chain variable domain of TCR clone 147335 (TRAV3, TRAJ21)
FAVGNFNKFYF

SEQ ID NO: 294670 - protein, 15 aa, Homo sapiens
  CDR3 for beta chain variable domain of TCR clone 147335 (TRBV20-1, TRBJ2-5)
CSATPLTGDQETQYF

SEQ ID NO: 294671 - protein, 11 aa, Homo sapiens
  CDR3 for alpha chain variable domain of TCR clone 147336 (TRAV35, TRAJ30)
CAGERDDKISF

SEQ ID NO: 294672 - protein, 14 aa, Homo sapiens
  CDR3 for beta chain variable domain of TCR clone 147336 (TRBV15, TRBJ2-5)
CATSGDRGQETQYF

SEQ ID NO: 294673 - protein, 15 aa, Homo sapiens
  CDR3 for alpha chain variable domain of TCR clone 147337 (TRAV12-3, TRAJ6)
CAMSATTGGSYKPTF

SEQ ID NO: 294674 - protein, 14 aa, Homo sapiens
  CDR3 for beta chain variable domain of TCR clone 147337 (TRBV4-1, TRBJ2-7)
CASSPVAGGDEQYF

SEQ ID NO: 294675 - protein, 13 aa, Homo sapiens
  CDR3 for alpha chain variable domain of TCR clone 147338 (TRAV21, TRAJ37)
CAVSSGNKGKLIF

SEQ ID NO: 294676 - protein, 17 aa, Homo sapiens
  CDR3 for beta chain variable domain of TCR clone 147338 (TRBV5-1, TRBJ2-5)
CASSLLGLAANQETQYF

SEQ ID NO: 294677 - protein, 11 aa, Homo sapiens
  CDR3 for alpha chain variable domain of TCR clone 147339 (TRAV21, TRAJ34)
CAHYNTDKLIF

SEQ ID NO: 294678 - protein, 14 aa, Homo sapiens
  CDR3 for beta chain variable domain of TCR clone 147339 (TRBV12-4, TRBJ1-1)
CASSLGTGGTEAFF

SEQ ID NO: 294679 - protein, 14 aa, Homo sapiens
  CDR3 for alpha chain variable domain of TCR clone 147340 (TRAV13-1, TRAJ35)
CAASKGGFGNVLHC

SEQ ID NO: 294680 - protein, 12 aa, Homo sapiens
  CDR3 for beta chain variable domain of TCR clone 147340 (TRBV11-2, TRBJ2-1)
CANSPGNNEQFF

SEQ ID NO: 294681 - protein, 11 aa, Homo sapiens
  CDR3 for alpha chain variable domain of TCR clone 147341 (TRAV17, TRAJ49)
CATDAGNQFFF

SEQ ID NO: 294682 - protein, 15 aa, Homo sapiens
  CDR3 for beta chain variable domain of TCR clone 147341 (TRBV6-5, TRBJ2-1)
CASSYDAGAGNEQFF

SEQ ID NO: 294683 - protein, 14 aa, Homo sapiens
  CDR3 for alpha chain variable domain of TCR clone 147342 (TRAV8-4, TRAJ15)
CAVTIREAGTALIF

SEQ ID NO: 294684 - protein, 14 aa, Homo sapiens
  CDR3 for beta chain variable domain of TCR clone 147342 (TRBV12-5, TRBJ2-5)
CASGSRTHQETQYF

SEQ ID NO: 294685 - protein, 16 aa, Homo sapiens
  CDR3 for alpha chain variable domain of TCR clone 147343 (TRAV16, TRAJ24)
CALSGGSTDSWGKLQF

SEQ ID NO: 294686 - protein, 15 aa, Homo sapiens
  CDR3 for beta chain variable domain of TCR clone 147343 (TRBV27, TRBJ2-1)
CASSNGGASSNEQFF

SEQ ID NO: 294687 - protein, 14 aa, Homo sapiens
  CDR3 for alpha chain variable domain of TCR clone 147344 (TRAV8-4, TRAJ8)
CAVSVGTGFQKLVF

SEQ ID NO: 294688 - protein, 13 aa, Homo sapiens
  CDR3 for beta chain variable domain of TCR clone 147344 (TRBV19, TRBJ1-2)
CASSVPGQDGYTF

SEQ ID NO: 294689 - protein, 15 aa, Homo sapiens
  CDR3 for alpha chain variable domain of TCR clone 147345 (TRAV21, TRAJ53)
CATLNSGGSNYKLQF

SEQ ID NO: 294690 - protein, 16 aa, Homo sapiens
  CDR3 for beta chain variable domain of TCR clone 147345 (TRBV12-4, TRBJ1-5)
CASSRPVGGSNQPQHF

SEQ ID NO: 294691 - protein, 14 aa, Homo sapiens
  CDR3 for alpha chain variable domain of TCR clone 147346 (TRAV12-3, TRAJ10)
SHLPLTGGGNKLTF

SEQ ID NO: 294692 - protein, 15 aa, Homo sapiens
  CDR3 for beta chain variable domain of TCR clone 147346 (TRBV10-2, TRBJ2-6)
CASSEQGTGANVLTL

SEQ ID NO: 294693 - protein, 15 aa, Homo sapiens
  CDR3 for alpha chain variable domain of TCR clone 147347 (TRAV35, TRAJ40)
CAGQLGTSGTYKYIF

SEQ ID NO: 294694 - protein, 11 aa, Homo sapiens
  CDR3 for beta chain variable domain of TCR clone 147347 (TRBV23-1, TRBJ2-1)
SSSGTGLEQFF

SEQ ID NO: 294695 - protein, 13 aa, Homo sapiens
  CDR3 for alpha chain variable domain of TCR clone 147348 (TRAV35, TRAJ13)
CAGRAGGYQKVTF

SEQ ID NO: 294696 - protein, 12 aa, Homo sapiens
  CDR3 for beta chain variable domain of TCR clone 147348 (TRBV12-4, TRBJ2-7)
CASSLGGYEQYF

SEQ ID NO: 294697 - protein, 10 aa, Homo sapiens
  CDR3 for alpha chain variable domain of TCR clone 147349 (TRAV17, TRAJ36)
CAAVAGNLFF

SEQ ID NO: 294698 - protein, 14 aa, Homo sapiens
  CDR3 for beta chain variable domain of TCR clone 147349 (TRBV28, TRBJ2-1)
CASSLNGRNNEQFF

SEQ ID NO: 294699 - protein, 14 aa, Homo sapiens
  CDR3 for alpha chain variable domain of TCR clone 147350 (TRAV12-2, TRAJ13)
CAVKKTGGYQKVTF

SEQ ID NO: 294700 - protein, 15 aa, Homo sapiens
  CDR3 for beta chain variable domain of TCR clone 147350 (TRBV11-2, TRBJ2-4)
CASSRPGTGINIQYF

SEQ ID NO: 294701 - protein, 12 aa, Homo sapiens
  CDR3 for alpha chain variable domain of TCR clone 147351 (TRAV26-1, TRAJ26)
CIVFIYGQNFVF

SEQ ID NO: 294702 - protein, 13 aa, Homo sapiens
  CDR3 for beta chain variable domain of TCR clone 147351 (TRBV27, TRBJ1-1)
CASSLSIGAEAFS

SEQ ID NO: 294703 - protein, 14 aa, Homo sapiens
  CDR3 for alpha chain variable domain of TCR clone 147352 (TRAV12-2, TRAJ45)
CALPERGGDDGLTF

SEQ ID NO: 294704 - protein, 14 aa, Homo sapiens
  CDR3 for beta chain variable domain of TCR clone 147352 (TRBV18, TRBJ1-5)
CASSPGNSNQPQHF

SEQ ID NO: 294705 - protein, 14 aa, Homo sapiens
  CDR3 for alpha chain variable domain of TCR clone 147353 (TRAV4, TRAJ32)
CLVNYGGATNKLIF

SEQ ID NO: 294706 - protein, 14 aa, Homo sapiens
  CDR3 for beta chain variable domain of TCR clone 147353 (TRBV15, TRBJ2-5)
CGTSGGTRTETQYF

SEQ ID NO: 294707 - protein, 13 aa, Homo sapiens
  CDR3 for alpha chain variable domain of TCR clone 147354 (TRAV2, TRAJ15)
CAVASQAGTALIF

SEQ ID NO: 294708 - protein, 15 aa, Homo sapiens
  CDR3 for beta chain variable domain of TCR clone 147354 (TRBV12-4, TRBJ2-5)
CASSPPTGLLETQYF

SEQ ID NO: 294709 - protein, 12 aa, Homo sapiens
  CDR3 for alpha chain variable domain of TCR clone 147355 (TRAV23/DV6, TRAJ26)
CAARRSGQNFVF

SEQ ID NO: 294710 - protein, 13 aa, Homo sapiens
  CDR3 for beta chain variable domain of TCR clone 147355 (TRBV19, TRBJ1-2)
CASSVPGQDGYTF

SEQ ID NO: 294711 - protein, 13 aa, Homo sapiens
  CDR3 for alpha chain variable domain of TCR clone 147356 (TRAV13-2, TRAJ40)
CAEFTSGTYKYIF

SEQ ID NO: 294712 - protein, 14 aa, Homo sapiens
  CDR3 for beta chain variable domain of TCR clone 147356 (TRBV10-2, TRBJ1-5)
CASSSTGRNQPQNF

SEQ ID NO: 294713 - protein, 12 aa, Homo sapiens
  CDR3 for alpha chain variable domain of TCR clone 147357 (TRAV13-1, TRAJ42)
SVLRGSQGNLIF

SEQ ID NO: 294714 - protein, 13 aa, Homo sapiens
  CDR3 for beta chain variable domain of TCR clone 147357 (TRBV2, TRBJ1-4)
RASSELGVEKLFF

SEQ ID NO: 294715 - protein, 12 aa, Homo sapiens
  CDR3 for alpha chain variable domain of TCR clone 147358 (TRAV3, TRAJ31)
CAVRDGNARLMF

SEQ ID NO: 294716 - protein, 14 aa, Homo sapiens
  CDR3 for beta chain variable domain of TCR clone 147358 (TRBV6-3, TRBJ1-1)
CASSYGGQHTGAFF

SEQ ID NO: 294717 - protein, 16 aa, Homo sapiens
  CDR3 for alpha chain variable domain of TCR clone 147359 (TRAV1-2, TRAJ10)
CAVRGVLTGGGNKLTF

SEQ ID NO: 294718 - protein, 17 aa, Homo sapiens
  CDR3 for beta chain variable domain of TCR clone 147359 (TRBV15, TRBJ1-5)
CATSRAPPRTRNQPQHF

SEQ ID NO: 294719 - protein, 13 aa, Homo sapiens
  CDR3 for alpha chain variable domain of TCR clone 147360 (TRAV13-1, TRAJ10)
CAALEGGGNKLTF

SEQ ID NO: 294720 - protein, 12 aa, Homo sapiens
  CDR3 for beta chain variable domain of TCR clone 147360 (TRBV7-8, TRBJ2-7)
CASSLGDREQYF

SEQ ID NO: 294721 - protein, 14 aa, Homo sapiens
  CDR3 for alpha chain variable domain of TCR clone 147361 (TRAV26-1, TRAJ34)
CIVRVAYNTDKLIF

SEQ ID NO: 294722 - protein, 13 aa, Homo sapiens
  CDR3 for beta chain variable domain of TCR clone 147361 (TRBV7-2, TRBJ2-2)
CASSLAVTGELFF

SEQ ID NO: 294723 - protein, 12 aa, Homo sapiens
  CDR3 for alpha chain variable domain of TCR clone 147362 (TRAV2, TRAJ9)
FAVDTGGFKTIF

SEQ ID NO: 294724 - protein, 14 aa, Homo sapiens
  CDR3 for beta chain variable domain of TCR clone 147362 (TRBV28, TRBJ2-2)
CASSMQGYTGELFF

SEQ ID NO: 294725 - protein, 14 aa, Homo sapiens
  CDR3 for alpha chain variable domain of TCR clone 147363 (TRAV12-1, TRAJ33)
CVVNPEDSNYQLIW

SEQ ID NO: 294726 - protein, 11 aa, Homo sapiens
  CDR3 for beta chain variable domain of TCR clone 147363 (TRBV7-6, TRBJ2-1)
CASSNNGEQFF

SEQ ID NO: 294727 - protein, 13 aa, Homo sapiens
  CDR3 for alpha chain variable domain of TCR clone 147364 (TRAV30, TRAJ24)
CGTVTDSWRKLQF

SEQ ID NO: 294728 - protein, 15 aa, Homo sapiens
  CDR3 for beta chain variable domain of TCR clone 147364 (TRBV25-1, TRBJ1-4)
CASSPGDSTNEKLFF

SEQ ID NO: 294729 - protein, 13 aa, Homo sapiens
  CDR3 for alpha chain variable domain of TCR clone 147365 (TRAV29/DV5, TRAJ31)
CAASRNNNARLML

SEQ ID NO: 294730 - protein, 12 aa, Homo sapiens
  CDR3 for beta chain variable domain of TCR clone 147365 (TRBV14, TRBJ2-5)
CASSHPKETQYF

SEQ ID NO: 294731 - protein, 16 aa, Homo sapiens
  CDR3 for alpha chain variable domain of TCR clone 147366 (TRAV3, TRAJ37)
CAVRVMGSGNTGKLIF

SEQ ID NO: 294732 - protein, 13 aa, Homo sapiens
  CDR3 for beta chain variable domain of TCR clone 147366 (TRBV7-9, TRBJ1-2)
CASSLKQNYGYTF

SEQ ID NO: 294733 - protein, 16 aa, Homo sapiens
  CDR3 for alpha chain variable domain of TCR clone 147367 (TRAV3, TRAJ10)
CAVRDMRAGGGNKLTF

SEQ ID NO: 294734 - protein, 13 aa, Homo sapiens
  CDR3 for beta chain variable domain of TCR clone 147367 (TRBV20-1, TRBJ2-5)
CSAREAFQETQYF

SEQ ID NO: 294735 - protein, 12 aa, Homo sapiens
  CDR3 for alpha chain variable domain of TCR clone 147368 (TRAV13-2, TRAJ23)
CAERHRGGKLIF

SEQ ID NO: 294736 - protein, 14 aa, Homo sapiens
  CDR3 for beta chain variable domain of TCR clone 147368 (TRBV7-8, TRBJ2-5)
CASSATGGQETQYF

SEQ ID NO: 294737 - protein, 14 aa, Homo sapiens
  CDR3 for alpha chain variable domain of TCR clone 147369 (TRAV8-3, TRAJ9)
CAVVYNTGGFKTIF

SEQ ID NO: 294738 - protein, 17 aa, Homo sapiens
  CDR3 for beta chain variable domain of TCR clone 147369 (TRBV2, TRBJ1-5)
CASSENRTPSILVMGLD

SEQ ID NO: 294739 - protein, 17 aa, Homo sapiens
  CDR3 for alpha chain variable domain of TCR clone 147370 (TRAV35, TRAJ28)
CAGLQVYSGAGSYQRTF

SEQ ID NO: 294740 - protein, 15 aa, Homo sapiens
  CDR3 for beta chain variable domain of TCR clone 147370 (TRBV2, TRBJ1-2)
CASSEIGGANYGYTF

SEQ ID NO: 294741 - protein, 13 aa, Homo sapiens
  CDR3 for alpha chain variable domain of TCR clone 147371 (TRAV16, TRAJ5)
CALTNTGSRALTF

SEQ ID NO: 294742 - protein, 15 aa, Homo sapiens
  CDR3 for beta chain variable domain of TCR clone 147371 (TRBV11-2, TRBJ2-4)
CASSRPGTGINMQYF

SEQ ID NO: 294743 - protein, 13 aa, Homo sapiens
  CDR3 for alpha chain variable domain of TCR clone 147372 (TRAV21, TRAJ13)
CAVNSGGYQKATF

SEQ ID NO: 294744 - protein, 17 aa, Homo sapiens
  CDR3 for beta chain variable domain of TCR clone 147372 (TRBV9, TRBJ2-5)
CASSVAGQGPSIETQYF

SEQ ID NO: 294745 - protein, 14 aa, Homo sapiens
  CDR3 for alpha chain variable domain of TCR clone 147373 (TRAV29/DV5, TRAJ43)
CAAIHSYNNNYMRF

SEQ ID NO: 294746 - protein, 14 aa, Homo sapiens
  CDR3 for beta chain variable domain of TCR clone 147373 (TRBV12-4, TRBJ2-5)
CASSSTEGTKTQYF

SEQ ID NO: 294747 - protein, 16 aa, Homo sapiens
  CDR3 for alpha chain variable domain of TCR clone 147374 (TRAV12-2, TRAJ40)
CAVIRGGTPGTYKYNF

SEQ ID NO: 294748 - protein, 14 aa, Homo sapiens
  CDR3 for beta chain variable domain of TCR clone 147374 (TRBV20-1, TRBJ2-5)
CSARDGRAGETQYF

SEQ ID NO: 294749 - protein, 16 aa, Homo sapiens
  CDR3 for alpha chain variable domain of TCR clone 147375 (TRAV30, TRAJ24)
CGTEIVDADGWGKFPF

SEQ ID NO: 294750 - protein, 14 aa, Homo sapiens
  CDR3 for beta chain variable domain of TCR clone 147375 (TRBV12-5, TRBJ2-5)
CASGSRTHQETQYF

SEQ ID NO: 294751 - protein, 13 aa, Homo sapiens
  CDR3 for alpha chain variable domain of TCR clone 147376 (TRAV13-1, TRAJ40)
CAAISPGTYKYII

SEQ ID NO: 294752 - protein, 13 aa, Homo sapiens
  CDR3 for beta chain variable domain of TCR clone 147376 (TRBV10-3, TRBJ2-7)
CAIRAGGPHEQYF

SEQ ID NO: 294753 - protein, 14 aa, Homo sapiens
  CDR3 for alpha chain variable domain of TCR clone 147377 (TRAV1-2, TRAJ8)
CAVREDTGFQKLVF

SEQ ID NO: 294754 - protein, 14 aa, Homo sapiens
  CDR3 for beta chain variable domain of TCR clone 147377 (TRBV25-1, TRBJ1-1)
CARTHLGGNTEAFF

SEQ ID NO: 294755 - protein, 13 aa, Homo sapiens
  CDR3 for alpha chain variable domain of TCR clone 147378 (TRAV36/DV7, TRAJ38)
CVANAGNNRKLSW

SEQ ID NO: 294756 - protein, 17 aa, Homo sapiens
  CDR3 for beta chain variable domain of TCR clone 147378 (TRBV12-4, TRBJ2-1)
CASSPGLAGGRINEQFF

SEQ ID NO: 294757 - protein, 12 aa, Homo sapiens
  CDR3 for alpha chain variable domain of TCR clone 147379 (TRAV29/DV5, TRAJ49)
RAATDTGNQFYF

SEQ ID NO: 294758 - protein, 16 aa, Homo sapiens
  CDR3 for beta chain variable domain of TCR clone 147379 (TRBV13, TRBJ2-2)
CASSPRTGEHTGELFF

SEQ ID NO: 294759 - protein, 16 aa, Homo sapiens
  CDR3 for alpha chain variable domain of TCR clone 147380 (TRAV3, TRAJ37)
SAVRPHGSGNTGKLIF

SEQ ID NO: 294760 - protein, 11 aa, Homo sapiens
  CDR3 for beta chain variable domain of TCR clone 147380 (TRBV10-3, TRBJ2-7)
CAISEGLEQYF

SEQ ID NO: 294761 - protein, 13 aa, Homo sapiens
  CDR3 for alpha chain variable domain of TCR clone 147381 (TRAV3, TRAJ21)
CAVRGPDFNKFYF

SEQ ID NO: 294762 - protein, 16 aa, Homo sapiens
  CDR3 for beta chain variable domain of TCR clone 147381 (TRBV27, TRBJ2-2)
CASIFRGLVRTGELFF

SEQ ID NO: 294763 - protein, 13 aa, Homo sapiens
  CDR3 for alpha chain variable domain of TCR clone 147382 (TRAV39, TRAJ58)
CAGEETSGSRLTC

SEQ ID NO: 294764 - protein, 13 aa, Homo sapiens
  CDR3 for beta chain variable domain of TCR clone 147382 (TRBV15, TRBJ2-7)
CATSTTGHYEQYF

SEQ ID NO: 294765 - protein, 16 aa, Homo sapiens
  CDR3 for alpha chain variable domain of TCR clone 147383 (TRAV30, TRAJ24)
CGTEIVDADSWVKLQF

SEQ ID NO: 294766 - protein, 12 aa, Homo sapiens
  CDR3 for beta chain variable domain of TCR clone 147383 (TRBV11-2, TRBJ2-2)
CASSLGGGELFF

SEQ ID NO: 294767 - protein, 14 aa, Homo sapiens
  CDR3 for alpha chain variable domain of TCR clone 147384 (TRAV12-2, TRAJ13)
CAVKKTGGYQKVTF

SEQ ID NO: 294768 - protein, 16 aa, Homo sapiens
  CDR3 for beta chain variable domain of TCR clone 147384 (TRBV10-2, TRBJ2-7)
CASSESPGSSGFEQYF

SEQ ID NO: 294769 - protein, 14 aa, Homo sapiens
  CDR3 for alpha chain variable domain of TCR clone 147385 (TRAV1-2, TRAJ16)
CAVNRFSDGQKLLF

SEQ ID NO: 294770 - protein, 13 aa, Homo sapiens
  CDR3 for beta chain variable domain of TCR clone 147385 (TRBV12-4, TRBJ2-7)
CASSFQGRYEQYF

SEQ ID NO: 294771 - protein, 16 aa, Homo sapiens
  CDR3 for alpha chain variable domain of TCR clone 147386 (TRAV26-2, TRAJ48)
CILRPPFNFGNEKLTL

SEQ ID NO: 294772 - protein, 15 aa, Homo sapiens
  CDR3 for beta chain variable domain of TCR clone 147386 (TRBV20-1, TRBJ2-3)
CSARVEGTYTDTQYF

SEQ ID NO: 294773 - protein, 16 aa, Homo sapiens
  CDR3 for alpha chain variable domain of TCR clone 147387 (TRAV1-2, TRAJ10)
GAVRGVLTGGGNKLTF

SEQ ID NO: 294774 - protein, 13 aa, Homo sapiens
  CDR3 for beta chain variable domain of TCR clone 147387 (TRBV20-1, TRBJ1-1)
CSARGGGNTEAFF

SEQ ID NO: 294775 - protein, 11 aa, Homo sapiens
  CDR3 for alpha chain variable domain of TCR clone 147388 (TRAV1-2, TRAJ40)
CAVPGTYKYIF

SEQ ID NO: 294776 - protein, 13 aa, Homo sapiens
  CDR3 for beta chain variable domain of TCR clone 147388 (TRBV7-9, TRBJ2-3)
CASSPGSTDTQYF

SEQ ID NO: 294777 - protein, 13 aa, Homo sapiens
  CDR3 for alpha chain variable domain of TCR clone 147389 (TRAV21, TRAJ27)
CAARPGNAGKSTF

SEQ ID NO: 294778 - protein, 14 aa, Homo sapiens
  CDR3 for beta chain variable domain of TCR clone 147389 (TRBV11-2, TRBJ2-7)
CASSLGTGAYEQYF

SEQ ID NO: 294779 - protein, 14 aa, Homo sapiens
  CDR3 for alpha chain variable domain of TCR clone 147390 (TRAV13-1, TRAJ9)
CAASALTGGFKTIF

SEQ ID NO: 294780 - protein, 13 aa, Homo sapiens
  CDR3 for beta chain variable domain of TCR clone 147390 (TRBV20-1, TRBJ1-1)
RSAGTVGNTEAFF

SEQ ID NO: 294781 - protein, 12 aa, Homo sapiens
  CDR3 for alpha chain variable domain of TCR clone 147391 (TRAV26-1, TRAJ26)
CIVFIYGQNFVF

SEQ ID NO: 294782 - protein, 14 aa, Homo sapiens
  CDR3 for beta chain variable domain of TCR clone 147391 (TRBV14, TRBJ2-5)
CASSQGPDQETQYF

SEQ ID NO: 294783 - protein, 13 aa, Homo sapiens
  CDR3 for alpha chain variable domain of TCR clone 147392 (TRAV20, TRAJ37)
CAGCTSNTGKLIF

SEQ ID NO: 294784 - protein, 11 aa, Homo sapiens
  CDR3 for beta chain variable domain of TCR clone 147392 (TRBV12-4, TRBJ2-3)
CASTATDTQCF

SEQ ID NO: 294785 - protein, 15 aa, Homo sapiens
  CDR3 for alpha chain variable domain of TCR clone 147393 (TRAV26-1, TRAJ29)
CIVRVEGAGNTPLFF

SEQ ID NO: 294786 - protein, 15 aa, Homo sapiens
  CDR3 for beta chain variable domain of TCR clone 147393 (TRBV7-9, TRBJ1-5)
CASSQGHQPNQPQHF

SEQ ID NO: 294787 - protein, 15 aa, Homo sapiens
  CDR3 for alpha chain variable domain of TCR clone 147394 (TRAV26-1, TRAJ29)
CIVRVEGSGNTPLVC

SEQ ID NO: 294788 - protein, 15 aa, Homo sapiens
  CDR3 for beta chain variable domain of TCR clone 147394 (TRBV12-4, TRBJ1-1)
CQQQDRVEANTEAFF

SEQ ID NO: 294789 - protein, 20 aa, Homo sapiens
  CDR3 for alpha chain variable domain of TCR clone 147395 (TRAV21, TRAJ4)
AASQPGDSATLAGGYNKPIF

SEQ ID NO: 294790 - protein, 19 aa, Homo sapiens
  CDR3 for beta chain variable domain of TCR clone 147395 (TRBV18, TRBJ1-3)
CASSPLSRTGMSSGNTIYL

SEQ ID NO: 294791 - protein, 20 aa, Homo sapiens
  CDR3 for alpha chain variable domain of TCR clone 147396 (TRAV21, TRAJ22)
SLVTQPPTLKSSGSARQLTF

SEQ ID NO: 294792 - protein, 16 aa, Homo sapiens
  CDR3 for beta chain variable domain of TCR clone 147396 (TRBV7-3, TRBJ2-2)
CASSLKRGTLSRELFF

SEQ ID NO: 294793 - protein, 18 aa, Homo sapiens
  CDR3 for alpha chain variable domain of TCR clone 147397 (TRAV13-1, TRAJ52)
CAASKRSAGGTSYGKLTC

SEQ ID NO: 294794 - protein, 12 aa, Homo sapiens
  CDR3 for beta chain variable domain of TCR clone 147397 (TRBV20-1, TRBJ2-3)
CSARVGTDTQYF

SEQ ID NO: 294795 - protein, 16 aa, Homo sapiens
  CDR3 for alpha chain variable domain of TCR clone 147398 (TRAV3, TRAJ10)
CAVRDMRAGGGNKLTF

SEQ ID NO: 294796 - protein, 17 aa, Homo sapiens
  CDR3 for beta chain variable domain of TCR clone 147398 (TRBV28, TRBJ2-5)
CASSTPEGDALQETQNF

SEQ ID NO: 294797 - protein, 15 aa, Homo sapiens
  CDR3 for alpha chain variable domain of TCR clone 147399 (TRAV23/DV6, TRAJ18)
CAASFRGSTLGRLDF

SEQ ID NO: 294798 - protein, 13 aa, Homo sapiens
  CDR3 for beta chain variable domain of TCR clone 147399 (TRBV28, TRBJ2-7)
CAILDRAGGEQYF

SEQ ID NO: 294799 - protein, 16 aa, Homo sapiens
  CDR3 for alpha chain variable domain of TCR clone 147400 (TRAV30, TRAJ24)
CGTEIVDADSWGKFQF

SEQ ID NO: 294800 - protein, 15 aa, Homo sapiens
  CDR3 for beta chain variable domain of TCR clone 147400 (TRBV5-1, TRBJ2-7)
CASSFRLAGVHEQYF

SEQ ID NO: 294801 - protein, 14 aa, Homo sapiens
  CDR3 for alpha chain variable domain of TCR clone 147401 (TRAV12-2, TRAJ53)
CAVNGGGSNYKLTF

SEQ ID NO: 294802 - protein, 14 aa, Homo sapiens
  CDR3 for beta chain variable domain of TCR clone 147401 (TRBV19, TRBJ2-1)
CASPTFVLSGEQFF

SEQ ID NO: 294803 - protein, 18 aa, Homo sapiens
  CDR3 for alpha chain variable domain of TCR clone 147402 (TRAV13-1, TRAJ28)
CAASPVPILWGWELPTTF

SEQ ID NO: 294804 - protein, 13 aa, Homo sapiens
  CDR3 for beta chain variable domain of TCR clone 147402 (TRBV15, TRBJ2-7)
CATSTTGHYEQYF

SEQ ID NO: 294805 - protein, 13 aa, Homo sapiens
  CDR3 for alpha chain variable domain of TCR clone 147403 (TRAV4, TRAJ34)
CLVGDYNTDKLIF

SEQ ID NO: 294806 - protein, 23 aa, Homo sapiens
  CDR3 for beta chain variable domain of TCR clone 147403 (TRBV4-3, TRBJ2-3)
WASSQDPPRASSISGGGGDTQYF

SEQ ID NO: 294807 - protein, 17 aa, Homo sapiens
  CDR3 for alpha chain variable domain of TCR clone 147404 (TRAV4, TRAJ13)
CLVGVQGSSGGYQKVTF

SEQ ID NO: 294808 - protein, 15 aa, Homo sapiens
  CDR3 for beta chain variable domain of TCR clone 147404 (TRBV9, TRBJ1-6)
CASSVAGTGDSHLHF

SEQ ID NO: 294809 - protein, 16 aa, Homo sapiens
  CDR3 for alpha chain variable domain of TCR clone 147405 (TRAV29/DV5, TRAJ39)
FAASLLFNNACKMLTF

SEQ ID NO: 294810 - protein, 16 aa, Homo sapiens
  CDR3 for beta chain variable domain of TCR clone 147405 (TRBV19, TRBJ2-6)
CASSMSGLSGANVLTF

SEQ ID NO: 294811 - protein, 17 aa, Homo sapiens
  CDR3 for alpha chain variable domain of TCR clone 147406 (TRAV3, TRAJ42)
CALRDRDYGGSQGNLIF

SEQ ID NO: 294812 - protein, 17 aa, Homo sapiens
  CDR3 for beta chain variable domain of TCR clone 147406 (TRBV7-9, TRBJ2-3)
CASSPTVAGDLTDTQYF

SEQ ID NO: 294813 - protein, 12 aa, Homo sapiens
  CDR3 for alpha chain variable domain of TCR clone 147407 (TRAV8-3, TRAJ43)
CAVGAGNNVMRF

SEQ ID NO: 294814 - protein, 14 aa, Homo sapiens
  CDR3 for beta chain variable domain of TCR clone 147407 (TRBV4-2, TRBJ1-5)
CASSRDRGNQPQHF

SEQ ID NO: 294815 - protein, 12 aa, Homo sapiens
  CDR3 for alpha chain variable domain of TCR clone 147408 (TRAV38-1, TRAJ47)
CAFETYGNKLVF

SEQ ID NO: 294816 - protein, 14 aa, Homo sapiens
  CDR3 for beta chain variable domain of TCR clone 147408 (TRBV6-6, TRBJ1-4)
CASRTDREYEKLFF

SEQ ID NO: 294817 - protein, 14 aa, Homo sapiens
  CDR3 for alpha chain variable domain of TCR clone 147409 (TRAV1-2, TRAJ8)
CAVREHTGFQKLVF

SEQ ID NO: 294818 - protein, 19 aa, Homo sapiens
  CDR3 for beta chain variable domain of TCR clone 147409 (TRBV28, TRBJ2-1)
CASSFSIRGSGRTRYEQFF

SEQ ID NO: 294819 - protein, 13 aa, Homo sapiens
  CDR3 for alpha chain variable domain of TCR clone 147410 (TRAV8-3, TRAJ36)
CAVGATGANNLFF

SEQ ID NO: 294820 - protein, 13 aa, Homo sapiens
  CDR3 for beta chain variable domain of TCR clone 147410 (TRBV6-3, TRBJ1-6)
CASSEGTGPTLHF

SEQ ID NO: 294821 - protein, 16 aa, Homo sapiens
  CDR3 for alpha chain variable domain of TCR clone 147411 (TRAV27, TRAJ13)
CAGAKSDSGGYQKGTF

SEQ ID NO: 294822 - protein, 15 aa, Homo sapiens
  CDR3 for beta chain variable domain of TCR clone 147411 (TRBV3-1, TRBJ1-2)
CASSPTRLPEGGYTF

SEQ ID NO: 294823 - protein, 17 aa, Homo sapiens
  CDR3 for alpha chain variable domain of TCR clone 147412 (TRAV12-2, TRAJ22)
CAVNRIPFSGSARQLTF

SEQ ID NO: 294824 - protein, 16 aa, Homo sapiens
  CDR3 for beta chain variable domain of TCR clone 147412 (TRBV19, TRBJ2-1)
CASSKAGPSSYNEQFF

SEQ ID NO: 294825 - protein, 13 aa, Homo sapiens
  CDR3 for alpha chain variable domain of TCR clone 147413 (TRAV13-1, TRAJ6)
CAARRGGSYIPTF

SEQ ID NO: 294826 - protein, 14 aa, Homo sapiens
  CDR3 for beta chain variable domain of TCR clone 147413 (TRBV4-2, TRBJ2-7)
CASSQGQTAYEQYF

SEQ ID NO: 294827 - protein, 13 aa, Homo sapiens
  CDR3 for alpha chain variable domain of TCR clone 147414 (TRAV17, TRAJ9)
CATDYTGGFKTIF

SEQ ID NO: 294828 - protein, 16 aa, Homo sapiens
  CDR3 for beta chain variable domain of TCR clone 147414 (TRBV7-7, TRBJ2-1)
CASSLASGTSYNGQFF

SEQ ID NO: 294829 - protein, 12 aa, Homo sapiens
  CDR3 for alpha chain variable domain of TCR clone 147415 (TRAV34, TRAJ27)
CGADTNAGKSTF

SEQ ID NO: 294830 - protein, 14 aa, Homo sapiens
  CDR3 for beta chain variable domain of TCR clone 147415 (TRBV25-1, TRBJ1-1)
CASTHLGGNTEAFF

SEQ ID NO: 294831 - protein, 15 aa, Homo sapiens
  CDR3 for alpha chain variable domain of TCR clone 147416 (TRAV4, TRAJ39)
CLVGPNNNAGNMLTF

SEQ ID NO: 294832 - protein, 14 aa, Homo sapiens
  CDR3 for beta chain variable domain of TCR clone 147416 (TRBV19, TRBJ2-1)
CASPTFVLSGERFF

SEQ ID NO: 294833 - protein, 13 aa, Homo sapiens
  CDR3 for alpha chain variable domain of TCR clone 147417 (TRAV12-3, TRAJ9)
CAMRNTGGFKTLF

SEQ ID NO: 294834 - protein, 16 aa, Homo sapiens
  CDR3 for beta chain variable domain of TCR clone 147417 (TRBV19, TRBJ2-1)
CASSIDGSFAYNEQFF

SEQ ID NO: 294835 - protein, 12 aa, Homo sapiens
  CDR3 for alpha chain variable domain of TCR clone 147418 (TRAV12-2, TRAJ9)
CAVFTGGFKTIF

SEQ ID NO: 294836 - protein, 14 aa, Homo sapiens
  CDR3 for beta chain variable domain of TCR clone 147418 (TRBV19, TRBJ2-1)
CASPTFVLSGEQFF

SEQ ID NO: 294837 - protein, 12 aa, Homo sapiens
  CDR3 for alpha chain variable domain of TCR clone 147419 (TRAV12-3, TRAJ17)
FAMTLTGNKLTF

SEQ ID NO: 294838 - protein, 13 aa, Homo sapiens
  CDR3 for beta chain variable domain of TCR clone 147419 (TRBV7-3, TRBJ1-1)
CASSQDWGAEAFF

SEQ ID NO: 294839 - protein, 16 aa, Homo sapiens
  CDR3 for alpha chain variable domain of TCR clone 147420 (TRAV16, TRAJ42)
CALSGYYGGSQGNLIF

SEQ ID NO: 294840 - protein, 15 aa, Homo sapiens
  CDR3 for beta chain variable domain of TCR clone 147420 (TRBV12-4, TRBJ2-1)
CASSPLSGRNNEQFF

SEQ ID NO: 294841 - protein, 15 aa, Homo sapiens
  CDR3 for alpha chain variable domain of TCR clone 147421 (TRAV3, TRAJ13)
CAVRVYSGGYQKVTF

SEQ ID NO: 294842 - protein, 14 aa, Homo sapiens
  CDR3 for beta chain variable domain of TCR clone 147421 (TRBV20-1, TRBJ2-4)
CSASGRVGENIQYF

SEQ ID NO: 294843 - protein, 14 aa, Homo sapiens
  CDR3 for alpha chain variable domain of TCR clone 147422 (TRAV38-1, TRAJ43)
CAFMKHNNNNDMPF

SEQ ID NO: 294844 - protein, 17 aa, Homo sapiens
  CDR3 for beta chain variable domain of TCR clone 147422 (TRBV7-7, TRBJ1-4)
CASSLVGQGASNEKLFF

SEQ ID NO: 294845 - protein, 12 aa, Homo sapiens
  CDR3 for alpha chain variable domain of TCR clone 147423 (TRAV13-1, TRAJ21)
CAAKEGFNKFYF

SEQ ID NO: 294846 - protein, 13 aa, Homo sapiens
  CDR3 for beta chain variable domain of TCR clone 147423 (TRBV7-3, TRBJ1-1)
CASSRDWGAEAFF

SEQ ID NO: 294847 - protein, 12 aa, Homo sapiens
  CDR3 for alpha chain variable domain of TCR clone 147424 (TRAV8-3, TRAJ15)
CAVGVPLSALIF

SEQ ID NO: 294848 - protein, 17 aa, Homo sapiens
  CDR3 for beta chain variable domain of TCR clone 147424 (TRBV5-5, TRBJ1-1)
CASSLRFRGLMNTEAFF

SEQ ID NO: 294849 - protein, 12 aa, Homo sapiens
  CDR3 for alpha chain variable domain of TCR clone 147425 (TRAV12-2, TRAJ31)
CAVNTPDARLMF

SEQ ID NO: 294850 - protein, 17 aa, Homo sapiens
  CDR3 for beta chain variable domain of TCR clone 147425 (TRBV20-1, TRBJ1-6)
CSARGGYTFPYNSPLHF

SEQ ID NO: 294851 - protein, 16 aa, Homo sapiens
  CDR3 for alpha chain variable domain of TCR clone 147426 (TRAV17, TRAJ22)
CATDAISSGSARQLTF

SEQ ID NO: 294852 - protein, 15 aa, Homo sapiens
  CDR3 for beta chain variable domain of TCR clone 147426 (TRBV6-1, TRBJ2-1)
CASSELRGQYNEQFF

SEQ ID NO: 294853 - protein, 12 aa, Homo sapiens
  CDR3 for alpha chain variable domain of TCR clone 147427 (TRAV27, TRAJ9)
CAGESGGFKNIF

SEQ ID NO: 294854 - protein, 11 aa, Homo sapiens
  CDR3 for beta chain variable domain of TCR clone 147427 (TRBV11-2, TRBJ1-1)
CASSINTEAFF

SEQ ID NO: 294855 - protein, 14 aa, Homo sapiens
  CDR3 for alpha chain variable domain of TCR clone 147428 (TRAV17, TRAJ11)
CATDTSRGYSTLTF

SEQ ID NO: 294856 - protein, 15 aa, Homo sapiens
  CDR3 for beta chain variable domain of TCR clone 147428 (TRBV7-9, TRBJ1-4)
CASSRTGGFNEKLFF

SEQ ID NO: 294857 - protein, 13 aa, Homo sapiens
  CDR3 for alpha chain variable domain of TCR clone 147429 (TRAV2, TRAJ40)
CAVVISGTYKYIF

SEQ ID NO: 294858 - protein, 16 aa, Homo sapiens
  CDR3 for beta chain variable domain of TCR clone 147429 (TRBV7-9, TRBJ1-3)
CASSLGAGSSGNTIYF

SEQ ID NO: 294859 - protein, 12 aa, Homo sapiens
  CDR3 for alpha chain variable domain of TCR clone 147430 (TRAV21, TRAJ29)
CAVTSGSTPLVF

SEQ ID NO: 294860 - protein, 15 aa, Homo sapiens
  CDR3 for beta chain variable domain of TCR clone 147430 (TRBV12-4, TRBJ1-2)
CASRLGVAGNYGYTF

SEQ ID NO: 294861 - protein, 11 aa, Homo sapiens
  CDR3 for alpha chain variable domain of TCR clone 147431 (TRAV8-6, TRAJ42)
CAVRGRKPRTS

SEQ ID NO: 294862 - protein, 13 aa, Homo sapiens
  CDR3 for beta chain variable domain of TCR clone 147431 (TRBV7-3, TRBJ1-1)
CASSQEWGAEAFF

SEQ ID NO: 294863 - protein, 13 aa, Homo sapiens
  CDR3 for alpha chain variable domain of TCR clone 147432 (TRAV12-1, TRAJ6)
CVVFPGGSYIPTF

SEQ ID NO: 294864 - protein, 15 aa, Homo sapiens
  CDR3 for beta chain variable domain of TCR clone 147432 (TRBV5-1, TRBJ2-7)
CASSLNGGPAREQYF

SEQ ID NO: 294865 - protein, 15 aa, Homo sapiens
  CDR3 for alpha chain variable domain of TCR clone 147433 (TRAV13-1, TRAJ16)
CAARYQMARSCSLQG

SEQ ID NO: 294866 - protein, 13 aa, Homo sapiens
  CDR3 for beta chain variable domain of TCR clone 147433 (TRBV4-1, TRBJ2-1)
CASSRAGGDEQFF

SEQ ID NO: 294867 - protein, 19 aa, Homo sapiens
  CDR3 for alpha chain variable domain of TCR clone 147434 (TRAV30, TRAJ52)
CGTEANTNAGGTSYGKLTF

SEQ ID NO: 294868 - protein, 11 aa, Homo sapiens
  CDR3 for beta chain variable domain of TCR clone 147434 (TRBV29-1, TRBJ2-5)
CSEDRTGTQSF

SEQ ID NO: 294869 - protein, 11 aa, Homo sapiens
  CDR3 for alpha chain variable domain of TCR clone 147435 (TRAV21, TRAJ11)
CAVNGYSTLTF

SEQ ID NO: 294870 - protein, 11 aa, Homo sapiens
  CDR3 for beta chain variable domain of TCR clone 147435 (TRBV19, TRBJ1-1)
GASSIGSEAFF

SEQ ID NO: 294871 - protein, 13 aa, Homo sapiens
  CDR3 for alpha chain variable domain of TCR clone 147436 (TRAV12-3, TRAJ33)
CAMSVNSNYQLIW

SEQ ID NO: 294872 - protein, 14 aa, Homo sapiens
  CDR3 for beta chain variable domain of TCR clone 147436 (TRBV7-2, TRBJ1-5)
CASSPRGGPQPQHF

SEQ ID NO: 294873 - protein, 17 aa, Homo sapiens
  CDR3 for alpha chain variable domain of TCR clone 147437 (TRAV13-1, TRAJ52)
CAASSGAVGTSYGKLTF

SEQ ID NO: 294874 - protein, 12 aa, Homo sapiens
  CDR3 for beta chain variable domain of TCR clone 147437 (TRBV29-1, TRBJ2-3)
CSVTGGADTQYF

SEQ ID NO: 294875 - protein, 11 aa, Homo sapiens
  CDR3 for alpha chain variable domain of TCR clone 147438 (TRAV3, TRAJ21)
CAVGNFNKFYF

SEQ ID NO: 294876 - protein, 17 aa, Homo sapiens
  CDR3 for beta chain variable domain of TCR clone 147438 (TRBV18, TRBJ2-1)
CASSKGLSGGADNEQFF

SEQ ID NO: 294877 - protein, 14 aa, Homo sapiens
  CDR3 for alpha chain variable domain of TCR clone 147439 (TRAV12-2, TRAJ13)
CVVKKTGGYQKVTF

SEQ ID NO: 294878 - protein, 15 aa, Homo sapiens
  CDR3 for beta chain variable domain of TCR clone 147439 (TRBV20-1, TRBJ2-1)
CSARGIGGTYNEQFF

SEQ ID NO: 294879 - protein, 14 aa, Homo sapiens
  CDR3 for alpha chain variable domain of TCR clone 147440 (TRAV13-1, TRAJ6)
CAASITGGSYIPPF

SEQ ID NO: 294880 - protein, 14 aa, Homo sapiens
  CDR3 for beta chain variable domain of TCR clone 147440 (TRBV6-3, TRBJ2-1)
CASLHSAYYNEQFF

SEQ ID NO: 294881 - protein, 19 aa, Homo sapiens
  CDR3 for alpha chain variable domain of TCR clone 147441 (TRAV12-1, TRAJ31)
SLLIRDSKLSDSDTPRLMF

SEQ ID NO: 294882 - protein, 14 aa, Homo sapiens
  CDR3 for beta chain variable domain of TCR clone 147441 (TRBV6-3, TRBJ2-1)
CASSSGQFYNEQFF

SEQ ID NO: 294883 - protein, 10 aa, Homo sapiens
  CDR3 for alpha chain variable domain of TCR clone 147442 (TRAV1-2, TRAJ20)
CALSDYKLSF

SEQ ID NO: 294884 - protein, 14 aa, Homo sapiens
  CDR3 for beta chain variable domain of TCR clone 147442 (TRBV19, TRBJ2-1)
CASPTFVLSGEQFF

SEQ ID NO: 294885 - protein, 12 aa, Homo sapiens
  CDR3 for alpha chain variable domain of TCR clone 147443 (TRAV2, TRAJ9)
CAVGAGGFKTIF

SEQ ID NO: 294886 - protein, 16 aa, Homo sapiens
  CDR3 for beta chain variable domain of TCR clone 147443 (TRBV4-2, TRBJ1-1)
CASRPLDGGGDTEAFF

SEQ ID NO: 294887 - protein, 14 aa, Homo sapiens
  CDR3 for alpha chain variable domain of TCR clone 147444 (TRAV12-3, TRAJ10)
SHLPLTGGGNKLTF

SEQ ID NO: 294888 - protein, 13 aa, Homo sapiens
  CDR3 for beta chain variable domain of TCR clone 147444 (TRBV4-1, TRBJ2-2)
CASSQENTGELFF

SEQ ID NO: 294889 - protein, 13 aa, Homo sapiens
  CDR3 for alpha chain variable domain of TCR clone 147445 (TRAV3, TRAJ20)
CCEAFCNDYNLSF

SEQ ID NO: 294890 - protein, 15 aa, Homo sapiens
  CDR3 for beta chain variable domain of TCR clone 147445 (TRBV19, TRBJ2-6)
CASVRRDSGANVLTF

SEQ ID NO: 294891 - protein, 10 aa, Homo sapiens
  CDR3 for alpha chain variable domain of TCR clone 147446 (TRAV23/DV6, TRAJ31)
CARGGAGLMF

SEQ ID NO: 294892 - protein, 14 aa, Homo sapiens
  CDR3 for beta chain variable domain of TCR clone 147446 (TRBV7-8, TRBJ1-2)
CASSPDSLSYGYTF

SEQ ID NO: 294893 - protein, 16 aa, Homo sapiens
  CDR3 for alpha chain variable domain of TCR clone 147447 (TRAV3, TRAJ6)
CAVRDGMGRRKLHTYM

SEQ ID NO: 294894 - protein, 15 aa, Homo sapiens
  CDR3 for beta chain variable domain of TCR clone 147447 (TRBV5-1, TRBJ2-7)
CASSLGDFTTYEQYF

SEQ ID NO: 294895 - protein, 16 aa, Homo sapiens
  CDR3 for alpha chain variable domain of TCR clone 147448 (TRAV3, TRAJ37)
CAVRGKGSGNTGKLIF

SEQ ID NO: 294896 - protein, 15 aa, Homo sapiens
  CDR3 for beta chain variable domain of TCR clone 147448 (TRBV11-2, TRBJ1-2)
CASSLEGVQRNGYTF

SEQ ID NO: 294897 - protein, 12 aa, Homo sapiens
  CDR3 for alpha chain variable domain of TCR clone 147449 (TRAV12-3, TRAJ17)
CAMTLTGNRLTF

SEQ ID NO: 294898 - protein, 17 aa, Homo sapiens
  CDR3 for beta chain variable domain of TCR clone 147449 (TRBV7-8, TRBJ2-6)
CASSAGTGGAGANVLTF

SEQ ID NO: 294899 - protein, 11 aa, Homo sapiens
  CDR3 for alpha chain variable domain of TCR clone 147450 (TRAV2, TRAJ33)
CAVDSNYQLIW

SEQ ID NO: 294900 - protein, 20 aa, Homo sapiens
  CDR3 for beta chain variable domain of TCR clone 147450 (TRBV7-8, TRBJ2-2)
CASSHLFPGPTIHITGKLFF

SEQ ID NO: 294901 - protein, 16 aa, Homo sapiens
  CDR3 for alpha chain variable domain of TCR clone 147451 (TRAV14/DV4, TRAJ53)
CAMGEGGGGSNYKLTF

SEQ ID NO: 294902 - protein, 17 aa, Homo sapiens
  CDR3 for beta chain variable domain of TCR clone 147451 (TRBV7-3, TRBJ2-3)
CASSLMKRMRGADTQYF

SEQ ID NO: 294903 - protein, 14 aa, Homo sapiens
  CDR3 for alpha chain variable domain of TCR clone 147452 (TRAV26-1, TRAJ45)
CLEVTGGGADGLTF

SEQ ID NO: 294904 - protein, 13 aa, Homo sapiens
  CDR3 for beta chain variable domain of TCR clone 147452 (TRBV19, TRBJ1-2)
CASSVPGQDGYTF

SEQ ID NO: 294905 - protein, 13 aa, Homo sapiens
  CDR3 for alpha chain variable domain of TCR clone 147453 (TRAV12-1, TRAJ9)
CVVRNTGGFKTIS

SEQ ID NO: 294906 - protein, 14 aa, Homo sapiens
  CDR3 for beta chain variable domain of TCR clone 147453 (TRBV20-1, TRBJ2-1)
CSAQIGGSANEQFF

SEQ ID NO: 294907 - protein, 14 aa, Homo sapiens
  CDR3 for alpha chain variable domain of TCR clone 147454 (TRAV13-1, TRAJ35)
CAASKGGFGNVLHC

SEQ ID NO: 294908 - protein, 16 aa, Homo sapiens
  CDR3 for beta chain variable domain of TCR clone 147454 (TRBV5-1, TRBJ2-1)
CASSLTLAGGRNEQFF

SEQ ID NO: 294909 - protein, 15 aa, Homo sapiens
  CDR3 for alpha chain variable domain of TCR clone 147455 (TRAV17, TRAJ57)
CATGPSPGGSEKLVF

SEQ ID NO: 294910 - protein, 15 aa, Homo sapiens
  CDR3 for beta chain variable domain of TCR clone 147455 (TRBV9, TRBJ2-1)
CASSLAGSADNEQFF

SEQ ID NO: 294911 - protein, 12 aa, Homo sapiens
  CDR3 for alpha chain variable domain of TCR clone 147456 (TRAV12-1, TRAJ9)
CVVHTGGFKTIS

SEQ ID NO: 294912 - protein, 14 aa, Homo sapiens
  CDR3 for beta chain variable domain of TCR clone 147456 (TRBV7-2, TRBJ2-7)
RASSPKTSFYEQYF

SEQ ID NO: 294913 - protein, 12 aa, Homo sapiens
  CDR3 for alpha chain variable domain of TCR clone 147457 (TRAV27, TRAJ42)
CAGGGSQGNLIF

SEQ ID NO: 294914 - protein, 13 aa, Homo sapiens
  CDR3 for beta chain variable domain of TCR clone 147457 (TRBV19, TRBJ2-7)
CASSIRSSYEQYY

SEQ ID NO: 294915 - protein, 14 aa, Homo sapiens
  CDR3 for alpha chain variable domain of TCR clone 147458 (TRAV13-1, TRAJ35)
CAASKGGFGNVLHC

SEQ ID NO: 294916 - protein, 13 aa, Homo sapiens
  CDR3 for beta chain variable domain of TCR clone 147458 (TRBV7-3, TRBJ1-1)
CDSSQDWGAEAFF

SEQ ID NO: 294917 - protein, 12 aa, Homo sapiens
  CDR3 for alpha chain variable domain of TCR clone 147459 (TRAV13-1, TRAJ21)
CAAKEGFNKFYF

SEQ ID NO: 294918 - protein, 16 aa, Homo sapiens
  CDR3 for beta chain variable domain of TCR clone 147459 (TRBV4-1, TRBJ2-5)
CARSHADRAGGETQYF

SEQ ID NO: 294919 - protein, 15 aa, Homo sapiens
  CDR3 for alpha chain variable domain of TCR clone 147460 (TRAV23/DV6, TRAJ38)
CAARSNAGNNRKLIW

SEQ ID NO: 294920 - protein, 16 aa, Homo sapiens
  CDR3 for beta chain variable domain of TCR clone 147460 (TRBV10-2, TRBJ1-5)
CANSRDRDYSNQPQHF

SEQ ID NO: 294921 - protein, 14 aa, Homo sapiens
  CDR3 for alpha chain variable domain of TCR clone 147461 (TRAV8-1, TRAJ22)
CAAPASGSARQLTF

SEQ ID NO: 294922 - protein, 15 aa, Homo sapiens
  CDR3 for beta chain variable domain of TCR clone 147461 (TRBV12-4, TRBJ2-5)
CASTLNSGRGETQYF

SEQ ID NO: 294923 - protein, 14 aa, Homo sapiens
  CDR3 for alpha chain variable domain of TCR clone 147462 (TRAV14/DV4, TRAJ42)
CPRVSLRSQGNLIF

SEQ ID NO: 294924 - protein, 18 aa, Homo sapiens
  CDR3 for beta chain variable domain of TCR clone 147462 (TRBV20-1, TRBJ2-3)
CSASGLAGGPGTTDTQYF

SEQ ID NO: 294925 - protein, 14 aa, Homo sapiens
  CDR3 for alpha chain variable domain of TCR clone 147463 (TRAV12-3, TRAJ12)
CAMSALDSRYKLIF

SEQ ID NO: 294926 - protein, 16 aa, Homo sapiens
  CDR3 for beta chain variable domain of TCR clone 147463 (TRBV7-9, TRBJ2-3)
CASSLQGNPGTETQYF

SEQ ID NO: 294927 - protein, 14 aa, Homo sapiens
  CDR3 for alpha chain variable domain of TCR clone 147464 (TRAV1-2, TRAJ8)
CAVREDKGFQKLVF

SEQ ID NO: 294928 - protein, 15 aa, Homo sapiens
  CDR3 for beta chain variable domain of TCR clone 147464 (TRBV28, TRBJ2-4)
CAAGSGTLLMGIQYF

SEQ ID NO: 294929 - protein, 16 aa, Homo sapiens
  CDR3 for alpha chain variable domain of TCR clone 147465 (TRAV16, TRAJ21)
CACGWATTSTNFTLDL

SEQ ID NO: 294930 - protein, 15 aa, Homo sapiens
  CDR3 for beta chain variable domain of TCR clone 147465 (TRBV19, TRBJ2-1)
CASSIQASSYNEQFF

SEQ ID NO: 294931 - protein, 16 aa, Homo sapiens
  CDR3 for alpha chain variable domain of TCR clone 147466 (TRAV3, TRAJ37)
CAVRGKGSGNTGKLIF

SEQ ID NO: 294932 - protein, 13 aa, Homo sapiens
  CDR3 for beta chain variable domain of TCR clone 147466 (TRBV7-9, TRBJ1-2)
CASSLKQNYGFTF

SEQ ID NO: 294933 - protein, 15 aa, Homo sapiens
  CDR3 for alpha chain variable domain of TCR clone 147467 (TRAV13-1, TRAJ16)
CAARYQMARSCSLQG

SEQ ID NO: 294934 - protein, 15 aa, Homo sapiens
  CDR3 for beta chain variable domain of TCR clone 147467 (TRBV27, TRBJ2-3)
CASSLGLAGPDTQYF

SEQ ID NO: 294935 - protein, 13 aa, Homo sapiens
  CDR3 for alpha chain variable domain of TCR clone 147468 (TRAV3, TRAJ20)
CAVRDTPRYKLSF

SEQ ID NO: 294936 - protein, 14 aa, Homo sapiens
  CDR3 for beta chain variable domain of TCR clone 147468 (TRBV4-2, TRBJ2-1)
CASGLDRAYNEQFF

SEQ ID NO: 294937 - protein, 11 aa, Homo sapiens
  CDR3 for alpha chain variable domain of TCR clone 147469 (TRAV12-3, TRAJ43)
CAMSVSNDMRF

SEQ ID NO: 294938 - protein, 19 aa, Homo sapiens
  CDR3 for beta chain variable domain of TCR clone 147469 (TRBV28, TRBJ2-7)
CASSYSETSRLGWVYEQYF

SEQ ID NO: 294939 - protein, 18 aa, Homo sapiens
  CDR3 for alpha chain variable domain of TCR clone 147470 (TRAV8-6, TRAJ52)
SAVSRVGAGGTSYGKLTF

SEQ ID NO: 294940 - protein, 14 aa, Homo sapiens
  CDR3 for beta chain variable domain of TCR clone 147470 (TRBV7-2, TRBJ1-4)
CASSHSKTNEKLFF

SEQ ID NO: 294941 - protein, 13 aa, Homo sapiens
  CDR3 for alpha chain variable domain of TCR clone 147471 (TRAV27, TRAJ45)
CRSSGGGADGLTF

SEQ ID NO: 294942 - protein, 11 aa, Homo sapiens
  CDR3 for beta chain variable domain of TCR clone 147471 (TRBV5-1, TRBJ2-1)
CASSIGQEQFF

SEQ ID NO: 294943 - protein, 18 aa, Homo sapiens
  CDR3 for alpha chain variable domain of TCR clone 147472 (TRAV21, TRAJ52)
CAVRPSPAGGTSYRKLTF

SEQ ID NO: 294944 - protein, 14 aa, Homo sapiens
  CDR3 for beta chain variable domain of TCR clone 147472 (TRBV7-2, TRBJ2-1)
CASSLEGGYNEQFF

SEQ ID NO: 294945 - protein, 14 aa, Homo sapiens
  CDR3 for alpha chain variable domain of TCR clone 147473 (TRAV26-1, TRAJ48)
CIVRVPFGNEKLTF

SEQ ID NO: 294946 - protein, 15 aa, Homo sapiens
  CDR3 for beta chain variable domain of TCR clone 147473 (TRBV18, TRBJ2-1)
CQLTLSQHKGDEQFF

SEQ ID NO: 294947 - protein, 15 aa, Homo sapiens
  CDR3 for alpha chain variable domain of TCR clone 147474 (TRAV13-1, TRAJ50)
CAAKGSETSYDKVIF

SEQ ID NO: 294948 - protein, 18 aa, Homo sapiens
  CDR3 for beta chain variable domain of TCR clone 147474 (TRBV10-3, TRBJ2-1)
CTTVPSVSLRGGVDEQFF

SEQ ID NO: 294949 - protein, 12 aa, Homo sapiens
  CDR3 for alpha chain variable domain of TCR clone 147475 (TRAV12-2, TRAJ43)
CAVNVNNNDMRF

SEQ ID NO: 294950 - protein, 14 aa, Homo sapiens
  CDR3 for beta chain variable domain of TCR clone 147475 (TRBV25-1, TRBJ2-2)
CASSELGLAGELFF

SEQ ID NO: 294951 - protein, 16 aa, Homo sapiens
  CDR3 for alpha chain variable domain of TCR clone 147476 (TRAV25, TRAJ53)
CAGPKGRGGRNYKLTF

SEQ ID NO: 294952 - protein, 17 aa, Homo sapiens
  CDR3 for beta chain variable domain of TCR clone 147476 (TRBV11-3, TRBJ2-6)
CASKWGQGLSGANVLTF

SEQ ID NO: 294953 - protein, 15 aa, Homo sapiens
  CDR3 for alpha chain variable domain of TCR clone 147477 (TRAV12-3, TRAJ6)
CAMSAASGGNYIPTF

SEQ ID NO: 294954 - protein, 13 aa, Homo sapiens
  CDR3 for beta chain variable domain of TCR clone 147477 (TRBV20-1, TRBJ1-2)
CSASPEFNYGYTF

SEQ ID NO: 294955 - protein, 16 aa, Homo sapiens
  CDR3 for alpha chain variable domain of TCR clone 147478 (TRAV3, TRAJ13)
CAVRDFESGGYQKVTF

SEQ ID NO: 294956 - protein, 16 aa, Homo sapiens
  CDR3 for beta chain variable domain of TCR clone 147478 (TRBV27, TRBJ2-5)
CASSYGPGGQKDTQYF

SEQ ID NO: 294957 - protein, 13 aa, Homo sapiens
  CDR3 for alpha chain variable domain of TCR clone 147479 (TRAV2, TRAJ15)
CAVASQAGTALIF

SEQ ID NO: 294958 - protein, 15 aa, Homo sapiens
  CDR3 for beta chain variable domain of TCR clone 147479 (TRBV7-9, TRBJ2-2)
CASRPEGTSTGELFF

SEQ ID NO: 294959 - protein, 16 aa, Homo sapiens
  CDR3 for alpha chain variable domain of TCR clone 147480 (TRAV30, TRAJ24)
CGTEIVDADSGGKFQF

SEQ ID NO: 294960 - protein, 14 aa, Homo sapiens
  CDR3 for beta chain variable domain of TCR clone 147480 (TRBV7-8, TRBJ2-3)
CASSLEAGTDTQYF

SEQ ID NO: 294961 - protein, 15 aa, Homo sapiens
  CDR3 for alpha chain variable domain of TCR clone 147481 (TRAV3, TRAJ5)
CAVRVRQTCRRALTF

SEQ ID NO: 294962 - protein, 15 aa, Homo sapiens
  CDR3 for beta chain variable domain of TCR clone 147481 (TRBV7-8, TRBJ2-1)
CASSLADSLYNEQFF

SEQ ID NO: 294963 - protein, 13 aa, Homo sapiens
  CDR3 for alpha chain variable domain of TCR clone 147482 (TRAV12-3, TRAJ33)
CAMSVNSNYQLIW

SEQ ID NO: 294964 - protein, 18 aa, Homo sapiens
  CDR3 for beta chain variable domain of TCR clone 147482 (TRBV23-1, TRBJ2-3)
CASSQFHTGGISTDTQYF

SEQ ID NO: 294965 - protein, 16 aa, Homo sapiens
  CDR3 for alpha chain variable domain of TCR clone 147483 (TRAV23/DV6, TRAJ52)
CAARPSGGTSYGKLTF

SEQ ID NO: 294966 - protein, 13 aa, Homo sapiens
  CDR3 for beta chain variable domain of TCR clone 147483 (TRBV7-9, TRBJ1-1)
CASRLSGETEAFF

SEQ ID NO: 294967 - protein, 14 aa, Homo sapiens
  CDR3 for alpha chain variable domain of TCR clone 147484 (TRAV23/DV6, TRAJ58)
CAGMREASGSRLTF

SEQ ID NO: 294968 - protein, 13 aa, Homo sapiens
  CDR3 for beta chain variable domain of TCR clone 147484 (TRBV28, TRBJ2-7)
CASRSSGVYEQYF

SEQ ID NO: 294969 - protein, 13 aa, Homo sapiens
  CDR3 for alpha chain variable domain of TCR clone 147485 (TRAV1-2, TRAJ31)
CAVRPNNNARLMF

SEQ ID NO: 294970 - protein, 13 aa, Homo sapiens
  CDR3 for beta chain variable domain of TCR clone 147485 (TRBV11-2, TRBJ2-1)
CSSLSGPYNEQFF

SEQ ID NO: 294971 - protein, 19 aa, Homo sapiens
  CDR3 for alpha chain variable domain of TCR clone 147486 (TRAV26-1, TRAJ38)
CIADNAGNNHIQNPAPAVF

SEQ ID NO: 294972 - protein, 13 aa, Homo sapiens
  CDR3 for beta chain variable domain of TCR clone 147486 (TRBV20-1, TRBJ1-1)
CSARGGGNTEAFF

SEQ ID NO: 294973 - protein, 15 aa, Homo sapiens
  CDR3 for alpha chain variable domain of TCR clone 147487 (TRAV2, TRAJ3)
CAVEDAYSSASKIIF

SEQ ID NO: 294974 - protein, 12 aa, Homo sapiens
  CDR3 for beta chain variable domain of TCR clone 147487 (TRBV11-2, TRBJ2-1)
CASSPGNNEQFF

SEQ ID NO: 294975 - protein, 14 aa, Homo sapiens
  CDR3 for alpha chain variable domain of TCR clone 147488 (TRAV3, TRAJ21)
CAVRDKYNFNKFYF

SEQ ID NO: 294976 - protein, 14 aa, Homo sapiens
  CDR3 for beta chain variable domain of TCR clone 147488 (TRBV7-2, TRBJ2-7)
CASRSQGAAYEQYF

SEQ ID NO: 294977 - protein, 15 aa, Homo sapiens
  CDR3 for alpha chain variable domain of TCR clone 147489 (TRAV8-4, TRAJ52)
CAVSDGGTSYGTLTF

SEQ ID NO: 294978 - protein, 12 aa, Homo sapiens
  CDR3 for beta chain variable domain of TCR clone 147489 (TRBV29-1, TRBJ2-3)
CSVTSGGDTQYF

SEQ ID NO: 294979 - protein, 22 aa, Homo sapiens
  CDR3 for alpha chain variable domain of TCR clone 147490 (TRAV13-2, )
CAEILSIPDIQNPDPAVYQLRD

SEQ ID NO: 294980 - protein, 11 aa, Homo sapiens
  CDR3 for beta chain variable domain of TCR clone 147490 (TRBV20-1, TRBJ2-7)
CSARLSYEHYF

SEQ ID NO: 294981 - protein, 13 aa, Homo sapiens
  CDR3 for alpha chain variable domain of TCR clone 147491 (TRAV8-3, TRAJ28)
CAVGAVGSYQLTF

SEQ ID NO: 294982 - protein, 15 aa, Homo sapiens
  CDR3 for beta chain variable domain of TCR clone 147491 (TRBV28, TRBJ2-5)
CAIIPGQGSIETQYF

SEQ ID NO: 294983 - protein, 15 aa, Homo sapiens
  CDR3 for alpha chain variable domain of TCR clone 147492 (TRAV8-1, TRAJ23)
CAVNSHYNQGGKLIF

SEQ ID NO: 294984 - protein, 15 aa, Homo sapiens
  CDR3 for beta chain variable domain of TCR clone 147492 (TRBV20-1, TRBJ2-7)
CSAESGTSGAYEQCF

SEQ ID NO: 294985 - protein, 16 aa, Homo sapiens
  CDR3 for alpha chain variable domain of TCR clone 147493 (TRAV8-3, TRAJ28)
CAVGATLGLGVTNSLP

SEQ ID NO: 294986 - protein, 14 aa, Homo sapiens
  CDR3 for beta chain variable domain of TCR clone 147493 (TRBV7-2, TRBJ2-1)
CASSLGVGYNEQFF

SEQ ID NO: 294987 - protein, 14 aa, Homo sapiens
  CDR3 for alpha chain variable domain of TCR clone 147494 (TRAV12-2, TRAJ40)
CAVKIPSGTYKYIF

SEQ ID NO: 294988 - protein, 15 aa, Homo sapiens
  CDR3 for beta chain variable domain of TCR clone 147494 (TRBV20-1, TRBJ1-4)
SAVLREWGVNEKLFF

SEQ ID NO: 294989 - protein, 11 aa, Homo sapiens
  CDR3 for alpha chain variable domain of TCR clone 147495 (TRAV2, TRAJ33)
CAVDSNYQLIW

SEQ ID NO: 294990 - protein, 14 aa, Homo sapiens
  CDR3 for beta chain variable domain of TCR clone 147495 (TRBV19, TRBJ2-7)
CASNFRDTFTGMYF

SEQ ID NO: 294991 - protein, 14 aa, Homo sapiens
  CDR3 for alpha chain variable domain of TCR clone 147496 (TRAV9-2, TRAJ39)
CALYIYNAGNMLTF

SEQ ID NO: 294992 - protein, 16 aa, Homo sapiens
  CDR3 for beta chain variable domain of TCR clone 147496 (TRBV9, TRBJ2-1)
CASSVGGGGNYNEQFF

SEQ ID NO: 294993 - protein, 18 aa, Homo sapiens
  CDR3 for alpha chain variable domain of TCR clone 147497 (TRAV26-1, TRAJ22)
CIVRVALISSGSARQLTF

SEQ ID NO: 294994 - protein, 14 aa, Homo sapiens
  CDR3 for beta chain variable domain of TCR clone 147497 (TRBV7-3, TRBJ2-1)
CASSLAGGTNEQFF

SEQ ID NO: 294995 - protein, 18 aa, Homo sapiens
  CDR3 for alpha chain variable domain of TCR clone 147498 (TRAV21, TRAJ52)
CAVRPSPAGGTSYGKLTF

SEQ ID NO: 294996 - protein, 14 aa, Homo sapiens
  CDR3 for beta chain variable domain of TCR clone 147498 (TRBV4-2, TRBJ2-3)
CASSQERGTDTQYF

SEQ ID NO: 294997 - protein, 13 aa, Homo sapiens
  CDR3 for alpha chain variable domain of TCR clone 147499 (TRAV2, TRAJ21)
CAVEDNNFNKFYF

SEQ ID NO: 294998 - protein, 16 aa, Homo sapiens
  CDR3 for beta chain variable domain of TCR clone 147499 (TRBV7-8, TRBJ2-4)
CASSAERTLAKNIQYF

SEQ ID NO: 294999 - protein, 16 aa, Homo sapiens
  CDR3 for alpha chain variable domain of TCR clone 147500 (TRAV23/DV6, TRAJ9)
CAASIGGNTGGFKTIF

SEQ ID NO: 295000 - protein, 13 aa, Homo sapiens
  CDR3 for beta chain variable domain of TCR clone 147500 (TRBV18, TRBJ2-5)
CASSPPGKETQYF

SEQ ID NO: 295001 - protein, 14 aa, Homo sapiens
  CDR3 for alpha chain variable domain of TCR clone 147501 (TRAV14/DV4, TRAJ42)
CPRGSLRSQGNLIF

SEQ ID NO: 295002 - protein, 12 aa, Homo sapiens
  CDR3 for beta chain variable domain of TCR clone 147501 (TRBV29-1, TRBJ2-3)
CSVTGGADTQYF

SEQ ID NO: 295003 - protein, 14 aa, Homo sapiens
  CDR3 for alpha chain variable domain of TCR clone 147502 (TRAV12-2, TRAJ9)
CAVNMEGRGFKTIF

SEQ ID NO: 295004 - protein, 14 aa, Homo sapiens
  CDR3 for beta chain variable domain of TCR clone 147502 (TRBV2, TRBJ2-5)
CASSEVLAQETQYF

SEQ ID NO: 295005 - protein, 13 aa, Homo sapiens
  CDR3 for alpha chain variable domain of TCR clone 147503 (TRAV13-2, TRAJ13)
CAERPGGYQKVTF

SEQ ID NO: 295006 - protein, 18 aa, Homo sapiens
  CDR3 for beta chain variable domain of TCR clone 147503 (TRBV11-2, TRBJ2-3)
CSSSLGGASRGAPNTQYF

SEQ ID NO: 295007 - protein, 14 aa, Homo sapiens
  CDR3 for alpha chain variable domain of TCR clone 147504 (TRAV12-2, TRAJ6)
CASKWGGGSYIPTF

SEQ ID NO: 295008 - protein, 13 aa, Homo sapiens
  CDR3 for beta chain variable domain of TCR clone 147504 (TRBV5-1, TRBJ1-4)
PASWKDGNEKLFF

SEQ ID NO: 295009 - protein, 11 aa, Homo sapiens
  CDR3 for alpha chain variable domain of TCR clone 147505 (TRAV21, TRAJ41)
CAVRSGSALNF

SEQ ID NO: 295010 - protein, 13 aa, Homo sapiens
  CDR3 for beta chain variable domain of TCR clone 147505 (TRBV7-9, TRBJ1-2)
CASSLKQNYGYTF

SEQ ID NO: 295011 - protein, 17 aa, Homo sapiens
  CDR3 for alpha chain variable domain of TCR clone 147506 (TRAV8-3, TRAJ52)
CAVGAEAGCTSYGKLTF

SEQ ID NO: 295012 - protein, 15 aa, Homo sapiens
  CDR3 for beta chain variable domain of TCR clone 147506 (TRBV5-1, TRBJ2-5)
CASSRQGLGQETQYF

SEQ ID NO: 295013 - protein, 14 aa, Homo sapiens
  CDR3 for alpha chain variable domain of TCR clone 147507 (TRAV14/DV4, TRAJ41)
CARGGPDSGYALNF

SEQ ID NO: 295014 - protein, 15 aa, Homo sapiens
  CDR3 for beta chain variable domain of TCR clone 147507 (TRBV19, TRBJ2-1)
CASSIQATYYNEQFF

SEQ ID NO: 295015 - protein, 10 aa, Homo sapiens
  CDR3 for alpha chain variable domain of TCR clone 147508 (TRAV9-2, TRAJ34)
CALSDDKLIF

SEQ ID NO: 295016 - protein, 14 aa, Homo sapiens
  CDR3 for beta chain variable domain of TCR clone 147508 (TRBV7-8, TRBJ2-7)
CASSAGQGAYEQYF

SEQ ID NO: 295017 - protein, 14 aa, Homo sapiens
  CDR3 for alpha chain variable domain of TCR clone 147509 (TRAV29/DV5, TRAJ45)
CAASFRGGDDGLTF

SEQ ID NO: 295018 - protein, 11 aa, Homo sapiens
  CDR3 for beta chain variable domain of TCR clone 147509 (TRBV11-2, TRBJ2-2)
CASSLPGELFF

SEQ ID NO: 295019 - protein, 16 aa, Homo sapiens
  CDR3 for alpha chain variable domain of TCR clone 147510 (TRAV27, TRAJ13)
CAGAKSDSGGYQKVTF

SEQ ID NO: 295020 - protein, 15 aa, Homo sapiens
  CDR3 for beta chain variable domain of TCR clone 147510 (TRBV29-1, TRBJ2-1)
CSVGRHALFCNEQFF

SEQ ID NO: 295021 - protein, 13 aa, Homo sapiens
  CDR3 for alpha chain variable domain of TCR clone 147511 (TRAV26-1, TRAJ48)
CIVRVVGDEKLTF

SEQ ID NO: 295022 - protein, 14 aa, Homo sapiens
  CDR3 for beta chain variable domain of TCR clone 147511 (TRBV7-3, TRBJ2-7)
CASSLKADSYEQYF

SEQ ID NO: 295023 - protein, 12 aa, Homo sapiens
  CDR3 for alpha chain variable domain of TCR clone 147512 (TRAV1-2, TRAJ9)
CAGYTGGFKTIF

SEQ ID NO: 295024 - protein, 15 aa, Homo sapiens
  CDR3 for beta chain variable domain of TCR clone 147512 (TRBV11-2, TRBJ2-1)
CASSPAVQSLNEQFF

SEQ ID NO: 295025 - protein, 13 aa, Homo sapiens
  CDR3 for alpha chain variable domain of TCR clone 147513 (TRAV17, TRAJ5)
CAPMDTGRRALTF

SEQ ID NO: 295026 - protein, 12 aa, Homo sapiens
  CDR3 for beta chain variable domain of TCR clone 147513 (TRBV5-4, TRBJ2-5)
CASSSTRETQYF

SEQ ID NO: 295027 - protein, 16 aa, Homo sapiens
  CDR3 for alpha chain variable domain of TCR clone 147514 (TRAV3, TRAJ37)
CAVRGRGSGNTGKLIC

SEQ ID NO: 295028 - protein, 13 aa, Homo sapiens
  CDR3 for beta chain variable domain of TCR clone 147514 (TRBV14, TRBJ2-7)
CASSQDRRGEQYF

SEQ ID NO: 295029 - protein, 14 aa, Homo sapiens
  CDR3 for alpha chain variable domain of TCR clone 147515 (TRAV12-2, TRAJ40)
FAVKIPSGTYKCIF

SEQ ID NO: 295030 - protein, 14 aa, Homo sapiens
  CDR3 for beta chain variable domain of TCR clone 147515 (TRBV20-1, TRBJ1-1)
CSAQTRIGGTEAFF

SEQ ID NO: 295031 - protein, 14 aa, Homo sapiens
  CDR3 for alpha chain variable domain of TCR clone 147516 (TRAV17, TRAJ57)
CATDPQGGSEKLVF

SEQ ID NO: 295032 - protein, 13 aa, Homo sapiens
  CDR3 for beta chain variable domain of TCR clone 147516 (TRBV19, TRBJ1-2)
CASSVAGQDGYTF

SEQ ID NO: 295033 - protein, 13 aa, Homo sapiens
  CDR3 for alpha chain variable domain of TCR clone 147517 (TRAV8-2, TRAJ43)
CVVSDQGDNDMRS

SEQ ID NO: 295034 - protein, 12 aa, Homo sapiens
  CDR3 for beta chain variable domain of TCR clone 147517 (TRBV7-9, TRBJ2-7)
CASRTGFDEQYF

SEQ ID NO: 295035 - protein, 12 aa, Homo sapiens
  CDR3 for alpha chain variable domain of TCR clone 147518 (TRAV8-3, TRAJ26)
CAGDTYGQSFVF

SEQ ID NO: 295036 - protein, 15 aa, Homo sapiens
  CDR3 for beta chain variable domain of TCR clone 147518 (TRBV9, TRBJ2-1)
CASSLAGSSYNEQFF

SEQ ID NO: 295037 - protein, 10 aa, Homo sapiens
  CDR3 for alpha chain variable domain of TCR clone 147519 (TRAV25, TRAJ20)
CAVNDYKLSF

SEQ ID NO: 295038 - protein, 17 aa, Homo sapiens
  CDR3 for beta chain variable domain of TCR clone 147519 (TRBV5-4, TRBJ2-1)
CASSSAGGRGPYNEQFC

SEQ ID NO: 295039 - protein, 11 aa, Homo sapiens
  CDR3 for alpha chain variable domain of TCR clone 147520 (TRAV4, TRAJ23)
CLVAPGGKLIF

SEQ ID NO: 295040 - protein, 13 aa, Homo sapiens
  CDR3 for beta chain variable domain of TCR clone 147520 (TRBV12-5, TRBJ2-3)
CASQNRGTDTQYF

SEQ ID NO: 295041 - protein, 13 aa, Homo sapiens
  CDR3 for alpha chain variable domain of TCR clone 147521 (TRAV12-2, TRAJ49)
CAVNMRTGNQFYF

SEQ ID NO: 295042 - protein, 14 aa, Homo sapiens
  CDR3 for beta chain variable domain of TCR clone 147521 (TRBV4-2, TRBJ2-1)
CASGLDRAYNEQFF

SEQ ID NO: 295043 - protein, 14 aa, Homo sapiens
  CDR3 for alpha chain variable domain of TCR clone 147522 (TRAV8-1, TRAJ39)
CAVNASNAGNMLTF

SEQ ID NO: 295044 - protein, 12 aa, Homo sapiens
  CDR3 for beta chain variable domain of TCR clone 147522 (TRBV11-2, TRBJ2-2)
CASSLGGGELFF

SEQ ID NO: 295045 - protein, 11 aa, Homo sapiens
  CDR3 for alpha chain variable domain of TCR clone 147523 (TRAV1-1, TRAJ23)
CAVRQGGKLIF

SEQ ID NO: 295046 - protein, 15 aa, Homo sapiens
  CDR3 for beta chain variable domain of TCR clone 147523 (TRBV4-1, TRBJ1-4)
CASSDTGGTNEKLFF

SEQ ID NO: 295047 - protein, 16 aa, Homo sapiens
  CDR3 for alpha chain variable domain of TCR clone 147524 (TRAV3, TRAJ37)
CAVRPHGSGNTGKLIF

SEQ ID NO: 295048 - protein, 15 aa, Homo sapiens
  CDR3 for beta chain variable domain of TCR clone 147524 (TRBV5-4, TRBJ2-2)
CASRYGDLNTGELFF

SEQ ID NO: 295049 - protein, 12 aa, Homo sapiens
  CDR3 for alpha chain variable domain of TCR clone 147525 (TRAV13-1, TRAJ21)
CAAKEGFNKFYF

SEQ ID NO: 295050 - protein, 16 aa, Homo sapiens
  CDR3 for beta chain variable domain of TCR clone 147525 (TRBV20-1, TRBJ1-2)
CSASMGQGVANYGYTF

SEQ ID NO: 295051 - protein, 13 aa, Homo sapiens
  CDR3 for alpha chain variable domain of TCR clone 147526 (TRAV6, TRAJ33)
CALPMDSNYQLIW

SEQ ID NO: 295052 - protein, 12 aa, Homo sapiens
  CDR3 for beta chain variable domain of TCR clone 147526 (TRBV11-2, TRBJ2-2)
CASSLGGGELFF

SEQ ID NO: 295053 - protein, 13 aa, Homo sapiens
  CDR3 for alpha chain variable domain of TCR clone 147527 (TRAV20, TRAJ29)
CAVQAVGNTPLVF

SEQ ID NO: 295054 - protein, 14 aa, Homo sapiens
  CDR3 for beta chain variable domain of TCR clone 147527 (TRBV6-3, TRBJ2-2)
CASTYTPDTGELFF

SEQ ID NO: 295055 - protein, 14 aa, Homo sapiens
  CDR3 for alpha chain variable domain of TCR clone 147528 (TRAV2, TRAJ9)
CAVDPNTGGFETIF

SEQ ID NO: 295056 - protein, 14 aa, Homo sapiens
  CDR3 for beta chain variable domain of TCR clone 147528 (TRBV7-2, TRBJ2-7)
CASSPKTSFYEQYF

SEQ ID NO: 295057 - protein, 14 aa, Homo sapiens
  CDR3 for alpha chain variable domain of TCR clone 147529 (TRAV23/DV6, TRAJ45)
CAASWGGGADRLTF

SEQ ID NO: 295058 - protein, 15 aa, Homo sapiens
  CDR3 for beta chain variable domain of TCR clone 147529 (TRBV4-2, TRBJ1-2)
CASSRNTGAGYGYTF

SEQ ID NO: 295059 - protein, 13 aa, Homo sapiens
  CDR3 for alpha chain variable domain of TCR clone 147530 (TRAV2, TRAJ40)
CAVVTSGTYKYIF

SEQ ID NO: 295060 - protein, 14 aa, Homo sapiens
  CDR3 for beta chain variable domain of TCR clone 147530 (TRBV19, TRBJ2-1)
CASPTFVLSAEQFF

SEQ ID NO: 295061 - protein, 16 aa, Homo sapiens
  CDR3 for alpha chain variable domain of TCR clone 147531 (TRAV27, TRAJ13)
CAGAKSDSGGYQKVTF

SEQ ID NO: 295062 - protein, 15 aa, Homo sapiens
  CDR3 for beta chain variable domain of TCR clone 147531 (TRBV29-1, TRBJ2-1)
CIVGRHALFYNEQFF

SEQ ID NO: 295063 - protein, 14 aa, Homo sapiens
  CDR3 for alpha chain variable domain of TCR clone 147532 (TRAV17, TRAJ39)
CATDPVRAGNMLTF

SEQ ID NO: 295064 - protein, 15 aa, Homo sapiens
  CDR3 for beta chain variable domain of TCR clone 147532 (TRBV13, TRBJ1-5)
CASSFGQGGVQPQNF

SEQ ID NO: 295065 - protein, 11 aa, Homo sapiens
  CDR3 for alpha chain variable domain of TCR clone 147533 (TRAV21, TRAJ11)
CAVNGYSTLTF

SEQ ID NO: 295066 - protein, 14 aa, Homo sapiens
  CDR3 for beta chain variable domain of TCR clone 147533 (TRBV19, TRBJ2-7)
CASSMGQGAIEQYF

SEQ ID NO: 295067 - protein, 14 aa, Homo sapiens
  CDR3 for alpha chain variable domain of TCR clone 147534 (TRAV2, TRAJ9)
CAVADRSGGFKTIF

SEQ ID NO: 295068 - protein, 15 aa, Homo sapiens
  CDR3 for beta chain variable domain of TCR clone 147534 (TRBV6-6, TRBJ2-7)
CASSYSYGGSYEQYF

SEQ ID NO: 295069 - protein, 12 aa, Homo sapiens
  CDR3 for alpha chain variable domain of TCR clone 147535 (TRAV2, TRAJ36)
CAELTGANNLFF

SEQ ID NO: 295070 - protein, 17 aa, Homo sapiens
  CDR3 for beta chain variable domain of TCR clone 147535 (TRBV13, TRBJ2-3)
CASSLSRVAGGRNTQYF

SEQ ID NO: 295071 - protein, 14 aa, Homo sapiens
  CDR3 for alpha chain variable domain of TCR clone 147536 (TRAV2, TRAJ9)
CAVEDRSGGFKTIF

SEQ ID NO: 295072 - protein, 15 aa, Homo sapiens
  CDR3 for beta chain variable domain of TCR clone 147536 (TRBV5-7, TRBJ1-6)
CASSWELGPNSPLHF

SEQ ID NO: 295073 - protein, 13 aa, Homo sapiens
  CDR3 for alpha chain variable domain of TCR clone 147537 (TRAV38-1, TRAJ42)
CARWGGSQGNPIF

SEQ ID NO: 295074 - protein, 15 aa, Homo sapiens
  CDR3 for beta chain variable domain of TCR clone 147537 (TRBV18, TRBJ2-1)
CASSPPSASYNEQFF

SEQ ID NO: 295075 - protein, 14 aa, Homo sapiens
  CDR3 for alpha chain variable domain of TCR clone 147538 (TRAV12-3, TRAJ10)
SHLPLTGGGNKLTF

SEQ ID NO: 295076 - protein, 17 aa, Homo sapiens
  CDR3 for beta chain variable domain of TCR clone 147538 (TRBV7-9, TRBJ2-7)
CASSWQGRWREAYEQYF

SEQ ID NO: 295077 - protein, 14 aa, Homo sapiens
  CDR3 for alpha chain variable domain of TCR clone 147539 (TRAV17, TRAJ29)
CATDSNSGNTPLVF

SEQ ID NO: 295078 - protein, 14 aa, Homo sapiens
  CDR3 for beta chain variable domain of TCR clone 147539 (TRBV2, TRBJ1-2)
CASSEGGRNYGYTF

SEQ ID NO: 295079 - protein, 16 aa, Homo sapiens
  CDR3 for alpha chain variable domain of TCR clone 147540 (TRAV3, TRAJ6)
CALRYGMGRRKLHTYI

SEQ ID NO: 295080 - protein, 15 aa, Homo sapiens
  CDR3 for beta chain variable domain of TCR clone 147540 (TRBV9, TRBJ2-1)
CASSLAGSSYNEQFF

SEQ ID NO: 295081 - protein, 16 aa, Homo sapiens
  CDR3 for alpha chain variable domain of TCR clone 147541 (TRAV4, TRAJ22)
CLVGDLYSGSARQLPF

SEQ ID NO: 295082 - protein, 16 aa, Homo sapiens
  CDR3 for beta chain variable domain of TCR clone 147541 (TRBV7-9, TRBJ2-1)
CASSGVAGGSYNEQFF

SEQ ID NO: 295083 - protein, 19 aa, Homo sapiens
  CDR3 for alpha chain variable domain of TCR clone 147542 (TRAV17, TRAJ17)
CATDGRPGVIKAAGNKLTF

SEQ ID NO: 295084 - protein, 12 aa, Homo sapiens
  CDR3 for beta chain variable domain of TCR clone 147542 (TRBV24-1, TRBJ2-3)
CATSDSTDTQYF

SEQ ID NO: 295085 - protein, 12 aa, Homo sapiens
  CDR3 for alpha chain variable domain of TCR clone 147543 (TRAV13-2, TRAJ23)
CAERHRGGKLIF

SEQ ID NO: 295086 - protein, 16 aa, Homo sapiens
  CDR3 for beta chain variable domain of TCR clone 147543 (TRBV20-1, TRBJ1-4)
CSAPGQGLLTNEKLFI

SEQ ID NO: 295087 - protein, 11 aa, Homo sapiens
  CDR3 for alpha chain variable domain of TCR clone 147544 (TRAV12-1, TRAJ21)
CVVNNFNKFYF

SEQ ID NO: 295088 - protein, 13 aa, Homo sapiens
  CDR3 for beta chain variable domain of TCR clone 147544 (TRBV19, TRBJ1-2)
CASSQGQVYGYTF

SEQ ID NO: 295089 - protein, 14 aa, Homo sapiens
  CDR3 for alpha chain variable domain of TCR clone 147545 (TRAV1-2, TRAJ16)
CAVNRFSYGQKLLF

SEQ ID NO: 295090 - protein, 13 aa, Homo sapiens
  CDR3 for beta chain variable domain of TCR clone 147545 (TRBV20-1, TRBJ2-2)
CSALSGGAGELFF

SEQ ID NO: 295091 - protein, 12 aa, Homo sapiens
  CDR3 for alpha chain variable domain of TCR clone 147546 (TRAV1-2, TRAJ17)
CSVRAAGNKLTF

SEQ ID NO: 295092 - protein, 16 aa, Homo sapiens
  CDR3 for beta chain variable domain of TCR clone 147546 (TRBV20-1, TRBJ2-1)
CSAPGLAGSYSDEQFF

SEQ ID NO: 295093 - protein, 17 aa, Homo sapiens
  CDR3 for alpha chain variable domain of TCR clone 147547 (TRAV3, TRAJ6)
CAVRDGPRAGGSYRPTF

SEQ ID NO: 295094 - protein, 20 aa, Homo sapiens
  CDR3 for beta chain variable domain of TCR clone 147547 (TRBV28, TRBJ2-1)
CASTPIGRSPGLAGGNEQLF

SEQ ID NO: 295095 - protein, 11 aa, Homo sapiens
  CDR3 for alpha chain variable domain of TCR clone 147548 (TRAV2, TRAJ13)
CASGGYQKVTF

SEQ ID NO: 295096 - protein, 17 aa, Homo sapiens
  CDR3 for beta chain variable domain of TCR clone 147548 (TRBV7-2, TRBJ2-2)
CASSPRGAGEGTGELFF

SEQ ID NO: 295097 - protein, 14 aa, Homo sapiens
  CDR3 for alpha chain variable domain of TCR clone 147549 (TRAV23/DV6, TRAJ45)
CAASWGGGADGLTF

SEQ ID NO: 295098 - protein, 12 aa, Homo sapiens
  CDR3 for beta chain variable domain of TCR clone 147549 (TRBV11-2, TRBJ2-2)
CASSLPTGELFF

SEQ ID NO: 295099 - protein, 16 aa, Homo sapiens
  CDR3 for alpha chain variable domain of TCR clone 147550 (TRAV13-2, TRAJ28)
CAEKSYSGAGSYQLTF

SEQ ID NO: 295100 - protein, 16 aa, Homo sapiens
  CDR3 for beta chain variable domain of TCR clone 147550 (TRBV19, TRBJ2-1)
CASSKAGTSSYNEQFF

SEQ ID NO: 295101 - protein, 13 aa, Homo sapiens
  CDR3 for alpha chain variable domain of TCR clone 147551 (TRAV21, TRAJ56)
CAMRTGANSKLTF

SEQ ID NO: 295102 - protein, 15 aa, Homo sapiens
  CDR3 for beta chain variable domain of TCR clone 147551 (TRBV7-9, TRBJ1-1)
CASSHRGTVNTEAFF

SEQ ID NO: 295103 - protein, 13 aa, Homo sapiens
  CDR3 for alpha chain variable domain of TCR clone 147552 (TRAV20, TRAJ20)
CAVRDFNDYKLSF

SEQ ID NO: 295104 - protein, 14 aa, Homo sapiens
  CDR3 for beta chain variable domain of TCR clone 147552 (TRBV20-1, TRBJ2-1)
CSAQIGGSANEQFF

SEQ ID NO: 295105 - protein, 15 aa, Homo sapiens
  CDR3 for alpha chain variable domain of TCR clone 147553 (TRAV29/DV5, TRAJ44)
CAASAGTGTASKLTC

SEQ ID NO: 295106 - protein, 12 aa, Homo sapiens
  CDR3 for beta chain variable domain of TCR clone 147553 (TRBV11-2, TRBJ2-2)
CASSLGGGELFF

SEQ ID NO: 295107 - protein, 12 aa, Homo sapiens
  CDR3 for alpha chain variable domain of TCR clone 147554 (TRAV25, TRAJ7)
CTGSYGNNRLAF

SEQ ID NO: 295108 - protein, 12 aa, Homo sapiens
  CDR3 for beta chain variable domain of TCR clone 147554 (TRBV5-1, TRBJ1-2)
CASSQDTYGYTF

SEQ ID NO: 295109 - protein, 17 aa, Homo sapiens
  CDR3 for alpha chain variable domain of TCR clone 147555 (TRAV13-1, TRAJ52)
CAAGRNAGGTSYGKLTF

SEQ ID NO: 295110 - protein, 15 aa, Homo sapiens
  CDR3 for beta chain variable domain of TCR clone 147555 (TRBV6-3, TRBJ2-7)
CASSSPGTVFYEEYF

SEQ ID NO: 295111 - protein, 16 aa, Homo sapiens
  CDR3 for alpha chain variable domain of TCR clone 147556 (TRAV21, TRAJ37)
CNVRTAGSSNTGKLIF

SEQ ID NO: 295112 - protein, 13 aa, Homo sapiens
  CDR3 for beta chain variable domain of TCR clone 147556 (TRBV7-9, TRBJ2-5)
CASLPSGRETQYF

SEQ ID NO: 295113 - protein, 20 aa, Homo sapiens
  CDR3 for alpha chain variable domain of TCR clone 147557 (TRAV21, TRAJ22)
SLVTQPPTLKSSGSARQLTF

SEQ ID NO: 295114 - protein, 16 aa, Homo sapiens
  CDR3 for beta chain variable domain of TCR clone 147557 (TRBV7-3, TRBJ2-2)
CASSLKRGTVSGELFF

SEQ ID NO: 295115 - protein, 13 aa, Homo sapiens
  CDR3 for alpha chain variable domain of TCR clone 147558 (TRAV13-1, TRAJ44)
CSKGDRHCSKLTF

SEQ ID NO: 295116 - protein, 15 aa, Homo sapiens
  CDR3 for beta chain variable domain of TCR clone 147558 (TRBV10-3, TRBJ2-1)
CAISDVQDRAYEQFF

SEQ ID NO: 295117 - protein, 17 aa, Homo sapiens
  CDR3 for alpha chain variable domain of TCR clone 147559 (TRAV16, TRAJ37)
CALSGRMALATQANEAL

SEQ ID NO: 295118 - protein, 13 aa, Homo sapiens
  CDR3 for beta chain variable domain of TCR clone 147559 (TRBV7-2, TRBJ2-2)
CASSLAVTGELFF

SEQ ID NO: 295119 - protein, 11 aa, Homo sapiens
  CDR3 for alpha chain variable domain of TCR clone 147560 (TRAV23/DV6, TRAJ58)
CAARLLRGETS

SEQ ID NO: 295120 - protein, 12 aa, Homo sapiens
  CDR3 for beta chain variable domain of TCR clone 147560 (TRBV7-3, TRBJ2-1)
CASSFINNEQFF

SEQ ID NO: 295121 - protein, 13 aa, Homo sapiens
  CDR3 for alpha chain variable domain of TCR clone 147561 (TRAV12-3, TRAJ46)
CAVKKSSGDKLTF

SEQ ID NO: 295122 - protein, 14 aa, Homo sapiens
  CDR3 for beta chain variable domain of TCR clone 147561 (TRBV12-4, TRBJ1-3)
CASSLRGTGNTIYF

SEQ ID NO: 295123 - protein, 14 aa, Homo sapiens
  CDR3 for alpha chain variable domain of TCR clone 147562 (TRAV8-4, TRAJ48)
CAVSETFGNEKLTF

SEQ ID NO: 295124 - protein, 14 aa, Homo sapiens
  CDR3 for beta chain variable domain of TCR clone 147562 (TRBV7-2, TRBJ2-7)
CASRSQGAAYEQYF

SEQ ID NO: 295125 - protein, 15 aa, Homo sapiens
  CDR3 for alpha chain variable domain of TCR clone 147563 (TRAV3, TRAJ5)
CAVRDLDMGRRALTF

SEQ ID NO: 295126 - protein, 16 aa, Homo sapiens
  CDR3 for beta chain variable domain of TCR clone 147563 (TRBV15, TRBJ2-6)
CATSVNGGFLANVLTF

SEQ ID NO: 295127 - protein, 14 aa, Homo sapiens
  CDR3 for alpha chain variable domain of TCR clone 147564 (TRAV35, TRAJ33)
FAGSSQDSNYQLIW

SEQ ID NO: 295128 - protein, 15 aa, Homo sapiens
  CDR3 for beta chain variable domain of TCR clone 147564 (TRBV28, TRBJ2-5)
CASSPGQGSIETQYF

SEQ ID NO: 295129 - protein, 15 aa, Homo sapiens
  CDR3 for alpha chain variable domain of TCR clone 147565 (TRAV26-1, TRAJ38)
CIVRAEGGNNRKLMW

SEQ ID NO: 295130 - protein, 14 aa, Homo sapiens
  CDR3 for beta chain variable domain of TCR clone 147565 (TRBV7-6, TRBJ2-5)
CASSSPSGSETQYF

SEQ ID NO: 295131 - protein, 14 aa, Homo sapiens
  CDR3 for alpha chain variable domain of TCR clone 147566 (TRAV17, TRAJ15)
CATTTNQAGTALIF

SEQ ID NO: 295132 - protein, 16 aa, Homo sapiens
  CDR3 for beta chain variable domain of TCR clone 147566 (TRBV4-1, TRBJ2-7)
CTSSRGDILSSYEQYF

SEQ ID NO: 295133 - protein, 14 aa, Homo sapiens
  CDR3 for alpha chain variable domain of TCR clone 147567 (TRAV12-2, TRAJ13)
CAVKKTGGYQKVTF

SEQ ID NO: 295134 - protein, 16 aa, Homo sapiens
  CDR3 for beta chain variable domain of TCR clone 147567 (TRBV7-3, TRBJ2-1)
CASSPGAGTYYNEQFF

SEQ ID NO: 295135 - protein, 12 aa, Homo sapiens
  CDR3 for alpha chain variable domain of TCR clone 147568 (TRAV16, TRAJ56)
CAPTGATSKLTF

SEQ ID NO: 295136 - protein, 17 aa, Homo sapiens
  CDR3 for beta chain variable domain of TCR clone 147568 (TRBV27, TRBJ2-6)
CASSLTGFASGANVLTF

SEQ ID NO: 295137 - protein, 16 aa, Homo sapiens
  CDR3 for alpha chain variable domain of TCR clone 147569 (TRAV3, TRAJ10)
CAVRDMRAGVGNKLTF

SEQ ID NO: 295138 - protein, 16 aa, Homo sapiens
  CDR3 for beta chain variable domain of TCR clone 147569 (TRBV12-5, TRBJ2-5)
CASGPRTSGNQETQYF

SEQ ID NO: 295139 - protein, 13 aa, Homo sapiens
  CDR3 for alpha chain variable domain of TCR clone 147570 (TRAV12-2, TRAJ20)
CAVNRFDDYKLSF

SEQ ID NO: 295140 - protein, 12 aa, Homo sapiens
  CDR3 for beta chain variable domain of TCR clone 147570 (TRBV28, TRBJ2-3)
CASSLYQDTQYF

SEQ ID NO: 295141 - protein, 15 aa, Homo sapiens
  CDR3 for alpha chain variable domain of TCR clone 147571 (TRAV12-3, TRAJ6)
CAMSATTGGSYIPTF

SEQ ID NO: 295142 - protein, 15 aa, Homo sapiens
  CDR3 for beta chain variable domain of TCR clone 147571 (TRBV7-8, TRBJ2-7)
CASSLRHFEAYEQYF

SEQ ID NO: 295143 - protein, 14 aa, Homo sapiens
  CDR3 for alpha chain variable domain of TCR clone 147572 (TRAV17, TRAJ54)
CATDANQGAQKLVF

SEQ ID NO: 295144 - protein, 12 aa, Homo sapiens
  CDR3 for beta chain variable domain of TCR clone 147572 (TRBV7-9, TRBJ2-7)
CASSIKREEQYV

SEQ ID NO: 295145 - protein, 14 aa, Homo sapiens
  CDR3 for alpha chain variable domain of TCR clone 147573 (TRAV12-3, TRAJ10)
SHLPLTGGGNKLTF

SEQ ID NO: 295146 - protein, 16 aa, Homo sapiens
  CDR3 for beta chain variable domain of TCR clone 147573 (TRBV12-4, TRBJ2-5)
CTSSCFVRGRQETQYF

SEQ ID NO: 295147 - protein, 14 aa, Homo sapiens
  CDR3 for alpha chain variable domain of TCR clone 147574 (TRAV4, TRAJ32)
CLVGLGGAANKLIF

SEQ ID NO: 295148 - protein, 17 aa, Homo sapiens
  CDR3 for beta chain variable domain of TCR clone 147574 (TRBV6-6, TRBJ2-5)
CASSSPPAGGSGKTQYF

SEQ ID NO: 295149 - protein, 13 aa, Homo sapiens
  CDR3 for alpha chain variable domain of TCR clone 147575 (TRAV27, TRAJ57)
CRSAQGGSEKLVF

SEQ ID NO: 295150 - protein, 11 aa, Homo sapiens
  CDR3 for beta chain variable domain of TCR clone 147575 (TRBV11-2, TRBJ1-1)
CASSINTQAFF

SEQ ID NO: 295151 - protein, 13 aa, Homo sapiens
  CDR3 for alpha chain variable domain of TCR clone 147576 (TRAV3, TRAJ20)
CAVRHLNDYKLSF

SEQ ID NO: 295152 - protein, 12 aa, Homo sapiens
  CDR3 for beta chain variable domain of TCR clone 147576 (TRBV6-1, TRBJ2-1)
CATYGLNNEQFF

SEQ ID NO: 295153 - protein, 16 aa, Homo sapiens
  CDR3 for alpha chain variable domain of TCR clone 147577 (TRAV16, TRAJ4)
CALSRMFSGGYNKLIF

SEQ ID NO: 295154 - protein, 19 aa, Homo sapiens
  CDR3 for beta chain variable domain of TCR clone 147577 (TRBV28, TRBJ2-7)
CASSYSGTSRLGRVYEQYF

SEQ ID NO: 295155 - protein, 11 aa, Homo sapiens
  CDR3 for alpha chain variable domain of TCR clone 147578 (TRAV21, TRAJ9)
CAVPGGFKTIF

SEQ ID NO: 295156 - protein, 17 aa, Homo sapiens
  CDR3 for beta chain variable domain of TCR clone 147578 (TRBV7-9, TRBJ2-5)
CATSGGARDPVLRARHE

SEQ ID NO: 295157 - protein, 17 aa, Homo sapiens
  CDR3 for alpha chain variable domain of TCR clone 147579 (TRAV1-1, TRAJ4)
CAPYTKLIFGAGTRLAV

SEQ ID NO: 295158 - protein, 16 aa, Homo sapiens
  CDR3 for beta chain variable domain of TCR clone 147579 (TRBV7-3, TRBJ2-2)
CASSLKRGTLSGELFF

SEQ ID NO: 295159 - protein, 15 aa, Homo sapiens
  CDR3 for alpha chain variable domain of TCR clone 147580 (TRAV8-3, TRAJ45)
CASSYSGGGADGLTF

SEQ ID NO: 295160 - protein, 12 aa, Homo sapiens
  CDR3 for beta chain variable domain of TCR clone 147580 (TRBV3-1, TRBJ2-5)
CASSQRGETQYF

SEQ ID NO: 295161 - protein, 14 aa, Homo sapiens
  CDR3 for alpha chain variable domain of TCR clone 147581 (TRAV1-2, TRAJ8)
CAVREDTGFQELVF

SEQ ID NO: 295162 - protein, 14 aa, Homo sapiens
  CDR3 for beta chain variable domain of TCR clone 147581 (TRBV25-1, TRBJ1-1)
CASTHLGGNTEAFF

SEQ ID NO: 295163 - protein, 13 aa, Homo sapiens
  CDR3 for alpha chain variable domain of TCR clone 147582 (TRAV27, TRAJ41)
CAGEGNSGYALNF

SEQ ID NO: 295164 - protein, 14 aa, Homo sapiens
  CDR3 for beta chain variable domain of TCR clone 147582 (TRBV7-2, TRBJ1-1)
GASSFLTGTTEAFF

SEQ ID NO: 295165 - protein, 14 aa, Homo sapiens
  CDR3 for alpha chain variable domain of TCR clone 147583 (TRAV13-1, TRAJ44)
CAAKATGTASKLTF

SEQ ID NO: 295166 - protein, 17 aa, Homo sapiens
  CDR3 for beta chain variable domain of TCR clone 147583 (TRBV7-3, TRBJ2-3)
CASSLMKRMRGAETQYL

SEQ ID NO: 295167 - protein, 10 aa, Homo sapiens
  CDR3 for alpha chain variable domain of TCR clone 147584 (TRAV26-1, TRAJ22)
CIAGSRQLNF

SEQ ID NO: 295168 - protein, 13 aa, Homo sapiens
  CDR3 for beta chain variable domain of TCR clone 147584 (TRBV19, TRBJ1-2)
CASSVPGQDGYTF

SEQ ID NO: 295169 - protein, 17 aa, Homo sapiens
  CDR3 for alpha chain variable domain of TCR clone 147585 (TRAV26-1, TRAJ53)
CIVRVDDCGGSNYKLTF

SEQ ID NO: 295170 - protein, 14 aa, Homo sapiens
  CDR3 for beta chain variable domain of TCR clone 147585 (TRBV12-5, TRBJ2-5)
CASGSRTHQETQYF

SEQ ID NO: 295171 - protein, 16 aa, Homo sapiens
  CDR3 for alpha chain variable domain of TCR clone 147586 (TRAV17, TRAJ52)
CATGIIGGSSYGKLTF

SEQ ID NO: 295172 - protein, 12 aa, Homo sapiens
  CDR3 for beta chain variable domain of TCR clone 147586 (TRBV7-3, TRBJ2-1)
CASSFINNEQFF

SEQ ID NO: 295173 - protein, 15 aa, Homo sapiens
  CDR3 for alpha chain variable domain of TCR clone 147587 (TRAV21, TRAJ37)
CAVRPTLSNTGKLIF

SEQ ID NO: 295174 - protein, 15 aa, Homo sapiens
  CDR3 for beta chain variable domain of TCR clone 147587 (TRBV7-6, TRBJ1-2)
CASSSGGRGGYGYTF

SEQ ID NO: 295175 - protein, 21 aa, Homo sapiens
  CDR3 for alpha chain variable domain of TCR clone 147588 (TRAV8-3, )
CAVVTTRIPDIQSPDPAVYQL

SEQ ID NO: 295176 - protein, 14 aa, Homo sapiens
  CDR3 for beta chain variable domain of TCR clone 147588 (TRBV11-2, TRBJ2-7)
CASSPSTTSYEQYF

SEQ ID NO: 295177 - protein, 16 aa, Homo sapiens
  CDR3 for alpha chain variable domain of TCR clone 147589 (TRAV1-2, TRAJ40)
CAVRGSRTSGTYKYNF

SEQ ID NO: 295178 - protein, 14 aa, Homo sapiens
  CDR3 for beta chain variable domain of TCR clone 147589 (TRBV4-1, TRBJ2-3)
CASSQDSGTDTQYF

SEQ ID NO: 295179 - protein, 13 aa, Homo sapiens
  CDR3 for alpha chain variable domain of TCR clone 147590 (TRAV27, TRAJ29)
CAGAHSGNTPLVF

SEQ ID NO: 295180 - protein, 18 aa, Homo sapiens
  CDR3 for beta chain variable domain of TCR clone 147590 (TRBV6-6, TRBJ1-3)
CASSYSKWDSIAGNTIYF

SEQ ID NO: 295181 - protein, 16 aa, Homo sapiens
  CDR3 for alpha chain variable domain of TCR clone 147591 (TRAV3, TRAJ37)
CAVRGKGSGNTGKLIF

SEQ ID NO: 295182 - protein, 21 aa, Homo sapiens
  CDR3 for beta chain variable domain of TCR clone 147591 (TRBV15, TRBJ2-1)
AWGTQPCTCVPPAEVDTARIF

SEQ ID NO: 295183 - protein, 12 aa, Homo sapiens
  CDR3 for alpha chain variable domain of TCR clone 147592 (TRAV23/DV6, TRAJ39)
PREGDAGNMLTF

SEQ ID NO: 295184 - protein, 12 aa, Homo sapiens
  CDR3 for beta chain variable domain of TCR clone 147592 (TRBV11-2, TRBJ2-2)
CASSRGGGELFF

SEQ ID NO: 295185 - protein, 12 aa, Homo sapiens
  CDR3 for alpha chain variable domain of TCR clone 147593 (TRAV2, TRAJ31)
CAVEEGNARLMF

SEQ ID NO: 295186 - protein, 18 aa, Homo sapiens
  CDR3 for beta chain variable domain of TCR clone 147593 (TRBV7-9, TRBJ2-3)
CASSLDLAGLATPDTQYL

SEQ ID NO: 295187 - protein, 14 aa, Homo sapiens
  CDR3 for alpha chain variable domain of TCR clone 147594 (TRAV21, TRAJ35)
CAVMPIGCGNVLHF

SEQ ID NO: 295188 - protein, 12 aa, Homo sapiens
  CDR3 for beta chain variable domain of TCR clone 147594 (TRBV7-9, TRBJ2-7)
CASSIKREEQYF

SEQ ID NO: 295189 - protein, 14 aa, Homo sapiens
  CDR3 for alpha chain variable domain of TCR clone 147595 (TRAV12-2, TRAJ9)
CAVRVNTGGFKTIF

SEQ ID NO: 295190 - protein, 12 aa, Homo sapiens
  CDR3 for beta chain variable domain of TCR clone 147595 (TRBV29-1, TRBJ2-3)
CSVTGGADTQYF

SEQ ID NO: 295191 - protein, 13 aa, Homo sapiens
  CDR3 for alpha chain variable domain of TCR clone 147596 (TRAV8-3, TRAJ6)
CAVEIGGSYIPTF

SEQ ID NO: 295192 - protein, 15 aa, Homo sapiens
  CDR3 for beta chain variable domain of TCR clone 147596 (TRBV28, TRBJ2-5)
CASSADRGRGETQYF

SEQ ID NO: 295193 - protein, 16 aa, Homo sapiens
  CDR3 for alpha chain variable domain of TCR clone 147597 (TRAV26-1, TRAJ45)
CIVEKYSGGGADGLTF

SEQ ID NO: 295194 - protein, 12 aa, Homo sapiens
  CDR3 for beta chain variable domain of TCR clone 147597 (TRBV5-1, TRBJ1-2)
CASSQDTYGYTF

SEQ ID NO: 295195 - protein, 15 aa, Homo sapiens
  CDR3 for alpha chain variable domain of TCR clone 147598 (TRAV29/DV5, TRAJ48)
CAASLGGLGNEKLTF

SEQ ID NO: 295196 - protein, 11 aa, Homo sapiens
  CDR3 for beta chain variable domain of TCR clone 147598 (TRBV20-1, TRBJ2-3)
CSGTSSTTQYF

SEQ ID NO: 295197 - protein, 14 aa, Homo sapiens
  CDR3 for alpha chain variable domain of TCR clone 147599 (TRAV26-1, TRAJ48)
CIVRVGFGNEKLTF

SEQ ID NO: 295198 - protein, 16 aa, Homo sapiens
  CDR3 for beta chain variable domain of TCR clone 147599 (TRBV11-3, TRBJ2-1)
CASSDVAGGSYNEQFF

SEQ ID NO: 295199 - protein, 14 aa, Homo sapiens
  CDR3 for alpha chain variable domain of TCR clone 147600 (TRAV1-2, TRAJ16)
CAVNRFSGGQKLLF

SEQ ID NO: 295200 - protein, 15 aa, Homo sapiens
  CDR3 for beta chain variable domain of TCR clone 147600 (TRBV7-9, TRBJ1-6)
CASSSPGRGKSPLHF

SEQ ID NO: 295201 - protein, 14 aa, Homo sapiens
  CDR3 for alpha chain variable domain of TCR clone 147601 (TRAV26-1, TRAJ44)
CISPLPGTASKLTF

SEQ ID NO: 295202 - protein, 16 aa, Homo sapiens
  CDR3 for beta chain variable domain of TCR clone 147601 (TRBV10-3, TRBJ2-1)
CAISGVGDGGGGEQFF

SEQ ID NO: 295203 - protein, 13 aa, Homo sapiens
  CDR3 for alpha chain variable domain of TCR clone 147602 (TRAV13-1, TRAJ43)
CAASLSNNNDMRF

SEQ ID NO: 295204 - protein, 14 aa, Homo sapiens
  CDR3 for beta chain variable domain of TCR clone 147602 (TRBV12-4, TRBJ1-1)
CASSLGTGGTEAFF

SEQ ID NO: 295205 - protein, 13 aa, Homo sapiens
  CDR3 for alpha chain variable domain of TCR clone 147603 (TRAV3, TRAJ41)
CAVSSNSGSALNF

SEQ ID NO: 295206 - protein, 13 aa, Homo sapiens
  CDR3 for beta chain variable domain of TCR clone 147603 (TRBV20-1, TRBJ2-2)
CSALSGGAGELFF

SEQ ID NO: 295207 - protein, 15 aa, Homo sapiens
  CDR3 for alpha chain variable domain of TCR clone 147604 (TRAV12-3, TRAJ6)
CAMRATTGGSYIPTF

SEQ ID NO: 295208 - protein, 16 aa, Homo sapiens
  CDR3 for beta chain variable domain of TCR clone 147604 (TRBV20-1, TRBJ1-2)
CSASMGQGVTNYGYTF

SEQ ID NO: 295209 - protein, 14 aa, Homo sapiens
  CDR3 for alpha chain variable domain of TCR clone 147605 (TRAV1-2, TRAJ16)
CAVNRVSDGQKLLF

SEQ ID NO: 295210 - protein, 13 aa, Homo sapiens
  CDR3 for beta chain variable domain of TCR clone 147605 (TRBV7-9, TRBJ1-2)
CASSLKQDYGYTF

SEQ ID NO: 295211 - protein, 12 aa, Homo sapiens
  CDR3 for alpha chain variable domain of TCR clone 147606 (TRAV17, TRAJ16)
CATVLPGQKLLF

SEQ ID NO: 295212 - protein, 15 aa, Homo sapiens
  CDR3 for beta chain variable domain of TCR clone 147606 (TRBV6-3, TRBJ2-2)
CASSFLASLTGELFF

SEQ ID NO: 295213 - protein, 14 aa, Homo sapiens
  CDR3 for alpha chain variable domain of TCR clone 147607 (TRAV36/DV7, TRAJ13)
WGSGENGGYQKVTF

SEQ ID NO: 295214 - protein, 15 aa, Homo sapiens
  CDR3 for beta chain variable domain of TCR clone 147607 (TRBV19, TRBJ2-1)
CASSTETSSYNEQFF

SEQ ID NO: 295215 - protein, 12 aa, Homo sapiens
  CDR3 for alpha chain variable domain of TCR clone 147608 (TRAV12-3, TRAJ17)
CAMTLTGNKLTF

SEQ ID NO: 295216 - protein, 16 aa, Homo sapiens
  CDR3 for beta chain variable domain of TCR clone 147608 (TRBV19, TRBJ2-1)
CASSEAGPSSYNEQFF

SEQ ID NO: 295217 - protein, 13 aa, Homo sapiens
  CDR3 for alpha chain variable domain of TCR clone 147609 (TRAV17, TRAJ37)
CATDPGNTGKLIF

SEQ ID NO: 295218 - protein, 16 aa, Homo sapiens
  CDR3 for beta chain variable domain of TCR clone 147609 (TRBV12-5, TRBJ2-5)
CASGPRTSGNQETQYF

SEQ ID NO: 295219 - protein, 14 aa, Homo sapiens
  CDR3 for alpha chain variable domain of TCR clone 147610 (TRAV13-2, TRAJ11)
CAEAGNSGYSTLTL

SEQ ID NO: 295220 - protein, 11 aa, Homo sapiens
  CDR3 for beta chain variable domain of TCR clone 147610 (TRBV10-3, TRBJ2-7)
CAISEGLEQYF

SEQ ID NO: 295221 - protein, 12 aa, Homo sapiens
  CDR3 for alpha chain variable domain of TCR clone 147611 (TRAV35, TRAJ31)
CAAASNNARLMF

SEQ ID NO: 295222 - protein, 15 aa, Homo sapiens
  CDR3 for beta chain variable domain of TCR clone 147611 (TRBV28, TRBJ2-4)
CAAGSGTLLMGIQYF

SEQ ID NO: 295223 - protein, 18 aa, Homo sapiens
  CDR3 for alpha chain variable domain of TCR clone 147612 (TRAV12-3, TRAJ52)
CAMSGGGAGGTSYGKLTF

SEQ ID NO: 295224 - protein, 17 aa, Homo sapiens
  CDR3 for beta chain variable domain of TCR clone 147612 (TRBV13, TRBJ2-3)
CASSLSRVAGGRNTQYF

SEQ ID NO: 295225 - protein, 16 aa, Homo sapiens
  CDR3 for alpha chain variable domain of TCR clone 147613 (TRAV4, TRAJ22)
CLVGDLYSGSARQLTL

SEQ ID NO: 295226 - protein, 15 aa, Homo sapiens
  CDR3 for beta chain variable domain of TCR clone 147613 (TRBV7-9, TRBJ1-4)
CASSRTGGFNEKLFF

SEQ ID NO: 295227 - protein, 15 aa, Homo sapiens
  CDR3 for alpha chain variable domain of TCR clone 147614 (TRAV12-3, TRAJ47)
CAMSALVEYGNKLVF

SEQ ID NO: 295228 - protein, 16 aa, Homo sapiens
  CDR3 for beta chain variable domain of TCR clone 147614 (TRBV13, TRBJ2-3)
CQQPLQGSGGRNTQYF

SEQ ID NO: 295229 - protein, 13 aa, Homo sapiens
  CDR3 for alpha chain variable domain of TCR clone 147615 (TRAV8-3, TRAJ28)
CAVGAVGSYPLTF

SEQ ID NO: 295230 - protein, 16 aa, Homo sapiens
  CDR3 for beta chain variable domain of TCR clone 147615 (TRBV19, TRBJ2-1)
CASSKAGPSSYNEQFF

SEQ ID NO: 295231 - protein, 12 aa, Homo sapiens
  CDR3 for alpha chain variable domain of TCR clone 147616 (TRAV8-3, TRAJ26)
CAGDNYGQNFVF

SEQ ID NO: 295232 - protein, 16 aa, Homo sapiens
  CDR3 for beta chain variable domain of TCR clone 147616 (TRBV15, TRBJ2-1)
CATSRERLAGAYEQFF

SEQ ID NO: 295233 - protein, 18 aa, Homo sapiens
  CDR3 for alpha chain variable domain of TCR clone 147617 (TRAV16, TRAJ45)
CAQASYPSSGGGADGLTF

SEQ ID NO: 295234 - protein, 12 aa, Homo sapiens
  CDR3 for beta chain variable domain of TCR clone 147617 (TRBV11-3, TRBJ2-4)
CASSAGRVSQYF

SEQ ID NO: 295235 - protein, 11 aa, Homo sapiens
  CDR3 for alpha chain variable domain of TCR clone 147618 (TRAV12-1, TRAJ37)
CVVNTPGKLIF

SEQ ID NO: 295236 - protein, 13 aa, Homo sapiens
  CDR3 for beta chain variable domain of TCR clone 147618 (TRBV7-9, TRBJ1-2)
CASSLKQNYGYTF

SEQ ID NO: 295237 - protein, 14 aa, Homo sapiens
  CDR3 for alpha chain variable domain of TCR clone 147619 (TRAV16, TRAJ33)
CALSAMDSNYQLIW

SEQ ID NO: 295238 - protein, 15 aa, Homo sapiens
  CDR3 for beta chain variable domain of TCR clone 147619 (TRBV9, TRBJ1-6)
CASSVAGTGDSTLHF

SEQ ID NO: 295239 - protein, 12 aa, Homo sapiens
  CDR3 for alpha chain variable domain of TCR clone 147620 (TRAV1-1, TRAJ8)
CAGGTCLQKLVF

SEQ ID NO: 295240 - protein, 15 aa, Homo sapiens
  CDR3 for beta chain variable domain of TCR clone 147620 (TRBV7-9, TRBJ1-4)
CASSRTGGFNEKLFF

SEQ ID NO: 295241 - protein, 13 aa, Homo sapiens
  CDR3 for alpha chain variable domain of TCR clone 147621 (TRAV12-3, TRAJ33)
CAISVNSNYQLIL

SEQ ID NO: 295242 - protein, 13 aa, Homo sapiens
  CDR3 for beta chain variable domain of TCR clone 147621 (TRBV4-1, TRBJ2-2)
CASSQENTGALFF

SEQ ID NO: 295243 - protein, 23 aa, Homo sapiens
  CDR3 for alpha chain variable domain of TCR clone 147622 (TRAV8-3, )
CAVVTTRIPDIQNPDPALYQLRD

SEQ ID NO: 295244 - protein, 14 aa, Homo sapiens
  CDR3 for beta chain variable domain of TCR clone 147622 (TRBV11-2, TRBJ2-7)
CASSPSTTSYEQYF

SEQ ID NO: 295245 - protein, 15 aa, Homo sapiens
  CDR3 for alpha chain variable domain of TCR clone 147623 (TRAV13-1, TRAJ44)
CAASRGGGTASKLTF

SEQ ID NO: 295246 - protein, 13 aa, Homo sapiens
  CDR3 for beta chain variable domain of TCR clone 147623 (TRBV15, TRBJ2-7)
CATSTTGHYEQYF

SEQ ID NO: 295247 - protein, 14 aa, Homo sapiens
  CDR3 for alpha chain variable domain of TCR clone 147624 (TRAV1-2, TRAJ16)
CAVNRFSDGQKLLF

SEQ ID NO: 295248 - protein, 12 aa, Homo sapiens
  CDR3 for beta chain variable domain of TCR clone 147624 (TRBV7-8, TRBJ2-5)
CASSPRVETQYF

SEQ ID NO: 295249 - protein, 14 aa, Homo sapiens
  CDR3 for alpha chain variable domain of TCR clone 147625 (TRAV12-2, TRAJ13)
CAVKKTGGYQKVTF

SEQ ID NO: 295250 - protein, 18 aa, Homo sapiens
  CDR3 for beta chain variable domain of TCR clone 147625 (TRBV24-1, TRBJ2-2)
CATSDSGQGTENTGELFF

SEQ ID NO: 295251 - protein, 18 aa, Homo sapiens
  CDR3 for alpha chain variable domain of TCR clone 147626 (TRAV21, TRAJ52)
CAVRPSPAGGTSYGKLTF

SEQ ID NO: 295252 - protein, 15 aa, Homo sapiens
  CDR3 for beta chain variable domain of TCR clone 147626 (TRBV18, TRBJ2-7)
CASSPSSTGNYEQYF

SEQ ID NO: 295253 - protein, 14 aa, Homo sapiens
  CDR3 for alpha chain variable domain of TCR clone 147627 (TRAV8-3, TRAJ4)
CAVGAAGGYNKLIF

SEQ ID NO: 295254 - protein, 14 aa, Homo sapiens
  CDR3 for beta chain variable domain of TCR clone 147627 (TRBV4-1, TRBJ1-5)
CASSPKGDNQHQHF

SEQ ID NO: 295255 - protein, 13 aa, Homo sapiens
  CDR3 for alpha chain variable domain of TCR clone 147628 (TRAV26-1, TRAJ8)
CIVRSTDFQKLVF

SEQ ID NO: 295256 - protein, 11 aa, Homo sapiens
  CDR3 for beta chain variable domain of TCR clone 147628 (TRBV11-2, TRBJ2-2)
CASSLPGELFF

SEQ ID NO: 295257 - protein, 11 aa, Homo sapiens
  CDR3 for alpha chain variable domain of TCR clone 147629 (TRAV2, TRAJ33)
SAVESNYQLIW

SEQ ID NO: 295258 - protein, 16 aa, Homo sapiens
  CDR3 for beta chain variable domain of TCR clone 147629 (TRBV4-3, TRBJ2-7)
CASSPRTSGRSYEQYF

SEQ ID NO: 295259 - protein, 18 aa, Homo sapiens
  CDR3 for alpha chain variable domain of TCR clone 147630 (TRAV26-1, TRAJ23)
CIVRVGLEVWNQGGKLIF

SEQ ID NO: 295260 - protein, 15 aa, Homo sapiens
  CDR3 for beta chain variable domain of TCR clone 147630 (TRBV19, TRBJ2-7)
CASSPAGSGEALRYF

SEQ ID NO: 295261 - protein, 14 aa, Homo sapiens
  CDR3 for alpha chain variable domain of TCR clone 147631 (TRAV8-3, TRAJ15)
CAVGRHQAGTALIF

SEQ ID NO: 295262 - protein, 15 aa, Homo sapiens
  CDR3 for beta chain variable domain of TCR clone 147631 (TRBV20-1, TRBJ2-7)
CSARVPAAYFYEQYF

SEQ ID NO: 295263 - protein, 15 aa, Homo sapiens
  CDR3 for alpha chain variable domain of TCR clone 147632 (TRAV8-4, TRAJ48)
CAVRAAYFGNEKLTF

SEQ ID NO: 295264 - protein, 12 aa, Homo sapiens
  CDR3 for beta chain variable domain of TCR clone 147632 (TRBV3-1, TRBJ2-5)
CASSQRGETQYF

SEQ ID NO: 295265 - protein, 17 aa, Homo sapiens
  CDR3 for alpha chain variable domain of TCR clone 147633 (TRAV3, TRAJ6)
CAVRDGPRAGGSYIPTF

SEQ ID NO: 295266 - protein, 14 aa, Homo sapiens
  CDR3 for beta chain variable domain of TCR clone 147633 (TRBV7-2, TRBJ2-7)
CASSPKASLYEQYF

SEQ ID NO: 295267 - protein, 18 aa, Homo sapiens
  CDR3 for alpha chain variable domain of TCR clone 147634 (TRAV26-1, TRAJ5)
CIVRVVPPRDTGRIALTF

SEQ ID NO: 295268 - protein, 15 aa, Homo sapiens
  CDR3 for beta chain variable domain of TCR clone 147634 (TRBV7-9, TRBJ2-7)
CASSLPMGQANEQYF

SEQ ID NO: 295269 - protein, 13 aa, Homo sapiens
  CDR3 for alpha chain variable domain of TCR clone 147635 (TRAV26-1, TRAJ48)
CIVRVVGDEKLTF

SEQ ID NO: 295270 - protein, 14 aa, Homo sapiens
  CDR3 for beta chain variable domain of TCR clone 147635 (TRBV18, TRBJ2-3)
CASSLGGGSDTQYF

SEQ ID NO: 295271 - protein, 13 aa, Homo sapiens
  CDR3 for alpha chain variable domain of TCR clone 147636 (TRAV12-2, TRAJ43)
CAVSGDNNNDMRF

SEQ ID NO: 295272 - protein, 14 aa, Homo sapiens
  CDR3 for beta chain variable domain of TCR clone 147636 (TRBV19, TRBJ2-2)
CASSIAGAFGELFF

SEQ ID NO: 295273 - protein, 13 aa, Homo sapiens
  CDR3 for alpha chain variable domain of TCR clone 147637 (TRAV20, TRAJ20)
CAVRWVRDYKLSF

SEQ ID NO: 295274 - protein, 14 aa, Homo sapiens
  CDR3 for beta chain variable domain of TCR clone 147637 (TRBV19, TRBJ2-2)
CASTVMANTGELFF

SEQ ID NO: 295275 - protein, 13 aa, Homo sapiens
  CDR3 for alpha chain variable domain of TCR clone 147638 (TRAV30, TRAJ6)
CGFIEGGSYIPKF

SEQ ID NO: 295276 - protein, 13 aa, Homo sapiens
  CDR3 for beta chain variable domain of TCR clone 147638 (TRBV5-4, TRBJ2-5)
CASSPVSQETQYF

SEQ ID NO: 295277 - protein, 16 aa, Homo sapiens
  CDR3 for alpha chain variable domain of TCR clone 147639 (TRAV26-1, TRAJ32)
CIVRTNYGGATNKLIF

SEQ ID NO: 295278 - protein, 11 aa, Homo sapiens
  CDR3 for beta chain variable domain of TCR clone 147639 (TRBV11-2, TRBJ2-2)
CASSLPGELFF

SEQ ID NO: 295279 - protein, 12 aa, Homo sapiens
  CDR3 for alpha chain variable domain of TCR clone 147640 (TRAV26-1, TRAJ43)
CIVRPRGDDSRF

SEQ ID NO: 295280 - protein, 16 aa, Homo sapiens
  CDR3 for beta chain variable domain of TCR clone 147640 (TRBV3-1, TRBJ2-1)
CASSQGGRRSFDEQFF

SEQ ID NO: 295281 - protein, 14 aa, Homo sapiens
  CDR3 for alpha chain variable domain of TCR clone 147641 (TRAV10, TRAJ48)
CVGVFHFGNENLTF

SEQ ID NO: 295282 - protein, 13 aa, Homo sapiens
  CDR3 for beta chain variable domain of TCR clone 147641 (TRBV4-1, TRBJ2-7)
CASSQGQAYEQYF

SEQ ID NO: 295283 - protein, 15 aa, Homo sapiens
  CDR3 for alpha chain variable domain of TCR clone 147642 (TRAV13-2, TRAJ10)
CAENRATGGGNKFTF

SEQ ID NO: 295284 - protein, 20 aa, Homo sapiens
  CDR3 for beta chain variable domain of TCR clone 147642 (TRBV28, TRBJ2-1)
CASTPIGRSPGLAGGNEQFF

SEQ ID NO: 295285 - protein, 15 aa, Homo sapiens
  CDR3 for alpha chain variable domain of TCR clone 147643 (TRAV21, TRAJ38)
CAVRQDAGNNRKLIW

SEQ ID NO: 295286 - protein, 16 aa, Homo sapiens
  CDR3 for beta chain variable domain of TCR clone 147643 (TRBV4-2, TRBJ1-1)
CTSRPLDGGGDTEAFF

SEQ ID NO: 295287 - protein, 19 aa, Homo sapiens
  CDR3 for alpha chain variable domain of TCR clone 147644 (TRAV4, TRAJ3)
PRVSLSDTAVSLSASKIIF

SEQ ID NO: 295288 - protein, 11 aa, Homo sapiens
  CDR3 for beta chain variable domain of TCR clone 147644 (TRBV27, TRBJ2-3)
CASSLGDTQYF

SEQ ID NO: 295289 - protein, 18 aa, Homo sapiens
  CDR3 for alpha chain variable domain of TCR clone 147645 (TRAV13-1, TRAJ52)
CAAKNPNAGGTSYGTLTF

SEQ ID NO: 295290 - protein, 15 aa, Homo sapiens
  CDR3 for beta chain variable domain of TCR clone 147645 (TRBV28, TRBJ2-3)
CASSPDRQGANAQYF

SEQ ID NO: 295291 - protein, 15 aa, Homo sapiens
  CDR3 for alpha chain variable domain of TCR clone 147646 (TRAV2, TRAJ24)
CAVVRLKNSWGKLQF

SEQ ID NO: 295292 - protein, 13 aa, Homo sapiens
  CDR3 for beta chain variable domain of TCR clone 147646 (TRBV29-1, TRBJ2-1)
CSVEGGRVNEQFF

SEQ ID NO: 295293 - protein, 15 aa, Homo sapiens
  CDR3 for alpha chain variable domain of TCR clone 147647 (TRAV27, TRAJ38)
CAARRNAGNNRKRSW

SEQ ID NO: 295294 - protein, 11 aa, Homo sapiens
  CDR3 for beta chain variable domain of TCR clone 147647 (TRBV12-4, TRBJ2-2)
CASSSAGELFF

SEQ ID NO: 295295 - protein, 12 aa, Homo sapiens
  CDR3 for alpha chain variable domain of TCR clone 147648 (TRAV13-1, TRAJ21)
CAAKEGFNKFYF

SEQ ID NO: 295296 - protein, 16 aa, Homo sapiens
  CDR3 for beta chain variable domain of TCR clone 147648 (TRBV5-4, TRBJ1-1)
CASGLDSRGMKLSLDK

SEQ ID NO: 295297 - protein, 23 aa, Homo sapiens
  CDR3 for alpha chain variable domain of TCR clone 147649 (TRAV26-1, )
CIADNAGNDHIQNPDPAVYQLRD

SEQ ID NO: 295298 - protein, 12 aa, Homo sapiens
  CDR3 for beta chain variable domain of TCR clone 147649 (TRBV11-2, TRBJ2-2)
CASSLGGGELFF

SEQ ID NO: 295299 - protein, 12 aa, Homo sapiens
  CDR3 for alpha chain variable domain of TCR clone 147650 (TRAV3, TRAJ27)
CAVRDKAGKSTF

SEQ ID NO: 295300 - protein, 14 aa, Homo sapiens
  CDR3 for beta chain variable domain of TCR clone 147650 (TRBV5-1, TRBJ2-7)
CASSSGTGGYEQYF

SEQ ID NO: 295301 - protein, 14 aa, Homo sapiens
  CDR3 for alpha chain variable domain of TCR clone 147651 (TRAV23/DV6, TRAJ13)
CAAMYSGGYQRVTF

SEQ ID NO: 295302 - protein, 17 aa, Homo sapiens
  CDR3 for beta chain variable domain of TCR clone 147651 (TRBV13, TRBJ2-3)
CASSLSRVAGGRNTQYF

SEQ ID NO: 295303 - protein, 16 aa, Homo sapiens
  CDR3 for alpha chain variable domain of TCR clone 147652 (TRAV3, TRAJ5)
CAVRNLMDTGRRALTF

SEQ ID NO: 295304 - protein, 15 aa, Homo sapiens
  CDR3 for beta chain variable domain of TCR clone 147652 (TRBV19, TRBJ2-7)
CASSPAGSGEALRYF

SEQ ID NO: 295305 - protein, 12 aa, Homo sapiens
  CDR3 for alpha chain variable domain of TCR clone 147653 (TRAV8-3, TRAJ41)
CAVALSGYALNF

SEQ ID NO: 295306 - protein, 14 aa, Homo sapiens
  CDR3 for beta chain variable domain of TCR clone 147653 (TRBV7-3, TRBJ2-1)
CASSLAGGTNEQFF

SEQ ID NO: 295307 - protein, 14 aa, Homo sapiens
  CDR3 for alpha chain variable domain of TCR clone 147654 (TRAV2, TRAJ22)
CAVGRGGSARQLTF

SEQ ID NO: 295308 - protein, 12 aa, Homo sapiens
  CDR3 for beta chain variable domain of TCR clone 147654 (TRBV19, TRBJ2-1)
CASSIQDTEQFF

SEQ ID NO: 295309 - protein, 13 aa, Homo sapiens
  CDR3 for alpha chain variable domain of TCR clone 147655 (TRAV29/DV5, TRAJ43)
CAASGGNNNDMRF

SEQ ID NO: 295310 - protein, 14 aa, Homo sapiens
  CDR3 for beta chain variable domain of TCR clone 147655 (TRBV28, TRBJ1-2)
CASRIQGANYGYTF

SEQ ID NO: 295311 - protein, 11 aa, Homo sapiens
  CDR3 for alpha chain variable domain of TCR clone 147656 (TRAV12-3, TRAJ11)
CNATGYSTLTF

SEQ ID NO: 295312 - protein, 18 aa, Homo sapiens
  CDR3 for beta chain variable domain of TCR clone 147656 (TRBV7-2, TRBJ2-3)
CASSLKSEGSGITDTQYF

SEQ ID NO: 295313 - protein, 14 aa, Homo sapiens
  CDR3 for alpha chain variable domain of TCR clone 147657 (TRAV16, TRAJ54)
CALSLIQGAQKLVF

SEQ ID NO: 295314 - protein, 13 aa, Homo sapiens
  CDR3 for beta chain variable domain of TCR clone 147657 (TRBV5-7, TRBJ2-6)
CASTSSGANVLTF

SEQ ID NO: 295315 - protein, 12 aa, Homo sapiens
  CDR3 for alpha chain variable domain of TCR clone 147658 (TRAV12-3, TRAJ17)
CAMTLTGNKPTF

SEQ ID NO: 295316 - protein, 16 aa, Homo sapiens
  CDR3 for beta chain variable domain of TCR clone 147658 (TRBV28, TRBJ1-5)
CASSLTGQGWNQPQHF

SEQ ID NO: 295317 - protein, 13 aa, Homo sapiens
  CDR3 for alpha chain variable domain of TCR clone 147659 (TRAV13-2, TRAJ13)
CSVRPGGYQKVTF

SEQ ID NO: 295318 - protein, 15 aa, Homo sapiens
  CDR3 for beta chain variable domain of TCR clone 147659 (TRBV11-3, TRBJ2-7)
CASSPGPASSYEQYF

SEQ ID NO: 295319 - protein, 14 aa, Homo sapiens
  CDR3 for alpha chain variable domain of TCR clone 147660 (TRAV17, TRAJ17)
CATVVRGAGNKLTF

SEQ ID NO: 295320 - protein, 14 aa, Homo sapiens
  CDR3 for beta chain variable domain of TCR clone 147660 (TRBV7-2, TRBJ2-7)
CASRSQGAAYEQYF

SEQ ID NO: 295321 - protein, 13 aa, Homo sapiens
  CDR3 for alpha chain variable domain of TCR clone 147661 (TRAV3, TRAJ41)
CAVSSNSGYTLNF

SEQ ID NO: 295322 - protein, 15 aa, Homo sapiens
  CDR3 for beta chain variable domain of TCR clone 147661 (TRBV27, TRBJ2-7)
CASSPIVTGAYEQYF

SEQ ID NO: 295323 - protein, 14 aa, Homo sapiens
  CDR3 for alpha chain variable domain of TCR clone 147662 (TRAV12-2, TRAJ17)
CAVLFKASGNKLTF

SEQ ID NO: 295324 - protein, 15 aa, Homo sapiens
  CDR3 for beta chain variable domain of TCR clone 147662 (TRBV7-3, TRBJ2-1)
CASSLDGNAYNEQFF

SEQ ID NO: 295325 - protein, 15 aa, Homo sapiens
  CDR3 for alpha chain variable domain of TCR clone 147663 (TRAV26-2, TRAJ45)
CILRDRVDQEEVLTD

SEQ ID NO: 295326 - protein, 15 aa, Homo sapiens
  CDR3 for beta chain variable domain of TCR clone 147663 (TRBV7-6, TRBJ2-5)
CASSKPTGPQETHYF

SEQ ID NO: 295327 - protein, 15 aa, Homo sapiens
  CDR3 for alpha chain variable domain of TCR clone 147664 (TRAV8-3, TRAJ48)
CAVGAQLRGNEKLTF

SEQ ID NO: 295328 - protein, 15 aa, Homo sapiens
  CDR3 for beta chain variable domain of TCR clone 147664 (TRBV5-1, TRBJ2-1)
CASSPPRAPYNEQFF

SEQ ID NO: 295329 - protein, 14 aa, Homo sapiens
  CDR3 for alpha chain variable domain of TCR clone 147665 (TRAV1-2, TRAJ16)
CAVNRFSDGQKLLF

SEQ ID NO: 295330 - protein, 15 aa, Homo sapiens
  CDR3 for beta chain variable domain of TCR clone 147665 (TRBV7-8, TRBJ2-1)
CASSPSGTIYNEQFF

SEQ ID NO: 295331 - protein, 13 aa, Homo sapiens
  CDR3 for alpha chain variable domain of TCR clone 147666 (TRAV2, TRAJ29)
CAAQNSGNTPLVF

SEQ ID NO: 295332 - protein, 14 aa, Homo sapiens
  CDR3 for beta chain variable domain of TCR clone 147666 (TRBV19, TRBJ2-1)
CASPTFVLSGEQFF

SEQ ID NO: 295333 - protein, 13 aa, Homo sapiens
  CDR3 for alpha chain variable domain of TCR clone 147667 (TRAV1-2, TRAJ9)
CAALNTGGFKTIF

SEQ ID NO: 295334 - protein, 14 aa, Homo sapiens
  CDR3 for beta chain variable domain of TCR clone 147667 (TRBV7-2, TRBJ2-7)
CASSLDPGGGEQYF

SEQ ID NO: 295335 - protein, 12 aa, Homo sapiens
  CDR3 for alpha chain variable domain of TCR clone 147668 (TRAV21, TRAJ11)
CAATSGYSTLTF

SEQ ID NO: 295336 - protein, 16 aa, Homo sapiens
  CDR3 for beta chain variable domain of TCR clone 147668 (TRBV20-1, TRBJ2-7)
CSAQSWRESASSNSGR

SEQ ID NO: 295337 - protein, 13 aa, Homo sapiens
  CDR3 for alpha chain variable domain of TCR clone 147669 (TRAV21, TRAJ8)
CAETNTGFQKLVF

SEQ ID NO: 295338 - protein, 16 aa, Homo sapiens
  CDR3 for beta chain variable domain of TCR clone 147669 (TRBV7-3, TRBJ2-2)
CASSLKRGTLSGELFF

SEQ ID NO: 295339 - protein, 14 aa, Homo sapiens
  CDR3 for alpha chain variable domain of TCR clone 147670 (TRAV1-2, TRAJ8)
CAVREDTGFPKLVF

SEQ ID NO: 295340 - protein, 16 aa, Homo sapiens
  CDR3 for beta chain variable domain of TCR clone 147670 (TRBV4-2, TRBJ2-5)
CASSQELVGSQETQYF

SEQ ID NO: 295341 - protein, 14 aa, Homo sapiens
  CDR3 for alpha chain variable domain of TCR clone 147671 (TRAV29/DV5, TRAJ36)
CAARRKTGVNNLFF

SEQ ID NO: 295342 - protein, 12 aa, Homo sapiens
  CDR3 for beta chain variable domain of TCR clone 147671 (TRBV11-2, TRBJ2-1)
CASSPGNNEQFF

SEQ ID NO: 295343 - protein, 15 aa, Homo sapiens
  CDR3 for alpha chain variable domain of TCR clone 147672 (TRAV20, TRAJ4)
CAVQVFSGGYNKLIF

SEQ ID NO: 295344 - protein, 12 aa, Homo sapiens
  CDR3 for beta chain variable domain of TCR clone 147672 (TRBV12-5, TRBJ2-5)
CASGQGVETQYF

SEQ ID NO: 295345 - protein, 15 aa, Homo sapiens
  CDR3 for alpha chain variable domain of TCR clone 147673 (TRAV8-3, TRAJ45)
CASSYSGGGADGLTF

SEQ ID NO: 295346 - protein, 16 aa, Homo sapiens
  CDR3 for beta chain variable domain of TCR clone 147673 (TRBV7-9, TRBJ2-3)
CASSPWREVGTDTQYF

SEQ ID NO: 295347 - protein, 13 aa, Homo sapiens
  CDR3 for alpha chain variable domain of TCR clone 147674 (TRAV21, TRAJ57)
CAVIEGGSEKLVF

SEQ ID NO: 295348 - protein, 14 aa, Homo sapiens
  CDR3 for beta chain variable domain of TCR clone 147674 (TRBV7-3, TRBJ2-1)
CASSLAGGTNEQFF

SEQ ID NO: 295349 - protein, 15 aa, Homo sapiens
  CDR3 for alpha chain variable domain of TCR clone 147675 (TRAV8-3, TRAJ40)
CAAPSLGSGTYKYIF

SEQ ID NO: 295350 - protein, 15 aa, Homo sapiens
  CDR3 for beta chain variable domain of TCR clone 147675 (TRBV7-3, TRBJ2-3)
CRSLSGYRPEDTQYF

SEQ ID NO: 295351 - protein, 12 aa, Homo sapiens
  CDR3 for alpha chain variable domain of TCR clone 147676 (TRAV27, TRAJ41)
CAGRNSGYALNF

SEQ ID NO: 295352 - protein, 13 aa, Homo sapiens
  CDR3 for beta chain variable domain of TCR clone 147676 (TRBV5-5, TRBJ1-2)
CASSFWRGEDYTF

SEQ ID NO: 295353 - protein, 13 aa, Homo sapiens
  CDR3 for alpha chain variable domain of TCR clone 147677 (TRAV3, TRAJ29)
CSVRDRIDTPLVF

SEQ ID NO: 295354 - protein, 14 aa, Homo sapiens
  CDR3 for beta chain variable domain of TCR clone 147677 (TRBV27, TRBJ2-1)
CASSATGGYNEQFF

SEQ ID NO: 295355 - protein, 17 aa, Homo sapiens
  CDR3 for alpha chain variable domain of TCR clone 147678 (TRAV3, TRAJ6)
CVVRDGPRAGGSSIPTF

SEQ ID NO: 295356 - protein, 14 aa, Homo sapiens
  CDR3 for beta chain variable domain of TCR clone 147678 (TRBV7-2, TRBJ2-7)
CASSPKTSFYEQYF

SEQ ID NO: 295357 - protein, 16 aa, Homo sapiens
  CDR3 for alpha chain variable domain of TCR clone 147679 (TRAV12-3, TRAJ9)
CAASIGGNTGGFKTIF

SEQ ID NO: 295358 - protein, 12 aa, Homo sapiens
  CDR3 for beta chain variable domain of TCR clone 147679 (TRBV6-3, TRBJ2-7)
CASSEPAFEQYF

SEQ ID NO: 295359 - protein, 13 aa, Homo sapiens
  CDR3 for alpha chain variable domain of TCR clone 147680 (TRAV30, TRAJ24)
CGTVTDSWGKLQF

SEQ ID NO: 295360 - protein, 15 aa, Homo sapiens
  CDR3 for beta chain variable domain of TCR clone 147680 (TRBV5-1, TRBJ2-3)
CASSVTSGSTDTQYF

SEQ ID NO: 295361 - protein, 14 aa, Homo sapiens
  CDR3 for alpha chain variable domain of TCR clone 147681 (TRAV12-2, TRAJ40)
CAVKIPSGTYKYIF

SEQ ID NO: 295362 - protein, 15 aa, Homo sapiens
  CDR3 for beta chain variable domain of TCR clone 147681 (TRBV10-3, TRBJ2-1)
CATNGGPGQGDEQFF

SEQ ID NO: 295363 - protein, 15 aa, Homo sapiens
  CDR3 for alpha chain variable domain of TCR clone 147682 (TRAV17, TRAJ52)
CATEAGGTSYGKLIF

SEQ ID NO: 295364 - protein, 16 aa, Homo sapiens
  CDR3 for beta chain variable domain of TCR clone 147682 (TRBV20-1, TRBJ2-1)
CSAGRPAGGPYNEQFF

SEQ ID NO: 295365 - protein, 12 aa, Homo sapiens
  CDR3 for alpha chain variable domain of TCR clone 147683 (TRAV21, TRAJ39)
CAADNAGNMLTL

SEQ ID NO: 295366 - protein, 15 aa, Homo sapiens
  CDR3 for beta chain variable domain of TCR clone 147683 (TRBV27, TRBJ2-1)
CASSNGGGSSNEQFF

SEQ ID NO: 295367 - protein, 16 aa, Homo sapiens
  CDR3 for alpha chain variable domain of TCR clone 147684 (TRAV27, TRAJ56)
CAGVSRKDGANSKLTF

SEQ ID NO: 295368 - protein, 14 aa, Homo sapiens
  CDR3 for beta chain variable domain of TCR clone 147684 (TRBV4-1, TRBJ2-5)
RQQPISGGQETQYF

SEQ ID NO: 295369 - protein, 11 aa, Homo sapiens
  CDR3 for alpha chain variable domain of TCR clone 147685 (TRAV12-3, TRAJ43)
CAMSVSNDMRF

SEQ ID NO: 295370 - protein, 15 aa, Homo sapiens
  CDR3 for beta chain variable domain of TCR clone 147685 (TRBV7-2, TRBJ2-1)
CASSLVGSSYNEQFF

SEQ ID NO: 295371 - protein, 12 aa, Homo sapiens
  CDR3 for alpha chain variable domain of TCR clone 147686 (TRAV2, TRAJ10)
CASTGGGNKLTF

SEQ ID NO: 295372 - protein, 17 aa, Homo sapiens
  CDR3 for beta chain variable domain of TCR clone 147686 (TRBV28, TRBJ2-5)
CASSRQGGLAGAETQYF

SEQ ID NO: 295373 - protein, 17 aa, Homo sapiens
  CDR3 for alpha chain variable domain of TCR clone 147687 (TRAV36/DV7, TRAJ52)
CAVAQRAGGTSSGKLTF

SEQ ID NO: 295374 - protein, 13 aa, Homo sapiens
  CDR3 for beta chain variable domain of TCR clone 147687 (TRBV7-3, TRBJ1-1)
CASSQDWGAEAFF

SEQ ID NO: 295375 - protein, 14 aa, Homo sapiens
  CDR3 for alpha chain variable domain of TCR clone 147688 (TRAV8-4, TRAJ9)
CDVRINTGGFKTIF

SEQ ID NO: 295376 - protein, 15 aa, Homo sapiens
  CDR3 for beta chain variable domain of TCR clone 147688 (TRBV10-2, TRBJ2-6)
CASSEQGTGANDLTF

SEQ ID NO: 295377 - protein, 15 aa, Homo sapiens
  CDR3 for alpha chain variable domain of TCR clone 147689 (TRAV8-4, TRAJ6)
CAVSAPSGGSYIPTF

SEQ ID NO: 295378 - protein, 12 aa, Homo sapiens
  CDR3 for beta chain variable domain of TCR clone 147689 (TRBV5-1, TRBJ2-7)
CASSLDSYEQYF

SEQ ID NO: 295379 - protein, 17 aa, Homo sapiens
  CDR3 for alpha chain variable domain of TCR clone 147690 (TRAV3, TRAJ6)
CAVTDGPGAGGSYIPTF

SEQ ID NO: 295380 - protein, 14 aa, Homo sapiens
  CDR3 for beta chain variable domain of TCR clone 147690 (TRBV7-2, TRBJ2-7)
CASSPKTSFYEQYF

SEQ ID NO: 295381 - protein, 16 aa, Homo sapiens
  CDR3 for alpha chain variable domain of TCR clone 147691 (TRAV1-2, TRAJ6)
CAVRDQGTGGSYRPTF

SEQ ID NO: 295382 - protein, 13 aa, Homo sapiens
  CDR3 for beta chain variable domain of TCR clone 147691 (TRBV28, TRBJ2-7)
CASTPGLAGEQYF

SEQ ID NO: 295383 - protein, 13 aa, Homo sapiens
  CDR3 for alpha chain variable domain of TCR clone 147692 (TRAV1-2, TRAJ9)
CAALDTGGFKTIF

SEQ ID NO: 295384 - protein, 17 aa, Homo sapiens
  CDR3 for beta chain variable domain of TCR clone 147692 (TRBV11-2, TRBJ2-1)
CASSLYPPGVEYNEQFF

SEQ ID NO: 295385 - protein, 13 aa, Homo sapiens
  CDR3 for alpha chain variable domain of TCR clone 147693 (TRAV20, TRAJ20)
CAVRDFNDYKLSF

SEQ ID NO: 295386 - protein, 13 aa, Homo sapiens
  CDR3 for beta chain variable domain of TCR clone 147693 (TRBV10-2, TRBJ2-6)
CASKSAGANVLTF

SEQ ID NO: 295387 - protein, 14 aa, Homo sapiens
  CDR3 for alpha chain variable domain of TCR clone 147694 (TRAV10, TRAJ32)
CGEPRGGATNKHIF

SEQ ID NO: 295388 - protein, 14 aa, Homo sapiens
  CDR3 for beta chain variable domain of TCR clone 147694 (TRBV5-4, TRBJ2-2)
CASRLDGGTGELFF

SEQ ID NO: 295389 - protein, 11 aa, Homo sapiens
  CDR3 for alpha chain variable domain of TCR clone 147695 (TRAV1-2, TRAJ40)
CAVPGTYKYIF

SEQ ID NO: 295390 - protein, 16 aa, Homo sapiens
  CDR3 for beta chain variable domain of TCR clone 147695 (TRBV29-1, TRBJ2-7)
WSVEVVGTSGSYEQYF

SEQ ID NO: 295391 - protein, 10 aa, Homo sapiens
  CDR3 for alpha chain variable domain of TCR clone 147696 (TRAV21, TRAJ31)
CAVDNARLMF

SEQ ID NO: 295392 - protein, 12 aa, Homo sapiens
  CDR3 for beta chain variable domain of TCR clone 147696 (TRBV12-4, TRBJ1-3)
CASRASGNTIYF

SEQ ID NO: 295393 - protein, 19 aa, Homo sapiens
  CDR3 for alpha chain variable domain of TCR clone 147697 (TRAV26-1, TRAJ28)
CIVRVAHAYSGAGSYQLTF

SEQ ID NO: 295394 - protein, 17 aa, Homo sapiens
  CDR3 for beta chain variable domain of TCR clone 147697 (TRBV9, TRBJ2-2)
CASSVGGQGTDTWELFF

SEQ ID NO: 295395 - protein, 18 aa, Homo sapiens
  CDR3 for alpha chain variable domain of TCR clone 147698 (TRAV9-2, TRAJ52)
CALRRHNAGGTSYGKLTF

SEQ ID NO: 295396 - protein, 13 aa, Homo sapiens
  CDR3 for beta chain variable domain of TCR clone 147698 (TRBV7-9, TRBJ1-2)
CASSLKQSYGYTF

SEQ ID NO: 295397 - protein, 14 aa, Homo sapiens
  CDR3 for alpha chain variable domain of TCR clone 147699 (TRAV8-2, TRAJ15)
CVVSDQQAGTALIF

SEQ ID NO: 295398 - protein, 16 aa, Homo sapiens
  CDR3 for beta chain variable domain of TCR clone 147699 (TRBV10-3, TRBJ2-1)
CAIRGGGRGDYNEQFF

SEQ ID NO: 295399 - protein, 14 aa, Homo sapiens
  CDR3 for alpha chain variable domain of TCR clone 147700 (TRAV1-2, TRAJ29)
CAVRELTSSTPLVF

SEQ ID NO: 295400 - protein, 14 aa, Homo sapiens
  CDR3 for beta chain variable domain of TCR clone 147700 (TRBV3-1, TRBJ2-5)
CASSQGPDQETQYF

SEQ ID NO: 295401 - protein, 14 aa, Homo sapiens
  CDR3 for alpha chain variable domain of TCR clone 147701 (TRAV12-3, TRAJ10)
SHLPLTGGGNNLTF

SEQ ID NO: 295402 - protein, 15 aa, Homo sapiens
  CDR3 for beta chain variable domain of TCR clone 147701 (TRBV7-9, TRBJ1-4)
CASSRTGGFNEKLFF

SEQ ID NO: 295403 - protein, 12 aa, Homo sapiens
  CDR3 for alpha chain variable domain of TCR clone 147702 (TRAV4, TRAJ26)
CLVGDYGQNFVF

SEQ ID NO: 295404 - protein, 16 aa, Homo sapiens
  CDR3 for beta chain variable domain of TCR clone 147702 (TRBV7-2, TRBJ1-2)
CDSSSNQDRRGHGYTF

SEQ ID NO: 295405 - protein, 13 aa, Homo sapiens
  CDR3 for alpha chain variable domain of TCR clone 147703 (TRAV3, TRAJ21)
CAVREPDFNKFYF

SEQ ID NO: 295406 - protein, 17 aa, Homo sapiens
  CDR3 for beta chain variable domain of TCR clone 147703 (TRBV15, TRBJ1-4)
CATSRYGTGDPNEKLFF

SEQ ID NO: 295407 - protein, 16 aa, Homo sapiens
  CDR3 for alpha chain variable domain of TCR clone 147704 (TRAV38-1, TRAJ56)
CAFMKRQTGANSKLTF

SEQ ID NO: 295408 - protein, 15 aa, Homo sapiens
  CDR3 for beta chain variable domain of TCR clone 147704 (TRBV27, TRBJ2-1)
CASSNGGGSSNEQFF

SEQ ID NO: 295409 - protein, 14 aa, Homo sapiens
  CDR3 for alpha chain variable domain of TCR clone 147705 (TRAV17, TRAJ54)
CATDANQGAQKLVF

SEQ ID NO: 295410 - protein, 14 aa, Homo sapiens
  CDR3 for beta chain variable domain of TCR clone 147705 (TRBV25-1, TRBJ1-1)
CASTHLGGNTEACF

SEQ ID NO: 295411 - protein, 13 aa, Homo sapiens
  CDR3 for alpha chain variable domain of TCR clone 147706 (TRAV12-1, TRAJ34)
CVVTGYNTDKLTF

SEQ ID NO: 295412 - protein, 13 aa, Homo sapiens
  CDR3 for beta chain variable domain of TCR clone 147706 (TRBV28, TRBJ2-7)
CASKAGGVYEQFF

SEQ ID NO: 295413 - protein, 11 aa, Homo sapiens
  CDR3 for alpha chain variable domain of TCR clone 147707 (TRAV12-2, TRAJ39)
CAVNNMLTFGG

SEQ ID NO: 295414 - protein, 12 aa, Homo sapiens
  CDR3 for beta chain variable domain of TCR clone 147707 (TRBV7-9, TRBJ1-1)
CASSPSSTEAFF

SEQ ID NO: 295415 - protein, 12 aa, Homo sapiens
  CDR3 for alpha chain variable domain of TCR clone 147708 (TRAV1-1, TRAJ8)
CAGGTGFQKLVF

SEQ ID NO: 295416 - protein, 13 aa, Homo sapiens
  CDR3 for beta chain variable domain of TCR clone 147708 (TRBV7-3, TRBJ1-1)
CASSHDWGAEAFF

SEQ ID NO: 295417 - protein, 14 aa, Homo sapiens
  CDR3 for alpha chain variable domain of TCR clone 147709 (TRAV12-1, TRAJ34)
CVVKLDYNTDKLIF

SEQ ID NO: 295418 - protein, 13 aa, Homo sapiens
  CDR3 for beta chain variable domain of TCR clone 147709 (TRBV20-1, TRBJ2-5)
CSARGDYQETQYF

SEQ ID NO: 295419 - protein, 10 aa, Homo sapiens
  CDR3 for alpha chain variable domain of TCR clone 147710 (TRAV30, TRAJ34)
CGTNPDKLIF

SEQ ID NO: 295420 - protein, 14 aa, Homo sapiens
  CDR3 for beta chain variable domain of TCR clone 147710 (TRBV7-3, TRBJ2-3)
CASSPSARTDTQYF

SEQ ID NO: 295421 - protein, 15 aa, Homo sapiens
  CDR3 for alpha chain variable domain of TCR clone 147711 (TRAV13-1, TRAJ42)
CAASIAGGSQGNLIF

SEQ ID NO: 295422 - protein, 15 aa, Homo sapiens
  CDR3 for beta chain variable domain of TCR clone 147711 (TRBV19, TRBJ2-1)
CASSIVRGEGSEQFF

SEQ ID NO: 295423 - protein, 13 aa, Homo sapiens
  CDR3 for alpha chain variable domain of TCR clone 147712 (TRAV21, TRAJ3)
CCEPYSSASKIIF

SEQ ID NO: 295424 - protein, 15 aa, Homo sapiens
  CDR3 for beta chain variable domain of TCR clone 147712 (TRBV7-3, TRBJ2-1)
CASSPTGGGEVEHSS

SEQ ID NO: 295425 - protein, 14 aa, Homo sapiens
  CDR3 for alpha chain variable domain of TCR clone 147713 (TRAV26-1, TRAJ40)
CIVRLLSGTYKYIF

SEQ ID NO: 295426 - protein, 15 aa, Homo sapiens
  CDR3 for beta chain variable domain of TCR clone 147713 (TRBV7-9, TRBJ2-7)
CASSLALAEAYEQYF

SEQ ID NO: 295427 - protein, 14 aa, Homo sapiens
  CDR3 for alpha chain variable domain of TCR clone 147714 (TRAV8-3, TRAJ4)
CSVGAAGGYNKLLF

SEQ ID NO: 295428 - protein, 15 aa, Homo sapiens
  CDR3 for beta chain variable domain of TCR clone 147714 (TRBV6-5, TRBJ2-1)
CASSYDAGAGNEQFF

SEQ ID NO: 295429 - protein, 17 aa, Homo sapiens
  CDR3 for alpha chain variable domain of TCR clone 147715 (TRAV13-1, TRAJ52)
CAASSGAGGTSNGKLTF

SEQ ID NO: 295430 - protein, 15 aa, Homo sapiens
  CDR3 for beta chain variable domain of TCR clone 147715 (TRBV2, TRBJ2-1)
CARSELAGSYNEQFF

SEQ ID NO: 295431 - protein, 13 aa, Homo sapiens
  CDR3 for alpha chain variable domain of TCR clone 147716 (TRAV13-1, TRAJ39)
CSKYSNAGNMPTF

SEQ ID NO: 295432 - protein, 18 aa, Homo sapiens
  CDR3 for beta chain variable domain of TCR clone 147716 (TRBV10-2, TRBJ2-2)
CISAPAVHRQADAGELFF

SEQ ID NO: 295433 - protein, 13 aa, Homo sapiens
  CDR3 for alpha chain variable domain of TCR clone 147717 (TRAV21, TRAJ27)
CAARPGNAGKSTF

SEQ ID NO: 295434 - protein, 15 aa, Homo sapiens
  CDR3 for beta chain variable domain of TCR clone 147717 (TRBV6-5, TRBJ2-7)
CASSRTSGFSYEQYF

SEQ ID NO: 295435 - protein, 16 aa, Homo sapiens
  CDR3 for alpha chain variable domain of TCR clone 147718 (TRAV13-1, TRAJ38)
CAASTSNAGNNRKLIG

SEQ ID NO: 295436 - protein, 16 aa, Homo sapiens
  CDR3 for beta chain variable domain of TCR clone 147718 (TRBV12-4, TRBJ1-5)
CASSSGPRGSNQPQHF

SEQ ID NO: 295437 - protein, 13 aa, Homo sapiens
  CDR3 for alpha chain variable domain of TCR clone 147719 (TRAV3, TRAJ20)
CAVRDTPRYKLSF

SEQ ID NO: 295438 - protein, 16 aa, Homo sapiens
  CDR3 for beta chain variable domain of TCR clone 147719 (TRBV20-1, TRBJ2-7)
CSARAPGLALSYEQSF

SEQ ID NO: 295439 - protein, 17 aa, Homo sapiens
  CDR3 for alpha chain variable domain of TCR clone 147720 (TRAV13-1, TRAJ5)
CSNPSLSRDTGRRALTF

SEQ ID NO: 295440 - protein, 17 aa, Homo sapiens
  CDR3 for beta chain variable domain of TCR clone 147720 (TRBV24-1, TRBJ2-1)
CATSDVSTSGTYKEQFF

SEQ ID NO: 295441 - protein, 14 aa, Homo sapiens
  CDR3 for alpha chain variable domain of TCR clone 147721 (TRAV1-2, TRAJ16)
CAVNQFSDGQKLLF

SEQ ID NO: 295442 - protein, 14 aa, Homo sapiens
  CDR3 for beta chain variable domain of TCR clone 147721 (TRBV7-3, TRBJ1-1)
CASSLGTGYTEAFC

SEQ ID NO: 295443 - protein, 11 aa, Homo sapiens
  CDR3 for alpha chain variable domain of TCR clone 147722 (TRAV12-3, TRAJ27)
CAMANEGKSTF

SEQ ID NO: 295444 - protein, 13 aa, Homo sapiens
  CDR3 for beta chain variable domain of TCR clone 147722 (TRBV3-1, TRBJ1-1)
CASSPGVITEAFF

SEQ ID NO: 295445 - protein, 14 aa, Homo sapiens
  CDR3 for alpha chain variable domain of TCR clone 147723 (TRAV21, TRAJ35)
CAVMPIGFGNVLHC

SEQ ID NO: 295446 - protein, 15 aa, Homo sapiens
  CDR3 for beta chain variable domain of TCR clone 147723 (TRBV9, TRBJ1-6)
CASSVAGTGDSPLHF

SEQ ID NO: 295447 - protein, 11 aa, Homo sapiens
  CDR3 for alpha chain variable domain of TCR clone 147724 (TRAV2, TRAJ13)
CASGGYQKVTF

SEQ ID NO: 295448 - protein, 15 aa, Homo sapiens
  CDR3 for beta chain variable domain of TCR clone 147724 (TRBV5-4, TRBJ2-1)
CASSREGLPYNEQFF

SEQ ID NO: 295449 - protein, 15 aa, Homo sapiens
  CDR3 for alpha chain variable domain of TCR clone 147725 (TRAV17, TRAJ57)
CATGPPKGGSEKLVF

SEQ ID NO: 295450 - protein, 16 aa, Homo sapiens
  CDR3 for beta chain variable domain of TCR clone 147725 (TRBV12-4, TRBJ1-5)
CASSRPVGGSNQPQHF

SEQ ID NO: 295451 - protein, 14 aa, Homo sapiens
  CDR3 for alpha chain variable domain of TCR clone 147726 (TRAV12-2, TRAJ13)
CAVKKTGGYQKVTF

SEQ ID NO: 295452 - protein, 15 aa, Homo sapiens
  CDR3 for beta chain variable domain of TCR clone 147726 (TRBV20-1, TRBJ2-1)
CSARGIGGTYNKQFF

SEQ ID NO: 295453 - protein, 12 aa, Homo sapiens
  CDR3 for alpha chain variable domain of TCR clone 147727 (TRAV12-3, TRAJ17)
CEMTLTGNKLTF

SEQ ID NO: 295454 - protein, 15 aa, Homo sapiens
  CDR3 for beta chain variable domain of TCR clone 147727 (TRBV20-1, TRBJ2-7)
CSARDRVTGMDEQYF

SEQ ID NO: 295455 - protein, 13 aa, Homo sapiens
  CDR3 for alpha chain variable domain of TCR clone 147728 (TRAV12-2, TRAJ13)
CAVTAGGYQKVTF

SEQ ID NO: 295456 - protein, 17 aa, Homo sapiens
  CDR3 for beta chain variable domain of TCR clone 147728 (TRBV11-2, TRBJ2-1)
CASSLYPPGVEYNEQFF

SEQ ID NO: 295457 - protein, 15 aa, Homo sapiens
  CDR3 for alpha chain variable domain of TCR clone 147729 (TRAV3, TRAJ5)
CAVRDLDTGRRALTF

SEQ ID NO: 295458 - protein, 14 aa, Homo sapiens
  CDR3 for beta chain variable domain of TCR clone 147729 (TRBV25-1, TRBJ1-1)
CASTQLGGNTEAFF

SEQ ID NO: 295459 - protein, 15 aa, Homo sapiens
  CDR3 for alpha chain variable domain of TCR clone 147730 (TRAV8-3, TRAJ45)
CALSYSGGRADGLTF

SEQ ID NO: 295460 - protein, 13 aa, Homo sapiens
  CDR3 for beta chain variable domain of TCR clone 147730 (TRBV10-3, TRBJ2-7)
CASKLAVNYEQYF

SEQ ID NO: 295461 - protein, 14 aa, Homo sapiens
  CDR3 for alpha chain variable domain of TCR clone 147731 (TRAV17, TRAJ54)
CATDANHGAQKRVF

SEQ ID NO: 295462 - protein, 12 aa, Homo sapiens
  CDR3 for beta chain variable domain of TCR clone 147731 (TRBV6-3, TRBJ2-1)
CASSGSYNEQFF

SEQ ID NO: 295463 - protein, 19 aa, Homo sapiens
  CDR3 for alpha chain variable domain of TCR clone 147732 (TRAV38-1, TRAJ53)
CAFMKHGLESGGSNYKLTF

SEQ ID NO: 295464 - protein, 13 aa, Homo sapiens
  CDR3 for beta chain variable domain of TCR clone 147732 (TRBV10-3, TRBJ2-7)
CASKLAVNYEQYF

SEQ ID NO: 295465 - protein, 14 aa, Homo sapiens
  CDR3 for alpha chain variable domain of TCR clone 147733 (TRAV12-2, TRAJ53)
CRERGGGSNYKLTF

SEQ ID NO: 295466 - protein, 17 aa, Homo sapiens
  CDR3 for beta chain variable domain of TCR clone 147733 (TRBV7-3, TRBJ2-3)
CASSLRKRMRGADTQYF

SEQ ID NO: 295467 - protein, 14 aa, Homo sapiens
  CDR3 for alpha chain variable domain of TCR clone 147734 (TRAV20, TRAJ29)
CAVQAWVGNTPLVF

SEQ ID NO: 295468 - protein, 14 aa, Homo sapiens
  CDR3 for beta chain variable domain of TCR clone 147734 (TRBV20-1, TRBJ1-1)
CSAQTRIGGTEAFF

SEQ ID NO: 295469 - protein, 18 aa, Homo sapiens
  CDR3 for alpha chain variable domain of TCR clone 147735 (TRAV1-2, TRAJ18)
CAVRDMGDRGATLGRLYF

SEQ ID NO: 295470 - protein, 16 aa, Homo sapiens
  CDR3 for beta chain variable domain of TCR clone 147735 (TRBV29-1, TRBJ1-2)
CSVEANRDIANYGYTF

SEQ ID NO: 295471 - protein, 17 aa, Homo sapiens
  CDR3 for alpha chain variable domain of TCR clone 147736 (TRAV12-3, TRAJ18)
CAMIRADRGSTLGRLYV

SEQ ID NO: 295472 - protein, 14 aa, Homo sapiens
  CDR3 for beta chain variable domain of TCR clone 147736 (TRBV5-7, TRBJ1-6)
CASTPWPADSPLHF

SEQ ID NO: 295473 - protein, 14 aa, Homo sapiens
  CDR3 for alpha chain variable domain of TCR clone 147737 (TRAV13-1, TRAJ44)
CAAKATGTSSKLTF

SEQ ID NO: 295474 - protein, 14 aa, Homo sapiens
  CDR3 for beta chain variable domain of TCR clone 147737 (TRBV19, TRBJ2-2)
CASSTLHRSGELFF

SEQ ID NO: 295475 - protein, 16 aa, Homo sapiens
  CDR3 for alpha chain variable domain of TCR clone 147738 (TRAV14/DV4, TRAJ20)
CAMREGRSRDDYKLSF

SEQ ID NO: 295476 - protein, 13 aa, Homo sapiens
  CDR3 for beta chain variable domain of TCR clone 147738 (TRBV7-8, TRBJ2-7)
CASSLTGGREQYF

SEQ ID NO: 295477 - protein, 13 aa, Homo sapiens
  CDR3 for alpha chain variable domain of TCR clone 147739 (TRAV2, TRAJ29)
CAVYSSGNTPLVF

SEQ ID NO: 295478 - protein, 14 aa, Homo sapiens
  CDR3 for beta chain variable domain of TCR clone 147739 (TRBV7-9, TRBJ1-1)
CASSLGGLKTGAFF

SEQ ID NO: 295479 - protein, 15 aa, Homo sapiens
  CDR3 for alpha chain variable domain of TCR clone 147740 (TRAV3, TRAJ4)
CAVRDGTGGYNKLSF

SEQ ID NO: 295480 - protein, 16 aa, Homo sapiens
  CDR3 for beta chain variable domain of TCR clone 147740 (TRBV27, TRBJ2-2)
CASSSSGVSNTGELLF

SEQ ID NO: 295481 - protein, 16 aa, Homo sapiens
  CDR3 for alpha chain variable domain of TCR clone 147741 (TRAV16, TRAJ4)
CALSRMFSGGDNKLIF

SEQ ID NO: 295482 - protein, 19 aa, Homo sapiens
  CDR3 for beta chain variable domain of TCR clone 147741 (TRBV28, TRBJ2-7)
CASSYSGTSRLGWVYEQYF

SEQ ID NO: 295483 - protein, 12 aa, Homo sapiens
  CDR3 for alpha chain variable domain of TCR clone 147742 (TRAV12-3, TRAJ4)
CAMTGVGTRLAV

SEQ ID NO: 295484 - protein, 14 aa, Homo sapiens
  CDR3 for beta chain variable domain of TCR clone 147742 (TRBV10-3, TRBJ1-1)
CAISDTDRGVEAFF

SEQ ID NO: 295485 - protein, 16 aa, Homo sapiens
  CDR3 for alpha chain variable domain of TCR clone 147743 (TRAV35, TRAJ20)
CWADPSSGFNDYKLSF

SEQ ID NO: 295486 - protein, 18 aa, Homo sapiens
  CDR3 for beta chain variable domain of TCR clone 147743 (TRBV4-3, TRBJ1-6)
CASSAQPGGEGSPLHLGT

SEQ ID NO: 295487 - protein, 13 aa, Homo sapiens
  CDR3 for alpha chain variable domain of TCR clone 147744 (TRAV12-1, TRAJ53)
CVVNAESNYKLTF

SEQ ID NO: 295488 - protein, 13 aa, Homo sapiens
  CDR3 for beta chain variable domain of TCR clone 147744 (TRBV19, TRBJ1-5)
CASSMRGYQPQHF

SEQ ID NO: 295489 - protein, 16 aa, Homo sapiens
  CDR3 for alpha chain variable domain of TCR clone 147745 (TRAV17, TRAJ35)
CATAEGGIGFGNVLHC

SEQ ID NO: 295490 - protein, 16 aa, Homo sapiens
  CDR3 for beta chain variable domain of TCR clone 147745 (TRBV6-5, TRBJ2-7)
CASSADQTSGFYEQYF

SEQ ID NO: 295491 - protein, 16 aa, Homo sapiens
  CDR3 for alpha chain variable domain of TCR clone 147746 (TRAV17, TRAJ53)
CATDALSGGSNYRLTF

SEQ ID NO: 295492 - protein, 12 aa, Homo sapiens
  CDR3 for beta chain variable domain of TCR clone 147746 (TRBV5-1, TRBJ2-7)
CASSFRGYEQYF

SEQ ID NO: 295493 - protein, 13 aa, Homo sapiens
  CDR3 for alpha chain variable domain of TCR clone 147747 (TRAV3, TRAJ29)
CAVRDIIGTPLVS

SEQ ID NO: 295494 - protein, 14 aa, Homo sapiens
  CDR3 for beta chain variable domain of TCR clone 147747 (TRBV27, TRBJ2-1)
CASSATGGYNEQFF

SEQ ID NO: 295495 - protein, 12 aa, Homo sapiens
  CDR3 for alpha chain variable domain of TCR clone 147748 (TRAV3, TRAJ7)
CADLLWEQQTRF

SEQ ID NO: 295496 - protein, 11 aa, Homo sapiens
  CDR3 for beta chain variable domain of TCR clone 147748 (TRBV11-2, TRBJ2-2)
CASSLPGELFF

SEQ ID NO: 295497 - protein, 14 aa, Homo sapiens
  CDR3 for alpha chain variable domain of TCR clone 147749 (TRAV12-2, TRAJ13)
CAVKKPGGYQKVTF

SEQ ID NO: 295498 - protein, 14 aa, Homo sapiens
  CDR3 for beta chain variable domain of TCR clone 147749 (TRBV5-1, TRBJ2-7)
CASSRGESLYEQYF

SEQ ID NO: 295499 - protein, 16 aa, Homo sapiens
  CDR3 for alpha chain variable domain of TCR clone 147750 (TRAV30, TRAJ24)
CGTESVDADSRGKFQF

SEQ ID NO: 295500 - protein, 14 aa, Homo sapiens
  CDR3 for beta chain variable domain of TCR clone 147750 (TRBV12-5, TRBJ2-5)
CASGSRTHQETQYF

SEQ ID NO: 295501 - protein, 11 aa, Homo sapiens
  CDR3 for alpha chain variable domain of TCR clone 147751 (TRAV12-1, TRAJ3)
CVVSSASKIIF

SEQ ID NO: 295502 - protein, 15 aa, Homo sapiens
  CDR3 for beta chain variable domain of TCR clone 147751 (TRBV20-1, TRBJ2-5)
CSASVTSGGGETQYF

SEQ ID NO: 295503 - protein, 18 aa, Homo sapiens
  CDR3 for alpha chain variable domain of TCR clone 147752 (TRAV21, TRAJ52)
CAVRPSPAGGTSHGKLTF

SEQ ID NO: 295504 - protein, 17 aa, Homo sapiens
  CDR3 for beta chain variable domain of TCR clone 147752 (TRBV20-1, TRBJ2-2)
WSASGSGQGVLTGELFF

SEQ ID NO: 295505 - protein, 14 aa, Homo sapiens
  CDR3 for alpha chain variable domain of TCR clone 147753 (TRAV26-1, TRAJ38)
CIADNAGNNRKLIW

SEQ ID NO: 295506 - protein, 17 aa, Homo sapiens
  CDR3 for beta chain variable domain of TCR clone 147753 (TRBV5-1, TRBJ2-5)
CASSPVALGQNQETQYF

SEQ ID NO: 295507 - protein, 11 aa, Homo sapiens
  CDR3 for alpha chain variable domain of TCR clone 147754 (TRAV1-1, TRAJ5)
CAVRVRRALTF

SEQ ID NO: 295508 - protein, 19 aa, Homo sapiens
  CDR3 for beta chain variable domain of TCR clone 147754 (TRBV19, TRBJ2-5)
CASSIGQVTDFFLGETQYF

SEQ ID NO: 295509 - protein, 14 aa, Homo sapiens
  CDR3 for alpha chain variable domain of TCR clone 147755 (TRAV12-2, TRAJ44)
CAVNPAGTASKLTI

SEQ ID NO: 295510 - protein, 15 aa, Homo sapiens
  CDR3 for beta chain variable domain of TCR clone 147755 (TRBV7-9, TRBJ1-6)
CASSSPGRGNSPLHF

SEQ ID NO: 295511 - protein, 14 aa, Homo sapiens
  CDR3 for alpha chain variable domain of TCR clone 147756 (TRAV38-1, TRAJ45)
CAYYSGGGADGLTF

SEQ ID NO: 295512 - protein, 14 aa, Homo sapiens
  CDR3 for beta chain variable domain of TCR clone 147756 (TRBV25-1, TRBJ1-1)
CARTHRGGNTEAFF

SEQ ID NO: 295513 - protein, 14 aa, Homo sapiens
  CDR3 for alpha chain variable domain of TCR clone 147757 (TRAV29/DV5, TRAJ36)
CAARRKTGANNLFF

SEQ ID NO: 295514 - protein, 14 aa, Homo sapiens
  CDR3 for beta chain variable domain of TCR clone 147757 (TRBV12-5, TRBJ2-5)
RASGSRTHQDTQYF

SEQ ID NO: 295515 - protein, 16 aa, Homo sapiens
  CDR3 for alpha chain variable domain of TCR clone 147758 (TRAV38-1, TRAJ37)
CAPKGDGSSNTGKLIF

SEQ ID NO: 295516 - protein, 13 aa, Homo sapiens
  CDR3 for beta chain variable domain of TCR clone 147758 (TRBV12-4, TRBJ2-5)
CASSLFRRETQYF

SEQ ID NO: 295517 - protein, 16 aa, Homo sapiens
  CDR3 for alpha chain variable domain of TCR clone 147759 (TRAV12-2, TRAJ18)
CAVTTDRGSTQGRLYF

SEQ ID NO: 295518 - protein, 13 aa, Homo sapiens
  CDR3 for beta chain variable domain of TCR clone 147759 (TRBV19, TRBJ2-3)
CATWDKITDTQYF

SEQ ID NO: 295519 - protein, 13 aa, Homo sapiens
  CDR3 for alpha chain variable domain of TCR clone 147760 (TRAV23/DV6, TRAJ36)
CAASQTGANNLSF

SEQ ID NO: 295520 - protein, 13 aa, Homo sapiens
  CDR3 for beta chain variable domain of TCR clone 147760 (TRBV5-4, TRBJ1-5)
CASSLGGDQPQHF

SEQ ID NO: 295521 - protein, 13 aa, Homo sapiens
  CDR3 for alpha chain variable domain of TCR clone 147761 (TRAV1-2, TRAJ9)
CAALNTVDFKTIF

SEQ ID NO: 295522 - protein, 13 aa, Homo sapiens
  CDR3 for beta chain variable domain of TCR clone 147761 (TRBV19, TRBJ1-2)
CASSVPGQDGYTF

SEQ ID NO: 295523 - protein, 13 aa, Homo sapiens
  CDR3 for alpha chain variable domain of TCR clone 147762 (TRAV26-1, TRAJ22)
YIVKAGSARQLTF

SEQ ID NO: 295524 - protein, 17 aa, Homo sapiens
  CDR3 for beta chain variable domain of TCR clone 147762 (TRBV11-2, TRBJ2-1)
CASSLYPPGVEYNEQFF

SEQ ID NO: 295525 - protein, 11 aa, Homo sapiens
  CDR3 for alpha chain variable domain of TCR clone 147763 (TRAV35, TRAJ34)
CWARNTDKIIF

SEQ ID NO: 295526 - protein, 14 aa, Homo sapiens
  CDR3 for beta chain variable domain of TCR clone 147763 (TRBV5-1, TRBJ2-7)
CASSRGESLYEQYF

SEQ ID NO: 295527 - protein, 12 aa, Homo sapiens
  CDR3 for alpha chain variable domain of TCR clone 147764 (TRAV8-3, TRAJ26)
CAGDNYCQNFVF

SEQ ID NO: 295528 - protein, 16 aa, Homo sapiens
  CDR3 for beta chain variable domain of TCR clone 147764 (TRBV7-3, TRBJ2-2)
CASSLKRGTLSGELFF

SEQ ID NO: 295529 - protein, 14 aa, Homo sapiens
  CDR3 for alpha chain variable domain of TCR clone 147765 (TRAV13-1, TRAJ44)
CAASSGGTASKLTF

SEQ ID NO: 295530 - protein, 15 aa, Homo sapiens
  CDR3 for beta chain variable domain of TCR clone 147765 (TRBV7-2, TRBJ2-7)
CASSLTGQGTYEQYF

SEQ ID NO: 295531 - protein, 12 aa, Homo sapiens
  CDR3 for alpha chain variable domain of TCR clone 147766 (TRAV21, TRAJ3)
CCFYSSASKIIF

SEQ ID NO: 295532 - protein, 16 aa, Homo sapiens
  CDR3 for beta chain variable domain of TCR clone 147766 (TRBV19, TRBJ2-1)
CASSKAGPSSYNEQFV

SEQ ID NO: 295533 - protein, 14 aa, Homo sapiens
  CDR3 for alpha chain variable domain of TCR clone 147767 (TRAV8-6, TRAJ9)
CAVSSYTGGFKTIF

SEQ ID NO: 295534 - protein, 12 aa, Homo sapiens
  CDR3 for beta chain variable domain of TCR clone 147767 (TRBV2, TRBJ1-2)
CASSESRRLTMA

SEQ ID NO: 295535 - protein, 13 aa, Homo sapiens
  CDR3 for alpha chain variable domain of TCR clone 147768 (TRAV12-3, TRAJ9)
CAMRNTGGFKTIF

SEQ ID NO: 295536 - protein, 17 aa, Homo sapiens
  CDR3 for beta chain variable domain of TCR clone 147768 (TRBV5-1, TRBJ2-5)
CASSPVALGQNQETQYF

SEQ ID NO: 295537 - protein, 15 aa, Homo sapiens
  CDR3 for alpha chain variable domain of TCR clone 147769 (TRAV21, TRAJ53)
CATLNSGGSNYKLTF

SEQ ID NO: 295538 - protein, 15 aa, Homo sapiens
  CDR3 for beta chain variable domain of TCR clone 147769 (TRBV10-1, TRBJ2-3)
CASSATSGGFDTQYF

SEQ ID NO: 295539 - protein, 15 aa, Homo sapiens
  CDR3 for alpha chain variable domain of TCR clone 147770 (TRAV13-1, TRAJ45)
CAASGSGGGADGLTF

SEQ ID NO: 295540 - protein, 12 aa, Homo sapiens
  CDR3 for beta chain variable domain of TCR clone 147770 (TRBV11-2, TRBJ2-2)
CASSLGGGEMFF

SEQ ID NO: 295541 - protein, 14 aa, Homo sapiens
  CDR3 for alpha chain variable domain of TCR clone 147771 (TRAV17, TRAJ57)
CATDPQGGSEKLVL

SEQ ID NO: 295542 - protein, 16 aa, Homo sapiens
  CDR3 for beta chain variable domain of TCR clone 147771 (TRBV20-1, TRBJ1-4)
CSAPGQGLLTNEKLFF

SEQ ID NO: 295543 - protein, 13 aa, Homo sapiens
  CDR3 for alpha chain variable domain of TCR clone 147772 (TRAV17, TRAJ22)
CAHHSGSARQPTF

SEQ ID NO: 295544 - protein, 14 aa, Homo sapiens
  CDR3 for beta chain variable domain of TCR clone 147772 (TRBV16, TRBJ1-1)
CASSQAGANTEAFF

SEQ ID NO: 295545 - protein, 12 aa, Homo sapiens
  CDR3 for alpha chain variable domain of TCR clone 147773 (TRAV16, TRAJ10)
CSRTGGGHKLTF

SEQ ID NO: 295546 - protein, 19 aa, Homo sapiens
  CDR3 for beta chain variable domain of TCR clone 147773 (TRBV25-1, TRBJ2-2)
CAILVYRVDRGRKTGELFF

SEQ ID NO: 295547 - protein, 14 aa, Homo sapiens
  CDR3 for alpha chain variable domain of TCR clone 147774 (TRAV26-1, TRAJ34)
CIVRVAYNTDKLIF

SEQ ID NO: 295548 - protein, 15 aa, Homo sapiens
  CDR3 for beta chain variable domain of TCR clone 147774 (TRBV20-1, TRBJ2-7)
CIARVPAAYFYEQYF

SEQ ID NO: 295549 - protein, 17 aa, Homo sapiens
  CDR3 for alpha chain variable domain of TCR clone 147775 (TRAV16, TRAJ58)
CIPVLSNGETSGSRLTF

SEQ ID NO: 295550 - protein, 17 aa, Homo sapiens
  CDR3 for beta chain variable domain of TCR clone 147775 (TRBV18, TRBJ2-1)
CASSKGLSGGADNEQFL

SEQ ID NO: 295551 - protein, 15 aa, Homo sapiens
  CDR3 for alpha chain variable domain of TCR clone 147776 (TRAV12-3, TRAJ48)
CAMNAKNFGNEKLTF

SEQ ID NO: 295552 - protein, 14 aa, Homo sapiens
  CDR3 for beta chain variable domain of TCR clone 147776 (TRBV2, TRBJ1-6)
CASSEARNNSPLLF

SEQ ID NO: 295553 - protein, 14 aa, Homo sapiens
  CDR3 for alpha chain variable domain of TCR clone 147777 (TRAV8-3, TRAJ4)
CAVGASGGYNKLIV

SEQ ID NO: 295554 - protein, 13 aa, Homo sapiens
  CDR3 for beta chain variable domain of TCR clone 147777 (TRBV18, TRBJ2-5)
CASSLQGQETQYF

SEQ ID NO: 295555 - protein, 13 aa, Homo sapiens
  CDR3 for alpha chain variable domain of TCR clone 147778 (TRAV8-3, TRAJ28)
CAVGAVGSYQLTF

SEQ ID NO: 295556 - protein, 15 aa, Homo sapiens
  CDR3 for beta chain variable domain of TCR clone 147778 (TRBV6-1, TRBJ2-3)
CASSERGGITDTPYF

SEQ ID NO: 295557 - protein, 14 aa, Homo sapiens
  CDR3 for alpha chain variable domain of TCR clone 147779 (TRAV12-1, TRAJ41)
CVVLNSNLGYALNF

SEQ ID NO: 295558 - protein, 14 aa, Homo sapiens
  CDR3 for beta chain variable domain of TCR clone 147779 (TRBV5-8, TRBJ1-1)
CASSPRTGFSEAFF

SEQ ID NO: 295559 - protein, 14 aa, Homo sapiens
  CDR3 for alpha chain variable domain of TCR clone 147780 (TRAV3, TRAJ7)
CAVREEEREQQTRF

SEQ ID NO: 295560 - protein, 19 aa, Homo sapiens
  CDR3 for beta chain variable domain of TCR clone 147780 (TRBV18, TRBJ2-1)
CASSPPMGSGRMGYNEQFF

SEQ ID NO: 295561 - protein, 12 aa, Homo sapiens
  CDR3 for alpha chain variable domain of TCR clone 147781 (TRAV13-1, TRAJ21)
CAAKEGFNKFYF

SEQ ID NO: 295562 - protein, 16 aa, Homo sapiens
  CDR3 for beta chain variable domain of TCR clone 147781 (TRBV7-8, TRBJ2-4)
CASSAERTLAKHIQYF

SEQ ID NO: 295563 - protein, 17 aa, Homo sapiens
  CDR3 for alpha chain variable domain of TCR clone 147782 (TRAV3, TRAJ6)
CAVRDGPRAGGSYIPTF

SEQ ID NO: 295564 - protein, 14 aa, Homo sapiens
  CDR3 for beta chain variable domain of TCR clone 147782 (TRBV12-4, TRBJ2-7)
CASTFGLSTYEQYF

SEQ ID NO: 295565 - protein, 14 aa, Homo sapiens
  CDR3 for alpha chain variable domain of TCR clone 147783 (TRAV30, TRAJ26)
CGTEIVSYGQNFVF

SEQ ID NO: 295566 - protein, 17 aa, Homo sapiens
  CDR3 for beta chain variable domain of TCR clone 147783 (TRBV28, TRBJ2-5)
CASSRQGGLAGAETQYF

SEQ ID NO: 295567 - protein, 18 aa, Homo sapiens
  CDR3 for alpha chain variable domain of TCR clone 147784 (TRAV21, TRAJ52)
CAVRPSPAGGTSYGKLTF

SEQ ID NO: 295568 - protein, 19 aa, Homo sapiens
  CDR3 for beta chain variable domain of TCR clone 147784 (TRBV14, TRBJ2-1)
CASSQDQLWEAPEYNEQFF

SEQ ID NO: 295569 - protein, 14 aa, Homo sapiens
  CDR3 for alpha chain variable domain of TCR clone 147785 (TRAV12-3, TRAJ10)
SHLPLTGGGNKLTF

SEQ ID NO: 295570 - protein, 15 aa, Homo sapiens
  CDR3 for beta chain variable domain of TCR clone 147785 (TRBV4-2, TRBJ2-1)
CASSQEGSGGNEQFF

SEQ ID NO: 295571 - protein, 13 aa, Homo sapiens
  CDR3 for alpha chain variable domain of TCR clone 147786 (TRAV30, TRAJ8)
CGTPNTGFQKLVF

SEQ ID NO: 295572 - protein, 15 aa, Homo sapiens
  CDR3 for beta chain variable domain of TCR clone 147786 (TRBV4-1, TRBJ1-4)
CASSDTGGTNEKLFF

SEQ ID NO: 295573 - protein, 14 aa, Homo sapiens
  CDR3 for alpha chain variable domain of TCR clone 147787 (TRAV12-1, TRAJ38)
CVVHNAGNNRKLSW

SEQ ID NO: 295574 - protein, 13 aa, Homo sapiens
  CDR3 for beta chain variable domain of TCR clone 147787 (TRBV19, TRBJ2-1)
CATSRGVYNEQFF

SEQ ID NO: 295575 - protein, 12 aa, Homo sapiens
  CDR3 for alpha chain variable domain of TCR clone 147788 (TRAV12-3, TRAJ17)
CAMTLTGNKLTS

SEQ ID NO: 295576 - protein, 15 aa, Homo sapiens
  CDR3 for beta chain variable domain of TCR clone 147788 (TRBV20-1, TRBJ2-7)
CSARDRVSGMDEQYY

SEQ ID NO: 295577 - protein, 14 aa, Homo sapiens
  CDR3 for alpha chain variable domain of TCR clone 147789 (TRAV12-2, TRAJ13)
CAVKKTVGYQKVTF

SEQ ID NO: 295578 - protein, 10 aa, Homo sapiens
  CDR3 for beta chain variable domain of TCR clone 147789 (TRBV12-4, TRBJ1-2)
CASSFIWLHL

SEQ ID NO: 295579 - protein, 13 aa, Homo sapiens
  CDR3 for alpha chain variable domain of TCR clone 147790 (TRAV5, TRAJ30)
CAEVANRDDKIIF

SEQ ID NO: 295580 - protein, 14 aa, Homo sapiens
  CDR3 for beta chain variable domain of TCR clone 147790 (TRBV4-1, TRBJ2-2)
CASSQAVNTGELFF

SEQ ID NO: 295581 - protein, 14 aa, Homo sapiens
  CDR3 for alpha chain variable domain of TCR clone 147791 (TRAV8-3, TRAJ4)
CAGGASGGYNKLIF

SEQ ID NO: 295582 - protein, 15 aa, Homo sapiens
  CDR3 for beta chain variable domain of TCR clone 147791 (TRBV6-5, TRBJ2-1)
CASSYDAGAGNEQFF

SEQ ID NO: 295583 - protein, 13 aa, Homo sapiens
  CDR3 for alpha chain variable domain of TCR clone 147792 (TRAV8-6, TRAJ48)
SAGVNFGNEKLTF

SEQ ID NO: 295584 - protein, 16 aa, Homo sapiens
  CDR3 for beta chain variable domain of TCR clone 147792 (TRBV4-2, TRBJ2-6)
CASSQARSSGANVLTF

SEQ ID NO: 295585 - protein, 12 aa, Homo sapiens
  CDR3 for alpha chain variable domain of TCR clone 147793 (TRAV16, TRAJ26)
CASKDGGQNFVF

SEQ ID NO: 295586 - protein, 13 aa, Homo sapiens
  CDR3 for beta chain variable domain of TCR clone 147793 (TRBV25-1, TRBJ1-1)
CASSDRGRPEAFF

SEQ ID NO: 295587 - protein, 11 aa, Homo sapiens
  CDR3 for alpha chain variable domain of TCR clone 147794 (TRAV13-1, TRAJ20)
CTASKNYKLSF

SEQ ID NO: 295588 - protein, 16 aa, Homo sapiens
  CDR3 for beta chain variable domain of TCR clone 147794 (TRBV20-1, TRBJ1-4)
CSAPGQGLLTNEKLFF

SEQ ID NO: 295589 - protein, 18 aa, Homo sapiens
  CDR3 for alpha chain variable domain of TCR clone 147795 (TRAV13-1, TRAJ52)
CAAKNPNAGGTSYGKLTF

SEQ ID NO: 295590 - protein, 15 aa, Homo sapiens
  CDR3 for beta chain variable domain of TCR clone 147795 (TRBV28, TRBJ1-4)
CASSVSGSGLEKLFF

SEQ ID NO: 295591 - protein, 13 aa, Homo sapiens
  CDR3 for alpha chain variable domain of TCR clone 147796 (TRAV12-3, TRAJ45)
CRSSGGGADGLTF

SEQ ID NO: 295592 - protein, 15 aa, Homo sapiens
  CDR3 for beta chain variable domain of TCR clone 147796 (TRBV20-1, TRBJ2-7)
CSARDRVSGMDEQYF

SEQ ID NO: 295593 - protein, 11 aa, Homo sapiens
  CDR3 for alpha chain variable domain of TCR clone 147797 (TRAV16, TRAJ33)
CALHSNYQLLW

SEQ ID NO: 295594 - protein, 15 aa, Homo sapiens
  CDR3 for beta chain variable domain of TCR clone 147797 (TRBV4-1, TRBJ2-7)
CASSQQGQGFDEQYF

SEQ ID NO: 295595 - protein, 14 aa, Homo sapiens
  CDR3 for alpha chain variable domain of TCR clone 147798 (TRAV17, TRAJ57)
CATDPQGGSEKLVF

SEQ ID NO: 295596 - protein, 18 aa, Homo sapiens
  CDR3 for beta chain variable domain of TCR clone 147798 (TRBV20-1, TRBJ2-3)
SSASGLAGGPGTTDTQYF

SEQ ID NO: 295597 - protein, 15 aa, Homo sapiens
  CDR3 for alpha chain variable domain of TCR clone 147799 (TRAV8-3, TRAJ45)
CASAYSGGGADGLTF

SEQ ID NO: 295598 - protein, 15 aa, Homo sapiens
  CDR3 for beta chain variable domain of TCR clone 147799 (TRBV20-1, TRBJ2-7)
CSARDRVSGMDEQYF

SEQ ID NO: 295599 - protein, 14 aa, Homo sapiens
  CDR3 for alpha chain variable domain of TCR clone 147800 (TRAV12-2, TRAJ17)
CAVLFKAAGNKLTF

SEQ ID NO: 295600 - protein, 15 aa, Homo sapiens
  CDR3 for beta chain variable domain of TCR clone 147800 (TRBV7-2, TRBJ2-3)
CASSLNLRDTDTQYF

SEQ ID NO: 295601 - protein, 12 aa, Homo sapiens
  CDR3 for alpha chain variable domain of TCR clone 147801 (TRAV8-4, TRAJ37)
CAKSSNPGKLIF

SEQ ID NO: 295602 - protein, 15 aa, Homo sapiens
  CDR3 for beta chain variable domain of TCR clone 147801 (TRBV7-9, TRBJ2-7)
CASSSSGLAVYEQYF

SEQ ID NO: 295603 - protein, 14 aa, Homo sapiens
  CDR3 for alpha chain variable domain of TCR clone 147802 (TRAV38-1, TRAJ45)
CASHSGGGDDGLTF

SEQ ID NO: 295604 - protein, 14 aa, Homo sapiens
  CDR3 for beta chain variable domain of TCR clone 147802 (TRBV20-1, TRBJ1-1)
CSAQTRIGGTEAFF

SEQ ID NO: 295605 - protein, 15 aa, Homo sapiens
  CDR3 for alpha chain variable domain of TCR clone 147803 (TRAV17, TRAJ10)
CATDAAGGGGNKLTF

SEQ ID NO: 295606 - protein, 14 aa, Homo sapiens
  CDR3 for beta chain variable domain of TCR clone 147803 (TRBV20-1, TRBJ2-5)
CSVPYRGRAETQYF

SEQ ID NO: 295607 - protein, 14 aa, Homo sapiens
  CDR3 for alpha chain variable domain of TCR clone 147804 (TRAV39, TRAJ54)
CAVVLIQGAQKLVF

SEQ ID NO: 295608 - protein, 16 aa, Homo sapiens
  CDR3 for beta chain variable domain of TCR clone 147804 (TRBV4-3, TRBJ2-1)
CASSPALDRGVNEQFF

SEQ ID NO: 295609 - protein, 11 aa, Homo sapiens
  CDR3 for alpha chain variable domain of TCR clone 147805 (TRAV12-3, TRAJ49)
CAANTGNQFYF

SEQ ID NO: 295610 - protein, 15 aa, Homo sapiens
  CDR3 for beta chain variable domain of TCR clone 147805 (TRBV11-2, TRBJ2-1)
CASSLGTSGLNEQLF

SEQ ID NO: 295611 - protein, 14 aa, Homo sapiens
  CDR3 for alpha chain variable domain of TCR clone 147806 (TRAV12-3, TRAJ56)
CAMSVTGANSKLTF

SEQ ID NO: 295612 - protein, 12 aa, Homo sapiens
  CDR3 for beta chain variable domain of TCR clone 147806 (TRBV7-9, TRBJ2-7)
CASSIKREEQYF

SEQ ID NO: 295613 - protein, 17 aa, Homo sapiens
  CDR3 for alpha chain variable domain of TCR clone 147807 (TRAV26-1, TRAJ58)
CIVRVGAEETSGSRLTF

SEQ ID NO: 295614 - protein, 14 aa, Homo sapiens
  CDR3 for beta chain variable domain of TCR clone 147807 (TRBV7-2, TRBJ2-7)
CASSLPPGQGPQYF

SEQ ID NO: 295615 - protein, 13 aa, Homo sapiens
  CDR3 for alpha chain variable domain of TCR clone 147808 (TRAV27, TRAJ56)
CAGKHGANSKLTF

SEQ ID NO: 295616 - protein, 15 aa, Homo sapiens
  CDR3 for beta chain variable domain of TCR clone 147808 (TRBV6-1, TRBJ2-3)
CASSERWDSTDTQYF

SEQ ID NO: 295617 - protein, 14 aa, Homo sapiens
  CDR3 for alpha chain variable domain of TCR clone 147809 (TRAV1-2, TRAJ8)
CAVRDPPGFQKLVF

SEQ ID NO: 295618 - protein, 14 aa, Homo sapiens
  CDR3 for beta chain variable domain of TCR clone 147809 (TRBV4-2, TRBJ2-7)
CASGHRTGEYEQYF

SEQ ID NO: 295619 - protein, 15 aa, Homo sapiens
  CDR3 for alpha chain variable domain of TCR clone 147810 (TRAV25, TRAJ23)
CALAPNYNQGGKLIF

SEQ ID NO: 295620 - protein, 12 aa, Homo sapiens
  CDR3 for beta chain variable domain of TCR clone 147810 (TRBV14, TRBJ1-1)
CASSQLKGLAFF

SEQ ID NO: 295621 - protein, 12 aa, Homo sapiens
  CDR3 for alpha chain variable domain of TCR clone 147811 (TRAV12-2, TRAJ10)
WGVTGGGNKLTF

SEQ ID NO: 295622 - protein, 13 aa, Homo sapiens
  CDR3 for beta chain variable domain of TCR clone 147811 (TRBV12-4, TRBJ2-5)
CASSPGTEETQYF

SEQ ID NO: 295623 - protein, 14 aa, Homo sapiens
  CDR3 for alpha chain variable domain of TCR clone 147812 (TRAV12-2, TRAJ13)
CAVKKAGGYQKVTF

SEQ ID NO: 295624 - protein, 14 aa, Homo sapiens
  CDR3 for beta chain variable domain of TCR clone 147812 (TRBV25-1, TRBJ1-1)
CASTHLGGNTEAFF

SEQ ID NO: 295625 - protein, 14 aa, Homo sapiens
  CDR3 for alpha chain variable domain of TCR clone 147813 (TRAV2, TRAJ9)
CAVEDRSGGCKTIF

SEQ ID NO: 295626 - protein, 13 aa, Homo sapiens
  CDR3 for beta chain variable domain of TCR clone 147813 (TRBV19, TRBJ1-2)
CASSVPGQDGYTF

SEQ ID NO: 295627 - protein, 16 aa, Homo sapiens
  CDR3 for alpha chain variable domain of TCR clone 147814 (TRAV2, TRAJ13)
CAARILGVTRKLPLEL

SEQ ID NO: 295628 - protein, 13 aa, Homo sapiens
  CDR3 for beta chain variable domain of TCR clone 147814 (TRBV7-6, TRBJ2-1)
CASSPLTYNEQFF

SEQ ID NO: 295629 - protein, 14 aa, Homo sapiens
  CDR3 for alpha chain variable domain of TCR clone 147815 (TRAV3, TRAJ22)
CCERPGRFSRQLTF

SEQ ID NO: 295630 - protein, 16 aa, Homo sapiens
  CDR3 for beta chain variable domain of TCR clone 147815 (TRBV4-2, TRBJ2-4)
CASSQELRRAKNIQYF

SEQ ID NO: 295631 - protein, 14 aa, Homo sapiens
  CDR3 for alpha chain variable domain of TCR clone 147816 (TRAV12-2, TRAJ13)
CAGKKTGGYQKVTV

SEQ ID NO: 295632 - protein, 15 aa, Homo sapiens
  CDR3 for beta chain variable domain of TCR clone 147816 (TRBV27, TRBJ2-1)
CASSNGGGSSNEQFF

SEQ ID NO: 295633 - protein, 14 aa, Homo sapiens
  CDR3 for alpha chain variable domain of TCR clone 147817 (TRAV13-1, TRAJ45)
CAATSGGGADGLTF

SEQ ID NO: 295634 - protein, 15 aa, Homo sapiens
  CDR3 for beta chain variable domain of TCR clone 147817 (TRBV11-2, TRBJ1-6)
CASSLDPWAVSPLHF

SEQ ID NO: 295635 - protein, 14 aa, Homo sapiens
  CDR3 for alpha chain variable domain of TCR clone 147818 (TRAV12-2, TRAJ13)
CAVKKTGGYQKVTF

SEQ ID NO: 295636 - protein, 15 aa, Homo sapiens
  CDR3 for beta chain variable domain of TCR clone 147818 (TRBV7-3, TRBJ2-1)
CASSLSSGSFDEQFF

SEQ ID NO: 295637 - protein, 11 aa, Homo sapiens
  CDR3 for alpha chain variable domain of TCR clone 147819 (TRAV4, TRAJ31)
CLVGDNARRMF

SEQ ID NO: 295638 - protein, 15 aa, Homo sapiens
  CDR3 for beta chain variable domain of TCR clone 147819 (TRBV10-2, TRBJ2-6)
CASSEQGTGANDLTF

SEQ ID NO: 295639 - protein, 14 aa, Homo sapiens
  CDR3 for alpha chain variable domain of TCR clone 147820 (TRAV13-2, TRAJ58)
SAERWLTSGSRLTF

SEQ ID NO: 295640 - protein, 16 aa, Homo sapiens
  CDR3 for beta chain variable domain of TCR clone 147820 (TRBV18, TRBJ1-4)
CASSLQTVATNEKLFF

SEQ ID NO: 295641 - protein, 12 aa, Homo sapiens
  CDR3 for alpha chain variable domain of TCR clone 147821 (TRAV13-1, TRAJ21)
CAAKEGLNKFYF

SEQ ID NO: 295642 - protein, 14 aa, Homo sapiens
  CDR3 for beta chain variable domain of TCR clone 147821 (TRBV5-4, TRBJ1-1)
CACSLDSRRDEAFF

SEQ ID NO: 295643 - protein, 14 aa, Homo sapiens
  CDR3 for alpha chain variable domain of TCR clone 147822 (TRAV21, TRAJ52)
PSPAGGTSYGKLTF

SEQ ID NO: 295644 - protein, 17 aa, Homo sapiens
  CDR3 for beta chain variable domain of TCR clone 147822 (TRBV25-1, TRBJ2-1)
CASSAYGQGRGVYEQFF

SEQ ID NO: 295645 - protein, 15 aa, Homo sapiens
  CDR3 for alpha chain variable domain of TCR clone 147823 (TRAV12-1, TRAJ5)
CVVNMLEMGRRALTF

SEQ ID NO: 295646 - protein, 12 aa, Homo sapiens
  CDR3 for beta chain variable domain of TCR clone 147823 (TRBV11-2, TRBJ2-2)
CASSLGGGELFF

SEQ ID NO: 295647 - protein, 12 aa, Homo sapiens
  CDR3 for alpha chain variable domain of TCR clone 147824 (TRAV16, TRAJ27)
CTLNHQCRQINL

SEQ ID NO: 295648 - protein, 14 aa, Homo sapiens
  CDR3 for beta chain variable domain of TCR clone 147824 (TRBV11-2, TRBJ1-5)
CASSLDRGRQPQHF

SEQ ID NO: 295649 - protein, 13 aa, Homo sapiens
  CDR3 for alpha chain variable domain of TCR clone 147825 (TRAV26-1, TRAJ36)
CIVVGTEANNLFF

SEQ ID NO: 295650 - protein, 13 aa, Homo sapiens
  CDR3 for beta chain variable domain of TCR clone 147825 (TRBV6-5, TRBJ2-6)
CASSTSGPLRLDF

SEQ ID NO: 295651 - protein, 17 aa, Homo sapiens
  CDR3 for alpha chain variable domain of TCR clone 147826 (TRAV3, TRAJ6)
CAVRDGSRAGGSYIPTF

SEQ ID NO: 295652 - protein, 14 aa, Homo sapiens
  CDR3 for beta chain variable domain of TCR clone 147826 (TRBV7-2, TRBJ2-7)
CASSTKTSFYEQYF

SEQ ID NO: 295653 - protein, 15 aa, Homo sapiens
  CDR3 for alpha chain variable domain of TCR clone 147827 (TRAV13-2, TRAJ53)
CAERGSRGSNYKLTF

SEQ ID NO: 295654 - protein, 14 aa, Homo sapiens
  CDR3 for beta chain variable domain of TCR clone 147827 (TRBV4-1, TRBJ2-2)
CASSQYPDTVELFF

SEQ ID NO: 295655 - protein, 13 aa, Homo sapiens
  CDR3 for alpha chain variable domain of TCR clone 147828 (TRAV27, TRAJ45)
CRSSGGGADGLTF

SEQ ID NO: 295656 - protein, 11 aa, Homo sapiens
  CDR3 for beta chain variable domain of TCR clone 147828 (TRBV7-3, TRBJ2-5)
CASSLSETQYF

SEQ ID NO: 295657 - protein, 15 aa, Homo sapiens
  CDR3 for alpha chain variable domain of TCR clone 147829 (TRAV25, TRAJ52)
CAGRPGGTGYGQLTF

SEQ ID NO: 295658 - protein, 17 aa, Homo sapiens
  CDR3 for beta chain variable domain of TCR clone 147829 (TRBV7-8, TRBJ2-6)
CASSAGTGGAGANVLTF

SEQ ID NO: 295659 - protein, 12 aa, Homo sapiens
  CDR3 for alpha chain variable domain of TCR clone 147830 (TRAV13-1, TRAJ15)
CAASQAGTALIF

SEQ ID NO: 295660 - protein, 14 aa, Homo sapiens
  CDR3 for beta chain variable domain of TCR clone 147830 (TRBV19, TRBJ2-2)
CASSTLHRSGGLFF

SEQ ID NO: 295661 - protein, 13 aa, Homo sapiens
  CDR3 for alpha chain variable domain of TCR clone 147831 (TRAV36/DV7, TRAJ54)
YAVLIQGAQKLVF

SEQ ID NO: 295662 - protein, 13 aa, Homo sapiens
  CDR3 for beta chain variable domain of TCR clone 147831 (TRBV29-1, TRBJ2-4)
CSVGEGTKNIQYF

SEQ ID NO: 295663 - protein, 14 aa, Homo sapiens
  CDR3 for alpha chain variable domain of TCR clone 147832 (TRAV2, TRAJ9)
CAVEDRSGGFKTIF

SEQ ID NO: 295664 - protein, 13 aa, Homo sapiens
  CDR3 for beta chain variable domain of TCR clone 147832 (TRBV7-9, TRBJ2-2)
CASCLDPTGELFF

SEQ ID NO: 295665 - protein, 17 aa, Homo sapiens
  CDR3 for alpha chain variable domain of TCR clone 147833 (TRAV13-1, TRAJ52)
CAAGRNAGGTSYGKLTF

SEQ ID NO: 295666 - protein, 13 aa, Homo sapiens
  CDR3 for beta chain variable domain of TCR clone 147833 (TRBV29-1, TRBJ2-1)
CSVEGGRVNEQFF

SEQ ID NO: 295667 - protein, 13 aa, Homo sapiens
  CDR3 for alpha chain variable domain of TCR clone 147834 (TRAV13-2, TRAJ10)
CAENTGGGNKLTF

SEQ ID NO: 295668 - protein, 15 aa, Homo sapiens
  CDR3 for beta chain variable domain of TCR clone 147834 (TRBV12-4, TRBJ2-2)
CASSRQGANTGELFF

SEQ ID NO: 295669 - protein, 13 aa, Homo sapiens
  CDR3 for alpha chain variable domain of TCR clone 147835 (TRAV12-3, TRAJ53)
CAMRGGSNYRLTF

SEQ ID NO: 295670 - protein, 13 aa, Homo sapiens
  CDR3 for beta chain variable domain of TCR clone 147835 (TRBV18, TRBJ2-5)
CASSLQGQETQYF

SEQ ID NO: 295671 - protein, 15 aa, Homo sapiens
  CDR3 for alpha chain variable domain of TCR clone 147836 (TRAV30, TRAJ57)
CGTAIPQGGSEKLVF

SEQ ID NO: 295672 - protein, 14 aa, Homo sapiens
  CDR3 for beta chain variable domain of TCR clone 147836 (TRBV5-8, TRBJ2-3)
CASSLGQGTDTQYF

SEQ ID NO: 295673 - protein, 12 aa, Homo sapiens
  CDR3 for alpha chain variable domain of TCR clone 147837 (TRAV21, TRAJ23)
CAVMLQGGKLIF

SEQ ID NO: 295674 - protein, 14 aa, Homo sapiens
  CDR3 for beta chain variable domain of TCR clone 147837 (TRBV7-3, TRBJ2-1)
CASSLAGGTNEQFF

SEQ ID NO: 295675 - protein, 13 aa, Homo sapiens
  CDR3 for alpha chain variable domain of TCR clone 147838 (TRAV27, TRAJ41)
CAGEENSGYALNF

SEQ ID NO: 295676 - protein, 14 aa, Homo sapiens
  CDR3 for beta chain variable domain of TCR clone 147838 (TRBV7-2, TRBJ1-1)
CASSFSTGTTEAFF

SEQ ID NO: 295677 - protein, 18 aa, Homo sapiens
  CDR3 for alpha chain variable domain of TCR clone 147839 (TRAV13-1, TRAJ52)
CAAKNPNAGGTSYGKLTL

SEQ ID NO: 295678 - protein, 17 aa, Homo sapiens
  CDR3 for beta chain variable domain of TCR clone 147839 (TRBV7-3, TRBJ2-5)
CASSLGSGRSGSETQYF

SEQ ID NO: 295679 - protein, 13 aa, Homo sapiens
  CDR3 for alpha chain variable domain of TCR clone 147840 (TRAV8-3, TRAJ47)
CAVSMEYGNKLVF

SEQ ID NO: 295680 - protein, 15 aa, Homo sapiens
  CDR3 for beta chain variable domain of TCR clone 147840 (TRBV7-9, TRBJ1-2)
CASSLDREPNYGYTF

SEQ ID NO: 295681 - protein, 14 aa, Homo sapiens
  CDR3 for alpha chain variable domain of TCR clone 147841 (TRAV3, TRAJ21)
CAVRDWDNFNKFYF

SEQ ID NO: 295682 - protein, 13 aa, Homo sapiens
  CDR3 for beta chain variable domain of TCR clone 147841 (TRBV5-7, TRBJ2-6)
CASTSSGADVLTF

SEQ ID NO: 295683 - protein, 12 aa, Homo sapiens
  CDR3 for alpha chain variable domain of TCR clone 147842 (TRAV1-1, TRAJ33)
CAASDSNYQLIW

SEQ ID NO: 295684 - protein, 18 aa, Homo sapiens
  CDR3 for beta chain variable domain of TCR clone 147842 (TRBV20-1, TRBJ2-2)
CSARVQTARPSGTGELFI

SEQ ID NO: 295685 - protein, 14 aa, Homo sapiens
  CDR3 for alpha chain variable domain of TCR clone 147843 (TRAV1-2, TRAJ16)
CAVNRFSDGQKLLF

SEQ ID NO: 295686 - protein, 13 aa, Homo sapiens
  CDR3 for beta chain variable domain of TCR clone 147843 (TRBV4-2, TRBJ1-1)
CASSQAGNTEALF

SEQ ID NO: 295687 - protein, 13 aa, Homo sapiens
  CDR3 for alpha chain variable domain of TCR clone 147844 (TRAV35, TRAJ44)
CAGLSGTASKLPF

SEQ ID NO: 295688 - protein, 17 aa, Homo sapiens
  CDR3 for beta chain variable domain of TCR clone 147844 (TRBV7-8, TRBJ1-2)
CASSLRPLQGHLYGYTF

SEQ ID NO: 295689 - protein, 16 aa, Homo sapiens
  CDR3 for alpha chain variable domain of TCR clone 147845 (TRAV26-1, TRAJ21)
CCVLWHRPYNFNKFYF

SEQ ID NO: 295690 - protein, 15 aa, Homo sapiens
  CDR3 for beta chain variable domain of TCR clone 147845 (TRBV20-1, TRBJ2-7)
CSARDRVSGMDEQYF

SEQ ID NO: 295691 - protein, 13 aa, Homo sapiens
  CDR3 for alpha chain variable domain of TCR clone 147846 (TRAV21, TRAJ27)
FAALPGNARKSTF

SEQ ID NO: 295692 - protein, 14 aa, Homo sapiens
  CDR3 for beta chain variable domain of TCR clone 147846 (TRBV7-6, TRBJ2-3)
CASSLGTVTDTQYF

SEQ ID NO: 295693 - protein, 14 aa, Homo sapiens
  CDR3 for alpha chain variable domain of TCR clone 147847 (TRAV8-4, TRAJ54)
CAGSEVLGAQKPVF

SEQ ID NO: 295694 - protein, 13 aa, Homo sapiens
  CDR3 for beta chain variable domain of TCR clone 147847 (TRBV27, TRBJ2-7)
CASSFVSSYEQYF

SEQ ID NO: 295695 - protein, 11 aa, Homo sapiens
  CDR3 for alpha chain variable domain of TCR clone 147848 (TRAV1-1, TRAJ23)
CAVRQGGKLIF

SEQ ID NO: 295696 - protein, 13 aa, Homo sapiens
  CDR3 for beta chain variable domain of TCR clone 147848 (TRBV7-8, TRBJ2-2)
CASSHLFPGPLSI

SEQ ID NO: 295697 - protein, 13 aa, Homo sapiens
  CDR3 for alpha chain variable domain of TCR clone 147849 (TRAV2, TRAJ40)
CAVVTSGTYKYLF

SEQ ID NO: 295698 - protein, 16 aa, Homo sapiens
  CDR3 for beta chain variable domain of TCR clone 147849 (TRBV12-5, TRBJ2-5)
CASGPRTSGNQETQYF

SEQ ID NO: 295699 - protein, 12 aa, Homo sapiens
  CDR3 for alpha chain variable domain of TCR clone 147850 (TRAV17, TRAJ39)
CAKGAAGKMLTF

SEQ ID NO: 295700 - protein, 14 aa, Homo sapiens
  CDR3 for beta chain variable domain of TCR clone 147850 (TRBV7-9, TRBJ1-2)
CASSRQGANYGYTF

SEQ ID NO: 295701 - protein, 15 aa, Homo sapiens
  CDR3 for alpha chain variable domain of TCR clone 147851 (TRAV25, TRAJ23)
CALAPTYNQGGKLIF

SEQ ID NO: 295702 - protein, 13 aa, Homo sapiens
  CDR3 for beta chain variable domain of TCR clone 147851 (TRBV11-3, TRBJ1-1)
CASSWDGNTEAFF

SEQ ID NO: 295703 - protein, 14 aa, Homo sapiens
  CDR3 for alpha chain variable domain of TCR clone 147852 (TRAV12-3, TRAJ10)
SHLPLTAGGNKLTF

SEQ ID NO: 295704 - protein, 15 aa, Homo sapiens
  CDR3 for beta chain variable domain of TCR clone 147852 (TRBV20-1, TRBJ2-7)
CSARDRVSGMDEQYF

SEQ ID NO: 295705 - protein, 15 aa, Homo sapiens
  CDR3 for alpha chain variable domain of TCR clone 147853 (TRAV26-2, TRAJ39)
CSLSGNNNAGNMLTF

SEQ ID NO: 295706 - protein, 15 aa, Homo sapiens
  CDR3 for beta chain variable domain of TCR clone 147853 (TRBV5-4, TRBJ1-1)
CASSSLGWANTEAFF

SEQ ID NO: 295707 - protein, 16 aa, Homo sapiens
  CDR3 for alpha chain variable domain of TCR clone 147854 (TRAV38-1, TRAJ32)
CAFMKGDGGATNKLIF

SEQ ID NO: 295708 - protein, 13 aa, Homo sapiens
  CDR3 for beta chain variable domain of TCR clone 147854 (TRBV20-1, TRBJ2-5)
CSAREAFQETQYF

SEQ ID NO: 295709 - protein, 12 aa, Homo sapiens
  CDR3 for alpha chain variable domain of TCR clone 147855 (TRAV3, TRAJ39)
CAVIGCSNMLTF

SEQ ID NO: 295710 - protein, 14 aa, Homo sapiens
  CDR3 for beta chain variable domain of TCR clone 147855 (TRBV7-8, TRBJ2-3)
CASSFPDGQDTQYF

SEQ ID NO: 295711 - protein, 13 aa, Homo sapiens
  CDR3 for alpha chain variable domain of TCR clone 147856 (TRAV3, TRAJ4)
CAVRDGGDNKLIF

SEQ ID NO: 295712 - protein, 15 aa, Homo sapiens
  CDR3 for beta chain variable domain of TCR clone 147856 (TRBV5-1, TRBJ2-1)
CASSPPRAPYNEQFF

SEQ ID NO: 295713 - protein, 15 aa, Homo sapiens
  CDR3 for alpha chain variable domain of TCR clone 147857 (TRAV2, TRAJ22)
CAVSSRGGSARQLTF

SEQ ID NO: 295714 - protein, 16 aa, Homo sapiens
  CDR3 for beta chain variable domain of TCR clone 147857 (TRBV29-1, TRBJ2-7)
CSVEDAEDGTAYEQYF

SEQ ID NO: 295715 - protein, 15 aa, Homo sapiens
  CDR3 for alpha chain variable domain of TCR clone 147858 (TRAV3, TRAJ22)
CAVRDRGGSARQLTF

SEQ ID NO: 295716 - protein, 17 aa, Homo sapiens
  CDR3 for beta chain variable domain of TCR clone 147858 (TRBV13, TRBJ2-3)
CAISLSRVARGRNTQYF

SEQ ID NO: 295717 - protein, 14 aa, Homo sapiens
  CDR3 for alpha chain variable domain of TCR clone 147859 (TRAV8-6, TRAJ22)
CAVRNAQSARQLTF

SEQ ID NO: 295718 - protein, 15 aa, Homo sapiens
  CDR3 for beta chain variable domain of TCR clone 147859 (TRBV7-2, TRBJ2-7)
CASSLGIGNDYEQYF

SEQ ID NO: 295719 - protein, 12 aa, Homo sapiens
  CDR3 for alpha chain variable domain of TCR clone 147860 (TRAV12-3, TRAJ4)
CAMTGAGTRLVV

SEQ ID NO: 295720 - protein, 14 aa, Homo sapiens
  CDR3 for beta chain variable domain of TCR clone 147860 (TRBV10-3, TRBJ1-1)
CAISDTDRGVEAFF

SEQ ID NO: 295721 - protein, 12 aa, Homo sapiens
  CDR3 for alpha chain variable domain of TCR clone 147861 (TRAV12-1, TRAJ40)
CVVYSGTYKYIF

SEQ ID NO: 295722 - protein, 16 aa, Homo sapiens
  CDR3 for beta chain variable domain of TCR clone 147861 (TRBV4-2, TRBJ2-7)
CASSQEGLANSYEQYF

SEQ ID NO: 295723 - protein, 11 aa, Homo sapiens
  CDR3 for alpha chain variable domain of TCR clone 147862 (TRAV35, TRAJ34)
CWARNTDKLIF

SEQ ID NO: 295724 - protein, 15 aa, Homo sapiens
  CDR3 for beta chain variable domain of TCR clone 147862 (TRBV9, TRBJ2-1)
CASSLAGSSYNEQFF

SEQ ID NO: 295725 - protein, 14 aa, Homo sapiens
  CDR3 for alpha chain variable domain of TCR clone 147863 (TRAV16, TRAJ39)
CALSKNNAGNMLTF

SEQ ID NO: 295726 - protein, 17 aa, Homo sapiens
  CDR3 for beta chain variable domain of TCR clone 147863 (TRBV23-1, TRBJ1-2)
CASSNTGGGLLWRHLRF

SEQ ID NO: 295727 - protein, 14 aa, Homo sapiens
  CDR3 for alpha chain variable domain of TCR clone 147864 (TRAV12-2, TRAJ53)
CAVKGGGSNYKLQF

SEQ ID NO: 295728 - protein, 14 aa, Homo sapiens
  CDR3 for beta chain variable domain of TCR clone 147864 (TRBV19, TRBJ2-1)
CASPTFVLSGEQFF

SEQ ID NO: 295729 - protein, 13 aa, Homo sapiens
  CDR3 for alpha chain variable domain of TCR clone 147865 (TRAV26-2, TRAJ37)
CIRGSSNTGKLIF

SEQ ID NO: 295730 - protein, 18 aa, Homo sapiens
  CDR3 for beta chain variable domain of TCR clone 147865 (TRBV20-1, TRBJ2-3)
CSASGLAGGPGTTDTQYF

SEQ ID NO: 295731 - protein, 14 aa, Homo sapiens
  CDR3 for alpha chain variable domain of TCR clone 147866 (TRAV1-2, TRAJ8)
CAVREDTGLQKLVF

SEQ ID NO: 295732 - protein, 15 aa, Homo sapiens
  CDR3 for beta chain variable domain of TCR clone 147866 (TRBV7-9, TRBJ1-4)
CASSARTGGNEKLFF

SEQ ID NO: 295733 - protein, 15 aa, Homo sapiens
  CDR3 for alpha chain variable domain of TCR clone 147867 (TRAV13-1, TRAJ32)
CAASIYGGATNKPIF

SEQ ID NO: 295734 - protein, 14 aa, Homo sapiens
  CDR3 for beta chain variable domain of TCR clone 147867 (TRBV7-9, TRBJ2-1)
CASSLASGSKEQFF

SEQ ID NO: 295735 - protein, 13 aa, Homo sapiens
  CDR3 for alpha chain variable domain of TCR clone 147868 (TRAV13-1, TRAJ9)
CAASGTGGFKNIF

SEQ ID NO: 295736 - protein, 13 aa, Homo sapiens
  CDR3 for beta chain variable domain of TCR clone 147868 (TRBV12-4, TRBJ2-7)
CASSLERVREQYF

SEQ ID NO: 295737 - protein, 14 aa, Homo sapiens
  CDR3 for alpha chain variable domain of TCR clone 147869 (TRAV12-3, TRAJ35)
CAMSLIGFGNGLHC

SEQ ID NO: 295738 - protein, 12 aa, Homo sapiens
  CDR3 for beta chain variable domain of TCR clone 147869 (TRBV12-4, TRBJ1-1)
CASRLAGLEAFF

SEQ ID NO: 295739 - protein, 15 aa, Homo sapiens
  CDR3 for alpha chain variable domain of TCR clone 147870 (TRAV12-1, TRAJ3)
CVVPPGTAVLPRYSL

SEQ ID NO: 295740 - protein, 15 aa, Homo sapiens
  CDR3 for beta chain variable domain of TCR clone 147870 (TRBV7-2, TRBJ2-6)
CASSREGSGANDLTF

SEQ ID NO: 295741 - protein, 16 aa, Homo sapiens
  CDR3 for alpha chain variable domain of TCR clone 147871 (TRAV3, TRAJ23)
CAAKIGIYNQGGKLIF

SEQ ID NO: 295742 - protein, 17 aa, Homo sapiens
  CDR3 for beta chain variable domain of TCR clone 147871 (TRBV10-3, TRBJ2-6)
CAISESTAPARANVLIF

SEQ ID NO: 295743 - protein, 14 aa, Homo sapiens
  CDR3 for alpha chain variable domain of TCR clone 147872 (TRAV27, TRAJ38)
CAGDRAGNNRKLIW

SEQ ID NO: 295744 - protein, 15 aa, Homo sapiens
  CDR3 for beta chain variable domain of TCR clone 147872 (TRBV10-2, TRBJ2-6)
CASSEQGTGANVLTF

SEQ ID NO: 295745 - protein, 12 aa, Homo sapiens
  CDR3 for alpha chain variable domain of TCR clone 147873 (TRAV29/DV5, TRAJ49)
CAALNTGNQFYF

SEQ ID NO: 295746 - protein, 15 aa, Homo sapiens
  CDR3 for beta chain variable domain of TCR clone 147873 (TRBV5-7, TRBJ1-5)
CASSYGKLWDQPQHF

SEQ ID NO: 295747 - protein, 13 aa, Homo sapiens
  CDR3 for alpha chain variable domain of TCR clone 147874 (TRAV35, TRAJ44)
CAGLSGTASKLTF

SEQ ID NO: 295748 - protein, 17 aa, Homo sapiens
  CDR3 for beta chain variable domain of TCR clone 147874 (TRBV7-8, TRBJ1-2)
CASSLRPLQVHLYGYTF

SEQ ID NO: 295749 - protein, 16 aa, Homo sapiens
  CDR3 for alpha chain variable domain of TCR clone 147875 (TRAV12-2, TRAJ45)
CAVIFLSGGGADGLTF

SEQ ID NO: 295750 - protein, 19 aa, Homo sapiens
  CDR3 for beta chain variable domain of TCR clone 147875 (TRBV28, TRBJ2-4)
CASSFRPGGTAHSKNIQYF

SEQ ID NO: 295751 - protein, 15 aa, Homo sapiens
  CDR3 for alpha chain variable domain of TCR clone 147876 (TRAV26-1, TRAJ29)
CIVRVEGSGNTHLVF

SEQ ID NO: 295752 - protein, 15 aa, Homo sapiens
  CDR3 for beta chain variable domain of TCR clone 147876 (TRBV7-9, TRBJ1-5)
CASSQGRQPNQPQHF

SEQ ID NO: 295753 - protein, 14 aa, Homo sapiens
  CDR3 for alpha chain variable domain of TCR clone 147877 (TRAV13-1, TRAJ35)
CAASKGGFGNVLHC

SEQ ID NO: 295754 - protein, 12 aa, Homo sapiens
  CDR3 for beta chain variable domain of TCR clone 147877 (TRBV11-2, TRBJ2-4)
CASSSASGSEYF

SEQ ID NO: 295755 - protein, 14 aa, Homo sapiens
  CDR3 for alpha chain variable domain of TCR clone 147878 (TRAV8-4, TRAJ17)
CAVSDQAAGNKLTF

SEQ ID NO: 295756 - protein, 15 aa, Homo sapiens
  CDR3 for beta chain variable domain of TCR clone 147878 (TRBV9, TRBJ1-6)
CASSVAGTGDSPLHF

SEQ ID NO: 295757 - protein, 13 aa, Homo sapiens
  CDR3 for alpha chain variable domain of TCR clone 147879 (TRAV17, TRAJ21)
CATDGGKFNKFYF

SEQ ID NO: 295758 - protein, 16 aa, Homo sapiens
  CDR3 for beta chain variable domain of TCR clone 147879 (TRBV7-3, TRBJ2-2)
CASSLKRGTLSGELFF

SEQ ID NO: 295759 - protein, 15 aa, Homo sapiens
  CDR3 for alpha chain variable domain of TCR clone 147880 (TRAV12-1, TRAJ44)
CVADLPTGTASKLTF

SEQ ID NO: 295760 - protein, 13 aa, Homo sapiens
  CDR3 for beta chain variable domain of TCR clone 147880 (TRBV6-5, TRBJ2-5)
CASSPQGGETQHF

SEQ ID NO: 295761 - protein, 16 aa, Homo sapiens
  CDR3 for alpha chain variable domain of TCR clone 147881 (TRAV3, TRAJ18)
CAVRDGRGSTLGRLSF

SEQ ID NO: 295762 - protein, 17 aa, Homo sapiens
  CDR3 for beta chain variable domain of TCR clone 147881 (TRBV5-1, TRBJ2-3)
CASSKIGLADRTDTQYF

SEQ ID NO: 295763 - protein, 18 aa, Homo sapiens
  CDR3 for alpha chain variable domain of TCR clone 147882 (TRAV21, TRAJ52)
CAVRPSPAGGTSYGKLTF

SEQ ID NO: 295764 - protein, 18 aa, Homo sapiens
  CDR3 for beta chain variable domain of TCR clone 147882 (TRBV7-3, TRBJ2-6)
CASSPQRTVSPGANVLTF

SEQ ID NO: 295765 - protein, 13 aa, Homo sapiens
  CDR3 for alpha chain variable domain of TCR clone 147883 (TRAV3, TRAJ21)
CAVREPDFNKFYF

SEQ ID NO: 295766 - protein, 15 aa, Homo sapiens
  CDR3 for beta chain variable domain of TCR clone 147883 (TRBV3-1, TRBJ2-7)
CASSQVRQGAYEQYF

SEQ ID NO: 295767 - protein, 16 aa, Homo sapiens
  CDR3 for alpha chain variable domain of TCR clone 147884 (TRAV12-3, TRAJ53)
CAMSPGSGGSNYKLTF

SEQ ID NO: 295768 - protein, 18 aa, Homo sapiens
  CDR3 for beta chain variable domain of TCR clone 147884 (TRBV11-2, TRBJ2-6)
CASSLNPFLGTGANVLTF

SEQ ID NO: 295769 - protein, 12 aa, Homo sapiens
  CDR3 for alpha chain variable domain of TCR clone 147885 (TRAV26-1, TRAJ36)
CIIRVRADNLFF

SEQ ID NO: 295770 - protein, 13 aa, Homo sapiens
  CDR3 for beta chain variable domain of TCR clone 147885 (TRBV11-2, TRBJ2-5)
CASSRGPSETQYF

SEQ ID NO: 295771 - protein, 13 aa, Homo sapiens
  CDR3 for alpha chain variable domain of TCR clone 147886 (TRAV8-3, TRAJ28)
CAVGAVGGDQLTF

SEQ ID NO: 295772 - protein, 14 aa, Homo sapiens
  CDR3 for beta chain variable domain of TCR clone 147886 (TRBV7-2, TRBJ2-7)
CASRSQGAAYEQYF

SEQ ID NO: 295773 - protein, 18 aa, Homo sapiens
  CDR3 for alpha chain variable domain of TCR clone 147887 (TRAV26-1, TRAJ56)
CIVRVASRVTGANSKLTF

SEQ ID NO: 295774 - protein, 15 aa, Homo sapiens
  CDR3 for beta chain variable domain of TCR clone 147887 (TRBV7-9, TRBJ2-5)
RASSDTGRGRETQFF

SEQ ID NO: 295775 - protein, 11 aa, Homo sapiens
  CDR3 for alpha chain variable domain of TCR clone 147888 (TRAV13-1, TRAJ15)
CAATPGTALIF

SEQ ID NO: 295776 - protein, 14 aa, Homo sapiens
  CDR3 for beta chain variable domain of TCR clone 147888 (TRBV7-2, TRBJ2-7)
CASSPKTSFYEQYF

SEQ ID NO: 295777 - protein, 15 aa, Homo sapiens
  CDR3 for alpha chain variable domain of TCR clone 147889 (TRAV12-1, TRAJ6)
CVVNCPLRRKLHTYI

SEQ ID NO: 295778 - protein, 14 aa, Homo sapiens
  CDR3 for beta chain variable domain of TCR clone 147889 (TRBV7-2, TRBJ2-3)
CASSQTGSSYTQYF

SEQ ID NO: 295779 - protein, 18 aa, Homo sapiens
  CDR3 for alpha chain variable domain of TCR clone 147890 (TRAV21, TRAJ52)
CAVRPSPAGGTSYGKLTF

SEQ ID NO: 295780 - protein, 18 aa, Homo sapiens
  CDR3 for beta chain variable domain of TCR clone 147890 (TRBV11-2, TRBJ1-3)
CASTPRVTTLGSGNTIYF

SEQ ID NO: 295781 - protein, 12 aa, Homo sapiens
  CDR3 for alpha chain variable domain of TCR clone 147891 (TRAV1-1, TRAJ39)
CAVPVVGNMLTF

SEQ ID NO: 295782 - protein, 14 aa, Homo sapiens
  CDR3 for beta chain variable domain of TCR clone 147891 (TRBV2, TRBJ1-5)
CASGGVLSNQPQHF

SEQ ID NO: 295783 - protein, 15 aa, Homo sapiens
  CDR3 for alpha chain variable domain of TCR clone 147892 (TRAV13-2, TRAJ5)
CAENPHWTGRRALTF

SEQ ID NO: 295784 - protein, 16 aa, Homo sapiens
  CDR3 for beta chain variable domain of TCR clone 147892 (TRBV7-9, TRBJ1-3)
CASSQTSGLRMGTICF

SEQ ID NO: 295785 - protein, 10 aa, Homo sapiens
  CDR3 for alpha chain variable domain of TCR clone 147893 (TRAV1-2, TRAJ23)
CAGQGGKIIF

SEQ ID NO: 295786 - protein, 19 aa, Homo sapiens
  CDR3 for beta chain variable domain of TCR clone 147893 (TRBV28, TRBJ2-7)
CASSYSGTSRLGWVYEQYF

SEQ ID NO: 295787 - protein, 14 aa, Homo sapiens
  CDR3 for alpha chain variable domain of TCR clone 147894 (TRAV26-1, TRAJ38)
CIADNAGNNRKMIW

SEQ ID NO: 295788 - protein, 15 aa, Homo sapiens
  CDR3 for beta chain variable domain of TCR clone 147894 (TRBV27, TRBJ2-1)
CASSNGGGSSNEQFF

SEQ ID NO: 295789 - protein, 15 aa, Homo sapiens
  CDR3 for alpha chain variable domain of TCR clone 147895 (TRAV2, TRAJ15)
CAVEDREQAGTALIL

SEQ ID NO: 295790 - protein, 14 aa, Homo sapiens
  CDR3 for beta chain variable domain of TCR clone 147895 (TRBV11-2, TRBJ2-7)
CASSLGAGAYEQYF

SEQ ID NO: 295791 - protein, 12 aa, Homo sapiens
  CDR3 for alpha chain variable domain of TCR clone 147896 (TRAV3, TRAJ27)
CAVRDKAGKSTF

SEQ ID NO: 295792 - protein, 14 aa, Homo sapiens
  CDR3 for beta chain variable domain of TCR clone 147896 (TRBV5-1, TRBJ1-2)
CAGSVDSTNYGYTF

SEQ ID NO: 295793 - protein, 20 aa, Homo sapiens
  CDR3 for alpha chain variable domain of TCR clone 147897 (TRAV27, TRAJ10)
ASTSVPSRGILTGGGIKLTF

SEQ ID NO: 295794 - protein, 15 aa, Homo sapiens
  CDR3 for beta chain variable domain of TCR clone 147897 (TRBV9, TRBJ2-3)
CASSLEGGLTDTQYF

SEQ ID NO: 295795 - protein, 15 aa, Homo sapiens
  CDR3 for alpha chain variable domain of TCR clone 147898 (TRAV23/DV6, TRAJ37)
CAAGEGSSNTGKLIF

SEQ ID NO: 295796 - protein, 14 aa, Homo sapiens
  CDR3 for beta chain variable domain of TCR clone 147898 (TRBV18, TRBJ2-5)
CASSPGVSQETQYF

SEQ ID NO: 295797 - protein, 16 aa, Homo sapiens
  CDR3 for alpha chain variable domain of TCR clone 147899 (TRAV2, TRAJ4)
CAVEDRFSGGYNKLIF

SEQ ID NO: 295798 - protein, 16 aa, Homo sapiens
  CDR3 for beta chain variable domain of TCR clone 147899 (TRBV19, TRBJ2-1)
CASSKAGPSSYNEQFF

SEQ ID NO: 295799 - protein, 13 aa, Homo sapiens
  CDR3 for alpha chain variable domain of TCR clone 147900 (TRAV8-3, TRAJ48)
CAVVRFGNDKLTF

SEQ ID NO: 295800 - protein, 16 aa, Homo sapiens
  CDR3 for beta chain variable domain of TCR clone 147900 (TRBV20-1, TRBJ2-5)
CSARDFASGIQETQYF

SEQ ID NO: 295801 - protein, 12 aa, Homo sapiens
  CDR3 for alpha chain variable domain of TCR clone 147901 (TRAV13-1, TRAJ21)
CAAKEGFNKFYF

SEQ ID NO: 295802 - protein, 18 aa, Homo sapiens
  CDR3 for beta chain variable domain of TCR clone 147901 (TRBV20-1, TRBJ2-6)
CSAETSPTHGSGANVLTF

SEQ ID NO: 295803 - protein, 13 aa, Homo sapiens
  CDR3 for alpha chain variable domain of TCR clone 147902 (TRAV29/DV5, TRAJ44)
CAASTGTASKLTF

SEQ ID NO: 295804 - protein, 17 aa, Homo sapiens
  CDR3 for beta chain variable domain of TCR clone 147902 (TRBV11-2, TRBJ2-1)
CASSLYPPGVEYNEQFF

SEQ ID NO: 295805 - protein, 15 aa, Homo sapiens
  CDR3 for alpha chain variable domain of TCR clone 147903 (TRAV13-1, TRAJ39)
CAATKGHNAGNMLTF

SEQ ID NO: 295806 - protein, 12 aa, Homo sapiens
  CDR3 for beta chain variable domain of TCR clone 147903 (TRBV7-9, TRBJ2-7)
CASSIKREEQYF

SEQ ID NO: 295807 - protein, 11 aa, Homo sapiens
  CDR3 for alpha chain variable domain of TCR clone 147904 (TRAV2, TRAJ13)
CASGGYQKVNF

SEQ ID NO: 295808 - protein, 15 aa, Homo sapiens
  CDR3 for beta chain variable domain of TCR clone 147904 (TRBV7-9, TRBJ1-4)
CASSRTGGFNEKLFF

SEQ ID NO: 295809 - protein, 13 aa, Homo sapiens
  CDR3 for alpha chain variable domain of TCR clone 147905 (TRAV13-2, TRAJ13)
CAERPGGYQKVTF

SEQ ID NO: 295810 - protein, 15 aa, Homo sapiens
  CDR3 for beta chain variable domain of TCR clone 147905 (TRBV11-3, TRBJ2-7)
CASNPGPASSYEQYF

SEQ ID NO: 295811 - protein, 14 aa, Homo sapiens
  CDR3 for alpha chain variable domain of TCR clone 147906 (TRAV1-2, TRAJ16)
CAVNRFSDGQKLLF

SEQ ID NO: 295812 - protein, 15 aa, Homo sapiens
  CDR3 for beta chain variable domain of TCR clone 147906 (TRBV20-1, TRBJ2-7)
CSARDRVSGTDEQYF

SEQ ID NO: 295813 - protein, 15 aa, Homo sapiens
  CDR3 for alpha chain variable domain of TCR clone 147907 (TRAV3, TRAJ5)
CAVRDLDTGRRALTF

SEQ ID NO: 295814 - protein, 17 aa, Homo sapiens
  CDR3 for beta chain variable domain of TCR clone 147907 (TRBV4-1, TRBJ1-3)
CASSPQRGIRFGNTIYF

SEQ ID NO: 295815 - protein, 14 aa, Homo sapiens
  CDR3 for alpha chain variable domain of TCR clone 147908 (TRAV1-2, TRAJ16)
CAVNRFSDGQKLLF

SEQ ID NO: 295816 - protein, 17 aa, Homo sapiens
  CDR3 for beta chain variable domain of TCR clone 147908 (TRBV7-6, TRBJ2-1)
CASSLEPTGAAYNEQFF

SEQ ID NO: 295817 - protein, 11 aa, Homo sapiens
  CDR3 for alpha chain variable domain of TCR clone 147909 (TRAV8-2, TRAJ26)
CVVTLLLGSDF

SEQ ID NO: 295818 - protein, 15 aa, Homo sapiens
  CDR3 for beta chain variable domain of TCR clone 147909 (TRBV11-2, TRBJ2-2)
CASSSDRVNAGELFF

SEQ ID NO: 295819 - protein, 11 aa, Homo sapiens
  CDR3 for alpha chain variable domain of TCR clone 147910 (TRAV21, TRAJ34)
CAVTNTDKLIF

SEQ ID NO: 295820 - protein, 14 aa, Homo sapiens
  CDR3 for beta chain variable domain of TCR clone 147910 (TRBV2, TRBJ1-5)
CASSGTVSNQPQHF

SEQ ID NO: 295821 - protein, 14 aa, Homo sapiens
  CDR3 for alpha chain variable domain of TCR clone 147911 (TRAV12-2, TRAJ40)
CAVKIPSGTYKYIF

SEQ ID NO: 295822 - protein, 15 aa, Homo sapiens
  CDR3 for beta chain variable domain of TCR clone 147911 (TRBV29-1, TRBJ2-6)
CSVGDRGSGANVLTF

SEQ ID NO: 295823 - protein, 17 aa, Homo sapiens
  CDR3 for alpha chain variable domain of TCR clone 147912 (TRAV12-2, TRAJ4)
CAVNVRPVSGGYNKLIF

SEQ ID NO: 295824 - protein, 17 aa, Homo sapiens
  CDR3 for beta chain variable domain of TCR clone 147912 (TRBV6-3, TRBJ2-1)
CASSSSSGTRGLDEQFF

SEQ ID NO: 295825 - protein, 15 aa, Homo sapiens
  CDR3 for alpha chain variable domain of TCR clone 147913 (TRAV30, TRAJ32)
CGTEILGGATNKLIF

SEQ ID NO: 295826 - protein, 14 aa, Homo sapiens
  CDR3 for beta chain variable domain of TCR clone 147913 (TRBV7-2, TRBJ2-5)
CASSPRGSSETQYF

SEQ ID NO: 295827 - protein, 10 aa, Homo sapiens
  CDR3 for alpha chain variable domain of TCR clone 147914 (TRAV12-1, TRAJ43)
CVVHNNDMRF

SEQ ID NO: 295828 - protein, 12 aa, Homo sapiens
  CDR3 for beta chain variable domain of TCR clone 147914 (TRBV14, TRBJ2-7)
CASSRLKGEQYF

SEQ ID NO: 295829 - protein, 14 aa, Homo sapiens
  CDR3 for alpha chain variable domain of TCR clone 147915 (TRAV3, TRAJ37)
CAVKESGNTGKLIF

SEQ ID NO: 295830 - protein, 12 aa, Homo sapiens
  CDR3 for beta chain variable domain of TCR clone 147915 (TRBV5-1, TRBJ2-7)
CASSLDSYEQYF

SEQ ID NO: 295831 - protein, 15 aa, Homo sapiens
  CDR3 for alpha chain variable domain of TCR clone 147916 (TRAV35, TRAJ40)
CAGQLWDSGTYKYIF

SEQ ID NO: 295832 - protein, 16 aa, Homo sapiens
  CDR3 for beta chain variable domain of TCR clone 147916 (TRBV28, TRBJ2-2)
CASSLEGGSNTGELFF

SEQ ID NO: 295833 - protein, 15 aa, Homo sapiens
  CDR3 for alpha chain variable domain of TCR clone 147917 (TRAV17, TRAJ45)
CATAELGGGADGLTF

SEQ ID NO: 295834 - protein, 14 aa, Homo sapiens
  CDR3 for beta chain variable domain of TCR clone 147917 (TRBV3-1, TRBJ2-5)
CASSQAVRQEAQYF

SEQ ID NO: 295835 - protein, 14 aa, Homo sapiens
  CDR3 for alpha chain variable domain of TCR clone 147918 (TRAV12-2, TRAJ48)
WAVNAFFGNEQLTF

SEQ ID NO: 295836 - protein, 13 aa, Homo sapiens
  CDR3 for beta chain variable domain of TCR clone 147918 (TRBV28, TRBJ2-7)
CAGAQQGLDEQYF

SEQ ID NO: 295837 - protein, 14 aa, Homo sapiens
  CDR3 for alpha chain variable domain of TCR clone 147919 (TRAV38-1, TRAJ29)
CAFITPSGITPLVF

SEQ ID NO: 295838 - protein, 14 aa, Homo sapiens
  CDR3 for beta chain variable domain of TCR clone 147919 (TRBV18, TRBJ2-7)
CASSPRGGAYEQYF

SEQ ID NO: 295839 - protein, 12 aa, Homo sapiens
  CDR3 for alpha chain variable domain of TCR clone 147920 (TRAV13-1, TRAJ11)
CAGPSGYSTLTF

SEQ ID NO: 295840 - protein, 17 aa, Homo sapiens
  CDR3 for beta chain variable domain of TCR clone 147920 (TRBV11-2, TRBJ2-1)
CASSLYPPGVEYNEQFF

SEQ ID NO: 295841 - protein, 19 aa, Homo sapiens
  CDR3 for alpha chain variable domain of TCR clone 147921 (TRAV26-1, TRAJ42)
CVLLRRQTYYGGSQGNLIF

SEQ ID NO: 295842 - protein, 14 aa, Homo sapiens
  CDR3 for beta chain variable domain of TCR clone 147921 (TRBV19, TRBJ2-5)
CASSMTGQQETQYF

SEQ ID NO: 295843 - protein, 14 aa, Homo sapiens
  CDR3 for alpha chain variable domain of TCR clone 147922 (TRAV27, TRAJ33)
CAADIMDSNYQLIW

SEQ ID NO: 295844 - protein, 13 aa, Homo sapiens
  CDR3 for beta chain variable domain of TCR clone 147922 (TRBV28, TRBJ1-2)
CASSLQGRGGYTF

SEQ ID NO: 295845 - protein, 14 aa, Homo sapiens
  CDR3 for alpha chain variable domain of TCR clone 147923 (TRAV1-1, TRAJ35)
CAAPPIGFGNVLHC

SEQ ID NO: 295846 - protein, 18 aa, Homo sapiens
  CDR3 for beta chain variable domain of TCR clone 147923 (TRBV4-1, TRBJ1-5)
CASSQDPRGQGLNQPQHF

SEQ ID NO: 295847 - protein, 12 aa, Homo sapiens
  CDR3 for alpha chain variable domain of TCR clone 147924 (TRAV12-1, TRAJ40)
CVVYSGTYKYIF

SEQ ID NO: 295848 - protein, 21 aa, Homo sapiens
  CDR3 for beta chain variable domain of TCR clone 147924 (TRBV7-6, TRBJ2-1)
SRTRPCIAAPAAWGGADEQFF

SEQ ID NO: 295849 - protein, 13 aa, Homo sapiens
  CDR3 for alpha chain variable domain of TCR clone 147925 (TRAV13-2, TRAJ48)
CAEMDFGNEKLTF

SEQ ID NO: 295850 - protein, 14 aa, Homo sapiens
  CDR3 for beta chain variable domain of TCR clone 147925 (TRBV7-2, TRBJ2-3)
CASSQTGSSYTQYF

SEQ ID NO: 295851 - protein, 12 aa, Homo sapiens
  CDR3 for alpha chain variable domain of TCR clone 147926 (TRAV12-3, TRAJ17)
CATTLTGNTLTF

SEQ ID NO: 295852 - protein, 15 aa, Homo sapiens
  CDR3 for beta chain variable domain of TCR clone 147926 (TRBV20-1, TRBJ2-7)
CSARDRVSGMDEQYF

SEQ ID NO: 295853 - protein, 13 aa, Homo sapiens
  CDR3 for alpha chain variable domain of TCR clone 147927 (TRAV29/DV5, TRAJ48)
CAASLFGTEKLTF

SEQ ID NO: 295854 - protein, 15 aa, Homo sapiens
  CDR3 for beta chain variable domain of TCR clone 147927 (TRBV20-1, TRBJ1-1)
CSAKPGQKMNTEAFF

SEQ ID NO: 295855 - protein, 15 aa, Homo sapiens
  CDR3 for alpha chain variable domain of TCR clone 147928 (TRAV21, TRAJ24)
CAARSSTDSWGKLQF

SEQ ID NO: 295856 - protein, 17 aa, Homo sapiens
  CDR3 for beta chain variable domain of TCR clone 147928 (TRBV7-6, TRBJ2-5)
CASSPGLADPWGETQYF

SEQ ID NO: 295857 - protein, 16 aa, Homo sapiens
  CDR3 for alpha chain variable domain of TCR clone 147929 (TRAV13-1, TRAJ10)
CAAGYILTGGGNKLTF

SEQ ID NO: 295858 - protein, 14 aa, Homo sapiens
  CDR3 for beta chain variable domain of TCR clone 147929 (TRBV7-2, TRBJ2-7)
CASSPKTSFYEQYF

SEQ ID NO: 295859 - protein, 17 aa, Homo sapiens
  CDR3 for alpha chain variable domain of TCR clone 147930 (TRAV27, TRAJ18)
CAGLHRGRGSTLGRLYF

SEQ ID NO: 295860 - protein, 14 aa, Homo sapiens
  CDR3 for beta chain variable domain of TCR clone 147930 (TRBV20-1, TRBJ1-5)
CSARGRGSNQAQHF

SEQ ID NO: 295861 - protein, 14 aa, Homo sapiens
  CDR3 for alpha chain variable domain of TCR clone 147931 (TRAV9-2, TRAJ39)
CALYIYNAGNMLTF

SEQ ID NO: 295862 - protein, 15 aa, Homo sapiens
  CDR3 for beta chain variable domain of TCR clone 147931 (TRBV12-4, TRBJ1-1)
CASSLSVSRGAEAFF

SEQ ID NO: 295863 - protein, 14 aa, Homo sapiens
  CDR3 for alpha chain variable domain of TCR clone 147932 (TRAV17, TRAJ54)
CATDANQGAQKLVF

SEQ ID NO: 295864 - protein, 12 aa, Homo sapiens
  CDR3 for beta chain variable domain of TCR clone 147932 (TRBV6-3, TRBJ2-7)
CASSLTPYEQYF

SEQ ID NO: 295865 - protein, 15 aa, Homo sapiens
  CDR3 for alpha chain variable domain of TCR clone 147933 (TRAV8-2, TRAJ15)
CVVTMGNQAGTALIF

SEQ ID NO: 295866 - protein, 15 aa, Homo sapiens
  CDR3 for beta chain variable domain of TCR clone 147933 (TRBV18, TRBJ2-7)
CASSPLQGRTYEQYF

SEQ ID NO: 295867 - protein, 15 aa, Homo sapiens
  CDR3 for alpha chain variable domain of TCR clone 147934 (TRAV12-3, TRAJ6)
CAMSATAGGSYIPTF

SEQ ID NO: 295868 - protein, 15 aa, Homo sapiens
  CDR3 for beta chain variable domain of TCR clone 147934 (TRBV7-9, TRBJ1-6)
CASSSPGRGNSPLHF

SEQ ID NO: 295869 - protein, 18 aa, Homo sapiens
  CDR3 for alpha chain variable domain of TCR clone 147935 (TRAV26-1, TRAJ23)
CIVRVGLEVWNQGGKLIF

SEQ ID NO: 295870 - protein, 13 aa, Homo sapiens
  CDR3 for beta chain variable domain of TCR clone 147935 (TRBV12-4, TRBJ1-1)
CASSPGTGFEAFF

SEQ ID NO: 295871 - protein, 13 aa, Homo sapiens
  CDR3 for alpha chain variable domain of TCR clone 147936 (TRAV8-3, TRAJ4)
WVFYSGGYNRLIF

SEQ ID NO: 295872 - protein, 14 aa, Homo sapiens
  CDR3 for beta chain variable domain of TCR clone 147936 (TRBV7-9, TRBJ2-3)
CASSLEDGTDTQYF

SEQ ID NO: 295873 - protein, 17 aa, Homo sapiens
  CDR3 for alpha chain variable domain of TCR clone 147937 (TRAV3, TRAJ42)
CAVRDRDYGGSQGNLIF

SEQ ID NO: 295874 - protein, 15 aa, Homo sapiens
  CDR3 for beta chain variable domain of TCR clone 147937 (TRBV4-1, TRBJ2-7)
CASSQQGQGFDEQYF

SEQ ID NO: 295875 - protein, 11 aa, Homo sapiens
  CDR3 for alpha chain variable domain of TCR clone 147938 (TRAV12-2, TRAJ36)
CAVDGANNLFF

SEQ ID NO: 295876 - protein, 13 aa, Homo sapiens
  CDR3 for beta chain variable domain of TCR clone 147938 (TRBV28, TRBJ2-5)
CAGVSRGEETQYL

SEQ ID NO: 295877 - protein, 15 aa, Homo sapiens
  CDR3 for alpha chain variable domain of TCR clone 147939 (TRAV26-1, TRAJ29)
CIVRVEGSGNTPLVF

SEQ ID NO: 295878 - protein, 14 aa, Homo sapiens
  CDR3 for beta chain variable domain of TCR clone 147939 (TRBV7-3, TRBJ2-2)
CASSSGGYTGELFF

SEQ ID NO: 295879 - protein, 13 aa, Homo sapiens
  CDR3 for alpha chain variable domain of TCR clone 147940 (TRAV35, TRAJ42)
CAGFPGSRGNLIF

SEQ ID NO: 295880 - protein, 12 aa, Homo sapiens
  CDR3 for beta chain variable domain of TCR clone 147940 (TRBV11-2, TRBJ2-2)
CASSLGGGELFF

SEQ ID NO: 295881 - protein, 15 aa, Homo sapiens
  CDR3 for alpha chain variable domain of TCR clone 147941 (TRAV13-1, TRAJ17)
CAASKERAAGNKLTF

SEQ ID NO: 295882 - protein, 13 aa, Homo sapiens
  CDR3 for beta chain variable domain of TCR clone 147941 (TRBV7-7, TRBJ2-3)
CASSLSRADTQYF

SEQ ID NO: 295883 - protein, 17 aa, Homo sapiens
  CDR3 for alpha chain variable domain of TCR clone 147942 (TRAV8-6, TRAJ58)
CAVSSLVGETSGSRLTF

SEQ ID NO: 295884 - protein, 15 aa, Homo sapiens
  CDR3 for beta chain variable domain of TCR clone 147942 (TRBV6-5, TRBJ2-1)
CASSYDAGAGNEQFF

SEQ ID NO: 295885 - protein, 16 aa, Homo sapiens
  CDR3 for alpha chain variable domain of TCR clone 147943 (TRAV12-2, TRAJ40)
CAVKIPQEPTNTSLEQ

SEQ ID NO: 295886 - protein, 14 aa, Homo sapiens
  CDR3 for beta chain variable domain of TCR clone 147943 (TRBV20-1, TRBJ1-1)
CSAQTRIGGTEAFF

SEQ ID NO: 295887 - protein, 15 aa, Homo sapiens
  CDR3 for alpha chain variable domain of TCR clone 147944 (TRAV26-1, TRAJ27)
CIVRVEGSGNTPLVF

SEQ ID NO: 295888 - protein, 14 aa, Homo sapiens
  CDR3 for beta chain variable domain of TCR clone 147944 (TRBV18, TRBJ2-5)
RASSPGVSQETQYF

SEQ ID NO: 295889 - protein, 15 aa, Homo sapiens
  CDR3 for alpha chain variable domain of TCR clone 147945 (TRAV20, TRAJ53)
CAVQASGGSNYKLTF

SEQ ID NO: 295890 - protein, 16 aa, Homo sapiens
  CDR3 for beta chain variable domain of TCR clone 147945 (TRBV29-1, TRBJ2-7)
CSVEDAEDGTAYEQYF

SEQ ID NO: 295891 - protein, 17 aa, Homo sapiens
  CDR3 for alpha chain variable domain of TCR clone 147946 (TRAV8-3, TRAJ32)
CAVGPLDYGGATNKLIF

SEQ ID NO: 295892 - protein, 15 aa, Homo sapiens
  CDR3 for beta chain variable domain of TCR clone 147946 (TRBV18, TRBJ1-2)
CASSPGNGLGDGYTF

SEQ ID NO: 295893 - protein, 12 aa, Homo sapiens
  CDR3 for alpha chain variable domain of TCR clone 147947 (TRAV8-2, TRAJ30)
CVVSDRDDKIIF

SEQ ID NO: 295894 - protein, 13 aa, Homo sapiens
  CDR3 for beta chain variable domain of TCR clone 147947 (TRBV7-9, TRBJ1-2)
CASSLKQNYGYTF

SEQ ID NO: 295895 - protein, 16 aa, Homo sapiens
  CDR3 for alpha chain variable domain of TCR clone 147948 (TRAV29/DV5, TRAJ30)
QCTSVQQANRDDKLIF

SEQ ID NO: 295896 - protein, 13 aa, Homo sapiens
  CDR3 for beta chain variable domain of TCR clone 147948 (TRBV12-5, TRBJ2-3)
CASQNRGTDTQYF

SEQ ID NO: 295897 - protein, 12 aa, Homo sapiens
  CDR3 for alpha chain variable domain of TCR clone 147949 (TRAV17, TRAJ20)
CATQSNDYKLSF

SEQ ID NO: 295898 - protein, 11 aa, Homo sapiens
  CDR3 for beta chain variable domain of TCR clone 147949 (TRBV12-4, TRBJ2-3)
CASTATDTQYF

SEQ ID NO: 295899 - protein, 16 aa, Homo sapiens
  CDR3 for alpha chain variable domain of TCR clone 147950 (TRAV30, TRAJ24)
CGTEIVDADSWGKFQY

SEQ ID NO: 295900 - protein, 19 aa, Homo sapiens
  CDR3 for beta chain variable domain of TCR clone 147950 (TRBV28, TRBJ2-1)
CASSFSIRGSGRTRYEQFF

SEQ ID NO: 295901 - protein, 10 aa, Homo sapiens
  CDR3 for alpha chain variable domain of TCR clone 147951 (TRAV13-1, TRAJ43)
CAASKNDMRF

SEQ ID NO: 295902 - protein, 16 aa, Homo sapiens
  CDR3 for beta chain variable domain of TCR clone 147951 (TRBV7-9, TRBJ2-1)
CASSDVAGGSYNEQFF

SEQ ID NO: 295903 - protein, 15 aa, Homo sapiens
  CDR3 for alpha chain variable domain of TCR clone 147952 (TRAV12-2, TRAJ53)
CAVNGGGGRNYKLTF

SEQ ID NO: 295904 - protein, 14 aa, Homo sapiens
  CDR3 for beta chain variable domain of TCR clone 147952 (TRBV11-2, TRBJ2-5)
CASSRTGGIETQYF

SEQ ID NO: 295905 - protein, 15 aa, Homo sapiens
  CDR3 for alpha chain variable domain of TCR clone 147953 (TRAV8-4, TRAJ37)
CAVSRGSGNTGKLIF

SEQ ID NO: 295906 - protein, 15 aa, Homo sapiens
  CDR3 for beta chain variable domain of TCR clone 147953 (TRBV5-1, TRBJ2-7)
CASSLDLTSSYEQYI

SEQ ID NO: 295907 - protein, 14 aa, Homo sapiens
  CDR3 for alpha chain variable domain of TCR clone 147954 (TRAV12-2, TRAJ17)
CAVLFKAAGNRLTF

SEQ ID NO: 295908 - protein, 15 aa, Homo sapiens
  CDR3 for beta chain variable domain of TCR clone 147954 (TRBV20-1, TRBJ2-7)
CSARDRVSGMDEQYF

SEQ ID NO: 295909 - protein, 16 aa, Homo sapiens
  CDR3 for alpha chain variable domain of TCR clone 147955 (TRAV30, TRAJ24)
CGTEIVDADSWGKFEF

SEQ ID NO: 295910 - protein, 14 aa, Homo sapiens
  CDR3 for beta chain variable domain of TCR clone 147955 (TRBV12-5, TRBJ2-5)
CASGSRTHQETQHF

SEQ ID NO: 295911 - protein, 13 aa, Homo sapiens
  CDR3 for alpha chain variable domain of TCR clone 147956 (TRAV1-2, TRAJ24)
CAVTTDSWGKLQF

SEQ ID NO: 295912 - protein, 13 aa, Homo sapiens
  CDR3 for beta chain variable domain of TCR clone 147956 (TRBV20-1, TRBJ1-1)
CSARGGGKTEAFF

SEQ ID NO: 295913 - protein, 11 aa, Homo sapiens
  CDR3 for alpha chain variable domain of TCR clone 147957 (TRAV12-1, TRAJ21)
CVVYNFNKFYF

SEQ ID NO: 295914 - protein, 16 aa, Homo sapiens
  CDR3 for beta chain variable domain of TCR clone 147957 (TRBV11-3, TRBJ2-5)
CASSSVVAGSTETQYF

SEQ ID NO: 295915 - protein, 12 aa, Homo sapiens
  CDR3 for alpha chain variable domain of TCR clone 147958 (TRAV13-1, TRAJ48)
WSANFGNEKLTF

SEQ ID NO: 295916 - protein, 11 aa, Homo sapiens
  CDR3 for beta chain variable domain of TCR clone 147958 (TRBV20-1, TRBJ1-5)
CSAQGDQPQHF

SEQ ID NO: 295917 - protein, 15 aa, Homo sapiens
  CDR3 for alpha chain variable domain of TCR clone 147959 (TRAV3, TRAJ5)
CAVRDLDTGRRAPTF

SEQ ID NO: 295918 - protein, 15 aa, Homo sapiens
  CDR3 for beta chain variable domain of TCR clone 147959 (TRBV20-1, TRBJ2-1)
CSARSTGGPGNEQFF

SEQ ID NO: 295919 - protein, 16 aa, Homo sapiens
  CDR3 for alpha chain variable domain of TCR clone 147960 (TRAV12-3, TRAJ10)
CAMKKGITGGGNKLTI

SEQ ID NO: 295920 - protein, 12 aa, Homo sapiens
  CDR3 for beta chain variable domain of TCR clone 147960 (TRBV20-1, TRBJ2-7)
CSAITPTKEQYF

SEQ ID NO: 295921 - protein, 14 aa, Homo sapiens
  CDR3 for alpha chain variable domain of TCR clone 147961 (TRAV8-4, TRAJ12)
CAVSPMDSSYKLLF

SEQ ID NO: 295922 - protein, 15 aa, Homo sapiens
  CDR3 for beta chain variable domain of TCR clone 147961 (TRBV5-5, TRBJ2-1)
CASSPEAETYNEQFF

SEQ ID NO: 295923 - protein, 16 aa, Homo sapiens
  CDR3 for alpha chain variable domain of TCR clone 147962 (TRAV12-3, TRAJ53)
CAMSPGSGGSNYNLTF

SEQ ID NO: 295924 - protein, 15 aa, Homo sapiens
  CDR3 for beta chain variable domain of TCR clone 147962 (TRBV27, TRBJ2-1)
CASSNGGGSSNEQFF

SEQ ID NO: 295925 - protein, 13 aa, Homo sapiens
  CDR3 for alpha chain variable domain of TCR clone 147963 (TRAV29/DV5, TRAJ29)
CAASAAGKTPSVF

SEQ ID NO: 295926 - protein, 14 aa, Homo sapiens
  CDR3 for beta chain variable domain of TCR clone 147963 (TRBV19, TRBJ2-3)
CASSAPRGTDTQYF

SEQ ID NO: 295927 - protein, 17 aa, Homo sapiens
  CDR3 for alpha chain variable domain of TCR clone 147964 (TRAV2, TRAJ36)
CAVEDRGNWGKQPLLWD

SEQ ID NO: 295928 - protein, 14 aa, Homo sapiens
  CDR3 for beta chain variable domain of TCR clone 147964 (TRBV12-4, TRBJ1-3)
CASTLTGAGNTIYF

SEQ ID NO: 295929 - protein, 13 aa, Homo sapiens
  CDR3 for alpha chain variable domain of TCR clone 147965 (TRAV3, TRAJ41)
CAVRSNSGYALNF

SEQ ID NO: 295930 - protein, 14 aa, Homo sapiens
  CDR3 for beta chain variable domain of TCR clone 147965 (TRBV7-2, TRBJ2-7)
CASSPKTSFYEQYF

SEQ ID NO: 295931 - protein, 13 aa, Homo sapiens
  CDR3 for alpha chain variable domain of TCR clone 147966 (TRAV1-1, TRAJ33)
CAVRRDSNYQLIC

SEQ ID NO: 295932 - protein, 16 aa, Homo sapiens
  CDR3 for beta chain variable domain of TCR clone 147966 (TRBV6-1, TRBJ2-2)
CASSAFRGGDTGELFF

SEQ ID NO: 295933 - protein, 12 aa, Homo sapiens
  CDR3 for alpha chain variable domain of TCR clone 147967 (TRAV12-3, TRAJ17)
CAMTLTGNKLTF

SEQ ID NO: 295934 - protein, 15 aa, Homo sapiens
  CDR3 for beta chain variable domain of TCR clone 147967 (TRBV19, TRBJ2-5)
CASHRLAGAQETQYF

SEQ ID NO: 295935 - protein, 11 aa, Homo sapiens
  CDR3 for alpha chain variable domain of TCR clone 147968 (TRAV1-2, TRAJ20)
CAVANDYKLSF

SEQ ID NO: 295936 - protein, 14 aa, Homo sapiens
  CDR3 for beta chain variable domain of TCR clone 147968 (TRBV27, TRBJ1-1)
CASSLLSGLSEAFF

SEQ ID NO: 295937 - protein, 13 aa, Homo sapiens
  CDR3 for alpha chain variable domain of TCR clone 147969 (TRAV36/DV7, TRAJ54)
CAVDIQGAQKLVF

SEQ ID NO: 295938 - protein, 15 aa, Homo sapiens
  CDR3 for beta chain variable domain of TCR clone 147969 (TRBV3-1, TRBJ2-5)
CASSANLGGPETQYF

SEQ ID NO: 295939 - protein, 16 aa, Homo sapiens
  CDR3 for alpha chain variable domain of TCR clone 147970 (TRAV8-3, TRAJ8)
CADPRDGNTGFQKLVF

SEQ ID NO: 295940 - protein, 14 aa, Homo sapiens
  CDR3 for beta chain variable domain of TCR clone 147970 (TRBV4-1, TRBJ2-2)
CASSQAVNTGELFF

SEQ ID NO: 295941 - protein, 14 aa, Homo sapiens
  CDR3 for alpha chain variable domain of TCR clone 147971 (TRAV13-1, TRAJ35)
CAASKGGFGNVLHC

SEQ ID NO: 295942 - protein, 12 aa, Homo sapiens
  CDR3 for beta chain variable domain of TCR clone 147971 (TRBV3-1, TRBJ2-1)
CASSQGSSGQFF

SEQ ID NO: 295943 - protein, 18 aa, Homo sapiens
  CDR3 for alpha chain variable domain of TCR clone 147972 (TRAV21, TRAJ52)
CAVRPSPAGGTSYGKLTF

SEQ ID NO: 295944 - protein, 17 aa, Homo sapiens
  CDR3 for beta chain variable domain of TCR clone 147972 (TRBV13, TRBJ2-3)
CASGLSRVAGGGNTQYF

SEQ ID NO: 295945 - protein, 15 aa, Homo sapiens
  CDR3 for alpha chain variable domain of TCR clone 147973 (TRAV36/DV7, TRAJ38)
CAGGQGAGNNRKLIW

SEQ ID NO: 295946 - protein, 12 aa, Homo sapiens
  CDR3 for beta chain variable domain of TCR clone 147973 (TRBV6-1, TRBJ2-5)
CASSEGRETQYF

SEQ ID NO: 295947 - protein, 13 aa, Homo sapiens
  CDR3 for alpha chain variable domain of TCR clone 147974 (TRAV20, TRAJ20)
CAVQAGIGYKLSF

SEQ ID NO: 295948 - protein, 13 aa, Homo sapiens
  CDR3 for beta chain variable domain of TCR clone 147974 (TRBV3-1, TRBJ2-3)
CASSQGGGDTQYF

SEQ ID NO: 295949 - protein, 16 aa, Homo sapiens
  CDR3 for alpha chain variable domain of TCR clone 147975 (TRAV26-1, TRAJ37)
CIVRGDGSGNTGKLIF

SEQ ID NO: 295950 - protein, 15 aa, Homo sapiens
  CDR3 for beta chain variable domain of TCR clone 147975 (TRBV10-1, TRBJ2-1)
CASSEWRGTYNEQFF

SEQ ID NO: 295951 - protein, 14 aa, Homo sapiens
  CDR3 for alpha chain variable domain of TCR clone 147976 (TRAV9-2, TRAJ39)
CALYIYNAGNMLTF

SEQ ID NO: 295952 - protein, 15 aa, Homo sapiens
  CDR3 for beta chain variable domain of TCR clone 147976 (TRBV7-3, TRBJ2-2)
CASSREVLPTGELFF

SEQ ID NO: 295953 - protein, 14 aa, Homo sapiens
  CDR3 for alpha chain variable domain of TCR clone 147977 (TRAV34, TRAJ44)
CGADGTGTSSKLTF

SEQ ID NO: 295954 - protein, 12 aa, Homo sapiens
  CDR3 for beta chain variable domain of TCR clone 147977 (TRBV11-2, TRBJ2-2)
CASSLGGGELFF

SEQ ID NO: 295955 - protein, 14 aa, Homo sapiens
  CDR3 for alpha chain variable domain of TCR clone 147978 (TRAV8-1, TRAJ24)
CAVHAADSWGKLQF

SEQ ID NO: 295956 - protein, 16 aa, Homo sapiens
  CDR3 for beta chain variable domain of TCR clone 147978 (TRBV4-3, TRBJ2-1)
CASSPALDRGVNEQFF

SEQ ID NO: 295957 - protein, 13 aa, Homo sapiens
  CDR3 for alpha chain variable domain of TCR clone 147979 (TRAV1-2, TRAJ31)
CAVSGYNNARLMF

SEQ ID NO: 295958 - protein, 14 aa, Homo sapiens
  CDR3 for beta chain variable domain of TCR clone 147979 (TRBV12-4, TRBJ1-3)
CASTLTGAGNTIYF

SEQ ID NO: 295959 - protein, 12 aa, Homo sapiens
  CDR3 for alpha chain variable domain of TCR clone 147980 (TRAV16, TRAJ56)
CAPIGANSKLTF

SEQ ID NO: 295960 - protein, 17 aa, Homo sapiens
  CDR3 for beta chain variable domain of TCR clone 147980 (TRBV27, TRBJ2-6)
CASSLTGFASGANVLTF

SEQ ID NO: 295961 - protein, 12 aa, Homo sapiens
  CDR3 for alpha chain variable domain of TCR clone 147981 (TRAV26-1, TRAJ26)
CIVFIYGQNFVF

SEQ ID NO: 295962 - protein, 15 aa, Homo sapiens
  CDR3 for beta chain variable domain of TCR clone 147981 (TRBV7-2, TRBJ2-7)
CASSLKGALTYEQYF

SEQ ID NO: 295963 - protein, 16 aa, Homo sapiens
  CDR3 for alpha chain variable domain of TCR clone 147982 (TRAV3, TRAJ10)
CAVRDMMAGGGNKLTF

SEQ ID NO: 295964 - protein, 16 aa, Homo sapiens
  CDR3 for beta chain variable domain of TCR clone 147982 (TRBV19, TRBJ2-2)
CASSFPGQGLAGELFF

SEQ ID NO: 295965 - protein, 13 aa, Homo sapiens
  CDR3 for alpha chain variable domain of TCR clone 147983 (TRAV13-1, TRAJ39)
CAAGIVMQATCSP

SEQ ID NO: 295966 - protein, 15 aa, Homo sapiens
  CDR3 for beta chain variable domain of TCR clone 147983 (TRBV11-2, TRBJ2-2)
CASSSDKVNAGELFF

SEQ ID NO: 295967 - protein, 15 aa, Homo sapiens
  CDR3 for alpha chain variable domain of TCR clone 147984 (TRAV8-3, TRAJ27)
CAVGPSKTNAGKSTF

SEQ ID NO: 295968 - protein, 12 aa, Homo sapiens
  CDR3 for beta chain variable domain of TCR clone 147984 (TRBV3-1, TRBJ2-1)
CASGGLGNEQFF

SEQ ID NO: 295969 - protein, 14 aa, Homo sapiens
  CDR3 for alpha chain variable domain of TCR clone 147985 (TRAV38-1, TRAJ57)
CAFMNTGGSEKLVF

SEQ ID NO: 295970 - protein, 12 aa, Homo sapiens
  CDR3 for beta chain variable domain of TCR clone 147985 (TRBV20-1, TRBJ1-5)
RSTSQGNQPQHF

SEQ ID NO: 295971 - protein, 17 aa, Homo sapiens
  CDR3 for alpha chain variable domain of TCR clone 147986 (TRAV1-2, TRAJ9)
CAVRGPNPDTGGFKTIF

SEQ ID NO: 295972 - protein, 16 aa, Homo sapiens
  CDR3 for beta chain variable domain of TCR clone 147986 (TRBV7-2, TRBJ1-1)
CASSSNGGVMNTEAFF

SEQ ID NO: 295973 - protein, 14 aa, Homo sapiens
  CDR3 for alpha chain variable domain of TCR clone 147987 (TRAV26-1, TRAJ39)
CIVRGSRAGNMPTF

SEQ ID NO: 295974 - protein, 15 aa, Homo sapiens
  CDR3 for beta chain variable domain of TCR clone 147987 (TRBV7-9, TRBJ1-5)
RASSQGHQPNQPQHF

SEQ ID NO: 295975 - protein, 15 aa, Homo sapiens
  CDR3 for alpha chain variable domain of TCR clone 147988 (TRAV12-1, TRAJ44)
CVADLPTGTASKLTF

SEQ ID NO: 295976 - protein, 12 aa, Homo sapiens
  CDR3 for beta chain variable domain of TCR clone 147988 (TRBV24-1, TRBJ1-1)
CATLYPDTEAFF

SEQ ID NO: 295977 - protein, 14 aa, Homo sapiens
  CDR3 for alpha chain variable domain of TCR clone 147989 (TRAV9-2, TRAJ39)
CALYIYNAGNMLTF

SEQ ID NO: 295978 - protein, 16 aa, Homo sapiens
  CDR3 for beta chain variable domain of TCR clone 147989 (TRBV19, TRBJ2-2)
CAIRSPGTGATGELFF

SEQ ID NO: 295979 - protein, 11 aa, Homo sapiens
  CDR3 for alpha chain variable domain of TCR clone 147990 (TRAV13-2, TRAJ26)
CAEIPGQNFVF

SEQ ID NO: 295980 - protein, 15 aa, Homo sapiens
  CDR3 for beta chain variable domain of TCR clone 147990 (TRBV7-9, TRBJ2-2)
CASGPLDTFPGELFF

SEQ ID NO: 295981 - protein, 14 aa, Homo sapiens
  CDR3 for alpha chain variable domain of TCR clone 147991 (TRAV21, TRAJ23)
CAIMIYNQGGKLIF

SEQ ID NO: 295982 - protein, 18 aa, Homo sapiens
  CDR3 for beta chain variable domain of TCR clone 147991 (TRBV20-1, TRBJ2-6)
CSAETTPTPGSGANVLTF

SEQ ID NO: 295983 - protein, 12 aa, Homo sapiens
  CDR3 for alpha chain variable domain of TCR clone 147992 (TRAV12-3, TRAJ17)
CAMTLTGNKLTL

SEQ ID NO: 295984 - protein, 15 aa, Homo sapiens
  CDR3 for beta chain variable domain of TCR clone 147992 (TRBV6-3, TRBJ2-7)
CASSSPGTVFYEQYF

SEQ ID NO: 295985 - protein, 12 aa, Homo sapiens
  CDR3 for alpha chain variable domain of TCR clone 147993 (TRAV3, TRAJ20)
CAVRDPDYKLSF

SEQ ID NO: 295986 - protein, 13 aa, Homo sapiens
  CDR3 for beta chain variable domain of TCR clone 147993 (TRBV11-2, TRBJ1-6)
CASSLAGTSPLHF

SEQ ID NO: 295987 - protein, 12 aa, Homo sapiens
  CDR3 for alpha chain variable domain of TCR clone 147994 (TRAV12-1, TRAJ7)
CVVNMRGNNTRF

SEQ ID NO: 295988 - protein, 15 aa, Homo sapiens
  CDR3 for beta chain variable domain of TCR clone 147994 (TRBV27, TRBJ2-3)
CASSLGLAATDTQYF

SEQ ID NO: 295989 - protein, 23 aa, Homo sapiens
  CDR3 for alpha chain variable domain of TCR clone 147995 (TRAV26-1, TRAJ38)
CIADNAGNNHIQNPDPAVYQLRD

SEQ ID NO: 295990 - protein, 13 aa, Homo sapiens
  CDR3 for beta chain variable domain of TCR clone 147995 (TRBV18, TRBJ1-1)
CASSPETKPEAFF

SEQ ID NO: 295991 - protein, 17 aa, Homo sapiens
  CDR3 for alpha chain variable domain of TCR clone 147996 (TRAV8-1, TRAJ43)
CAVTNDMRFGAGTRLTV

SEQ ID NO: 295992 - protein, 17 aa, Homo sapiens
  CDR3 for beta chain variable domain of TCR clone 147996 (TRBV20-1, TRBJ2-2)
CSASGSGQGGLTGELFF

SEQ ID NO: 295993 - protein, 15 aa, Homo sapiens
  CDR3 for alpha chain variable domain of TCR clone 147997 (TRAV13-2, TRAJ37)
CREYEDPGNTGQLIF

SEQ ID NO: 295994 - protein, 13 aa, Homo sapiens
  CDR3 for beta chain variable domain of TCR clone 147997 (TRBV20-1, TRBJ2-7)
CSARSGHPYEQYF

SEQ ID NO: 295995 - protein, 14 aa, Homo sapiens
  CDR3 for alpha chain variable domain of TCR clone 147998 (TRAV20, TRAJ20)
CAVRRGYNDYKLSF

SEQ ID NO: 295996 - protein, 17 aa, Homo sapiens
  CDR3 for beta chain variable domain of TCR clone 147998 (TRBV13, TRBJ2-3)
CASSLSRVAGGRNTQYF

SEQ ID NO: 295997 - protein, 11 aa, Homo sapiens
  CDR3 for alpha chain variable domain of TCR clone 147999 (TRAV16, TRAJ33)
CALPSNYQLIW

SEQ ID NO: 295998 - protein, 15 aa, Homo sapiens
  CDR3 for beta chain variable domain of TCR clone 147999 (TRBV4-1, TRBJ2-7)
CASSQQGQGFDEQYF

SEQ ID NO: 295999 - protein, 12 aa, Homo sapiens
  CDR3 for alpha chain variable domain of TCR clone 148000 (TRAV30, TRAJ43)
CGTEERGNVMRF

SEQ ID NO: 296000 - protein, 17 aa, Homo sapiens
  CDR3 for beta chain variable domain of TCR clone 148000 (TRBV11-2, TRBJ2-1)
CASSLYPPGVEYNEQFF

SEQ ID NO: 296001 - protein, 13 aa, Homo sapiens
  CDR3 for alpha chain variable domain of TCR clone 148001 (TRAV8-3, TRAJ48)
CAVVPFVNEKSTF

SEQ ID NO: 296002 - protein, 14 aa, Homo sapiens
  CDR3 for beta chain variable domain of TCR clone 148001 (TRBV18, TRBJ2-7)
CASSPRGGAYEQYF

SEQ ID NO: 296003 - protein, 12 aa, Homo sapiens
  CDR3 for alpha chain variable domain of TCR clone 148002 (TRAV1-2, TRAJ33)
CAALDSNYQLIW

SEQ ID NO: 296004 - protein, 12 aa, Homo sapiens
  CDR3 for beta chain variable domain of TCR clone 148002 (TRBV7-3, TRBJ2-1)
CASSFQSGPQFF

SEQ ID NO: 296005 - protein, 15 aa, Homo sapiens
  CDR3 for alpha chain variable domain of TCR clone 148003 (TRAV35, TRAJ50)
CAGQLRKTSYDKVIF

SEQ ID NO: 296006 - protein, 16 aa, Homo sapiens
  CDR3 for beta chain variable domain of TCR clone 148003 (TRBV11-2, TRBJ2-1)
CASSFGGSFVYNEQFF

SEQ ID NO: 296007 - protein, 11 aa, Homo sapiens
  CDR3 for alpha chain variable domain of TCR clone 148004 (TRAV4, TRAJ31)
CLVGDNARLMF

SEQ ID NO: 296008 - protein, 17 aa, Homo sapiens
  CDR3 for beta chain variable domain of TCR clone 148004 (TRBV7-8, TRBJ1-2)
CASSLRPLQGHLYGYTF

SEQ ID NO: 296009 - protein, 14 aa, Homo sapiens
  CDR3 for alpha chain variable domain of TCR clone 148005 (TRAV12-2, TRAJ5)
CAVNRSTGRRALTF

SEQ ID NO: 296010 - protein, 15 aa, Homo sapiens
  CDR3 for beta chain variable domain of TCR clone 148005 (TRBV18, TRBJ2-7)
CASSSAPTGNYEQYF

SEQ ID NO: 296011 - protein, 12 aa, Homo sapiens
  CDR3 for alpha chain variable domain of TCR clone 148006 (TRAV27, TRAJ35)
CAGADFGNVLHC

SEQ ID NO: 296012 - protein, 16 aa, Homo sapiens
  CDR3 for beta chain variable domain of TCR clone 148006 (TRBV19, TRBJ2-1)
CASSKAGPSSYNEQFF

SEQ ID NO: 296013 - protein, 16 aa, Homo sapiens
  CDR3 for alpha chain variable domain of TCR clone 148007 (TRAV12-3, TRAJ50)
CAMRNPMKTSYDKVIF

SEQ ID NO: 296014 - protein, 13 aa, Homo sapiens
  CDR3 for beta chain variable domain of TCR clone 148007 (TRBV4-1, TRBJ2-3)
CASSLDFTDTQYF

SEQ ID NO: 296015 - protein, 13 aa, Homo sapiens
  CDR3 for alpha chain variable domain of TCR clone 148008 (TRAV12-2, TRAJ30)
CAVNLNRDDKIIF

SEQ ID NO: 296016 - protein, 14 aa, Homo sapiens
  CDR3 for beta chain variable domain of TCR clone 148008 (TRBV20-1, TRBJ2-3)
CSASGGGSTDTQYF

SEQ ID NO: 296017 - protein, 14 aa, Homo sapiens
  CDR3 for alpha chain variable domain of TCR clone 148009 (TRAV41, TRAJ57)
CAVLLQGGSEKLVF

SEQ ID NO: 296018 - protein, 12 aa, Homo sapiens
  CDR3 for beta chain variable domain of TCR clone 148009 (TRBV10-3, TRBJ1-1)
CATMDRPPEAFL

SEQ ID NO: 296019 - protein, 15 aa, Homo sapiens
  CDR3 for alpha chain variable domain of TCR clone 148010 (TRAV8-3, TRAJ45)
CPSSYSGGGADGLTF

SEQ ID NO: 296020 - protein, 18 aa, Homo sapiens
  CDR3 for beta chain variable domain of TCR clone 148010 (TRBV18, TRBJ1-3)
CASSPRGGAGPSGNTIYF

SEQ ID NO: 296021 - protein, 15 aa, Homo sapiens
  CDR3 for alpha chain variable domain of TCR clone 148011 (TRAV17, TRAJ57)
CATAPSQGGSEKLVF

SEQ ID NO: 296022 - protein, 14 aa, Homo sapiens
  CDR3 for beta chain variable domain of TCR clone 148011 (TRBV12-5, TRBJ2-5)
CASGSRTHQETQYF

SEQ ID NO: 296023 - protein, 13 aa, Homo sapiens
  CDR3 for alpha chain variable domain of TCR clone 148012 (TRAV2, TRAJ40)
CAVVTSGTYKYIF

SEQ ID NO: 296024 - protein, 12 aa, Homo sapiens
  CDR3 for beta chain variable domain of TCR clone 148012 (TRBV5-6, TRBJ1-2)
CASSLVQNGYTF

SEQ ID NO: 296025 - protein, 15 aa, Homo sapiens
  CDR3 for alpha chain variable domain of TCR clone 148013 (TRAV3, TRAJ9)
CAVRARNTGGFKTIF

SEQ ID NO: 296026 - protein, 14 aa, Homo sapiens
  CDR3 for beta chain variable domain of TCR clone 148013 (TRBV7-2, TRBJ1-6)
CASSLTGVNSPLHF

SEQ ID NO: 296027 - protein, 17 aa, Homo sapiens
  CDR3 for alpha chain variable domain of TCR clone 148014 (TRAV3, TRAJ13)
CAVRDMRRTGCYQKVTF

SEQ ID NO: 296028 - protein, 14 aa, Homo sapiens
  CDR3 for beta chain variable domain of TCR clone 148014 (TRBV12-5, TRBJ2-5)
CASGSRTHQETQYF

SEQ ID NO: 296029 - protein, 12 aa, Homo sapiens
  CDR3 for alpha chain variable domain of TCR clone 148015 (TRAV23/DV6, TRAJ16)
CAARGRGQKLLF

SEQ ID NO: 296030 - protein, 15 aa, Homo sapiens
  CDR3 for beta chain variable domain of TCR clone 148015 (TRBV15, TRBJ2-1)
CATSRPGQGLHEQFV

SEQ ID NO: 296031 - protein, 13 aa, Homo sapiens
  CDR3 for alpha chain variable domain of TCR clone 148016 (TRAV8-3, TRAJ28)
CAVGAVGSYQLTF

SEQ ID NO: 296032 - protein, 18 aa, Homo sapiens
  CDR3 for beta chain variable domain of TCR clone 148016 (TRBV23-1, TRBJ2-7)
CASSQYRRTDSTSSTSGR

SEQ ID NO: 296033 - protein, 13 aa, Homo sapiens
  CDR3 for alpha chain variable domain of TCR clone 148017 (TRAV27, TRAJ3)
ASLRGSSASKIIF

SEQ ID NO: 296034 - protein, 15 aa, Homo sapiens
  CDR3 for beta chain variable domain of TCR clone 148017 (TRBV5-1, TRBJ2-3)
CASSVTSGSTDTQYF

SEQ ID NO: 296035 - protein, 13 aa, Homo sapiens
  CDR3 for alpha chain variable domain of TCR clone 148018 (TRAV27, TRAJ10)
CAGLTGGGNKLTF

SEQ ID NO: 296036 - protein, 14 aa, Homo sapiens
  CDR3 for beta chain variable domain of TCR clone 148018 (TRBV25-1, TRBJ1-1)
CASTHLGGNTEAFF

SEQ ID NO: 296037 - protein, 14 aa, Homo sapiens
  CDR3 for alpha chain variable domain of TCR clone 148019 (TRAV17, TRAJ16)
CATADFSDGQKLLF

SEQ ID NO: 296038 - protein, 16 aa, Homo sapiens
  CDR3 for beta chain variable domain of TCR clone 148019 (TRBV12-4, TRBJ2-7)
CASSLIGGTGTYEQYF

SEQ ID NO: 296039 - protein, 15 aa, Homo sapiens
  CDR3 for alpha chain variable domain of TCR clone 148020 (TRAV35, TRAJ53)
CAGLTQAGSNYKLTF

SEQ ID NO: 296040 - protein, 11 aa, Homo sapiens
  CDR3 for beta chain variable domain of TCR clone 148020 (TRBV20-1, TRBJ1-2)
CSIWGSYGYTF

SEQ ID NO: 296041 - protein, 11 aa, Homo sapiens
  CDR3 for alpha chain variable domain of TCR clone 148021 (TRAV36/DV7, TRAJ54)
CAVEGAQKLVF

SEQ ID NO: 296042 - protein, 13 aa, Homo sapiens
  CDR3 for beta chain variable domain of TCR clone 148021 (TRBV12-4, TRBJ2-5)
CASSPGTEETQYF

SEQ ID NO: 296043 - protein, 15 aa, Homo sapiens
  CDR3 for alpha chain variable domain of TCR clone 148022 (TRAV8-2, TRAJ16)
CVVSDGFSDGQKLLF

SEQ ID NO: 296044 - protein, 14 aa, Homo sapiens
  CDR3 for beta chain variable domain of TCR clone 148022 (TRBV7-3, TRBJ1-1)
CASSVGTGYTEAFF

SEQ ID NO: 296045 - protein, 13 aa, Homo sapiens
  CDR3 for alpha chain variable domain of TCR clone 148023 (TRAV26-1, TRAJ34)
CIVRPWTTDKLIF

SEQ ID NO: 296046 - protein, 13 aa, Homo sapiens
  CDR3 for beta chain variable domain of TCR clone 148023 (TRBV5-1, TRBJ2-1)
CASSLGSYNEQFF

SEQ ID NO: 296047 - protein, 14 aa, Homo sapiens
  CDR3 for alpha chain variable domain of TCR clone 148024 (TRAV13-2, TRAJ41)
CAERPDWAGYAINF

SEQ ID NO: 296048 - protein, 15 aa, Homo sapiens
  CDR3 for beta chain variable domain of TCR clone 148024 (TRBV2, TRBJ2-1)
CASSEEREGDNEQFF

SEQ ID NO: 296049 - protein, 17 aa, Homo sapiens
  CDR3 for alpha chain variable domain of TCR clone 148025 (TRAV3, TRAJ6)
CAVRDGPRAGGSYIPTF

SEQ ID NO: 296050 - protein, 18 aa, Homo sapiens
  CDR3 for beta chain variable domain of TCR clone 148025 (TRBV6-5, TRBJ2-6)
CASRTPGQGKTGANVLTF

SEQ ID NO: 296051 - protein, 13 aa, Homo sapiens
  CDR3 for alpha chain variable domain of TCR clone 148026 (TRAV2, TRAJ15)
CAVASQAGTALIF

SEQ ID NO: 296052 - protein, 15 aa, Homo sapiens
  CDR3 for beta chain variable domain of TCR clone 148026 (TRBV7-8, TRBJ1-5)
CASSRGGGADQPQHF

SEQ ID NO: 296053 - protein, 15 aa, Homo sapiens
  CDR3 for alpha chain variable domain of TCR clone 148027 (TRAV1-2, TRAJ3)
CAVRGGYSSASKIIF

SEQ ID NO: 296054 - protein, 11 aa, Homo sapiens
  CDR3 for beta chain variable domain of TCR clone 148027 (TRBV11-2, TRBJ2-2)
CASSLPGELFV

SEQ ID NO: 296055 - protein, 15 aa, Homo sapiens
  CDR3 for alpha chain variable domain of TCR clone 148028 (TRAV25, TRAJ52)
CAGTSGSTSYGKLTF

SEQ ID NO: 296056 - protein, 16 aa, Homo sapiens
  CDR3 for beta chain variable domain of TCR clone 148028 (TRBV15, TRBJ1-2)
CATSRGPRTGGGGFTF

SEQ ID NO: 296057 - protein, 14 aa, Homo sapiens
  CDR3 for alpha chain variable domain of TCR clone 148029 (TRAV1-2, TRAJ8)
CAVREDTGFQKLVF

SEQ ID NO: 296058 - protein, 17 aa, Homo sapiens
  CDR3 for beta chain variable domain of TCR clone 148029 (TRBV28, TRBJ2-7)
CASSPGLAGGDSSEQYF

SEQ ID NO: 296059 - protein, 18 aa, Homo sapiens
  CDR3 for alpha chain variable domain of TCR clone 148030 (TRAV29/DV5, TRAJ52)
CAAGFRGAGGTGYGKLTF

SEQ ID NO: 296060 - protein, 16 aa, Homo sapiens
  CDR3 for beta chain variable domain of TCR clone 148030 (TRBV7-3, TRBJ2-2)
CASSLKRGTLSGELFF

SEQ ID NO: 296061 - protein, 14 aa, Homo sapiens
  CDR3 for alpha chain variable domain of TCR clone 148031 (TRAV1-2, TRAJ8)
CSVREDTGFQKLVF

SEQ ID NO: 296062 - protein, 16 aa, Homo sapiens
  CDR3 for beta chain variable domain of TCR clone 148031 (TRBV7-9, TRBJ2-1)
CASSDVAGGSYNEQFF

SEQ ID NO: 296063 - protein, 14 aa, Homo sapiens
  CDR3 for alpha chain variable domain of TCR clone 148032 (TRAV1-2, TRAJ8)
CAVREDTGFQKLVF

SEQ ID NO: 296064 - protein, 12 aa, Homo sapiens
  CDR3 for beta chain variable domain of TCR clone 148032 (TRBV12-4, TRBJ1-3)
CASSFSGNTMYF

SEQ ID NO: 296065 - protein, 14 aa, Homo sapiens
  CDR3 for alpha chain variable domain of TCR clone 148033 (TRAV1-1, TRAJ23)
CAVSIYNQGGKLIF

SEQ ID NO: 296066 - protein, 15 aa, Homo sapiens
  CDR3 for beta chain variable domain of TCR clone 148033 (TRBV5-8, TRBJ2-2)
CASSLDRWATGELFF

SEQ ID NO: 296067 - protein, 15 aa, Homo sapiens
  CDR3 for alpha chain variable domain of TCR clone 148034 (TRAV38-1, TRAJ30)
CAFMMSYGGDDKIIF

SEQ ID NO: 296068 - protein, 15 aa, Homo sapiens
  CDR3 for beta chain variable domain of TCR clone 148034 (TRBV7-9, TRBJ1-5)
CASSQGHQPNQPQHF

SEQ ID NO: 296069 - protein, 12 aa, Homo sapiens
  CDR3 for alpha chain variable domain of TCR clone 148035 (TRAV20, TRAJ54)
CAVQEGAQKLVF

SEQ ID NO: 296070 - protein, 17 aa, Homo sapiens
  CDR3 for beta chain variable domain of TCR clone 148035 (TRBV13, TRBJ2-3)
CASSLTRVAGGRNTQYF

SEQ ID NO: 296071 - protein, 11 aa, Homo sapiens
  CDR3 for alpha chain variable domain of TCR clone 148036 (TRAV20, TRAJ23)
CACNQGGKLIF

SEQ ID NO: 296072 - protein, 16 aa, Homo sapiens
  CDR3 for beta chain variable domain of TCR clone 148036 (TRBV7-8, TRBJ2-5)
CASSFGGQPVQETQYF

SEQ ID NO: 296073 - protein, 12 aa, Homo sapiens
  CDR3 for alpha chain variable domain of TCR clone 148037 (TRAV12-1, TRAJ40)
CVFYSGTYKYIF

SEQ ID NO: 296074 - protein, 16 aa, Homo sapiens
  CDR3 for beta chain variable domain of TCR clone 148037 (TRBV25-1, TRBJ1-1)
CASSGDRDRGRIEAFF

SEQ ID NO: 296075 - protein, 14 aa, Homo sapiens
  CDR3 for alpha chain variable domain of TCR clone 148038 (TRAV13-1, TRAJ35)
CAASKGGFGNVLHC

SEQ ID NO: 296076 - protein, 20 aa, Homo sapiens
  CDR3 for beta chain variable domain of TCR clone 148038 (TRBV19, TRBJ2-1)
CASSISRTVTSTRLNNEQFF

SEQ ID NO: 296077 - protein, 14 aa, Homo sapiens
  CDR3 for alpha chain variable domain of TCR clone 148039 (TRAV2, TRAJ37)
CAVDFISNTGKLIF

SEQ ID NO: 296078 - protein, 13 aa, Homo sapiens
  CDR3 for beta chain variable domain of TCR clone 148039 (TRBV20-1, TRBJ1-1)
CSAPLGGGTEAFF

SEQ ID NO: 296079 - protein, 15 aa, Homo sapiens
  CDR3 for alpha chain variable domain of TCR clone 148040 (TRAV17, TRAJ56)
CASEPFTGANSKLTF

SEQ ID NO: 296080 - protein, 15 aa, Homo sapiens
  CDR3 for beta chain variable domain of TCR clone 148040 (TRBV28, TRBJ1-5)
CASSRTGGYVQPQHF

SEQ ID NO: 296081 - protein, 13 aa, Homo sapiens
  CDR3 for alpha chain variable domain of TCR clone 148041 (TRAV17, TRAJ15)
CATANQAGTALIF

SEQ ID NO: 296082 - protein, 14 aa, Homo sapiens
  CDR3 for beta chain variable domain of TCR clone 148041 (TRBV6-6, TRBJ2-7)
CASSDSGAGYEQYF

SEQ ID NO: 296083 - protein, 12 aa, Homo sapiens
  CDR3 for alpha chain variable domain of TCR clone 148042 (TRAV1-1, TRAJ8)
CAGGTGFQKLVF

SEQ ID NO: 296084 - protein, 14 aa, Homo sapiens
  CDR3 for beta chain variable domain of TCR clone 148042 (TRBV12-4, TRBJ1-1)
CASSLGTGGTEAFF

SEQ ID NO: 296085 - protein, 15 aa, Homo sapiens
  CDR3 for alpha chain variable domain of TCR clone 148043 (TRAV12-1, TRAJ9)
CVVSFGDTGGCKTIF

SEQ ID NO: 296086 - protein, 12 aa, Homo sapiens
  CDR3 for beta chain variable domain of TCR clone 148043 (TRBV11-3, TRBJ1-1)
CASSHRQGEAFF

SEQ ID NO: 296087 - protein, 14 aa, Homo sapiens
  CDR3 for alpha chain variable domain of TCR clone 148044 (TRAV12-3, TRAJ29)
CAMILLSGNTPLVF

SEQ ID NO: 296088 - protein, 13 aa, Homo sapiens
  CDR3 for beta chain variable domain of TCR clone 148044 (TRBV20-1, TRBJ2-1)
CSASTGGYNEQFF

SEQ ID NO: 296089 - protein, 17 aa, Homo sapiens
  CDR3 for alpha chain variable domain of TCR clone 148045 (TRAV3, TRAJ6)
CAVSRRTDTGGSYIPTF

SEQ ID NO: 296090 - protein, 14 aa, Homo sapiens
  CDR3 for beta chain variable domain of TCR clone 148045 (TRBV25-1, TRBJ1-1)
CASTHLGGNTEAFF

SEQ ID NO: 296091 - protein, 13 aa, Homo sapiens
  CDR3 for alpha chain variable domain of TCR clone 148046 (TRAV12-2, TRAJ20)
CAVYPSNDYKLSF

SEQ ID NO: 296092 - protein, 14 aa, Homo sapiens
  CDR3 for beta chain variable domain of TCR clone 148046 (TRBV12-4, TRBJ1-1)
CASSLGTGGTEAFF

SEQ ID NO: 296093 - protein, 12 aa, Homo sapiens
  CDR3 for alpha chain variable domain of TCR clone 148047 (TRAV26-1, TRAJ36)
CIVRVRADNLFF

SEQ ID NO: 296094 - protein, 13 aa, Homo sapiens
  CDR3 for beta chain variable domain of TCR clone 148047 (TRBV4-1, TRBJ2-1)
CASSQEVQYEQFF

SEQ ID NO: 296095 - protein, 15 aa, Homo sapiens
  CDR3 for alpha chain variable domain of TCR clone 148048 (TRAV12-3, TRAJ49)
CAMAVTPNTGNQFYF

SEQ ID NO: 296096 - protein, 13 aa, Homo sapiens
  CDR3 for beta chain variable domain of TCR clone 148048 (TRBV20-1, TRBJ1-1)
CSARVGGNTEAFF

SEQ ID NO: 296097 - protein, 14 aa, Homo sapiens
  CDR3 for alpha chain variable domain of TCR clone 148049 (TRAV13-1, TRAJ35)
CAASKGGVGNVLHC

SEQ ID NO: 296098 - protein, 13 aa, Homo sapiens
  CDR3 for beta chain variable domain of TCR clone 148049 (TRBV7-3, TRBJ1-1)
CASGQDWGAEAFF

SEQ ID NO: 296099 - protein, 14 aa, Homo sapiens
  CDR3 for alpha chain variable domain of TCR clone 148050 (TRAV2, TRAJ37)
CAVDFTSNTGKLIF

SEQ ID NO: 296100 - protein, 17 aa, Homo sapiens
  CDR3 for beta chain variable domain of TCR clone 148050 (TRBV7-3, TRBJ2-5)
CASSLGSGRSGSETQYF

SEQ ID NO: 296101 - protein, 14 aa, Homo sapiens
  CDR3 for alpha chain variable domain of TCR clone 148051 (TRAV16, TRAJ42)
CALLAGGSQGHLIF

SEQ ID NO: 296102 - protein, 15 aa, Homo sapiens
  CDR3 for beta chain variable domain of TCR clone 148051 (TRBV2, TRBJ2-7)
CASSEGLARSYEQYF

SEQ ID NO: 296103 - protein, 14 aa, Homo sapiens
  CDR3 for alpha chain variable domain of TCR clone 148052 (TRAV8-4, TRAJ9)
CAVRINTGGFKTIF

SEQ ID NO: 296104 - protein, 15 aa, Homo sapiens
  CDR3 for beta chain variable domain of TCR clone 148052 (TRBV10-2, TRBJ2-6)
CASSEQWTGANVLPF

SEQ ID NO: 296105 - protein, 14 aa, Homo sapiens
  CDR3 for alpha chain variable domain of TCR clone 148053 (TRAV8-3, TRAJ28)
CAVVPGAGSYQLTF

SEQ ID NO: 296106 - protein, 15 aa, Homo sapiens
  CDR3 for beta chain variable domain of TCR clone 148053 (TRBV19, TRBJ1-2)
CASSIGQVLNYGYTF

SEQ ID NO: 296107 - protein, 17 aa, Homo sapiens
  CDR3 for alpha chain variable domain of TCR clone 148054 (TRAV3, TRAJ42)
CAVRDRDYGGSQGNLIF

SEQ ID NO: 296108 - protein, 15 aa, Homo sapiens
  CDR3 for beta chain variable domain of TCR clone 148054 (TRBV7-3, TRBJ1-6)
CASSLGRGAGSPLHF

SEQ ID NO: 296109 - protein, 15 aa, Homo sapiens
  CDR3 for alpha chain variable domain of TCR clone 148055 (TRAV35, TRAJ58)
CAGRRQETSGSRLTF

SEQ ID NO: 296110 - protein, 13 aa, Homo sapiens
  CDR3 for beta chain variable domain of TCR clone 148055 (TRBV6-5, TRBJ2-5)
CASSPQGGETQYF

SEQ ID NO: 296111 - protein, 16 aa, Homo sapiens
  CDR3 for alpha chain variable domain of TCR clone 148056 (TRAV3, TRAJ37)
CAVRGKGYGNTGKLIF

SEQ ID NO: 296112 - protein, 15 aa, Homo sapiens
  CDR3 for beta chain variable domain of TCR clone 148056 (TRBV6-6, TRBJ2-5)
CASSYGKIIQETQYF

SEQ ID NO: 296113 - protein, 14 aa, Homo sapiens
  CDR3 for alpha chain variable domain of TCR clone 148057 (TRAV13-1, TRAJ35)
CAASKGGFGNVLHC

SEQ ID NO: 296114 - protein, 13 aa, Homo sapiens
  CDR3 for beta chain variable domain of TCR clone 148057 (TRBV7-3, TRBJ1-1)
CASSQDWGAEDFS

SEQ ID NO: 296115 - protein, 14 aa, Homo sapiens
  CDR3 for alpha chain variable domain of TCR clone 148058 (TRAV1-1, TRAJ23)
CAVSLYNQGGKLIF

SEQ ID NO: 296116 - protein, 14 aa, Homo sapiens
  CDR3 for beta chain variable domain of TCR clone 148058 (TRBV28, TRBJ2-1)
CASSLNGRNNEQFF

SEQ ID NO: 296117 - protein, 14 aa, Homo sapiens
  CDR3 for alpha chain variable domain of TCR clone 148059 (TRAV16, TRAJ33)
CALLAMDSNYQLIW

SEQ ID NO: 296118 - protein, 16 aa, Homo sapiens
  CDR3 for beta chain variable domain of TCR clone 148059 (TRBV25-1, TRBJ2-7)
CASSELTGGGIYEQYF

SEQ ID NO: 296119 - protein, 14 aa, Homo sapiens
  CDR3 for alpha chain variable domain of TCR clone 148060 (TRAV2, TRAJ9)
CAVEDRSGGFKTTL

SEQ ID NO: 296120 - protein, 14 aa, Homo sapiens
  CDR3 for beta chain variable domain of TCR clone 148060 (TRBV19, TRBJ2-1)
CASPTFVLSGEQFF

SEQ ID NO: 296121 - protein, 15 aa, Homo sapiens
  CDR3 for alpha chain variable domain of TCR clone 148061 (TRAV8-3, TRAJ45)
CASSYSGGGADGLTF

SEQ ID NO: 296122 - protein, 13 aa, Homo sapiens
  CDR3 for beta chain variable domain of TCR clone 148061 (TRBV7-9, TRBJ2-5)
CASTPVGQETQYF

SEQ ID NO: 296123 - protein, 15 aa, Homo sapiens
  CDR3 for alpha chain variable domain of TCR clone 148062 (TRAV12-1, TRAJ42)
CVVTRDGGSQGNPIF

SEQ ID NO: 296124 - protein, 13 aa, Homo sapiens
  CDR3 for beta chain variable domain of TCR clone 148062 (TRBV27, TRBJ2-7)
CASSLTTGYEQYF

SEQ ID NO: 296125 - protein, 14 aa, Homo sapiens
  CDR3 for alpha chain variable domain of TCR clone 148063 (TRAV4, TRAJ9)
CLVGSGTGGFKTIF

SEQ ID NO: 296126 - protein, 15 aa, Homo sapiens
  CDR3 for beta chain variable domain of TCR clone 148063 (TRBV7-9, TRBJ1-4)
CASSRTGGFNEKLFF

SEQ ID NO: 296127 - protein, 12 aa, Homo sapiens
  CDR3 for alpha chain variable domain of TCR clone 148064 (TRAV1-1, TRAJ8)
CAGGTGFQKLVF

SEQ ID NO: 296128 - protein, 15 aa, Homo sapiens
  CDR3 for beta chain variable domain of TCR clone 148064 (TRBV7-9, TRBJ1-4)
CASSRTVGFNEKLFF

SEQ ID NO: 296129 - protein, 12 aa, Homo sapiens
  CDR3 for alpha chain variable domain of TCR clone 148065 (TRAV13-2, TRAJ24)
CRGQLTAGKLQF

SEQ ID NO: 296130 - protein, 13 aa, Homo sapiens
  CDR3 for beta chain variable domain of TCR clone 148065 (TRBV29-1, TRBJ2-1)
CSVEGGRVNEQFF

SEQ ID NO: 296131 - protein, 15 aa, Homo sapiens
  CDR3 for alpha chain variable domain of TCR clone 148066 (TRAV38-1, TRAJ37)
CAFIFGSGNTGKLIF

SEQ ID NO: 296132 - protein, 17 aa, Homo sapiens
  CDR3 for beta chain variable domain of TCR clone 148066 (TRBV7-2, TRBJ2-1)
CASSLGPPWGGLDEQFF

SEQ ID NO: 296133 - protein, 16 aa, Homo sapiens
  CDR3 for alpha chain variable domain of TCR clone 148067 (TRAV20, TRAJ22)
CAVQASSSGSARQLTF

SEQ ID NO: 296134 - protein, 16 aa, Homo sapiens
  CDR3 for beta chain variable domain of TCR clone 148067 (TRBV7-3, TRBJ2-1)
CASSLSSGGGAKEQFF

SEQ ID NO: 296135 - protein, 12 aa, Homo sapiens
  CDR3 for alpha chain variable domain of TCR clone 148068 (TRAV35, TRAJ39)
LPPNNAGNMLTF

SEQ ID NO: 296136 - protein, 16 aa, Homo sapiens
  CDR3 for beta chain variable domain of TCR clone 148068 (TRBV2, TRBJ2-3)
CASSTSVEGVTDTQYF

SEQ ID NO: 296137 - protein, 12 aa, Homo sapiens
  CDR3 for alpha chain variable domain of TCR clone 148069 (TRAV27, TRAJ35)
CAGADFGNVLHC

SEQ ID NO: 296138 - protein, 12 aa, Homo sapiens
  CDR3 for beta chain variable domain of TCR clone 148069 (TRBV7-3, TRBJ1-1)
CQQQDWGAEAFF

SEQ ID NO: 296139 - protein, 14 aa, Homo sapiens
  CDR3 for alpha chain variable domain of TCR clone 148070 (TRAV8-3, TRAJ35)
CAVVPQGFGNVLHC

SEQ ID NO: 296140 - protein, 15 aa, Homo sapiens
  CDR3 for beta chain variable domain of TCR clone 148070 (TRBV27, TRBJ2-1)
CASGNGGGSSNEQFF

SEQ ID NO: 296141 - protein, 13 aa, Homo sapiens
  CDR3 for alpha chain variable domain of TCR clone 148071 (TRAV12-2, TRAJ50)
CAVLVTSYDKVIF

SEQ ID NO: 296142 - protein, 14 aa, Homo sapiens
  CDR3 for beta chain variable domain of TCR clone 148071 (TRBV9, TRBJ2-1)
CASSVDPRGKEQFF

SEQ ID NO: 296143 - protein, 16 aa, Homo sapiens
  CDR3 for alpha chain variable domain of TCR clone 148072 (TRAV3, TRAJ37)
CAVRGKGSGNTGKLIF

SEQ ID NO: 296144 - protein, 13 aa, Homo sapiens
  CDR3 for beta chain variable domain of TCR clone 148072 (TRBV20-1, TRBJ2-7)
CSATHTSGYEQYF

SEQ ID NO: 296145 - protein, 17 aa, Homo sapiens
  CDR3 for alpha chain variable domain of TCR clone 148073 (TRAV3, TRAJ6)
CAERDGPRAGGSYIPTF

SEQ ID NO: 296146 - protein, 15 aa, Homo sapiens
  CDR3 for beta chain variable domain of TCR clone 148073 (TRBV7-6, TRBJ2-3)
CASSPIIYSTDTQYF

SEQ ID NO: 296147 - protein, 13 aa, Homo sapiens
  CDR3 for alpha chain variable domain of TCR clone 148074 (TRAV12-2, TRAJ50)
CAVIVTSYDKVIF

SEQ ID NO: 296148 - protein, 16 aa, Homo sapiens
  CDR3 for beta chain variable domain of TCR clone 148074 (TRBV7-2, TRBJ2-3)
CASSLVGDASTDTQYF

SEQ ID NO: 296149 - protein, 15 aa, Homo sapiens
  CDR3 for alpha chain variable domain of TCR clone 148075 (TRAV13-1, TRAJ6)
CAAIHPSGGSYIPRF

SEQ ID NO: 296150 - protein, 14 aa, Homo sapiens
  CDR3 for beta chain variable domain of TCR clone 148075 (TRBV7-9, TRBJ2-2)
CASGLAINTGELFF

SEQ ID NO: 296151 - protein, 13 aa, Homo sapiens
  CDR3 for alpha chain variable domain of TCR clone 148076 (TRAV27, TRAJ45)
CRSSGGGADGLTF

SEQ ID NO: 296152 - protein, 17 aa, Homo sapiens
  CDR3 for beta chain variable domain of TCR clone 148076 (TRBV11-2, TRBJ2-1)
CASTLYPPGVEYNEQFF

SEQ ID NO: 296153 - protein, 12 aa, Homo sapiens
  CDR3 for alpha chain variable domain of TCR clone 148077 (TRAV21, TRAJ13)
PGPSGGYQKVTF

SEQ ID NO: 296154 - protein, 15 aa, Homo sapiens
  CDR3 for beta chain variable domain of TCR clone 148077 (TRBV6-3, TRBJ2-7)
CASSCPGTVFYEQYF

SEQ ID NO: 296155 - protein, 11 aa, Homo sapiens
  CDR3 for alpha chain variable domain of TCR clone 148078 (TRAV2, TRAJ33)
CAVESNYQLIW

SEQ ID NO: 296156 - protein, 15 aa, Homo sapiens
  CDR3 for beta chain variable domain of TCR clone 148078 (TRBV10-2, TRBJ2-6)
CASSEQGTGANVLTF

SEQ ID NO: 296157 - protein, 12 aa, Homo sapiens
  CDR3 for alpha chain variable domain of TCR clone 148079 (TRAV8-3, TRAJ41)
CAVALSGYALNF

SEQ ID NO: 296158 - protein, 16 aa, Homo sapiens
  CDR3 for beta chain variable domain of TCR clone 148079 (TRBV27, TRBJ2-7)
CASRSERRDSAYEQYF

SEQ ID NO: 296159 - protein, 12 aa, Homo sapiens
  CDR3 for alpha chain variable domain of TCR clone 148080 (TRAV1-1, TRAJ24)
CAVRGSWGKFQF

SEQ ID NO: 296160 - protein, 14 aa, Homo sapiens
  CDR3 for beta chain variable domain of TCR clone 148080 (TRBV20-1, TRBJ2-3)
CSARGGNSTDTQYF

SEQ ID NO: 296161 - protein, 15 aa, Homo sapiens
  CDR3 for alpha chain variable domain of TCR clone 148081 (TRAV12-2, TRAJ43)
CAFDMRFGAGTRLTV

SEQ ID NO: 296162 - protein, 18 aa, Homo sapiens
  CDR3 for beta chain variable domain of TCR clone 148081 (TRBV20-1, TRBJ2-3)
CSASGLAGGPGTTATQYF

SEQ ID NO: 296163 - protein, 14 aa, Homo sapiens
  CDR3 for alpha chain variable domain of TCR clone 148082 (TRAV10, TRAJ15)
CVVSASQAGTALIF

SEQ ID NO: 296164 - protein, 13 aa, Homo sapiens
  CDR3 for beta chain variable domain of TCR clone 148082 (TRBV7-6, TRBJ1-2)
CASSLVADYGYTF

SEQ ID NO: 296165 - protein, 23 aa, Homo sapiens
  CDR3 for alpha chain variable domain of TCR clone 148083 (TRAV8-3, )
CAVVTTRIPDIQNPDPAVYQLRD

SEQ ID NO: 296166 - protein, 14 aa, Homo sapiens
  CDR3 for beta chain variable domain of TCR clone 148083 (TRBV11-2, TRBJ2-7)
CDSSPSTTSYEQYF

SEQ ID NO: 296167 - protein, 11 aa, Homo sapiens
  CDR3 for alpha chain variable domain of TCR clone 148084 (TRAV2, TRAJ13)
CASGGYQKVTF

SEQ ID NO: 296168 - protein, 13 aa, Homo sapiens
  CDR3 for beta chain variable domain of TCR clone 148084 (TRBV27, TRBJ1-1)
CASSVSANTEAFF

SEQ ID NO: 296169 - protein, 17 aa, Homo sapiens
  CDR3 for alpha chain variable domain of TCR clone 148085 (TRAV26-1, TRAJ37)
CIVRVITVSSNTGKLIF

SEQ ID NO: 296170 - protein, 18 aa, Homo sapiens
  CDR3 for beta chain variable domain of TCR clone 148085 (TRBV18, TRBJ2-4)
CASSPGSAAPIAKNIQYF

SEQ ID NO: 296171 - protein, 13 aa, Homo sapiens
  CDR3 for alpha chain variable domain of TCR clone 148086 (TRAV26-1, TRAJ34)
CIVRALGTDKLIF

SEQ ID NO: 296172 - protein, 14 aa, Homo sapiens
  CDR3 for beta chain variable domain of TCR clone 148086 (TRBV11-2, TRBJ2-5)
CASRPLAGRETQYF

SEQ ID NO: 296173 - protein, 11 aa, Homo sapiens
  CDR3 for alpha chain variable domain of TCR clone 148087 (TRAV12-2, TRAJ31)
CAVTRWARLMF

SEQ ID NO: 296174 - protein, 12 aa, Homo sapiens
  CDR3 for beta chain variable domain of TCR clone 148087 (TRBV5-5, TRBJ2-5)
CASSYFGETQYF

SEQ ID NO: 296175 - protein, 14 aa, Homo sapiens
  CDR3 for alpha chain variable domain of TCR clone 148088 (TRAV17, TRAJ39)
CATDPVRAGNMLTF

SEQ ID NO: 296176 - protein, 17 aa, Homo sapiens
  CDR3 for beta chain variable domain of TCR clone 148088 (TRBV7-8, TRBJ2-6)
CASSAGTGGAGANVLTF

SEQ ID NO: 296177 - protein, 12 aa, Homo sapiens
  CDR3 for alpha chain variable domain of TCR clone 148089 (TRAV12-3, TRAJ17)
CAMTLTGNKLTF

SEQ ID NO: 296178 - protein, 15 aa, Homo sapiens
  CDR3 for beta chain variable domain of TCR clone 148089 (TRBV11-1, TRBJ2-3)
CASSLLAGRTDTQYF

SEQ ID NO: 296179 - protein, 14 aa, Homo sapiens
  CDR3 for alpha chain variable domain of TCR clone 148090 (TRAV1-2, TRAJ16)
CAVNRFSDGQKLLF

SEQ ID NO: 296180 - protein, 14 aa, Homo sapiens
  CDR3 for beta chain variable domain of TCR clone 148090 (TRBV7-9, TRBJ2-3)
CASTLEDGTDTQYF

SEQ ID NO: 296181 - protein, 14 aa, Homo sapiens
  CDR3 for alpha chain variable domain of TCR clone 148091 (TRAV29/DV5, TRAJ32)
CAAAYGGATNNLIF

SEQ ID NO: 296182 - protein, 15 aa, Homo sapiens
  CDR3 for beta chain variable domain of TCR clone 148091 (TRBV27, TRBJ2-7)
CASSTAGTGSYEQYF

SEQ ID NO: 296183 - protein, 14 aa, Homo sapiens
  CDR3 for alpha chain variable domain of TCR clone 148092 (TRAV23/DV6, TRAJ11)
CAALIGGGYSTLNL

SEQ ID NO: 296184 - protein, 13 aa, Homo sapiens
  CDR3 for beta chain variable domain of TCR clone 148092 (TRBV11-3, TRBJ1-1)
CASSLGGNTEAFF

SEQ ID NO: 296185 - protein, 12 aa, Homo sapiens
  CDR3 for alpha chain variable domain of TCR clone 148093 (TRAV8-3, TRAJ43)
CAVGAGNNDMRF

SEQ ID NO: 296186 - protein, 14 aa, Homo sapiens
  CDR3 for beta chain variable domain of TCR clone 148093 (TRBV4-2, TRBJ1-5)
CASNRDRGNQPQHF

SEQ ID NO: 296187 - protein, 18 aa, Homo sapiens
  CDR3 for alpha chain variable domain of TCR clone 148094 (TRAV21, TRAJ52)
CAVRPSPAGGTSYGKLTF

SEQ ID NO: 296188 - protein, 15 aa, Homo sapiens
  CDR3 for beta chain variable domain of TCR clone 148094 (TRBV28, TRBJ1-3)
CASSMGWASGNTIYF

SEQ ID NO: 296189 - protein, 11 aa, Homo sapiens
  CDR3 for alpha chain variable domain of TCR clone 148095 (TRAV1-1, TRAJ23)
CAVRQGGKLIF

SEQ ID NO: 296190 - protein, 13 aa, Homo sapiens
  CDR3 for beta chain variable domain of TCR clone 148095 (TRBV7-8, TRBJ2-2)
PGPTIHITGELFF

SEQ ID NO: 296191 - protein, 14 aa, Homo sapiens
  CDR3 for alpha chain variable domain of TCR clone 148096 (TRAV17, TRAJ57)
CATDPQGGSEKLVF

SEQ ID NO: 296192 - protein, 18 aa, Homo sapiens
  CDR3 for beta chain variable domain of TCR clone 148096 (TRBV6-6, TRBJ1-3)
CACSYSKWDSISGNTIYF

SEQ ID NO: 296193 - protein, 12 aa, Homo sapiens
  CDR3 for alpha chain variable domain of TCR clone 148097 (TRAV12-3, TRAJ17)
CAMTLTGNKLTF

SEQ ID NO: 296194 - protein, 13 aa, Homo sapiens
  CDR3 for beta chain variable domain of TCR clone 148097 (TRBV18, TRBJ2-7)
CASSRSGSCEQYF

SEQ ID NO: 296195 - protein, 22 aa, Homo sapiens
  CDR3 for alpha chain variable domain of TCR clone 148098 (TRAV26-2, TRAJ45)
CCVLLHPERQGRSVGGADGLTF

SEQ ID NO: 296196 - protein, 15 aa, Homo sapiens
  CDR3 for beta chain variable domain of TCR clone 148098 (TRBV7-6, TRBJ2-5)
CASSKPTGPQETQYF

SEQ ID NO: 296197 - protein, 14 aa, Homo sapiens
  CDR3 for alpha chain variable domain of TCR clone 148099 (TRAV38-1, TRAJ30)
CAFMPMNRDDKIIF

SEQ ID NO: 296198 - protein, 12 aa, Homo sapiens
  CDR3 for beta chain variable domain of TCR clone 148099 (TRBV2, TRBJ2-7)
CASTYRTDEQYF

SEQ ID NO: 296199 - protein, 11 aa, Homo sapiens
  CDR3 for alpha chain variable domain of TCR clone 148100 (TRAV17, TRAJ31)
CATSNNARLIV

SEQ ID NO: 296200 - protein, 14 aa, Homo sapiens
  CDR3 for beta chain variable domain of TCR clone 148100 (TRBV18, TRBJ2-7)
CASSPRGGAYEQYF

SEQ ID NO: 296201 - protein, 13 aa, Homo sapiens
  CDR3 for alpha chain variable domain of TCR clone 148101 (TRAV13-1, TRAJ43)
CAASMNNNNDMRF

SEQ ID NO: 296202 - protein, 14 aa, Homo sapiens
  CDR3 for beta chain variable domain of TCR clone 148101 (TRBV7-9, TRBJ2-7)
CASSIGQGAGEQYF

SEQ ID NO: 296203 - protein, 15 aa, Homo sapiens
  CDR3 for alpha chain variable domain of TCR clone 148102 (TRAV27, TRAJ38)
CAARRNAGNNRKLSW

SEQ ID NO: 296204 - protein, 16 aa, Homo sapiens
  CDR3 for beta chain variable domain of TCR clone 148102 (TRBV28, TRBJ1-4)
CASSPPYRGRSEKLFF

SEQ ID NO: 296205 - protein, 11 aa, Homo sapiens
  CDR3 for alpha chain variable domain of TCR clone 148103 (TRAV12-2, TRAJ49)
CAVHTGNQFYF

SEQ ID NO: 296206 - protein, 13 aa, Homo sapiens
  CDR3 for beta chain variable domain of TCR clone 148103 (TRBV4-2, TRBJ2-1)
CASSPGGYNEQFF

SEQ ID NO: 296207 - protein, 12 aa, Homo sapiens
  CDR3 for alpha chain variable domain of TCR clone 148104 (TRAV12-3, TRAJ17)
CAMTLTGNKLTF

SEQ ID NO: 296208 - protein, 15 aa, Homo sapiens
  CDR3 for beta chain variable domain of TCR clone 148104 (TRBV9, TRBJ1-6)
CASSVAGTRDSPLHF

SEQ ID NO: 296209 - protein, 14 aa, Homo sapiens
  CDR3 for alpha chain variable domain of TCR clone 148105 (TRAV12-2, TRAJ33)
CAVKRARSNYQLIW

SEQ ID NO: 296210 - protein, 12 aa, Homo sapiens
  CDR3 for beta chain variable domain of TCR clone 148105 (TRBV24-1, TRBJ2-3)
CATSTSTDTQYF

SEQ ID NO: 296211 - protein, 16 aa, Homo sapiens
  CDR3 for alpha chain variable domain of TCR clone 148106 (TRAV12-1, TRAJ48)
CVVNMVSNFGNEKSTF

SEQ ID NO: 296212 - protein, 18 aa, Homo sapiens
  CDR3 for beta chain variable domain of TCR clone 148106 (TRBV11-2, TRBJ2-6)
CASSLNPFLGTGANVLTF

SEQ ID NO: 296213 - protein, 15 aa, Homo sapiens
  CDR3 for alpha chain variable domain of TCR clone 148107 (TRAV8-4, TRAJ53)
CAVSDGGGSNYKLTF

SEQ ID NO: 296214 - protein, 15 aa, Homo sapiens
  CDR3 for beta chain variable domain of TCR clone 148107 (TRBV19, TRBJ2-5)
CSSHGLAGAQETQYF

SEQ ID NO: 296215 - protein, 14 aa, Homo sapiens
  CDR3 for alpha chain variable domain of TCR clone 148108 (TRAV12-2, TRAJ24)
CAVTPADSWGKLQF

SEQ ID NO: 296216 - protein, 13 aa, Homo sapiens
  CDR3 for beta chain variable domain of TCR clone 148108 (TRBV12-4, TRBJ2-7)
CASSPTETYEQYF

SEQ ID NO: 296217 - protein, 15 aa, Homo sapiens
  CDR3 for alpha chain variable domain of TCR clone 148109 (TRAV2, TRAJ15)
CAVEDREQAGTALIC

SEQ ID NO: 296218 - protein, 15 aa, Homo sapiens
  CDR3 for beta chain variable domain of TCR clone 148109 (TRBV3-1, TRBJ1-2)
CASSHPGTPGYGYTF

SEQ ID NO: 296219 - protein, 14 aa, Homo sapiens
  CDR3 for alpha chain variable domain of TCR clone 148110 (TRAV17, TRAJ33)
CATDARRSNYQVIW

SEQ ID NO: 296220 - protein, 14 aa, Homo sapiens
  CDR3 for beta chain variable domain of TCR clone 148110 (TRBV25-1, TRBJ1-4)
CASSGGGQPEKLFF

SEQ ID NO: 296221 - protein, 16 aa, Homo sapiens
  CDR3 for alpha chain variable domain of TCR clone 148111 (TRAV14/DV4, TRAJ53)
CAMREGGGGSNFKLTF

SEQ ID NO: 296222 - protein, 13 aa, Homo sapiens
  CDR3 for beta chain variable domain of TCR clone 148111 (TRBV14, TRBJ1-1)
CASSQEAGTEAFF

SEQ ID NO: 296223 - protein, 14 aa, Homo sapiens
  CDR3 for alpha chain variable domain of TCR clone 148112 (TRAV26-1, TRAJ44)
CIARTTGTASKLTF

SEQ ID NO: 296224 - protein, 13 aa, Homo sapiens
  CDR3 for beta chain variable domain of TCR clone 148112 (TRBV7-7, TRBJ2-5)
CASSRSGQETQYF

SEQ ID NO: 296225 - protein, 14 aa, Homo sapiens
  CDR3 for alpha chain variable domain of TCR clone 148113 (TRAV13-1, TRAJ32)
CAARGSGATNKLIF

SEQ ID NO: 296226 - protein, 16 aa, Homo sapiens
  CDR3 for beta chain variable domain of TCR clone 148113 (TRBV20-1, TRBJ1-2)
CSASMGQGVANYGYTF

SEQ ID NO: 296227 - protein, 16 aa, Homo sapiens
  CDR3 for alpha chain variable domain of TCR clone 148114 (TRAV30, TRAJ24)
CGTEIVDADSWRKFQF

SEQ ID NO: 296228 - protein, 16 aa, Homo sapiens
  CDR3 for beta chain variable domain of TCR clone 148114 (TRBV20-1, TRBJ2-2)
CSASASGIPGAGELFF

SEQ ID NO: 296229 - protein, 13 aa, Homo sapiens
  CDR3 for alpha chain variable domain of TCR clone 148115 (TRAV3, TRAJ5)
CAVRDTGRRALTF

SEQ ID NO: 296230 - protein, 14 aa, Homo sapiens
  CDR3 for beta chain variable domain of TCR clone 148115 (TRBV19, TRBJ2-1)
CASPTFVLSGEQFF

SEQ ID NO: 296231 - protein, 14 aa, Homo sapiens
  CDR3 for alpha chain variable domain of TCR clone 148116 (TRAV1-2, TRAJ8)
CAVRENTGFQKLVF

SEQ ID NO: 296232 - protein, 18 aa, Homo sapiens
  CDR3 for beta chain variable domain of TCR clone 148116 (TRBV5-1, TRBJ2-7)
CASSWGTGGRAWSSTSGR

SEQ ID NO: 296233 - protein, 16 aa, Homo sapiens
  CDR3 for alpha chain variable domain of TCR clone 148117 (TRAV5, TRAJ23)
CAGDRLIFGQGTELSV

SEQ ID NO: 296234 - protein, 13 aa, Homo sapiens
  CDR3 for beta chain variable domain of TCR clone 148117 (TRBV20-1, TRBJ1-1)
CSARGGGNTEAFF

SEQ ID NO: 296235 - protein, 12 aa, Homo sapiens
  CDR3 for alpha chain variable domain of TCR clone 148118 (TRAV21, TRAJ15)
CAVNQAGTALSF

SEQ ID NO: 296236 - protein, 13 aa, Homo sapiens
  CDR3 for beta chain variable domain of TCR clone 148118 (TRBV11-2, TRBJ2-5)
CASSSTGEETQYF

SEQ ID NO: 296237 - protein, 14 aa, Homo sapiens
  CDR3 for alpha chain variable domain of TCR clone 148119 (TRAV12-3, TRAJ10)
SHLPLTGGGNQLTF

SEQ ID NO: 296238 - protein, 14 aa, Homo sapiens
  CDR3 for beta chain variable domain of TCR clone 148119 (TRBV4-1, TRBJ2-2)
CASSQAVNTGELFF

SEQ ID NO: 296239 - protein, 11 aa, Homo sapiens
  CDR3 for alpha chain variable domain of TCR clone 148120 (TRAV12-1, TRAJ33)
CVVNMNYQLIW

SEQ ID NO: 296240 - protein, 11 aa, Homo sapiens
  CDR3 for beta chain variable domain of TCR clone 148120 (TRBV10-1, TRBJ2-3)
CASSDSDKQYF

SEQ ID NO: 296241 - protein, 17 aa, Homo sapiens
  CDR3 for alpha chain variable domain of TCR clone 148121 (TRAV16, TRAJ42)
CALSPNLYGGSQGNLIF

SEQ ID NO: 296242 - protein, 13 aa, Homo sapiens
  CDR3 for beta chain variable domain of TCR clone 148121 (TRBV19, TRBJ1-5)
CASSTRRDQPQHF

SEQ ID NO: 296243 - protein, 13 aa, Homo sapiens
  CDR3 for alpha chain variable domain of TCR clone 148122 (TRAV13-2, TRAJ48)
CAEMDFGNEKLTF

SEQ ID NO: 296244 - protein, 15 aa, Homo sapiens
  CDR3 for beta chain variable domain of TCR clone 148122 (TRBV7-9, TRBJ1-6)
YASSSPGRGNSPLHS

SEQ ID NO: 296245 - protein, 14 aa, Homo sapiens
  CDR3 for alpha chain variable domain of TCR clone 148123 (TRAV1-2, TRAJ8)
CAVREDTGFQKLVF

SEQ ID NO: 296246 - protein, 15 aa, Homo sapiens
  CDR3 for beta chain variable domain of TCR clone 148123 (TRBV6-3, TRBJ2-7)
CASSSPGTVFYEQVF

SEQ ID NO: 296247 - protein, 11 aa, Homo sapiens
  CDR3 for alpha chain variable domain of TCR clone 148124 (TRAV23/DV6, TRAJ58)
CAARLLRGETS

SEQ ID NO: 296248 - protein, 15 aa, Homo sapiens
  CDR3 for beta chain variable domain of TCR clone 148124 (TRBV7-8, TRBJ2-1)
CASSLADSLYNEQFF

SEQ ID NO: 296249 - protein, 14 aa, Homo sapiens
  CDR3 for alpha chain variable domain of TCR clone 148125 (TRAV2, TRAJ37)
CAVDFTSNTGKLIF

SEQ ID NO: 296250 - protein, 15 aa, Homo sapiens
  CDR3 for beta chain variable domain of TCR clone 148125 (TRBV20-1, TRBJ1-1)
CSASRGVTVNTEAFF

SEQ ID NO: 296251 - protein, 14 aa, Homo sapiens
  CDR3 for alpha chain variable domain of TCR clone 148126 (TRAV4, TRAJ26)
CLVGPHNYGQNFVF

SEQ ID NO: 296252 - protein, 17 aa, Homo sapiens
  CDR3 for beta chain variable domain of TCR clone 148126 (TRBV24-1, TRBJ2-1)
CATSDVSTSGTYNERFF

SEQ ID NO: 296253 - protein, 13 aa, Homo sapiens
  CDR3 for alpha chain variable domain of TCR clone 148127 (TRAV1-2, TRAJ9)
CAALNTGGFKTIF

SEQ ID NO: 296254 - protein, 14 aa, Homo sapiens
  CDR3 for beta chain variable domain of TCR clone 148127 (TRBV19, TRBJ2-1)
CATSQGDTYNEQFF

SEQ ID NO: 296255 - protein, 14 aa, Homo sapiens
  CDR3 for alpha chain variable domain of TCR clone 148128 (TRAV12-2, TRAJ17)
CAVLFKAAGNKLTF

SEQ ID NO: 296256 - protein, 15 aa, Homo sapiens
  CDR3 for beta chain variable domain of TCR clone 148128 (TRBV28, TRBJ1-3)
CASGATGNSGNTIYF

SEQ ID NO: 296257 - protein, 14 aa, Homo sapiens
  CDR3 for alpha chain variable domain of TCR clone 148129 (TRAV12-3, TRAJ42)
CAMNYGGSQGNLIF

SEQ ID NO: 296258 - protein, 17 aa, Homo sapiens
  CDR3 for beta chain variable domain of TCR clone 148129 (TRBV19, TRBJ2-7)
CASSISFYDSYPYEQYF

SEQ ID NO: 296259 - protein, 12 aa, Homo sapiens
  CDR3 for alpha chain variable domain of TCR clone 148130 (TRAV8-3, TRAJ20)
CALGANDYKLSF

SEQ ID NO: 296260 - protein, 16 aa, Homo sapiens
  CDR3 for beta chain variable domain of TCR clone 148130 (TRBV19, TRBJ2-2)
CASRSPGTGAAGELFF

SEQ ID NO: 296261 - protein, 13 aa, Homo sapiens
  CDR3 for alpha chain variable domain of TCR clone 148131 (TRAV2, TRAJ15)
CAVASQVGTALIF

SEQ ID NO: 296262 - protein, 17 aa, Homo sapiens
  CDR3 for beta chain variable domain of TCR clone 148131 (TRBV11-2, TRBJ2-1)
CASSLYPPGVEYNEQFF

SEQ ID NO: 296263 - protein, 15 aa, Homo sapiens
  CDR3 for alpha chain variable domain of TCR clone 148132 (TRAV13-1, TRAJ52)
SYYNAGGTSYGKLTF

SEQ ID NO: 296264 - protein, 20 aa, Homo sapiens
  CDR3 for beta chain variable domain of TCR clone 148132 (TRBV4-1, TRBJ2-2)
CASSQASPPGLASNTGELFF

SEQ ID NO: 296265 - protein, 16 aa, Homo sapiens
  CDR3 for alpha chain variable domain of TCR clone 148133 (TRAV16, TRAJ4)
CALSRMFSGGYNKLIF

SEQ ID NO: 296266 - protein, 16 aa, Homo sapiens
  CDR3 for beta chain variable domain of TCR clone 148133 (TRBV24-1, TRBJ2-3)
CATSDPGTGATDTPYF

SEQ ID NO: 296267 - protein, 11 aa, Homo sapiens
  CDR3 for alpha chain variable domain of TCR clone 148134 (TRAV12-1, TRAJ31)
CVVNGDARLMF

SEQ ID NO: 296268 - protein, 15 aa, Homo sapiens
  CDR3 for beta chain variable domain of TCR clone 148134 (TRBV12-4, TRBJ2-5)
CASSPPTGLQETQYF

SEQ ID NO: 296269 - protein, 14 aa, Homo sapiens
  CDR3 for alpha chain variable domain of TCR clone 148135 (TRAV38-1, TRAJ29)
CAFISPPGNTPLVF

SEQ ID NO: 296270 - protein, 14 aa, Homo sapiens
  CDR3 for beta chain variable domain of TCR clone 148135 (TRBV18, TRBJ2-7)
CASSPRGGAYEQYF

SEQ ID NO: 296271 - protein, 13 aa, Homo sapiens
  CDR3 for alpha chain variable domain of TCR clone 148136 (TRAV8-3, TRAJ44)
CAVVPGTASKLTF

SEQ ID NO: 296272 - protein, 12 aa, Homo sapiens
  CDR3 for beta chain variable domain of TCR clone 148136 (TRBV7-8, TRBJ2-7)
CASSLGDMEQYF

SEQ ID NO: 296273 - protein, 11 aa, Homo sapiens
  CDR3 for alpha chain variable domain of TCR clone 148137 (TRAV27, TRAJ43)
CVRYNNNDMRF

SEQ ID NO: 296274 - protein, 15 aa, Homo sapiens
  CDR3 for beta chain variable domain of TCR clone 148137 (TRBV7-9, TRBJ2-7)
CASSLALAEAYEQYF

SEQ ID NO: 296275 - protein, 11 aa, Homo sapiens
  CDR3 for alpha chain variable domain of TCR clone 148138 (TRAV12-3, TRAJ43)
CAMSVSNDMRF

SEQ ID NO: 296276 - protein, 16 aa, Homo sapiens
  CDR3 for beta chain variable domain of TCR clone 148138 (TRBV20-1, TRBJ2-1)
CSARDSLGAVYNVQFF

SEQ ID NO: 296277 - protein, 20 aa, Homo sapiens
  CDR3 for alpha chain variable domain of TCR clone 148139 (TRAV12-1, TRAJ42)
SSVIQPPTSVKGGGQGNLIL

SEQ ID NO: 296278 - protein, 18 aa, Homo sapiens
  CDR3 for beta chain variable domain of TCR clone 148139 (TRBV11-2, TRBJ2-3)
CASSLGGASRGAPNTQYF

SEQ ID NO: 296279 - protein, 15 aa, Homo sapiens
  CDR3 for alpha chain variable domain of TCR clone 148140 (TRAV2, TRAJ37)
CTVGDGSGNTGKLIF

SEQ ID NO: 296280 - protein, 13 aa, Homo sapiens
  CDR3 for beta chain variable domain of TCR clone 148140 (TRBV20-1, TRBJ2-7)
CSAQTGLSYEQYF

SEQ ID NO: 296281 - protein, 13 aa, Homo sapiens
  CDR3 for alpha chain variable domain of TCR clone 148141 (TRAV8-3, TRAJ28)
CAVGAVGSYQLTF

SEQ ID NO: 296282 - protein, 15 aa, Homo sapiens
  CDR3 for beta chain variable domain of TCR clone 148141 (TRBV7-9, TRBJ1-5)
CASSHGHQPNQPQYF

SEQ ID NO: 296283 - protein, 17 aa, Homo sapiens
  CDR3 for alpha chain variable domain of TCR clone 148142 (TRAV3, TRAJ6)
CAVRDGPRAGGGYIPKF

SEQ ID NO: 296284 - protein, 12 aa, Homo sapiens
  CDR3 for beta chain variable domain of TCR clone 148142 (TRBV11-2, TRBJ2-1)
CASSPGNNEQFF

SEQ ID NO: 296285 - protein, 13 aa, Homo sapiens
  CDR3 for alpha chain variable domain of TCR clone 148143 (TRAV2, TRAJ40)
CAVDTSGTYKYIL

SEQ ID NO: 296286 - protein, 14 aa, Homo sapiens
  CDR3 for beta chain variable domain of TCR clone 148143 (TRBV19, TRBJ2-1)
CASPTFVLSGEQFF

SEQ ID NO: 296287 - protein, 15 aa, Homo sapiens
  CDR3 for alpha chain variable domain of TCR clone 148144 (TRAV26-1, TRAJ44)
CIVRIGTGTASKLTF

SEQ ID NO: 296288 - protein, 15 aa, Homo sapiens
  CDR3 for beta chain variable domain of TCR clone 148144 (TRBV7-6, TRBJ2-1)
CASSSLAGEGNVQFF

SEQ ID NO: 296289 - protein, 11 aa, Homo sapiens
  CDR3 for alpha chain variable domain of TCR clone 148145 (TRAV23/DV6, TRAJ47)
CAAGYGNKLVF

SEQ ID NO: 296290 - protein, 17 aa, Homo sapiens
  CDR3 for beta chain variable domain of TCR clone 148145 (TRBV7-9, TRBJ1-1)
CASSSPPGQGQNTEAFF

SEQ ID NO: 296291 - protein, 15 aa, Homo sapiens
  CDR3 for alpha chain variable domain of TCR clone 148146 (TRAV8-3, TRAJ23)
CAVGDRYNQGGKLIF

SEQ ID NO: 296292 - protein, 13 aa, Homo sapiens
  CDR3 for beta chain variable domain of TCR clone 148146 (TRBV7-9, TRBJ2-5)
CASLPSGRETQYF

SEQ ID NO: 296293 - protein, 14 aa, Homo sapiens
  CDR3 for alpha chain variable domain of TCR clone 148147 (TRAV12-3, TRAJ10)
SHLPLTGVGNKLTF

SEQ ID NO: 296294 - protein, 15 aa, Homo sapiens
  CDR3 for beta chain variable domain of TCR clone 148147 (TRBV11-3, TRBJ2-3)
CASLKDGREGDTQYF

SEQ ID NO: 296295 - protein, 14 aa, Homo sapiens
  CDR3 for alpha chain variable domain of TCR clone 148148 (TRAV23/DV6, TRAJ17)
CAASVKAAGNKLTF

SEQ ID NO: 296296 - protein, 18 aa, Homo sapiens
  CDR3 for beta chain variable domain of TCR clone 148148 (TRBV20-1, TRBJ2-7)
CSAGLPPRSGGSPYEQYF

SEQ ID NO: 296297 - protein, 16 aa, Homo sapiens
  CDR3 for alpha chain variable domain of TCR clone 148149 (TRAV12-1, TRAJ43)
CVVNPHRFGAGTRLTV

SEQ ID NO: 296298 - protein, 13 aa, Homo sapiens
  CDR3 for beta chain variable domain of TCR clone 148149 (TRBV12-4, TRBJ1-2)
YASSSGPNYGYTF

SEQ ID NO: 296299 - protein, 14 aa, Homo sapiens
  CDR3 for alpha chain variable domain of TCR clone 148150 (TRAV26-1, TRAJ21)
CIVRPPHNFNKFYF

SEQ ID NO: 296300 - protein, 14 aa, Homo sapiens
  CDR3 for beta chain variable domain of TCR clone 148150 (TRBV11-3, TRBJ2-1)
CASSATTSGSIQFF

SEQ ID NO: 296301 - protein, 12 aa, Homo sapiens
  CDR3 for alpha chain variable domain of TCR clone 148151 (TRAV13-2, TRAJ23)
CAERHRGGKLIF

SEQ ID NO: 296302 - protein, 17 aa, Homo sapiens
  CDR3 for beta chain variable domain of TCR clone 148151 (TRBV20-1, TRBJ2-1)
CSARDPLAGVWDNEQFF

SEQ ID NO: 296303 - protein, 11 aa, Homo sapiens
  CDR3 for alpha chain variable domain of TCR clone 148152 (TRAV12-1, TRAJ26)
CVVAYGQNFGF

SEQ ID NO: 296304 - protein, 15 aa, Homo sapiens
  CDR3 for beta chain variable domain of TCR clone 148152 (TRBV12-4, TRBJ2-5)
CASSGTGQAQETQYF

SEQ ID NO: 296305 - protein, 23 aa, Homo sapiens
  CDR3 for alpha chain variable domain of TCR clone 148153 (TRAV26-1, TRAJ38)
CIVRPLNAGNNHIQNPDPAVYQL

SEQ ID NO: 296306 - protein, 13 aa, Homo sapiens
  CDR3 for beta chain variable domain of TCR clone 148153 (TRBV18, TRBJ1-1)
CASSHNGDTEAFF

SEQ ID NO: 296307 - protein, 14 aa, Homo sapiens
  CDR3 for alpha chain variable domain of TCR clone 148154 (TRAV1-2, TRAJ8)
CAVREDTGFQKLVF

SEQ ID NO: 296308 - protein, 15 aa, Homo sapiens
  CDR3 for beta chain variable domain of TCR clone 148154 (TRBV9, TRBJ1-6)
CASSVAGAGDSPLHF

SEQ ID NO: 296309 - protein, 13 aa, Homo sapiens
  CDR3 for alpha chain variable domain of TCR clone 148155 (TRAV8-3, TRAJ43)
CSVVPYNNNDMRF

SEQ ID NO: 296310 - protein, 17 aa, Homo sapiens
  CDR3 for beta chain variable domain of TCR clone 148155 (TRBV7-7, TRBJ1-1)
CASIGDRPNLGVTEAFF

SEQ ID NO: 296311 - protein, 16 aa, Homo sapiens
  CDR3 for alpha chain variable domain of TCR clone 148156 (TRAV12-2, TRAJ45)
CDVIFLSGGGADGLTF

SEQ ID NO: 296312 - protein, 19 aa, Homo sapiens
  CDR3 for beta chain variable domain of TCR clone 148156 (TRBV28, TRBJ2-4)
CASSFQPGGPAHSKNIQYF

SEQ ID NO: 296313 - protein, 13 aa, Homo sapiens
  CDR3 for alpha chain variable domain of TCR clone 148157 (TRAV8-3, TRAJ28)
RAVGAVGSYQLTF

SEQ ID NO: 296314 - protein, 17 aa, Homo sapiens
  CDR3 for beta chain variable domain of TCR clone 148157 (TRBV11-2, TRBJ2-1)
CASSLYPPGVEYNEQFF

SEQ ID NO: 296315 - protein, 20 aa, Homo sapiens
  CDR3 for alpha chain variable domain of TCR clone 148158 (TRAV21, TRAJ4)
AASQPGDSATLAGGYNKLIF

SEQ ID NO: 296316 - protein, 13 aa, Homo sapiens
  CDR3 for beta chain variable domain of TCR clone 148158 (TRBV12-4, TRBJ1-1)
CASSLGGTTEAFF

SEQ ID NO: 296317 - protein, 16 aa, Homo sapiens
  CDR3 for alpha chain variable domain of TCR clone 148159 (TRAV1-2, TRAJ10)
CAVRGVLTGGGNKLTF

SEQ ID NO: 296318 - protein, 13 aa, Homo sapiens
  CDR3 for beta chain variable domain of TCR clone 148159 (TRBV24-1, TRBJ2-2)
CATTATRTVELFF

SEQ ID NO: 296319 - protein, 14 aa, Homo sapiens
  CDR3 for alpha chain variable domain of TCR clone 148160 (TRAV1-2, TRAJ16)
CAVNRFSDGQKLLF

SEQ ID NO: 296320 - protein, 15 aa, Homo sapiens
  CDR3 for beta chain variable domain of TCR clone 148160 (TRBV9, TRBJ1-6)
CASSVAGTGDSTLNF

SEQ ID NO: 296321 - protein, 14 aa, Homo sapiens
  CDR3 for alpha chain variable domain of TCR clone 148161 (TRAV12-2, TRAJ45)
CAVNIGGGADGLTF

SEQ ID NO: 296322 - protein, 14 aa, Homo sapiens
  CDR3 for beta chain variable domain of TCR clone 148161 (TRBV12-5, TRBJ2-5)
CASGARTHQETQYF

SEQ ID NO: 296323 - protein, 13 aa, Homo sapiens
  CDR3 for alpha chain variable domain of TCR clone 148162 (TRAV13-1, TRAJ39)
CSKYSNAGNMLTF

SEQ ID NO: 296324 - protein, 16 aa, Homo sapiens
  CDR3 for beta chain variable domain of TCR clone 148162 (TRBV7-2, TRBJ2-3)
CASSLVALYGTDTQYF

SEQ ID NO: 296325 - protein, 17 aa, Homo sapiens
  CDR3 for alpha chain variable domain of TCR clone 148163 (TRAV16, TRAJ58)
CITVLSNGETSGSRLTF

SEQ ID NO: 296326 - protein, 16 aa, Homo sapiens
  CDR3 for beta chain variable domain of TCR clone 148163 (TRBV20-1, TRBJ2-3)
CSARLHSAGAIDTQYF

SEQ ID NO: 296327 - protein, 14 aa, Homo sapiens
  CDR3 for alpha chain variable domain of TCR clone 148164 (TRAV3, TRAJ27)
CAVRDDTNAGKSTF

SEQ ID NO: 296328 - protein, 13 aa, Homo sapiens
  CDR3 for beta chain variable domain of TCR clone 148164 (TRBV7-7, TRBJ2-3)
CASSLSRADTQYF

SEQ ID NO: 296329 - protein, 14 aa, Homo sapiens
  CDR3 for alpha chain variable domain of TCR clone 148165 (TRAV20, TRAJ53)
CAVNSGGSNYKLTF

SEQ ID NO: 296330 - protein, 11 aa, Homo sapiens
  CDR3 for beta chain variable domain of TCR clone 148165 (TRBV19, TRBJ1-1)
CASSIGSEAFF

SEQ ID NO: 296331 - protein, 18 aa, Homo sapiens
  CDR3 for alpha chain variable domain of TCR clone 148166 (TRAV13-1, TRAJ52)
CAAKNPNAGGTSYGNPTF

SEQ ID NO: 296332 - protein, 15 aa, Homo sapiens
  CDR3 for beta chain variable domain of TCR clone 148166 (TRBV6-1, TRBJ2-3)
CASSERGGITDTQYF

SEQ ID NO: 296333 - protein, 14 aa, Homo sapiens
  CDR3 for alpha chain variable domain of TCR clone 148167 (TRAV23/DV6, TRAJ17)
CAASVQAAGNKPTF

SEQ ID NO: 296334 - protein, 18 aa, Homo sapiens
  CDR3 for beta chain variable domain of TCR clone 148167 (TRBV20-1, TRBJ2-7)
CSAGLPPRSGGSPYEQYF

SEQ ID NO: 296335 - protein, 14 aa, Homo sapiens
  CDR3 for alpha chain variable domain of TCR clone 148168 (TRAV1-2, TRAJ15)
CAVRDRQAGTALIF

SEQ ID NO: 296336 - protein, 16 aa, Homo sapiens
  CDR3 for beta chain variable domain of TCR clone 148168 (TRBV13, TRBJ2-2)
CASSPRTGEHTGELFF

SEQ ID NO: 296337 - protein, 15 aa, Homo sapiens
  CDR3 for alpha chain variable domain of TCR clone 148169 (TRAV12-1, TRAJ44)
CVVFVNTGTASKLTF

SEQ ID NO: 296338 - protein, 17 aa, Homo sapiens
  CDR3 for beta chain variable domain of TCR clone 148169 (TRBV3-1, TRBJ2-7)
CASSQDLTGLSSYEQYF

SEQ ID NO: 296339 - protein, 16 aa, Homo sapiens
  CDR3 for alpha chain variable domain of TCR clone 148170 (TRAV12-2, TRAJ18)
CAVTTDRGSTPGRLYF

SEQ ID NO: 296340 - protein, 14 aa, Homo sapiens
  CDR3 for beta chain variable domain of TCR clone 148170 (TRBV4-2, TRBJ1-5)
CASSQDSINQPQHF

SEQ ID NO: 296341 - protein, 14 aa, Homo sapiens
  CDR3 for alpha chain variable domain of TCR clone 148171 (TRAV8-2, TRAJ6)
CVVISAGGSYIPTF

SEQ ID NO: 296342 - protein, 16 aa, Homo sapiens
  CDR3 for beta chain variable domain of TCR clone 148171 (TRBV7-6, TRBJ2-6)
CASSIPGLSGANVLTF

SEQ ID NO: 296343 - protein, 12 aa, Homo sapiens
  CDR3 for alpha chain variable domain of TCR clone 148172 (TRAV29/DV5, TRAJ15)
CASNQAGTALIF

SEQ ID NO: 296344 - protein, 15 aa, Homo sapiens
  CDR3 for beta chain variable domain of TCR clone 148172 (TRBV11-2, TRBJ2-2)
CASSSDRVNAGELFS

SEQ ID NO: 296345 - protein, 14 aa, Homo sapiens
  CDR3 for alpha chain variable domain of TCR clone 148173 (TRAV8-1, TRAJ5)
CAVRTDTGRRAITF

SEQ ID NO: 296346 - protein, 15 aa, Homo sapiens
  CDR3 for beta chain variable domain of TCR clone 148173 (TRBV7-3, TRBJ2-1)
CASSPTGGGEVEQFF

SEQ ID NO: 296347 - protein, 13 aa, Homo sapiens
  CDR3 for alpha chain variable domain of TCR clone 148174 (TRAV26-1, TRAJ34)
CIVRPWITDKLIF

SEQ ID NO: 296348 - protein, 14 aa, Homo sapiens
  CDR3 for beta chain variable domain of TCR clone 148174 (TRBV7-2, TRBJ2-7)
CASRSQVAAYEQYF

SEQ ID NO: 296349 - protein, 11 aa, Homo sapiens
  CDR3 for alpha chain variable domain of TCR clone 148175 (TRAV35, TRAJ29)
CAGAGNTPLVF

SEQ ID NO: 296350 - protein, 12 aa, Homo sapiens
  CDR3 for beta chain variable domain of TCR clone 148175 (TRBV20-1, TRBJ2-1)
CSARLGTDEQFF

SEQ ID NO: 296351 - protein, 13 aa, Homo sapiens
  CDR3 for alpha chain variable domain of TCR clone 148176 (TRAV3, TRAJ29)
CAVRDWGNTPLVF

SEQ ID NO: 296352 - protein, 15 aa, Homo sapiens
  CDR3 for beta chain variable domain of TCR clone 148176 (TRBV12-4, TRBJ2-5)
CASIGRTGEGETQYL

SEQ ID NO: 296353 - protein, 15 aa, Homo sapiens
  CDR3 for alpha chain variable domain of TCR clone 148177 (TRAV25, TRAJ52)
GAGTSGGTSYGKLTF

SEQ ID NO: 296354 - protein, 16 aa, Homo sapiens
  CDR3 for beta chain variable domain of TCR clone 148177 (TRBV15, TRBJ1-2)
CATSRGPRTGGGGYTF

SEQ ID NO: 296355 - protein, 16 aa, Homo sapiens
  CDR3 for alpha chain variable domain of TCR clone 148178 (TRAV3, TRAJ37)
CAVRPHGSGNPGKLIF

SEQ ID NO: 296356 - protein, 16 aa, Homo sapiens
  CDR3 for beta chain variable domain of TCR clone 148178 (TRBV9, TRBJ1-2)
CASSVEGKVSPYGYTF

SEQ ID NO: 296357 - protein, 11 aa, Homo sapiens
  CDR3 for alpha chain variable domain of TCR clone 148179 (TRAV2, TRAJ13)
CASGGYQKVTF

SEQ ID NO: 296358 - protein, 15 aa, Homo sapiens
  CDR3 for beta chain variable domain of TCR clone 148179 (TRBV11-1, TRBJ1-3)
CASTDPRAFGNTIYF

SEQ ID NO: 296359 - protein, 14 aa, Homo sapiens
  CDR3 for alpha chain variable domain of TCR clone 148180 (TRAV1-2, TRAJ16)
CAVNRFSDGQKLLF

SEQ ID NO: 296360 - protein, 16 aa, Homo sapiens
  CDR3 for beta chain variable domain of TCR clone 148180 (TRBV7-3, TRBJ2-2)
CAISLKRGTLSGELFF

SEQ ID NO: 296361 - protein, 13 aa, Homo sapiens
  CDR3 for alpha chain variable domain of TCR clone 148181 (TRAV1-2, TRAJ9)
CAALNTGGFKTIF

SEQ ID NO: 296362 - protein, 12 aa, Homo sapiens
  CDR3 for beta chain variable domain of TCR clone 148181 (TRBV3-1, TRBJ2-1)
CASSQGSSGQFF

SEQ ID NO: 296363 - protein, 12 aa, Homo sapiens
  CDR3 for alpha chain variable domain of TCR clone 148182 (TRAV12-1, TRAJ40)
CVFYPGTYKYIF

SEQ ID NO: 296364 - protein, 18 aa, Homo sapiens
  CDR3 for beta chain variable domain of TCR clone 148182 (TRBV12-4, TRBJ2-2)
CASSLVAGTRGRTGELFS

SEQ ID NO: 296365 - protein, 11 aa, Homo sapiens
  CDR3 for alpha chain variable domain of TCR clone 148183 (TRAV1-1, TRAJ23)
CAVRQGGKLFF

SEQ ID NO: 296366 - protein, 14 aa, Homo sapiens
  CDR3 for beta chain variable domain of TCR clone 148183 (TRBV19, TRBJ2-1)
CASPTFVLSGEQFF

SEQ ID NO: 296367 - protein, 16 aa, Homo sapiens
  CDR3 for alpha chain variable domain of TCR clone 148184 (TRAV3, TRAJ34)
CAVRARGTPTSSSLGL

SEQ ID NO: 296368 - protein, 18 aa, Homo sapiens
  CDR3 for beta chain variable domain of TCR clone 148184 (TRBV28, TRBJ2-5)
CASNSRARASGRAETQYF

SEQ ID NO: 296369 - protein, 15 aa, Homo sapiens
  CDR3 for alpha chain variable domain of TCR clone 148185 (TRAV38-2/DV8, TRAJ57)
CAYKSGLGGSEKLVF

SEQ ID NO: 296370 - protein, 16 aa, Homo sapiens
  CDR3 for beta chain variable domain of TCR clone 148185 (TRBV28, TRBJ1-5)
CACSFRGGYSNQPQHF

SEQ ID NO: 296371 - protein, 13 aa, Homo sapiens
  CDR3 for alpha chain variable domain of TCR clone 148186 (TRAV20, TRAJ31)
CAVQAIGGARLMF

SEQ ID NO: 296372 - protein, 14 aa, Homo sapiens
  CDR3 for beta chain variable domain of TCR clone 148186 (TRBV2, TRBJ1-5)
CASSGTVSNKPQHF

SEQ ID NO: 296373 - protein, 13 aa, Homo sapiens
  CDR3 for alpha chain variable domain of TCR clone 148187 (TRAV1-2, TRAJ9)
CAALNTGVFKTIF

SEQ ID NO: 296374 - protein, 20 aa, Homo sapiens
  CDR3 for beta chain variable domain of TCR clone 148187 (TRBV28, TRBJ2-1)
CASTPIGRSPGLAGGNEQFF

SEQ ID NO: 296375 - protein, 15 aa, Homo sapiens
  CDR3 for alpha chain variable domain of TCR clone 148188 (TRAV21, TRAJ53)
CATLNSGGSNYKLTF

SEQ ID NO: 296376 - protein, 13 aa, Homo sapiens
  CDR3 for beta chain variable domain of TCR clone 148188 (TRBV4-1, TRBJ2-7)
CASSQGQAYEQYF

SEQ ID NO: 296377 - protein, 17 aa, Homo sapiens
  CDR3 for alpha chain variable domain of TCR clone 148189 (TRAV3, TRAJ6)
CAVRDGPRAGGSYIPTF

SEQ ID NO: 296378 - protein, 14 aa, Homo sapiens
  CDR3 for beta chain variable domain of TCR clone 148189 (TRBV7-2, TRBJ2-7)
CAGTPKTSFYEQYF

SEQ ID NO: 296379 - protein, 16 aa, Homo sapiens
  CDR3 for alpha chain variable domain of TCR clone 148190 (TRAV3, TRAJ10)
CAVRDMRAGGGNKLTF

SEQ ID NO: 296380 - protein, 17 aa, Homo sapiens
  CDR3 for beta chain variable domain of TCR clone 148190 (TRBV6-5, TRBJ2-7)
CASRPSVGEVQHYEQYF

SEQ ID NO: 296381 - protein, 12 aa, Homo sapiens
  CDR3 for alpha chain variable domain of TCR clone 148191 (TRAV13-2, TRAJ8)
CAPWLGFQKLVF

SEQ ID NO: 296382 - protein, 13 aa, Homo sapiens
  CDR3 for beta chain variable domain of TCR clone 148191 (TRBV12-4, TRBJ1-5)
CASSPVRAQPQHF

SEQ ID NO: 296383 - protein, 13 aa, Homo sapiens
  CDR3 for alpha chain variable domain of TCR clone 148192 (TRAV8-3, TRAJ28)
CAVGAVGSYQPTL

SEQ ID NO: 296384 - protein, 15 aa, Homo sapiens
  CDR3 for beta chain variable domain of TCR clone 148192 (TRBV7-9, TRBJ1-5)
CASSQGHQPNQPQHF

SEQ ID NO: 296385 - protein, 13 aa, Homo sapiens
  CDR3 for alpha chain variable domain of TCR clone 148193 (TRAV36/DV7, TRAJ33)
CAVDMDSNYHLIW

SEQ ID NO: 296386 - protein, 16 aa, Homo sapiens
  CDR3 for beta chain variable domain of TCR clone 148193 (TRBV15, TRBJ2-3)
CATRLSGGRAPDTQYF

SEQ ID NO: 296387 - protein, 17 aa, Homo sapiens
  CDR3 for alpha chain variable domain of TCR clone 148194 (TRAV17, TRAJ52)
CATDRNAGGTSFGKLTF

SEQ ID NO: 296388 - protein, 13 aa, Homo sapiens
  CDR3 for beta chain variable domain of TCR clone 148194 (TRBV4-2, TRBJ1-1)
CASSQAGNTEAFF

SEQ ID NO: 296389 - protein, 15 aa, Homo sapiens
  CDR3 for alpha chain variable domain of TCR clone 148195 (TRAV8-3, TRAJ27)
CAVGPSKTNAGKSTF

SEQ ID NO: 296390 - protein, 13 aa, Homo sapiens
  CDR3 for beta chain variable domain of TCR clone 148195 (TRBV12-5, TRBJ2-3)
CASGERQSDTQYF

SEQ ID NO: 296391 - protein, 12 aa, Homo sapiens
  CDR3 for alpha chain variable domain of TCR clone 148196 (TRAV16, TRAJ10)
CSRTGGGNKLTF

SEQ ID NO: 296392 - protein, 12 aa, Homo sapiens
  CDR3 for beta chain variable domain of TCR clone 148196 (TRBV7-9, TRBJ2-7)
CASSLEGYEQYF

SEQ ID NO: 296393 - protein, 12 aa, Homo sapiens
  CDR3 for alpha chain variable domain of TCR clone 148197 (TRAV12-2, TRAJ42)
CAVGGSQGNHIF

SEQ ID NO: 296394 - protein, 16 aa, Homo sapiens
  CDR3 for beta chain variable domain of TCR clone 148197 (TRBV7-3, TRBJ2-2)
CASSLKRGTLSGELFF

SEQ ID NO: 296395 - protein, 11 aa, Homo sapiens
  CDR3 for alpha chain variable domain of TCR clone 148198 (TRAV20, TRAJ56)
CSLGANSKLTF

SEQ ID NO: 296396 - protein, 14 aa, Homo sapiens
  CDR3 for beta chain variable domain of TCR clone 148198 (TRBV20-1, TRBJ2-7)
CSAKRGRSSYEQYF

SEQ ID NO: 296397 - protein, 10 aa, Homo sapiens
  CDR3 for alpha chain variable domain of TCR clone 148199 (TRAV23/DV6, TRAJ31)
CARGGAILMF

SEQ ID NO: 296398 - protein, 14 aa, Homo sapiens
  CDR3 for beta chain variable domain of TCR clone 148199 (TRBV7-8, TRBJ1-2)
CASSPDSLSYGYTF

SEQ ID NO: 296399 - protein, 15 aa, Homo sapiens
  CDR3 for alpha chain variable domain of TCR clone 148200 (TRAV20, TRAJ4)
CAVEGSSGGYNKLIF

SEQ ID NO: 296400 - protein, 14 aa, Homo sapiens
  CDR3 for beta chain variable domain of TCR clone 148200 (TRBV7-8, TRBJ2-7)
CASTLGGALGEHYF

SEQ ID NO: 296401 - protein, 13 aa, Homo sapiens
  CDR3 for alpha chain variable domain of TCR clone 148201 (TRAV21, TRAJ56)
CAVRLGANSKLTF

SEQ ID NO: 296402 - protein, 12 aa, Homo sapiens
  CDR3 for beta chain variable domain of TCR clone 148201 (TRBV12-4, TRBJ2-3)
CASRSTTDTQYF

SEQ ID NO: 296403 - protein, 17 aa, Homo sapiens
  CDR3 for alpha chain variable domain of TCR clone 148202 (TRAV3, TRAJ6)
CAVRDGPRAGGSYISTF

SEQ ID NO: 296404 - protein, 20 aa, Homo sapiens
  CDR3 for beta chain variable domain of TCR clone 148202 (TRBV28, TRBJ2-1)
CASTPIGRSPGRAGGNEQFF

SEQ ID NO: 296405 - protein, 15 aa, Homo sapiens
  CDR3 for alpha chain variable domain of TCR clone 148203 (TRAV12-2, TRAJ53)
CAVNGGGGSNYKLTF

SEQ ID NO: 296406 - protein, 16 aa, Homo sapiens
  CDR3 for beta chain variable domain of TCR clone 148203 (TRBV18, TRBJ1-5)
CASSPRTGGGNQPQHF

SEQ ID NO: 296407 - protein, 14 aa, Homo sapiens
  CDR3 for alpha chain variable domain of TCR clone 148204 (TRAV8-4, TRAJ38)
CARLNAGNNRKPIW

SEQ ID NO: 296408 - protein, 12 aa, Homo sapiens
  CDR3 for beta chain variable domain of TCR clone 148204 (TRBV6-1, TRBJ2-7)
CASSEPLYEQYF

SEQ ID NO: 296409 - protein, 12 aa, Homo sapiens
  CDR3 for alpha chain variable domain of TCR clone 148205 (TRAV8-3, TRAJ20)
CAVDFNDYKLSF

SEQ ID NO: 296410 - protein, 17 aa, Homo sapiens
  CDR3 for beta chain variable domain of TCR clone 148205 (TRBV7-8, TRBJ2-6)
FASSAGTGGAGANVLTF

SEQ ID NO: 296411 - protein, 15 aa, Homo sapiens
  CDR3 for alpha chain variable domain of TCR clone 148206 (TRAV35, TRAJ52)
CAGPRGGTSYGKLTF

SEQ ID NO: 296412 - protein, 12 aa, Homo sapiens
  CDR3 for beta chain variable domain of TCR clone 148206 (TRBV5-1, TRBJ2-7)
CASSLDSYEQYF

SEQ ID NO: 296413 - protein, 11 aa, Homo sapiens
  CDR3 for alpha chain variable domain of TCR clone 148207 (TRAV12-1, TRAJ37)
CVVNTQGKLIF

SEQ ID NO: 296414 - protein, 13 aa, Homo sapiens
  CDR3 for beta chain variable domain of TCR clone 148207 (TRBV12-4, TRBJ1-5)
CASSPDRAQPQHF

SEQ ID NO: 296415 - protein, 15 aa, Homo sapiens
  CDR3 for alpha chain variable domain of TCR clone 148208 (TRAV2, TRAJ9)
CAVEDRGTGGFKTIF

SEQ ID NO: 296416 - protein, 18 aa, Homo sapiens
  CDR3 for beta chain variable domain of TCR clone 148208 (TRBV7-3, TRBJ2-1)
CASSLTLASGRAMVSSSS

SEQ ID NO: 296417 - protein, 13 aa, Homo sapiens
  CDR3 for alpha chain variable domain of TCR clone 148209 (TRAV12-1, TRAJ6)
CVVFPGGSYIPTF

SEQ ID NO: 296418 - protein, 13 aa, Homo sapiens
  CDR3 for beta chain variable domain of TCR clone 148209 (TRBV7-9, TRBJ1-2)
CASSLKQNYGYAF

SEQ ID NO: 296419 - protein, 13 aa, Homo sapiens
  CDR3 for alpha chain variable domain of TCR clone 148210 (TRAV12-1, TRAJ7)
CEVNMRGNNRLAF

SEQ ID NO: 296420 - protein, 15 aa, Homo sapiens
  CDR3 for beta chain variable domain of TCR clone 148210 (TRBV27, TRBJ2-3)
CASSLGLAATDTQYF

SEQ ID NO: 296421 - protein, 12 aa, Homo sapiens
  CDR3 for alpha chain variable domain of TCR clone 148211 (TRAV27, TRAJ35)
CAEADFGNVLHC

SEQ ID NO: 296422 - protein, 16 aa, Homo sapiens
  CDR3 for beta chain variable domain of TCR clone 148211 (TRBV7-3, TRBJ2-1)
CASSLEGYRSYNEQFF

SEQ ID NO: 296423 - protein, 14 aa, Homo sapiens
  CDR3 for alpha chain variable domain of TCR clone 148212 (TRAV9-2, TRAJ39)
CALYIYNAGNMLTF

SEQ ID NO: 296424 - protein, 16 aa, Homo sapiens
  CDR3 for beta chain variable domain of TCR clone 148212 (TRBV9, TRBJ2-3)
CQQIDSGGPSTDTQYF

SEQ ID NO: 296425 - protein, 12 aa, Homo sapiens
  CDR3 for alpha chain variable domain of TCR clone 148213 (TRAV1-2, TRAJ26)
CAVRYYGQNFVF

SEQ ID NO: 296426 - protein, 15 aa, Homo sapiens
  CDR3 for beta chain variable domain of TCR clone 148213 (TRBV28, TRBJ2-1)
CASGIIAGGRGEQFF

SEQ ID NO: 296427 - protein, 15 aa, Homo sapiens
  CDR3 for alpha chain variable domain of TCR clone 148214 (TRAV3, TRAJ42)
CAVRGGTGSQGNLIF

SEQ ID NO: 296428 - protein, 14 aa, Homo sapiens
  CDR3 for beta chain variable domain of TCR clone 148214 (TRBV19, TRBJ1-2)
CASSSLFARDIYTF

SEQ ID NO: 296429 - protein, 11 aa, Homo sapiens
  CDR3 for alpha chain variable domain of TCR clone 148215 (TRAV2, TRAJ13)
CASVGYQKVTF

SEQ ID NO: 296430 - protein, 13 aa, Homo sapiens
  CDR3 for beta chain variable domain of TCR clone 148215 (TRBV27, TRBJ1-4)
CASSLMGDEKLFF

SEQ ID NO: 296431 - protein, 16 aa, Homo sapiens
  CDR3 for alpha chain variable domain of TCR clone 148216 (TRAV26-2, TRAJ56)
CILRDVAAGANSKLTF

SEQ ID NO: 296432 - protein, 17 aa, Homo sapiens
  CDR3 for beta chain variable domain of TCR clone 148216 (TRBV28, TRBJ1-4)
CASSLVARGITNEKLFF

SEQ ID NO: 296433 - protein, 12 aa, Homo sapiens
  CDR3 for alpha chain variable domain of TCR clone 148217 (TRAV2, TRAJ5)
CALDTCRRALTF

SEQ ID NO: 296434 - protein, 15 aa, Homo sapiens
  CDR3 for beta chain variable domain of TCR clone 148217 (TRBV10-3, TRBJ2-1)
CAISDVQDRAYEQFF

SEQ ID NO: 296435 - protein, 14 aa, Homo sapiens
  CDR3 for alpha chain variable domain of TCR clone 148218 (TRAV17, TRAJ42)
CATAGGGSQGNFIF

SEQ ID NO: 296436 - protein, 14 aa, Homo sapiens
  CDR3 for beta chain variable domain of TCR clone 148218 (TRBV7-2, TRBJ2-3)
CASRFSLPSDTQYF

SEQ ID NO: 296437 - protein, 16 aa, Homo sapiens
  CDR3 for alpha chain variable domain of TCR clone 148219 (TRAV13-1, TRAJ45)
CAAPKESGGGADGLTF

SEQ ID NO: 296438 - protein, 15 aa, Homo sapiens
  CDR3 for beta chain variable domain of TCR clone 148219 (TRBV9, TRBJ1-6)
CASSVAGTGDSPLHF

SEQ ID NO: 296439 - protein, 18 aa, Homo sapiens
  CDR3 for alpha chain variable domain of TCR clone 148220 (TRAV21, TRAJ52)
CTVMPSPAGGTSYGKLTF

SEQ ID NO: 296440 - protein, 17 aa, Homo sapiens
  CDR3 for beta chain variable domain of TCR clone 148220 (TRBV13, TRBJ2-3)
CASSLSRVAGGRNTQYF

SEQ ID NO: 296441 - protein, 12 aa, Homo sapiens
  CDR3 for alpha chain variable domain of TCR clone 148221 (TRAV12-3, TRAJ20)
CAMVSGDYKLSF

SEQ ID NO: 296442 - protein, 17 aa, Homo sapiens
  CDR3 for beta chain variable domain of TCR clone 148221 (TRBV10-3, TRBJ1-1)
CAISESGTGGGTTEAFF

SEQ ID NO: 296443 - protein, 10 aa, Homo sapiens
  CDR3 for alpha chain variable domain of TCR clone 148222 (TRAV12-1, TRAJ43)
CVVNGRDMRF

SEQ ID NO: 296444 - protein, 12 aa, Homo sapiens
  CDR3 for beta chain variable domain of TCR clone 148222 (TRBV12-4, TRBJ1-1)
CASSPGQGWAFF

SEQ ID NO: 296445 - protein, 13 aa, Homo sapiens
  CDR3 for alpha chain variable domain of TCR clone 148223 (TRAV2, TRAJ40)
CSVVTSGTYKYIF

SEQ ID NO: 296446 - protein, 14 aa, Homo sapiens
  CDR3 for beta chain variable domain of TCR clone 148223 (TRBV7-9, TRBJ2-1)
CASSSMVGFGEQFF

SEQ ID NO: 296447 - protein, 13 aa, Homo sapiens
  CDR3 for alpha chain variable domain of TCR clone 148224 (TRAV21, TRAJ27)
CAARPGNAGKSTF

SEQ ID NO: 296448 - protein, 13 aa, Homo sapiens
  CDR3 for beta chain variable domain of TCR clone 148224 (TRBV4-1, TRBJ2-2)
CASSQENTGELFF

SEQ ID NO: 296449 - protein, 13 aa, Homo sapiens
  CDR3 for alpha chain variable domain of TCR clone 148225 (TRAV3, TRAJ20)
CAVRSLNDYKLSF

SEQ ID NO: 296450 - protein, 13 aa, Homo sapiens
  CDR3 for beta chain variable domain of TCR clone 148225 (TRBV6-1, TRBJ2-1)
CAGMDPTNNEQFC

SEQ ID NO: 296451 - protein, 14 aa, Homo sapiens
  CDR3 for alpha chain variable domain of TCR clone 148226 (TRAV12-2, TRAJ40)
CAVKIPSGTHKYIF

SEQ ID NO: 296452 - protein, 17 aa, Homo sapiens
  CDR3 for beta chain variable domain of TCR clone 148226 (TRBV13, TRBJ2-3)
CASSLSRVAGGRDTQYF

SEQ ID NO: 296453 - protein, 14 aa, Homo sapiens
  CDR3 for alpha chain variable domain of TCR clone 148227 (TRAV12-2, TRAJ17)
CAVNIKAAGNKLTF

SEQ ID NO: 296454 - protein, 14 aa, Homo sapiens
  CDR3 for beta chain variable domain of TCR clone 148227 (TRBV7-9, TRBJ2-2)
CASSGLADTGELFF

SEQ ID NO: 296455 - protein, 14 aa, Homo sapiens
  CDR3 for alpha chain variable domain of TCR clone 148228 (TRAV13-1, TRAJ44)
CAEKATGTASKLTF

SEQ ID NO: 296456 - protein, 11 aa, Homo sapiens
  CDR3 for beta chain variable domain of TCR clone 148228 (TRBV7-8, TRBJ2-7)
CASSLSLEQYF

SEQ ID NO: 296457 - protein, 16 aa, Homo sapiens
  CDR3 for alpha chain variable domain of TCR clone 148229 (TRAV8-1, TRAJ42)
CAVTSRYGGSQGNIIF

SEQ ID NO: 296458 - protein, 12 aa, Homo sapiens
  CDR3 for beta chain variable domain of TCR clone 148229 (TRBV6-3, TRBJ2-7)
CASSLGRRGLYF

SEQ ID NO: 296459 - protein, 14 aa, Homo sapiens
  CDR3 for alpha chain variable domain of TCR clone 148230 (TRAV2, TRAJ9)
CAVGDRSGGFKTIF

SEQ ID NO: 296460 - protein, 13 aa, Homo sapiens
  CDR3 for beta chain variable domain of TCR clone 148230 (TRBV3-1, TRBJ2-5)
CQSQGPDQETQYF

SEQ ID NO: 296461 - protein, 13 aa, Homo sapiens
  CDR3 for alpha chain variable domain of TCR clone 148231 (TRAV21, TRAJ20)
CAVGLRVDYKLSF

SEQ ID NO: 296462 - protein, 16 aa, Homo sapiens
  CDR3 for beta chain variable domain of TCR clone 148231 (TRBV5-1, TRBJ2-1)
CASSLSSLRESNEQFF

SEQ ID NO: 296463 - protein, 16 aa, Homo sapiens
  CDR3 for alpha chain variable domain of TCR clone 148232 (TRAV30, TRAJ24)
CGTEIVDADSCVKFQF

SEQ ID NO: 296464 - protein, 14 aa, Homo sapiens
  CDR3 for beta chain variable domain of TCR clone 148232 (TRBV20-1, TRBJ1-1)
CSAQTRIGGTEAFF

SEQ ID NO: 296465 - protein, 14 aa, Homo sapiens
  CDR3 for alpha chain variable domain of TCR clone 148233 (TRAV8-3, TRAJ33)
CAVGAPDSNYQLIW

SEQ ID NO: 296466 - protein, 16 aa, Homo sapiens
  CDR3 for beta chain variable domain of TCR clone 148233 (TRBV11-2, TRBJ2-5)
CASSGQGYSPQETQYF

SEQ ID NO: 296467 - protein, 15 aa, Homo sapiens
  CDR3 for alpha chain variable domain of TCR clone 148234 (TRAV13-1, TRAJ18)
CAASGGGSTLGRLYF

SEQ ID NO: 296468 - protein, 13 aa, Homo sapiens
  CDR3 for beta chain variable domain of TCR clone 148234 (TRBV18, TRBJ2-1)
CASGLASNKEQFF

SEQ ID NO: 296469 - protein, 15 aa, Homo sapiens
  CDR3 for alpha chain variable domain of TCR clone 148235 (TRAV3, TRAJ20)
CAVRDIKLSDYKLSF

SEQ ID NO: 296470 - protein, 14 aa, Homo sapiens
  CDR3 for beta chain variable domain of TCR clone 148235 (TRBV5-4, TRBJ1-1)
CASSLDSRRDEAFF

SEQ ID NO: 296471 - protein, 14 aa, Homo sapiens
  CDR3 for alpha chain variable domain of TCR clone 148236 (TRAV26-1, TRAJ49)
CIVRPSNTGNQFYF

SEQ ID NO: 296472 - protein, 15 aa, Homo sapiens
  CDR3 for beta chain variable domain of TCR clone 148236 (TRBV19, TRBJ1-1)
CASMGFRDVNTEGFF

SEQ ID NO: 296473 - protein, 18 aa, Homo sapiens
  CDR3 for alpha chain variable domain of TCR clone 148237 (TRAV21, TRAJ52)
CAVRPSPAGGTSYGKLTF

SEQ ID NO: 296474 - protein, 13 aa, Homo sapiens
  CDR3 for beta chain variable domain of TCR clone 148237 (TRBV6-4, TRBJ2-1)
CASSASVNNEQFF

SEQ ID NO: 296475 - protein, 13 aa, Homo sapiens
  CDR3 for alpha chain variable domain of TCR clone 148238 (TRAV36/DV7, TRAJ29)
CAVEPSGNTPLVF

SEQ ID NO: 296476 - protein, 14 aa, Homo sapiens
  CDR3 for beta chain variable domain of TCR clone 148238 (TRBV7-3, TRBJ1-1)
CASSLKGGNTEAFF

SEQ ID NO: 296477 - protein, 16 aa, Homo sapiens
  CDR3 for alpha chain variable domain of TCR clone 148239 (TRAV16, TRAJ52)
CALSAAGGTSYGKLTF

SEQ ID NO: 296478 - protein, 12 aa, Homo sapiens
  CDR3 for beta chain variable domain of TCR clone 148239 (TRBV19, TRBJ1-5)
CASSIAQQPQHF

SEQ ID NO: 296479 - protein, 11 aa, Homo sapiens
  CDR3 for alpha chain variable domain of TCR clone 148240 (TRAV21, TRAJ11)
CAVNGYSTLTF

SEQ ID NO: 296480 - protein, 13 aa, Homo sapiens
  CDR3 for beta chain variable domain of TCR clone 148240 (TRBV4-2, TRBJ1-1)
CASSQAGNTEAFF

SEQ ID NO: 296481 - protein, 15 aa, Homo sapiens
  CDR3 for alpha chain variable domain of TCR clone 148241 (TRAV12-2, TRAJ53)
CAVNGGGGSNYKLTF

SEQ ID NO: 296482 - protein, 15 aa, Homo sapiens
  CDR3 for beta chain variable domain of TCR clone 148241 (TRBV20-1, TRBJ2-7)
CSARDRVSGMDERYF

SEQ ID NO: 296483 - protein, 15 aa, Homo sapiens
  CDR3 for alpha chain variable domain of TCR clone 148242 (TRAV13-1, TRAJ10)
CAATILMGGGNKLTF

SEQ ID NO: 296484 - protein, 15 aa, Homo sapiens
  CDR3 for beta chain variable domain of TCR clone 148242 (TRBV2, TRBJ2-7)
CASTLLGSGATEQYF

SEQ ID NO: 296485 - protein, 15 aa, Homo sapiens
  CDR3 for alpha chain variable domain of TCR clone 148243 (TRAV8-3, TRAJ11)
CAVGLLNSGYSTLTF

SEQ ID NO: 296486 - protein, 14 aa, Homo sapiens
  CDR3 for beta chain variable domain of TCR clone 148243 (TRBV10-2, TRBJ1-5)
CASSSTGRNQPQHF

SEQ ID NO: 296487 - protein, 13 aa, Homo sapiens
  CDR3 for alpha chain variable domain of TCR clone 148244 (TRAV36/DV7, TRAJ37)
CAVFSSNTGKLIF

SEQ ID NO: 296488 - protein, 15 aa, Homo sapiens
  CDR3 for beta chain variable domain of TCR clone 148244 (TRBV7-9, TRBJ1-5)
CASSQGHQPNQPQHF

SEQ ID NO: 296489 - protein, 11 aa, Homo sapiens
  CDR3 for alpha chain variable domain of TCR clone 148245 (TRAV21, TRAJ34)
CAPLDTYKLIF

SEQ ID NO: 296490 - protein, 16 aa, Homo sapiens
  CDR3 for beta chain variable domain of TCR clone 148245 (TRBV5-1, TRBJ2-3)
CASSLAGDRGTDTQYF

SEQ ID NO: 296491 - protein, 11 aa, Homo sapiens
  CDR3 for alpha chain variable domain of TCR clone 148246 (TRAV13-1, TRAJ15)
CAATPGTALIF

SEQ ID NO: 296492 - protein, 17 aa, Homo sapiens
  CDR3 for beta chain variable domain of TCR clone 148246 (TRBV13, TRBJ2-3)
RASSLSRVAGGRNTQYF

SEQ ID NO: 296493 - protein, 15 aa, Homo sapiens
  CDR3 for alpha chain variable domain of TCR clone 148247 (TRAV12-1, TRAJ44)
CVADLPTRTASKLTF

SEQ ID NO: 296494 - protein, 13 aa, Homo sapiens
  CDR3 for beta chain variable domain of TCR clone 148247 (TRBV20-1, TRBJ2-5)
CSARGDYQETQYF

SEQ ID NO: 296495 - protein, 17 aa, Homo sapiens
  CDR3 for alpha chain variable domain of TCR clone 148248 (TRAV5, TRAJ6)
CAESIQPRAGGSYIPTF

SEQ ID NO: 296496 - protein, 16 aa, Homo sapiens
  CDR3 for beta chain variable domain of TCR clone 148248 (TRBV5-4, TRBJ2-3)
CASQQPGAGGADTQYF

SEQ ID NO: 296497 - protein, 13 aa, Homo sapiens
  CDR3 for alpha chain variable domain of TCR clone 148249 (TRAV16, TRAJ53)
CALRGGSNYKLTF

SEQ ID NO: 296498 - protein, 14 aa, Homo sapiens
  CDR3 for beta chain variable domain of TCR clone 148249 (TRBV7-8, TRBJ2-7)
CASSVGQGAYEQYF

SEQ ID NO: 296499 - protein, 14 aa, Homo sapiens
  CDR3 for alpha chain variable domain of TCR clone 148250 (TRAV3, TRAJ6)
CAVRDPWGSYIPTF

SEQ ID NO: 296500 - protein, 18 aa, Homo sapiens
  CDR3 for beta chain variable domain of TCR clone 148250 (TRBV11-2, TRBJ2-3)
CASSLGGASRGAPNTQYF

SEQ ID NO: 296501 - protein, 17 aa, Homo sapiens
  CDR3 for alpha chain variable domain of TCR clone 148251 (TRAV12-3, TRAJ26)
CAMSGGRWDNYGQNFVF

SEQ ID NO: 296502 - protein, 12 aa, Homo sapiens
  CDR3 for beta chain variable domain of TCR clone 148251 (TRBV19, TRBJ1-5)
CASSIAQQAQHF

SEQ ID NO: 296503 - protein, 18 aa, Homo sapiens
  CDR3 for alpha chain variable domain of TCR clone 148252 (TRAV26-2, TRAJ45)
CILRVDKYSGGGADGLKF

SEQ ID NO: 296504 - protein, 16 aa, Homo sapiens
  CDR3 for beta chain variable domain of TCR clone 148252 (TRBV2, TRBJ1-4)
CASNFLQGATNEKPFF

SEQ ID NO: 296505 - protein, 14 aa, Homo sapiens
  CDR3 for alpha chain variable domain of TCR clone 148253 (TRAV29/DV5, TRAJ32)
CAAAYGGATTKLIF

SEQ ID NO: 296506 - protein, 14 aa, Homo sapiens
  CDR3 for beta chain variable domain of TCR clone 148253 (TRBV7-2, TRBJ1-1)
CASSFLTGTTEAFF

SEQ ID NO: 296507 - protein, 14 aa, Homo sapiens
  CDR3 for alpha chain variable domain of TCR clone 148254 (TRAV8-1, TRAJ5)
CAVGTDTGRRALTF

SEQ ID NO: 296508 - protein, 14 aa, Homo sapiens
  CDR3 for beta chain variable domain of TCR clone 148254 (TRBV5-5, TRBJ1-2)
CASSLDPYNYGYTF

SEQ ID NO: 296509 - protein, 17 aa, Homo sapiens
  CDR3 for alpha chain variable domain of TCR clone 148255 (TRAV3, TRAJ42)
CAVRDRDYGGSQGNLIF

SEQ ID NO: 296510 - protein, 12 aa, Homo sapiens
  CDR3 for beta chain variable domain of TCR clone 148255 (TRBV11-2, TRBJ2-1)
CTSSPGNNEQFF

SEQ ID NO: 296511 - protein, 18 aa, Homo sapiens
  CDR3 for alpha chain variable domain of TCR clone 148256 (TRAV13-1, TRAJ52)
CAASKRSAVGTSYVKLTF

SEQ ID NO: 296512 - protein, 13 aa, Homo sapiens
  CDR3 for beta chain variable domain of TCR clone 148256 (TRBV12-4, TRBJ1-2)
CASSLRQGKGYTF

SEQ ID NO: 296513 - protein, 16 aa, Homo sapiens
  CDR3 for alpha chain variable domain of TCR clone 148257 (TRAV13-1, )
CAANDIQNPDPAVYQL

SEQ ID NO: 296514 - protein, 15 aa, Homo sapiens
  CDR3 for beta chain variable domain of TCR clone 148257 (TRBV11-2, TRBJ2-1)
CASSLGTSGLNEQFF

SEQ ID NO: 296515 - protein, 21 aa, Homo sapiens
  CDR3 for alpha chain variable domain of TCR clone 148258 (TRAV12-1, TRAJ32)
SSVIQPTTSMNYGGATNKLIF

SEQ ID NO: 296516 - protein, 15 aa, Homo sapiens
  CDR3 for beta chain variable domain of TCR clone 148258 (TRBV7-9, TRBJ2-2)
CASGPLDTFPGELFF

SEQ ID NO: 296517 - protein, 16 aa, Homo sapiens
  CDR3 for alpha chain variable domain of TCR clone 148259 (TRAV3, TRAJ3)
CAVRDRAKSSASKIIF

SEQ ID NO: 296518 - protein, 16 aa, Homo sapiens
  CDR3 for beta chain variable domain of TCR clone 148259 (TRBV11-2, TRBJ1-2)
CASSPSGREANYGYTF

SEQ ID NO: 296519 - protein, 13 aa, Homo sapiens
  CDR3 for alpha chain variable domain of TCR clone 148260 (TRAV8-6, TRAJ24)
CAVSSDSWGKLQF

SEQ ID NO: 296520 - protein, 18 aa, Homo sapiens
  CDR3 for beta chain variable domain of TCR clone 148260 (TRBV7-6, TRBJ2-1)
CASSPRTSGMSSYNEQFF

SEQ ID NO: 296521 - protein, 11 aa, Homo sapiens
  CDR3 for alpha chain variable domain of TCR clone 148261 (TRAV3, TRAJ31)
CAVRPDARPLF

SEQ ID NO: 296522 - protein, 12 aa, Homo sapiens
  CDR3 for beta chain variable domain of TCR clone 148261 (TRBV7-9, TRBJ2-2)
CASSLDTGELFF

SEQ ID NO: 296523 - protein, 15 aa, Homo sapiens
  CDR3 for alpha chain variable domain of TCR clone 148262 (TRAV3, TRAJ4)
CAQNMFSGGYNKLIF

SEQ ID NO: 296524 - protein, 16 aa, Homo sapiens
  CDR3 for beta chain variable domain of TCR clone 148262 (TRBV20-1, TRBJ1-4)
CSAPGQGLLTNEKLFF

SEQ ID NO: 296525 - protein, 15 aa, Homo sapiens
  CDR3 for alpha chain variable domain of TCR clone 148263 (TRAV3, TRAJ17)
CAVRSCRQQANLWRR

SEQ ID NO: 296526 - protein, 15 aa, Homo sapiens
  CDR3 for beta chain variable domain of TCR clone 148263 (TRBV2, TRBJ2-4)
CASSGTNRAKNIQYF

SEQ ID NO: 296527 - protein, 16 aa, Homo sapiens
  CDR3 for alpha chain variable domain of TCR clone 148264 (TRAV30, TRAJ24)
CGTAIVDADSWGKFQF

SEQ ID NO: 296528 - protein, 15 aa, Homo sapiens
  CDR3 for beta chain variable domain of TCR clone 148264 (TRBV18, TRBJ2-1)
CASLPDRGRDNEQFF

SEQ ID NO: 296529 - protein, 14 aa, Homo sapiens
  CDR3 for alpha chain variable domain of TCR clone 148265 (TRAV1-2, TRAJ16)
CAVNRFSDGQKLLF

SEQ ID NO: 296530 - protein, 14 aa, Homo sapiens
  CDR3 for beta chain variable domain of TCR clone 148265 (TRBV5-1, TRBJ2-3)
CASSPPSRLSRLTV

SEQ ID NO: 296531 - protein, 16 aa, Homo sapiens
  CDR3 for alpha chain variable domain of TCR clone 148266 (TRAV25, TRAJ53)
CAGPKGSGGSNYKLTF

SEQ ID NO: 296532 - protein, 15 aa, Homo sapiens
  CDR3 for beta chain variable domain of TCR clone 148266 (TRBV25-1, TRBJ1-4)
CASSPGDSTNEKLFF

SEQ ID NO: 296533 - protein, 10 aa, Homo sapiens
  CDR3 for alpha chain variable domain of TCR clone 148267 (TRAV30, TRAJ48)
CGIGNEKLTF

SEQ ID NO: 296534 - protein, 16 aa, Homo sapiens
  CDR3 for beta chain variable domain of TCR clone 148267 (TRBV4-1, TRBJ2-3)
CASSQSTSGAEDTQYF

SEQ ID NO: 296535 - protein, 12 aa, Homo sapiens
  CDR3 for alpha chain variable domain of TCR clone 148268 (TRAV12-2, TRAJ31)
CAVNTPDARLLF

SEQ ID NO: 296536 - protein, 12 aa, Homo sapiens
  CDR3 for beta chain variable domain of TCR clone 148268 (TRBV12-4, TRBJ2-7)
CASSLGGYEQYF

SEQ ID NO: 296537 - protein, 12 aa, Homo sapiens
  CDR3 for alpha chain variable domain of TCR clone 148269 (TRAV12-3, TRAJ43)
CAISSNNNDMRF

SEQ ID NO: 296538 - protein, 12 aa, Homo sapiens
  CDR3 for beta chain variable domain of TCR clone 148269 (TRBV11-2, TRBJ2-2)
CASSLGGGELFF

SEQ ID NO: 296539 - protein, 17 aa, Homo sapiens
  CDR3 for alpha chain variable domain of TCR clone 148270 (TRAV3, TRAJ6)
CAVRDGPRAGGSYIPTF

SEQ ID NO: 296540 - protein, 15 aa, Homo sapiens
  CDR3 for beta chain variable domain of TCR clone 148270 (TRBV5-1, TRBJ2-1)
CASKGLAGVYNEQFF

SEQ ID NO: 296541 - protein, 18 aa, Homo sapiens
  CDR3 for alpha chain variable domain of TCR clone 148271 (TRAV13-1, TRAJ52)
CAAKNPNAGGTSYGKLTF

SEQ ID NO: 296542 - protein, 14 aa, Homo sapiens
  CDR3 for beta chain variable domain of TCR clone 148271 (TRBV7-2, TRBJ2-7)
CASRSQGAAYGQYF

SEQ ID NO: 296543 - protein, 14 aa, Homo sapiens
  CDR3 for alpha chain variable domain of TCR clone 148272 (TRAV2, TRAJ9)
CAVEDRSGGFKTIF

SEQ ID NO: 296544 - protein, 15 aa, Homo sapiens
  CDR3 for beta chain variable domain of TCR clone 148272 (TRBV7-9, TRBJ1-1)
CASSPELGGGTEAFF

SEQ ID NO: 296545 - protein, 21 aa, Homo sapiens
  CDR3 for alpha chain variable domain of TCR clone 148273 (TRAV3, TRAJ17)
CAVRARRGGRSCRQQANFCRR

SEQ ID NO: 296546 - protein, 15 aa, Homo sapiens
  CDR3 for beta chain variable domain of TCR clone 148273 (TRBV27, TRBJ2-1)
CASSNGGGSSNEQFF

SEQ ID NO: 296547 - protein, 12 aa, Homo sapiens
  CDR3 for alpha chain variable domain of TCR clone 148274 (TRAV13-1, TRAJ53)
AASGGSNYKLTF

SEQ ID NO: 296548 - protein, 16 aa, Homo sapiens
  CDR3 for beta chain variable domain of TCR clone 148274 (TRBV2, TRBJ2-3)
CASSTSVEGVTDTQYF

SEQ ID NO: 296549 - protein, 15 aa, Homo sapiens
  CDR3 for alpha chain variable domain of TCR clone 148275 (TRAV25, TRAJ52)
CAGRPGGTNYVKLTF

SEQ ID NO: 296550 - protein, 17 aa, Homo sapiens
  CDR3 for beta chain variable domain of TCR clone 148275 (TRBV7-8, TRBJ2-6)
CASSAGTGGAGANVLTF

SEQ ID NO: 296551 - protein, 17 aa, Homo sapiens
  CDR3 for alpha chain variable domain of TCR clone 148276 (TRAV3, TRAJ6)
CAVRDGPRAGGSYVPTF

SEQ ID NO: 296552 - protein, 15 aa, Homo sapiens
  CDR3 for beta chain variable domain of TCR clone 148276 (TRBV11-3, TRBJ2-3)
CASLKDGREGDTQYF

SEQ ID NO: 296553 - protein, 13 aa, Homo sapiens
  CDR3 for alpha chain variable domain of TCR clone 148277 (TRAV12-3, TRAJ33)
CAMSVNSNYQLIW

SEQ ID NO: 296554 - protein, 13 aa, Homo sapiens
  CDR3 for beta chain variable domain of TCR clone 148277 (TRBV7-2, TRBJ2-2)
CARSLAVTGELCF

SEQ ID NO: 296555 - protein, 14 aa, Homo sapiens
  CDR3 for alpha chain variable domain of TCR clone 148278 (TRAV1-2, TRAJ8)
CAVREDTGFQKLVF

SEQ ID NO: 296556 - protein, 16 aa, Homo sapiens
  CDR3 for beta chain variable domain of TCR clone 148278 (TRBV5-1, TRBJ2-2)
CASSLAGSTNTGELFF

SEQ ID NO: 296557 - protein, 14 aa, Homo sapiens
  CDR3 for alpha chain variable domain of TCR clone 148279 (TRAV13-1, TRAJ5)
CAAHPDTGRRALTF

SEQ ID NO: 296558 - protein, 13 aa, Homo sapiens
  CDR3 for beta chain variable domain of TCR clone 148279 (TRBV10-3, TRBJ2-7)
CASKLAVNYEQYF

SEQ ID NO: 296559 - protein, 15 aa, Homo sapiens
  CDR3 for alpha chain variable domain of TCR clone 148280 (TRAV12-1, TRAJ33)
CVVNRAVDSNYQLIW

SEQ ID NO: 296560 - protein, 17 aa, Homo sapiens
  CDR3 for beta chain variable domain of TCR clone 148280 (TRBV19, TRBJ2-6)
CASSTGQVFSGANVLTF

SEQ ID NO: 296561 - protein, 15 aa, Homo sapiens
  CDR3 for alpha chain variable domain of TCR clone 148281 (TRAV13-1, TRAJ52)
SYYNAGGTSYGKLTF

SEQ ID NO: 296562 - protein, 15 aa, Homo sapiens
  CDR3 for beta chain variable domain of TCR clone 148281 (TRBV20-1, TRBJ2-7)
CSARDRVSGMDEQYF

SEQ ID NO: 296563 - protein, 14 aa, Homo sapiens
  CDR3 for alpha chain variable domain of TCR clone 148282 (TRAV1-2, TRAJ16)
CAVNRFSDGKKLLF

SEQ ID NO: 296564 - protein, 18 aa, Homo sapiens
  CDR3 for beta chain variable domain of TCR clone 148282 (TRBV20-1, TRBJ2-6)
CSAETTPTHGSGANVLTF

SEQ ID NO: 296565 - protein, 15 aa, Homo sapiens
  CDR3 for alpha chain variable domain of TCR clone 148283 (TRAV38-2/DV8, TRAJ48)
CAYRSGCFGNEKLTF

SEQ ID NO: 296566 - protein, 16 aa, Homo sapiens
  CDR3 for beta chain variable domain of TCR clone 148283 (TRBV28, TRBJ2-7)
CASSPWVATGDLSQYF

SEQ ID NO: 296567 - protein, 14 aa, Homo sapiens
  CDR3 for alpha chain variable domain of TCR clone 148284 (TRAV2, TRAJ9)
CAVEDRCGGFKTIF

SEQ ID NO: 296568 - protein, 14 aa, Homo sapiens
  CDR3 for beta chain variable domain of TCR clone 148284 (TRBV18, TRBJ2-7)
CASSPRGGAYEQYF

SEQ ID NO: 296569 - protein, 16 aa, Homo sapiens
  CDR3 for alpha chain variable domain of TCR clone 148285 (TRAV1-2, TRAJ10)
CAVRGVLTGGGNKLTF

SEQ ID NO: 296570 - protein, 16 aa, Homo sapiens
  CDR3 for beta chain variable domain of TCR clone 148285 (TRBV27, TRBJ1-1)
CASSSRGRTGYTEAFF

SEQ ID NO: 296571 - protein, 16 aa, Homo sapiens
  CDR3 for alpha chain variable domain of TCR clone 148286 (TRAV8-6, TRAJ32)
CAVSDHYGGATNKLIF

SEQ ID NO: 296572 - protein, 18 aa, Homo sapiens
  CDR3 for beta chain variable domain of TCR clone 148286 (TRBV4-2, TRBJ2-6)
CASSQLQGVLTGANVLTF

SEQ ID NO: 296573 - protein, 13 aa, Homo sapiens
  CDR3 for alpha chain variable domain of TCR clone 148287 (TRAV13-2, TRAJ13)
CAERPGGYQKVTF

SEQ ID NO: 296574 - protein, 19 aa, Homo sapiens
  CDR3 for beta chain variable domain of TCR clone 148287 (TRBV4-1, TRBJ2-1)
CASSQGPLPGLGSRNEQFS

SEQ ID NO: 296575 - protein, 14 aa, Homo sapiens
  CDR3 for alpha chain variable domain of TCR clone 148288 (TRAV8-4, TRAJ9)
GAVRINTGGFKTIF

SEQ ID NO: 296576 - protein, 12 aa, Homo sapiens
  CDR3 for beta chain variable domain of TCR clone 148288 (TRBV11-2, TRBJ2-2)
CASSLGGGELFF

SEQ ID NO: 296577 - protein, 14 aa, Homo sapiens
  CDR3 for alpha chain variable domain of TCR clone 148289 (TRAV38-1, TRAJ43)
CAFMKHNNNNDIRF

SEQ ID NO: 296578 - protein, 15 aa, Homo sapiens
  CDR3 for beta chain variable domain of TCR clone 148289 (TRBV9, TRBJ1-6)
CACSVAGTGDSPLHF

SEQ ID NO: 296579 - protein, 13 aa, Homo sapiens
  CDR3 for alpha chain variable domain of TCR clone 148290 (TRAV12-2, TRAJ4)
CAVFSGGYNKLFF

SEQ ID NO: 296580 - protein, 13 aa, Homo sapiens
  CDR3 for beta chain variable domain of TCR clone 148290 (TRBV19, TRBJ1-5)
CASSIDRDQPQHF

SEQ ID NO: 296581 - protein, 15 aa, Homo sapiens
  CDR3 for alpha chain variable domain of TCR clone 148291 (TRAV26-2, TRAJ54)
CILRDVGQGAQKLVF

SEQ ID NO: 296582 - protein, 13 aa, Homo sapiens
  CDR3 for beta chain variable domain of TCR clone 148291 (TRBV20-1, TRBJ1-1)
CSAGTVGNTEAFF

SEQ ID NO: 296583 - protein, 12 aa, Homo sapiens
  CDR3 for alpha chain variable domain of TCR clone 148292 (TRAV16, TRAJ10)
CPRTGGGNKITF

SEQ ID NO: 296584 - protein, 13 aa, Homo sapiens
  CDR3 for beta chain variable domain of TCR clone 148292 (TRBV15, TRBJ2-7)
CATSTTGHYEQYF

SEQ ID NO: 296585 - protein, 16 aa, Homo sapiens
  CDR3 for alpha chain variable domain of TCR clone 148293 (TRAV23/DV6, TRAJ9)
CAASIGGNTGGFKTTF

SEQ ID NO: 296586 - protein, 17 aa, Homo sapiens
  CDR3 for beta chain variable domain of TCR clone 148293 (TRBV11-2, TRBJ2-1)
CASSLYPPGVEYNEQFF

SEQ ID NO: 296587 - protein, 17 aa, Homo sapiens
  CDR3 for alpha chain variable domain of TCR clone 148294 (TRAV38-2/DV8, TRAJ28)
CAFLTLYSGAGSYQLTF

SEQ ID NO: 296588 - protein, 14 aa, Homo sapiens
  CDR3 for beta chain variable domain of TCR clone 148294 (TRBV7-2, TRBJ2-5)
CASSLSGGGGTQYF

SEQ ID NO: 296589 - protein, 13 aa, Homo sapiens
  CDR3 for alpha chain variable domain of TCR clone 148295 (TRAV16, TRAJ28)
CAQTGAGSYQLTF

SEQ ID NO: 296590 - protein, 16 aa, Homo sapiens
  CDR3 for beta chain variable domain of TCR clone 148295 (TRBV28, TRBJ1-5)
CASSLTGQGWNQPQHF

SEQ ID NO: 296591 - protein, 12 aa, Homo sapiens
  CDR3 for alpha chain variable domain of TCR clone 148296 (TRAV35, TRAJ39)
LAPNNAGNMLTF

SEQ ID NO: 296592 - protein, 16 aa, Homo sapiens
  CDR3 for beta chain variable domain of TCR clone 148296 (TRBV2, TRBJ2-3)
CASSAAVEGVTDTQYF

SEQ ID NO: 296593 - protein, 14 aa, Homo sapiens
  CDR3 for alpha chain variable domain of TCR clone 148297 (TRAV8-2, TRAJ11)
CVVSEKSGYSTLTF

SEQ ID NO: 296594 - protein, 16 aa, Homo sapiens
  CDR3 for beta chain variable domain of TCR clone 148297 (TRBV28, TRBJ2-1)
CASSSPEYPRDNEHFF

SEQ ID NO: 296595 - protein, 19 aa, Homo sapiens
  CDR3 for alpha chain variable domain of TCR clone 148298 (TRAV26-1, TRAJ47)
CVLLHRQSSFMEYGNKLVF

SEQ ID NO: 296596 - protein, 13 aa, Homo sapiens
  CDR3 for beta chain variable domain of TCR clone 148298 (TRBV29-1, TRBJ2-1)
CSVEGGRVNEQFF

SEQ ID NO: 296597 - protein, 15 aa, Homo sapiens
  CDR3 for alpha chain variable domain of TCR clone 148299 (TRAV12-3, TRAJ11)
CAMSEENSGYSTLTF

SEQ ID NO: 296598 - protein, 18 aa, Homo sapiens
  CDR3 for beta chain variable domain of TCR clone 148299 (TRBV28, TRBJ1-2)
CASRQQQGKRGSNYGYTF

SEQ ID NO: 296599 - protein, 12 aa, Homo sapiens
  CDR3 for alpha chain variable domain of TCR clone 148300 (TRAV26-2, TRAJ21)
CILKGNFNKFYF

SEQ ID NO: 296600 - protein, 15 aa, Homo sapiens
  CDR3 for beta chain variable domain of TCR clone 148300 (TRBV11-2, TRBJ2-7)
CASSLMVGGSYEQYF

SEQ ID NO: 296601 - protein, 16 aa, Homo sapiens
  CDR3 for alpha chain variable domain of TCR clone 148301 (TRAV30, TRAJ24)
CGTEIVDADSWGKFQF

SEQ ID NO: 296602 - protein, 15 aa, Homo sapiens
  CDR3 for beta chain variable domain of TCR clone 148301 (TRBV7-2, TRBJ2-1)
CASSLGLAGGREQFF

SEQ ID NO: 296603 - protein, 16 aa, Homo sapiens
  CDR3 for alpha chain variable domain of TCR clone 148302 (TRAV14/DV4, TRAJ53)
CAMREGGGGSNYKLTF

SEQ ID NO: 296604 - protein, 15 aa, Homo sapiens
  CDR3 for beta chain variable domain of TCR clone 148302 (TRBV7-2, TRBJ2-3)
CASSLAGAFKDTQYF

SEQ ID NO: 296605 - protein, 18 aa, Homo sapiens
  CDR3 for alpha chain variable domain of TCR clone 148303 (TRAV1-2, TRAJ18)
CAVRDMGDRGSTLGRRYF

SEQ ID NO: 296606 - protein, 16 aa, Homo sapiens
  CDR3 for beta chain variable domain of TCR clone 148303 (TRBV29-1, TRBJ1-2)
CSVEANRDIANYGYSF

SEQ ID NO: 296607 - protein, 14 aa, Homo sapiens
  CDR3 for alpha chain variable domain of TCR clone 148304 (TRAV23/DV6, TRAJ13)
CAASETGGYQKVTF

SEQ ID NO: 296608 - protein, 14 aa, Homo sapiens
  CDR3 for beta chain variable domain of TCR clone 148304 (TRBV7-9, TRBJ2-3)
CASSLEDGTDTQYF

SEQ ID NO: 296609 - protein, 14 aa, Homo sapiens
  CDR3 for alpha chain variable domain of TCR clone 148305 (TRAV35, TRAJ33)
CAGSSRDSNYQLIW

SEQ ID NO: 296610 - protein, 15 aa, Homo sapiens
  CDR3 for beta chain variable domain of TCR clone 148305 (TRBV20-1, TRBJ2-7)
CSAGSGTSGAYEQYF

SEQ ID NO: 296611 - protein, 12 aa, Homo sapiens
  CDR3 for alpha chain variable domain of TCR clone 148306 (TRAV21, TRAJ29)
FAVTSGNKPLVF

SEQ ID NO: 296612 - protein, 15 aa, Homo sapiens
  CDR3 for beta chain variable domain of TCR clone 148306 (TRBV12-4, TRBJ1-2)
CASRLGVAGNYGYTF

SEQ ID NO: 296613 - protein, 16 aa, Homo sapiens
  CDR3 for alpha chain variable domain of TCR clone 148307 (TRAV8-4, TRAJ18)
CAVTANGCSTLGRLYF

SEQ ID NO: 296614 - protein, 14 aa, Homo sapiens
  CDR3 for beta chain variable domain of TCR clone 148307 (TRBV12-4, TRBJ1-2)
CASSSAGHIYGYTF

SEQ ID NO: 296615 - protein, 14 aa, Homo sapiens
  CDR3 for alpha chain variable domain of TCR clone 148308 (TRAV1-2, TRAJ16)
CAVNRFSDGQKLLF

SEQ ID NO: 296616 - protein, 15 aa, Homo sapiens
  CDR3 for beta chain variable domain of TCR clone 148308 (TRBV19, TRBJ1-5)
CASSIIWADNQPQHF

SEQ ID NO: 296617 - protein, 13 aa, Homo sapiens
  CDR3 for alpha chain variable domain of TCR clone 148309 (TRAV20, TRAJ37)
CAGCSSNTGKLIF

SEQ ID NO: 296618 - protein, 17 aa, Homo sapiens
  CDR3 for beta chain variable domain of TCR clone 148309 (TRBV2, TRBJ2-7)
CASSQALTGWDSYEQYF

SEQ ID NO: 296619 - protein, 14 aa, Homo sapiens
  CDR3 for alpha chain variable domain of TCR clone 148310 (TRAV17, TRAJ23)
CATASYNQGGKLIC

SEQ ID NO: 296620 - protein, 16 aa, Homo sapiens
  CDR3 for beta chain variable domain of TCR clone 148310 (TRBV12-4, TRBJ1-5)
CASSRPVGGSNQPQHF

SEQ ID NO: 296621 - protein, 14 aa, Homo sapiens
  CDR3 for alpha chain variable domain of TCR clone 148311 (TRAV1-2, TRAJ8)
CAVREGTGFQKLVF

SEQ ID NO: 296622 - protein, 12 aa, Homo sapiens
  CDR3 for beta chain variable domain of TCR clone 148311 (TRBV12-4, TRBJ2-1)
CASSPGRNEQFF

SEQ ID NO: 296623 - protein, 14 aa, Homo sapiens
  CDR3 for alpha chain variable domain of TCR clone 148312 (TRAV12-2, TRAJ5)
CAVNRCTGRRALTF

SEQ ID NO: 296624 - protein, 12 aa, Homo sapiens
  CDR3 for beta chain variable domain of TCR clone 148312 (TRBV19, TRBJ1-5)
CASSIAQQPQHF

SEQ ID NO: 296625 - protein, 18 aa, Homo sapiens
  CDR3 for alpha chain variable domain of TCR clone 148313 (TRAV13-1, TRAJ4)
CSKYKEVPWRGGHNKLIF

SEQ ID NO: 296626 - protein, 16 aa, Homo sapiens
  CDR3 for beta chain variable domain of TCR clone 148313 (TRBV2, TRBJ1-1)
CASSPPNRGMNTEAFF

SEQ ID NO: 296627 - protein, 15 aa, Homo sapiens
  CDR3 for alpha chain variable domain of TCR clone 148314 (TRAV21, TRAJ45)
CAVSYSGGGADGLTF

SEQ ID NO: 296628 - protein, 16 aa, Homo sapiens
  CDR3 for beta chain variable domain of TCR clone 148314 (TRBV29-1, TRBJ2-7)
CSVEVVGTSGSYEQYF

SEQ ID NO: 296629 - protein, 14 aa, Homo sapiens
  CDR3 for alpha chain variable domain of TCR clone 148315 (TRAV38-1, TRAJ29)
CAFITPSGNTPLVF

SEQ ID NO: 296630 - protein, 14 aa, Homo sapiens
  CDR3 for beta chain variable domain of TCR clone 148315 (TRBV19, TRBJ2-2)
CASSGQGIAGELFF

SEQ ID NO: 296631 - protein, 13 aa, Homo sapiens
  CDR3 for alpha chain variable domain of TCR clone 148316 (TRAV35, TRAJ57)
CAGSQGGSEKLVF

SEQ ID NO: 296632 - protein, 14 aa, Homo sapiens
  CDR3 for beta chain variable domain of TCR clone 148316 (TRBV25-1, TRBJ1-1)
CASTHLGGNTEVFF

SEQ ID NO: 296633 - protein, 16 aa, Homo sapiens
  CDR3 for alpha chain variable domain of TCR clone 148317 (TRAV12-2, TRAJ45)
CAVNMYSGGGADGLTF

SEQ ID NO: 296634 - protein, 17 aa, Homo sapiens
  CDR3 for beta chain variable domain of TCR clone 148317 (TRBV6-3, TRBJ2-2)
CASSYRGRDCYTGELFF

SEQ ID NO: 296635 - protein, 13 aa, Homo sapiens
  CDR3 for alpha chain variable domain of TCR clone 148318 (TRAV21, TRAJ27)
CAARPGNAGKSTC

SEQ ID NO: 296636 - protein, 13 aa, Homo sapiens
  CDR3 for beta chain variable domain of TCR clone 148318 (TRBV7-9, TRBJ1-2)
CASSLKQNYGYTF

SEQ ID NO: 296637 - protein, 13 aa, Homo sapiens
  CDR3 for alpha chain variable domain of TCR clone 148319 (TRAV23/DV6, TRAJ16)
CSASISDGQKLLF

SEQ ID NO: 296638 - protein, 15 aa, Homo sapiens
  CDR3 for beta chain variable domain of TCR clone 148319 (TRBV2, TRBJ2-2)
CASSRETVGTGELFL

SEQ ID NO: 296639 - protein, 12 aa, Homo sapiens
  CDR3 for alpha chain variable domain of TCR clone 148320 (TRAV12-2, TRAJ31)
CAVNTPDARLMF

SEQ ID NO: 296640 - protein, 14 aa, Homo sapiens
  CDR3 for beta chain variable domain of TCR clone 148320 (TRBV7-6, TRBJ2-3)
CASSLGTVTDTQYF

SEQ ID NO: 296641 - protein, 14 aa, Homo sapiens
  CDR3 for alpha chain variable domain of TCR clone 148321 (TRAV26-1, TRAJ58)
CIVRVETSGSRLTF

SEQ ID NO: 296642 - protein, 16 aa, Homo sapiens
  CDR3 for beta chain variable domain of TCR clone 148321 (TRBV29-1, TRBJ2-7)
CSVEVVGTSGSYEQYF

SEQ ID NO: 296643 - protein, 13 aa, Homo sapiens
  CDR3 for alpha chain variable domain of TCR clone 148322 (TRAV8-3, TRAJ15)
CAVAIQAGTALIF

SEQ ID NO: 296644 - protein, 17 aa, Homo sapiens
  CDR3 for beta chain variable domain of TCR clone 148322 (TRBV20-1, TRBJ2-1)
CSARDPLAGVSYNEQFF

SEQ ID NO: 296645 - protein, 15 aa, Homo sapiens
  CDR3 for alpha chain variable domain of TCR clone 148323 (TRAV8-4, TRAJ52)
CAVSDGGTSYGKLTF

SEQ ID NO: 296646 - protein, 12 aa, Homo sapiens
  CDR3 for beta chain variable domain of TCR clone 148323 (TRBV29-1, TRBJ2-3)
CSVTGGGDTQYS

SEQ ID NO: 296647 - protein, 19 aa, Homo sapiens
  CDR3 for alpha chain variable domain of TCR clone 148324 (TRAV1-2, TRAJ26)
CPLPLCCERPDNYGQNFVF

SEQ ID NO: 296648 - protein, 15 aa, Homo sapiens
  CDR3 for beta chain variable domain of TCR clone 148324 (TRBV9, TRBJ1-6)
CASSVAGTGDSALHF

SEQ ID NO: 296649 - protein, 15 aa, Homo sapiens
  CDR3 for alpha chain variable domain of TCR clone 148325 (TRAV17, TRAJ57)
CATGPSQGGSEKLVF

SEQ ID NO: 296650 - protein, 15 aa, Homo sapiens
  CDR3 for beta chain variable domain of TCR clone 148325 (TRBV28, TRBJ2-1)
CASSILAGGRSEQFF

SEQ ID NO: 296651 - protein, 13 aa, Homo sapiens
  CDR3 for alpha chain variable domain of TCR clone 148326 (TRAV8-4, TRAJ48)
CAVSLFGNEKLTF

SEQ ID NO: 296652 - protein, 11 aa, Homo sapiens
  CDR3 for beta chain variable domain of TCR clone 148326 (TRBV12-4, TRBJ2-3)
CASTATDTQYF

SEQ ID NO: 296653 - protein, 12 aa, Homo sapiens
  CDR3 for alpha chain variable domain of TCR clone 148327 (TRAV13-1, TRAJ21)
CAAKEGFNKFYF

SEQ ID NO: 296654 - protein, 14 aa, Homo sapiens
  CDR3 for beta chain variable domain of TCR clone 148327 (TRBV7-7, TRBJ2-2)
CASSRDRSTGELFF

SEQ ID NO: 296655 - protein, 18 aa, Homo sapiens
  CDR3 for alpha chain variable domain of TCR clone 148328 (TRAV13-1, TRAJ52)
CAASKRSAGGTSYGKLTF

SEQ ID NO: 296656 - protein, 15 aa, Homo sapiens
  CDR3 for beta chain variable domain of TCR clone 148328 (TRBV7-2, TRBJ1-2)
CASSLVSGGDYGYTF

SEQ ID NO: 296657 - protein, 11 aa, Homo sapiens
  CDR3 for alpha chain variable domain of TCR clone 148329 (TRAV3, TRAJ20)
CAVRDGYKLSF

SEQ ID NO: 296658 - protein, 12 aa, Homo sapiens
  CDR3 for beta chain variable domain of TCR clone 148329 (TRBV11-2, TRBJ2-7)
CASSLPTYEQYF

SEQ ID NO: 296659 - protein, 11 aa, Homo sapiens
  CDR3 for alpha chain variable domain of TCR clone 148330 (TRAV21, TRAJ31)
CAVRNNARLLF

SEQ ID NO: 296660 - protein, 17 aa, Homo sapiens
  CDR3 for beta chain variable domain of TCR clone 148330 (TRBV28, TRBJ1-5)
CASSLSWLVSSNQPQHF

SEQ ID NO: 296661 - protein, 11 aa, Homo sapiens
  CDR3 for alpha chain variable domain of TCR clone 148331 (TRAV3, TRAJ17)
PRGAAGNKLTF

SEQ ID NO: 296662 - protein, 13 aa, Homo sapiens
  CDR3 for beta chain variable domain of TCR clone 148331 (TRBV5-1, TRBJ1-2)
CASSFQDGYGYTF

SEQ ID NO: 296663 - protein, 13 aa, Homo sapiens
  CDR3 for alpha chain variable domain of TCR clone 148332 (TRAV13-1, TRAJ39)
CAASIWAGNMLTF

SEQ ID NO: 296664 - protein, 14 aa, Homo sapiens
  CDR3 for beta chain variable domain of TCR clone 148332 (TRBV14, TRBJ2-3)
CASSQRLSTDTQYF

SEQ ID NO: 296665 - protein, 16 aa, Homo sapiens
  CDR3 for alpha chain variable domain of TCR clone 148333 (TRAV14/DV4, TRAJ21)
CALREGPENNFNKFYF

SEQ ID NO: 296666 - protein, 12 aa, Homo sapiens
  CDR3 for beta chain variable domain of TCR clone 148333 (TRBV29-1, TRBJ2-2)
CSVDKYTGELFF

SEQ ID NO: 296667 - protein, 11 aa, Homo sapiens
  CDR3 for alpha chain variable domain of TCR clone 148334 (TRAV3, TRAJ17)
PRGAAGNKLSF

SEQ ID NO: 296668 - protein, 16 aa, Homo sapiens
  CDR3 for beta chain variable domain of TCR clone 148334 (TRBV7-6, TRBJ2-1)
CASSAPGPSSYNEQFF

SEQ ID NO: 296669 - protein, 13 aa, Homo sapiens
  CDR3 for alpha chain variable domain of TCR clone 148335 (TRAV8-3, TRAJ48)
CAVVPFGNEKLTF

SEQ ID NO: 296670 - protein, 15 aa, Homo sapiens
  CDR3 for beta chain variable domain of TCR clone 148335 (TRBV11-2, TRBJ2-1)
CASSCPSTRYNEQFF

SEQ ID NO: 296671 - protein, 12 aa, Homo sapiens
  CDR3 for alpha chain variable domain of TCR clone 148336 (TRAV12-2, TRAJ42)
CAVGGSQGNLIF

SEQ ID NO: 296672 - protein, 15 aa, Homo sapiens
  CDR3 for beta chain variable domain of TCR clone 148336 (TRBV20-1, TRBJ2-7)
CSARDRVSGMDEQYF

SEQ ID NO: 296673 - protein, 13 aa, Homo sapiens
  CDR3 for alpha chain variable domain of TCR clone 148337 (TRAV30, TRAJ34)
CGTVGYNTDTLIF

SEQ ID NO: 296674 - protein, 16 aa, Homo sapiens
  CDR3 for beta chain variable domain of TCR clone 148337 (TRBV7-9, TRBJ1-2)
CASSLGFSSGEDGYTF

SEQ ID NO: 296675 - protein, 17 aa, Homo sapiens
  CDR3 for alpha chain variable domain of TCR clone 148338 (TRAV38-1, TRAJ45)
CAFMKHYTGGGADGLTF

SEQ ID NO: 296676 - protein, 14 aa, Homo sapiens
  CDR3 for beta chain variable domain of TCR clone 148338 (TRBV7-2, TRBJ2-7)
CASSPKTSFYEQYF

SEQ ID NO: 296677 - protein, 12 aa, Homo sapiens
  CDR3 for alpha chain variable domain of TCR clone 148339 (TRAV21, TRAJ37)
CAVRGNTGKLIV

SEQ ID NO: 296678 - protein, 14 aa, Homo sapiens
  CDR3 for beta chain variable domain of TCR clone 148339 (TRBV19, TRBJ2-1)
CASEVTGARNEQFF

SEQ ID NO: 296679 - protein, 11 aa, Homo sapiens
  CDR3 for alpha chain variable domain of TCR clone 148340 (TRAV35, TRAJ30)
CAPGGDDKIIF

SEQ ID NO: 296680 - protein, 17 aa, Homo sapiens
  CDR3 for beta chain variable domain of TCR clone 148340 (TRBV13, TRBJ2-3)
CASSLSRVAGGRNTQYF

SEQ ID NO: 296681 - protein, 14 aa, Homo sapiens
  CDR3 for alpha chain variable domain of TCR clone 148341 (TRAV12-2, TRAJ45)
CAVNIQGKADGLTF

SEQ ID NO: 296682 - protein, 13 aa, Homo sapiens
  CDR3 for beta chain variable domain of TCR clone 148341 (TRBV20-1, TRBJ1-1)
CSARAGIGTEAFF

SEQ ID NO: 296683 - protein, 13 aa, Homo sapiens
  CDR3 for alpha chain variable domain of TCR clone 148342 (TRAV17, TRAJ5)
CAPMDTGRRALTF

SEQ ID NO: 296684 - protein, 15 aa, Homo sapiens
  CDR3 for beta chain variable domain of TCR clone 148342 (TRBV5-1, TRBJ2-7)
CASSLNGGPAREQYF

SEQ ID NO: 296685 - protein, 14 aa, Homo sapiens
  CDR3 for alpha chain variable domain of TCR clone 148343 (TRAV23/DV6, TRAJ8)
CAASKATGFQKRVF

SEQ ID NO: 296686 - protein, 15 aa, Homo sapiens
  CDR3 for beta chain variable domain of TCR clone 148343 (TRBV28, TRBJ2-3)
CASSPDRQGANTQYF

SEQ ID NO: 296687 - protein, 20 aa, Homo sapiens
  CDR3 for alpha chain variable domain of TCR clone 148344 (TRAV4, TRAJ29)
CCVLLPRGRHPYSGNTPLVF

SEQ ID NO: 296688 - protein, 13 aa, Homo sapiens
  CDR3 for beta chain variable domain of TCR clone 148344 (TRBV27, TRBJ2-7)
CASGRGGAYEQYF

SEQ ID NO: 296689 - protein, 15 aa, Homo sapiens
  CDR3 for alpha chain variable domain of TCR clone 148345 (TRAV13-1, TRAJ21)
CAEVYTTSTNFTLDL

SEQ ID NO: 296690 - protein, 13 aa, Homo sapiens
  CDR3 for beta chain variable domain of TCR clone 148345 (TRBV27, TRBJ1-4)
CASSLMGDEKLFF

SEQ ID NO: 296691 - protein, 14 aa, Homo sapiens
  CDR3 for alpha chain variable domain of TCR clone 148346 (TRAV26-1, TRAJ38)
CIVVGAGNNRQLIW

SEQ ID NO: 296692 - protein, 12 aa, Homo sapiens
  CDR3 for beta chain variable domain of TCR clone 148346 (TRBV5-1, TRBJ2-5)
CASSWDQETQYF

SEQ ID NO: 296693 - protein, 13 aa, Homo sapiens
  CDR3 for alpha chain variable domain of TCR clone 148347 (TRAV20, TRAJ40)
CAVPFSGTYKYIF

SEQ ID NO: 296694 - protein, 13 aa, Homo sapiens
  CDR3 for beta chain variable domain of TCR clone 148347 (TRBV15, TRBJ2-5)
GATSQIGEETQYF

SEQ ID NO: 296695 - protein, 13 aa, Homo sapiens
  CDR3 for alpha chain variable domain of TCR clone 148348 (TRAV20, TRAJ37)
CAGCSSNTGKLIF

SEQ ID NO: 296696 - protein, 14 aa, Homo sapiens
  CDR3 for beta chain variable domain of TCR clone 148348 (TRBV15, TRBJ2-7)
CATSRVARGYEQYF

SEQ ID NO: 296697 - protein, 13 aa, Homo sapiens
  CDR3 for alpha chain variable domain of TCR clone 148349 (TRAV3, TRAJ8)
CAVRFTGFQKLVF

SEQ ID NO: 296698 - protein, 14 aa, Homo sapiens
  CDR3 for beta chain variable domain of TCR clone 148349 (TRBV7-6, TRBJ2-3)
CASSVAGGTDTQYF

SEQ ID NO: 296699 - protein, 10 aa, Homo sapiens
  CDR3 for alpha chain variable domain of TCR clone 148350 (TRAV16, TRAJ22)
SAMYFRQLTF

SEQ ID NO: 296700 - protein, 15 aa, Homo sapiens
  CDR3 for beta chain variable domain of TCR clone 148350 (TRBV7-9, TRBJ1-6)
CASSSPGRGNSPLHF

SEQ ID NO: 296701 - protein, 14 aa, Homo sapiens
  CDR3 for alpha chain variable domain of TCR clone 148351 (TRAV23/DV6, TRAJ6)
CAASRSGGSYIPTF

SEQ ID NO: 296702 - protein, 16 aa, Homo sapiens
  CDR3 for beta chain variable domain of TCR clone 148351 (TRBV15, TRBJ1-2)
CATSRGPRTGGGGYTF

SEQ ID NO: 296703 - protein, 13 aa, Homo sapiens
  CDR3 for alpha chain variable domain of TCR clone 148352 (TRAV35, TRAJ21)
CAGQLSNFNKCYF

SEQ ID NO: 296704 - protein, 11 aa, Homo sapiens
  CDR3 for beta chain variable domain of TCR clone 148352 (TRBV7-6, TRBJ2-5)
CASSSQETQYF

SEQ ID NO: 296705 - protein, 14 aa, Homo sapiens
  CDR3 for alpha chain variable domain of TCR clone 148353 (TRAV12-3, TRAJ10)
SHLPLTGGGNKLTF

SEQ ID NO: 296706 - protein, 15 aa, Homo sapiens
  CDR3 for beta chain variable domain of TCR clone 148353 (TRBV7-2, TRBJ1-2)
CASSITWTGNYGYTF

SEQ ID NO: 296707 - protein, 12 aa, Homo sapiens
  CDR3 for alpha chain variable domain of TCR clone 148354 (TRAV12-3, TRAJ17)
CAITLTGNKLTF

SEQ ID NO: 296708 - protein, 15 aa, Homo sapiens
  CDR3 for beta chain variable domain of TCR clone 148354 (TRBV20-1, TRBJ2-7)
CSARDRVSGMDAQYF

SEQ ID NO: 296709 - protein, 14 aa, Homo sapiens
  CDR3 for alpha chain variable domain of TCR clone 148355 (TRAV21, TRAJ8)
CALQRDTGFQKLVF

SEQ ID NO: 296710 - protein, 15 aa, Homo sapiens
  CDR3 for beta chain variable domain of TCR clone 148355 (TRBV7-2, TRBJ1-2)
CASSPRAGLNYGYTF

SEQ ID NO: 296711 - protein, 16 aa, Homo sapiens
  CDR3 for alpha chain variable domain of TCR clone 148356 (TRAV8-6, TRAJ28)
CAVTSKPGAGSYQLTF

SEQ ID NO: 296712 - protein, 16 aa, Homo sapiens
  CDR3 for beta chain variable domain of TCR clone 148356 (TRBV12-4, TRBJ2-5)
CASSWRASGDLETQYF

SEQ ID NO: 296713 - protein, 13 aa, Homo sapiens
  CDR3 for alpha chain variable domain of TCR clone 148357 (TRAV8-3, TRAJ7)
CAVGAYGNNRLAF

SEQ ID NO: 296714 - protein, 19 aa, Homo sapiens
  CDR3 for beta chain variable domain of TCR clone 148357 (TRBV28, TRBJ2-4)
CASSFQPGGPAHSKNIQYF

SEQ ID NO: 296715 - protein, 15 aa, Homo sapiens
  CDR3 for alpha chain variable domain of TCR clone 148358 (TRAV27, TRAJ38)
CAGRFNAGNNRKLFW

SEQ ID NO: 296716 - protein, 13 aa, Homo sapiens
  CDR3 for beta chain variable domain of TCR clone 148358 (TRBV20-1, TRBJ2-1)
TSGALPPGNEQFF

SEQ ID NO: 296717 - protein, 14 aa, Homo sapiens
  CDR3 for alpha chain variable domain of TCR clone 148359 (TRAV1-2, TRAJ16)
CAVNRFSDAQKLLF

SEQ ID NO: 296718 - protein, 14 aa, Homo sapiens
  CDR3 for beta chain variable domain of TCR clone 148359 (TRBV12-4, TRBJ1-1)
CASSLGTGGTEAFF

SEQ ID NO: 296719 - protein, 12 aa, Homo sapiens
  CDR3 for alpha chain variable domain of TCR clone 148360 (TRAV8-3, TRAJ26)
CAGDNYGQNCVF

SEQ ID NO: 296720 - protein, 15 aa, Homo sapiens
  CDR3 for beta chain variable domain of TCR clone 148360 (TRBV9, TRBJ2-1)
CASSLAGSSYNEQFF

SEQ ID NO: 296721 - protein, 21 aa, Homo sapiens
  CDR3 for alpha chain variable domain of TCR clone 148361 (TRAV1-1, TRAJ6)
CLLLLRCERLERTGGSYIPTF

SEQ ID NO: 296722 - protein, 14 aa, Homo sapiens
  CDR3 for beta chain variable domain of TCR clone 148361 (TRBV2, TRBJ2-1)
CASSEALIYNEQFF

SEQ ID NO: 296723 - protein, 14 aa, Homo sapiens
  CDR3 for alpha chain variable domain of TCR clone 148362 (TRAV1-2, TRAJ8)
CAVREDTGFQKLVF

SEQ ID NO: 296724 - protein, 15 aa, Homo sapiens
  CDR3 for beta chain variable domain of TCR clone 148362 (TRBV4-1, TRBJ2-7)
CASSQNTGRIYEQYF

SEQ ID NO: 296725 - protein, 11 aa, Homo sapiens
  CDR3 for alpha chain variable domain of TCR clone 148363 (TRAV35, TRAJ34)
CWARNTDKLIF

SEQ ID NO: 296726 - protein, 14 aa, Homo sapiens
  CDR3 for beta chain variable domain of TCR clone 148363 (TRBV7-3, TRBJ2-2)
CASSSGGYTGELFF

SEQ ID NO: 296727 - protein, 15 aa, Homo sapiens
  CDR3 for alpha chain variable domain of TCR clone 148364 (TRAV8-4, TRAJ37)
CAVTYGSSNTGKLIF

SEQ ID NO: 296728 - protein, 15 aa, Homo sapiens
  CDR3 for beta chain variable domain of TCR clone 148364 (TRBV7-3, TRBJ2-1)
CASSPTGGGEVEQFF

SEQ ID NO: 296729 - protein, 14 aa, Homo sapiens
  CDR3 for alpha chain variable domain of TCR clone 148365 (TRAV12-3, TRAJ29)
CAMILLSGNTPLVF

SEQ ID NO: 296730 - protein, 16 aa, Homo sapiens
  CDR3 for beta chain variable domain of TCR clone 148365 (TRBV28, TRBJ2-7)
CASSSGTSGGVYEQYF

SEQ ID NO: 296731 - protein, 14 aa, Homo sapiens
  CDR3 for alpha chain variable domain of TCR clone 148366 (TRAV35, TRAJ13)
CAGSPSGGYQKVTF

SEQ ID NO: 296732 - protein, 20 aa, Homo sapiens
  CDR3 for beta chain variable domain of TCR clone 148366 (TRBV19, TRBJ2-7)
CASTQVAPESLRAVLRAGHQ

SEQ ID NO: 296733 - protein, 14 aa, Homo sapiens
  CDR3 for alpha chain variable domain of TCR clone 148367 (TRAV26-1, TRAJ34)
CIVRVAYNTDKLIF

SEQ ID NO: 296734 - protein, 15 aa, Homo sapiens
  CDR3 for beta chain variable domain of TCR clone 148367 (TRBV20-1, TRBJ1-1)
CSASRGVTGNTEAFF

SEQ ID NO: 296735 - protein, 13 aa, Homo sapiens
  CDR3 for alpha chain variable domain of TCR clone 148368 (TRAV1-2, TRAJ9)
CAALNTGGFKTIF

SEQ ID NO: 296736 - protein, 16 aa, Homo sapiens
  CDR3 for beta chain variable domain of TCR clone 148368 (TRBV4-2, TRBJ1-1)
CASSQAGFGMNTEAFF

SEQ ID NO: 296737 - protein, 16 aa, Homo sapiens
  CDR3 for alpha chain variable domain of TCR clone 148369 (TRAV30, TRAJ24)
CGTEIVGADSWGKFQF

SEQ ID NO: 296738 - protein, 17 aa, Homo sapiens
  CDR3 for beta chain variable domain of TCR clone 148369 (TRBV7-9, TRBJ1-4)
CASSARTGGNEKLFLAV

SEQ ID NO: 296739 - protein, 17 aa, Homo sapiens
  CDR3 for alpha chain variable domain of TCR clone 148370 (TRAV3, TRAJ6)
CAVRDGPRAGGSYIPKF

SEQ ID NO: 296740 - protein, 15 aa, Homo sapiens
  CDR3 for beta chain variable domain of TCR clone 148370 (TRBV5-5, TRBJ1-5)
CASSSTPGSNQPQHF

SEQ ID NO: 296741 - protein, 21 aa, Homo sapiens
  CDR3 for alpha chain variable domain of TCR clone 148371 (TRAV12-3, )
CASRQIPDIQNPDPAVYQLRD

SEQ ID NO: 296742 - protein, 14 aa, Homo sapiens
  CDR3 for beta chain variable domain of TCR clone 148371 (TRBV7-2, TRBJ1-3)
CASSLGTAGNTIYF

SEQ ID NO: 296743 - protein, 10 aa, Homo sapiens
  CDR3 for alpha chain variable domain of TCR clone 148372 (TRAV30, TRAJ48)
CGIGNEKLTF

SEQ ID NO: 296744 - protein, 15 aa, Homo sapiens
  CDR3 for beta chain variable domain of TCR clone 148372 (TRBV28, TRBJ2-1)
CASRKAGTAYNEQFF

SEQ ID NO: 296745 - protein, 13 aa, Homo sapiens
  CDR3 for alpha chain variable domain of TCR clone 148373 (TRAV3, TRAJ38)
CAVRDCLNAGNNH

SEQ ID NO: 296746 - protein, 13 aa, Homo sapiens
  CDR3 for beta chain variable domain of TCR clone 148373 (TRBV23-1, TRBJ1-4)
CASRGKFNEKLFF

SEQ ID NO: 296747 - protein, 17 aa, Homo sapiens
  CDR3 for alpha chain variable domain of TCR clone 148374 (TRAV26-1, TRAJ53)
CIVRVDDRGGSNYELTF

SEQ ID NO: 296748 - protein, 15 aa, Homo sapiens
  CDR3 for beta chain variable domain of TCR clone 148374 (TRBV20-1, TRBJ2-7)
CSARVPAAYFYEQYF

SEQ ID NO: 296749 - protein, 15 aa, Homo sapiens
  CDR3 for alpha chain variable domain of TCR clone 148375 (TRAV27, TRAJ38)
CAARRNAGNNRKLIW

SEQ ID NO: 296750 - protein, 15 aa, Homo sapiens
  CDR3 for beta chain variable domain of TCR clone 148375 (TRBV2, TRBJ2-1)
CASSELAGSYNERFF

SEQ ID NO: 296751 - protein, 17 aa, Homo sapiens
  CDR3 for alpha chain variable domain of TCR clone 148376 (TRAV36/DV7, TRAJ52)
CAVAQRAGGTSYGKLTF

SEQ ID NO: 296752 - protein, 16 aa, Homo sapiens
  CDR3 for beta chain variable domain of TCR clone 148376 (TRBV20-1, TRBJ2-1)
CSARDLKQGMNNEQFS

SEQ ID NO: 296753 - protein, 14 aa, Homo sapiens
  CDR3 for alpha chain variable domain of TCR clone 148377 (TRAV12-3, TRAJ10)
SHLPLTGGGNKLTF

SEQ ID NO: 296754 - protein, 16 aa, Homo sapiens
  CDR3 for beta chain variable domain of TCR clone 148377 (TRBV12-4, TRBJ2-7)
CASSWRPSGDLETQYF

SEQ ID NO: 296755 - protein, 14 aa, Homo sapiens
  CDR3 for alpha chain variable domain of TCR clone 148378 (TRAV30, TRAJ33)
CGTERRFSNYQLIW

SEQ ID NO: 296756 - protein, 13 aa, Homo sapiens
  CDR3 for beta chain variable domain of TCR clone 148378 (TRBV10-3, TRBJ2-7)
CASKLAVNYEQYF

SEQ ID NO: 296757 - protein, 12 aa, Homo sapiens
  CDR3 for alpha chain variable domain of TCR clone 148379 (TRAV13-1, TRAJ47)
CAASEGGNKLVF

SEQ ID NO: 296758 - protein, 13 aa, Homo sapiens
  CDR3 for beta chain variable domain of TCR clone 148379 (TRBV10-3, TRBJ2-7)
CASKLAVNYEQYF

SEQ ID NO: 296759 - protein, 13 aa, Homo sapiens
  CDR3 for alpha chain variable domain of TCR clone 148380 (TRAV27, TRAJ39)
CAGVNNAGNMLTF

SEQ ID NO: 296760 - protein, 19 aa, Homo sapiens
  CDR3 for beta chain variable domain of TCR clone 148380 (TRBV5-1, TRBJ2-3)
RASSLWLAGGITTTDTQYF

SEQ ID NO: 296761 - protein, 14 aa, Homo sapiens
  CDR3 for alpha chain variable domain of TCR clone 148381 (TRAV1-2, TRAJ26)
CCERPDNYGQNFVF

SEQ ID NO: 296762 - protein, 15 aa, Homo sapiens
  CDR3 for beta chain variable domain of TCR clone 148381 (TRBV9, TRBJ1-6)
CASSVAGTGDSPLNF

SEQ ID NO: 296763 - protein, 14 aa, Homo sapiens
  CDR3 for alpha chain variable domain of TCR clone 148382 (TRAV1-2, TRAJ16)
CAVNRFSDGQKLPF

SEQ ID NO: 296764 - protein, 13 aa, Homo sapiens
  CDR3 for beta chain variable domain of TCR clone 148382 (TRBV27, TRBJ2-7)
CASSLTTGYEQYF

SEQ ID NO: 296765 - protein, 12 aa, Homo sapiens
  CDR3 for alpha chain variable domain of TCR clone 148383 (TRAV12-1, TRAJ40)
CVVYSGTYKYIF

SEQ ID NO: 296766 - protein, 14 aa, Homo sapiens
  CDR3 for beta chain variable domain of TCR clone 148383 (TRBV7-9, TRBJ2-5)
CASSLGAAQETQYF

SEQ ID NO: 296767 - protein, 14 aa, Homo sapiens
  CDR3 for alpha chain variable domain of TCR clone 148384 (TRAV35, TRAJ53)
GRVNSGGSNYKLTF

SEQ ID NO: 296768 - protein, 16 aa, Homo sapiens
  CDR3 for beta chain variable domain of TCR clone 148384 (TRBV20-1, TRBJ1-4)
CSAIGGPRGANEKLFF

SEQ ID NO: 296769 - protein, 14 aa, Homo sapiens
  CDR3 for alpha chain variable domain of TCR clone 148385 (TRAV9-2, TRAJ36)
CALPWRTGANNLLF

SEQ ID NO: 296770 - protein, 15 aa, Homo sapiens
  CDR3 for beta chain variable domain of TCR clone 148385 (TRBV7-2, TRBJ2-5)
CASSFLRGGEETQYF

SEQ ID NO: 296771 - protein, 13 aa, Homo sapiens
  CDR3 for alpha chain variable domain of TCR clone 148386 (TRAV2, TRAJ35)
CAPRVGFGNVLHC

SEQ ID NO: 296772 - protein, 15 aa, Homo sapiens
  CDR3 for beta chain variable domain of TCR clone 148386 (TRBV6-3, TRBJ2-7)
CAGSSPGTVFYEQYF

SEQ ID NO: 296773 - protein, 14 aa, Homo sapiens
  CDR3 for alpha chain variable domain of TCR clone 148387 (TRAV13-1, TRAJ26)
CAASSAHYGQNFDF

SEQ ID NO: 296774 - protein, 17 aa, Homo sapiens
  CDR3 for beta chain variable domain of TCR clone 148387 (TRBV25-1, TRBJ2-5)
CASSRRGGRGGQETQYF

SEQ ID NO: 296775 - protein, 11 aa, Homo sapiens
  CDR3 for alpha chain variable domain of TCR clone 148388 (TRAV12-3, TRAJ43)
FAMSVSNDMRF

SEQ ID NO: 296776 - protein, 20 aa, Homo sapiens
  CDR3 for beta chain variable domain of TCR clone 148388 (TRBV28, TRBJ2-1)
CASTPIGRSPGIAGGNEQFF

SEQ ID NO: 296777 - protein, 13 aa, Homo sapiens
  CDR3 for alpha chain variable domain of TCR clone 148389 (TRAV1-1, TRAJ13)
CAVNSGGYQKVAF

SEQ ID NO: 296778 - protein, 12 aa, Homo sapiens
  CDR3 for beta chain variable domain of TCR clone 148389 (TRBV28, TRBJ2-1)
CASSVQINEQFF

SEQ ID NO: 296779 - protein, 12 aa, Homo sapiens
  CDR3 for alpha chain variable domain of TCR clone 148390 (TRAV27, TRAJ21)
CAVVRQLQQILL

SEQ ID NO: 296780 - protein, 14 aa, Homo sapiens
  CDR3 for beta chain variable domain of TCR clone 148390 (TRBV7-9, TRBJ1-4)
CASSLEGQSEKLFF

SEQ ID NO: 296781 - protein, 14 aa, Homo sapiens
  CDR3 for alpha chain variable domain of TCR clone 148391 (TRAV13-1, TRAJ36)
CAAIYQTWANNLFF

SEQ ID NO: 296782 - protein, 15 aa, Homo sapiens
  CDR3 for beta chain variable domain of TCR clone 148391 (TRBV5-1, TRBJ1-1)
CASSPLGGSNTEAFF

SEQ ID NO: 296783 - protein, 13 aa, Homo sapiens
  CDR3 for alpha chain variable domain of TCR clone 148392 (TRAV13-1, TRAJ11)
CAASIRGYSTLTF

SEQ ID NO: 296784 - protein, 17 aa, Homo sapiens
  CDR3 for beta chain variable domain of TCR clone 148392 (TRBV4-3, TRBJ1-2)
CASSSRFQAGGSVGYTF

SEQ ID NO: 296785 - protein, 11 aa, Homo sapiens
  CDR3 for alpha chain variable domain of TCR clone 148393 (TRAV2, TRAJ13)
CASGGHQKVTF

SEQ ID NO: 296786 - protein, 14 aa, Homo sapiens
  CDR3 for beta chain variable domain of TCR clone 148393 (TRBV7-3, TRBJ2-7)
CASSYDQDYYEQYF

SEQ ID NO: 296787 - protein, 16 aa, Homo sapiens
  CDR3 for alpha chain variable domain of TCR clone 148394 (TRAV30, TRAJ24)
CGTEIVDADSWGKFQF

SEQ ID NO: 296788 - protein, 14 aa, Homo sapiens
  CDR3 for beta chain variable domain of TCR clone 148394 (TRBV12-5, TRBJ2-5)
CANGSRTHQESQYF

SEQ ID NO: 296789 - protein, 13 aa, Homo sapiens
  CDR3 for alpha chain variable domain of TCR clone 148395 (TRAV38-1, TRAJ42)
CARWGGSQGNLIF

SEQ ID NO: 296790 - protein, 17 aa, Homo sapiens
  CDR3 for beta chain variable domain of TCR clone 148395 (TRBV20-1, TRBJ2-1)
CSARDPLAGVSDNEQFF

SEQ ID NO: 296791 - protein, 12 aa, Homo sapiens
  CDR3 for alpha chain variable domain of TCR clone 148396 (TRAV13-1, TRAJ15)
CAANQAGTALIF

SEQ ID NO: 296792 - protein, 14 aa, Homo sapiens
  CDR3 for beta chain variable domain of TCR clone 148396 (TRBV20-1, TRBJ2-5)
CSARYRVLQETQYF

SEQ ID NO: 296793 - protein, 13 aa, Homo sapiens
  CDR3 for alpha chain variable domain of TCR clone 148397 (TRAV13-2, TRAJ13)
CAERPGGYQKGTF

SEQ ID NO: 296794 - protein, 12 aa, Homo sapiens
  CDR3 for beta chain variable domain of TCR clone 148397 (TRBV14, TRBJ2-5)
CASSHLKETQYF

SEQ ID NO: 296795 - protein, 15 aa, Homo sapiens
  CDR3 for alpha chain variable domain of TCR clone 148398 (TRAV17, TRAJ22)
CATVAPSGSARQLTF

SEQ ID NO: 296796 - protein, 17 aa, Homo sapiens
  CDR3 for beta chain variable domain of TCR clone 148398 (TRBV13, TRBJ2-3)
CASSLSRVAGGRNTQYF

SEQ ID NO: 296797 - protein, 14 aa, Homo sapiens
  CDR3 for alpha chain variable domain of TCR clone 148399 (TRAV1-2, TRAJ16)
SAVNRFSDGLKLLF

SEQ ID NO: 296798 - protein, 11 aa, Homo sapiens
  CDR3 for beta chain variable domain of TCR clone 148399 (TRBV29-1, TRBJ2-5)
CSEDRTGTQCF

SEQ ID NO: 296799 - protein, 13 aa, Homo sapiens
  CDR3 for alpha chain variable domain of TCR clone 148400 (TRAV3, TRAJ27)
CAVRPLGAGKSTF

SEQ ID NO: 296800 - protein, 14 aa, Homo sapiens
  CDR3 for beta chain variable domain of TCR clone 148400 (TRBV5-7, TRBJ1-2)
CASSLVRGDYGYTF

SEQ ID NO: 296801 - protein, 12 aa, Homo sapiens
  CDR3 for alpha chain variable domain of TCR clone 148401 (TRAV8-3, TRAJ26)
CAGDNYGQNFVF

SEQ ID NO: 296802 - protein, 17 aa, Homo sapiens
  CDR3 for beta chain variable domain of TCR clone 148401 (TRBV4-2, TRBJ2-1)
CASSQFPGQGIYNEQFF

SEQ ID NO: 296803 - protein, 13 aa, Homo sapiens
  CDR3 for alpha chain variable domain of TCR clone 148402 (TRAV13-1, TRAJ13)
CAAFGGGYQKVTF

SEQ ID NO: 296804 - protein, 14 aa, Homo sapiens
  CDR3 for beta chain variable domain of TCR clone 148402 (TRBV5-5, TRBJ2-2)
CASSLLGDTGELFF

SEQ ID NO: 296805 - protein, 13 aa, Homo sapiens
  CDR3 for alpha chain variable domain of TCR clone 148403 (TRAV12-1, TRAJ34)
CVVTGYNTDKLIF

SEQ ID NO: 296806 - protein, 17 aa, Homo sapiens
  CDR3 for beta chain variable domain of TCR clone 148403 (TRBV7-2, TRBJ2-2)
CASSPRGAGEGTGELFF

SEQ ID NO: 296807 - protein, 17 aa, Homo sapiens
  CDR3 for alpha chain variable domain of TCR clone 148404 (TRAV3, TRAJ42)
CAVRDRDYGGSQGNLIF

SEQ ID NO: 296808 - protein, 19 aa, Homo sapiens
  CDR3 for beta chain variable domain of TCR clone 148404 (TRBV28, TRBJ2-1)
CASSFSIRGSGRTRYEQFF

SEQ ID NO: 296809 - protein, 13 aa, Homo sapiens
  CDR3 for alpha chain variable domain of TCR clone 148405 (TRAV8-3, TRAJ28)
CAVGAVGSYQLTF

SEQ ID NO: 296810 - protein, 15 aa, Homo sapiens
  CDR3 for beta chain variable domain of TCR clone 148405 (TRBV5-1, TRBJ1-1)
CASSSTTGTNTEAFF

SEQ ID NO: 296811 - protein, 13 aa, Homo sapiens
  CDR3 for alpha chain variable domain of TCR clone 148406 (TRAV13-1, TRAJ39)
CAASILAGDMLTF

SEQ ID NO: 296812 - protein, 15 aa, Homo sapiens
  CDR3 for beta chain variable domain of TCR clone 148406 (TRBV7-9, TRBJ1-1)
CASSLLEQGGTEAFF

SEQ ID NO: 296813 - protein, 16 aa, Homo sapiens
  CDR3 for alpha chain variable domain of TCR clone 148407 (TRAV12-3, TRAJ53)
CAMSPGSGGSNYKLTF

SEQ ID NO: 296814 - protein, 13 aa, Homo sapiens
  CDR3 for beta chain variable domain of TCR clone 148407 (TRBV10-3, TRBJ2-1)
CASKLAVNYEQYF

SEQ ID NO: 296815 - protein, 14 aa, Homo sapiens
  CDR3 for alpha chain variable domain of TCR clone 148408 (TRAV13-1, TRAJ10)
CAALFTGGGNKLTY

SEQ ID NO: 296816 - protein, 15 aa, Homo sapiens
  CDR3 for beta chain variable domain of TCR clone 148408 (TRBV10-3, TRBJ2-2)
CAISEGDRAAGELFF

SEQ ID NO: 296817 - protein, 15 aa, Homo sapiens
  CDR3 for alpha chain variable domain of TCR clone 148409 (TRAV26-1, TRAJ21)
CIVRVPNYNFNKFYF

SEQ ID NO: 296818 - protein, 20 aa, Homo sapiens
  CDR3 for beta chain variable domain of TCR clone 148409 (TRBV7-8, TRBJ2-2)
CASSHLFPGPTIHITGELFF

SEQ ID NO: 296819 - protein, 13 aa, Homo sapiens
  CDR3 for alpha chain variable domain of TCR clone 148410 (TRAV13-2, TRAJ31)
CAENLNNNARLMF

SEQ ID NO: 296820 - protein, 13 aa, Homo sapiens
  CDR3 for beta chain variable domain of TCR clone 148410 (TRBV7-3, TRBJ2-1)
CQQPGGGGNEQFF

SEQ ID NO: 296821 - protein, 13 aa, Homo sapiens
  CDR3 for alpha chain variable domain of TCR clone 148411 (TRAV1-1, TRAJ38)
CASNAGNNRKLIW

SEQ ID NO: 296822 - protein, 14 aa, Homo sapiens
  CDR3 for beta chain variable domain of TCR clone 148411 (TRBV15, TRBJ2-1)
CATSGVEDYNQQFF

SEQ ID NO: 296823 - protein, 14 aa, Homo sapiens
  CDR3 for alpha chain variable domain of TCR clone 148412 (TRAV1-2, TRAJ33)
CAVIAPDSNYQLIW

SEQ ID NO: 296824 - protein, 15 aa, Homo sapiens
  CDR3 for beta chain variable domain of TCR clone 148412 (TRBV27, TRBJ2-7)
CASTQRRPEYYEQYF

SEQ ID NO: 296825 - protein, 17 aa, Homo sapiens
  CDR3 for alpha chain variable domain of TCR clone 148413 (TRAV3, TRAJ42)
CAVRDRDYGGSQGNLIF

SEQ ID NO: 296826 - protein, 15 aa, Homo sapiens
  CDR3 for beta chain variable domain of TCR clone 148413 (TRBV14, TRBJ1-1)
CASSQDGMGRREAFF

SEQ ID NO: 296827 - protein, 14 aa, Homo sapiens
  CDR3 for alpha chain variable domain of TCR clone 148414 (TRAV29/DV5, TRAJ36)
CAARRKTGANNLFF

SEQ ID NO: 296828 - protein, 13 aa, Homo sapiens
  CDR3 for beta chain variable domain of TCR clone 148414 (TRBV6-6, TRBJ2-1)
CASSLHQGDEQFF

SEQ ID NO: 296829 - protein, 14 aa, Homo sapiens
  CDR3 for alpha chain variable domain of TCR clone 148415 (TRAV8-3, TRAJ4)
CAVGAAGGYNKLIF

SEQ ID NO: 296830 - protein, 16 aa, Homo sapiens
  CDR3 for beta chain variable domain of TCR clone 148415 (TRBV12-4, TRBJ2-1)
CASSLPGDPSYNEQFF

SEQ ID NO: 296831 - protein, 12 aa, Homo sapiens
  CDR3 for alpha chain variable domain of TCR clone 148416 (TRAV27, TRAJ42)
CAGGGSQGNLIF

SEQ ID NO: 296832 - protein, 13 aa, Homo sapiens
  CDR3 for beta chain variable domain of TCR clone 148416 (TRBV19, TRBJ2-7)
CASSIRSSYEQYL

SEQ ID NO: 296833 - protein, 14 aa, Homo sapiens
  CDR3 for alpha chain variable domain of TCR clone 148417 (TRAV12-2, TRAJ40)
CAVKIPSGTYKYIF

SEQ ID NO: 296834 - protein, 20 aa, Homo sapiens
  CDR3 for beta chain variable domain of TCR clone 148417 (TRBV28, TRBJ2-1)
CSSTPIGRSPGLAGGNEQFF

SEQ ID NO: 296835 - protein, 14 aa, Homo sapiens
  CDR3 for alpha chain variable domain of TCR clone 148418 (TRAV26-1, TRAJ28)
SVAWGRIKVLDFLF

SEQ ID NO: 296836 - protein, 18 aa, Homo sapiens
  CDR3 for beta chain variable domain of TCR clone 148418 (TRBV20-1, TRBJ2-2)
CSARDLTSGSMDTGELFF

SEQ ID NO: 296837 - protein, 16 aa, Homo sapiens
  CDR3 for alpha chain variable domain of TCR clone 148419 (TRAV12-2, TRAJ32)
CAVNLGQGGATNKPIF

SEQ ID NO: 296838 - protein, 15 aa, Homo sapiens
  CDR3 for beta chain variable domain of TCR clone 148419 (TRBV27, TRBJ2-1)
CASSNGGGSSNEQFF

SEQ ID NO: 296839 - protein, 13 aa, Homo sapiens
  CDR3 for alpha chain variable domain of TCR clone 148420 (TRAV12-3, TRAJ53)
CAMRGGSNYKLTF

SEQ ID NO: 296840 - protein, 15 aa, Homo sapiens
  CDR3 for beta chain variable domain of TCR clone 148420 (TRBV2, TRBJ2-1)
CATQARLVMIGEHFF

SEQ ID NO: 296841 - protein, 13 aa, Homo sapiens
  CDR3 for alpha chain variable domain of TCR clone 148421 (TRAV1-2, TRAJ9)
CAVLNSGGFKTIF

SEQ ID NO: 296842 - protein, 15 aa, Homo sapiens
  CDR3 for beta chain variable domain of TCR clone 148421 (TRBV7-3, TRBJ2-1)
CASSPTGGGEVEQFF

SEQ ID NO: 296843 - protein, 10 aa, Homo sapiens
  CDR3 for alpha chain variable domain of TCR clone 148422 (TRAV1-2, TRAJ31)
CVSEDARLMF

SEQ ID NO: 296844 - protein, 14 aa, Homo sapiens
  CDR3 for beta chain variable domain of TCR clone 148422 (TRBV19, TRBJ1-5)
CASGTEVYNQPQHF

SEQ ID NO: 296845 - protein, 15 aa, Homo sapiens
  CDR3 for alpha chain variable domain of TCR clone 148423 (TRAV29/DV5, TRAJ24)
CAASGATDSWGKFQF

SEQ ID NO: 296846 - protein, 13 aa, Homo sapiens
  CDR3 for beta chain variable domain of TCR clone 148423 (TRBV11-2, TRBJ2-7)
CASSTLDRYEQYF

SEQ ID NO: 296847 - protein, 15 aa, Homo sapiens
  CDR3 for alpha chain variable domain of TCR clone 148424 (TRAV8-4, TRAJ8)
CAVSDLNTGFQKVVF

SEQ ID NO: 296848 - protein, 14 aa, Homo sapiens
  CDR3 for beta chain variable domain of TCR clone 148424 (TRBV7-2, TRBJ2-3)
CASSQTGSSYTQYF

SEQ ID NO: 296849 - protein, 13 aa, Homo sapiens
  CDR3 for alpha chain variable domain of TCR clone 148425 (TRAV21, TRAJ49)
CAVGQSTGNQFYF

SEQ ID NO: 296850 - protein, 13 aa, Homo sapiens
  CDR3 for beta chain variable domain of TCR clone 148425 (TRBV6-6, TRBJ1-5)
CASRAYQDQRQHF

SEQ ID NO: 296851 - protein, 12 aa, Homo sapiens
  CDR3 for alpha chain variable domain of TCR clone 148426 (TRAV24, TRAJ37)
CASSSNTGKLIF

SEQ ID NO: 296852 - protein, 16 aa, Homo sapiens
  CDR3 for beta chain variable domain of TCR clone 148426 (TRBV19, TRBJ2-1)
CASSKAGPSSYNEQFF

SEQ ID NO: 296853 - protein, 16 aa, Homo sapiens
  CDR3 for alpha chain variable domain of TCR clone 148427 (TRAV30, TRAJ24)
CGTEIVDADSWGKSQF

SEQ ID NO: 296854 - protein, 14 aa, Homo sapiens
  CDR3 for beta chain variable domain of TCR clone 148427 (TRBV12-5, TRBJ2-5)
CASGSLTHQETQYF

SEQ ID NO: 296855 - protein, 18 aa, Homo sapiens
  CDR3 for alpha chain variable domain of TCR clone 148428 (TRAV13-1, TRAJ52)
CAASRRSAGGTSYGKLTF

SEQ ID NO: 296856 - protein, 16 aa, Homo sapiens
  CDR3 for beta chain variable domain of TCR clone 148428 (TRBV7-8, TRBJ2-4)
CASSAERTLAKNIQYF

SEQ ID NO: 296857 - protein, 15 aa, Homo sapiens
  CDR3 for alpha chain variable domain of TCR clone 148429 (TRAV8-3, TRAJ45)
CDSSYSGGGVDGLTF

SEQ ID NO: 296858 - protein, 13 aa, Homo sapiens
  CDR3 for beta chain variable domain of TCR clone 148429 (TRBV10-3, TRBJ2-7)
CASKLAVNYEQYF

SEQ ID NO: 296859 - protein, 15 aa, Homo sapiens
  CDR3 for alpha chain variable domain of TCR clone 148430 (TRAV25, TRAJ53)
CAATGGGGSNYKLTF

SEQ ID NO: 296860 - protein, 15 aa, Homo sapiens
  CDR3 for beta chain variable domain of TCR clone 148430 (TRBV28, TRBJ1-5)
CASSRTGGYVQPQHF

SEQ ID NO: 296861 - protein, 16 aa, Homo sapiens
  CDR3 for alpha chain variable domain of TCR clone 148431 (TRAV27, TRAJ52)
FAGAGAGGTSYGKLTF

SEQ ID NO: 296862 - protein, 17 aa, Homo sapiens
  CDR3 for beta chain variable domain of TCR clone 148431 (TRBV24-1, TRBJ2-3)
CATSDLPSGEDTDTQYF

SEQ ID NO: 296863 - protein, 16 aa, Homo sapiens
  CDR3 for alpha chain variable domain of TCR clone 148432 (TRAV23/DV6, TRAJ52)
CATRPSGGTSYGKLTF

SEQ ID NO: 296864 - protein, 13 aa, Homo sapiens
  CDR3 for beta chain variable domain of TCR clone 148432 (TRBV7-9, TRBJ1-1)
CASSLSGETEAFF

SEQ ID NO: 296865 - protein, 10 aa, Homo sapiens
  CDR3 for alpha chain variable domain of TCR clone 148433 (TRAV1-2, TRAJ23)
CAGQGGKLIF

SEQ ID NO: 296866 - protein, 13 aa, Homo sapiens
  CDR3 for beta chain variable domain of TCR clone 148433 (TRBV29-1, TRBJ2-1)
CSVEGGRVNEQFF

SEQ ID NO: 296867 - protein, 14 aa, Homo sapiens
  CDR3 for alpha chain variable domain of TCR clone 148434 (TRAV12-2, TRAJ13)
CAVKKTGGYQKVTF

SEQ ID NO: 296868 - protein, 17 aa, Homo sapiens
  CDR3 for beta chain variable domain of TCR clone 148434 (TRBV13, TRBJ2-3)
CASILSRVAGGRNTQYF

SEQ ID NO: 296869 - protein, 13 aa, Homo sapiens
  CDR3 for alpha chain variable domain of TCR clone 148435 (TRAV38-1, TRAJ31)
CAFMNFNNARLMF

SEQ ID NO: 296870 - protein, 16 aa, Homo sapiens
  CDR3 for beta chain variable domain of TCR clone 148435 (TRBV6-5, TRBJ2-7)
CASSYFRVGISDEQYF

SEQ ID NO: 296871 - protein, 13 aa, Homo sapiens
  CDR3 for alpha chain variable domain of TCR clone 148436 (TRAV13-1, TRAJ43)
CAASLSNNNDMRF

SEQ ID NO: 296872 - protein, 15 aa, Homo sapiens
  CDR3 for beta chain variable domain of TCR clone 148436 (TRBV19, TRBJ1-6)
CASSTQGAVGSPLHF

SEQ ID NO: 296873 - protein, 11 aa, Homo sapiens
  CDR3 for alpha chain variable domain of TCR clone 148437 (TRAV1-2, TRAJ20)
CAVSNDYKLSF

SEQ ID NO: 296874 - protein, 13 aa, Homo sapiens
  CDR3 for beta chain variable domain of TCR clone 148437 (TRBV10-2, TRBJ2-7)
CARGASGGSEQSF

SEQ ID NO: 296875 - protein, 13 aa, Homo sapiens
  CDR3 for alpha chain variable domain of TCR clone 148438 (TRAV13-2, TRAJ22)
CLGWISSARQLTF

SEQ ID NO: 296876 - protein, 14 aa, Homo sapiens
  CDR3 for beta chain variable domain of TCR clone 148438 (TRBV19, TRBJ2-1)
CASPTFVLSGEQFF

SEQ ID NO: 296877 - protein, 14 aa, Homo sapiens
  CDR3 for alpha chain variable domain of TCR clone 148439 (TRAV8-1, TRAJ5)
CAGRTDTGRRAPTF

SEQ ID NO: 296878 - protein, 14 aa, Homo sapiens
  CDR3 for beta chain variable domain of TCR clone 148439 (TRBV5-5, TRBJ1-2)
CASSLDPYNYGYTF

SEQ ID NO: 296879 - protein, 13 aa, Homo sapiens
  CDR3 for alpha chain variable domain of TCR clone 148440 (TRAV8-3, TRAJ43)
CAVGIYNNKDMRF

SEQ ID NO: 296880 - protein, 16 aa, Homo sapiens
  CDR3 for beta chain variable domain of TCR clone 148440 (TRBV7-2, TRBJ2-5)
CASSLVLWTKQETQYF

SEQ ID NO: 296881 - protein, 13 aa, Homo sapiens
  CDR3 for alpha chain variable domain of TCR clone 148441 (TRAV1-2, TRAJ9)
CAALNTGGFKTIF

SEQ ID NO: 296882 - protein, 14 aa, Homo sapiens
  CDR3 for beta chain variable domain of TCR clone 148441 (TRBV12-5, TRBJ2-5)
CASGSRTRQETQYF

SEQ ID NO: 296883 - protein, 19 aa, Homo sapiens
  CDR3 for alpha chain variable domain of TCR clone 148442 (TRAV26-1, TRAJ28)
CIVRVAHAYSGAGSYQLTF

SEQ ID NO: 296884 - protein, 13 aa, Homo sapiens
  CDR3 for beta chain variable domain of TCR clone 148442 (TRBV20-1, TRBJ1-1)
CSARGGGNTEAFF

SEQ ID NO: 296885 - protein, 14 aa, Homo sapiens
  CDR3 for alpha chain variable domain of TCR clone 148443 (TRAV12-2, TRAJ45)
CAVCSGGGADGLTF

SEQ ID NO: 296886 - protein, 14 aa, Homo sapiens
  CDR3 for beta chain variable domain of TCR clone 148443 (TRBV6-5, TRBJ1-2)
CASTRGGGSDGYTF

SEQ ID NO: 296887 - protein, 14 aa, Homo sapiens
  CDR3 for alpha chain variable domain of TCR clone 148444 (TRAV12-3, TRAJ10)
SHLPLTGGGNKLTF

SEQ ID NO: 296888 - protein, 16 aa, Homo sapiens
  CDR3 for beta chain variable domain of TCR clone 148444 (TRBV25-1, TRBJ1-1)
CASSGDRDRGRIEAFF

SEQ ID NO: 296889 - protein, 13 aa, Homo sapiens
  CDR3 for alpha chain variable domain of TCR clone 148445 (TRAV35, TRAJ33)
CAGQLYGVYQLIW

SEQ ID NO: 296890 - protein, 14 aa, Homo sapiens
  CDR3 for beta chain variable domain of TCR clone 148445 (TRBV7-2, TRBJ1-1)
CASSLGGAGTEAFF

SEQ ID NO: 296891 - protein, 11 aa, Homo sapiens
  CDR3 for alpha chain variable domain of TCR clone 148446 (TRAV1-1, TRAJ23)
CAVRQGGKLIF

SEQ ID NO: 296892 - protein, 17 aa, Homo sapiens
  CDR3 for beta chain variable domain of TCR clone 148446 (TRBV7-8, TRBJ1-1)
CASSSPPGRGQNTEAFF

SEQ ID NO: 296893 - protein, 18 aa, Homo sapiens
  CDR3 for alpha chain variable domain of TCR clone 148447 (TRAV12-3, TRAJ52)
CAMSVGGAGGTSYGKLTF

SEQ ID NO: 296894 - protein, 19 aa, Homo sapiens
  CDR3 for beta chain variable domain of TCR clone 148447 (TRBV25-1, TRBJ2-2)
RAILVYRVDRGRKAGELFF

SEQ ID NO: 296895 - protein, 14 aa, Homo sapiens
  CDR3 for alpha chain variable domain of TCR clone 148448 (TRAV38-1, TRAJ29)
CAFITPSGNTPLVF

SEQ ID NO: 296896 - protein, 14 aa, Homo sapiens
  CDR3 for beta chain variable domain of TCR clone 148448 (TRBV6-5, TRBJ1-2)
CASSYDGTGGGYTF

SEQ ID NO: 296897 - protein, 16 aa, Homo sapiens
  CDR3 for alpha chain variable domain of TCR clone 148449 (TRAV38-1, TRAJ37)
CAFKGDGSSDTGKLIF

SEQ ID NO: 296898 - protein, 13 aa, Homo sapiens
  CDR3 for beta chain variable domain of TCR clone 148449 (TRBV12-4, TRBJ2-5)
CASSLLRRETQYF

SEQ ID NO: 296899 - protein, 14 aa, Homo sapiens
  CDR3 for alpha chain variable domain of TCR clone 148450 (TRAV1-2, TRAJ16)
FAVNRFSDGQKLLF

SEQ ID NO: 296900 - protein, 16 aa, Homo sapiens
  CDR3 for beta chain variable domain of TCR clone 148450 (TRBV5-1, TRBJ2-7)
CASSYASTSSGGEQYF

SEQ ID NO: 296901 - protein, 16 aa, Homo sapiens
  CDR3 for alpha chain variable domain of TCR clone 148451 (TRAV3, TRAJ21)
CAVRDIERGNFNKFYF

SEQ ID NO: 296902 - protein, 17 aa, Homo sapiens
  CDR3 for beta chain variable domain of TCR clone 148451 (TRBV4-1, TRBJ2-7)
CASSPFLTSGGVVEQYF

SEQ ID NO: 296903 - protein, 10 aa, Homo sapiens
  CDR3 for alpha chain variable domain of TCR clone 148452 (TRAV13-2, TRAJ20)
CAENICRLQA

SEQ ID NO: 296904 - protein, 14 aa, Homo sapiens
  CDR3 for beta chain variable domain of TCR clone 148452 (TRBV7-2, TRBJ2-7)
CASSPKTSFYEQYF

SEQ ID NO: 296905 - protein, 14 aa, Homo sapiens
  CDR3 for alpha chain variable domain of TCR clone 148453 (TRAV38-1, TRAJ45)
CASHSGGGAAGLTF

SEQ ID NO: 296906 - protein, 14 aa, Homo sapiens
  CDR3 for beta chain variable domain of TCR clone 148453 (TRBV20-1, TRBJ1-1)
CSAQTRIGGTEAFF

SEQ ID NO: 296907 - protein, 12 aa, Homo sapiens
  CDR3 for alpha chain variable domain of TCR clone 148454 (TRAV12-1, TRAJ31)
CVSWNNNARLMF

SEQ ID NO: 296908 - protein, 15 aa, Homo sapiens
  CDR3 for beta chain variable domain of TCR clone 148454 (TRBV7-2, TRBJ1-5)
CASRLDRGQDQPQHF

SEQ ID NO: 296909 - protein, 14 aa, Homo sapiens
  CDR3 for alpha chain variable domain of TCR clone 148455 (TRAV17, TRAJ57)
CATEPQGGSEKLVF

SEQ ID NO: 296910 - protein, 16 aa, Homo sapiens
  CDR3 for beta chain variable domain of TCR clone 148455 (TRBV20-1, TRBJ1-4)
CSAPGQGLLTNEKLFF

SEQ ID NO: 296911 - protein, 11 aa, Homo sapiens
  CDR3 for alpha chain variable domain of TCR clone 148456 (TRAV12-1, TRAJ8)
CVVTGFQKLVF

SEQ ID NO: 296912 - protein, 13 aa, Homo sapiens
  CDR3 for beta chain variable domain of TCR clone 148456 (TRBV7-3, TRBJ1-1)
CASSQDWGAEAFF

SEQ ID NO: 296913 - protein, 15 aa, Homo sapiens
  CDR3 for alpha chain variable domain of TCR clone 148457 (TRAV3, TRAJ29)
CAVRAPLSGNTPLVF

SEQ ID NO: 296914 - protein, 17 aa, Homo sapiens
  CDR3 for beta chain variable domain of TCR clone 148457 (TRBV3-1, TRBJ2-5)
CASSNWGGTSGQETQYF

SEQ ID NO: 296915 - protein, 17 aa, Homo sapiens
  CDR3 for alpha chain variable domain of TCR clone 148458 (TRAV3, TRAJ6)
CAVRDGPRAGGSYIPTF

SEQ ID NO: 296916 - protein, 13 aa, Homo sapiens
  CDR3 for beta chain variable domain of TCR clone 148458 (TRBV15, TRBJ1-2)
CATSRGQLYGYTF

SEQ ID NO: 296917 - protein, 15 aa, Homo sapiens
  CDR3 for alpha chain variable domain of TCR clone 148459 (TRAV8-2, TRAJ15)
WVVTMGNQAGTALIF

SEQ ID NO: 296918 - protein, 12 aa, Homo sapiens
  CDR3 for beta chain variable domain of TCR clone 148459 (TRBV6-1, TRBJ2-7)
CASSDYSYEQYF

SEQ ID NO: 296919 - protein, 13 aa, Homo sapiens
  CDR3 for alpha chain variable domain of TCR clone 148460 (TRAV8-1, TRAJ23)
CAVTGGQGGKLIF

SEQ ID NO: 296920 - protein, 15 aa, Homo sapiens
  CDR3 for beta chain variable domain of TCR clone 148460 (TRBV20-1, TRBJ2-2)
CSAIPGHSNTGELLF

SEQ ID NO: 296921 - protein, 14 aa, Homo sapiens
  CDR3 for alpha chain variable domain of TCR clone 148461 (TRAV12-2, TRAJ52)
FAVPGGTSYGKLTF

SEQ ID NO: 296922 - protein, 12 aa, Homo sapiens
  CDR3 for beta chain variable domain of TCR clone 148461 (TRBV18, TRBJ2-1)
CASSPGTSEGFF

SEQ ID NO: 296923 - protein, 15 aa, Homo sapiens
  CDR3 for alpha chain variable domain of TCR clone 148462 (TRAV13-1, TRAJ16)
CAARYQRARSCSLQG

SEQ ID NO: 296924 - protein, 13 aa, Homo sapiens
  CDR3 for beta chain variable domain of TCR clone 148462 (TRBV4-1, TRBJ2-1)
CASSQAGGDEQFF

SEQ ID NO: 296925 - protein, 16 aa, Homo sapiens
  CDR3 for alpha chain variable domain of TCR clone 148463 (TRAV4, TRAJ18)
CCVLLIGGSTLGRLYF

SEQ ID NO: 296926 - protein, 14 aa, Homo sapiens
  CDR3 for beta chain variable domain of TCR clone 148463 (TRBV7-8, TRBJ2-3)
CASSLEAGTDTQYF

SEQ ID NO: 296927 - protein, 13 aa, Homo sapiens
  CDR3 for alpha chain variable domain of TCR clone 148464 (TRAV27, TRAJ56)
CAGKPGANRKLTF

SEQ ID NO: 296928 - protein, 18 aa, Homo sapiens
  CDR3 for beta chain variable domain of TCR clone 148464 (TRBV11-2, TRBJ2-3)
CASSVGGASRGAPNTQYF

SEQ ID NO: 296929 - protein, 16 aa, Homo sapiens
  CDR3 for alpha chain variable domain of TCR clone 148465 (TRAV21, TRAJ37)
CAVRPRGSSSTGKLIL

SEQ ID NO: 296930 - protein, 13 aa, Homo sapiens
  CDR3 for beta chain variable domain of TCR clone 148465 (TRBV7-9, TRBJ2-5)
CASLSPGQETQYF

SEQ ID NO: 296931 - protein, 14 aa, Homo sapiens
  CDR3 for alpha chain variable domain of TCR clone 148466 (TRAV3, TRAJ20)
RAVRDSFNDYKLSF

SEQ ID NO: 296932 - protein, 16 aa, Homo sapiens
  CDR3 for beta chain variable domain of TCR clone 148466 (TRBV18, TRBJ1-1)
CASSPGVGGRGGEAFF

SEQ ID NO: 296933 - protein, 15 aa, Homo sapiens
  CDR3 for alpha chain variable domain of TCR clone 148467 (TRAV27, TRAJ38)
CAARRNAGNNRKLIW

SEQ ID NO: 296934 - protein, 13 aa, Homo sapiens
  CDR3 for beta chain variable domain of TCR clone 148467 (TRBV2, TRBJ1-1)
CASRWTVNTEAFF

SEQ ID NO: 296935 - protein, 14 aa, Homo sapiens
  CDR3 for alpha chain variable domain of TCR clone 148468 (TRAV38-1, TRAJ40)
CALRPASGTYKYIF

SEQ ID NO: 296936 - protein, 15 aa, Homo sapiens
  CDR3 for beta chain variable domain of TCR clone 148468 (TRBV20-1, TRBJ2-7)
CSARDRVSGMDEQYF

SEQ ID NO: 296937 - protein, 14 aa, Homo sapiens
  CDR3 for alpha chain variable domain of TCR clone 148469 (TRAV17, TRAJ16)
CATADFSDGQKLLL

SEQ ID NO: 296938 - protein, 12 aa, Homo sapiens
  CDR3 for beta chain variable domain of TCR clone 148469 (TRBV24-1, TRBJ1-1)
CATLYPDTVAFF

SEQ ID NO: 296939 - protein, 11 aa, Homo sapiens
  CDR3 for alpha chain variable domain of TCR clone 148470 (TRAV3, TRAJ17)
CAESAGNKLTF

SEQ ID NO: 296940 - protein, 15 aa, Homo sapiens
  CDR3 for beta chain variable domain of TCR clone 148470 (TRBV12-4, TRBJ2-7)
CASSLGSGSPYEQYF

SEQ ID NO: 296941 - protein, 14 aa, Homo sapiens
  CDR3 for alpha chain variable domain of TCR clone 148471 (TRAV12-2, TRAJ17)
CGVLFKAAGNKLTF

SEQ ID NO: 296942 - protein, 15 aa, Homo sapiens
  CDR3 for beta chain variable domain of TCR clone 148471 (TRBV20-1, TRBJ2-7)
CSARDRVSGMDEQYF

SEQ ID NO: 296943 - protein, 13 aa, Homo sapiens
  CDR3 for alpha chain variable domain of TCR clone 148472 (TRAV3, TRAJ20)
CAVRSLNDYKLSF

SEQ ID NO: 296944 - protein, 12 aa, Homo sapiens
  CDR3 for beta chain variable domain of TCR clone 148472 (TRBV3-1, TRBJ2-1)
CASSQGSSGQFF

SEQ ID NO: 296945 - protein, 12 aa, Homo sapiens
  CDR3 for alpha chain variable domain of TCR clone 148473 (TRAV12-3, TRAJ17)
CAMTLTGNKLTF

SEQ ID NO: 296946 - protein, 14 aa, Homo sapiens
  CDR3 for beta chain variable domain of TCR clone 148473 (TRBV20-1, TRBJ2-5)
CSASDSGSGETQYF

SEQ ID NO: 296947 - protein, 18 aa, Homo sapiens
  CDR3 for alpha chain variable domain of TCR clone 148474 (TRAV26-1, TRAJ52)
FIVRVEGAGGTSYGKLTF

SEQ ID NO: 296948 - protein, 13 aa, Homo sapiens
  CDR3 for beta chain variable domain of TCR clone 148474 (TRBV7-3, TRBJ1-2)
CASRLKRGYGYTF

SEQ ID NO: 296949 - protein, 12 aa, Homo sapiens
  CDR3 for alpha chain variable domain of TCR clone 148475 (TRAV27, TRAJ35)
CAGADFGNVLHC

SEQ ID NO: 296950 - protein, 16 aa, Homo sapiens
  CDR3 for beta chain variable domain of TCR clone 148475 (TRBV6-1, TRBJ2-1)
CASILRQGSSYNMQFF

SEQ ID NO: 296951 - protein, 15 aa, Homo sapiens
  CDR3 for alpha chain variable domain of TCR clone 148476 (TRAV12-3, TRAJ6)
CAMSATSGGSYIPTF

SEQ ID NO: 296952 - protein, 14 aa, Homo sapiens
  CDR3 for beta chain variable domain of TCR clone 148476 (TRBV6-5, TRBJ1-5)
CASSPGVSNQPQHF

SEQ ID NO: 296953 - protein, 16 aa, Homo sapiens
  CDR3 for alpha chain variable domain of TCR clone 148477 (TRAV23/DV6, TRAJ52)
CAARPSGGTSYGKLTF

SEQ ID NO: 296954 - protein, 13 aa, Homo sapiens
  CDR3 for beta chain variable domain of TCR clone 148477 (TRBV7-9, TRBJ1-1)
CASSLSGDTEAFF

SEQ ID NO: 296955 - protein, 16 aa, Homo sapiens
  CDR3 for alpha chain variable domain of TCR clone 148478 (TRAV3, TRAJ37)
CAVRGKGSGNTVKLIF

SEQ ID NO: 296956 - protein, 15 aa, Homo sapiens
  CDR3 for beta chain variable domain of TCR clone 148478 (TRBV7-9, TRBJ1-6)
CASSSPGRGNSPLHF

SEQ ID NO: 296957 - protein, 12 aa, Homo sapiens
  CDR3 for alpha chain variable domain of TCR clone 148479 (TRAV4, TRAJ5)
RTMDTGRRALTF

SEQ ID NO: 296958 - protein, 15 aa, Homo sapiens
  CDR3 for beta chain variable domain of TCR clone 148479 (TRBV27, TRBJ2-5)
CASSLMPSGGETQYF

SEQ ID NO: 296959 - protein, 11 aa, Homo sapiens
  CDR3 for alpha chain variable domain of TCR clone 148480 (TRAV21, TRAJ34)
CTVTNTDKLIF

SEQ ID NO: 296960 - protein, 16 aa, Homo sapiens
  CDR3 for beta chain variable domain of TCR clone 148480 (TRBV20-1, TRBJ1-4)
CSAPGQGLLTNEKLFF

SEQ ID NO: 296961 - protein, 13 aa, Homo sapiens
  CDR3 for alpha chain variable domain of TCR clone 148481 (TRAV12-1, TRAJ40)
CVVPTSGTYKYIF

SEQ ID NO: 296962 - protein, 18 aa, Homo sapiens
  CDR3 for beta chain variable domain of TCR clone 148481 (TRBV7-6, TRBJ2-1)
CASSPRTSGMSSYNEQFF

SEQ ID NO: 296963 - protein, 11 aa, Homo sapiens
  CDR3 for alpha chain variable domain of TCR clone 148482 (TRAV13-1, TRAJ39)
CASHAGNMLTF

SEQ ID NO: 296964 - protein, 15 aa, Homo sapiens
  CDR3 for beta chain variable domain of TCR clone 148482 (TRBV12-4, TRBJ2-5)
CASSPPTGLQETQYF

SEQ ID NO: 296965 - protein, 15 aa, Homo sapiens
  CDR3 for alpha chain variable domain of TCR clone 148483 (TRAV8-6, TRAJ10)
CAVSDQAGGGNKLTF

SEQ ID NO: 296966 - protein, 20 aa, Homo sapiens
  CDR3 for beta chain variable domain of TCR clone 148483 (TRBV3-1, TRBJ2-6)
CASSPRPGLEGGAGANVLTF

SEQ ID NO: 296967 - protein, 20 aa, Homo sapiens
  CDR3 for alpha chain variable domain of TCR clone 148484 (TRAV27, TRAJ10)
ASTSVPSRGILTGGGNKLTF

SEQ ID NO: 296968 - protein, 14 aa, Homo sapiens
  CDR3 for beta chain variable domain of TCR clone 148484 (TRBV9, TRBJ2-3)
CQQPRGGLTDTQYF

SEQ ID NO: 296969 - protein, 15 aa, Homo sapiens
  CDR3 for alpha chain variable domain of TCR clone 148485 (TRAV13-2, TRAJ5)
CAENPHWTGSRALTF

SEQ ID NO: 296970 - protein, 16 aa, Homo sapiens
  CDR3 for beta chain variable domain of TCR clone 148485 (TRBV7-9, TRBJ1-3)
CASSQTSGLRMGTIYF

SEQ ID NO: 296971 - protein, 19 aa, Homo sapiens
  CDR3 for alpha chain variable domain of TCR clone 148486 (TRAV36/DV7, TRAJ13)
CAVEAGPFLGVTRKLPLEL

SEQ ID NO: 296972 - protein, 16 aa, Homo sapiens
  CDR3 for beta chain variable domain of TCR clone 148486 (TRBV19, TRBJ2-3)
CASSPEWDRGTDTQYF

SEQ ID NO: 296973 - protein, 14 aa, Homo sapiens
  CDR3 for alpha chain variable domain of TCR clone 148487 (TRAV1-2, TRAJ16)
CAVNRFSDGQKLLF

SEQ ID NO: 296974 - protein, 17 aa, Homo sapiens
  CDR3 for beta chain variable domain of TCR clone 148487 (TRBV28, TRBJ2-5)
CGSSVGGEWGGQETQYF

SEQ ID NO: 296975 - protein, 14 aa, Homo sapiens
  CDR3 for alpha chain variable domain of TCR clone 148488 (TRAV12-2, TRAJ13)
CAVKKKVGYQKVTF

SEQ ID NO: 296976 - protein, 15 aa, Homo sapiens
  CDR3 for beta chain variable domain of TCR clone 148488 (TRBV27, TRBJ2-1)
CASSNGGGSSNEQFF

SEQ ID NO: 296977 - protein, 12 aa, Homo sapiens
  CDR3 for alpha chain variable domain of TCR clone 148489 (TRAV13-1, TRAJ48)
CAANFGNEKLTF

SEQ ID NO: 296978 - protein, 15 aa, Homo sapiens
  CDR3 for beta chain variable domain of TCR clone 148489 (TRBV11-2, TRBJ2-1)
CASSLGPDSYNEQFF

SEQ ID NO: 296979 - protein, 15 aa, Homo sapiens
  CDR3 for alpha chain variable domain of TCR clone 148490 (TRAV8-1, TRAJ8)
CAVNAMNTGFQKLVF

SEQ ID NO: 296980 - protein, 15 aa, Homo sapiens
  CDR3 for beta chain variable domain of TCR clone 148490 (TRBV11-2, TRBJ2-1)
CASSSPSTRYNEQFF

SEQ ID NO: 296981 - protein, 12 aa, Homo sapiens
  CDR3 for alpha chain variable domain of TCR clone 148491 (TRAV38-2/DV8, TRAJ48)
CALLSGNEKLTF

SEQ ID NO: 296982 - protein, 17 aa, Homo sapiens
  CDR3 for beta chain variable domain of TCR clone 148491 (TRBV4-3, TRBJ2-1)
CASSQFSSGRASGEQFF

SEQ ID NO: 296983 - protein, 13 aa, Homo sapiens
  CDR3 for alpha chain variable domain of TCR clone 148492 (TRAV13-1, TRAJ5)
CAASDTGRRALTF

SEQ ID NO: 296984 - protein, 20 aa, Homo sapiens
  CDR3 for beta chain variable domain of TCR clone 148492 (TRBV7-8, TRBJ2-2)
CASSHLFPGPTIHITGELFF

SEQ ID NO: 296985 - protein, 17 aa, Homo sapiens
  CDR3 for alpha chain variable domain of TCR clone 148493 (TRAV13-1, TRAJ52)
CAARSGAGGTSYGKLTF

SEQ ID NO: 296986 - protein, 15 aa, Homo sapiens
  CDR3 for beta chain variable domain of TCR clone 148493 (TRBV2, TRBJ2-1)
CASSELAGGYNEQFF

SEQ ID NO: 296987 - protein, 12 aa, Homo sapiens
  CDR3 for alpha chain variable domain of TCR clone 148494 (TRAV39, TRAJ49)
CAVAMTGNQFYF

SEQ ID NO: 296988 - protein, 16 aa, Homo sapiens
  CDR3 for beta chain variable domain of TCR clone 148494 (TRBV20-1, TRBJ2-3)
CSATKRDSTYTDTQYF

SEQ ID NO: 296989 - protein, 13 aa, Homo sapiens
  CDR3 for alpha chain variable domain of TCR clone 148495 (TRAV8-3, TRAJ48)
CAVVPFGNEKLPF

SEQ ID NO: 296990 - protein, 14 aa, Homo sapiens
  CDR3 for beta chain variable domain of TCR clone 148495 (TRBV18, TRBJ2-7)
CASSPRGGAYEQYF

SEQ ID NO: 296991 - protein, 15 aa, Homo sapiens
  CDR3 for alpha chain variable domain of TCR clone 148496 (TRAV8-3, TRAJ27)
CAVGPSKSNAGKSTL

SEQ ID NO: 296992 - protein, 15 aa, Homo sapiens
  CDR3 for beta chain variable domain of TCR clone 148496 (TRBV7-2, TRBJ2-1)
CASSSGLAGGNEQFF

SEQ ID NO: 296993 - protein, 23 aa, Homo sapiens
  CDR3 for alpha chain variable domain of TCR clone 148497 (TRAV3, TRAJ38)
CAVRDCLNAGNNHIQNPDPAVYQ

SEQ ID NO: 296994 - protein, 14 aa, Homo sapiens
  CDR3 for beta chain variable domain of TCR clone 148497 (TRBV5-5, TRBJ1-5)
RASSGQGVDQPQHF

SEQ ID NO: 296995 - protein, 13 aa, Homo sapiens
  CDR3 for alpha chain variable domain of TCR clone 148498 (TRAV1-2, TRAJ26)
CAVRPNYGQNFVF

SEQ ID NO: 296996 - protein, 14 aa, Homo sapiens
  CDR3 for beta chain variable domain of TCR clone 148498 (TRBV7-2, TRBJ2-7)
CASRSQGAAYEQYF

SEQ ID NO: 296997 - protein, 12 aa, Homo sapiens
  CDR3 for alpha chain variable domain of TCR clone 148499 (TRAV17, TRAJ4)
CATDGGYNKLIC

SEQ ID NO: 296998 - protein, 13 aa, Homo sapiens
  CDR3 for beta chain variable domain of TCR clone 148499 (TRBV29-1, TRBJ2-2)
CSTTGVNNGELFF

SEQ ID NO: 296999 - protein, 17 aa, Homo sapiens
  CDR3 for alpha chain variable domain of TCR clone 148500 (TRAV14/DV4, TRAJ4)
CAMREASGRGGYNNLIF

SEQ ID NO: 297000 - protein, 14 aa, Homo sapiens
  CDR3 for beta chain variable domain of TCR clone 148500 (TRBV19, TRBJ2-7)
CASSMGQGAIEQYF

SEQ ID NO: 297001 - protein, 13 aa, Homo sapiens
  CDR3 for alpha chain variable domain of TCR clone 148501 (TRAV12-3, TRAJ33)
CAMSVNSNYQLIW

SEQ ID NO: 297002 - protein, 13 aa, Homo sapiens
  CDR3 for beta chain variable domain of TCR clone 148501 (TRBV11-3, TRBJ2-1)
CASSSRRVDEQFF

SEQ ID NO: 297003 - protein, 14 aa, Homo sapiens
  CDR3 for alpha chain variable domain of TCR clone 148502 (TRAV12-3, TRAJ10)
SHLPLTGGGNKLTF

SEQ ID NO: 297004 - protein, 13 aa, Homo sapiens
  CDR3 for beta chain variable domain of TCR clone 148502 (TRBV19, TRBJ2-3)
CATWDKITDTQYF

SEQ ID NO: 297005 - protein, 12 aa, Homo sapiens
  CDR3 for alpha chain variable domain of TCR clone 148503 (TRAV30, TRAJ31)
CGTAKHNARLMF

SEQ ID NO: 297006 - protein, 17 aa, Homo sapiens
  CDR3 for beta chain variable domain of TCR clone 148503 (TRBV7-8, TRBJ2-6)
CASSAGTGGAGANVLTF

SEQ ID NO: 297007 - protein, 15 aa, Homo sapiens
  CDR3 for alpha chain variable domain of TCR clone 148504 (TRAV13-1, TRAJ43)
CAATPELGGNNDMRF

SEQ ID NO: 297008 - protein, 15 aa, Homo sapiens
  CDR3 for beta chain variable domain of TCR clone 148504 (TRBV10-2, TRBJ2-6)
CASSEQGIGANVLTF

SEQ ID NO: 297009 - protein, 14 aa, Homo sapiens
  CDR3 for alpha chain variable domain of TCR clone 148505 (TRAV8-4, TRAJ38)
CARLNAGNNRKLLW

SEQ ID NO: 297010 - protein, 12 aa, Homo sapiens
  CDR3 for beta chain variable domain of TCR clone 148505 (TRBV6-1, TRBJ2-7)
CASSEPLYEQYV

SEQ ID NO: 297011 - protein, 16 aa, Homo sapiens
  CDR3 for alpha chain variable domain of TCR clone 148506 (TRAV16, TRAJ4)
CALSRMFSGCYNKLIF

SEQ ID NO: 297012 - protein, 12 aa, Homo sapiens
  CDR3 for beta chain variable domain of TCR clone 148506 (TRBV29-1, TRBJ2-3)
CSVTGGADTQYF

SEQ ID NO: 297013 - protein, 14 aa, Homo sapiens
  CDR3 for alpha chain variable domain of TCR clone 148507 (TRAV9-2, TRAJ39)
CALYIYNAGNMLTF

SEQ ID NO: 297014 - protein, 13 aa, Homo sapiens
  CDR3 for beta chain variable domain of TCR clone 148507 (TRBV18, TRBJ1-1)
CASSPNGDTEAFF

SEQ ID NO: 297015 - protein, 15 aa, Homo sapiens
  CDR3 for alpha chain variable domain of TCR clone 148508 (TRAV26-2, TRAJ52)
CILRAGGTSYGKLTF

SEQ ID NO: 297016 - protein, 15 aa, Homo sapiens
  CDR3 for beta chain variable domain of TCR clone 148508 (TRBV6-1, TRBJ2-4)
CASSEAVWTINIQYF

SEQ ID NO: 297017 - protein, 12 aa, Homo sapiens
  CDR3 for alpha chain variable domain of TCR clone 148509 (TRAV2, TRAJ9)
CAVGAGGFKTIF

SEQ ID NO: 297018 - protein, 20 aa, Homo sapiens
  CDR3 for beta chain variable domain of TCR clone 148509 (TRBV23-1, TRBJ1-1)
CISAPAVPPPGLDMNTEAFF

SEQ ID NO: 297019 - protein, 17 aa, Homo sapiens
  CDR3 for alpha chain variable domain of TCR clone 148510 (TRAV3, TRAJ42)
CAVRDRDYGVSQGNLIF

SEQ ID NO: 297020 - protein, 13 aa, Homo sapiens
  CDR3 for beta chain variable domain of TCR clone 148510 (TRBV20-1, TRBJ2-5)
CSARRGTGATQYF

SEQ ID NO: 297021 - protein, 13 aa, Homo sapiens
  CDR3 for alpha chain variable domain of TCR clone 148511 (TRAV12-3, TRAJ7)
CAMSASGNNRLAF

SEQ ID NO: 297022 - protein, 14 aa, Homo sapiens
  CDR3 for beta chain variable domain of TCR clone 148511 (TRBV11-2, TRBJ2-5)
CASSRTGGIETQYF

SEQ ID NO: 297023 - protein, 14 aa, Homo sapiens
  CDR3 for alpha chain variable domain of TCR clone 148512 (TRAV1-2, TRAJ8)
CAVREDTGFQELLF

SEQ ID NO: 297024 - protein, 12 aa, Homo sapiens
  CDR3 for beta chain variable domain of TCR clone 148512 (TRBV29-1, TRBJ2-7)
CSARDRPYEQYF

SEQ ID NO: 297025 - protein, 15 aa, Homo sapiens
  CDR3 for alpha chain variable domain of TCR clone 148513 (TRAV8-6, TRAJ6)
CAVSVTSGGSYIPTV

SEQ ID NO: 297026 - protein, 14 aa, Homo sapiens
  CDR3 for beta chain variable domain of TCR clone 148513 (TRBV6-1, TRBJ1-3)
CASSEDRGIDTIYF

SEQ ID NO: 297027 - protein, 16 aa, Homo sapiens
  CDR3 for alpha chain variable domain of TCR clone 148514 (TRAV26-2, TRAJ28)
GILRPYSGAGSYQLTF

SEQ ID NO: 297028 - protein, 17 aa, Homo sapiens
  CDR3 for beta chain variable domain of TCR clone 148514 (TRBV27, TRBJ2-5)
CASRLRPGQGVQETQYF

SEQ ID NO: 297029 - protein, 12 aa, Homo sapiens
  CDR3 for alpha chain variable domain of TCR clone 148515 (TRAV27, TRAJ13)
CAGAGGYQKVNF

SEQ ID NO: 297030 - protein, 15 aa, Homo sapiens
  CDR3 for beta chain variable domain of TCR clone 148515 (TRBV20-1, TRBJ2-6)
CSARDRGPGANVLTF

SEQ ID NO: 297031 - protein, 14 aa, Homo sapiens
  CDR3 for alpha chain variable domain of TCR clone 148516 (TRAV26-1, TRAJ38)
CIADNAGNNRKLVW

SEQ ID NO: 297032 - protein, 15 aa, Homo sapiens
  CDR3 for beta chain variable domain of TCR clone 148516 (TRBV7-2, TRBJ2-1)
CASSLVAGRYNEQFF

SEQ ID NO: 297033 - protein, 14 aa, Homo sapiens
  CDR3 for alpha chain variable domain of TCR clone 148517 (TRAV13-1, TRAJ9)
CAASALTGGFKTIF

SEQ ID NO: 297034 - protein, 14 aa, Homo sapiens
  CDR3 for beta chain variable domain of TCR clone 148517 (TRBV28, TRBJ2-7)
CASSPYGMAYEQYF

SEQ ID NO: 297035 - protein, 15 aa, Homo sapiens
  CDR3 for alpha chain variable domain of TCR clone 148518 (TRAV17, TRAJ4)
CATGTWSGGYNKLIF

SEQ ID NO: 297036 - protein, 15 aa, Homo sapiens
  CDR3 for beta chain variable domain of TCR clone 148518 (TRBV9, TRBJ1-6)
CASSVAGTGDSPLLF

SEQ ID NO: 297037 - protein, 15 aa, Homo sapiens
  CDR3 for alpha chain variable domain of TCR clone 148519 (TRAV1-2, TRAJ15)
CAVDVMGSAGTALIF

SEQ ID NO: 297038 - protein, 14 aa, Homo sapiens
  CDR3 for beta chain variable domain of TCR clone 148519 (TRBV7-9, TRBJ1-4)
CASSTDREKLFLAV

SEQ ID NO: 297039 - protein, 14 aa, Homo sapiens
  CDR3 for alpha chain variable domain of TCR clone 148520 (TRAV3, TRAJ17)
CAVRDAAAGNNLTF

SEQ ID NO: 297040 - protein, 16 aa, Homo sapiens
  CDR3 for beta chain variable domain of TCR clone 148520 (TRBV20-1, TRBJ1-2)
CSASMGQGVANYGYTF

SEQ ID NO: 297041 - protein, 12 aa, Homo sapiens
  CDR3 for alpha chain variable domain of TCR clone 148521 (TRAV20, TRAJ20)
CAVRFNDYKLSF

SEQ ID NO: 297042 - protein, 14 aa, Homo sapiens
  CDR3 for beta chain variable domain of TCR clone 148521 (TRBV4-2, TRBJ2-1)
CASGLDRAYNEQFF

SEQ ID NO: 297043 - protein, 16 aa, Homo sapiens
  CDR3 for alpha chain variable domain of TCR clone 148522 (TRAV26-1, TRAJ53)
CIVRVAMGGSNYKLTF

SEQ ID NO: 297044 - protein, 12 aa, Homo sapiens
  CDR3 for beta chain variable domain of TCR clone 148522 (TRBV3-1, TRBJ2-5)
CASSQRGETQYF

SEQ ID NO: 297045 - protein, 16 aa, Homo sapiens
  CDR3 for alpha chain variable domain of TCR clone 148523 (TRAV12-1, TRAJ48)
CVVNMRDNFGNEKLTF

SEQ ID NO: 297046 - protein, 16 aa, Homo sapiens
  CDR3 for beta chain variable domain of TCR clone 148523 (TRBV7-6, TRBJ2-1)
CASSSVVAGTYKEQFF

SEQ ID NO: 297047 - protein, 15 aa, Homo sapiens
  CDR3 for alpha chain variable domain of TCR clone 148524 (TRAV3, TRAJ22)
CAVRDRGGSAQQLTF

SEQ ID NO: 297048 - protein, 16 aa, Homo sapiens
  CDR3 for beta chain variable domain of TCR clone 148524 (TRBV5-4, TRBJ2-3)
CASQQPGAGGADTQYF

SEQ ID NO: 297049 - protein, 12 aa, Homo sapiens
  CDR3 for alpha chain variable domain of TCR clone 148525 (TRAV13-1, TRAJ21)
CAAKEGFNKLYF

SEQ ID NO: 297050 - protein, 11 aa, Homo sapiens
  CDR3 for beta chain variable domain of TCR clone 148525 (TRBV12-4, TRBJ2-3)
CASTATDTQYF

SEQ ID NO: 297051 - protein, 14 aa, Homo sapiens
  CDR3 for alpha chain variable domain of TCR clone 148526 (TRAV2, TRAJ3)
CAVDRYSSSSKIIF

SEQ ID NO: 297052 - protein, 16 aa, Homo sapiens
  CDR3 for beta chain variable domain of TCR clone 148526 (TRBV20-1, TRBJ1-5)
CSAELPGQQTNQPQHF

SEQ ID NO: 297053 - protein, 13 aa, Homo sapiens
  CDR3 for alpha chain variable domain of TCR clone 148527 (TRAV2, TRAJ29)
CAVYSSGNTPLVF

SEQ ID NO: 297054 - protein, 15 aa, Homo sapiens
  CDR3 for beta chain variable domain of TCR clone 148527 (TRBV6-3, TRBJ2-7)
CASSSPGTVFYEQYF

SEQ ID NO: 297055 - protein, 18 aa, Homo sapiens
  CDR3 for alpha chain variable domain of TCR clone 148528 (TRAV21, TRAJ52)
CAVRPSPAGGTSYGKRPF

SEQ ID NO: 297056 - protein, 13 aa, Homo sapiens
  CDR3 for beta chain variable domain of TCR clone 148528 (TRBV2, TRBJ1-5)
CATAGPGNQPQHF

SEQ ID NO: 297057 - protein, 13 aa, Homo sapiens
  CDR3 for alpha chain variable domain of TCR clone 148529 (TRAV12-1, TRAJ22)
CVASGGSARQLTF

SEQ ID NO: 297058 - protein, 18 aa, Homo sapiens
  CDR3 for beta chain variable domain of TCR clone 148529 (TRBV4-1, TRBJ1-5)
CASSQDPRGQGLNQPQHF

SEQ ID NO: 297059 - protein, 13 aa, Homo sapiens
  CDR3 for alpha chain variable domain of TCR clone 148530 (TRAV17, TRAJ26)
CATVDNYGQNFVF

SEQ ID NO: 297060 - protein, 17 aa, Homo sapiens
  CDR3 for beta chain variable domain of TCR clone 148530 (TRBV7-7, TRBJ2-2)
CASSSVPAGGEIGELFF

SEQ ID NO: 297061 - protein, 10 aa, Homo sapiens
  CDR3 for alpha chain variable domain of TCR clone 148531 (TRAV21, TRAJ4)
LAGGYNKLIF

SEQ ID NO: 297062 - protein, 19 aa, Homo sapiens
  CDR3 for beta chain variable domain of TCR clone 148531 (TRBV18, TRBJ1-3)
CASSPLSRTGMSSGNTIYF

SEQ ID NO: 297063 - protein, 14 aa, Homo sapiens
  CDR3 for alpha chain variable domain of TCR clone 148532 (TRAV12-2, TRAJ13)
CAVKRTGGYQKVTF

SEQ ID NO: 297064 - protein, 14 aa, Homo sapiens
  CDR3 for beta chain variable domain of TCR clone 148532 (TRBV7-6, TRBJ2-3)
CASSLGTVTDTQYF

SEQ ID NO: 297065 - protein, 16 aa, Homo sapiens
  CDR3 for alpha chain variable domain of TCR clone 148533 (TRAV30, TRAJ44)
CGTEDKRTGTASKPTF

SEQ ID NO: 297066 - protein, 16 aa, Homo sapiens
  CDR3 for beta chain variable domain of TCR clone 148533 (TRBV10-2, TRBJ2-7)
CASSESPGSSGFEQYF

SEQ ID NO: 297067 - protein, 14 aa, Homo sapiens
  CDR3 for alpha chain variable domain of TCR clone 148534 (TRAV12-1, TRAJ43)
CVVNGRSNNNDMRF

SEQ ID NO: 297068 - protein, 13 aa, Homo sapiens
  CDR3 for beta chain variable domain of TCR clone 148534 (TRBV10-3, TRBJ2-7)
CASKLAENYEQYF

SEQ ID NO: 297069 - protein, 13 aa, Homo sapiens
  CDR3 for alpha chain variable domain of TCR clone 148535 (TRAV27, TRAJ29)
CAGAHSGNTPLVF

SEQ ID NO: 297070 - protein, 18 aa, Homo sapiens
  CDR3 for beta chain variable domain of TCR clone 148535 (TRBV2, TRBJ2-2)
CQQSTGTSGGGNTGELFF

SEQ ID NO: 297071 - protein, 12 aa, Homo sapiens
  CDR3 for alpha chain variable domain of TCR clone 148536 (TRAV30, TRAJ43)
CGTEERGNDMRF

SEQ ID NO: 297072 - protein, 16 aa, Homo sapiens
  CDR3 for beta chain variable domain of TCR clone 148536 (TRBV10-2, TRBJ2-7)
CASSESPGSSGFEQYF

SEQ ID NO: 297073 - protein, 14 aa, Homo sapiens
  CDR3 for alpha chain variable domain of TCR clone 148537 (TRAV38-1, TRAJ29)
CAFITPSGNTPLVF

SEQ ID NO: 297074 - protein, 14 aa, Homo sapiens
  CDR3 for beta chain variable domain of TCR clone 148537 (TRBV18, TRBJ2-7)
CASSPRGGAYEQYI

SEQ ID NO: 297075 - protein, 13 aa, Homo sapiens
  CDR3 for alpha chain variable domain of TCR clone 148538 (TRAV17, TRAJ9)
CATDYTGGFKTIF

SEQ ID NO: 297076 - protein, 16 aa, Homo sapiens
  CDR3 for beta chain variable domain of TCR clone 148538 (TRBV7-7, TRBJ2-1)
CASSLAGGTSYNGQFF

SEQ ID NO: 297077 - protein, 13 aa, Homo sapiens
  CDR3 for alpha chain variable domain of TCR clone 148539 (TRAV1-2, TRAJ9)
CAALNTGGFKTIF

SEQ ID NO: 297078 - protein, 16 aa, Homo sapiens
  CDR3 for beta chain variable domain of TCR clone 148539 (TRBV5-1, TRBJ1-1)
CASSSGGNALNTEAFF

SEQ ID NO: 297079 - protein, 18 aa, Homo sapiens
  CDR3 for alpha chain variable domain of TCR clone 148540 (TRAV26-2, TRAJ54)
CILRDVEVGIQGAQKLVF

SEQ ID NO: 297080 - protein, 13 aa, Homo sapiens
  CDR3 for beta chain variable domain of TCR clone 148540 (TRBV7-9, TRBJ2-3)
CASSPGSTDTQYF

SEQ ID NO: 297081 - protein, 12 aa, Homo sapiens
  CDR3 for alpha chain variable domain of TCR clone 148541 (TRAV3, TRAJ26)
CAVRDYGQNFVF

SEQ ID NO: 297082 - protein, 13 aa, Homo sapiens
  CDR3 for beta chain variable domain of TCR clone 148541 (TRBV7-2, TRBJ2-2)
CASSLAVTGELFL

SEQ ID NO: 297083 - protein, 14 aa, Homo sapiens
  CDR3 for alpha chain variable domain of TCR clone 148542 (TRAV4, TRAJ17)
CLGGDPLVGNKLTF

SEQ ID NO: 297084 - protein, 20 aa, Homo sapiens
  CDR3 for beta chain variable domain of TCR clone 148542 (TRBV20-1, TRBJ2-1)
CSARPYSVAGGPSYYNEQFF

SEQ ID NO: 297085 - protein, 16 aa, Homo sapiens
  CDR3 for alpha chain variable domain of TCR clone 148543 (TRAV4, TRAJ6)
CLVGVYASGGSYIPTF

SEQ ID NO: 297086 - protein, 13 aa, Homo sapiens
  CDR3 for beta chain variable domain of TCR clone 148543 (TRBV7-9, TRBJ1-2)
CASSLKQNYGYTF

SEQ ID NO: 297087 - protein, 12 aa, Homo sapiens
  CDR3 for alpha chain variable domain of TCR clone 148544 (TRAV1-1, TRAJ8)
CAGGTGFQKLVF

SEQ ID NO: 297088 - protein, 15 aa, Homo sapiens
  CDR3 for beta chain variable domain of TCR clone 148544 (TRBV7-9, TRBJ1-4)
CASSRTGGFIEKLFF

SEQ ID NO: 297089 - protein, 14 aa, Homo sapiens
  CDR3 for alpha chain variable domain of TCR clone 148545 (TRAV29/DV5, TRAJ36)
CAARRKTGENNLFF

SEQ ID NO: 297090 - protein, 16 aa, Homo sapiens
  CDR3 for beta chain variable domain of TCR clone 148545 (TRBV7-3, TRBJ2-2)
CASSLKRGTLSGELFF

SEQ ID NO: 297091 - protein, 17 aa, Homo sapiens
  CDR3 for alpha chain variable domain of TCR clone 148546 (TRAV13-1, TRAJ53)
CAASWKSSGGSNYKLTF

SEQ ID NO: 297092 - protein, 19 aa, Homo sapiens
  CDR3 for beta chain variable domain of TCR clone 148546 (TRBV7-9, TRBJ2-1)
WASSHNRGALLRSYNEQFF

SEQ ID NO: 297093 - protein, 22 aa, Homo sapiens
  CDR3 for alpha chain variable domain of TCR clone 148547 (TRAV26-1, TRAJ52)
CCVLLHRQSRRGGGTSYGKLTF

SEQ ID NO: 297094 - protein, 13 aa, Homo sapiens
  CDR3 for beta chain variable domain of TCR clone 148547 (TRBV7-3, TRBJ1-2)
CASSLKRGYGYTF

SEQ ID NO: 297095 - protein, 14 aa, Homo sapiens
  CDR3 for alpha chain variable domain of TCR clone 148548 (TRAV13-1, TRAJ23)
CAASRLGRGGTLIF

SEQ ID NO: 297096 - protein, 15 aa, Homo sapiens
  CDR3 for beta chain variable domain of TCR clone 148548 (TRBV7-2, TRBJ2-1)
CASSLVAGRYNEQFF

SEQ ID NO: 297097 - protein, 14 aa, Homo sapiens
  CDR3 for alpha chain variable domain of TCR clone 148549 (TRAV34, TRAJ44)
CGADRTGTASKLTF

SEQ ID NO: 297098 - protein, 12 aa, Homo sapiens
  CDR3 for beta chain variable domain of TCR clone 148549 (TRBV11-2, TRBJ2-2)
CASSLGGGELFF

SEQ ID NO: 297099 - protein, 17 aa, Homo sapiens
  CDR3 for alpha chain variable domain of TCR clone 148550 (TRAV3, TRAJ42)
CAVRDWDYGGSQGNLIF

SEQ ID NO: 297100 - protein, 15 aa, Homo sapiens
  CDR3 for beta chain variable domain of TCR clone 148550 (TRBV2, TRBJ2-7)
CASSEGLARSYEQYF

SEQ ID NO: 297101 - protein, 15 aa, Homo sapiens
  CDR3 for alpha chain variable domain of TCR clone 148551 (TRAV17, TRAJ57)
CATGPSQGGSEKLVV

SEQ ID NO: 297102 - protein, 13 aa, Homo sapiens
  CDR3 for beta chain variable domain of TCR clone 148551 (TRBV6-5, TRBJ2-5)
CASSPQGGETQYF

SEQ ID NO: 297103 - protein, 15 aa, Homo sapiens
  CDR3 for alpha chain variable domain of TCR clone 148552 (TRAV2, TRAJ28)
CAVPYSGAGSYPLTF

SEQ ID NO: 297104 - protein, 17 aa, Homo sapiens
  CDR3 for beta chain variable domain of TCR clone 148552 (TRBV20-1, TRBJ2-4)
CSARDWASGGRENIQYF

SEQ ID NO: 297105 - protein, 12 aa, Homo sapiens
  CDR3 for alpha chain variable domain of TCR clone 148553 (TRAV2, TRAJ40)
CCGYLGTYKYIF

SEQ ID NO: 297106 - protein, 15 aa, Homo sapiens
  CDR3 for beta chain variable domain of TCR clone 148553 (TRBV11-3, TRBJ2-3)
CASLKDGREGDTQYF

SEQ ID NO: 297107 - protein, 14 aa, Homo sapiens
  CDR3 for alpha chain variable domain of TCR clone 148554 (TRAV35, TRAJ50)
CAGHRKTSYDKAIF

SEQ ID NO: 297108 - protein, 13 aa, Homo sapiens
  CDR3 for beta chain variable domain of TCR clone 148554 (TRBV7-7, TRBJ2-3)
CASSVSRADTQYF

SEQ ID NO: 297109 - protein, 13 aa, Homo sapiens
  CDR3 for alpha chain variable domain of TCR clone 148555 (TRAV17, TRAJ9)
CATDCTGGFTTIF

SEQ ID NO: 297110 - protein, 16 aa, Homo sapiens
  CDR3 for beta chain variable domain of TCR clone 148555 (TRBV7-7, TRBJ2-1)
CASSLASGTSYNEQFF

SEQ ID NO: 297111 - protein, 15 aa, Homo sapiens
  CDR3 for alpha chain variable domain of TCR clone 148556 (TRAV27, TRAJ38)
CAARRNAGNNRKLIW

SEQ ID NO: 297112 - protein, 17 aa, Homo sapiens
  CDR3 for beta chain variable domain of TCR clone 148556 (TRBV27, TRBJ1-6)
CASSLDQLSSYNSPLHF

SEQ ID NO: 297113 - protein, 15 aa, Homo sapiens
  CDR3 for alpha chain variable domain of TCR clone 148557 (TRAV25, TRAJ10)
CAGLGLTGGGNKLTF

SEQ ID NO: 297114 - protein, 15 aa, Homo sapiens
  CDR3 for beta chain variable domain of TCR clone 148557 (TRBV27, TRBJ1-6)
CASSFDRGLGSPLHF

SEQ ID NO: 297115 - protein, 16 aa, Homo sapiens
  CDR3 for alpha chain variable domain of TCR clone 148558 (TRAV8-3, TRAJ13)
CAVGAYPSAGYQKVTF

SEQ ID NO: 297116 - protein, 15 aa, Homo sapiens
  CDR3 for beta chain variable domain of TCR clone 148558 (TRBV19, TRBJ1-5)
CANSIVWADNQPQHF

SEQ ID NO: 297117 - protein, 16 aa, Homo sapiens
  CDR3 for alpha chain variable domain of TCR clone 148559 (TRAV30, TRAJ24)
CGTEIVDADSWGKFQF

SEQ ID NO: 297118 - protein, 17 aa, Homo sapiens
  CDR3 for beta chain variable domain of TCR clone 148559 (TRBV11-2, TRBJ2-5)
CASSSTGEETVLRARHA

SEQ ID NO: 297119 - protein, 14 aa, Homo sapiens
  CDR3 for alpha chain variable domain of TCR clone 148560 (TRAV1-2, TRAJ16)
CAVNWFSDGQKLLF

SEQ ID NO: 297120 - protein, 13 aa, Homo sapiens
  CDR3 for beta chain variable domain of TCR clone 148560 (TRBV4-2, TRBJ1-1)
CASSQAGNTEAFF

SEQ ID NO: 297121 - protein, 15 aa, Homo sapiens
  CDR3 for alpha chain variable domain of TCR clone 148561 (TRAV8-3, TRAJ40)
CAAPSLGSGTYNYIF

SEQ ID NO: 297122 - protein, 18 aa, Homo sapiens
  CDR3 for beta chain variable domain of TCR clone 148561 (TRBV4-1, TRBJ1-4)
CASSPRTGGAWTNEKLFF

SEQ ID NO: 297123 - protein, 13 aa, Homo sapiens
  CDR3 for alpha chain variable domain of TCR clone 148562 (TRAV27, TRAJ6)
CAGGTRGSYIPTF

SEQ ID NO: 297124 - protein, 14 aa, Homo sapiens
  CDR3 for beta chain variable domain of TCR clone 148562 (TRBV2, TRBJ2-1)
CASRTGSSYNEQFF

SEQ ID NO: 297125 - protein, 14 aa, Homo sapiens
  CDR3 for alpha chain variable domain of TCR clone 148563 (TRAV13-1, TRAJ22)
CAASYSGSARQLTF

SEQ ID NO: 297126 - protein, 13 aa, Homo sapiens
  CDR3 for beta chain variable domain of TCR clone 148563 (TRBV6-4, TRBJ1-5)
CASSADLNQPQHF

SEQ ID NO: 297127 - protein, 16 aa, Homo sapiens
  CDR3 for alpha chain variable domain of TCR clone 148564 (TRAV3, TRAJ37)
CAVIGKGSGNTGKLIF

SEQ ID NO: 297128 - protein, 16 aa, Homo sapiens
  CDR3 for beta chain variable domain of TCR clone 148564 (TRBV12-5, TRBJ2-5)
CASGPRTSGSQETQYF

SEQ ID NO: 297129 - protein, 12 aa, Homo sapiens
  CDR3 for alpha chain variable domain of TCR clone 148565 (TRAV3, TRAJ20)
CAVRDHDYKLSF

SEQ ID NO: 297130 - protein, 15 aa, Homo sapiens
  CDR3 for beta chain variable domain of TCR clone 148565 (TRBV9, TRBJ1-6)
CAGSVAGTGDSPLHF

SEQ ID NO: 297131 - protein, 23 aa, Homo sapiens
  CDR3 for alpha chain variable domain of TCR clone 148566 (TRAV26-1, TRAJ38)
CIADNAGNNHIQNPDPAEYQLRD

SEQ ID NO: 297132 - protein, 12 aa, Homo sapiens
  CDR3 for beta chain variable domain of TCR clone 148566 (TRBV11-2, TRBJ2-2)
CASSLGGGELFF

SEQ ID NO: 297133 - protein, 13 aa, Homo sapiens
  CDR3 for alpha chain variable domain of TCR clone 148567 (TRAV29/DV5, TRAJ31)
CAASRNKNARLMF

SEQ ID NO: 297134 - protein, 15 aa, Homo sapiens
  CDR3 for beta chain variable domain of TCR clone 148567 (TRBV2, TRBJ2-1)
CASSELAGSYNEQFF

SEQ ID NO: 297135 - protein, 13 aa, Homo sapiens
  CDR3 for alpha chain variable domain of TCR clone 148568 (TRAV17, TRAJ9)
CATDYTGGFKTIF

SEQ ID NO: 297136 - protein, 16 aa, Homo sapiens
  CDR3 for beta chain variable domain of TCR clone 148568 (TRBV28, TRBJ1-5)
CASSFRGGYSNQPQHF

SEQ ID NO: 297137 - protein, 17 aa, Homo sapiens
  CDR3 for alpha chain variable domain of TCR clone 148569 (TRAV3, TRAJ6)
CAVRDGPRAGGSYIPKL

SEQ ID NO: 297138 - protein, 20 aa, Homo sapiens
  CDR3 for beta chain variable domain of TCR clone 148569 (TRBV28, TRBJ2-1)
CASTPIGRSPGLAGGNEQFF

SEQ ID NO: 297139 - protein, 14 aa, Homo sapiens
  CDR3 for alpha chain variable domain of TCR clone 148570 (TRAV12-3, TRAJ10)
SHLPPTGGGNKLTF

SEQ ID NO: 297140 - protein, 15 aa, Homo sapiens
  CDR3 for beta chain variable domain of TCR clone 148570 (TRBV4-1, TRBJ1-4)
CASSDTGGTNEKLFF

SEQ ID NO: 297141 - protein, 15 aa, Homo sapiens
  CDR3 for alpha chain variable domain of TCR clone 148571 (TRAV8-4, TRAJ29)
CAVSENFRGNTPLVF

SEQ ID NO: 297142 - protein, 12 aa, Homo sapiens
  CDR3 for beta chain variable domain of TCR clone 148571 (TRBV14, TRBJ2-7)
CASSSLKGEQYF

SEQ ID NO: 297143 - protein, 13 aa, Homo sapiens
  CDR3 for alpha chain variable domain of TCR clone 148572 (TRAV8-4, TRAJ26)
CAVSSSMVRILSL

SEQ ID NO: 297144 - protein, 15 aa, Homo sapiens
  CDR3 for beta chain variable domain of TCR clone 148572 (TRBV20-1, TRBJ2-7)
CSARDRVSGMDEQYF

SEQ ID NO: 297145 - protein, 16 aa, Homo sapiens
  CDR3 for alpha chain variable domain of TCR clone 148573 (TRAV12-3, TRAJ53)
CAMSPGSGGSNYKLTF

SEQ ID NO: 297146 - protein, 15 aa, Homo sapiens
  CDR3 for beta chain variable domain of TCR clone 148573 (TRBV29-1, TRBJ2-1)
CSVPTGLALYNEQFF

SEQ ID NO: 297147 - protein, 15 aa, Homo sapiens
  CDR3 for alpha chain variable domain of TCR clone 148574 (TRAV17, TRAJ57)
CATGPSQGGSEKLVF

SEQ ID NO: 297148 - protein, 14 aa, Homo sapiens
  CDR3 for beta chain variable domain of TCR clone 148574 (TRBV11-2, TRBJ1-2)
CASSLYRGNYGDTF

SEQ ID NO: 297149 - protein, 15 aa, Homo sapiens
  CDR3 for alpha chain variable domain of TCR clone 148575 (TRAV25, TRAJ41)
CAGPWNSNSGYALNF

SEQ ID NO: 297150 - protein, 13 aa, Homo sapiens
  CDR3 for beta chain variable domain of TCR clone 148575 (TRBV15, TRBJ1-1)
CATSRGIRARAFF

SEQ ID NO: 297151 - protein, 14 aa, Homo sapiens
  CDR3 for alpha chain variable domain of TCR clone 148576 (TRAV25, TRAJ35)
CARRMEGFGNVLHC

SEQ ID NO: 297152 - protein, 15 aa, Homo sapiens
  CDR3 for beta chain variable domain of TCR clone 148576 (TRBV9, TRBJ2-1)
CASSFAGSSYNEQFF

SEQ ID NO: 297153 - protein, 15 aa, Homo sapiens
  CDR3 for alpha chain variable domain of TCR clone 148577 (TRAV3, TRAJ42)
CAVRGGTGSQRNLIF

SEQ ID NO: 297154 - protein, 14 aa, Homo sapiens
  CDR3 for beta chain variable domain of TCR clone 148577 (TRBV19, TRBJ1-2)
CASSSLFARDVYTF

SEQ ID NO: 297155 - protein, 14 aa, Homo sapiens
  CDR3 for alpha chain variable domain of TCR clone 148578 (TRAV35, TRAJ13)
CAGSPSGGYKKVTF

SEQ ID NO: 297156 - protein, 20 aa, Homo sapiens
  CDR3 for beta chain variable domain of TCR clone 148578 (TRBV19, TRBJ2-7)
CASTQVAPESLRAVLRAGHQ

SEQ ID NO: 297157 - protein, 16 aa, Homo sapiens
  CDR3 for alpha chain variable domain of TCR clone 148579 (TRAV17, TRAJ9)
CATGEWGGTGGFKTIF

SEQ ID NO: 297158 - protein, 12 aa, Homo sapiens
  CDR3 for beta chain variable domain of TCR clone 148579 (TRBV11-3, TRBJ1-1)
CASSHRQGEASF

SEQ ID NO: 297159 - protein, 16 aa, Homo sapiens
  CDR3 for alpha chain variable domain of TCR clone 148580 (TRAV1-2, TRAJ10)
CAVRGVLTGGGNKLTF

SEQ ID NO: 297160 - protein, 15 aa, Homo sapiens
  CDR3 for beta chain variable domain of TCR clone 148580 (TRBV7-9, TRBJ1-6)
CASSSPGRGNSPLHV

SEQ ID NO: 297161 - protein, 14 aa, Homo sapiens
  CDR3 for alpha chain variable domain of TCR clone 148581 (TRAV4, TRAJ26)
CLVGPHNYGQNFVF

SEQ ID NO: 297162 - protein, 18 aa, Homo sapiens
  CDR3 for beta chain variable domain of TCR clone 148581 (TRBV25-1, TRBJ1-2)
CASSGLQNGQGLIFGYTF

SEQ ID NO: 297163 - protein, 12 aa, Homo sapiens
  CDR3 for alpha chain variable domain of TCR clone 148582 (TRAV25, TRAJ36)
CAEQTGAYNLFF

SEQ ID NO: 297164 - protein, 15 aa, Homo sapiens
  CDR3 for beta chain variable domain of TCR clone 148582 (TRBV6-1, TRBJ1-2)
CASTYEWEANYGYTF

SEQ ID NO: 297165 - protein, 13 aa, Homo sapiens
  CDR3 for alpha chain variable domain of TCR clone 148583 (TRAV35, TRAJ43)
CAGYPYNNNDMRF

SEQ ID NO: 297166 - protein, 15 aa, Homo sapiens
  CDR3 for beta chain variable domain of TCR clone 148583 (TRBV25-1, TRBJ1-4)
CASSNRIATNEKLFF

SEQ ID NO: 297167 - protein, 11 aa, Homo sapiens
  CDR3 for alpha chain variable domain of TCR clone 148584 (TRAV4, TRAJ31)
CLVGDNARLMF

SEQ ID NO: 297168 - protein, 16 aa, Homo sapiens
  CDR3 for beta chain variable domain of TCR clone 148584 (TRBV2, TRBJ2-3)
CASSTSVEGVTDTQYF

SEQ ID NO: 297169 - protein, 12 aa, Homo sapiens
  CDR3 for alpha chain variable domain of TCR clone 148585 (TRAV27, TRAJ21)
CAGVRQLQQILL

SEQ ID NO: 297170 - protein, 16 aa, Homo sapiens
  CDR3 for beta chain variable domain of TCR clone 148585 (TRBV7-9, TRBJ1-4)
CASSLEDSQKNCFLAV

SEQ ID NO: 297171 - protein, 14 aa, Homo sapiens
  CDR3 for alpha chain variable domain of TCR clone 148586 (TRAV13-1, TRAJ10)
CAASSPGGGNKLTF

SEQ ID NO: 297172 - protein, 15 aa, Homo sapiens
  CDR3 for beta chain variable domain of TCR clone 148586 (TRBV7-8, TRBJ2-1)
CASSLAGGLYNEQFF

SEQ ID NO: 297173 - protein, 14 aa, Homo sapiens
  CDR3 for alpha chain variable domain of TCR clone 148587 (TRAV14/DV4, TRAJ42)
CPRGSLRSQGNLIF

SEQ ID NO: 297174 - protein, 15 aa, Homo sapiens
  CDR3 for beta chain variable domain of TCR clone 148587 (TRBV7-9, TRBJ1-6)
CASSSPGRGNSPLHF

SEQ ID NO: 297175 - protein, 15 aa, Homo sapiens
  CDR3 for alpha chain variable domain of TCR clone 148588 (TRAV8-3, TRAJ40)
CAAPSLGSGTYKYIF

SEQ ID NO: 297176 - protein, 16 aa, Homo sapiens
  CDR3 for beta chain variable domain of TCR clone 148588 (TRBV7-3, TRBJ2-3)
CASSLSGYRAEDTQYF

SEQ ID NO: 297177 - protein, 13 aa, Homo sapiens
  CDR3 for alpha chain variable domain of TCR clone 148589 (TRAV27, TRAJ49)
CAPRPYTGNQFYL

SEQ ID NO: 297178 - protein, 16 aa, Homo sapiens
  CDR3 for beta chain variable domain of TCR clone 148589 (TRBV4-1, TRBJ1-2)
CASSHDAGQVLYGYTF

SEQ ID NO: 297179 - protein, 17 aa, Homo sapiens
  CDR3 for alpha chain variable domain of TCR clone 148590 (TRAV17, TRAJ7)
CATLGRLAFGKGNQVVV

SEQ ID NO: 297180 - protein, 13 aa, Homo sapiens
  CDR3 for beta chain variable domain of TCR clone 148590 (TRBV12-4, TRBJ2-7)
CASSLEGVREQYF

SEQ ID NO: 297181 - protein, 13 aa, Homo sapiens
  CDR3 for alpha chain variable domain of TCR clone 148591 (TRAV12-3, TRAJ13)
CAMTYGGYQKVTF

SEQ ID NO: 297182 - protein, 13 aa, Homo sapiens
  CDR3 for beta chain variable domain of TCR clone 148591 (TRBV20-1, TRBJ2-2)
CSALSGGAGELFF

SEQ ID NO: 297183 - protein, 14 aa, Homo sapiens
  CDR3 for alpha chain variable domain of TCR clone 148592 (TRAV2, TRAJ9)
CAVEDRSGGFKTIF

SEQ ID NO: 297184 - protein, 11 aa, Homo sapiens
  CDR3 for beta chain variable domain of TCR clone 148592 (TRBV7-9, TRBJ2-5)
CASSLGEAQYF

SEQ ID NO: 297185 - protein, 17 aa, Homo sapiens
  CDR3 for alpha chain variable domain of TCR clone 148593 (TRAV4, TRAJ13)
CLVGVQGSSGGYQKVTF

SEQ ID NO: 297186 - protein, 20 aa, Homo sapiens
  CDR3 for beta chain variable domain of TCR clone 148593 (TRBV7-8, TRBJ2-2)
CASSHLFPGPTIHITGELFF

SEQ ID NO: 297187 - protein, 16 aa, Homo sapiens
  CDR3 for alpha chain variable domain of TCR clone 148594 (TRAV8-3, TRAJ10)
CAVGPILTGGGNKLTF

SEQ ID NO: 297188 - protein, 19 aa, Homo sapiens
  CDR3 for beta chain variable domain of TCR clone 148594 (TRBV7-2, TRBJ2-3)
CASSFLSRNWGGGTDTQYF

SEQ ID NO: 297189 - protein, 16 aa, Homo sapiens
  CDR3 for alpha chain variable domain of TCR clone 148595 (TRAV38-2/DV8, TRAJ42)
CACLMNYGGSQGNLIF

SEQ ID NO: 297190 - protein, 14 aa, Homo sapiens
  CDR3 for beta chain variable domain of TCR clone 148595 (TRBV6-5, TRBJ1-2)
CASTRGGGSDGYTF

SEQ ID NO: 297191 - protein, 14 aa, Homo sapiens
  CDR3 for alpha chain variable domain of TCR clone 148596 (TRAV2, TRAJ9)
CAVEDRGGGFKTIF

SEQ ID NO: 297192 - protein, 18 aa, Homo sapiens
  CDR3 for beta chain variable domain of TCR clone 148596 (TRBV11-2, TRBJ2-3)
CASSLGGASRGAPNTQYF

SEQ ID NO: 297193 - protein, 13 aa, Homo sapiens
  CDR3 for alpha chain variable domain of TCR clone 148597 (TRAV36/DV7, TRAJ49)
CAVEANTGNQFYF

SEQ ID NO: 297194 - protein, 14 aa, Homo sapiens
  CDR3 for beta chain variable domain of TCR clone 148597 (TRBV20-1, TRBJ2-5)
CSASSGRAAETQDF

SEQ ID NO: 297195 - protein, 13 aa, Homo sapiens
  CDR3 for alpha chain variable domain of TCR clone 148598 (TRAV20, TRAJ21)
CAVEGYNFNKFYF

SEQ ID NO: 297196 - protein, 12 aa, Homo sapiens
  CDR3 for beta chain variable domain of TCR clone 148598 (TRBV7-2, TRBJ2-1)
CASSLRQNDQFF

SEQ ID NO: 297197 - protein, 16 aa, Homo sapiens
  CDR3 for alpha chain variable domain of TCR clone 148599 (TRAV30, TRAJ24)
CGTEIVDADCWGKFQF

SEQ ID NO: 297198 - protein, 14 aa, Homo sapiens
  CDR3 for beta chain variable domain of TCR clone 148599 (TRBV18, TRBJ2-3)
CASSPRTSTDTQYF

SEQ ID NO: 297199 - protein, 13 aa, Homo sapiens
  CDR3 for alpha chain variable domain of TCR clone 148600 (TRAV12-3, TRAJ7)
CTMTPYGNNRLAF

SEQ ID NO: 297200 - protein, 16 aa, Homo sapiens
  CDR3 for beta chain variable domain of TCR clone 148600 (TRBV7-8, TRBJ2-3)
CASSPYRGPNTDTQYF

SEQ ID NO: 297201 - protein, 14 aa, Homo sapiens
  CDR3 for alpha chain variable domain of TCR clone 148601 (TRAV13-2, TRAJ43)
CAEIPTYNNNDMRF

SEQ ID NO: 297202 - protein, 13 aa, Homo sapiens
  CDR3 for beta chain variable domain of TCR clone 148601 (TRBV19, TRBJ1-2)
CASSVPGQEGYTY

SEQ ID NO: 297203 - protein, 14 aa, Homo sapiens
  CDR3 for alpha chain variable domain of TCR clone 148602 (TRAV13-1, TRAJ40)
CAASMTSGTYKYIF

SEQ ID NO: 297204 - protein, 13 aa, Homo sapiens
  CDR3 for beta chain variable domain of TCR clone 148602 (TRBV7-7, TRBJ1-1)
CASSLGANTEAFF

SEQ ID NO: 297205 - protein, 14 aa, Homo sapiens
  CDR3 for alpha chain variable domain of TCR clone 148603 (TRAV26-1, TRAJ44)
CIVKSTGTASKLTF

SEQ ID NO: 297206 - protein, 15 aa, Homo sapiens
  CDR3 for beta chain variable domain of TCR clone 148603 (TRBV19, TRBJ2-4)
CASSDGGGAKNMQYF

SEQ ID NO: 297207 - protein, 13 aa, Homo sapiens
  CDR3 for alpha chain variable domain of TCR clone 148604 (TRAV3, TRAJ30)
CAVRGRGDDKVIF

SEQ ID NO: 297208 - protein, 14 aa, Homo sapiens
  CDR3 for beta chain variable domain of TCR clone 148604 (TRBV5-1, TRBJ1-1)
CASSRTTGDTEDFF

SEQ ID NO: 297209 - protein, 16 aa, Homo sapiens
  CDR3 for alpha chain variable domain of TCR clone 148605 (TRAV3, TRAJ37)
CAVRPHGSGNTGKLIF

SEQ ID NO: 297210 - protein, 14 aa, Homo sapiens
  CDR3 for beta chain variable domain of TCR clone 148605 (TRBV2, TRBJ2-1)
CASSDRAYYKEQFI

SEQ ID NO: 297211 - protein, 14 aa, Homo sapiens
  CDR3 for alpha chain variable domain of TCR clone 148606 (TRAV17, TRAJ54)
CATDANQGAQKLVF

SEQ ID NO: 297212 - protein, 14 aa, Homo sapiens
  CDR3 for beta chain variable domain of TCR clone 148606 (TRBV7-2, TRBJ2-1)
CASSLSGVYNEQFF

SEQ ID NO: 297213 - protein, 13 aa, Homo sapiens
  CDR3 for alpha chain variable domain of TCR clone 148607 (TRAV2, TRAJ47)
CAVDREYGNKLVF

SEQ ID NO: 297214 - protein, 17 aa, Homo sapiens
  CDR3 for beta chain variable domain of TCR clone 148607 (TRBV15, TRBJ1-5)
CATSRVRGIYSNQTQHF

SEQ ID NO: 297215 - protein, 14 aa, Homo sapiens
  CDR3 for alpha chain variable domain of TCR clone 148608 (TRAV12-3, TRAJ42)
CAMNYGGSQGNLIF

SEQ ID NO: 297216 - protein, 13 aa, Homo sapiens
  CDR3 for beta chain variable domain of TCR clone 148608 (TRBV12-5, TRBJ2-3)
CASGDRQSDTQYF

SEQ ID NO: 297217 - protein, 14 aa, Homo sapiens
  CDR3 for alpha chain variable domain of TCR clone 148609 (TRAV38-1, TRAJ11)
CAFMKHEGYSTLTF

SEQ ID NO: 297218 - protein, 15 aa, Homo sapiens
  CDR3 for beta chain variable domain of TCR clone 148609 (TRBV7-6, TRBJ2-3)
CASSSEGGLAHTQYF

SEQ ID NO: 297219 - protein, 12 aa, Homo sapiens
  CDR3 for alpha chain variable domain of TCR clone 148610 (TRAV27, TRAJ9)
CAGESGGFKTIF

SEQ ID NO: 297220 - protein, 15 aa, Homo sapiens
  CDR3 for beta chain variable domain of TCR clone 148610 (TRBV10-1, TRBJ2-3)
CASSATSGGFDTQYF

SEQ ID NO: 297221 - protein, 13 aa, Homo sapiens
  CDR3 for alpha chain variable domain of TCR clone 148611 (TRAV12-2, TRAJ12)
CAVNWDSSYKLIF

SEQ ID NO: 297222 - protein, 12 aa, Homo sapiens
  CDR3 for beta chain variable domain of TCR clone 148611 (TRBV19, TRBJ2-1)
CASSMQDTEQFF

SEQ ID NO: 297223 - protein, 14 aa, Homo sapiens
  CDR3 for alpha chain variable domain of TCR clone 148612 (TRAV26-2, TRAJ23)
CSRTLYNQGGKLNF

SEQ ID NO: 297224 - protein, 15 aa, Homo sapiens
  CDR3 for beta chain variable domain of TCR clone 148612 (TRBV20-1, TRBJ2-7)
CSARDRVSGMDEQYF

SEQ ID NO: 297225 - protein, 13 aa, Homo sapiens
  CDR3 for alpha chain variable domain of TCR clone 148613 (TRAV12-2, TRAJ20)
CAVYPSNDYKLSF

SEQ ID NO: 297226 - protein, 15 aa, Homo sapiens
  CDR3 for beta chain variable domain of TCR clone 148613 (TRBV3-1, TRBJ2-7)
CASSQVRQGAYEQYF

SEQ ID NO: 297227 - protein, 15 aa, Homo sapiens
  CDR3 for alpha chain variable domain of TCR clone 148614 (TRAV34, TRAJ38)
WGADFTPGNNRKLIW

SEQ ID NO: 297228 - protein, 16 aa, Homo sapiens
  CDR3 for beta chain variable domain of TCR clone 148614 (TRBV12-5, TRBJ2-5)
CASGPRTNGNQETQYF

SEQ ID NO: 297229 - protein, 14 aa, Homo sapiens
  CDR3 for alpha chain variable domain of TCR clone 148615 (TRAV13-1, TRAJ44)
CAASRAGTASKLTF

SEQ ID NO: 297230 - protein, 19 aa, Homo sapiens
  CDR3 for beta chain variable domain of TCR clone 148615 (TRBV28, TRBJ2-1)
CASREVTAARSKTYNEQFF

SEQ ID NO: 297231 - protein, 14 aa, Homo sapiens
  CDR3 for alpha chain variable domain of TCR clone 148616 (TRAV13-1, TRAJ48)
CAASTDFGNEKLTF

SEQ ID NO: 297232 - protein, 16 aa, Homo sapiens
  CDR3 for beta chain variable domain of TCR clone 148616 (TRBV6-1, TRBJ2-5)
CASSETLDRGAETQYF

SEQ ID NO: 297233 - protein, 12 aa, Homo sapiens
  CDR3 for alpha chain variable domain of TCR clone 148617 (TRAV25, TRAJ7)
CPGSYGNNRLAF

SEQ ID NO: 297234 - protein, 12 aa, Homo sapiens
  CDR3 for beta chain variable domain of TCR clone 148617 (TRBV5-1, TRBJ1-2)
CAGSQDTYGYTF

SEQ ID NO: 297235 - protein, 13 aa, Homo sapiens
  CDR3 for alpha chain variable domain of TCR clone 148618 (TRAV13-2, TRAJ48)
CAEMDFGNEKLTF

SEQ ID NO: 297236 - protein, 15 aa, Homo sapiens
  CDR3 for beta chain variable domain of TCR clone 148618 (TRBV7-9, TRBJ1-6)
CASSSPGRGNSTLNF

SEQ ID NO: 297237 - protein, 11 aa, Homo sapiens
  CDR3 for alpha chain variable domain of TCR clone 148619 (TRAV26-1, TRAJ37)
CIVRVGRKLIF

SEQ ID NO: 297238 - protein, 14 aa, Homo sapiens
  CDR3 for beta chain variable domain of TCR clone 148619 (TRBV11-2, TRBJ1-2)
CASSLGTANYGYTF

SEQ ID NO: 297239 - protein, 11 aa, Homo sapiens
  CDR3 for alpha chain variable domain of TCR clone 148620 (TRAV21, TRAJ33)
CAVLSNYQLIW

SEQ ID NO: 297240 - protein, 17 aa, Homo sapiens
  CDR3 for beta chain variable domain of TCR clone 148620 (TRBV11-2, TRBJ2-7)
CASSLMVGGPTSSTSGR

SEQ ID NO: 297241 - protein, 15 aa, Homo sapiens
  CDR3 for alpha chain variable domain of TCR clone 148621 (TRAV22, TRAJ24)
CAVPLSTDSCGKLQF

SEQ ID NO: 297242 - protein, 16 aa, Homo sapiens
  CDR3 for beta chain variable domain of TCR clone 148621 (TRBV28, TRBJ2-7)
CASSFPDRRLTYEQYF

SEQ ID NO: 297243 - protein, 16 aa, Homo sapiens
  CDR3 for alpha chain variable domain of TCR clone 148622 (TRAV4, TRAJ9)
CLLGDPNRPVGFKTIF

SEQ ID NO: 297244 - protein, 16 aa, Homo sapiens
  CDR3 for beta chain variable domain of TCR clone 148622 (TRBV28, TRBJ1-4)
CASSPPYRGRSEKLFF

SEQ ID NO: 297245 - protein, 15 aa, Homo sapiens
  CDR3 for alpha chain variable domain of TCR clone 148623 (TRAV3, TRAJ3)
CAVRDMSSSASKIIF

SEQ ID NO: 297246 - protein, 13 aa, Homo sapiens
  CDR3 for beta chain variable domain of TCR clone 148623 (TRBV10-3, TRBJ2-7)
CASKLAVNYEQYF

SEQ ID NO: 297247 - protein, 13 aa, Homo sapiens
  CDR3 for alpha chain variable domain of TCR clone 148624 (TRAV8-3, TRAJ28)
CAVGAVGSYQLTF

SEQ ID NO: 297248 - protein, 14 aa, Homo sapiens
  CDR3 for beta chain variable domain of TCR clone 148624 (TRBV28, TRBJ2-1)
CASSLNGRNNEHFF

SEQ ID NO: 297249 - protein, 13 aa, Homo sapiens
  CDR3 for alpha chain variable domain of TCR clone 148625 (TRAV12-2, TRAJ18)
GAVRGSTLGRLYF

SEQ ID NO: 297250 - protein, 20 aa, Homo sapiens
  CDR3 for beta chain variable domain of TCR clone 148625 (TRBV7-8, TRBJ2-2)
CASSHLFPGPTIHITGELFF

SEQ ID NO: 297251 - protein, 15 aa, Homo sapiens
  CDR3 for alpha chain variable domain of TCR clone 148626 (TRAV25, TRAJ10)
CAGPLLTGGGNKLTF

SEQ ID NO: 297252 - protein, 15 aa, Homo sapiens
  CDR3 for beta chain variable domain of TCR clone 148626 (TRBV7-9, TRBJ1-4)
CASSARTGGNEKLFF

SEQ ID NO: 297253 - protein, 17 aa, Homo sapiens
  CDR3 for alpha chain variable domain of TCR clone 148627 (TRAV2, TRAJ32)
CAFNPPESGWCYKQARL

SEQ ID NO: 297254 - protein, 12 aa, Homo sapiens
  CDR3 for beta chain variable domain of TCR clone 148627 (TRBV20-1, TRBJ2-7)
CSAITPTKEQYF

SEQ ID NO: 297255 - protein, 12 aa, Homo sapiens
  CDR3 for alpha chain variable domain of TCR clone 148628 (TRAV13-1, TRAJ48)
CAANFGNEKLTF

SEQ ID NO: 297256 - protein, 13 aa, Homo sapiens
  CDR3 for beta chain variable domain of TCR clone 148628 (TRBV7-9, TRBJ1-2)
CASSLKQNYGYTF

SEQ ID NO: 297257 - protein, 13 aa, Homo sapiens
  CDR3 for alpha chain variable domain of TCR clone 148629 (TRAV12-2, TRAJ10)
CAVPTGGGNKLTF

SEQ ID NO: 297258 - protein, 13 aa, Homo sapiens
  CDR3 for beta chain variable domain of TCR clone 148629 (TRBV7-9, TRBJ1-2)
CASRLKQNYGYTF

SEQ ID NO: 297259 - protein, 12 aa, Homo sapiens
  CDR3 for alpha chain variable domain of TCR clone 148630 (TRAV12-3, TRAJ20)
CAMVRGDYKLSF

SEQ ID NO: 297260 - protein, 14 aa, Homo sapiens
  CDR3 for beta chain variable domain of TCR clone 148630 (TRBV5-7, TRBJ1-1)
CASSLAGDWTEAFF

SEQ ID NO: 297261 - protein, 19 aa, Homo sapiens
  CDR3 for alpha chain variable domain of TCR clone 148631 (TRAV17, TRAJ42)
CFLLLCYGPGGGSQGNLIF

SEQ ID NO: 297262 - protein, 15 aa, Homo sapiens
  CDR3 for beta chain variable domain of TCR clone 148631 (TRBV12-4, TRBJ2-5)
CASSPPTGLQETQYF

SEQ ID NO: 297263 - protein, 17 aa, Homo sapiens
  CDR3 for alpha chain variable domain of TCR clone 148632 (TRAV3, TRAJ6)
CAVRDGPREGGSYIPPF

SEQ ID NO: 297264 - protein, 13 aa, Homo sapiens
  CDR3 for beta chain variable domain of TCR clone 148632 (TRBV19, TRBJ2-7)
CASSIDRTYEQYF

SEQ ID NO: 297265 - protein, 13 aa, Homo sapiens
  CDR3 for alpha chain variable domain of TCR clone 148633 (TRAV3, TRAJ27)
CAVRPLGAGKSPF

SEQ ID NO: 297266 - protein, 13 aa, Homo sapiens
  CDR3 for beta chain variable domain of TCR clone 148633 (TRBV7-9, TRBJ2-3)
CASSPGSPDTQYF

SEQ ID NO: 297267 - protein, 14 aa, Homo sapiens
  CDR3 for alpha chain variable domain of TCR clone 148634 (TRAV29/DV5, TRAJ36)
CAARRKTGANNLFF

SEQ ID NO: 297268 - protein, 15 aa, Homo sapiens
  CDR3 for beta chain variable domain of TCR clone 148634 (TRBV19, TRBJ1-2)
CASSVGHVLNYGYTF

SEQ ID NO: 297269 - protein, 12 aa, Homo sapiens
  CDR3 for alpha chain variable domain of TCR clone 148635 (TRAV12-2, TRAJ10)
WGVTGGGNKLTF

SEQ ID NO: 297270 - protein, 19 aa, Homo sapiens
  CDR3 for beta chain variable domain of TCR clone 148635 (TRBV19, TRBJ2-5)
CASSIGQVTDFFLGETQYF

SEQ ID NO: 297271 - protein, 14 aa, Homo sapiens
  CDR3 for alpha chain variable domain of TCR clone 148636 (TRAV8-3, TRAJ30)
CAVGDMNREDKIIF

SEQ ID NO: 297272 - protein, 17 aa, Homo sapiens
  CDR3 for beta chain variable domain of TCR clone 148636 (TRBV19, TRBJ2-2)
CASSRNPGGFGTGELFF

SEQ ID NO: 297273 - protein, 13 aa, Homo sapiens
  CDR3 for alpha chain variable domain of TCR clone 148637 (TRAV35, TRAJ42)
CAGFPGSQGNLIL

SEQ ID NO: 297274 - protein, 14 aa, Homo sapiens
  CDR3 for beta chain variable domain of TCR clone 148637 (TRBV4-1, TRBJ2-2)
CASSQAVNTGERFF

SEQ ID NO: 297275 - protein, 15 aa, Homo sapiens
  CDR3 for alpha chain variable domain of TCR clone 148638 (TRAV21, TRAJ37)
CAGRPTLSNTGKLIF

SEQ ID NO: 297276 - protein, 16 aa, Homo sapiens
  CDR3 for beta chain variable domain of TCR clone 148638 (TRBV24-1, TRBJ2-3)
CATSDRRQDLTDTQYF

SEQ ID NO: 297277 - protein, 17 aa, Homo sapiens
  CDR3 for alpha chain variable domain of TCR clone 148639 (TRAV12-2, TRAJ52)
CAVNPYAGGTSYGKLTF

SEQ ID NO: 297278 - protein, 16 aa, Homo sapiens
  CDR3 for beta chain variable domain of TCR clone 148639 (TRBV27, TRBJ2-2)
CASSFRGLVRTGELFF

SEQ ID NO: 297279 - protein, 14 aa, Homo sapiens
  CDR3 for alpha chain variable domain of TCR clone 148640 (TRAV13-1, TRAJ9)
CAASALTGGFKTIF

SEQ ID NO: 297280 - protein, 16 aa, Homo sapiens
  CDR3 for beta chain variable domain of TCR clone 148640 (TRBV12-4, TRBJ2-3)
CASSFGTGGISDTQYL

SEQ ID NO: 297281 - protein, 14 aa, Homo sapiens
  CDR3 for alpha chain variable domain of TCR clone 148641 (TRAV36/DV7, TRAJ44)
CCGANTGTASKLTF

SEQ ID NO: 297282 - protein, 16 aa, Homo sapiens
  CDR3 for beta chain variable domain of TCR clone 148641 (TRBV12-5, TRBJ2-5)
CASGPRTSGNQETQYF

SEQ ID NO: 297283 - protein, 14 aa, Homo sapiens
  CDR3 for alpha chain variable domain of TCR clone 148642 (TRAV12-3, TRAJ10)
SHLPLTGGGNKLTF

SEQ ID NO: 297284 - protein, 12 aa, Homo sapiens
  CDR3 for beta chain variable domain of TCR clone 148642 (TRBV24-1, TRBJ2-1)
CATSQGYNEQFF

SEQ ID NO: 297285 - protein, 17 aa, Homo sapiens
  CDR3 for alpha chain variable domain of TCR clone 148643 (TRAV23/DV6, TRAJ57)
CAASSTLSQGGSEKLVF

SEQ ID NO: 297286 - protein, 14 aa, Homo sapiens
  CDR3 for beta chain variable domain of TCR clone 148643 (TRBV7-8, TRBJ2-5)
CASSAKGGQETQYF

SEQ ID NO: 297287 - protein, 15 aa, Homo sapiens
  CDR3 for alpha chain variable domain of TCR clone 148644 (TRAV17, TRAJ52)
YATEAGGTSYGKLTF

SEQ ID NO: 297288 - protein, 14 aa, Homo sapiens
  CDR3 for beta chain variable domain of TCR clone 148644 (TRBV28, TRBJ1-5)
CASSLGVLVKPQHF

SEQ ID NO: 297289 - protein, 11 aa, Homo sapiens
  CDR3 for alpha chain variable domain of TCR clone 148645 (TRAV23/DV6, TRAJ56)
CAAPANSKLTF

SEQ ID NO: 297290 - protein, 15 aa, Homo sapiens
  CDR3 for beta chain variable domain of TCR clone 148645 (TRBV7-9, TRBJ1-1)
CASSPTGSRAAEAFF

SEQ ID NO: 297291 - protein, 12 aa, Homo sapiens
  CDR3 for alpha chain variable domain of TCR clone 148646 (TRAV25, TRAJ11)
CAGASGYSTLTF

SEQ ID NO: 297292 - protein, 13 aa, Homo sapiens
  CDR3 for beta chain variable domain of TCR clone 148646 (TRBV6-4, TRBJ1-5)
CASSADLNQPQLF

SEQ ID NO: 297293 - protein, 14 aa, Homo sapiens
  CDR3 for alpha chain variable domain of TCR clone 148647 (TRAV12-2, TRAJ10)
CAVTPTGGGNKLTF

SEQ ID NO: 297294 - protein, 13 aa, Homo sapiens
  CDR3 for beta chain variable domain of TCR clone 148647 (TRBV4-2, TRBJ1-1)
CASSQAGNTEAFF

SEQ ID NO: 297295 - protein, 14 aa, Homo sapiens
  CDR3 for alpha chain variable domain of TCR clone 148648 (TRAV29/DV5, TRAJ28)
CAARAGAGSYHLTF

SEQ ID NO: 297296 - protein, 13 aa, Homo sapiens
  CDR3 for beta chain variable domain of TCR clone 148648 (TRBV7-2, TRBJ1-5)
CASSFARNQPQHF

SEQ ID NO: 297297 - protein, 11 aa, Homo sapiens
  CDR3 for alpha chain variable domain of TCR clone 148649 (TRAV12-2, TRAJ21)
CAVEGFNKFYF

SEQ ID NO: 297298 - protein, 20 aa, Homo sapiens
  CDR3 for beta chain variable domain of TCR clone 148649 (TRBV19, TRBJ2-1)
CASSISRTVTSTRLNNEQFF

SEQ ID NO: 297299 - protein, 14 aa, Homo sapiens
  CDR3 for alpha chain variable domain of TCR clone 148650 (TRAV12-2, TRAJ13)
CAVKKTGGYQKVTF

SEQ ID NO: 297300 - protein, 16 aa, Homo sapiens
  CDR3 for beta chain variable domain of TCR clone 148650 (TRBV4-1, TRBJ2-3)
CDSSQSTSGAEDTQYF

SEQ ID NO: 297301 - protein, 14 aa, Homo sapiens
  CDR3 for alpha chain variable domain of TCR clone 148651 (TRAV13-1, TRAJ44)
CAAKATGTASKLTY

SEQ ID NO: 297302 - protein, 12 aa, Homo sapiens
  CDR3 for beta chain variable domain of TCR clone 148651 (TRBV7-8, TRBJ2-7)
CASSLGDREQYF

SEQ ID NO: 297303 - protein, 12 aa, Homo sapiens
  CDR3 for alpha chain variable domain of TCR clone 148652 (TRAV8-3, TRAJ20)
CAVGGGDYKLSF

SEQ ID NO: 297304 - protein, 15 aa, Homo sapiens
  CDR3 for beta chain variable domain of TCR clone 148652 (TRBV2, TRBJ2-7)
CASSEGLARSYEQYF

SEQ ID NO: 297305 - protein, 15 aa, Homo sapiens
  CDR3 for alpha chain variable domain of TCR clone 148653 (TRAV27, TRAJ38)
CAARRNAGNNRKLIC

SEQ ID NO: 297306 - protein, 13 aa, Homo sapiens
  CDR3 for beta chain variable domain of TCR clone 148653 (TRBV12-5, TRBJ2-3)
CASGDRQSDTQYL

SEQ ID NO: 297307 - protein, 14 aa, Homo sapiens
  CDR3 for alpha chain variable domain of TCR clone 148654 (TRAV3, TRAJ34)
FAVRAPGNTDKLIF

SEQ ID NO: 297308 - protein, 17 aa, Homo sapiens
  CDR3 for beta chain variable domain of TCR clone 148654 (TRBV20-1, TRBJ2-7)
CSAAPGLARGISYEQYF

SEQ ID NO: 297309 - protein, 15 aa, Homo sapiens
  CDR3 for alpha chain variable domain of TCR clone 148655 (TRAV12-2, TRAJ43)
CAFDMRFGAGTRLTV

SEQ ID NO: 297310 - protein, 13 aa, Homo sapiens
  CDR3 for beta chain variable domain of TCR clone 148655 (TRBV4-2, TRBJ1-1)
CASSQAGSTEAFF

SEQ ID NO: 297311 - protein, 15 aa, Homo sapiens
  CDR3 for alpha chain variable domain of TCR clone 148656 (TRAV23/DV6, TRAJ12)
CAAIDLGAMDSIYKL

SEQ ID NO: 297312 - protein, 12 aa, Homo sapiens
  CDR3 for beta chain variable domain of TCR clone 148656 (TRBV10-3, TRBJ2-2)
CAIRENTGELFF

SEQ ID NO: 297313 - protein, 17 aa, Homo sapiens
  CDR3 for alpha chain variable domain of TCR clone 148657 (TRAV12-1, TRAJ42)
CVVMRMNYGGSQGSLIF

SEQ ID NO: 297314 - protein, 13 aa, Homo sapiens
  CDR3 for beta chain variable domain of TCR clone 148657 (TRBV7-2, TRBJ1-1)
CASSLARPAEAFF

SEQ ID NO: 297315 - protein, 14 aa, Homo sapiens
  CDR3 for alpha chain variable domain of TCR clone 148658 (TRAV13-1, TRAJ44)
CAAKATGTATKLTF

SEQ ID NO: 297316 - protein, 17 aa, Homo sapiens
  CDR3 for beta chain variable domain of TCR clone 148658 (TRBV7-3, TRBJ2-3)
CASSLMKRMRGADTQYF

SEQ ID NO: 297317 - protein, 11 aa, Homo sapiens
  CDR3 for alpha chain variable domain of TCR clone 148659 (TRAV20, TRAJ40)
CAVGGTYKYIF

SEQ ID NO: 297318 - protein, 13 aa, Homo sapiens
  CDR3 for beta chain variable domain of TCR clone 148659 (TRBV7-3, TRBJ1-1)
CASSLTQGTEAFF

SEQ ID NO: 297319 - protein, 11 aa, Homo sapiens
  CDR3 for alpha chain variable domain of TCR clone 148660 (TRAV2, TRAJ23)
CAVETRGKVIF

SEQ ID NO: 297320 - protein, 14 aa, Homo sapiens
  CDR3 for beta chain variable domain of TCR clone 148660 (TRBV2, TRBJ2-3)
CASSEGQNTDTQYF

SEQ ID NO: 297321 - protein, 14 aa, Homo sapiens
  CDR3 for alpha chain variable domain of TCR clone 148661 (TRAV29/DV5, TRAJ44)
CAASALGTAIKLTF

SEQ ID NO: 297322 - protein, 13 aa, Homo sapiens
  CDR3 for beta chain variable domain of TCR clone 148661 (TRBV29-1, TRBJ2-7)
CSVKRGGNYEQYF

SEQ ID NO: 297323 - protein, 13 aa, Homo sapiens
  CDR3 for alpha chain variable domain of TCR clone 148662 (TRAV21, TRAJ57)
CAVTQGGSEKLVF

SEQ ID NO: 297324 - protein, 13 aa, Homo sapiens
  CDR3 for beta chain variable domain of TCR clone 148662 (TRBV7-3, TRBJ1-5)
CASSLDSNQPQHF

SEQ ID NO: 297325 - protein, 14 aa, Homo sapiens
  CDR3 for alpha chain variable domain of TCR clone 148663 (TRAV8-1, TRAJ5)
CAVSMDTGRRALTF

SEQ ID NO: 297326 - protein, 14 aa, Homo sapiens
  CDR3 for beta chain variable domain of TCR clone 148663 (TRBV11-2, TRBJ2-5)
CASRPLAGRETQYF

SEQ ID NO: 297327 - protein, 13 aa, Homo sapiens
  CDR3 for alpha chain variable domain of TCR clone 148664 (TRAV3, TRAJ29)
CAVRDIIDTPLVF

SEQ ID NO: 297328 - protein, 14 aa, Homo sapiens
  CDR3 for beta chain variable domain of TCR clone 148664 (TRBV27, TRBJ2-1)
CASSATGGYNAQFF

SEQ ID NO: 297329 - protein, 14 aa, Homo sapiens
  CDR3 for alpha chain variable domain of TCR clone 148665 (TRAV1-2, TRAJ16)
CAVNRFSDGQKLLF

SEQ ID NO: 297330 - protein, 16 aa, Homo sapiens
  CDR3 for beta chain variable domain of TCR clone 148665 (TRBV20-1, TRBJ2-3)
CSAIFPIGGLTDTQYF

SEQ ID NO: 297331 - protein, 13 aa, Homo sapiens
  CDR3 for alpha chain variable domain of TCR clone 148666 (TRAV35, TRAJ36)
CAGPRIGANNLFF

SEQ ID NO: 297332 - protein, 15 aa, Homo sapiens
  CDR3 for beta chain variable domain of TCR clone 148666 (TRBV28, TRBJ2-5)
CASSPPWSYQATHYF

SEQ ID NO: 297333 - protein, 12 aa, Homo sapiens
  CDR3 for alpha chain variable domain of TCR clone 148667 (TRAV2, TRAJ33)
FAFMDSNYQLIL

SEQ ID NO: 297334 - protein, 16 aa, Homo sapiens
  CDR3 for beta chain variable domain of TCR clone 148667 (TRBV2, TRBJ2-7)
CASSEPWTGPSYEQYF

SEQ ID NO: 297335 - protein, 15 aa, Homo sapiens
  CDR3 for alpha chain variable domain of TCR clone 148668 (TRAV12-3, TRAJ49)
CAMAVTPNTGNQFYF

SEQ ID NO: 297336 - protein, 14 aa, Homo sapiens
  CDR3 for beta chain variable domain of TCR clone 148668 (TRBV7-2, TRBJ1-1)
CASSFLTGTTEAFF

SEQ ID NO: 297337 - protein, 11 aa, Homo sapiens
  CDR3 for alpha chain variable domain of TCR clone 148669 (TRAV4, TRAJ23)
CLVAPGGKLIF

SEQ ID NO: 297338 - protein, 14 aa, Homo sapiens
  CDR3 for beta chain variable domain of TCR clone 148669 (TRBV4-2, TRBJ2-1)
CASGLDRAYNEQFF

SEQ ID NO: 297339 - protein, 17 aa, Homo sapiens
  CDR3 for alpha chain variable domain of TCR clone 148670 (TRAV3, TRAJ6)
CALRDGPKAGGSYIPTF

SEQ ID NO: 297340 - protein, 14 aa, Homo sapiens
  CDR3 for beta chain variable domain of TCR clone 148670 (TRBV7-2, TRBJ2-7)
CASSPKTSFYEQYF

SEQ ID NO: 297341 - protein, 19 aa, Homo sapiens
  CDR3 for alpha chain variable domain of TCR clone 148671 (TRAV35, TRAJ30)
CAPGGMTRSSLEKGRDFIF

SEQ ID NO: 297342 - protein, 13 aa, Homo sapiens
  CDR3 for beta chain variable domain of TCR clone 148671 (TRBV7-6, TRBJ2-1)
CQQLGGGADEQFF

SEQ ID NO: 297343 - protein, 12 aa, Homo sapiens
  CDR3 for alpha chain variable domain of TCR clone 148672 (TRAV13-1, TRAJ21)
CAAKEGFNKFYF

SEQ ID NO: 297344 - protein, 14 aa, Homo sapiens
  CDR3 for beta chain variable domain of TCR clone 148672 (TRBV27, TRBJ2-5)
CASSRTFLVDTQYF

SEQ ID NO: 297345 - protein, 13 aa, Homo sapiens
  CDR3 for alpha chain variable domain of TCR clone 148673 (TRAV30, TRAJ34)
CGTVGYNTDKLIF

SEQ ID NO: 297346 - protein, 16 aa, Homo sapiens
  CDR3 for beta chain variable domain of TCR clone 148673 (TRBV7-9, TRBJ1-2)
CASSLGFSSGEDGYTC

SEQ ID NO: 297347 - protein, 12 aa, Homo sapiens
  CDR3 for alpha chain variable domain of TCR clone 148674 (TRAV3, TRAJ26)
CAVRDYGQNFVF

SEQ ID NO: 297348 - protein, 13 aa, Homo sapiens
  CDR3 for beta chain variable domain of TCR clone 148674 (TRBV19, TRBJ1-1)
CASSIGPQAEAFF

SEQ ID NO: 297349 - protein, 14 aa, Homo sapiens
  CDR3 for alpha chain variable domain of TCR clone 148675 (TRAV12-1, TRAJ12)
CLVTRMDSSYKLIF

SEQ ID NO: 297350 - protein, 13 aa, Homo sapiens
  CDR3 for beta chain variable domain of TCR clone 148675 (TRBV20-1, TRBJ1-1)
CSARGGGNTETFF

SEQ ID NO: 297351 - protein, 16 aa, Homo sapiens
  CDR3 for alpha chain variable domain of TCR clone 148676 (TRAV30, TRAJ24)
CGTEIVDADSWGKFQF

SEQ ID NO: 297352 - protein, 13 aa, Homo sapiens
  CDR3 for beta chain variable domain of TCR clone 148676 (TRBV11-2, TRBJ2-5)
CASSSTGEETHYF

SEQ ID NO: 297353 - protein, 18 aa, Homo sapiens
  CDR3 for alpha chain variable domain of TCR clone 148677 (TRAV20, TRAJ4)
CAVQPYYMFSGGYNKLIF

SEQ ID NO: 297354 - protein, 13 aa, Homo sapiens
  CDR3 for beta chain variable domain of TCR clone 148677 (TRBV19, TRBJ2-7)
CASSTSGSYEQYF

SEQ ID NO: 297355 - protein, 12 aa, Homo sapiens
  CDR3 for alpha chain variable domain of TCR clone 148678 (TRAV27, TRAJ21)
CAGVRQLQEILL

SEQ ID NO: 297356 - protein, 14 aa, Homo sapiens
  CDR3 for beta chain variable domain of TCR clone 148678 (TRBV7-9, TRBJ1-4)
CASSLEGQSEKLFF

SEQ ID NO: 297357 - protein, 14 aa, Homo sapiens
  CDR3 for alpha chain variable domain of TCR clone 148679 (TRAV35, TRAJ29)
CAGQLTSGNTPLVF

SEQ ID NO: 297358 - protein, 12 aa, Homo sapiens
  CDR3 for beta chain variable domain of TCR clone 148679 (TRBV7-9, TRBJ1-4)
CASSTDREKLFF

SEQ ID NO: 297359 - protein, 13 aa, Homo sapiens
  CDR3 for alpha chain variable domain of TCR clone 148680 (TRAV12-2, TRAJ20)
CAVNRFDDYKLSF

SEQ ID NO: 297360 - protein, 12 aa, Homo sapiens
  CDR3 for beta chain variable domain of TCR clone 148680 (TRBV19, TRBJ2-1)
CASSQISNEQFI

SEQ ID NO: 297361 - protein, 14 aa, Homo sapiens
  CDR3 for alpha chain variable domain of TCR clone 148681 (TRAV12-1, TRAJ38)
CVELKAGNNRKLIW

SEQ ID NO: 297362 - protein, 12 aa, Homo sapiens
  CDR3 for beta chain variable domain of TCR clone 148681 (TRBV24-1, TRBJ1-1)
CATLYPDTEAFF

SEQ ID NO: 297363 - protein, 15 aa, Homo sapiens
  CDR3 for alpha chain variable domain of TCR clone 148682 (TRAV21, TRAJ10)
CAVPLLTGGGNKLTF

SEQ ID NO: 297364 - protein, 14 aa, Homo sapiens
  CDR3 for beta chain variable domain of TCR clone 148682 (TRBV12-4, TRBJ1-1)
RASSLGTGGTEAFF

SEQ ID NO: 297365 - protein, 14 aa, Homo sapiens
  CDR3 for alpha chain variable domain of TCR clone 148683 (TRAV17, TRAJ57)
CATDPQGGSEKLVF

SEQ ID NO: 297366 - protein, 12 aa, Homo sapiens
  CDR3 for beta chain variable domain of TCR clone 148683 (TRBV12-4, TRBJ2-1)
CASSPGRNEQFF

SEQ ID NO: 297367 - protein, 12 aa, Homo sapiens
  CDR3 for alpha chain variable domain of TCR clone 148684 (TRAV13-1, TRAJ53)
AASGGSNYKLTF

SEQ ID NO: 297368 - protein, 13 aa, Homo sapiens
  CDR3 for beta chain variable domain of TCR clone 148684 (TRBV19, TRBJ2-7)
CASSIDRTYEQYF

SEQ ID NO: 297369 - protein, 13 aa, Homo sapiens
  CDR3 for alpha chain variable domain of TCR clone 148685 (TRAV8-3, TRAJ36)
CAVGATGANNLFF

SEQ ID NO: 297370 - protein, 15 aa, Homo sapiens
  CDR3 for beta chain variable domain of TCR clone 148685 (TRBV7-2, TRBJ1-2)
CASSPRSGWNYGYTF

SEQ ID NO: 297371 - protein, 19 aa, Homo sapiens
  CDR3 for alpha chain variable domain of TCR clone 148686 (TRAV26-1, TRAJ42)
CVLLRRQTYYGGSPGNLIF

SEQ ID NO: 297372 - protein, 16 aa, Homo sapiens
  CDR3 for beta chain variable domain of TCR clone 148686 (TRBV7-3, TRBJ2-2)
CASSLKRGTLSGELFF

SEQ ID NO: 297373 - protein, 13 aa, Homo sapiens
  CDR3 for alpha chain variable domain of TCR clone 148687 (TRAV3, TRAJ15)
RAVRDQAGTALIF

SEQ ID NO: 297374 - protein, 15 aa, Homo sapiens
  CDR3 for beta chain variable domain of TCR clone 148687 (TRBV11-1, TRBJ2-7)
CASSLNYGASYEQYF

SEQ ID NO: 297375 - protein, 13 aa, Homo sapiens
  CDR3 for alpha chain variable domain of TCR clone 148688 (TRAV12-1, TRAJ22)
CVASGGSARQLIF

SEQ ID NO: 297376 - protein, 12 aa, Homo sapiens
  CDR3 for beta chain variable domain of TCR clone 148688 (TRBV29-1, TRBJ2-3)
CSVTGGADTQYF

SEQ ID NO: 297377 - protein, 12 aa, Homo sapiens
  CDR3 for alpha chain variable domain of TCR clone 148689 (TRAV25, TRAJ11)
CAGASGYSTLTF

SEQ ID NO: 297378 - protein, 14 aa, Homo sapiens
  CDR3 for beta chain variable domain of TCR clone 148689 (TRBV19, TRBJ1-5)
CASSKMTGPQPQHF

SEQ ID NO: 297379 - protein, 14 aa, Homo sapiens
  CDR3 for alpha chain variable domain of TCR clone 148690 (TRAV38-1, TRAJ40)
CALRPTSGTYKYIF

SEQ ID NO: 297380 - protein, 16 aa, Homo sapiens
  CDR3 for beta chain variable domain of TCR clone 148690 (TRBV7-7, TRBJ2-1)
CASSLASGTSYNEQFF

SEQ ID NO: 297381 - protein, 17 aa, Homo sapiens
  CDR3 for alpha chain variable domain of TCR clone 148691 (TRAV3, TRAJ42)
CAVRDRDYGGSQGNLIF

SEQ ID NO: 297382 - protein, 15 aa, Homo sapiens
  CDR3 for beta chain variable domain of TCR clone 148691 (TRBV6-6)
CESGWWCGGWCEVLL

SEQ ID NO: 297383 - protein, 11 aa, Homo sapiens
  CDR3 for alpha chain variable domain of TCR clone 148692 (TRAV26-1, TRAJ37)
CIVRVGRKLTF

SEQ ID NO: 297384 - protein, 13 aa, Homo sapiens
  CDR3 for beta chain variable domain of TCR clone 148692 (TRBV14, TRBJ1-2)
CASSEDRRYGYTF

SEQ ID NO: 297385 - protein, 14 aa, Homo sapiens
  CDR3 for alpha chain variable domain of TCR clone 148693 (TRAV2, TRAJ9)
CAVEDRRGGFKTIF

SEQ ID NO: 297386 - protein, 16 aa, Homo sapiens
  CDR3 for beta chain variable domain of TCR clone 148693 (TRBV27, TRBJ2-2)
CASSFRGLVRTGELFF

SEQ ID NO: 297387 - protein, 13 aa, Homo sapiens
  CDR3 for alpha chain variable domain of TCR clone 148694 (TRAV8-6, TRAJ8)
CAVSNTGFQKLAF

SEQ ID NO: 297388 - protein, 15 aa, Homo sapiens
  CDR3 for beta chain variable domain of TCR clone 148694 (TRBV28, TRBJ2-5)
CASSSGRTIQETQYF

SEQ ID NO: 297389 - protein, 13 aa, Homo sapiens
  CDR3 for alpha chain variable domain of TCR clone 148695 (TRAV27, TRAJ17)
CAGAATAGNKLTI

SEQ ID NO: 297390 - protein, 15 aa, Homo sapiens
  CDR3 for beta chain variable domain of TCR clone 148695 (TRBV5-1, TRBJ2-3)
CASRNQAGSTDTQYF

SEQ ID NO: 297391 - protein, 14 aa, Homo sapiens
  CDR3 for alpha chain variable domain of TCR clone 148696 (TRAV3, TRAJ22)
CAVRDYGSARQLTF

SEQ ID NO: 297392 - protein, 14 aa, Homo sapiens
  CDR3 for beta chain variable domain of TCR clone 148696 (TRBV7-7, TRBJ2-7)
CASSLGRGVGEQYF

SEQ ID NO: 297393 - protein, 15 aa, Homo sapiens
  CDR3 for alpha chain variable domain of TCR clone 148697 (TRAV3, TRAJ22)
CAVRDRGGSARQLTF

SEQ ID NO: 297394 - protein, 19 aa, Homo sapiens
  CDR3 for beta chain variable domain of TCR clone 148697 (TRBV11-3, TRBJ2-3)
CASGFGTSGGPRGGGTQYF

SEQ ID NO: 297395 - protein, 16 aa, Homo sapiens
  CDR3 for alpha chain variable domain of TCR clone 148698 (TRAV3, TRAJ10)
CAVRDMRAGGGNKLTF

SEQ ID NO: 297396 - protein, 16 aa, Homo sapiens
  CDR3 for beta chain variable domain of TCR clone 148698 (TRBV6-1, TRBJ2-1)
CASILRQGSSYNEQFF

SEQ ID NO: 297397 - protein, 12 aa, Homo sapiens
  CDR3 for alpha chain variable domain of TCR clone 148699 (TRAV25, TRAJ29)
CAGYSGNTPLVF

SEQ ID NO: 297398 - protein, 14 aa, Homo sapiens
  CDR3 for beta chain variable domain of TCR clone 148699 (TRBV6-1, TRBJ2-7)
CASTRTGDYYEQYF

SEQ ID NO: 297399 - protein, 15 aa, Homo sapiens
  CDR3 for alpha chain variable domain of TCR clone 148700 (TRAV23/DV6, TRAJ13)
CAAWPGGGSYQKVTF

SEQ ID NO: 297400 - protein, 14 aa, Homo sapiens
  CDR3 for beta chain variable domain of TCR clone 148700 (TRBV6-1, TRBJ2-1)
CASAGGAIKNEQFF

SEQ ID NO: 297401 - protein, 14 aa, Homo sapiens
  CDR3 for alpha chain variable domain of TCR clone 148701 (TRAV21, TRAJ28)
CAVGSGAGSHQLTF

SEQ ID NO: 297402 - protein, 14 aa, Homo sapiens
  CDR3 for beta chain variable domain of TCR clone 148701 (TRBV18, TRBJ1-4)
CASSPGPNGEKLFF

SEQ ID NO: 297403 - protein, 15 aa, Homo sapiens
  CDR3 for alpha chain variable domain of TCR clone 148702 (TRAV17, TRAJ4)
CATGTWSGGYNKLIF

SEQ ID NO: 297404 - protein, 13 aa, Homo sapiens
  CDR3 for beta chain variable domain of TCR clone 148702 (TRBV4-1, TRBJ2-1)
CASSQEVQYEQFF

SEQ ID NO: 297405 - protein, 12 aa, Homo sapiens
  CDR3 for alpha chain variable domain of TCR clone 148703 (TRAV13-1, TRAJ21)
CAAKEGFNKFYF

SEQ ID NO: 297406 - protein, 17 aa, Homo sapiens
  CDR3 for beta chain variable domain of TCR clone 148703 (TRBV20-1, TRBJ2-1)
CSARSSGLAGSYNEQFF

SEQ ID NO: 297407 - protein, 15 aa, Homo sapiens
  CDR3 for alpha chain variable domain of TCR clone 148704 (TRAV26-1, TRAJ40)
CIVRVTTSGTYKYIF

SEQ ID NO: 297408 - protein, 17 aa, Homo sapiens
  CDR3 for beta chain variable domain of TCR clone 148704 (TRBV7-3, TRBJ2-3)
CASSLMKRMRGADTQYF

SEQ ID NO: 297409 - protein, 14 aa, Homo sapiens
  CDR3 for alpha chain variable domain of TCR clone 148705 (TRAV1-2, TRAJ16)
CAVNRFSDGQKLLF

SEQ ID NO: 297410 - protein, 18 aa, Homo sapiens
  CDR3 for beta chain variable domain of TCR clone 148705 (TRBV20-1, TRBJ2-3)
CSASGLACGPGTTDTQYF

SEQ ID NO: 297411 - protein, 22 aa, Homo sapiens
  CDR3 for alpha chain variable domain of TCR clone 148706 (TRAV34, )
CGADFTPGNNHIQNPYPAVYQL

SEQ ID NO: 297412 - protein, 16 aa, Homo sapiens
  CDR3 for beta chain variable domain of TCR clone 148706 (TRBV12-5, TRBJ2-5)
CASGPRTSGNQETQYF

SEQ ID NO: 297413 - protein, 13 aa, Homo sapiens
  CDR3 for alpha chain variable domain of TCR clone 148707 (TRAV12-1, TRAJ6)
CVVYPGGSYIPTF

SEQ ID NO: 297414 - protein, 15 aa, Homo sapiens
  CDR3 for beta chain variable domain of TCR clone 148707 (TRBV20-1, TRBJ2-3)
CSARPSGFYTDTQYF

SEQ ID NO: 297415 - protein, 14 aa, Homo sapiens
  CDR3 for alpha chain variable domain of TCR clone 148708 (TRAV12-1, TRAJ12)
CVVTRMGGSYKLIF

SEQ ID NO: 297416 - protein, 13 aa, Homo sapiens
  CDR3 for beta chain variable domain of TCR clone 148708 (TRBV20-1, TRBJ1-1)
CSARGGGNTEAFF

SEQ ID NO: 297417 - protein, 11 aa, Homo sapiens
  CDR3 for alpha chain variable domain of TCR clone 148709 (TRAV26-1, TRAJ37)
CIVRVGRKLIF

SEQ ID NO: 297418 - protein, 13 aa, Homo sapiens
  CDR3 for beta chain variable domain of TCR clone 148709 (TRBV7-3, TRBJ1-1)
CASSLTQGTEAFF

SEQ ID NO: 297419 - protein, 15 aa, Homo sapiens
  CDR3 for alpha chain variable domain of TCR clone 148710 (TRAV14/DV4, TRAJ12)
CAMRGGRDSSYKLIF

SEQ ID NO: 297420 - protein, 16 aa, Homo sapiens
  CDR3 for beta chain variable domain of TCR clone 148710 (TRBV4-2, TRBJ1-5)
CASSQGQGASNQPQHF

SEQ ID NO: 297421 - protein, 12 aa, Homo sapiens
  CDR3 for alpha chain variable domain of TCR clone 148711 (TRAV36/DV7, TRAJ54)
CAVVRGAQKLVF

SEQ ID NO: 297422 - protein, 12 aa, Homo sapiens
  CDR3 for beta chain variable domain of TCR clone 148711 (TRBV10-2, TRBJ2-5)
CASSGGGKTQYF

SEQ ID NO: 297423 - protein, 13 aa, Homo sapiens
  CDR3 for alpha chain variable domain of TCR clone 148712 (TRAV13-2, TRAJ48)
CAEMDFGNEKSTF

SEQ ID NO: 297424 - protein, 15 aa, Homo sapiens
  CDR3 for beta chain variable domain of TCR clone 148712 (TRBV7-9, TRBJ1-6)
CASRSPGRGNSPLHF

SEQ ID NO: 297425 - protein, 12 aa, Homo sapiens
  CDR3 for alpha chain variable domain of TCR clone 148713 (TRAV12-3, TRAJ40)
CAMTSGTYKYIF

SEQ ID NO: 297426 - protein, 15 aa, Homo sapiens
  CDR3 for beta chain variable domain of TCR clone 148713 (TRBV7-3, TRBJ2-2)
CASSLAGQGTGELFF

SEQ ID NO: 297427 - protein, 12 aa, Homo sapiens
  CDR3 for alpha chain variable domain of TCR clone 148714 (TRAV35, TRAJ40)
CAGRAGTYKYIF

SEQ ID NO: 297428 - protein, 14 aa, Homo sapiens
  CDR3 for beta chain variable domain of TCR clone 148714 (TRBV7-2, TRBJ1-3)
CAGSRGGTGNTIYF

SEQ ID NO: 297429 - protein, 14 aa, Homo sapiens
  CDR3 for alpha chain variable domain of TCR clone 148715 (TRAV12-2, TRAJ13)
CAVKKTGGYQKVTF

SEQ ID NO: 297430 - protein, 13 aa, Homo sapiens
  CDR3 for beta chain variable domain of TCR clone 148715 (TRBV14, TRBJ1-1)
CASSREFGTEAFF

SEQ ID NO: 297431 - protein, 14 aa, Homo sapiens
  CDR3 for alpha chain variable domain of TCR clone 148716 (TRAV21, TRAJ38)
CAVANAGNNRKLIW

SEQ ID NO: 297432 - protein, 16 aa, Homo sapiens
  CDR3 for beta chain variable domain of TCR clone 148716 (TRBV5-4, TRBJ2-1)
CASSLALAGAYNDQFF

SEQ ID NO: 297433 - protein, 14 aa, Homo sapiens
  CDR3 for alpha chain variable domain of TCR clone 148717 (TRAV13-1, TRAJ35)
CAASKGGFGKVLHG

SEQ ID NO: 297434 - protein, 13 aa, Homo sapiens
  CDR3 for beta chain variable domain of TCR clone 148717 (TRBV7-3, TRBJ1-1)
CASSQDWGAEAFF

SEQ ID NO: 297435 - protein, 13 aa, Homo sapiens
  CDR3 for alpha chain variable domain of TCR clone 148718 (TRAV20, TRAJ49)
CAVQARTGNQFYF

SEQ ID NO: 297436 - protein, 12 aa, Homo sapiens
  CDR3 for beta chain variable domain of TCR clone 148718 (TRBV19, TRBJ2-5)
CASSISEETQYF

SEQ ID NO: 297437 - protein, 14 aa, Homo sapiens
  CDR3 for alpha chain variable domain of TCR clone 148719 (TRAV12-2, TRAJ13)
CAVKKTGGYPKVTF

SEQ ID NO: 297438 - protein, 13 aa, Homo sapiens
  CDR3 for beta chain variable domain of TCR clone 148719 (TRBV20-1, TRBJ1-1)
CSARLGQGTEASF

SEQ ID NO: 297439 - protein, 15 aa, Homo sapiens
  CDR3 for alpha chain variable domain of TCR clone 148720 (TRAV12-2, TRAJ53)
CAVNGGGGSNYKLTF

SEQ ID NO: 297440 - protein, 16 aa, Homo sapiens
  CDR3 for beta chain variable domain of TCR clone 148720 (TRBV19, TRBJ2-2)
CASSPSGGLNTGELFF

SEQ ID NO: 297441 - protein, 11 aa, Homo sapiens
  CDR3 for alpha chain variable domain of TCR clone 148721 (TRAV22, TRAJ30)
CAGNRDDKIIF

SEQ ID NO: 297442 - protein, 14 aa, Homo sapiens
  CDR3 for beta chain variable domain of TCR clone 148721 (TRBV11-2, TRBJ2-5)
CASSRTGGIETQYF

SEQ ID NO: 297443 - protein, 14 aa, Homo sapiens
  CDR3 for alpha chain variable domain of TCR clone 148722 (TRAV1-1, TRAJ27)
CAVIYNTNAFKSTF

SEQ ID NO: 297444 - protein, 15 aa, Homo sapiens
  CDR3 for beta chain variable domain of TCR clone 148722 (TRBV7-2, TRBJ2-1)
CASSSGLAGGNEQFF

SEQ ID NO: 297445 - protein, 13 aa, Homo sapiens
  CDR3 for alpha chain variable domain of TCR clone 148723 (TRAV13-1, TRAJ39)
CSKYSNAGNMLTF

SEQ ID NO: 297446 - protein, 13 aa, Homo sapiens
  CDR3 for beta chain variable domain of TCR clone 148723 (TRBV7-2, TRBJ2-2)
CASSSVRAGELFF

SEQ ID NO: 297447 - protein, 13 aa, Homo sapiens
  CDR3 for alpha chain variable domain of TCR clone 148724 (TRAV12-3, TRAJ33)
CAMSVNSNYQLIW

SEQ ID NO: 297448 - protein, 18 aa, Homo sapiens
  CDR3 for beta chain variable domain of TCR clone 148724 (TRBV10-3, TRBJ2-3)
CAISESNASGGAKDTQYF

SEQ ID NO: 297449 - protein, 15 aa, Homo sapiens
  CDR3 for alpha chain variable domain of TCR clone 148725 (TRAV3, TRAJ5)
CAVRDLDTGRRALTF

SEQ ID NO: 297450 - protein, 12 aa, Homo sapiens
  CDR3 for beta chain variable domain of TCR clone 148725 (TRBV12-4, TRBJ2-7)
CQQSDRTYEQYF

SEQ ID NO: 297451 - protein, 14 aa, Homo sapiens
  CDR3 for alpha chain variable domain of TCR clone 148726 (TRAV12-2, TRAJ13)
CAVKKTGGNQKVTF

SEQ ID NO: 297452 - protein, 15 aa, Homo sapiens
  CDR3 for beta chain variable domain of TCR clone 148726 (TRBV28, TRBJ2-5)
CASSPPWSYQETQYF

SEQ ID NO: 297453 - protein, 13 aa, Homo sapiens
  CDR3 for alpha chain variable domain of TCR clone 148727 (TRAV3, TRAJ20)
CAVRDTPRYKLSF

SEQ ID NO: 297454 - protein, 14 aa, Homo sapiens
  CDR3 for beta chain variable domain of TCR clone 148727 (TRBV4-1, TRBJ1-1)
CASSRSGQSFEAFF

SEQ ID NO: 297455 - protein, 13 aa, Homo sapiens
  CDR3 for alpha chain variable domain of TCR clone 148728 (TRAV35, TRAJ33)
FAGQLYGVYQLIW

SEQ ID NO: 297456 - protein, 14 aa, Homo sapiens
  CDR3 for beta chain variable domain of TCR clone 148728 (TRBV7-2, TRBJ1-1)
CASSLGGAGTEAFF

SEQ ID NO: 297457 - protein, 11 aa, Homo sapiens
  CDR3 for alpha chain variable domain of TCR clone 148729 (TRAV26-1, TRAJ37)
CLVRVGRKLIF

SEQ ID NO: 297458 - protein, 14 aa, Homo sapiens
  CDR3 for beta chain variable domain of TCR clone 148729 (TRBV11-3, TRBJ2-7)
CASSSRTGRYEQYF

SEQ ID NO: 297459 - protein, 14 aa, Homo sapiens
  CDR3 for alpha chain variable domain of TCR clone 148730 (TRAV13-1, TRAJ40)
CEASMTSGTYKYIF

SEQ ID NO: 297460 - protein, 15 aa, Homo sapiens
  CDR3 for beta chain variable domain of TCR clone 148730 (TRBV7-3, TRBJ2-1)
CASSPTGGGEVEQFF

SEQ ID NO: 297461 - protein, 15 aa, Homo sapiens
  CDR3 for alpha chain variable domain of TCR clone 148731 (TRAV12-2, )
CAVASLATPISRTLT

SEQ ID NO: 297462 - protein, 16 aa, Homo sapiens
  CDR3 for beta chain variable domain of TCR clone 148731 (TRBV5-1, TRBJ2-2)
CASSSRTGGRTGELFF

SEQ ID NO: 297463 - protein, 12 aa, Homo sapiens
  CDR3 for alpha chain variable domain of TCR clone 148732 (TRAV17, TRAJ20)
CATDSNDYKLSF

SEQ ID NO: 297464 - protein, 11 aa, Homo sapiens
  CDR3 for beta chain variable domain of TCR clone 148732 (TRBV11-2, TRBJ1-1)
CASSIYTEAFF

SEQ ID NO: 297465 - protein, 13 aa, Homo sapiens
  CDR3 for alpha chain variable domain of TCR clone 148733 (TRAV17, TRAJ7)
CATVESGNNRLAF

SEQ ID NO: 297466 - protein, 13 aa, Homo sapiens
  CDR3 for beta chain variable domain of TCR clone 148733 (TRBV10-3, TRBJ2-7)
CASKLAVNYEQYF

SEQ ID NO: 297467 - protein, 15 aa, Homo sapiens
  CDR3 for alpha chain variable domain of TCR clone 148734 (TRAV29/DV5, TRAJ24)
CAASGATDSWGKFQF

SEQ ID NO: 297468 - protein, 11 aa, Homo sapiens
  CDR3 for beta chain variable domain of TCR clone 148734 (TRBV11-2, TRBJ2-2)
CQQPPYRELFF

SEQ ID NO: 297469 - protein, 12 aa, Homo sapiens
  CDR3 for alpha chain variable domain of TCR clone 148735 (TRAV3, TRAJ43)
CCERGRNNDMRF

SEQ ID NO: 297470 - protein, 15 aa, Homo sapiens
  CDR3 for beta chain variable domain of TCR clone 148735 (TRBV27, TRBJ1-6)
CASSFDRGLGSPLHF

SEQ ID NO: 297471 - protein, 13 aa, Homo sapiens
  CDR3 for alpha chain variable domain of TCR clone 148736 (TRAV13-1, TRAJ13)
CAAPKGGYQKVTF

SEQ ID NO: 297472 - protein, 16 aa, Homo sapiens
  CDR3 for beta chain variable domain of TCR clone 148736 (TRBV18, TRBJ1-2)
CASSPPERVTIYGYTF

SEQ ID NO: 297473 - protein, 16 aa, Homo sapiens
  CDR3 for alpha chain variable domain of TCR clone 148737 (TRAV30, TRAJ24)
CGTEIVDADSWGKFQF

SEQ ID NO: 297474 - protein, 14 aa, Homo sapiens
  CDR3 for beta chain variable domain of TCR clone 148737 (TRBV12-4, TRBJ1-1)
CASSSARGYTEAFF

SEQ ID NO: 297475 - protein, 14 aa, Homo sapiens
  CDR3 for alpha chain variable domain of TCR clone 148738 (TRAV23/DV6, TRAJ4)
CAANLSGGYNKLIF

SEQ ID NO: 297476 - protein, 14 aa, Homo sapiens
  CDR3 for beta chain variable domain of TCR clone 148738 (TRBV11-2, TRBJ1-2)
CASSLGTANYGYTF

SEQ ID NO: 297477 - protein, 14 aa, Homo sapiens
  CDR3 for alpha chain variable domain of TCR clone 148739 (TRAV1-2, TRAJ16)
CAVNRFSDGQKLLF

SEQ ID NO: 297478 - protein, 13 aa, Homo sapiens
  CDR3 for beta chain variable domain of TCR clone 148739 (TRBV5-5, TRBJ1-2)
CASSFWRGEDDTF

SEQ ID NO: 297479 - protein, 14 aa, Homo sapiens
  CDR3 for alpha chain variable domain of TCR clone 148740 (TRAV1-2, TRAJ27)
CAPAEYTNAGKSTF

SEQ ID NO: 297480 - protein, 18 aa, Homo sapiens
  CDR3 for beta chain variable domain of TCR clone 148740 (TRBV28, TRBJ1-2)
CASRRQQGKRGSNYGYTF

SEQ ID NO: 297481 - protein, 13 aa, Homo sapiens
  CDR3 for alpha chain variable domain of TCR clone 148741 (TRAV20, TRAJ42)
CAVPGGSQGNLIF

SEQ ID NO: 297482 - protein, 15 aa, Homo sapiens
  CDR3 for beta chain variable domain of TCR clone 148741 (TRBV10-1, TRBJ2-1)
CASSEWRGTYNEQFF

SEQ ID NO: 297483 - protein, 14 aa, Homo sapiens
  CDR3 for alpha chain variable domain of TCR clone 148742 (TRAV20, TRAJ20)
CAVRRGYNEYKLNF

SEQ ID NO: 297484 - protein, 13 aa, Homo sapiens
  CDR3 for beta chain variable domain of TCR clone 148742 (TRBV19, TRBJ2-5)
CASSETAPETQYF

SEQ ID NO: 297485 - protein, 12 aa, Homo sapiens
  CDR3 for alpha chain variable domain of TCR clone 148743 (TRAV23/DV6, TRAJ16)
CAATGTGQKLLF

SEQ ID NO: 297486 - protein, 14 aa, Homo sapiens
  CDR3 for beta chain variable domain of TCR clone 148743 (TRBV12-4, TRBJ1-3)
CASTLTGAGNTMYF

SEQ ID NO: 297487 - protein, 16 aa, Homo sapiens
  CDR3 for alpha chain variable domain of TCR clone 148744 (TRAV30, TRAJ24)
CGTEIVDADSWGQLQF

SEQ ID NO: 297488 - protein, 14 aa, Homo sapiens
  CDR3 for beta chain variable domain of TCR clone 148744 (TRBV12-5, TRBJ2-5)
CASGPRTHQETQYF

SEQ ID NO: 297489 - protein, 15 aa, Homo sapiens
  CDR3 for alpha chain variable domain of TCR clone 148745 (TRAV20, TRAJ45)
CAVQETGGGADGLTF

SEQ ID NO: 297490 - protein, 13 aa, Homo sapiens
  CDR3 for beta chain variable domain of TCR clone 148745 (TRBV7-9, TRBJ1-2)
CASSLKQNYGYTF

SEQ ID NO: 297491 - protein, 13 aa, Homo sapiens
  CDR3 for alpha chain variable domain of TCR clone 148746 (TRAV8-3, TRAJ28)
CAVGAVGSYQLTF

SEQ ID NO: 297492 - protein, 13 aa, Homo sapiens
  CDR3 for beta chain variable domain of TCR clone 148746 (TRBV14, TRBJ1-1)
CASSQEAGTEAFF

SEQ ID NO: 297493 - protein, 15 aa, Homo sapiens
  CDR3 for alpha chain variable domain of TCR clone 148747 (TRAV3, TRAJ20)
CAVRDIKLSDYKLSF

SEQ ID NO: 297494 - protein, 12 aa, Homo sapiens
  CDR3 for beta chain variable domain of TCR clone 148747 (TRBV7-9, TRBJ2-7)
CASSLEGYEQYF

SEQ ID NO: 297495 - protein, 10 aa, Homo sapiens
  CDR3 for alpha chain variable domain of TCR clone 148748 (TRAV3, TRAJ30)
CAVREIKIIF

SEQ ID NO: 297496 - protein, 14 aa, Homo sapiens
  CDR3 for beta chain variable domain of TCR clone 148748 (TRBV15, TRBJ2-3)
CATRSGTSTDTQYF

SEQ ID NO: 297497 - protein, 14 aa, Homo sapiens
  CDR3 for alpha chain variable domain of TCR clone 148749 (TRAV1-2, TRAJ8)
CAVREDAGFQKLVF

SEQ ID NO: 297498 - protein, 15 aa, Homo sapiens
  CDR3 for beta chain variable domain of TCR clone 148749 (TRBV5-1, TRBJ2-1)
CASSPPRAPYNEQFF

SEQ ID NO: 297499 - protein, 14 aa, Homo sapiens
  CDR3 for alpha chain variable domain of TCR clone 148750 (TRAV23/DV6, TRAJ27)
CAASRDTNAGKSTF

SEQ ID NO: 297500 - protein, 15 aa, Homo sapiens
  CDR3 for beta chain variable domain of TCR clone 148750 (TRBV7-8, TRBJ1-1)
CASSLGDSRNTEAFL

SEQ ID NO: 297501 - protein, 13 aa, Homo sapiens
  CDR3 for alpha chain variable domain of TCR clone 148751 (TRAV13-1, TRAJ11)
CAASIRGYSTLTF

SEQ ID NO: 297502 - protein, 17 aa, Homo sapiens
  CDR3 for beta chain variable domain of TCR clone 148751 (TRBV4-3, TRBJ1-2)
CASSSRLQAGGSVGYTS

SEQ ID NO: 297503 - protein, 13 aa, Homo sapiens
  CDR3 for alpha chain variable domain of TCR clone 148752 (TRAV16, TRAJ28)
CALTGAGSYQLTF

SEQ ID NO: 297504 - protein, 15 aa, Homo sapiens
  CDR3 for beta chain variable domain of TCR clone 148752 (TRBV12-4, TRBJ2-5)
CASSPPTGLQETQYF

SEQ ID NO: 297505 - protein, 14 aa, Homo sapiens
  CDR3 for alpha chain variable domain of TCR clone 148753 (TRAV38-1, TRAJ40)
CALRPTSGTYKYIF

SEQ ID NO: 297506 - protein, 14 aa, Homo sapiens
  CDR3 for beta chain variable domain of TCR clone 148753 (TRBV5-4, TRBJ1-1)
CASSLDGRRDEAFF

SEQ ID NO: 297507 - protein, 10 aa, Homo sapiens
  CDR3 for alpha chain variable domain of TCR clone 148754 (TRAV16, TRAJ22)
SAMYLRQLTF

SEQ ID NO: 297508 - protein, 17 aa, Homo sapiens
  CDR3 for beta chain variable domain of TCR clone 148754 (TRBV24-1, TRBJ2-3)
CATSDLPSGEDTDTQYF

SEQ ID NO: 297509 - protein, 15 aa, Homo sapiens
  CDR3 for alpha chain variable domain of TCR clone 148755 (TRAV8-3, TRAJ23)
CAVGDRYNQGGKLIF

SEQ ID NO: 297510 - protein, 13 aa, Homo sapiens
  CDR3 for beta chain variable domain of TCR clone 148755 (TRBV29-1, TRBJ1-3)
CSADVDSGNTIYF

SEQ ID NO: 297511 - protein, 13 aa, Homo sapiens
  CDR3 for alpha chain variable domain of TCR clone 148756 (TRAV17, TRAJ11)
CATVPGGYSTLTF

SEQ ID NO: 297512 - protein, 15 aa, Homo sapiens
  CDR3 for beta chain variable domain of TCR clone 148756 (TRBV11-2, TRBJ1-1)
CASSSRSSLLLSLDK

SEQ ID NO: 297513 - protein, 13 aa, Homo sapiens
  CDR3 for alpha chain variable domain of TCR clone 148757 (TRAV20, TRAJ37)
CAECSSNTGKLIF

SEQ ID NO: 297514 - protein, 17 aa, Homo sapiens
  CDR3 for beta chain variable domain of TCR clone 148757 (TRBV9, TRBJ1-6)
CASSVAGTGDSPLHLGT

SEQ ID NO: 297515 - protein, 16 aa, Homo sapiens
  CDR3 for alpha chain variable domain of TCR clone 148758 (TRAV8-3, TRAJ13)
CAVGAYPSGGYQKVTS

SEQ ID NO: 297516 - protein, 13 aa, Homo sapiens
  CDR3 for beta chain variable domain of TCR clone 148758 (TRBV7-9, TRBJ1-2)
CASSLKQNYGYTF

SEQ ID NO: 297517 - protein, 13 aa, Homo sapiens
  CDR3 for alpha chain variable domain of TCR clone 148759 (TRAV27, TRAJ6)
CAGGARGSYIPTF

SEQ ID NO: 297518 - protein, 12 aa, Homo sapiens
  CDR3 for beta chain variable domain of TCR clone 148759 (TRBV6-3, TRBJ2-7)
CASSLTPYEQYF

SEQ ID NO: 297519 - protein, 13 aa, Homo sapiens
  CDR3 for alpha chain variable domain of TCR clone 148760 (TRAV2, TRAJ12)
CAVGADSSYKLIF

SEQ ID NO: 297520 - protein, 13 aa, Homo sapiens
  CDR3 for beta chain variable domain of TCR clone 148760 (TRBV7-9, TRBJ1-2)
CASSLKQNYGYTF

SEQ ID NO: 297521 - protein, 12 aa, Homo sapiens
  CDR3 for alpha chain variable domain of TCR clone 148761 (TRAV8-3, TRAJ20)
CAVCANDYKLSF

SEQ ID NO: 297522 - protein, 14 aa, Homo sapiens
  CDR3 for beta chain variable domain of TCR clone 148761 (TRBV11-2, TRBJ2-5)
CASRPLAGRETQYF

SEQ ID NO: 297523 - protein, 12 aa, Homo sapiens
  CDR3 for alpha chain variable domain of TCR clone 148762 (TRAV1-2, TRAJ33)
CAALDSNYQLIW

SEQ ID NO: 297524 - protein, 14 aa, Homo sapiens
  CDR3 for beta chain variable domain of TCR clone 148762 (TRBV19, TRBJ2-3)
CASSAPRVTDTQYF

SEQ ID NO: 297525 - protein, 14 aa, Homo sapiens
  CDR3 for alpha chain variable domain of TCR clone 148763 (TRAV1-2, TRAJ16)
CAVNRFSDGQKLLF

SEQ ID NO: 297526 - protein, 13 aa, Homo sapiens
  CDR3 for beta chain variable domain of TCR clone 148763 (TRBV20-1, TRBJ2-7)
CSATGQVHYEQYF

SEQ ID NO: 297527 - protein, 14 aa, Homo sapiens
  CDR3 for alpha chain variable domain of TCR clone 148764 (TRAV12-2, TRAJ44)
CAVNKAGTASKLTF

SEQ ID NO: 297528 - protein, 15 aa, Homo sapiens
  CDR3 for beta chain variable domain of TCR clone 148764 (TRBV7-9, TRBJ2-7)
CISVSEAPPMNEQYF

SEQ ID NO: 297529 - protein, 11 aa, Homo sapiens
  CDR3 for alpha chain variable domain of TCR clone 148765 (TRAV1-1, TRAJ23)
CAVRLGGKLIF

SEQ ID NO: 297530 - protein, 20 aa, Homo sapiens
  CDR3 for beta chain variable domain of TCR clone 148765 (TRBV7-8, TRBJ2-2)
CASSHLFPGPTVHITGELFF

SEQ ID NO: 297531 - protein, 14 aa, Homo sapiens
  CDR3 for alpha chain variable domain of TCR clone 148766 (TRAV2, TRAJ29)
CAGPFQYGNTPLVI

SEQ ID NO: 297532 - protein, 11 aa, Homo sapiens
  CDR3 for beta chain variable domain of TCR clone 148766 (TRBV29-1, TRBJ2-5)
CSEDRTGTQYF

SEQ ID NO: 297533 - protein, 11 aa, Homo sapiens
  CDR3 for alpha chain variable domain of TCR clone 148767 (TRAV27, TRAJ47)
CRSNQGNKLVF

SEQ ID NO: 297534 - protein, 16 aa, Homo sapiens
  CDR3 for beta chain variable domain of TCR clone 148767 (TRBV12-4, TRBJ1-5)
CASSRPVGGSNQTQHF

SEQ ID NO: 297535 - protein, 18 aa, Homo sapiens
  CDR3 for alpha chain variable domain of TCR clone 148768 (TRAV26-2, TRAJ45)
CILRVDKYSGGGADGLNF

SEQ ID NO: 297536 - protein, 14 aa, Homo sapiens
  CDR3 for beta chain variable domain of TCR clone 148768 (TRBV11-2, TRBJ2-7)
CASSSTGEGYEQYF

SEQ ID NO: 297537 - protein, 14 aa, Homo sapiens
  CDR3 for alpha chain variable domain of TCR clone 148769 (TRAV1-2, TRAJ8)
CAVTEDTGFQKLVF

SEQ ID NO: 297538 - protein, 12 aa, Homo sapiens
  CDR3 for beta chain variable domain of TCR clone 148769 (TRBV14, TRBJ2-7)
CASSRLKGEQYF

SEQ ID NO: 297539 - protein, 15 aa, Homo sapiens
  CDR3 for alpha chain variable domain of TCR clone 148770 (TRAV12-1, TRAJ9)
CVVSFGDTGGFKTIF

SEQ ID NO: 297540 - protein, 14 aa, Homo sapiens
  CDR3 for beta chain variable domain of TCR clone 148770 (TRBV12-4, TRBJ1-1)
CASSLGTGGTEAFF

SEQ ID NO: 297541 - protein, 14 aa, Homo sapiens
  CDR3 for alpha chain variable domain of TCR clone 148771 (TRAV35, TRAJ42)
CAGRYGGSQGNLIF

SEQ ID NO: 297542 - protein, 19 aa, Homo sapiens
  CDR3 for beta chain variable domain of TCR clone 148771 (TRBV19, TRBJ2-5)
CASSIGQVTDFFLGETQYF

SEQ ID NO: 297543 - protein, 16 aa, Homo sapiens
  CDR3 for alpha chain variable domain of TCR clone 148772 (TRAV14/DV4, TRAJ20)
CAMREGRSRDDYKLSF

SEQ ID NO: 297544 - protein, 17 aa, Homo sapiens
  CDR3 for beta chain variable domain of TCR clone 148772 (TRBV13, TRBJ2-3)
WASSLSRVAGGRNTQYF

SEQ ID NO: 297545 - protein, 18 aa, Homo sapiens
  CDR3 for alpha chain variable domain of TCR clone 148773 (TRAV21, TRAJ52)
CAVRPSQAGGTSYGKLTF

SEQ ID NO: 297546 - protein, 14 aa, Homo sapiens
  CDR3 for beta chain variable domain of TCR clone 148773 (TRBV4-1, TRBJ2-2)
CASSQAVNTGELFF

SEQ ID NO: 297547 - protein, 16 aa, Homo sapiens
  CDR3 for alpha chain variable domain of TCR clone 148774 (TRAV8-3, TRAJ13)
CAVGAYPSGGYQTVTF

SEQ ID NO: 297548 - protein, 13 aa, Homo sapiens
  CDR3 for beta chain variable domain of TCR clone 148774 (TRBV7-9, TRBJ1-2)
CASSLKQNYGYTF

SEQ ID NO: 297549 - protein, 14 aa, Homo sapiens
  CDR3 for alpha chain variable domain of TCR clone 148775 (TRAV12-2, TRAJ45)
CAVNIGGGADGLTF

SEQ ID NO: 297550 - protein, 13 aa, Homo sapiens
  CDR3 for beta chain variable domain of TCR clone 148775 (TRBV19, TRBJ2-5)
CASSIHSQETQYF

SEQ ID NO: 297551 - protein, 16 aa, Homo sapiens
  CDR3 for alpha chain variable domain of TCR clone 148776 (TRAV1-2, TRAJ16)
CAVTGFQMARSCSLQG

SEQ ID NO: 297552 - protein, 14 aa, Homo sapiens
  CDR3 for beta chain variable domain of TCR clone 148776 (TRBV19, TRBJ2-2)
CASSTLHRSGELFF

SEQ ID NO: 297553 - protein, 14 aa, Homo sapiens
  CDR3 for alpha chain variable domain of TCR clone 148777 (TRAV21, TRAJ35)
CAVMPIGFGNVLHC

SEQ ID NO: 297554 - protein, 18 aa, Homo sapiens
  CDR3 for beta chain variable domain of TCR clone 148777 (TRBV7-9, TRBJ2-7)
CASSLTTSGSRTWYEQYF

SEQ ID NO: 297555 - protein, 12 aa, Homo sapiens
  CDR3 for alpha chain variable domain of TCR clone 148778 (TRAV16, TRAJ8)
CALDKGFQKLVF

SEQ ID NO: 297556 - protein, 15 aa, Homo sapiens
  CDR3 for beta chain variable domain of TCR clone 148778 (TRBV2, TRBJ1-2)
FASRNRESGNYGYTF

SEQ ID NO: 297557 - protein, 13 aa, Homo sapiens
  CDR3 for alpha chain variable domain of TCR clone 148779 (TRAV2, TRAJ21)
CAVEDLNFNKFNF

SEQ ID NO: 297558 - protein, 15 aa, Homo sapiens
  CDR3 for beta chain variable domain of TCR clone 148779 (TRBV28, TRBJ2-5)
CASSPGQGSIETQYF

SEQ ID NO: 297559 - protein, 15 aa, Homo sapiens
  CDR3 for alpha chain variable domain of TCR clone 148780 (TRAV8-2, TRAJ24)
CVVSDRTDSWGKVQF

SEQ ID NO: 297560 - protein, 14 aa, Homo sapiens
  CDR3 for beta chain variable domain of TCR clone 148780 (TRBV19, TRBJ2-7)
CASSIEASSYEQYF

SEQ ID NO: 297561 - protein, 11 aa, Homo sapiens
  CDR3 for alpha chain variable domain of TCR clone 148781 (TRAV13-2, TRAJ15)
CSHQAGTALIF

SEQ ID NO: 297562 - protein, 16 aa, Homo sapiens
  CDR3 for beta chain variable domain of TCR clone 148781 (TRBV2, TRBJ2-1)
CASSVGGSLSYNEQFF

SEQ ID NO: 297563 - protein, 13 aa, Homo sapiens
  CDR3 for alpha chain variable domain of TCR clone 148782 (TRAV13-1, TRAJ39)
CAASIWAGDMLTF

SEQ ID NO: 297564 - protein, 15 aa, Homo sapiens
  CDR3 for beta chain variable domain of TCR clone 148782 (TRBV7-9, TRBJ1-1)
CASSLREQGGTEAFF

SEQ ID NO: 297565 - protein, 13 aa, Homo sapiens
  CDR3 for alpha chain variable domain of TCR clone 148783 (TRAV12-1, TRAJ35)
CVVRGGCGNVLHC

SEQ ID NO: 297566 - protein, 13 aa, Homo sapiens
  CDR3 for beta chain variable domain of TCR clone 148783 (TRBV19, TRBJ2-1)
CASTNSDVGEQFF

SEQ ID NO: 297567 - protein, 14 aa, Homo sapiens
  CDR3 for alpha chain variable domain of TCR clone 148784 (TRAV12-3, TRAJ10)
SHLPLTGGGNKLTF

SEQ ID NO: 297568 - protein, 14 aa, Homo sapiens
  CDR3 for beta chain variable domain of TCR clone 148784 (TRBV7-3, TRBJ2-1)
CASSLTGGANEQFF

SEQ ID NO: 297569 - protein, 14 aa, Homo sapiens
  CDR3 for alpha chain variable domain of TCR clone 148785 (TRAV35, TRAJ33)
CWPRGRDSNYQLIW

SEQ ID NO: 297570 - protein, 19 aa, Homo sapiens
  CDR3 for beta chain variable domain of TCR clone 148785 (TRBV25-1, TRBJ2-2)
CAILVYRVDRGRKTGELFF

SEQ ID NO: 297571 - protein, 17 aa, Homo sapiens
  CDR3 for alpha chain variable domain of TCR clone 148786 (TRAV38-1, TRAJ45)
CAFMRSHSGGGTDGLTF

SEQ ID NO: 297572 - protein, 15 aa, Homo sapiens
  CDR3 for beta chain variable domain of TCR clone 148786 (TRBV7-2, TRBJ2-3)
CASSLVVRGPDTQYF

SEQ ID NO: 297573 - protein, 11 aa, Homo sapiens
  CDR3 for alpha chain variable domain of TCR clone 148787 (TRAV2, TRAJ13)
CASGGYQKVTF

SEQ ID NO: 297574 - protein, 14 aa, Homo sapiens
  CDR3 for beta chain variable domain of TCR clone 148787 (TRBV20-1, TRBJ1-2)
CSARPGTALYGYTF

SEQ ID NO: 297575 - protein, 17 aa, Homo sapiens
  CDR3 for alpha chain variable domain of TCR clone 148788 (TRAV14/DV4, TRAJ34)
CAMREGRPHRQAHLWDL

SEQ ID NO: 297576 - protein, 14 aa, Homo sapiens
  CDR3 for beta chain variable domain of TCR clone 148788 (TRBV19, TRBJ2-1)
CASPTFVLSGEQFF

SEQ ID NO: 297577 - protein, 21 aa, Homo sapiens
  CDR3 for alpha chain variable domain of TCR clone 148789 (TRAV12-1, TRAJ32)
SSVIQPPTSMNYGGATNKLIF

SEQ ID NO: 297578 - protein, 15 aa, Homo sapiens
  CDR3 for beta chain variable domain of TCR clone 148789 (TRBV7-9, TRBJ2-2)
CASGPLDTFPGELCF

SEQ ID NO: 297579 - protein, 16 aa, Homo sapiens
  CDR3 for alpha chain variable domain of TCR clone 148790 (TRAV30, TRAJ24)
CGTEIVDADSWGKFQL

SEQ ID NO: 297580 - protein, 14 aa, Homo sapiens
  CDR3 for beta chain variable domain of TCR clone 148790 (TRBV12-5, TRBJ2-5)
YASGSRTHQETQYF

SEQ ID NO: 297581 - protein, 12 aa, Homo sapiens
  CDR3 for alpha chain variable domain of TCR clone 148791 (TRAV13-1, TRAJ17)
CAARTAGHKLTF

SEQ ID NO: 297582 - protein, 15 aa, Homo sapiens
  CDR3 for beta chain variable domain of TCR clone 148791 (TRBV7-6, TRBJ1-1)
CASSPQGGANTEAFF

SEQ ID NO: 297583 - protein, 18 aa, Homo sapiens
  CDR3 for alpha chain variable domain of TCR clone 148792 (TRAV21, TRAJ52)
CSVRPSPAGGTSYGKLTC

SEQ ID NO: 297584 - protein, 13 aa, Homo sapiens
  CDR3 for beta chain variable domain of TCR clone 148792 (TRBV7-3, TRBJ1-1)
CASRQDWGAEAFF

SEQ ID NO: 297585 - protein, 18 aa, Homo sapiens
  CDR3 for alpha chain variable domain of TCR clone 148793 (TRAV21, TRAJ52)
CAVRPSPAGGTSCGKLIF

SEQ ID NO: 297586 - protein, 17 aa, Homo sapiens
  CDR3 for beta chain variable domain of TCR clone 148793 (TRBV13, TRBJ2-3)
CASSLSRVAGGRNTQYF

SEQ ID NO: 297587 - protein, 14 aa, Homo sapiens
  CDR3 for alpha chain variable domain of TCR clone 148794 (TRAV26-1, TRAJ38)
FIADNAGSNRKLIW

SEQ ID NO: 297588 - protein, 12 aa, Homo sapiens
  CDR3 for beta chain variable domain of TCR clone 148794 (TRBV29-1, TRBJ2-3)
CSVTGGADTQYF

SEQ ID NO: 297589 - protein, 12 aa, Homo sapiens
  CDR3 for alpha chain variable domain of TCR clone 148795 (TRAV1-1, TRAJ39)
CAVPVVGNMLSF

SEQ ID NO: 297590 - protein, 13 aa, Homo sapiens
  CDR3 for beta chain variable domain of TCR clone 148795 (TRBV4-1, TRBJ1-1)
CASSRKMNTEAFF

SEQ ID NO: 297591 - protein, 15 aa, Homo sapiens
  CDR3 for alpha chain variable domain of TCR clone 148796 (TRAV26-1, TRAJ23)
CIVRVAGYQGGKLIF

SEQ ID NO: 297592 - protein, 13 aa, Homo sapiens
  CDR3 for beta chain variable domain of TCR clone 148796 (TRBV7-2, TRBJ2-7)
CASSSPSGSEQYF

SEQ ID NO: 297593 - protein, 13 aa, Homo sapiens
  CDR3 for alpha chain variable domain of TCR clone 148797 (TRAV13-2, TRAJ53)
CAENMGSNYKLTF

SEQ ID NO: 297594 - protein, 12 aa, Homo sapiens
  CDR3 for beta chain variable domain of TCR clone 148797 (TRBV7-9, TRBJ2-7)
CASSQGVYEQYF

SEQ ID NO: 297595 - protein, 13 aa, Homo sapiens
  CDR3 for alpha chain variable domain of TCR clone 148798 (TRAV20, TRAJ37)
CAGGPSNTGKLIF

SEQ ID NO: 297596 - protein, 11 aa, Homo sapiens
  CDR3 for beta chain variable domain of TCR clone 148798 (TRBV12-4, TRBJ2-3)
CASTATDTQYF

SEQ ID NO: 297597 - protein, 15 aa, Homo sapiens
  CDR3 for alpha chain variable domain of TCR clone 148799 (TRAV17, TRAJ37)
CATDHGSSNTGKLIF

SEQ ID NO: 297598 - protein, 15 aa, Homo sapiens
  CDR3 for beta chain variable domain of TCR clone 148799 (TRBV27, TRBJ2-1)
CASSNGGGSSNEQFF

SEQ ID NO: 297599 - protein, 14 aa, Homo sapiens
  CDR3 for alpha chain variable domain of TCR clone 148800 (TRAV8-6, TRAJ29)
CAVSRASGNTPIVF

SEQ ID NO: 297600 - protein, 13 aa, Homo sapiens
  CDR3 for beta chain variable domain of TCR clone 148800 (TRBV19, TRBJ1-5)
CASSEGSNQPQHF

SEQ ID NO: 297601 - protein, 15 aa, Homo sapiens
  CDR3 for alpha chain variable domain of TCR clone 148801 (TRAV25, TRAJ53)
CPTSNSGGSNYKMTF

SEQ ID NO: 297602 - protein, 13 aa, Homo sapiens
  CDR3 for beta chain variable domain of TCR clone 148801 (TRBV10-2, TRBJ2-7)
CASGASGGYEQYF

SEQ ID NO: 297603 - protein, 14 aa, Homo sapiens
  CDR3 for alpha chain variable domain of TCR clone 148802 (TRAV8-6, TRAJ6)
CAVHASGGSYIPTF

SEQ ID NO: 297604 - protein, 15 aa, Homo sapiens
  CDR3 for beta chain variable domain of TCR clone 148802 (TRBV7-8, TRBJ1-3)
CASSPRGKDGNTIYF

SEQ ID NO: 297605 - protein, 18 aa, Homo sapiens
  CDR3 for alpha chain variable domain of TCR clone 148803 (TRAV26-1, TRAJ23)
CIVRVGLEVWNQGGKLIF

SEQ ID NO: 297606 - protein, 13 aa, Homo sapiens
  CDR3 for beta chain variable domain of TCR clone 148803 (TRBV7-2, TRBJ2-7)
CASSSPSGSEQYF

SEQ ID NO: 297607 - protein, 11 aa, Homo sapiens
  CDR3 for alpha chain variable domain of TCR clone 148804 (TRAV12-2, TRAJ33)
CAVNSNYQLIW

SEQ ID NO: 297608 - protein, 14 aa, Homo sapiens
  CDR3 for beta chain variable domain of TCR clone 148804 (TRBV12-4, TRBJ2-2)
CASNQGANTGELFF

SEQ ID NO: 297609 - protein, 17 aa, Homo sapiens
  CDR3 for alpha chain variable domain of TCR clone 148805 (TRAV3, TRAJ6)
CSVREGPRAGGSYIPTF

SEQ ID NO: 297610 - protein, 14 aa, Homo sapiens
  CDR3 for beta chain variable domain of TCR clone 148805 (TRBV7-2, TRBJ2-7)
CASSPKTSFYEQYF

SEQ ID NO: 297611 - protein, 16 aa, Homo sapiens
  CDR3 for alpha chain variable domain of TCR clone 148806 (TRAV30, TRAJ24)
CGTEIVDADSWGRFQF

SEQ ID NO: 297612 - protein, 14 aa, Homo sapiens
  CDR3 for beta chain variable domain of TCR clone 148806 (TRBV12-5, TRBJ2-5)
CASGSRSHQETQYF

SEQ ID NO: 297613 - protein, 18 aa, Homo sapiens
  CDR3 for alpha chain variable domain of TCR clone 148807 (TRAV26-2, TRAJ54)
CILRDVEVGIQGAQKLVF

SEQ ID NO: 297614 - protein, 13 aa, Homo sapiens
  CDR3 for beta chain variable domain of TCR clone 148807 (TRBV7-9, TRBJ1-4)
CASSLPGIEKLFF

SEQ ID NO: 297615 - protein, 14 aa, Homo sapiens
  CDR3 for alpha chain variable domain of TCR clone 148808 (TRAV17, TRAJ39)
CATDPVRAGNKLTF

SEQ ID NO: 297616 - protein, 15 aa, Homo sapiens
  CDR3 for beta chain variable domain of TCR clone 148808 (TRBV13, TRBJ1-5)
CASSFGQGGVQPQHF

SEQ ID NO: 297617 - protein, 14 aa, Homo sapiens
  CDR3 for alpha chain variable domain of TCR clone 148809 (TRAV12-1, TRAJ13)
CVVIDSGGHQKVTF

SEQ ID NO: 297618 - protein, 17 aa, Homo sapiens
  CDR3 for beta chain variable domain of TCR clone 148809 (TRBV15, TRBJ1-5)
FATSRAPPGTRNQPQHF

SEQ ID NO: 297619 - protein, 14 aa, Homo sapiens
  CDR3 for alpha chain variable domain of TCR clone 148810 (TRAV4, TRAJ6)
CLVGEAGGSCIPTF

SEQ ID NO: 297620 - protein, 16 aa, Homo sapiens
  CDR3 for beta chain variable domain of TCR clone 148810 (TRBV7-6, TRBJ2-1)
CASSLNEGPSYNEQFF

SEQ ID NO: 297621 - protein, 13 aa, Homo sapiens
  CDR3 for alpha chain variable domain of TCR clone 148811 (TRAV13-2, TRAJ53)
CAENMGSNYTLTF

SEQ ID NO: 297622 - protein, 13 aa, Homo sapiens
  CDR3 for beta chain variable domain of TCR clone 148811 (TRBV4-1, TRBJ2-2)
CASSQENTGELFF

SEQ ID NO: 297623 - protein, 13 aa, Homo sapiens
  CDR3 for alpha chain variable domain of TCR clone 148812 (TRAV29/DV5, TRAJ31)
CAASRNNNARLMF

SEQ ID NO: 297624 - protein, 13 aa, Homo sapiens
  CDR3 for beta chain variable domain of TCR clone 148812 (TRBV10-3, TRBJ2-7)
CASKLAVNYEHYF

SEQ ID NO: 297625 - protein, 13 aa, Homo sapiens
  CDR3 for alpha chain variable domain of TCR clone 148813 (TRAV2, TRAJ40)
CAVVTSGTYKYIF

SEQ ID NO: 297626 - protein, 16 aa, Homo sapiens
  CDR3 for beta chain variable domain of TCR clone 148813 (TRBV7-2, TRBJ2-1)
CASSLGRTSGDNEQFF

SEQ ID NO: 297627 - protein, 14 aa, Homo sapiens
  CDR3 for alpha chain variable domain of TCR clone 148814 (TRAV12-1, TRAJ46)
CVVTAKSSGAKLTF

SEQ ID NO: 297628 - protein, 17 aa, Homo sapiens
  CDR3 for beta chain variable domain of TCR clone 148814 (TRBV4-1, TRBJ2-3)
CASSQDPAGGPLDTQYF

SEQ ID NO: 297629 - protein, 13 aa, Homo sapiens
  CDR3 for alpha chain variable domain of TCR clone 148815 (TRAV12-2, TRAJ49)
CAVKPNTGNQFYF

SEQ ID NO: 297630 - protein, 15 aa, Homo sapiens
  CDR3 for beta chain variable domain of TCR clone 148815 (TRBV7-9, TRBJ2-2)
CASGPLDTFPGELFF

SEQ ID NO: 297631 - protein, 14 aa, Homo sapiens
  CDR3 for alpha chain variable domain of TCR clone 148816 (TRAV12-2, TRAJ13)
CAVKKTGGYQKVTF

SEQ ID NO: 297632 - protein, 15 aa, Homo sapiens
  CDR3 for beta chain variable domain of TCR clone 148816 (TRBV7-9, TRBJ1-1)
CASSDSLGENTEAFF

SEQ ID NO: 297633 - protein, 11 aa, Homo sapiens
  CDR3 for alpha chain variable domain of TCR clone 148817 (TRAV23/DV6, TRAJ58)
CAARLLRGETS

SEQ ID NO: 297634 - protein, 15 aa, Homo sapiens
  CDR3 for beta chain variable domain of TCR clone 148817 (TRBV28, TRBJ1-2)
CASSSHSIANYGYTF

SEQ ID NO: 297635 - protein, 15 aa, Homo sapiens
  CDR3 for alpha chain variable domain of TCR clone 148818 (TRAV21, TRAJ53)
YATLYSGGSNYKLTF

SEQ ID NO: 297636 - protein, 14 aa, Homo sapiens
  CDR3 for beta chain variable domain of TCR clone 148818 (TRBV7-2, TRBJ2-7)
CASRSQGAAYEQYF

SEQ ID NO: 297637 - protein, 15 aa, Homo sapiens
  CDR3 for alpha chain variable domain of TCR clone 148819 (TRAV22, TRAJ24)
CAVPLSTESWGKLQF

SEQ ID NO: 297638 - protein, 16 aa, Homo sapiens
  CDR3 for beta chain variable domain of TCR clone 148819 (TRBV28, TRBJ2-7)
CASSFPDRRLTYEQYF

SEQ ID NO: 297639 - protein, 14 aa, Homo sapiens
  CDR3 for alpha chain variable domain of TCR clone 148820 (TRAV12-2, TRAJ9)
CAVNMEGGGFKTIF

SEQ ID NO: 297640 - protein, 14 aa, Homo sapiens
  CDR3 for beta chain variable domain of TCR clone 148820 (TRBV27, TRBJ2-5)
CANSSLKGWETQYF

SEQ ID NO: 297641 - protein, 16 aa, Homo sapiens
  CDR3 for alpha chain variable domain of TCR clone 148821 (TRAV20, TRAJ28)
CAVRDPSGAGSYQLTF

SEQ ID NO: 297642 - protein, 15 aa, Homo sapiens
  CDR3 for beta chain variable domain of TCR clone 148821 (TRBV20-1, TRBJ2-7)
CSARDRVSGMDEQYF

SEQ ID NO: 297643 - protein, 15 aa, Homo sapiens
  CDR3 for alpha chain variable domain of TCR clone 148822 (TRAV26-2, TRAJ45)
CILRDRVDQEEVLTD

SEQ ID NO: 297644 - protein, 15 aa, Homo sapiens
  CDR3 for beta chain variable domain of TCR clone 148822 (TRBV7-6, TRBJ2-5)
CASSKPTGPHETQYF

SEQ ID NO: 297645 - protein, 16 aa, Homo sapiens
  CDR3 for alpha chain variable domain of TCR clone 148823 (TRAV4, TRAJ9)
CLVGDPNRPGGFKTVF

SEQ ID NO: 297646 - protein, 16 aa, Homo sapiens
  CDR3 for beta chain variable domain of TCR clone 148823 (TRBV28, TRBJ1-4)
CASSPPYRGRSEKLFF

SEQ ID NO: 297647 - protein, 11 aa, Homo sapiens
  CDR3 for alpha chain variable domain of TCR clone 148824 (TRAV13-1, TRAJ39)
CASHAGNILTF

SEQ ID NO: 297648 - protein, 15 aa, Homo sapiens
  CDR3 for beta chain variable domain of TCR clone 148824 (TRBV6-3, TRBJ2-7)
CASSSPGTVFYEQYF

SEQ ID NO: 297649 - protein, 14 aa, Homo sapiens
  CDR3 for alpha chain variable domain of TCR clone 148825 (TRAV17, TRAJ57)
CATDPQGGSEKLVF

SEQ ID NO: 297650 - protein, 15 aa, Homo sapiens
  CDR3 for beta chain variable domain of TCR clone 148825 (TRBV7-2, TRBJ2-3)
CASSLAGASIDTQYF

SEQ ID NO: 297651 - protein, 17 aa, Homo sapiens
  CDR3 for alpha chain variable domain of TCR clone 148826 (TRAV4, TRAJ13)
CIVGVQGSSGGYQKGTF

SEQ ID NO: 297652 - protein, 18 aa, Homo sapiens
  CDR3 for beta chain variable domain of TCR clone 148826 (TRBV15, TRBJ2-3)
CATSRDGARSWDTDTQYF

SEQ ID NO: 297653 - protein, 13 aa, Homo sapiens
  CDR3 for alpha chain variable domain of TCR clone 148827 (TRAV21, TRAJ33)
CAVAGDSNYQLIW

SEQ ID NO: 297654 - protein, 13 aa, Homo sapiens
  CDR3 for beta chain variable domain of TCR clone 148827 (TRBV7-3, TRBJ1-1)
CASSQDWGAEAFF

SEQ ID NO: 297655 - protein, 13 aa, Homo sapiens
  CDR3 for alpha chain variable domain of TCR clone 148828 (TRAV8-3, TRAJ44)
CAVVPGTASKLTF

SEQ ID NO: 297656 - protein, 14 aa, Homo sapiens
  CDR3 for beta chain variable domain of TCR clone 148828 (TRBV11-2, TRBJ2-3)
CGSSRLARTDTQYF

SEQ ID NO: 297657 - protein, 14 aa, Homo sapiens
  CDR3 for alpha chain variable domain of TCR clone 148829 (TRAV4, TRAJ23)
CLVGAGNQGGKLIF

SEQ ID NO: 297658 - protein, 14 aa, Homo sapiens
  CDR3 for beta chain variable domain of TCR clone 148829 (TRBV2, TRBJ2-5)
CASSEVLAQETQYF

SEQ ID NO: 297659 - protein, 12 aa, Homo sapiens
  CDR3 for alpha chain variable domain of TCR clone 148830 (TRAV12-1, TRAJ31)
CVVNRANASLMF

SEQ ID NO: 297660 - protein, 15 aa, Homo sapiens
  CDR3 for beta chain variable domain of TCR clone 148830 (TRBV19, TRBJ2-1)
CASNTDGDPNNEQFF

SEQ ID NO: 297661 - protein, 13 aa, Homo sapiens
  CDR3 for alpha chain variable domain of TCR clone 148831 (TRAV3, TRAJ20)
CAVRDTPPYKLSF

SEQ ID NO: 297662 - protein, 16 aa, Homo sapiens
  CDR3 for beta chain variable domain of TCR clone 148831 (TRBV20-1, TRBJ2-7)
CSARAPGLALSYEQYF

SEQ ID NO: 297663 - protein, 14 aa, Homo sapiens
  CDR3 for alpha chain variable domain of TCR clone 148832 (TRAV13-1, TRAJ6)
CAASITGGSYIPTF

SEQ ID NO: 297664 - protein, 15 aa, Homo sapiens
  CDR3 for beta chain variable domain of TCR clone 148832 (TRBV7-9, TRBJ1-5)
CASSQGHQPNQPQHF

SEQ ID NO: 297665 - protein, 14 aa, Homo sapiens
  CDR3 for alpha chain variable domain of TCR clone 148833 (TRAV4, TRAJ26)
CLMAPHNYGQNFVF

SEQ ID NO: 297666 - protein, 17 aa, Homo sapiens
  CDR3 for beta chain variable domain of TCR clone 148833 (TRBV24-1, TRBJ2-1)
CATSDVSTSGTYNEQFF

SEQ ID NO: 297667 - protein, 14 aa, Homo sapiens
  CDR3 for alpha chain variable domain of TCR clone 148834 (TRAV17, TRAJ35)
CATDRPGFGNVLHC

SEQ ID NO: 297668 - protein, 14 aa, Homo sapiens
  CDR3 for beta chain variable domain of TCR clone 148834 (TRBV18, TRBJ2-5)
CASSPGVSQETQYF

SEQ ID NO: 297669 - protein, 10 aa, Homo sapiens
  CDR3 for alpha chain variable domain of TCR clone 148835 (TRAV30, TRAJ24)
WMLTAGEIQF

SEQ ID NO: 297670 - protein, 16 aa, Homo sapiens
  CDR3 for beta chain variable domain of TCR clone 148835 (TRBV6-3, TRBJ1-1)
CASTDLGTVPNTEAFF

SEQ ID NO: 297671 - protein, 14 aa, Homo sapiens
  CDR3 for alpha chain variable domain of TCR clone 148836 (TRAV2, TRAJ37)
CAVDFTSNTGQLIF

SEQ ID NO: 297672 - protein, 17 aa, Homo sapiens
  CDR3 for beta chain variable domain of TCR clone 148836 (TRBV7-3, TRBJ2-3)
CASSLMKRMRGADTQYF

SEQ ID NO: 297673 - protein, 14 aa, Homo sapiens
  CDR3 for alpha chain variable domain of TCR clone 148837 (TRAV27, TRAJ44)
CAASFTGTASKLTF

SEQ ID NO: 297674 - protein, 14 aa, Homo sapiens
  CDR3 for beta chain variable domain of TCR clone 148837 (TRBV7-3, TRBJ2-1)
CASSLAGGTNEQFF

SEQ ID NO: 297675 - protein, 13 aa, Homo sapiens
  CDR3 for alpha chain variable domain of TCR clone 148838 (TRAV8-3, TRAJ36)
CAVGATGANNLFF

SEQ ID NO: 297676 - protein, 12 aa, Homo sapiens
  CDR3 for beta chain variable domain of TCR clone 148838 (TRBV2, TRBJ1-5)
CSRGGGNQPQHF

SEQ ID NO: 297677 - protein, 11 aa, Homo sapiens
  CDR3 for alpha chain variable domain of TCR clone 148839 (TRAV8-1, TRAJ47)
CAVNEWKQTGL

SEQ ID NO: 297678 - protein, 13 aa, Homo sapiens
  CDR3 for beta chain variable domain of TCR clone 148839 (TRBV11-2, TRBJ2-5)
CASSSTGEETQYF

SEQ ID NO: 297679 - protein, 12 aa, Homo sapiens
  CDR3 for alpha chain variable domain of TCR clone 148840 (TRAV26-1, TRAJ53)
CIEGGSNYKLTF

SEQ ID NO: 297680 - protein, 17 aa, Homo sapiens
  CDR3 for beta chain variable domain of TCR clone 148840 (TRBV7-3, TRBJ2-5)
CASSLGSGRSGSETQYF

SEQ ID NO: 297681 - protein, 14 aa, Homo sapiens
  CDR3 for alpha chain variable domain of TCR clone 148841 (TRAV23/DV6, TRAJ13)
CAASETGGYQKVNF

SEQ ID NO: 297682 - protein, 16 aa, Homo sapiens
  CDR3 for beta chain variable domain of TCR clone 148841 (TRBV5-1, TRBJ1-3)
CASSPWAPSSGNTIYF

SEQ ID NO: 297683 - protein, 12 aa, Homo sapiens
  CDR3 for alpha chain variable domain of TCR clone 148842 (TRAV13-1, TRAJ48)
CAANFGNEKLTF

SEQ ID NO: 297684 - protein, 12 aa, Homo sapiens
  CDR3 for beta chain variable domain of TCR clone 148842 (TRBV7-2, TRBJ2-1)
CASSPQDIEQFF

SEQ ID NO: 297685 - protein, 12 aa, Homo sapiens
  CDR3 for alpha chain variable domain of TCR clone 148843 (TRAV2, TRAJ32)
CAVGGATNKLIF

SEQ ID NO: 297686 - protein, 14 aa, Homo sapiens
  CDR3 for beta chain variable domain of TCR clone 148843 (TRBV7-7, TRBJ2-2)
CATRQDSDTGELFF

SEQ ID NO: 297687 - protein, 13 aa, Homo sapiens
  CDR3 for alpha chain variable domain of TCR clone 148844 (TRAV9-2, TRAJ49)
CALRPNTGNQFYF

SEQ ID NO: 297688 - protein, 14 aa, Homo sapiens
  CDR3 for beta chain variable domain of TCR clone 148844 (TRBV9, TRBJ2-7)
CASSVAGGVYEQYF

SEQ ID NO: 297689 - protein, 14 aa, Homo sapiens
  CDR3 for alpha chain variable domain of TCR clone 148845 (TRAV2, TRAJ37)
CAVDFTSNTGKLIF

SEQ ID NO: 297690 - protein, 18 aa, Homo sapiens
  CDR3 for beta chain variable domain of TCR clone 148845 (TRBV10-3, TRBJ2-3)
CAISESRVGPMRGDTQYF

SEQ ID NO: 297691 - protein, 12 aa, Homo sapiens
  CDR3 for alpha chain variable domain of TCR clone 148846 (TRAV27, TRAJ35)
CAGADFGNVLHC

SEQ ID NO: 297692 - protein, 13 aa, Homo sapiens
  CDR3 for beta chain variable domain of TCR clone 148846 (TRBV27, TRBJ2-1)
CASRTLGVGEQFF

SEQ ID NO: 297693 - protein, 13 aa, Homo sapiens
  CDR3 for alpha chain variable domain of TCR clone 148847 (TRAV8-1, TRAJ30)
CAVIMNRDDKIIF

SEQ ID NO: 297694 - protein, 14 aa, Homo sapiens
  CDR3 for beta chain variable domain of TCR clone 148847 (TRBV7-8, TRBJ1-6)
CASSLQGANSPLHF

SEQ ID NO: 297695 - protein, 10 aa, Homo sapiens
  CDR3 for alpha chain variable domain of TCR clone 148848 (TRAV21, TRAJ34)
CAADTDKHIF

SEQ ID NO: 297696 - protein, 16 aa, Homo sapiens
  CDR3 for beta chain variable domain of TCR clone 148848 (TRBV6-5, TRBJ2-2)
CASSHVSRAQPGELFF

SEQ ID NO: 297697 - protein, 12 aa, Homo sapiens
  CDR3 for alpha chain variable domain of TCR clone 148849 (TRAV12-2, TRAJ3)
CAVWSSASKIIF

SEQ ID NO: 297698 - protein, 18 aa, Homo sapiens
  CDR3 for beta chain variable domain of TCR clone 148849 (TRBV11-2, TRBJ2-3)
CASSLGGASRGAPNTQYF

SEQ ID NO: 297699 - protein, 11 aa, Homo sapiens
  CDR3 for alpha chain variable domain of TCR clone 148850 (TRAV3, TRAJ31)
CAALPGARLMF

SEQ ID NO: 297700 - protein, 15 aa, Homo sapiens
  CDR3 for beta chain variable domain of TCR clone 148850 (TRBV11-3, TRBJ1-1)
CASSLGGPGGTEAFF

SEQ ID NO: 297701 - protein, 15 aa, Homo sapiens
  CDR3 for alpha chain variable domain of TCR clone 148851 (TRAV23/DV6, TRAJ13)
CAAWPGGGGYQKVTF

SEQ ID NO: 297702 - protein, 15 aa, Homo sapiens
  CDR3 for beta chain variable domain of TCR clone 148851 (TRBV7-9, TRBJ1-5)
CASSQGHQPNQPQHF

SEQ ID NO: 297703 - protein, 11 aa, Homo sapiens
  CDR3 for alpha chain variable domain of TCR clone 148852 (TRAV2, TRAJ13)
CASGGYQKVTF

SEQ ID NO: 297704 - protein, 15 aa, Homo sapiens
  CDR3 for beta chain variable domain of TCR clone 148852 (TRBV6-5, TRBJ2-4)
CASSLRESPKNIQYF

SEQ ID NO: 297705 - protein, 14 aa, Homo sapiens
  CDR3 for alpha chain variable domain of TCR clone 148853 (TRAV12-1, TRAJ12)
CVVNGRDSSYRLIF

SEQ ID NO: 297706 - protein, 13 aa, Homo sapiens
  CDR3 for beta chain variable domain of TCR clone 148853 (TRBV28, TRBJ2-2)
CASIRESTGELFF

SEQ ID NO: 297707 - protein, 11 aa, Homo sapiens
  CDR3 for alpha chain variable domain of TCR clone 148854 (TRAV12-1, TRAJ21)
CVVNNFNKFYF

SEQ ID NO: 297708 - protein, 13 aa, Homo sapiens
  CDR3 for beta chain variable domain of TCR clone 148854 (TRBV29-1, TRBJ2-3)
CSATRGGRDTQYF

SEQ ID NO: 297709 - protein, 15 aa, Homo sapiens
  CDR3 for alpha chain variable domain of TCR clone 148855 (TRAV3, TRAJ37)
CAVSRGSGNTGKLIF

SEQ ID NO: 297710 - protein, 14 aa, Homo sapiens
  CDR3 for beta chain variable domain of TCR clone 148855 (TRBV19, TRBJ2-1)
CASPTFVLSGEQFF

SEQ ID NO: 297711 - protein, 15 aa, Homo sapiens
  CDR3 for alpha chain variable domain of TCR clone 148856 (TRAV21, TRAJ32)
CAVNSYGGATNKLII

SEQ ID NO: 297712 - protein, 18 aa, Homo sapiens
  CDR3 for beta chain variable domain of TCR clone 148856 (TRBV7-9, TRBJ2-1)
CASSTGLAEGSSYNEQFF

SEQ ID NO: 297713 - protein, 11 aa, Homo sapiens
  CDR3 for alpha chain variable domain of TCR clone 148857 (TRAV2, TRAJ13)
CVSGGYQKVTF

SEQ ID NO: 297714 - protein, 14 aa, Homo sapiens
  CDR3 for beta chain variable domain of TCR clone 148857 (TRBV25-1, TRBJ1-1)
CASTHLGGNTEAFF

SEQ ID NO: 297715 - protein, 14 aa, Homo sapiens
  CDR3 for alpha chain variable domain of TCR clone 148858 (TRAV1-2, TRAJ16)
CAVNRFSDCQKLLF

SEQ ID NO: 297716 - protein, 15 aa, Homo sapiens
  CDR3 for beta chain variable domain of TCR clone 148858 (TRBV20-1, TRBJ2-7)
CSARDRVSGMDEQYF

SEQ ID NO: 297717 - protein, 12 aa, Homo sapiens
  CDR3 for alpha chain variable domain of TCR clone 148859 (TRAV1-2, TRAJ33)
CAALDSYYQLIW

SEQ ID NO: 297718 - protein, 14 aa, Homo sapiens
  CDR3 for beta chain variable domain of TCR clone 148859 (TRBV19, TRBJ2-3)
CASSAPRGTDTQYF

SEQ ID NO: 297719 - protein, 15 aa, Homo sapiens
  CDR3 for alpha chain variable domain of TCR clone 148860 (TRAV25, TRAJ53)
CAGPRSGGSNYKLTF

SEQ ID NO: 297720 - protein, 15 aa, Homo sapiens
  CDR3 for beta chain variable domain of TCR clone 148860 (TRBV28, TRBJ1-2)
CASSSHSIANYGYTF

SEQ ID NO: 297721 - protein, 14 aa, Homo sapiens
  CDR3 for alpha chain variable domain of TCR clone 148861 (TRAV13-1, TRAJ35)
CAASKGGFGNVLHC

SEQ ID NO: 297722 - protein, 16 aa, Homo sapiens
  CDR3 for beta chain variable domain of TCR clone 148861 (TRBV19, TRBJ2-5)
CASSIGGLAAQETQYF

SEQ ID NO: 297723 - protein, 11 aa, Homo sapiens
  CDR3 for alpha chain variable domain of TCR clone 148862 (TRAV2, TRAJ33)
CAVESNYQLIW

SEQ ID NO: 297724 - protein, 13 aa, Homo sapiens
  CDR3 for beta chain variable domain of TCR clone 148862 (TRBV7-7, TRBJ2-3)
CASSLSRADTQYF

SEQ ID NO: 297725 - protein, 10 aa, Homo sapiens
  CDR3 for alpha chain variable domain of TCR clone 148863 (TRAV16, TRAJ22)
SAMYLRQLTF

SEQ ID NO: 297726 - protein, 17 aa, Homo sapiens
  CDR3 for beta chain variable domain of TCR clone 148863 (TRBV20-1, TRBJ2-1)
CSARDPLAGVWDNEQFF

SEQ ID NO: 297727 - protein, 14 aa, Homo sapiens
  CDR3 for alpha chain variable domain of TCR clone 148864 (TRAV17, TRAJ45)
CATASGGGADGLTF

SEQ ID NO: 297728 - protein, 16 aa, Homo sapiens
  CDR3 for beta chain variable domain of TCR clone 148864 (TRBV13, TRBJ2-3)
CQQPLQGSGGRNTQYF

SEQ ID NO: 297729 - protein, 14 aa, Homo sapiens
  CDR3 for alpha chain variable domain of TCR clone 148865 (TRAV13-1, TRAJ35)
CAASKGGFGNVLIC

SEQ ID NO: 297730 - protein, 13 aa, Homo sapiens
  CDR3 for beta chain variable domain of TCR clone 148865 (TRBV7-3, TRBJ1-1)
CASSQDWGAEAFF

SEQ ID NO: 297731 - protein, 10 aa, Homo sapiens
  CDR3 for alpha chain variable domain of TCR clone 148866 (TRAV21, TRAJ31)
CAVDNARLMF

SEQ ID NO: 297732 - protein, 20 aa, Homo sapiens
  CDR3 for beta chain variable domain of TCR clone 148866 (TRBV7-8, TRBJ2-2)
CASSHLFPGPTIHITGELFF

SEQ ID NO: 297733 - protein, 12 aa, Homo sapiens
  CDR3 for alpha chain variable domain of TCR clone 148867 (TRAV3, TRAJ20)
CAVRDHDYNLSF

SEQ ID NO: 297734 - protein, 15 aa, Homo sapiens
  CDR3 for beta chain variable domain of TCR clone 148867 (TRBV9, TRBJ1-6)
CASSVAGTGDSPLHF

SEQ ID NO: 297735 - protein, 14 aa, Homo sapiens
  CDR3 for alpha chain variable domain of TCR clone 148868 (TRAV4, TRAJ9)
CLVGSGTGGFKTIV

SEQ ID NO: 297736 - protein, 14 aa, Homo sapiens
  CDR3 for beta chain variable domain of TCR clone 148868 (TRBV7-9, TRBJ2-4)
CASSLAMGGNIQYF

SEQ ID NO: 297737 - protein, 13 aa, Homo sapiens
  CDR3 for alpha chain variable domain of TCR clone 148869 (TRAV14/DV4, TRAJ20)
CAMREGRDYKLSF

SEQ ID NO: 297738 - protein, 15 aa, Homo sapiens
  CDR3 for beta chain variable domain of TCR clone 148869 (TRBV7-3, TRBJ2-1)
CASSLPGGSFDEQFF

SEQ ID NO: 297739 - protein, 12 aa, Homo sapiens
  CDR3 for alpha chain variable domain of TCR clone 148870 (TRAV21, TRAJ13)
PGPSGGYQKVTF

SEQ ID NO: 297740 - protein, 16 aa, Homo sapiens
  CDR3 for beta chain variable domain of TCR clone 148870 (TRBV29-1, TRBJ2-6)
CSVEDITDSGANVLTF

SEQ ID NO: 297741 - protein, 17 aa, Homo sapiens
  CDR3 for alpha chain variable domain of TCR clone 148871 (TRAV3, TRAJ42)
CALRDRDYVGSQGNLIF

SEQ ID NO: 297742 - protein, 15 aa, Homo sapiens
  CDR3 for beta chain variable domain of TCR clone 148871 (TRBV6-6, TRBJ2-7)
CASSYSYGGSYEQYF

SEQ ID NO: 297743 - protein, 13 aa, Homo sapiens
  CDR3 for alpha chain variable domain of TCR clone 148872 (TRAV8-3, TRAJ36)
CAVGATGATNLFF

SEQ ID NO: 297744 - protein, 13 aa, Homo sapiens
  CDR3 for beta chain variable domain of TCR clone 148872 (TRBV11-2, TRBJ2-5)
CASSSTGEETQYF

SEQ ID NO: 297745 - protein, 14 aa, Homo sapiens
  CDR3 for alpha chain variable domain of TCR clone 148873 (TRAV13-1, TRAJ35)
CVASKGGFGNVLHR

SEQ ID NO: 297746 - protein, 13 aa, Homo sapiens
  CDR3 for beta chain variable domain of TCR clone 148873 (TRBV7-3, TRBJ1-1)
CASSQDWGAEAFF

SEQ ID NO: 297747 - protein, 15 aa, Homo sapiens
  CDR3 for alpha chain variable domain of TCR clone 148874 (TRAV30, TRAJ13)
CGTQGVTGGYQKVTF

SEQ ID NO: 297748 - protein, 17 aa, Homo sapiens
  CDR3 for beta chain variable domain of TCR clone 148874 (TRBV20-1, TRBJ2-2)
CSARVKRTHVRYGELFF

SEQ ID NO: 297749 - protein, 15 aa, Homo sapiens
  CDR3 for alpha chain variable domain of TCR clone 148875 (TRAV13-1, TRAJ36)
CAASIRQTGANNLFF

SEQ ID NO: 297750 - protein, 17 aa, Homo sapiens
  CDR3 for beta chain variable domain of TCR clone 148875 (TRBV20-1, TRBJ2-2)
CRARDRTSGRHTGELFF

SEQ ID NO: 297751 - protein, 14 aa, Homo sapiens
  CDR3 for alpha chain variable domain of TCR clone 148876 (TRAV1-2, TRAJ16)
CAVNRFSDDQKLLF

SEQ ID NO: 297752 - protein, 16 aa, Homo sapiens
  CDR3 for beta chain variable domain of TCR clone 148876 (TRBV7-2, TRBJ2-7)
CASSLDLSGGAYEQYF

SEQ ID NO: 297753 - protein, 14 aa, Homo sapiens
  CDR3 for alpha chain variable domain of TCR clone 148877 (TRAV8-2, TRAJ23)
CGVSDDNQGGKLIF

SEQ ID NO: 297754 - protein, 16 aa, Homo sapiens
  CDR3 for beta chain variable domain of TCR clone 148877 (TRBV4-2, TRBJ2-5)
CASSQELVGSQETQYF

SEQ ID NO: 297755 - protein, 15 aa, Homo sapiens
  CDR3 for alpha chain variable domain of TCR clone 148878 (TRAV21, TRAJ24)
CAARSSTDSWGKLQF

SEQ ID NO: 297756 - protein, 15 aa, Homo sapiens
  CDR3 for beta chain variable domain of TCR clone 148878 (TRBV5-1, TRBJ2-1)
CASRPPRAPYNEQFF

SEQ ID NO: 297757 - protein, 12 aa, Homo sapiens
  CDR3 for alpha chain variable domain of TCR clone 148879 (TRAV16, TRAJ10)
CSRTGGGNKLTF

SEQ ID NO: 297758 - protein, 13 aa, Homo sapiens
  CDR3 for beta chain variable domain of TCR clone 148879 (TRBV7-3, TRBJ1-1)
CASSQDWGAEDFF

SEQ ID NO: 297759 - protein, 14 aa, Homo sapiens
  CDR3 for alpha chain variable domain of TCR clone 148880 (TRAV1-2, TRAJ16)
CAVNRFSDGQKLLF

SEQ ID NO: 297760 - protein, 16 aa, Homo sapiens
  CDR3 for beta chain variable domain of TCR clone 148880 (TRBV12-4, TRBJ2-7)
CASSPEGQGSSYEQYF

SEQ ID NO: 297761 - protein, 14 aa, Homo sapiens
  CDR3 for alpha chain variable domain of TCR clone 148881 (TRAV35, TRAJ22)
CAGLRPGSARQLTF

SEQ ID NO: 297762 - protein, 19 aa, Homo sapiens
  CDR3 for beta chain variable domain of TCR clone 148881 (TRBV19, TRBJ2-2)
CASTRPGLAGGRVTGELFF

SEQ ID NO: 297763 - protein, 14 aa, Homo sapiens
  CDR3 for alpha chain variable domain of TCR clone 148882 (TRAV17, TRAJ37)
CATDGSSNTGKLIF

SEQ ID NO: 297764 - protein, 13 aa, Homo sapiens
  CDR3 for beta chain variable domain of TCR clone 148882 (TRBV20-1, TRBJ1-1)
CSARGGGNTEAFF

SEQ ID NO: 297765 - protein, 14 aa, Homo sapiens
  CDR3 for alpha chain variable domain of TCR clone 148883 (TRAV13-1, TRAJ53)
CATSTGGSNYKLTF

SEQ ID NO: 297766 - protein, 14 aa, Homo sapiens
  CDR3 for beta chain variable domain of TCR clone 148883 (TRBV5-4, TRBJ1-4)
CASSFSGGAENPFF

SEQ ID NO: 297767 - protein, 11 aa, Homo sapiens
  CDR3 for alpha chain variable domain of TCR clone 148884 (TRAV21, TRAJ34)
CAVTNTDKLIF

SEQ ID NO: 297768 - protein, 16 aa, Homo sapiens
  CDR3 for beta chain variable domain of TCR clone 148884 (TRBV2, TRBJ2-7)
CASSEPWTGPSYEQYF

SEQ ID NO: 297769 - protein, 13 aa, Homo sapiens
  CDR3 for alpha chain variable domain of TCR clone 148885 (TRAV36/DV7, TRAJ50)
CAVSKTSYDKVIF

SEQ ID NO: 297770 - protein, 13 aa, Homo sapiens
  CDR3 for beta chain variable domain of TCR clone 148885 (TRBV18, TRBJ2-7)
CASSPGRTYEQYF

SEQ ID NO: 297771 - protein, 13 aa, Homo sapiens
  CDR3 for alpha chain variable domain of TCR clone 148886 (TRAV12-1, TRAJ26)
CVVRRNYGQNFVF

SEQ ID NO: 297772 - protein, 16 aa, Homo sapiens
  CDR3 for beta chain variable domain of TCR clone 148886 (TRBV19, TRBJ2-2)
CASRSPGTGATGELFF

SEQ ID NO: 297773 - protein, 12 aa, Homo sapiens
  CDR3 for alpha chain variable domain of TCR clone 148887 (TRAV35, TRAJ39)
LAPNNAGNMPTF

SEQ ID NO: 297774 - protein, 16 aa, Homo sapiens
  CDR3 for beta chain variable domain of TCR clone 148887 (TRBV2, TRBJ2-3)
CASSTSVEGVTYTQYF

SEQ ID NO: 297775 - protein, 15 aa, Homo sapiens
  CDR3 for alpha chain variable domain of TCR clone 148888 (TRAV12-3, TRAJ6)
CAMSAASGGSYIPTF

SEQ ID NO: 297776 - protein, 13 aa, Homo sapiens
  CDR3 for beta chain variable domain of TCR clone 148888 (TRBV20-1, TRBJ1-2)
CSASPEFNYGYTF

SEQ ID NO: 297777 - protein, 14 aa, Homo sapiens
  CDR3 for alpha chain variable domain of TCR clone 148889 (TRAV13-1, TRAJ35)
CAASKGGFGNVRHC

SEQ ID NO: 297778 - protein, 15 aa, Homo sapiens
  CDR3 for beta chain variable domain of TCR clone 148889 (TRBV27, TRBJ2-1)
CASSNGGGSSNEQFF

SEQ ID NO: 297779 - protein, 18 aa, Homo sapiens
  CDR3 for alpha chain variable domain of TCR clone 148890 (TRAV21, TRAJ52)
CAVRPSPAGGTSYGKLTF

SEQ ID NO: 297780 - protein, 16 aa, Homo sapiens
  CDR3 for beta chain variable domain of TCR clone 148890 (TRBV7-3, TRBJ2-1)
CVSSLEGYRSYNEQFF

SEQ ID NO: 297781 - protein, 14 aa, Homo sapiens
  CDR3 for alpha chain variable domain of TCR clone 148891 (TRAV17, TRAJ6)
CATDASGGSYIPTF

SEQ ID NO: 297782 - protein, 17 aa, Homo sapiens
  CDR3 for beta chain variable domain of TCR clone 148891 (TRBV7-8, TRBJ2-6)
CASSAGTGGAGANVLTF

SEQ ID NO: 297783 - protein, 12 aa, Homo sapiens
  CDR3 for alpha chain variable domain of TCR clone 148892 (TRAV27, TRAJ34)
CAGAKNTDKIIF

SEQ ID NO: 297784 - protein, 13 aa, Homo sapiens
  CDR3 for beta chain variable domain of TCR clone 148892 (TRBV4-1, TRBJ2-1)
CASSQEVQYEQFF

SEQ ID NO: 297785 - protein, 15 aa, Homo sapiens
  CDR3 for alpha chain variable domain of TCR clone 148893 (TRAV26-1, TRAJ29)
CIVRVEGSGNTPLVF

SEQ ID NO: 297786 - protein, 15 aa, Homo sapiens
  CDR3 for beta chain variable domain of TCR clone 148893 (TRBV28, TRBJ2-5)
CASSPGQGSTETQYF

SEQ ID NO: 297787 - protein, 12 aa, Homo sapiens
  CDR3 for alpha chain variable domain of TCR clone 148894 (TRAV13-1, TRAJ42)
SVLRGSQGNLIF

SEQ ID NO: 297788 - protein, 13 aa, Homo sapiens
  CDR3 for beta chain variable domain of TCR clone 148894 (TRBV2, TRBJ1-4)
CASSESGVEKLFF

SEQ ID NO: 297789 - protein, 14 aa, Homo sapiens
  CDR3 for alpha chain variable domain of TCR clone 148895 (TRAV17, TRAJ56)
CATVPAGANSKLTF

SEQ ID NO: 297790 - protein, 13 aa, Homo sapiens
  CDR3 for beta chain variable domain of TCR clone 148895 (TRBV7-9, TRBJ2-7)
CASSFARAYEQYF

SEQ ID NO: 297791 - protein, 17 aa, Homo sapiens
  CDR3 for alpha chain variable domain of TCR clone 148896 (TRAV3, TRAJ6)
CAVRDGPRAGGSYIPTF

SEQ ID NO: 297792 - protein, 16 aa, Homo sapiens
  CDR3 for beta chain variable domain of TCR clone 148896 (TRBV27, TRBJ2-2)
CARSFRGLVRTGELFF

SEQ ID NO: 297793 - protein, 11 aa, Homo sapiens
  CDR3 for alpha chain variable domain of TCR clone 148897 (TRAV23/DV6, TRAJ58)
CAARLLRGETS

SEQ ID NO: 297794 - protein, 15 aa, Homo sapiens
  CDR3 for beta chain variable domain of TCR clone 148897 (TRBV19, TRBJ2-7)
CASSIGGGLVNEQYF

SEQ ID NO: 297795 - protein, 13 aa, Homo sapiens
  CDR3 for alpha chain variable domain of TCR clone 148898 (TRAV2, TRAJ40)
CAVVTSGTYKDIF

SEQ ID NO: 297796 - protein, 16 aa, Homo sapiens
  CDR3 for beta chain variable domain of TCR clone 148898 (TRBV12-5, TRBJ2-5)
CASGPRTSGNQETQYF

SEQ ID NO: 297797 - protein, 16 aa, Homo sapiens
  CDR3 for alpha chain variable domain of TCR clone 148899 (TRAV21, TRAJ52)
CAVTNAGGTSYGKMTF

SEQ ID NO: 297798 - protein, 11 aa, Homo sapiens
  CDR3 for beta chain variable domain of TCR clone 148899 (TRBV2, TRBJ1-1)
CASREGTEAFF

SEQ ID NO: 297799 - protein, 16 aa, Homo sapiens
  CDR3 for alpha chain variable domain of TCR clone 148900 (TRAV1-1, TRAJ28)
CAVRDDSGAGSYQLTF

SEQ ID NO: 297800 - protein, 12 aa, Homo sapiens
  CDR3 for beta chain variable domain of TCR clone 148900 (TRBV11-2, TRBJ2-5)
CASSLDTKTQYF

SEQ ID NO: 297801 - protein, 13 aa, Homo sapiens
  CDR3 for alpha chain variable domain of TCR clone 148901 (TRAV2, TRAJ29)
CAVRNSGNTPIVF

SEQ ID NO: 297802 - protein, 14 aa, Homo sapiens
  CDR3 for beta chain variable domain of TCR clone 148901 (TRBV7-9, TRBJ2-7)
CASSLQQGGYEQYF

SEQ ID NO: 297803 - protein, 14 aa, Homo sapiens
  CDR3 for alpha chain variable domain of TCR clone 148902 (TRAV1-2, TRAJ6)
CAVSLSGGSYIPTF

SEQ ID NO: 297804 - protein, 15 aa, Homo sapiens
  CDR3 for beta chain variable domain of TCR clone 148902 (TRBV28, TRBJ2-7)
CASSPGGRGFYERYF

SEQ ID NO: 297805 - protein, 12 aa, Homo sapiens
  CDR3 for alpha chain variable domain of TCR clone 148903 (TRAV13-1, TRAJ22)
CVPRGFCKATDL

SEQ ID NO: 297806 - protein, 16 aa, Homo sapiens
  CDR3 for beta chain variable domain of TCR clone 148903 (TRBV29-1, TRBJ2-7)
CSVEVVGTSGSYEQYF

SEQ ID NO: 297807 - protein, 16 aa, Homo sapiens
  CDR3 for alpha chain variable domain of TCR clone 148904 (TRAV26-2, TRAJ45)
CTTASPIGGGADGLTF

SEQ ID NO: 297808 - protein, 16 aa, Homo sapiens
  CDR3 for beta chain variable domain of TCR clone 148904 (TRBV12-4, TRBJ2-1)
CASSAVGQGNGDEQFF

SEQ ID NO: 297809 - protein, 12 aa, Homo sapiens
  CDR3 for alpha chain variable domain of TCR clone 148905 (TRAV4, TRAJ26)
CLVGDYGQNFVF

SEQ ID NO: 297810 - protein, 16 aa, Homo sapiens
  CDR3 for beta chain variable domain of TCR clone 148905 (TRBV7-2, TRBJ1-2)
CASSSNQDRRAHGYTF

SEQ ID NO: 297811 - protein, 15 aa, Homo sapiens
  CDR3 for alpha chain variable domain of TCR clone 148906 (TRAV2, TRAJ9)
CAVAALNTGGFKTIF

SEQ ID NO: 297812 - protein, 14 aa, Homo sapiens
  CDR3 for beta chain variable domain of TCR clone 148906 (TRBV7-8, TRBJ2-5)
CASSDTGGQETQYF

SEQ ID NO: 297813 - protein, 11 aa, Homo sapiens
  CDR3 for alpha chain variable domain of TCR clone 148907 (TRAV2, TRAJ33)
CAVESNYQLIW

SEQ ID NO: 297814 - protein, 14 aa, Homo sapiens
  CDR3 for beta chain variable domain of TCR clone 148907 (TRBV7-2, TRBJ1-5)
CASSTQGAGQPQHF

SEQ ID NO: 297815 - protein, 15 aa, Homo sapiens
  CDR3 for alpha chain variable domain of TCR clone 148908 (TRAV5, TRAJ33)
CAEAPAMDRNYQLIW

SEQ ID NO: 297816 - protein, 12 aa, Homo sapiens
  CDR3 for beta chain variable domain of TCR clone 148908 (TRBV6-3, TRBJ2-7)
CASSLTPYEQYF

SEQ ID NO: 297817 - protein, 15 aa, Homo sapiens
  CDR3 for alpha chain variable domain of TCR clone 148909 (TRAV16, TRAJ26)
CITVLQRNYGQNFVF

SEQ ID NO: 297818 - protein, 15 aa, Homo sapiens
  CDR3 for beta chain variable domain of TCR clone 148909 (TRBV7-2, TRBJ2-3)
CASILTGTSTDTQYF

SEQ ID NO: 297819 - protein, 12 aa, Homo sapiens
  CDR3 for alpha chain variable domain of TCR clone 148910 (TRAV21, TRAJ20)
CAVRGNDYKLSF

SEQ ID NO: 297820 - protein, 14 aa, Homo sapiens
  CDR3 for beta chain variable domain of TCR clone 148910 (TRBV7-8, TRBJ2-7)
CASCQTQGADEQYF

SEQ ID NO: 297821 - protein, 14 aa, Homo sapiens
  CDR3 for alpha chain variable domain of TCR clone 148911 (TRAV29/DV5, TRAJ48)
CAAMALFGNVKLTF

SEQ ID NO: 297822 - protein, 15 aa, Homo sapiens
  CDR3 for beta chain variable domain of TCR clone 148911 (TRBV7-2, TRBJ2-1)
CASTHGTGIYNEQFF

SEQ ID NO: 297823 - protein, 14 aa, Homo sapiens
  CDR3 for alpha chain variable domain of TCR clone 148912 (TRAV1-2, TRAJ16)
CAVNLFSDGQKLLF

SEQ ID NO: 297824 - protein, 13 aa, Homo sapiens
  CDR3 for beta chain variable domain of TCR clone 148912 (TRBV7-2, TRBJ2-2)
CASSLAVTGELFF

SEQ ID NO: 297825 - protein, 14 aa, Homo sapiens
  CDR3 for alpha chain variable domain of TCR clone 148913 (TRAV1-2, TRAJ16)
CAVNRFSYGQKLLF

SEQ ID NO: 297826 - protein, 13 aa, Homo sapiens
  CDR3 for beta chain variable domain of TCR clone 148913 (TRBV7-3, TRBJ2-1)
CASSPGSYNEQFF

SEQ ID NO: 297827 - protein, 13 aa, Homo sapiens
  CDR3 for alpha chain variable domain of TCR clone 148914 (TRAV17, TRAJ5)
CAPMDTGRRALTF

SEQ ID NO: 297828 - protein, 17 aa, Homo sapiens
  CDR3 for beta chain variable domain of TCR clone 148914 (TRBV24-1, TRBJ2-1)
CATSDVSTSGTYNEQFF

SEQ ID NO: 297829 - protein, 15 aa, Homo sapiens
  CDR3 for alpha chain variable domain of TCR clone 148915 (TRAV4, TRAJ17)
CLVGDIGAAGNKLTL

SEQ ID NO: 297830 - protein, 14 aa, Homo sapiens
  CDR3 for beta chain variable domain of TCR clone 148915 (TRBV6-3, TRBJ2-7)
CASSYSVRVYEQYF

SEQ ID NO: 297831 - protein, 16 aa, Homo sapiens
  CDR3 for alpha chain variable domain of TCR clone 148916 (TRAV12-2, TRAJ40)
CAVIRGVTSGTYKYIF

SEQ ID NO: 297832 - protein, 14 aa, Homo sapiens
  CDR3 for beta chain variable domain of TCR clone 148916 (TRBV20-1, TRBJ2-5)
CSARDGRAGETQYF

SEQ ID NO: 297833 - protein, 13 aa, Homo sapiens
  CDR3 for alpha chain variable domain of TCR clone 148917 (TRAV1-2, TRAJ9)
CAALNTGGFKTIF

SEQ ID NO: 297834 - protein, 17 aa, Homo sapiens
  CDR3 for beta chain variable domain of TCR clone 148917 (TRBV19, TRBJ2-7)
CASSISFYDSYPYEQYF

SEQ ID NO: 297835 - protein, 16 aa, Homo sapiens
  CDR3 for alpha chain variable domain of TCR clone 148918 (TRAV4, TRAJ22)
CLVGALYSGSARQLPF

SEQ ID NO: 297836 - protein, 16 aa, Homo sapiens
  CDR3 for beta chain variable domain of TCR clone 148918 (TRBV7-9, TRBJ2-1)
CASSDVAGGSYNEQFF

SEQ ID NO: 297837 - protein, 18 aa, Homo sapiens
  CDR3 for alpha chain variable domain of TCR clone 148919 (TRAV21, TRAJ52)
CAVRPSPVGGTSYGKLTF

SEQ ID NO: 297838 - protein, 13 aa, Homo sapiens
  CDR3 for beta chain variable domain of TCR clone 148919 (TRBV29-1, TRBJ2-2)
CSVYREDTGELFF

SEQ ID NO: 297839 - protein, 14 aa, Homo sapiens
  CDR3 for alpha chain variable domain of TCR clone 148920 (TRAV8-3, TRAJ21)
CAVDARDNFNKFYF

SEQ ID NO: 297840 - protein, 16 aa, Homo sapiens
  CDR3 for beta chain variable domain of TCR clone 148920 (TRBV20-1, TRBJ2-1)
CSARDLAGHSFNEQFF

SEQ ID NO: 297841 - protein, 13 aa, Homo sapiens
  CDR3 for alpha chain variable domain of TCR clone 148921 (TRAV21, TRAJ15)
CAVANQAGTALIF

SEQ ID NO: 297842 - protein, 17 aa, Homo sapiens
  CDR3 for beta chain variable domain of TCR clone 148921 (TRBV2, TRBJ1-4)
CASSKRELTQGEEKLFF

SEQ ID NO: 297843 - protein, 12 aa, Homo sapiens
  CDR3 for alpha chain variable domain of TCR clone 148922 (TRAV13-2, TRAJ39)
CAESRPGNMLTF

SEQ ID NO: 297844 - protein, 15 aa, Homo sapiens
  CDR3 for beta chain variable domain of TCR clone 148922 (TRBV9, TRBJ1-6)
CASRVAGTGDSPLHF

SEQ ID NO: 297845 - protein, 10 aa, Homo sapiens
  CDR3 for alpha chain variable domain of TCR clone 148923 (TRAV1-2, TRAJ20)
CVPNDYKLSF

SEQ ID NO: 297846 - protein, 12 aa, Homo sapiens
  CDR3 for beta chain variable domain of TCR clone 148923 (TRBV7-8, TRBJ2-7)
CASSLGDREQYF

SEQ ID NO: 297847 - protein, 14 aa, Homo sapiens
  CDR3 for alpha chain variable domain of TCR clone 148924 (TRAV8-4, TRAJ45)
CASGGGGGAVGLTF

SEQ ID NO: 297848 - protein, 20 aa, Homo sapiens
  CDR3 for beta chain variable domain of TCR clone 148924 (TRBV4-3, TRBJ2-3)
CASSPRVEMRASGRPDTQYF

SEQ ID NO: 297849 - protein, 12 aa, Homo sapiens
  CDR3 for alpha chain variable domain of TCR clone 148925 (TRAV16, TRAJ10)
CSRTGGGNKLTF

SEQ ID NO: 297850 - protein, 15 aa, Homo sapiens
  CDR3 for beta chain variable domain of TCR clone 148925 (TRBV19, TRBJ2-1)
CASSRPGQNYNEQFF

SEQ ID NO: 297851 - protein, 15 aa, Homo sapiens
  CDR3 for alpha chain variable domain of TCR clone 148926 (TRAV3, TRAJ47)
CAARDIGKYGNKLVF

SEQ ID NO: 297852 - protein, 14 aa, Homo sapiens
  CDR3 for beta chain variable domain of TCR clone 148926 (TRBV13, TRBJ2-5)
CASSLERVGETQYF

SEQ ID NO: 297853 - protein, 14 aa, Homo sapiens
  CDR3 for alpha chain variable domain of TCR clone 148927 (TRAV8-3, TRAJ9)
CAVVYNPGGFTTIF

SEQ ID NO: 297854 - protein, 14 aa, Homo sapiens
  CDR3 for beta chain variable domain of TCR clone 148927 (TRBV7-3, TRBJ2-2)
CASSSGGYTGELFF

SEQ ID NO: 297855 - protein, 17 aa, Homo sapiens
  CDR3 for alpha chain variable domain of TCR clone 148928 (TRAV8-1, TRAJ43)
CAVTNDMRFGAGTRLTV

SEQ ID NO: 297856 - protein, 13 aa, Homo sapiens
  CDR3 for beta chain variable domain of TCR clone 148928 (TRBV7-3, TRBJ1-1)
CASSQEWGAEAFF

SEQ ID NO: 297857 - protein, 16 aa, Homo sapiens
  CDR3 for alpha chain variable domain of TCR clone 148929 (TRAV4, TRAJ9)
CLVGDPNRPGGFKTIF

SEQ ID NO: 297858 - protein, 13 aa, Homo sapiens
  CDR3 for beta chain variable domain of TCR clone 148929 (TRBV7-3, TRBJ1-1)
CASSQDWGAEAFF

SEQ ID NO: 297859 - protein, 18 aa, Homo sapiens
  CDR3 for alpha chain variable domain of TCR clone 148930 (TRAV13-2, TRAJ52)
CAETPLNAGGTSYGKLTF

SEQ ID NO: 297860 - protein, 17 aa, Homo sapiens
  CDR3 for beta chain variable domain of TCR clone 148930 (TRBV7-8, TRBJ2-1)
CASSPPTGTLAYNEQFF

SEQ ID NO: 297861 - protein, 14 aa, Homo sapiens
  CDR3 for alpha chain variable domain of TCR clone 148931 (TRAV3, TRAJ21)
CAVESQANFNKFYF

SEQ ID NO: 297862 - protein, 18 aa, Homo sapiens
  CDR3 for beta chain variable domain of TCR clone 148931 (TRBV7-9, TRBJ2-1)
CPSSLAVSGTSGRNEQFF

SEQ ID NO: 297863 - protein, 15 aa, Homo sapiens
  CDR3 for alpha chain variable domain of TCR clone 148932 (TRAV8-3, TRAJ11)
CAVGLLNLGYSTPTF

SEQ ID NO: 297864 - protein, 16 aa, Homo sapiens
  CDR3 for beta chain variable domain of TCR clone 148932 (TRBV7-9, TRBJ1-2)
CASSLGFSSGEDGYTF

SEQ ID NO: 297865 - protein, 13 aa, Homo sapiens
  CDR3 for alpha chain variable domain of TCR clone 148933 (TRAV12-1, TRAJ26)
CVVRRNYGQNFVF

SEQ ID NO: 297866 - protein, 15 aa, Homo sapiens
  CDR3 for beta chain variable domain of TCR clone 148933 (TRBV28, TRBJ2-1)
CASSIIAGGRSEHFF

SEQ ID NO: 297867 - protein, 15 aa, Homo sapiens
  CDR3 for alpha chain variable domain of TCR clone 148934 (TRAV16, TRAJ4)
CALEDPSGGYNKLIF

SEQ ID NO: 297868 - protein, 13 aa, Homo sapiens
  CDR3 for beta chain variable domain of TCR clone 148934 (TRBV7-3, TRBJ2-7)
CASSQAGGYGQYF

SEQ ID NO: 297869 - protein, 12 aa, Homo sapiens
  CDR3 for alpha chain variable domain of TCR clone 148935 (TRAV12-3, TRAJ17)
CAMTLTGNKLTF

SEQ ID NO: 297870 - protein, 17 aa, Homo sapiens
  CDR3 for beta chain variable domain of TCR clone 148935 (TRBV4-3, TRBJ2-7)
CASSQDLIGQGAYEQYF

SEQ ID NO: 297871 - protein, 11 aa, Homo sapiens
  CDR3 for alpha chain variable domain of TCR clone 148936 (TRAV3, TRAJ21)
CAVGNFNKFYF

SEQ ID NO: 297872 - protein, 13 aa, Homo sapiens
  CDR3 for beta chain variable domain of TCR clone 148936 (TRBV7-9, TRBJ2-5)
CASLPSGRETQYF

SEQ ID NO: 297873 - protein, 14 aa, Homo sapiens
  CDR3 for alpha chain variable domain of TCR clone 148937 (TRAV17, TRAJ57)
CATDPQGGSEKLVL

SEQ ID NO: 297874 - protein, 18 aa, Homo sapiens
  CDR3 for beta chain variable domain of TCR clone 148937 (TRBV25-1, TRBJ2-1)
CASSESRAGGPGYNEQFF

SEQ ID NO: 297875 - protein, 14 aa, Homo sapiens
  CDR3 for alpha chain variable domain of TCR clone 148938 (TRAV30, TRAJ33)
CGTVAPRSNYQLIW

SEQ ID NO: 297876 - protein, 13 aa, Homo sapiens
  CDR3 for beta chain variable domain of TCR clone 148938 (TRBV5-4, TRBJ2-5)
CASSPVSQETQYF

SEQ ID NO: 297877 - protein, 15 aa, Homo sapiens
  CDR3 for alpha chain variable domain of TCR clone 148939 (TRAV25, TRAJ53)
CPTSNSGGSNYKLTF

SEQ ID NO: 297878 - protein, 22 aa, Homo sapiens
  CDR3 for beta chain variable domain of TCR clone 148939 (TRBV11-2, TRBJ1-4)
CASSLDITRRGIPRKDNEKLFF

SEQ ID NO: 297879 - protein, 12 aa, Homo sapiens
  CDR3 for alpha chain variable domain of TCR clone 148940 (TRAV12-3, TRAJ3)
CALYSSASKIIF

SEQ ID NO: 297880 - protein, 20 aa, Homo sapiens
  CDR3 for beta chain variable domain of TCR clone 148940 (TRBV7-8, TRBJ2-2)
CASSHLFPGPTIHITGELFF

SEQ ID NO: 297881 - protein, 14 aa, Homo sapiens
  CDR3 for alpha chain variable domain of TCR clone 148941 (TRAV8-3, TRAJ7)
CAAIELYGNNRLAF

SEQ ID NO: 297882 - protein, 16 aa, Homo sapiens
  CDR3 for beta chain variable domain of TCR clone 148941 (TRBV27, TRBJ2-2)
CASSFRGLVRTGELFF

SEQ ID NO: 297883 - protein, 15 aa, Homo sapiens
  CDR3 for alpha chain variable domain of TCR clone 148942 (TRAV13-2, TRAJ22)
CAENSRPGSARQLTF

SEQ ID NO: 297884 - protein, 17 aa, Homo sapiens
  CDR3 for beta chain variable domain of TCR clone 148942 (TRBV20-1, TRBJ2-6)
GSATRDRGPSGANVLTF

SEQ ID NO: 297885 - protein, 13 aa, Homo sapiens
  CDR3 for alpha chain variable domain of TCR clone 148943 (TRAV1-1, TRAJ23)
CAEVANQGGKLIF

SEQ ID NO: 297886 - protein, 15 aa, Homo sapiens
  CDR3 for beta chain variable domain of TCR clone 148943 (TRBV5-4, TRBJ2-1)
CASSFSGGSYNEQFF

SEQ ID NO: 297887 - protein, 15 aa, Homo sapiens
  CDR3 for alpha chain variable domain of TCR clone 148944 (TRAV12-3, TRAJ6)
CAMSATAGGRYIPTF

SEQ ID NO: 297888 - protein, 16 aa, Homo sapiens
  CDR3 for beta chain variable domain of TCR clone 148944 (TRBV20-1, TRBJ1-2)
CSASMGQGVANYGYTF

SEQ ID NO: 297889 - protein, 15 aa, Homo sapiens
  CDR3 for alpha chain variable domain of TCR clone 148945 (TRAV8-1, TRAJ42)
CAVRSYGGSQGNLIF

SEQ ID NO: 297890 - protein, 21 aa, Homo sapiens
  CDR3 for beta chain variable domain of TCR clone 148945 (TRBV5-1, TRBJ1-6)
CASSPRGGADSTGGVRSPLLF

SEQ ID NO: 297891 - protein, 17 aa, Homo sapiens
  CDR3 for alpha chain variable domain of TCR clone 148946 (TRAV12-2, TRAJ52)
CAVNPYSGGTSYGKLTF

SEQ ID NO: 297892 - protein, 16 aa, Homo sapiens
  CDR3 for beta chain variable domain of TCR clone 148946 (TRBV5-5, TRBJ2-2)
CASSGRREGATGELFF

SEQ ID NO: 297893 - protein, 16 aa, Homo sapiens
  CDR3 for alpha chain variable domain of TCR clone 148947 (TRAV1-2, TRAJ10)
RAVRGVLTGGGNKLTV

SEQ ID NO: 297894 - protein, 12 aa, Homo sapiens
  CDR3 for beta chain variable domain of TCR clone 148947 (TRBV7-8, TRBJ2-7)
CASSLGDREQYF

SEQ ID NO: 297895 - protein, 13 aa, Homo sapiens
  CDR3 for alpha chain variable domain of TCR clone 148948 (TRAV30, TRAJ26)
CGTEIPLGQNFVF

SEQ ID NO: 297896 - protein, 14 aa, Homo sapiens
  CDR3 for beta chain variable domain of TCR clone 148948 (TRBV7-2, TRBJ2-7)
CASRSQGAAYEQYF

SEQ ID NO: 297897 - protein, 17 aa, Homo sapiens
  CDR3 for alpha chain variable domain of TCR clone 148949 (TRAV1-1, TRAJ11)
CAGYSTLTFGKGTMLLV

SEQ ID NO: 297898 - protein, 15 aa, Homo sapiens
  CDR3 for beta chain variable domain of TCR clone 148949 (TRBV6-5, TRBJ2-1)
CARRGDFDSYNEQFF

SEQ ID NO: 297899 - protein, 11 aa, Homo sapiens
  CDR3 for alpha chain variable domain of TCR clone 148950 (TRAV35, TRAJ30)
CAGERDDKIIF

SEQ ID NO: 297900 - protein, 13 aa, Homo sapiens
  CDR3 for beta chain variable domain of TCR clone 148950 (TRBV15, TRBJ2-5)
CHQRGQAQETQYF

SEQ ID NO: 297901 - protein, 14 aa, Homo sapiens
  CDR3 for alpha chain variable domain of TCR clone 148951 (TRAV16, TRAJ26)
CALSSANYGQNFVF

SEQ ID NO: 297902 - protein, 12 aa, Homo sapiens
  CDR3 for beta chain variable domain of TCR clone 148951 (TRBV11-2, TRBJ2-2)
CASSLGGGELFF

SEQ ID NO: 297903 - protein, 17 aa, Homo sapiens
  CDR3 for alpha chain variable domain of TCR clone 148952 (TRAV3, TRAJ42)
CAVRDRAYGGSQGNLIF

SEQ ID NO: 297904 - protein, 14 aa, Homo sapiens
  CDR3 for beta chain variable domain of TCR clone 148952 (TRBV5-4, TRBJ1-1)
CASSLDSRRDEAFF

SEQ ID NO: 297905 - protein, 15 aa, Homo sapiens
  CDR3 for alpha chain variable domain of TCR clone 148953 (TRAV26-1, TRAJ29)
CIVRVGGSGNTPLVF

SEQ ID NO: 297906 - protein, 15 aa, Homo sapiens
  CDR3 for beta chain variable domain of TCR clone 148953 (TRBV7-9, TRBJ1-5)
CASSQGHQPNQTQHF

SEQ ID NO: 297907 - protein, 12 aa, Homo sapiens
  CDR3 for alpha chain variable domain of TCR clone 148954 (TRAV10, TRAJ9)
CGAYTVGFKTIF

SEQ ID NO: 297908 - protein, 13 aa, Homo sapiens
  CDR3 for beta chain variable domain of TCR clone 148954 (TRBV9, TRBJ2-1)
CASSPSGGNEQFF

SEQ ID NO: 297909 - protein, 12 aa, Homo sapiens
  CDR3 for alpha chain variable domain of TCR clone 148955 (TRAV13-1, TRAJ15)
CAASQAGTALIF

SEQ ID NO: 297910 - protein, 14 aa, Homo sapiens
  CDR3 for beta chain variable domain of TCR clone 148955 (TRBV19, TRBJ2-2)
CASSTLHGSGELFF

SEQ ID NO: 297911 - protein, 14 aa, Homo sapiens
  CDR3 for alpha chain variable domain of TCR clone 148956 (TRAV12-2, TRAJ13)
CAVKETGGYQKVTF

SEQ ID NO: 297912 - protein, 12 aa, Homo sapiens
  CDR3 for beta chain variable domain of TCR clone 148956 (TRBV12-4, TRBJ1-2)
CASSFIWLDLRF

SEQ ID NO: 297913 - protein, 14 aa, Homo sapiens
  CDR3 for alpha chain variable domain of TCR clone 148957 (TRAV8-6, TRAJ49)
CAASDPGTGNQFYF

SEQ ID NO: 297914 - protein, 16 aa, Homo sapiens
  CDR3 for beta chain variable domain of TCR clone 148957 (TRBV24-1, TRBJ2-1)
CATSGVAGANYNEQFF

SEQ ID NO: 297915 - protein, 20 aa, Homo sapiens
  CDR3 for alpha chain variable domain of TCR clone 148958 (TRAV25, TRAJ33)
TATQTTDVGTSRGNNYQLIW

SEQ ID NO: 297916 - protein, 14 aa, Homo sapiens
  CDR3 for beta chain variable domain of TCR clone 148958 (TRBV7-2, TRBJ2-5)
CASSTGGELKTQYF

SEQ ID NO: 297917 - protein, 15 aa, Homo sapiens
  CDR3 for alpha chain variable domain of TCR clone 148959 (TRAV21, TRAJ53)
CAALNSGGSNHKLTF

SEQ ID NO: 297918 - protein, 13 aa, Homo sapiens
  CDR3 for beta chain variable domain of TCR clone 148959 (TRBV11-2, TRBJ2-5)
CASSSTGEETQYF

SEQ ID NO: 297919 - protein, 18 aa, Homo sapiens
  CDR3 for alpha chain variable domain of TCR clone 148960 (TRAV21, TRAJ52)
CAVRPSTAGGTSYGKLTL

SEQ ID NO: 297920 - protein, 13 aa, Homo sapiens
  CDR3 for beta chain variable domain of TCR clone 148960 (TRBV7-3, TRBJ1-1)
CASSQDWGAEAFF

SEQ ID NO: 297921 - protein, 12 aa, Homo sapiens
  CDR3 for alpha chain variable domain of TCR clone 148961 (TRAV2, TRAJ40)
CCGYLRNLKYIF

SEQ ID NO: 297922 - protein, 14 aa, Homo sapiens
  CDR3 for beta chain variable domain of TCR clone 148961 (TRBV18, TRBJ2-7)
CASSPRGGAYEQYF

SEQ ID NO: 297923 - protein, 14 aa, Homo sapiens
  CDR3 for alpha chain variable domain of TCR clone 148962 (TRAV1-2, TRAJ16)
CAVNRFSDGQKLLF

SEQ ID NO: 297924 - protein, 13 aa, Homo sapiens
  CDR3 for beta chain variable domain of TCR clone 148962 (TRBV20-1, TRBJ1-1)
CSARGGGNTEPFF

SEQ ID NO: 297925 - protein, 14 aa, Homo sapiens
  CDR3 for alpha chain variable domain of TCR clone 148963 (TRAV12-1, TRAJ26)
CVVKGSNYGQNFVF

SEQ ID NO: 297926 - protein, 16 aa, Homo sapiens
  CDR3 for beta chain variable domain of TCR clone 148963 (TRBV11-2, TRBJ2-6)
CQQPKGHFLWGQRLTF

SEQ ID NO: 297927 - protein, 16 aa, Homo sapiens
  CDR3 for alpha chain variable domain of TCR clone 148964 (TRAV26-2, TRAJ48)
CILRPPFNFENEKLTF

SEQ ID NO: 297928 - protein, 15 aa, Homo sapiens
  CDR3 for beta chain variable domain of TCR clone 148964 (TRBV20-1, TRBJ2-3)
CSARVEGTYTDTQYF

SEQ ID NO: 297929 - protein, 15 aa, Homo sapiens
  CDR3 for alpha chain variable domain of TCR clone 148965 (TRAV23/DV6, TRAJ13)
CAAWPGGGGYQKVTF

SEQ ID NO: 297930 - protein, 15 aa, Homo sapiens
  CDR3 for beta chain variable domain of TCR clone 148965 (TRBV12-4, TRBJ1-2)
CASSPITGGGYGYTF

SEQ ID NO: 297931 - protein, 10 aa, Homo sapiens
  CDR3 for alpha chain variable domain of TCR clone 148966 (TRAV2, TRAJ34)
CAVVNDELIF

SEQ ID NO: 297932 - protein, 14 aa, Homo sapiens
  CDR3 for beta chain variable domain of TCR clone 148966 (TRBV4-2, TRBJ2-1)
CASGLDRAYNEQFF

SEQ ID NO: 297933 - protein, 15 aa, Homo sapiens
  CDR3 for alpha chain variable domain of TCR clone 148967 (TRAV29/DV5, TRAJ29)
CAASERSSGNTPLVC

SEQ ID NO: 297934 - protein, 17 aa, Homo sapiens
  CDR3 for beta chain variable domain of TCR clone 148967 (TRBV4-1, TRBJ1-4)
CASSQEGPRGVEEKLFF

SEQ ID NO: 297935 - protein, 13 aa, Homo sapiens
  CDR3 for alpha chain variable domain of TCR clone 148968 (TRAV12-2, TRAJ20)
CAVYPSNDYKLSF

SEQ ID NO: 297936 - protein, 15 aa, Homo sapiens
  CDR3 for beta chain variable domain of TCR clone 148968 (TRBV27, TRBJ2-5)
CASSLYPRGGKTQYF

SEQ ID NO: 297937 - protein, 15 aa, Homo sapiens
  CDR3 for alpha chain variable domain of TCR clone 148969 (TRAV12-1, TRAJ44)
CVVDTPQGTASQLTF

SEQ ID NO: 297938 - protein, 13 aa, Homo sapiens
  CDR3 for beta chain variable domain of TCR clone 148969 (TRBV27, TRBJ2-1)
CASSSGSYNEQFF

SEQ ID NO: 297939 - protein, 14 aa, Homo sapiens
  CDR3 for alpha chain variable domain of TCR clone 148970 (TRAV1-2, TRAJ8)
CAVREDTGFQKLVF

SEQ ID NO: 297940 - protein, 10 aa, Homo sapiens
  CDR3 for beta chain variable domain of TCR clone 148970 (TRBV11-2, TRBJ2-2)
CQQLTRELFF

SEQ ID NO: 297941 - protein, 18 aa, Homo sapiens
  CDR3 for alpha chain variable domain of TCR clone 148971 (TRAV13-1, TRAJ52)
CAASKRSAGGTSYGKLTF

SEQ ID NO: 297942 - protein, 15 aa, Homo sapiens
  CDR3 for beta chain variable domain of TCR clone 148971 (TRBV6-6, TRBJ2-7)
CASSYSYGGSYEQYF

SEQ ID NO: 297943 - protein, 15 aa, Homo sapiens
  CDR3 for alpha chain variable domain of TCR clone 148972 (TRAV16, TRAJ4)
CALEDPSGGYNKMIF

SEQ ID NO: 297944 - protein, 13 aa, Homo sapiens
  CDR3 for beta chain variable domain of TCR clone 148972 (TRBV7-3, TRBJ2-7)
CASSQAGGYEQYF

SEQ ID NO: 297945 - protein, 16 aa, Homo sapiens
  CDR3 for alpha chain variable domain of TCR clone 148973 (TRAV30, TRAJ24)
YGTEIVDADSWGKFQC

SEQ ID NO: 297946 - protein, 15 aa, Homo sapiens
  CDR3 for beta chain variable domain of TCR clone 148973 (TRBV20-1, TRBJ2-4)
CSARDLTGGPNIQYF

SEQ ID NO: 297947 - protein, 14 aa, Homo sapiens
  CDR3 for alpha chain variable domain of TCR clone 148974 (TRAV1-2, TRAJ16)
CSVNRFSGGQKLLF

SEQ ID NO: 297948 - protein, 16 aa, Homo sapiens
  CDR3 for beta chain variable domain of TCR clone 148974 (TRBV9, TRBJ2-1)
CASSVGGGGNYNEQFF

SEQ ID NO: 297949 - protein, 12 aa, Homo sapiens
  CDR3 for alpha chain variable domain of TCR clone 148975 (TRAV12-2, TRAJ52)
IGGGTSYGKLTF

SEQ ID NO: 297950 - protein, 15 aa, Homo sapiens
  CDR3 for beta chain variable domain of TCR clone 148975 (TRBV6-3, TRBJ2-7)
CASSSPGTVFYEQYF

SEQ ID NO: 297951 - protein, 14 aa, Homo sapiens
  CDR3 for alpha chain variable domain of TCR clone 148976 (TRAV12-2, TRAJ13)
CAVKKTGGYQKVTF

SEQ ID NO: 297952 - protein, 23 aa, Homo sapiens
  CDR3 for beta chain variable domain of TCR clone 148976 (TRBV4-2, TRBJ2-3)
CASSQDPPRSSSISGGRGDTQYF

SEQ ID NO: 297953 - protein, 12 aa, Homo sapiens
  CDR3 for alpha chain variable domain of TCR clone 148977 (TRAV29/DV5, TRAJ15)
CASNQAGTALIF

SEQ ID NO: 297954 - protein, 13 aa, Homo sapiens
  CDR3 for beta chain variable domain of TCR clone 148977 (TRBV12-4, TRBJ1-2)
CASSLRQGKGYTF

SEQ ID NO: 297955 - protein, 12 aa, Homo sapiens
  CDR3 for alpha chain variable domain of TCR clone 148978 (TRAV12-3, TRAJ17)
CAMTLTGNKLTF

SEQ ID NO: 297956 - protein, 15 aa, Homo sapiens
  CDR3 for beta chain variable domain of TCR clone 148978 (TRBV7-8, TRBJ1-1)
CASSLGDSRNTEAFF

SEQ ID NO: 297957 - protein, 15 aa, Homo sapiens
  CDR3 for alpha chain variable domain of TCR clone 148979 (TRAV2, TRAJ15)
CAVEVREQAGTALIF

SEQ ID NO: 297958 - protein, 13 aa, Homo sapiens
  CDR3 for beta chain variable domain of TCR clone 148979 (TRBV10-2, TRBJ2-3)
CASSESGDHTQYF

SEQ ID NO: 297959 - protein, 11 aa, Homo sapiens
  CDR3 for alpha chain variable domain of TCR clone 148980 (TRAV12-2, TRAJ29)
CAVTLRSPLVF

SEQ ID NO: 297960 - protein, 16 aa, Homo sapiens
  CDR3 for beta chain variable domain of TCR clone 148980 (TRBV10-3, TRBJ2-1)
CAISGVGDGGGGEQFF

SEQ ID NO: 297961 - protein, 14 aa, Homo sapiens
  CDR3 for alpha chain variable domain of TCR clone 148981 (TRAV2, TRAJ9)
CAVEDRSGGFKTIS

SEQ ID NO: 297962 - protein, 12 aa, Homo sapiens
  CDR3 for beta chain variable domain of TCR clone 148981 (TRBV11-2, TRBJ2-1)
CASSPGNNEQFF

SEQ ID NO: 297963 - protein, 16 aa, Homo sapiens
  CDR3 for alpha chain variable domain of TCR clone 148982 (TRAV17, TRAJ36)
CATVSLNWGKQPLLWD

SEQ ID NO: 297964 - protein, 18 aa, Homo sapiens
  CDR3 for beta chain variable domain of TCR clone 148982 (TRBV5-1, TRBJ2-2)
CASSLVALGGRDTGELFF

SEQ ID NO: 297965 - protein, 16 aa, Homo sapiens
  CDR3 for alpha chain variable domain of TCR clone 148983 (TRAV3, TRAJ10)
CAVRDMTAGGGNKLTF

SEQ ID NO: 297966 - protein, 15 aa, Homo sapiens
  CDR3 for beta chain variable domain of TCR clone 148983 (TRBV20-1, TRBJ2-1)
CSASSAGSSYNEQFF

SEQ ID NO: 297967 - protein, 13 aa, Homo sapiens
  CDR3 for alpha chain variable domain of TCR clone 148984 (TRAV13-2, TRAJ40)
CAEFTSGTSKYIF

SEQ ID NO: 297968 - protein, 14 aa, Homo sapiens
  CDR3 for beta chain variable domain of TCR clone 148984 (TRBV10-2, TRBJ1-5)
CASSSTGRNQPQHF

SEQ ID NO: 297969 - protein, 12 aa, Homo sapiens
  CDR3 for alpha chain variable domain of TCR clone 148985 (TRAV12-3, TRAJ17)
CAMMLTGNKLTF

SEQ ID NO: 297970 - protein, 13 aa, Homo sapiens
  CDR3 for beta chain variable domain of TCR clone 148985 (TRBV4-2, TRBJ1-1)
CASSQAGNTEAFF

SEQ ID NO: 297971 - protein, 15 aa, Homo sapiens
  CDR3 for alpha chain variable domain of TCR clone 148986 (TRAV13-1, TRAJ17)
CAASIHGGCRQQANF

SEQ ID NO: 297972 - protein, 14 aa, Homo sapiens
  CDR3 for beta chain variable domain of TCR clone 148986 (TRBV20-1, TRBJ2-4)
CNARDRGQGGIQYF

SEQ ID NO: 297973 - protein, 13 aa, Homo sapiens
  CDR3 for alpha chain variable domain of TCR clone 148987 (TRAV17, TRAJ26)
CATVDNYGQNFVF

SEQ ID NO: 297974 - protein, 16 aa, Homo sapiens
  CDR3 for beta chain variable domain of TCR clone 148987 (TRBV15, TRBJ2-3)
CATSRDLGIVTDTQYF

SEQ ID NO: 297975 - protein, 12 aa, Homo sapiens
  CDR3 for alpha chain variable domain of TCR clone 148988 (TRAV1-1, TRAJ8)
CAGGTGFQKLGF

SEQ ID NO: 297976 - protein, 13 aa, Homo sapiens
  CDR3 for beta chain variable domain of TCR clone 148988 (TRBV12-4, TRBJ1-2)
CASSLRQGKGYTF

SEQ ID NO: 297977 - protein, 14 aa, Homo sapiens
  CDR3 for alpha chain variable domain of TCR clone 148989 (TRAV1-2, TRAJ16)
CSVNRFSDGQKLLF

SEQ ID NO: 297978 - protein, 12 aa, Homo sapiens
  CDR3 for beta chain variable domain of TCR clone 148989 (TRBV6-5, TRBJ2-5)
CASSVGSETQYF

SEQ ID NO: 297979 - protein, 14 aa, Homo sapiens
  CDR3 for alpha chain variable domain of TCR clone 148990 (TRAV21, TRAJ35)
CAVMPRGFGNVLHC

SEQ ID NO: 297980 - protein, 12 aa, Homo sapiens
  CDR3 for beta chain variable domain of TCR clone 148990 (TRBV7-9, TRBJ2-7)
CASSIKREEQYF

SEQ ID NO: 297981 - protein, 15 aa, Homo sapiens
  CDR3 for alpha chain variable domain of TCR clone 148991 (TRAV14/DV4, TRAJ10)
CAMRELTGGGNKHTF

SEQ ID NO: 297982 - protein, 18 aa, Homo sapiens
  CDR3 for beta chain variable domain of TCR clone 148991 (TRBV7-9, TRBJ2-7)
CASSLTTSGSRTWYEQYF

SEQ ID NO: 297983 - protein, 11 aa, Homo sapiens
  CDR3 for alpha chain variable domain of TCR clone 148992 (TRAV12-3, TRAJ43)
FAMSVSNDMRF

SEQ ID NO: 297984 - protein, 14 aa, Homo sapiens
  CDR3 for beta chain variable domain of TCR clone 148992 (TRBV20-1, TRBJ1-1)
SAVLHLGGGTEAFF

SEQ ID NO: 297985 - protein, 14 aa, Homo sapiens
  CDR3 for alpha chain variable domain of TCR clone 148993 (TRAV35, TRAJ10)
CAGILTGGGNKLTF

SEQ ID NO: 297986 - protein, 14 aa, Homo sapiens
  CDR3 for beta chain variable domain of TCR clone 148993 (TRBV11-2, TRBJ1-4)
CASSLGGLGEKLFF

SEQ ID NO: 297987 - protein, 12 aa, Homo sapiens
  CDR3 for alpha chain variable domain of TCR clone 148994 (TRAV36/DV7, TRAJ40)
CAVGMGTYKYIF

SEQ ID NO: 297988 - protein, 14 aa, Homo sapiens
  CDR3 for beta chain variable domain of TCR clone 148994 (TRBV19, TRBJ2-3)
CASSIDLGGDTQYF

SEQ ID NO: 297989 - protein, 13 aa, Homo sapiens
  CDR3 for alpha chain variable domain of TCR clone 148995 (TRAV21, TRAJ20)
CAVGLRVDYKLSF

SEQ ID NO: 297990 - protein, 13 aa, Homo sapiens
  CDR3 for beta chain variable domain of TCR clone 148995 (TRBV25-1, TRBJ2-5)
CASSESGRETQYF

SEQ ID NO: 297991 - protein, 11 aa, Homo sapiens
  CDR3 for alpha chain variable domain of TCR clone 148996 (TRAV21, TRAJ39)
LLVNAGNMLTF

SEQ ID NO: 297992 - protein, 18 aa, Homo sapiens
  CDR3 for beta chain variable domain of TCR clone 148996 (TRBV11-2, TRBJ2-3)
CASSLGGASRGAPNTQYF

SEQ ID NO: 297993 - protein, 13 aa, Homo sapiens
  CDR3 for alpha chain variable domain of TCR clone 148997 (TRAV13-1, TRAJ5)
CAASDTGRRALTF

SEQ ID NO: 297994 - protein, 15 aa, Homo sapiens
  CDR3 for beta chain variable domain of TCR clone 148997 (TRBV19, TRBJ1-1)
CASTSGQIQNTEAFF

SEQ ID NO: 297995 - protein, 14 aa, Homo sapiens
  CDR3 for alpha chain variable domain of TCR clone 148998 (TRAV13-1, TRAJ44)
CAAKATGTASKPTF

SEQ ID NO: 297996 - protein, 11 aa, Homo sapiens
  CDR3 for beta chain variable domain of TCR clone 148998 (TRBV28, TRBJ2-7)
CASSQIYEQYF

SEQ ID NO: 297997 - protein, 15 aa, Homo sapiens
  CDR3 for alpha chain variable domain of TCR clone 148999 (TRAV3, TRAJ10)
RAVRDGTGGGNKLTF

SEQ ID NO: 297998 - protein, 19 aa, Homo sapiens
  CDR3 for beta chain variable domain of TCR clone 148999 (TRBV19, TRBJ2-5)
CASSIGQVTDFFLGETQYF

SEQ ID NO: 297999 - protein, 13 aa, Homo sapiens
  CDR3 for alpha chain variable domain of TCR clone 149000 (TRAV21, TRAJ57)
YAVTQGGSEKLVF

SEQ ID NO: 298000 - protein, 16 aa, Homo sapiens
  CDR3 for beta chain variable domain of TCR clone 149000 (TRBV29-1, TRBJ2-7)
CSVEDAADGTAYEQYF

SEQ ID NO: 298001 - protein, 16 aa, Homo sapiens
  CDR3 for alpha chain variable domain of TCR clone 149001 (TRAV4, TRAJ22)
CLVGDLYSGSARQLTF

SEQ ID NO: 298002 - protein, 14 aa, Homo sapiens
  CDR3 for beta chain variable domain of TCR clone 149001 (TRBV7-9, TRBJ2-5)
CASSLVGGEETQYF

SEQ ID NO: 298003 - protein, 12 aa, Homo sapiens
  CDR3 for alpha chain variable domain of TCR clone 149002 (TRAV3, TRAJ20)
CAVRDPDYKLSF

SEQ ID NO: 298004 - protein, 20 aa, Homo sapiens
  CDR3 for beta chain variable domain of TCR clone 149002 (TRBV7-8, TRBJ2-2)
CASSHLFPGPTIHITGELFF

SEQ ID NO: 298005 - protein, 14 aa, Homo sapiens
  CDR3 for alpha chain variable domain of TCR clone 149003 (TRAV8-6, TRAJ6)
CAVSFTSGGSYTYI

SEQ ID NO: 298006 - protein, 13 aa, Homo sapiens
  CDR3 for beta chain variable domain of TCR clone 149003 (TRBV29-1, TRBJ2-1)
CSVEGGRVNEQFF

SEQ ID NO: 298007 - protein, 20 aa, Homo sapiens
  CDR3 for alpha chain variable domain of TCR clone 149004 (TRAV12-3, TRAJ41)
SLFIRDSQPSDSATPEALNF

SEQ ID NO: 298008 - protein, 13 aa, Homo sapiens
  CDR3 for beta chain variable domain of TCR clone 149004 (TRBV9, TRBJ2-7)
CASSASDSYEQYF

SEQ ID NO: 298009 - protein, 13 aa, Homo sapiens
  CDR3 for alpha chain variable domain of TCR clone 149005 (TRAV8-4, TRAJ10)
CAAFTGGGNKLTF

SEQ ID NO: 298010 - protein, 15 aa, Homo sapiens
  CDR3 for beta chain variable domain of TCR clone 149005 (TRBV2, TRBJ2-3)
CASSDFEKPTDTQYF

SEQ ID NO: 298011 - protein, 10 aa, Homo sapiens
  CDR3 for alpha chain variable domain of TCR clone 149006 (TRAV3, TRAJ12)
CAVRGEMVRW

SEQ ID NO: 298012 - protein, 15 aa, Homo sapiens
  CDR3 for beta chain variable domain of TCR clone 149006 (TRBV5-5, TRBJ1-5)
CASSLKGGGEQPQHF

SEQ ID NO: 298013 - protein, 16 aa, Homo sapiens
  CDR3 for alpha chain variable domain of TCR clone 149007 (TRAV1-2, TRAJ10)
CAVRGVLTGGGNKLTF

SEQ ID NO: 298014 - protein, 12 aa, Homo sapiens
  CDR3 for beta chain variable domain of TCR clone 149007 (TRBV11-2, TRBJ2-1)
CASSHGNNEQFF

SEQ ID NO: 298015 - protein, 14 aa, Homo sapiens
  CDR3 for alpha chain variable domain of TCR clone 149008 (TRAV1-2, TRAJ16)
CAVNRFSDGQKLLF

SEQ ID NO: 298016 - protein, 15 aa, Homo sapiens
  CDR3 for beta chain variable domain of TCR clone 149008 (TRBV12-4, TRBJ2-5)
RASSPPTGLQETQYF

SEQ ID NO: 298017 - protein, 11 aa, Homo sapiens
  CDR3 for alpha chain variable domain of TCR clone 149009 (TRAV2, TRAJ13)
CASGGYQKVTF

SEQ ID NO: 298018 - protein, 14 aa, Homo sapiens
  CDR3 for beta chain variable domain of TCR clone 149009 (TRBV28, TRBJ2-5)
CASSLGDRAETQYF

SEQ ID NO: 298019 - protein, 12 aa, Homo sapiens
  CDR3 for alpha chain variable domain of TCR clone 149010 (TRAV13-2, TRAJ23)
CAERHRGGKLIF

SEQ ID NO: 298020 - protein, 15 aa, Homo sapiens
  CDR3 for beta chain variable domain of TCR clone 149010 (TRBV6-3, TRBJ2-7)
CASSPPGTVFYEQYF

SEQ ID NO: 298021 - protein, 12 aa, Homo sapiens
  CDR3 for alpha chain variable domain of TCR clone 149011 (TRAV12-3, TRAJ17)
CAMTLTGNKLTF

SEQ ID NO: 298022 - protein, 16 aa, Homo sapiens
  CDR3 for beta chain variable domain of TCR clone 149011 (TRBV19, TRBJ2-1)
CSSSKAGPSSYNEQFF

SEQ ID NO: 298023 - protein, 12 aa, Homo sapiens
  CDR3 for alpha chain variable domain of TCR clone 149012 (TRAV12-3, TRAJ17)
SAMTLTGNKLTF

SEQ ID NO: 298024 - protein, 15 aa, Homo sapiens
  CDR3 for beta chain variable domain of TCR clone 149012 (TRBV9, TRBJ1-6)
CASSVAGTGDSPLHF

SEQ ID NO: 298025 - protein, 10 aa, Homo sapiens
  CDR3 for alpha chain variable domain of TCR clone 149013 (TRAV12-1, TRAJ43)
CVVHNNDMRF

SEQ ID NO: 298026 - protein, 12 aa, Homo sapiens
  CDR3 for beta chain variable domain of TCR clone 149013 (TRBV11-2, TRBJ2-1)
CASSPGNNEQFF

SEQ ID NO: 298027 - protein, 15 aa, Homo sapiens
  CDR3 for alpha chain variable domain of TCR clone 149014 (TRAV8-6, TRAJ10)
CAVSDQAGGGNKLTF

SEQ ID NO: 298028 - protein, 16 aa, Homo sapiens
  CDR3 for beta chain variable domain of TCR clone 149014 (TRBV19, TRBJ2-1)
CASSKAGPSSYNEQFF

SEQ ID NO: 298029 - protein, 11 aa, Homo sapiens
  CDR3 for alpha chain variable domain of TCR clone 149015 (TRAV17, TRAJ9)
CGFTGGFKTIF

SEQ ID NO: 298030 - protein, 16 aa, Homo sapiens
  CDR3 for beta chain variable domain of TCR clone 149015 (TRBV2, TRBJ2-1)
CARRKTSGGSYNEQFF

SEQ ID NO: 298031 - protein, 14 aa, Homo sapiens
  CDR3 for alpha chain variable domain of TCR clone 149016 (TRAV2, TRAJ9)
CAVEDRSGGFKTIF

SEQ ID NO: 298032 - protein, 14 aa, Homo sapiens
  CDR3 for beta chain variable domain of TCR clone 149016 (TRBV7-8, TRBJ2-3)
CASSFKSSTDTQYF

SEQ ID NO: 298033 - protein, 13 aa, Homo sapiens
  CDR3 for alpha chain variable domain of TCR clone 149017 (TRAV20, TRAJ37)
CAGCSSNTGKLIF

SEQ ID NO: 298034 - protein, 11 aa, Homo sapiens
  CDR3 for beta chain variable domain of TCR clone 149017 (TRBV12-4, TRBJ2-3)
CASTARDTQYF

SEQ ID NO: 298035 - protein, 11 aa, Homo sapiens
  CDR3 for alpha chain variable domain of TCR clone 149018 (TRAV13-1, TRAJ39)
CASHAGNTLTF

SEQ ID NO: 298036 - protein, 15 aa, Homo sapiens
  CDR3 for beta chain variable domain of TCR clone 149018 (TRBV6-3, TRBJ2-7)
CASSSPGTVFYEQYF

SEQ ID NO: 298037 - protein, 12 aa, Homo sapiens
  CDR3 for alpha chain variable domain of TCR clone 149019 (TRAV12-2, TRAJ10)
WGVTGGGNKLTF

SEQ ID NO: 298038 - protein, 20 aa, Homo sapiens
  CDR3 for beta chain variable domain of TCR clone 149019 (TRBV11-2, TRBJ2-2)
LRTRPCISVPAALEAGSCFF

SEQ ID NO: 298039 - protein, 15 aa, Homo sapiens
  CDR3 for alpha chain variable domain of TCR clone 149020 (TRAV29/DV5, TRAJ29)
CAASERSSGNTPLVF

SEQ ID NO: 298040 - protein, 14 aa, Homo sapiens
  CDR3 for beta chain variable domain of TCR clone 149020 (TRBV7-8, TRBJ2-5)
CASSATGGQETQYF

SEQ ID NO: 298041 - protein, 13 aa, Homo sapiens
  CDR3 for alpha chain variable domain of TCR clone 149021 (TRAV1-2, TRAJ24)
CAVRADSWGKFQF

SEQ ID NO: 298042 - protein, 14 aa, Homo sapiens
  CDR3 for beta chain variable domain of TCR clone 149021 (TRBV12-4, TRBJ1-1)
CASSLGTGGTEAFF

SEQ ID NO: 298043 - protein, 13 aa, Homo sapiens
  CDR3 for alpha chain variable domain of TCR clone 149022 (TRAV23/DV6, TRAJ22)
CAPYFGSARQLTF

SEQ ID NO: 298044 - protein, 15 aa, Homo sapiens
  CDR3 for beta chain variable domain of TCR clone 149022 (TRBV11-2, TRBJ1-6)
CASSLDPWAVSPLHF

SEQ ID NO: 298045 - protein, 13 aa, Homo sapiens
  CDR3 for alpha chain variable domain of TCR clone 149023 (TRAV3, TRAJ27)
CAVRPLGAGKSTF

SEQ ID NO: 298046 - protein, 12 aa, Homo sapiens
  CDR3 for beta chain variable domain of TCR clone 149023 (TRBV4-1, TRBJ2-3)
CASSQGTDTQYF

SEQ ID NO: 298047 - protein, 17 aa, Homo sapiens
  CDR3 for alpha chain variable domain of TCR clone 149024 (TRAV29/DV5, TRAJ40)
CAASVIYTTSGTYTYIF

SEQ ID NO: 298048 - protein, 13 aa, Homo sapiens
  CDR3 for beta chain variable domain of TCR clone 149024 (TRBV6-1, TRBJ2-1)
CASSHDRNNEQFF

SEQ ID NO: 298049 - protein, 12 aa, Homo sapiens
  CDR3 for alpha chain variable domain of TCR clone 149025 (TRAV12-3, TRAJ5)
CAMDTGRRALTL

SEQ ID NO: 298050 - protein, 13 aa, Homo sapiens
  CDR3 for beta chain variable domain of TCR clone 149025 (TRBV7-7, TRBJ2-2)
CASSLTSAGELFF

SEQ ID NO: 298051 - protein, 15 aa, Homo sapiens
  CDR3 for alpha chain variable domain of TCR clone 149026 (TRAV12-1, TRAJ4)
CVVNPFSGGYNKLIF

SEQ ID NO: 298052 - protein, 16 aa, Homo sapiens
  CDR3 for beta chain variable domain of TCR clone 149026 (TRBV5-1, TRBJ1-1)
CASSKTGTEVGTEAFV

SEQ ID NO: 298053 - protein, 10 aa, Homo sapiens
  CDR3 for alpha chain variable domain of TCR clone 149027 (TRAV5, TRAJ34)
CAEDTDKLIF

SEQ ID NO: 298054 - protein, 12 aa, Homo sapiens
  CDR3 for beta chain variable domain of TCR clone 149027 (TRBV7-8, TRBJ2-1)
CASSLGHNEQFF

SEQ ID NO: 298055 - protein, 14 aa, Homo sapiens
  CDR3 for alpha chain variable domain of TCR clone 149028 (TRAV8-3, TRAJ3)
CAVVPRSSSSKIIF

SEQ ID NO: 298056 - protein, 16 aa, Homo sapiens
  CDR3 for beta chain variable domain of TCR clone 149028 (TRBV4-1, TRBJ2-3)
CASSQLTSGGGDTQYF

SEQ ID NO: 298057 - protein, 14 aa, Homo sapiens
  CDR3 for alpha chain variable domain of TCR clone 149029 (TRAV12-3, TRAJ10)
SHLPLTGGGNKLTF

SEQ ID NO: 298058 - protein, 12 aa, Homo sapiens
  CDR3 for beta chain variable domain of TCR clone 149029 (TRBV27, TRBJ1-1)
CQQLSIGAEAFF

SEQ ID NO: 298059 - protein, 13 aa, Homo sapiens
  CDR3 for alpha chain variable domain of TCR clone 149030 (TRAV20, TRAJ20)
CAVRDFNDYKLSF

SEQ ID NO: 298060 - protein, 14 aa, Homo sapiens
  CDR3 for beta chain variable domain of TCR clone 149030 (TRBV20-1, TRBJ1-1)
CSAQTRIGGTEAFF

SEQ ID NO: 298061 - protein, 13 aa, Homo sapiens
  CDR3 for alpha chain variable domain of TCR clone 149031 (TRAV12-2, TRAJ20)
CAVNRYDDYKLSF

SEQ ID NO: 298062 - protein, 12 aa, Homo sapiens
  CDR3 for beta chain variable domain of TCR clone 149031 (TRBV28, TRBJ2-3)
CASSLYRDTQYF

SEQ ID NO: 298063 - protein, 14 aa, Homo sapiens
  CDR3 for alpha chain variable domain of TCR clone 149032 (TRAV27, TRAJ22)
CAGLPSGSARQLTF

SEQ ID NO: 298064 - protein, 17 aa, Homo sapiens
  CDR3 for beta chain variable domain of TCR clone 149032 (TRBV24-1, TRBJ2-4)
CATSDAEARGVRNSQYF

SEQ ID NO: 298065 - protein, 16 aa, Homo sapiens
  CDR3 for alpha chain variable domain of TCR clone 149033 (TRAV3, TRAJ37)
CAVRGKGSGNTRKLIF

SEQ ID NO: 298066 - protein, 17 aa, Homo sapiens
  CDR3 for beta chain variable domain of TCR clone 149033 (TRBV28, TRBJ2-3)
CASTASGRDLSTDTQYF

SEQ ID NO: 298067 - protein, 12 aa, Homo sapiens
  CDR3 for alpha chain variable domain of TCR clone 149034 (TRAV23/DV6, TRAJ30)
CAATKGDDKIIF

SEQ ID NO: 298068 - protein, 13 aa, Homo sapiens
  CDR3 for beta chain variable domain of TCR clone 149034 (TRBV19, TRBJ1-2)
CASSVPGQDGYTF

SEQ ID NO: 298069 - protein, 12 aa, Homo sapiens
  CDR3 for alpha chain variable domain of TCR clone 149035 (TRAV12-1, TRAJ40)
CVVYAGTYKYIF

SEQ ID NO: 298070 - protein, 14 aa, Homo sapiens
  CDR3 for beta chain variable domain of TCR clone 149035 (TRBV19, TRBJ2-3)
CASSAPRGTDTQYF

SEQ ID NO: 298071 - protein, 15 aa, Homo sapiens
  CDR3 for alpha chain variable domain of TCR clone 149036 (TRAV12-2, TRAJ8)
CAVREENTGFQKLVF

SEQ ID NO: 298072 - protein, 15 aa, Homo sapiens
  CDR3 for beta chain variable domain of TCR clone 149036 (TRBV28, TRBJ2-4)
CAAGSGTLLMGIQDF

SEQ ID NO: 298073 - protein, 13 aa, Homo sapiens
  CDR3 for alpha chain variable domain of TCR clone 149037 (TRAV2, TRAJ29)
CAAQNSGNTPLVC

SEQ ID NO: 298074 - protein, 14 aa, Homo sapiens
  CDR3 for beta chain variable domain of TCR clone 149037 (TRBV7-9, TRBJ2-4)
CASSLAMGGNIQYF

SEQ ID NO: 298075 - protein, 14 aa, Homo sapiens
  CDR3 for alpha chain variable domain of TCR clone 149038 (TRAV4, TRAJ30)
CLVGDMNRDDKIIF

SEQ ID NO: 298076 - protein, 16 aa, Homo sapiens
  CDR3 for beta chain variable domain of TCR clone 149038 (TRBV20-1, TRBJ1-4)
CSAPGQGVLTNEKLFF

SEQ ID NO: 298077 - protein, 14 aa, Homo sapiens
  CDR3 for alpha chain variable domain of TCR clone 149039 (TRAV1-2, TRAJ8)
CAVREDTGFQKLVF

SEQ ID NO: 298078 - protein, 15 aa, Homo sapiens
  CDR3 for beta chain variable domain of TCR clone 149039 (TRBV12-4, TRBJ2-1)
CASIKSFSGYNEQFF

SEQ ID NO: 298079 - protein, 13 aa, Homo sapiens
  CDR3 for alpha chain variable domain of TCR clone 149040 (TRAV3, TRAJ15)
CAVRDQAGTALNF

SEQ ID NO: 298080 - protein, 15 aa, Homo sapiens
  CDR3 for beta chain variable domain of TCR clone 149040 (TRBV11-1, TRBJ2-7)
CASSLNYGASYEQYF

SEQ ID NO: 298081 - protein, 13 aa, Homo sapiens
  CDR3 for alpha chain variable domain of TCR clone 149041 (TRAV8-6, TRAJ49)
CAVVTNTGNQFNF

SEQ ID NO: 298082 - protein, 15 aa, Homo sapiens
  CDR3 for beta chain variable domain of TCR clone 149041 (TRBV9, TRBJ1-6)
CASSVAGTGDSPLHF

SEQ ID NO: 298083 - protein, 14 aa, Homo sapiens
  CDR3 for alpha chain variable domain of TCR clone 149042 (TRAV8-3, TRAJ4)
CAVGVAGGYNKLIF

SEQ ID NO: 298084 - protein, 12 aa, Homo sapiens
  CDR3 for beta chain variable domain of TCR clone 149042 (TRBV11-2, TRBJ2-2)
CASSLGGGELFF

SEQ ID NO: 298085 - protein, 16 aa, Homo sapiens
  CDR3 for alpha chain variable domain of TCR clone 149043 (TRAV3, TRAJ5)
CAVRNLMDTGRRALTF

SEQ ID NO: 298086 - protein, 12 aa, Homo sapiens
  CDR3 for beta chain variable domain of TCR clone 149043 (TRBV12-4, TRBJ2-3)
CASSTLPDTQYF

SEQ ID NO: 298087 - protein, 13 aa, Homo sapiens
  CDR3 for alpha chain variable domain of TCR clone 149044 (TRAV6, TRAJ3)
CSTGYRSASKIIF

SEQ ID NO: 298088 - protein, 13 aa, Homo sapiens
  CDR3 for beta chain variable domain of TCR clone 149044 (TRBV14, TRBJ1-2)
CASSQQGYYGYTF

SEQ ID NO: 298089 - protein, 13 aa, Homo sapiens
  CDR3 for alpha chain variable domain of TCR clone 149045 (TRAV12-3, TRAJ33)
CAMRVTSNYQLIW

SEQ ID NO: 298090 - protein, 13 aa, Homo sapiens
  CDR3 for beta chain variable domain of TCR clone 149045 (TRBV7-2, TRBJ2-2)
CASSLAVTGELFF

SEQ ID NO: 298091 - protein, 11 aa, Homo sapiens
  CDR3 for alpha chain variable domain of TCR clone 149046 (TRAV3, TRAJ21)
CAVGNFNKFYF

SEQ ID NO: 298092 - protein, 14 aa, Homo sapiens
  CDR3 for beta chain variable domain of TCR clone 149046 (TRBV7-9, TRBJ1-4)
CAITEGEANEKLFF

SEQ ID NO: 298093 - protein, 10 aa, Homo sapiens
  CDR3 for alpha chain variable domain of TCR clone 149047 (TRAV1-2, TRAJ31)
CAFFDARLMF

SEQ ID NO: 298094 - protein, 14 aa, Homo sapiens
  CDR3 for beta chain variable domain of TCR clone 149047 (TRBV12-5, TRBJ2-5)
CASGSRTHQETQYF

SEQ ID NO: 298095 - protein, 10 aa, Homo sapiens
  CDR3 for alpha chain variable domain of TCR clone 149048 (TRAV17, TRAJ36)
CATVAGNLFF

SEQ ID NO: 298096 - protein, 12 aa, Homo sapiens
  CDR3 for beta chain variable domain of TCR clone 149048 (TRBV11-2, TRBJ2-4)
CASSSASGSEYF

SEQ ID NO: 298097 - protein, 14 aa, Homo sapiens
  CDR3 for alpha chain variable domain of TCR clone 149049 (TRAV1-2, TRAJ16)
CAVNRFSDGQKLLF

SEQ ID NO: 298098 - protein, 16 aa, Homo sapiens
  CDR3 for beta chain variable domain of TCR clone 149049 (TRBV12-4, TRBJ2-5)
CASSFFVRGRQETQSF

SEQ ID NO: 298099 - protein, 17 aa, Homo sapiens
  CDR3 for alpha chain variable domain of TCR clone 149050 (TRAV4, TRAJ13)
CIVGVQRSSGGYQKVTF

SEQ ID NO: 298100 - protein, 18 aa, Homo sapiens
  CDR3 for beta chain variable domain of TCR clone 149050 (TRBV15, TRBJ2-3)
CATSRDGARSWDTDTQYF

SEQ ID NO: 298101 - protein, 15 aa, Homo sapiens
  CDR3 for alpha chain variable domain of TCR clone 149051 (TRAV13-1, TRAJ27)
CAASGGNTNAGKSTF

SEQ ID NO: 298102 - protein, 15 aa, Homo sapiens
  CDR3 for beta chain variable domain of TCR clone 149051 (TRBV12-4, TRBJ1-5)
CASTRQGSGNQPQQF

SEQ ID NO: 298103 - protein, 14 aa, Homo sapiens
  CDR3 for alpha chain variable domain of TCR clone 149052 (TRAV26-1, TRAJ34)
FIVRESYNTDKLIF

SEQ ID NO: 298104 - protein, 13 aa, Homo sapiens
  CDR3 for beta chain variable domain of TCR clone 149052 (TRBV19, TRBJ2-1)
CATSRGVYNEQFF

SEQ ID NO: 298105 - protein, 15 aa, Homo sapiens
  CDR3 for alpha chain variable domain of TCR clone 149053 (TRAV8-6, TRAJ6)
CAVRDASGGSYIPTF

SEQ ID NO: 298106 - protein, 12 aa, Homo sapiens
  CDR3 for beta chain variable domain of TCR clone 149053 (TRBV2, TRBJ2-7)
CASSRVGYEQYF

SEQ ID NO: 298107 - protein, 16 aa, Homo sapiens
  CDR3 for alpha chain variable domain of TCR clone 149054 (TRAV3, TRAJ37)
CAVRGKGSGNTGKLIF

SEQ ID NO: 298108 - protein, 13 aa, Homo sapiens
  CDR3 for beta chain variable domain of TCR clone 149054 (TRBV14, TRBJ2-7)
CSSSQDRRYEQYF

SEQ ID NO: 298109 - protein, 11 aa, Homo sapiens
  CDR3 for alpha chain variable domain of TCR clone 149055 (TRAV1-2, TRAJ31)
CAVNNNARLMF

SEQ ID NO: 298110 - protein, 15 aa, Homo sapiens
  CDR3 for beta chain variable domain of TCR clone 149055 (TRBV12-4, TRBJ1-1)
CQQQDRVVANTEAFF

SEQ ID NO: 298111 - protein, 10 aa, Homo sapiens
  CDR3 for alpha chain variable domain of TCR clone 149056 (TRAV16, TRAJ22)
SALYLRQLTF

SEQ ID NO: 298112 - protein, 15 aa, Homo sapiens
  CDR3 for beta chain variable domain of TCR clone 149056 (TRBV7-9, TRBJ1-6)
CASSSPGRGNSPLHF

SEQ ID NO: 298113 - protein, 16 aa, Homo sapiens
  CDR3 for alpha chain variable domain of TCR clone 149057 (TRAV17, TRAJ9)
CATGEWGGTGGFKTIF

SEQ ID NO: 298114 - protein, 15 aa, Homo sapiens
  CDR3 for beta chain variable domain of TCR clone 149057 (TRBV7-9, TRBJ2-1)
CASSLGWGRANEQFF

SEQ ID NO: 298115 - protein, 12 aa, Homo sapiens
  CDR3 for alpha chain variable domain of TCR clone 149058 (TRAV1-1, TRAJ29)
CAVISGNTPLVL

SEQ ID NO: 298116 - protein, 17 aa, Homo sapiens
  CDR3 for beta chain variable domain of TCR clone 149058 (TRBV20-1, TRBJ2-2)
CSASGSGQGGLTGELFF

SEQ ID NO: 298117 - protein, 14 aa, Homo sapiens
  CDR3 for alpha chain variable domain of TCR clone 149059 (TRAV8-4, TRAJ34)
CAGSDPGDTDKLIF

SEQ ID NO: 298118 - protein, 14 aa, Homo sapiens
  CDR3 for beta chain variable domain of TCR clone 149059 (TRBV20-1, TRBJ2-5)
CSARDGRAGETQYF

SEQ ID NO: 298119 - protein, 11 aa, Homo sapiens
  CDR3 for alpha chain variable domain of TCR clone 149060 (TRAV12-2, TRAJ31)
YAVTRWARLMF

SEQ ID NO: 298120 - protein, 15 aa, Homo sapiens
  CDR3 for beta chain variable domain of TCR clone 149060 (TRBV19, TRBJ2-7)
CASSIGGGLVNEQYF

SEQ ID NO: 298121 - protein, 10 aa, Homo sapiens
  CDR3 for alpha chain variable domain of TCR clone 149061 (TRAV16, TRAJ22)
SAMYLRQLTF

SEQ ID NO: 298122 - protein, 15 aa, Homo sapiens
  CDR3 for beta chain variable domain of TCR clone 149061 (TRBV7-2, TRBJ2-2)
CASSLVAGSAGELFF

SEQ ID NO: 298123 - protein, 12 aa, Homo sapiens
  CDR3 for alpha chain variable domain of TCR clone 149062 (TRAV13-2, TRAJ23)
CAERHRGGKLIF

SEQ ID NO: 298124 - protein, 16 aa, Homo sapiens
  CDR3 for beta chain variable domain of TCR clone 149062 (TRBV7-7, TRBJ2-1)
CASSLASVTSYNEQFF

SEQ ID NO: 298125 - protein, 14 aa, Homo sapiens
  CDR3 for alpha chain variable domain of TCR clone 149063 (TRAV8-4, TRAJ8)
CAVRLNTGFQKLVF

SEQ ID NO: 298126 - protein, 13 aa, Homo sapiens
  CDR3 for beta chain variable domain of TCR clone 149063 (TRBV7-9, TRBJ2-3)
CASSPGSTDTQYF

SEQ ID NO: 298127 - protein, 13 aa, Homo sapiens
  CDR3 for alpha chain variable domain of TCR clone 149064 (TRAV13-1, TRAJ11)
CAASKEGYSTLTF

SEQ ID NO: 298128 - protein, 19 aa, Homo sapiens
  CDR3 for beta chain variable domain of TCR clone 149064 (TRBV23-1, TRBJ2-5)
CISEPAPPRDRAQEETQYF

SEQ ID NO: 298129 - protein, 13 aa, Homo sapiens
  CDR3 for alpha chain variable domain of TCR clone 149065 (TRAV13-1, TRAJ40)
CAARTSGAYKYIF

SEQ ID NO: 298130 - protein, 17 aa, Homo sapiens
  CDR3 for beta chain variable domain of TCR clone 149065 (TRBV4-1, TRBJ2-3)
CASSQGYVSGGTDTQYF

SEQ ID NO: 298131 - protein, 14 aa, Homo sapiens
  CDR3 for alpha chain variable domain of TCR clone 149066 (TRAV3, TRAJ9)
CAVRGNTGGFKTIF

SEQ ID NO: 298132 - protein, 13 aa, Homo sapiens
  CDR3 for beta chain variable domain of TCR clone 149066 (TRBV6-3, TRBJ2-1)
CASSYDNYNEQFF

SEQ ID NO: 298133 - protein, 12 aa, Homo sapiens
  CDR3 for alpha chain variable domain of TCR clone 149067 (TRAV2, TRAJ31)
CAVEDNNARLMF

SEQ ID NO: 298134 - protein, 16 aa, Homo sapiens
  CDR3 for beta chain variable domain of TCR clone 149067 (TRBV10-3, TRBJ2-1)
CAISGVGDAGGGEQFF

SEQ ID NO: 298135 - protein, 13 aa, Homo sapiens
  CDR3 for alpha chain variable domain of TCR clone 149068 (TRAV1-2, TRAJ9)
CAALNTGGFKTMF

SEQ ID NO: 298136 - protein, 20 aa, Homo sapiens
  CDR3 for beta chain variable domain of TCR clone 149068 (TRBV28, TRBJ2-1)
CASTPIGRSPGLAGGNEQFF

SEQ ID NO: 298137 - protein, 14 aa, Homo sapiens
  CDR3 for alpha chain variable domain of TCR clone 149069 (TRAV13-1, TRAJ10)
CAAKEPGGGNKLTF

SEQ ID NO: 298138 - protein, 14 aa, Homo sapiens
  CDR3 for beta chain variable domain of TCR clone 149069 (TRBV7-6, TRBJ2-3)
CASSLGTVTDTQYF

SEQ ID NO: 298139 - protein, 15 aa, Homo sapiens
  CDR3 for alpha chain variable domain of TCR clone 149070 (TRAV12-2, TRAJ13)
CRESLGSGGYQKVTF

SEQ ID NO: 298140 - protein, 15 aa, Homo sapiens
  CDR3 for beta chain variable domain of TCR clone 149070 (TRBV6-5, TRBJ2-1)
CASRRVQLSYNEQFF

SEQ ID NO: 298141 - protein, 13 aa, Homo sapiens
  CDR3 for alpha chain variable domain of TCR clone 149071 (TRAV3, TRAJ15)
CAVRDQAGTALIF

SEQ ID NO: 298142 - protein, 15 aa, Homo sapiens
  CDR3 for beta chain variable domain of TCR clone 149071 (TRBV11-2, TRBJ2-2)
CASSSDRVNAGELFF

SEQ ID NO: 298143 - protein, 16 aa, Homo sapiens
  CDR3 for alpha chain variable domain of TCR clone 149072 (TRAV35, TRAJ28)
CAGQKYSGAGSYQLTF

SEQ ID NO: 298144 - protein, 13 aa, Homo sapiens
  CDR3 for beta chain variable domain of TCR clone 149072 (TRBV28, TRBJ2-7)
CASKAGGVYEQYF

SEQ ID NO: 298145 - protein, 14 aa, Homo sapiens
  CDR3 for alpha chain variable domain of TCR clone 149073 (TRAV2, TRAJ37)
CAVDFTSNTGKLIF

SEQ ID NO: 298146 - protein, 17 aa, Homo sapiens
  CDR3 for beta chain variable domain of TCR clone 149073 (TRBV7-3, TRBJ2-3)
CASSPRGQGYGTDTQYF

SEQ ID NO: 298147 - protein, 15 aa, Homo sapiens
  CDR3 for alpha chain variable domain of TCR clone 149074 (TRAV21, TRAJ41)
CAVSDNSNSGYALNF

SEQ ID NO: 298148 - protein, 11 aa, Homo sapiens
  CDR3 for beta chain variable domain of TCR clone 149074 (TRBV12-4, TRBJ2-3)
CASTATDTQYF

SEQ ID NO: 298149 - protein, 13 aa, Homo sapiens
  CDR3 for alpha chain variable domain of TCR clone 149075 (TRAV16, TRAJ34)
CALSPYNTDKLVF

SEQ ID NO: 298150 - protein, 17 aa, Homo sapiens
  CDR3 for beta chain variable domain of TCR clone 149075 (TRBV5-1, TRBJ2-1)
CASSTGTSGYSYNEQFF

SEQ ID NO: 298151 - protein, 14 aa, Homo sapiens
  CDR3 for alpha chain variable domain of TCR clone 149076 (TRAV12-2, TRAJ13)
RAVKRTGGYQKVTF

SEQ ID NO: 298152 - protein, 16 aa, Homo sapiens
  CDR3 for beta chain variable domain of TCR clone 149076 (TRBV12-5, TRBJ2-5)
CASGPRTSGNQETQYF

SEQ ID NO: 298153 - protein, 12 aa, Homo sapiens
  CDR3 for alpha chain variable domain of TCR clone 149077 (TRAV25, TRAJ11)
CAGYSGYSTLPF

SEQ ID NO: 298154 - protein, 18 aa, Homo sapiens
  CDR3 for beta chain variable domain of TCR clone 149077 (TRBV5-4, TRBJ2-3)
CASSPTAGLLPSTDTQYF

SEQ ID NO: 298155 - protein, 12 aa, Homo sapiens
  CDR3 for alpha chain variable domain of TCR clone 149078 (TRAV17, TRAJ21)
CALRYNFNKFYF

SEQ ID NO: 298156 - protein, 12 aa, Homo sapiens
  CDR3 for beta chain variable domain of TCR clone 149078 (TRBV24-1, TRBJ2-5)
CHQYRGTETQYF

SEQ ID NO: 298157 - protein, 15 aa, Homo sapiens
  CDR3 for alpha chain variable domain of TCR clone 149079 (TRAV26-1, TRAJ37)
CIVRLGSGNPGKLIF

SEQ ID NO: 298158 - protein, 13 aa, Homo sapiens
  CDR3 for beta chain variable domain of TCR clone 149079 (TRBV6-6, TRBJ2-7)
FASSSSGSYEQYF

SEQ ID NO: 298159 - protein, 12 aa, Homo sapiens
  CDR3 for alpha chain variable domain of TCR clone 149080 (TRAV13-1, TRAJ21)
CAAKEGFNKFYF

SEQ ID NO: 298160 - protein, 13 aa, Homo sapiens
  CDR3 for beta chain variable domain of TCR clone 149080 (TRBV7-9, TRBJ2-1)
CASSLGSVNEQFF

SEQ ID NO: 298161 - protein, 11 aa, Homo sapiens
  CDR3 for alpha chain variable domain of TCR clone 149081 (TRAV16, TRAJ26)
CALTRWSEFCL

SEQ ID NO: 298162 - protein, 16 aa, Homo sapiens
  CDR3 for beta chain variable domain of TCR clone 149081 (TRBV9, TRBJ2-1)
CASSVGGGGIYNEQFF

SEQ ID NO: 298163 - protein, 12 aa, Homo sapiens
  CDR3 for alpha chain variable domain of TCR clone 149082 (TRAV13-1, TRAJ53)
AASGVSNYKLTF

SEQ ID NO: 298164 - protein, 11 aa, Homo sapiens
  CDR3 for beta chain variable domain of TCR clone 149082 (TRBV12-4, TRBJ2-3)
CASTATDTQYF

SEQ ID NO: 298165 - protein, 14 aa, Homo sapiens
  CDR3 for alpha chain variable domain of TCR clone 149083 (TRAV8-2, TRAJ4)
CVVSPSGGYNKLIV

SEQ ID NO: 298166 - protein, 15 aa, Homo sapiens
  CDR3 for beta chain variable domain of TCR clone 149083 (TRBV4-1, TRBJ1-4)
CASSDTGGTNEKLFF

SEQ ID NO: 298167 - protein, 14 aa, Homo sapiens
  CDR3 for alpha chain variable domain of TCR clone 149084 (TRAV1-2, TRAJ16)
CAVNRFSDGQKLLF

SEQ ID NO: 298168 - protein, 15 aa, Homo sapiens
  CDR3 for beta chain variable domain of TCR clone 149084 (TRBV7-9, TRBJ1-6)
CASSSPGRENSPLHS

SEQ ID NO: 298169 - protein, 13 aa, Homo sapiens
  CDR3 for alpha chain variable domain of TCR clone 149085 (TRAV12-1, TRAJ33)
CGDAPDSNYQLIW

SEQ ID NO: 298170 - protein, 12 aa, Homo sapiens
  CDR3 for beta chain variable domain of TCR clone 149085 (TRBV11-2, TRBJ2-2)
CASSLRGGELFF

SEQ ID NO: 298171 - protein, 15 aa, Homo sapiens
  CDR3 for alpha chain variable domain of TCR clone 149086 (TRAV27, TRAJ38)
CAARRNAGNNRKLMV

SEQ ID NO: 298172 - protein, 13 aa, Homo sapiens
  CDR3 for beta chain variable domain of TCR clone 149086 (TRBV12-5, TRBJ2-3)
CASGDRQSDTQYF

SEQ ID NO: 298173 - protein, 16 aa, Homo sapiens
  CDR3 for alpha chain variable domain of TCR clone 149087 (TRAV26-1, TRAJ37)
CIVRGDGSGNTGKLIF

SEQ ID NO: 298174 - protein, 13 aa, Homo sapiens
  CDR3 for beta chain variable domain of TCR clone 149087 (TRBV7-9, TRBJ2-1)
CASSWESYNEQFF

SEQ ID NO: 298175 - protein, 16 aa, Homo sapiens
  CDR3 for alpha chain variable domain of TCR clone 149088 (TRAV22, TRAJ45)
CAVERGKRGGADGLTF

SEQ ID NO: 298176 - protein, 16 aa, Homo sapiens
  CDR3 for beta chain variable domain of TCR clone 149088 (TRBV2, TRBJ2-7)
CASSEPWTGPSYEQYF

SEQ ID NO: 298177 - protein, 14 aa, Homo sapiens
  CDR3 for alpha chain variable domain of TCR clone 149089 (TRAV12-3, TRAJ21)
CAATDLFNFNKFYF

SEQ ID NO: 298178 - protein, 13 aa, Homo sapiens
  CDR3 for beta chain variable domain of TCR clone 149089 (TRBV19, TRBJ2-2)
CASSSKNTGELFF

SEQ ID NO: 298179 - protein, 10 aa, Homo sapiens
  CDR3 for alpha chain variable domain of TCR clone 149090 (TRAV8-3, TRAJ45)
SGGGADGLTF

SEQ ID NO: 298180 - protein, 16 aa, Homo sapiens
  CDR3 for beta chain variable domain of TCR clone 149090 (TRBV7-9, TRBJ2-2)
CASSGFGGANTGELFF

SEQ ID NO: 298181 - protein, 14 aa, Homo sapiens
  CDR3 for alpha chain variable domain of TCR clone 149091 (TRAV14/DV4, TRAJ20)
CAMREGGNDYKLSF

SEQ ID NO: 298182 - protein, 12 aa, Homo sapiens
  CDR3 for beta chain variable domain of TCR clone 149091 (TRBV12-4, TRBJ2-1)
CASSPGRNEQFF

SEQ ID NO: 298183 - protein, 18 aa, Homo sapiens
  CDR3 for alpha chain variable domain of TCR clone 149092 (TRAV26-2, TRAJ54)
CILRDVEVGIQGAQKLVF

SEQ ID NO: 298184 - protein, 15 aa, Homo sapiens
  CDR3 for beta chain variable domain of TCR clone 149092 (TRBV11-2, TRBJ1-2)
CASSLEGVQRNGYTF

SEQ ID NO: 298185 - protein, 14 aa, Homo sapiens
  CDR3 for alpha chain variable domain of TCR clone 149093 (TRAV9-2, TRAJ39)
CALYIYNAGNMLTF

SEQ ID NO: 298186 - protein, 15 aa, Homo sapiens
  CDR3 for beta chain variable domain of TCR clone 149093 (TRBV28, TRBJ1-3)
CASSMGWAPGNTIYF

SEQ ID NO: 298187 - protein, 16 aa, Homo sapiens
  CDR3 for alpha chain variable domain of TCR clone 149094 (TRAV26-1, TRAJ38)
CIVRVELGGNNRKLIW

SEQ ID NO: 298188 - protein, 14 aa, Homo sapiens
  CDR3 for beta chain variable domain of TCR clone 149094 (TRBV12-5, TRBJ2-5)
CASGSRTHQETQYF

SEQ ID NO: 298189 - protein, 12 aa, Homo sapiens
  CDR3 for alpha chain variable domain of TCR clone 149095 (TRAV12-3, TRAJ20)
CAMVRGDYKLSF

SEQ ID NO: 298190 - protein, 12 aa, Homo sapiens
  CDR3 for beta chain variable domain of TCR clone 149095 (TRBV6-1, TRBJ2-7)
CASSHYSYEQYF

SEQ ID NO: 298191 - protein, 23 aa, Homo sapiens
  CDR3 for alpha chain variable domain of TCR clone 149096 (TRAV26-1, TRAJ38)
CIADNAGNNHIHNPDPALYQLRD

SEQ ID NO: 298192 - protein, 13 aa, Homo sapiens
  CDR3 for beta chain variable domain of TCR clone 149096 (TRBV20-1, TRBJ1-1)
CSARGGGNTEAFF

SEQ ID NO: 298193 - protein, 14 aa, Homo sapiens
  CDR3 for alpha chain variable domain of TCR clone 149097 (TRAV1-2, TRAJ16)
CAVNRFSDGQKLLF

SEQ ID NO: 298194 - protein, 17 aa, Homo sapiens
  CDR3 for beta chain variable domain of TCR clone 149097 (TRBV6-5, TRBJ2-4)
CASRPTPGQGSKNIQYF

SEQ ID NO: 298195 - protein, 12 aa, Homo sapiens
  CDR3 for alpha chain variable domain of TCR clone 149098 (TRAV23/DV6, TRAJ39)
CAALNAGNMLTF

SEQ ID NO: 298196 - protein, 15 aa, Homo sapiens
  CDR3 for beta chain variable domain of TCR clone 149098 (TRBV29-1, TRBJ2-1)
CSGRDRKSSYNEQFF

SEQ ID NO: 298197 - protein, 11 aa, Homo sapiens
  CDR3 for alpha chain variable domain of TCR clone 149099 (TRAV12-1, TRAJ30)
CVVNVLGKIIF

SEQ ID NO: 298198 - protein, 15 aa, Homo sapiens
  CDR3 for beta chain variable domain of TCR clone 149099 (TRBV7-6, TRBJ1-2)
CASSSGGRGGYGYTF

SEQ ID NO: 298199 - protein, 17 aa, Homo sapiens
  CDR3 for alpha chain variable domain of TCR clone 149100 (TRAV38-2/DV8, TRAJ28)
CAFLTLYSGAGSYQLTF

SEQ ID NO: 298200 - protein, 14 aa, Homo sapiens
  CDR3 for beta chain variable domain of TCR clone 149100 (TRBV7-2, TRBJ2-5)
CGSSLSGGGETQYF

SEQ ID NO: 298201 - protein, 14 aa, Homo sapiens
  CDR3 for alpha chain variable domain of TCR clone 149101 (TRAV12-1, TRAJ54)
CVVNIYQGAQKLVF

SEQ ID NO: 298202 - protein, 18 aa, Homo sapiens
  CDR3 for beta chain variable domain of TCR clone 149101 (TRBV12-4, TRBJ2-4)
CASSRTGAVDVAKNIQYF

SEQ ID NO: 298203 - protein, 11 aa, Homo sapiens
  CDR3 for alpha chain variable domain of TCR clone 149102 (TRAV12-2, TRAJ43)
CASPIGNDMRF

SEQ ID NO: 298204 - protein, 12 aa, Homo sapiens
  CDR3 for beta chain variable domain of TCR clone 149102 (TRBV20-1, TRBJ2-7)
GSAGLKMGEQYF

SEQ ID NO: 298205 - protein, 13 aa, Homo sapiens
  CDR3 for alpha chain variable domain of TCR clone 149103 (TRAV22, TRAJ26)
CAVEHNYGQNFVF

SEQ ID NO: 298206 - protein, 16 aa, Homo sapiens
  CDR3 for beta chain variable domain of TCR clone 149103 (TRBV7-2, TRBJ2-6)
CASSERRASGANVPTF

SEQ ID NO: 298207 - protein, 13 aa, Homo sapiens
  CDR3 for alpha chain variable domain of TCR clone 149104 (TRAV12-2, TRAJ20)
CAVYPSNDYKLSF

SEQ ID NO: 298208 - protein, 15 aa, Homo sapiens
  CDR3 for beta chain variable domain of TCR clone 149104 (TRBV18, TRBJ1-2)
CASSPGNGLGYGYTV

SEQ ID NO: 298209 - protein, 14 aa, Homo sapiens
  CDR3 for alpha chain variable domain of TCR clone 149105 (TRAV1-2, TRAJ16)
CAVNRFSDGKKLPF

SEQ ID NO: 298210 - protein, 14 aa, Homo sapiens
  CDR3 for beta chain variable domain of TCR clone 149105 (TRBV6-1, TRBJ1-3)
CASVQGGGGNTIYF

SEQ ID NO: 298211 - protein, 18 aa, Homo sapiens
  CDR3 for alpha chain variable domain of TCR clone 149106 (TRAV13-1, TRAJ52)
CAASKRSAGGTSYGKLTF

SEQ ID NO: 298212 - protein, 23 aa, Homo sapiens
  CDR3 for beta chain variable domain of TCR clone 149106 (TRBV4-2, TRBJ2-3)
CASSQDPPRASSISGGRGDTQYF

SEQ ID NO: 298213 - protein, 16 aa, Homo sapiens
  CDR3 for alpha chain variable domain of TCR clone 149107 (TRAV4, TRAJ5)
CLVGPDHGHGQESTCF

SEQ ID NO: 298214 - protein, 13 aa, Homo sapiens
  CDR3 for beta chain variable domain of TCR clone 149107 (TRBV4-2, TRBJ1-2)
CASSLSASGGYTF

SEQ ID NO: 298215 - protein, 14 aa, Homo sapiens
  CDR3 for alpha chain variable domain of TCR clone 149108 (TRAV12-2, TRAJ13)
CAVKKTGGYQKFTF

SEQ ID NO: 298216 - protein, 13 aa, Homo sapiens
  CDR3 for beta chain variable domain of TCR clone 149108 (TRBV7-9, TRBJ1-2)
CASSLKQNYGYTF

SEQ ID NO: 298217 - protein, 11 aa, Homo sapiens
  CDR3 for alpha chain variable domain of TCR clone 149109 (TRAV2, TRAJ13)
CASGGYQKVTF

SEQ ID NO: 298218 - protein, 14 aa, Homo sapiens
  CDR3 for beta chain variable domain of TCR clone 149109 (TRBV6-3, TRBJ1-1)
CASSNVLPGAEAFF

SEQ ID NO: 298219 - protein, 14 aa, Homo sapiens
  CDR3 for alpha chain variable domain of TCR clone 149110 (TRAV26-1, TRAJ38)
CIADNAGNNRKLIW

SEQ ID NO: 298220 - protein, 17 aa, Homo sapiens
  CDR3 for beta chain variable domain of TCR clone 149110 (TRBV7-9, TRBJ2-3)
CASSPTVSGDLTDTQYF

SEQ ID NO: 298221 - protein, 14 aa, Homo sapiens
  CDR3 for alpha chain variable domain of TCR clone 149111 (TRAV2, TRAJ9)
CAVEDRSGGFETIF

SEQ ID NO: 298222 - protein, 13 aa, Homo sapiens
  CDR3 for beta chain variable domain of TCR clone 149111 (TRBV7-9, TRBJ1-2)
CASSLKQNYGYTF

SEQ ID NO: 298223 - protein, 17 aa, Homo sapiens
  CDR3 for alpha chain variable domain of TCR clone 149112 (TRAV8-6, TRAJ58)
CAVRSWVEETSGSRLTF

SEQ ID NO: 298224 - protein, 15 aa, Homo sapiens
  CDR3 for beta chain variable domain of TCR clone 149112 (TRBV20-1, TRBJ2-7)
CSARDRVSGMDEQYF

SEQ ID NO: 298225 - protein, 14 aa, Homo sapiens
  CDR3 for alpha chain variable domain of TCR clone 149113 (TRAV12-2, TRAJ40)
CAVKIPSGTYKYIF

SEQ ID NO: 298226 - protein, 14 aa, Homo sapiens
  CDR3 for beta chain variable domain of TCR clone 149113 (TRBV20-1, TRBJ2-7)
CSAPELAGVGEQYF

SEQ ID NO: 298227 - protein, 15 aa, Homo sapiens
  CDR3 for alpha chain variable domain of TCR clone 149114 (TRAV3, TRAJ20)
YAVRDIKLSDYKFSF

SEQ ID NO: 298228 - protein, 18 aa, Homo sapiens
  CDR3 for beta chain variable domain of TCR clone 149114 (TRBV20-1, TRBJ2-5)
CSQTWDSGRLGGKETQYF

SEQ ID NO: 298229 - protein, 14 aa, Homo sapiens
  CDR3 for alpha chain variable domain of TCR clone 149115 (TRAV1-2, TRAJ16)
CAVNRFSDGQKLLF

SEQ ID NO: 298230 - protein, 17 aa, Homo sapiens
  CDR3 for beta chain variable domain of TCR clone 149115 (TRBV20-1, TRBJ2-1)
CSGSSSGLAGSYNEQFF

SEQ ID NO: 298231 - protein, 15 aa, Homo sapiens
  CDR3 for alpha chain variable domain of TCR clone 149116 (TRAV26-1, TRAJ17)
CIVSSFKAAGNKLTF

SEQ ID NO: 298232 - protein, 14 aa, Homo sapiens
  CDR3 for beta chain variable domain of TCR clone 149116 (TRBV7-6, TRBJ2-3)
CASSLGTVTDTQYF

SEQ ID NO: 298233 - protein, 13 aa, Homo sapiens
  CDR3 for alpha chain variable domain of TCR clone 149117 (TRAV13-1, TRAJ37)
CAAVSGNTGKLIF

SEQ ID NO: 298234 - protein, 19 aa, Homo sapiens
  CDR3 for beta chain variable domain of TCR clone 149117 (TRBV10-2, TRBJ1-6)
CASSENRGAPIIHPSTLGT

SEQ ID NO: 298235 - protein, 19 aa, Homo sapiens
  CDR3 for alpha chain variable domain of TCR clone 149118 (TRAV8-4, TRAJ3)
CAVTGENLVQQCFQENLWI

SEQ ID NO: 298236 - protein, 16 aa, Homo sapiens
  CDR3 for beta chain variable domain of TCR clone 149118 (TRBV4-2, TRBJ1-1)
CASSQAGFGMNTEAFF

SEQ ID NO: 298237 - protein, 15 aa, Homo sapiens
  CDR3 for alpha chain variable domain of TCR clone 149119 (TRAV4, TRAJ17)
FLVGDIGAAGNKLTF

SEQ ID NO: 298238 - protein, 14 aa, Homo sapiens
  CDR3 for beta chain variable domain of TCR clone 149119 (TRBV6-3, TRBJ2-7)
CASSYSVRVYEQYF

SEQ ID NO: 298239 - protein, 18 aa, Homo sapiens
  CDR3 for alpha chain variable domain of TCR clone 149120 (TRAV20, TRAJ4)
CALQPYYMFSGGYNKLIF

SEQ ID NO: 298240 - protein, 13 aa, Homo sapiens
  CDR3 for beta chain variable domain of TCR clone 149120 (TRBV19, TRBJ2-3)
CATWDKITDTQYF

SEQ ID NO: 298241 - protein, 13 aa, Homo sapiens
  CDR3 for alpha chain variable domain of TCR clone 149121 (TRAV1-2, TRAJ9)
CAALNTGGFKTIF

SEQ ID NO: 298242 - protein, 13 aa, Homo sapiens
  CDR3 for beta chain variable domain of TCR clone 149121 (TRBV19, TRBJ1-2)
CASSVAGQDGYIF

SEQ ID NO: 298243 - protein, 12 aa, Homo sapiens
  CDR3 for alpha chain variable domain of TCR clone 149122 (TRAV3, TRAJ26)
CAVIDYGQNFFF

SEQ ID NO: 298244 - protein, 16 aa, Homo sapiens
  CDR3 for beta chain variable domain of TCR clone 149122 (TRBV11-2, TRBJ1-2)
CASSPSGREANYGYTF

SEQ ID NO: 298245 - protein, 17 aa, Homo sapiens
  CDR3 for alpha chain variable domain of TCR clone 149123 (TRAV38-1, TRAJ45)
CAFMKHYMGGGADGLTF

SEQ ID NO: 298246 - protein, 15 aa, Homo sapiens
  CDR3 for beta chain variable domain of TCR clone 149123 (TRBV2, TRBJ1-4)
CASSERAGEKLFLAV

SEQ ID NO: 298247 - protein, 15 aa, Homo sapiens
  CDR3 for alpha chain variable domain of TCR clone 149124 (TRAV26-1, TRAJ29)
CIVRVEGSGNTPLVF

SEQ ID NO: 298248 - protein, 12 aa, Homo sapiens
  CDR3 for beta chain variable domain of TCR clone 149124 (TRBV5-1, TRBJ2-4)
LAGEWTKNIQYF

SEQ ID NO: 298249 - protein, 14 aa, Homo sapiens
  CDR3 for alpha chain variable domain of TCR clone 149125 (TRAV29/DV5, TRAJ36)
CAARRKTGANNPFF

SEQ ID NO: 298250 - protein, 13 aa, Homo sapiens
  CDR3 for beta chain variable domain of TCR clone 149125 (TRBV15, TRBJ1-2)
CATSMTANYGYTF

SEQ ID NO: 298251 - protein, 13 aa, Homo sapiens
  CDR3 for alpha chain variable domain of TCR clone 149126 (TRAV19, TRAJ57)
CALLQGGSEKLVF

SEQ ID NO: 298252 - protein, 16 aa, Homo sapiens
  CDR3 for beta chain variable domain of TCR clone 149126 (TRBV7-3, TRBJ2-2)
CASSLKRGTLSGELFF

SEQ ID NO: 298253 - protein, 13 aa, Homo sapiens
  CDR3 for alpha chain variable domain of TCR clone 149127 (TRAV20, TRAJ21)
CALEGYNFNKFYF

SEQ ID NO: 298254 - protein, 14 aa, Homo sapiens
  CDR3 for beta chain variable domain of TCR clone 149127 (TRBV12-5, TRBJ2-5)
CASGSRTHQETQYF

SEQ ID NO: 298255 - protein, 16 aa, Homo sapiens
  CDR3 for alpha chain variable domain of TCR clone 149128 (TRAV30, TRAJ24)
CGTEIVDADSWGKFKF

SEQ ID NO: 298256 - protein, 13 aa, Homo sapiens
  CDR3 for beta chain variable domain of TCR clone 149128 (TRBV12-4, TRBJ2-5)
CASSPGTEETQYF

SEQ ID NO: 298257 - protein, 15 aa, Homo sapiens
  CDR3 for alpha chain variable domain of TCR clone 149129 (TRAV13-1, TRAJ43)
CAASGGFGAGTRLTV

SEQ ID NO: 298258 - protein, 14 aa, Homo sapiens
  CDR3 for beta chain variable domain of TCR clone 149129 (TRBV7-2, TRBJ2-7)
CASRSQGAAYEQYF

SEQ ID NO: 298259 - protein, 15 aa, Homo sapiens
  CDR3 for alpha chain variable domain of TCR clone 149130 (TRAV26-1, TRAJ29)
CIVRVEGSGNTPLFF

SEQ ID NO: 298260 - protein, 14 aa, Homo sapiens
  CDR3 for beta chain variable domain of TCR clone 149130 (TRBV6-1, TRBJ1-3)
CASVQGGGGNTIYF

SEQ ID NO: 298261 - protein, 23 aa, Homo sapiens
  CDR3 for alpha chain variable domain of TCR clone 149131 (TRAV1-2, TRAJ13)
LLKELQMKDSAPYLCAVPPYFTF

SEQ ID NO: 298262 - protein, 15 aa, Homo sapiens
  CDR3 for beta chain variable domain of TCR clone 149131 (TRBV5-1, TRBJ2-3)
CASSLDPASTDTQYF

SEQ ID NO: 298263 - protein, 11 aa, Homo sapiens
  CDR3 for alpha chain variable domain of TCR clone 149132 (TRAV1-1, TRAJ23)
CAVRQGGKLIF

SEQ ID NO: 298264 - protein, 18 aa, Homo sapiens
  CDR3 for beta chain variable domain of TCR clone 149132 (TRBV11-2, TRBJ1-6)
CASSLVSATGGSVHPSTL

SEQ ID NO: 298265 - protein, 12 aa, Homo sapiens
  CDR3 for alpha chain variable domain of TCR clone 149133 (TRAV8-3, TRAJ26)
CAGYNYGQNFVF

SEQ ID NO: 298266 - protein, 16 aa, Homo sapiens
  CDR3 for beta chain variable domain of TCR clone 149133 (TRBV19, TRBJ2-1)
CASSKAGPSSYNEQFF

SEQ ID NO: 298267 - protein, 13 aa, Homo sapiens
  CDR3 for alpha chain variable domain of TCR clone 149134 (TRAV36/DV7, TRAJ54)
CAVLIQGAQKLVF

SEQ ID NO: 298268 - protein, 13 aa, Homo sapiens
  CDR3 for beta chain variable domain of TCR clone 149134 (TRBV29-1, TRBJ2-4)
CSGGEGTKNIQYF

SEQ ID NO: 298269 - protein, 11 aa, Homo sapiens
  CDR3 for alpha chain variable domain of TCR clone 149135 (TRAV2, TRAJ33)
CAVDSNYQLIW

SEQ ID NO: 298270 - protein, 14 aa, Homo sapiens
  CDR3 for beta chain variable domain of TCR clone 149135 (TRBV11-2, TRBJ2-3)
CASSRLARTDRQYF

SEQ ID NO: 298271 - protein, 22 aa, Homo sapiens
  CDR3 for alpha chain variable domain of TCR clone 149136 (TRAV21, TRAJ50)
SLVTQPPTSVLASKTSYDKVIF

SEQ ID NO: 298272 - protein, 17 aa, Homo sapiens
  CDR3 for beta chain variable domain of TCR clone 149136 (TRBV13, TRBJ2-3)
CASSLSRVAGGRNTQYF

SEQ ID NO: 298273 - protein, 14 aa, Homo sapiens
  CDR3 for alpha chain variable domain of TCR clone 149137 (TRAV8-4, TRAJ17)
CAVSDQAAGNKLTF

SEQ ID NO: 298274 - protein, 15 aa, Homo sapiens
  CDR3 for beta chain variable domain of TCR clone 149137 (TRBV7-2, TRBJ1-2)
CASSLAPVRGLGYTF

SEQ ID NO: 298275 - protein, 14 aa, Homo sapiens
  CDR3 for alpha chain variable domain of TCR clone 149138 (TRAV8-3, TRAJ39)
CAVGANNAGKMLTF

SEQ ID NO: 298276 - protein, 15 aa, Homo sapiens
  CDR3 for beta chain variable domain of TCR clone 149138 (TRBV4-3, TRBJ1-1)
CASSQELGRGTEAFF

SEQ ID NO: 298277 - protein, 16 aa, Homo sapiens
  CDR3 for alpha chain variable domain of TCR clone 149139 (TRAV3, TRAJ10)
CAVRDMNAGGGNKITF

SEQ ID NO: 298278 - protein, 15 aa, Homo sapiens
  CDR3 for beta chain variable domain of TCR clone 149139 (TRBV9, TRBJ1-6)
CASSVAGTGDSPLHF

SEQ ID NO: 298279 - protein, 13 aa, Homo sapiens
  CDR3 for alpha chain variable domain of TCR clone 149140 (TRAV36/DV7, TRAJ7)
CAGTRYVNNRLAF

SEQ ID NO: 298280 - protein, 15 aa, Homo sapiens
  CDR3 for beta chain variable domain of TCR clone 149140 (TRBV11-3, TRBJ2-7)
CASSPGPASSYEQYF

SEQ ID NO: 298281 - protein, 14 aa, Homo sapiens
  CDR3 for alpha chain variable domain of TCR clone 149141 (TRAV12-3, TRAJ10)
SHLPLTGGGNKLTF

SEQ ID NO: 298282 - protein, 15 aa, Homo sapiens
  CDR3 for beta chain variable domain of TCR clone 149141 (TRBV10-3, TRBJ1-1)
CGISDRGGMNTEAFF

SEQ ID NO: 298283 - protein, 14 aa, Homo sapiens
  CDR3 for alpha chain variable domain of TCR clone 149142 (TRAV2, TRAJ9)
CAVEDRSGGFKTIF

SEQ ID NO: 298284 - protein, 15 aa, Homo sapiens
  CDR3 for beta chain variable domain of TCR clone 149142 (TRBV11-2, TRBJ1-3)
CASSLDGTVGNTIYF

SEQ ID NO: 298285 - protein, 15 aa, Homo sapiens
  CDR3 for alpha chain variable domain of TCR clone 149143 (TRAV3, TRAJ3)
CAVRYRRSSASKIIF

SEQ ID NO: 298286 - protein, 13 aa, Homo sapiens
  CDR3 for beta chain variable domain of TCR clone 149143 (TRBV9, TRBJ2-5)
CASSPAGLGTQYF

SEQ ID NO: 298287 - protein, 10 aa, Homo sapiens
  CDR3 for alpha chain variable domain of TCR clone 149144 (TRAV13-2, TRAJ20)
CAENICRLQA

SEQ ID NO: 298288 - protein, 15 aa, Homo sapiens
  CDR3 for beta chain variable domain of TCR clone 149144 (TRBV18, TRBJ1-2)
CASSPGDGLGYGYTF

SEQ ID NO: 298289 - protein, 15 aa, Homo sapiens
  CDR3 for alpha chain variable domain of TCR clone 149145 (TRAV4, TRAJ36)
CLVGDRQTGANNLFF

SEQ ID NO: 298290 - protein, 12 aa, Homo sapiens
  CDR3 for beta chain variable domain of TCR clone 149145 (TRBV11-2, TRBJ2-1)
CASSPGNNEQFF

SEQ ID NO: 298291 - protein, 14 aa, Homo sapiens
  CDR3 for alpha chain variable domain of TCR clone 149146 (TRAV12-2, TRAJ13)
CAVKKTGGYQKVTF

SEQ ID NO: 298292 - protein, 14 aa, Homo sapiens
  CDR3 for beta chain variable domain of TCR clone 149146 (TRBV5-5, TRBJ2-1)
CASSLGQGTYEQFF

SEQ ID NO: 298293 - protein, 16 aa, Homo sapiens
  CDR3 for alpha chain variable domain of TCR clone 149147 (TRAV30, TRAJ24)
CGTEIVDADSWGKFQF

SEQ ID NO: 298294 - protein, 14 aa, Homo sapiens
  CDR3 for beta chain variable domain of TCR clone 149147 (TRBV5-1, TRBJ2-7)
CASSLVRGSGEQYF

SEQ ID NO: 298295 - protein, 12 aa, Homo sapiens
  CDR3 for alpha chain variable domain of TCR clone 149148 (TRAV13-1, TRAJ21)
CAAKEGFNKFYF

SEQ ID NO: 298296 - protein, 16 aa, Homo sapiens
  CDR3 for beta chain variable domain of TCR clone 149148 (TRBV7-2, TRBJ2-6)
CASSLVGRSGANVLTF

SEQ ID NO: 298297 - protein, 18 aa, Homo sapiens
  CDR3 for alpha chain variable domain of TCR clone 149149 (TRAV21, TRAJ52)
CAVRPSPAGGTSYGKLTF

SEQ ID NO: 298298 - protein, 15 aa, Homo sapiens
  CDR3 for beta chain variable domain of TCR clone 149149 (TRBV19, TRBJ2-1)
CASSGGGTLYNEQFF

SEQ ID NO: 298299 - protein, 14 aa, Homo sapiens
  CDR3 for alpha chain variable domain of TCR clone 149150 (TRAV25, TRAJ23)
CAGQGDNQGGKLIF

SEQ ID NO: 298300 - protein, 12 aa, Homo sapiens
  CDR3 for beta chain variable domain of TCR clone 149150 (TRBV7-9, TRBJ1-1)
CASSLVRGESFF

SEQ ID NO: 298301 - protein, 14 aa, Homo sapiens
  CDR3 for alpha chain variable domain of TCR clone 149151 (TRAV1-2, TRAJ16)
CAVSRFSDGQKLLF

SEQ ID NO: 298302 - protein, 15 aa, Homo sapiens
  CDR3 for beta chain variable domain of TCR clone 149151 (TRBV6-3, TRBJ2-7)
CASSSPGTVFYEQYF

SEQ ID NO: 298303 - protein, 14 aa, Homo sapiens
  CDR3 for alpha chain variable domain of TCR clone 149152 (TRAV2, TRAJ37)
CAVDFTSNTGKLIF

SEQ ID NO: 298304 - protein, 13 aa, Homo sapiens
  CDR3 for beta chain variable domain of TCR clone 149152 (TRBV20-1, TRBJ1-1)
CSAPLGGGAEAFF

SEQ ID NO: 298305 - protein, 14 aa, Homo sapiens
  CDR3 for alpha chain variable domain of TCR clone 149153 (TRAV12-2, TRAJ17)
CAVLFKAAGKKLTF

SEQ ID NO: 298306 - protein, 16 aa, Homo sapiens
  CDR3 for beta chain variable domain of TCR clone 149153 (TRBV20-1, TRBJ1-4)
CSAPRQGLLTNEKLFF

SEQ ID NO: 298307 - protein, 13 aa, Homo sapiens
  CDR3 for alpha chain variable domain of TCR clone 149154 (TRAV23/DV6, TRAJ21)
CAASIGNFNKFYF

SEQ ID NO: 298308 - protein, 13 aa, Homo sapiens
  CDR3 for beta chain variable domain of TCR clone 149154 (TRBV7-9, TRBJ1-2)
CASSLKQNYGYTF

SEQ ID NO: 298309 - protein, 17 aa, Homo sapiens
  CDR3 for alpha chain variable domain of TCR clone 149155 (TRAV13-1, TRAJ28)
CAASPPYSGARSYQLTF

SEQ ID NO: 298310 - protein, 15 aa, Homo sapiens
  CDR3 for beta chain variable domain of TCR clone 149155 (TRBV5-1, TRBJ2-2)
CASSLFGQNTGELFF

SEQ ID NO: 298311 - protein, 10 aa, Homo sapiens
  CDR3 for alpha chain variable domain of TCR clone 149156 (TRAV29/DV5, TRAJ34)
CAEDTDKLIF

SEQ ID NO: 298312 - protein, 19 aa, Homo sapiens
  CDR3 for beta chain variable domain of TCR clone 149156 (TRBV25-1, TRBJ2-2)
CAILVYRVDRGRKTGELFF

SEQ ID NO: 298313 - protein, 14 aa, Homo sapiens
  CDR3 for alpha chain variable domain of TCR clone 149157 (TRAV12-1, TRAJ17)
CVVNYKAAGNKLTF

SEQ ID NO: 298314 - protein, 17 aa, Homo sapiens
  CDR3 for beta chain variable domain of TCR clone 149157 (TRBV20-1, TRBJ2-1)
CSASSSVLAGSYNEQFC

SEQ ID NO: 298315 - protein, 14 aa, Homo sapiens
  CDR3 for alpha chain variable domain of TCR clone 149158 (TRAV9-2, TRAJ39)
CALYIDNAGNMLTF

SEQ ID NO: 298316 - protein, 12 aa, Homo sapiens
  CDR3 for beta chain variable domain of TCR clone 149158 (TRBV14, TRBJ2-7)
CASSLYKDEQYF

SEQ ID NO: 298317 - protein, 14 aa, Homo sapiens
  CDR3 for alpha chain variable domain of TCR clone 149159 (TRAV25, TRAJ6)
CAGRESGGSYIPTF

SEQ ID NO: 298318 - protein, 15 aa, Homo sapiens
  CDR3 for beta chain variable domain of TCR clone 149159 (TRBV12-4, TRBJ2-5)
CASSPPTGLQETQYF

SEQ ID NO: 298319 - protein, 12 aa, Homo sapiens
  CDR3 for alpha chain variable domain of TCR clone 149160 (TRAV2, TRAJ30)
TTVLSKDDKIIF

SEQ ID NO: 298320 - protein, 14 aa, Homo sapiens
  CDR3 for beta chain variable domain of TCR clone 149160 (TRBV12-4, TRBJ2-7)
CASNRQGRSYEQYF

SEQ ID NO: 298321 - protein, 17 aa, Homo sapiens
  CDR3 for alpha chain variable domain of TCR clone 149161 (TRAV16, TRAJ58)
CITVLSNGETSGSRLTF

SEQ ID NO: 298322 - protein, 14 aa, Homo sapiens
  CDR3 for beta chain variable domain of TCR clone 149161 (TRBV12-4, TRBJ1-1)
CASSLGTGGTEAFF

SEQ ID NO: 298323 - protein, 16 aa, Homo sapiens
  CDR3 for alpha chain variable domain of TCR clone 149162 (TRAV3, TRAJ18)
CAVRDGRGSTLGRLYF

SEQ ID NO: 298324 - protein, 16 aa, Homo sapiens
  CDR3 for beta chain variable domain of TCR clone 149162 (TRBV4-1, TRBJ2-1)
CASSQEAGQGSDEQFF

SEQ ID NO: 298325 - protein, 15 aa, Homo sapiens
  CDR3 for alpha chain variable domain of TCR clone 149163 (TRAV2, TRAJ37)
CAVGDGPSNTGKLIF

SEQ ID NO: 298326 - protein, 13 aa, Homo sapiens
  CDR3 for beta chain variable domain of TCR clone 149163 (TRBV20-1, TRBJ2-7)
CSAQTGLSYEQYF

SEQ ID NO: 298327 - protein, 15 aa, Homo sapiens
  CDR3 for alpha chain variable domain of TCR clone 149164 (TRAV29/DV5, TRAJ29)
CAASERSSGNTPLVF

SEQ ID NO: 298328 - protein, 15 aa, Homo sapiens
  CDR3 for beta chain variable domain of TCR clone 149164 (TRBV14, TRBJ1-1)
CASSQDGMGRREAFF

SEQ ID NO: 298329 - protein, 14 aa, Homo sapiens
  CDR3 for alpha chain variable domain of TCR clone 149165 (TRAV1-2, TRAJ8)
CAVREYTGFQKLVF

SEQ ID NO: 298330 - protein, 13 aa, Homo sapiens
  CDR3 for beta chain variable domain of TCR clone 149165 (TRBV10-3, TRBJ1-2)
CAISERDSYGYTF

SEQ ID NO: 298331 - protein, 13 aa, Homo sapiens
  CDR3 for alpha chain variable domain of TCR clone 149166 (TRAV20, TRAJ37)
CAGCSSNTGKLIF

SEQ ID NO: 298332 - protein, 15 aa, Homo sapiens
  CDR3 for beta chain variable domain of TCR clone 149166 (TRBV5-8, TRBJ2-7)
CASSYTGTGPREQYF

SEQ ID NO: 298333 - protein, 15 aa, Homo sapiens
  CDR3 for alpha chain variable domain of TCR clone 149167 (TRAV21, TRAJ24)
CAARSSTDSWGTLQF

SEQ ID NO: 298334 - protein, 15 aa, Homo sapiens
  CDR3 for beta chain variable domain of TCR clone 149167 (TRBV4-1, TRBJ2-7)
CASSQNTGRLYEQYF

SEQ ID NO: 298335 - protein, 12 aa, Homo sapiens
  CDR3 for alpha chain variable domain of TCR clone 149168 (TRAV1-1, TRAJ8)
CSVGTGFQKLVF

SEQ ID NO: 298336 - protein, 16 aa, Homo sapiens
  CDR3 for beta chain variable domain of TCR clone 149168 (TRBV12-5, TRBJ2-5)
CASGPRTSGNQETQYF

SEQ ID NO: 298337 - protein, 13 aa, Homo sapiens
  CDR3 for alpha chain variable domain of TCR clone 149169 (TRAV3, TRAJ36)
CAVKRTGANNLFF

SEQ ID NO: 298338 - protein, 17 aa, Homo sapiens
  CDR3 for beta chain variable domain of TCR clone 149169 (TRBV11-2, TRBJ2-1)
CASSLCPPGVEYNEQFF

SEQ ID NO: 298339 - protein, 19 aa, Homo sapiens
  CDR3 for alpha chain variable domain of TCR clone 149170 (TRAV26-1, TRAJ52)
CIVIAHRNACGTSYGKLTF

SEQ ID NO: 298340 - protein, 15 aa, Homo sapiens
  CDR3 for beta chain variable domain of TCR clone 149170 (TRBV12-4, TRBJ2-5)
CASSPPTGLQETQYF

SEQ ID NO: 298341 - protein, 17 aa, Homo sapiens
  CDR3 for alpha chain variable domain of TCR clone 149171 (TRAV3, TRAJ6)
CAVRDGPRAGGSYIPTF

SEQ ID NO: 298342 - protein, 12 aa, Homo sapiens
  CDR3 for beta chain variable domain of TCR clone 149171 (TRBV20-1, TRBJ1-2)
CSADLSRGGYTF

SEQ ID NO: 298343 - protein, 13 aa, Homo sapiens
  CDR3 for alpha chain variable domain of TCR clone 149172 (TRAV1-2, TRAJ9)
CAALNTGGFKTIF

SEQ ID NO: 298344 - protein, 14 aa, Homo sapiens
  CDR3 for beta chain variable domain of TCR clone 149172 (TRBV13, TRBJ2-3)
CASSTGSPTDTQYF

SEQ ID NO: 298345 - protein, 17 aa, Homo sapiens
  CDR3 for alpha chain variable domain of TCR clone 149173 (TRAV4, TRAJ18)
CLVGERSVGSTLGRLYF

SEQ ID NO: 298346 - protein, 15 aa, Homo sapiens
  CDR3 for beta chain variable domain of TCR clone 149173 (TRBV20-1, TRBJ2-1)
CSARGIGGTYNEQFF

SEQ ID NO: 298347 - protein, 13 aa, Homo sapiens
  CDR3 for alpha chain variable domain of TCR clone 149174 (TRAV13-1, TRAJ5)
CAASDTGRRALTV

SEQ ID NO: 298348 - protein, 12 aa, Homo sapiens
  CDR3 for beta chain variable domain of TCR clone 149174 (TRBV28, TRBJ2-3)
CPSSLYRDTQYF

SEQ ID NO: 298349 - protein, 14 aa, Homo sapiens
  CDR3 for alpha chain variable domain of TCR clone 149175 (TRAV2, TRAJ29)
CGVTPPSGNTPLVF

SEQ ID NO: 298350 - protein, 13 aa, Homo sapiens
  CDR3 for beta chain variable domain of TCR clone 149175 (TRBV11-2, TRBJ2-1)
CASSLGLAGGRFF

SEQ ID NO: 298351 - protein, 12 aa, Homo sapiens
  CDR3 for alpha chain variable domain of TCR clone 149176 (TRAV13-1, TRAJ21)
CAAKEGFNKFYF

SEQ ID NO: 298352 - protein, 13 aa, Homo sapiens
  CDR3 for beta chain variable domain of TCR clone 149176 (TRBV7-3, TRBJ1-1)
CASSQDWGTEAFF

SEQ ID NO: 298353 - protein, 13 aa, Homo sapiens
  CDR3 for alpha chain variable domain of TCR clone 149177 (TRAV12-1, TRAJ39)
CGDDNNAGNMLTF

SEQ ID NO: 298354 - protein, 14 aa, Homo sapiens
  CDR3 for beta chain variable domain of TCR clone 149177 (TRBV7-2, TRBJ1-1)
CASSFLTGTTEAFF

SEQ ID NO: 298355 - protein, 13 aa, Homo sapiens
  CDR3 for alpha chain variable domain of TCR clone 149178 (TRAV2, TRAJ29)
CAAGNSGKTPLVF

SEQ ID NO: 298356 - protein, 16 aa, Homo sapiens
  CDR3 for beta chain variable domain of TCR clone 149178 (TRBV7-9, TRBJ1-2)
CASSPGEGAINYGYTF

SEQ ID NO: 298357 - protein, 10 aa, Homo sapiens
  CDR3 for alpha chain variable domain of TCR clone 149179 (TRAV3, )
CAVRDCLNVG

SEQ ID NO: 298358 - protein, 19 aa, Homo sapiens
  CDR3 for beta chain variable domain of TCR clone 149179 (TRBV7-2, TRBJ2-3)
CASSFLSRNWGGGTDTQYF

SEQ ID NO: 298359 - protein, 14 aa, Homo sapiens
  CDR3 for alpha chain variable domain of TCR clone 149180 (TRAV8-2, TRAJ5)
CVVIMDTGRRALTF

SEQ ID NO: 298360 - protein, 18 aa, Homo sapiens
  CDR3 for beta chain variable domain of TCR clone 149180 (TRBV7-9, TRBJ2-7)
CASSLTTSGSRTWYEQYF

SEQ ID NO: 298361 - protein, 15 aa, Homo sapiens
  CDR3 for alpha chain variable domain of TCR clone 149181 (TRAV9-2, TRAJ56)
CALRDVDGANSKLTF

SEQ ID NO: 298362 - protein, 14 aa, Homo sapiens
  CDR3 for beta chain variable domain of TCR clone 149181 (TRBV7-3, TRBJ2-1)
CASSLAGGTNEQFF

SEQ ID NO: 298363 - protein, 13 aa, Homo sapiens
  CDR3 for alpha chain variable domain of TCR clone 149182 (TRAV26-1, TRAJ30)
CIVRVESNDKIIF

SEQ ID NO: 298364 - protein, 12 aa, Homo sapiens
  CDR3 for beta chain variable domain of TCR clone 149182 (TRBV6-3, TRBJ2-1)
CASSGSYNEQFF

SEQ ID NO: 298365 - protein, 13 aa, Homo sapiens
  CDR3 for alpha chain variable domain of TCR clone 149183 (TRAV29/DV5, TRAJ31)
CAASLNNNARLMF

SEQ ID NO: 298366 - protein, 12 aa, Homo sapiens
  CDR3 for beta chain variable domain of TCR clone 149183 (TRBV11-2, TRBJ2-2)
CASSLGGGELFF

SEQ ID NO: 298367 - protein, 16 aa, Homo sapiens
  CDR3 for alpha chain variable domain of TCR clone 149184 (TRAV26-1, TRAJ52)
CIVSNAGGTSYGKLTF

SEQ ID NO: 298368 - protein, 15 aa, Homo sapiens
  CDR3 for beta chain variable domain of TCR clone 149184 (TRBV7-3, TRBJ2-1)
CDSSPTGGGEVEQFF

SEQ ID NO: 298369 - protein, 17 aa, Homo sapiens
  CDR3 for alpha chain variable domain of TCR clone 149185 (TRAV4, TRAJ13)
CLVAVQGSSGGYQKVTF

SEQ ID NO: 298370 - protein, 18 aa, Homo sapiens
  CDR3 for beta chain variable domain of TCR clone 149185 (TRBV15, TRBJ2-3)
CATSRDGARSWDTDTQYF

SEQ ID NO: 298371 - protein, 14 aa, Homo sapiens
  CDR3 for alpha chain variable domain of TCR clone 149186 (TRAV12-2, TRAJ13)
CAVKKTGGYHKVTF

SEQ ID NO: 298372 - protein, 12 aa, Homo sapiens
  CDR3 for beta chain variable domain of TCR clone 149186 (TRBV7-8, TRBJ2-7)
CASSLGDREQYF

SEQ ID NO: 298373 - protein, 12 aa, Homo sapiens
  CDR3 for alpha chain variable domain of TCR clone 149187 (TRAV3, TRAJ20)
CDVRDPDYKLSF

SEQ ID NO: 298374 - protein, 14 aa, Homo sapiens
  CDR3 for beta chain variable domain of TCR clone 149187 (TRBV4-2, TRBJ2-1)
CASGLDRAYNEQFF

SEQ ID NO: 298375 - protein, 16 aa, Homo sapiens
  CDR3 for alpha chain variable domain of TCR clone 149188 (TRAV17, TRAJ35)
CATAEGGIGFGDVLHF

SEQ ID NO: 298376 - protein, 12 aa, Homo sapiens
  CDR3 for beta chain variable domain of TCR clone 149188 (TRBV11-2, TRBJ2-2)
CASSLGGGELFF

SEQ ID NO: 298377 - protein, 13 aa, Homo sapiens
  CDR3 for alpha chain variable domain of TCR clone 149189 (TRAV1-2, TRAJ12)
CAVSMDSSYKLIF

SEQ ID NO: 298378 - protein, 15 aa, Homo sapiens
  CDR3 for beta chain variable domain of TCR clone 149189 (TRBV28, TRBJ2-7)
CASSPGGRGFYEQYF

SEQ ID NO: 298379 - protein, 14 aa, Homo sapiens
  CDR3 for alpha chain variable domain of TCR clone 149190 (TRAV13-1, TRAJ44)
CAEKATGTASKLPF

SEQ ID NO: 298380 - protein, 17 aa, Homo sapiens
  CDR3 for beta chain variable domain of TCR clone 149190 (TRBV7-3, TRBJ2-3)
CASSLMKRMRGADTQYF

SEQ ID NO: 298381 - protein, 13 aa, Homo sapiens
  CDR3 for alpha chain variable domain of TCR clone 149191 (TRAV23/DV6, TRAJ5)
CAARAAGRRALTF

SEQ ID NO: 298382 - protein, 15 aa, Homo sapiens
  CDR3 for beta chain variable domain of TCR clone 149191 (TRBV7-2, TRBJ1-2)
CASSLVSGGDYGYTF

SEQ ID NO: 298383 - protein, 14 aa, Homo sapiens
  CDR3 for alpha chain variable domain of TCR clone 149192 (TRAV13-2, TRAJ11)
FAETGSSGYSTLTF

SEQ ID NO: 298384 - protein, 11 aa, Homo sapiens
  CDR3 for beta chain variable domain of TCR clone 149192 (TRBV10-3, TRBJ2-7)
CAISEGLEQYF

SEQ ID NO: 298385 - protein, 13 aa, Homo sapiens
  CDR3 for alpha chain variable domain of TCR clone 149193 (TRAV1-2, TRAJ9)
CAALNTGGFKTIF

SEQ ID NO: 298386 - protein, 16 aa, Homo sapiens
  CDR3 for beta chain variable domain of TCR clone 149193 (TRBV11-2, TRBJ2-1)
CASSHRLAGVYNEQFF

SEQ ID NO: 298387 - protein, 21 aa, Homo sapiens
  CDR3 for alpha chain variable domain of TCR clone 149194 (TRAV8-3, TRAJ10)
CAVGHTHGRRRQTHLWDRHSA

SEQ ID NO: 298388 - protein, 10 aa, Homo sapiens
  CDR3 for beta chain variable domain of TCR clone 149194 (TRBV20-1, TRBJ2-5)
CSARFETQYF

SEQ ID NO: 298389 - protein, 14 aa, Homo sapiens
  CDR3 for alpha chain variable domain of TCR clone 149195 (TRAV8-4, TRAJ48)
CAVNETFGNGKLTF

SEQ ID NO: 298390 - protein, 14 aa, Homo sapiens
  CDR3 for beta chain variable domain of TCR clone 149195 (TRBV13, TRBJ2-7)
CASSLKGASYEQYF

SEQ ID NO: 298391 - protein, 12 aa, Homo sapiens
  CDR3 for alpha chain variable domain of TCR clone 149196 (TRAV12-2, TRAJ10)
WGVTGGGNKLTF

SEQ ID NO: 298392 - protein, 14 aa, Homo sapiens
  CDR3 for beta chain variable domain of TCR clone 149196 (TRBV2, TRBJ2-1)
CASRTGSSYNEQFF

SEQ ID NO: 298393 - protein, 15 aa, Homo sapiens
  CDR3 for alpha chain variable domain of TCR clone 149197 (TRAV38-1, TRAJ30)
CAFMMSYGGGDKIIF

SEQ ID NO: 298394 - protein, 16 aa, Homo sapiens
  CDR3 for beta chain variable domain of TCR clone 149197 (TRBV7-9, TRBJ2-7)
CASSFGLAGPSYEQYF

SEQ ID NO: 298395 - protein, 12 aa, Homo sapiens
  CDR3 for alpha chain variable domain of TCR clone 149198 (TRAV25, TRAJ35)
CAGIGFGNVLHC

SEQ ID NO: 298396 - protein, 12 aa, Homo sapiens
  CDR3 for beta chain variable domain of TCR clone 149198 (TRBV11-2, TRBJ2-2)
CASSLPTGELFF

SEQ ID NO: 298397 - protein, 11 aa, Homo sapiens
  CDR3 for alpha chain variable domain of TCR clone 149199 (TRAV13-1, TRAJ6)
CATLGSYIPKF

SEQ ID NO: 298398 - protein, 15 aa, Homo sapiens
  CDR3 for beta chain variable domain of TCR clone 149199 (TRBV7-2, TRBJ2-3)
CASSSTGLETDTQYF

SEQ ID NO: 298399 - protein, 14 aa, Homo sapiens
  CDR3 for alpha chain variable domain of TCR clone 149200 (TRAV13-2, TRAJ17)
CAENSKAAGNKLSF

SEQ ID NO: 298400 - protein, 14 aa, Homo sapiens
  CDR3 for beta chain variable domain of TCR clone 149200 (TRBV7-2, TRBJ2-5)
CASSPGGNQETQYF

SEQ ID NO: 298401 - protein, 11 aa, Homo sapiens
  CDR3 for alpha chain variable domain of TCR clone 149201 (TRAV23/DV6, TRAJ56)
CAAPANSKLTF

SEQ ID NO: 298402 - protein, 14 aa, Homo sapiens
  CDR3 for beta chain variable domain of TCR clone 149201 (TRBV7-2, TRBJ1-1)
CASSFLTGTTEAFF

SEQ ID NO: 298403 - protein, 19 aa, Homo sapiens
  CDR3 for alpha chain variable domain of TCR clone 149202 (TRAV1-2, TRAJ26)
CLLPLCCERPDNYGQNFVF

SEQ ID NO: 298404 - protein, 13 aa, Homo sapiens
  CDR3 for beta chain variable domain of TCR clone 149202 (TRBV11-2, TRBJ2-5)
CASSSTGEETQYF

SEQ ID NO: 298405 - protein, 13 aa, Homo sapiens
  CDR3 for alpha chain variable domain of TCR clone 149203 (TRAV13-1, TRAJ5)
CSARVTGRRALTL

SEQ ID NO: 298406 - protein, 15 aa, Homo sapiens
  CDR3 for beta chain variable domain of TCR clone 149203 (TRBV28, TRBJ2-7)
CASSPGGRGFYEQYF

SEQ ID NO: 298407 - protein, 12 aa, Homo sapiens
  CDR3 for alpha chain variable domain of TCR clone 149204 (TRAV29/DV5, TRAJ49)
CAATDTGNQFYF

SEQ ID NO: 298408 - protein, 12 aa, Homo sapiens
  CDR3 for beta chain variable domain of TCR clone 149204 (TRBV11-2, TRBJ2-2)
SASSLGGGELFF

SEQ ID NO: 298409 - protein, 13 aa, Homo sapiens
  CDR3 for alpha chain variable domain of TCR clone 149205 (TRAV20, TRAJ31)
CAVQAWNNARPMF

SEQ ID NO: 298410 - protein, 16 aa, Homo sapiens
  CDR3 for beta chain variable domain of TCR clone 149205 (TRBV6-6, TRBJ2-1)
CASSWGGQGPYNEQFF

SEQ ID NO: 298411 - protein, 15 aa, Homo sapiens
  CDR3 for alpha chain variable domain of TCR clone 149206 (TRAV29/DV5, TRAJ42)
CAAKTDGGSQGNLIF

SEQ ID NO: 298412 - protein, 15 aa, Homo sapiens
  CDR3 for beta chain variable domain of TCR clone 149206 (TRBV29-1, TRBJ2-7)
CSVEFFDRGSYEQYF

SEQ ID NO: 298413 - protein, 15 aa, Homo sapiens
  CDR3 for alpha chain variable domain of TCR clone 149207 (TRAV8-3, TRAJ45)
CASSYSGGGSYGLTF

SEQ ID NO: 298414 - protein, 13 aa, Homo sapiens
  CDR3 for beta chain variable domain of TCR clone 149207 (TRBV10-3, TRBJ2-7)
CASKLAVNYEQYF

SEQ ID NO: 298415 - protein, 15 aa, Homo sapiens
  CDR3 for alpha chain variable domain of TCR clone 149208 (TRAV26-1, TRAJ44)
CIVRANTGTASKLTF

SEQ ID NO: 298416 - protein, 14 aa, Homo sapiens
  CDR3 for beta chain variable domain of TCR clone 149208 (TRBV2, TRBJ2-1)
PAGRGLPSYNEQFF

SEQ ID NO: 298417 - protein, 18 aa, Homo sapiens
  CDR3 for alpha chain variable domain of TCR clone 149209 (TRAV13-1, TRAJ52)
CAAKNPNAGGTSYGKLTF

SEQ ID NO: 298418 - protein, 13 aa, Homo sapiens
  CDR3 for beta chain variable domain of TCR clone 149209 (TRBV20-1, TRBJ1-1)
CSARGGGNAEAFF

SEQ ID NO: 298419 - protein, 18 aa, Homo sapiens
  CDR3 for alpha chain variable domain of TCR clone 149210 (TRAV29/DV5, TRAJ53)
CSVLLCSKRGGSKYKLTF

SEQ ID NO: 298420 - protein, 17 aa, Homo sapiens
  CDR3 for beta chain variable domain of TCR clone 149210 (TRBV7-8, TRBJ2-6)
CASSAGTGGAGANVLTF

SEQ ID NO: 298421 - protein, 13 aa, Homo sapiens
  CDR3 for alpha chain variable domain of TCR clone 149211 (TRAV17, TRAJ9)
CATFLTGGFKTIF

SEQ ID NO: 298422 - protein, 16 aa, Homo sapiens
  CDR3 for beta chain variable domain of TCR clone 149211 (TRBV5-7, TRBJ1-4)
CGSSPSGGLKTEKLFF

SEQ ID NO: 298423 - protein, 13 aa, Homo sapiens
  CDR3 for alpha chain variable domain of TCR clone 149212 (TRAV35, TRAJ32)
CAGVGGATNKLIF

SEQ ID NO: 298424 - protein, 17 aa, Homo sapiens
  CDR3 for beta chain variable domain of TCR clone 149212 (TRBV4-3, TRBJ2-1)
CASSKFSSGRASGEQFF

SEQ ID NO: 298425 - protein, 16 aa, Homo sapiens
  CDR3 for alpha chain variable domain of TCR clone 149213 (TRAV38-2/DV8, TRAJ10)
CAYTNILTGGGNKLTF

SEQ ID NO: 298426 - protein, 12 aa, Homo sapiens
  CDR3 for beta chain variable domain of TCR clone 149213 (TRBV14, TRBJ2-7)
CASSLYKDEQYF

SEQ ID NO: 298427 - protein, 15 aa, Homo sapiens
  CDR3 for alpha chain variable domain of TCR clone 149214 (TRAV29/DV5, TRAJ42)
CAAKTDGGSKGNLIF

SEQ ID NO: 298428 - protein, 16 aa, Homo sapiens
  CDR3 for beta chain variable domain of TCR clone 149214 (TRBV7-9, TRBJ2-1)
CASSLVSGPSYNEQFF

SEQ ID NO: 298429 - protein, 13 aa, Homo sapiens
  CDR3 for alpha chain variable domain of TCR clone 149215 (TRAV12-3, TRAJ9)
CAMRNTGGFKNIF

SEQ ID NO: 298430 - protein, 16 aa, Homo sapiens
  CDR3 for beta chain variable domain of TCR clone 149215 (TRBV19, TRBJ2-1)
CASSIDGSFAYNEQFF

SEQ ID NO: 298431 - protein, 11 aa, Homo sapiens
  CDR3 for alpha chain variable domain of TCR clone 149216 (TRAV3, TRAJ21)
CSVGNFNKFYF

SEQ ID NO: 298432 - protein, 15 aa, Homo sapiens
  CDR3 for beta chain variable domain of TCR clone 149216 (TRBV29-1, TRBJ2-1)
CSVEGGPASYNEQFF

SEQ ID NO: 298433 - protein, 14 aa, Homo sapiens
  CDR3 for alpha chain variable domain of TCR clone 149217 (TRAV2, TRAJ9)
CAVEDRSGGFETIF

SEQ ID NO: 298434 - protein, 13 aa, Homo sapiens
  CDR3 for beta chain variable domain of TCR clone 149217 (TRBV19, TRBJ2-2)
CASSIWSTGELFF

SEQ ID NO: 298435 - protein, 14 aa, Homo sapiens
  CDR3 for alpha chain variable domain of TCR clone 149218 (TRAV35, TRAJ13)
CAGSPSGGYQKVTF

SEQ ID NO: 298436 - protein, 15 aa, Homo sapiens
  CDR3 for beta chain variable domain of TCR clone 149218 (TRBV6-1, TRBJ2-3)
CASSERGGITDTQYF

SEQ ID NO: 298437 - protein, 12 aa, Homo sapiens
  CDR3 for alpha chain variable domain of TCR clone 149219 (TRAV26-1, TRAJ53)
CIEGGSNYKLTF

SEQ ID NO: 298438 - protein, 16 aa, Homo sapiens
  CDR3 for beta chain variable domain of TCR clone 149219 (TRBV19, TRBJ2-2)
CASRSPGTGATGELFF

SEQ ID NO: 298439 - protein, 12 aa, Homo sapiens
  CDR3 for alpha chain variable domain of TCR clone 149220 (TRAV8-3, TRAJ26)
CAGDNYGQNFVF

SEQ ID NO: 298440 - protein, 15 aa, Homo sapiens
  CDR3 for beta chain variable domain of TCR clone 149220 (TRBV9, TRBJ2-1)
CASSIAGSSYNEQFF

SEQ ID NO: 298441 - protein, 13 aa, Homo sapiens
  CDR3 for alpha chain variable domain of TCR clone 149221 (TRAV8-3, TRAJ48)
CAVVPFGNEKLAF

SEQ ID NO: 298442 - protein, 14 aa, Homo sapiens
  CDR3 for beta chain variable domain of TCR clone 149221 (TRBV5-1, TRBJ1-1)
CASSSGLPNTEAFF

SEQ ID NO: 298443 - protein, 14 aa, Homo sapiens
  CDR3 for alpha chain variable domain of TCR clone 149222 (TRAV1-2, TRAJ8)
CAVREDKGFQKLVF

SEQ ID NO: 298444 - protein, 15 aa, Homo sapiens
  CDR3 for beta chain variable domain of TCR clone 149222 (TRBV20-1, TRBJ2-7)
CSARDRVSGMDEQYF

SEQ ID NO: 298445 - protein, 14 aa, Homo sapiens
  CDR3 for alpha chain variable domain of TCR clone 149223 (TRAV21, TRAJ45)
CAVSSGGGADGLTF

SEQ ID NO: 298446 - protein, 15 aa, Homo sapiens
  CDR3 for beta chain variable domain of TCR clone 149223 (TRBV11-3, TRBJ2-2)
CASSLGGRPTGELFF

SEQ ID NO: 298447 - protein, 12 aa, Homo sapiens
  CDR3 for alpha chain variable domain of TCR clone 149224 (TRAV12-3, TRAJ17)
CAMTLTGNKLTL

SEQ ID NO: 298448 - protein, 15 aa, Homo sapiens
  CDR3 for beta chain variable domain of TCR clone 149224 (TRBV20-1, TRBJ2-7)
CSARDRVSGMNEQYF

SEQ ID NO: 298449 - protein, 13 aa, Homo sapiens
  CDR3 for alpha chain variable domain of TCR clone 149225 (TRAV8-4, TRAJ30)
CAVIVNRDDKIIF

SEQ ID NO: 298450 - protein, 13 aa, Homo sapiens
  CDR3 for beta chain variable domain of TCR clone 149225 (TRBV3-1, TRBJ2-2)
CASLARGSGELFF

SEQ ID NO: 298451 - protein, 13 aa, Homo sapiens
  CDR3 for alpha chain variable domain of TCR clone 149226 (TRAV8-3, TRAJ48)
CAVVPFGNEKLTF

SEQ ID NO: 298452 - protein, 16 aa, Homo sapiens
  CDR3 for beta chain variable domain of TCR clone 149226 (TRBV18, TRBJ2-7)
CASSPRGGAYEQYLGR

SEQ ID NO: 298453 - protein, 13 aa, Homo sapiens
  CDR3 for alpha chain variable domain of TCR clone 149227 (TRAV12-3, TRAJ35)
CAMAIGFGNVLHC

SEQ ID NO: 298454 - protein, 14 aa, Homo sapiens
  CDR3 for beta chain variable domain of TCR clone 149227 (TRBV20-1, TRBJ2-5)
CSALVPGYQETQYF

SEQ ID NO: 298455 - protein, 14 aa, Homo sapiens
  CDR3 for alpha chain variable domain of TCR clone 149228 (TRAV13-2, TRAJ5)
CAENMDTGRRALTF

SEQ ID NO: 298456 - protein, 12 aa, Homo sapiens
  CDR3 for beta chain variable domain of TCR clone 149228 (TRBV28, TRBJ2-3)
CASSLYRDTQYF

SEQ ID NO: 298457 - protein, 10 aa, Homo sapiens
  CDR3 for alpha chain variable domain of TCR clone 149229 (TRAV19, TRAJ45)
PGGGADGLTF

SEQ ID NO: 298458 - protein, 15 aa, Homo sapiens
  CDR3 for beta chain variable domain of TCR clone 149229 (TRBV28, TRBJ2-1)
CASSIIAGGRSEQFF

SEQ ID NO: 298459 - protein, 15 aa, Homo sapiens
  CDR3 for alpha chain variable domain of TCR clone 149230 (TRAV26-1, TRAJ56)
CIVRVATGANSKLTF

SEQ ID NO: 298460 - protein, 14 aa, Homo sapiens
  CDR3 for beta chain variable domain of TCR clone 149230 (TRBV5-1, TRBJ2-1)
CASSPGGQANEQFF

SEQ ID NO: 298461 - protein, 13 aa, Homo sapiens
  CDR3 for alpha chain variable domain of TCR clone 149231 (TRAV26-2, TRAJ43)
CILRAVNNNDMRF

SEQ ID NO: 298462 - protein, 15 aa, Homo sapiens
  CDR3 for beta chain variable domain of TCR clone 149231 (TRBV7-2, TRBJ2-1)
CASTHGTGINNEQFF

SEQ ID NO: 298463 - protein, 13 aa, Homo sapiens
  CDR3 for alpha chain variable domain of TCR clone 149232 (TRAV8-6, TRAJ50)
CDVIKTSYDKVIF

SEQ ID NO: 298464 - protein, 15 aa, Homo sapiens
  CDR3 for beta chain variable domain of TCR clone 149232 (TRBV7-2, TRBJ2-2)
CASRRPGQNTGELFF

SEQ ID NO: 298465 - protein, 13 aa, Homo sapiens
  CDR3 for alpha chain variable domain of TCR clone 149233 (TRAV12-1, TRAJ11)
CVVTRGGYSTFTF

SEQ ID NO: 298466 - protein, 13 aa, Homo sapiens
  CDR3 for beta chain variable domain of TCR clone 149233 (TRBV20-1, TRBJ1-2)
CSARDQGAYGYTF

SEQ ID NO: 298467 - protein, 12 aa, Homo sapiens
  CDR3 for alpha chain variable domain of TCR clone 149234 (TRAV12-3, TRAJ17)
CAMTLTGNKLTF

SEQ ID NO: 298468 - protein, 13 aa, Homo sapiens
  CDR3 for beta chain variable domain of TCR clone 149234 (TRBV29-1, TRBJ2-1)
CSVEGGRVNEQFL

SEQ ID NO: 298469 - protein, 14 aa, Homo sapiens
  CDR3 for alpha chain variable domain of TCR clone 149235 (TRAV21, TRAJ58)
CAVRRGRSGSRLTF

SEQ ID NO: 298470 - protein, 13 aa, Homo sapiens
  CDR3 for beta chain variable domain of TCR clone 149235 (TRBV7-9, TRBJ2-5)
CASLPSGRETQYF

SEQ ID NO: 298471 - protein, 10 aa, Homo sapiens
  CDR3 for alpha chain variable domain of TCR clone 149236 (TRAV13-2, TRAJ49)
CADTGHQFYF

SEQ ID NO: 298472 - protein, 13 aa, Homo sapiens
  CDR3 for beta chain variable domain of TCR clone 149236 (TRBV10-3, TRBJ1-2)
CAISERDSYGYTF

SEQ ID NO: 298473 - protein, 16 aa, Homo sapiens
  CDR3 for alpha chain variable domain of TCR clone 149237 (TRAV3, TRAJ21)
CAVRDLERGNLNKFYF

SEQ ID NO: 298474 - protein, 20 aa, Homo sapiens
  CDR3 for beta chain variable domain of TCR clone 149237 (TRBV4-1, TRBJ2-2)
CASSQASPPGLASNTGELFF

SEQ ID NO: 298475 - protein, 14 aa, Homo sapiens
  CDR3 for alpha chain variable domain of TCR clone 149238 (TRAV21, TRAJ23)
CAIMIYNKGGKLIF

SEQ ID NO: 298476 - protein, 18 aa, Homo sapiens
  CDR3 for beta chain variable domain of TCR clone 149238 (TRBV20-1, TRBJ2-6)
CSAETTPTHGSGANVLPF

SEQ ID NO: 298477 - protein, 12 aa, Homo sapiens
  CDR3 for alpha chain variable domain of TCR clone 149239 (TRAV12-1, TRAJ23)
CVVNNQGGKLIF

SEQ ID NO: 298478 - protein, 16 aa, Homo sapiens
  CDR3 for beta chain variable domain of TCR clone 149239 (TRBV11-1, TRBJ2-7)
CTSSAQTGTLSYEQYF

SEQ ID NO: 298479 - protein, 12 aa, Homo sapiens
  CDR3 for alpha chain variable domain of TCR clone 149240 (TRAV13-1, TRAJ21)
CAAKEGFNNFYF

SEQ ID NO: 298480 - protein, 20 aa, Homo sapiens
  CDR3 for beta chain variable domain of TCR clone 149240 (TRBV28, TRBJ2-1)
CASTPIGRSPGLAGGNEQFF

SEQ ID NO: 298481 - protein, 16 aa, Homo sapiens
  CDR3 for alpha chain variable domain of TCR clone 149241 (TRAV8-3, TRAJ10)
CAVGPILTGGGNKLTF

SEQ ID NO: 298482 - protein, 16 aa, Homo sapiens
  CDR3 for beta chain variable domain of TCR clone 149241 (TRBV7-2, TRBJ2-5)
CASSSKWLRGQETQYF

SEQ ID NO: 298483 - protein, 12 aa, Homo sapiens
  CDR3 for alpha chain variable domain of TCR clone 149242 (TRAV12-2, TRAJ36)
CAAPRGANNLFF

SEQ ID NO: 298484 - protein, 15 aa, Homo sapiens
  CDR3 for beta chain variable domain of TCR clone 149242 (TRBV11-2, TRBJ1-3)
CASSLDGTVGNTIYF

SEQ ID NO: 298485 - protein, 14 aa, Homo sapiens
  CDR3 for alpha chain variable domain of TCR clone 149243 (TRAV12-2, TRAJ40)
CAVKIPSGTYKYIF

SEQ ID NO: 298486 - protein, 12 aa, Homo sapiens
  CDR3 for beta chain variable domain of TCR clone 149243 (TRBV19, TRBJ2-3)
CASAGGADTQYF

SEQ ID NO: 298487 - protein, 11 aa, Homo sapiens
  CDR3 for alpha chain variable domain of TCR clone 149244 (TRAV2, TRAJ13)
CASGGYQKVTF

SEQ ID NO: 298488 - protein, 14 aa, Homo sapiens
  CDR3 for beta chain variable domain of TCR clone 149244 (TRBV7-3, TRBJ2-1)
CAGSLAGGTNEQFF

SEQ ID NO: 298489 - protein, 14 aa, Homo sapiens
  CDR3 for alpha chain variable domain of TCR clone 149245 (TRAV4, TRAJ9)
CLVGSGTGGFKTIC

SEQ ID NO: 298490 - protein, 15 aa, Homo sapiens
  CDR3 for beta chain variable domain of TCR clone 149245 (TRBV11-3, TRBJ2-3)
CASLKDGREGDTQYF

SEQ ID NO: 298491 - protein, 17 aa, Homo sapiens
  CDR3 for alpha chain variable domain of TCR clone 149246 (TRAV3, TRAJ42)
CAVRDRDYGGSHGDLIF

SEQ ID NO: 298492 - protein, 15 aa, Homo sapiens
  CDR3 for beta chain variable domain of TCR clone 149246 (TRBV6-6, TRBJ2-7)
CASSYSYGGSYEQYF

SEQ ID NO: 298493 - protein, 14 aa, Homo sapiens
  CDR3 for alpha chain variable domain of TCR clone 149247 (TRAV1-2, TRAJ8)
CAVREDKGFQKLVF

SEQ ID NO: 298494 - protein, 14 aa, Homo sapiens
  CDR3 for beta chain variable domain of TCR clone 149247 (TRBV5-4, TRBJ1-1)
CASSLDSRRDEAFF

SEQ ID NO: 298495 - protein, 15 aa, Homo sapiens
  CDR3 for alpha chain variable domain of TCR clone 149248 (TRAV34, TRAJ38)
CGADFTPGDNRKLIW

SEQ ID NO: 298496 - protein, 16 aa, Homo sapiens
  CDR3 for beta chain variable domain of TCR clone 149248 (TRBV12-5, TRBJ2-5)
CASGPRTSGNQESQYF

SEQ ID NO: 298497 - protein, 11 aa, Homo sapiens
  CDR3 for alpha chain variable domain of TCR clone 149249 (TRAV13-1, TRAJ39)
CASHAGNMLTF

SEQ ID NO: 298498 - protein, 14 aa, Homo sapiens
  CDR3 for beta chain variable domain of TCR clone 149249 (TRBV11-2, TRBJ1-5)
CASSLDRGRQPQHC

SEQ ID NO: 298499 - protein, 14 aa, Homo sapiens
  CDR3 for alpha chain variable domain of TCR clone 149250 (TRAV9-2, TRAJ39)
CALYIYNAGNMLTF

SEQ ID NO: 298500 - protein, 12 aa, Homo sapiens
  CDR3 for beta chain variable domain of TCR clone 149250 (TRBV7-9, TRBJ2-7)
CASSIKREEQYF

SEQ ID NO: 298501 - protein, 16 aa, Homo sapiens
  CDR3 for alpha chain variable domain of TCR clone 149251 (TRAV35, TRAJ28)
GAGQRYSGAGSYQLTF

SEQ ID NO: 298502 - protein, 13 aa, Homo sapiens
  CDR3 for beta chain variable domain of TCR clone 149251 (TRBV19, TRBJ1-2)
CASSQGQVYGYTF

SEQ ID NO: 298503 - protein, 15 aa, Homo sapiens
  CDR3 for alpha chain variable domain of TCR clone 149252 (TRAV8-3, TRAJ45)
CASSYSGGGVYGLTF

SEQ ID NO: 298504 - protein, 13 aa, Homo sapiens
  CDR3 for beta chain variable domain of TCR clone 149252 (TRBV10-3, TRBJ2-7)
CASKLAVNYEQYF

SEQ ID NO: 298505 - protein, 12 aa, Homo sapiens
  CDR3 for alpha chain variable domain of TCR clone 149253 (TRAV21, TRAJ58)
CALSASGSRLTF

SEQ ID NO: 298506 - protein, 13 aa, Homo sapiens
  CDR3 for beta chain variable domain of TCR clone 149253 (TRBV5-7, TRBJ1-2)
CASSLGVFNSYTF

SEQ ID NO: 298507 - protein, 14 aa, Homo sapiens
  CDR3 for alpha chain variable domain of TCR clone 149254 (TRAV13-1, TRAJ35)
CAASKGGFGNVPHC

SEQ ID NO: 298508 - protein, 13 aa, Homo sapiens
  CDR3 for beta chain variable domain of TCR clone 149254 (TRBV7-3, TRBJ1-1)
CASSQDWGTEAFF

SEQ ID NO: 298509 - protein, 14 aa, Homo sapiens
  CDR3 for alpha chain variable domain of TCR clone 149255 (TRAV1-2, TRAJ16)
CAVNRFSDGQKLLF

SEQ ID NO: 298510 - protein, 13 aa, Homo sapiens
  CDR3 for beta chain variable domain of TCR clone 149255 (TRBV7-3, TRBJ1-1)
CASSQGWGAEAFF

SEQ ID NO: 298511 - protein, 19 aa, Homo sapiens
  CDR3 for alpha chain variable domain of TCR clone 149256 (TRAV1-2, TRAJ26)
CLLPLCCERPDNYGKNFVF

SEQ ID NO: 298512 - protein, 16 aa, Homo sapiens
  CDR3 for beta chain variable domain of TCR clone 149256 (TRBV19, TRBJ1-1)
CASSPTRFWPGTEAFF

SEQ ID NO: 298513 - protein, 16 aa, Homo sapiens
  CDR3 for alpha chain variable domain of TCR clone 149257 (TRAV8-3, TRAJ10)
SAVGPILTGGGNKLTF

SEQ ID NO: 298514 - protein, 15 aa, Homo sapiens
  CDR3 for beta chain variable domain of TCR clone 149257 (TRBV7-2, TRBJ2-5)
CSSSKWLSGQETQYF

SEQ ID NO: 298515 - protein, 11 aa, Homo sapiens
  CDR3 for alpha chain variable domain of TCR clone 149258 (TRAV1-1, TRAJ23)
CAFRQGGKLIF

SEQ ID NO: 298516 - protein, 12 aa, Homo sapiens
  CDR3 for beta chain variable domain of TCR clone 149258 (TRBV11-2, TRBJ2-2)
CASSIGGGELFF

SEQ ID NO: 298517 - protein, 17 aa, Homo sapiens
  CDR3 for alpha chain variable domain of TCR clone 149259 (TRAV1-1, TRAJ9)
CLLLLRCTNTGGFKTIF

SEQ ID NO: 298518 - protein, 14 aa, Homo sapiens
  CDR3 for beta chain variable domain of TCR clone 149259 (TRBV20-1, TRBJ2-1)
CSAQIGGSANEQFF

SEQ ID NO: 298519 - protein, 12 aa, Homo sapiens
  CDR3 for alpha chain variable domain of TCR clone 149260 (TRAV13-2, TRAJ23)
CAERHRGGKLIF

SEQ ID NO: 298520 - protein, 15 aa, Homo sapiens
  CDR3 for beta chain variable domain of TCR clone 149260 (TRBV7-9, TRBJ1-6)
CASNSPGRGNSPLHF

SEQ ID NO: 298521 - protein, 14 aa, Homo sapiens
  CDR3 for alpha chain variable domain of TCR clone 149261 (TRAV12-1, TRAJ34)
CVVDLDYNTDKLIF

SEQ ID NO: 298522 - protein, 13 aa, Homo sapiens
  CDR3 for beta chain variable domain of TCR clone 149261 (TRBV20-1, TRBJ1-1)
CSARGGGNTEAFF

SEQ ID NO: 298523 - protein, 15 aa, Homo sapiens
  CDR3 for alpha chain variable domain of TCR clone 149262 (TRAV36/DV7, TRAJ54)
CAVEKPVQGAQKLVF

SEQ ID NO: 298524 - protein, 16 aa, Homo sapiens
  CDR3 for beta chain variable domain of TCR clone 149262 (TRBV4-2, TRBJ2-3)
CASSQELAGDTDTQYF

SEQ ID NO: 298525 - protein, 14 aa, Homo sapiens
  CDR3 for alpha chain variable domain of TCR clone 149263 (TRAV13-1, TRAJ5)
CADHPDTGRRALTF

SEQ ID NO: 298526 - protein, 14 aa, Homo sapiens
  CDR3 for beta chain variable domain of TCR clone 149263 (TRBV7-2, TRBJ2-7)
CASSLSPGRYEQYF

SEQ ID NO: 298527 - protein, 14 aa, Homo sapiens
  CDR3 for alpha chain variable domain of TCR clone 149264 (TRAV8-6, TRAJ36)
CAVSEKDGANNLFF

SEQ ID NO: 298528 - protein, 16 aa, Homo sapiens
  CDR3 for beta chain variable domain of TCR clone 149264 (TRBV28, TRBJ1-5)
CASSFRGGYSNQPQHF

SEQ ID NO: 298529 - protein, 15 aa, Homo sapiens
  CDR3 for alpha chain variable domain of TCR clone 149265 (TRAV8-4, TRAJ53)
CAVSDGGGSNYKLTF

SEQ ID NO: 298530 - protein, 18 aa, Homo sapiens
  CDR3 for beta chain variable domain of TCR clone 149265 (TRBV20-1, TRBJ2-3)
CSASGLAGGPGTTDTQYF

SEQ ID NO: 298531 - protein, 16 aa, Homo sapiens
  CDR3 for alpha chain variable domain of TCR clone 149266 (TRAV8-4, TRAJ52)
CAVSFAGGTSYGKLTF

SEQ ID NO: 298532 - protein, 12 aa, Homo sapiens
  CDR3 for beta chain variable domain of TCR clone 149266 (TRBV28, TRBJ2-7)
CASTGNHYEQYF

SEQ ID NO: 298533 - protein, 14 aa, Homo sapiens
  CDR3 for alpha chain variable domain of TCR clone 149267 (TRAV17, TRAJ26)
CATDDHNYGQNFVF

SEQ ID NO: 298534 - protein, 12 aa, Homo sapiens
  CDR3 for beta chain variable domain of TCR clone 149267 (TRBV11-2, TRBJ2-2)
CASSLGGGELFF

SEQ ID NO: 298535 - protein, 14 aa, Homo sapiens
  CDR3 for alpha chain variable domain of TCR clone 149268 (TRAV13-1, TRAJ24)
CAASRTDSWGNLQF

SEQ ID NO: 298536 - protein, 15 aa, Homo sapiens
  CDR3 for beta chain variable domain of TCR clone 149268 (TRBV7-9, TRBJ1-5)
CASSQGHQPNQPQHF

SEQ ID NO: 298537 - protein, 11 aa, Homo sapiens
  CDR3 for alpha chain variable domain of TCR clone 149269 (TRAV3, TRAJ21)
CAVGNFNKFYL

SEQ ID NO: 298538 - protein, 15 aa, Homo sapiens
  CDR3 for beta chain variable domain of TCR clone 149269 (TRBV5-1, TRBJ2-1)
CASSLVANSYNEQFF

SEQ ID NO: 298539 - protein, 13 aa, Homo sapiens
  CDR3 for alpha chain variable domain of TCR clone 149270 (TRAV35, TRAJ42)
CAGFPGSQGNLIF

SEQ ID NO: 298540 - protein, 15 aa, Homo sapiens
  CDR3 for beta chain variable domain of TCR clone 149270 (TRBV5-7, TRBJ2-7)
CASSLPGQVFYEQYF

SEQ ID NO: 298541 - protein, 15 aa, Homo sapiens
  CDR3 for alpha chain variable domain of TCR clone 149271 (TRAV17, TRAJ35)
CATAFVIGFGNVLHC

SEQ ID NO: 298542 - protein, 16 aa, Homo sapiens
  CDR3 for beta chain variable domain of TCR clone 149271 (TRBV7-9, TRBJ2-3)
CASSPWREVGTDTQYF

SEQ ID NO: 298543 - protein, 14 aa, Homo sapiens
  CDR3 for alpha chain variable domain of TCR clone 149272 (TRAV12-2, TRAJ13)
CAVKKTGGYQKVTF

SEQ ID NO: 298544 - protein, 16 aa, Homo sapiens
  CDR3 for beta chain variable domain of TCR clone 149272 (TRBV19, TRBJ1-2)
CASSKFRDTTNYGYTF

SEQ ID NO: 298545 - protein, 13 aa, Homo sapiens
  CDR3 for alpha chain variable domain of TCR clone 149273 (TRAV8-3, TRAJ21)
CAVGLDNFNKFYF

SEQ ID NO: 298546 - protein, 16 aa, Homo sapiens
  CDR3 for beta chain variable domain of TCR clone 149273 (TRBV4-1, TRBJ2-3)
CASSQSTSGAEDTQYF

SEQ ID NO: 298547 - protein, 17 aa, Homo sapiens
  CDR3 for alpha chain variable domain of TCR clone 149274 (TRAV3, TRAJ38)
CAVRDCLNTGNNRKLIW

SEQ ID NO: 298548 - protein, 14 aa, Homo sapiens
  CDR3 for beta chain variable domain of TCR clone 149274 (TRBV7-2, TRBJ2-7)
CASRSQGAAYEQYF

SEQ ID NO: 298549 - protein, 15 aa, Homo sapiens
  CDR3 for alpha chain variable domain of TCR clone 149275 (TRAV12-1, TRAJ9)
CVVSFVDPGGFKTIF

SEQ ID NO: 298550 - protein, 13 aa, Homo sapiens
  CDR3 for beta chain variable domain of TCR clone 149275 (TRBV2, TRBJ1-4)
CASSERAGEKLFF

SEQ ID NO: 298551 - protein, 20 aa, Homo sapiens
  CDR3 for alpha chain variable domain of TCR clone 149276 (TRAV26-1, TRAJ38)
CIADNAGNNHIQNPDPAVYQ

SEQ ID NO: 298552 - protein, 15 aa, Homo sapiens
  CDR3 for beta chain variable domain of TCR clone 149276 (TRBV12-4, TRBJ2-7)
CASSQTGAISYEQYF

SEQ ID NO: 298553 - protein, 15 aa, Homo sapiens
  CDR3 for alpha chain variable domain of TCR clone 149277 (TRAV13-1, TRAJ32)
CAASIYGGATNKIIF

SEQ ID NO: 298554 - protein, 17 aa, Homo sapiens
  CDR3 for beta chain variable domain of TCR clone 149277 (TRBV7-3, TRBJ2-5)
CASSLGSGRSGSETQYF

SEQ ID NO: 298555 - protein, 12 aa, Homo sapiens
  CDR3 for alpha chain variable domain of TCR clone 149278 (TRAV13-2, TRAJ23)
CAERHRGGKLIF

SEQ ID NO: 298556 - protein, 16 aa, Homo sapiens
  CDR3 for beta chain variable domain of TCR clone 149278 (TRBV19, TRBJ2-1)
CASSKAGPSSYNEQLF

SEQ ID NO: 298557 - protein, 12 aa, Homo sapiens
  CDR3 for alpha chain variable domain of TCR clone 149279 (TRAV16, TRAJ10)
CSRTGGGNKPTF

SEQ ID NO: 298558 - protein, 19 aa, Homo sapiens
  CDR3 for beta chain variable domain of TCR clone 149279 (TRBV28, TRBJ2-1)
CASSFSIRGSGRTRYEQFF

SEQ ID NO: 298559 - protein, 14 aa, Homo sapiens
  CDR3 for alpha chain variable domain of TCR clone 149280 (TRAV1-2, TRAJ29)
CAVRELTSATPLVF

SEQ ID NO: 298560 - protein, 13 aa, Homo sapiens
  CDR3 for beta chain variable domain of TCR clone 149280 (TRBV28, TRBJ1-3)
CASSFLGSGTIYF

SEQ ID NO: 298561 - protein, 11 aa, Homo sapiens
  CDR3 for alpha chain variable domain of TCR clone 149281 (TRAV1-2, TRAJ31)
CAVNNNDRLMS

SEQ ID NO: 298562 - protein, 15 aa, Homo sapiens
  CDR3 for beta chain variable domain of TCR clone 149281 (TRBV28, TRBJ2-1)
CASSIIAGGRSEQFF

SEQ ID NO: 298563 - protein, 15 aa, Homo sapiens
  CDR3 for alpha chain variable domain of TCR clone 149282 (TRAV3, TRAJ3)
CAVRDGHSSASKKIF

SEQ ID NO: 298564 - protein, 17 aa, Homo sapiens
  CDR3 for beta chain variable domain of TCR clone 149282 (TRBV25-1, TRBJ2-7)
CASSDARVVFSSYEQYF

SEQ ID NO: 298565 - protein, 13 aa, Homo sapiens
  CDR3 for alpha chain variable domain of TCR clone 149283 (TRAV21, TRAJ15)
CAVANQAGTALIF

SEQ ID NO: 298566 - protein, 13 aa, Homo sapiens
  CDR3 for beta chain variable domain of TCR clone 149283 (TRBV27, TRBJ2-2)
CQQFRGGDGELFF

SEQ ID NO: 298567 - protein, 11 aa, Homo sapiens
  CDR3 for alpha chain variable domain of TCR clone 149284 (TRAV21, TRAJ34)
CAHYNTDKTIF

SEQ ID NO: 298568 - protein, 13 aa, Homo sapiens
  CDR3 for beta chain variable domain of TCR clone 149284 (TRBV7-6, TRBJ1-2)
CASSLVADYGYTF

SEQ ID NO: 298569 - protein, 21 aa, Homo sapiens
  CDR3 for alpha chain variable domain of TCR clone 149285 (TRAV36/DV7, TRAJ39)
TATQTGDSAIYLPNAGNMLTF

SEQ ID NO: 298570 - protein, 16 aa, Homo sapiens
  CDR3 for beta chain variable domain of TCR clone 149285 (TRBV19, TRBJ1-5)
CASSIDRGGPRQPQHF

SEQ ID NO: 298571 - protein, 12 aa, Homo sapiens
  CDR3 for alpha chain variable domain of TCR clone 149286 (TRAV21, TRAJ11)
CAATSGYSTLTF

SEQ ID NO: 298572 - protein, 13 aa, Homo sapiens
  CDR3 for beta chain variable domain of TCR clone 149286 (TRBV6-1, TRBJ2-1)
CASREDGGHEQFF

SEQ ID NO: 298573 - protein, 13 aa, Homo sapiens
  CDR3 for alpha chain variable domain of TCR clone 149287 (TRAV3, TRAJ29)
CAVRDIIDTPLVI

SEQ ID NO: 298574 - protein, 14 aa, Homo sapiens
  CDR3 for beta chain variable domain of TCR clone 149287 (TRBV27, TRBJ2-1)
CASSATGGYNEQFF

SEQ ID NO: 298575 - protein, 16 aa, Homo sapiens
  CDR3 for alpha chain variable domain of TCR clone 149288 (TRAV12-3, TRAJ53)
CAMSPGSGGSNYKLTF

SEQ ID NO: 298576 - protein, 14 aa, Homo sapiens
  CDR3 for beta chain variable domain of TCR clone 149288 (TRBV7-2, TRBJ2-1)
CQQLRLAGGNEQFF

SEQ ID NO: 298577 - protein, 13 aa, Homo sapiens
  CDR3 for alpha chain variable domain of TCR clone 149289 (TRAV36/DV7, TRAJ57)
CAVVLGGSEKLVF

SEQ ID NO: 298578 - protein, 14 aa, Homo sapiens
  CDR3 for beta chain variable domain of TCR clone 149289 (TRBV4-1, TRBJ1-2)
CASSQDGQVRGYTV

SEQ ID NO: 298579 - protein, 13 aa, Homo sapiens
  CDR3 for alpha chain variable domain of TCR clone 149290 (TRAV35, TRAJ42)
CAGFPGSQGNLIF

SEQ ID NO: 298580 - protein, 14 aa, Homo sapiens
  CDR3 for beta chain variable domain of TCR clone 149290 (TRBV19, TRBJ2-1)
CASPTFVLSGAQFF

SEQ ID NO: 298581 - protein, 13 aa, Homo sapiens
  CDR3 for alpha chain variable domain of TCR clone 149291 (TRAV8-4, TRAJ10)
CAAFTGGGNKLTF

SEQ ID NO: 298582 - protein, 16 aa, Homo sapiens
  CDR3 for beta chain variable domain of TCR clone 149291 (TRBV3-1, TRBJ2-7)
CASSQGATGVAYEQYF

SEQ ID NO: 298583 - protein, 16 aa, Homo sapiens
  CDR3 for alpha chain variable domain of TCR clone 149292 (TRAV30, TRAJ24)
CGTETVNADSWGKFQF

SEQ ID NO: 298584 - protein, 14 aa, Homo sapiens
  CDR3 for beta chain variable domain of TCR clone 149292 (TRBV12-5, TRBJ2-5)
CASGSRTHQETQYF

SEQ ID NO: 298585 - protein, 17 aa, Homo sapiens
  CDR3 for alpha chain variable domain of TCR clone 149293 (TRAV4, TRAJ18)
CLVGERSVGSTLGRRDF

SEQ ID NO: 298586 - protein, 16 aa, Homo sapiens
  CDR3 for beta chain variable domain of TCR clone 149293 (TRBV4-2, TRBJ1-1)
CASSPSPGRAAPEAFF

SEQ ID NO: 298587 - protein, 18 aa, Homo sapiens
  CDR3 for alpha chain variable domain of TCR clone 149294 (TRAV13-1, TRAJ52)
CAAKNPNAGGTSYGKLTF

SEQ ID NO: 298588 - protein, 15 aa, Homo sapiens
  CDR3 for beta chain variable domain of TCR clone 149294 (TRBV6-1, TRBJ2-3)
CPSSERGGITDTQYF

SEQ ID NO: 298589 - protein, 17 aa, Homo sapiens
  CDR3 for alpha chain variable domain of TCR clone 149295 (TRAV3, TRAJ6)
CAVRDGPRAGGSDISTF

SEQ ID NO: 298590 - protein, 20 aa, Homo sapiens
  CDR3 for beta chain variable domain of TCR clone 149295 (TRBV28, TRBJ2-1)
CASTPIGRSPGLAGGNEQFF

SEQ ID NO: 298591 - protein, 11 aa, Homo sapiens
  CDR3 for alpha chain variable domain of TCR clone 149296 (TRAV21, TRAJ34)
CAVTNTDTLIF

SEQ ID NO: 298592 - protein, 16 aa, Homo sapiens
  CDR3 for beta chain variable domain of TCR clone 149296 (TRBV6-1, TRBJ2-5)
CASSETLDRGAETQYF

SEQ ID NO: 298593 - protein, 14 aa, Homo sapiens
  CDR3 for alpha chain variable domain of TCR clone 149297 (TRAV1-2, TRAJ16)
CAVNRFSDGHKLLF

SEQ ID NO: 298594 - protein, 16 aa, Homo sapiens
  CDR3 for beta chain variable domain of TCR clone 149297 (TRBV12-5, TRBJ2-5)
CASGPRTSGNQETQYF

SEQ ID NO: 298595 - protein, 12 aa, Homo sapiens
  CDR3 for alpha chain variable domain of TCR clone 149298 (TRAV35, TRAJ30)
CAGQLADDKIIF

SEQ ID NO: 298596 - protein, 15 aa, Homo sapiens
  CDR3 for beta chain variable domain of TCR clone 149298 (TRBV28, TRBJ2-1)
CASSLGTRLYNEQFF

SEQ ID NO: 298597 - protein, 17 aa, Homo sapiens
  CDR3 for alpha chain variable domain of TCR clone 149299 (TRAV3, TRAJ6)
CAVRDGPRAGGSYIPTF

SEQ ID NO: 298598 - protein, 16 aa, Homo sapiens
  CDR3 for beta chain variable domain of TCR clone 149299 (TRBV7-2, TRBJ2-7)
CASRRGGGPTSSTSGR

SEQ ID NO: 298599 - protein, 14 aa, Homo sapiens
  CDR3 for alpha chain variable domain of TCR clone 149300 (TRAV1-2, TRAJ29)
CAVRTDSGNTPLVL

SEQ ID NO: 298600 - protein, 14 aa, Homo sapiens
  CDR3 for beta chain variable domain of TCR clone 149300 (TRBV7-2, TRBJ2-7)
CASSPKTSFYEQYF

SEQ ID NO: 298601 - protein, 16 aa, Homo sapiens
  CDR3 for alpha chain variable domain of TCR clone 149301 (TRAV30, TRAJ24)
CGTEIVGADSWGKFQF

SEQ ID NO: 298602 - protein, 13 aa, Homo sapiens
  CDR3 for beta chain variable domain of TCR clone 149301 (TRBV7-2, TRBJ1-3)
CASSLAPGNTMYF

SEQ ID NO: 298603 - protein, 15 aa, Homo sapiens
  CDR3 for alpha chain variable domain of TCR clone 149302 (TRAV9-2, TRAJ57)
CALRPNQGGSEKLVF

SEQ ID NO: 298604 - protein, 13 aa, Homo sapiens
  CDR3 for beta chain variable domain of TCR clone 149302 (TRBV7-2, TRBJ2-7)
CASSAPSGSEQYF

SEQ ID NO: 298605 - protein, 12 aa, Homo sapiens
  CDR3 for alpha chain variable domain of TCR clone 149303 (TRAV13-2, TRAJ8)
CAPWLGFQKLVF

SEQ ID NO: 298606 - protein, 15 aa, Homo sapiens
  CDR3 for beta chain variable domain of TCR clone 149303 (TRBV12-4, TRBJ2-5)
CAISLSGAFQETQYF

SEQ ID NO: 298607 - protein, 14 aa, Homo sapiens
  CDR3 for alpha chain variable domain of TCR clone 149304 (TRAV17, TRAJ16)
CATADSSDGQKLLF

SEQ ID NO: 298608 - protein, 12 aa, Homo sapiens
  CDR3 for beta chain variable domain of TCR clone 149304 (TRBV24-1, TRBJ1-1)
CATLHPDTEAFF

SEQ ID NO: 298609 - protein, 15 aa, Homo sapiens
  CDR3 for alpha chain variable domain of TCR clone 149305 (TRAV27, TRAJ38)
WAARRNAGNNRKLIG

SEQ ID NO: 298610 - protein, 13 aa, Homo sapiens
  CDR3 for beta chain variable domain of TCR clone 149305 (TRBV12-5, TRBJ2-3)
CASGDRQSDTQYF

SEQ ID NO: 298611 - protein, 14 aa, Homo sapiens
  CDR3 for alpha chain variable domain of TCR clone 149306 (TRAV4, TRAJ26)
CLVGPHNYGQNFVF

SEQ ID NO: 298612 - protein, 17 aa, Homo sapiens
  CDR3 for beta chain variable domain of TCR clone 149306 (TRBV24-1, TRBJ2-1)
CATRDVSTSGTYNEQLF

SEQ ID NO: 298613 - protein, 15 aa, Homo sapiens
  CDR3 for alpha chain variable domain of TCR clone 149307 (TRAV8-3, TRAJ27)
CAVGTSKTNAGKSTF

SEQ ID NO: 298614 - protein, 15 aa, Homo sapiens
  CDR3 for beta chain variable domain of TCR clone 149307 (TRBV7-2, TRBJ2-1)
CASSSVLAGGNEQFF

SEQ ID NO: 298615 - protein, 16 aa, Homo sapiens
  CDR3 for alpha chain variable domain of TCR clone 149308 (TRAV4, TRAJ22)
CLVGDLYSGSARQLTF

SEQ ID NO: 298616 - protein, 15 aa, Homo sapiens
  CDR3 for beta chain variable domain of TCR clone 149308 (TRBV7-2, TRBJ2-2)
CASRRPGQNTGELFF

SEQ ID NO: 298617 - protein, 13 aa, Homo sapiens
  CDR3 for alpha chain variable domain of TCR clone 149309 (TRAV13-1, TRAJ6)
CAASRGGSYRPTF

SEQ ID NO: 298618 - protein, 14 aa, Homo sapiens
  CDR3 for beta chain variable domain of TCR clone 149309 (TRBV7-2, TRBJ2-5)
CASSFGGAQETQYF

SEQ ID NO: 298619 - protein, 12 aa, Homo sapiens
  CDR3 for alpha chain variable domain of TCR clone 149310 (TRAV8-3, TRAJ20)
CAVGGGDYKLSF

SEQ ID NO: 298620 - protein, 15 aa, Homo sapiens
  CDR3 for beta chain variable domain of TCR clone 149310 (TRBV7-2, TRBJ2-7)
CASSLKGALTYEQYF

SEQ ID NO: 298621 - protein, 15 aa, Homo sapiens
  CDR3 for alpha chain variable domain of TCR clone 149311 (TRAV2, TRAJ24)
CAVVRLKNSWGKLQV

SEQ ID NO: 298622 - protein, 16 aa, Homo sapiens
  CDR3 for beta chain variable domain of TCR clone 149311 (TRBV7-7, TRBJ2-3)
CASSPGTSGSTDTQYF

SEQ ID NO: 298623 - protein, 12 aa, Homo sapiens
  CDR3 for alpha chain variable domain of TCR clone 149312 (TRAV8-3, TRAJ20)
CAVDFNDYKLSF

SEQ ID NO: 298624 - protein, 12 aa, Homo sapiens
  CDR3 for beta chain variable domain of TCR clone 149312 (TRBV29-1, TRBJ2-3)
CRVTGGADTQYF

SEQ ID NO: 298625 - protein, 16 aa, Homo sapiens
  CDR3 for alpha chain variable domain of TCR clone 149313 (TRAV12-1, TRAJ22)
CVVNTISSGSARQLTF

SEQ ID NO: 298626 - protein, 13 aa, Homo sapiens
  CDR3 for beta chain variable domain of TCR clone 149313 (TRBV19, TRBJ1-5)
CVSSIGGEQPQHF

SEQ ID NO: 298627 - protein, 15 aa, Homo sapiens
  CDR3 for alpha chain variable domain of TCR clone 149314 (TRAV3, TRAJ36)
CAVRASQTGANNLFF

SEQ ID NO: 298628 - protein, 12 aa, Homo sapiens
  CDR3 for beta chain variable domain of TCR clone 149314 (TRBV7-8, TRBJ2-1)
CASSLGHNEQFF

SEQ ID NO: 298629 - protein, 11 aa, Homo sapiens
  CDR3 for alpha chain variable domain of TCR clone 149315 (TRAV2, TRAJ13)
CASVGYQKVTF

SEQ ID NO: 298630 - protein, 14 aa, Homo sapiens
  CDR3 for beta chain variable domain of TCR clone 149315 (TRBV18, TRBJ1-2)
CASSPDRVVYGYTF

SEQ ID NO: 298631 - protein, 14 aa, Homo sapiens
  CDR3 for alpha chain variable domain of TCR clone 149316 (TRAV16, TRAJ39)
CALSKNNAGNMLTF

SEQ ID NO: 298632 - protein, 19 aa, Homo sapiens
  CDR3 for beta chain variable domain of TCR clone 149316 (TRBV6-6, TRBJ2-1)
AAPSQTSVYFGASSYEQFF

SEQ ID NO: 298633 - protein, 20 aa, Homo sapiens
  CDR3 for alpha chain variable domain of TCR clone 149317 (TRAV12-3, TRAJ41)
SLFIRDSQPSDSATPEAINF

SEQ ID NO: 298634 - protein, 15 aa, Homo sapiens
  CDR3 for beta chain variable domain of TCR clone 149317 (TRBV5-1, TRBJ2-7)
CASSLDLTSSYEQYF

SEQ ID NO: 298635 - protein, 12 aa, Homo sapiens
  CDR3 for alpha chain variable domain of TCR clone 149318 (TRAV3, TRAJ32)
CAVRDIRGYVVL

SEQ ID NO: 298636 - protein, 15 aa, Homo sapiens
  CDR3 for beta chain variable domain of TCR clone 149318 (TRBV12-4, TRBJ2-2)
CASSLGVRHTGELFF

SEQ ID NO: 298637 - protein, 16 aa, Homo sapiens
  CDR3 for alpha chain variable domain of TCR clone 149319 (TRAV3, TRAJ37)
CAVRPHGSGNTGKLIF

SEQ ID NO: 298638 - protein, 16 aa, Homo sapiens
  CDR3 for beta chain variable domain of TCR clone 149319 (TRBV6-1, TRBJ1-2)
CASSGAWQGRSHGYTF

SEQ ID NO: 298639 - protein, 14 aa, Homo sapiens
  CDR3 for alpha chain variable domain of TCR clone 149320 (TRAV26-1, TRAJ38)
CIADNAGNNRKLIW

SEQ ID NO: 298640 - protein, 10 aa, Homo sapiens
  CDR3 for beta chain variable domain of TCR clone 149320 (TRBV19, TRBJ1-2)
CASSVPGQDA

SEQ ID NO: 298641 - protein, 15 aa, Homo sapiens
  CDR3 for alpha chain variable domain of TCR clone 149321 (TRAV35, TRAJ23)
CAGQRGYNQGGKLIF

SEQ ID NO: 298642 - protein, 13 aa, Homo sapiens
  CDR3 for beta chain variable domain of TCR clone 149321 (TRBV7-9, TRBJ1-2)
CASSLKQNYGYTF

SEQ ID NO: 298643 - protein, 13 aa, Homo sapiens
  CDR3 for alpha chain variable domain of TCR clone 149322 (TRAV34, TRAJ22)
CGAEAGSARQLTF

SEQ ID NO: 298644 - protein, 15 aa, Homo sapiens
  CDR3 for beta chain variable domain of TCR clone 149322 (TRBV9, TRBJ1-6)
CASSVAGTGDSPLHF

SEQ ID NO: 298645 - protein, 17 aa, Homo sapiens
  CDR3 for alpha chain variable domain of TCR clone 149323 (TRAV16, TRAJ58)
CITVLSNGETSGSRLTF

SEQ ID NO: 298646 - protein, 17 aa, Homo sapiens
  CDR3 for beta chain variable domain of TCR clone 149323 (TRBV13, TRBJ2-3)
CASSLSRVAGGRNTQYF

SEQ ID NO: 298647 - protein, 12 aa, Homo sapiens
  CDR3 for alpha chain variable domain of TCR clone 149324 (TRAV2, TRAJ10)
CASTGGGNRLTF

SEQ ID NO: 298648 - protein, 20 aa, Homo sapiens
  CDR3 for beta chain variable domain of TCR clone 149324 (TRBV7-8, TRBJ2-2)
CASSHLFPGPTIHITGELFF

SEQ ID NO: 298649 - protein, 13 aa, Homo sapiens
  CDR3 for alpha chain variable domain of TCR clone 149325 (TRAV8-1, TRAJ32)
CAADGGATNKLIF

SEQ ID NO: 298650 - protein, 15 aa, Homo sapiens
  CDR3 for beta chain variable domain of TCR clone 149325 (TRBV27, TRBJ1-5)
CASSLGTGFDQPQHF

SEQ ID NO: 298651 - protein, 11 aa, Homo sapiens
  CDR3 for alpha chain variable domain of TCR clone 149326 (TRAV3, TRAJ21)
CAVGNCNKFYF

SEQ ID NO: 298652 - protein, 16 aa, Homo sapiens
  CDR3 for beta chain variable domain of TCR clone 149326 (TRBV19, TRBJ2-1)
CDSSKAGPSSYNEQFF

SEQ ID NO: 298653 - protein, 12 aa, Homo sapiens
  CDR3 for alpha chain variable domain of TCR clone 149327 (TRAV3, TRAJ43)
CAVRDPNNDMRF

SEQ ID NO: 298654 - protein, 16 aa, Homo sapiens
  CDR3 for beta chain variable domain of TCR clone 149327 (TRBV2, TRBJ2-1)
CASRLNTASAYNEQFF

SEQ ID NO: 298655 - protein, 18 aa, Homo sapiens
  CDR3 for alpha chain variable domain of TCR clone 149328 (TRAV13-1, TRAJ52)
CAASKRSAGGTSYGKLTF

SEQ ID NO: 298656 - protein, 13 aa, Homo sapiens
  CDR3 for beta chain variable domain of TCR clone 149328 (TRBV12-4, TRBJ1-2)
CASSVRQGKGYSF

SEQ ID NO: 298657 - protein, 12 aa, Homo sapiens
  CDR3 for alpha chain variable domain of TCR clone 149329 (TRAV12-3, TRAJ17)
CAMTLTGNKLTF

SEQ ID NO: 298658 - protein, 17 aa, Homo sapiens
  CDR3 for beta chain variable domain of TCR clone 149329 (TRBV11-1, TRBJ2-7)
CASSLLDGGDSAYEQYF

SEQ ID NO: 298659 - protein, 14 aa, Homo sapiens
  CDR3 for alpha chain variable domain of TCR clone 149330 (TRAV21, TRAJ28)
CAVGSGAGRYQLTF

SEQ ID NO: 298660 - protein, 14 aa, Homo sapiens
  CDR3 for beta chain variable domain of TCR clone 149330 (TRBV18, TRBJ1-4)
CASSPGPNGEKLFL

SEQ ID NO: 298661 - protein, 14 aa, Homo sapiens
  CDR3 for alpha chain variable domain of TCR clone 149331 (TRAV1-2, TRAJ8)
CAVREDTGFQKLAF

SEQ ID NO: 298662 - protein, 16 aa, Homo sapiens
  CDR3 for beta chain variable domain of TCR clone 149331 (TRBV19, TRBJ2-1)
CASSKAGPGSYNEQFF

SEQ ID NO: 298663 - protein, 11 aa, Homo sapiens
  CDR3 for alpha chain variable domain of TCR clone 149332 (TRAV13-1, TRAJ24)
CSASGWGKLQF

SEQ ID NO: 298664 - protein, 14 aa, Homo sapiens
  CDR3 for beta chain variable domain of TCR clone 149332 (TRBV7-7, TRBJ2-2)
CATRQDSDTGELFF

SEQ ID NO: 298665 - protein, 15 aa, Homo sapiens
  CDR3 for alpha chain variable domain of TCR clone 149333 (TRAV4, TRAJ39)
CLVGPHNNAGNMLTF

SEQ ID NO: 298666 - protein, 12 aa, Homo sapiens
  CDR3 for beta chain variable domain of TCR clone 149333 (TRBV11-2, TRBJ2-2)
CASSLGGGELFF

SEQ ID NO: 298667 - protein, 16 aa, Homo sapiens
  CDR3 for alpha chain variable domain of TCR clone 149334 (TRAV30, TRAJ24)
CGTEIVDADSWGKFQF

SEQ ID NO: 298668 - protein, 16 aa, Homo sapiens
  CDR3 for beta chain variable domain of TCR clone 149334 (TRBV19, TRBJ1-6)
CASSVAPVAGNSPLHF

SEQ ID NO: 298669 - protein, 16 aa, Homo sapiens
  CDR3 for alpha chain variable domain of TCR clone 149335 (TRAV20, TRAJ53)
CAVRRGSGGSNYNLTF

SEQ ID NO: 298670 - protein, 12 aa, Homo sapiens
  CDR3 for beta chain variable domain of TCR clone 149335 (TRBV29-1, TRBJ2-3)
CSVVLGADTQYF

SEQ ID NO: 298671 - protein, 11 aa, Homo sapiens
  CDR3 for alpha chain variable domain of TCR clone 149336 (TRAV21, TRAJ34)
CAHYNTDKLIF

SEQ ID NO: 298672 - protein, 12 aa, Homo sapiens
  CDR3 for beta chain variable domain of TCR clone 149336 (TRBV28, TRBJ2-6)
CAIQAGANVLTF

SEQ ID NO: 298673 - protein, 12 aa, Homo sapiens
  CDR3 for alpha chain variable domain of TCR clone 149337 (TRAV12-3, TRAJ34)
CAMGYNTDKLIF

SEQ ID NO: 298674 - protein, 17 aa, Homo sapiens
  CDR3 for beta chain variable domain of TCR clone 149337 (TRBV28, TRBJ2-1)
CTSVPSIIAGGRSEQFF

SEQ ID NO: 298675 - protein, 11 aa, Homo sapiens
  CDR3 for alpha chain variable domain of TCR clone 149338 (TRAV3, TRAJ21)
CAVGNFNKFYF

SEQ ID NO: 298676 - protein, 15 aa, Homo sapiens
  CDR3 for beta chain variable domain of TCR clone 149338 (TRBV5-8, TRBJ2-2)
CASSLDRGATGELFF

SEQ ID NO: 298677 - protein, 14 aa, Homo sapiens
  CDR3 for alpha chain variable domain of TCR clone 149339 (TRAV12-2, TRAJ32)
CAHPESGATNKRIF

SEQ ID NO: 298678 - protein, 14 aa, Homo sapiens
  CDR3 for beta chain variable domain of TCR clone 149339 (TRBV4-2, TRBJ2-3)
CASRETRAPGMQYF

SEQ ID NO: 298679 - protein, 15 aa, Homo sapiens
  CDR3 for alpha chain variable domain of TCR clone 149340 (TRAV8-3, TRAJ27)
CAGCPSKTNAGKSTF

SEQ ID NO: 298680 - protein, 15 aa, Homo sapiens
  CDR3 for beta chain variable domain of TCR clone 149340 (TRBV7-2, TRBJ2-1)
CASSSGLAGGNEQFF

SEQ ID NO: 298681 - protein, 12 aa, Homo sapiens
  CDR3 for alpha chain variable domain of TCR clone 149341 (TRAV8-3, TRAJ20)
CAVDFNDYKLSF

SEQ ID NO: 298682 - protein, 13 aa, Homo sapiens
  CDR3 for beta chain variable domain of TCR clone 149341 (TRBV5-7, TRBJ2-3)
CASSLGRTNTQYF

SEQ ID NO: 298683 - protein, 14 aa, Homo sapiens
  CDR3 for alpha chain variable domain of TCR clone 149342 (TRAV8-1, TRAJ5)
CAVRTDTGRRALTF

SEQ ID NO: 298684 - protein, 14 aa, Homo sapiens
  CDR3 for beta chain variable domain of TCR clone 149342 (TRBV19, TRBJ2-1)
CASPTCVLSGEQFF

SEQ ID NO: 298685 - protein, 13 aa, Homo sapiens
  CDR3 for alpha chain variable domain of TCR clone 149343 (TRAV21, TRAJ56)
CAGWVGANSKLTF

SEQ ID NO: 298686 - protein, 16 aa, Homo sapiens
  CDR3 for beta chain variable domain of TCR clone 149343 (TRBV5-7, TRBJ2-5)
CASSLLGYPGVETQYF

SEQ ID NO: 298687 - protein, 17 aa, Homo sapiens
  CDR3 for alpha chain variable domain of TCR clone 149344 (TRAV12-2, TRAJ6)
CAPQGPPRAGGSYIPTF

SEQ ID NO: 298688 - protein, 16 aa, Homo sapiens
  CDR3 for beta chain variable domain of TCR clone 149344 (TRBV19, TRBJ2-2)
CASSTARASNIGELFF

SEQ ID NO: 298689 - protein, 12 aa, Homo sapiens
  CDR3 for alpha chain variable domain of TCR clone 149345 (TRAV1-1, TRAJ15)
CAAPTRQELLIF

SEQ ID NO: 298690 - protein, 15 aa, Homo sapiens
  CDR3 for beta chain variable domain of TCR clone 149345 (TRBV27, TRBJ2-3)
CASSLGLAGPDTQYF

SEQ ID NO: 298691 - protein, 11 aa, Homo sapiens
  CDR3 for alpha chain variable domain of TCR clone 149346 (TRAV12-3, TRAJ43)
CAMSVSNDIRF

SEQ ID NO: 298692 - protein, 14 aa, Homo sapiens
  CDR3 for beta chain variable domain of TCR clone 149346 (TRBV7-8, TRBJ2-3)
CASSLEAGSDTQYC

SEQ ID NO: 298693 - protein, 17 aa, Homo sapiens
  CDR3 for alpha chain variable domain of TCR clone 149347 (TRAV3, TRAJ6)
CAVRDGPRAGGSYIPTF

SEQ ID NO: 298694 - protein, 12 aa, Homo sapiens
  CDR3 for beta chain variable domain of TCR clone 149347 (TRBV11-2, TRBJ2-1)
CASSAGNNEQFF

SEQ ID NO: 298695 - protein, 17 aa, Homo sapiens
  CDR3 for alpha chain variable domain of TCR clone 149348 (TRAV8-6, TRAJ58)
CAVSSWVGETSGSRLTF

SEQ ID NO: 298696 - protein, 14 aa, Homo sapiens
  CDR3 for beta chain variable domain of TCR clone 149348 (TRBV4-2, TRBJ2-1)
CASGLDRAYNAQFF

SEQ ID NO: 298697 - protein, 17 aa, Homo sapiens
  CDR3 for alpha chain variable domain of TCR clone 149349 (TRAV3, TRAJ6)
CAVRDDPRAGGSYIPTF

SEQ ID NO: 298698 - protein, 20 aa, Homo sapiens
  CDR3 for beta chain variable domain of TCR clone 149349 (TRBV28, TRBJ2-1)
CASTPIGRSPGLAGGNEQFF

SEQ ID NO: 298699 - protein, 15 aa, Homo sapiens
  CDR3 for alpha chain variable domain of TCR clone 149350 (TRAV36/DV7, TRAJ44)
CAVCRNTGTASKLTF

SEQ ID NO: 298700 - protein, 16 aa, Homo sapiens
  CDR3 for beta chain variable domain of TCR clone 149350 (TRBV25-1, TRBJ2-7)
CASSELTGGGIYEQYF

SEQ ID NO: 298701 - protein, 15 aa, Homo sapiens
  CDR3 for alpha chain variable domain of TCR clone 149351 (TRAV2, TRAJ38)
CAVADRIGNNRKLIW

SEQ ID NO: 298702 - protein, 16 aa, Homo sapiens
  CDR3 for beta chain variable domain of TCR clone 149351 (TRBV7-8, TRBJ2-1)
CASSLAGTGRYNEQFF

SEQ ID NO: 298703 - protein, 13 aa, Homo sapiens
  CDR3 for alpha chain variable domain of TCR clone 149352 (TRAV30, TRAJ24)
CGTVPDSWGKLQF

SEQ ID NO: 298704 - protein, 16 aa, Homo sapiens
  CDR3 for beta chain variable domain of TCR clone 149352 (TRBV19, TRBJ2-1)
CASSRAGPSSYNEQFF

SEQ ID NO: 298705 - protein, 15 aa, Homo sapiens
  CDR3 for alpha chain variable domain of TCR clone 149353 (TRAV8-6, TRAJ26)
CAVSDQSPGGQNFVF

SEQ ID NO: 298706 - protein, 16 aa, Homo sapiens
  CDR3 for beta chain variable domain of TCR clone 149353 (TRBV12-5, TRBJ2-5)
CASGPRTSGNQETQYF

SEQ ID NO: 298707 - protein, 13 aa, Homo sapiens
  CDR3 for alpha chain variable domain of TCR clone 149354 (TRAV27, TRAJ45)
CRSSGGGADGLTF

SEQ ID NO: 298708 - protein, 15 aa, Homo sapiens
  CDR3 for beta chain variable domain of TCR clone 149354 (TRBV12-4, TRBJ2-1)
CASSPPAGLQETQYF

SEQ ID NO: 298709 - protein, 20 aa, Homo sapiens
  CDR3 for alpha chain variable domain of TCR clone 149355 (TRAV26-1, TRAJ42)
CCVLLHRQTYYGGSQGNLIF

SEQ ID NO: 298710 - protein, 16 aa, Homo sapiens
  CDR3 for beta chain variable domain of TCR clone 149355 (TRBV7-3, TRBJ2-2)
CASRVKRGTLSGELFF

SEQ ID NO: 298711 - protein, 15 aa, Homo sapiens
  CDR3 for alpha chain variable domain of TCR clone 149356 (TRAV16, TRAJ17)
CALSGNKAAGNKLTF

SEQ ID NO: 298712 - protein, 12 aa, Homo sapiens
  CDR3 for beta chain variable domain of TCR clone 149356 (TRBV11-2, TRBJ2-2)
CASSLGGGELFF

SEQ ID NO: 298713 - protein, 12 aa, Homo sapiens
  CDR3 for alpha chain variable domain of TCR clone 149357 (TRAV22, TRAJ29)
CAPPSGNTPLVF

SEQ ID NO: 298714 - protein, 15 aa, Homo sapiens
  CDR3 for beta chain variable domain of TCR clone 149357 (TRBV5-1, TRBJ2-1)
CASSPPRAPYNEQLF

SEQ ID NO: 298715 - protein, 17 aa, Homo sapiens
  CDR3 for alpha chain variable domain of TCR clone 149358 (TRAV26-1, TRAJ37)
CVVRVITVSSNTGKLIF

SEQ ID NO: 298716 - protein, 15 aa, Homo sapiens
  CDR3 for beta chain variable domain of TCR clone 149358 (TRBV20-1, TRBJ2-7)
FSARDRVSGMDEQYF

SEQ ID NO: 298717 - protein, 12 aa, Homo sapiens
  CDR3 for alpha chain variable domain of TCR clone 149359 (TRAV13-2, TRAJ23)
CAERHRGGKLIF

SEQ ID NO: 298718 - protein, 15 aa, Homo sapiens
  CDR3 for beta chain variable domain of TCR clone 149359 (TRBV7-9, TRBJ1-6)
CASSSLGRGNSPLHF

SEQ ID NO: 298719 - protein, 13 aa, Homo sapiens
  CDR3 for alpha chain variable domain of TCR clone 149360 (TRAV36/DV7, TRAJ29)
CAVEPSGNTPLVF

SEQ ID NO: 298720 - protein, 15 aa, Homo sapiens
  CDR3 for beta chain variable domain of TCR clone 149360 (TRBV7-2, TRBJ2-3)
CASSLRGGSTDTQYF

SEQ ID NO: 298721 - protein, 12 aa, Homo sapiens
  CDR3 for alpha chain variable domain of TCR clone 149361 (TRAV8-1, TRAJ31)
CAVINNNARLMF

SEQ ID NO: 298722 - protein, 15 aa, Homo sapiens
  CDR3 for beta chain variable domain of TCR clone 149361 (TRBV20-1, TRBJ2-2)
CSARGGQGNTGELLF

SEQ ID NO: 298723 - protein, 14 aa, Homo sapiens
  CDR3 for alpha chain variable domain of TCR clone 149362 (TRAV8-6, TRAJ29)
CAVSGWAGNTPLVF

SEQ ID NO: 298724 - protein, 14 aa, Homo sapiens
  CDR3 for beta chain variable domain of TCR clone 149362 (TRBV7-3, TRBJ1-1)
CASSLKGGNTEAFF

SEQ ID NO: 298725 - protein, 17 aa, Homo sapiens
  CDR3 for alpha chain variable domain of TCR clone 149363 (TRAV4, TRAJ42)
CLVGGLNYGGSQGTLLF

SEQ ID NO: 298726 - protein, 12 aa, Homo sapiens
  CDR3 for beta chain variable domain of TCR clone 149363 (TRBV20-1, TRBJ2-1)
CSAQYTYNEQFF

SEQ ID NO: 298727 - protein, 15 aa, Homo sapiens
  CDR3 for alpha chain variable domain of TCR clone 149364 (TRAV12-3, TRAJ6)
CAMSAKTGGSYIPTF

SEQ ID NO: 298728 - protein, 15 aa, Homo sapiens
  CDR3 for beta chain variable domain of TCR clone 149364 (TRBV7-6, TRBJ1-5)
CASSQSSGINQPQHF

SEQ ID NO: 298729 - protein, 11 aa, Homo sapiens
  CDR3 for alpha chain variable domain of TCR clone 149365 (TRAV1-1, TRAJ37)
CAVSPQGKLIF

SEQ ID NO: 298730 - protein, 15 aa, Homo sapiens
  CDR3 for beta chain variable domain of TCR clone 149365 (TRBV9, TRBJ1-6)
CASSVAGTGDSPLHF

SEQ ID NO: 298731 - protein, 16 aa, Homo sapiens
  CDR3 for alpha chain variable domain of TCR clone 149366 (TRAV4, TRAJ22)
CLVGDLYSGSARQLTF

SEQ ID NO: 298732 - protein, 16 aa, Homo sapiens
  CDR3 for beta chain variable domain of TCR clone 149366 (TRBV7-9, TRBJ2-1)
CASSDVAGGSDNEQFF

SEQ ID NO: 298733 - protein, 14 aa, Homo sapiens
  CDR3 for alpha chain variable domain of TCR clone 149367 (TRAV1-2, TRAJ16)
CAVNRFSDGQKLLF

SEQ ID NO: 298734 - protein, 15 aa, Homo sapiens
  CDR3 for beta chain variable domain of TCR clone 149367 (TRBV3-1, TRBJ2-5)
CASSANLGGPETRYF

SEQ ID NO: 298735 - protein, 16 aa, Homo sapiens
  CDR3 for alpha chain variable domain of TCR clone 149368 (TRAV30, TRAJ24)
CATEIVDADSWGKFQF

SEQ ID NO: 298736 - protein, 13 aa, Homo sapiens
  CDR3 for beta chain variable domain of TCR clone 149368 (TRBV18, TRBJ1-1)
CASSGGRNTEAFF

SEQ ID NO: 298737 - protein, 20 aa, Homo sapiens
  CDR3 for alpha chain variable domain of TCR clone 149369 (TRAV1-1, TRAJ4)
CLLLLRCEGFLSGGYNKLIF

SEQ ID NO: 298738 - protein, 18 aa, Homo sapiens
  CDR3 for beta chain variable domain of TCR clone 149369 (TRBV28, TRBJ1-4)
CTSVPAVHPTGGSEKLFF

SEQ ID NO: 298739 - protein, 12 aa, Homo sapiens
  CDR3 for alpha chain variable domain of TCR clone 149370 (TRAV1-1, TRAJ8)
CAGGTGFQQLVF

SEQ ID NO: 298740 - protein, 15 aa, Homo sapiens
  CDR3 for beta chain variable domain of TCR clone 149370 (TRBV9, TRBJ1-6)
CASSVAGTGDSPLHF

SEQ ID NO: 298741 - protein, 13 aa, Homo sapiens
  CDR3 for alpha chain variable domain of TCR clone 149371 (TRAV8-3, TRAJ48)
CAVVPFGNEKLTF

SEQ ID NO: 298742 - protein, 16 aa, Homo sapiens
  CDR3 for beta chain variable domain of TCR clone 149371 (TRBV12-4, TRBJ1-5)
CASSRPVGGSNQPQHF

SEQ ID NO: 298743 - protein, 13 aa, Homo sapiens
  CDR3 for alpha chain variable domain of TCR clone 149372 (TRAV23/DV6, TRAJ22)
SAPYSGSARQLTF

SEQ ID NO: 298744 - protein, 15 aa, Homo sapiens
  CDR3 for beta chain variable domain of TCR clone 149372 (TRBV11-2, TRBJ1-6)
CASSLDPWAVSPLHF

SEQ ID NO: 298745 - protein, 14 aa, Homo sapiens
  CDR3 for alpha chain variable domain of TCR clone 149373 (TRAV12-2, TRAJ53)
CRERGGGINYTLTF

SEQ ID NO: 298746 - protein, 16 aa, Homo sapiens
  CDR3 for beta chain variable domain of TCR clone 149373 (TRBV11-2, TRBJ2-3)
CASSFQGRGALDTQYF

SEQ ID NO: 298747 - protein, 19 aa, Homo sapiens
  CDR3 for alpha chain variable domain of TCR clone 149374 (TRAV1-2, TRAJ26)
CLLPLCCERPDNYGQNFVF

SEQ ID NO: 298748 - protein, 12 aa, Homo sapiens
  CDR3 for beta chain variable domain of TCR clone 149374 (TRBV2, TRBJ1-1)
CATPSRGTEAFF

SEQ ID NO: 298749 - protein, 14 aa, Homo sapiens
  CDR3 for alpha chain variable domain of TCR clone 149375 (TRAV35, TRAJ50)
CAGHRKTSDDKVIF

SEQ ID NO: 298750 - protein, 13 aa, Homo sapiens
  CDR3 for beta chain variable domain of TCR clone 149375 (TRBV7-7, TRBJ2-3)
CASSLSRADTQYF

SEQ ID NO: 298751 - protein, 11 aa, Homo sapiens
  CDR3 for alpha chain variable domain of TCR clone 149376 (TRAV21, TRAJ23)
CAPQRRGKLIF

SEQ ID NO: 298752 - protein, 14 aa, Homo sapiens
  CDR3 for beta chain variable domain of TCR clone 149376 (TRBV12-4, TRBJ1-1)
CASTWAGHDTGAFF

SEQ ID NO: 298753 - protein, 15 aa, Homo sapiens
  CDR3 for alpha chain variable domain of TCR clone 149377 (TRAV8-3, TRAJ45)
CASSYSGGGADGLTF

SEQ ID NO: 298754 - protein, 13 aa, Homo sapiens
  CDR3 for beta chain variable domain of TCR clone 149377 (TRBV7-9, TRBJ2-7)
CASSFAGADEQYF

SEQ ID NO: 298755 - protein, 15 aa, Homo sapiens
  CDR3 for alpha chain variable domain of TCR clone 149378 (TRAV13-1, TRAJ10)
CAATILTGGGNKLTF

SEQ ID NO: 298756 - protein, 12 aa, Homo sapiens
  CDR3 for beta chain variable domain of TCR clone 149378 (TRBV2, TRBJ2-7)
CASSLQAYEQYF

SEQ ID NO: 298757 - protein, 16 aa, Homo sapiens
  CDR3 for alpha chain variable domain of TCR clone 149379 (TRAV1-2, TRAJ10)
CAVRGVLTGGGNKLTF

SEQ ID NO: 298758 - protein, 18 aa, Homo sapiens
  CDR3 for beta chain variable domain of TCR clone 149379 (TRBV25-1, TRBJ1-2)
CASSGLQNGQGLIFGYTF

SEQ ID NO: 298759 - protein, 18 aa, Homo sapiens
  CDR3 for alpha chain variable domain of TCR clone 149380 (TRAV13-1, TRAJ52)
CAARKRSAGGTSYGKLTV

SEQ ID NO: 298760 - protein, 13 aa, Homo sapiens
  CDR3 for beta chain variable domain of TCR clone 149380 (TRBV12-4, TRBJ1-2)
CASSLRQGKGYTF

SEQ ID NO: 298761 - protein, 20 aa, Homo sapiens
  CDR3 for alpha chain variable domain of TCR clone 149381 (TRAV8-3, TRAJ45)
LSTSVLWGSYSGGGADGLTF

SEQ ID NO: 298762 - protein, 13 aa, Homo sapiens
  CDR3 for beta chain variable domain of TCR clone 149381 (TRBV11-2, TRBJ2-5)
CASSRGPSETQYF

SEQ ID NO: 298763 - protein, 21 aa, Homo sapiens
  CDR3 for alpha chain variable domain of TCR clone 149382 (TRAV25, TRAJ47)
TATQTTDVGTYFWEYGNKLVF

SEQ ID NO: 298764 - protein, 13 aa, Homo sapiens
  CDR3 for beta chain variable domain of TCR clone 149382 (TRBV15, TRBJ1-6)
CATSGGLNSPLHF

SEQ ID NO: 298765 - protein, 10 aa, Homo sapiens
  CDR3 for alpha chain variable domain of TCR clone 149383 (TRAV12-1, TRAJ43)
CVVHNNDTRF

SEQ ID NO: 298766 - protein, 13 aa, Homo sapiens
  CDR3 for beta chain variable domain of TCR clone 149383 (TRBV12-4, TRBJ1-2)
CASSSGLTVISTF

SEQ ID NO: 298767 - protein, 14 aa, Homo sapiens
  CDR3 for alpha chain variable domain of TCR clone 149384 (TRAV8-3, TRAJ4)
CAVGASGGYNKLIF

SEQ ID NO: 298768 - protein, 17 aa, Homo sapiens
  CDR3 for beta chain variable domain of TCR clone 149384 (TRBV11-2, TRBJ2-1)
CASSLYPPGLEYNEHFF

SEQ ID NO: 298769 - protein, 11 aa, Homo sapiens
  CDR3 for alpha chain variable domain of TCR clone 149385 (TRAV1-1, TRAJ23)
CAVRQGGKLIF

SEQ ID NO: 298770 - protein, 16 aa, Homo sapiens
  CDR3 for beta chain variable domain of TCR clone 149385 (TRBV5-5, TRBJ2-7)
CASSVRTSGRPYEQYF

SEQ ID NO: 298771 - protein, 14 aa, Homo sapiens
  CDR3 for alpha chain variable domain of TCR clone 149386 (TRAV1-2, TRAJ16)
CAVNRFSDGQKLLF

SEQ ID NO: 298772 - protein, 14 aa, Homo sapiens
  CDR3 for beta chain variable domain of TCR clone 149386 (TRBV15, TRBJ2-3)
CATSRAGSTDTQYF

SEQ ID NO: 298773 - protein, 13 aa, Homo sapiens
  CDR3 for alpha chain variable domain of TCR clone 149387 (TRAV17, TRAJ5)
CAPMDTGRRALTF

SEQ ID NO: 298774 - protein, 14 aa, Homo sapiens
  CDR3 for beta chain variable domain of TCR clone 149387 (TRBV29-1, TRBJ2-7)
CSVDQRQASYEQYF

SEQ ID NO: 298775 - protein, 12 aa, Homo sapiens
  CDR3 for alpha chain variable domain of TCR clone 149388 (TRAV21, TRAJ42)
CAVGGSHGNLIF

SEQ ID NO: 298776 - protein, 14 aa, Homo sapiens
  CDR3 for beta chain variable domain of TCR clone 149388 (TRBV12-4, TRBJ1-1)
CASSLGTGGTEAFF

SEQ ID NO: 298777 - protein, 14 aa, Homo sapiens
  CDR3 for alpha chain variable domain of TCR clone 149389 (TRAV13-1, TRAJ35)
CAASKGGFGNVLHC

SEQ ID NO: 298778 - protein, 15 aa, Homo sapiens
  CDR3 for beta chain variable domain of TCR clone 149389 (TRBV7-9, TRBJ2-7)
CASSPGGGLTYEQYF

SEQ ID NO: 298779 - protein, 13 aa, Homo sapiens
  CDR3 for alpha chain variable domain of TCR clone 149390 (TRAV1-2, TRAJ9)
CAVLNTGGYKTIF

SEQ ID NO: 298780 - protein, 15 aa, Homo sapiens
  CDR3 for beta chain variable domain of TCR clone 149390 (TRBV7-3, TRBJ2-1)
CASSPTGGGEVEQFF

SEQ ID NO: 298781 - protein, 12 aa, Homo sapiens
  CDR3 for alpha chain variable domain of TCR clone 149391 (TRAV8-3, TRAJ26)
CAGDNYGQNFVF

SEQ ID NO: 298782 - protein, 16 aa, Homo sapiens
  CDR3 for beta chain variable domain of TCR clone 149391 (TRBV12-4, TRBJ1-5)
CASSRPVGGSNQPQHF

SEQ ID NO: 298783 - protein, 15 aa, Homo sapiens
  CDR3 for alpha chain variable domain of TCR clone 149392 (TRAV13-1, TRAJ32)
CAASNGWWCYKQAHL

SEQ ID NO: 298784 - protein, 16 aa, Homo sapiens
  CDR3 for beta chain variable domain of TCR clone 149392 (TRBV13, TRBJ2-2)
CASSPRTGEHTGELFF

SEQ ID NO: 298785 - protein, 17 aa, Homo sapiens
  CDR3 for alpha chain variable domain of TCR clone 149393 (TRAV4, )
CLVDIQNPDPAVYQLRD

SEQ ID NO: 298786 - protein, 15 aa, Homo sapiens
  CDR3 for beta chain variable domain of TCR clone 149393 (TRBV11-2, TRBJ2-1)
CASSLGTSGLNEQLF

SEQ ID NO: 298787 - protein, 11 aa, Homo sapiens
  CDR3 for alpha chain variable domain of TCR clone 149394 (TRAV21, TRAJ34)
CAHYNTDKLIF

SEQ ID NO: 298788 - protein, 13 aa, Homo sapiens
  CDR3 for beta chain variable domain of TCR clone 149394 (TRBV13, TRBJ2-5)
CASSPEVGETQYF

SEQ ID NO: 298789 - protein, 15 aa, Homo sapiens
  CDR3 for alpha chain variable domain of TCR clone 149395 (TRAV4, TRAJ39)
CLVGPNNNASNMLTF

SEQ ID NO: 298790 - protein, 14 aa, Homo sapiens
  CDR3 for beta chain variable domain of TCR clone 149395 (TRBV19, TRBJ2-7)
CASNFRDTFTGMYF

SEQ ID NO: 298791 - protein, 16 aa, Homo sapiens
  CDR3 for alpha chain variable domain of TCR clone 149396 (TRAV8-4, TRAJ52)
CAVSDPGGTSYGKLTF

SEQ ID NO: 298792 - protein, 14 aa, Homo sapiens
  CDR3 for beta chain variable domain of TCR clone 149396 (TRBV7-9, TRBJ2-1)
CASSQGQAEAEQFF

SEQ ID NO: 298793 - protein, 18 aa, Homo sapiens
  CDR3 for alpha chain variable domain of TCR clone 149397 (TRAV21, TRAJ52)
CAVRPSPAGGTSYGRLTF

SEQ ID NO: 298794 - protein, 17 aa, Homo sapiens
  CDR3 for beta chain variable domain of TCR clone 149397 (TRBV13, TRBJ2-3)
CASRLSRVAGGRNTQYF

SEQ ID NO: 298795 - protein, 15 aa, Homo sapiens
  CDR3 for alpha chain variable domain of TCR clone 149398 (TRAV8-3, TRAJ27)
CAVGPSKNNAGKSTF

SEQ ID NO: 298796 - protein, 13 aa, Homo sapiens
  CDR3 for beta chain variable domain of TCR clone 149398 (TRBV12-5, TRBJ1-2)
CASGVRTGNGYTF

SEQ ID NO: 298797 - protein, 16 aa, Homo sapiens
  CDR3 for alpha chain variable domain of TCR clone 149399 (TRAV1-2, TRAJ33)
CAVRAISMDSNYQLIW

SEQ ID NO: 298798 - protein, 17 aa, Homo sapiens
  CDR3 for beta chain variable domain of TCR clone 149399 (TRBV5-3, TRBJ1-5)
CARSPRRDRRCTQHQHF

SEQ ID NO: 298799 - protein, 14 aa, Homo sapiens
  CDR3 for alpha chain variable domain of TCR clone 149400 (TRAV1-2, TRAJ17)
CALRRGAAGSKLTF

SEQ ID NO: 298800 - protein, 18 aa, Homo sapiens
  CDR3 for beta chain variable domain of TCR clone 149400 (TRBV25-1, TRBJ1-2)
CASSGLQNGQGLIFGYTF

SEQ ID NO: 298801 - protein, 11 aa, Homo sapiens
  CDR3 for alpha chain variable domain of TCR clone 149401 (TRAV17, TRAJ9)
CATTGGFKTIF

SEQ ID NO: 298802 - protein, 17 aa, Homo sapiens
  CDR3 for beta chain variable domain of TCR clone 149401 (TRBV7-3, TRBJ2-3)
CASSLMKRMRGADTQYF

SEQ ID NO: 298803 - protein, 13 aa, Homo sapiens
  CDR3 for alpha chain variable domain of TCR clone 149402 (TRAV3, TRAJ20)
CAVRGGGDYKLSF

SEQ ID NO: 298804 - protein, 16 aa, Homo sapiens
  CDR3 for beta chain variable domain of TCR clone 149402 (TRBV4-1, TRBJ2-5)
CASSQTSGGPLETQYF

SEQ ID NO: 298805 - protein, 16 aa, Homo sapiens
  CDR3 for alpha chain variable domain of TCR clone 149403 (TRAV12-2, TRAJ43)
CARDDMRFGAGTRLTV

SEQ ID NO: 298806 - protein, 16 aa, Homo sapiens
  CDR3 for beta chain variable domain of TCR clone 149403 (TRBV2, TRBJ2-4)
CASSEAPGGEQNIQYF

SEQ ID NO: 298807 - protein, 15 aa, Homo sapiens
  CDR3 for alpha chain variable domain of TCR clone 149404 (TRAV8-1, TRAJ6)
CAVNTPPGGIYIPPF

SEQ ID NO: 298808 - protein, 14 aa, Homo sapiens
  CDR3 for beta chain variable domain of TCR clone 149404 (TRBV12-4, TRBJ2-1)
CASSLGQGASEQFF

SEQ ID NO: 298809 - protein, 21 aa, Homo sapiens
  CDR3 for alpha chain variable domain of TCR clone 149405 (TRAV8-4, TRAJ47)
HLTKPSAHMSDAAERGNKLVF

SEQ ID NO: 298810 - protein, 12 aa, Homo sapiens
  CDR3 for beta chain variable domain of TCR clone 149405 (TRBV28, TRBJ2-6)
CAIQAGANVLTF

SEQ ID NO: 298811 - protein, 13 aa, Homo sapiens
  CDR3 for alpha chain variable domain of TCR clone 149406 (TRAV8-2, TRAJ26)
CVVTLLLGSELCL

SEQ ID NO: 298812 - protein, 15 aa, Homo sapiens
  CDR3 for beta chain variable domain of TCR clone 149406 (TRBV11-2, TRBJ2-2)
CASSSDRVNAGELFF

SEQ ID NO: 298813 - protein, 14 aa, Homo sapiens
  CDR3 for alpha chain variable domain of TCR clone 149407 (TRAV1-2, TRAJ8)
CAVREDTGFQKLIF

SEQ ID NO: 298814 - protein, 14 aa, Homo sapiens
  CDR3 for beta chain variable domain of TCR clone 149407 (TRBV29-1, TRBJ2-5)
CSVETSGSGETQYF

SEQ ID NO: 298815 - protein, 16 aa, Homo sapiens
  CDR3 for alpha chain variable domain of TCR clone 149408 (TRAV12-3, TRAJ50)
CAMRDPMKTSSDKVIF

SEQ ID NO: 298816 - protein, 13 aa, Homo sapiens
  CDR3 for beta chain variable domain of TCR clone 149408 (TRBV4-1, TRBJ2-3)
CASSLDFTDTQYF

SEQ ID NO: 298817 - protein, 14 aa, Homo sapiens
  CDR3 for alpha chain variable domain of TCR clone 149409 (TRAV12-2, TRAJ40)
CAVKIPSGPYKYIF

SEQ ID NO: 298818 - protein, 15 aa, Homo sapiens
  CDR3 for beta chain variable domain of TCR clone 149409 (TRBV2, TRBJ2-3)
CASSDFEKATDTQYF

SEQ ID NO: 298819 - protein, 22 aa, Homo sapiens
  CDR3 for alpha chain variable domain of TCR clone 149410 (TRAV27, TRAJ38)
CAARRNAGNNHIQNPDPAVYQL

SEQ ID NO: 298820 - protein, 16 aa, Homo sapiens
  CDR3 for beta chain variable domain of TCR clone 149410 (TRBV11-2, TRBJ2-7)
CASSPTTGGVSYEQYF

SEQ ID NO: 298821 - protein, 13 aa, Homo sapiens
  CDR3 for alpha chain variable domain of TCR clone 149411 (TRAV13-1, TRAJ48)
CAAASFGNEKLTF

SEQ ID NO: 298822 - protein, 14 aa, Homo sapiens
  CDR3 for beta chain variable domain of TCR clone 149411 (TRBV18, TRBJ2-1)
CASSPGTSETEHFF

SEQ ID NO: 298823 - protein, 12 aa, Homo sapiens
  CDR3 for alpha chain variable domain of TCR clone 149412 (TRAV16, TRAJ10)
CSRTGGGNKLTF

SEQ ID NO: 298824 - protein, 12 aa, Homo sapiens
  CDR3 for beta chain variable domain of TCR clone 149412 (TRBV19, TRBJ1-4)
CASKDWPGGLFF

SEQ ID NO: 298825 - protein, 14 aa, Homo sapiens
  CDR3 for alpha chain variable domain of TCR clone 149413 (TRAV12-3, TRAJ12)
CAMGRMDSRYKLIF

SEQ ID NO: 298826 - protein, 14 aa, Homo sapiens
  CDR3 for beta chain variable domain of TCR clone 149413 (TRBV20-1, TRBJ1-4)
CSARSGQSNEKLFF

SEQ ID NO: 298827 - protein, 16 aa, Homo sapiens
  CDR3 for alpha chain variable domain of TCR clone 149414 (TRAV14/DV4, TRAJ15)
CAMREGPAQAGTALIF

SEQ ID NO: 298828 - protein, 12 aa, Homo sapiens
  CDR3 for beta chain variable domain of TCR clone 149414 (TRBV28, TRBJ2-6)
CPIQAGANVLTF

SEQ ID NO: 298829 - protein, 12 aa, Homo sapiens
  CDR3 for alpha chain variable domain of TCR clone 149415 (TRAV12-1, TRAJ34)
CVVAGATDKLIF

SEQ ID NO: 298830 - protein, 16 aa, Homo sapiens
  CDR3 for beta chain variable domain of TCR clone 149415 (TRBV7-2, TRBJ1-2)
CASSSNHDRRGHGYTF

SEQ ID NO: 298831 - protein, 18 aa, Homo sapiens
  CDR3 for alpha chain variable domain of TCR clone 149416 (TRAV12-3, TRAJ52)
CAMSVGGAGGTSYGKLTF

SEQ ID NO: 298832 - protein, 16 aa, Homo sapiens
  CDR3 for beta chain variable domain of TCR clone 149416 (TRBV4-1, TRBJ2-3)
CASSQSTSGAEDTQYF

SEQ ID NO: 298833 - protein, 17 aa, Homo sapiens
  CDR3 for alpha chain variable domain of TCR clone 149417 (TRAV3, TRAJ28)
CAVREAYSGAGSYQLTF

SEQ ID NO: 298834 - protein, 14 aa, Homo sapiens
  CDR3 for beta chain variable domain of TCR clone 149417 (TRBV7-3, TRBJ1-1)
CASSLKGGNTEAFF

SEQ ID NO: 298835 - protein, 12 aa, Homo sapiens
  CDR3 for alpha chain variable domain of TCR clone 149418 (TRAV17, TRAJ53)
CATEGSNYKLTF

SEQ ID NO: 298836 - protein, 19 aa, Homo sapiens
  CDR3 for beta chain variable domain of TCR clone 149418 (TRBV5-1, TRBJ2-3)
CASSLCTSGGITTPDTQYF

SEQ ID NO: 298837 - protein, 12 aa, Homo sapiens
  CDR3 for alpha chain variable domain of TCR clone 149419 (TRAV21, TRAJ39)
CAADNAGNMLTF

SEQ ID NO: 298838 - protein, 16 aa, Homo sapiens
  CDR3 for beta chain variable domain of TCR clone 149419 (TRBV29-1, TRBJ2-6)
CSVEDITYSGANVLTF

SEQ ID NO: 298839 - protein, 13 aa, Homo sapiens
  CDR3 for alpha chain variable domain of TCR clone 149420 (TRAV2, TRAJ40)
CAVVTSVTYKYIF

SEQ ID NO: 298840 - protein, 16 aa, Homo sapiens
  CDR3 for beta chain variable domain of TCR clone 149420 (TRBV7-9, TRBJ1-3)
CASSLGAGSSGNTIYF

SEQ ID NO: 298841 - protein, 19 aa, Homo sapiens
  CDR3 for alpha chain variable domain of TCR clone 149421 (TRAV2, TRAJ20)
ILQVREAAAAVYRDCKLSF

SEQ ID NO: 298842 - protein, 16 aa, Homo sapiens
  CDR3 for beta chain variable domain of TCR clone 149421 (TRBV20-1, TRBJ1-4)
CSAPGQGLLTNEKLFF

SEQ ID NO: 298843 - protein, 12 aa, Homo sapiens
  CDR3 for alpha chain variable domain of TCR clone 149422 (TRAV21, TRAJ11)
CAATSGYSTLTF

SEQ ID NO: 298844 - protein, 12 aa, Homo sapiens
  CDR3 for beta chain variable domain of TCR clone 149422 (TRBV2, TRBJ2-1)
CAYGPPGNEQFF

SEQ ID NO: 298845 - protein, 11 aa, Homo sapiens
  CDR3 for alpha chain variable domain of TCR clone 149423 (TRAV1-2, TRAJ11)
CAVRGYSTLTF

SEQ ID NO: 298846 - protein, 15 aa, Homo sapiens
  CDR3 for beta chain variable domain of TCR clone 149423 (TRBV20-1, TRBJ2-7)
CSARVPAAYFYEQYF

SEQ ID NO: 298847 - protein, 13 aa, Homo sapiens
  CDR3 for alpha chain variable domain of TCR clone 149424 (TRAV21, TRAJ27)
CAARPGNAGKSPF

SEQ ID NO: 298848 - protein, 15 aa, Homo sapiens
  CDR3 for beta chain variable domain of TCR clone 149424 (TRBV20-1, TRBJ2-7)
CSAGDRVSGMDEQYF

SEQ ID NO: 298849 - protein, 14 aa, Homo sapiens
  CDR3 for alpha chain variable domain of TCR clone 149425 (TRAV16, TRAJ37)
CALDISGNTGKLIF

SEQ ID NO: 298850 - protein, 14 aa, Homo sapiens
  CDR3 for beta chain variable domain of TCR clone 149425 (TRBV19, TRBJ2-1)
CASSPGLAPNEQFF

SEQ ID NO: 298851 - protein, 15 aa, Homo sapiens
  CDR3 for alpha chain variable domain of TCR clone 149426 (TRAV3, TRAJ42)
CAVRGGTGSQGNLIF

SEQ ID NO: 298852 - protein, 15 aa, Homo sapiens
  CDR3 for beta chain variable domain of TCR clone 149426 (TRBV6-1, TRBJ2-1)
CASSELRGQYNEQFF

SEQ ID NO: 298853 - protein, 14 aa, Homo sapiens
  CDR3 for alpha chain variable domain of TCR clone 149427 (TRAV12-2, TRAJ13)
CAVKKTGGYQKVTF

SEQ ID NO: 298854 - protein, 15 aa, Homo sapiens
  CDR3 for beta chain variable domain of TCR clone 149427 (TRBV15, TRBJ2-3)
CATSGAGFGTDTQYF

SEQ ID NO: 298855 - protein, 11 aa, Homo sapiens
  CDR3 for alpha chain variable domain of TCR clone 149428 (TRAV16, TRAJ23)
CALGGGGKLIF

SEQ ID NO: 298856 - protein, 14 aa, Homo sapiens
  CDR3 for beta chain variable domain of TCR clone 149428 (TRBV28, TRBJ2-2)
CASSMQGYTGELFF

SEQ ID NO: 298857 - protein, 13 aa, Homo sapiens
  CDR3 for alpha chain variable domain of TCR clone 149429 (TRAV1-2, TRAJ31)
CAVRGYNNARLMF

SEQ ID NO: 298858 - protein, 20 aa, Homo sapiens
  CDR3 for beta chain variable domain of TCR clone 149429 (TRBV7-8, TRBJ2-2)
CASSHLFPGPTIHITGELFF

SEQ ID NO: 298859 - protein, 14 aa, Homo sapiens
  CDR3 for alpha chain variable domain of TCR clone 149430 (TRAV23/DV6, TRAJ36)
CAASRRTGANNRSF

SEQ ID NO: 298860 - protein, 14 aa, Homo sapiens
  CDR3 for beta chain variable domain of TCR clone 149430 (TRBV6-1, TRBJ1-2)
CASSDTGASYGYTF

SEQ ID NO: 298861 - protein, 13 aa, Homo sapiens
  CDR3 for alpha chain variable domain of TCR clone 149431 (TRAV13-1, TRAJ6)
CAASKGGSYIPTF

SEQ ID NO: 298862 - protein, 18 aa, Homo sapiens
  CDR3 for beta chain variable domain of TCR clone 149431 (TRBV5-5, TRBJ1-5)
CASSLRQVKGSSNQPQHF

SEQ ID NO: 298863 - protein, 17 aa, Homo sapiens
  CDR3 for alpha chain variable domain of TCR clone 149432 (TRAV26-1, TRAJ46)
IASSESEKKSSGDKLTF

SEQ ID NO: 298864 - protein, 14 aa, Homo sapiens
  CDR3 for beta chain variable domain of TCR clone 149432 (TRBV25-1, TRBJ1-1)
CASTHLGGNTEAFF

SEQ ID NO: 298865 - protein, 14 aa, Homo sapiens
  CDR3 for alpha chain variable domain of TCR clone 149433 (TRAV12-2, TRAJ17)
CAVLFKAAGNKLTF

SEQ ID NO: 298866 - protein, 15 aa, Homo sapiens
  CDR3 for beta chain variable domain of TCR clone 149433 (TRBV2, TRBJ2-1)
CASSELAGSYNEQFF

SEQ ID NO: 298867 - protein, 16 aa, Homo sapiens
  CDR3 for alpha chain variable domain of TCR clone 149434 (TRAV26-1, TRAJ37)
CTYARHGSSNTGKLIF

SEQ ID NO: 298868 - protein, 16 aa, Homo sapiens
  CDR3 for beta chain variable domain of TCR clone 149434 (TRBV19, TRBJ2-4)
CATGGLAGGTKNIQYF

SEQ ID NO: 298869 - protein, 14 aa, Homo sapiens
  CDR3 for alpha chain variable domain of TCR clone 149435 (TRAV23/DV6, TRAJ37)
CAASTTGNTGKLTF

SEQ ID NO: 298870 - protein, 16 aa, Homo sapiens
  CDR3 for beta chain variable domain of TCR clone 149435 (TRBV24-1, TRBJ2-1)
CATSDLAGPTNNEQFF

SEQ ID NO: 298871 - protein, 15 aa, Homo sapiens
  CDR3 for alpha chain variable domain of TCR clone 149436 (TRAV23/DV6, TRAJ16)
CAASPWFSDGQKLLF

SEQ ID NO: 298872 - protein, 11 aa, Homo sapiens
  CDR3 for beta chain variable domain of TCR clone 149436 (TRBV19, TRBJ2-5)
CARSIKETQYF

SEQ ID NO: 298873 - protein, 12 aa, Homo sapiens
  CDR3 for alpha chain variable domain of TCR clone 149437 (TRAV2, TRAJ26)
CAGSPGRLWSAF

SEQ ID NO: 298874 - protein, 13 aa, Homo sapiens
  CDR3 for beta chain variable domain of TCR clone 149437 (TRBV7-9, TRBJ1-2)
CASSLKQNYGYTF

SEQ ID NO: 298875 - protein, 15 aa, Homo sapiens
  CDR3 for alpha chain variable domain of TCR clone 149438 (TRAV26-1, TRAJ29)
CIVRVEGSGNTPLVF

SEQ ID NO: 298876 - protein, 15 aa, Homo sapiens
  CDR3 for beta chain variable domain of TCR clone 149438 (TRBV7-6, TRBJ1-2)
CASSSGGRGGYGYTF

SEQ ID NO: 298877 - protein, 17 aa, Homo sapiens
  CDR3 for alpha chain variable domain of TCR clone 149439 (TRAV12-2, TRAJ52)
CAVNPYAGGTSYGKLTF

SEQ ID NO: 298878 - protein, 13 aa, Homo sapiens
  CDR3 for beta chain variable domain of TCR clone 149439 (TRBV6-5, TRBJ2-1)
CASRGRVGNEQFF

SEQ ID NO: 298879 - protein, 12 aa, Homo sapiens
  CDR3 for alpha chain variable domain of TCR clone 149440 (TRAV36/DV7, TRAJ54)
CAVDRGAQKLVC

SEQ ID NO: 298880 - protein, 14 aa, Homo sapiens
  CDR3 for beta chain variable domain of TCR clone 149440 (TRBV7-3, TRBJ1-1)
CASSLKGGNTEAFF

SEQ ID NO: 298881 - protein, 14 aa, Homo sapiens
  CDR3 for alpha chain variable domain of TCR clone 149441 (TRAV1-2, TRAJ16)
CAVNRFSDCQKLLF

SEQ ID NO: 298882 - protein, 13 aa, Homo sapiens
  CDR3 for beta chain variable domain of TCR clone 149441 (TRBV24-1, TRBJ2-2)
CATSDWSTGELFF

SEQ ID NO: 298883 - protein, 15 aa, Homo sapiens
  CDR3 for alpha chain variable domain of TCR clone 149442 (TRAV12-1, TRAJ45)
CVVLSGGGGADGLTF

SEQ ID NO: 298884 - protein, 14 aa, Homo sapiens
  CDR3 for beta chain variable domain of TCR clone 149442 (TRBV11-2, TRBJ2-5)
CASSRTGGSETQYF

SEQ ID NO: 298885 - protein, 15 aa, Homo sapiens
  CDR3 for alpha chain variable domain of TCR clone 149443 (TRAV8-3, TRAJ45)
CASSHSGGGADGLTF

SEQ ID NO: 298886 - protein, 12 aa, Homo sapiens
  CDR3 for beta chain variable domain of TCR clone 149443 (TRBV12-4, TRBJ2-7)
CASSLGGYEQYF

SEQ ID NO: 298887 - protein, 16 aa, Homo sapiens
  CDR3 for alpha chain variable domain of TCR clone 149444 (TRAV3, TRAJ37)
CAVRGKGSGNTGKLIF

SEQ ID NO: 298888 - protein, 15 aa, Homo sapiens
  CDR3 for beta chain variable domain of TCR clone 149444 (TRBV20-1, TRBJ2-2)
CSAIPGHSNTGELFF

SEQ ID NO: 298889 - protein, 13 aa, Homo sapiens
  CDR3 for alpha chain variable domain of TCR clone 149445 (TRAV8-3, TRAJ43)
CAVVPYNNNDMRF

SEQ ID NO: 298890 - protein, 11 aa, Homo sapiens
  CDR3 for beta chain variable domain of TCR clone 149445 (TRBV11-2, TRBJ2-2)
CASSLPGELFF

SEQ ID NO: 298891 - protein, 15 aa, Homo sapiens
  CDR3 for alpha chain variable domain of TCR clone 149446 (TRAV27, TRAJ38)
CAARRNAGNNRKLIW

SEQ ID NO: 298892 - protein, 15 aa, Homo sapiens
  CDR3 for beta chain variable domain of TCR clone 149446 (TRBV20-1, TRBJ2-2)
CSARGGQGNTGELFF

SEQ ID NO: 298893 - protein, 11 aa, Homo sapiens
  CDR3 for alpha chain variable domain of TCR clone 149447 (TRAV2, TRAJ13)
CASWGYQKVTF

SEQ ID NO: 298894 - protein, 13 aa, Homo sapiens
  CDR3 for beta chain variable domain of TCR clone 149447 (TRBV20-1, TRBJ1-1)
CSARVGGNTEAFF

SEQ ID NO: 298895 - protein, 14 aa, Homo sapiens
  CDR3 for alpha chain variable domain of TCR clone 149448 (TRAV12-2, TRAJ13)
CAVKKTGGYQKVTF

SEQ ID NO: 298896 - protein, 16 aa, Homo sapiens
  CDR3 for beta chain variable domain of TCR clone 149448 (TRBV20-1, TRBJ1-4)
CSAPGQGVLTNEKLFF

SEQ ID NO: 298897 - protein, 17 aa, Homo sapiens
  CDR3 for alpha chain variable domain of TCR clone 149449 (TRAV4, TRAJ18)
CLVGERSVGSTLGRLYF

SEQ ID NO: 298898 - protein, 11 aa, Homo sapiens
  CDR3 for beta chain variable domain of TCR clone 149449 (TRBV6-5, TRBJ1-2)
CASSTTVLEVA

SEQ ID NO: 298899 - protein, 14 aa, Homo sapiens
  CDR3 for alpha chain variable domain of TCR clone 149450 (TRAV2, TRAJ37)
CAVDFTSSTGKLIF

SEQ ID NO: 298900 - protein, 12 aa, Homo sapiens
  CDR3 for beta chain variable domain of TCR clone 149450 (TRBV14, TRBJ2-4)
CASSNLKSIQYF

SEQ ID NO: 298901 - protein, 11 aa, Homo sapiens
  CDR3 for alpha chain variable domain of TCR clone 149451 (TRAV35, TRAJ49)
CAGLFGNQFYF

SEQ ID NO: 298902 - protein, 18 aa, Homo sapiens
  CDR3 for beta chain variable domain of TCR clone 149451 (TRBV4-2, TRBJ2-7)
CASSPGLAGRSLPYEQYF

SEQ ID NO: 298903 - protein, 16 aa, Homo sapiens
  CDR3 for alpha chain variable domain of TCR clone 149452 (TRAV12-3, TRAJ53)
CAMSPGSGGSNYKLTF

SEQ ID NO: 298904 - protein, 16 aa, Homo sapiens
  CDR3 for beta chain variable domain of TCR clone 149452 (TRBV19, TRBJ2-1)
CASSKAGPSAYNEQFF

SEQ ID NO: 298905 - protein, 11 aa, Homo sapiens
  CDR3 for alpha chain variable domain of TCR clone 149453 (TRAV2, TRAJ13)
CASGGYQKVTF

SEQ ID NO: 298906 - protein, 16 aa, Homo sapiens
  CDR3 for beta chain variable domain of TCR clone 149453 (TRBV6-1, TRBJ2-5)
CARSETLDRGAENQYF

SEQ ID NO: 298907 - protein, 13 aa, Homo sapiens
  CDR3 for alpha chain variable domain of TCR clone 149454 (TRAV26-1, TRAJ36)
CIAVRRGANNRFF

SEQ ID NO: 298908 - protein, 19 aa, Homo sapiens
  CDR3 for beta chain variable domain of TCR clone 149454 (TRBV27, TRBJ2-1)
CASSLEILSPGAAGNEQFF

SEQ ID NO: 298909 - protein, 17 aa, Homo sapiens
  CDR3 for alpha chain variable domain of TCR clone 149455 (TRAV3, TRAJ12)
CAVRDGWRMDSSYKLIF

SEQ ID NO: 298910 - protein, 13 aa, Homo sapiens
  CDR3 for beta chain variable domain of TCR clone 149455 (TRBV7-2, TRBJ1-1)
CASNLKGAKVAFF

SEQ ID NO: 298911 - protein, 14 aa, Homo sapiens
  CDR3 for alpha chain variable domain of TCR clone 149456 (TRAV12-1, TRAJ43)
CVVNGRSNNNDMRF

SEQ ID NO: 298912 - protein, 13 aa, Homo sapiens
  CDR3 for beta chain variable domain of TCR clone 149456 (TRBV28, TRBJ1-2)
CASSRGQVYGYTF

SEQ ID NO: 298913 - protein, 14 aa, Homo sapiens
  CDR3 for alpha chain variable domain of TCR clone 149457 (TRAV16, TRAJ57)
CALPTQGGSEKLVF

SEQ ID NO: 298914 - protein, 15 aa, Homo sapiens
  CDR3 for beta chain variable domain of TCR clone 149457 (TRBV28, TRBJ1-3)
CASWGGHLYGNTIYF

SEQ ID NO: 298915 - protein, 14 aa, Homo sapiens
  CDR3 for alpha chain variable domain of TCR clone 149458 (TRAV21, TRAJ21)
CAVKGFGNFNKLYF

SEQ ID NO: 298916 - protein, 13 aa, Homo sapiens
  CDR3 for beta chain variable domain of TCR clone 149458 (TRBV18, TRBJ1-1)
CASSPETKPEAFF

SEQ ID NO: 298917 - protein, 14 aa, Homo sapiens
  CDR3 for alpha chain variable domain of TCR clone 149459 (TRAV13-1, TRAJ35)
CAASKGGFGNVRHW

SEQ ID NO: 298918 - protein, 13 aa, Homo sapiens
  CDR3 for beta chain variable domain of TCR clone 149459 (TRBV7-3, TRBJ1-1)
CASSQDWGAEAFF

SEQ ID NO: 298919 - protein, 12 aa, Homo sapiens
  CDR3 for alpha chain variable domain of TCR clone 149460 (TRAV38-2/DV8, TRAJ43)
CAPTPGGNDMRF

SEQ ID NO: 298920 - protein, 16 aa, Homo sapiens
  CDR3 for beta chain variable domain of TCR clone 149460 (TRBV3-1, TRBJ2-7)
CASSQGATGVAYEQYF

SEQ ID NO: 298921 - protein, 14 aa, Homo sapiens
  CDR3 for alpha chain variable domain of TCR clone 149461 (TRAV9-2, TRAJ9)
CALRDPTGGFKTIF

SEQ ID NO: 298922 - protein, 14 aa, Homo sapiens
  CDR3 for beta chain variable domain of TCR clone 149461 (TRBV20-1, TRBJ2-4)
CSARDRGQGGIQYF

SEQ ID NO: 298923 - protein, 18 aa, Homo sapiens
  CDR3 for alpha chain variable domain of TCR clone 149462 (TRAV21, TRAJ52)
CAVRPSPTGGTSYGKMTF

SEQ ID NO: 298924 - protein, 13 aa, Homo sapiens
  CDR3 for beta chain variable domain of TCR clone 149462 (TRBV7-3, TRBJ1-1)
CASSQEWGAEAFF

SEQ ID NO: 298925 - protein, 14 aa, Homo sapiens
  CDR3 for alpha chain variable domain of TCR clone 149463 (TRAV1-2, TRAJ16)
CAVNRFSDGQKLLF

SEQ ID NO: 298926 - protein, 15 aa, Homo sapiens
  CDR3 for beta chain variable domain of TCR clone 149463 (TRBV7-9, TRBJ1-6)
CAISSPGSGNSPLHF

SEQ ID NO: 298927 - protein, 13 aa, Homo sapiens
  CDR3 for alpha chain variable domain of TCR clone 149464 (TRAV8-3, TRAJ43)
CAVGPDHNNDMRF

SEQ ID NO: 298928 - protein, 14 aa, Homo sapiens
  CDR3 for beta chain variable domain of TCR clone 149464 (TRBV19, TRBJ2-1)
CASPTFVLSGEQSF

SEQ ID NO: 298929 - protein, 14 aa, Homo sapiens
  CDR3 for alpha chain variable domain of TCR clone 149465 (TRAV8-1, TRAJ5)
CAVRTDTGRRALSF

SEQ ID NO: 298930 - protein, 15 aa, Homo sapiens
  CDR3 for beta chain variable domain of TCR clone 149465 (TRBV7-3, TRBJ2-1)
CASSPTGGGEVEQFF

SEQ ID NO: 298931 - protein, 12 aa, Homo sapiens
  CDR3 for alpha chain variable domain of TCR clone 149466 (TRAV8-6, TRAJ4)
CAVSDHPNKMIF

SEQ ID NO: 298932 - protein, 14 aa, Homo sapiens
  CDR3 for beta chain variable domain of TCR clone 149466 (TRBV6-6, TRBJ1-5)
CASVDSGFNQPQHF

SEQ ID NO: 298933 - protein, 16 aa, Homo sapiens
  CDR3 for alpha chain variable domain of TCR clone 149467 (TRAV12-2, TRAJ32)
CAVNLGHGGAINKLIF

SEQ ID NO: 298934 - protein, 15 aa, Homo sapiens
  CDR3 for beta chain variable domain of TCR clone 149467 (TRBV20-1, TRBJ2-7)
CSARGPLAGGREQYF

SEQ ID NO: 298935 - protein, 11 aa, Homo sapiens
  CDR3 for alpha chain variable domain of TCR clone 149468 (TRAV35, TRAJ30)
YAGERDDKIIF

SEQ ID NO: 298936 - protein, 14 aa, Homo sapiens
  CDR3 for beta chain variable domain of TCR clone 149468 (TRBV15, TRBJ2-5)
CATSGDRGQETQYF

SEQ ID NO: 298937 - protein, 15 aa, Homo sapiens
  CDR3 for alpha chain variable domain of TCR clone 149469 (TRAV8-3, TRAJ27)
CAVGPSKTNAGKSPF

SEQ ID NO: 298938 - protein, 15 aa, Homo sapiens
  CDR3 for beta chain variable domain of TCR clone 149469 (TRBV7-2, TRBJ2-1)
CASSSGLAGGNEQFF

SEQ ID NO: 298939 - protein, 14 aa, Homo sapiens
  CDR3 for alpha chain variable domain of TCR clone 149470 (TRAV14/DV4, TRAJ47)
CAMGEGRGGNKLVF

SEQ ID NO: 298940 - protein, 11 aa, Homo sapiens
  CDR3 for beta chain variable domain of TCR clone 149470 (TRBV6-3, TRBJ2-3)
CATGQADTQYF

SEQ ID NO: 298941 - protein, 14 aa, Homo sapiens
  CDR3 for alpha chain variable domain of TCR clone 149471 (TRAV12-3, TRAJ10)
SHLPLTGGGNKLTF

SEQ ID NO: 298942 - protein, 14 aa, Homo sapiens
  CDR3 for beta chain variable domain of TCR clone 149471 (TRBV19, TRBJ2-1)
CASSPGLAPNEQSF

SEQ ID NO: 298943 - protein, 15 aa, Homo sapiens
  CDR3 for alpha chain variable domain of TCR clone 149472 (TRAV2, TRAJ24)
CAVVRLKNSWGKLQF

SEQ ID NO: 298944 - protein, 14 aa, Homo sapiens
  CDR3 for beta chain variable domain of TCR clone 149472 (TRBV7-9, TRBJ2-1)
CASSPRDSLYEQFF

SEQ ID NO: 298945 - protein, 12 aa, Homo sapiens
  CDR3 for alpha chain variable domain of TCR clone 149473 (TRAV13-1, TRAJ5)
CAVDTVRRALTF

SEQ ID NO: 298946 - protein, 12 aa, Homo sapiens
  CDR3 for beta chain variable domain of TCR clone 149473 (TRBV28, TRBJ2-1)
CASSFYRHEQFF

SEQ ID NO: 298947 - protein, 14 aa, Homo sapiens
  CDR3 for alpha chain variable domain of TCR clone 149474 (TRAV13-1, TRAJ48)
CAASRSFGNEKLTF

SEQ ID NO: 298948 - protein, 15 aa, Homo sapiens
  CDR3 for beta chain variable domain of TCR clone 149474 (TRBV28, TRBJ2-1)
CASSIIAGGRSEQFF

SEQ ID NO: 298949 - protein, 12 aa, Homo sapiens
  CDR3 for alpha chain variable domain of TCR clone 149475 (TRAV13-1, TRAJ21)
CAAKEGFNKFYF

SEQ ID NO: 298950 - protein, 13 aa, Homo sapiens
  CDR3 for beta chain variable domain of TCR clone 149475 (TRBV7-2, TRBJ2-2)
CASSLAVTGGLFF

SEQ ID NO: 298951 - protein, 14 aa, Homo sapiens
  CDR3 for alpha chain variable domain of TCR clone 149476 (TRAV12-2, TRAJ17)
CAVLFKAAGNKLTF

SEQ ID NO: 298952 - protein, 14 aa, Homo sapiens
  CDR3 for beta chain variable domain of TCR clone 149476 (TRBV11-2, TRBJ2-3)
CASSRLARTDTQYF

SEQ ID NO: 298953 - protein, 12 aa, Homo sapiens
  CDR3 for alpha chain variable domain of TCR clone 149477 (TRAV12-1, TRAJ23)
CVVNNQGGKIIF

SEQ ID NO: 298954 - protein, 16 aa, Homo sapiens
  CDR3 for beta chain variable domain of TCR clone 149477 (TRBV11-1, TRBJ2-7)
CASSAQTGTLSYEQYF

SEQ ID NO: 298955 - protein, 15 aa, Homo sapiens
  CDR3 for alpha chain variable domain of TCR clone 149478 (TRAV26-1, TRAJ44)
CIVRANTGTASKLTF

SEQ ID NO: 298956 - protein, 18 aa, Homo sapiens
  CDR3 for beta chain variable domain of TCR clone 149478 (TRBV11-2, TRBJ2-3)
CASSLGGASRGAPNTQYF

SEQ ID NO: 298957 - protein, 14 aa, Homo sapiens
  CDR3 for alpha chain variable domain of TCR clone 149479 (TRAV2, TRAJ37)
CAVDFTSNTGKLIF

SEQ ID NO: 298958 - protein, 14 aa, Homo sapiens
  CDR3 for beta chain variable domain of TCR clone 149479 (TRBV20-1, TRBJ1-1)
SAELHLGGGTEAFF

SEQ ID NO: 298959 - protein, 15 aa, Homo sapiens
  CDR3 for alpha chain variable domain of TCR clone 149480 (TRAV12-2, TRAJ53)
CAVNGGGGSNYKLTF

SEQ ID NO: 298960 - protein, 13 aa, Homo sapiens
  CDR3 for beta chain variable domain of TCR clone 149480 (TRBV7-9, TRBJ1-4)
CATQIGPNEKLFF

SEQ ID NO: 298961 - protein, 12 aa, Homo sapiens
  CDR3 for alpha chain variable domain of TCR clone 149481 (TRAV12-1, TRAJ40)
CVFYSGTYKYIF

SEQ ID NO: 298962 - protein, 18 aa, Homo sapiens
  CDR3 for beta chain variable domain of TCR clone 149481 (TRBV12-4, TRBJ2-2)
CASSLVAGSRGRAGELFF

SEQ ID NO: 298963 - protein, 12 aa, Homo sapiens
  CDR3 for alpha chain variable domain of TCR clone 149482 (TRAV12-2, TRAJ47)
CAVAEYGSKLVF

SEQ ID NO: 298964 - protein, 14 aa, Homo sapiens
  CDR3 for beta chain variable domain of TCR clone 149482 (TRBV20-1, TRBJ1-1)
CSAMGGTANTEAFF

SEQ ID NO: 298965 - protein, 14 aa, Homo sapiens
  CDR3 for alpha chain variable domain of TCR clone 149483 (TRAV1-1, TRAJ27)
CAVIYNTNAGKSTF

SEQ ID NO: 298966 - protein, 14 aa, Homo sapiens
  CDR3 for beta chain variable domain of TCR clone 149483 (TRBV6-5, TRBJ1-2)
CASSYDGTEGGYTF

SEQ ID NO: 298967 - protein, 17 aa, Homo sapiens
  CDR3 for alpha chain variable domain of TCR clone 149484 (TRAV1-2, TRAJ8)
CAVRDPDENTGFQKHVF

SEQ ID NO: 298968 - protein, 12 aa, Homo sapiens
  CDR3 for beta chain variable domain of TCR clone 149484 (TRBV7-9, TRBJ2-7)
CASSIKREEQYF

SEQ ID NO: 298969 - protein, 13 aa, Homo sapiens
  CDR3 for alpha chain variable domain of TCR clone 149485 (TRAV12-1, TRAJ39)
CVVNYNARNMLTF

SEQ ID NO: 298970 - protein, 12 aa, Homo sapiens
  CDR3 for beta chain variable domain of TCR clone 149485 (TRBV5-7, TRBJ1-1)
CASSLGRGKAFF

SEQ ID NO: 298971 - protein, 13 aa, Homo sapiens
  CDR3 for alpha chain variable domain of TCR clone 149486 (TRAV12-1, TRAJ20)
CVGQRFNDYKLSF

SEQ ID NO: 298972 - protein, 14 aa, Homo sapiens
  CDR3 for beta chain variable domain of TCR clone 149486 (TRBV12-5, TRBJ2-5)
CASGSRTHQETQYF

SEQ ID NO: 298973 - protein, 11 aa, Homo sapiens
  CDR3 for alpha chain variable domain of TCR clone 149487 (TRAV8-6, TRAJ42)
WGGGSQGNLIF

SEQ ID NO: 298974 - protein, 13 aa, Homo sapiens
  CDR3 for beta chain variable domain of TCR clone 149487 (TRBV12-4, TRBJ2-2)
CASSITGSGELFF

SEQ ID NO: 298975 - protein, 12 aa, Homo sapiens
  CDR3 for alpha chain variable domain of TCR clone 149488 (TRAV2, TRAJ33)
CAVPDSNYQLIW

SEQ ID NO: 298976 - protein, 16 aa, Homo sapiens
  CDR3 for beta chain variable domain of TCR clone 149488 (TRBV11-2, TRBJ2-1)
CASSLLLLSSYNEQFF

SEQ ID NO: 298977 - protein, 15 aa, Homo sapiens
  CDR3 for alpha chain variable domain of TCR clone 149489 (TRAV27, TRAJ13)
ASTSVQERGVTKVTF

SEQ ID NO: 298978 - protein, 15 aa, Homo sapiens
  CDR3 for beta chain variable domain of TCR clone 149489 (TRBV20-1, TRBJ2-6)
CSARDRGPGANVLTF

SEQ ID NO: 298979 - protein, 16 aa, Homo sapiens
  CDR3 for alpha chain variable domain of TCR clone 149490 (TRAV21, TRAJ52)
CAVSDAGGTSFGKLTF

SEQ ID NO: 298980 - protein, 13 aa, Homo sapiens
  CDR3 for beta chain variable domain of TCR clone 149490 (TRBV7-3, TRBJ2-5)
CASSFRGSQTQYF

SEQ ID NO: 298981 - protein, 14 aa, Homo sapiens
  CDR3 for alpha chain variable domain of TCR clone 149491 (TRAV17, TRAJ57)
CATDPRGGSEKLVF

SEQ ID NO: 298982 - protein, 18 aa, Homo sapiens
  CDR3 for beta chain variable domain of TCR clone 149491 (TRBV25-1, TRBJ2-1)
CASSESRAGGPGYNEQFF

SEQ ID NO: 298983 - protein, 15 aa, Homo sapiens
  CDR3 for alpha chain variable domain of TCR clone 149492 (TRAV3, TRAJ22)
CAVRGRGGSARQLTF

SEQ ID NO: 298984 - protein, 13 aa, Homo sapiens
  CDR3 for beta chain variable domain of TCR clone 149492 (TRBV20-1, TRBJ1-1)
CSARVGGNTEAFF

SEQ ID NO: 298985 - protein, 13 aa, Homo sapiens
  CDR3 for alpha chain variable domain of TCR clone 149493 (TRAV3, TRAJ20)
CAVRPLDDYKLSF

SEQ ID NO: 298986 - protein, 12 aa, Homo sapiens
  CDR3 for beta chain variable domain of TCR clone 149493 (TRBV6-1, TRBJ2-1)
CATYGLNNEQFF

SEQ ID NO: 298987 - protein, 15 aa, Homo sapiens
  CDR3 for alpha chain variable domain of TCR clone 149494 (TRAV17, TRAJ57)
CATGPSQGGSEKLVF

SEQ ID NO: 298988 - protein, 15 aa, Homo sapiens
  CDR3 for beta chain variable domain of TCR clone 149494 (TRBV7-3, TRBJ2-1)
CASSPTGGWEVEQFF

SEQ ID NO: 298989 - protein, 12 aa, Homo sapiens
  CDR3 for alpha chain variable domain of TCR clone 149495 (TRAV13-2, TRAJ23)
CAERHRGGKLIS

SEQ ID NO: 298990 - protein, 13 aa, Homo sapiens
  CDR3 for beta chain variable domain of TCR clone 149495 (TRBV20-1, TRBJ2-2)
CSALSGGAGELFF

SEQ ID NO: 298991 - protein, 18 aa, Homo sapiens
  CDR3 for alpha chain variable domain of TCR clone 149496 (TRAV21, TRAJ52)
CAVRPSPAGGTSYGKLTF

SEQ ID NO: 298992 - protein, 13 aa, Homo sapiens
  CDR3 for beta chain variable domain of TCR clone 149496 (TRBV7-2, TRBJ2-5)
CASSYWTGETQYF

SEQ ID NO: 298993 - protein, 14 aa, Homo sapiens
  CDR3 for alpha chain variable domain of TCR clone 149497 (TRAV3, TRAJ9)
CAVRLNTGGFKTIF

SEQ ID NO: 298994 - protein, 17 aa, Homo sapiens
  CDR3 for beta chain variable domain of TCR clone 149497 (TRBV20-1, TRBJ2-4)
CSARDWASGGRENIQYF

SEQ ID NO: 298995 - protein, 14 aa, Homo sapiens
  CDR3 for alpha chain variable domain of TCR clone 149498 (TRAV8-1, TRAJ5)
CAVRTDTGRRALTF

SEQ ID NO: 298996 - protein, 15 aa, Homo sapiens
  CDR3 for beta chain variable domain of TCR clone 149498 (TRBV7-9, TRBJ1-6)
CASSLVQGGNSPLHF

SEQ ID NO: 298997 - protein, 13 aa, Homo sapiens
  CDR3 for alpha chain variable domain of TCR clone 149499 (TRAV13-2, TRAJ48)
CAEMNFGDEKLTF

SEQ ID NO: 298998 - protein, 15 aa, Homo sapiens
  CDR3 for beta chain variable domain of TCR clone 149499 (TRBV7-9, TRBJ1-6)
CASSSPGRGNSPLHF

SEQ ID NO: 298999 - protein, 14 aa, Homo sapiens
  CDR3 for alpha chain variable domain of TCR clone 149500 (TRAV38-1, TRAJ29)
CAFITPSGNTPLVF

SEQ ID NO: 299000 - protein, 13 aa, Homo sapiens
  CDR3 for beta chain variable domain of TCR clone 149500 (TRBV5-5, TRBJ1-2)
CASSFWRGEDYTF

SEQ ID NO: 299001 - protein, 14 aa, Homo sapiens
  CDR3 for alpha chain variable domain of TCR clone 149501 (TRAV12-2, TRAJ24)
CAVTPADSWGKLQF

SEQ ID NO: 299002 - protein, 14 aa, Homo sapiens
  CDR3 for beta chain variable domain of TCR clone 149501 (TRBV7-3, TRBJ1-1)
CASSLKGGNTEAFF

SEQ ID NO: 299003 - protein, 14 aa, Homo sapiens
  CDR3 for alpha chain variable domain of TCR clone 149502 (TRAV29/DV5, TRAJ36)
CAARRKTGANYLFF

SEQ ID NO: 299004 - protein, 15 aa, Homo sapiens
  CDR3 for beta chain variable domain of TCR clone 149502 (TRBV10-2, TRBJ1-4)
CASTPIDRGNEKLFF

SEQ ID NO: 299005 - protein, 14 aa, Homo sapiens
  CDR3 for alpha chain variable domain of TCR clone 149503 (TRAV23/DV6, TRAJ58)
CAARYGTSGSRLTF

SEQ ID NO: 299006 - protein, 12 aa, Homo sapiens
  CDR3 for beta chain variable domain of TCR clone 149503 (TRBV11-2, TRBJ2-2)
CASSLGGGELFF

SEQ ID NO: 299007 - protein, 16 aa, Homo sapiens
  CDR3 for alpha chain variable domain of TCR clone 149504 (TRAV12-3, TRAJ53)
CAMSPGSGGRNYKLTF

SEQ ID NO: 299008 - protein, 15 aa, Homo sapiens
  CDR3 for beta chain variable domain of TCR clone 149504 (TRBV4-3, TRBJ2-7)
CASSQGGRGIYEQYF

SEQ ID NO: 299009 - protein, 17 aa, Homo sapiens
  CDR3 for alpha chain variable domain of TCR clone 149505 (TRAV3, TRAJ42)
CAVRDRDYGGSQGNLIF

SEQ ID NO: 299010 - protein, 16 aa, Homo sapiens
  CDR3 for beta chain variable domain of TCR clone 149505 (TRBV9, TRBJ2-5)
CASSPRTGYDEETQYF

SEQ ID NO: 299011 - protein, 14 aa, Homo sapiens
  CDR3 for alpha chain variable domain of TCR clone 149506 (TRAV13-1, TRAJ6)
CAASGPGGSYIPTF

SEQ ID NO: 299012 - protein, 16 aa, Homo sapiens
  CDR3 for beta chain variable domain of TCR clone 149506 (TRBV19, TRBJ1-1)
CASRFGGPVTGTEAFF

SEQ ID NO: 299013 - protein, 14 aa, Homo sapiens
  CDR3 for alpha chain variable domain of TCR clone 149507 (TRAV38-1, TRAJ40)
CALRPTPGTYKYIF

SEQ ID NO: 299014 - protein, 13 aa, Homo sapiens
  CDR3 for beta chain variable domain of TCR clone 149507 (TRBV25-1, TRBJ1-1)
CQHPPGGNTEAFF

SEQ ID NO: 299015 - protein, 13 aa, Homo sapiens
  CDR3 for alpha chain variable domain of TCR clone 149508 (TRAV36/DV7, TRAJ54)
CAVDIQGAQKLGF

SEQ ID NO: 299016 - protein, 15 aa, Homo sapiens
  CDR3 for beta chain variable domain of TCR clone 149508 (TRBV7-9, TRBJ1-4)
CASSATGGNNEKLFF

SEQ ID NO: 299017 - protein, 16 aa, Homo sapiens
  CDR3 for alpha chain variable domain of TCR clone 149509 (TRAV26-1, TRAJ56)
CIVRARERGANRKLTF

SEQ ID NO: 299018 - protein, 13 aa, Homo sapiens
  CDR3 for beta chain variable domain of TCR clone 149509 (TRBV7-2, TRBJ1-1)
CASSLRANTEAFF

SEQ ID NO: 299019 - protein, 18 aa, Homo sapiens
  CDR3 for alpha chain variable domain of TCR clone 149510 (TRAV21, TRAJ53)
CAVKGGENSGGSNYKLIF

SEQ ID NO: 299020 - protein, 13 aa, Homo sapiens
  CDR3 for beta chain variable domain of TCR clone 149510 (TRBV9, TRBJ2-1)
CASSPSGGSEQFF

SEQ ID NO: 299021 - protein, 15 aa, Homo sapiens
  CDR3 for alpha chain variable domain of TCR clone 149511 (TRAV21, TRAJ53)
CATLNSGGSNYKLTF

SEQ ID NO: 299022 - protein, 13 aa, Homo sapiens
  CDR3 for beta chain variable domain of TCR clone 149511 (TRBV12-4, TRBJ2-7)
CASSFVSTAEQYF

SEQ ID NO: 299023 - protein, 12 aa, Homo sapiens
  CDR3 for alpha chain variable domain of TCR clone 149512 (TRAV21, TRAJ13)
PGPSGGYQKVTF

SEQ ID NO: 299024 - protein, 15 aa, Homo sapiens
  CDR3 for beta chain variable domain of TCR clone 149512 (TRBV7-9, TRBJ1-6)
CASSSPGRGNSPLYF

SEQ ID NO: 299025 - protein, 19 aa, Homo sapiens
  CDR3 for alpha chain variable domain of TCR clone 149513 (TRAV26-1, TRAJ52)
CIVRAHSNAGGTSFGKLTF

SEQ ID NO: 299026 - protein, 15 aa, Homo sapiens
  CDR3 for beta chain variable domain of TCR clone 149513 (TRBV12-4, TRBJ2-5)
CASSPPTGLQETQSF

SEQ ID NO: 299027 - protein, 15 aa, Homo sapiens
  CDR3 for alpha chain variable domain of TCR clone 149514 (TRAV13-1, TRAJ17)
CAASIERAAGNKLTV

SEQ ID NO: 299028 - protein, 12 aa, Homo sapiens
  CDR3 for beta chain variable domain of TCR clone 149514 (TRBV5-7, TRBJ1-1)
CASSLGRGKAFF

SEQ ID NO: 299029 - protein, 13 aa, Homo sapiens
  CDR3 for alpha chain variable domain of TCR clone 149515 (TRAV8-1, TRAJ30)
CAVIMNRDDKIIF

SEQ ID NO: 299030 - protein, 14 aa, Homo sapiens
  CDR3 for beta chain variable domain of TCR clone 149515 (TRBV7-2, TRBJ1-6)
CASSLQGANSPLDF

SEQ ID NO: 299031 - protein, 12 aa, Homo sapiens
  CDR3 for alpha chain variable domain of TCR clone 149516 (TRAV1-1, TRAJ43)
CAPRVSSNDMRF

SEQ ID NO: 299032 - protein, 12 aa, Homo sapiens
  CDR3 for beta chain variable domain of TCR clone 149516 (TRBV7-2, TRBJ1-2)
CASSLDRGGYTF

SEQ ID NO: 299033 - protein, 14 aa, Homo sapiens
  CDR3 for alpha chain variable domain of TCR clone 149517 (TRAV12-2, TRAJ15)
CAPHTGQAGTALIF

SEQ ID NO: 299034 - protein, 17 aa, Homo sapiens
  CDR3 for beta chain variable domain of TCR clone 149517 (TRBV5-5, TRBJ1-2)
CASSLGSLDGQREGYTF

SEQ ID NO: 299035 - protein, 15 aa, Homo sapiens
  CDR3 for alpha chain variable domain of TCR clone 149518 (TRAV2, TRAJ9)
CAVAALNTGGFKTIF

SEQ ID NO: 299036 - protein, 16 aa, Homo sapiens
  CDR3 for beta chain variable domain of TCR clone 149518 (TRBV7-8, TRBJ2-2)
CASSLKRGTLSGELFF

SEQ ID NO: 299037 - protein, 13 aa, Homo sapiens
  CDR3 for alpha chain variable domain of TCR clone 149519 (TRAV1-2, TRAJ9)
CAALNTGGFKTIF

SEQ ID NO: 299038 - protein, 15 aa, Homo sapiens
  CDR3 for beta chain variable domain of TCR clone 149519 (TRBV7-2, TRBJ2-7)
CASSLKGALTYEQYF

SEQ ID NO: 299039 - protein, 14 aa, Homo sapiens
  CDR3 for alpha chain variable domain of TCR clone 149520 (TRAV35, TRAJ33)
CAGSSQDSNYQLIS

SEQ ID NO: 299040 - protein, 15 aa, Homo sapiens
  CDR3 for beta chain variable domain of TCR clone 149520 (TRBV20-1, TRBJ2-7)
CSAESGTSGAYEQYF

SEQ ID NO: 299041 - protein, 14 aa, Homo sapiens
  CDR3 for alpha chain variable domain of TCR clone 149521 (TRAV23/DV6, TRAJ4)
CAANLSGGYNKLIF

SEQ ID NO: 299042 - protein, 17 aa, Homo sapiens
  CDR3 for beta chain variable domain of TCR clone 149521 (TRBV13, TRBJ2-3)
CASSLSRVAGGRNTQYF

SEQ ID NO: 299043 - protein, 14 aa, Homo sapiens
  CDR3 for alpha chain variable domain of TCR clone 149522 (TRAV1-2, TRAJ16)
CAVNRFSDGQKLLF

SEQ ID NO: 299044 - protein, 16 aa, Homo sapiens
  CDR3 for beta chain variable domain of TCR clone 149522 (TRBV13, TRBJ2-2)
CASSPRTGEHTGELFL

SEQ ID NO: 299045 - protein, 13 aa, Homo sapiens
  CDR3 for alpha chain variable domain of TCR clone 149523 (TRAV24, TRAJ23)
CASHWNQGGKLIF

SEQ ID NO: 299046 - protein, 14 aa, Homo sapiens
  CDR3 for beta chain variable domain of TCR clone 149523 (TRBV18, TRBJ2-7)
CASSPRGGAYEQYF

SEQ ID NO: 299047 - protein, 14 aa, Homo sapiens
  CDR3 for alpha chain variable domain of TCR clone 149524 (TRAV17, TRAJ54)
RATDANQGAQKLVF

SEQ ID NO: 299048 - protein, 14 aa, Homo sapiens
  CDR3 for beta chain variable domain of TCR clone 149524 (TRBV25-1, TRBJ1-1)
CASTHLGGNTEAFF

SEQ ID NO: 299049 - protein, 12 aa, Homo sapiens
  CDR3 for alpha chain variable domain of TCR clone 149525 (TRAV29/DV5, TRAJ49)
CAALNTGNQFYF

SEQ ID NO: 299050 - protein, 16 aa, Homo sapiens
  CDR3 for beta chain variable domain of TCR clone 149525 (TRBV12-5, TRBJ2-5)
CASGPRTSGNQETQYF

SEQ ID NO: 299051 - protein, 13 aa, Homo sapiens
  CDR3 for alpha chain variable domain of TCR clone 149526 (TRAV12-3, TRAJ7)
CAMSASGNNRLAF

SEQ ID NO: 299052 - protein, 12 aa, Homo sapiens
  CDR3 for beta chain variable domain of TCR clone 149526 (TRBV7-9, TRBJ2-7)
CASSIKREEQYF

SEQ ID NO: 299053 - protein, 11 aa, Homo sapiens
  CDR3 for alpha chain variable domain of TCR clone 149527 (TRAV12-2, TRAJ49)
CAVTTGNQFYF

SEQ ID NO: 299054 - protein, 14 aa, Homo sapiens
  CDR3 for beta chain variable domain of TCR clone 149527 (TRBV6-1, TRBJ1-3)
CASVQGGGGNTIYF

SEQ ID NO: 299055 - protein, 17 aa, Homo sapiens
  CDR3 for alpha chain variable domain of TCR clone 149528 (TRAV27, TRAJ26)
CAGARAPLDNYGENFVF

SEQ ID NO: 299056 - protein, 15 aa, Homo sapiens
  CDR3 for beta chain variable domain of TCR clone 149528 (TRBV11-2, TRBJ2-5)
CASSPRSGGLETQYF

SEQ ID NO: 299057 - protein, 13 aa, Homo sapiens
  CDR3 for alpha chain variable domain of TCR clone 149529 (TRAV17, TRAJ9)
CATDYTGGFKTIF

SEQ ID NO: 299058 - protein, 14 aa, Homo sapiens
  CDR3 for beta chain variable domain of TCR clone 149529 (TRBV19, TRBJ2-5)
CASSMTGQQKTQYF

SEQ ID NO: 299059 - protein, 15 aa, Homo sapiens
  CDR3 for alpha chain variable domain of TCR clone 149530 (TRAV23/DV6, TRAJ37)
CAAGEGSSNTGKLIF

SEQ ID NO: 299060 - protein, 12 aa, Homo sapiens
  CDR3 for beta chain variable domain of TCR clone 149530 (TRBV11-2, TRBJ2-2)
CASSLGGGELFF

SEQ ID NO: 299061 - protein, 11 aa, Homo sapiens
  CDR3 for alpha chain variable domain of TCR clone 149531 (TRAV4, TRAJ20)
CLVGDKVTTTS

SEQ ID NO: 299062 - protein, 15 aa, Homo sapiens
  CDR3 for beta chain variable domain of TCR clone 149531 (TRBV18, TRBJ2-7)
CASSPYSTGNYEQYF

SEQ ID NO: 299063 - protein, 16 aa, Homo sapiens
  CDR3 for alpha chain variable domain of TCR clone 149532 (TRAV16, TRAJ52)
CALSAAGGTSYGKLTF

SEQ ID NO: 299064 - protein, 14 aa, Homo sapiens
  CDR3 for beta chain variable domain of TCR clone 149532 (TRBV20-1, TRBJ1-3)
CSASPTGAGNTIYF

SEQ ID NO: 299065 - protein, 16 aa, Homo sapiens
  CDR3 for alpha chain variable domain of TCR clone 149533 (TRAV12-1, TRAJ53)
CVVTIVAGGSNYKLTF

SEQ ID NO: 299066 - protein, 16 aa, Homo sapiens
  CDR3 for beta chain variable domain of TCR clone 149533 (TRBV6-6, TRBJ2-3)
CASSYSHAGSTDTQYF

SEQ ID NO: 299067 - protein, 13 aa, Homo sapiens
  CDR3 for alpha chain variable domain of TCR clone 149534 (TRAV12-3, TRAJ29)
CAMTLSGNTPLVF

SEQ ID NO: 299068 - protein, 15 aa, Homo sapiens
  CDR3 for beta chain variable domain of TCR clone 149534 (TRBV11-2, TRBJ2-1)
CASSSPSTRYNEQFF

SEQ ID NO: 299069 - protein, 18 aa, Homo sapiens
  CDR3 for alpha chain variable domain of TCR clone 149535 (TRAV1-2, TRAJ18)
CAVRDMGDRGSTLGRLYF

SEQ ID NO: 299070 - protein, 14 aa, Homo sapiens
  CDR3 for beta chain variable domain of TCR clone 149535 (TRBV12-4, TRBJ2-1)
CAGAVGGLGNEQFF

SEQ ID NO: 299071 - protein, 16 aa, Homo sapiens
  CDR3 for alpha chain variable domain of TCR clone 149536 (TRAV26-2, TRAJ57)
CILRDVGSGGSERLVF

SEQ ID NO: 299072 - protein, 13 aa, Homo sapiens
  CDR3 for beta chain variable domain of TCR clone 149536 (TRBV18, TRBJ2-3)
CASSPGVTDTQYF

SEQ ID NO: 299073 - protein, 14 aa, Homo sapiens
  CDR3 for alpha chain variable domain of TCR clone 149537 (TRAV12-2, TRAJ40)
CAVKIPSGTYKSIF

SEQ ID NO: 299074 - protein, 14 aa, Homo sapiens
  CDR3 for beta chain variable domain of TCR clone 149537 (TRBV7-9, TRBJ1-2)
CASSRQGANYGYTF

SEQ ID NO: 299075 - protein, 12 aa, Homo sapiens
  CDR3 for alpha chain variable domain of TCR clone 149538 (TRAV20, TRAJ4)
CSASGGYNKLSF

SEQ ID NO: 299076 - protein, 13 aa, Homo sapiens
  CDR3 for beta chain variable domain of TCR clone 149538 (TRBV9, TRBJ2-1)
CASSPSGGNEQFF

SEQ ID NO: 299077 - protein, 12 aa, Homo sapiens
  CDR3 for alpha chain variable domain of TCR clone 149539 (TRAV13-1, TRAJ20)
CAARQNDYKLRF

SEQ ID NO: 299078 - protein, 14 aa, Homo sapiens
  CDR3 for beta chain variable domain of TCR clone 149539 (TRBV5-1, TRBJ2-7)
CASSFASGVNEQYF

SEQ ID NO: 299079 - protein, 12 aa, Homo sapiens
  CDR3 for alpha chain variable domain of TCR clone 149540 (TRAV16, TRAJ49)
CALNEGGNQFYF

SEQ ID NO: 299080 - protein, 14 aa, Homo sapiens
  CDR3 for beta chain variable domain of TCR clone 149540 (TRBV7-9, TRBJ2-1)
CASRPTGLRNEQFL

SEQ ID NO: 299081 - protein, 11 aa, Homo sapiens
  CDR3 for alpha chain variable domain of TCR clone 149541 (TRAV12-2, TRAJ31)
CAILNNARLMF

SEQ ID NO: 299082 - protein, 16 aa, Homo sapiens
  CDR3 for beta chain variable domain of TCR clone 149541 (TRBV13, TRBJ2-2)
CGSSPRTGEHTGELFF

SEQ ID NO: 299083 - protein, 13 aa, Homo sapiens
  CDR3 for alpha chain variable domain of TCR clone 149542 (TRAV21, TRAJ37)
CAVSSGNTGKLIF

SEQ ID NO: 299084 - protein, 16 aa, Homo sapiens
  CDR3 for beta chain variable domain of TCR clone 149542 (TRBV13, TRBJ2-3)
CQQPLQGSGGRNTQYF

SEQ ID NO: 299085 - protein, 14 aa, Homo sapiens
  CDR3 for alpha chain variable domain of TCR clone 149543 (TRAV38-1, TRAJ45)
CASHSGGGADGLTF

SEQ ID NO: 299086 - protein, 15 aa, Homo sapiens
  CDR3 for beta chain variable domain of TCR clone 149543 (TRBV7-9, TRBJ1-5)
CASSQGHQPNQPQHF

SEQ ID NO: 299087 - protein, 14 aa, Homo sapiens
  CDR3 for alpha chain variable domain of TCR clone 149544 (TRAV30, TRAJ26)
CATEIVSYGQNFVF

SEQ ID NO: 299088 - protein, 13 aa, Homo sapiens
  CDR3 for beta chain variable domain of TCR clone 149544 (TRBV7-3, TRBJ1-1)
CASSQDWGAEAFF

SEQ ID NO: 299089 - protein, 16 aa, Homo sapiens
  CDR3 for alpha chain variable domain of TCR clone 149545 (TRAV16, TRAJ4)
CAQSRMFSGGYNKLIF

SEQ ID NO: 299090 - protein, 16 aa, Homo sapiens
  CDR3 for beta chain variable domain of TCR clone 149545 (TRBV12-5, TRBJ2-5)
CASGPRTSGNQETQYF

SEQ ID NO: 299091 - protein, 14 aa, Homo sapiens
  CDR3 for alpha chain variable domain of TCR clone 149546 (TRAV8-3, TRAJ3)
CAVVPRSSASKIIF

SEQ ID NO: 299092 - protein, 16 aa, Homo sapiens
  CDR3 for beta chain variable domain of TCR clone 149546 (TRBV4-1, TRBJ2-3)
CASSRLTSGGGDTQYF

SEQ ID NO: 299093 - protein, 15 aa, Homo sapiens
  CDR3 for alpha chain variable domain of TCR clone 149547 (TRAV36/DV7, TRAJ53)
CAVEGSGGIHYKLTF

SEQ ID NO: 299094 - protein, 16 aa, Homo sapiens
  CDR3 for beta chain variable domain of TCR clone 149547 (TRBV27, TRBJ2-2)
CASSLSGFWVTGELFF

SEQ ID NO: 299095 - protein, 16 aa, Homo sapiens
  CDR3 for alpha chain variable domain of TCR clone 149548 (TRAV14/DV4, TRAJ54)
CAMREGRIQGAQKLVF

SEQ ID NO: 299096 - protein, 12 aa, Homo sapiens
  CDR3 for beta chain variable domain of TCR clone 149548 (TRBV7-9, TRBJ1-5)
CASSPQGQPHHF

SEQ ID NO: 299097 - protein, 12 aa, Homo sapiens
  CDR3 for alpha chain variable domain of TCR clone 149549 (TRAV3, TRAJ20)
CAVRDPDYKLSF

SEQ ID NO: 299098 - protein, 15 aa, Homo sapiens
  CDR3 for beta chain variable domain of TCR clone 149549 (TRBV5-1, TRBJ1-5)
CASSLGTVSNQPQHF

SEQ ID NO: 299099 - protein, 15 aa, Homo sapiens
  CDR3 for alpha chain variable domain of TCR clone 149550 (TRAV23/DV6, TRAJ13)
CAAWPGGGGYQKVTF

SEQ ID NO: 299100 - protein, 15 aa, Homo sapiens
  CDR3 for beta chain variable domain of TCR clone 149550 (TRBV7-9, TRBJ1-6)
CASSSPGRGNSPLHF

SEQ ID NO: 299101 - protein, 13 aa, Homo sapiens
  CDR3 for alpha chain variable domain of TCR clone 149551 (TRAV8-3, TRAJ28)
CAVGAVGSYQLAF

SEQ ID NO: 299102 - protein, 16 aa, Homo sapiens
  CDR3 for beta chain variable domain of TCR clone 149551 (TRBV19, TRBJ2-1)
CASSKAGPSSYNEQFF

SEQ ID NO: 299103 - protein, 17 aa, Homo sapiens
  CDR3 for alpha chain variable domain of TCR clone 149552 (TRAV23/DV6, TRAJ57)
CAASSTLSQGGSEKLVF

SEQ ID NO: 299104 - protein, 17 aa, Homo sapiens
  CDR3 for beta chain variable domain of TCR clone 149552 (TRBV7-8, TRBJ2-6)
CASSAGTGGAGANVLTF

SEQ ID NO: 299105 - protein, 13 aa, Homo sapiens
  CDR3 for alpha chain variable domain of TCR clone 149553 (TRAV26-2, TRAJ43)
CILRAVNNNYMRF

SEQ ID NO: 299106 - protein, 13 aa, Homo sapiens
  CDR3 for beta chain variable domain of TCR clone 149553 (TRBV14, TRBJ2-1)
CASSQDRRNEQFF

SEQ ID NO: 299107 - protein, 12 aa, Homo sapiens
  CDR3 for alpha chain variable domain of TCR clone 149554 (TRAV13-1, TRAJ27)
CAAHTNAGKSTF

SEQ ID NO: 299108 - protein, 15 aa, Homo sapiens
  CDR3 for beta chain variable domain of TCR clone 149554 (TRBV7-9, TRBJ1-6)
CARSSPGRGNSPLLF

SEQ ID NO: 299109 - protein, 18 aa, Homo sapiens
  CDR3 for alpha chain variable domain of TCR clone 149555 (TRAV26-2, TRAJ54)
CILRDVEVGIQGAQKLVF

SEQ ID NO: 299110 - protein, 15 aa, Homo sapiens
  CDR3 for beta chain variable domain of TCR clone 149555 (TRBV9, TRBJ1-6)
CASSVAGTGDSPLHF

SEQ ID NO: 299111 - protein, 15 aa, Homo sapiens
  CDR3 for alpha chain variable domain of TCR clone 149556 (TRAV12-2, TRAJ53)
CAVNGGGGSNYKRTF

SEQ ID NO: 299112 - protein, 12 aa, Homo sapiens
  CDR3 for beta chain variable domain of TCR clone 149556 (TRBV11-2, TRBJ2-2)
CASSLGGGELFF

SEQ ID NO: 299113 - protein, 14 aa, Homo sapiens
  CDR3 for alpha chain variable domain of TCR clone 149557 (TRAV12-3, TRAJ10)
SHLPLTGGGNKLTF

SEQ ID NO: 299114 - protein, 15 aa, Homo sapiens
  CDR3 for beta chain variable domain of TCR clone 149557 (TRBV11-2, TRBJ1-3)
CASSLGGAVGNTIYF

SEQ ID NO: 299115 - protein, 11 aa, Homo sapiens
  CDR3 for alpha chain variable domain of TCR clone 149558 (TRAV12-1, TRAJ37)
CVVTTPGKLIF

SEQ ID NO: 299116 - protein, 13 aa, Homo sapiens
  CDR3 for beta chain variable domain of TCR clone 149558 (TRBV12-4, TRBJ1-5)
CASSPDRAQPQHF

SEQ ID NO: 299117 - protein, 13 aa, Homo sapiens
  CDR3 for alpha chain variable domain of TCR clone 149559 (TRAV12-1, TRAJ42)
CGGVGGSQGNLIF

SEQ ID NO: 299118 - protein, 14 aa, Homo sapiens
  CDR3 for beta chain variable domain of TCR clone 149559 (TRBV25-1, TRBJ1-1)
CASTHLGGNTEAFF

SEQ ID NO: 299119 - protein, 12 aa, Homo sapiens
  CDR3 for alpha chain variable domain of TCR clone 149560 (TRAV27, TRAJ9)
CAGESGGFKSIF

SEQ ID NO: 299120 - protein, 14 aa, Homo sapiens
  CDR3 for beta chain variable domain of TCR clone 149560 (TRBV6-1, TRBJ2-1)
CASAKDGFYNEQFF

SEQ ID NO: 299121 - protein, 14 aa, Homo sapiens
  CDR3 for alpha chain variable domain of TCR clone 149561 (TRAV2, TRAJ37)
CAVDFTSNTGKLIL

SEQ ID NO: 299122 - protein, 17 aa, Homo sapiens
  CDR3 for beta chain variable domain of TCR clone 149561 (TRBV7-8, TRBJ2-1)
CASSPPTGTLAYNEQFF

SEQ ID NO: 299123 - protein, 13 aa, Homo sapiens
  CDR3 for alpha chain variable domain of TCR clone 149562 (TRAV8-6, TRAJ33)
CAVSEGSNYQLIW

SEQ ID NO: 299124 - protein, 12 aa, Homo sapiens
  CDR3 for beta chain variable domain of TCR clone 149562 (TRBV7-9, TRBJ1-6)
CASSLMTSPLHF

SEQ ID NO: 299125 - protein, 16 aa, Homo sapiens
  CDR3 for alpha chain variable domain of TCR clone 149563 (TRAV30, TRAJ24)
CGTEIVDADSWGKFQF

SEQ ID NO: 299126 - protein, 15 aa, Homo sapiens
  CDR3 for beta chain variable domain of TCR clone 149563 (TRBV7-9, TRBJ1-4)
CASSARTGGNEKLFI

SEQ ID NO: 299127 - protein, 15 aa, Homo sapiens
  CDR3 for alpha chain variable domain of TCR clone 149564 (TRAV21, TRAJ53)
CATLNSGSSNYKLTF

SEQ ID NO: 299128 - protein, 15 aa, Homo sapiens
  CDR3 for beta chain variable domain of TCR clone 149564 (TRBV20-1, TRBJ2-7)
CSARDRVSGMDEQYF

SEQ ID NO: 299129 - protein, 14 aa, Homo sapiens
  CDR3 for alpha chain variable domain of TCR clone 149565 (TRAV12-2, TRAJ24)
CAVTPADSWGKLQF

SEQ ID NO: 299130 - protein, 13 aa, Homo sapiens
  CDR3 for beta chain variable domain of TCR clone 149565 (TRBV20-1, TRBJ1-1)
CSAPLGGGTEAFF

SEQ ID NO: 299131 - protein, 13 aa, Homo sapiens
  CDR3 for alpha chain variable domain of TCR clone 149566 (TRAV35, TRAJ57)
CAGSQGGSEKLVF

SEQ ID NO: 299132 - protein, 14 aa, Homo sapiens
  CDR3 for beta chain variable domain of TCR clone 149566 (TRBV25-1, TRBJ1-1)
CASTHLGGNTESFF

SEQ ID NO: 299133 - protein, 15 aa, Homo sapiens
  CDR3 for alpha chain variable domain of TCR clone 149567 (TRAV23/DV6, TRAJ4)
CAASPLRGGYNKLIF

SEQ ID NO: 299134 - protein, 20 aa, Homo sapiens
  CDR3 for beta chain variable domain of TCR clone 149567 (TRBV7-8, TRBJ2-2)
CASSHLFPGPTIHITGELFF

SEQ ID NO: 299135 - protein, 10 aa, Homo sapiens
  CDR3 for alpha chain variable domain of TCR clone 149568 (TRAV3, TRAJ18)
CAVRDGRLNP

SEQ ID NO: 299136 - protein, 15 aa, Homo sapiens
  CDR3 for beta chain variable domain of TCR clone 149568 (TRBV7-9, TRBJ1-6)
CASSSPGRGNSPLHF

SEQ ID NO: 299137 - protein, 16 aa, Homo sapiens
  CDR3 for alpha chain variable domain of TCR clone 149569 (TRAV30, TRAJ24)
CGTVIVDANSWGKFQF

SEQ ID NO: 299138 - protein, 13 aa, Homo sapiens
  CDR3 for beta chain variable domain of TCR clone 149569 (TRBV12-4, TRBJ2-5)
CASSPGTEETQYF

SEQ ID NO: 299139 - protein, 12 aa, Homo sapiens
  CDR3 for alpha chain variable domain of TCR clone 149570 (TRAV21, TRAJ30)
CAVMNRDDKIIF

SEQ ID NO: 299140 - protein, 15 aa, Homo sapiens
  CDR3 for beta chain variable domain of TCR clone 149570 (TRBV5-1, TRBJ2-1)
CASKGLAGVYNEQFF

SEQ ID NO: 299141 - protein, 17 aa, Homo sapiens
  CDR3 for alpha chain variable domain of TCR clone 149571 (TRAV13-1, )
CAANIQNPDPAVYQLRD

SEQ ID NO: 299142 - protein, 19 aa, Homo sapiens
  CDR3 for beta chain variable domain of TCR clone 149571 (TRBV25-1, TRBJ2-2)
CAILVYRVDRGRKTGELFF

SEQ ID NO: 299143 - protein, 14 aa, Homo sapiens
  CDR3 for alpha chain variable domain of TCR clone 149572 (TRAV1-1, TRAJ27)
RAVIYNTNAGKSTF

SEQ ID NO: 299144 - protein, 15 aa, Homo sapiens
  CDR3 for beta chain variable domain of TCR clone 149572 (TRBV7-2, TRBJ2-1)
CTSSSGLAGGNEQFF

SEQ ID NO: 299145 - protein, 11 aa, Homo sapiens
  CDR3 for alpha chain variable domain of TCR clone 149573 (TRAV12-1, TRAJ21)
CVLNNFNKFYF

SEQ ID NO: 299146 - protein, 14 aa, Homo sapiens
  CDR3 for beta chain variable domain of TCR clone 149573 (TRBV15, TRBJ1-5)
CATSREQSHQPQHF

SEQ ID NO: 299147 - protein, 14 aa, Homo sapiens
  CDR3 for alpha chain variable domain of TCR clone 149574 (TRAV12-2, TRAJ17)
CAVLFKAAGNQLTF

SEQ ID NO: 299148 - protein, 12 aa, Homo sapiens
  CDR3 for beta chain variable domain of TCR clone 149574 (TRBV14, TRBJ2-5)
CASSQLKETQYF

SEQ ID NO: 299149 - protein, 14 aa, Homo sapiens
  CDR3 for alpha chain variable domain of TCR clone 149575 (TRAV17, TRAJ22)
CATSPSGSPRQLTF

SEQ ID NO: 299150 - protein, 13 aa, Homo sapiens
  CDR3 for beta chain variable domain of TCR clone 149575 (TRBV12-4, TRBJ1-2)
CASSLRQGKGYTF

SEQ ID NO: 299151 - protein, 17 aa, Homo sapiens
  CDR3 for alpha chain variable domain of TCR clone 149576 (TRAV3, TRAJ42)
CAVRDRDYGGSQGNLIF

SEQ ID NO: 299152 - protein, 14 aa, Homo sapiens
  CDR3 for beta chain variable domain of TCR clone 149576 (TRBV7-2, TRBJ2-7)
CASRSQGVAYEQYF

SEQ ID NO: 299153 - protein, 13 aa, Homo sapiens
  CDR3 for alpha chain variable domain of TCR clone 149577 (TRAV20, TRAJ20)
CAVQAGSGYKLSF

SEQ ID NO: 299154 - protein, 14 aa, Homo sapiens
  CDR3 for beta chain variable domain of TCR clone 149577 (TRBV4-2, TRBJ2-1)
CASGLDRAYNEQFF

SEQ ID NO: 299155 - protein, 13 aa, Homo sapiens
  CDR3 for alpha chain variable domain of TCR clone 149578 (TRAV23/DV6, TRAJ58)
CAARLIRGSRLTF

SEQ ID NO: 299156 - protein, 13 aa, Homo sapiens
  CDR3 for beta chain variable domain of TCR clone 149578 (TRBV2, TRBJ1-6)
CADSGSYNSPLHS

SEQ ID NO: 299157 - protein, 15 aa, Homo sapiens
  CDR3 for alpha chain variable domain of TCR clone 149579 (TRAV12-2, TRAJ53)
CAVNGGGGSNYKLTF

SEQ ID NO: 299158 - protein, 14 aa, Homo sapiens
  CDR3 for beta chain variable domain of TCR clone 149579 (TRBV7-7, TRBJ2-2)
CATRQDSDTGELFF

SEQ ID NO: 299159 - protein, 11 aa, Homo sapiens
  CDR3 for alpha chain variable domain of TCR clone 149580 (TRAV1-1, TRAJ23)
CAVRQGGKLNF

SEQ ID NO: 299160 - protein, 20 aa, Homo sapiens
  CDR3 for beta chain variable domain of TCR clone 149580 (TRBV7-8, TRBJ2-2)
CSSSHLFPGPTIHITGELFF

SEQ ID NO: 299161 - protein, 14 aa, Homo sapiens
  CDR3 for alpha chain variable domain of TCR clone 149581 (TRAV1-2, TRAJ16)
CAVNRFSGGQKLLF

SEQ ID NO: 299162 - protein, 15 aa, Homo sapiens
  CDR3 for beta chain variable domain of TCR clone 149581 (TRBV7-9, TRBJ1-6)
CDSSSPGRGNSPLHF

SEQ ID NO: 299163 - protein, 14 aa, Homo sapiens
  CDR3 for alpha chain variable domain of TCR clone 149582 (TRAV13-2, TRAJ11)
CAETGNSGYSTLTF

SEQ ID NO: 299164 - protein, 15 aa, Homo sapiens
  CDR3 for beta chain variable domain of TCR clone 149582 (TRBV9, TRBJ1-6)
CASSVAGTGDSPLHF

SEQ ID NO: 299165 - protein, 16 aa, Homo sapiens
  CDR3 for alpha chain variable domain of TCR clone 149583 (TRAV1-2, TRAJ10)
CAVRGVLTGGGNKLTF

SEQ ID NO: 299166 - protein, 17 aa, Homo sapiens
  CDR3 for beta chain variable domain of TCR clone 149583 (TRBV24-1, TRBJ2-1)
CATSDVSTSGTYNEQFF

SEQ ID NO: 299167 - protein, 22 aa, Homo sapiens
  CDR3 for alpha chain variable domain of TCR clone 149584 (TRAV40, )
CLLGDGIPDIQNPDPAVYHLRD

SEQ ID NO: 299168 - protein, 16 aa, Homo sapiens
  CDR3 for beta chain variable domain of TCR clone 149584 (TRBV20-1, TRBJ1-5)
CSAELPGQQTNQPQHF

SEQ ID NO: 299169 - protein, 14 aa, Homo sapiens
  CDR3 for alpha chain variable domain of TCR clone 149585 (TRAV2, TRAJ12)
CAVDAMDSSYKLIF

SEQ ID NO: 299170 - protein, 13 aa, Homo sapiens
  CDR3 for beta chain variable domain of TCR clone 149585 (TRBV19, TRBJ2-1)
CASKVGAAGEQFF

SEQ ID NO: 299171 - protein, 22 aa, Homo sapiens
  CDR3 for alpha chain variable domain of TCR clone 149586 (TRAV3, TRAJ38)
CAVRDCLNAGNNHIQNPDPAVY

SEQ ID NO: 299172 - protein, 13 aa, Homo sapiens
  CDR3 for beta chain variable domain of TCR clone 149586 (TRBV12-4, TRBJ1-2)
CASSLRQGKGYSF

SEQ ID NO: 299173 - protein, 16 aa, Homo sapiens
  CDR3 for alpha chain variable domain of TCR clone 149587 (TRAV4, TRAJ37)
CLVGRFGSSNTGKLIF

SEQ ID NO: 299174 - protein, 15 aa, Homo sapiens
  CDR3 for beta chain variable domain of TCR clone 149587 (TRBV12-4, TRBJ2-3)
CASSLAERPTDTQYF

SEQ ID NO: 299175 - protein, 14 aa, Homo sapiens
  CDR3 for alpha chain variable domain of TCR clone 149588 (TRAV12-2, TRAJ13)
CAVNKTGGYQKVTF

SEQ ID NO: 299176 - protein, 19 aa, Homo sapiens
  CDR3 for beta chain variable domain of TCR clone 149588 (TRBV25-1, TRBJ2-2)
CAIPVYRVDRGRKTGELFF

SEQ ID NO: 299177 - protein, 21 aa, Homo sapiens
  CDR3 for alpha chain variable domain of TCR clone 149589 (TRAV3, )
CAVRPTPDIQNPDPAVYKLRD

SEQ ID NO: 299178 - protein, 15 aa, Homo sapiens
  CDR3 for beta chain variable domain of TCR clone 149589 (TRBV11-3, TRBJ2-5)
CASSDTSGGIETQYF

SEQ ID NO: 299179 - protein, 18 aa, Homo sapiens
  CDR3 for alpha chain variable domain of TCR clone 149590 (TRAV21, TRAJ52)
CAVRPSPAGGTSYGKLTF

SEQ ID NO: 299180 - protein, 12 aa, Homo sapiens
  CDR3 for beta chain variable domain of TCR clone 149590 (TRBV7-3, TRBJ1-1)
CQQQDWGAEAFF

SEQ ID NO: 299181 - protein, 13 aa, Homo sapiens
  CDR3 for alpha chain variable domain of TCR clone 149591 (TRAV21, TRAJ27)
CAALNTNAGKSTF

SEQ ID NO: 299182 - protein, 14 aa, Homo sapiens
  CDR3 for beta chain variable domain of TCR clone 149591 (TRBV2, TRBJ2-1)
CASRAYGIYNEQFF

SEQ ID NO: 299183 - protein, 15 aa, Homo sapiens
  CDR3 for alpha chain variable domain of TCR clone 149592 (TRAV17, TRAJ16)
CATALRFSDGQKLLF

SEQ ID NO: 299184 - protein, 14 aa, Homo sapiens
  CDR3 for beta chain variable domain of TCR clone 149592 (TRBV7-2, TRBJ2-7)
CASSLYPGRYEQYF

SEQ ID NO: 299185 - protein, 14 aa, Homo sapiens
  CDR3 for alpha chain variable domain of TCR clone 149593 (TRAV12-3, TRAJ9)
CATSPNTGGFKTIF

SEQ ID NO: 299186 - protein, 14 aa, Homo sapiens
  CDR3 for beta chain variable domain of TCR clone 149593 (TRBV11-2, TRBJ2-7)
CASSSLADGYEQYF

SEQ ID NO: 299187 - protein, 13 aa, Homo sapiens
  CDR3 for alpha chain variable domain of TCR clone 149594 (TRAV13-1, TRAJ21)
CAASIFNFNKFYF

SEQ ID NO: 299188 - protein, 14 aa, Homo sapiens
  CDR3 for beta chain variable domain of TCR clone 149594 (TRBV7-2, TRBJ1-5)
CASSTQGAGQPQHF

SEQ ID NO: 299189 - protein, 13 aa, Homo sapiens
  CDR3 for alpha chain variable domain of TCR clone 149595 (TRAV2, TRAJ24)
CAVPTDSWGKLQF

SEQ ID NO: 299190 - protein, 16 aa, Homo sapiens
  CDR3 for beta chain variable domain of TCR clone 149595 (TRBV6-3, TRBJ1-2)
CASIRELSGTPYGYTF

SEQ ID NO: 299191 - protein, 12 aa, Homo sapiens
  CDR3 for alpha chain variable domain of TCR clone 149596 (TRAV13-1, TRAJ21)
CAAKEGFNKFYF

SEQ ID NO: 299192 - protein, 13 aa, Homo sapiens
  CDR3 for beta chain variable domain of TCR clone 149596 (TRBV19, TRBJ2-7)
RASSPRQSYEQYF

SEQ ID NO: 299193 - protein, 14 aa, Homo sapiens
  CDR3 for alpha chain variable domain of TCR clone 149597 (TRAV12-2, TRAJ40)
CAVKIPSGTYKYIF

SEQ ID NO: 299194 - protein, 15 aa, Homo sapiens
  CDR3 for beta chain variable domain of TCR clone 149597 (TRBV7-2, TRBJ2-7)
CASSWGQGAIYEQYF

SEQ ID NO: 299195 - protein, 14 aa, Homo sapiens
  CDR3 for alpha chain variable domain of TCR clone 149598 (TRAV12-3, TRAJ10)
SHLPLTGGGNKLTF

SEQ ID NO: 299196 - protein, 12 aa, Homo sapiens
  CDR3 for beta chain variable domain of TCR clone 149598 (TRBV7-3, TRBJ2-5)
CASGSPGGTQYF

SEQ ID NO: 299197 - protein, 14 aa, Homo sapiens
  CDR3 for alpha chain variable domain of TCR clone 149599 (TRAV12-3, TRAJ58)
CAMSIETSGSRLTF

SEQ ID NO: 299198 - protein, 12 aa, Homo sapiens
  CDR3 for beta chain variable domain of TCR clone 149599 (TRBV7-8, TRBJ2-7)
CASSLGDREQYF

SEQ ID NO: 299199 - protein, 13 aa, Homo sapiens
  CDR3 for alpha chain variable domain of TCR clone 149600 (TRAV21, TRAJ27)
CAARPGNAGKSTF

SEQ ID NO: 299200 - protein, 15 aa, Homo sapiens
  CDR3 for beta chain variable domain of TCR clone 149600 (TRBV7-2, TRBJ2-1)
CASSFQADEYNEQFF

SEQ ID NO: 299201 - protein, 18 aa, Homo sapiens
  CDR3 for alpha chain variable domain of TCR clone 149601 (TRAV29/DV5, TRAJ52)
CAAGFRGAGGTSYGKMTF

SEQ ID NO: 299202 - protein, 11 aa, Homo sapiens
  CDR3 for beta chain variable domain of TCR clone 149601 (TRBV7-2, TRBJ2-2)
CASSLPGELFF

SEQ ID NO: 299203 - protein, 14 aa, Homo sapiens
  CDR3 for alpha chain variable domain of TCR clone 149602 (TRAV1-2, TRAJ16)
CAANRFSDGQKLLF

SEQ ID NO: 299204 - protein, 15 aa, Homo sapiens
  CDR3 for beta chain variable domain of TCR clone 149602 (TRBV4-1, TRBJ1-4)
CASSDTGGTNEKLFF

SEQ ID NO: 299205 - protein, 11 aa, Homo sapiens
  CDR3 for alpha chain variable domain of TCR clone 149603 (TRAV27, TRAJ47)
CAGASGNKLVF

SEQ ID NO: 299206 - protein, 15 aa, Homo sapiens
  CDR3 for beta chain variable domain of TCR clone 149603 (TRBV9, TRBJ2-7)
CASSPHEQGSYEQYF

SEQ ID NO: 299207 - protein, 16 aa, Homo sapiens
  CDR3 for alpha chain variable domain of TCR clone 149604 (TRAV26-1, TRAJ33)
CIVPFWGEDSNYQLIC

SEQ ID NO: 299208 - protein, 14 aa, Homo sapiens
  CDR3 for beta chain variable domain of TCR clone 149604 (TRBV6-3, TRBJ1-1)
CASSYHSKNTEAFF

SEQ ID NO: 299209 - protein, 19 aa, Homo sapiens
  CDR3 for alpha chain variable domain of TCR clone 149605 (TRAV26-1, TRAJ38)
CIADNAGNNHIQNPDPAVY

SEQ ID NO: 299210 - protein, 13 aa, Homo sapiens
  CDR3 for beta chain variable domain of TCR clone 149605 (TRBV20-1, TRBJ1-1)
CSARDGGNTEAFF

SEQ ID NO: 299211 - protein, 13 aa, Homo sapiens
  CDR3 for alpha chain variable domain of TCR clone 149606 (TRAV12-1, TRAJ40)
CVVPTSGTYKYIF

SEQ ID NO: 299212 - protein, 13 aa, Homo sapiens
  CDR3 for beta chain variable domain of TCR clone 149606 (TRBV7-8, TRBJ2-7)
CASSLTGGREQYF

SEQ ID NO: 299213 - protein, 14 aa, Homo sapiens
  CDR3 for alpha chain variable domain of TCR clone 149607 (TRAV26-1, TRAJ38)
CIADNAGNNRKLIW

SEQ ID NO: 299214 - protein, 17 aa, Homo sapiens
  CDR3 for beta chain variable domain of TCR clone 149607 (TRBV7-9, TRBJ2-3)
CACSPTVAGDLTDTQYF

SEQ ID NO: 299215 - protein, 13 aa, Homo sapiens
  CDR3 for alpha chain variable domain of TCR clone 149608 (TRAV2, TRAJ15)
CAVASQAGTALIF

SEQ ID NO: 299216 - protein, 13 aa, Homo sapiens
  CDR3 for beta chain variable domain of TCR clone 149608 (TRBV7-3, TRBJ1-2)
CASSLKRGYGYTF

SEQ ID NO: 299217 - protein, 21 aa, Homo sapiens
  CDR3 for alpha chain variable domain of TCR clone 149609 (TRAV12-1, TRAJ32)
SSVIQPPTSMNYGGATNKLIF

SEQ ID NO: 299218 - protein, 15 aa, Homo sapiens
  CDR3 for beta chain variable domain of TCR clone 149609 (TRBV7-9, TRBJ2-2)
CASGPLDTCPGELFF

SEQ ID NO: 299219 - protein, 16 aa, Homo sapiens
  CDR3 for alpha chain variable domain of TCR clone 149610 (TRAV35, TRAJ28)
CAGQRYSGPGSYQLTF

SEQ ID NO: 299220 - protein, 14 aa, Homo sapiens
  CDR3 for beta chain variable domain of TCR clone 149610 (TRBV18, TRBJ2-7)
CASSPRGGAYEQYF

SEQ ID NO: 299221 - protein, 13 aa, Homo sapiens
  CDR3 for alpha chain variable domain of TCR clone 149611 (TRAV8-3, TRAJ36)
CAVGATGANKLFF

SEQ ID NO: 299222 - protein, 15 aa, Homo sapiens
  CDR3 for beta chain variable domain of TCR clone 149611 (TRBV7-2, TRBJ1-2)
CARSPRAGWNYGYTF

SEQ ID NO: 299223 - protein, 14 aa, Homo sapiens
  CDR3 for alpha chain variable domain of TCR clone 149612 (TRAV13-1, TRAJ40)
CAASMTSGTYKYIF

SEQ ID NO: 299224 - protein, 14 aa, Homo sapiens
  CDR3 for beta chain variable domain of TCR clone 149612 (TRBV20-1, TRBJ2-2)
CSAPDTANTGELFF

SEQ ID NO: 299225 - protein, 17 aa, Homo sapiens
  CDR3 for alpha chain variable domain of TCR clone 149613 (TRAV1-1, TRAJ32)
CAVRVDELWWCYKQAHL

SEQ ID NO: 299226 - protein, 13 aa, Homo sapiens
  CDR3 for beta chain variable domain of TCR clone 149613 (TRBV10-3, TRBJ2-7)
CASKLAVNYERYF

SEQ ID NO: 299227 - protein, 14 aa, Homo sapiens
  CDR3 for alpha chain variable domain of TCR clone 149614 (TRAV1-2, TRAJ29)
CAVRELTSARPLVF

SEQ ID NO: 299228 - protein, 14 aa, Homo sapiens
  CDR3 for beta chain variable domain of TCR clone 149614 (TRBV3-1, TRBJ2-5)
CASSQGPDQETQYF

SEQ ID NO: 299229 - protein, 16 aa, Homo sapiens
  CDR3 for alpha chain variable domain of TCR clone 149615 (TRAV3, TRAJ13)
CAVRDPNSGGYQKVTF

SEQ ID NO: 299230 - protein, 16 aa, Homo sapiens
  CDR3 for beta chain variable domain of TCR clone 149615 (TRBV7-7, TRBJ2-1)
CASSLASGTSYNEQFF

SEQ ID NO: 299231 - protein, 17 aa, Homo sapiens
  CDR3 for alpha chain variable domain of TCR clone 149616 (TRAV4, TRAJ18)
CLVGERSVGSTLGGLYF

SEQ ID NO: 299232 - protein, 16 aa, Homo sapiens
  CDR3 for beta chain variable domain of TCR clone 149616 (TRBV19, TRBJ2-1)
CASSKAGPSSYNEQFF

SEQ ID NO: 299233 - protein, 11 aa, Homo sapiens
  CDR3 for alpha chain variable domain of TCR clone 149617 (TRAV12-1, TRAJ43)
CVEYDNNDMRF

SEQ ID NO: 299234 - protein, 16 aa, Homo sapiens
  CDR3 for beta chain variable domain of TCR clone 149617 (TRBV5-4, TRBJ2-1)
CASSWVGSGQDNEQFF

SEQ ID NO: 299235 - protein, 16 aa, Homo sapiens
  CDR3 for alpha chain variable domain of TCR clone 149618 (TRAV3, TRAJ10)
CAVRDMRAGGGNKLPF

SEQ ID NO: 299236 - protein, 19 aa, Homo sapiens
  CDR3 for beta chain variable domain of TCR clone 149618 (TRBV6-3, TRBJ1-2)
CASSYSKGRTGPPNYGYAF

SEQ ID NO: 299237 - protein, 13 aa, Homo sapiens
  CDR3 for alpha chain variable domain of TCR clone 149619 (TRAV13-1, TRAJ21)
CAASIYNVNKFYF

SEQ ID NO: 299238 - protein, 15 aa, Homo sapiens
  CDR3 for beta chain variable domain of TCR clone 149619 (TRBV5-5, TRBJ1-5)
CASSLKGGGEQPQHF

SEQ ID NO: 299239 - protein, 14 aa, Homo sapiens
  CDR3 for alpha chain variable domain of TCR clone 149620 (TRAV38-2/DV8, TRAJ23)
CAYRSQNQGGKLIF

SEQ ID NO: 299240 - protein, 15 aa, Homo sapiens
  CDR3 for beta chain variable domain of TCR clone 149620 (TRBV11-3, TRBJ2-2)
CASSLVGTGAGELFF

SEQ ID NO: 299241 - protein, 17 aa, Homo sapiens
  CDR3 for alpha chain variable domain of TCR clone 149621 (TRAV3, TRAJ6)
CAVRDGPRAGGSYVPTF

SEQ ID NO: 299242 - protein, 16 aa, Homo sapiens
  CDR3 for beta chain variable domain of TCR clone 149621 (TRBV7-8, TRBJ2-3)
CASSTEGQRETDTLYF

SEQ ID NO: 299243 - protein, 15 aa, Homo sapiens
  CDR3 for alpha chain variable domain of TCR clone 149622 (TRAV12-1, TRAJ42)
CVVTRDGGSQGNLIF

SEQ ID NO: 299244 - protein, 12 aa, Homo sapiens
  CDR3 for beta chain variable domain of TCR clone 149622 (TRBV6-3, TRBJ2-7)
CASSLTPYEQYF

SEQ ID NO: 299245 - protein, 14 aa, Homo sapiens
  CDR3 for alpha chain variable domain of TCR clone 149623 (TRAV23/DV6, TRAJ49)
CAATPGQVLRSLQI

SEQ ID NO: 299246 - protein, 14 aa, Homo sapiens
  CDR3 for beta chain variable domain of TCR clone 149623 (TRBV7-3, TRBJ1-1)
CASSLKGGNTEAFF

SEQ ID NO: 299247 - protein, 15 aa, Homo sapiens
  CDR3 for alpha chain variable domain of TCR clone 149624 (TRAV12-2, TRAJ5)
CAVNNEDTGRRALTF

SEQ ID NO: 299248 - protein, 13 aa, Homo sapiens
  CDR3 for beta chain variable domain of TCR clone 149624 (TRBV20-1, TRBJ2-7)
CSASRSSSYEQYF

SEQ ID NO: 299249 - protein, 14 aa, Homo sapiens
  CDR3 for alpha chain variable domain of TCR clone 149625 (TRAV23/DV6, TRAJ37)
CAASTSSNTGKQIF

SEQ ID NO: 299250 - protein, 13 aa, Homo sapiens
  CDR3 for beta chain variable domain of TCR clone 149625 (TRBV7-7, TRBJ1-1)
CASSLGANTEAFF

SEQ ID NO: 299251 - protein, 14 aa, Homo sapiens
  CDR3 for alpha chain variable domain of TCR clone 149626 (TRAV1-2, TRAJ16)
CAVNRFSDGQQLLF

SEQ ID NO: 299252 - protein, 14 aa, Homo sapiens
  CDR3 for beta chain variable domain of TCR clone 149626 (TRBV19, TRBJ2-7)
CASSIGPNSYEQYF

SEQ ID NO: 299253 - protein, 14 aa, Homo sapiens
  CDR3 for alpha chain variable domain of TCR clone 149627 (TRAV17, TRAJ22)
CATSPSGSARQLTF

SEQ ID NO: 299254 - protein, 15 aa, Homo sapiens
  CDR3 for beta chain variable domain of TCR clone 149627 (TRBV6-1, TRBJ2-3)
CASSEIAHSTDTQYF

SEQ ID NO: 299255 - protein, 14 aa, Homo sapiens
  CDR3 for alpha chain variable domain of TCR clone 149628 (TRAV12-3, TRAJ12)
CAMSEVDSSYKLIF

SEQ ID NO: 299256 - protein, 12 aa, Homo sapiens
  CDR3 for beta chain variable domain of TCR clone 149628 (TRBV18, TRBJ1-4)
CASPPSREKLFF

SEQ ID NO: 299257 - protein, 13 aa, Homo sapiens
  CDR3 for alpha chain variable domain of TCR clone 149629 (TRAV8-3, TRAJ28)
CAVGAVGSYNSLS

SEQ ID NO: 299258 - protein, 15 aa, Homo sapiens
  CDR3 for beta chain variable domain of TCR clone 149629 (TRBV7-9, TRBJ1-5)
CASSQGHQPNQPQHF

SEQ ID NO: 299259 - protein, 14 aa, Homo sapiens
  CDR3 for alpha chain variable domain of TCR clone 149630 (TRAV14/DV4, TRAJ15)
CAMRRDQAGTALIF

SEQ ID NO: 299260 - protein, 11 aa, Homo sapiens
  CDR3 for beta chain variable domain of TCR clone 149630 (TRBV7-2, TRBJ2-7)
CASSSGLGQYF

SEQ ID NO: 299261 - protein, 14 aa, Homo sapiens
  CDR3 for alpha chain variable domain of TCR clone 149631 (TRAV16, TRAJ32)
CALQSGGATNKLIF

SEQ ID NO: 299262 - protein, 13 aa, Homo sapiens
  CDR3 for beta chain variable domain of TCR clone 149631 (TRBV15, TRBJ1-6)
CATSGGLNSPLHF

SEQ ID NO: 299263 - protein, 14 aa, Homo sapiens
  CDR3 for alpha chain variable domain of TCR clone 149632 (TRAV1-1, TRAJ27)
CSVIYNTNAGKSTF

SEQ ID NO: 299264 - protein, 14 aa, Homo sapiens
  CDR3 for beta chain variable domain of TCR clone 149632 (TRBV25-1, TRBJ1-1)
CASTHLGGNTEAFF

SEQ ID NO: 299265 - protein, 16 aa, Homo sapiens
  CDR3 for alpha chain variable domain of TCR clone 149633 (TRAV26-2, TRAJ45)
CTTASPIGGGADGLTF

SEQ ID NO: 299266 - protein, 15 aa, Homo sapiens
  CDR3 for beta chain variable domain of TCR clone 149633 (TRBV28, TRBJ2-1)
CASSIIAGGRSEQFF

SEQ ID NO: 299267 - protein, 14 aa, Homo sapiens
  CDR3 for alpha chain variable domain of TCR clone 149634 (TRAV12-1, TRAJ9)
CVVNRRTGGFKTIF

SEQ ID NO: 299268 - protein, 14 aa, Homo sapiens
  CDR3 for beta chain variable domain of TCR clone 149634 (TRBV20-1, TRBJ2-1)
CSAQIGGSANEQFF

SEQ ID NO: 299269 - protein, 16 aa, Homo sapiens
  CDR3 for alpha chain variable domain of TCR clone 149635 (TRAV26-1, TRAJ45)
CIVEKYSGGGADGLTF

SEQ ID NO: 299270 - protein, 16 aa, Homo sapiens
  CDR3 for beta chain variable domain of TCR clone 149635 (TRBV10-3, TRBJ1-6)
CAISERRGQGNSPLRF

SEQ ID NO: 299271 - protein, 18 aa, Homo sapiens
  CDR3 for alpha chain variable domain of TCR clone 149636 (TRAV21, TRAJ52)
CAVRPSPAGGTSYGKLTF

SEQ ID NO: 299272 - protein, 15 aa, Homo sapiens
  CDR3 for beta chain variable domain of TCR clone 149636 (TRBV7-9, TRBJ2-7)
CASGISGLAVYEQYF

SEQ ID NO: 299273 - protein, 15 aa, Homo sapiens
  CDR3 for alpha chain variable domain of TCR clone 149637 (TRAV26-1, TRAJ40)
CIVRVTTSGTYKYIF

SEQ ID NO: 299274 - protein, 12 aa, Homo sapiens
  CDR3 for beta chain variable domain of TCR clone 149637 (TRBV7-9, TRBJ1-4)
RASSTDREKLFF

SEQ ID NO: 299275 - protein, 11 aa, Homo sapiens
  CDR3 for alpha chain variable domain of TCR clone 149638 (TRAV35, TRAJ34)
CWARNTDKLIF

SEQ ID NO: 299276 - protein, 14 aa, Homo sapiens
  CDR3 for beta chain variable domain of TCR clone 149638 (TRBV5-1, TRBJ2-7)
CSSSRGESLYEQYF

SEQ ID NO: 299277 - protein, 13 aa, Homo sapiens
  CDR3 for alpha chain variable domain of TCR clone 149639 (TRAV12-2, TRAJ42)
CAVKRGSQGNLIF

SEQ ID NO: 299278 - protein, 16 aa, Homo sapiens
  CDR3 for beta chain variable domain of TCR clone 149639 (TRBV9, TRBJ2-2)
CASSATGKGHTGELFF

SEQ ID NO: 299279 - protein, 15 aa, Homo sapiens
  CDR3 for alpha chain variable domain of TCR clone 149640 (TRAV27, TRAJ38)
CAARRNAGNNRKLTW

SEQ ID NO: 299280 - protein, 13 aa, Homo sapiens
  CDR3 for beta chain variable domain of TCR clone 149640 (TRBV12-5, TRBJ2-3)
CASGDRQSYTQYF

SEQ ID NO: 299281 - protein, 10 aa, Homo sapiens
  CDR3 for alpha chain variable domain of TCR clone 149641 (TRAV21, TRAJ34)
CAADTDKLIF

SEQ ID NO: 299282 - protein, 19 aa, Homo sapiens
  CDR3 for beta chain variable domain of TCR clone 149641 (TRBV25-1, TRBJ2-2)
CAILVYRVDRGRKTGELFF

SEQ ID NO: 299283 - protein, 16 aa, Homo sapiens
  CDR3 for alpha chain variable domain of TCR clone 149642 (TRAV26-1, TRAJ42)
CIVGTGYGGSQGNLIF

SEQ ID NO: 299284 - protein, 15 aa, Homo sapiens
  CDR3 for beta chain variable domain of TCR clone 149642 (TRBV20-1, TRBJ2-7)
CSARDRVSGMDEQYF

SEQ ID NO: 299285 - protein, 14 aa, Homo sapiens
  CDR3 for alpha chain variable domain of TCR clone 149643 (TRAV12-1, TRAJ17)
YVVNHKAAGNKLTF

SEQ ID NO: 299286 - protein, 17 aa, Homo sapiens
  CDR3 for beta chain variable domain of TCR clone 149643 (TRBV20-1, TRBJ2-1)
CSASSSGLAGSYNEQFF

SEQ ID NO: 299287 - protein, 14 aa, Homo sapiens
  CDR3 for alpha chain variable domain of TCR clone 149644 (TRAV2, TRAJ9)
CAVEDRSGGFKIIF

SEQ ID NO: 299288 - protein, 13 aa, Homo sapiens
  CDR3 for beta chain variable domain of TCR clone 149644 (TRBV19, TRBJ1-2)
CASSVPGQDGYTF

SEQ ID NO: 299289 - protein, 15 aa, Homo sapiens
  CDR3 for alpha chain variable domain of TCR clone 149645 (TRAV3, TRAJ29)
CAVRDINSGNIPLVF

SEQ ID NO: 299290 - protein, 16 aa, Homo sapiens
  CDR3 for beta chain variable domain of TCR clone 149645 (TRBV4-1, TRBJ2-5)
CASSQTFYGDQETQYF

SEQ ID NO: 299291 - protein, 15 aa, Homo sapiens
  CDR3 for alpha chain variable domain of TCR clone 149646 (TRAV2, TRAJ9)
CAVEDGGTGGFKTIF

SEQ ID NO: 299292 - protein, 19 aa, Homo sapiens
  CDR3 for beta chain variable domain of TCR clone 149646 (TRBV28, TRBJ2-7)
CASSYSGTSRLGWVYEQYF

SEQ ID NO: 299293 - protein, 17 aa, Homo sapiens
  CDR3 for alpha chain variable domain of TCR clone 149647 (TRAV16, TRAJ58)
CITVLSNGETSGPRLTF

SEQ ID NO: 299294 - protein, 17 aa, Homo sapiens
  CDR3 for beta chain variable domain of TCR clone 149647 (TRBV18, TRBJ2-1)
CASSRGLSGGADNEQFF

SEQ ID NO: 299295 - protein, 17 aa, Homo sapiens
  CDR3 for alpha chain variable domain of TCR clone 149648 (TRAV23/DV6, TRAJ57)
CAASSTLSQGGSEKLAL

SEQ ID NO: 299296 - protein, 14 aa, Homo sapiens
  CDR3 for beta chain variable domain of TCR clone 149648 (TRBV25-1, TRBJ1-1)
CASTHLGGNTEAFF

SEQ ID NO: 299297 - protein, 12 aa, Homo sapiens
  CDR3 for alpha chain variable domain of TCR clone 149649 (TRAV2, TRAJ33)
CAVPDSNYQLIW

SEQ ID NO: 299298 - protein, 17 aa, Homo sapiens
  CDR3 for beta chain variable domain of TCR clone 149649 (TRBV6-5, TRBJ2-3)
CSSSYGTSLYKSDTQYF

SEQ ID NO: 299299 - protein, 14 aa, Homo sapiens
  CDR3 for alpha chain variable domain of TCR clone 149650 (TRAV9-2, TRAJ24)
CALNPRGSWGKLQF

SEQ ID NO: 299300 - protein, 15 aa, Homo sapiens
  CDR3 for beta chain variable domain of TCR clone 149650 (TRBV7-2, TRBJ2-3)
CASSSTGLETDTQYS

SEQ ID NO: 299301 - protein, 13 aa, Homo sapiens
  CDR3 for alpha chain variable domain of TCR clone 149651 (TRAV26-1, TRAJ48)
CIVRVVGDEKVTF

SEQ ID NO: 299302 - protein, 17 aa, Homo sapiens
  CDR3 for beta chain variable domain of TCR clone 149651 (TRBV7-3, TRBJ2-2)
CASSLSGTSGGTGELFF

SEQ ID NO: 299303 - protein, 15 aa, Homo sapiens
  CDR3 for alpha chain variable domain of TCR clone 149652 (TRAV38-1, TRAJ57)
CAFMDSQGGSEKLVF

SEQ ID NO: 299304 - protein, 15 aa, Homo sapiens
  CDR3 for beta chain variable domain of TCR clone 149652 (TRBV7-8, TRBJ2-1)
CASSLADSLYNEQFF

SEQ ID NO: 299305 - protein, 12 aa, Homo sapiens
  CDR3 for alpha chain variable domain of TCR clone 149653 (TRAV12-3, TRAJ17)
CAMTLTGNQLTF

SEQ ID NO: 299306 - protein, 18 aa, Homo sapiens
  CDR3 for beta chain variable domain of TCR clone 149653 (TRBV4-3, TRBJ1-6)
CASSQETPASSYNSPLHF

SEQ ID NO: 299307 - protein, 17 aa, Homo sapiens
  CDR3 for alpha chain variable domain of TCR clone 149654 (TRAV8-6, TRAJ58)
CDVSSWVGETSGSRLTF

SEQ ID NO: 299308 - protein, 14 aa, Homo sapiens
  CDR3 for beta chain variable domain of TCR clone 149654 (TRBV4-2, TRBJ2-1)
CASGLDRAYNEQFF

SEQ ID NO: 299309 - protein, 17 aa, Homo sapiens
  CDR3 for alpha chain variable domain of TCR clone 149655 (TRAV3, TRAJ6)
CAVRDGPRAGGSYVPTF

SEQ ID NO: 299310 - protein, 14 aa, Homo sapiens
  CDR3 for beta chain variable domain of TCR clone 149655 (TRBV7-2, TRBJ2-7)
CASSPTTSFYEQYF

SEQ ID NO: 299311 - protein, 11 aa, Homo sapiens
  CDR3 for alpha chain variable domain of TCR clone 149656 (TRAV12-2, TRAJ49)
CALQGGNQFYF

SEQ ID NO: 299312 - protein, 10 aa, Homo sapiens
  CDR3 for beta chain variable domain of TCR clone 149656 (TRBV15, TRBJ2-7)
AETGGYEQYF

SEQ ID NO: 299313 - protein, 14 aa, Homo sapiens
  CDR3 for alpha chain variable domain of TCR clone 149657 (TRAV26-1, TRAJ38)
CIADNAGNNRKLIW

SEQ ID NO: 299314 - protein, 14 aa, Homo sapiens
  CDR3 for beta chain variable domain of TCR clone 149657 (TRBV4-1, TRBJ2-2)
CARSQAVNTGELFF

SEQ ID NO: 299315 - protein, 14 aa, Homo sapiens
  CDR3 for alpha chain variable domain of TCR clone 149658 (TRAV3, TRAJ33)
CAVRDMDSNYQLIW

SEQ ID NO: 299316 - protein, 19 aa, Homo sapiens
  CDR3 for beta chain variable domain of TCR clone 149658 (TRBV7-3, TRBJ1-2)
CASSFSQGNDGELWLHLRF

SEQ ID NO: 299317 - protein, 15 aa, Homo sapiens
  CDR3 for alpha chain variable domain of TCR clone 149659 (TRAV23/DV6, TRAJ37)
CAAGEGSGNTGNLIF

SEQ ID NO: 299318 - protein, 17 aa, Homo sapiens
  CDR3 for beta chain variable domain of TCR clone 149659 (TRBV20-1, TRBJ2-7)
CSATRAGGVAGVEEQYF

SEQ ID NO: 299319 - protein, 12 aa, Homo sapiens
  CDR3 for alpha chain variable domain of TCR clone 149660 (TRAV13-1, TRAJ27)
CAAHTNAGKSTL

SEQ ID NO: 299320 - protein, 15 aa, Homo sapiens
  CDR3 for beta chain variable domain of TCR clone 149660 (TRBV7-9, TRBJ1-6)
CASSSPGRGNSPLHF

SEQ ID NO: 299321 - protein, 15 aa, Homo sapiens
  CDR3 for alpha chain variable domain of TCR clone 149661 (TRAV3, TRAJ20)
CAVRDSRSNDYNLSF

SEQ ID NO: 299322 - protein, 14 aa, Homo sapiens
  CDR3 for beta chain variable domain of TCR clone 149661 (TRBV20-1, TRBJ2-7)
CSARRGNGIYEQYF

SEQ ID NO: 299323 - protein, 12 aa, Homo sapiens
  CDR3 for alpha chain variable domain of TCR clone 149662 (TRAV3, TRAJ27)
CAGRDKAGKSTF

SEQ ID NO: 299324 - protein, 14 aa, Homo sapiens
  CDR3 for beta chain variable domain of TCR clone 149662 (TRBV15, TRBJ2-5)
CATSIGGLGETQYF

SEQ ID NO: 299325 - protein, 14 aa, Homo sapiens
  CDR3 for alpha chain variable domain of TCR clone 149663 (TRAV16, TRAJ33)
CALSAMDSNYQLIW

SEQ ID NO: 299326 - protein, 14 aa, Homo sapiens
  CDR3 for beta chain variable domain of TCR clone 149663 (TRBV4-2, TRBJ2-1)
RASGLDRAYNEQFF

SEQ ID NO: 299327 - protein, 16 aa, Homo sapiens
  CDR3 for alpha chain variable domain of TCR clone 149664 (TRAV30, TRAJ24)
CGTEIVDADSWGKFQC

SEQ ID NO: 299328 - protein, 17 aa, Homo sapiens
  CDR3 for beta chain variable domain of TCR clone 149664 (TRBV20-1, TRBJ2-1)
CSAPPRLAGTRYNEQFF

SEQ ID NO: 299329 - protein, 13 aa, Homo sapiens
  CDR3 for alpha chain variable domain of TCR clone 149665 (TRAV21, TRAJ15)
CAVRNQAGTALIF

SEQ ID NO: 299330 - protein, 15 aa, Homo sapiens
  CDR3 for beta chain variable domain of TCR clone 149665 (TRBV5-1, TRBJ2-1)
CASTGSGRTYNEQFF

SEQ ID NO: 299331 - protein, 12 aa, Homo sapiens
  CDR3 for alpha chain variable domain of TCR clone 149666 (TRAV12-3, TRAJ17)
CAMTLTGNKLTF

SEQ ID NO: 299332 - protein, 17 aa, Homo sapiens
  CDR3 for beta chain variable domain of TCR clone 149666 (TRBV11-2, TRBJ2-4)
CASSSVGPGGHRNIQYF

SEQ ID NO: 299333 - protein, 13 aa, Homo sapiens
  CDR3 for alpha chain variable domain of TCR clone 149667 (TRAV21, TRAJ27)
CAARPGNAGKSTF

SEQ ID NO: 299334 - protein, 15 aa, Homo sapiens
  CDR3 for beta chain variable domain of TCR clone 149667 (TRBV11-2, TRBJ1-2)
CASSLEGVQRNGYTF

SEQ ID NO: 299335 - protein, 14 aa, Homo sapiens
  CDR3 for alpha chain variable domain of TCR clone 149668 (TRAV13-1, TRAJ35)
CAASKGGFGNVLHC

SEQ ID NO: 299336 - protein, 13 aa, Homo sapiens
  CDR3 for beta chain variable domain of TCR clone 149668 (TRBV7-3, TRBJ1-1)
CASSQDWGAAAFF

SEQ ID NO: 299337 - protein, 13 aa, Homo sapiens
  CDR3 for alpha chain variable domain of TCR clone 149669 (TRAV12-3, TRAJ33)
CAMSVNSNYQLIW

SEQ ID NO: 299338 - protein, 16 aa, Homo sapiens
  CDR3 for beta chain variable domain of TCR clone 149669 (TRBV28, TRBJ2-1)
CASSSPEYPRDNEQFF

SEQ ID NO: 299339 - protein, 15 aa, Homo sapiens
  CDR3 for alpha chain variable domain of TCR clone 149670 (TRAV12-1, TRAJ9)
CVVSFGDTGGFKTIF

SEQ ID NO: 299340 - protein, 15 aa, Homo sapiens
  CDR3 for beta chain variable domain of TCR clone 149670 (TRBV19, TRBJ1-2)
CASSVGQVLNYGYTF

SEQ ID NO: 299341 - protein, 16 aa, Homo sapiens
  CDR3 for alpha chain variable domain of TCR clone 149671 (TRAV17, TRAJ35)
CATAEGGIGFGNVLHC

SEQ ID NO: 299342 - protein, 13 aa, Homo sapiens
  CDR3 for beta chain variable domain of TCR clone 149671 (TRBV24-1, TRBJ2-2)
CATSDWSTGELFF

SEQ ID NO: 299343 - protein, 15 aa, Homo sapiens
  CDR3 for alpha chain variable domain of TCR clone 149672 (TRAV8-4, TRAJ6)
CAVSAPSGESYIPTF

SEQ ID NO: 299344 - protein, 15 aa, Homo sapiens
  CDR3 for beta chain variable domain of TCR clone 149672 (TRBV2, TRBJ2-1)
CASSEARSAYNEQFF

SEQ ID NO: 299345 - protein, 11 aa, Homo sapiens
  CDR3 for alpha chain variable domain of TCR clone 149673 (TRAV13-1, TRAJ15)
CAATQGTALIF

SEQ ID NO: 299346 - protein, 13 aa, Homo sapiens
  CDR3 for beta chain variable domain of TCR clone 149673 (TRBV19, TRBJ2-1)
CATSRGVYNEQFF

SEQ ID NO: 299347 - protein, 13 aa, Homo sapiens
  CDR3 for alpha chain variable domain of TCR clone 149674 (TRAV13-2, TRAJ15)
CAERPQAGTALIF

SEQ ID NO: 299348 - protein, 15 aa, Homo sapiens
  CDR3 for beta chain variable domain of TCR clone 149674 (TRBV11-2, TRBJ2-7)
CASRFPVTGGYEQYF

SEQ ID NO: 299349 - protein, 12 aa, Homo sapiens
  CDR3 for alpha chain variable domain of TCR clone 149675 (TRAV13-2, TRAJ41)
CAKNIGRYALNY

SEQ ID NO: 299350 - protein, 12 aa, Homo sapiens
  CDR3 for beta chain variable domain of TCR clone 149675 (TRBV7-9, TRBJ1-1)
CASSLSGGVAFF

SEQ ID NO: 299351 - protein, 14 aa, Homo sapiens
  CDR3 for alpha chain variable domain of TCR clone 149676 (TRAV35, TRAJ50)
SAGHRKTSYDKVIF

SEQ ID NO: 299352 - protein, 17 aa, Homo sapiens
  CDR3 for beta chain variable domain of TCR clone 149676 (TRBV7-8, TRBJ2-6)
CASSAGTGGAGANVLTF

SEQ ID NO: 299353 - protein, 13 aa, Homo sapiens
  CDR3 for alpha chain variable domain of TCR clone 149677 (TRAV8-3, TRAJ28)
CAVGAVGSYQLTF

SEQ ID NO: 299354 - protein, 14 aa, Homo sapiens
  CDR3 for beta chain variable domain of TCR clone 149677 (TRBV7-8, TRBJ2-3)
CASSSRDSTDTQYF

SEQ ID NO: 299355 - protein, 18 aa, Homo sapiens
  CDR3 for alpha chain variable domain of TCR clone 149678 (TRAV29/DV5, TRAJ26)
CSVLLFSKRKPEGQNFVF

SEQ ID NO: 299356 - protein, 17 aa, Homo sapiens
  CDR3 for beta chain variable domain of TCR clone 149678 (TRBV20-1, TRBJ2-2)
CSASGSGQGGLTGELFF

SEQ ID NO: 299357 - protein, 15 aa, Homo sapiens
  CDR3 for alpha chain variable domain of TCR clone 149679 (TRAV21, TRAJ53)
CAVRQSGGSNYKLTF

SEQ ID NO: 299358 - protein, 15 aa, Homo sapiens
  CDR3 for beta chain variable domain of TCR clone 149679 (TRBV11-2, TRBJ2-1)
CASSLTSGGYNEQFF

SEQ ID NO: 299359 - protein, 12 aa, Homo sapiens
  CDR3 for alpha chain variable domain of TCR clone 149680 (TRAV12-1, TRAJ40)
CVVYSGTYKYIF

SEQ ID NO: 299360 - protein, 15 aa, Homo sapiens
  CDR3 for beta chain variable domain of TCR clone 149680 (TRBV11-3, TRBJ2-1)
CASSLGDSSHNEQFF

SEQ ID NO: 299361 - protein, 17 aa, Homo sapiens
  CDR3 for alpha chain variable domain of TCR clone 149681 (TRAV17, TRAJ52)
CATDRNAGGTSYGKLTF

SEQ ID NO: 299362 - protein, 13 aa, Homo sapiens
  CDR3 for beta chain variable domain of TCR clone 149681 (TRBV20-1, TRBJ2-7)
CSATHTSGYEQYF

SEQ ID NO: 299363 - protein, 14 aa, Homo sapiens
  CDR3 for alpha chain variable domain of TCR clone 149682 (TRAV26-1, TRAJ45)
CIEVTGGGADGLTF

SEQ ID NO: 299364 - protein, 13 aa, Homo sapiens
  CDR3 for beta chain variable domain of TCR clone 149682 (TRBV12-4, TRBJ1-5)
CASSTDRAQPQHF

SEQ ID NO: 299365 - protein, 13 aa, Homo sapiens
  CDR3 for alpha chain variable domain of TCR clone 149683 (TRAV1-2, TRAJ9)
CAVLNTGGFITIF

SEQ ID NO: 299366 - protein, 14 aa, Homo sapiens
  CDR3 for beta chain variable domain of TCR clone 149683 (TRBV20-1, TRBJ2-3)
CSARGGTSTDTQYF

SEQ ID NO: 299367 - protein, 15 aa, Homo sapiens
  CDR3 for alpha chain variable domain of TCR clone 149684 (TRAV12-1, TRAJ26)
CVVNREDNYGQNFVF

SEQ ID NO: 299368 - protein, 14 aa, Homo sapiens
  CDR3 for beta chain variable domain of TCR clone 149684 (TRBV12-4, TRBJ1-1)
CASSLGTGGTEAFF

SEQ ID NO: 299369 - protein, 12 aa, Homo sapiens
  CDR3 for alpha chain variable domain of TCR clone 149685 (TRAV13-1, TRAJ27)
CAAKSDTGKSTF

SEQ ID NO: 299370 - protein, 14 aa, Homo sapiens
  CDR3 for beta chain variable domain of TCR clone 149685 (TRBV20-1, TRBJ2-3)
CSARGGTSTDTQCF

SEQ ID NO: 299371 - protein, 13 aa, Homo sapiens
  CDR3 for alpha chain variable domain of TCR clone 149686 (TRAV3, TRAJ20)
CAVRDTPPYKLSF

SEQ ID NO: 299372 - protein, 15 aa, Homo sapiens
  CDR3 for beta chain variable domain of TCR clone 149686 (TRBV19, TRBJ2-3)
CAAGDTNAPNDTQYF

SEQ ID NO: 299373 - protein, 14 aa, Homo sapiens
  CDR3 for alpha chain variable domain of TCR clone 149687 (TRAV23/DV6, TRAJ24)
CAASLSDSWGKLQF

SEQ ID NO: 299374 - protein, 16 aa, Homo sapiens
  CDR3 for beta chain variable domain of TCR clone 149687 (TRBV7-9, TRBJ2-6)
CASSLKGPLRAKALTF

SEQ ID NO: 299375 - protein, 10 aa, Homo sapiens
  CDR3 for alpha chain variable domain of TCR clone 149688 (TRAV17, TRAJ36)
CATAAGNLFF

SEQ ID NO: 299376 - protein, 12 aa, Homo sapiens
  CDR3 for beta chain variable domain of TCR clone 149688 (TRBV11-2, TRBJ2-4)
CASSSASGSEYF

SEQ ID NO: 299377 - protein, 13 aa, Homo sapiens
  CDR3 for alpha chain variable domain of TCR clone 149689 (TRAV16, TRAJ47)
CALSRGYGNKLVF

SEQ ID NO: 299378 - protein, 13 aa, Homo sapiens
  CDR3 for beta chain variable domain of TCR clone 149689 (TRBV19, TRBJ2-1)
CASTNSDVGEQFF

SEQ ID NO: 299379 - protein, 12 aa, Homo sapiens
  CDR3 for alpha chain variable domain of TCR clone 149690 (TRAV27, TRAJ9)
CAGESGGFKNIF

SEQ ID NO: 299380 - protein, 18 aa, Homo sapiens
  CDR3 for beta chain variable domain of TCR clone 149690 (TRBV10-2, TRBJ2-2)
CISAPAVHRQADAGELFF

SEQ ID NO: 299381 - protein, 13 aa, Homo sapiens
  CDR3 for alpha chain variable domain of TCR clone 149691 (TRAV27, TRAJ41)
CAGEGNSGYALNF

SEQ ID NO: 299382 - protein, 16 aa, Homo sapiens
  CDR3 for beta chain variable domain of TCR clone 149691 (TRBV11-2, TRBJ2-5)
CASSGQGYSPQETQYF

SEQ ID NO: 299383 - protein, 13 aa, Homo sapiens
  CDR3 for alpha chain variable domain of TCR clone 149692 (TRAV20, TRAJ40)
CAVPFSGTYKYIV

SEQ ID NO: 299384 - protein, 13 aa, Homo sapiens
  CDR3 for beta chain variable domain of TCR clone 149692 (TRBV15, TRBJ2-5)
CATSQIGEETQYF

SEQ ID NO: 299385 - protein, 19 aa, Homo sapiens
  CDR3 for alpha chain variable domain of TCR clone 149693 (TRAV21, TRAJ20)
SLVTQPPTSVLPNDYKLSF

SEQ ID NO: 299386 - protein, 17 aa, Homo sapiens
  CDR3 for beta chain variable domain of TCR clone 149693 (TRBV7-2, TRBJ2-3)
CASSLAGGLAGTAGQYF

SEQ ID NO: 299387 - protein, 13 aa, Homo sapiens
  CDR3 for alpha chain variable domain of TCR clone 149694 (TRAV12-3, TRAJ9)
CAMSAEGGFKTIF

SEQ ID NO: 299388 - protein, 14 aa, Homo sapiens
  CDR3 for beta chain variable domain of TCR clone 149694 (TRBV6-1, TRBJ2-7)
CASSERVNPYEQYF

SEQ ID NO: 299389 - protein, 15 aa, Homo sapiens
  CDR3 for alpha chain variable domain of TCR clone 149695 (TRAV25, TRAJ52)
CAGTSGGTSYGKLTF

SEQ ID NO: 299390 - protein, 16 aa, Homo sapiens
  CDR3 for beta chain variable domain of TCR clone 149695 (TRBV5-4, TRBJ1-6)
CASSLGQGLYNSPLHF

SEQ ID NO: 299391 - protein, 15 aa, Homo sapiens
  CDR3 for alpha chain variable domain of TCR clone 149696 (TRAV13-1, TRAJ32)
CAASNGWWGYKQAHL

SEQ ID NO: 299392 - protein, 15 aa, Homo sapiens
  CDR3 for beta chain variable domain of TCR clone 149696 (TRBV20-1, TRBJ2-7)
CSARDRVSGMDEQYF

SEQ ID NO: 299393 - protein, 12 aa, Homo sapiens
  CDR3 for alpha chain variable domain of TCR clone 149697 (TRAV12-2, TRAJ52)
IGGGSSYGKLTF

SEQ ID NO: 299394 - protein, 13 aa, Homo sapiens
  CDR3 for beta chain variable domain of TCR clone 149697 (TRBV12-4, TRBJ1-1)
CASSPGTGFEAFF

SEQ ID NO: 299395 - protein, 15 aa, Homo sapiens
  CDR3 for alpha chain variable domain of TCR clone 149698 (TRAV17, TRAJ23)
CATDAEDNQGGKLIF

SEQ ID NO: 299396 - protein, 12 aa, Homo sapiens
  CDR3 for beta chain variable domain of TCR clone 149698 (TRBV2, TRBJ2-1)
CSKREGYNEQFF

SEQ ID NO: 299397 - protein, 13 aa, Homo sapiens
  CDR3 for alpha chain variable domain of TCR clone 149699 (TRAV29/DV5, TRAJ31)
CAASRNNNARPMF

SEQ ID NO: 299398 - protein, 12 aa, Homo sapiens
  CDR3 for beta chain variable domain of TCR clone 149699 (TRBV14, TRBJ2-7)
CASSSLKGEQYF

SEQ ID NO: 299399 - protein, 12 aa, Homo sapiens
  CDR3 for alpha chain variable domain of TCR clone 149700 (TRAV13-1, TRAJ53)
AASGGSNYKITF

SEQ ID NO: 299400 - protein, 15 aa, Homo sapiens
  CDR3 for beta chain variable domain of TCR clone 149700 (TRBV28, TRBJ2-1)
CASSIIAGGRSEQFF

SEQ ID NO: 299401 - protein, 16 aa, Homo sapiens
  CDR3 for alpha chain variable domain of TCR clone 149701 (TRAV16, TRAJ4)
FALSRMFSGGYNKLIF

SEQ ID NO: 299402 - protein, 13 aa, Homo sapiens
  CDR3 for beta chain variable domain of TCR clone 149701 (TRBV10-3, TRBJ1-2)
CAISERDSYGYTF

SEQ ID NO: 299403 - protein, 13 aa, Homo sapiens
  CDR3 for alpha chain variable domain of TCR clone 149702 (TRAV8-3, TRAJ36)
CAVGATGANNPFF

SEQ ID NO: 299404 - protein, 17 aa, Homo sapiens
  CDR3 for beta chain variable domain of TCR clone 149702 (TRBV11-2, TRBJ2-1)
CASSLYHPGVEYNEQFF

SEQ ID NO: 299405 - protein, 12 aa, Homo sapiens
  CDR3 for alpha chain variable domain of TCR clone 149703 (TRAV12-3, TRAJ17)
CAMTLTGNKPTF

SEQ ID NO: 299406 - protein, 14 aa, Homo sapiens
  CDR3 for beta chain variable domain of TCR clone 149703 (TRBV18, TRBJ2-7)
CASSPRGGAYEQYF

SEQ ID NO: 299407 - protein, 16 aa, Homo sapiens
  CDR3 for alpha chain variable domain of TCR clone 149704 (TRAV14/DV4, TRAJ54)
CAMREGRIQGAQKLVF

SEQ ID NO: 299408 - protein, 15 aa, Homo sapiens
  CDR3 for beta chain variable domain of TCR clone 149704 (TRBV19, TRBJ2-5)
CASHGLAGAKETQYF

SEQ ID NO: 299409 - protein, 14 aa, Homo sapiens
  CDR3 for alpha chain variable domain of TCR clone 149705 (TRAV26-1, TRAJ21)
CLVRPPYNFNKFYF

SEQ ID NO: 299410 - protein, 14 aa, Homo sapiens
  CDR3 for beta chain variable domain of TCR clone 149705 (TRBV11-3, TRBJ2-1)
CASSATTSGSIQFF

SEQ ID NO: 299411 - protein, 14 aa, Homo sapiens
  CDR3 for alpha chain variable domain of TCR clone 149706 (TRAV8-3, TRAJ4)
CAVGAAGGYNKLIF

SEQ ID NO: 299412 - protein, 14 aa, Homo sapiens
  CDR3 for beta chain variable domain of TCR clone 149706 (TRBV6-5, TRBJ2-1)
CSSYDAGAGNEQFF

SEQ ID NO: 299413 - protein, 16 aa, Homo sapiens
  CDR3 for alpha chain variable domain of TCR clone 149707 (TRAV30, TRAJ24)
CGAEIVDADSWGKFQF

SEQ ID NO: 299414 - protein, 15 aa, Homo sapiens
  CDR3 for beta chain variable domain of TCR clone 149707 (TRBV28, TRBJ2-1)
CASSIIAGGRSEQFF

SEQ ID NO: 299415 - protein, 14 aa, Homo sapiens
  CDR3 for alpha chain variable domain of TCR clone 149708 (TRAV17, TRAJ37)
CATDGASNTGKLIF

SEQ ID NO: 299416 - protein, 13 aa, Homo sapiens
  CDR3 for beta chain variable domain of TCR clone 149708 (TRBV11-2, TRBJ2-1)
CASSLDLVNEQFF

SEQ ID NO: 299417 - protein, 14 aa, Homo sapiens
  CDR3 for alpha chain variable domain of TCR clone 149709 (TRAV21, TRAJ58)
CAVRRGRSGSRLTF

SEQ ID NO: 299418 - protein, 13 aa, Homo sapiens
  CDR3 for beta chain variable domain of TCR clone 149709 (TRBV7-2, TRBJ1-6)
CASSLKFDPALHF

SEQ ID NO: 299419 - protein, 13 aa, Homo sapiens
  CDR3 for alpha chain variable domain of TCR clone 149710 (TRAV12-3, TRAJ9)
CAMRNTVGFKTIF

SEQ ID NO: 299420 - protein, 16 aa, Homo sapiens
  CDR3 for beta chain variable domain of TCR clone 149710 (TRBV20-1, TRBJ1-4)
CSAPGQGLLTNEKLFF

SEQ ID NO: 299421 - protein, 13 aa, Homo sapiens
  CDR3 for alpha chain variable domain of TCR clone 149711 (TRAV38-1, TRAJ42)
CARWGGSQGNLIF

SEQ ID NO: 299422 - protein, 12 aa, Homo sapiens
  CDR3 for beta chain variable domain of TCR clone 149711 (TRBV14, TRBJ1-1)
CASSQLKGLAFF

SEQ ID NO: 299423 - protein, 13 aa, Homo sapiens
  CDR3 for alpha chain variable domain of TCR clone 149712 (TRAV21, TRAJ45)
CAVMGGGADGITF

SEQ ID NO: 299424 - protein, 14 aa, Homo sapiens
  CDR3 for beta chain variable domain of TCR clone 149712 (TRBV4-3, TRBJ1-4)
CASSPLQRNEKLFF

SEQ ID NO: 299425 - protein, 14 aa, Homo sapiens
  CDR3 for alpha chain variable domain of TCR clone 149713 (TRAV8-6, TRAJ13)
CAVFSSGGDQKVTF

SEQ ID NO: 299426 - protein, 14 aa, Homo sapiens
  CDR3 for beta chain variable domain of TCR clone 149713 (TRBV7-2, TRBJ1-5)
CASSLTGNNQPQHF

SEQ ID NO: 299427 - protein, 12 aa, Homo sapiens
  CDR3 for alpha chain variable domain of TCR clone 149714 (TRAV29/DV5, TRAJ34)
CAARHNTDKLIL

SEQ ID NO: 299428 - protein, 14 aa, Homo sapiens
  CDR3 for beta chain variable domain of TCR clone 149714 (TRBV7-2, TRBJ1-5)
CASSTQGAGQPQHF

SEQ ID NO: 299429 - protein, 13 aa, Homo sapiens
  CDR3 for alpha chain variable domain of TCR clone 149715 (TRAV36/DV7, TRAJ26)
CAVADNYGQNFVF

SEQ ID NO: 299430 - protein, 14 aa, Homo sapiens
  CDR3 for beta chain variable domain of TCR clone 149715 (TRBV4-1, TRBJ1-1)
CASSPRVDNTAAFF

SEQ ID NO: 299431 - protein, 15 aa, Homo sapiens
  CDR3 for alpha chain variable domain of TCR clone 149716 (TRAV3, TRAJ9)
CAVRDSNTGGFKTIF

SEQ ID NO: 299432 - protein, 18 aa, Homo sapiens
  CDR3 for beta chain variable domain of TCR clone 149716 (TRBV7-9, TRBJ2-7)
CASSLTTSGSRTWYEQYF

SEQ ID NO: 299433 - protein, 13 aa, Homo sapiens
  CDR3 for alpha chain variable domain of TCR clone 149717 (TRAV29/DV5, TRAJ31)
CAASRNNNARLMF

SEQ ID NO: 299434 - protein, 12 aa, Homo sapiens
  CDR3 for beta chain variable domain of TCR clone 149717 (TRBV14, TRBJ2-5)
CASSHRKETQYF

SEQ ID NO: 299435 - protein, 14 aa, Homo sapiens
  CDR3 for alpha chain variable domain of TCR clone 149718 (TRAV8-3, TRAJ23)
CAVIIYNEGGKLIF

SEQ ID NO: 299436 - protein, 15 aa, Homo sapiens
  CDR3 for beta chain variable domain of TCR clone 149718 (TRBV18, TRBJ2-1)
CASSPPSASYNEQFF

SEQ ID NO: 299437 - protein, 13 aa, Homo sapiens
  CDR3 for alpha chain variable domain of TCR clone 149719 (TRAV20, TRAJ9)
CAVPDSGGFKTIF

SEQ ID NO: 299438 - protein, 15 aa, Homo sapiens
  CDR3 for beta chain variable domain of TCR clone 149719 (TRBV27, TRBJ2-7)
CASSKAGRGGYEQYF

SEQ ID NO: 299439 - protein, 14 aa, Homo sapiens
  CDR3 for alpha chain variable domain of TCR clone 149720 (TRAV12-2, TRAJ17)
CAVLFKAAGNKLTF

SEQ ID NO: 299440 - protein, 15 aa, Homo sapiens
  CDR3 for beta chain variable domain of TCR clone 149720 (TRBV20-1, TRBJ2-7)
CSARKGLAESYEQYF

SEQ ID NO: 299441 - protein, 13 aa, Homo sapiens
  CDR3 for alpha chain variable domain of TCR clone 149721 (TRAV8-3, TRAJ21)
CAVGAYNFNKFYF

SEQ ID NO: 299442 - protein, 13 aa, Homo sapiens
  CDR3 for beta chain variable domain of TCR clone 149721 (TRBV19, TRBJ1-2)
CASSVPGQDGYTF

SEQ ID NO: 299443 - protein, 15 aa, Homo sapiens
  CDR3 for alpha chain variable domain of TCR clone 149722 (TRAV12-3, TRAJ11)
CAMSEENSGYSTLTF

SEQ ID NO: 299444 - protein, 14 aa, Homo sapiens
  CDR3 for beta chain variable domain of TCR clone 149722 (TRBV7-3, TRBJ1-1)
CASSLKGGNTEAFF

SEQ ID NO: 299445 - protein, 12 aa, Homo sapiens
  CDR3 for alpha chain variable domain of TCR clone 149723 (TRAV13-2, TRAJ23)
CAERHRGGKLIF

SEQ ID NO: 299446 - protein, 14 aa, Homo sapiens
  CDR3 for beta chain variable domain of TCR clone 149723 (TRBV2, TRBJ2-7)
CASSLTSGCYEQYF

SEQ ID NO: 299447 - protein, 13 aa, Homo sapiens
  CDR3 for alpha chain variable domain of TCR clone 149724 (TRAV12-1, TRAJ6)
CVVYPGGSYITTF

SEQ ID NO: 299448 - protein, 13 aa, Homo sapiens
  CDR3 for beta chain variable domain of TCR clone 149724 (TRBV4-2, TRBJ1-1)
CASSQAGNTEAFF

SEQ ID NO: 299449 - protein, 10 aa, Homo sapiens
  CDR3 for alpha chain variable domain of TCR clone 149725 (TRAV12-1, TRAJ20)
CAIYFQRLQA

SEQ ID NO: 299450 - protein, 12 aa, Homo sapiens
  CDR3 for beta chain variable domain of TCR clone 149725 (TRBV12-4, TRBJ2-7)
CASSLGGYEQYF

SEQ ID NO: 299451 - protein, 17 aa, Homo sapiens
  CDR3 for alpha chain variable domain of TCR clone 149726 (TRAV8-3, TRAJ13)
CAVGAGLGVTRKLPLEL

SEQ ID NO: 299452 - protein, 15 aa, Homo sapiens
  CDR3 for beta chain variable domain of TCR clone 149726 (TRBV28, TRBJ2-7)
CASSPGGRGFYEQYF

SEQ ID NO: 299453 - protein, 10 aa, Homo sapiens
  CDR3 for alpha chain variable domain of TCR clone 149727 (TRAV30, TRAJ48)
CGIGNEKLTF

SEQ ID NO: 299454 - protein, 15 aa, Homo sapiens
  CDR3 for beta chain variable domain of TCR clone 149727 (TRBV24-1, TRBJ2-5)
CATSETTGAVGAQYF

SEQ ID NO: 299455 - protein, 12 aa, Homo sapiens
  CDR3 for alpha chain variable domain of TCR clone 149728 (TRAV16, TRAJ10)
CSRTGGGNKLTF

SEQ ID NO: 299456 - protein, 12 aa, Homo sapiens
  CDR3 for beta chain variable domain of TCR clone 149728 (TRBV11-3, TRBJ1-1)
CDSSHRQGEAFF

SEQ ID NO: 299457 - protein, 14 aa, Homo sapiens
  CDR3 for alpha chain variable domain of TCR clone 149729 (TRAV17, TRAJ39)
CATDPVRAGNMLTF

SEQ ID NO: 299458 - protein, 17 aa, Homo sapiens
  CDR3 for beta chain variable domain of TCR clone 149729 (TRBV19, TRBJ1-1)
CASSMGPTLTGGIGAFF

SEQ ID NO: 299459 - protein, 12 aa, Homo sapiens
  CDR3 for alpha chain variable domain of TCR clone 149730 (TRAV21, TRAJ33)
CAKMDRNYQLIW

SEQ ID NO: 299460 - protein, 17 aa, Homo sapiens
  CDR3 for beta chain variable domain of TCR clone 149730 (TRBV20-1, TRBJ2-2)
CSASGSGQGGLTGELFF

SEQ ID NO: 299461 - protein, 15 aa, Homo sapiens
  CDR3 for alpha chain variable domain of TCR clone 149731 (TRAV4, TRAJ8)
FPVGEQHTGCQKLVF

SEQ ID NO: 299462 - protein, 15 aa, Homo sapiens
  CDR3 for beta chain variable domain of TCR clone 149731 (TRBV7-9, TRBJ2-5)
CASSNRDYLQETQYF

SEQ ID NO: 299463 - protein, 14 aa, Homo sapiens
  CDR3 for alpha chain variable domain of TCR clone 149732 (TRAV12-2, TRAJ17)
CAVLFKAAGNKLTF

SEQ ID NO: 299464 - protein, 13 aa, Homo sapiens
  CDR3 for beta chain variable domain of TCR clone 149732 (TRBV4-3, TRBJ1-1)
CASSQVEGSMAFF

SEQ ID NO: 299465 - protein, 12 aa, Homo sapiens
  CDR3 for alpha chain variable domain of TCR clone 149733 (TRAV26-1, TRAJ39)
CIVRVEGNMLTF

SEQ ID NO: 299466 - protein, 15 aa, Homo sapiens
  CDR3 for beta chain variable domain of TCR clone 149733 (TRBV10-1, TRBJ2-1)
CASSTGTELYNEQFF

SEQ ID NO: 299467 - protein, 14 aa, Homo sapiens
  CDR3 for alpha chain variable domain of TCR clone 149734 (TRAV21, TRAJ38)
CAVANAGNNRKLIW

SEQ ID NO: 299468 - protein, 16 aa, Homo sapiens
  CDR3 for beta chain variable domain of TCR clone 149734 (TRBV5-4, TRBJ2-1)
CASSVALAGAYNEQFF

SEQ ID NO: 299469 - protein, 12 aa, Homo sapiens
  CDR3 for alpha chain variable domain of TCR clone 149735 (TRAV8-3, TRAJ20)
CAVGANDYKLSF

SEQ ID NO: 299470 - protein, 14 aa, Homo sapiens
  CDR3 for beta chain variable domain of TCR clone 149735 (TRBV19, TRBJ2-5)
CASSMTGQQETQYF

SEQ ID NO: 299471 - protein, 12 aa, Homo sapiens
  CDR3 for alpha chain variable domain of TCR clone 149736 (TRAV1-1, TRAJ8)
CAGGTGFQKLVF

SEQ ID NO: 299472 - protein, 15 aa, Homo sapiens
  CDR3 for beta chain variable domain of TCR clone 149736 (TRBV12-4, TRBJ2-5)
CASSPPTGLQETQYF

SEQ ID NO: 299473 - protein, 14 aa, Homo sapiens
  CDR3 for alpha chain variable domain of TCR clone 149737 (TRAV23/DV6, TRAJ37)
CAASTSSNTGKLIF

SEQ ID NO: 299474 - protein, 18 aa, Homo sapiens
  CDR3 for beta chain variable domain of TCR clone 149737 (TRBV25-1, TRBJ1-2)
CASSGLQNGQGLIFGYTF

SEQ ID NO: 299475 - protein, 13 aa, Homo sapiens
  CDR3 for alpha chain variable domain of TCR clone 149738 (TRAV9-2, TRAJ53)
CALSVGSNYKLTF

SEQ ID NO: 299476 - protein, 17 aa, Homo sapiens
  CDR3 for beta chain variable domain of TCR clone 149738 (TRBV11-2, TRBJ2-1)
CASSLYPPGVEYNEQFF

SEQ ID NO: 299477 - protein, 17 aa, Homo sapiens
  CDR3 for alpha chain variable domain of TCR clone 149739 (TRAV3, TRAJ6)
CAVRAGPRAGGSYIHTF

SEQ ID NO: 299478 - protein, 14 aa, Homo sapiens
  CDR3 for beta chain variable domain of TCR clone 149739 (TRBV7-2, TRBJ2-7)
CASSPKTSFYEQYF

SEQ ID NO: 299479 - protein, 17 aa, Homo sapiens
  CDR3 for alpha chain variable domain of TCR clone 149740 (TRAV3, TRAJ12)
CAVRDGGRMDSSYKLIF

SEQ ID NO: 299480 - protein, 14 aa, Homo sapiens
  CDR3 for beta chain variable domain of TCR clone 149740 (TRBV7-8, TRBJ2-3)
CASSLEAGTDTQYF

SEQ ID NO: 299481 - protein, 15 aa, Homo sapiens
  CDR3 for alpha chain variable domain of TCR clone 149741 (TRAV17, TRAJ57)
CATGPSQGGSEKLVF

SEQ ID NO: 299482 - protein, 14 aa, Homo sapiens
  CDR3 for beta chain variable domain of TCR clone 149741 (TRBV20-1, TRBJ1-1)
CSARAVNGYTEAFF

SEQ ID NO: 299483 - protein, 12 aa, Homo sapiens
  CDR3 for alpha chain variable domain of TCR clone 149742 (TRAV20, TRAJ54)
CAVQEGAPKLVF

SEQ ID NO: 299484 - protein, 17 aa, Homo sapiens
  CDR3 for beta chain variable domain of TCR clone 149742 (TRBV13, TRBJ2-3)
CASSLSRVAGGRNTQYF

SEQ ID NO: 299485 - protein, 15 aa, Homo sapiens
  CDR3 for alpha chain variable domain of TCR clone 149743 (TRAV12-1, TRAJ43)
CVVNRGIYNNNDMRF

SEQ ID NO: 299486 - protein, 16 aa, Homo sapiens
  CDR3 for beta chain variable domain of TCR clone 149743 (TRBV19, TRBJ2-3)
CASSFYTTGIGDTQYF

SEQ ID NO: 299487 - protein, 12 aa, Homo sapiens
  CDR3 for alpha chain variable domain of TCR clone 149744 (TRAV13-1, TRAJ49)
CAASPMGNQFYF

SEQ ID NO: 299488 - protein, 12 aa, Homo sapiens
  CDR3 for beta chain variable domain of TCR clone 149744 (TRBV12-4, TRBJ2-1)
CASSLQGSEQFF

SEQ ID NO: 299489 - protein, 16 aa, Homo sapiens
  CDR3 for alpha chain variable domain of TCR clone 149745 (TRAV3, TRAJ10)
CAVRDMRAGGGNKLTF

SEQ ID NO: 299490 - protein, 17 aa, Homo sapiens
  CDR3 for beta chain variable domain of TCR clone 149745 (TRBV15, TRBJ2-3)
CATSGTTSEEGTDTQYF

SEQ ID NO: 299491 - protein, 11 aa, Homo sapiens
  CDR3 for alpha chain variable domain of TCR clone 149746 (TRAV21, TRAJ20)
CCRVNDYKLSF

SEQ ID NO: 299492 - protein, 16 aa, Homo sapiens
  CDR3 for beta chain variable domain of TCR clone 149746 (TRBV6-6, TRBJ2-7)
CASRASGRARSYEQYF

SEQ ID NO: 299493 - protein, 14 aa, Homo sapiens
  CDR3 for alpha chain variable domain of TCR clone 149747 (TRAV12-2, TRAJ40)
YAVKIPSGTYKYIF

SEQ ID NO: 299494 - protein, 13 aa, Homo sapiens
  CDR3 for beta chain variable domain of TCR clone 149747 (TRBV7-9, TRBJ1-2)
CSSSLKQNYGYTF

SEQ ID NO: 299495 - protein, 12 aa, Homo sapiens
  CDR3 for alpha chain variable domain of TCR clone 149748 (TRAV8-3, TRAJ26)
CAGDNYGQNFVF

SEQ ID NO: 299496 - protein, 18 aa, Homo sapiens
  CDR3 for beta chain variable domain of TCR clone 149748 (TRBV12-4, TRBJ2-2)
CASSSVAGTRGRTGELFF

SEQ ID NO: 299497 - protein, 15 aa, Homo sapiens
  CDR3 for alpha chain variable domain of TCR clone 149749 (TRAV21, TRAJ53)
CATLNSGGSNYKLTF

SEQ ID NO: 299498 - protein, 15 aa, Homo sapiens
  CDR3 for beta chain variable domain of TCR clone 149749 (TRBV7-6, TRBJ1-5)
CASSQSSGINQHQHF

SEQ ID NO: 299499 - protein, 12 aa, Homo sapiens
  CDR3 for alpha chain variable domain of TCR clone 149750 (TRAV1-1, TRAJ39)
RAVPVVGNMLTF

SEQ ID NO: 299500 - protein, 18 aa, Homo sapiens
  CDR3 for beta chain variable domain of TCR clone 149750 (TRBV7-9, TRBJ2-7)
CASSLTTSGSRTWYEQYF

SEQ ID NO: 299501 - protein, 11 aa, Homo sapiens
  CDR3 for alpha chain variable domain of TCR clone 149751 (TRAV17, TRAJ9)
CATTGGFKTIL

SEQ ID NO: 299502 - protein, 13 aa, Homo sapiens
  CDR3 for beta chain variable domain of TCR clone 149751 (TRBV6-4, TRBJ1-5)
CASSADLNQPQHF

SEQ ID NO: 299503 - protein, 18 aa, Homo sapiens
  CDR3 for alpha chain variable domain of TCR clone 149752 (TRAV13-1, TRAJ52)
CAAKNPNAGGTSYGKLTF

SEQ ID NO: 299504 - protein, 15 aa, Homo sapiens
  CDR3 for beta chain variable domain of TCR clone 149752 (TRBV11-2, TRBJ2-2)
CASSLDGGNTGELFF

SEQ ID NO: 299505 - protein, 15 aa, Homo sapiens
  CDR3 for alpha chain variable domain of TCR clone 149753 (TRAV13-1, TRAJ32)
CAASIYGGATNKLTF

SEQ ID NO: 299506 - protein, 17 aa, Homo sapiens
  CDR3 for beta chain variable domain of TCR clone 149753 (TRBV7-3, TRBJ2-5)
CASSLGSGRSGSETQYF

SEQ ID NO: 299507 - protein, 13 aa, Homo sapiens
  CDR3 for alpha chain variable domain of TCR clone 149754 (TRAV2, TRAJ40)
CAVVTSGTYKYIF

SEQ ID NO: 299508 - protein, 15 aa, Homo sapiens
  CDR3 for beta chain variable domain of TCR clone 149754 (TRBV3-1, TRBJ2-5)
CASSANLGGPETQYF

SEQ ID NO: 299509 - protein, 13 aa, Homo sapiens
  CDR3 for alpha chain variable domain of TCR clone 149755 (TRAV2, TRAJ40)
CAVVTSGTYNYIF

SEQ ID NO: 299510 - protein, 15 aa, Homo sapiens
  CDR3 for beta chain variable domain of TCR clone 149755 (TRBV28, TRBJ2-1)
CASSGLAEVDNEQFF

SEQ ID NO: 299511 - protein, 15 aa, Homo sapiens
  CDR3 for alpha chain variable domain of TCR clone 149756 (TRAV8-4, TRAJ37)
CAVSRGSGNTGKLIF

SEQ ID NO: 299512 - protein, 15 aa, Homo sapiens
  CDR3 for beta chain variable domain of TCR clone 149756 (TRBV7-3, TRBJ2-3)
CQQLSGYRPEDTQYF

SEQ ID NO: 299513 - protein, 14 aa, Homo sapiens
  CDR3 for alpha chain variable domain of TCR clone 149757 (TRAV17, TRAJ54)
CATDANQGAQKLVV

SEQ ID NO: 299514 - protein, 12 aa, Homo sapiens
  CDR3 for beta chain variable domain of TCR clone 149757 (TRBV6-3, TRBJ2-1)
CARSGSYNAQFF

SEQ ID NO: 299515 - protein, 13 aa, Homo sapiens
  CDR3 for alpha chain variable domain of TCR clone 149758 (TRAV1-2, TRAJ9)
CAVLNTGGFKTIF

SEQ ID NO: 299516 - protein, 14 aa, Homo sapiens
  CDR3 for beta chain variable domain of TCR clone 149758 (TRBV20-1, TRBJ2-3)
CSARSGTSTYTQYF

SEQ ID NO: 299517 - protein, 15 aa, Homo sapiens
  CDR3 for alpha chain variable domain of TCR clone 149759 (TRAV8-4, TRAJ3)
CAVTGENLVQQCFQD

SEQ ID NO: 299518 - protein, 15 aa, Homo sapiens
  CDR3 for beta chain variable domain of TCR clone 149759 (TRBV7-2, TRBJ2-1)
CASSSGLAGGNEQFF

SEQ ID NO: 299519 - protein, 16 aa, Homo sapiens
  CDR3 for alpha chain variable domain of TCR clone 149760 (TRAV3, TRAJ37)
FAVRGKGSGNTGKLIF

SEQ ID NO: 299520 - protein, 16 aa, Homo sapiens
  CDR3 for beta chain variable domain of TCR clone 149760 (TRBV28, TRBJ1-5)
CASSFRGGYSNQPQHF

SEQ ID NO: 299521 - protein, 12 aa, Homo sapiens
  CDR3 for alpha chain variable domain of TCR clone 149761 (TRAV30, TRAJ43)
CGTEERGNDMRF

SEQ ID NO: 299522 - protein, 15 aa, Homo sapiens
  CDR3 for beta chain variable domain of TCR clone 149761 (TRBV7-2, TRBJ2-3)
CASSSTGLETDTQYF

SEQ ID NO: 299523 - protein, 15 aa, Homo sapiens
  CDR3 for alpha chain variable domain of TCR clone 149762 (TRAV3, TRAJ3)
CAVRNGHSSASKIIF

SEQ ID NO: 299524 - protein, 14 aa, Homo sapiens
  CDR3 for beta chain variable domain of TCR clone 149762 (TRBV28, TRBJ1-4)
CASSFGTFDEKLFV

SEQ ID NO: 299525 - protein, 23 aa, Homo sapiens
  CDR3 for alpha chain variable domain of TCR clone 149763 (TRAV12-2, TRAJ36)
SLLIRDSQPSDSATLERANNLFF

SEQ ID NO: 299526 - protein, 12 aa, Homo sapiens
  CDR3 for beta chain variable domain of TCR clone 149763 (TRBV3-1, TRBJ2-1)
CASGGLGNEQFF

SEQ ID NO: 299527 - protein, 19 aa, Homo sapiens
  CDR3 for alpha chain variable domain of TCR clone 149764 (TRAV26-1, TRAJ28)
CIVRVAHAYSGAGSYQLTF

SEQ ID NO: 299528 - protein, 15 aa, Homo sapiens
  CDR3 for beta chain variable domain of TCR clone 149764 (TRBV7-9, TRBJ1-4)
CASSRTGGFNEKLFF

SEQ ID NO: 299529 - protein, 18 aa, Homo sapiens
  CDR3 for alpha chain variable domain of TCR clone 149765 (TRAV12-3, TRAJ52)
CAMSVGGAGGTSYGKLTF

SEQ ID NO: 299530 - protein, 16 aa, Homo sapiens
  CDR3 for beta chain variable domain of TCR clone 149765 (TRBV7-9, TRBJ1-2)
CASSRSLDRGGYGYTF

SEQ ID NO: 299531 - protein, 11 aa, Homo sapiens
  CDR3 for alpha chain variable domain of TCR clone 149766 (TRAV3, TRAJ21)
CAVGNFNKFYF

SEQ ID NO: 299532 - protein, 16 aa, Homo sapiens
  CDR3 for beta chain variable domain of TCR clone 149766 (TRBV18, TRBJ2-2)
CASSPPRTANTGELFF

SEQ ID NO: 299533 - protein, 18 aa, Homo sapiens
  CDR3 for alpha chain variable domain of TCR clone 149767 (TRAV21, TRAJ52)
CAVRPSPAGGTSYGKLTF

SEQ ID NO: 299534 - protein, 14 aa, Homo sapiens
  CDR3 for beta chain variable domain of TCR clone 149767 (TRBV11-3, TRBJ1-6)
CASSFSGGDSPLHF

SEQ ID NO: 299535 - protein, 13 aa, Homo sapiens
  CDR3 for alpha chain variable domain of TCR clone 149768 (TRAV12-3, TRAJ40)
FAMSDSGTYKYIF

SEQ ID NO: 299536 - protein, 11 aa, Homo sapiens
  CDR3 for beta chain variable domain of TCR clone 149768 (TRBV19, TRBJ1-1)
CASSIGSEAFF

SEQ ID NO: 299537 - protein, 11 aa, Homo sapiens
  CDR3 for alpha chain variable domain of TCR clone 149769 (TRAV1-2, TRAJ31)
CAVNTNARLMF

SEQ ID NO: 299538 - protein, 15 aa, Homo sapiens
  CDR3 for beta chain variable domain of TCR clone 149769 (TRBV28, TRBJ2-1)
CASSIIAGGRSEQFF

SEQ ID NO: 299539 - protein, 17 aa, Homo sapiens
  CDR3 for alpha chain variable domain of TCR clone 149770 (TRAV3, TRAJ6)
CAVRDGPRAGGSYIPTF

SEQ ID NO: 299540 - protein, 13 aa, Homo sapiens
  CDR3 for beta chain variable domain of TCR clone 149770 (TRBV28, TRBJ2-7)
CASRSSGVYEQYF

SEQ ID NO: 299541 - protein, 15 aa, Homo sapiens
  CDR3 for alpha chain variable domain of TCR clone 149771 (TRAV20, TRAJ50)
CAVRQMKTSYDKVIF

SEQ ID NO: 299542 - protein, 17 aa, Homo sapiens
  CDR3 for beta chain variable domain of TCR clone 149771 (TRBV28, TRBJ2-7)
CASSPLHRASGVYVQYF

SEQ ID NO: 299543 - protein, 12 aa, Homo sapiens
  CDR3 for alpha chain variable domain of TCR clone 149772 (TRAV4, TRAJ26)
CLVGDYGQNFVF

SEQ ID NO: 299544 - protein, 15 aa, Homo sapiens
  CDR3 for beta chain variable domain of TCR clone 149772 (TRBV9, TRBJ1-6)
CASSVAGTGDSPLHF

SEQ ID NO: 299545 - protein, 15 aa, Homo sapiens
  CDR3 for alpha chain variable domain of TCR clone 149773 (TRAV3, TRAJ5)
CAVRDLDTGRRAPTF

SEQ ID NO: 299546 - protein, 13 aa, Homo sapiens
  CDR3 for beta chain variable domain of TCR clone 149773 (TRBV19, TRBJ1-2)
CASSQGQVYGYTF

SEQ ID NO: 299547 - protein, 12 aa, Homo sapiens
  CDR3 for alpha chain variable domain of TCR clone 149774 (TRAV17, TRAJ12)
CAGGDSSYRLIS

SEQ ID NO: 299548 - protein, 12 aa, Homo sapiens
  CDR3 for beta chain variable domain of TCR clone 149774 (TRBV29-1, TRBJ1-1)
CSESDGNTEAFF

SEQ ID NO: 299549 - protein, 17 aa, Homo sapiens
  CDR3 for alpha chain variable domain of TCR clone 149775 (TRAV26-1, TRAJ36)
CIVRPPGDKTGANNLFF

SEQ ID NO: 299550 - protein, 16 aa, Homo sapiens
  CDR3 for beta chain variable domain of TCR clone 149775 (TRBV19, TRBJ2-1)
CASSKAGPSSYNEQFF

SEQ ID NO: 299551 - protein, 16 aa, Homo sapiens
  CDR3 for alpha chain variable domain of TCR clone 149776 (TRAV8-3, TRAJ22)
CAWDILGPGSARQLTF

SEQ ID NO: 299552 - protein, 14 aa, Homo sapiens
  CDR3 for beta chain variable domain of TCR clone 149776 (TRBV11-2, TRBJ2-7)
CASSLELEGYEQYF

SEQ ID NO: 299553 - protein, 13 aa, Homo sapiens
  CDR3 for alpha chain variable domain of TCR clone 149777 (TRAV12-2, TRAJ37)
CAGGSGSTGELVF

SEQ ID NO: 299554 - protein, 14 aa, Homo sapiens
  CDR3 for beta chain variable domain of TCR clone 149777 (TRBV6-1, TRBJ2-6)
CASQQGAGANVLTF

SEQ ID NO: 299555 - protein, 15 aa, Homo sapiens
  CDR3 for alpha chain variable domain of TCR clone 149778 (TRAV13-2, TRAJ5)
CAENPQWTGRRALTF

SEQ ID NO: 299556 - protein, 14 aa, Homo sapiens
  CDR3 for beta chain variable domain of TCR clone 149778 (TRBV5-7, TRBJ2-7)
CASSFKGATGEQYF

SEQ ID NO: 299557 - protein, 14 aa, Homo sapiens
  CDR3 for alpha chain variable domain of TCR clone 149779 (TRAV12-3, TRAJ29)
CAMILLSGNTPLVF

SEQ ID NO: 299558 - protein, 15 aa, Homo sapiens
  CDR3 for beta chain variable domain of TCR clone 149779 (TRBV27, TRBJ2-1)
CASSNGGGSSNEQFF

SEQ ID NO: 299559 - protein, 13 aa, Homo sapiens
  CDR3 for alpha chain variable domain of TCR clone 149780 (TRAV3, TRAJ29)
CAVRDIIDTPLVF

SEQ ID NO: 299560 - protein, 15 aa, Homo sapiens
  CDR3 for beta chain variable domain of TCR clone 149780 (TRBV7-6, TRBJ1-2)
CASSSGGRGGYGYTF

SEQ ID NO: 299561 - protein, 14 aa, Homo sapiens
  CDR3 for alpha chain variable domain of TCR clone 149781 (TRAV13-1, TRAJ35)
CAASKVGLGNVLHF

SEQ ID NO: 299562 - protein, 13 aa, Homo sapiens
  CDR3 for beta chain variable domain of TCR clone 149781 (TRBV7-3, TRBJ1-1)
CASSQDWGAEAFF

SEQ ID NO: 299563 - protein, 12 aa, Homo sapiens
  CDR3 for alpha chain variable domain of TCR clone 149782 (TRAV12-3, TRAJ17)
CAVTLTGNKLTF

SEQ ID NO: 299564 - protein, 15 aa, Homo sapiens
  CDR3 for beta chain variable domain of TCR clone 149782 (TRBV20-1, TRBJ2-7)
CSARYRVSGMDEQYF

SEQ ID NO: 299565 - protein, 15 aa, Homo sapiens
  CDR3 for alpha chain variable domain of TCR clone 149783 (TRAV8-2, TRAJ39)
CVVSSWDNAGNMLTF

SEQ ID NO: 299566 - protein, 13 aa, Homo sapiens
  CDR3 for beta chain variable domain of TCR clone 149783 (TRBV25-1, TRBJ2-5)
CASSESGRETQFF

SEQ ID NO: 299567 - protein, 14 aa, Homo sapiens
  CDR3 for alpha chain variable domain of TCR clone 149784 (TRAV12-2, TRAJ40)
CAVKIPSGTYKYIF

SEQ ID NO: 299568 - protein, 17 aa, Homo sapiens
  CDR3 for beta chain variable domain of TCR clone 149784 (TRBV20-1, TRBJ2-1)
CSAFSGTSGSLYNEQFV

SEQ ID NO: 299569 - protein, 15 aa, Homo sapiens
  CDR3 for alpha chain variable domain of TCR clone 149785 (TRAV8-3, TRAJ23)
CAVGDRYNQGVKLIF

SEQ ID NO: 299570 - protein, 22 aa, Homo sapiens
  CDR3 for beta chain variable domain of TCR clone 149785 (TRBV29-1, TRBJ2-5)
TGSNMSPEDSSIYLCSAGTQYF

SEQ ID NO: 299571 - protein, 14 aa, Homo sapiens
  CDR3 for alpha chain variable domain of TCR clone 149786 (TRAV12-3, TRAJ9)
CAMSPNTGGFKTIF

SEQ ID NO: 299572 - protein, 13 aa, Homo sapiens
  CDR3 for beta chain variable domain of TCR clone 149786 (TRBV10-3, TRBJ2-7)
CASKLAVNYEQYF

SEQ ID NO: 299573 - protein, 14 aa, Homo sapiens
  CDR3 for alpha chain variable domain of TCR clone 149787 (TRAV12-3, TRAJ10)
SHLPLTGGGNKLNF

SEQ ID NO: 299574 - protein, 12 aa, Homo sapiens
  CDR3 for beta chain variable domain of TCR clone 149787 (TRBV11-2, TRBJ2-2)
CASSLGGGELFF

SEQ ID NO: 299575 - protein, 10 aa, Homo sapiens
  CDR3 for alpha chain variable domain of TCR clone 149788 (TRAV8-3, TRAJ10)
NAGGGNKLTF

SEQ ID NO: 299576 - protein, 16 aa, Homo sapiens
  CDR3 for beta chain variable domain of TCR clone 149788 (TRBV11-2, TRBJ1-2)
CASSLDTGGADYGYTF

SEQ ID NO: 299577 - protein, 14 aa, Homo sapiens
  CDR3 for alpha chain variable domain of TCR clone 149789 (TRAV12-1, TRAJ9)
CVVTGYTGGFKTIF

SEQ ID NO: 299578 - protein, 13 aa, Homo sapiens
  CDR3 for beta chain variable domain of TCR clone 149789 (TRBV20-1, TRBJ1-1)
CSARVGGNTEAFF

SEQ ID NO: 299579 - protein, 14 aa, Homo sapiens
  CDR3 for alpha chain variable domain of TCR clone 149790 (TRAV12-2, TRAJ13)
CAVKKTGGYQKVTF

SEQ ID NO: 299580 - protein, 13 aa, Homo sapiens
  CDR3 for beta chain variable domain of TCR clone 149790 (TRBV19, TRBJ1-2)
CASSVPEQDGYTF

SEQ ID NO: 299581 - protein, 10 aa, Homo sapiens
  CDR3 for alpha chain variable domain of TCR clone 149791 (TRAV23/DV6, TRAJ31)
CARGGARLMF

SEQ ID NO: 299582 - protein, 14 aa, Homo sapiens
  CDR3 for beta chain variable domain of TCR clone 149791 (TRBV7-8, TRBJ1-2)
CASSPDSLSDGYTF

SEQ ID NO: 299583 - protein, 12 aa, Homo sapiens
  CDR3 for alpha chain variable domain of TCR clone 149792 (TRAV16, TRAJ10)
CSRTGGGNKLTF

SEQ ID NO: 299584 - protein, 13 aa, Homo sapiens
  CDR3 for beta chain variable domain of TCR clone 149792 (TRBV29-1, TRBJ1-1)
CSVGDSRSTEAFF

SEQ ID NO: 299585 - protein, 12 aa, Homo sapiens
  CDR3 for alpha chain variable domain of TCR clone 149793 (TRAV3, TRAJ39)
RAVIEWSNMLTL

SEQ ID NO: 299586 - protein, 14 aa, Homo sapiens
  CDR3 for beta chain variable domain of TCR clone 149793 (TRBV7-8, TRBJ2-3)
CASSFPDGQDTQYF

SEQ ID NO: 299587 - protein, 14 aa, Homo sapiens
  CDR3 for alpha chain variable domain of TCR clone 149794 (TRAV23/DV6, TRAJ8)
CAASMNTGFQKLVF

SEQ ID NO: 299588 - protein, 12 aa, Homo sapiens
  CDR3 for beta chain variable domain of TCR clone 149794 (TRBV7-8, TRBJ2-7)
CASSLGDREQYF

SEQ ID NO: 299589 - protein, 14 aa, Homo sapiens
  CDR3 for alpha chain variable domain of TCR clone 149795 (TRAV13-1, TRAJ12)
CAASYMDSSYKLIF

SEQ ID NO: 299590 - protein, 13 aa, Homo sapiens
  CDR3 for beta chain variable domain of TCR clone 149795 (TRBV2, TRBJ2-5)
CASSDGIQETRYF

SEQ ID NO: 299591 - protein, 13 aa, Homo sapiens
  CDR3 for alpha chain variable domain of TCR clone 149796 (TRAV3, TRAJ36)
CAVRDTGANNLFF

SEQ ID NO: 299592 - protein, 18 aa, Homo sapiens
  CDR3 for beta chain variable domain of TCR clone 149796 (TRBV7-3, TRBJ2-3)
CASSSTGTYPGSTDTQYF

SEQ ID NO: 299593 - protein, 13 aa, Homo sapiens
  CDR3 for alpha chain variable domain of TCR clone 149797 (TRAV1-2, TRAJ9)
CAVLNTGGFKTIF

SEQ ID NO: 299594 - protein, 13 aa, Homo sapiens
  CDR3 for beta chain variable domain of TCR clone 149797 (TRBV20-1, TRBJ1-1)
CSAGTVGNAEAFF

SEQ ID NO: 299595 - protein, 14 aa, Homo sapiens
  CDR3 for alpha chain variable domain of TCR clone 149798 (TRAV13-1, TRAJ40)
CAASMTSGTYKYIF

SEQ ID NO: 299596 - protein, 15 aa, Homo sapiens
  CDR3 for beta chain variable domain of TCR clone 149798 (TRBV28, TRBJ1-2)
CASSSHSIANYGYTF

SEQ ID NO: 299597 - protein, 17 aa, Homo sapiens
  CDR3 for alpha chain variable domain of TCR clone 149799 (TRAV36/DV7, TRAJ52)
CAVAQRAGGTSYGKLTF

SEQ ID NO: 299598 - protein, 14 aa, Homo sapiens
  CDR3 for beta chain variable domain of TCR clone 149799 (TRBV6-1, TRBJ1-3)
CASVQGGGGNTIYV

SEQ ID NO: 299599 - protein, 13 aa, Homo sapiens
  CDR3 for alpha chain variable domain of TCR clone 149800 (TRAV1-2, TRAJ12)
CAVSMDSSYKLIF

SEQ ID NO: 299600 - protein, 15 aa, Homo sapiens
  CDR3 for beta chain variable domain of TCR clone 149800 (TRBV27, TRBJ2-5)
CASSLIPSGGGTQYF

SEQ ID NO: 299601 - protein, 20 aa, Homo sapiens
  CDR3 for alpha chain variable domain of TCR clone 149801 (TRAV8-3, TRAJ44)
LSTSVLWVRLYTGTASKLTF

SEQ ID NO: 299602 - protein, 15 aa, Homo sapiens
  CDR3 for beta chain variable domain of TCR clone 149801 (TRBV6-5, TRBJ1-2)
CASSYSQAFNYGYTL

SEQ ID NO: 299603 - protein, 16 aa, Homo sapiens
  CDR3 for alpha chain variable domain of TCR clone 149802 (TRAV12-3, TRAJ53)
CAMSPGSGGSNYKLTF

SEQ ID NO: 299604 - protein, 14 aa, Homo sapiens
  CDR3 for beta chain variable domain of TCR clone 149802 (TRBV7-2, TRBJ1-2)
CASSQTGSTYGYTF

SEQ ID NO: 299605 - protein, 14 aa, Homo sapiens
  CDR3 for alpha chain variable domain of TCR clone 149803 (TRAV16, TRAJ58)
CALFTETSGSRLTF

SEQ ID NO: 299606 - protein, 15 aa, Homo sapiens
  CDR3 for beta chain variable domain of TCR clone 149803 (TRBV9, TRBJ1-6)
CASSVAGTGDSPLHF

SEQ ID NO: 299607 - protein, 15 aa, Homo sapiens
  CDR3 for alpha chain variable domain of TCR clone 149804 (TRAV21, TRAJ57)
CAVIITQGGSEKLVF

SEQ ID NO: 299608 - protein, 23 aa, Homo sapiens
  CDR3 for beta chain variable domain of TCR clone 149804 (TRBV5-1, TRBJ2-2)
GAGGLGPLSLRQQLDLDSGELFF

SEQ ID NO: 299609 - protein, 12 aa, Homo sapiens
  CDR3 for alpha chain variable domain of TCR clone 149805 (TRAV12-3, TRAJ17)
CAMTLTGNKLTF

SEQ ID NO: 299610 - protein, 12 aa, Homo sapiens
  CDR3 for beta chain variable domain of TCR clone 149805 (TRBV11-2, TRBJ2-3)
GASRGAPNTQYF

SEQ ID NO: 299611 - protein, 13 aa, Homo sapiens
  CDR3 for alpha chain variable domain of TCR clone 149806 (TRAV8-3, TRAJ6)
CAPRRGGSYIPTF

SEQ ID NO: 299612 - protein, 15 aa, Homo sapiens
  CDR3 for beta chain variable domain of TCR clone 149806 (TRBV4-1, TRBJ2-3)
CASSNLAGGRDTQYF

SEQ ID NO: 299613 - protein, 21 aa, Homo sapiens
  CDR3 for alpha chain variable domain of TCR clone 149807 (TRAV1-1, TRAJ6)
CLLLLRCERLERTGGRYIPTF

SEQ ID NO: 299614 - protein, 13 aa, Homo sapiens
  CDR3 for beta chain variable domain of TCR clone 149807 (TRBV10-2, TRBJ2-7)
CASGASGGYEQYV

SEQ ID NO: 299615 - protein, 14 aa, Homo sapiens
  CDR3 for alpha chain variable domain of TCR clone 149808 (TRAV8-6, TRAJ54)
CAVSDFQGAQKLVF

SEQ ID NO: 299616 - protein, 14 aa, Homo sapiens
  CDR3 for beta chain variable domain of TCR clone 149808 (TRBV18, TRBJ2-7)
CASSPRGGAYEQYL

SEQ ID NO: 299617 - protein, 13 aa, Homo sapiens
  CDR3 for alpha chain variable domain of TCR clone 149809 (TRAV35, TRAJ48)
CAGHEFGNEKLTF

SEQ ID NO: 299618 - protein, 13 aa, Homo sapiens
  CDR3 for beta chain variable domain of TCR clone 149809 (TRBV7-2, TRBJ1-6)
CASSLVESSPLHF

SEQ ID NO: 299619 - protein, 13 aa, Homo sapiens
  CDR3 for alpha chain variable domain of TCR clone 149810 (TRAV2, TRAJ24)
CAVPTDSWGKLQF

SEQ ID NO: 299620 - protein, 16 aa, Homo sapiens
  CDR3 for beta chain variable domain of TCR clone 149810 (TRBV6-3, TRBJ1-2)
CASSRELSGTPYVYTF

SEQ ID NO: 299621 - protein, 16 aa, Homo sapiens
  CDR3 for alpha chain variable domain of TCR clone 149811 (TRAV26-1, TRAJ53)
CTVRVAMGGSNYKLTF

SEQ ID NO: 299622 - protein, 12 aa, Homo sapiens
  CDR3 for beta chain variable domain of TCR clone 149811 (TRBV7-9, TRBJ1-5)
CASSPQGQPQYF

SEQ ID NO: 299623 - protein, 12 aa, Homo sapiens
  CDR3 for alpha chain variable domain of TCR clone 149812 (TRAV2, TRAJ34)
CAVERNTAKLIF

SEQ ID NO: 299624 - protein, 14 aa, Homo sapiens
  CDR3 for beta chain variable domain of TCR clone 149812 (TRBV7-9, TRBJ2-1)
CASSDNSGYNEQFF

SEQ ID NO: 299625 - protein, 15 aa, Homo sapiens
  CDR3 for alpha chain variable domain of TCR clone 149813 (TRAV21, TRAJ53)
CATLNSGGSNYTLTF

SEQ ID NO: 299626 - protein, 15 aa, Homo sapiens
  CDR3 for beta chain variable domain of TCR clone 149813 (TRBV27, TRBJ2-1)
CASSNGGGSSNEQFF

SEQ ID NO: 299627 - protein, 14 aa, Homo sapiens
  CDR3 for alpha chain variable domain of TCR clone 149814 (TRAV29/DV5, TRAJ44)
CAAFLVGTASKLTF

SEQ ID NO: 299628 - protein, 15 aa, Homo sapiens
  CDR3 for beta chain variable domain of TCR clone 149814 (TRBV7-3, TRBJ2-2)
CASSETGQGTGKLFF

SEQ ID NO: 299629 - protein, 14 aa, Homo sapiens
  CDR3 for alpha chain variable domain of TCR clone 149815 (TRAV1-2, TRAJ6)
CAVSLSGGSYIPTF

SEQ ID NO: 299630 - protein, 16 aa, Homo sapiens
  CDR3 for beta chain variable domain of TCR clone 149815 (TRBV20-1, TRBJ2-7)
CSARDWAGGPSSTSGR

SEQ ID NO: 299631 - protein, 14 aa, Homo sapiens
  CDR3 for alpha chain variable domain of TCR clone 149816 (TRAV12-2, TRAJ44)
CAVNPSGTASKLTF

SEQ ID NO: 299632 - protein, 16 aa, Homo sapiens
  CDR3 for beta chain variable domain of TCR clone 149816 (TRBV2, TRBJ2-1)
CASSVGGSLSYNEQFF

SEQ ID NO: 299633 - protein, 13 aa, Homo sapiens
  CDR3 for alpha chain variable domain of TCR clone 149817 (TRAV27, TRAJ3)
ASLRGSSACKIIF

SEQ ID NO: 299634 - protein, 15 aa, Homo sapiens
  CDR3 for beta chain variable domain of TCR clone 149817 (TRBV28, TRBJ1-3)
CASSMGWASGNTIYF

SEQ ID NO: 299635 - protein, 16 aa, Homo sapiens
  CDR3 for alpha chain variable domain of TCR clone 149818 (TRAV12-3, TRAJ53)
CAMRPGSGGSNYKLTF

SEQ ID NO: 299636 - protein, 16 aa, Homo sapiens
  CDR3 for beta chain variable domain of TCR clone 149818 (TRBV29-1, TRBJ2-5)
SAARTERDPVLRARHA

SEQ ID NO: 299637 - protein, 13 aa, Homo sapiens
  CDR3 for alpha chain variable domain of TCR clone 149819 (TRAV12-1, TRAJ26)
CGVRRNYGQNFVF

SEQ ID NO: 299638 - protein, 15 aa, Homo sapiens
  CDR3 for beta chain variable domain of TCR clone 149819 (TRBV28, TRBJ2-1)
CASSIIAGGRSEQFF

SEQ ID NO: 299639 - protein, 11 aa, Homo sapiens
  CDR3 for alpha chain variable domain of TCR clone 149820 (TRAV12-1, TRAJ37)
CVVYTPGKLIF

SEQ ID NO: 299640 - protein, 13 aa, Homo sapiens
  CDR3 for beta chain variable domain of TCR clone 149820 (TRBV12-4, TRBJ1-5)
CASSPDRAQPQHF

SEQ ID NO: 299641 - protein, 14 aa, Homo sapiens
  CDR3 for alpha chain variable domain of TCR clone 149821 (TRAV8-6, TRAJ44)
CAVSHTGTASKFTF

SEQ ID NO: 299642 - protein, 15 aa, Homo sapiens
  CDR3 for beta chain variable domain of TCR clone 149821 (TRBV2, TRBJ1-1)
CASQETTVSVTEAFF

SEQ ID NO: 299643 - protein, 13 aa, Homo sapiens
  CDR3 for alpha chain variable domain of TCR clone 149822 (TRAV26-1, TRAJ29)
CIVRRSGNTPLVF

SEQ ID NO: 299644 - protein, 14 aa, Homo sapiens
  CDR3 for beta chain variable domain of TCR clone 149822 (TRBV20-1, TRBJ1-1)
CSAKTTGANTEAFF

SEQ ID NO: 299645 - protein, 14 aa, Homo sapiens
  CDR3 for alpha chain variable domain of TCR clone 149823 (TRAV13-1, TRAJ44)
CAAKATGTASKLTL

SEQ ID NO: 299646 - protein, 16 aa, Homo sapiens
  CDR3 for beta chain variable domain of TCR clone 149823 (TRBV12-5, TRBJ2-5)
CASGPRTSGNQETQYF

SEQ ID NO: 299647 - protein, 23 aa, Homo sapiens
  CDR3 for alpha chain variable domain of TCR clone 149824 (TRAV12-2, TRAJ36)
SLLVRASQPSDSATLERANNLFF

SEQ ID NO: 299648 - protein, 17 aa, Homo sapiens
  CDR3 for beta chain variable domain of TCR clone 149824 (TRBV3-1, TRBJ2-3)
CASSQLLDRGHTDTQYF

SEQ ID NO: 299649 - protein, 14 aa, Homo sapiens
  CDR3 for alpha chain variable domain of TCR clone 149825 (TRAV1-2, TRAJ16)
CAVNRFSDVQKLLF

SEQ ID NO: 299650 - protein, 15 aa, Homo sapiens
  CDR3 for beta chain variable domain of TCR clone 149825 (TRBV7-9, TRBJ2-7)
CASSLDLGRGYEQYF

SEQ ID NO: 299651 - protein, 14 aa, Homo sapiens
  CDR3 for alpha chain variable domain of TCR clone 149826 (TRAV20, TRAJ32)
CCGRYGGATKKLIF

SEQ ID NO: 299652 - protein, 16 aa, Homo sapiens
  CDR3 for beta chain variable domain of TCR clone 149826 (TRBV19, TRBJ2-2)
CASRSPGTGATGELFF

SEQ ID NO: 299653 - protein, 14 aa, Homo sapiens
  CDR3 for alpha chain variable domain of TCR clone 149827 (TRAV8-3, TRAJ4)
RAVGASGGYNKLIF

SEQ ID NO: 299654 - protein, 16 aa, Homo sapiens
  CDR3 for beta chain variable domain of TCR clone 149827 (TRBV4-3, TRBJ2-2)
CASSHLQGSGTGELFF

SEQ ID NO: 299655 - protein, 14 aa, Homo sapiens
  CDR3 for alpha chain variable domain of TCR clone 149828 (TRAV26-1, TRAJ39)
CIVRGSRAGNMLTF

SEQ ID NO: 299656 - protein, 12 aa, Homo sapiens
  CDR3 for beta chain variable domain of TCR clone 149828 (TRBV14, TRBJ2-7)
CASSLYKDEQYF

SEQ ID NO: 299657 - protein, 14 aa, Homo sapiens
  CDR3 for alpha chain variable domain of TCR clone 149829 (TRAV17, TRAJ6)
CSTNPAGGSYIPTF

SEQ ID NO: 299658 - protein, 15 aa, Homo sapiens
  CDR3 for beta chain variable domain of TCR clone 149829 (TRBV2, TRBJ2-5)
CASSGTVAAGETQYF

SEQ ID NO: 299659 - protein, 14 aa, Homo sapiens
  CDR3 for alpha chain variable domain of TCR clone 149830 (TRAV8-2, TRAJ13)
CVVRDSGGYQKVTF

SEQ ID NO: 299660 - protein, 13 aa, Homo sapiens
  CDR3 for beta chain variable domain of TCR clone 149830 (TRBV27, TRBJ2-1)
CASTPLAAGEQFF

SEQ ID NO: 299661 - protein, 16 aa, Homo sapiens
  CDR3 for alpha chain variable domain of TCR clone 149831 (TRAV21, TRAJ52)
CAVTNAVGTSYGKLTF

SEQ ID NO: 299662 - protein, 14 aa, Homo sapiens
  CDR3 for beta chain variable domain of TCR clone 149831 (TRBV4-1, TRBJ2-5)
CASSRSGSGETQYF

SEQ ID NO: 299663 - protein, 14 aa, Homo sapiens
  CDR3 for alpha chain variable domain of TCR clone 149832 (TRAV12-3, TRAJ10)
SHLPLTGGGNKLTF

SEQ ID NO: 299664 - protein, 14 aa, Homo sapiens
  CDR3 for beta chain variable domain of TCR clone 149832 (TRBV7-2, TRBJ2-2)
CASSLNSNTGELFL

SEQ ID NO: 299665 - protein, 13 aa, Homo sapiens
  CDR3 for alpha chain variable domain of TCR clone 149833 (TRAV2, TRAJ29)
CAAGNSGNTPLVF

SEQ ID NO: 299666 - protein, 16 aa, Homo sapiens
  CDR3 for beta chain variable domain of TCR clone 149833 (TRBV7-9, TRBJ1-2)
CASRPGGGAINYGYTF

SEQ ID NO: 299667 - protein, 11 aa, Homo sapiens
  CDR3 for alpha chain variable domain of TCR clone 149834 (TRAV21, TRAJ9)
CAVPGGVKTIF

SEQ ID NO: 299668 - protein, 17 aa, Homo sapiens
  CDR3 for beta chain variable domain of TCR clone 149834 (TRBV7-9, TRBJ2-5)
CATSGGARDPVLRARHA

SEQ ID NO: 299669 - protein, 15 aa, Homo sapiens
  CDR3 for alpha chain variable domain of TCR clone 149835 (TRAV16, TRAJ26)
CAPEELWSEFCLLSR

SEQ ID NO: 299670 - protein, 15 aa, Homo sapiens
  CDR3 for beta chain variable domain of TCR clone 149835 (TRBV7-2, TRBJ2-3)
CASSLTGTSTDTQYF

SEQ ID NO: 299671 - protein, 15 aa, Homo sapiens
  CDR3 for alpha chain variable domain of TCR clone 149836 (TRAV8-1, TRAJ6)
CAVNTPPGGSNIHTF

SEQ ID NO: 299672 - protein, 15 aa, Homo sapiens
  CDR3 for beta chain variable domain of TCR clone 149836 (TRBV11-2, TRBJ2-2)
CASSSDRVNAGELFF

SEQ ID NO: 299673 - protein, 14 aa, Homo sapiens
  CDR3 for alpha chain variable domain of TCR clone 149837 (TRAV1-2, TRAJ37)
CAVRSKSNTGKLTF

SEQ ID NO: 299674 - protein, 14 aa, Homo sapiens
  CDR3 for beta chain variable domain of TCR clone 149837 (TRBV6-3, TRBJ1-2)
CASSEGGGSYGYTF

SEQ ID NO: 299675 - protein, 16 aa, Homo sapiens
  CDR3 for alpha chain variable domain of TCR clone 149838 (TRAV8-2, TRAJ45)
CVVSEGTGGGADGLTF

SEQ ID NO: 299676 - protein, 13 aa, Homo sapiens
  CDR3 for beta chain variable domain of TCR clone 149838 (TRBV4-2, TRBJ1-1)
CASSQAGNTEAFF

SEQ ID NO: 299677 - protein, 16 aa, Homo sapiens
  CDR3 for alpha chain variable domain of TCR clone 149839 (TRAV20, TRAJ53)
CAVQGTSGGSNYKLTF

SEQ ID NO: 299678 - protein, 16 aa, Homo sapiens
  CDR3 for beta chain variable domain of TCR clone 149839 (TRBV29-1, TRBJ2-6)
CSVEDITYSGANVLTF

SEQ ID NO: 299679 - protein, 14 aa, Homo sapiens
  CDR3 for alpha chain variable domain of TCR clone 149840 (TRAV13-1, TRAJ35)
CAASKGGFGNVLHC

SEQ ID NO: 299680 - protein, 14 aa, Homo sapiens
  CDR3 for beta chain variable domain of TCR clone 149840 (TRBV4-2, TRBJ2-1)
CASGLDRAYNEQFF

SEQ ID NO: 299681 - protein, 12 aa, Homo sapiens
  CDR3 for alpha chain variable domain of TCR clone 149841 (TRAV13-1, TRAJ49)
CAASPLGNQFYF

SEQ ID NO: 299682 - protein, 10 aa, Homo sapiens
  CDR3 for beta chain variable domain of TCR clone 149841 (TRBV15, TRBJ2-7)
AETGGYEQYF

SEQ ID NO: 299683 - protein, 13 aa, Homo sapiens
  CDR3 for alpha chain variable domain of TCR clone 149842 (TRAV2, TRAJ40)
CAVVTSGTYKYIF

SEQ ID NO: 299684 - protein, 14 aa, Homo sapiens
  CDR3 for beta chain variable domain of TCR clone 149842 (TRBV19, TRBJ2-1)
CASPTVFLSGEQFF

SEQ ID NO: 299685 - protein, 16 aa, Homo sapiens
  CDR3 for alpha chain variable domain of TCR clone 149843 (TRAV30, TRAJ24)
CGTEIVEADSWGKFKF

SEQ ID NO: 299686 - protein, 14 aa, Homo sapiens
  CDR3 for beta chain variable domain of TCR clone 149843 (TRBV12-5, TRBJ2-5)
CASGSRTHQETQYF

SEQ ID NO: 299687 - protein, 14 aa, Homo sapiens
  CDR3 for alpha chain variable domain of TCR clone 149844 (TRAV29/DV5, TRAJ20)
CAASAPIEAYKLSF

SEQ ID NO: 299688 - protein, 15 aa, Homo sapiens
  CDR3 for beta chain variable domain of TCR clone 149844 (TRBV6-1, TRBJ2-1)
CASSEAAYSYNEQFF

SEQ ID NO: 299689 - protein, 17 aa, Homo sapiens
  CDR3 for alpha chain variable domain of TCR clone 149845 (TRAV3, TRAJ12)
CAVRDGGRMDSCYKLIF

SEQ ID NO: 299690 - protein, 15 aa, Homo sapiens
  CDR3 for beta chain variable domain of TCR clone 149845 (TRBV20-1, TRBJ2-5)
CSAEGTGGLQETQYF

SEQ ID NO: 299691 - protein, 13 aa, Homo sapiens
  CDR3 for alpha chain variable domain of TCR clone 149846 (TRAV21, TRAJ57)
GAVTQGGSEKLVF

SEQ ID NO: 299692 - protein, 16 aa, Homo sapiens
  CDR3 for beta chain variable domain of TCR clone 149846 (TRBV29-1, TRBJ2-7)
CSVDDAEDGTAYEQYF

SEQ ID NO: 299693 - protein, 12 aa, Homo sapiens
  CDR3 for alpha chain variable domain of TCR clone 149847 (TRAV30, TRAJ43)
CGTEERGNDMRF

SEQ ID NO: 299694 - protein, 16 aa, Homo sapiens
  CDR3 for beta chain variable domain of TCR clone 149847 (TRBV12-4, TRBJ2-5)
CASSLSTSGGKETQYF

SEQ ID NO: 299695 - protein, 13 aa, Homo sapiens
  CDR3 for alpha chain variable domain of TCR clone 149848 (TRAV17, TRAJ5)
CAPTATGRRALTF

SEQ ID NO: 299696 - protein, 14 aa, Homo sapiens
  CDR3 for beta chain variable domain of TCR clone 149848 (TRBV19, TRBJ2-1)
CASPTFVLSGEQFF

SEQ ID NO: 299697 - protein, 15 aa, Homo sapiens
  CDR3 for alpha chain variable domain of TCR clone 149849 (TRAV35, TRAJ52)
CAGPLGGTSYGKLTF

SEQ ID NO: 299698 - protein, 15 aa, Homo sapiens
  CDR3 for beta chain variable domain of TCR clone 149849 (TRBV6-5, TRBJ1-2)
CASSYSQAFNYGYTF

SEQ ID NO: 299699 - protein, 14 aa, Homo sapiens
  CDR3 for alpha chain variable domain of TCR clone 149850 (TRAV17, TRAJ49)
CATDARDTGNQFYF

SEQ ID NO: 299700 - protein, 14 aa, Homo sapiens
  CDR3 for beta chain variable domain of TCR clone 149850 (TRBV5-5, TRBJ1-2)
CASSFGQINYGDTF

SEQ ID NO: 299701 - protein, 18 aa, Homo sapiens
  CDR3 for alpha chain variable domain of TCR clone 149851 (TRAV29/DV5, TRAJ52)
CAAGFRDAGGTSYGKLTF

SEQ ID NO: 299702 - protein, 14 aa, Homo sapiens
  CDR3 for beta chain variable domain of TCR clone 149851 (TRBV7-2, TRBJ1-1)
CASSFLTGTTEAFF

SEQ ID NO: 299703 - protein, 15 aa, Homo sapiens
  CDR3 for alpha chain variable domain of TCR clone 149852 (TRAV8-2, TRAJ15)
CVVTMGNQAGTALIF

SEQ ID NO: 299704 - protein, 14 aa, Homo sapiens
  CDR3 for beta chain variable domain of TCR clone 149852 (TRBV7-9, TRBJ2-5)
CASSLDTAQETQYF

SEQ ID NO: 299705 - protein, 13 aa, Homo sapiens
  CDR3 for alpha chain variable domain of TCR clone 149853 (TRAV8-6, TRAJ16)
CAVRRWVGQKLLF

SEQ ID NO: 299706 - protein, 15 aa, Homo sapiens
  CDR3 for beta chain variable domain of TCR clone 149853 (TRBV12-4, TRBJ2-1)
CASSLSTGVSNEQFF

SEQ ID NO: 299707 - protein, 14 aa, Homo sapiens
  CDR3 for alpha chain variable domain of TCR clone 149854 (TRAV26-1, TRAJ34)
CIVRVAYNTDKLIF

SEQ ID NO: 299708 - protein, 13 aa, Homo sapiens
  CDR3 for beta chain variable domain of TCR clone 149854 (TRBV4-2, TRBJ1-1)
CASSQAGNNEAFF

SEQ ID NO: 299709 - protein, 13 aa, Homo sapiens
  CDR3 for alpha chain variable domain of TCR clone 149855 (TRAV8-3, TRAJ20)
CAVGRPNDYKLSF

SEQ ID NO: 299710 - protein, 18 aa, Homo sapiens
  CDR3 for beta chain variable domain of TCR clone 149855 (TRBV11-2, TRBJ2-3)
CASSLGGASRGAPNTQYF

SEQ ID NO: 299711 - protein, 12 aa, Homo sapiens
  CDR3 for alpha chain variable domain of TCR clone 149856 (TRAV12-3, TRAJ17)
CAMTLTGNKLTF

SEQ ID NO: 299712 - protein, 14 aa, Homo sapiens
  CDR3 for beta chain variable domain of TCR clone 149856 (TRBV24-1, TRBJ1-1)
CATSDRRENTEAFF

SEQ ID NO: 299713 - protein, 10 aa, Homo sapiens
  CDR3 for alpha chain variable domain of TCR clone 149857 (TRAV8-2, TRAJ29)
CTGGNTPLVF

SEQ ID NO: 299714 - protein, 17 aa, Homo sapiens
  CDR3 for beta chain variable domain of TCR clone 149857 (TRBV2, TRBJ2-7)
CASSQALTGWDSYEQYC

SEQ ID NO: 299715 - protein, 13 aa, Homo sapiens
  CDR3 for alpha chain variable domain of TCR clone 149858 (TRAV12-2, TRAJ20)
CAVNRFDDYKLSF

SEQ ID NO: 299716 - protein, 13 aa, Homo sapiens
  CDR3 for beta chain variable domain of TCR clone 149858 (TRBV10-3, TRBJ2-7)
CASKLAVNYEQYF

SEQ ID NO: 299717 - protein, 15 aa, Homo sapiens
  CDR3 for alpha chain variable domain of TCR clone 149859 (TRAV8-3, TRAJ45)
CASSYSGGGADGLTS

SEQ ID NO: 299718 - protein, 16 aa, Homo sapiens
  CDR3 for beta chain variable domain of TCR clone 149859 (TRBV7-9, TRBJ2-2)
CASSGFGGPNTGELFF

SEQ ID NO: 299719 - protein, 18 aa, Homo sapiens
  CDR3 for alpha chain variable domain of TCR clone 149860 (TRAV12-3, TRAJ52)
CAMSRTNAGGTSYGKLTF

SEQ ID NO: 299720 - protein, 15 aa, Homo sapiens
  CDR3 for beta chain variable domain of TCR clone 149860 (TRBV7-2, TRBJ2-1)
CASSLVAGGHNEQFC

SEQ ID NO: 299721 - protein, 11 aa, Homo sapiens
  CDR3 for alpha chain variable domain of TCR clone 149861 (TRAV12-3, TRAJ27)
CAMANAGKYTF

SEQ ID NO: 299722 - protein, 13 aa, Homo sapiens
  CDR3 for beta chain variable domain of TCR clone 149861 (TRBV20-1, TRBJ1-1)
CSARVGGNTEAFF

SEQ ID NO: 299723 - protein, 14 aa, Homo sapiens
  CDR3 for alpha chain variable domain of TCR clone 149862 (TRAV1-2, TRAJ16)
CAVNRFSDGRKLLF

SEQ ID NO: 299724 - protein, 17 aa, Homo sapiens
  CDR3 for beta chain variable domain of TCR clone 149862 (TRBV20-1, TRBJ2-1)
CSASSSGLAGSYNEQFF

SEQ ID NO: 299725 - protein, 14 aa, Homo sapiens
  CDR3 for alpha chain variable domain of TCR clone 149863 (TRAV12-2, TRAJ4)
CAEDLSGCYNKLIL

SEQ ID NO: 299726 - protein, 13 aa, Homo sapiens
  CDR3 for beta chain variable domain of TCR clone 149863 (TRBV7-9, TRBJ1-2)
CASSLKQNYGYTF

SEQ ID NO: 299727 - protein, 13 aa, Homo sapiens
  CDR3 for alpha chain variable domain of TCR clone 149864 (TRAV8-4, TRAJ48)
CAVSLFGNEKLTF

SEQ ID NO: 299728 - protein, 14 aa, Homo sapiens
  CDR3 for beta chain variable domain of TCR clone 149864 (TRBV12-5, TRBJ2-5)
CASGSRTHQETQYF

SEQ ID NO: 299729 - protein, 15 aa, Homo sapiens
  CDR3 for alpha chain variable domain of TCR clone 149865 (TRAV17, TRAJ54)
CATTRSEQRAKKLVF

SEQ ID NO: 299730 - protein, 16 aa, Homo sapiens
  CDR3 for beta chain variable domain of TCR clone 149865 (TRBV12-4, TRBJ2-3)
CASSLRLAETTDTQYF

SEQ ID NO: 299731 - protein, 18 aa, Homo sapiens
  CDR3 for alpha chain variable domain of TCR clone 149866 (TRAV35, TRAJ28)
CAGHTYPLSGAGSYQLTF

SEQ ID NO: 299732 - protein, 12 aa, Homo sapiens
  CDR3 for beta chain variable domain of TCR clone 149866 (TRBV7-9, TRBJ1-1)
CASSLEGTEAFF

SEQ ID NO: 299733 - protein, 12 aa, Homo sapiens
  CDR3 for alpha chain variable domain of TCR clone 149867 (TRAV16, TRAJ10)
CSRTGGGNKLTF

SEQ ID NO: 299734 - protein, 13 aa, Homo sapiens
  CDR3 for beta chain variable domain of TCR clone 149867 (TRBV10-3, TRBJ2-7)
CASKLAVNYEQYV

SEQ ID NO: 299735 - protein, 12 aa, Homo sapiens
  CDR3 for alpha chain variable domain of TCR clone 149868 (TRAV1-1, TRAJ39)
CAVPVVGNMLTF

SEQ ID NO: 299736 - protein, 12 aa, Homo sapiens
  CDR3 for beta chain variable domain of TCR clone 149868 (TRBV11-2, TRBJ2-2)
CASSLPTGELFF

SEQ ID NO: 299737 - protein, 14 aa, Homo sapiens
  CDR3 for alpha chain variable domain of TCR clone 149869 (TRAV12-2, TRAJ40)
CAVKTPSGTYKYIF

SEQ ID NO: 299738 - protein, 12 aa, Homo sapiens
  CDR3 for beta chain variable domain of TCR clone 149869 (TRBV11-2, TRBJ2-1)
CASSPGNNEQFF

SEQ ID NO: 299739 - protein, 11 aa, Homo sapiens
  CDR3 for alpha chain variable domain of TCR clone 149870 (TRAV13-2, TRAJ26)
CAEIPGQNFVF

SEQ ID NO: 299740 - protein, 16 aa, Homo sapiens
  CDR3 for beta chain variable domain of TCR clone 149870 (TRBV12-5, TRBJ2-5)
CASGPRTSGNQETQYF

SEQ ID NO: 299741 - protein, 14 aa, Homo sapiens
  CDR3 for alpha chain variable domain of TCR clone 149871 (TRAV1-2, TRAJ16)
CAVNRFSVGQKLLF

SEQ ID NO: 299742 - protein, 16 aa, Homo sapiens
  CDR3 for beta chain variable domain of TCR clone 149871 (TRBV12-5, TRBJ2-5)
CASGPRTSGNQETQYF

SEQ ID NO: 299743 - protein, 10 aa, Homo sapiens
  CDR3 for alpha chain variable domain of TCR clone 149872 (TRAV12-2, TRAJ29)
CAVTLQSSCL

SEQ ID NO: 299744 - protein, 16 aa, Homo sapiens
  CDR3 for beta chain variable domain of TCR clone 149872 (TRBV29-1, TRBJ2-2)
CSVETRASGNTGELFF

SEQ ID NO: 299745 - protein, 12 aa, Homo sapiens
  CDR3 for alpha chain variable domain of TCR clone 149873 (TRAV1-2, TRAJ29)
CAVPSGNTPLVF

SEQ ID NO: 299746 - protein, 12 aa, Homo sapiens
  CDR3 for beta chain variable domain of TCR clone 149873 (TRBV7-9, TRBJ2-7)
CASSFGSYDQYF

SEQ ID NO: 299747 - protein, 12 aa, Homo sapiens
  CDR3 for alpha chain variable domain of TCR clone 149874 (TRAV16, TRAJ27)
CALNTNAGKSTF

SEQ ID NO: 299748 - protein, 17 aa, Homo sapiens
  CDR3 for beta chain variable domain of TCR clone 149874 (TRBV11-2, TRBJ2-1)
CASSLYPPGVEYNEQFF

SEQ ID NO: 299749 - protein, 12 aa, Homo sapiens
  CDR3 for alpha chain variable domain of TCR clone 149875 (TRAV2, TRAJ9)
CAVGAGGFKTIF

SEQ ID NO: 299750 - protein, 16 aa, Homo sapiens
  CDR3 for beta chain variable domain of TCR clone 149875 (TRBV7-2, TRBJ2-5)
CASSPGGARRGETQYF

SEQ ID NO: 299751 - protein, 14 aa, Homo sapiens
  CDR3 for alpha chain variable domain of TCR clone 149876 (TRAV1-2, TRAJ8)
CAVREDTGFQKLVF

SEQ ID NO: 299752 - protein, 14 aa, Homo sapiens
  CDR3 for beta chain variable domain of TCR clone 149876 (TRBV9, TRBJ2-3)
CASSVGLSTDTQYF

SEQ ID NO: 299753 - protein, 12 aa, Homo sapiens
  CDR3 for alpha chain variable domain of TCR clone 149877 (TRAV13-2, TRAJ23)
CAERHRGGKLIF

SEQ ID NO: 299754 - protein, 15 aa, Homo sapiens
  CDR3 for beta chain variable domain of TCR clone 149877 (TRBV5-1, TRBJ2-7)
CASSLGDFTTYEQYF

SEQ ID NO: 299755 - protein, 17 aa, Homo sapiens
  CDR3 for alpha chain variable domain of TCR clone 149878 (TRAV4, TRAJ13)
CIVGFQGSSGGYQKVTF

SEQ ID NO: 299756 - protein, 18 aa, Homo sapiens
  CDR3 for beta chain variable domain of TCR clone 149878 (TRBV15, TRBJ2-3)
CATSRDGARSWDTDTQYF

SEQ ID NO: 299757 - protein, 12 aa, Homo sapiens
  CDR3 for alpha chain variable domain of TCR clone 149879 (TRAV23/DV6, TRAJ58)
CAARLLRGETSA

SEQ ID NO: 299758 - protein, 13 aa, Homo sapiens
  CDR3 for beta chain variable domain of TCR clone 149879 (TRBV7-3, TRBJ2-1)
CQQLSGGTNEQFF

SEQ ID NO: 299759 - protein, 12 aa, Homo sapiens
  CDR3 for alpha chain variable domain of TCR clone 149880 (TRAV12-3, TRAJ17)
CAMTLTGNKLTF

SEQ ID NO: 299760 - protein, 15 aa, Homo sapiens
  CDR3 for beta chain variable domain of TCR clone 149880 (TRBV20-1, TRBJ2-7)
CSARARVSGMDEQSF

SEQ ID NO: 299761 - protein, 15 aa, Homo sapiens
  CDR3 for alpha chain variable domain of TCR clone 149881 (TRAV21, TRAJ24)
CAARSSTDSWRQLQF

SEQ ID NO: 299762 - protein, 14 aa, Homo sapiens
  CDR3 for beta chain variable domain of TCR clone 149881 (TRBV11-2, TRBJ2-5)
CASSRTGGIETQYF

SEQ ID NO: 299763 - protein, 12 aa, Homo sapiens
  CDR3 for alpha chain variable domain of TCR clone 149882 (TRAV1-2, TRAJ39)
TSLLYAGNMLTF

SEQ ID NO: 299764 - protein, 16 aa, Homo sapiens
  CDR3 for beta chain variable domain of TCR clone 149882 (TRBV11-2, TRBJ2-1)
CASSLLLLSAYNEQSF

SEQ ID NO: 299765 - protein, 11 aa, Homo sapiens
  CDR3 for alpha chain variable domain of TCR clone 149883 (TRAV2, TRAJ23)
RAVETRGKLIF

SEQ ID NO: 299766 - protein, 14 aa, Homo sapiens
  CDR3 for beta chain variable domain of TCR clone 149883 (TRBV2, TRBJ2-3)
CASSEGQNTDTQYF

SEQ ID NO: 299767 - protein, 11 aa, Homo sapiens
  CDR3 for alpha chain variable domain of TCR clone 149884 (TRAV2, TRAJ33)
CAVDSNYQLIW

SEQ ID NO: 299768 - protein, 14 aa, Homo sapiens
  CDR3 for beta chain variable domain of TCR clone 149884 (TRBV5-1, TRBJ2-3)
CASSLFGPTDTQYF

SEQ ID NO: 299769 - protein, 16 aa, Homo sapiens
  CDR3 for alpha chain variable domain of TCR clone 149885 (TRAV16, TRAJ52)
RALSAAGGTSYGKLTF

SEQ ID NO: 299770 - protein, 19 aa, Homo sapiens
  CDR3 for beta chain variable domain of TCR clone 149885 (TRBV19, TRBJ2-5)
CASSIGQVTDFFLGETQYF

SEQ ID NO: 299771 - protein, 14 aa, Homo sapiens
  CDR3 for alpha chain variable domain of TCR clone 149886 (TRAV12-2, TRAJ40)
CAVKIPSGTYKYIF

SEQ ID NO: 299772 - protein, 15 aa, Homo sapiens
  CDR3 for beta chain variable domain of TCR clone 149886 (TRBV24-1, TRBJ2-7)
TSVPSVVGVSYEQYF

SEQ ID NO: 299773 - protein, 14 aa, Homo sapiens
  CDR3 for alpha chain variable domain of TCR clone 149887 (TRAV1-2, TRAJ29)
WAVRELTSATPLVF

SEQ ID NO: 299774 - protein, 14 aa, Homo sapiens
  CDR3 for beta chain variable domain of TCR clone 149887 (TRBV3-1, TRBJ2-5)
CASSQGPDQETQYF

SEQ ID NO: 299775 - protein, 13 aa, Homo sapiens
  CDR3 for alpha chain variable domain of TCR clone 149888 (TRAV8-3, TRAJ48)
CAVVPFGDEKLTF

SEQ ID NO: 299776 - protein, 12 aa, Homo sapiens
  CDR3 for beta chain variable domain of TCR clone 149888 (TRBV11-2, TRBJ2-2)
CASSLGGGELFF

SEQ ID NO: 299777 - protein, 13 aa, Homo sapiens
  CDR3 for alpha chain variable domain of TCR clone 149889 (TRAV25, TRAJ9)
CAGRVTGGFKTIF

SEQ ID NO: 299778 - protein, 15 aa, Homo sapiens
  CDR3 for beta chain variable domain of TCR clone 149889 (TRBV6-3, TRBJ2-7)
CASSSPGTVFYEQYF

SEQ ID NO: 299779 - protein, 11 aa, Homo sapiens
  CDR3 for alpha chain variable domain of TCR clone 149890 (TRAV12-1, TRAJ34)
CVVNKGRELIF

SEQ ID NO: 299780 - protein, 12 aa, Homo sapiens
  CDR3 for beta chain variable domain of TCR clone 149890 (TRBV2, TRBJ2-1)
CAYGQPGNEQFF

SEQ ID NO: 299781 - protein, 14 aa, Homo sapiens
  CDR3 for alpha chain variable domain of TCR clone 149891 (TRAV12-2, TRAJ40)
CAVKIPSGTYKYIF

SEQ ID NO: 299782 - protein, 13 aa, Homo sapiens
  CDR3 for beta chain variable domain of TCR clone 149891 (TRBV13, TRBJ2-7)
CASSQGVSYEQYF

SEQ ID NO: 299783 - protein, 15 aa, Homo sapiens
  CDR3 for alpha chain variable domain of TCR clone 149892 (TRAV38-1, TRAJ37)
CAFIFGSGYTGKLIF

SEQ ID NO: 299784 - protein, 12 aa, Homo sapiens
  CDR3 for beta chain variable domain of TCR clone 149892 (TRBV7-9, TRBJ2-7)
CASSLEGYEQYF

SEQ ID NO: 299785 - protein, 16 aa, Homo sapiens
  CDR3 for alpha chain variable domain of TCR clone 149893 (TRAV12-3, TRAJ53)
CAMGPGSGGSNYKLTF

SEQ ID NO: 299786 - protein, 16 aa, Homo sapiens
  CDR3 for beta chain variable domain of TCR clone 149893 (TRBV4-2, TRBJ1-1)
CASSQAGFRMNTEAFF

SEQ ID NO: 299787 - protein, 13 aa, Homo sapiens
  CDR3 for alpha chain variable domain of TCR clone 149894 (TRAV30, TRAJ6)
CGTEAGGSYIPTF

SEQ ID NO: 299788 - protein, 13 aa, Homo sapiens
  CDR3 for beta chain variable domain of TCR clone 149894 (TRBV12-4, TRBJ1-2)
CASSLRQGKGYTF

SEQ ID NO: 299789 - protein, 14 aa, Homo sapiens
  CDR3 for alpha chain variable domain of TCR clone 149895 (TRAV26-1, TRAJ38)
CIADNAGNNRKLIW

SEQ ID NO: 299790 - protein, 21 aa, Homo sapiens
  CDR3 for beta chain variable domain of TCR clone 149895 (TRBV7-2, TRBJ2-7)
RRTRPCISVPAALRLVYEQYF

SEQ ID NO: 299791 - protein, 12 aa, Homo sapiens
  CDR3 for alpha chain variable domain of TCR clone 149896 (TRAV27, TRAJ21)
CAGVRQLQQILL

SEQ ID NO: 299792 - protein, 14 aa, Homo sapiens
  CDR3 for beta chain variable domain of TCR clone 149896 (TRBV7-9, TRBJ1-4)
CASSLEGQSEKLVF

SEQ ID NO: 299793 - protein, 15 aa, Homo sapiens
  CDR3 for alpha chain variable domain of TCR clone 149897 (TRAV12-3, TRAJ6)
CAMSATTGGSYIPTF

SEQ ID NO: 299794 - protein, 16 aa, Homo sapiens
  CDR3 for beta chain variable domain of TCR clone 149897 (TRBV20-1, TRBJ1-2)
CSASMGQGVAYYGYTF

SEQ ID NO: 299795 - protein, 12 aa, Homo sapiens
  CDR3 for alpha chain variable domain of TCR clone 149898 (TRAV4, TRAJ6)
CLAPGGSYIPTF

SEQ ID NO: 299796 - protein, 13 aa, Homo sapiens
  CDR3 for beta chain variable domain of TCR clone 149898 (TRBV6-5, TRBJ2-5)
CASSPQGGETQYF

SEQ ID NO: 299797 - protein, 13 aa, Homo sapiens
  CDR3 for alpha chain variable domain of TCR clone 149899 (TRAV3, TRAJ8)
CAVRFTGFQKLVF

SEQ ID NO: 299798 - protein, 12 aa, Homo sapiens
  CDR3 for beta chain variable domain of TCR clone 149899 (TRBV2, TRBJ1-2)
CASSGQTYGDTF

SEQ ID NO: 299799 - protein, 15 aa, Homo sapiens
  CDR3 for alpha chain variable domain of TCR clone 149900 (TRAV8-3, TRAJ45)
CAASYSGGGADGLTF

SEQ ID NO: 299800 - protein, 18 aa, Homo sapiens
  CDR3 for beta chain variable domain of TCR clone 149900 (TRBV18, TRBJ1-3)
CASSPRGGAGPSGNTIYF

SEQ ID NO: 299801 - protein, 19 aa, Homo sapiens
  CDR3 for alpha chain variable domain of TCR clone 149901 (TRAV2, TRAJ20)
ILQAREADAAVYRDCKLSF

SEQ ID NO: 299802 - protein, 13 aa, Homo sapiens
  CDR3 for beta chain variable domain of TCR clone 149901 (TRBV15, TRBJ1-6)
CATSGGLNSPLHF

SEQ ID NO: 299803 - protein, 15 aa, Homo sapiens
  CDR3 for alpha chain variable domain of TCR clone 149902 (TRAV17, TRAJ56)
CATEPFTGANRKLTF

SEQ ID NO: 299804 - protein, 15 aa, Homo sapiens
  CDR3 for beta chain variable domain of TCR clone 149902 (TRBV28, TRBJ1-5)
CASSRTGGYVQTQHF

SEQ ID NO: 299805 - protein, 14 aa, Homo sapiens
  CDR3 for alpha chain variable domain of TCR clone 149903 (TRAV12-2, TRAJ17)
CAVLFKAAGNKLTF

SEQ ID NO: 299806 - protein, 20 aa, Homo sapiens
  CDR3 for beta chain variable domain of TCR clone 149903 (TRBV7-8, TRBJ2-2)
CASSHLFPGPTIHITGKLFF

SEQ ID NO: 299807 - protein, 12 aa, Homo sapiens
  CDR3 for alpha chain variable domain of TCR clone 149904 (TRAV21, TRAJ33)
CSKMDSNYQLIW

SEQ ID NO: 299808 - protein, 15 aa, Homo sapiens
  CDR3 for beta chain variable domain of TCR clone 149904 (TRBV6-3, TRBJ2-7)
CASSSPGTVFYEQYF

SEQ ID NO: 299809 - protein, 11 aa, Homo sapiens
  CDR3 for alpha chain variable domain of TCR clone 149905 (TRAV1-2, TRAJ20)
CAVSNDYKLSF

SEQ ID NO: 299810 - protein, 14 aa, Homo sapiens
  CDR3 for beta chain variable domain of TCR clone 149905 (TRBV23-1, TRBJ2-5)
CASSFLRSQETQYF

SEQ ID NO: 299811 - protein, 14 aa, Homo sapiens
  CDR3 for alpha chain variable domain of TCR clone 149906 (TRAV8-4, TRAJ9)
CAVRINTGGFKTIF

SEQ ID NO: 299812 - protein, 14 aa, Homo sapiens
  CDR3 for beta chain variable domain of TCR clone 149906 (TRBV5-1, TRBJ1-1)
CASRLQGASTEAFF

SEQ ID NO: 299813 - protein, 14 aa, Homo sapiens
  CDR3 for alpha chain variable domain of TCR clone 149907 (TRAV8-3, TRAJ4)
CAVGAAGGYYKLIF

SEQ ID NO: 299814 - protein, 15 aa, Homo sapiens
  CDR3 for beta chain variable domain of TCR clone 149907 (TRBV6-5, TRBJ2-1)
CASSYDAGAGNEQFL

SEQ ID NO: 299815 - protein, 14 aa, Homo sapiens
  CDR3 for alpha chain variable domain of TCR clone 149908 (TRAV2, TRAJ37)
CAVAFTSNTGKLSF

SEQ ID NO: 299816 - protein, 15 aa, Homo sapiens
  CDR3 for beta chain variable domain of TCR clone 149908 (TRBV20-1, TRBJ1-1)
CSASRGVTGNTEAFF

SEQ ID NO: 299817 - protein, 14 aa, Homo sapiens
  CDR3 for alpha chain variable domain of TCR clone 149909 (TRAV12-2, TRAJ13)
CAVKKTGGYQEVTF

SEQ ID NO: 299818 - protein, 14 aa, Homo sapiens
  CDR3 for beta chain variable domain of TCR clone 149909 (TRBV7-8, TRBJ2-3)
CASSLEAGTDTQYF

SEQ ID NO: 299819 - protein, 12 aa, Homo sapiens
  CDR3 for alpha chain variable domain of TCR clone 149910 (TRAV21, TRAJ36)
CAVYTGANNLFF

SEQ ID NO: 299820 - protein, 14 aa, Homo sapiens
  CDR3 for beta chain variable domain of TCR clone 149910 (TRBV7-3, TRBJ2-1)
CASSLGTSANEQFF

SEQ ID NO: 299821 - protein, 12 aa, Homo sapiens
  CDR3 for alpha chain variable domain of TCR clone 149911 (TRAV13-1, TRAJ21)
CAAKEGFNKFYF

SEQ ID NO: 299822 - protein, 14 aa, Homo sapiens
  CDR3 for beta chain variable domain of TCR clone 149911 (TRBV15, TRBJ2-3)
CATRSGTSTDTQYF

SEQ ID NO: 299823 - protein, 17 aa, Homo sapiens
  CDR3 for alpha chain variable domain of TCR clone 149912 (TRAV20, TRAJ52)
CAVQANAGGTSYGKLTF

SEQ ID NO: 299824 - protein, 17 aa, Homo sapiens
  CDR3 for beta chain variable domain of TCR clone 149912 (TRBV18, TRBJ2-1)
CASSPLAAGAGDNEQFF

SEQ ID NO: 299825 - protein, 14 aa, Homo sapiens
  CDR3 for alpha chain variable domain of TCR clone 149913 (TRAV21, TRAJ37)
CAVKGSSNTGRLIF

SEQ ID NO: 299826 - protein, 15 aa, Homo sapiens
  CDR3 for beta chain variable domain of TCR clone 149913 (TRBV7-2, TRBJ2-1)
CASSSGLAGGNEQFF

SEQ ID NO: 299827 - protein, 10 aa, Homo sapiens
  CDR3 for alpha chain variable domain of TCR clone 149914 (TRAV30, TRAJ48)
CGIGNEKLTF

SEQ ID NO: 299828 - protein, 16 aa, Homo sapiens
  CDR3 for beta chain variable domain of TCR clone 149914 (TRBV11-2, TRBJ2-3)
CASSSRTSGGAGTQYF

SEQ ID NO: 299829 - protein, 16 aa, Homo sapiens
  CDR3 for alpha chain variable domain of TCR clone 149915 (TRAV3, TRAJ3)
CAVRDRAKSSASKIIF

SEQ ID NO: 299830 - protein, 16 aa, Homo sapiens
  CDR3 for beta chain variable domain of TCR clone 149915 (TRBV20-1, TRBJ2-4)
CSDTSLAELAKNIQYF

SEQ ID NO: 299831 - protein, 12 aa, Homo sapiens
  CDR3 for alpha chain variable domain of TCR clone 149916 (TRAV8-6, TRAJ11)
CAVSSGYSTLTF

SEQ ID NO: 299832 - protein, 14 aa, Homo sapiens
  CDR3 for beta chain variable domain of TCR clone 149916 (TRBV5-1, TRBJ2-7)
CASSRGESLYEQYF

SEQ ID NO: 299833 - protein, 15 aa, Homo sapiens
  CDR3 for alpha chain variable domain of TCR clone 149917 (TRAV2, TRAJ9)
CAVEDRGTGGFKTIF

SEQ ID NO: 299834 - protein, 15 aa, Homo sapiens
  CDR3 for beta chain variable domain of TCR clone 149917 (TRBV7-2, TRBJ2-1)
CASTHGTGIYNEQFF

SEQ ID NO: 299835 - protein, 13 aa, Homo sapiens
  CDR3 for alpha chain variable domain of TCR clone 149918 (TRAV8-3, TRAJ21)
CAVGAYNFNTFYF

SEQ ID NO: 299836 - protein, 16 aa, Homo sapiens
  CDR3 for beta chain variable domain of TCR clone 149918 (TRBV19, TRBJ2-1)
CASSMGGGSSYNEQFF

SEQ ID NO: 299837 - protein, 13 aa, Homo sapiens
  CDR3 for alpha chain variable domain of TCR clone 149919 (TRAV35, TRAJ32)
CAGVGGATNKLIF

SEQ ID NO: 299838 - protein, 15 aa, Homo sapiens
  CDR3 for beta chain variable domain of TCR clone 149919 (TRBV19, TRBJ2-4)
CASRGPRRGENIQYF

SEQ ID NO: 299839 - protein, 13 aa, Homo sapiens
  CDR3 for alpha chain variable domain of TCR clone 149920 (TRAV13-1, TRAJ21)
CAASIYNFNKFYF

SEQ ID NO: 299840 - protein, 12 aa, Homo sapiens
  CDR3 for beta chain variable domain of TCR clone 149920 (TRBV7-2, TRBJ2-5)
CASSLYQETQYF

SEQ ID NO: 299841 - protein, 11 aa, Homo sapiens
  CDR3 for alpha chain variable domain of TCR clone 149921 (TRAV12-3, TRAJ20)
CSMSYDYKLSF

SEQ ID NO: 299842 - protein, 14 aa, Homo sapiens
  CDR3 for beta chain variable domain of TCR clone 149921 (TRBV7-2, TRBJ2-7)
CASSPKTSFYEQYF

SEQ ID NO: 299843 - protein, 13 aa, Homo sapiens
  CDR3 for alpha chain variable domain of TCR clone 149922 (TRAV3, TRAJ20)
CAVRDTPRYKLSF

SEQ ID NO: 299844 - protein, 16 aa, Homo sapiens
  CDR3 for beta chain variable domain of TCR clone 149922 (TRBV4-2, TRBJ1-1)
CASSQAGFGMNTEAFF

SEQ ID NO: 299845 - protein, 14 aa, Homo sapiens
  CDR3 for alpha chain variable domain of TCR clone 149923 (TRAV12-1, TRAJ54)
CVVNIYQGAQKLVF

SEQ ID NO: 299846 - protein, 16 aa, Homo sapiens
  CDR3 for beta chain variable domain of TCR clone 149923 (TRBV7-9, TRBJ1-2)
CASSLGFSSGEDGYTF

SEQ ID NO: 299847 - protein, 15 aa, Homo sapiens
  CDR3 for alpha chain variable domain of TCR clone 149924 (TRAV8-3, TRAJ27)
CDVGSSKTNAGKSTF

SEQ ID NO: 299848 - protein, 15 aa, Homo sapiens
  CDR3 for beta chain variable domain of TCR clone 149924 (TRBV7-2, TRBJ2-1)
CASSSGLAGGNEQFF

SEQ ID NO: 299849 - protein, 13 aa, Homo sapiens
  CDR3 for alpha chain variable domain of TCR clone 149925 (TRAV12-2, TRAJ42)
CAVKRGSKGNPIF

SEQ ID NO: 299850 - protein, 12 aa, Homo sapiens
  CDR3 for beta chain variable domain of TCR clone 149925 (TRBV5-7, TRBJ1-2)
CASSLVQNGYTF

SEQ ID NO: 299851 - protein, 17 aa, Homo sapiens
  CDR3 for alpha chain variable domain of TCR clone 149926 (TRAV27, TRAJ42)
CAERVIYYVGSQGNLIF

SEQ ID NO: 299852 - protein, 14 aa, Homo sapiens
  CDR3 for beta chain variable domain of TCR clone 149926 (TRBV20-1, TRBJ2-1)
CSAQIGGSANEQFF

SEQ ID NO: 299853 - protein, 14 aa, Homo sapiens
  CDR3 for alpha chain variable domain of TCR clone 149927 (TRAV13-1, TRAJ9)
CAASALTGGFKTIF

SEQ ID NO: 299854 - protein, 18 aa, Homo sapiens
  CDR3 for beta chain variable domain of TCR clone 149927 (TRBV11-2, TRBJ2-6)
CASSLNPFLGTGANVLTF

SEQ ID NO: 299855 - protein, 12 aa, Homo sapiens
  CDR3 for alpha chain variable domain of TCR clone 149928 (TRAV16, TRAJ10)
CSRTGGGNKLTF

SEQ ID NO: 299856 - protein, 13 aa, Homo sapiens
  CDR3 for beta chain variable domain of TCR clone 149928 (TRBV7-3, TRBJ1-1)
CASSQEWGAEDFF

SEQ ID NO: 299857 - protein, 13 aa, Homo sapiens
  CDR3 for alpha chain variable domain of TCR clone 149929 (TRAV12-2, TRAJ20)
CAVYPSNDYKLSF

SEQ ID NO: 299858 - protein, 12 aa, Homo sapiens
  CDR3 for beta chain variable domain of TCR clone 149929 (TRBV11-2, TRBJ2-2)
CASSLPTGELFF

SEQ ID NO: 299859 - protein, 16 aa, Homo sapiens
  CDR3 for alpha chain variable domain of TCR clone 149930 (TRAV4, TRAJ22)
CLVGDLYSGSARQLTF

SEQ ID NO: 299860 - protein, 13 aa, Homo sapiens
  CDR3 for beta chain variable domain of TCR clone 149930 (TRBV7-9, TRBJ2-1)
CASSWESYNEQFF

SEQ ID NO: 299861 - protein, 22 aa, Homo sapiens
  CDR3 for alpha chain variable domain of TCR clone 149931 (TRAV27, )
CAVRAQIPDIQNPDPAVYQLRD

SEQ ID NO: 299862 - protein, 16 aa, Homo sapiens
  CDR3 for beta chain variable domain of TCR clone 149931 (TRBV5-1, TRBJ2-3)
CASSLGLAVYTDTQYF

SEQ ID NO: 299863 - protein, 16 aa, Homo sapiens
  CDR3 for alpha chain variable domain of TCR clone 149932 (TRAV12-3, TRAJ53)
CAMSPGSGGSNYKLTF

SEQ ID NO: 299864 - protein, 15 aa, Homo sapiens
  CDR3 for beta chain variable domain of TCR clone 149932 (TRBV9, TRBJ1-6)
CASSVAGTGDSTLHF

SEQ ID NO: 299865 - protein, 14 aa, Homo sapiens
  CDR3 for alpha chain variable domain of TCR clone 149933 (TRAV26-1, TRAJ44)
CIARTTGTASKLTF

SEQ ID NO: 299866 - protein, 12 aa, Homo sapiens
  CDR3 for beta chain variable domain of TCR clone 149933 (TRBV7-9, TRBJ2-7)
CASSIKREEQYF

SEQ ID NO: 299867 - protein, 14 aa, Homo sapiens
  CDR3 for alpha chain variable domain of TCR clone 149934 (TRAV1-2, TRAJ8)
CAEREDTGFQKLVF

SEQ ID NO: 299868 - protein, 15 aa, Homo sapiens
  CDR3 for beta chain variable domain of TCR clone 149934 (TRBV4-3, TRBJ1-1)
CASSPRLEGNTEAFF

SEQ ID NO: 299869 - protein, 13 aa, Homo sapiens
  CDR3 for alpha chain variable domain of TCR clone 149935 (TRAV13-1, TRAJ21)
CAASIYNFNKFYF

SEQ ID NO: 299870 - protein, 12 aa, Homo sapiens
  CDR3 for beta chain variable domain of TCR clone 149935 (TRBV7-9, TRBJ2-7)
CASSFGSYEQYF

SEQ ID NO: 299871 - protein, 13 aa, Homo sapiens
  CDR3 for alpha chain variable domain of TCR clone 149936 (TRAV2, TRAJ29)
CAAQTPGNTPLVF

SEQ ID NO: 299872 - protein, 14 aa, Homo sapiens
  CDR3 for beta chain variable domain of TCR clone 149936 (TRBV7-9, TRBJ2-4)
CASSLAMGGNIQYF

SEQ ID NO: 299873 - protein, 13 aa, Homo sapiens
  CDR3 for alpha chain variable domain of TCR clone 149937 (TRAV27, TRAJ54)
CAGAGQGAQKLLF

SEQ ID NO: 299874 - protein, 15 aa, Homo sapiens
  CDR3 for beta chain variable domain of TCR clone 149937 (TRBV18, TRBJ2-6)
CASSPSYAGANVLTF

SEQ ID NO: 299875 - protein, 14 aa, Homo sapiens
  CDR3 for alpha chain variable domain of TCR clone 149938 (TRAV12-2, TRAJ40)
CAVKIPPGTYKYIF

SEQ ID NO: 299876 - protein, 17 aa, Homo sapiens
  CDR3 for beta chain variable domain of TCR clone 149938 (TRBV20-1, TRBJ2-1)
CSASSSGLAGSYNEQFF

SEQ ID NO: 299877 - protein, 13 aa, Homo sapiens
  CDR3 for alpha chain variable domain of TCR clone 149939 (TRAV12-2, TRAJ4)
CAIRSGGYNKLIF

SEQ ID NO: 299878 - protein, 15 aa, Homo sapiens
  CDR3 for beta chain variable domain of TCR clone 149939 (TRBV10-3, TRBJ2-1)
CAISDVQDRAYEQFF

SEQ ID NO: 299879 - protein, 14 aa, Homo sapiens
  CDR3 for alpha chain variable domain of TCR clone 149940 (TRAV8-4, TRAJ16)
CAVSPVGRWPEAAL

SEQ ID NO: 299880 - protein, 15 aa, Homo sapiens
  CDR3 for beta chain variable domain of TCR clone 149940 (TRBV7-9, TRBJ1-4)
CASSRTGGFNEKLFF

SEQ ID NO: 299881 - protein, 14 aa, Homo sapiens
  CDR3 for alpha chain variable domain of TCR clone 149941 (TRAV12-1, TRAJ17)
CVVNPKAAGNKLAF

SEQ ID NO: 299882 - protein, 15 aa, Homo sapiens
  CDR3 for beta chain variable domain of TCR clone 149941 (TRBV5-1, TRBJ2-1)
CASSPPRAPYNEQFF

SEQ ID NO: 299883 - protein, 15 aa, Homo sapiens
  CDR3 for alpha chain variable domain of TCR clone 149942 (TRAV8-6, TRAJ10)
CAVSDQAGGGNKLTF

SEQ ID NO: 299884 - protein, 15 aa, Homo sapiens
  CDR3 for beta chain variable domain of TCR clone 149942 (TRBV3-1, TRBJ2-5)
CASSANLGGPETQHV

SEQ ID NO: 299885 - protein, 22 aa, Homo sapiens
  CDR3 for alpha chain variable domain of TCR clone 149943 (TRAV1-2, TRAJ8)
CAVREDTGFQKLVLELAPDFWF

SEQ ID NO: 299886 - protein, 16 aa, Homo sapiens
  CDR3 for beta chain variable domain of TCR clone 149943 (TRBV28, TRBJ1-4)
CASSPPYRGRSEKLFF

SEQ ID NO: 299887 - protein, 14 aa, Homo sapiens
  CDR3 for alpha chain variable domain of TCR clone 149944 (TRAV8-1, TRAJ5)
CAVRTDTGRRALTF

SEQ ID NO: 299888 - protein, 15 aa, Homo sapiens
  CDR3 for beta chain variable domain of TCR clone 149944 (TRBV4-3, TRBJ2-7)
CASSQGDWGDYEQYF

SEQ ID NO: 299889 - protein, 15 aa, Homo sapiens
  CDR3 for alpha chain variable domain of TCR clone 149945 (TRAV26-2, TRAJ39)
FSLRGDNNAGDMLTF

SEQ ID NO: 299890 - protein, 15 aa, Homo sapiens
  CDR3 for beta chain variable domain of TCR clone 149945 (TRBV5-4, TRBJ1-1)
CASSSLGWANTEAFF

SEQ ID NO: 299891 - protein, 14 aa, Homo sapiens
  CDR3 for alpha chain variable domain of TCR clone 149946 (TRAV12-2, TRAJ17)
CAVLFKAAGNKLTF

SEQ ID NO: 299892 - protein, 18 aa, Homo sapiens
  CDR3 for beta chain variable domain of TCR clone 149946 (TRBV4-1, TRBJ1-5)
CASSQDPRGQGLNQPQHF

SEQ ID NO: 299893 - protein, 14 aa, Homo sapiens
  CDR3 for alpha chain variable domain of TCR clone 149947 (TRAV12-2, TRAJ44)
CAVNPAGTASKLTF

SEQ ID NO: 299894 - protein, 16 aa, Homo sapiens
  CDR3 for beta chain variable domain of TCR clone 149947 (TRBV2, TRBJ2-6)
CASSEVGRAGANVLTF

SEQ ID NO: 299895 - protein, 12 aa, Homo sapiens
  CDR3 for alpha chain variable domain of TCR clone 149948 (TRAV13-2, TRAJ23)
CAERHRGGKLIF

SEQ ID NO: 299896 - protein, 17 aa, Homo sapiens
  CDR3 for beta chain variable domain of TCR clone 149948 (TRBV7-2, TRBJ2-2)
CASSPSWRGGGTGELFF

SEQ ID NO: 299897 - protein, 17 aa, Homo sapiens
  CDR3 for alpha chain variable domain of TCR clone 149949 (TRAV8-4, TRAJ45)
CAVSEGGSGGGADGLTF

SEQ ID NO: 299898 - protein, 12 aa, Homo sapiens
  CDR3 for beta chain variable domain of TCR clone 149949 (TRBV11-2, TRBJ2-2)
CASSLPTGELFF

SEQ ID NO: 299899 - protein, 11 aa, Homo sapiens
  CDR3 for alpha chain variable domain of TCR clone 149950 (TRAV21, TRAJ34)
CAHYSTDKLIF

SEQ ID NO: 299900 - protein, 11 aa, Homo sapiens
  CDR3 for beta chain variable domain of TCR clone 149950 (TRBV29-1, TRBJ2-5)
CSEDRTGTQYF

SEQ ID NO: 299901 - protein, 16 aa, Homo sapiens
  CDR3 for alpha chain variable domain of TCR clone 149951 (TRAV4, TRAJ8)
CLVGDSGNTGFQKLVF

SEQ ID NO: 299902 - protein, 15 aa, Homo sapiens
  CDR3 for beta chain variable domain of TCR clone 149951 (TRBV19, TRBJ1-2)
CASSVPGQDGYTLVR

SEQ ID NO: 299903 - protein, 17 aa, Homo sapiens
  CDR3 for alpha chain variable domain of TCR clone 149952 (TRAV27, TRAJ52)
CAGAGRAGGTSYGKLTF

SEQ ID NO: 299904 - protein, 16 aa, Homo sapiens
  CDR3 for beta chain variable domain of TCR clone 149952 (TRBV19, TRBJ2-1)
CASSKAGPSSYNEQFF

SEQ ID NO: 299905 - protein, 16 aa, Homo sapiens
  CDR3 for alpha chain variable domain of TCR clone 149953 (TRAV3, TRAJ37)
CAVRGKGSGNTGKLIC

SEQ ID NO: 299906 - protein, 13 aa, Homo sapiens
  CDR3 for beta chain variable domain of TCR clone 149953 (TRBV7-3, TRBJ1-1)
CASSQDWGAEAFF

SEQ ID NO: 299907 - protein, 16 aa, Homo sapiens
  CDR3 for alpha chain variable domain of TCR clone 149954 (TRAV13-1, TRAJ48)
CAANIFGNFGNEKLTF

SEQ ID NO: 299908 - protein, 14 aa, Homo sapiens
  CDR3 for beta chain variable domain of TCR clone 149954 (TRBV24-1, TRBJ1-1)
CATSIPRGDTEAFF

SEQ ID NO: 299909 - protein, 16 aa, Homo sapiens
  CDR3 for alpha chain variable domain of TCR clone 149955 (TRAV30, TRAJ24)
CGTEIVDADSCGKFQF

SEQ ID NO: 299910 - protein, 15 aa, Homo sapiens
  CDR3 for beta chain variable domain of TCR clone 149955 (TRBV6-3, TRBJ2-7)
CASSSPGTVFYEQYF

SEQ ID NO: 299911 - protein, 12 aa, Homo sapiens
  CDR3 for alpha chain variable domain of TCR clone 149956 (TRAV3, TRAJ13)
CAVSGGYQKVTF

SEQ ID NO: 299912 - protein, 16 aa, Homo sapiens
  CDR3 for beta chain variable domain of TCR clone 149956 (TRBV13, TRBJ2-2)
CASSPRTGEHTGELFF

SEQ ID NO: 299913 - protein, 14 aa, Homo sapiens
  CDR3 for alpha chain variable domain of TCR clone 149957 (TRAV30, TRAJ33)
CGTVAPPQQLSVNL

SEQ ID NO: 299914 - protein, 16 aa, Homo sapiens
  CDR3 for beta chain variable domain of TCR clone 149957 (TRBV3-1, TRBJ2-5)
CASSPVQFNGFGTQYF

SEQ ID NO: 299915 - protein, 15 aa, Homo sapiens
  CDR3 for alpha chain variable domain of TCR clone 149958 (TRAV12-3, TRAJ42)
CAMSGHGGSQGNLIF

SEQ ID NO: 299916 - protein, 13 aa, Homo sapiens
  CDR3 for beta chain variable domain of TCR clone 149958 (TRBV19, TRBJ2-5)
CAGSGRAGETQYF

SEQ ID NO: 299917 - protein, 10 aa, Homo sapiens
  CDR3 for alpha chain variable domain of TCR clone 149959 (TRAV1-2, TRAJ20)
CAVTDYKLSF

SEQ ID NO: 299918 - protein, 15 aa, Homo sapiens
  CDR3 for beta chain variable domain of TCR clone 149959 (TRBV7-2, TRBJ2-7)
CASSVVSSGSYEQYF

SEQ ID NO: 299919 - protein, 15 aa, Homo sapiens
  CDR3 for alpha chain variable domain of TCR clone 149960 (TRAV1-2, TRAJ20)
CAPTPPGGNDYKLSF

SEQ ID NO: 299920 - protein, 15 aa, Homo sapiens
  CDR3 for beta chain variable domain of TCR clone 149960 (TRBV12-4, TRBJ2-5)
CASSPPTGLQETQYF

SEQ ID NO: 299921 - protein, 14 aa, Homo sapiens
  CDR3 for alpha chain variable domain of TCR clone 149961 (TRAV13-1, TRAJ44)
CAAKATGTASKLTF

SEQ ID NO: 299922 - protein, 12 aa, Homo sapiens
  CDR3 for beta chain variable domain of TCR clone 149961 (TRBV5-1, TRBJ2-7)
CASRGGGLEQYF

SEQ ID NO: 299923 - protein, 16 aa, Homo sapiens
  CDR3 for alpha chain variable domain of TCR clone 149962 (TRAV30, TRAJ24)
CGTEIVDADSWGKFPF

SEQ ID NO: 299924 - protein, 18 aa, Homo sapiens
  CDR3 for beta chain variable domain of TCR clone 149962 (TRBV11-2, TRBJ2-3)
CASSLGGASRGAPNTQYF

SEQ ID NO: 299925 - protein, 20 aa, Homo sapiens
  CDR3 for alpha chain variable domain of TCR clone 149963 (TRAV26-1, TRAJ42)
CCVLLHRQTYYGGSQGNLIF

SEQ ID NO: 299926 - protein, 11 aa, Homo sapiens
  CDR3 for beta chain variable domain of TCR clone 149963 (TRBV7-3, TRBJ2-2)
CASSLKRDLVR

SEQ ID NO: 299927 - protein, 16 aa, Homo sapiens
  CDR3 for alpha chain variable domain of TCR clone 149964 (TRAV20, TRAJ28)
CAVRDPSGAGSYQLTF

SEQ ID NO: 299928 - protein, 15 aa, Homo sapiens
  CDR3 for beta chain variable domain of TCR clone 149964 (TRBV6-3, TRBJ2-7)
CASSSPGTVFYEQYF

SEQ ID NO: 299929 - protein, 13 aa, Homo sapiens
  CDR3 for alpha chain variable domain of TCR clone 149965 (TRAV35, TRAJ13)
CWRSPGGYQKVTF

SEQ ID NO: 299930 - protein, 14 aa, Homo sapiens
  CDR3 for beta chain variable domain of TCR clone 149965 (TRBV19, TRBJ2-2)
CASSMVGLSGELFF

SEQ ID NO: 299931 - protein, 13 aa, Homo sapiens
  CDR3 for alpha chain variable domain of TCR clone 149966 (TRAV2, TRAJ40)
YAVVTSGTYKYIF

SEQ ID NO: 299932 - protein, 16 aa, Homo sapiens
  CDR3 for beta chain variable domain of TCR clone 149966 (TRBV19, TRBJ2-2)
CASRSPGTGATGELFF

SEQ ID NO: 299933 - protein, 18 aa, Homo sapiens
  CDR3 for alpha chain variable domain of TCR clone 149967 (TRAV26-1, TRAJ52)
CIVRVQGAGGTSYGKLTF

SEQ ID NO: 299934 - protein, 13 aa, Homo sapiens
  CDR3 for beta chain variable domain of TCR clone 149967 (TRBV7-3, TRBJ1-2)
CASSLKRGYGYTF

SEQ ID NO: 299935 - protein, 11 aa, Homo sapiens
  CDR3 for alpha chain variable domain of TCR clone 149968 (TRAV12-2, TRAJ29)
CAVTLRSPLVF

SEQ ID NO: 299936 - protein, 15 aa, Homo sapiens
  CDR3 for beta chain variable domain of TCR clone 149968 (TRBV10-3, TRBJ1-3)
CAISDSQGAGNTIYF

SEQ ID NO: 299937 - protein, 17 aa, Homo sapiens
  CDR3 for alpha chain variable domain of TCR clone 149969 (TRAV3, TRAJ6)
CAVRDGTRAGGSYIPTF

SEQ ID NO: 299938 - protein, 16 aa, Homo sapiens
  CDR3 for beta chain variable domain of TCR clone 149969 (TRBV4-1, TRBJ2-7)
CASSLTAGQATYEQYF

SEQ ID NO: 299939 - protein, 18 aa, Homo sapiens
  CDR3 for alpha chain variable domain of TCR clone 149970 (TRAV21, TRAJ52)
CAVRPSPAGGTSYGKLTF

SEQ ID NO: 299940 - protein, 16 aa, Homo sapiens
  CDR3 for beta chain variable domain of TCR clone 149970 (TRBV18, TRBJ2-7)
CASSPMGNRRAHEQYF

SEQ ID NO: 299941 - protein, 12 aa, Homo sapiens
  CDR3 for alpha chain variable domain of TCR clone 149971 (TRAV17, TRAJ54)
CAILQGAQKLVF

SEQ ID NO: 299942 - protein, 15 aa, Homo sapiens
  CDR3 for beta chain variable domain of TCR clone 149971 (TRBV12-4, TRBJ2-5)
CASSPPTGLQETQYF

SEQ ID NO: 299943 - protein, 16 aa, Homo sapiens
  CDR3 for alpha chain variable domain of TCR clone 149972 (TRAV3, TRAJ10)
CAVRDTRAGGGNKLTF

SEQ ID NO: 299944 - protein, 17 aa, Homo sapiens
  CDR3 for beta chain variable domain of TCR clone 149972 (TRBV13, TRBJ2-3)
RASSLSRVAGGRNTQYF

SEQ ID NO: 299945 - protein, 17 aa, Homo sapiens
  CDR3 for alpha chain variable domain of TCR clone 149973 (TRAV26-2, TRAJ48)
CILRAHPSNFGYEKLTF

SEQ ID NO: 299946 - protein, 15 aa, Homo sapiens
  CDR3 for beta chain variable domain of TCR clone 149973 (TRBV7-2, TRBJ2-3)
CASSSTGLETDTQYF

SEQ ID NO: 299947 - protein, 15 aa, Homo sapiens
  CDR3 for alpha chain variable domain of TCR clone 149974 (TRAV17, TRAJ29)
CATDAFRKHTSCLWN

SEQ ID NO: 299948 - protein, 13 aa, Homo sapiens
  CDR3 for beta chain variable domain of TCR clone 149974 (TRBV5-7, TRBJ2-6)
CASTSSGANVLTF

SEQ ID NO: 299949 - protein, 14 aa, Homo sapiens
  CDR3 for alpha chain variable domain of TCR clone 149975 (TRAV8-4, TRAJ9)
CAVRVNTGGFKTIF

SEQ ID NO: 299950 - protein, 16 aa, Homo sapiens
  CDR3 for beta chain variable domain of TCR clone 149975 (TRBV28, TRBJ1-4)
CASSSRTGAANEKLFF

SEQ ID NO: 299951 - protein, 14 aa, Homo sapiens
  CDR3 for alpha chain variable domain of TCR clone 149976 (TRAV29/DV5, TRAJ34)
CAASASRETDKHIF

SEQ ID NO: 299952 - protein, 15 aa, Homo sapiens
  CDR3 for beta chain variable domain of TCR clone 149976 (TRBV7-8, TRBJ2-7)
CASSLERAGSYEQYF

SEQ ID NO: 299953 - protein, 15 aa, Homo sapiens
  CDR3 for alpha chain variable domain of TCR clone 149977 (TRAV2, TRAJ11)
CAVGGRNSGYSTLTF

SEQ ID NO: 299954 - protein, 17 aa, Homo sapiens
  CDR3 for beta chain variable domain of TCR clone 149977 (TRBV7-3, TRBJ2-3)
CASSLMKRMRGADTQYF

SEQ ID NO: 299955 - protein, 13 aa, Homo sapiens
  CDR3 for alpha chain variable domain of TCR clone 149978 (TRAV39, TRAJ48)
CAAVNFGNEKLTF

SEQ ID NO: 299956 - protein, 12 aa, Homo sapiens
  CDR3 for beta chain variable domain of TCR clone 149978 (TRBV5-5, TRBJ2-5)
CASSYFGETQYV

SEQ ID NO: 299957 - protein, 11 aa, Homo sapiens
  CDR3 for alpha chain variable domain of TCR clone 149979 (TRAV4, TRAJ23)
CLVAPGGKLIF

SEQ ID NO: 299958 - protein, 15 aa, Homo sapiens
  CDR3 for beta chain variable domain of TCR clone 149979 (TRBV7-2, TRBJ1-2)
CASSLAPDRGLGYTF

SEQ ID NO: 299959 - protein, 13 aa, Homo sapiens
  CDR3 for alpha chain variable domain of TCR clone 149980 (TRAV12-2, TRAJ50)
CAVIVTSYDKVIF

SEQ ID NO: 299960 - protein, 13 aa, Homo sapiens
  CDR3 for beta chain variable domain of TCR clone 149980 (TRBV7-9, TRBJ1-2)
CASSLKRNYGYTF

SEQ ID NO: 299961 - protein, 14 aa, Homo sapiens
  CDR3 for alpha chain variable domain of TCR clone 149981 (TRAV29/DV5, TRAJ36)
CAARRKTGANNLFF

SEQ ID NO: 299962 - protein, 13 aa, Homo sapiens
  CDR3 for beta chain variable domain of TCR clone 149981 (TRBV13, TRBJ2-5)
CASSPEVGETQYF

SEQ ID NO: 299963 - protein, 15 aa, Homo sapiens
  CDR3 for alpha chain variable domain of TCR clone 149982 (TRAV2, TRAJ37)
CAVGDGSRNTGKLIF

SEQ ID NO: 299964 - protein, 13 aa, Homo sapiens
  CDR3 for beta chain variable domain of TCR clone 149982 (TRBV20-1, TRBJ2-7)
CSAQTGLSYEQYS

SEQ ID NO: 299965 - protein, 12 aa, Homo sapiens
  CDR3 for alpha chain variable domain of TCR clone 149983 (TRAV12-3, TRAJ17)
CAMTLTGNKLTF

SEQ ID NO: 299966 - protein, 18 aa, Homo sapiens
  CDR3 for beta chain variable domain of TCR clone 149983 (TRBV4-3, TRBJ1-6)
CASSHETPASSYNSPLLF

SEQ ID NO: 299967 - protein, 13 aa, Homo sapiens
  CDR3 for alpha chain variable domain of TCR clone 149984 (TRAV8-3, TRAJ36)
CAVGATGANNLFF

SEQ ID NO: 299968 - protein, 13 aa, Homo sapiens
  CDR3 for beta chain variable domain of TCR clone 149984 (TRBV12-4, TRBJ2-5)
CASSLFRRETQYF

SEQ ID NO: 299969 - protein, 11 aa, Homo sapiens
  CDR3 for alpha chain variable domain of TCR clone 149985 (TRAV12-2, TRAJ49)
CAVRSGNQFYF

SEQ ID NO: 299970 - protein, 14 aa, Homo sapiens
  CDR3 for beta chain variable domain of TCR clone 149985 (TRBV5-4, TRBJ2-1)
CASSLDQGLNEQFF

SEQ ID NO: 299971 - protein, 14 aa, Homo sapiens
  CDR3 for alpha chain variable domain of TCR clone 149986 (TRAV21, TRAJ35)
CAVMPIGFGNVLHC

SEQ ID NO: 299972 - protein, 15 aa, Homo sapiens
  CDR3 for beta chain variable domain of TCR clone 149986 (TRBV11-2, TRBJ2-2)
CASSPSGGGTGELFF

SEQ ID NO: 299973 - protein, 12 aa, Homo sapiens
  CDR3 for alpha chain variable domain of TCR clone 149987 (TRAV13-1, TRAJ21)
CAAKEGFNKFYF

SEQ ID NO: 299974 - protein, 15 aa, Homo sapiens
  CDR3 for beta chain variable domain of TCR clone 149987 (TRBV7-7, TRBJ2-5)
CASSQLERAEETQFF

SEQ ID NO: 299975 - protein, 11 aa, Homo sapiens
  CDR3 for alpha chain variable domain of TCR clone 149988 (TRAV29/DV5, TRAJ47)
CAAQRGNKLVF

SEQ ID NO: 299976 - protein, 14 aa, Homo sapiens
  CDR3 for beta chain variable domain of TCR clone 149988 (TRBV11-2, TRBJ2-7)
CASSSTGEGYEQYF

SEQ ID NO: 299977 - protein, 12 aa, Homo sapiens
  CDR3 for alpha chain variable domain of TCR clone 149989 (TRAV13-2, TRAJ23)
CAERHSGGKLIF

SEQ ID NO: 299978 - protein, 15 aa, Homo sapiens
  CDR3 for beta chain variable domain of TCR clone 149989 (TRBV9, TRBJ1-6)
CASSVAGTGDSPLHF

SEQ ID NO: 299979 - protein, 15 aa, Homo sapiens
  CDR3 for alpha chain variable domain of TCR clone 149990 (TRAV26-1, TRAJ44)
CIVRIGTGTASKLTF

SEQ ID NO: 299980 - protein, 18 aa, Homo sapiens
  CDR3 for beta chain variable domain of TCR clone 149990 (TRBV27, TRBJ2-1)
CASGNRAVGVGSKNEQFF

SEQ ID NO: 299981 - protein, 13 aa, Homo sapiens
  CDR3 for alpha chain variable domain of TCR clone 149991 (TRAV2, TRAJ40)
CAVVTSGTYKYIF

SEQ ID NO: 299982 - protein, 14 aa, Homo sapiens
  CDR3 for beta chain variable domain of TCR clone 149991 (TRBV7-3, TRBJ1-1)
CASSRQGGDTEAFF

SEQ ID NO: 299983 - protein, 14 aa, Homo sapiens
  CDR3 for alpha chain variable domain of TCR clone 149992 (TRAV12-2, TRAJ40)
CAVKIPSGTYKYIF

SEQ ID NO: 299984 - protein, 14 aa, Homo sapiens
  CDR3 for beta chain variable domain of TCR clone 149992 (TRBV28, TRBJ2-3)
CASSFVAGTDTQYF

SEQ ID NO: 299985 - protein, 17 aa, Homo sapiens
  CDR3 for alpha chain variable domain of TCR clone 149993 (TRAV35, TRAJ38)
CAGQLQRNAGNNRKLIW

SEQ ID NO: 299986 - protein, 13 aa, Homo sapiens
  CDR3 for beta chain variable domain of TCR clone 149993 (TRBV12-5, TRBJ2-3)
CASGDRQSDTQYF

SEQ ID NO: 299987 - protein, 15 aa, Homo sapiens
  CDR3 for alpha chain variable domain of TCR clone 149994 (TRAV26-1, TRAJ44)
CIVRANTGTARKPTF

SEQ ID NO: 299988 - protein, 16 aa, Homo sapiens
  CDR3 for beta chain variable domain of TCR clone 149994 (TRBV7-7, TRBJ2-1)
CASSLASGTSYNEQFF

SEQ ID NO: 299989 - protein, 19 aa, Homo sapiens
  CDR3 for alpha chain variable domain of TCR clone 149995 (TRAV1-2, TRAJ26)
CLLPLCCERPDNYGQNFVF

SEQ ID NO: 299990 - protein, 17 aa, Homo sapiens
  CDR3 for beta chain variable domain of TCR clone 149995 (TRBV28, TRBJ2-5)
CASSRKGGLAGAETQYF

SEQ ID NO: 299991 - protein, 11 aa, Homo sapiens
  CDR3 for alpha chain variable domain of TCR clone 149996 (TRAV16, TRAJ31)
CALFNNARLMF

SEQ ID NO: 299992 - protein, 13 aa, Homo sapiens
  CDR3 for beta chain variable domain of TCR clone 149996 (TRBV28, TRBJ2-3)
CASKLPGTDTQYF

SEQ ID NO: 299993 - protein, 14 aa, Homo sapiens
  CDR3 for alpha chain variable domain of TCR clone 149997 (TRAV34, TRAJ22)
CGADTSGSARQLTF

SEQ ID NO: 299994 - protein, 16 aa, Homo sapiens
  CDR3 for beta chain variable domain of TCR clone 149997 (TRBV13, TRBJ2-2)
CASSPRTGEHTGELFF

SEQ ID NO: 299995 - protein, 14 aa, Homo sapiens
  CDR3 for alpha chain variable domain of TCR clone 149998 (TRAV12-1, TRAJ12)
CVVTRMDSSYKLIF

SEQ ID NO: 299996 - protein, 15 aa, Homo sapiens
  CDR3 for beta chain variable domain of TCR clone 149998 (TRBV6-1, TRBJ2-2)
CASIVTSGITGELFF

SEQ ID NO: 299997 - protein, 19 aa, Homo sapiens
  CDR3 for alpha chain variable domain of TCR clone 149999 (TRAV26-1, TRAJ22)
CCVLLRRWVFSGSARQLTF

SEQ ID NO: 299998 - protein, 19 aa, Homo sapiens
  CDR3 for beta chain variable domain of TCR clone 149999 (TRBV19, TRBJ2-5)
CASSIGQVTDFFLGETQYF

SEQ ID NO: 299999 - protein, 16 aa, Homo sapiens
  CDR3 for alpha chain variable domain of TCR clone 150000 (TRAV4, TRAJ29)
CLVGAYRSQETHLLSL

SEQ ID NO: 300000 - protein, 12 aa, Homo sapiens
  CDR3 for beta chain variable domain of TCR clone 150000 (TRBV6-1, TRBJ2-7)
CASSDYSYEQYF

SEQ ID NO: 300001 - protein, 11 aa, Homo sapiens
  CDR3 for alpha chain variable domain of TCR clone 150001 (TRAV8-3, TRAJ49)
CAVNTGNQFYV

SEQ ID NO: 300002 - protein, 14 aa, Homo sapiens
  CDR3 for beta chain variable domain of TCR clone 150001 (TRBV19, TRBJ2-7)
CASSDRAGPYEQYF

SEQ ID NO: 300003 - protein, 13 aa, Homo sapiens
  CDR3 for alpha chain variable domain of TCR clone 150002 (TRAV12-1, TRAJ21)
CVVTLYNFNKFYF

SEQ ID NO: 300004 - protein, 20 aa, Homo sapiens
  CDR3 for beta chain variable domain of TCR clone 150002 (TRBV7-8, TRBJ2-1)
CASSLASRLAGVRSYNEQFF

SEQ ID NO: 300005 - protein, 14 aa, Homo sapiens
  CDR3 for alpha chain variable domain of TCR clone 150003 (TRAV14/DV4, TRAJ15)
CAMRRDQAGTALIF

SEQ ID NO: 300006 - protein, 16 aa, Homo sapiens
  CDR3 for beta chain variable domain of TCR clone 150003 (TRBV15, TRBJ2-3)
CATSRDLGIVTDTQYL

SEQ ID NO: 300007 - protein, 15 aa, Homo sapiens
  CDR3 for alpha chain variable domain of TCR clone 150004 (TRAV8-4, TRAJ29)
CAVSEGFRGNKPLVF

SEQ ID NO: 300008 - protein, 18 aa, Homo sapiens
  CDR3 for beta chain variable domain of TCR clone 150004 (TRBV20-1, TRBJ2-6)
CSARTLAGGPAGANVLTF

SEQ ID NO: 300009 - protein, 11 aa, Homo sapiens
  CDR3 for alpha chain variable domain of TCR clone 150005 (TRAV3, TRAJ21)
CAVGNFNKFYF

SEQ ID NO: 300010 - protein, 16 aa, Homo sapiens
  CDR3 for beta chain variable domain of TCR clone 150005 (TRBV19, TRBJ2-1)
CASSKEGPSYYNEQFF

SEQ ID NO: 300011 - protein, 12 aa, Homo sapiens
  CDR3 for alpha chain variable domain of TCR clone 150006 (TRAV22, TRAJ43)
CAVVLNNNDMRF

SEQ ID NO: 300012 - protein, 13 aa, Homo sapiens
  CDR3 for beta chain variable domain of TCR clone 150006 (TRBV11-3, TRBJ1-1)
CASTGSLNTEAFF

SEQ ID NO: 300013 - protein, 13 aa, Homo sapiens
  CDR3 for alpha chain variable domain of TCR clone 150007 (TRAV35, TRAJ57)
CAGSQGGSEKLVF

SEQ ID NO: 300014 - protein, 16 aa, Homo sapiens
  CDR3 for beta chain variable domain of TCR clone 150007 (TRBV7-7, TRBJ2-1)
CASSLASGTSYNEQFF

SEQ ID NO: 300015 - protein, 18 aa, Homo sapiens
  CDR3 for alpha chain variable domain of TCR clone 150008 (TRAV8-3, TRAJ4)
WVRDPTSNDPGGYNKLIF

SEQ ID NO: 300016 - protein, 13 aa, Homo sapiens
  CDR3 for beta chain variable domain of TCR clone 150008 (TRBV20-1, TRBJ1-2)
CSVTGIQGSGYTF

SEQ ID NO: 300017 - protein, 12 aa, Homo sapiens
  CDR3 for alpha chain variable domain of TCR clone 150009 (TRAV35, TRAJ54)
CADLQGAQKLVF

SEQ ID NO: 300018 - protein, 13 aa, Homo sapiens
  CDR3 for beta chain variable domain of TCR clone 150009 (TRBV10-3, TRBJ2-7)
CASKLAVNYEQYF

SEQ ID NO: 300019 - protein, 14 aa, Homo sapiens
  CDR3 for alpha chain variable domain of TCR clone 150010 (TRAV27, TRAJ23)
CAGLSYNQGGKLIF

SEQ ID NO: 300020 - protein, 15 aa, Homo sapiens
  CDR3 for beta chain variable domain of TCR clone 150010 (TRBV19, TRBJ2-2)
CASSLNWGVTGELFF

SEQ ID NO: 300021 - protein, 13 aa, Homo sapiens
  CDR3 for alpha chain variable domain of TCR clone 150011 (TRAV17, TRAJ54)
CAAGIQGAQKLVC

SEQ ID NO: 300022 - protein, 14 aa, Homo sapiens
  CDR3 for beta chain variable domain of TCR clone 150011 (TRBV11-2, TRBJ1-2)
CASSLGTANYGYTF

SEQ ID NO: 300023 - protein, 14 aa, Homo sapiens
  CDR3 for alpha chain variable domain of TCR clone 150012 (TRAV4, TRAJ17)
CLVGDMAAGNKLTF

SEQ ID NO: 300024 - protein, 14 aa, Homo sapiens
  CDR3 for beta chain variable domain of TCR clone 150012 (TRBV7-2, TRBJ2-7)
CASSPMTSFYEQYF

SEQ ID NO: 300025 - protein, 11 aa, Homo sapiens
  CDR3 for alpha chain variable domain of TCR clone 150013 (TRAV8-6, TRAJ34)
CAVWDTDKLIF

SEQ ID NO: 300026 - protein, 16 aa, Homo sapiens
  CDR3 for beta chain variable domain of TCR clone 150013 (TRBV5-1, TRBJ2-7)
CASSYASTSPGGEQYF

SEQ ID NO: 300027 - protein, 12 aa, Homo sapiens
  CDR3 for alpha chain variable domain of TCR clone 150014 (TRAV16, TRAJ27)
CALNHQCRQINL

SEQ ID NO: 300028 - protein, 12 aa, Homo sapiens
  CDR3 for beta chain variable domain of TCR clone 150014 (TRBV2, TRBJ2-1)
CAYGPPGNEQFF

SEQ ID NO: 300029 - protein, 15 aa, Homo sapiens
  CDR3 for alpha chain variable domain of TCR clone 150015 (TRAV1-1, TRAJ23)
CAVSEGPGRKAYLRT

SEQ ID NO: 300030 - protein, 14 aa, Homo sapiens
  CDR3 for beta chain variable domain of TCR clone 150015 (TRBV10-2, TRBJ2-1)
CASSEGTSEDEQSF

SEQ ID NO: 300031 - protein, 13 aa, Homo sapiens
  CDR3 for alpha chain variable domain of TCR clone 150016 (TRAV27, TRAJ42)
CAGARGSQGNLIF

SEQ ID NO: 300032 - protein, 14 aa, Homo sapiens
  CDR3 for beta chain variable domain of TCR clone 150016 (TRBV19, TRBJ2-7)
CASSMGQGAIEQYF

SEQ ID NO: 300033 - protein, 14 aa, Homo sapiens
  CDR3 for alpha chain variable domain of TCR clone 150017 (TRAV8-1, TRAJ4)
CAVPCSGGYNKLIF

SEQ ID NO: 300034 - protein, 16 aa, Homo sapiens
  CDR3 for beta chain variable domain of TCR clone 150017 (TRBV6-1, TRBJ1-2)
CASSGAWQGRSHGYTF

SEQ ID NO: 300035 - protein, 15 aa, Homo sapiens
  CDR3 for alpha chain variable domain of TCR clone 150018 (TRAV12-3, TRAJ45)
CAMSWGGGGADGLTF

SEQ ID NO: 300036 - protein, 16 aa, Homo sapiens
  CDR3 for beta chain variable domain of TCR clone 150018 (TRBV12-4, TRBJ1-5)
CASRQPVEGSNQPQHF

SEQ ID NO: 300037 - protein, 13 aa, Homo sapiens
  CDR3 for alpha chain variable domain of TCR clone 150019 (TRAV8-3, TRAJ37)
CDVPSSNTGKLIF

SEQ ID NO: 300038 - protein, 12 aa, Homo sapiens
  CDR3 for beta chain variable domain of TCR clone 150019 (TRBV11-2, TRBJ2-1)
CASSPGNNEQFF

SEQ ID NO: 300039 - protein, 13 aa, Homo sapiens
  CDR3 for alpha chain variable domain of TCR clone 150020 (TRAV20, TRAJ37)
CAGCSSNTGKLIF

SEQ ID NO: 300040 - protein, 11 aa, Homo sapiens
  CDR3 for beta chain variable domain of TCR clone 150020 (TRBV12-4, TRBJ2-3)
CAGTATDTRYF

SEQ ID NO: 300041 - protein, 14 aa, Homo sapiens
  CDR3 for alpha chain variable domain of TCR clone 150021 (TRAV12-2, TRAJ6)
CASKWGGGSYIPTF

SEQ ID NO: 300042 - protein, 15 aa, Homo sapiens
  CDR3 for beta chain variable domain of TCR clone 150021 (TRBV6-1, TRBJ2-6)
CASSSRPSGANVLTF

SEQ ID NO: 300043 - protein, 16 aa, Homo sapiens
  CDR3 for alpha chain variable domain of TCR clone 150022 (TRAV12-3, TRAJ53)
CAMSPGSGGSNYKLTF

SEQ ID NO: 300044 - protein, 16 aa, Homo sapiens
  CDR3 for beta chain variable domain of TCR clone 150022 (TRBV7-9, TRBJ1-3)
CASSLGAGSSGNTIYF

SEQ ID NO: 300045 - protein, 13 aa, Homo sapiens
  CDR3 for alpha chain variable domain of TCR clone 150023 (TRAV8-2, TRAJ9)
CVVFNTGGFKTIF

SEQ ID NO: 300046 - protein, 17 aa, Homo sapiens
  CDR3 for beta chain variable domain of TCR clone 150023 (TRBV11-1, TRBJ2-7)
CASSLLDGGDSAYEQYF

SEQ ID NO: 300047 - protein, 14 aa, Homo sapiens
  CDR3 for alpha chain variable domain of TCR clone 150024 (TRAV8-3, TRAJ21)
CAVCLNPRSDKFYF

SEQ ID NO: 300048 - protein, 11 aa, Homo sapiens
  CDR3 for beta chain variable domain of TCR clone 150024 (TRBV6-3, TRBJ2-3)
CATGQADTQYF

SEQ ID NO: 300049 - protein, 19 aa, Homo sapiens
  CDR3 for alpha chain variable domain of TCR clone 150025 (TRAV2, TRAJ20)
ILQVREADAAVYRDCKLNF

SEQ ID NO: 300050 - protein, 16 aa, Homo sapiens
  CDR3 for beta chain variable domain of TCR clone 150025 (TRBV19, TRBJ2-1)
CASSKAGPSSYNEQFF

SEQ ID NO: 300051 - protein, 14 aa, Homo sapiens
  CDR3 for alpha chain variable domain of TCR clone 150026 (TRAV3, TRAJ36)
CAVRDGTGANNLFF

SEQ ID NO: 300052 - protein, 16 aa, Homo sapiens
  CDR3 for beta chain variable domain of TCR clone 150026 (TRBV7-3, TRBJ2-5)
CASIQPGGWVQETQYF

SEQ ID NO: 300053 - protein, 14 aa, Homo sapiens
  CDR3 for alpha chain variable domain of TCR clone 150027 (TRAV23/DV6, TRAJ6)
CAAIPSGGSYIHTF

SEQ ID NO: 300054 - protein, 17 aa, Homo sapiens
  CDR3 for beta chain variable domain of TCR clone 150027 (TRBV7-2, TRBJ2-3)
CASSLGGRAAWRDTQYF

SEQ ID NO: 300055 - protein, 12 aa, Homo sapiens
  CDR3 for alpha chain variable domain of TCR clone 150028 (TRAV25, TRAJ29)
CAGPRGNTPLVF

SEQ ID NO: 300056 - protein, 13 aa, Homo sapiens
  CDR3 for beta chain variable domain of TCR clone 150028 (TRBV7-9, TRBJ1-2)
CASSLKRNYGYTF

SEQ ID NO: 300057 - protein, 14 aa, Homo sapiens
  CDR3 for alpha chain variable domain of TCR clone 150029 (TRAV1-1, TRAJ27)
CAVIYNTNAGKSTF

SEQ ID NO: 300058 - protein, 15 aa, Homo sapiens
  CDR3 for beta chain variable domain of TCR clone 150029 (TRBV10-2, TRBJ2-6)
CASSEQGTGANVLTF

SEQ ID NO: 300059 - protein, 15 aa, Homo sapiens
  CDR3 for alpha chain variable domain of TCR clone 150030 (TRAV12-3, TRAJ52)
CNGGAGGTSYGKLTF

SEQ ID NO: 300060 - protein, 16 aa, Homo sapiens
  CDR3 for beta chain variable domain of TCR clone 150030 (TRBV24-1, TRBJ2-3)
CATSEAREGRGDTQYF

SEQ ID NO: 300061 - protein, 15 aa, Homo sapiens
  CDR3 for alpha chain variable domain of TCR clone 150031 (TRAV3, TRAJ3)
CAVRNRRSSASKIIF

SEQ ID NO: 300062 - protein, 13 aa, Homo sapiens
  CDR3 for beta chain variable domain of TCR clone 150031 (TRBV9, TRBJ2-5)
CASSPAGLGTQYF

SEQ ID NO: 300063 - protein, 15 aa, Homo sapiens
  CDR3 for alpha chain variable domain of TCR clone 150032 (TRAV12-2, TRAJ40)
CRDRGGTSGTYKYIF

SEQ ID NO: 300064 - protein, 16 aa, Homo sapiens
  CDR3 for beta chain variable domain of TCR clone 150032 (TRBV7-9, TRBJ2-1)
CASSDVAGGSYNEQFF

SEQ ID NO: 300065 - protein, 13 aa, Homo sapiens
  CDR3 for alpha chain variable domain of TCR clone 150033 (TRAV26-2, TRAJ43)
CILRAVNNNDMRF

SEQ ID NO: 300066 - protein, 19 aa, Homo sapiens
  CDR3 for beta chain variable domain of TCR clone 150033 (TRBV19, TRBJ2-5)
CASSIGQVTDFFLGETQYF

SEQ ID NO: 300067 - protein, 11 aa, Homo sapiens
  CDR3 for alpha chain variable domain of TCR clone 150034 (TRAV2, TRAJ33)
CAVESNYRLIW

SEQ ID NO: 300068 - protein, 14 aa, Homo sapiens
  CDR3 for beta chain variable domain of TCR clone 150034 (TRBV19, TRBJ2-1)
CASPTFVLSGEQFF

SEQ ID NO: 300069 - protein, 13 aa, Homo sapiens
  CDR3 for alpha chain variable domain of TCR clone 150035 (TRAV26-1, TRAJ31)
CIVRVDGNARLMF

SEQ ID NO: 300070 - protein, 17 aa, Homo sapiens
  CDR3 for beta chain variable domain of TCR clone 150035 (TRBV11-2, TRBJ2-1)
WASSLYPPGVEYNEQFF

SEQ ID NO: 300071 - protein, 12 aa, Homo sapiens
  CDR3 for alpha chain variable domain of TCR clone 150036 (TRAV13-2, TRAJ23)
CAERHRGGTLIF

SEQ ID NO: 300072 - protein, 13 aa, Homo sapiens
  CDR3 for beta chain variable domain of TCR clone 150036 (TRBV7-9, TRBJ2-3)
CASSPGSTDTQYF

SEQ ID NO: 300073 - protein, 14 aa, Homo sapiens
  CDR3 for alpha chain variable domain of TCR clone 150037 (TRAV16, TRAJ33)
CALSAMDSNYQLFW

SEQ ID NO: 300074 - protein, 15 aa, Homo sapiens
  CDR3 for beta chain variable domain of TCR clone 150037 (TRBV9, TRBJ1-6)
CASSVAGTGDSPLHF

SEQ ID NO: 300075 - protein, 14 aa, Homo sapiens
  CDR3 for alpha chain variable domain of TCR clone 150038 (TRAV13-1, TRAJ35)
CSASKGGFGNVLHC

SEQ ID NO: 300076 - protein, 16 aa, Homo sapiens
  CDR3 for beta chain variable domain of TCR clone 150038 (TRBV7-9, TRBJ2-1)
CASSDVAGGSYNEQFF

SEQ ID NO: 300077 - protein, 14 aa, Homo sapiens
  CDR3 for alpha chain variable domain of TCR clone 150039 (TRAV12-2, TRAJ13)
CAVKKTGGYQKVTF

SEQ ID NO: 300078 - protein, 15 aa, Homo sapiens
  CDR3 for beta chain variable domain of TCR clone 150039 (TRBV11-2, TRBJ1-2)
CASSLEGVQRNGYTF

SEQ ID NO: 300079 - protein, 14 aa, Homo sapiens
  CDR3 for alpha chain variable domain of TCR clone 150040 (TRAV13-1, TRAJ44)
CAAKATGTASKLTF

SEQ ID NO: 300080 - protein, 15 aa, Homo sapiens
  CDR3 for beta chain variable domain of TCR clone 150040 (TRBV10-2, TRBJ2-6)
CASSEQGTGANVLTF

SEQ ID NO: 300081 - protein, 15 aa, Homo sapiens
  CDR3 for alpha chain variable domain of TCR clone 150041 (TRAV21, TRAJ24)
CAARSSTDSWGKLQF

SEQ ID NO: 300082 - protein, 15 aa, Homo sapiens
  CDR3 for beta chain variable domain of TCR clone 150041 (TRBV5-1, TRBJ2-1)
CANSPPRAPYNEQFF

SEQ ID NO: 300083 - protein, 17 aa, Homo sapiens
  CDR3 for alpha chain variable domain of TCR clone 150042 (TRAV4, TRAJ18)
CLVGERSVGSTLGRLYF

SEQ ID NO: 300084 - protein, 14 aa, Homo sapiens
  CDR3 for beta chain variable domain of TCR clone 150042 (TRBV7-9, TRBJ2-3)
CASSLEDGTDTQYF

SEQ ID NO: 300085 - protein, 13 aa, Homo sapiens
  CDR3 for alpha chain variable domain of TCR clone 150043 (TRAV29/DV5, TRAJ31)
CAASRNNNARLMV

SEQ ID NO: 300086 - protein, 14 aa, Homo sapiens
  CDR3 for beta chain variable domain of TCR clone 150043 (TRBV7-2, TRBJ2-7)
CASSPKTSFYEQYF

SEQ ID NO: 300087 - protein, 13 aa, Homo sapiens
  CDR3 for alpha chain variable domain of TCR clone 150044 (TRAV12-1, TRAJ37)
CVVNIDNTGKLIF

SEQ ID NO: 300088 - protein, 14 aa, Homo sapiens
  CDR3 for beta chain variable domain of TCR clone 150044 (TRBV7-6, TRBJ2-7)
CASSFRQGADEQYF

SEQ ID NO: 300089 - protein, 16 aa, Homo sapiens
  CDR3 for alpha chain variable domain of TCR clone 150045 (TRAV1-2, TRAJ10)
CAVRGVLTGGGNKLTL

SEQ ID NO: 300090 - protein, 14 aa, Homo sapiens
  CDR3 for beta chain variable domain of TCR clone 150045 (TRBV20-1, TRBJ1-1)
CSARATGVGTEAFF

SEQ ID NO: 300091 - protein, 14 aa, Homo sapiens
  CDR3 for alpha chain variable domain of TCR clone 150046 (TRAV1-2, TRAJ16)
CAVNRFSDGQKLLF

SEQ ID NO: 300092 - protein, 13 aa, Homo sapiens
  CDR3 for beta chain variable domain of TCR clone 150046 (TRBV27, TRBJ2-1)
CASRTFGVGEQFF

SEQ ID NO: 300093 - protein, 15 aa, Homo sapiens
  CDR3 for alpha chain variable domain of TCR clone 150047 (TRAV12-2, TRAJ20)
CAVKGGFGAGTTVTV

SEQ ID NO: 300094 - protein, 15 aa, Homo sapiens
  CDR3 for beta chain variable domain of TCR clone 150047 (TRBV7-3, TRBJ2-1)
CASSPTGGGEVEQFF

SEQ ID NO: 300095 - protein, 14 aa, Homo sapiens
  CDR3 for alpha chain variable domain of TCR clone 150048 (TRAV1-2, TRAJ16)
CAVNRFSDGQKLLF

SEQ ID NO: 300096 - protein, 14 aa, Homo sapiens
  CDR3 for beta chain variable domain of TCR clone 150048 (TRBV5-1, TRBJ2-2)
CASSLGGGSGELFF

SEQ ID NO: 300097 - protein, 13 aa, Homo sapiens
  CDR3 for alpha chain variable domain of TCR clone 150049 (TRAV21, TRAJ45)
CAVMGGGADGLTF

SEQ ID NO: 300098 - protein, 16 aa, Homo sapiens
  CDR3 for beta chain variable domain of TCR clone 150049 (TRBV20-1, TRBJ2-1)
CIARGHLAGGRGEQFF

SEQ ID NO: 300099 - protein, 14 aa, Homo sapiens
  CDR3 for alpha chain variable domain of TCR clone 150050 (TRAV1-2, TRAJ16)
CAVNRFSDGQKLPF

SEQ ID NO: 300100 - protein, 15 aa, Homo sapiens
  CDR3 for beta chain variable domain of TCR clone 150050 (TRBV7-9, TRBJ1-5)
CASSQGHQPNQPQHF

SEQ ID NO: 300101 - protein, 11 aa, Homo sapiens
  CDR3 for alpha chain variable domain of TCR clone 150051 (TRAV8-3, TRAJ15)
CAVGPGTALIL

SEQ ID NO: 300102 - protein, 18 aa, Homo sapiens
  CDR3 for beta chain variable domain of TCR clone 150051 (TRBV18, TRBJ2-3)
CASSYTSGAAGGTDTQYF

SEQ ID NO: 300103 - protein, 14 aa, Homo sapiens
  CDR3 for alpha chain variable domain of TCR clone 150052 (TRAV12-2, TRAJ13)
CAVKKIGGYQKVTF

SEQ ID NO: 300104 - protein, 13 aa, Homo sapiens
  CDR3 for beta chain variable domain of TCR clone 150052 (TRBV19, TRBJ1-3)
CASRLSLGNTIYF

SEQ ID NO: 300105 - protein, 14 aa, Homo sapiens
  CDR3 for alpha chain variable domain of TCR clone 150053 (TRAV12-1, TRAJ26)
CVVKGSNYGQHFVF

SEQ ID NO: 300106 - protein, 17 aa, Homo sapiens
  CDR3 for beta chain variable domain of TCR clone 150053 (TRBV11-2, TRBJ2-6)
CASSQRDIFSGANVLTF

SEQ ID NO: 300107 - protein, 13 aa, Homo sapiens
  CDR3 for alpha chain variable domain of TCR clone 150054 (TRAV2, TRAJ40)
CAVVTSGTYKYIF

SEQ ID NO: 300108 - protein, 15 aa, Homo sapiens
  CDR3 for beta chain variable domain of TCR clone 150054 (TRBV7-6, TRBJ2-7)
CASSGRRDTFGEQYF

SEQ ID NO: 300109 - protein, 14 aa, Homo sapiens
  CDR3 for alpha chain variable domain of TCR clone 150055 (TRAV3, TRAJ21)
CAVRDAYNFNTFYF

SEQ ID NO: 300110 - protein, 12 aa, Homo sapiens
  CDR3 for beta chain variable domain of TCR clone 150055 (TRBV7-9, TRBJ2-7)
CASSIKREEQYF

SEQ ID NO: 300111 - protein, 14 aa, Homo sapiens
  CDR3 for alpha chain variable domain of TCR clone 150056 (TRAV12-2, TRAJ4)
CAVLIGGGYNKLIF

SEQ ID NO: 300112 - protein, 18 aa, Homo sapiens
  CDR3 for beta chain variable domain of TCR clone 150056 (TRBV7-3, TRBJ2-3)
CASSSTGTYPGSTDTQYF

SEQ ID NO: 300113 - protein, 15 aa, Homo sapiens
  CDR3 for alpha chain variable domain of TCR clone 150057 (TRAV12-3, TRAJ49)
CEMAVTPNTGNPFYF

SEQ ID NO: 300114 - protein, 14 aa, Homo sapiens
  CDR3 for beta chain variable domain of TCR clone 150057 (TRBV7-8, TRBJ2-3)
CASSLEAGTDTQYF

SEQ ID NO: 300115 - protein, 14 aa, Homo sapiens
  CDR3 for alpha chain variable domain of TCR clone 150058 (TRAV29/DV5, TRAJ57)
CAARSQGGPEKLVF

SEQ ID NO: 300116 - protein, 15 aa, Homo sapiens
  CDR3 for beta chain variable domain of TCR clone 150058 (TRBV28, TRBJ2-4)
CAAGSGTLLMGIQYF

SEQ ID NO: 300117 - protein, 11 aa, Homo sapiens
  CDR3 for alpha chain variable domain of TCR clone 150059 (TRAV4, TRAJ31)
CLVGDNARLMF

SEQ ID NO: 300118 - protein, 16 aa, Homo sapiens
  CDR3 for beta chain variable domain of TCR clone 150059 (TRBV7-2, TRBJ2-5)
CASSSKWLRGQGTQYF

SEQ ID NO: 300119 - protein, 13 aa, Homo sapiens
  CDR3 for alpha chain variable domain of TCR clone 150060 (TRAV8-3, TRAJ48)
CAVVPFGNEKLTF

SEQ ID NO: 300120 - protein, 15 aa, Homo sapiens
  CDR3 for beta chain variable domain of TCR clone 150060 (TRBV9, TRBJ1-6)
CASSVAGTGDSPLHF

SEQ ID NO: 300121 - protein, 13 aa, Homo sapiens
  CDR3 for alpha chain variable domain of TCR clone 150061 (TRAV1-2, TRAJ9)
CAALNTGGFNTIF

SEQ ID NO: 300122 - protein, 16 aa, Homo sapiens
  CDR3 for beta chain variable domain of TCR clone 150061 (TRBV11-2, TRBJ2-1)
CASSPRLAGVYNEQFF

SEQ ID NO: 300123 - protein, 14 aa, Homo sapiens
  CDR3 for alpha chain variable domain of TCR clone 150062 (TRAV17, TRAJ22)
SATSPSGSARQLTF

SEQ ID NO: 300124 - protein, 15 aa, Homo sapiens
  CDR3 for beta chain variable domain of TCR clone 150062 (TRBV4-1, TRBJ2-5)
CASSQWDLYQETQYF

SEQ ID NO: 300125 - protein, 12 aa, Homo sapiens
  CDR3 for alpha chain variable domain of TCR clone 150063 (TRAV12-2, TRAJ24)
CAVTPADSWGAI

SEQ ID NO: 300126 - protein, 12 aa, Homo sapiens
  CDR3 for beta chain variable domain of TCR clone 150063 (TRBV3-1, TRBJ2-1)
CASSQGSSGQFF

SEQ ID NO: 300127 - protein, 18 aa, Homo sapiens
  CDR3 for alpha chain variable domain of TCR clone 150064 (TRAV13-1, TRAJ52)
CAAKNPNAGGTSYGKLTF

SEQ ID NO: 300128 - protein, 16 aa, Homo sapiens
  CDR3 for beta chain variable domain of TCR clone 150064 (TRBV18, TRBJ1-3)
CASSLGILNGENTIYF

SEQ ID NO: 300129 - protein, 16 aa, Homo sapiens
  CDR3 for alpha chain variable domain of TCR clone 150065 (TRAV3, TRAJ17)
RAVSDGSPAAGNKLTF

SEQ ID NO: 300130 - protein, 14 aa, Homo sapiens
  CDR3 for beta chain variable domain of TCR clone 150065 (TRBV15, TRBJ2-1)
CATNHGGRHNEQFF

SEQ ID NO: 300131 - protein, 10 aa, Homo sapiens
  CDR3 for alpha chain variable domain of TCR clone 150066 (TRAV12-3, TRAJ49)
CAMNDDQFYF

SEQ ID NO: 300132 - protein, 16 aa, Homo sapiens
  CDR3 for beta chain variable domain of TCR clone 150066 (TRBV7-2, TRBJ2-6)
CASSERRASGANVLTF

SEQ ID NO: 300133 - protein, 14 aa, Homo sapiens
  CDR3 for alpha chain variable domain of TCR clone 150067 (TRAV13-1, TRAJ35)
CAASKGGFGNVLHC

SEQ ID NO: 300134 - protein, 14 aa, Homo sapiens
  CDR3 for beta chain variable domain of TCR clone 150067 (TRBV11-3, TRBJ2-7)
CASSPDRNTYEQYF

SEQ ID NO: 300135 - protein, 21 aa, Homo sapiens
  CDR3 for alpha chain variable domain of TCR clone 150068 (TRAV1-1, TRAJ6)
CLLLLRCERLERTGGSYIPTF

SEQ ID NO: 300136 - protein, 13 aa, Homo sapiens
  CDR3 for beta chain variable domain of TCR clone 150068 (TRBV7-2, TRBJ2-5)
CQQLVRGRGTQYF

SEQ ID NO: 300137 - protein, 15 aa, Homo sapiens
  CDR3 for alpha chain variable domain of TCR clone 150069 (TRAV3, TRAJ17)
CAFRDTGAAGNKLTF

SEQ ID NO: 300138 - protein, 14 aa, Homo sapiens
  CDR3 for beta chain variable domain of TCR clone 150069 (TRBV6-3, TRBJ1-1)
CASSNLLPGAEAFF

SEQ ID NO: 300139 - protein, 13 aa, Homo sapiens
  CDR3 for alpha chain variable domain of TCR clone 150070 (TRAV39, TRAJ33)
CAANPDSNYQLIW

SEQ ID NO: 300140 - protein, 13 aa, Homo sapiens
  CDR3 for beta chain variable domain of TCR clone 150070 (TRBV7-9, TRBJ2-3)
CASSPGSTDTQYF

SEQ ID NO: 300141 - protein, 13 aa, Homo sapiens
  CDR3 for alpha chain variable domain of TCR clone 150071 (TRAV12-3, TRAJ9)
CAMRNTGGFKTIF

SEQ ID NO: 300142 - protein, 15 aa, Homo sapiens
  CDR3 for beta chain variable domain of TCR clone 150071 (TRBV7-3, TRBJ2-1)
CASSPTGGGEVEQFF

SEQ ID NO: 300143 - protein, 12 aa, Homo sapiens
  CDR3 for alpha chain variable domain of TCR clone 150072 (TRAV21, TRAJ22)
CAVSGSARQLTF

SEQ ID NO: 300144 - protein, 14 aa, Homo sapiens
  CDR3 for beta chain variable domain of TCR clone 150072 (TRBV4-1, TRBJ2-7)
CASSPVAGGDEQYF

SEQ ID NO: 300145 - protein, 16 aa, Homo sapiens
  CDR3 for alpha chain variable domain of TCR clone 150073 (TRAV12-2, TRAJ45)
CAVKRNPGGGADGLTF

SEQ ID NO: 300146 - protein, 12 aa, Homo sapiens
  CDR3 for beta chain variable domain of TCR clone 150073 (TRBV6-1, TRBJ2-5)
CTSSEGRETQYF

SEQ ID NO: 300147 - protein, 14 aa, Homo sapiens
  CDR3 for alpha chain variable domain of TCR clone 150074 (TRAV1-2, TRAJ16)
CAVNRFSDGQKLLF

SEQ ID NO: 300148 - protein, 17 aa, Homo sapiens
  CDR3 for beta chain variable domain of TCR clone 150074 (TRBV20-1, TRBJ2-1)
CSASSSGLAGSYNEPFF

SEQ ID NO: 300149 - protein, 13 aa, Homo sapiens
  CDR3 for alpha chain variable domain of TCR clone 150075 (TRAV38-2/DV8, TRAJ45)
CAYVGGGADGLTF

SEQ ID NO: 300150 - protein, 13 aa, Homo sapiens
  CDR3 for beta chain variable domain of TCR clone 150075 (TRBV29-1, TRBJ2-1)
CSVECGRVNEQFF

SEQ ID NO: 300151 - protein, 13 aa, Homo sapiens
  CDR3 for alpha chain variable domain of TCR clone 150076 (TRAV12-3, TRAJ13)
CAMTSGGHQKVTF

SEQ ID NO: 300152 - protein, 14 aa, Homo sapiens
  CDR3 for beta chain variable domain of TCR clone 150076 (TRBV7-2, TRBJ1-2)
CASSRGGTNYVYTF

SEQ ID NO: 300153 - protein, 15 aa, Homo sapiens
  CDR3 for alpha chain variable domain of TCR clone 150077 (TRAV8-3, TRAJ45)
CALSYSGGGADGLTF

SEQ ID NO: 300154 - protein, 13 aa, Homo sapiens
  CDR3 for beta chain variable domain of TCR clone 150077 (TRBV10-3, TRBJ2-7)
CASNLAVNYEQYF

SEQ ID NO: 300155 - protein, 15 aa, Homo sapiens
  CDR3 for alpha chain variable domain of TCR clone 150078 (TRAV27, TRAJ38)
CAARRNAGNNRKLIW

SEQ ID NO: 300156 - protein, 15 aa, Homo sapiens
  CDR3 for beta chain variable domain of TCR clone 150078 (TRBV7-2, TRBJ1-1)
CASSFAGDRDTEAFF

SEQ ID NO: 300157 - protein, 13 aa, Homo sapiens
  CDR3 for alpha chain variable domain of TCR clone 150079 (TRAV21, TRAJ27)
CAALNTNAGKSTF

SEQ ID NO: 300158 - protein, 15 aa, Homo sapiens
  CDR3 for beta chain variable domain of TCR clone 150079 (TRBV11-2, TRBJ1-6)
CASSLDPWAVSPLHF

SEQ ID NO: 300159 - protein, 13 aa, Homo sapiens
  CDR3 for alpha chain variable domain of TCR clone 150080 (TRAV13-1, TRAJ49)
CAAIWALGNQFYF

SEQ ID NO: 300160 - protein, 15 aa, Homo sapiens
  CDR3 for beta chain variable domain of TCR clone 150080 (TRBV19, TRBJ2-2)
CASSPRTGWTGELFF

SEQ ID NO: 300161 - protein, 13 aa, Homo sapiens
  CDR3 for alpha chain variable domain of TCR clone 150081 (TRAV23/DV6, TRAJ27)
CAASKPMQANQPL

SEQ ID NO: 300162 - protein, 13 aa, Homo sapiens
  CDR3 for beta chain variable domain of TCR clone 150081 (TRBV7-2, TRBJ1-1)
CASNLKGAKVAFF

SEQ ID NO: 300163 - protein, 14 aa, Homo sapiens
  CDR3 for alpha chain variable domain of TCR clone 150082 (TRAV8-4, TRAJ34)
CAVSDPGDTDKLIF

SEQ ID NO: 300164 - protein, 12 aa, Homo sapiens
  CDR3 for beta chain variable domain of TCR clone 150082 (TRBV5-4, TRBJ2-5)
CASSSTRETQYF

SEQ ID NO: 300165 - protein, 13 aa, Homo sapiens
  CDR3 for alpha chain variable domain of TCR clone 150083 (TRAV8-3, TRAJ28)
CAVGAVGSYQLTF

SEQ ID NO: 300166 - protein, 17 aa, Homo sapiens
  CDR3 for beta chain variable domain of TCR clone 150083 (TRBV19, TRBJ2-2)
CASSRNPGGFGTGELFF

SEQ ID NO: 300167 - protein, 13 aa, Homo sapiens
  CDR3 for alpha chain variable domain of TCR clone 150084 (TRAV29/DV5, TRAJ31)
CAASRYNNARLMF

SEQ ID NO: 300168 - protein, 12 aa, Homo sapiens
  CDR3 for beta chain variable domain of TCR clone 150084 (TRBV14, TRBJ2-7)
CASSLYKDEQYF

SEQ ID NO: 300169 - protein, 17 aa, Homo sapiens
  CDR3 for alpha chain variable domain of TCR clone 150085 (TRAV38-1, TRAJ45)
CAFMRSHSGGGADGLTF

SEQ ID NO: 300170 - protein, 15 aa, Homo sapiens
  CDR3 for beta chain variable domain of TCR clone 150085 (TRBV7-2, TRBJ2-3)
CASSLVVRGPDMQYF

SEQ ID NO: 300171 - protein, 13 aa, Homo sapiens
  CDR3 for alpha chain variable domain of TCR clone 150086 (TRAV20, TRAJ48)
CAVHLFGNEKLTF

SEQ ID NO: 300172 - protein, 15 aa, Homo sapiens
  CDR3 for beta chain variable domain of TCR clone 150086 (TRBV6-5, TRBJ2-6)
FASSQWEAGANVLTF

SEQ ID NO: 300173 - protein, 14 aa, Homo sapiens
  CDR3 for alpha chain variable domain of TCR clone 150087 (TRAV8-6, TRAJ13)
CAVRYSGGYQKVTF

SEQ ID NO: 300174 - protein, 14 aa, Homo sapiens
  CDR3 for beta chain variable domain of TCR clone 150087 (TRBV7-2, TRBJ1-5)
SASSRDGSNQPQHF

SEQ ID NO: 300175 - protein, 13 aa, Homo sapiens
  CDR3 for alpha chain variable domain of TCR clone 150088 (TRAV21, TRAJ36)
CAVIKTGANNLFF

SEQ ID NO: 300176 - protein, 13 aa, Homo sapiens
  CDR3 for beta chain variable domain of TCR clone 150088 (TRBV29-1, TRBJ2-3)
CSAMRGGRDTQYF

SEQ ID NO: 300177 - protein, 18 aa, Homo sapiens
  CDR3 for alpha chain variable domain of TCR clone 150089 (TRAV13-1, TRAJ52)
CAAKNPNAGGTSYGKLTF

SEQ ID NO: 300178 - protein, 17 aa, Homo sapiens
  CDR3 for beta chain variable domain of TCR clone 150089 (TRBV11-2, TRBJ2-1)
CASSLYPPGVECNEQFF

SEQ ID NO: 300179 - protein, 15 aa, Homo sapiens
  CDR3 for alpha chain variable domain of TCR clone 150090 (TRAV23/DV6, TRAJ28)
CAALLAYSGAGSYQL

SEQ ID NO: 300180 - protein, 11 aa, Homo sapiens
  CDR3 for beta chain variable domain of TCR clone 150090 (TRBV29-1, TRBJ2-5)
CSEDRTGTQYF

SEQ ID NO: 300181 - protein, 14 aa, Homo sapiens
  CDR3 for alpha chain variable domain of TCR clone 150091 (TRAV1-2, TRAJ33)
CAVRAPDSNYRLIW

SEQ ID NO: 300182 - protein, 14 aa, Homo sapiens
  CDR3 for beta chain variable domain of TCR clone 150091 (TRBV11-3, TRBJ1-6)
CASSFSGGDSPLHF

SEQ ID NO: 300183 - protein, 12 aa, Homo sapiens
  CDR3 for alpha chain variable domain of TCR clone 150092 (TRAV8-3, TRAJ26)
CAGDNYGQNFVF

SEQ ID NO: 300184 - protein, 11 aa, Homo sapiens
  CDR3 for beta chain variable domain of TCR clone 150092 (TRBV29-1, TRBJ2-5)
CSEDRTGTQYF

SEQ ID NO: 300185 - protein, 13 aa, Homo sapiens
  CDR3 for alpha chain variable domain of TCR clone 150093 (TRAV36/DV7, TRAJ37)
CAVFSSDTGKLIF

SEQ ID NO: 300186 - protein, 16 aa, Homo sapiens
  CDR3 for beta chain variable domain of TCR clone 150093 (TRBV3-1, TRBJ2-5)
CASSPGQFNGFGTQYF

SEQ ID NO: 300187 - protein, 12 aa, Homo sapiens
  CDR3 for alpha chain variable domain of TCR clone 150094 (TRAV12-1, TRAJ39)
CVVREAGNMLTF

SEQ ID NO: 300188 - protein, 14 aa, Homo sapiens
  CDR3 for beta chain variable domain of TCR clone 150094 (TRBV7-2, TRBJ2-2)
CASRGQGAAGELFF

SEQ ID NO: 300189 - protein, 14 aa, Homo sapiens
  CDR3 for alpha chain variable domain of TCR clone 150095 (TRAV12-2, TRAJ40)
FAVKIPSGTYKYIF

SEQ ID NO: 300190 - protein, 15 aa, Homo sapiens
  CDR3 for beta chain variable domain of TCR clone 150095 (TRBV20-1, TRBJ1-4)
CSARREWGVNEKLFF

SEQ ID NO: 300191 - protein, 13 aa, Homo sapiens
  CDR3 for alpha chain variable domain of TCR clone 150096 (TRAV13-1, TRAJ38)
CAAGGGNNRKLIW

SEQ ID NO: 300192 - protein, 14 aa, Homo sapiens
  CDR3 for beta chain variable domain of TCR clone 150096 (TRBV7-2, TRBJ1-1)
CASSFLTGTTEAFF

SEQ ID NO: 300193 - protein, 16 aa, Homo sapiens
  CDR3 for alpha chain variable domain of TCR clone 150097 (TRAV20, TRAJ4)
CAVRPMFSGGYNKLIF

SEQ ID NO: 300194 - protein, 13 aa, Homo sapiens
  CDR3 for beta chain variable domain of TCR clone 150097 (TRBV7-9, TRBJ1-2)
CASSLKQNYGYTF

SEQ ID NO: 300195 - protein, 18 aa, Homo sapiens
  CDR3 for alpha chain variable domain of TCR clone 150098 (TRAV13-1, TRAJ52)
CAASKRSAGGTSSGKLTF

SEQ ID NO: 300196 - protein, 14 aa, Homo sapiens
  CDR3 for beta chain variable domain of TCR clone 150098 (TRBV19, TRBJ2-1)
CASPTFVLSGEQFF

SEQ ID NO: 300197 - protein, 14 aa, Homo sapiens
  CDR3 for alpha chain variable domain of TCR clone 150099 (TRAV26-1, TRAJ39)
CIARGARAGNMLTF

SEQ ID NO: 300198 - protein, 15 aa, Homo sapiens
  CDR3 for beta chain variable domain of TCR clone 150099 (TRBV7-9, TRBJ1-5)
CASSQGHQPNQPQHF

SEQ ID NO: 300199 - protein, 10 aa, Homo sapiens
  CDR3 for alpha chain variable domain of TCR clone 150100 (TRAV12-2, TRAJ52)
CAANRWWYQL

SEQ ID NO: 300200 - protein, 13 aa, Homo sapiens
  CDR3 for beta chain variable domain of TCR clone 150100 (TRBV12-4, TRBJ1-1)
CASSPGTGFGAFF

SEQ ID NO: 300201 - protein, 14 aa, Homo sapiens
  CDR3 for alpha chain variable domain of TCR clone 150101 (TRAV8-1, TRAJ5)
CAVRTVTGRRALTF

SEQ ID NO: 300202 - protein, 14 aa, Homo sapiens
  CDR3 for beta chain variable domain of TCR clone 150101 (TRBV7-8, TRBJ2-3)
CASSFPDGQDTQYF

SEQ ID NO: 300203 - protein, 17 aa, Homo sapiens
  CDR3 for alpha chain variable domain of TCR clone 150102 (TRAV3, TRAJ42)
CAVRDRYYGGSQGNLIF

SEQ ID NO: 300204 - protein, 12 aa, Homo sapiens
  CDR3 for beta chain variable domain of TCR clone 150102 (TRBV11-2, TRBJ2-1)
CASSPGNNEQFF

SEQ ID NO: 300205 - protein, 17 aa, Homo sapiens
  CDR3 for alpha chain variable domain of TCR clone 150103 (TRAV3, TRAJ6)
CAVRDGPMAGGSYIPTF

SEQ ID NO: 300206 - protein, 14 aa, Homo sapiens
  CDR3 for beta chain variable domain of TCR clone 150103 (TRBV7-2, TRBJ2-7)
CASSPKTSIYEQYF

SEQ ID NO: 300207 - protein, 12 aa, Homo sapiens
  CDR3 for alpha chain variable domain of TCR clone 150104 (TRAV12-3, TRAJ34)
CAMGYNTDKLIF

SEQ ID NO: 300208 - protein, 13 aa, Homo sapiens
  CDR3 for beta chain variable domain of TCR clone 150104 (TRBV9, TRBJ2-7)
CASSVAEYYEQYF

SEQ ID NO: 300209 - protein, 16 aa, Homo sapiens
  CDR3 for alpha chain variable domain of TCR clone 150105 (TRAV26-1, TRAJ36)
CIVRVSYQTGANNLFF

SEQ ID NO: 300210 - protein, 12 aa, Homo sapiens
  CDR3 for beta chain variable domain of TCR clone 150105 (TRBV7-9, TRBJ2-7)
CASSIKREEQYF

SEQ ID NO: 300211 - protein, 12 aa, Homo sapiens
  CDR3 for alpha chain variable domain of TCR clone 150106 (TRAV12-1, TRAJ40)
CVVYSGTYKYVF

SEQ ID NO: 300212 - protein, 14 aa, Homo sapiens
  CDR3 for beta chain variable domain of TCR clone 150106 (TRBV7-2, TRBJ2-1)
CASSPGTFYNEQFF

SEQ ID NO: 300213 - protein, 16 aa, Homo sapiens
  CDR3 for alpha chain variable domain of TCR clone 150107 (TRAV27, TRAJ13)
CAGAKSDSGGYQKVTF

SEQ ID NO: 300214 - protein, 16 aa, Homo sapiens
  CDR3 for beta chain variable domain of TCR clone 150107 (TRBV7-6, TRBJ2-7)
CQQLSSASGNSYEQYF

SEQ ID NO: 300215 - protein, 17 aa, Homo sapiens
  CDR3 for alpha chain variable domain of TCR clone 150108 (TRAV8-2, TRAJ17)
CVVSDRRFKAEGNKLTF

SEQ ID NO: 300216 - protein, 18 aa, Homo sapiens
  CDR3 for beta chain variable domain of TCR clone 150108 (TRBV7-9, TRBJ2-7)
CASSLTTSGSRTWYEQYF

SEQ ID NO: 300217 - protein, 15 aa, Homo sapiens
  CDR3 for alpha chain variable domain of TCR clone 150109 (TRAV8-2, TRAJ40)
CVVLGTTSGTYKYFF

SEQ ID NO: 300218 - protein, 16 aa, Homo sapiens
  CDR3 for beta chain variable domain of TCR clone 150109 (TRBV7-3, TRBJ2-1)
CASSLEGYRSYNEQFF

SEQ ID NO: 300219 - protein, 13 aa, Homo sapiens
  CDR3 for alpha chain variable domain of TCR clone 150110 (TRAV12-1, TRAJ29)
CGVNGPGNTPLVF

SEQ ID NO: 300220 - protein, 12 aa, Homo sapiens
  CDR3 for beta chain variable domain of TCR clone 150110 (TRBV7-2, TRBJ2-5)
CQQQGGLETQYF

SEQ ID NO: 300221 - protein, 17 aa, Homo sapiens
  CDR3 for alpha chain variable domain of TCR clone 150111 (TRAV3, TRAJ6)
CAVRDGPRAGGSYIPTF

SEQ ID NO: 300222 - protein, 11 aa, Homo sapiens
  CDR3 for beta chain variable domain of TCR clone 150111 (TRBV4-1, TRBJ2-2)
CASEHTGELFF

SEQ ID NO: 300223 - protein, 14 aa, Homo sapiens
  CDR3 for alpha chain variable domain of TCR clone 150112 (TRAV17, TRAJ11)
CATDTSRGYTTLTF

SEQ ID NO: 300224 - protein, 13 aa, Homo sapiens
  CDR3 for beta chain variable domain of TCR clone 150112 (TRBV19, TRBJ2-5)
CASRDSRRETQYF

SEQ ID NO: 300225 - protein, 12 aa, Homo sapiens
  CDR3 for alpha chain variable domain of TCR clone 150113 (TRAV13-2, TRAJ23)
CAERHRGGKLIF

SEQ ID NO: 300226 - protein, 15 aa, Homo sapiens
  CDR3 for beta chain variable domain of TCR clone 150113 (TRBV20-1, TRBJ2-7)
CSARDRVSGMDEHYF

SEQ ID NO: 300227 - protein, 14 aa, Homo sapiens
  CDR3 for alpha chain variable domain of TCR clone 150114 (TRAV12-2, TRAJ6)
CAVIASGGSYIPTF

SEQ ID NO: 300228 - protein, 15 aa, Homo sapiens
  CDR3 for beta chain variable domain of TCR clone 150114 (TRBV20-1, TRBJ2-7)
CSARDRVAGMDEQYF

SEQ ID NO: 300229 - protein, 14 aa, Homo sapiens
  CDR3 for alpha chain variable domain of TCR clone 150115 (TRAV13-1, TRAJ10)
CAALFTGGGNKLTF

SEQ ID NO: 300230 - protein, 14 aa, Homo sapiens
  CDR3 for beta chain variable domain of TCR clone 150115 (TRBV7-2, TRBJ2-7)
CASRSQGAAYEQYF

SEQ ID NO: 300231 - protein, 13 aa, Homo sapiens
  CDR3 for alpha chain variable domain of TCR clone 150116 (TRAV25, TRAJ30)
CAGRVDRDDKITF

SEQ ID NO: 300232 - protein, 17 aa, Homo sapiens
  CDR3 for beta chain variable domain of TCR clone 150116 (TRBV7-9, TRBJ2-6)
CASSFGAGYSGANVLTF

SEQ ID NO: 300233 - protein, 17 aa, Homo sapiens
  CDR3 for alpha chain variable domain of TCR clone 150117 (TRAV3, TRAJ28)
CAVRDGYSGARSYQLTF

SEQ ID NO: 300234 - protein, 17 aa, Homo sapiens
  CDR3 for beta chain variable domain of TCR clone 150117 (TRBV20-1, TRBJ2-1)
CSAPPRLAGTRYNEQFF

SEQ ID NO: 300235 - protein, 12 aa, Homo sapiens
  CDR3 for alpha chain variable domain of TCR clone 150118 (TRAV1-1, TRAJ30)
CAVRGRDDKIIF

SEQ ID NO: 300236 - protein, 14 aa, Homo sapiens
  CDR3 for beta chain variable domain of TCR clone 150118 (TRBV5-1, TRBJ2-7)
CASSRGESLYEQYF

SEQ ID NO: 300237 - protein, 14 aa, Homo sapiens
  CDR3 for alpha chain variable domain of TCR clone 150119 (TRAV1-2, TRAJ8)
CAVREATGSQKLVF

SEQ ID NO: 300238 - protein, 15 aa, Homo sapiens
  CDR3 for beta chain variable domain of TCR clone 150119 (TRBV6-3, TRBJ2-7)
CASSSPGTVFYEQYF

SEQ ID NO: 300239 - protein, 14 aa, Homo sapiens
  CDR3 for alpha chain variable domain of TCR clone 150120 (TRAV13-2, TRAJ11)
CAETGNSGYSTLTF

SEQ ID NO: 300240 - protein, 14 aa, Homo sapiens
  CDR3 for beta chain variable domain of TCR clone 150120 (TRBV11-2, TRBJ1-2)
CASSLGTANYGYTF

SEQ ID NO: 300241 - protein, 13 aa, Homo sapiens
  CDR3 for alpha chain variable domain of TCR clone 150121 (TRAV29/DV5, TRAJ44)
CAASTGTASKLTF

SEQ ID NO: 300242 - protein, 11 aa, Homo sapiens
  CDR3 for beta chain variable domain of TCR clone 150121 (TRBV12-4, TRBJ2-3)
WASTATDTQYF

SEQ ID NO: 300243 - protein, 21 aa, Homo sapiens
  CDR3 for alpha chain variable domain of TCR clone 150122 (TRAV6, TRAJ36)
CARQTTSSLGLERDSPLFPIS

SEQ ID NO: 300244 - protein, 14 aa, Homo sapiens
  CDR3 for beta chain variable domain of TCR clone 150122 (TRBV24-1, TRBJ2-7)
VTTPWDQLYYEQYF

SEQ ID NO: 300245 - protein, 13 aa, Homo sapiens
  CDR3 for alpha chain variable domain of TCR clone 150123 (TRAV17, TRAJ9)
CATDYTGGFKTIF

SEQ ID NO: 300246 - protein, 16 aa, Homo sapiens
  CDR3 for beta chain variable domain of TCR clone 150123 (TRBV7-7, TRBJ2-1)
CASSLASGTSYTEQFF

SEQ ID NO: 300247 - protein, 17 aa, Homo sapiens
  CDR3 for alpha chain variable domain of TCR clone 150124 (TRAV38-2/DV8, TRAJ57)
CAYRSVLTQGGSEKLVF

SEQ ID NO: 300248 - protein, 17 aa, Homo sapiens
  CDR3 for beta chain variable domain of TCR clone 150124 (TRBV7-3, TRBJ2-5)
CASSLGSGRSGSETQYF

SEQ ID NO: 300249 - protein, 14 aa, Homo sapiens
  CDR3 for alpha chain variable domain of TCR clone 150125 (TRAV12-2, TRAJ13)
CAVKKTGGYQKVTF

SEQ ID NO: 300250 - protein, 18 aa, Homo sapiens
  CDR3 for beta chain variable domain of TCR clone 150125 (TRBV10-3, TRBJ2-3)
CAISESRVGPMRGDTQYF

SEQ ID NO: 300251 - protein, 15 aa, Homo sapiens
  CDR3 for alpha chain variable domain of TCR clone 150126 (TRAV26-1, TRAJ27)
CIVRVLTPMQANQHL

SEQ ID NO: 300252 - protein, 13 aa, Homo sapiens
  CDR3 for beta chain variable domain of TCR clone 150126 (TRBV20-1, TRBJ2-7)
CSATHTSGYEQYF

SEQ ID NO: 300253 - protein, 16 aa, Homo sapiens
  CDR3 for alpha chain variable domain of TCR clone 150127 (TRAV20, TRAJ52)
CAVLPDGGTSYGKLTF

SEQ ID NO: 300254 - protein, 18 aa, Homo sapiens
  CDR3 for beta chain variable domain of TCR clone 150127 (TRBV28, TRBJ2-1)
CASSSTSGRANSYNEQFF

SEQ ID NO: 300255 - protein, 14 aa, Homo sapiens
  CDR3 for alpha chain variable domain of TCR clone 150128 (TRAV8-4, TRAJ54)
CAVSEVLGAQKLVF

SEQ ID NO: 300256 - protein, 17 aa, Homo sapiens
  CDR3 for beta chain variable domain of TCR clone 150128 (TRBV4-1, TRBJ1-4)
CASSQEGPRGVEEKLFV

SEQ ID NO: 300257 - protein, 14 aa, Homo sapiens
  CDR3 for alpha chain variable domain of TCR clone 150129 (TRAV27, TRAJ22)
CAGLPSGSARQLTF

SEQ ID NO: 300258 - protein, 12 aa, Homo sapiens
  CDR3 for beta chain variable domain of TCR clone 150129 (TRBV12-5, TRBJ2-5)
CASGQGVETQYF

SEQ ID NO: 300259 - protein, 14 aa, Homo sapiens
  CDR3 for alpha chain variable domain of TCR clone 150130 (TRAV9-2, TRAJ39)
CALYIYNAGNMLTF

SEQ ID NO: 300260 - protein, 13 aa, Homo sapiens
  CDR3 for beta chain variable domain of TCR clone 150130 (TRBV27, TRBJ2-7)
CASSFVSTYEQYF

SEQ ID NO: 300261 - protein, 21 aa, Homo sapiens
  CDR3 for alpha chain variable domain of TCR clone 150131 (TRAV12-1, TRAJ54)
SSVIQPPTSVCSIQGAQKLVF

SEQ ID NO: 300262 - protein, 13 aa, Homo sapiens
  CDR3 for beta chain variable domain of TCR clone 150131 (TRBV12-4, TRBJ2-5)
CASSLGGSRTQYF

SEQ ID NO: 300263 - protein, 15 aa, Homo sapiens
  CDR3 for alpha chain variable domain of TCR clone 150132 (TRAV3, TRAJ17)
CAVRDTGAAGNKLTF

SEQ ID NO: 300264 - protein, 14 aa, Homo sapiens
  CDR3 for beta chain variable domain of TCR clone 150132 (TRBV6-3, TRBJ1-1)
YASSNLPPGAEAFF

SEQ ID NO: 300265 - protein, 16 aa, Homo sapiens
  CDR3 for alpha chain variable domain of TCR clone 150133 (TRAV3, TRAJ10)
CAVRDRLTGGGNKLTF

SEQ ID NO: 300266 - protein, 13 aa, Homo sapiens
  CDR3 for beta chain variable domain of TCR clone 150133 (TRBV13, TRBJ1-4)
CASSSASGEKLFF

SEQ ID NO: 300267 - protein, 13 aa, Homo sapiens
  CDR3 for alpha chain variable domain of TCR clone 150134 (TRAV8-1, TRAJ30)
CAVIMNRDDKIIF

SEQ ID NO: 300268 - protein, 14 aa, Homo sapiens
  CDR3 for beta chain variable domain of TCR clone 150134 (TRBV7-2, TRBJ1-6)
CASSLQGANSPHHF

SEQ ID NO: 300269 - protein, 13 aa, Homo sapiens
  CDR3 for alpha chain variable domain of TCR clone 150135 (TRAV8-6, TRAJ8)
CAVSKTGFQKLVF

SEQ ID NO: 300270 - protein, 11 aa, Homo sapiens
  CDR3 for beta chain variable domain of TCR clone 150135 (TRBV20-1, TRBJ1-5)
CSAQGDQPQHF

SEQ ID NO: 300271 - protein, 11 aa, Homo sapiens
  CDR3 for alpha chain variable domain of TCR clone 150136 (TRAV17, TRAJ31)
CATSNNARLMF

SEQ ID NO: 300272 - protein, 15 aa, Homo sapiens
  CDR3 for beta chain variable domain of TCR clone 150136 (TRBV19, TRBJ2-7)
CASSPAGSGEALRYF

SEQ ID NO: 300273 - protein, 11 aa, Homo sapiens
  CDR3 for alpha chain variable domain of TCR clone 150137 (TRAV12-3, TRAJ27)
CEWPMQANQPL

SEQ ID NO: 300274 - protein, 13 aa, Homo sapiens
  CDR3 for beta chain variable domain of TCR clone 150137 (TRBV20-1, TRBJ1-1)
CSARVGGNTEAFF

SEQ ID NO: 300275 - protein, 14 aa, Homo sapiens
  CDR3 for alpha chain variable domain of TCR clone 150138 (TRAV3, TRAJ8)
CAVSLNTGFQKLVF

SEQ ID NO: 300276 - protein, 13 aa, Homo sapiens
  CDR3 for beta chain variable domain of TCR clone 150138 (TRBV9, TRBJ2-1)
CASSVGQGGEQFF

SEQ ID NO: 300277 - protein, 12 aa, Homo sapiens
  CDR3 for alpha chain variable domain of TCR clone 150139 (TRAV16, TRAJ56)
CAPTGANSKLTF

SEQ ID NO: 300278 - protein, 12 aa, Homo sapiens
  CDR3 for beta chain variable domain of TCR clone 150139 (TRBV12-5, TRBJ2-5)
CASGQGVETQYF

SEQ ID NO: 300279 - protein, 16 aa, Homo sapiens
  CDR3 for alpha chain variable domain of TCR clone 150140 (TRAV3, TRAJ5)
CAVRNLMATGRRALTF

SEQ ID NO: 300280 - protein, 16 aa, Homo sapiens
  CDR3 for beta chain variable domain of TCR clone 150140 (TRBV4-2, TRBJ2-7)
CASSQEGLAISYEQYF

SEQ ID NO: 300281 - protein, 16 aa, Homo sapiens
  CDR3 for alpha chain variable domain of TCR clone 150141 (TRAV8-3, TRAJ44)
CAVGASNTGTASKLTF

SEQ ID NO: 300282 - protein, 15 aa, Homo sapiens
  CDR3 for beta chain variable domain of TCR clone 150141 (TRBV7-2, TRBJ2-1)
CASRKTGSSYNEQFF

SEQ ID NO: 300283 - protein, 14 aa, Homo sapiens
  CDR3 for alpha chain variable domain of TCR clone 150142 (TRAV12-1, TRAJ13)
CVVIDSGGHQKVTL

SEQ ID NO: 300284 - protein, 17 aa, Homo sapiens
  CDR3 for beta chain variable domain of TCR clone 150142 (TRBV15, TRBJ1-5)
CATSRAPPGTRNQPQHF

SEQ ID NO: 300285 - protein, 14 aa, Homo sapiens
  CDR3 for alpha chain variable domain of TCR clone 150143 (TRAV8-3, TRAJ39)
CALGAWGAGNMLTF

SEQ ID NO: 300286 - protein, 16 aa, Homo sapiens
  CDR3 for beta chain variable domain of TCR clone 150143 (TRBV7-2, TRBJ1-3)
CASSSGRVLSGNTIYS

SEQ ID NO: 300287 - protein, 10 aa, Homo sapiens
  CDR3 for alpha chain variable domain of TCR clone 150144 (TRAV20, TRAJ22)
CAAPAGQLTF

SEQ ID NO: 300288 - protein, 11 aa, Homo sapiens
  CDR3 for beta chain variable domain of TCR clone 150144 (TRBV29-1, TRBJ2-5)
CSEDRTGTQYF

SEQ ID NO: 300289 - protein, 23 aa, Homo sapiens
  CDR3 for alpha chain variable domain of TCR clone 150145 (TRAV26-1, TRAJ38)
CIADNAGNNHIQNPGPAVYHLRD

SEQ ID NO: 300290 - protein, 13 aa, Homo sapiens
  CDR3 for beta chain variable domain of TCR clone 150145 (TRBV20-1, TRBJ1-1)
CSARGGGNTEAFF

SEQ ID NO: 300291 - protein, 13 aa, Homo sapiens
  CDR3 for alpha chain variable domain of TCR clone 150146 (TRAV21, TRAJ27)
SAARPGNAGKSTF

SEQ ID NO: 300292 - protein, 14 aa, Homo sapiens
  CDR3 for beta chain variable domain of TCR clone 150146 (TRBV7-6, TRBJ2-3)
FASSLGTVTDTQYF

SEQ ID NO: 300293 - protein, 10 aa, Homo sapiens
  CDR3 for alpha chain variable domain of TCR clone 150147 (TRAV23/DV6, TRAJ57)
CAASSTLSQG

SEQ ID NO: 300294 - protein, 14 aa, Homo sapiens
  CDR3 for beta chain variable domain of TCR clone 150147 (TRBV5-5, TRBJ1-2)
CASSLDPYNYGYTF

SEQ ID NO: 300295 - protein, 14 aa, Homo sapiens
  CDR3 for alpha chain variable domain of TCR clone 150148 (TRAV35, TRAJ54)
CAGYLIQGAQKLVF

SEQ ID NO: 300296 - protein, 15 aa, Homo sapiens
  CDR3 for beta chain variable domain of TCR clone 150148 (TRBV12-4, TRBJ2-5)
CASSLGGQGRETQYF

SEQ ID NO: 300297 - protein, 17 aa, Homo sapiens
  CDR3 for alpha chain variable domain of TCR clone 150149 (TRAV38-1, TRAJ45)
CAFMRSHSGGGADGPTF

SEQ ID NO: 300298 - protein, 15 aa, Homo sapiens
  CDR3 for beta chain variable domain of TCR clone 150149 (TRBV7-2, TRBJ2-3)
CASSLVVRGPDTQYF

SEQ ID NO: 300299 - protein, 17 aa, Homo sapiens
  CDR3 for alpha chain variable domain of TCR clone 150150 (TRAV8-3, TRAJ21)
CAVGALPPGGTNFTLDL

SEQ ID NO: 300300 - protein, 18 aa, Homo sapiens
  CDR3 for beta chain variable domain of TCR clone 150150 (TRBV25-1, TRBJ1-2)
CASSGLQNGQGLIFGYTF

SEQ ID NO: 300301 - protein, 14 aa, Homo sapiens
  CDR3 for alpha chain variable domain of TCR clone 150151 (TRAV17, TRAJ54)
CATDANQGAQKLVF

SEQ ID NO: 300302 - protein, 12 aa, Homo sapiens
  CDR3 for beta chain variable domain of TCR clone 150151 (TRBV7-9, TRBJ2-7)
CASSTKREEQYI

SEQ ID NO: 300303 - protein, 16 aa, Homo sapiens
  CDR3 for alpha chain variable domain of TCR clone 150152 (TRAV12-2, TRAJ52)
CRLANAGGTSYGKLTF

SEQ ID NO: 300304 - protein, 14 aa, Homo sapiens
  CDR3 for beta chain variable domain of TCR clone 150152 (TRBV6-6, TRBJ2-5)
CASSYGGRGETQYF

SEQ ID NO: 300305 - protein, 15 aa, Homo sapiens
  CDR3 for alpha chain variable domain of TCR clone 150153 (TRAV23/DV6, TRAJ18)
CAARYRGSTLGRLYF

SEQ ID NO: 300306 - protein, 15 aa, Homo sapiens
  CDR3 for beta chain variable domain of TCR clone 150153 (TRBV7-2, TRBJ2-1)
CASSSGLAGGNEQFF

SEQ ID NO: 300307 - protein, 12 aa, Homo sapiens
  CDR3 for alpha chain variable domain of TCR clone 150154 (TRAV8-3, TRAJ26)
CAGDNYGQNFVF

SEQ ID NO: 300308 - protein, 16 aa, Homo sapiens
  CDR3 for beta chain variable domain of TCR clone 150154 (TRBV5-1, TRBJ1-1)
CASSLSQGRRGTEAFF

SEQ ID NO: 300309 - protein, 19 aa, Homo sapiens
  CDR3 for alpha chain variable domain of TCR clone 150155 (TRAV16, )
CALSGDIQTPDPAVYQLRD

SEQ ID NO: 300310 - protein, 16 aa, Homo sapiens
  CDR3 for beta chain variable domain of TCR clone 150155 (TRBV12-5, TRBJ2-5)
CASGPRTSGNQETQYF

SEQ ID NO: 300311 - protein, 13 aa, Homo sapiens
  CDR3 for alpha chain variable domain of TCR clone 150156 (TRAV8-1, TRAJ28)
CAVSGAGSYQLTF

SEQ ID NO: 300312 - protein, 13 aa, Homo sapiens
  CDR3 for beta chain variable domain of TCR clone 150156 (TRBV19, TRBJ1-2)
CASSVPGQDGYTF

SEQ ID NO: 300313 - protein, 14 aa, Homo sapiens
  CDR3 for alpha chain variable domain of TCR clone 150157 (TRAV13-1, TRAJ35)
CAASKGDFGNVLHC

SEQ ID NO: 300314 - protein, 13 aa, Homo sapiens
  CDR3 for beta chain variable domain of TCR clone 150157 (TRBV7-3, TRBJ1-1)
CASSQDWGAEAVF

SEQ ID NO: 300315 - protein, 13 aa, Homo sapiens
  CDR3 for alpha chain variable domain of TCR clone 150158 (TRAV21, TRAJ57)
CPVTQGGSEKLVF

SEQ ID NO: 300316 - protein, 16 aa, Homo sapiens
  CDR3 for beta chain variable domain of TCR clone 150158 (TRBV29-1, TRBJ2-7)
CSVEDAEDGTAYEQYF

SEQ ID NO: 300317 - protein, 15 aa, Homo sapiens
  CDR3 for alpha chain variable domain of TCR clone 150159 (TRAV2, TRAJ11)
CAVGGRNSGYSTLTF

SEQ ID NO: 300318 - protein, 14 aa, Homo sapiens
  CDR3 for beta chain variable domain of TCR clone 150159 (TRBV4-1, TRBJ2-2)
CASCQAVNTGELFF

SEQ ID NO: 300319 - protein, 11 aa, Homo sapiens
  CDR3 for alpha chain variable domain of TCR clone 150160 (TRAV12-1, TRAJ30)
CVVNGQEKIIF

SEQ ID NO: 300320 - protein, 15 aa, Homo sapiens
  CDR3 for beta chain variable domain of TCR clone 150160 (TRBV27, TRBJ2-2)
CTSVPANSSPGSCFF

SEQ ID NO: 300321 - protein, 15 aa, Homo sapiens
  CDR3 for alpha chain variable domain of TCR clone 150161 (TRAV26-1, TRAJ29)
CIVRVEGSGNTPLVF

SEQ ID NO: 300322 - protein, 15 aa, Homo sapiens
  CDR3 for beta chain variable domain of TCR clone 150161 (TRBV5-1, TRBJ2-1)
CASTGSGRTYNEQFF

SEQ ID NO: 300323 - protein, 15 aa, Homo sapiens
  CDR3 for alpha chain variable domain of TCR clone 150162 (TRAV21, TRAJ24)
CAAQSSTDSWGKLQF

SEQ ID NO: 300324 - protein, 13 aa, Homo sapiens
  CDR3 for beta chain variable domain of TCR clone 150162 (TRBV11-2, TRBJ2-5)
CVSSSTGEETQYF

SEQ ID NO: 300325 - protein, 11 aa, Homo sapiens
  CDR3 for alpha chain variable domain of TCR clone 150163 (TRAV29/DV5, TRAJ43)
CAARKNNEMRF

SEQ ID NO: 300326 - protein, 15 aa, Homo sapiens
  CDR3 for beta chain variable domain of TCR clone 150163 (TRBV5-1, TRBJ1-2)
CASSLGQVSGRGYTF

SEQ ID NO: 300327 - protein, 15 aa, Homo sapiens
  CDR3 for alpha chain variable domain of TCR clone 150164 (TRAV8-3, TRAJ32)
CAVGPYGGATKKLIF

SEQ ID NO: 300328 - protein, 14 aa, Homo sapiens
  CDR3 for beta chain variable domain of TCR clone 150164 (TRBV29-1, TRBJ2-2)
CSVLAETNTGELFV

SEQ ID NO: 300329 - protein, 11 aa, Homo sapiens
  CDR3 for alpha chain variable domain of TCR clone 150165 (TRAV21, TRAJ7)
CAAYGNNRLAF

SEQ ID NO: 300330 - protein, 14 aa, Homo sapiens
  CDR3 for beta chain variable domain of TCR clone 150165 (TRBV4-1, TRBJ2-7)
CASSRTVVAFEQYF

SEQ ID NO: 300331 - protein, 16 aa, Homo sapiens
  CDR3 for alpha chain variable domain of TCR clone 150166 (TRAV3, TRAJ10)
CAVRDMRAGGGNKRTF

SEQ ID NO: 300332 - protein, 11 aa, Homo sapiens
  CDR3 for beta chain variable domain of TCR clone 150166 (TRBV29-1, TRBJ2-5)
CSEDRTGTQYF

SEQ ID NO: 300333 - protein, 13 aa, Homo sapiens
  CDR3 for alpha chain variable domain of TCR clone 150167 (TRAV8-3, TRAJ43)
CAVGPDNNNDMRF

SEQ ID NO: 300334 - protein, 14 aa, Homo sapiens
  CDR3 for beta chain variable domain of TCR clone 150167 (TRBV2, TRBJ1-5)
CASSENRGGQPQHF

SEQ ID NO: 300335 - protein, 14 aa, Homo sapiens
  CDR3 for alpha chain variable domain of TCR clone 150168 (TRAV12-1, TRAJ17)
CVVNYKAAGKKITF

SEQ ID NO: 300336 - protein, 17 aa, Homo sapiens
  CDR3 for beta chain variable domain of TCR clone 150168 (TRBV20-1, TRBJ2-1)
CSASSSGLAGSYNEQFF

SEQ ID NO: 300337 - protein, 15 aa, Homo sapiens
  CDR3 for alpha chain variable domain of TCR clone 150169 (TRAV3, TRAJ29)
CAVRAPLSGNTPLVF

SEQ ID NO: 300338 - protein, 15 aa, Homo sapiens
  CDR3 for beta chain variable domain of TCR clone 150169 (TRBV28, TRBJ1-1)
CASRIKGGLNTVAFF

SEQ ID NO: 300339 - protein, 14 aa, Homo sapiens
  CDR3 for alpha chain variable domain of TCR clone 150170 (TRAV8-4, TRAJ9)
CAVRINTGGFKTIF

SEQ ID NO: 300340 - protein, 15 aa, Homo sapiens
  CDR3 for beta chain variable domain of TCR clone 150170 (TRBV10-2, TRBJ2-6)
CASSQQGTGANVLTF

SEQ ID NO: 300341 - protein, 13 aa, Homo sapiens
  CDR3 for alpha chain variable domain of TCR clone 150171 (TRAV17, TRAJ5)
CALRGTGRRALTF

SEQ ID NO: 300342 - protein, 14 aa, Homo sapiens
  CDR3 for beta chain variable domain of TCR clone 150171 (TRBV2, TRBJ2-1)
CASSEALDGNEQFF

SEQ ID NO: 300343 - protein, 10 aa, Homo sapiens
  CDR3 for alpha chain variable domain of TCR clone 150172 (TRAV30, TRAJ48)
CGIGNEKLTF

SEQ ID NO: 300344 - protein, 15 aa, Homo sapiens
  CDR3 for beta chain variable domain of TCR clone 150172 (TRBV28, TRBJ2-1)
CASRKTGTAYNEQFL

SEQ ID NO: 300345 - protein, 13 aa, Homo sapiens
  CDR3 for alpha chain variable domain of TCR clone 150173 (TRAV36/DV7, TRAJ34)
CAVGEVNTDKLIF

SEQ ID NO: 300346 - protein, 15 aa, Homo sapiens
  CDR3 for beta chain variable domain of TCR clone 150173 (TRBV13, TRBJ1-3)
CASSPNRGSGNTIYF

SEQ ID NO: 300347 - protein, 15 aa, Homo sapiens
  CDR3 for alpha chain variable domain of TCR clone 150174 (TRAV4, TRAJ42)
CLVGGYGGSQGNLIF

SEQ ID NO: 300348 - protein, 16 aa, Homo sapiens
  CDR3 for beta chain variable domain of TCR clone 150174 (TRBV27, TRBJ1-1)
CASSTRTGGVGTKAFF

SEQ ID NO: 300349 - protein, 12 aa, Homo sapiens
  CDR3 for alpha chain variable domain of TCR clone 150175 (TRAV3, TRAJ20)
CAVRDPDYKLSF

SEQ ID NO: 300350 - protein, 15 aa, Homo sapiens
  CDR3 for beta chain variable domain of TCR clone 150175 (TRBV7-6, TRBJ2-1)
CASSSLAGEGNEQFF

SEQ ID NO: 300351 - protein, 15 aa, Homo sapiens
  CDR3 for alpha chain variable domain of TCR clone 150176 (TRAV12-3, TRAJ6)
CAMSAASGGSYIPTF

SEQ ID NO: 300352 - protein, 13 aa, Homo sapiens
  CDR3 for beta chain variable domain of TCR clone 150176 (TRBV10-3, TRBJ2-7)
CASKLAVNYEQYF

SEQ ID NO: 300353 - protein, 13 aa, Homo sapiens
  CDR3 for alpha chain variable domain of TCR clone 150177 (TRAV21, TRAJ20)
CAVGLRVDYKPSF

SEQ ID NO: 300354 - protein, 11 aa, Homo sapiens
  CDR3 for beta chain variable domain of TCR clone 150177 (TRBV25-1, TRBJ2-1)
CATTRISEQFF

SEQ ID NO: 300355 - protein, 14 aa, Homo sapiens
  CDR3 for alpha chain variable domain of TCR clone 150178 (TRAV12-1, TRAJ15)
CVVDRNQAGIALIF

SEQ ID NO: 300356 - protein, 14 aa, Homo sapiens
  CDR3 for beta chain variable domain of TCR clone 150178 (TRBV19, TRBJ1-1)
CATTSGTRGTEAFF

SEQ ID NO: 300357 - protein, 13 aa, Homo sapiens
  CDR3 for alpha chain variable domain of TCR clone 150179 (TRAV12-3, TRAJ33)
CAMSVNSNYQLIW

SEQ ID NO: 300358 - protein, 12 aa, Homo sapiens
  CDR3 for beta chain variable domain of TCR clone 150179 (TRBV11-2, TRBJ2-2)
YASSLGGGELFF

SEQ ID NO: 300359 - protein, 14 aa, Homo sapiens
  CDR3 for alpha chain variable domain of TCR clone 150180 (TRAV26-1, TRAJ39)
GIVRGSRAGNMLTF

SEQ ID NO: 300360 - protein, 15 aa, Homo sapiens
  CDR3 for beta chain variable domain of TCR clone 150180 (TRBV7-9, TRBJ1-5)
CASSQGHQPNQPQHF

SEQ ID NO: 300361 - protein, 15 aa, Homo sapiens
  CDR3 for alpha chain variable domain of TCR clone 150181 (TRAV21, TRAJ53)
CATLSSGGSNYKLTF

SEQ ID NO: 300362 - protein, 13 aa, Homo sapiens
  CDR3 for beta chain variable domain of TCR clone 150181 (TRBV11-2, TRBJ2-5)
CASSSTGEETQYF

SEQ ID NO: 300363 - protein, 17 aa, Homo sapiens
  CDR3 for alpha chain variable domain of TCR clone 150182 (TRAV26-2, TRAJ32)
ERCGCVGYGGATNKLIF

SEQ ID NO: 300364 - protein, 15 aa, Homo sapiens
  CDR3 for beta chain variable domain of TCR clone 150182 (TRBV27, TRBJ2-5)
CASSLYPRGGETQYF

SEQ ID NO: 300365 - protein, 14 aa, Homo sapiens
  CDR3 for alpha chain variable domain of TCR clone 150183 (TRAV17, TRAJ57)
CATDPQGGSEKLVY

SEQ ID NO: 300366 - protein, 14 aa, Homo sapiens
  CDR3 for beta chain variable domain of TCR clone 150183 (TRBV7-9, TRBJ2-2)
CASSLVQDTGELFF

SEQ ID NO: 300367 - protein, 20 aa, Homo sapiens
  CDR3 for alpha chain variable domain of TCR clone 150184 (TRAV14/DV4, )
CAMREGRKDIQNPDPAVYKL

SEQ ID NO: 300368 - protein, 13 aa, Homo sapiens
  CDR3 for beta chain variable domain of TCR clone 150184 (TRBV19, TRBJ1-5)
CASSIGGNQPQHF

SEQ ID NO: 300369 - protein, 21 aa, Homo sapiens
  CDR3 for alpha chain variable domain of TCR clone 150185 (TRAV8-4, TRAJ47)
HLTKPSAHMSDAAERGNKLDF

SEQ ID NO: 300370 - protein, 14 aa, Homo sapiens
  CDR3 for beta chain variable domain of TCR clone 150185 (TRBV7-9, TRBJ2-1)
CASSPRDSLYEQFF

SEQ ID NO: 300371 - protein, 12 aa, Homo sapiens
  CDR3 for alpha chain variable domain of TCR clone 150186 (TRAV12-1, TRAJ34)
CVVAGATDKLIF

SEQ ID NO: 300372 - protein, 16 aa, Homo sapiens
  CDR3 for beta chain variable domain of TCR clone 150186 (TRBV7-2, TRBJ1-2)
CASSSNQDRRVHGYTF

SEQ ID NO: 300373 - protein, 13 aa, Homo sapiens
  CDR3 for alpha chain variable domain of TCR clone 150187 (TRAV8-1, TRAJ30)
CAVIMNGDDKIIF

SEQ ID NO: 300374 - protein, 15 aa, Homo sapiens
  CDR3 for beta chain variable domain of TCR clone 150187 (TRBV4-1, TRBJ2-7)
CASSQNTGRLYEQYF

SEQ ID NO: 300375 - protein, 15 aa, Homo sapiens
  CDR3 for alpha chain variable domain of TCR clone 150188 (TRAV35, TRAJ38)
CAGFSNAGNNRKLIW

SEQ ID NO: 300376 - protein, 18 aa, Homo sapiens
  CDR3 for beta chain variable domain of TCR clone 150188 (TRBV3-1, TRBJ1-2)
CASSQDVIGWNGDYGYSF

SEQ ID NO: 300377 - protein, 13 aa, Homo sapiens
  CDR3 for alpha chain variable domain of TCR clone 150189 (TRAV23/DV6, TRAJ34)
CAASIEGTDKLIF

SEQ ID NO: 300378 - protein, 16 aa, Homo sapiens
  CDR3 for beta chain variable domain of TCR clone 150189 (TRBV7-3, TRBJ2-2)
CASSLKRGTLSGELFF

SEQ ID NO: 300379 - protein, 11 aa, Homo sapiens
  CDR3 for alpha chain variable domain of TCR clone 150190 (TRAV20, TRAJ40)
CAVGGNYKYIF

SEQ ID NO: 300380 - protein, 15 aa, Homo sapiens
  CDR3 for beta chain variable domain of TCR clone 150190 (TRBV6-3, TRBJ2-2)
CASSFLATLTGELFF

SEQ ID NO: 300381 - protein, 11 aa, Homo sapiens
  CDR3 for alpha chain variable domain of TCR clone 150191 (TRAV23/DV6, TRAJ56)
CAAPANSKLTF

SEQ ID NO: 300382 - protein, 15 aa, Homo sapiens
  CDR3 for beta chain variable domain of TCR clone 150191 (TRBV7-3, TRBJ2-7)
CASSPPVALNYEQYF

SEQ ID NO: 300383 - protein, 14 aa, Homo sapiens
  CDR3 for alpha chain variable domain of TCR clone 150192 (TRAV20, TRAJ29)
CAVQAWVGNTPLFF

SEQ ID NO: 300384 - protein, 15 aa, Homo sapiens
  CDR3 for beta chain variable domain of TCR clone 150192 (TRBV29-1, TRBJ2-7)
CSVEFFDSGSYEQYF

SEQ ID NO: 300385 - protein, 16 aa, Homo sapiens
  CDR3 for alpha chain variable domain of TCR clone 150193 (TRAV3, TRAJ37)
WAVRPHGSGNTGKLIF

SEQ ID NO: 300386 - protein, 16 aa, Homo sapiens
  CDR3 for beta chain variable domain of TCR clone 150193 (TRBV20-1, TRBJ1-4)
CSAPGQGLLTNEKLFF

SEQ ID NO: 300387 - protein, 12 aa, Homo sapiens
  CDR3 for alpha chain variable domain of TCR clone 150194 (TRAV12-1, TRAJ20)
CVAHFNDYKLRF

SEQ ID NO: 300388 - protein, 13 aa, Homo sapiens
  CDR3 for beta chain variable domain of TCR clone 150194 (TRBV5-7, TRBJ2-5)
CASSLRLQETQYF

SEQ ID NO: 300389 - protein, 13 aa, Homo sapiens
  CDR3 for alpha chain variable domain of TCR clone 150195 (TRAV3, TRAJ29)
CAVRDIVGTPLVF

SEQ ID NO: 300390 - protein, 14 aa, Homo sapiens
  CDR3 for beta chain variable domain of TCR clone 150195 (TRBV27, TRBJ2-1)
CASSATGGYNEQFF

SEQ ID NO: 300391 - protein, 14 aa, Homo sapiens
  CDR3 for alpha chain variable domain of TCR clone 150196 (TRAV8-3, TRAJ30)
CAVGDMNRDDKIIF

SEQ ID NO: 300392 - protein, 16 aa, Homo sapiens
  CDR3 for beta chain variable domain of TCR clone 150196 (TRBV29-1, TRBJ2-7)
CSVEDAEDGTAFEQYF

SEQ ID NO: 300393 - protein, 12 aa, Homo sapiens
  CDR3 for alpha chain variable domain of TCR clone 150197 (TRAV8-3, TRAJ26)
CAGYNYGQNFVF

SEQ ID NO: 300394 - protein, 15 aa, Homo sapiens
  CDR3 for beta chain variable domain of TCR clone 150197 (TRBV11-3, TRBJ2-3)
CASLKDGREGDTQYF

SEQ ID NO: 300395 - protein, 11 aa, Homo sapiens
  CDR3 for alpha chain variable domain of TCR clone 150198 (TRAV2, TRAJ33)
CAVDSNYQLIW

SEQ ID NO: 300396 - protein, 14 aa, Homo sapiens
  CDR3 for beta chain variable domain of TCR clone 150198 (TRBV6-3, TRBJ1-4)
CASSGQNLNEELFF

SEQ ID NO: 300397 - protein, 13 aa, Homo sapiens
  CDR3 for alpha chain variable domain of TCR clone 150199 (TRAV27, TRAJ45)
CRSSGGGADGLTF

SEQ ID NO: 300398 - protein, 11 aa, Homo sapiens
  CDR3 for beta chain variable domain of TCR clone 150199 (TRBV7-8, TRBJ2-7)
CASSLSLEQYF

SEQ ID NO: 300399 - protein, 15 aa, Homo sapiens
  CDR3 for alpha chain variable domain of TCR clone 150200 (TRAV1-1, TRAJ24)
CALSGGTDSWGKFRF

SEQ ID NO: 300400 - protein, 16 aa, Homo sapiens
  CDR3 for beta chain variable domain of TCR clone 150200 (TRBV2, TRBJ2-7)
CASSEPWTGPSYEQYF

SEQ ID NO: 300401 - protein, 18 aa, Homo sapiens
  CDR3 for alpha chain variable domain of TCR clone 150201 (TRAV21, TRAJ52)
CAVRPSSAGGTSYGKLTF

SEQ ID NO: 300402 - protein, 17 aa, Homo sapiens
  CDR3 for beta chain variable domain of TCR clone 150201 (TRBV13, TRBJ2-3)
CASCLSRVAGGRNTQYF

SEQ ID NO: 300403 - protein, 15 aa, Homo sapiens
  CDR3 for alpha chain variable domain of TCR clone 150202 (TRAV12-1, TRAJ9)
YVVSFGDTGGFKTIF

SEQ ID NO: 300404 - protein, 13 aa, Homo sapiens
  CDR3 for beta chain variable domain of TCR clone 150202 (TRBV2, TRBJ1-4)
CASSERAGEKLFF

SEQ ID NO: 300405 - protein, 12 aa, Homo sapiens
  CDR3 for alpha chain variable domain of TCR clone 150203 (TRAV13-1, TRAJ26)
STSFSKGQNFVF

SEQ ID NO: 300406 - protein, 12 aa, Homo sapiens
  CDR3 for beta chain variable domain of TCR clone 150203 (TRBV7-8, TRBJ2-7)
CASSLGDREQYF

SEQ ID NO: 300407 - protein, 13 aa, Homo sapiens
  CDR3 for alpha chain variable domain of TCR clone 150204 (TRAV27, TRAJ8)
CAGGPTGFQKLVF

SEQ ID NO: 300408 - protein, 15 aa, Homo sapiens
  CDR3 for beta chain variable domain of TCR clone 150204 (TRBV6-1, TRBJ2-7)
CASSESMGYFYEQYF

SEQ ID NO: 300409 - protein, 13 aa, Homo sapiens
  CDR3 for alpha chain variable domain of TCR clone 150205 (TRAV27, TRAJ29)
CAGAHSGNTPLVF

SEQ ID NO: 300410 - protein, 14 aa, Homo sapiens
  CDR3 for beta chain variable domain of TCR clone 150205 (TRBV7-2, TRBJ1-2)
CASSQTGSTYGYTF

SEQ ID NO: 300411 - protein, 13 aa, Homo sapiens
  CDR3 for alpha chain variable domain of TCR clone 150206 (TRAV29/DV5, TRAJ31)
CAASRNNNARLMF

SEQ ID NO: 300412 - protein, 12 aa, Homo sapiens
  CDR3 for beta chain variable domain of TCR clone 150206 (TRBV7-7, TRBJ2-5)
CASSLGGETQYF

SEQ ID NO: 300413 - protein, 11 aa, Homo sapiens
  CDR3 for alpha chain variable domain of TCR clone 150207 (TRAV26-1, )
CIADNAGKTIS

SEQ ID NO: 300414 - protein, 17 aa, Homo sapiens
  CDR3 for beta chain variable domain of TCR clone 150207 (TRBV11-2, TRBJ2-6)
CASSQRDIFSGANVLTF

SEQ ID NO: 300415 - protein, 12 aa, Homo sapiens
  CDR3 for alpha chain variable domain of TCR clone 150208 (TRAV12-3, TRAJ17)
CTMTLTGTKLTI

SEQ ID NO: 300416 - protein, 15 aa, Homo sapiens
  CDR3 for beta chain variable domain of TCR clone 150208 (TRBV20-1, TRBJ2-7)
CSARDRVSGMDEQYF

SEQ ID NO: 300417 - protein, 18 aa, Homo sapiens
  CDR3 for alpha chain variable domain of TCR clone 150209 (TRAV13-1, TRAJ52)
CAAKNPNAGGTSYGKLTF

SEQ ID NO: 300418 - protein, 16 aa, Homo sapiens
  CDR3 for beta chain variable domain of TCR clone 150209 (TRBV5-1, TRBJ2-3)
CASSLYTGQGTDTQYF

SEQ ID NO: 300419 - protein, 12 aa, Homo sapiens
  CDR3 for alpha chain variable domain of TCR clone 150210 (TRAV13-2, TRAJ23)
CAERHRGGKLIF

SEQ ID NO: 300420 - protein, 15 aa, Homo sapiens
  CDR3 for beta chain variable domain of TCR clone 150210 (TRBV7-2, TRBJ2-7)
CASSLVSSGSYEQYF

SEQ ID NO: 300421 - protein, 12 aa, Homo sapiens
  CDR3 for alpha chain variable domain of TCR clone 150211 (TRAV13-1, TRAJ21)
CAAKEGFNKIYF

SEQ ID NO: 300422 - protein, 13 aa, Homo sapiens
  CDR3 for beta chain variable domain of TCR clone 150211 (TRBV7-3, TRBJ2-1)
CASSLDSYNEQFF

SEQ ID NO: 300423 - protein, 15 aa, Homo sapiens
  CDR3 for alpha chain variable domain of TCR clone 150212 (TRAV3, TRAJ13)
CAVIDIAGGYQKVTF

SEQ ID NO: 300424 - protein, 13 aa, Homo sapiens
  CDR3 for beta chain variable domain of TCR clone 150212 (TRBV2, TRBJ2-2)
CASSKKNTGELFF

SEQ ID NO: 300425 - protein, 12 aa, Homo sapiens
  CDR3 for alpha chain variable domain of TCR clone 150213 (TRAV13-1, TRAJ21)
CAAKEGFNKFYF

SEQ ID NO: 300426 - protein, 15 aa, Homo sapiens
  CDR3 for beta chain variable domain of TCR clone 150213 (TRBV9, TRBJ1-6)
CASSVAGTGDSPLYF

SEQ ID NO: 300427 - protein, 14 aa, Homo sapiens
  CDR3 for alpha chain variable domain of TCR clone 150214 (TRAV26-1, TRAJ38)
CIADNAGNNRKLIW

SEQ ID NO: 300428 - protein, 15 aa, Homo sapiens
  CDR3 for beta chain variable domain of TCR clone 150214 (TRBV12-4, TRBJ1-5)
CQQPTGRGSNQPQHF

SEQ ID NO: 300429 - protein, 15 aa, Homo sapiens
  CDR3 for alpha chain variable domain of TCR clone 150215 (TRAV26-1, TRAJ56)
CIVRVDNGANSKLTF

SEQ ID NO: 300430 - protein, 15 aa, Homo sapiens
  CDR3 for beta chain variable domain of TCR clone 150215 (TRBV20-1, TRBJ2-7)
CSARDPTEVGHEQFF

SEQ ID NO: 300431 - protein, 14 aa, Homo sapiens
  CDR3 for alpha chain variable domain of TCR clone 150216 (TRAV29/DV5, TRAJ20)
CAATIRSNDYKLSF

SEQ ID NO: 300432 - protein, 15 aa, Homo sapiens
  CDR3 for beta chain variable domain of TCR clone 150216 (TRBV4-1, TRBJ2-7)
CASSQEWGPSYEQYF

SEQ ID NO: 300433 - protein, 18 aa, Homo sapiens
  CDR3 for alpha chain variable domain of TCR clone 150217 (TRAV13-1, TRAJ52)
CAAKNPNAGGTSYGKLKF

SEQ ID NO: 300434 - protein, 13 aa, Homo sapiens
  CDR3 for beta chain variable domain of TCR clone 150217 (TRBV20-1, TRBJ1-1)
CSARGGGNTEAFF

SEQ ID NO: 300435 - protein, 18 aa, Homo sapiens
  CDR3 for alpha chain variable domain of TCR clone 150218 (TRAV21, TRAJ52)
CSVRPSPAGGTSYGKLTF

SEQ ID NO: 300436 - protein, 15 aa, Homo sapiens
  CDR3 for beta chain variable domain of TCR clone 150218 (TRBV28, TRBJ2-7)
CASSPGGRGFYEQYF

SEQ ID NO: 300437 - protein, 16 aa, Homo sapiens
  CDR3 for alpha chain variable domain of TCR clone 150219 (TRAV4, TRAJ22)
CLVGVLYSGSARQLTF

SEQ ID NO: 300438 - protein, 14 aa, Homo sapiens
  CDR3 for beta chain variable domain of TCR clone 150219 (TRBV28, TRBJ2-3)
CASSWRGRADTQYF

SEQ ID NO: 300439 - protein, 12 aa, Homo sapiens
  CDR3 for alpha chain variable domain of TCR clone 150220 (TRAV12-3, TRAJ17)
CAMTLTGNKLTF

SEQ ID NO: 300440 - protein, 13 aa, Homo sapiens
  CDR3 for beta chain variable domain of TCR clone 150220 (TRBV9, TRBJ2-1)
CASSVGQGGEQFF

SEQ ID NO: 300441 - protein, 16 aa, Homo sapiens
  CDR3 for alpha chain variable domain of TCR clone 150221 (TRAV14/DV4, TRAJ54)
CAMREGRIQGAQKLVF

SEQ ID NO: 300442 - protein, 14 aa, Homo sapiens
  CDR3 for beta chain variable domain of TCR clone 150221 (TRBV11-3, TRBJ2-1)
CASSATTSGSIQFF

SEQ ID NO: 300443 - protein, 16 aa, Homo sapiens
  CDR3 for alpha chain variable domain of TCR clone 150222 (TRAV35, TRAJ28)
CAGQMYSGAGSYQLTF

SEQ ID NO: 300444 - protein, 13 aa, Homo sapiens
  CDR3 for beta chain variable domain of TCR clone 150222 (TRBV19, TRBJ1-2)
CASSQGQVYGYTF

SEQ ID NO: 300445 - protein, 14 aa, Homo sapiens
  CDR3 for alpha chain variable domain of TCR clone 150223 (TRAV1-1, TRAJ27)
CAVIYNTNAGKSTF

SEQ ID NO: 300446 - protein, 13 aa, Homo sapiens
  CDR3 for beta chain variable domain of TCR clone 150223 (TRBV25-1, TRBJ1-1)
CQHHLGGNTEAFF

SEQ ID NO: 300447 - protein, 17 aa, Homo sapiens
  CDR3 for alpha chain variable domain of TCR clone 150224 (TRAV3, TRAJ6)
CAVREGPRAGGSYIPTF

SEQ ID NO: 300448 - protein, 14 aa, Homo sapiens
  CDR3 for beta chain variable domain of TCR clone 150224 (TRBV7-2, TRBJ2-7)
CASSPKTSFYGQYF

SEQ ID NO: 300449 - protein, 10 aa, Homo sapiens
  CDR3 for alpha chain variable domain of TCR clone 150225 (TRAV12-1, TRAJ37)
ARGNTGELIC

SEQ ID NO: 300450 - protein, 15 aa, Homo sapiens
  CDR3 for beta chain variable domain of TCR clone 150225 (TRBV7-2, TRBJ2-3)
CASSLEQGGTDTQYF

SEQ ID NO: 300451 - protein, 17 aa, Homo sapiens
  CDR3 for alpha chain variable domain of TCR clone 150226 (TRAV13-2, TRAJ43)
CAENEDMRFGAGTRVTV

SEQ ID NO: 300452 - protein, 15 aa, Homo sapiens
  CDR3 for beta chain variable domain of TCR clone 150226 (TRBV20-1, TRBJ2-7)
CSARREAGAPREQYF

SEQ ID NO: 300453 - protein, 13 aa, Homo sapiens
  CDR3 for alpha chain variable domain of TCR clone 150227 (TRAV41, TRAJ45)
CAVRSGGADGLTF

SEQ ID NO: 300454 - protein, 14 aa, Homo sapiens
  CDR3 for beta chain variable domain of TCR clone 150227 (TRBV15, TRBJ2-5)
CATSIGGLGETQYF

SEQ ID NO: 300455 - protein, 13 aa, Homo sapiens
  CDR3 for alpha chain variable domain of TCR clone 150228 (TRAV12-2, TRAJ26)
CAVNENYGQNFVF

SEQ ID NO: 300456 - protein, 15 aa, Homo sapiens
  CDR3 for beta chain variable domain of TCR clone 150228 (TRBV20-1, TRBJ2-7)
CSARDRVSGMDEQYF

SEQ ID NO: 300457 - protein, 12 aa, Homo sapiens
  CDR3 for alpha chain variable domain of TCR clone 150229 (TRAV13-1, TRAJ21)
CAAKEGFNKFYF

SEQ ID NO: 300458 - protein, 16 aa, Homo sapiens
  CDR3 for beta chain variable domain of TCR clone 150229 (TRBV5-4, TRBJ1-1)
CASSLDSQGMKLSLDK

SEQ ID NO: 300459 - protein, 15 aa, Homo sapiens
  CDR3 for alpha chain variable domain of TCR clone 150230 (TRAV14/DV4, TRAJ33)
CAMREGRDSNYQLIW

SEQ ID NO: 300460 - protein, 15 aa, Homo sapiens
  CDR3 for beta chain variable domain of TCR clone 150230 (TRBV5-5, TRBJ1-5)
CPSSSTPGSNQPQHF

SEQ ID NO: 300461 - protein, 13 aa, Homo sapiens
  CDR3 for alpha chain variable domain of TCR clone 150231 (TRAV8-6, TRAJ8)
CAVSNTGFQKIEF

SEQ ID NO: 300462 - protein, 15 aa, Homo sapiens
  CDR3 for beta chain variable domain of TCR clone 150231 (TRBV28, TRBJ2-5)
CASSSGRTIQETQYF

SEQ ID NO: 300463 - protein, 14 aa, Homo sapiens
  CDR3 for alpha chain variable domain of TCR clone 150232 (TRAV35, TRAJ33)
CAGSSQDSNYQLIW

SEQ ID NO: 300464 - protein, 17 aa, Homo sapiens
  CDR3 for beta chain variable domain of TCR clone 150232 (TRBV5-1, TRBJ1-6)
CASSPSLQGSDNSPLHF

SEQ ID NO: 300465 - protein, 13 aa, Homo sapiens
  CDR3 for alpha chain variable domain of TCR clone 150233 (TRAV8-6, TRAJ49)
CAVITNTGNQFYF

SEQ ID NO: 300466 - protein, 16 aa, Homo sapiens
  CDR3 for beta chain variable domain of TCR clone 150233 (TRBV5-1, TRBJ2-2)
CASSLWDTTNTGELFF

SEQ ID NO: 300467 - protein, 14 aa, Homo sapiens
  CDR3 for alpha chain variable domain of TCR clone 150234 (TRAV8-3, TRAJ9)
CAVVYNTGGFKAIF

SEQ ID NO: 300468 - protein, 16 aa, Homo sapiens
  CDR3 for beta chain variable domain of TCR clone 150234 (TRBV7-3, TRBJ2-2)
CASSLKRGTLSGELFF

SEQ ID NO: 300469 - protein, 15 aa, Homo sapiens
  CDR3 for alpha chain variable domain of TCR clone 150235 (TRAV3, TRAJ45)
CAVRTPWGGADGLTF

SEQ ID NO: 300470 - protein, 16 aa, Homo sapiens
  CDR3 for beta chain variable domain of TCR clone 150235 (TRBV6-1, TRBJ2-2)
CASSFGQGANTGEMFF

SEQ ID NO: 300471 - protein, 17 aa, Homo sapiens
  CDR3 for alpha chain variable domain of TCR clone 150236 (TRAV3, TRAJ6)
CAVRDGPRAGRSYIPTF

SEQ ID NO: 300472 - protein, 14 aa, Homo sapiens
  CDR3 for beta chain variable domain of TCR clone 150236 (TRBV7-2, TRBJ2-7)
CASSPKTSFYEQYS

SEQ ID NO: 300473 - protein, 15 aa, Homo sapiens
  CDR3 for alpha chain variable domain of TCR clone 150237 (TRAV17, TRAJ16)
CATALRFSDGQKLLF

SEQ ID NO: 300474 - protein, 13 aa, Homo sapiens
  CDR3 for beta chain variable domain of TCR clone 150237 (TRBV19, TRBJ1-2)
CASSVPGQDGYTF

SEQ ID NO: 300475 - protein, 13 aa, Homo sapiens
  CDR3 for alpha chain variable domain of TCR clone 150238 (TRAV12-2, TRAJ42)
WAVKRGSQGNLIF

SEQ ID NO: 300476 - protein, 16 aa, Homo sapiens
  CDR3 for beta chain variable domain of TCR clone 150238 (TRBV9, TRBJ2-2)
CASSAMGKGNTGELFF

SEQ ID NO: 300477 - protein, 13 aa, Homo sapiens
  CDR3 for alpha chain variable domain of TCR clone 150239 (TRAV8-3, TRAJ43)
CAVGPDNNNDIGF

SEQ ID NO: 300478 - protein, 12 aa, Homo sapiens
  CDR3 for beta chain variable domain of TCR clone 150239 (TRBV7-2, TRBJ1-6)
CASSLSSSPLHF

SEQ ID NO: 300479 - protein, 15 aa, Homo sapiens
  CDR3 for alpha chain variable domain of TCR clone 150240 (TRAV3, TRAJ5)
CAVRDLDTGRRALTF

SEQ ID NO: 300480 - protein, 13 aa, Homo sapiens
  CDR3 for beta chain variable domain of TCR clone 150240 (TRBV12-4, TRBJ2-7)
CASSPTETYEQNF

SEQ ID NO: 300481 - protein, 12 aa, Homo sapiens
  CDR3 for alpha chain variable domain of TCR clone 150241 (TRAV13-1, TRAJ9)
CASHTGGFKTIF

SEQ ID NO: 300482 - protein, 13 aa, Homo sapiens
  CDR3 for beta chain variable domain of TCR clone 150241 (TRBV12-4, TRBJ1-2)
CASSSGSKDGFTF

SEQ ID NO: 300483 - protein, 12 aa, Homo sapiens
  CDR3 for alpha chain variable domain of TCR clone 150242 (TRAV8-3, TRAJ15)
CAVGAPLSALIF

SEQ ID NO: 300484 - protein, 17 aa, Homo sapiens
  CDR3 for beta chain variable domain of TCR clone 150242 (TRBV5-5, TRBJ1-1)
CASSLRFRGRMNTEAFF

SEQ ID NO: 300485 - protein, 15 aa, Homo sapiens
  CDR3 for alpha chain variable domain of TCR clone 150243 (TRAV3, TRAJ5)
CAVSDRKTGRRALTI

SEQ ID NO: 300486 - protein, 15 aa, Homo sapiens
  CDR3 for beta chain variable domain of TCR clone 150243 (TRBV7-8, TRBJ2-1)
CASSLADSLYNEQFF

SEQ ID NO: 300487 - protein, 15 aa, Homo sapiens
  CDR3 for alpha chain variable domain of TCR clone 150244 (TRAV3, TRAJ29)
CAVRDINSGNTPLVF

SEQ ID NO: 300488 - protein, 15 aa, Homo sapiens
  CDR3 for beta chain variable domain of TCR clone 150244 (TRBV28, TRBJ2-1)
CASSIIAGGRSEQFF

SEQ ID NO: 300489 - protein, 15 aa, Homo sapiens
  CDR3 for alpha chain variable domain of TCR clone 150245 (TRAV13-1, TRAJ17)
CAASIERAAGNKLTF

SEQ ID NO: 300490 - protein, 12 aa, Homo sapiens
  CDR3 for beta chain variable domain of TCR clone 150245 (TRBV5-7, TRBJ1-1)
CANSVGRGKAFF

SEQ ID NO: 300491 - protein, 14 aa, Homo sapiens
  CDR3 for alpha chain variable domain of TCR clone 150246 (TRAV1-2, TRAJ16)
CAVNRFSDGQKLLF

SEQ ID NO: 300492 - protein, 15 aa, Homo sapiens
  CDR3 for beta chain variable domain of TCR clone 150246 (TRBV13, TRBJ1-2)
CASSSKIQGNYGYTF

SEQ ID NO: 300493 - protein, 16 aa, Homo sapiens
  CDR3 for alpha chain variable domain of TCR clone 150247 (TRAV4, TRAJ18)
CCVLLIGGSTLGRLYF

SEQ ID NO: 300494 - protein, 15 aa, Homo sapiens
  CDR3 for beta chain variable domain of TCR clone 150247 (TRBV19, TRBJ2-1)
CASSIGLAGWDEQFF

SEQ ID NO: 300495 - protein, 15 aa, Homo sapiens
  CDR3 for alpha chain variable domain of TCR clone 150248 (TRAV12-2, TRAJ53)
CAVNGGGGSNYKLTF

SEQ ID NO: 300496 - protein, 14 aa, Homo sapiens
  CDR3 for beta chain variable domain of TCR clone 150248 (TRBV4-2, TRBJ2-1)
CASGLDRAYNEQYF

SEQ ID NO: 300497 - protein, 13 aa, Homo sapiens
  CDR3 for alpha chain variable domain of TCR clone 150249 (TRAV8-3, TRAJ44)
CAVVPGTASKLTF

SEQ ID NO: 300498 - protein, 13 aa, Homo sapiens
  CDR3 for beta chain variable domain of TCR clone 150249 (TRBV10-3, TRBJ2-7)
CASKLALNYEQYF

SEQ ID NO: 300499 - protein, 16 aa, Homo sapiens
  CDR3 for alpha chain variable domain of TCR clone 150250 (TRAV23/DV6, TRAJ9)
CAASIGGNTGGFKTIF

SEQ ID NO: 300500 - protein, 18 aa, Homo sapiens
  CDR3 for beta chain variable domain of TCR clone 150250 (TRBV7-9, TRBJ2-7)
CASSLNTSGSRTWYEQYF

SEQ ID NO: 300501 - protein, 12 aa, Homo sapiens
  CDR3 for alpha chain variable domain of TCR clone 150251 (TRAV2, TRAJ10)
CDSTGGGNKLTF

SEQ ID NO: 300502 - protein, 14 aa, Homo sapiens
  CDR3 for beta chain variable domain of TCR clone 150251 (TRBV20-1, TRBJ2-5)
CSASDSGSGETQYF

SEQ ID NO: 300503 - protein, 15 aa, Homo sapiens
  CDR3 for alpha chain variable domain of TCR clone 150252 (TRAV8-3, TRAJ6)
CAVGPLGGGSYVPTF

SEQ ID NO: 300504 - protein, 14 aa, Homo sapiens
  CDR3 for beta chain variable domain of TCR clone 150252 (TRBV19, TRBJ2-2)
CASSTGQGAGELFF

SEQ ID NO: 300505 - protein, 12 aa, Homo sapiens
  CDR3 for alpha chain variable domain of TCR clone 150253 (TRAV1-1, TRAJ9)
CAVDTGGFKTIF

SEQ ID NO: 300506 - protein, 14 aa, Homo sapiens
  CDR3 for beta chain variable domain of TCR clone 150253 (TRBV7-8, TRBJ2-5)
CASSATGGQETQYV

SEQ ID NO: 300507 - protein, 12 aa, Homo sapiens
  CDR3 for alpha chain variable domain of TCR clone 150254 (TRAV27, TRAJ13)
CAGVRGYQKVTF

SEQ ID NO: 300508 - protein, 16 aa, Homo sapiens
  CDR3 for beta chain variable domain of TCR clone 150254 (TRBV28, TRBJ2-1)
SASSSSYSGSLNEQFF

SEQ ID NO: 300509 - protein, 11 aa, Homo sapiens
  CDR3 for alpha chain variable domain of TCR clone 150255 (TRAV23/DV6, TRAJ49)
CAVAPVTSSIL

SEQ ID NO: 300510 - protein, 13 aa, Homo sapiens
  CDR3 for beta chain variable domain of TCR clone 150255 (TRBV10-3, TRBJ2-7)
CASKLAVNYEQYF

SEQ ID NO: 300511 - protein, 14 aa, Homo sapiens
  CDR3 for alpha chain variable domain of TCR clone 150256 (TRAV35, TRAJ24)
CAGPRRDSWGKLQF

SEQ ID NO: 300512 - protein, 15 aa, Homo sapiens
  CDR3 for beta chain variable domain of TCR clone 150256 (TRBV6-3, TRBJ2-7)
CASSSPGTVFYEQYF

SEQ ID NO: 300513 - protein, 14 aa, Homo sapiens
  CDR3 for alpha chain variable domain of TCR clone 150257 (TRAV16, TRAJ15)
CALSGPQAGSALIF

SEQ ID NO: 300514 - protein, 12 aa, Homo sapiens
  CDR3 for beta chain variable domain of TCR clone 150257 (TRBV18, TRBJ2-5)
CASSPSKETQYF

SEQ ID NO: 300515 - protein, 19 aa, Homo sapiens
  CDR3 for alpha chain variable domain of TCR clone 150258 (TRAV1-2, TRAJ26)
CLLPLCCERPDNYGQNFVF

SEQ ID NO: 300516 - protein, 17 aa, Homo sapiens
  CDR3 for beta chain variable domain of TCR clone 150258 (TRBV25-1, TRBJ2-5)
CASSRRGGRGGRETQYF

SEQ ID NO: 300517 - protein, 14 aa, Homo sapiens
  CDR3 for alpha chain variable domain of TCR clone 150259 (TRAV35, TRAJ22)
CAGLRPGSARQLTF

SEQ ID NO: 300518 - protein, 15 aa, Homo sapiens
  CDR3 for beta chain variable domain of TCR clone 150259 (TRBV7-2, TRBJ2-2)
CASSPTGANTGELFF

SEQ ID NO: 300519 - protein, 12 aa, Homo sapiens
  CDR3 for alpha chain variable domain of TCR clone 150260 (TRAV20, TRAJ39)
CAVGNAGNMLTF

SEQ ID NO: 300520 - protein, 15 aa, Homo sapiens
  CDR3 for beta chain variable domain of TCR clone 150260 (TRBV27, TRBJ2-1)
CASSNGGWSSNEQFF

SEQ ID NO: 300521 - protein, 14 aa, Homo sapiens
  CDR3 for alpha chain variable domain of TCR clone 150261 (TRAV1-2, TRAJ16)
CAVNRFSDGQKLLF

SEQ ID NO: 300522 - protein, 15 aa, Homo sapiens
  CDR3 for beta chain variable domain of TCR clone 150261 (TRBV6-1, TRBJ2-3)
CAGSERGGITDTQYF

SEQ ID NO: 300523 - protein, 14 aa, Homo sapiens
  CDR3 for alpha chain variable domain of TCR clone 150262 (TRAV26-1, TRAJ21)
CIVRPPYNFNKFYF

SEQ ID NO: 300524 - protein, 13 aa, Homo sapiens
  CDR3 for beta chain variable domain of TCR clone 150262 (TRBV2, TRBJ2-7)
CASSGGIAYEQYF

SEQ ID NO: 300525 - protein, 12 aa, Homo sapiens
  CDR3 for alpha chain variable domain of TCR clone 150263 (TRAV17, TRAJ30)
CVPERRDDKINF

SEQ ID NO: 300526 - protein, 11 aa, Homo sapiens
  CDR3 for beta chain variable domain of TCR clone 150263 (TRBV20-1, TRBJ1-2)
CSVQGAGGYTF

SEQ ID NO: 300527 - protein, 12 aa, Homo sapiens
  CDR3 for alpha chain variable domain of TCR clone 150264 (TRAV27, TRAJ36)
CAGMTGANNLFF

SEQ ID NO: 300528 - protein, 14 aa, Homo sapiens
  CDR3 for beta chain variable domain of TCR clone 150264 (TRBV12-4, TRBJ2-3)
CASSLVASTDTQYF

SEQ ID NO: 300529 - protein, 17 aa, Homo sapiens
  CDR3 for alpha chain variable domain of TCR clone 150265 (TRAV3, TRAJ42)
CAVRDRDFGGSQGNLIF

SEQ ID NO: 300530 - protein, 15 aa, Homo sapiens
  CDR3 for beta chain variable domain of TCR clone 150265 (TRBV6-6, TRBJ2-7)
CASSYSYGGSYKQYF

SEQ ID NO: 300531 - protein, 15 aa, Homo sapiens
  CDR3 for alpha chain variable domain of TCR clone 150266 (TRAV2, TRAJ9)
CAVEDRGTGGFKTIF

SEQ ID NO: 300532 - protein, 16 aa, Homo sapiens
  CDR3 for beta chain variable domain of TCR clone 150266 (TRBV24-1, TRBJ2-3)
CATSDPGTGAIDTQYF

SEQ ID NO: 300533 - protein, 14 aa, Homo sapiens
  CDR3 for alpha chain variable domain of TCR clone 150267 (TRAV38-1, TRAJ45)
CAYYSGGGADGFTF

SEQ ID NO: 300534 - protein, 20 aa, Homo sapiens
  CDR3 for beta chain variable domain of TCR clone 150267 (TRBV28, TRBJ2-1)
CASTPIGRSPGRAGGNEQFF

SEQ ID NO: 300535 - protein, 13 aa, Homo sapiens
  CDR3 for alpha chain variable domain of TCR clone 150268 (TRAV1-1, TRAJ23)
CAVVANQGGKLIF

SEQ ID NO: 300536 - protein, 15 aa, Homo sapiens
  CDR3 for beta chain variable domain of TCR clone 150268 (TRBV12-4, TRBJ2-5)
CASSPPTGLQETQYF

SEQ ID NO: 300537 - protein, 12 aa, Homo sapiens
  CDR3 for alpha chain variable domain of TCR clone 150269 (TRAV21, TRAJ47)
CCEEEYGNKLVF

SEQ ID NO: 300538 - protein, 14 aa, Homo sapiens
  CDR3 for beta chain variable domain of TCR clone 150269 (TRBV19, TRBJ2-1)
CASPTFVLSGEQFF

SEQ ID NO: 300539 - protein, 13 aa, Homo sapiens
  CDR3 for alpha chain variable domain of TCR clone 150270 (TRAV3, TRAJ15)
CAVRDQAGTSLIF

SEQ ID NO: 300540 - protein, 15 aa, Homo sapiens
  CDR3 for beta chain variable domain of TCR clone 150270 (TRBV11-1, TRBJ2-7)
CASSLNYGASYEQYF

SEQ ID NO: 300541 - protein, 15 aa, Homo sapiens
  CDR3 for alpha chain variable domain of TCR clone 150271 (TRAV12-1, TRAJ44)
CVADLPTGTATKLTF

SEQ ID NO: 300542 - protein, 15 aa, Homo sapiens
  CDR3 for beta chain variable domain of TCR clone 150271 (TRBV18, TRBJ2-1)
CASSPPSASYNEQFF

SEQ ID NO: 300543 - protein, 12 aa, Homo sapiens
  CDR3 for alpha chain variable domain of TCR clone 150272 (TRAV16, TRAJ26)
CALRSYGQNFVF

SEQ ID NO: 300544 - protein, 14 aa, Homo sapiens
  CDR3 for beta chain variable domain of TCR clone 150272 (TRBV10-3, TRBJ2-1)
CAISSDLAYNQQFF

SEQ ID NO: 300545 - protein, 13 aa, Homo sapiens
  CDR3 for alpha chain variable domain of TCR clone 150273 (TRAV2, TRAJ40)
CAVVTSGTYKYIF

SEQ ID NO: 300546 - protein, 14 aa, Homo sapiens
  CDR3 for beta chain variable domain of TCR clone 150273 (TRBV12-4, TRBJ1-1)
CASSSARGYTEAFF

SEQ ID NO: 300547 - protein, 14 aa, Homo sapiens
  CDR3 for alpha chain variable domain of TCR clone 150274 (TRAV3, TRAJ21)
CAVRDAYNFNKFYF

SEQ ID NO: 300548 - protein, 17 aa, Homo sapiens
  CDR3 for beta chain variable domain of TCR clone 150274 (TRBV20-1, TRBJ1-6)
CSARGRYTFSYNSPLHF

SEQ ID NO: 300549 - protein, 23 aa, Homo sapiens
  CDR3 for alpha chain variable domain of TCR clone 150275 (TRAV26-1, TRAJ38)
CIADNAGNNHIQNPDPAVYQLRD

SEQ ID NO: 300550 - protein, 14 aa, Homo sapiens
  CDR3 for beta chain variable domain of TCR clone 150275 (TRBV7-9, TRBJ2-2)
CASSLVQDAGELFF

SEQ ID NO: 300551 - protein, 15 aa, Homo sapiens
  CDR3 for alpha chain variable domain of TCR clone 150276 (TRAV23/DV6, TRAJ28)
CAALLAYPGAGRYQL

SEQ ID NO: 300552 - protein, 13 aa, Homo sapiens
  CDR3 for beta chain variable domain of TCR clone 150276 (TRBV4-2, TRBJ2-3)
CASSQGNTDTQYF

SEQ ID NO: 300553 - protein, 19 aa, Homo sapiens
  CDR3 for alpha chain variable domain of TCR clone 150277 (TRAV26-1, TRAJ52)
CIVRAHRNAGGTSYGKLTF

SEQ ID NO: 300554 - protein, 15 aa, Homo sapiens
  CDR3 for beta chain variable domain of TCR clone 150277 (TRBV12-4, TRBJ2-5)
CASSPPTGLQDTQYF

SEQ ID NO: 300555 - protein, 15 aa, Homo sapiens
  CDR3 for alpha chain variable domain of TCR clone 150278 (TRAV8-2, TRAJ40)
CVVSDRGSGTYKYIF

SEQ ID NO: 300556 - protein, 14 aa, Homo sapiens
  CDR3 for beta chain variable domain of TCR clone 150278 (TRBV7-2, TRBJ2-7)
CASRSQGAAYEQYF

SEQ ID NO: 300557 - protein, 17 aa, Homo sapiens
  CDR3 for alpha chain variable domain of TCR clone 150279 (TRAV12-2, TRAJ52)
CAVNPYAGGTSYGRLTF

SEQ ID NO: 300558 - protein, 16 aa, Homo sapiens
  CDR3 for beta chain variable domain of TCR clone 150279 (TRBV5-5, TRBJ2-2)
CASSGRREGATGELFF

SEQ ID NO: 300559 - protein, 17 aa, Homo sapiens
  CDR3 for alpha chain variable domain of TCR clone 150280 (TRAV3, TRAJ6)
RAVRDGPRAGGSYIPTF

SEQ ID NO: 300560 - protein, 15 aa, Homo sapiens
  CDR3 for beta chain variable domain of TCR clone 150280 (TRBV29-1, TRBJ2-5)
CSVEGLAVNQETQYF

SEQ ID NO: 300561 - protein, 11 aa, Homo sapiens
  CDR3 for alpha chain variable domain of TCR clone 150281 (TRAV13-2, TRAJ20)
CADSNAYKLSF

SEQ ID NO: 300562 - protein, 12 aa, Homo sapiens
  CDR3 for beta chain variable domain of TCR clone 150281 (TRBV11-2, TRBJ2-2)
CASSLGGGELFF

SEQ ID NO: 300563 - protein, 11 aa, Homo sapiens
  CDR3 for alpha chain variable domain of TCR clone 150282 (TRAV2, TRAJ13)
CASGGYQKVTF

SEQ ID NO: 300564 - protein, 14 aa, Homo sapiens
  CDR3 for beta chain variable domain of TCR clone 150282 (TRBV5-7, TRBJ1-2)
CASSLVRGDYGHTF

SEQ ID NO: 300565 - protein, 13 aa, Homo sapiens
  CDR3 for alpha chain variable domain of TCR clone 150283 (TRAV17, TRAJ39)
CAISTNAGNMLTF

SEQ ID NO: 300566 - protein, 14 aa, Homo sapiens
  CDR3 for beta chain variable domain of TCR clone 150283 (TRBV25-1, TRBJ1-1)
CASTHLGGNTEAFF

SEQ ID NO: 300567 - protein, 13 aa, Homo sapiens
  CDR3 for alpha chain variable domain of TCR clone 150284 (TRAV2, TRAJ40)
CAVVTSGTYKSIF

SEQ ID NO: 300568 - protein, 14 aa, Homo sapiens
  CDR3 for beta chain variable domain of TCR clone 150284 (TRBV19, TRBJ2-1)
CASPIFVLSGEQFF

SEQ ID NO: 300569 - protein, 18 aa, Homo sapiens
  CDR3 for alpha chain variable domain of TCR clone 150285 (TRAV12-3, TRAJ18)
CAMSAEGDRGSTLGRLYF

SEQ ID NO: 300570 - protein, 17 aa, Homo sapiens
  CDR3 for beta chain variable domain of TCR clone 150285 (TRBV24-1, TRBJ2-1)
CATSDVSTSGTYNEQFF

SEQ ID NO: 300571 - protein, 14 aa, Homo sapiens
  CDR3 for alpha chain variable domain of TCR clone 150286 (TRAV1-2, TRAJ16)
CDVNRFSDGQKLLF

SEQ ID NO: 300572 - protein, 11 aa, Homo sapiens
  CDR3 for beta chain variable domain of TCR clone 150286 (TRBV4-1, TRBJ2-2)
CASEHTGELFF

SEQ ID NO: 300573 - protein, 14 aa, Homo sapiens
  CDR3 for alpha chain variable domain of TCR clone 150287 (TRAV26-1, TRAJ34)
CIVRESYNTDKLIF

SEQ ID NO: 300574 - protein, 13 aa, Homo sapiens
  CDR3 for beta chain variable domain of TCR clone 150287 (TRBV19, TRBJ2-1)
CATSRGVYDEQFF

SEQ ID NO: 300575 - protein, 15 aa, Homo sapiens
  CDR3 for alpha chain variable domain of TCR clone 150288 (TRAV34, TRAJ38)
CGADFTPGNNRKLIW

SEQ ID NO: 300576 - protein, 20 aa, Homo sapiens
  CDR3 for beta chain variable domain of TCR clone 150288 (TRBV12-5, TRBJ2-5)
CASGPRTSGNQETSTSGQAR

SEQ ID NO: 300577 - protein, 14 aa, Homo sapiens
  CDR3 for alpha chain variable domain of TCR clone 150289 (TRAV20, TRAJ4)
CAVQASGGYNKLIF

SEQ ID NO: 300578 - protein, 14 aa, Homo sapiens
  CDR3 for beta chain variable domain of TCR clone 150289 (TRBV7-2, TRBJ2-7)
CASSPKTSFYEQYF

SEQ ID NO: 300579 - protein, 15 aa, Homo sapiens
  CDR3 for alpha chain variable domain of TCR clone 150290 (TRAV21, TRAJ45)
CAVSYSGGGADGLTF

SEQ ID NO: 300580 - protein, 20 aa, Homo sapiens
  CDR3 for beta chain variable domain of TCR clone 150290 (TRBV7-8, TRBJ2-2)
CASSHLFPGPTIHITGELFF

SEQ ID NO: 300581 - protein, 11 aa, Homo sapiens
  CDR3 for alpha chain variable domain of TCR clone 150291 (TRAV1-2, TRAJ20)
CAVSNDYKLSF

SEQ ID NO: 300582 - protein, 16 aa, Homo sapiens
  CDR3 for beta chain variable domain of TCR clone 150291 (TRBV29-1, TRBJ2-6)
CGVEDVTYSGANVLTF

SEQ ID NO: 300583 - protein, 12 aa, Homo sapiens
  CDR3 for alpha chain variable domain of TCR clone 150292 (TRAV1-2, TRAJ29)
CAVRNLHTPLVF

SEQ ID NO: 300584 - protein, 16 aa, Homo sapiens
  CDR3 for beta chain variable domain of TCR clone 150292 (TRBV27, TRBJ2-2)
CASSFRGLVRTGELFF

SEQ ID NO: 300585 - protein, 16 aa, Homo sapiens
  CDR3 for alpha chain variable domain of TCR clone 150293 (TRAV21, TRAJ37)
CAVRPRGSSNTSKLLF

SEQ ID NO: 300586 - protein, 16 aa, Homo sapiens
  CDR3 for beta chain variable domain of TCR clone 150293 (TRBV2, TRBJ2-1)
CASSVGGSLSYNEQFF

SEQ ID NO: 300587 - protein, 13 aa, Homo sapiens
  CDR3 for alpha chain variable domain of TCR clone 150294 (TRAV35, TRAJ42)
CAGFPGSQGNLIF

SEQ ID NO: 300588 - protein, 16 aa, Homo sapiens
  CDR3 for beta chain variable domain of TCR clone 150294 (TRBV4-1, TRBJ1-2)
CASSQDAGQVLYGYTF

SEQ ID NO: 300589 - protein, 13 aa, Homo sapiens
  CDR3 for alpha chain variable domain of TCR clone 150295 (TRAV27, TRAJ49)
CAPRPYTANQFYF

SEQ ID NO: 300590 - protein, 16 aa, Homo sapiens
  CDR3 for beta chain variable domain of TCR clone 150295 (TRBV4-1, TRBJ1-2)
CASSQDAGQVLYGYTF

SEQ ID NO: 300591 - protein, 14 aa, Homo sapiens
  CDR3 for alpha chain variable domain of TCR clone 150296 (TRAV26-1, TRAJ38)
CIADNAGNNRKLIW

SEQ ID NO: 300592 - protein, 14 aa, Homo sapiens
  CDR3 for beta chain variable domain of TCR clone 150296 (TRBV11-2, TRBJ2-3)
CASSRLARTDTQYF

SEQ ID NO: 300593 - protein, 16 aa, Homo sapiens
  CDR3 for alpha chain variable domain of TCR clone 150297 (TRAV1-2, TRAJ10)
CAVGGVLAGGGNKLTF

SEQ ID NO: 300594 - protein, 12 aa, Homo sapiens
  CDR3 for beta chain variable domain of TCR clone 150297 (TRBV7-8, TRBJ2-7)
CASSLGDREQYL

SEQ ID NO: 300595 - protein, 10 aa, Homo sapiens
  CDR3 for alpha chain variable domain of TCR clone 150298 (TRAV2, TRAJ34)
CAVVNDKLIF

SEQ ID NO: 300596 - protein, 17 aa, Homo sapiens
  CDR3 for beta chain variable domain of TCR clone 150298 (TRBV20-1, TRBJ2-2)
CSASGSGQGGLTGELFF

SEQ ID NO: 300597 - protein, 14 aa, Homo sapiens
  CDR3 for alpha chain variable domain of TCR clone 150299 (TRAV12-2, TRAJ40)
CAVKIPSGTYKYIF

SEQ ID NO: 300598 - protein, 14 aa, Homo sapiens
  CDR3 for beta chain variable domain of TCR clone 150299 (TRBV20-1, TRBJ1-1)
CSAPTRIGGTEAFF

SEQ ID NO: 300599 - protein, 16 aa, Homo sapiens
  CDR3 for alpha chain variable domain of TCR clone 150300 (TRAV30, TRAJ24)
CGTEIVDADSWGKFQF

SEQ ID NO: 300600 - protein, 18 aa, Homo sapiens
  CDR3 for beta chain variable domain of TCR clone 150300 (TRBV10-3, TRBJ2-3)
CAISESRVGPMRGDTQYF

SEQ ID NO: 300601 - protein, 13 aa, Homo sapiens
  CDR3 for alpha chain variable domain of TCR clone 150301 (TRAV17, TRAJ29)
CATGPSGNTPLVF

SEQ ID NO: 300602 - protein, 14 aa, Homo sapiens
  CDR3 for beta chain variable domain of TCR clone 150301 (TRBV2, TRBJ1-6)
CASEVGSYNSPLHF

SEQ ID NO: 300603 - protein, 16 aa, Homo sapiens
  CDR3 for alpha chain variable domain of TCR clone 150302 (TRAV12-2, TRAJ45)
CAVKRNPGGGADGLTF

SEQ ID NO: 300604 - protein, 12 aa, Homo sapiens
  CDR3 for beta chain variable domain of TCR clone 150302 (TRBV6-1, TRBJ2-5)
RASSEGRETQYS

SEQ ID NO: 300605 - protein, 11 aa, Homo sapiens
  CDR3 for alpha chain variable domain of TCR clone 150303 (TRAV2, TRAJ20)
CAVLNDYKLSF

SEQ ID NO: 300606 - protein, 15 aa, Homo sapiens
  CDR3 for beta chain variable domain of TCR clone 150303 (TRBV2, TRBJ2-7)
CASSENRQGKGEQYF

SEQ ID NO: 300607 - protein, 15 aa, Homo sapiens
  CDR3 for alpha chain variable domain of TCR clone 150304 (TRAV8-1, TRAJ42)
CAVRRYGGSQGNLIF

SEQ ID NO: 300608 - protein, 21 aa, Homo sapiens
  CDR3 for beta chain variable domain of TCR clone 150304 (TRBV5-1, TRBJ1-6)
CASSPRGGADSTGGVRSPLHF

SEQ ID NO: 300609 - protein, 16 aa, Homo sapiens
  CDR3 for alpha chain variable domain of TCR clone 150305 (TRAV26-1, TRAJ52)
CIVSNAGGTRYGKLTF

SEQ ID NO: 300610 - protein, 15 aa, Homo sapiens
  CDR3 for beta chain variable domain of TCR clone 150305 (TRBV7-3, TRBJ2-1)
CASSPTGGGEVEQFF

SEQ ID NO: 300611 - protein, 15 aa, Homo sapiens
  CDR3 for alpha chain variable domain of TCR clone 150306 (TRAV21, TRAJ53)
CATLNSGGSNYKLTF

SEQ ID NO: 300612 - protein, 18 aa, Homo sapiens
  CDR3 for beta chain variable domain of TCR clone 150306 (TRBV7-9, TRBJ2-1)
CASSLGGLAGFWSNEQFF

SEQ ID NO: 300613 - protein, 11 aa, Homo sapiens
  CDR3 for alpha chain variable domain of TCR clone 150307 (TRAV12-3, TRAJ27)
CAMANAGKSTF

SEQ ID NO: 300614 - protein, 15 aa, Homo sapiens
  CDR3 for beta chain variable domain of TCR clone 150307 (TRBV15, TRBJ1-5)
CATSRDPVSNQPQHF

SEQ ID NO: 300615 - protein, 13 aa, Homo sapiens
  CDR3 for alpha chain variable domain of TCR clone 150308 (TRAV30, TRAJ16)
CGTFGGDGQKLLF

SEQ ID NO: 300616 - protein, 14 aa, Homo sapiens
  CDR3 for beta chain variable domain of TCR clone 150308 (TRBV19, TRBJ2-3)
CASSVGRGSDTQYF

SEQ ID NO: 300617 - protein, 17 aa, Homo sapiens
  CDR3 for alpha chain variable domain of TCR clone 150309 (TRAV3, TRAJ6)
CAVRDGPRAGGSYRPTF

SEQ ID NO: 300618 - protein, 14 aa, Homo sapiens
  CDR3 for beta chain variable domain of TCR clone 150309 (TRBV4-2, TRBJ2-1)
CASGLDRAYNEQFF

SEQ ID NO: 300619 - protein, 17 aa, Homo sapiens
  CDR3 for alpha chain variable domain of TCR clone 150310 (TRAV2, TRAJ36)
CAVVERGNWGKQPLLWD

SEQ ID NO: 300620 - protein, 14 aa, Homo sapiens
  CDR3 for beta chain variable domain of TCR clone 150310 (TRBV7-9, TRBJ2-5)
CASSLDTAQETQYF

SEQ ID NO: 300621 - protein, 14 aa, Homo sapiens
  CDR3 for alpha chain variable domain of TCR clone 150311 (TRAV29/DV5, TRAJ26)
CAARVSPRVRILSL

SEQ ID NO: 300622 - protein, 17 aa, Homo sapiens
  CDR3 for beta chain variable domain of TCR clone 150311 (TRBV20-1, TRBJ2-2)
CSASGSGQGGLTGELFF

SEQ ID NO: 300623 - protein, 12 aa, Homo sapiens
  CDR3 for alpha chain variable domain of TCR clone 150312 (TRAV13-2, TRAJ23)
CAERHRGGKLIF

SEQ ID NO: 300624 - protein, 18 aa, Homo sapiens
  CDR3 for beta chain variable domain of TCR clone 150312 (TRBV11-2, TRBJ2-3)
CASSFGGASRGAPNTQYF

SEQ ID NO: 300625 - protein, 21 aa, Homo sapiens
  CDR3 for alpha chain variable domain of TCR clone 150313 (TRAV26-1, TRAJ17)
CCVLLHRQSSVSKAAGNKLTF

SEQ ID NO: 300626 - protein, 14 aa, Homo sapiens
  CDR3 for beta chain variable domain of TCR clone 150313 (TRBV28, TRBJ1-2)
CASRIQGANYGYTF

SEQ ID NO: 300627 - protein, 14 aa, Homo sapiens
  CDR3 for alpha chain variable domain of TCR clone 150314 (TRAV1-2, TRAJ16)
CAVNRFSDGQKLLF

SEQ ID NO: 300628 - protein, 17 aa, Homo sapiens
  CDR3 for beta chain variable domain of TCR clone 150314 (TRBV7-9, TRBJ1-6)
CASGSPGRGNSPLHLGT

SEQ ID NO: 300629 - protein, 13 aa, Homo sapiens
  CDR3 for alpha chain variable domain of TCR clone 150315 (TRAV2, TRAJ40)
CDVVTSGTYKYLF

SEQ ID NO: 300630 - protein, 15 aa, Homo sapiens
  CDR3 for beta chain variable domain of TCR clone 150315 (TRBV6-3, TRBJ2-7)
CASSSPGTVFYEQYF

SEQ ID NO: 300631 - protein, 13 aa, Homo sapiens
  CDR3 for alpha chain variable domain of TCR clone 150316 (TRAV12-3, TRAJ33)
CAMSVNSNYQLLW

SEQ ID NO: 300632 - protein, 16 aa, Homo sapiens
  CDR3 for beta chain variable domain of TCR clone 150316 (TRBV13, TRBJ2-5)
CASSLRTGGSWETQYF

SEQ ID NO: 300633 - protein, 17 aa, Homo sapiens
  CDR3 for alpha chain variable domain of TCR clone 150317 (TRAV13-1, TRAJ52)
CAASLGAGGTSYGKLTF

SEQ ID NO: 300634 - protein, 15 aa, Homo sapiens
  CDR3 for beta chain variable domain of TCR clone 150317 (TRBV2, TRBJ2-1)
CASRELAGSYNEQFF

SEQ ID NO: 300635 - protein, 13 aa, Homo sapiens
  CDR3 for alpha chain variable domain of TCR clone 150318 (TRAV20, TRAJ54)
CSVQAGGAQKLVF

SEQ ID NO: 300636 - protein, 14 aa, Homo sapiens
  CDR3 for beta chain variable domain of TCR clone 150318 (TRBV20-1, TRBJ2-7)
CGAKTGTGGYEQYF

SEQ ID NO: 300637 - protein, 11 aa, Homo sapiens
  CDR3 for alpha chain variable domain of TCR clone 150319 (TRAV16, TRAJ26)
CALTRWSEFCL

SEQ ID NO: 300638 - protein, 13 aa, Homo sapiens
  CDR3 for beta chain variable domain of TCR clone 150319 (TRBV4-1, TRBJ2-2)
CASSQENTWELFF

SEQ ID NO: 300639 - protein, 13 aa, Homo sapiens
  CDR3 for alpha chain variable domain of TCR clone 150320 (TRAV8-2, TRAJ44)
CSRGAGTASKLTF

SEQ ID NO: 300640 - protein, 13 aa, Homo sapiens
  CDR3 for beta chain variable domain of TCR clone 150320 (TRBV12-4, TRBJ2-7)
CASSRRASYEQYF

SEQ ID NO: 300641 - protein, 21 aa, Homo sapiens
  CDR3 for alpha chain variable domain of TCR clone 150321 (TRAV23/DV6, TRAJ30)
PSLETQPPTSVQQARDDKIIF

SEQ ID NO: 300642 - protein, 15 aa, Homo sapiens
  CDR3 for beta chain variable domain of TCR clone 150321 (TRBV24-1, TRBJ2-4)
CATSDPRDRANIQYF

SEQ ID NO: 300643 - protein, 12 aa, Homo sapiens
  CDR3 for alpha chain variable domain of TCR clone 150322 (TRAV13-1, TRAJ21)
CAAKEGFNNFYF

SEQ ID NO: 300644 - protein, 15 aa, Homo sapiens
  CDR3 for beta chain variable domain of TCR clone 150322 (TRBV27, TRBJ2-1)
CASSNGGGSSNEQFF

SEQ ID NO: 300645 - protein, 13 aa, Homo sapiens
  CDR3 for alpha chain variable domain of TCR clone 150323 (TRAV12-2, TRAJ52)
CAGSGTSYGKLTF

SEQ ID NO: 300646 - protein, 17 aa, Homo sapiens
  CDR3 for beta chain variable domain of TCR clone 150323 (TRBV11-2, TRBJ2-1)
CASSLYPPGVEYNEQFF

SEQ ID NO: 300647 - protein, 13 aa, Homo sapiens
  CDR3 for alpha chain variable domain of TCR clone 150324 (TRAV27, TRAJ57)
CRSAQGGSEKLVF

SEQ ID NO: 300648 - protein, 15 aa, Homo sapiens
  CDR3 for beta chain variable domain of TCR clone 150324 (TRBV10-3, TRBJ2-3)
CAISVLGQETDTQYF

SEQ ID NO: 300649 - protein, 10 aa, Homo sapiens
  CDR3 for alpha chain variable domain of TCR clone 150325 (TRAV23/DV6, TRAJ31)
CARGGARLMF

SEQ ID NO: 300650 - protein, 16 aa, Homo sapiens
  CDR3 for beta chain variable domain of TCR clone 150325 (TRBV7-8, TRBJ2-6)
CASRVGDSSGANVLTF

SEQ ID NO: 300651 - protein, 13 aa, Homo sapiens
  CDR3 for alpha chain variable domain of TCR clone 150326 (TRAV12-1, TRAJ7)
CVVNMRGNNRLAF

SEQ ID NO: 300652 - protein, 14 aa, Homo sapiens
  CDR3 for beta chain variable domain of TCR clone 150326 (TRBV19, TRBJ2-1)
CASPTFVLSGEQFF

SEQ ID NO: 300653 - protein, 12 aa, Homo sapiens
  CDR3 for alpha chain variable domain of TCR clone 150327 (TRAV21, TRAJ49)
YAVNDGGNQFYF

SEQ ID NO: 300654 - protein, 14 aa, Homo sapiens
  CDR3 for beta chain variable domain of TCR clone 150327 (TRBV18, TRBJ2-7)
CASSPRGGSYEQYF

SEQ ID NO: 300655 - protein, 16 aa, Homo sapiens
  CDR3 for alpha chain variable domain of TCR clone 150328 (TRAV3, TRAJ27)
CAVRDTQGTNAGKSTF

SEQ ID NO: 300656 - protein, 17 aa, Homo sapiens
  CDR3 for beta chain variable domain of TCR clone 150328 (TRBV4-1, TRBJ2-7)
CASSQGRGLQTSYEQYF

SEQ ID NO: 300657 - protein, 12 aa, Homo sapiens
  CDR3 for alpha chain variable domain of TCR clone 150329 (TRAV2, TRAJ10)
CASTGGGNKLTF

SEQ ID NO: 300658 - protein, 14 aa, Homo sapiens
  CDR3 for beta chain variable domain of TCR clone 150329 (TRBV7-2, TRBJ2-2)
CASRGQGAGGELFF

SEQ ID NO: 300659 - protein, 15 aa, Homo sapiens
  CDR3 for alpha chain variable domain of TCR clone 150330 (TRAV21, TRAJ53)
CATLNSGGSHYKLTF

SEQ ID NO: 300660 - protein, 20 aa, Homo sapiens
  CDR3 for beta chain variable domain of TCR clone 150330 (TRBV7-8, TRBJ2-2)
CASSHLFPGPTIHITGELFF

SEQ ID NO: 300661 - protein, 15 aa, Homo sapiens
  CDR3 for alpha chain variable domain of TCR clone 150331 (TRAV3, TRAJ4)
CAVRDGTGGYNKLIF

SEQ ID NO: 300662 - protein, 13 aa, Homo sapiens
  CDR3 for beta chain variable domain of TCR clone 150331 (TRBV10-3, TRBJ2-7)
CASQLAVNYEQYF

SEQ ID NO: 300663 - protein, 16 aa, Homo sapiens
  CDR3 for alpha chain variable domain of TCR clone 150332 (TRAV36/DV7, TRAJ30)
CAVETYGLDRDDKIIF

SEQ ID NO: 300664 - protein, 17 aa, Homo sapiens
  CDR3 for beta chain variable domain of TCR clone 150332 (TRBV25-1, TRBJ2-7)
CASSDARVVFSSYEQYF

SEQ ID NO: 300665 - protein, 14 aa, Homo sapiens
  CDR3 for alpha chain variable domain of TCR clone 150333 (TRAV2, TRAJ37)
CAVDFTINTVKLIF

SEQ ID NO: 300666 - protein, 15 aa, Homo sapiens
  CDR3 for beta chain variable domain of TCR clone 150333 (TRBV3-1, TRBJ2-2)
CARSQGSGTFGELFF

SEQ ID NO: 300667 - protein, 15 aa, Homo sapiens
  CDR3 for alpha chain variable domain of TCR clone 150334 (TRAV12-2, TRAJ43)
CAFDMRFGAGTRLTV

SEQ ID NO: 300668 - protein, 17 aa, Homo sapiens
  CDR3 for beta chain variable domain of TCR clone 150334 (TRBV20-1, TRBJ2-7)
CSARDPEGDHREYEQYF

SEQ ID NO: 300669 - protein, 17 aa, Homo sapiens
  CDR3 for alpha chain variable domain of TCR clone 150335 (TRAV35, TRAJ28)
CAGLQVYSGAGSYQLTF

SEQ ID NO: 300670 - protein, 15 aa, Homo sapiens
  CDR3 for beta chain variable domain of TCR clone 150335 (TRBV2, TRBJ1-2)
CASNEIGGANYGYTF

SEQ ID NO: 300671 - protein, 12 aa, Homo sapiens
  CDR3 for alpha chain variable domain of TCR clone 150336 (TRAV38-2/DV8, TRAJ48)
RALLSGKETKTF

SEQ ID NO: 300672 - protein, 15 aa, Homo sapiens
  CDR3 for beta chain variable domain of TCR clone 150336 (TRBV6-1, TRBJ2-1)
CASSELRGQYNEQFF

SEQ ID NO: 300673 - protein, 14 aa, Homo sapiens
  CDR3 for alpha chain variable domain of TCR clone 150337 (TRAV1-1, TRAJ27)
CAVISNTNAGKSTS

SEQ ID NO: 300674 - protein, 15 aa, Homo sapiens
  CDR3 for beta chain variable domain of TCR clone 150337 (TRBV7-2, TRBJ2-1)
CASSSGLAGGNEQFF

SEQ ID NO: 300675 - protein, 14 aa, Homo sapiens
  CDR3 for alpha chain variable domain of TCR clone 150338 (TRAV2, TRAJ37)
CAVDFTSNTGKLIF

SEQ ID NO: 300676 - protein, 17 aa, Homo sapiens
  CDR3 for beta chain variable domain of TCR clone 150338 (TRBV20-1, TRBJ1-5)
CSASLSPGQGGNQPQHF

SEQ ID NO: 300677 - protein, 13 aa, Homo sapiens
  CDR3 for alpha chain variable domain of TCR clone 150339 (TRAV8-4, TRAJ9)
CAVSDTGGFKTIF

SEQ ID NO: 300678 - protein, 14 aa, Homo sapiens
  CDR3 for beta chain variable domain of TCR clone 150339 (TRBV7-2, TRBJ2-7)
CASRSQGAAYEQYF

SEQ ID NO: 300679 - protein, 15 aa, Homo sapiens
  CDR3 for alpha chain variable domain of TCR clone 150340 (TRAV8-3, TRAJ45)
CASPYSGGGADGLTF

SEQ ID NO: 300680 - protein, 15 aa, Homo sapiens
  CDR3 for beta chain variable domain of TCR clone 150340 (TRBV7-8, TRBJ2-1)
CASSLAGGLYNEQFF

SEQ ID NO: 300681 - protein, 13 aa, Homo sapiens
  CDR3 for alpha chain variable domain of TCR clone 150341 (TRAV12-3, TRAJ40)
CAMSDSGTYKYIF

SEQ ID NO: 300682 - protein, 15 aa, Homo sapiens
  CDR3 for beta chain variable domain of TCR clone 150341 (TRBV2, TRBJ2-1)
CASSEEREGDNEQFF

SEQ ID NO: 300683 - protein, 13 aa, Homo sapiens
  CDR3 for alpha chain variable domain of TCR clone 150342 (TRAV38-2/DV8, TRAJ34)
CAYRTRNTDKLIF

SEQ ID NO: 300684 - protein, 15 aa, Homo sapiens
  CDR3 for beta chain variable domain of TCR clone 150342 (TRBV6-1, TRBJ2-1)
CASSELRGQYNEQFF

SEQ ID NO: 300685 - protein, 12 aa, Homo sapiens
  CDR3 for alpha chain variable domain of TCR clone 150343 (TRAV8-3, TRAJ26)
CAGDNYGQNFVF

SEQ ID NO: 300686 - protein, 14 aa, Homo sapiens
  CDR3 for beta chain variable domain of TCR clone 150343 (TRBV7-7, TRBJ2-2)
CATRQDSDTGELFF

SEQ ID NO: 300687 - protein, 10 aa, Homo sapiens
  CDR3 for alpha chain variable domain of TCR clone 150344 (TRAV1-2, TRAJ20)
CALNDYKLSF

SEQ ID NO: 300688 - protein, 17 aa, Homo sapiens
  CDR3 for beta chain variable domain of TCR clone 150344 (TRBV11-2, TRBJ2-4)
CASSSVGPGGHRNMQYF

SEQ ID NO: 300689 - protein, 15 aa, Homo sapiens
  CDR3 for alpha chain variable domain of TCR clone 150345 (TRAV3, TRAJ22)
CAVRDRSGSARQLTF

SEQ ID NO: 300690 - protein, 13 aa, Homo sapiens
  CDR3 for beta chain variable domain of TCR clone 150345 (TRBV20-1, TRBJ1-1)
CSARVCGNTEAFF

SEQ ID NO: 300691 - protein, 14 aa, Homo sapiens
  CDR3 for alpha chain variable domain of TCR clone 150346 (TRAV12-2, TRAJ13)
CAVKKTGGYQKVTF

SEQ ID NO: 300692 - protein, 14 aa, Homo sapiens
  CDR3 for beta chain variable domain of TCR clone 150346 (TRBV20-1, TRBJ1-5)
CSARDDRGNQPQHF

SEQ ID NO: 300693 - protein, 16 aa, Homo sapiens
  CDR3 for alpha chain variable domain of TCR clone 150347 (TRAV12-3, TRAJ53)
CAMSPGSGGSNYKLTF

SEQ ID NO: 300694 - protein, 17 aa, Homo sapiens
  CDR3 for beta chain variable domain of TCR clone 150347 (TRBV28, TRBJ2-5)
CASSTPGGDALQETQYL

SEQ ID NO: 300695 - protein, 19 aa, Homo sapiens
  CDR3 for alpha chain variable domain of TCR clone 150348 (TRAV14/DV4, TRAJ53)
CISVQWGLGGGGSNYKLTF

SEQ ID NO: 300696 - protein, 14 aa, Homo sapiens
  CDR3 for beta chain variable domain of TCR clone 150348 (TRBV7-2, TRBJ1-1)
CASSFLTGTTEAFF

SEQ ID NO: 300697 - protein, 12 aa, Homo sapiens
  CDR3 for alpha chain variable domain of TCR clone 150349 (TRAV23/DV6, TRAJ30)
CAASKGDAKIIF

SEQ ID NO: 300698 - protein, 13 aa, Homo sapiens
  CDR3 for beta chain variable domain of TCR clone 150349 (TRBV19, TRBJ1-2)
CASSVPGQDGYTF

SEQ ID NO: 300699 - protein, 11 aa, Homo sapiens
  CDR3 for alpha chain variable domain of TCR clone 150350 (TRAV1-1, TRAJ16)
CAAGDGQKLLF

SEQ ID NO: 300700 - protein, 15 aa, Homo sapiens
  CDR3 for beta chain variable domain of TCR clone 150350 (TRBV28, TRBJ1-2)
CASIQQGSDDYGYTF

SEQ ID NO: 300701 - protein, 15 aa, Homo sapiens
  CDR3 for alpha chain variable domain of TCR clone 150351 (TRAV12-1, TRAJ5)
CVVNMLETGRRALTF

SEQ ID NO: 300702 - protein, 15 aa, Homo sapiens
  CDR3 for beta chain variable domain of TCR clone 150351 (TRBV2, TRBJ2-1)
CASSELAGSYNEQFF

SEQ ID NO: 300703 - protein, 14 aa, Homo sapiens
  CDR3 for alpha chain variable domain of TCR clone 150352 (TRAV20, TRAJ20)
CAVRRGYNDYKLSF

SEQ ID NO: 300704 - protein, 16 aa, Homo sapiens
  CDR3 for beta chain variable domain of TCR clone 150352 (TRBV11-3, TRBJ2-5)
CASSSVVAGSTETQYF

SEQ ID NO: 300705 - protein, 13 aa, Homo sapiens
  CDR3 for alpha chain variable domain of TCR clone 150353 (TRAV21, TRAJ57)
CAVTQGGSEKLVF

SEQ ID NO: 300706 - protein, 15 aa, Homo sapiens
  CDR3 for beta chain variable domain of TCR clone 150353 (TRBV5-1, TRBJ1-1)
CASSPTTGTNTEAFF

SEQ ID NO: 300707 - protein, 15 aa, Homo sapiens
  CDR3 for alpha chain variable domain of TCR clone 150354 (TRAV3, TRAJ22)
CAVRDRGGYARQLAF

SEQ ID NO: 300708 - protein, 17 aa, Homo sapiens
  CDR3 for beta chain variable domain of TCR clone 150354 (TRBV13, TRBJ2-3)
CASSLSRVAGGRNTQYF

SEQ ID NO: 300709 - protein, 11 aa, Homo sapiens
  CDR3 for alpha chain variable domain of TCR clone 150355 (TRAV3, TRAJ13)
CAVTSYQKFTF

SEQ ID NO: 300710 - protein, 15 aa, Homo sapiens
  CDR3 for beta chain variable domain of TCR clone 150355 (TRBV7-9, TRBJ2-7)
CASSSSGLAVYEQYF

SEQ ID NO: 300711 - protein, 12 aa, Homo sapiens
  CDR3 for alpha chain variable domain of TCR clone 150356 (TRAV13-2, TRAJ23)
CAERHRGGKLIF

SEQ ID NO: 300712 - protein, 19 aa, Homo sapiens
  CDR3 for beta chain variable domain of TCR clone 150356 (TRBV19, TRBJ2-5)
CASSIGQVTDLFLGETQYF

SEQ ID NO: 300713 - protein, 14 aa, Homo sapiens
  CDR3 for alpha chain variable domain of TCR clone 150357 (TRAV12-3, TRAJ10)
SHLPLTGGGNKLTF

SEQ ID NO: 300714 - protein, 13 aa, Homo sapiens
  CDR3 for beta chain variable domain of TCR clone 150357 (TRBV29-1, TRBJ2-5)
CSVGATAQGTQYF

SEQ ID NO: 300715 - protein, 12 aa, Homo sapiens
  CDR3 for alpha chain variable domain of TCR clone 150358 (TRAV13-2, TRAJ8)
CAPWLGFQKLVF

SEQ ID NO: 300716 - protein, 15 aa, Homo sapiens
  CDR3 for beta chain variable domain of TCR clone 150358 (TRBV12-4, TRBJ2-5)
CASSLSRAFQETQYF

SEQ ID NO: 300717 - protein, 15 aa, Homo sapiens
  CDR3 for alpha chain variable domain of TCR clone 150359 (TRAV8-3, TRAJ15)
CAVGAPNQAGSALIF

SEQ ID NO: 300718 - protein, 14 aa, Homo sapiens
  CDR3 for beta chain variable domain of TCR clone 150359 (TRBV20-1, TRBJ2-1)
CSPNDEASYNEQFF

SEQ ID NO: 300719 - protein, 15 aa, Homo sapiens
  CDR3 for alpha chain variable domain of TCR clone 150360 (TRAV8-2, TRAJ24)
CVLSDRTDSWGKLQF

SEQ ID NO: 300720 - protein, 13 aa, Homo sapiens
  CDR3 for beta chain variable domain of TCR clone 150360 (TRBV7-9, TRBJ1-2)
CASSLKQNYGYTF

SEQ ID NO: 300721 - protein, 14 aa, Homo sapiens
  CDR3 for alpha chain variable domain of TCR clone 150361 (TRAV1-2, TRAJ16)
CAVNRFSDGQKRLF

SEQ ID NO: 300722 - protein, 14 aa, Homo sapiens
  CDR3 for beta chain variable domain of TCR clone 150361 (TRBV7-3, TRBJ1-1)
CASSLGTGYTEAFF

SEQ ID NO: 300723 - protein, 12 aa, Homo sapiens
  CDR3 for alpha chain variable domain of TCR clone 150362 (TRAV12-3, TRAJ17)
CAMTLTGNDLTF

SEQ ID NO: 300724 - protein, 15 aa, Homo sapiens
  CDR3 for beta chain variable domain of TCR clone 150362 (TRBV20-1, TRBJ2-7)
CSARDRVSGMDEQYF

SEQ ID NO: 300725 - protein, 14 aa, Homo sapiens
  CDR3 for alpha chain variable domain of TCR clone 150363 (TRAV1-2, TRAJ16)
CAVNRCSDGQKLLF

SEQ ID NO: 300726 - protein, 16 aa, Homo sapiens
  CDR3 for beta chain variable domain of TCR clone 150363 (TRBV11-2, TRBJ1-2)
CASSLDTGGADYGYTF

SEQ ID NO: 300727 - protein, 10 aa, Homo sapiens
  CDR3 for alpha chain variable domain of TCR clone 150364 (TRAV8-4, TRAJ43)
CAVSADDMRF

SEQ ID NO: 300728 - protein, 16 aa, Homo sapiens
  CDR3 for beta chain variable domain of TCR clone 150364 (TRBV5-1, TRBJ2-2)
CASSLWDTTNTGELFF

SEQ ID NO: 300729 - protein, 14 aa, Homo sapiens
  CDR3 for alpha chain variable domain of TCR clone 150365 (TRAV12-1, TRAJ27)
CVVNGGTNAGKSTF

SEQ ID NO: 300730 - protein, 15 aa, Homo sapiens
  CDR3 for beta chain variable domain of TCR clone 150365 (TRBV6-3, TRBJ2-7)
CASSSPGTVFYEQYF

SEQ ID NO: 300731 - protein, 12 aa, Homo sapiens
  CDR3 for alpha chain variable domain of TCR clone 150366 (TRAV3, TRAJ27)
CAVRDKAGKSTF

SEQ ID NO: 300732 - protein, 16 aa, Homo sapiens
  CDR3 for beta chain variable domain of TCR clone 150366 (TRBV7-7, TRBJ2-1)
CASSLASGTSYNEQFF

SEQ ID NO: 300733 - protein, 13 aa, Homo sapiens
  CDR3 for alpha chain variable domain of TCR clone 150367 (TRAV21, TRAJ27)
CAARPGNAGKPTF

SEQ ID NO: 300734 - protein, 16 aa, Homo sapiens
  CDR3 for beta chain variable domain of TCR clone 150367 (TRBV13, TRBJ2-2)
CASSPRTGEHTGELFF

SEQ ID NO: 300735 - protein, 23 aa, Homo sapiens
  CDR3 for alpha chain variable domain of TCR clone 150368 (TRAV26-1, TRAJ38)
CIAGNAGNNHIQNPDPAVYQLRD

SEQ ID NO: 300736 - protein, 13 aa, Homo sapiens
  CDR3 for beta chain variable domain of TCR clone 150368 (TRBV20-1, TRBJ1-1)
CSARGGGSTEAFF

SEQ ID NO: 300737 - protein, 15 aa, Homo sapiens
  CDR3 for alpha chain variable domain of TCR clone 150369 (TRAV3, TRAJ17)
CAVSPKEAAGNKLTF

SEQ ID NO: 300738 - protein, 16 aa, Homo sapiens
  CDR3 for beta chain variable domain of TCR clone 150369 (TRBV28, TRBJ2-3)
CASSFFRDPRLGTQYF

SEQ ID NO: 300739 - protein, 13 aa, Homo sapiens
  CDR3 for alpha chain variable domain of TCR clone 150370 (TRAV21, TRAJ27)
CAARPGNAGKSTH

SEQ ID NO: 300740 - protein, 20 aa, Homo sapiens
  CDR3 for beta chain variable domain of TCR clone 150370 (TRBV7-8, TRBJ2-2)
CASSHLFPGPTIHITGELFF

SEQ ID NO: 300741 - protein, 12 aa, Homo sapiens
  CDR3 for alpha chain variable domain of TCR clone 150371 (TRAV12-3, TRAJ40)
CAMRSGTSKYII

SEQ ID NO: 300742 - protein, 20 aa, Homo sapiens
  CDR3 for beta chain variable domain of TCR clone 150371 (TRBV7-8, TRBJ2-2)
WASSHLFPGPTIHITGELFF

SEQ ID NO: 300743 - protein, 17 aa, Homo sapiens
  CDR3 for alpha chain variable domain of TCR clone 150372 (TRAV3, TRAJ42)
CAVRDRDYGGSHGKLIL

SEQ ID NO: 300744 - protein, 15 aa, Homo sapiens
  CDR3 for beta chain variable domain of TCR clone 150372 (TRBV6-6, TRBJ2-7)
CASSYSYGGSYEQYF

SEQ ID NO: 300745 - protein, 17 aa, Homo sapiens
  CDR3 for alpha chain variable domain of TCR clone 150373 (TRAV8-6, TRAJ58)
CAVSSWVGETSGTRSTF

SEQ ID NO: 300746 - protein, 14 aa, Homo sapiens
  CDR3 for beta chain variable domain of TCR clone 150373 (TRBV4-2, TRBJ2-1)
CASGLDRAYNEQFF

SEQ ID NO: 300747 - protein, 22 aa, Homo sapiens
  CDR3 for alpha chain variable domain of TCR clone 150374 (TRAV27, TRAJ38)
CAARRNAGNNHIQNPDPAVYQL

SEQ ID NO: 300748 - protein, 13 aa, Homo sapiens
  CDR3 for beta chain variable domain of TCR clone 150374 (TRBV12-5, TRBJ2-3)
CASGDRQTDTQYF

SEQ ID NO: 300749 - protein, 17 aa, Homo sapiens
  CDR3 for alpha chain variable domain of TCR clone 150375 (TRAV13-1, TRAJ52)
CAASSGAGGTSYGKLTF

SEQ ID NO: 300750 - protein, 14 aa, Homo sapiens
  CDR3 for beta chain variable domain of TCR clone 150375 (TRBV18, TRBJ2-7)
CASSPRGGAYEQYF

SEQ ID NO: 300751 - protein, 12 aa, Homo sapiens
  CDR3 for alpha chain variable domain of TCR clone 150376 (TRAV12-3, TRAJ17)
CAMRLTGNKLTF

SEQ ID NO: 300752 - protein, 11 aa, Homo sapiens
  CDR3 for beta chain variable domain of TCR clone 150376 (TRBV11-2, TRBJ1-1)
CASSINTGAFF

SEQ ID NO: 300753 - protein, 14 aa, Homo sapiens
  CDR3 for alpha chain variable domain of TCR clone 150377 (TRAV12-3, TRAJ6)
CAMSATGGSYIPTF

SEQ ID NO: 300754 - protein, 13 aa, Homo sapiens
  CDR3 for beta chain variable domain of TCR clone 150377 (TRBV5-1, TRBJ2-2)
CASTFPRPGELFF

SEQ ID NO: 300755 - protein, 14 aa, Homo sapiens
  CDR3 for alpha chain variable domain of TCR clone 150378 (TRAV17, TRAJ22)
CATVLSGSARQLTF

SEQ ID NO: 300756 - protein, 14 aa, Homo sapiens
  CDR3 for beta chain variable domain of TCR clone 150378 (TRBV19, TRBJ2-1)
CASPTFVLSGEHFF

SEQ ID NO: 300757 - protein, 15 aa, Homo sapiens
  CDR3 for alpha chain variable domain of TCR clone 150379 (TRAV3, TRAJ17)
CAVSPKEAAGNKLTF

SEQ ID NO: 300758 - protein, 12 aa, Homo sapiens
  CDR3 for beta chain variable domain of TCR clone 150379 (TRBV7-9, TRBJ1-6)
CASSIMTSPLHF

SEQ ID NO: 300759 - protein, 15 aa, Homo sapiens
  CDR3 for alpha chain variable domain of TCR clone 150380 (TRAV1-1, TRAJ4)
CAVRAFSGGYNKLIF

SEQ ID NO: 300760 - protein, 17 aa, Homo sapiens
  CDR3 for beta chain variable domain of TCR clone 150380 (TRBV20-1, TRBJ2-2)
CSASGSGQGGLTGELFF

SEQ ID NO: 300761 - protein, 13 aa, Homo sapiens
  CDR3 for alpha chain variable domain of TCR clone 150381 (TRAV1-1, TRAJ31)
CASYLNNNARLMF

SEQ ID NO: 300762 - protein, 13 aa, Homo sapiens
  CDR3 for beta chain variable domain of TCR clone 150381 (TRBV15, TRBJ1-6)
CATPGGLNSPLHF

SEQ ID NO: 300763 - protein, 13 aa, Homo sapiens
  CDR3 for alpha chain variable domain of TCR clone 150382 (TRAV8-3, TRAJ36)
CAVGATGANTLFF

SEQ ID NO: 300764 - protein, 15 aa, Homo sapiens
  CDR3 for beta chain variable domain of TCR clone 150382 (TRBV5-4, TRBJ1-1)
CASSSLGWANTEAFF

SEQ ID NO: 300765 - protein, 12 aa, Homo sapiens
  CDR3 for alpha chain variable domain of TCR clone 150383 (TRAV17, TRAJ12)
CATLRSSYKLIF

SEQ ID NO: 300766 - protein, 13 aa, Homo sapiens
  CDR3 for beta chain variable domain of TCR clone 150383 (TRBV2, TRBJ1-4)
CACSELGVEKLFF

SEQ ID NO: 300767 - protein, 14 aa, Homo sapiens
  CDR3 for alpha chain variable domain of TCR clone 150384 (TRAV8-3, TRAJ4)
CAVGAAGGYNKLIC

SEQ ID NO: 300768 - protein, 15 aa, Homo sapiens
  CDR3 for beta chain variable domain of TCR clone 150384 (TRBV5-1, TRBJ2-1)
CASSPPRAPYNEQFF

SEQ ID NO: 300769 - protein, 16 aa, Homo sapiens
  CDR3 for alpha chain variable domain of TCR clone 150385 (TRAV21, TRAJ45)
CAVSWGSGGGADGRTF

SEQ ID NO: 300770 - protein, 13 aa, Homo sapiens
  CDR3 for beta chain variable domain of TCR clone 150385 (TRBV11-2, TRBJ2-2)
CASGRDREEELFF

SEQ ID NO: 300771 - protein, 15 aa, Homo sapiens
  CDR3 for alpha chain variable domain of TCR clone 150386 (TRAV3, TRAJ5)
CAVRDLDTCRRALTF

SEQ ID NO: 300772 - protein, 15 aa, Homo sapiens
  CDR3 for beta chain variable domain of TCR clone 150386 (TRBV6-3, TRBJ2-2)
CASSFLATLTGELFF

SEQ ID NO: 300773 - protein, 15 aa, Homo sapiens
  CDR3 for alpha chain variable domain of TCR clone 150387 (TRAV17, TRAJ4)
CATGTWSGGYNKLIF

SEQ ID NO: 300774 - protein, 15 aa, Homo sapiens
  CDR3 for beta chain variable domain of TCR clone 150387 (TRBV20-1, TRBJ2-7)
CSVRDRVSGMDEQYF

SEQ ID NO: 300775 - protein, 18 aa, Homo sapiens
  CDR3 for alpha chain variable domain of TCR clone 150388 (TRAV4, TRAJ10)
CLVGDIPLLTGGGNKLTF

SEQ ID NO: 300776 - protein, 14 aa, Homo sapiens
  CDR3 for beta chain variable domain of TCR clone 150388 (TRBV12-5, TRBJ2-5)
CASGSRTHQETQYF

SEQ ID NO: 300777 - protein, 13 aa, Homo sapiens
  CDR3 for alpha chain variable domain of TCR clone 150389 (TRAV1-1, TRAJ7)
CAVSPLWEQQTRF

SEQ ID NO: 300778 - protein, 15 aa, Homo sapiens
  CDR3 for beta chain variable domain of TCR clone 150389 (TRBV5-1, TRBJ2-1)
CASSLVANSYNEQFF

SEQ ID NO: 300779 - protein, 13 aa, Homo sapiens
  CDR3 for alpha chain variable domain of TCR clone 150390 (TRAV13-2, TRAJ48)
FAEMDFGNEKLTF

SEQ ID NO: 300780 - protein, 15 aa, Homo sapiens
  CDR3 for beta chain variable domain of TCR clone 150390 (TRBV27, TRBJ2-5)
CASSLYPRGGETQYF

SEQ ID NO: 300781 - protein, 13 aa, Homo sapiens
  CDR3 for alpha chain variable domain of TCR clone 150391 (TRAV30, TRAJ24)
CGKVTDSWGKLQF

SEQ ID NO: 300782 - protein, 15 aa, Homo sapiens
  CDR3 for beta chain variable domain of TCR clone 150391 (TRBV25-1, TRBJ1-4)
CASSPGDSTNEKLFF

SEQ ID NO: 300783 - protein, 14 aa, Homo sapiens
  CDR3 for alpha chain variable domain of TCR clone 150392 (TRAV12-2, TRAJ40)
CAVKIPSGTYRYIF

SEQ ID NO: 300784 - protein, 17 aa, Homo sapiens
  CDR3 for beta chain variable domain of TCR clone 150392 (TRBV7-8, TRBJ2-6)
CASSAGAGGAGANVLTF

SEQ ID NO: 300785 - protein, 11 aa, Homo sapiens
  CDR3 for alpha chain variable domain of TCR clone 150393 (TRAV3, TRAJ21)
CAVGNFNKFYF

SEQ ID NO: 300786 - protein, 12 aa, Homo sapiens
  CDR3 for beta chain variable domain of TCR clone 150393 (TRBV29-1, TRBJ2-3)
CSVTGGGDTQYF

SEQ ID NO: 300787 - protein, 11 aa, Homo sapiens
  CDR3 for alpha chain variable domain of TCR clone 150394 (TRAV13-1, TRAJ43)
CAASGANDMRL

SEQ ID NO: 300788 - protein, 16 aa, Homo sapiens
  CDR3 for beta chain variable domain of TCR clone 150394 (TRBV5-1, TRBJ2-3)
CASSLGLAVYTDTQYF

SEQ ID NO: 300789 - protein, 14 aa, Homo sapiens
  CDR3 for alpha chain variable domain of TCR clone 150395 (TRAV1-2, TRAJ16)
CAVNRFSDGQELLF

SEQ ID NO: 300790 - protein, 13 aa, Homo sapiens
  CDR3 for beta chain variable domain of TCR clone 150395 (TRBV4-1, TRBJ2-1)
CASSQAGGDEQFF

SEQ ID NO: 300791 - protein, 13 aa, Homo sapiens
  CDR3 for alpha chain variable domain of TCR clone 150396 (TRAV12-3, TRAJ54)
CAMTLQGAQKLVF

SEQ ID NO: 300792 - protein, 14 aa, Homo sapiens
  CDR3 for beta chain variable domain of TCR clone 150396 (TRBV4-1, TRBJ2-2)
CASSQAVNSGELFF

SEQ ID NO: 300793 - protein, 11 aa, Homo sapiens
  CDR3 for alpha chain variable domain of TCR clone 150397 (TRAV1-2, TRAJ40)
CAVPGTYKYIF

SEQ ID NO: 300794 - protein, 14 aa, Homo sapiens
  CDR3 for beta chain variable domain of TCR clone 150397 (TRBV7-2, TRBJ2-1)
CASSRGGARNEQFF

SEQ ID NO: 300795 - protein, 11 aa, Homo sapiens
  CDR3 for alpha chain variable domain of TCR clone 150398 (TRAV12-1, TRAJ30)
CVVNGQDENIF

SEQ ID NO: 300796 - protein, 15 aa, Homo sapiens
  CDR3 for beta chain variable domain of TCR clone 150398 (TRBV28, TRBJ2-5)
CASSSGRTIQETQYF

SEQ ID NO: 300797 - protein, 14 aa, Homo sapiens
  CDR3 for alpha chain variable domain of TCR clone 150399 (TRAV23/DV6, TRAJ8)
CAASKATGFQKLVF

SEQ ID NO: 300798 - protein, 15 aa, Homo sapiens
  CDR3 for beta chain variable domain of TCR clone 150399 (TRBV28, TRBJ2-3)
RASSPDRQGANTQYF

SEQ ID NO: 300799 - protein, 13 aa, Homo sapiens
  CDR3 for alpha chain variable domain of TCR clone 150400 (TRAV8-4, TRAJ31)
CAVSDSGNARLMF

SEQ ID NO: 300800 - protein, 16 aa, Homo sapiens
  CDR3 for beta chain variable domain of TCR clone 150400 (TRBV4-1, TRBJ2-5)
CASSHYPPGTEENQYF

SEQ ID NO: 300801 - protein, 14 aa, Homo sapiens
  CDR3 for alpha chain variable domain of TCR clone 150401 (TRAV2, TRAJ9)
CAVDPNTGGFKTIF

SEQ ID NO: 300802 - protein, 13 aa, Homo sapiens
  CDR3 for beta chain variable domain of TCR clone 150401 (TRBV20-1, TRBJ2-1)
CSASTGTYNEQFF

SEQ ID NO: 300803 - protein, 11 aa, Homo sapiens
  CDR3 for alpha chain variable domain of TCR clone 150402 (TRAV35, TRAJ30)
CAGARDDKIIF

SEQ ID NO: 300804 - protein, 14 aa, Homo sapiens
  CDR3 for beta chain variable domain of TCR clone 150402 (TRBV15, TRBJ2-5)
CATSGDRGQETQYF

SEQ ID NO: 300805 - protein, 12 aa, Homo sapiens
  CDR3 for alpha chain variable domain of TCR clone 150403 (TRAV8-3, TRAJ26)
CAGDNYGQNFVF

SEQ ID NO: 300806 - protein, 12 aa, Homo sapiens
  CDR3 for beta chain variable domain of TCR clone 150403 (TRBV11-2, TRBJ2-1)
WASSPGNNEQFF

SEQ ID NO: 300807 - protein, 16 aa, Homo sapiens
  CDR3 for alpha chain variable domain of TCR clone 150404 (TRAV3, TRAJ8)
CAVRDYPNTGFQKLVF

SEQ ID NO: 300808 - protein, 16 aa, Homo sapiens
  CDR3 for beta chain variable domain of TCR clone 150404 (TRBV12-5, TRBJ2-5)
CASGPRTSGNQETQYF

SEQ ID NO: 300809 - protein, 14 aa, Homo sapiens
  CDR3 for alpha chain variable domain of TCR clone 150405 (TRAV21, TRAJ40)
CAVRRTSGTYKYIF

SEQ ID NO: 300810 - protein, 16 aa, Homo sapiens
  CDR3 for beta chain variable domain of TCR clone 150405 (TRBV11-3, TRBJ2-5)
CASSLGPTSGTETQYF

SEQ ID NO: 300811 - protein, 14 aa, Homo sapiens
  CDR3 for alpha chain variable domain of TCR clone 150406 (TRAV1-2, TRAJ16)
CAVNRFSDGQKLLF

SEQ ID NO: 300812 - protein, 15 aa, Homo sapiens
  CDR3 for beta chain variable domain of TCR clone 150406 (TRBV9, TRBJ1-6)
CASSVARKGDSPLHF

SEQ ID NO: 300813 - protein, 13 aa, Homo sapiens
  CDR3 for alpha chain variable domain of TCR clone 150407 (TRAV13-1, TRAJ5)
CAASDTGRGALTF

SEQ ID NO: 300814 - protein, 12 aa, Homo sapiens
  CDR3 for beta chain variable domain of TCR clone 150407 (TRBV28, TRBJ2-3)
RASSLYRDTQYF

SEQ ID NO: 300815 - protein, 17 aa, Homo sapiens
  CDR3 for alpha chain variable domain of TCR clone 150408 (TRAV26-2, TRAJ42)
CILRDVGYGGSQGNLIF

SEQ ID NO: 300816 - protein, 16 aa, Homo sapiens
  CDR3 for beta chain variable domain of TCR clone 150408 (TRBV6-5, TRBJ2-1)
CASSESLAGHYNEQFF

SEQ ID NO: 300817 - protein, 14 aa, Homo sapiens
  CDR3 for alpha chain variable domain of TCR clone 150409 (TRAV12-2, TRAJ45)
CALPERGGADGLTF

SEQ ID NO: 300818 - protein, 13 aa, Homo sapiens
  CDR3 for beta chain variable domain of TCR clone 150409 (TRBV24-1, TRBJ2-1)
CATSAGPYNEQFF

SEQ ID NO: 300819 - protein, 12 aa, Homo sapiens
  CDR3 for alpha chain variable domain of TCR clone 150410 (TRAV13-1, TRAJ16)
CAAVSDGQKLLF

SEQ ID NO: 300820 - protein, 16 aa, Homo sapiens
  CDR3 for beta chain variable domain of TCR clone 150410 (TRBV18, TRBJ1-1)
CASSPGVGGRGGEAFF

SEQ ID NO: 300821 - protein, 15 aa, Homo sapiens
  CDR3 for alpha chain variable domain of TCR clone 150411 (TRAV35, TRAJ50)
CAGQLRKTSYDKVIF

SEQ ID NO: 300822 - protein, 13 aa, Homo sapiens
  CDR3 for beta chain variable domain of TCR clone 150411 (TRBV20-1, TRBJ1-2)
CSARDQGAYGYTF

SEQ ID NO: 300823 - protein, 15 aa, Homo sapiens
  CDR3 for alpha chain variable domain of TCR clone 150412 (TRAV12-2, TRAJ53)
CAVNGWGGSNYKLTF

SEQ ID NO: 300824 - protein, 15 aa, Homo sapiens
  CDR3 for beta chain variable domain of TCR clone 150412 (TRBV28, TRBJ2-1)
CASSGLAEVDNEQFF

SEQ ID NO: 300825 - protein, 13 aa, Homo sapiens
  CDR3 for alpha chain variable domain of TCR clone 150413 (TRAV3, TRAJ21)
CAVREPDFSKFYF

SEQ ID NO: 300826 - protein, 12 aa, Homo sapiens
  CDR3 for beta chain variable domain of TCR clone 150413 (TRBV5-1, TRBJ2-4)
LAGEWTKNIQYF

SEQ ID NO: 300827 - protein, 16 aa, Homo sapiens
  CDR3 for alpha chain variable domain of TCR clone 150414 (TRAV16, TRAJ37)
CFLAQNGSSNTGNLIF

SEQ ID NO: 300828 - protein, 17 aa, Homo sapiens
  CDR3 for beta chain variable domain of TCR clone 150414 (TRBV6-5, TRBJ2-7)
CASSYSFWGQGSYEQYF

SEQ ID NO: 300829 - protein, 15 aa, Homo sapiens
  CDR3 for alpha chain variable domain of TCR clone 150415 (TRAV16, TRAJ53)
CALIDSGGSNYKLTF

SEQ ID NO: 300830 - protein, 14 aa, Homo sapiens
  CDR3 for beta chain variable domain of TCR clone 150415 (TRBV19, TRBJ2-1)
CASPTFALSGEQFF

SEQ ID NO: 300831 - protein, 16 aa, Homo sapiens
  CDR3 for alpha chain variable domain of TCR clone 150416 (TRAV20, TRAJ52)
CAVLPDGGTSYGKLTF

SEQ ID NO: 300832 - protein, 12 aa, Homo sapiens
  CDR3 for beta chain variable domain of TCR clone 150416 (TRBV19, TRBJ2-1)
CASSQISNEQYF

SEQ ID NO: 300833 - protein, 11 aa, Homo sapiens
  CDR3 for alpha chain variable domain of TCR clone 150417 (TRAV2, TRAJ33)
CAVDSNYQLIW

SEQ ID NO: 300834 - protein, 14 aa, Homo sapiens
  CDR3 for beta chain variable domain of TCR clone 150417 (TRBV19, TRBJ2-1)
CASGKSTQYNEQFF

SEQ ID NO: 300835 - protein, 12 aa, Homo sapiens
  CDR3 for alpha chain variable domain of TCR clone 150418 (TRAV1-2, TRAJ24)
CAVGGSWGKFQF

SEQ ID NO: 300836 - protein, 15 aa, Homo sapiens
  CDR3 for beta chain variable domain of TCR clone 150418 (TRBV7-8, TRBJ2-7)
CASSLRHFEAYEQYF

SEQ ID NO: 300837 - protein, 13 aa, Homo sapiens
  CDR3 for alpha chain variable domain of TCR clone 150419 (TRAV12-2, TRAJ9)
CAGGNTGGFKTIF

SEQ ID NO: 300838 - protein, 17 aa, Homo sapiens
  CDR3 for beta chain variable domain of TCR clone 150419 (TRBV4-1, TRBJ2-1)
CTSSQGRGGGLYNEQFF

SEQ ID NO: 300839 - protein, 13 aa, Homo sapiens
  CDR3 for alpha chain variable domain of TCR clone 150420 (TRAV12-2, TRAJ24)
CAVSTDSLGKLQF

SEQ ID NO: 300840 - protein, 15 aa, Homo sapiens
  CDR3 for beta chain variable domain of TCR clone 150420 (TRBV7-2, TRBJ2-2)
CASSPTGANTGELFF

SEQ ID NO: 300841 - protein, 14 aa, Homo sapiens
  CDR3 for alpha chain variable domain of TCR clone 150421 (TRAV12-2, TRAJ17)
CAALFKAAGNKLTF

SEQ ID NO: 300842 - protein, 13 aa, Homo sapiens
  CDR3 for beta chain variable domain of TCR clone 150421 (TRBV12-4, TRBJ2-7)
CASSLSGVYEQYF

SEQ ID NO: 300843 - protein, 15 aa, Homo sapiens
  CDR3 for alpha chain variable domain of TCR clone 150422 (TRAV14/DV4, TRAJ26)
CAMREGQNYGQNFVF

SEQ ID NO: 300844 - protein, 13 aa, Homo sapiens
  CDR3 for beta chain variable domain of TCR clone 150422 (TRBV24-1, TRBJ2-2)
CATSDWYTGELFF

SEQ ID NO: 300845 - protein, 22 aa, Homo sapiens
  CDR3 for alpha chain variable domain of TCR clone 150423 (TRAV2, TRAJ26)
CAGSPGRLWSEFCLWSRNQTVC

SEQ ID NO: 300846 - protein, 13 aa, Homo sapiens
  CDR3 for beta chain variable domain of TCR clone 150423 (TRBV7-9, TRBJ1-2)
CASSLKQNYGYTF

SEQ ID NO: 300847 - protein, 15 aa, Homo sapiens
  CDR3 for alpha chain variable domain of TCR clone 150424 (TRAV14/DV4, TRAJ22)
CALSRLSGSARQLTF

SEQ ID NO: 300848 - protein, 15 aa, Homo sapiens
  CDR3 for beta chain variable domain of TCR clone 150424 (TRBV28, TRBJ2-5)
CASSFRQGALETQYF

SEQ ID NO: 300849 - protein, 14 aa, Homo sapiens
  CDR3 for alpha chain variable domain of TCR clone 150425 (TRAV20, TRAJ20)
CAVRRGYNDYKLSF

SEQ ID NO: 300850 - protein, 13 aa, Homo sapiens
  CDR3 for beta chain variable domain of TCR clone 150425 (TRBV19, TRBJ2-5)
CASTETAPETQYF

SEQ ID NO: 300851 - protein, 15 aa, Homo sapiens
  CDR3 for alpha chain variable domain of TCR clone 150426 (TRAV8-4, TRAJ37)
CAVTYGASNTGKLIF

SEQ ID NO: 300852 - protein, 13 aa, Homo sapiens
  CDR3 for beta chain variable domain of TCR clone 150426 (TRBV12-4, TRBJ2-5)
CASSLGGSRTQYF

SEQ ID NO: 300853 - protein, 15 aa, Homo sapiens
  CDR3 for alpha chain variable domain of TCR clone 150427 (TRAV26-1, TRAJ40)
CIVRVTTSGTYKYIF

SEQ ID NO: 300854 - protein, 11 aa, Homo sapiens
  CDR3 for beta chain variable domain of TCR clone 150427 (TRBV12-4, TRBJ2-5)
CASSFQGAQYF

SEQ ID NO: 300855 - protein, 16 aa, Homo sapiens
  CDR3 for alpha chain variable domain of TCR clone 150428 (TRAV26-2, TRAJ45)
CTTASPLGGGADGLTF

SEQ ID NO: 300856 - protein, 20 aa, Homo sapiens
  CDR3 for beta chain variable domain of TCR clone 150428 (TRBV28, TRBJ2-1)
CASTPIGRSTGLAGGNEQFF

SEQ ID NO: 300857 - protein, 15 aa, Homo sapiens
  CDR3 for alpha chain variable domain of TCR clone 150429 (TRAV3, TRAJ22)
CAVRDRGGSARQLTF

SEQ ID NO: 300858 - protein, 14 aa, Homo sapiens
  CDR3 for beta chain variable domain of TCR clone 150429 (TRBV19, TRBJ2-1)
CASPTFVLGGEQFF

SEQ ID NO: 300859 - protein, 14 aa, Homo sapiens
  CDR3 for alpha chain variable domain of TCR clone 150430 (TRAV26-1, TRAJ45)
CIVRVVGGADGLAF

SEQ ID NO: 300860 - protein, 16 aa, Homo sapiens
  CDR3 for beta chain variable domain of TCR clone 150430 (TRBV7-9, TRBJ1-1)
CASSLTQVRSNTEAFF

SEQ ID NO: 300861 - protein, 17 aa, Homo sapiens
  CDR3 for alpha chain variable domain of TCR clone 150431 (TRAV3, TRAJ12)
CAVRDGGRMDSSYKLIF

SEQ ID NO: 300862 - protein, 15 aa, Homo sapiens
  CDR3 for beta chain variable domain of TCR clone 150431 (TRBV4-3, TRBJ1-1)
CTSSQELGRGTEAFF

SEQ ID NO: 300863 - protein, 14 aa, Homo sapiens
  CDR3 for alpha chain variable domain of TCR clone 150432 (TRAV12-1, TRAJ17)
CVVNHKAAGNKLTF

SEQ ID NO: 300864 - protein, 11 aa, Homo sapiens
  CDR3 for beta chain variable domain of TCR clone 150432 (TRBV19, TRBJ1-1)
CASSIGSEAFF

SEQ ID NO: 300865 - protein, 15 aa, Homo sapiens
  CDR3 for alpha chain variable domain of TCR clone 150433 (TRAV13-1, TRAJ9)
CAASTLNTGGFKTIF

SEQ ID NO: 300866 - protein, 15 aa, Homo sapiens
  CDR3 for beta chain variable domain of TCR clone 150433 (TRBV6-5, TRBJ2-4)
FASSLRESPNNIQYF

SEQ ID NO: 300867 - protein, 17 aa, Homo sapiens
  CDR3 for alpha chain variable domain of TCR clone 150434 (TRAV36/DV7, TRAJ52)
CAVAQRAGGTSYGKLTF

SEQ ID NO: 300868 - protein, 13 aa, Homo sapiens
  CDR3 for beta chain variable domain of TCR clone 150434 (TRBV20-1, TRBJ1-6)
CSAPLGVGSPLHI

SEQ ID NO: 300869 - protein, 15 aa, Homo sapiens
  CDR3 for alpha chain variable domain of TCR clone 150435 (TRAV3, TRAJ5)
CAVRDLDTGRRALTF

SEQ ID NO: 300870 - protein, 15 aa, Homo sapiens
  CDR3 for beta chain variable domain of TCR clone 150435 (TRBV10-3, TRBJ2-1)
CAISDVQDRAYEQFF

SEQ ID NO: 300871 - protein, 12 aa, Homo sapiens
  CDR3 for alpha chain variable domain of TCR clone 150436 (TRAV17, TRAJ57)
CATDGGSEKLVF

SEQ ID NO: 300872 - protein, 20 aa, Homo sapiens
  CDR3 for beta chain variable domain of TCR clone 150436 (TRBV7-9, TRBJ2-7)
RGTRPCISVPAASRAYEQYF

SEQ ID NO: 300873 - protein, 13 aa, Homo sapiens
  CDR3 for alpha chain variable domain of TCR clone 150437 (TRAV13-1, TRAJ6)
CARGSGGSYIPTF

SEQ ID NO: 300874 - protein, 15 aa, Homo sapiens
  CDR3 for beta chain variable domain of TCR clone 150437 (TRBV11-3, TRBJ2-3)
CASLKDGREGDTQYF

SEQ ID NO: 300875 - protein, 16 aa, Homo sapiens
  CDR3 for alpha chain variable domain of TCR clone 150438 (TRAV30, TRAJ24)
CGTEIVDADSWGKFQL

SEQ ID NO: 300876 - protein, 13 aa, Homo sapiens
  CDR3 for beta chain variable domain of TCR clone 150438 (TRBV9, TRBJ1-1)
CASSPTGSTEAFF

SEQ ID NO: 300877 - protein, 15 aa, Homo sapiens
  CDR3 for alpha chain variable domain of TCR clone 150439 (TRAV26-1, TRAJ29)
CIVRIEGSGNTPLSF

SEQ ID NO: 300878 - protein, 15 aa, Homo sapiens
  CDR3 for beta chain variable domain of TCR clone 150439 (TRBV7-9, TRBJ1-5)
CASSQGHQPNQPQHF

SEQ ID NO: 300879 - protein, 16 aa, Homo sapiens
  CDR3 for alpha chain variable domain of TCR clone 150440 (TRAV3, TRAJ10)
CAVRDVRAGGGNKLTF

SEQ ID NO: 300880 - protein, 12 aa, Homo sapiens
  CDR3 for beta chain variable domain of TCR clone 150440 (TRBV18, TRBJ1-1)
CASSPGGTEAFF

SEQ ID NO: 300881 - protein, 14 aa, Homo sapiens
  CDR3 for alpha chain variable domain of TCR clone 150441 (TRAV2, TRAJ33)
CAVEDQGSNYQLIW

SEQ ID NO: 300882 - protein, 13 aa, Homo sapiens
  CDR3 for beta chain variable domain of TCR clone 150441 (TRBV7-2, TRBJ1-4)
CASSLAGLEKLFF

SEQ ID NO: 300883 - protein, 12 aa, Homo sapiens
  CDR3 for alpha chain variable domain of TCR clone 150442 (TRAV8-3, TRAJ27)
CAVGAEAGKSTF

SEQ ID NO: 300884 - protein, 14 aa, Homo sapiens
  CDR3 for beta chain variable domain of TCR clone 150442 (TRBV2, TRBJ2-1)
CASRLIVGHEEQFF

SEQ ID NO: 300885 - protein, 12 aa, Homo sapiens
  CDR3 for alpha chain variable domain of TCR clone 150443 (TRAV12-3, TRAJ17)
CAMTLTGNKLTF

SEQ ID NO: 300886 - protein, 15 aa, Homo sapiens
  CDR3 for beta chain variable domain of TCR clone 150443 (TRBV5-1, TRBJ2-5)
CASSLSQGVVATQYF

SEQ ID NO: 300887 - protein, 15 aa, Homo sapiens
  CDR3 for alpha chain variable domain of TCR clone 150444 (TRAV13-1, TRAJ17)
CAASIERAAGNKLTF

SEQ ID NO: 300888 - protein, 12 aa, Homo sapiens
  CDR3 for beta chain variable domain of TCR clone 150444 (TRBV5-7, TRBJ1-1)
CASSLGRGKAFS

SEQ ID NO: 300889 - protein, 11 aa, Homo sapiens
  CDR3 for alpha chain variable domain of TCR clone 150445 (TRAV21, TRAJ31)
CAVRNNARLMF

SEQ ID NO: 300890 - protein, 15 aa, Homo sapiens
  CDR3 for beta chain variable domain of TCR clone 150445 (TRBV7-2, TRBJ2-1)
CASSFQADEYNEQFF

SEQ ID NO: 300891 - protein, 13 aa, Homo sapiens
  CDR3 for alpha chain variable domain of TCR clone 150446 (TRAV27, TRAJ27)
CAGKDTNAGKSTF

SEQ ID NO: 300892 - protein, 16 aa, Homo sapiens
  CDR3 for beta chain variable domain of TCR clone 150446 (TRBV6-5, TRBJ2-7)
CASSSDPTSGFYEQYF

SEQ ID NO: 300893 - protein, 16 aa, Homo sapiens
  CDR3 for alpha chain variable domain of TCR clone 150447 (TRAV30, TRAJ24)
CGTEIVDADSWGKFQF

SEQ ID NO: 300894 - protein, 16 aa, Homo sapiens
  CDR3 for beta chain variable domain of TCR clone 150447 (TRBV4-2, TRBJ1-1)
CASSPSPGRAAPEDFF

SEQ ID NO: 300895 - protein, 17 aa, Homo sapiens
  CDR3 for alpha chain variable domain of TCR clone 150448 (TRAV3, TRAJ42)
CAVRDRDYGGSQGNLIF

SEQ ID NO: 300896 - protein, 18 aa, Homo sapiens
  CDR3 for beta chain variable domain of TCR clone 150448 (TRBV20-1, TRBJ2-3)
CSASGLAGVPGTTDTQYF

SEQ ID NO: 300897 - protein, 14 aa, Homo sapiens
  CDR3 for alpha chain variable domain of TCR clone 150449 (TRAV8-4, TRAJ15)
CAVSPYQAGTALIF

SEQ ID NO: 300898 - protein, 19 aa, Homo sapiens
  CDR3 for beta chain variable domain of TCR clone 150449 (TRBV25-1, TRBJ2-2)
CAILVYRVDRGRKTGELFF

SEQ ID NO: 300899 - protein, 14 aa, Homo sapiens
  CDR3 for alpha chain variable domain of TCR clone 150450 (TRAV1-2, TRAJ8)
CAVREDTGFQKLVF

SEQ ID NO: 300900 - protein, 15 aa, Homo sapiens
  CDR3 for beta chain variable domain of TCR clone 150450 (TRBV4-1, TRBJ2-7)
FASSQNTGRLYEQYF

SEQ ID NO: 300901 - protein, 14 aa, Homo sapiens
  CDR3 for alpha chain variable domain of TCR clone 150451 (TRAV12-3, TRAJ10)
SHLPLTGGGNKLTF

SEQ ID NO: 300902 - protein, 15 aa, Homo sapiens
  CDR3 for beta chain variable domain of TCR clone 150451 (TRBV29-1, TRBJ2-1)
CSVRTSLSSYNEQFF

SEQ ID NO: 300903 - protein, 14 aa, Homo sapiens
  CDR3 for alpha chain variable domain of TCR clone 150452 (TRAV1-2, TRAJ8)
CAVRVDTGFQKLVF

SEQ ID NO: 300904 - protein, 14 aa, Homo sapiens
  CDR3 for beta chain variable domain of TCR clone 150452 (TRBV29-1, TRBJ2-3)
CSAGAGVGADTQYF

SEQ ID NO: 300905 - protein, 12 aa, Homo sapiens
  CDR3 for alpha chain variable domain of TCR clone 150453 (TRAV12-1, TRAJ26)
CVVDNYGQNFVF

SEQ ID NO: 300906 - protein, 14 aa, Homo sapiens
  CDR3 for beta chain variable domain of TCR clone 150453 (TRBV2, TRBJ2-1)
CASSEELAVNRHFF

SEQ ID NO: 300907 - protein, 14 aa, Homo sapiens
  CDR3 for alpha chain variable domain of TCR clone 150454 (TRAV14/DV4, TRAJ15)
CAMRRDQAGTTLIF

SEQ ID NO: 300908 - protein, 11 aa, Homo sapiens
  CDR3 for beta chain variable domain of TCR clone 150454 (TRBV7-2, TRBJ2-7)
CASSSGLWQYF

SEQ ID NO: 300909 - protein, 14 aa, Homo sapiens
  CDR3 for alpha chain variable domain of TCR clone 150455 (TRAV16, TRAJ15)
CALSGPQAGTALLF

SEQ ID NO: 300910 - protein, 17 aa, Homo sapiens
  CDR3 for beta chain variable domain of TCR clone 150455 (TRBV7-8, TRBJ2-6)
CASSAGTGGAGANVLTF

SEQ ID NO: 300911 - protein, 16 aa, Homo sapiens
  CDR3 for alpha chain variable domain of TCR clone 150456 (TRAV23/DV6, TRAJ9)
CAASIGGNTGGFKTIF

SEQ ID NO: 300912 - protein, 16 aa, Homo sapiens
  CDR3 for beta chain variable domain of TCR clone 150456 (TRBV7-2, TRBJ2-5)
CASSLAGSGRGETQYF

SEQ ID NO: 300913 - protein, 14 aa, Homo sapiens
  CDR3 for alpha chain variable domain of TCR clone 150457 (TRAV21, TRAJ53)
CAPPNGGSNYKLTF

SEQ ID NO: 300914 - protein, 18 aa, Homo sapiens
  CDR3 for beta chain variable domain of TCR clone 150457 (TRBV28, TRBJ2-1)
CASSSPSGLAGAIYEQFF

SEQ ID NO: 300915 - protein, 15 aa, Homo sapiens
  CDR3 for alpha chain variable domain of TCR clone 150458 (TRAV26-1, TRAJ29)
CIVRVEGSGNTPLGF

SEQ ID NO: 300916 - protein, 13 aa, Homo sapiens
  CDR3 for beta chain variable domain of TCR clone 150458 (TRBV3-1, TRBJ2-2)
CASLARGSGELFF

SEQ ID NO: 300917 - protein, 14 aa, Homo sapiens
  CDR3 for alpha chain variable domain of TCR clone 150459 (TRAV12-3, TRAJ10)
SHLPLTGGGNELTF

SEQ ID NO: 300918 - protein, 13 aa, Homo sapiens
  CDR3 for beta chain variable domain of TCR clone 150459 (TRBV7-9, TRBJ1-2)
CASSLKQNYGYTF

SEQ ID NO: 300919 - protein, 14 aa, Homo sapiens
  CDR3 for alpha chain variable domain of TCR clone 150460 (TRAV12-2, TRAJ53)
CAVKGGGSNYKLTF

SEQ ID NO: 300920 - protein, 16 aa, Homo sapiens
  CDR3 for beta chain variable domain of TCR clone 150460 (TRBV20-1, TRBJ1-2)
CSASMRQGVANYGYTF

SEQ ID NO: 300921 - protein, 12 aa, Homo sapiens
  CDR3 for alpha chain variable domain of TCR clone 150461 (TRAV38-1, TRAJ47)
CAFETYGNKLVF

SEQ ID NO: 300922 - protein, 15 aa, Homo sapiens
  CDR3 for beta chain variable domain of TCR clone 150461 (TRBV5-7, TRBJ2-7)
CDSSGGRPVPYEQYF

SEQ ID NO: 300923 - protein, 18 aa, Homo sapiens
  CDR3 for alpha chain variable domain of TCR clone 150462 (TRAV21, TRAJ52)
CAVRPSPAGGTSYGKLTF

SEQ ID NO: 300924 - protein, 14 aa, Homo sapiens
  CDR3 for beta chain variable domain of TCR clone 150462 (TRBV7-3, TRBJ2-1)
CASSLGTSAYEQFF

SEQ ID NO: 300925 - protein, 12 aa, Homo sapiens
  CDR3 for alpha chain variable domain of TCR clone 150463 (TRAV26-2, TRAJ47)
CILVEYGNKLVF

SEQ ID NO: 300926 - protein, 15 aa, Homo sapiens
  CDR3 for beta chain variable domain of TCR clone 150463 (TRBV12-4, TRBJ2-5)
CASSPPTGLQETQYF

SEQ ID NO: 300927 - protein, 12 aa, Homo sapiens
  CDR3 for alpha chain variable domain of TCR clone 150464 (TRAV16, TRAJ13)
CITLRGYQKVTF

SEQ ID NO: 300928 - protein, 17 aa, Homo sapiens
  CDR3 for beta chain variable domain of TCR clone 150464 (TRBV28, TRBJ2-5)
CASSRQGGLAGAEAQYF

SEQ ID NO: 300929 - protein, 14 aa, Homo sapiens
  CDR3 for alpha chain variable domain of TCR clone 150465 (TRAV9-2, TRAJ39)
CALYIYNAGNMLTF

SEQ ID NO: 300930 - protein, 14 aa, Homo sapiens
  CDR3 for beta chain variable domain of TCR clone 150465 (TRBV12-5, TRBJ2-5)
CANGSRTHQETQYF

SEQ ID NO: 300931 - protein, 18 aa, Homo sapiens
  CDR3 for alpha chain variable domain of TCR clone 150466 (TRAV13-1, TRAJ52)
CAAKSPNAGGTSYGKLTF

SEQ ID NO: 300932 - protein, 16 aa, Homo sapiens
  CDR3 for beta chain variable domain of TCR clone 150466 (TRBV2, TRBJ2-1)
CASRSPAGGKYNEQFF

SEQ ID NO: 300933 - protein, 14 aa, Homo sapiens
  CDR3 for alpha chain variable domain of TCR clone 150467 (TRAV12-2, TRAJ9)
CAVNMKGGGFKTIF

SEQ ID NO: 300934 - protein, 14 aa, Homo sapiens
  CDR3 for beta chain variable domain of TCR clone 150467 (TRBV2, TRBJ2-5)
CASSEVLAQETQYF

SEQ ID NO: 300935 - protein, 14 aa, Homo sapiens
  CDR3 for alpha chain variable domain of TCR clone 150468 (TRAV8-3, TRAJ9)
CAVVYNTGGFKTIF

SEQ ID NO: 300936 - protein, 17 aa, Homo sapiens
  CDR3 for beta chain variable domain of TCR clone 150468 (TRBV20-1, TRBJ2-1)
RSASSSGLAGSYNEQFF

SEQ ID NO: 300937 - protein, 14 aa, Homo sapiens
  CDR3 for alpha chain variable domain of TCR clone 150469 (TRAV8-6, TRAJ29)
CAVSRASGNTPLVF

SEQ ID NO: 300938 - protein, 15 aa, Homo sapiens
  CDR3 for beta chain variable domain of TCR clone 150469 (TRBV19, TRBJ2-2)
CASSPRTGWTGELFF

SEQ ID NO: 300939 - protein, 15 aa, Homo sapiens
  CDR3 for alpha chain variable domain of TCR clone 150470 (TRAV26-1, TRAJ22)
CIVRVSFWFCKATDL

SEQ ID NO: 300940 - protein, 12 aa, Homo sapiens
  CDR3 for beta chain variable domain of TCR clone 150470 (TRBV7-9, TRBJ1-2)
CSSLKQNYGYTF

SEQ ID NO: 300941 - protein, 15 aa, Homo sapiens
  CDR3 for alpha chain variable domain of TCR clone 150471 (TRAV8-3, TRAJ45)
CASSYSGGGADGLTF

SEQ ID NO: 300942 - protein, 13 aa, Homo sapiens
  CDR3 for beta chain variable domain of TCR clone 150471 (TRBV20-1, TRBJ2-1)
CSARSSPRDEQFF

SEQ ID NO: 300943 - protein, 15 aa, Homo sapiens
  CDR3 for alpha chain variable domain of TCR clone 150472 (TRAV13-1, TRAJ48)
CAASTGGFGNEKLTL

SEQ ID NO: 300944 - protein, 14 aa, Homo sapiens
  CDR3 for beta chain variable domain of TCR clone 150472 (TRBV24-1, TRBJ2-2)
CATGGLGNTGELFF

SEQ ID NO: 300945 - protein, 16 aa, Homo sapiens
  CDR3 for alpha chain variable domain of TCR clone 150473 (TRAV3, TRAJ10)
FAVRDMRAGGGNKLTF

SEQ ID NO: 300946 - protein, 15 aa, Homo sapiens
  CDR3 for beta chain variable domain of TCR clone 150473 (TRBV7-2, TRBJ1-5)
CASSRGQGDNQPQHF

SEQ ID NO: 300947 - protein, 15 aa, Homo sapiens
  CDR3 for alpha chain variable domain of TCR clone 150474 (TRAV3, TRAJ5)
CAVRDLDTGRRALTF

SEQ ID NO: 300948 - protein, 15 aa, Homo sapiens
  CDR3 for beta chain variable domain of TCR clone 150474 (TRBV6-3, TRBJ2-7)
CASSAPGTVFYEQYF

SEQ ID NO: 300949 - protein, 13 aa, Homo sapiens
  CDR3 for alpha chain variable domain of TCR clone 150475 (TRAV27, TRAJ6)
CAGGTRGSYIPTF

SEQ ID NO: 300950 - protein, 13 aa, Homo sapiens
  CDR3 for beta chain variable domain of TCR clone 150475 (TRBV4-1, TRBJ2-5)
CASSLPRGETQYF

SEQ ID NO: 300951 - protein, 21 aa, Homo sapiens
  CDR3 for alpha chain variable domain of TCR clone 150476 (TRAV4, TRAJ39)
CCVLLPRGGAAGGNAGNMLTF

SEQ ID NO: 300952 - protein, 16 aa, Homo sapiens
  CDR3 for beta chain variable domain of TCR clone 150476 (TRBV7-6, TRBJ2-7)
CASSGGTGAPSYEQYF

SEQ ID NO: 300953 - protein, 11 aa, Homo sapiens
  CDR3 for alpha chain variable domain of TCR clone 150477 (TRAV12-3, TRAJ27)
CAMANAGKSTF

SEQ ID NO: 300954 - protein, 15 aa, Homo sapiens
  CDR3 for beta chain variable domain of TCR clone 150477 (TRBV7-3, TRBJ2-2)
CASRKSGGRTGELFF

SEQ ID NO: 300955 - protein, 11 aa, Homo sapiens
  CDR3 for alpha chain variable domain of TCR clone 150478 (TRAV1-2, TRAJ40)
CAVPGTYKYIF

SEQ ID NO: 300956 - protein, 13 aa, Homo sapiens
  CDR3 for beta chain variable domain of TCR clone 150478 (TRBV27, TRBJ1-4)
CASSVMGDEKLFF

SEQ ID NO: 300957 - protein, 13 aa, Homo sapiens
  CDR3 for alpha chain variable domain of TCR clone 150479 (TRAV12-3, TRAJ4)
RNEQAGGYNKLIF

SEQ ID NO: 300958 - protein, 15 aa, Homo sapiens
  CDR3 for beta chain variable domain of TCR clone 150479 (TRBV5-1, TRBJ1-1)
CASSLSDLGGTEAFF

SEQ ID NO: 300959 - protein, 13 aa, Homo sapiens
  CDR3 for alpha chain variable domain of TCR clone 150480 (TRAV13-1, TRAJ10)
CAATAGGGNKLTF

SEQ ID NO: 300960 - protein, 14 aa, Homo sapiens
  CDR3 for beta chain variable domain of TCR clone 150480 (TRBV19, TRBJ1-2)
CASSRQGSSIGYTF

SEQ ID NO: 300961 - protein, 15 aa, Homo sapiens
  CDR3 for alpha chain variable domain of TCR clone 150481 (TRAV38-1, TRAJ57)
CAFMDSQVGSEKLVF

SEQ ID NO: 300962 - protein, 16 aa, Homo sapiens
  CDR3 for beta chain variable domain of TCR clone 150481 (TRBV10-3, TRBJ2-1)
CAIRGGGRGDYNEQFF

SEQ ID NO: 300963 - protein, 14 aa, Homo sapiens
  CDR3 for alpha chain variable domain of TCR clone 150482 (TRAV13-1, TRAJ39)
CAASEGNAGNMLTF

SEQ ID NO: 300964 - protein, 12 aa, Homo sapiens
  CDR3 for beta chain variable domain of TCR clone 150482 (TRBV11-2, TRBJ2-2)
CASSLGGGELFF

SEQ ID NO: 300965 - protein, 14 aa, Homo sapiens
  CDR3 for alpha chain variable domain of TCR clone 150483 (TRAV13-1, TRAJ35)
CAASKGGFGNVLHC

SEQ ID NO: 300966 - protein, 16 aa, Homo sapiens
  CDR3 for beta chain variable domain of TCR clone 150483 (TRBV2, TRBJ2-3)
CQHRGAPRRWTDAQYF

SEQ ID NO: 300967 - protein, 13 aa, Homo sapiens
  CDR3 for alpha chain variable domain of TCR clone 150484 (TRAV26-1, TRAJ34)
CIVRGHNTHKLIF

SEQ ID NO: 300968 - protein, 15 aa, Homo sapiens
  CDR3 for beta chain variable domain of TCR clone 150484 (TRBV4-1, TRBJ2-7)
CASSQEWGPSYEQYF

SEQ ID NO: 300969 - protein, 14 aa, Homo sapiens
  CDR3 for alpha chain variable domain of TCR clone 150485 (TRAV8-6, TRAJ52)
CAVIGGTSYGKLTF

SEQ ID NO: 300970 - protein, 15 aa, Homo sapiens
  CDR3 for beta chain variable domain of TCR clone 150485 (TRBV11-2, TRBJ2-5)
CASSLGAAGVETQYF

SEQ ID NO: 300971 - protein, 13 aa, Homo sapiens
  CDR3 for alpha chain variable domain of TCR clone 150486 (TRAV20, TRAJ40)
CAVTFSGTYKYIF

SEQ ID NO: 300972 - protein, 13 aa, Homo sapiens
  CDR3 for beta chain variable domain of TCR clone 150486 (TRBV15, TRBJ2-5)
CATSQIGEETQYF

SEQ ID NO: 300973 - protein, 13 aa, Homo sapiens
  CDR3 for alpha chain variable domain of TCR clone 150487 (TRAV3, TRAJ21)
RAVREPDFNKFYF

SEQ ID NO: 300974 - protein, 17 aa, Homo sapiens
  CDR3 for beta chain variable domain of TCR clone 150487 (TRBV7-8, TRBJ2-6)
CASSAGTGGAGANVLTF

SEQ ID NO: 300975 - protein, 17 aa, Homo sapiens
  CDR3 for alpha chain variable domain of TCR clone 150488 (TRAV8-4, TRAJ11)
CSVSDRGENSGYSTLTF

SEQ ID NO: 300976 - protein, 14 aa, Homo sapiens
  CDR3 for beta chain variable domain of TCR clone 150488 (TRBV20-1, TRBJ2-1)
CSPNDEASYNEQFF

SEQ ID NO: 300977 - protein, 12 aa, Homo sapiens
  CDR3 for alpha chain variable domain of TCR clone 150489 (TRAV12-1, TRAJ40)
CVVYSGTYKYIF

SEQ ID NO: 300978 - protein, 13 aa, Homo sapiens
  CDR3 for beta chain variable domain of TCR clone 150489 (TRBV12-4, TRBJ2-7)
CASSFVPTAEQYF

SEQ ID NO: 300979 - protein, 12 aa, Homo sapiens
  CDR3 for alpha chain variable domain of TCR clone 150490 (TRAV12-1, TRAJ40)
CVLYSGTYKYIF

SEQ ID NO: 300980 - protein, 17 aa, Homo sapiens
  CDR3 for beta chain variable domain of TCR clone 150490 (TRBV11-3, TRBJ1-5)
CASSPLTGLRGNQPQHF

SEQ ID NO: 300981 - protein, 14 aa, Homo sapiens
  CDR3 for alpha chain variable domain of TCR clone 150491 (TRAV4, TRAJ17)
CLVGDMAAGNKLTF

SEQ ID NO: 300982 - protein, 16 aa, Homo sapiens
  CDR3 for beta chain variable domain of TCR clone 150491 (TRBV9, TRBJ2-2)
CASSAMGKGNTGELFF

SEQ ID NO: 300983 - protein, 18 aa, Homo sapiens
  CDR3 for alpha chain variable domain of TCR clone 150492 (TRAV26-2, TRAJ45)
CIPRVDKYSGGGADGLTF

SEQ ID NO: 300984 - protein, 17 aa, Homo sapiens
  CDR3 for beta chain variable domain of TCR clone 150492 (TRBV25-1, TRBJ2-1)
CASSAYGQGRGVYEQFF

SEQ ID NO: 300985 - protein, 13 aa, Homo sapiens
  CDR3 for alpha chain variable domain of TCR clone 150493 (TRAV12-2, TRAJ52)
CAVGGTSYGKMTF

SEQ ID NO: 300986 - protein, 12 aa, Homo sapiens
  CDR3 for beta chain variable domain of TCR clone 150493 (TRBV11-2, TRBJ2-2)
CASSLGGGELFF

SEQ ID NO: 300987 - protein, 14 aa, Homo sapiens
  CDR3 for alpha chain variable domain of TCR clone 150494 (TRAV8-3, TRAJ4)
CAVGAAGGYNKLIF

SEQ ID NO: 300988 - protein, 19 aa, Homo sapiens
  CDR3 for beta chain variable domain of TCR clone 150494 (TRBV2, TRBJ2-7)
CASSRGPNDQGLASYEQYF

SEQ ID NO: 300989 - protein, 12 aa, Homo sapiens
  CDR3 for alpha chain variable domain of TCR clone 150495 (TRAV27, TRAJ36)
RAGMTGANNLFF

SEQ ID NO: 300990 - protein, 14 aa, Homo sapiens
  CDR3 for beta chain variable domain of TCR clone 150495 (TRBV12-4, TRBJ2-3)
CASSLVPSTDTQYF

SEQ ID NO: 300991 - protein, 12 aa, Homo sapiens
  CDR3 for alpha chain variable domain of TCR clone 150496 (TRAV13-1, TRAJ21)
CAAKEGFNKFYF

SEQ ID NO: 300992 - protein, 12 aa, Homo sapiens
  CDR3 for beta chain variable domain of TCR clone 150496 (TRBV28, TRBJ2-1)
CAGKTSGNEQFF

SEQ ID NO: 300993 - protein, 12 aa, Homo sapiens
  CDR3 for alpha chain variable domain of TCR clone 150497 (TRAV13-1, TRAJ21)
CAAKEGFNKFYF

SEQ ID NO: 300994 - protein, 19 aa, Homo sapiens
  CDR3 for beta chain variable domain of TCR clone 150497 (TRBV7-8, TRBJ2-2)
CSSHLFPGPTIHITGELFF

SEQ ID NO: 300995 - protein, 14 aa, Homo sapiens
  CDR3 for alpha chain variable domain of TCR clone 150498 (TRAV1-2, TRAJ8)
CAVREDTGFQKLVF

SEQ ID NO: 300996 - protein, 15 aa, Homo sapiens
  CDR3 for beta chain variable domain of TCR clone 150498 (TRBV5-1, TRBJ2-5)
CASSLGLAEQETQYF

SEQ ID NO: 300997 - protein, 13 aa, Homo sapiens
  CDR3 for alpha chain variable domain of TCR clone 150499 (TRAV9-2, TRAJ53)
CALSGGSNYKLTF

SEQ ID NO: 300998 - protein, 15 aa, Homo sapiens
  CDR3 for beta chain variable domain of TCR clone 150499 (TRBV7-3, TRBJ2-1)
CASSLAGAGADEQFF

SEQ ID NO: 300999 - protein, 13 aa, Homo sapiens
  CDR3 for alpha chain variable domain of TCR clone 150500 (TRAV1-1, TRAJ9)
CAAKNTGGFKTIF

SEQ ID NO: 301000 - protein, 13 aa, Homo sapiens
  CDR3 for beta chain variable domain of TCR clone 150500 (TRBV7-9, TRBJ1-2)
CASSVKQNYGYTF

SEQ ID NO: 301001 - protein, 15 aa, Homo sapiens
  CDR3 for alpha chain variable domain of TCR clone 150501 (TRAV17, TRAJ56)
SATDANTGANSKLTF

SEQ ID NO: 301002 - protein, 12 aa, Homo sapiens
  CDR3 for beta chain variable domain of TCR clone 150501 (TRBV7-8, TRBJ2-7)
CARSLGDREQYF

SEQ ID NO: 301003 - protein, 14 aa, Homo sapiens
  CDR3 for alpha chain variable domain of TCR clone 150502 (TRAV12-2, TRAJ11)
CAVEGGSGYSTLTF

SEQ ID NO: 301004 - protein, 17 aa, Homo sapiens
  CDR3 for beta chain variable domain of TCR clone 150502 (TRBV11-2, TRBJ2-1)
CASSLYPPGVEYNEQFF

SEQ ID NO: 301005 - protein, 12 aa, Homo sapiens
  CDR3 for alpha chain variable domain of TCR clone 150503 (TRAV12-3, TRAJ17)
CAMTITGNKLTF

SEQ ID NO: 301006 - protein, 13 aa, Homo sapiens
  CDR3 for beta chain variable domain of TCR clone 150503 (TRBV7-9, TRBJ1-2)
CASSVKQNYGYTF

SEQ ID NO: 301007 - protein, 14 aa, Homo sapiens
  CDR3 for alpha chain variable domain of TCR clone 150504 (TRAV12-2, TRAJ3)
CAVSLYSSASKIIF

SEQ ID NO: 301008 - protein, 15 aa, Homo sapiens
  CDR3 for beta chain variable domain of TCR clone 150504 (TRBV11-3, TRBJ2-3)
CASLKDGREGDTQYF

SEQ ID NO: 301009 - protein, 15 aa, Homo sapiens
  CDR3 for alpha chain variable domain of TCR clone 150505 (TRAV27, TRAJ53)
CRAINSGGSNYKLTF

SEQ ID NO: 301010 - protein, 15 aa, Homo sapiens
  CDR3 for beta chain variable domain of TCR clone 150505 (TRBV7-3, TRBJ2-1)
CASSPTGGGEVEQSF

SEQ ID NO: 301011 - protein, 13 aa, Homo sapiens
  CDR3 for alpha chain variable domain of TCR clone 150506 (TRAV12-1, TRAJ34)
CVVTGYNTDQLIF

SEQ ID NO: 301012 - protein, 13 aa, Homo sapiens
  CDR3 for beta chain variable domain of TCR clone 150506 (TRBV28, TRBJ2-7)
CASKAGGVYEQYF

SEQ ID NO: 301013 - protein, 11 aa, Homo sapiens
  CDR3 for alpha chain variable domain of TCR clone 150507 (TRAV23/DV6, TRAJ58)
CAARLLRGETS

SEQ ID NO: 301014 - protein, 12 aa, Homo sapiens
  CDR3 for beta chain variable domain of TCR clone 150507 (TRBV11-2, TRBJ2-2)
CASSLPTGELFF

SEQ ID NO: 301015 - protein, 12 aa, Homo sapiens
  CDR3 for alpha chain variable domain of TCR clone 150508 (TRAV3, TRAJ39)
CAVIEWSNMLTF

SEQ ID NO: 301016 - protein, 13 aa, Homo sapiens
  CDR3 for beta chain variable domain of TCR clone 150508 (TRBV7-8, TRBJ2-3)
CQQLPGRQDTQYF

SEQ ID NO: 301017 - protein, 18 aa, Homo sapiens
  CDR3 for alpha chain variable domain of TCR clone 150509 (TRAV12-3, TRAJ52)
CAMSVGGAGGTTYGKLTF

SEQ ID NO: 301018 - protein, 14 aa, Homo sapiens
  CDR3 for beta chain variable domain of TCR clone 150509 (TRBV7-2, TRBJ2-7)
CASRSQGAAYEQYF

SEQ ID NO: 301019 - protein, 12 aa, Homo sapiens
  CDR3 for alpha chain variable domain of TCR clone 150510 (TRAV8-3, TRAJ26)
FAGDNYGQNFVF

SEQ ID NO: 301020 - protein, 13 aa, Homo sapiens
  CDR3 for beta chain variable domain of TCR clone 150510 (TRBV20-1, TRBJ2-5)
CSARGDYQETQYF

SEQ ID NO: 301021 - protein, 12 aa, Homo sapiens
  CDR3 for alpha chain variable domain of TCR clone 150511 (TRAV1-1, TRAJ8)
FAGGTGFQKLVF

SEQ ID NO: 301022 - protein, 15 aa, Homo sapiens
  CDR3 for beta chain variable domain of TCR clone 150511 (TRBV20-1, TRBJ2-7)
CSARDRVSGMDEHYF

SEQ ID NO: 301023 - protein, 14 aa, Homo sapiens
  CDR3 for alpha chain variable domain of TCR clone 150512 (TRAV29/DV5, TRAJ36)
CAARRKTGANNLFF

SEQ ID NO: 301024 - protein, 16 aa, Homo sapiens
  CDR3 for beta chain variable domain of TCR clone 150512 (TRBV24-1, TRBJ2-3)
CATSDPGTGATDTQYF

SEQ ID NO: 301025 - protein, 12 aa, Homo sapiens
  CDR3 for alpha chain variable domain of TCR clone 150513 (TRAV12-2, TRAJ52)
IGGGTSYGKLTF

SEQ ID NO: 301026 - protein, 13 aa, Homo sapiens
  CDR3 for beta chain variable domain of TCR clone 150513 (TRBV15, TRBJ2-7)
CATSTTGQYEQYF

SEQ ID NO: 301027 - protein, 15 aa, Homo sapiens
  CDR3 for alpha chain variable domain of TCR clone 150514 (TRAV35, TRAJ41)
CAGQLFSNSGSALNF

SEQ ID NO: 301028 - protein, 14 aa, Homo sapiens
  CDR3 for beta chain variable domain of TCR clone 150514 (TRBV7-2, TRBJ1-2)
CASSRGGTNYGYTF

SEQ ID NO: 301029 - protein, 13 aa, Homo sapiens
  CDR3 for alpha chain variable domain of TCR clone 150515 (TRAV21, TRAJ27)
CAARPGNAGKSTF

SEQ ID NO: 301030 - protein, 13 aa, Homo sapiens
  CDR3 for beta chain variable domain of TCR clone 150515 (TRBV13, TRBJ2-1)
CASILGGRGEQVF

SEQ ID NO: 301031 - protein, 13 aa, Homo sapiens
  CDR3 for alpha chain variable domain of TCR clone 150516 (TRAV29/DV5, TRAJ33)
CAASVESNYQFIW

SEQ ID NO: 301032 - protein, 14 aa, Homo sapiens
  CDR3 for beta chain variable domain of TCR clone 150516 (TRBV11-2, TRBJ2-5)
CASSRTGGIETQYF

SEQ ID NO: 301033 - protein, 13 aa, Homo sapiens
  CDR3 for alpha chain variable domain of TCR clone 150517 (TRAV17, TRAJ9)
CATDYTGGFKTIF

SEQ ID NO: 301034 - protein, 14 aa, Homo sapiens
  CDR3 for beta chain variable domain of TCR clone 150517 (TRBV2, TRBJ2-3)
CASGEGQNTDTQYF

SEQ ID NO: 301035 - protein, 17 aa, Homo sapiens
  CDR3 for alpha chain variable domain of TCR clone 150518 (TRAV3, TRAJ6)
CAVRDGPRAGGSYIHTF

SEQ ID NO: 301036 - protein, 18 aa, Homo sapiens
  CDR3 for beta chain variable domain of TCR clone 150518 (TRBV7-9, TRBJ2-7)
CASSLTTSGSRTRYEQYF

SEQ ID NO: 301037 - protein, 14 aa, Homo sapiens
  CDR3 for alpha chain variable domain of TCR clone 150519 (TRAV12-3, TRAJ10)
SHLPMTGGGNKLTF

SEQ ID NO: 301038 - protein, 18 aa, Homo sapiens
  CDR3 for beta chain variable domain of TCR clone 150519 (TRBV11-2, TRBJ2-3)
CASSLGGASRGAPNTQYF

SEQ ID NO: 301039 - protein, 14 aa, Homo sapiens
  CDR3 for alpha chain variable domain of TCR clone 150520 (TRAV34, TRAJ44)
CGADGTGTASKLNF

SEQ ID NO: 301040 - protein, 17 aa, Homo sapiens
  CDR3 for beta chain variable domain of TCR clone 150520 (TRBV11-2, TRBJ2-1)
CASSLYPPGVEYNEQFF

SEQ ID NO: 301041 - protein, 14 aa, Homo sapiens
  CDR3 for alpha chain variable domain of TCR clone 150521 (TRAV29/DV5, TRAJ36)
CAARRKPGSNNLFF

SEQ ID NO: 301042 - protein, 14 aa, Homo sapiens
  CDR3 for beta chain variable domain of TCR clone 150521 (TRBV12-5, TRBJ2-5)
CASGSRTHQETQYF

SEQ ID NO: 301043 - protein, 18 aa, Homo sapiens
  CDR3 for alpha chain variable domain of TCR clone 150522 (TRAV26-1, TRAJ52)
CIVRVEGAGGTSYGKLTF

SEQ ID NO: 301044 - protein, 13 aa, Homo sapiens
  CDR3 for beta chain variable domain of TCR clone 150522 (TRBV7-3, TRBJ1-2)
CACSLKRGYGYTF

SEQ ID NO: 301045 - protein, 16 aa, Homo sapiens
  CDR3 for alpha chain variable domain of TCR clone 150523 (TRAV30, TRAJ24)
CCTEIVDADSWVKFQF

SEQ ID NO: 301046 - protein, 15 aa, Homo sapiens
  CDR3 for beta chain variable domain of TCR clone 150523 (TRBV27, TRBJ2-1)
CASSNGGGSSNEQFF

SEQ ID NO: 301047 - protein, 14 aa, Homo sapiens
  CDR3 for alpha chain variable domain of TCR clone 150524 (TRAV29/DV5, TRAJ48)
CAAAANFGNEKLTF

SEQ ID NO: 301048 - protein, 14 aa, Homo sapiens
  CDR3 for beta chain variable domain of TCR clone 150524 (TRBV7-9, TRBJ2-2)
CASSLVQDTGELFF

SEQ ID NO: 301049 - protein, 12 aa, Homo sapiens
  CDR3 for alpha chain variable domain of TCR clone 150525 (TRAV12-1, TRAJ40)
CVVYSGTYKYIF

SEQ ID NO: 301050 - protein, 12 aa, Homo sapiens
  CDR3 for beta chain variable domain of TCR clone 150525 (TRBV12-4, TRBJ2-3)
CASSTLPDTQYF

SEQ ID NO: 301051 - protein, 13 aa, Homo sapiens
  CDR3 for alpha chain variable domain of TCR clone 150526 (TRAV3, TRAJ3)
CAGADSSASKIIF

SEQ ID NO: 301052 - protein, 16 aa, Homo sapiens
  CDR3 for beta chain variable domain of TCR clone 150526 (TRBV5-1, TRBJ2-3)
CVSSLGLAVYTDTQYF

SEQ ID NO: 301053 - protein, 15 aa, Homo sapiens
  CDR3 for alpha chain variable domain of TCR clone 150527 (TRAV23/DV6, TRAJ18)
CAARYRGSTLGRLYF

SEQ ID NO: 301054 - protein, 12 aa, Homo sapiens
  CDR3 for beta chain variable domain of TCR clone 150527 (TRBV11-2, TRBJ2-1)
CASSPGNNEQFF

SEQ ID NO: 301055 - protein, 15 aa, Homo sapiens
  CDR3 for alpha chain variable domain of TCR clone 150528 (TRAV12-1, TRAJ41)
CVVNSRAGSGYALNF

SEQ ID NO: 301056 - protein, 12 aa, Homo sapiens
  CDR3 for beta chain variable domain of TCR clone 150528 (TRBV5-4, TRBJ2-7)
CASSLEAYEQYF

SEQ ID NO: 301057 - protein, 14 aa, Homo sapiens
  CDR3 for alpha chain variable domain of TCR clone 150529 (TRAV1-2, TRAJ8)
CAVIEDTGFQKRVF

SEQ ID NO: 301058 - protein, 15 aa, Homo sapiens
  CDR3 for beta chain variable domain of TCR clone 150529 (TRBV12-4, TRBJ2-5)
CASSPPTGLQETQYF

SEQ ID NO: 301059 - protein, 16 aa, Homo sapiens
  CDR3 for alpha chain variable domain of TCR clone 150530 (TRAV12-3, TRAJ53)
CAMSPGSGGSNYKLTF

SEQ ID NO: 301060 - protein, 14 aa, Homo sapiens
  CDR3 for beta chain variable domain of TCR clone 150530 (TRBV7-3, TRBJ2-3)
CASSSLHTSDTQYF

SEQ ID NO: 301061 - protein, 16 aa, Homo sapiens
  CDR3 for alpha chain variable domain of TCR clone 150531 (TRAV12-3, TRAJ53)
CAMSPGSGGSNYKLTF

SEQ ID NO: 301062 - protein, 14 aa, Homo sapiens
  CDR3 for beta chain variable domain of TCR clone 150531 (TRBV15, TRBJ2-5)
CATSGDRGQETQYF

SEQ ID NO: 301063 - protein, 15 aa, Homo sapiens
  CDR3 for alpha chain variable domain of TCR clone 150532 (TRAV17, TRAJ23)
CATDAEANQGGKLLF

SEQ ID NO: 301064 - protein, 12 aa, Homo sapiens
  CDR3 for beta chain variable domain of TCR clone 150532 (TRBV2, TRBJ2-1)
CAKREGYNEQFF

SEQ ID NO: 301065 - protein, 13 aa, Homo sapiens
  CDR3 for alpha chain variable domain of TCR clone 150533 (TRAV21, TRAJ27)
CAARPGNAGKSSF

SEQ ID NO: 301066 - protein, 14 aa, Homo sapiens
  CDR3 for beta chain variable domain of TCR clone 150533 (TRBV20-1, TRBJ2-1)
CSAAGSGEYNEQFF

SEQ ID NO: 301067 - protein, 14 aa, Homo sapiens
  CDR3 for alpha chain variable domain of TCR clone 150534 (TRAV23/DV6, TRAJ22)
CAASVSGSARQLTF

SEQ ID NO: 301068 - protein, 16 aa, Homo sapiens
  CDR3 for beta chain variable domain of TCR clone 150534 (TRBV19, TRBJ2-2)
CASSFPGQGLAEELFF

SEQ ID NO: 301069 - protein, 11 aa, Homo sapiens
  CDR3 for alpha chain variable domain of TCR clone 150535 (TRAV14/DV4, )
CAMRETSRTLT

SEQ ID NO: 301070 - protein, 14 aa, Homo sapiens
  CDR3 for beta chain variable domain of TCR clone 150535 (TRBV2, TRBJ2-1)
CASSDRAYYNEQFF

SEQ ID NO: 301071 - protein, 14 aa, Homo sapiens
  CDR3 for alpha chain variable domain of TCR clone 150536 (TRAV38-2/DV8, TRAJ23)
CAYRSQNQGGKLIF

SEQ ID NO: 301072 - protein, 13 aa, Homo sapiens
  CDR3 for beta chain variable domain of TCR clone 150536 (TRBV24-1, TRBJ2-1)
CATSAGPYNEQCF

SEQ ID NO: 301073 - protein, 11 aa, Homo sapiens
  CDR3 for alpha chain variable domain of TCR clone 150537 (TRAV2, TRAJ23)
SAVETRGKLIF

SEQ ID NO: 301074 - protein, 14 aa, Homo sapiens
  CDR3 for beta chain variable domain of TCR clone 150537 (TRBV2, TRBJ2-3)
CASSEGQNTDTQYF

SEQ ID NO: 301075 - protein, 13 aa, Homo sapiens
  CDR3 for alpha chain variable domain of TCR clone 150538 (TRAV27, TRAJ45)
CRSSGGGADGLTF

SEQ ID NO: 301076 - protein, 16 aa, Homo sapiens
  CDR3 for beta chain variable domain of TCR clone 150538 (TRBV29-1, TRBJ2-7)
CSVEVVGTSGSYEQYF

SEQ ID NO: 301077 - protein, 19 aa, Homo sapiens
  CDR3 for alpha chain variable domain of TCR clone 150539 (TRAV26-1, )
CIADNAGNNHIQNPDPAVY

SEQ ID NO: 301078 - protein, 12 aa, Homo sapiens
  CDR3 for beta chain variable domain of TCR clone 150539 (TRBV11-2, TRBJ2-2)
CASSLGGGELFF

SEQ ID NO: 301079 - protein, 18 aa, Homo sapiens
  CDR3 for alpha chain variable domain of TCR clone 150540 (TRAV21, TRAJ52)
CAVRPSQAGGTSYGKLTF

SEQ ID NO: 301080 - protein, 11 aa, Homo sapiens
  CDR3 for beta chain variable domain of TCR clone 150540 (TRBV12-4, TRBJ2-3)
CASTATDTQYF

SEQ ID NO: 301081 - protein, 16 aa, Homo sapiens
  CDR3 for alpha chain variable domain of TCR clone 150541 (TRAV14/DV4, TRAJ54)
CAMRECRIQGAQKLVF

SEQ ID NO: 301082 - protein, 15 aa, Homo sapiens
  CDR3 for beta chain variable domain of TCR clone 150541 (TRBV20-1, TRBJ2-7)
CSARDRVSGMDEQYF

SEQ ID NO: 301083 - protein, 10 aa, Homo sapiens
  CDR3 for alpha chain variable domain of TCR clone 150542 (TRAV1-2, TRAJ20)
CAVTDYKLSF

SEQ ID NO: 301084 - protein, 13 aa, Homo sapiens
  CDR3 for beta chain variable domain of TCR clone 150542 (TRBV7-3, TRBJ2-1)
CASSLDSYNEQFF

SEQ ID NO: 301085 - protein, 18 aa, Homo sapiens
  CDR3 for alpha chain variable domain of TCR clone 150543 (TRAV26-2, )
CILTDIQNPDPAVYQLRD

SEQ ID NO: 301086 - protein, 17 aa, Homo sapiens
  CDR3 for beta chain variable domain of TCR clone 150543 (TRBV13, TRBJ2-3)
CASSLSRVAGGRNTQYF

SEQ ID NO: 301087 - protein, 16 aa, Homo sapiens
  CDR3 for alpha chain variable domain of TCR clone 150544 (TRAV1-1, TRAJ45)
CAVRDYSGGGADGLTF

SEQ ID NO: 301088 - protein, 13 aa, Homo sapiens
  CDR3 for beta chain variable domain of TCR clone 150544 (TRBV20-1, TRBJ1-2)
CSARGTADYGYTF

SEQ ID NO: 301089 - protein, 16 aa, Homo sapiens
  CDR3 for alpha chain variable domain of TCR clone 150545 (TRAV22, TRAJ45)
CAVERGKRGGADGLNF

SEQ ID NO: 301090 - protein, 16 aa, Homo sapiens
  CDR3 for beta chain variable domain of TCR clone 150545 (TRBV5-1, TRBJ2-5)
CASSLRRTSGQETQYF

SEQ ID NO: 301091 - protein, 15 aa, Homo sapiens
  CDR3 for alpha chain variable domain of TCR clone 150546 (TRAV12-2, TRAJ13)
CRESLGSGGYQKVTF

SEQ ID NO: 301092 - protein, 12 aa, Homo sapiens
  CDR3 for beta chain variable domain of TCR clone 150546 (TRBV16, TRBJ2-2)
CASSQSVGELFF

SEQ ID NO: 301093 - protein, 13 aa, Homo sapiens
  CDR3 for alpha chain variable domain of TCR clone 150547 (TRAV27, TRAJ3)
ASLRGSSASKIIF

SEQ ID NO: 301094 - protein, 12 aa, Homo sapiens
  CDR3 for beta chain variable domain of TCR clone 150547 (TRBV5-4, TRBJ2-5)
CASSSTRETQYF

SEQ ID NO: 301095 - protein, 10 aa, Homo sapiens
  CDR3 for alpha chain variable domain of TCR clone 150548 (TRAV39, TRAJ49)
CAVAGNQFYF

SEQ ID NO: 301096 - protein, 14 aa, Homo sapiens
  CDR3 for beta chain variable domain of TCR clone 150548 (TRBV7-2, TRBJ2-7)
CASRSQGAAYEQYF

SEQ ID NO: 301097 - protein, 16 aa, Homo sapiens
  CDR3 for alpha chain variable domain of TCR clone 150549 (TRAV30, TRAJ24)
CGTEIVDADSWGKFQF

SEQ ID NO: 301098 - protein, 15 aa, Homo sapiens
  CDR3 for beta chain variable domain of TCR clone 150549 (TRBV7-2, TRBJ1-2)
CASSLVSGGVYGYTF

SEQ ID NO: 301099 - protein, 15 aa, Homo sapiens
  CDR3 for alpha chain variable domain of TCR clone 150550 (TRAV8-3, TRAJ40)
CAAPSLSSGTYKYIF

SEQ ID NO: 301100 - protein, 12 aa, Homo sapiens
  CDR3 for beta chain variable domain of TCR clone 150550 (TRBV11-2, TRBJ2-2)
CASSLGGGELFF

SEQ ID NO: 301101 - protein, 13 aa, Homo sapiens
  CDR3 for alpha chain variable domain of TCR clone 150551 (TRAV3, TRAJ21)
CAVREPDFNKFYF

SEQ ID NO: 301102 - protein, 14 aa, Homo sapiens
  CDR3 for beta chain variable domain of TCR clone 150551 (TRBV7-8, TRBJ2-3)
CASSFPDGQDTQYF

SEQ ID NO: 301103 - protein, 11 aa, Homo sapiens
  CDR3 for alpha chain variable domain of TCR clone 150552 (TRAV2, TRAJ13)
CASGVYQKVTF

SEQ ID NO: 301104 - protein, 14 aa, Homo sapiens
  CDR3 for beta chain variable domain of TCR clone 150552 (TRBV7-2, TRBJ2-7)
CASRSQGAAYEQYF

SEQ ID NO: 301105 - protein, 13 aa, Homo sapiens
  CDR3 for alpha chain variable domain of TCR clone 150553 (TRAV13-2, TRAJ15)
CAESNQAGTALIF

SEQ ID NO: 301106 - protein, 12 aa, Homo sapiens
  CDR3 for beta chain variable domain of TCR clone 150553 (TRBV24-1, TRBJ2-3)
CATSDSTDTQYF

SEQ ID NO: 301107 - protein, 14 aa, Homo sapiens
  CDR3 for alpha chain variable domain of TCR clone 150554 (TRAV12-3, TRAJ6)
CAMSATGGSYIPTF

SEQ ID NO: 301108 - protein, 13 aa, Homo sapiens
  CDR3 for beta chain variable domain of TCR clone 150554 (TRBV20-1, TRBJ2-5)
CSAREAFQETQYF

SEQ ID NO: 301109 - protein, 17 aa, Homo sapiens
  CDR3 for alpha chain variable domain of TCR clone 150555 (TRAV3, TRAJ13)
CAVRDMGRTGGYQKVTF

SEQ ID NO: 301110 - protein, 14 aa, Homo sapiens
  CDR3 for beta chain variable domain of TCR clone 150555 (TRBV12-5, TRBJ2-5)
CASGSRTHQETQYF

SEQ ID NO: 301111 - protein, 13 aa, Homo sapiens
  CDR3 for alpha chain variable domain of TCR clone 150556 (TRAV21, TRAJ57)
CAVTQGGSEKLVF

SEQ ID NO: 301112 - protein, 16 aa, Homo sapiens
  CDR3 for beta chain variable domain of TCR clone 150556 (TRBV29-1, TRBJ2-7)
CSVEGAEDGTAYEQYL

SEQ ID NO: 301113 - protein, 13 aa, Homo sapiens
  CDR3 for alpha chain variable domain of TCR clone 150557 (TRAV13-2, TRAJ13)
CAARPGGYQKVTF

SEQ ID NO: 301114 - protein, 16 aa, Homo sapiens
  CDR3 for beta chain variable domain of TCR clone 150557 (TRBV18, TRBJ2-5)
CASSPPSSGGAKTQYF

SEQ ID NO: 301115 - protein, 11 aa, Homo sapiens
  CDR3 for alpha chain variable domain of TCR clone 150558 (TRAV2, TRAJ23)
CDVETRGKLIF

SEQ ID NO: 301116 - protein, 14 aa, Homo sapiens
  CDR3 for beta chain variable domain of TCR clone 150558 (TRBV2, TRBJ2-3)
CASSEGQNTDTQYF

SEQ ID NO: 301117 - protein, 14 aa, Homo sapiens
  CDR3 for alpha chain variable domain of TCR clone 150559 (TRAV12-3, TRAJ42)
CAMNYGGSQGNLLF

SEQ ID NO: 301118 - protein, 15 aa, Homo sapiens
  CDR3 for beta chain variable domain of TCR clone 150559 (TRBV5-7, TRBJ1-5)
CASSYGKLWDQPQHF

SEQ ID NO: 301119 - protein, 13 aa, Homo sapiens
  CDR3 for alpha chain variable domain of TCR clone 150560 (TRAV9-2, TRAJ53)
CALSGGSNYKLTF

SEQ ID NO: 301120 - protein, 12 aa, Homo sapiens
  CDR3 for beta chain variable domain of TCR clone 150560 (TRBV5-1, TRBJ1-2)
CASSQDTYGYTF

SEQ ID NO: 301121 - protein, 15 aa, Homo sapiens
  CDR3 for alpha chain variable domain of TCR clone 150561 (TRAV6, TRAJ32)
CALDMGGCATNKLIF

SEQ ID NO: 301122 - protein, 16 aa, Homo sapiens
  CDR3 for beta chain variable domain of TCR clone 150561 (TRBV7-3, TRBJ2-2)
CASSLKRGTLSGELFF

SEQ ID NO: 301123 - protein, 14 aa, Homo sapiens
  CDR3 for alpha chain variable domain of TCR clone 150562 (TRAV8-1, TRAJ13)
CAVKRSGGYQKVTF

SEQ ID NO: 301124 - protein, 22 aa, Homo sapiens
  CDR3 for beta chain variable domain of TCR clone 150562 (TRBV11-2, TRBJ1-4)
CASSLDITRWGIPRKDNEKLFF

SEQ ID NO: 301125 - protein, 15 aa, Homo sapiens
  CDR3 for alpha chain variable domain of TCR clone 150563 (TRAV34, TRAJ38)
CGADFTPGNNRKLIW

SEQ ID NO: 301126 - protein, 14 aa, Homo sapiens
  CDR3 for beta chain variable domain of TCR clone 150563 (TRBV7-8, TRBJ2-7)
CASSPGLADYEQYF

SEQ ID NO: 301127 - protein, 14 aa, Homo sapiens
  CDR3 for alpha chain variable domain of TCR clone 150564 (TRAV9-2, TRAJ39)
CALYIYNAGNMLTF

SEQ ID NO: 301128 - protein, 15 aa, Homo sapiens
  CDR3 for beta chain variable domain of TCR clone 150564 (TRBV28, TRBJ1-3)
GASSMGWASGNTIYF

SEQ ID NO: 301129 - protein, 16 aa, Homo sapiens
  CDR3 for alpha chain variable domain of TCR clone 150565 (TRAV23/DV6, TRAJ52)
CAARPSGGTSYGKLTF

SEQ ID NO: 301130 - protein, 13 aa, Homo sapiens
  CDR3 for beta chain variable domain of TCR clone 150565 (TRBV7-9, TRBJ1-1)
CASSLSGGTEAFF

SEQ ID NO: 301131 - protein, 16 aa, Homo sapiens
  CDR3 for alpha chain variable domain of TCR clone 150566 (TRAV12-3, TRAJ53)
CAMSPGSGGSNYKLTF

SEQ ID NO: 301132 - protein, 15 aa, Homo sapiens
  CDR3 for beta chain variable domain of TCR clone 150566 (TRBV4-3, TRBJ2-1)
CASSQMRGAHNEQFF

SEQ ID NO: 301133 - protein, 20 aa, Homo sapiens
  CDR3 for alpha chain variable domain of TCR clone 150567 (TRAV1-1, TRAJ39)
CLLLLRCESSAYNAGNMLTF

SEQ ID NO: 301134 - protein, 13 aa, Homo sapiens
  CDR3 for beta chain variable domain of TCR clone 150567 (TRBV12-4, TRBJ1-5)
CASSPDRSQPQHF

SEQ ID NO: 301135 - protein, 14 aa, Homo sapiens
  CDR3 for alpha chain variable domain of TCR clone 150568 (TRAV35, TRAJ50)
CAGHRKTSYDKVIF

SEQ ID NO: 301136 - protein, 13 aa, Homo sapiens
  CDR3 for beta chain variable domain of TCR clone 150568 (TRBV7-7, TRBJ2-3)
CASSLSRPDTQYF

SEQ ID NO: 301137 - protein, 14 aa, Homo sapiens
  CDR3 for alpha chain variable domain of TCR clone 150569 (TRAV21, TRAJ35)
CAVMPIGFGNVLHC

SEQ ID NO: 301138 - protein, 12 aa, Homo sapiens
  CDR3 for beta chain variable domain of TCR clone 150569 (TRBV7-9, TRBJ2-7)
CSSSIKREEQYF

SEQ ID NO: 301139 - protein, 13 aa, Homo sapiens
  CDR3 for alpha chain variable domain of TCR clone 150570 (TRAV13-1, TRAJ39)
CAAPFECRQHAHL

SEQ ID NO: 301140 - protein, 16 aa, Homo sapiens
  CDR3 for beta chain variable domain of TCR clone 150570 (TRBV12-5, TRBJ2-5)
CASGPRTSGNRETQYF

SEQ ID NO: 301141 - protein, 14 aa, Homo sapiens
  CDR3 for alpha chain variable domain of TCR clone 150571 (TRAV17, TRAJ12)
CATDEKDSSYKLIF

SEQ ID NO: 301142 - protein, 16 aa, Homo sapiens
  CDR3 for beta chain variable domain of TCR clone 150571 (TRBV11-2, TRBJ2-1)
CARSPRLAGVYNEQFF

SEQ ID NO: 301143 - protein, 17 aa, Homo sapiens
  CDR3 for alpha chain variable domain of TCR clone 150572 (TRAV8-3, TRAJ42)
CAVGNPEERRSQGNLIF

SEQ ID NO: 301144 - protein, 14 aa, Homo sapiens
  CDR3 for beta chain variable domain of TCR clone 150572 (TRBV12-4, TRBJ1-4)
CASSRQGANEKLFF

SEQ ID NO: 301145 - protein, 16 aa, Homo sapiens
  CDR3 for alpha chain variable domain of TCR clone 150573 (TRAV30, TRAJ24)
CGTEIVDADSWWKFQF

SEQ ID NO: 301146 - protein, 14 aa, Homo sapiens
  CDR3 for beta chain variable domain of TCR clone 150573 (TRBV12-5, TRBJ2-5)
CASGSRTHQETQYL

SEQ ID NO: 301147 - protein, 14 aa, Homo sapiens
  CDR3 for alpha chain variable domain of TCR clone 150574 (TRAV12-1, TRAJ17)
CVVNYKAAGNKLTF

SEQ ID NO: 301148 - protein, 17 aa, Homo sapiens
  CDR3 for beta chain variable domain of TCR clone 150574 (TRBV20-1, TRBJ2-1)
CSAISSGLAVSYNEQFF

SEQ ID NO: 301149 - protein, 17 aa, Homo sapiens
  CDR3 for alpha chain variable domain of TCR clone 150575 (TRAV3, TRAJ6)
CAVRDGPRAGGSYIPTF

SEQ ID NO: 301150 - protein, 15 aa, Homo sapiens
  CDR3 for beta chain variable domain of TCR clone 150575 (TRBV4-1, TRBJ1-4)
CASSDTGGTNDKLFF

SEQ ID NO: 301151 - protein, 14 aa, Homo sapiens
  CDR3 for alpha chain variable domain of TCR clone 150576 (TRAV9-2, TRAJ44)
CSLSEPGTASKLTF

SEQ ID NO: 301152 - protein, 14 aa, Homo sapiens
  CDR3 for beta chain variable domain of TCR clone 150576 (TRBV27, TRBJ1-1)
CASSQGTVMTEAFF

SEQ ID NO: 301153 - protein, 16 aa, Homo sapiens
  CDR3 for alpha chain variable domain of TCR clone 150577 (TRAV30, TRAJ24)
CGTEIVDADSWGKFQF

SEQ ID NO: 301154 - protein, 17 aa, Homo sapiens
  CDR3 for beta chain variable domain of TCR clone 150577 (TRBV7-9, TRBJ2-3)
CASSKAGRLPRTDTQYF

SEQ ID NO: 301155 - protein, 13 aa, Homo sapiens
  CDR3 for alpha chain variable domain of TCR clone 150578 (TRAV27, TRAJ41)
CAGEGNSGYALNF

SEQ ID NO: 301156 - protein, 15 aa, Homo sapiens
  CDR3 for beta chain variable domain of TCR clone 150578 (TRBV6-1, TRBJ2-1)
CASSEAAYSYNEQFF

SEQ ID NO: 301157 - protein, 12 aa, Homo sapiens
  CDR3 for alpha chain variable domain of TCR clone 150579 (TRAV3, TRAJ43)
CAVRGPNNDMRF

SEQ ID NO: 301158 - protein, 15 aa, Homo sapiens
  CDR3 for beta chain variable domain of TCR clone 150579 (TRBV7-3, TRBJ2-1)
CASSPTGGGEVEQFF

SEQ ID NO: 301159 - protein, 14 aa, Homo sapiens
  CDR3 for alpha chain variable domain of TCR clone 150580 (TRAV13-1, TRAJ35)
CAASKGGFGNGRHC

SEQ ID NO: 301160 - protein, 16 aa, Homo sapiens
  CDR3 for beta chain variable domain of TCR clone 150580 (TRBV7-9, TRBJ2-1)
CASSDVAGGSYNEQFF

SEQ ID NO: 301161 - protein, 12 aa, Homo sapiens
  CDR3 for alpha chain variable domain of TCR clone 150581 (TRAV27, TRAJ35)
CAGADFGNVLHC

SEQ ID NO: 301162 - protein, 13 aa, Homo sapiens
  CDR3 for beta chain variable domain of TCR clone 150581 (TRBV7-3, TRBJ1-1)
CARSQDWGAEAFF

SEQ ID NO: 301163 - protein, 11 aa, Homo sapiens
  CDR3 for alpha chain variable domain of TCR clone 150582 (TRAV12-2, TRAJ3)
CAVKRASKIIF

SEQ ID NO: 301164 - protein, 15 aa, Homo sapiens
  CDR3 for beta chain variable domain of TCR clone 150582 (TRBV12-4, TRBJ2-1)
CASSLLATGNNEQFF

SEQ ID NO: 301165 - protein, 14 aa, Homo sapiens
  CDR3 for alpha chain variable domain of TCR clone 150583 (TRAV8-4, TRAJ16)
CALSPVGRWPEAAL

SEQ ID NO: 301166 - protein, 15 aa, Homo sapiens
  CDR3 for beta chain variable domain of TCR clone 150583 (TRBV11-3, TRBJ2-7)
CASSPGPASSYEQYF

SEQ ID NO: 301167 - protein, 15 aa, Homo sapiens
  CDR3 for alpha chain variable domain of TCR clone 150584 (TRAV12-3, TRAJ44)
CAMSGLTGTASKLTF

SEQ ID NO: 301168 - protein, 15 aa, Homo sapiens
  CDR3 for beta chain variable domain of TCR clone 150584 (TRBV20-1, TRBJ2-7)
CSARTPGTMTYEQYF

SEQ ID NO: 301169 - protein, 13 aa, Homo sapiens
  CDR3 for alpha chain variable domain of TCR clone 150585 (TRAV36/DV7, TRAJ37)
CAVFSSNTGKLIF

SEQ ID NO: 301170 - protein, 12 aa, Homo sapiens
  CDR3 for beta chain variable domain of TCR clone 150585 (TRBV7-9, TRBJ2-7)
CASSLEGYEQYF

SEQ ID NO: 301171 - protein, 14 aa, Homo sapiens
  CDR3 for alpha chain variable domain of TCR clone 150586 (TRAV13-2, TRAJ22)
CADGTLGSARQLTF

SEQ ID NO: 301172 - protein, 16 aa, Homo sapiens
  CDR3 for beta chain variable domain of TCR clone 150586 (TRBV19, TRBJ2-1)
GASSSKGTRSYNEQFF

SEQ ID NO: 301173 - protein, 12 aa, Homo sapiens
  CDR3 for alpha chain variable domain of TCR clone 150587 (TRAV8-3, TRAJ20)
CAVGANDYELSF

SEQ ID NO: 301174 - protein, 16 aa, Homo sapiens
  CDR3 for beta chain variable domain of TCR clone 150587 (TRBV19, TRBJ2-2)
CSSRSPGTGATGELFF

SEQ ID NO: 301175 - protein, 14 aa, Homo sapiens
  CDR3 for alpha chain variable domain of TCR clone 150588 (TRAV17, TRAJ22)
CATPPSGSARQLTF

SEQ ID NO: 301176 - protein, 16 aa, Homo sapiens
  CDR3 for beta chain variable domain of TCR clone 150588 (TRBV5-4, TRBJ2-5)
CASSLGLAGGRETQYF

SEQ ID NO: 301177 - protein, 13 aa, Homo sapiens
  CDR3 for alpha chain variable domain of TCR clone 150589 (TRAV2, TRAJ39)
CAVLNNAGNMLTF

SEQ ID NO: 301178 - protein, 11 aa, Homo sapiens
  CDR3 for beta chain variable domain of TCR clone 150589 (TRBV4-1, TRBJ2-2)
CASEHTGELFF

SEQ ID NO: 301179 - protein, 14 aa, Homo sapiens
  CDR3 for alpha chain variable domain of TCR clone 150590 (TRAV17, TRAJ5)
CATVALTGRRALTF

SEQ ID NO: 301180 - protein, 14 aa, Homo sapiens
  CDR3 for beta chain variable domain of TCR clone 150590 (TRBV28, TRBJ2-7)
CASSPYGMAYEQFF

SEQ ID NO: 301181 - protein, 14 aa, Homo sapiens
  CDR3 for alpha chain variable domain of TCR clone 150591 (TRAV12-1, TRAJ17)
CVVNYKAAGNRLTF

SEQ ID NO: 301182 - protein, 17 aa, Homo sapiens
  CDR3 for beta chain variable domain of TCR clone 150591 (TRBV20-1, TRBJ2-1)
CSASSSVLAGSYNEQFF

SEQ ID NO: 301183 - protein, 14 aa, Homo sapiens
  CDR3 for alpha chain variable domain of TCR clone 150592 (TRAV12-3, TRAJ10)
SHLPLTGGGNKLTF

SEQ ID NO: 301184 - protein, 12 aa, Homo sapiens
  CDR3 for beta chain variable domain of TCR clone 150592 (TRBV20-1, TRBJ1-5)
CSTSQGNQPQHF

SEQ ID NO: 301185 - protein, 12 aa, Homo sapiens
  CDR3 for alpha chain variable domain of TCR clone 150593 (TRAV27, TRAJ17)
CAMTLTGNKLTF

SEQ ID NO: 301186 - protein, 14 aa, Homo sapiens
  CDR3 for beta chain variable domain of TCR clone 150593 (TRBV4-1, TRBJ2-5)
CASSRSGSGETQYF

SEQ ID NO: 301187 - protein, 11 aa, Homo sapiens
  CDR3 for alpha chain variable domain of TCR clone 150594 (TRAV4, TRAJ31)
CLVGLNARLMF

SEQ ID NO: 301188 - protein, 16 aa, Homo sapiens
  CDR3 for beta chain variable domain of TCR clone 150594 (TRBV15, TRBJ2-6)
RATSVNGGFLANVLTF

SEQ ID NO: 301189 - protein, 16 aa, Homo sapiens
  CDR3 for alpha chain variable domain of TCR clone 150595 (TRAV3, TRAJ18)
CAVRDGGGSTLGRPYF

SEQ ID NO: 301190 - protein, 17 aa, Homo sapiens
  CDR3 for beta chain variable domain of TCR clone 150595 (TRBV5-1, TRBJ2-3)
CASSKIGLVDRTDTQYF

SEQ ID NO: 301191 - protein, 12 aa, Homo sapiens
  CDR3 for alpha chain variable domain of TCR clone 150596 (TRAV20, TRAJ13)
CCVKRGYQKVTF

SEQ ID NO: 301192 - protein, 11 aa, Homo sapiens
  CDR3 for beta chain variable domain of TCR clone 150596 (TRBV11-2, TRBJ2-2)
CASSLPGELFF

SEQ ID NO: 301193 - protein, 14 aa, Homo sapiens
  CDR3 for alpha chain variable domain of TCR clone 150597 (TRAV12-2, TRAJ11)
CAVNRESGYSTLPS

SEQ ID NO: 301194 - protein, 10 aa, Homo sapiens
  CDR3 for beta chain variable domain of TCR clone 150597 (TRBV20-1, TRBJ2-5)
CSARFETQYF

SEQ ID NO: 301195 - protein, 14 aa, Homo sapiens
  CDR3 for alpha chain variable domain of TCR clone 150598 (TRAV8-1, TRAJ23)
CAVGTYNQGGKLIF

SEQ ID NO: 301196 - protein, 16 aa, Homo sapiens
  CDR3 for beta chain variable domain of TCR clone 150598 (TRBV2, TRBJ2-5)
CASSETQGVGEETQYF

SEQ ID NO: 301197 - protein, 13 aa, Homo sapiens
  CDR3 for alpha chain variable domain of TCR clone 150599 (TRAV12-3, TRAJ13)
CAMSSGGYQKVTF

SEQ ID NO: 301198 - protein, 17 aa, Homo sapiens
  CDR3 for beta chain variable domain of TCR clone 150599 (TRBV4-1, TRBJ1-4)
CASSQAGPRGVEEKLFF

SEQ ID NO: 301199 - protein, 15 aa, Homo sapiens
  CDR3 for alpha chain variable domain of TCR clone 150600 (TRAV35, TRAJ34)
CAGTSIVRNTDKLIF

SEQ ID NO: 301200 - protein, 14 aa, Homo sapiens
  CDR3 for beta chain variable domain of TCR clone 150600 (TRBV7-2, TRBJ1-2)
CASSSQGAHYGYTF

SEQ ID NO: 301201 - protein, 15 aa, Homo sapiens
  CDR3 for alpha chain variable domain of TCR clone 150601 (TRAV26-1, TRAJ17)
CIVRVVKAAGNKLTS

SEQ ID NO: 301202 - protein, 16 aa, Homo sapiens
  CDR3 for beta chain variable domain of TCR clone 150601 (TRBV7-9, TRBJ2-1)
CASSLVSGPSYNEQFF

SEQ ID NO: 301203 - protein, 13 aa, Homo sapiens
  CDR3 for alpha chain variable domain of TCR clone 150602 (TRAV2, TRAJ13)
CAVESGGYQKVTF

SEQ ID NO: 301204 - protein, 17 aa, Homo sapiens
  CDR3 for beta chain variable domain of TCR clone 150602 (TRBV25-1, TRBJ2-1)
CASSAYGQGRGVYEQFF

SEQ ID NO: 301205 - protein, 15 aa, Homo sapiens
  CDR3 for alpha chain variable domain of TCR clone 150603 (TRAV1-2, TRAJ30)
CAVRPHGNRDDKIIF

SEQ ID NO: 301206 - protein, 13 aa, Homo sapiens
  CDR3 for beta chain variable domain of TCR clone 150603 (TRBV4-1, TRBJ2-7)
CASSQGQAYEHYF

SEQ ID NO: 301207 - protein, 13 aa, Homo sapiens
  CDR3 for alpha chain variable domain of TCR clone 150604 (TRAV20, TRAJ3)
CARRYSSASKIIF

SEQ ID NO: 301208 - protein, 12 aa, Homo sapiens
  CDR3 for beta chain variable domain of TCR clone 150604 (TRBV28, TRBJ2-1)
YASSFRGNEQFF

SEQ ID NO: 301209 - protein, 13 aa, Homo sapiens
  CDR3 for alpha chain variable domain of TCR clone 150605 (TRAV21, TRAJ32)
CASYGGATNKLIF

SEQ ID NO: 301210 - protein, 13 aa, Homo sapiens
  CDR3 for beta chain variable domain of TCR clone 150605 (TRBV15, TRBJ1-6)
CATSPGLNSPLHF

SEQ ID NO: 301211 - protein, 12 aa, Homo sapiens
  CDR3 for alpha chain variable domain of TCR clone 150606 (TRAV12-3, TRAJ17)
CAMTLTGNKLTF

SEQ ID NO: 301212 - protein, 15 aa, Homo sapiens
  CDR3 for beta chain variable domain of TCR clone 150606 (TRBV20-1, TRBJ2-7)
CGSRDRVSGMDEQYF

SEQ ID NO: 301213 - protein, 14 aa, Homo sapiens
  CDR3 for alpha chain variable domain of TCR clone 150607 (TRAV30, TRAJ33)
CGTVAPRSNYQLIW

SEQ ID NO: 301214 - protein, 15 aa, Homo sapiens
  CDR3 for beta chain variable domain of TCR clone 150607 (TRBV11-3, TRBJ2-3)
CASLKDGREGDTQYF

SEQ ID NO: 301215 - protein, 12 aa, Homo sapiens
  CDR3 for alpha chain variable domain of TCR clone 150608 (TRAV8-2, TRAJ5)
CVVSDIGRTLTF

SEQ ID NO: 301216 - protein, 14 aa, Homo sapiens
  CDR3 for beta chain variable domain of TCR clone 150608 (TRBV19, TRBJ2-7)
CASNFRDTFTGMYF

SEQ ID NO: 301217 - protein, 14 aa, Homo sapiens
  CDR3 for alpha chain variable domain of TCR clone 150609 (TRAV35, TRAJ22)
CAGLRPCSARQLTF

SEQ ID NO: 301218 - protein, 14 aa, Homo sapiens
  CDR3 for beta chain variable domain of TCR clone 150609 (TRBV5-1, TRBJ2-7)
CASSRGESLYEQYF

SEQ ID NO: 301219 - protein, 17 aa, Homo sapiens
  CDR3 for alpha chain variable domain of TCR clone 150610 (TRAV17, TRAJ28)
CATDTRRGGAGSYQLTF

SEQ ID NO: 301220 - protein, 16 aa, Homo sapiens
  CDR3 for beta chain variable domain of TCR clone 150610 (TRBV25-1, TRBJ1-1)
CASSGDRDRGRIEAFF

SEQ ID NO: 301221 - protein, 14 aa, Homo sapiens
  CDR3 for alpha chain variable domain of TCR clone 150611 (TRAV8-3, TRAJ37)
CAVGSSGNTGKLIF

SEQ ID NO: 301222 - protein, 15 aa, Homo sapiens
  CDR3 for beta chain variable domain of TCR clone 150611 (TRBV7-9, TRBJ2-5)
CASSFKAGREETQYF

SEQ ID NO: 301223 - protein, 13 aa, Homo sapiens
  CDR3 for alpha chain variable domain of TCR clone 150612 (TRAV29/DV5, TRAJ37)
CAAVPGNTGKLIS

SEQ ID NO: 301224 - protein, 13 aa, Homo sapiens
  CDR3 for beta chain variable domain of TCR clone 150612 (TRBV28, TRBJ2-7)
CASSPTLKREQYF

SEQ ID NO: 301225 - protein, 14 aa, Homo sapiens
  CDR3 for alpha chain variable domain of TCR clone 150613 (TRAV26-1, TRAJ21)
CIVRVGHNFNKFYF

SEQ ID NO: 301226 - protein, 15 aa, Homo sapiens
  CDR3 for beta chain variable domain of TCR clone 150613 (TRBV20-1, TRBJ2-7)
CSARDRVSGMDEQYF

SEQ ID NO: 301227 - protein, 15 aa, Homo sapiens
  CDR3 for alpha chain variable domain of TCR clone 150614 (TRAV3, TRAJ5)
CAVSDLDTGRRALLF

SEQ ID NO: 301228 - protein, 13 aa, Homo sapiens
  CDR3 for beta chain variable domain of TCR clone 150614 (TRBV12-4, TRBJ2-7)
CASSPTETYEQYF

SEQ ID NO: 301229 - protein, 13 aa, Homo sapiens
  CDR3 for alpha chain variable domain of TCR clone 150615 (TRAV29/DV5, TRAJ31)
CAASRNNNASLMF

SEQ ID NO: 301230 - protein, 12 aa, Homo sapiens
  CDR3 for beta chain variable domain of TCR clone 150615 (TRBV11-2, TRBJ2-1)
CASSPGNNEQFF

SEQ ID NO: 301231 - protein, 15 aa, Homo sapiens
  CDR3 for alpha chain variable domain of TCR clone 150616 (TRAV1-2, TRAJ30)
CAVRPHGNRDDKIII

SEQ ID NO: 301232 - protein, 13 aa, Homo sapiens
  CDR3 for beta chain variable domain of TCR clone 150616 (TRBV4-1, TRBJ2-7)
CASSQGQAYEQYF

SEQ ID NO: 301233 - protein, 15 aa, Homo sapiens
  CDR3 for alpha chain variable domain of TCR clone 150617 (TRAV16, TRAJ17)
CALSGNKAAGNKLTF

SEQ ID NO: 301234 - protein, 15 aa, Homo sapiens
  CDR3 for beta chain variable domain of TCR clone 150617 (TRBV7-8, TRBJ2-3)
CASSPRTGSTDTQYF

SEQ ID NO: 301235 - protein, 11 aa, Homo sapiens
  CDR3 for alpha chain variable domain of TCR clone 150618 (TRAV1-1, TRAJ23)
CAVRQGGKLIF

SEQ ID NO: 301236 - protein, 20 aa, Homo sapiens
  CDR3 for beta chain variable domain of TCR clone 150618 (TRBV7-8, TRBJ2-2)
CASSYLFPGPTVHITGELFF

SEQ ID NO: 301237 - protein, 16 aa, Homo sapiens
  CDR3 for alpha chain variable domain of TCR clone 150619 (TRAV12-3, TRAJ53)
CAMSPGSGGSNYKLTF

SEQ ID NO: 301238 - protein, 15 aa, Homo sapiens
  CDR3 for beta chain variable domain of TCR clone 150619 (TRBV4-2, TRBJ1-2)
CASSQRTGGRDGYTF

SEQ ID NO: 301239 - protein, 15 aa, Homo sapiens
  CDR3 for alpha chain variable domain of TCR clone 150620 (TRAV9-2, TRAJ49)
CALSPPDHTGNQFYF

SEQ ID NO: 301240 - protein, 16 aa, Homo sapiens
  CDR3 for beta chain variable domain of TCR clone 150620 (TRBV19, TRBJ2-1)
CASSKAGPSSYNEQFF

SEQ ID NO: 301241 - protein, 11 aa, Homo sapiens
  CDR3 for alpha chain variable domain of TCR clone 150621 (TRAV21, TRAJ11)
CAVNGYSTLTF

SEQ ID NO: 301242 - protein, 15 aa, Homo sapiens
  CDR3 for beta chain variable domain of TCR clone 150621 (TRBV18, TRBJ2-3)
CASSPGLAGGDTQYF

SEQ ID NO: 301243 - protein, 14 aa, Homo sapiens
  CDR3 for alpha chain variable domain of TCR clone 150622 (TRAV35, TRAJ42)
CAGNYGGSQGNLIF

SEQ ID NO: 301244 - protein, 15 aa, Homo sapiens
  CDR3 for beta chain variable domain of TCR clone 150622 (TRBV7-9, TRBJ2-1)
CASSLGWGRANEQFF

SEQ ID NO: 301245 - protein, 13 aa, Homo sapiens
  CDR3 for alpha chain variable domain of TCR clone 150623 (TRAV35, TRAJ44)
CAGLSGTASKLTF

SEQ ID NO: 301246 - protein, 20 aa, Homo sapiens
  CDR3 for beta chain variable domain of TCR clone 150623 (TRBV7-8, TRBJ2-2)
CASSHLFPGPTIHITGELFF

SEQ ID NO: 301247 - protein, 12 aa, Homo sapiens
  CDR3 for alpha chain variable domain of TCR clone 150624 (TRAV12-3, TRAJ41)
CAMSYSGYALNF

SEQ ID NO: 301248 - protein, 15 aa, Homo sapiens
  CDR3 for beta chain variable domain of TCR clone 150624 (TRBV7-3, TRBJ2-1)
CASSLDGNSYNEQFF

SEQ ID NO: 301249 - protein, 12 aa, Homo sapiens
  CDR3 for alpha chain variable domain of TCR clone 150625 (TRAV12-1, TRAJ5)
CVADAGRRALTF

SEQ ID NO: 301250 - protein, 14 aa, Homo sapiens
  CDR3 for beta chain variable domain of TCR clone 150625 (TRBV2, TRBJ1-1)
CASSEQWGDTEAFF

SEQ ID NO: 301251 - protein, 15 aa, Homo sapiens
  CDR3 for alpha chain variable domain of TCR clone 150626 (TRAV12-3, TRAJ27)
CAMRAYNTNAGKSTL

SEQ ID NO: 301252 - protein, 13 aa, Homo sapiens
  CDR3 for beta chain variable domain of TCR clone 150626 (TRBV11-2, TRBJ2-5)
CASSRGPSEAQYF

SEQ ID NO: 301253 - protein, 10 aa, Homo sapiens
  CDR3 for alpha chain variable domain of TCR clone 150627 (TRAV16, TRAJ22)
SAMYLRQLTF

SEQ ID NO: 301254 - protein, 15 aa, Homo sapiens
  CDR3 for beta chain variable domain of TCR clone 150627 (TRBV19, TRBJ2-1)
CASSSPGVPLDEQFF

SEQ ID NO: 301255 - protein, 13 aa, Homo sapiens
  CDR3 for alpha chain variable domain of TCR clone 150628 (TRAV23/DV6, TRAJ9)
CAANTTGGFKTIF

SEQ ID NO: 301256 - protein, 14 aa, Homo sapiens
  CDR3 for beta chain variable domain of TCR clone 150628 (TRBV5-1, TRBJ2-3)
CASRVDGVSDTQYF

SEQ ID NO: 301257 - protein, 15 aa, Homo sapiens
  CDR3 for alpha chain variable domain of TCR clone 150629 (TRAV14/DV4, TRAJ33)
CAMREGRDSNYQLIW

SEQ ID NO: 301258 - protein, 15 aa, Homo sapiens
  CDR3 for beta chain variable domain of TCR clone 150629 (TRBV5-5, TRBJ1-5)
CASSSTSGSNQPQHF

SEQ ID NO: 301259 - protein, 12 aa, Homo sapiens
  CDR3 for alpha chain variable domain of TCR clone 150630 (TRAV8-3, TRAJ16)
CAVGAPGQELLF

SEQ ID NO: 301260 - protein, 16 aa, Homo sapiens
  CDR3 for beta chain variable domain of TCR clone 150630 (TRBV7-2, TRBJ1-1)
CASSLSGTHAGTEAFF

SEQ ID NO: 301261 - protein, 14 aa, Homo sapiens
  CDR3 for alpha chain variable domain of TCR clone 150631 (TRAV12-3, TRAJ42)
CAMNYGGSQGNLIF

SEQ ID NO: 301262 - protein, 15 aa, Homo sapiens
  CDR3 for beta chain variable domain of TCR clone 150631 (TRBV5-7, TRBJ1-5)
CASRYGKLWVQPQHF

SEQ ID NO: 301263 - protein, 14 aa, Homo sapiens
  CDR3 for alpha chain variable domain of TCR clone 150632 (TRAV27, TRAJ22)
CAGLPSGSARQLTF

SEQ ID NO: 301264 - protein, 13 aa, Homo sapiens
  CDR3 for beta chain variable domain of TCR clone 150632 (TRBV7-2, TRBJ2-7)
CASSAPSGGEQYF

SEQ ID NO: 301265 - protein, 15 aa, Homo sapiens
  CDR3 for alpha chain variable domain of TCR clone 150633 (TRAV27, TRAJ38)
CAARRNAGINRKLIW

SEQ ID NO: 301266 - protein, 13 aa, Homo sapiens
  CDR3 for beta chain variable domain of TCR clone 150633 (TRBV4-2, TRBJ1-1)
CASSQAGNTEAFF

SEQ ID NO: 301267 - protein, 11 aa, Homo sapiens
  CDR3 for alpha chain variable domain of TCR clone 150634 (TRAV17, TRAJ36)
CSPTGANNLFF

SEQ ID NO: 301268 - protein, 15 aa, Homo sapiens
  CDR3 for beta chain variable domain of TCR clone 150634 (TRBV12-4, TRBJ1-1)
CASSWSQTGNTEAFF

SEQ ID NO: 301269 - protein, 13 aa, Homo sapiens
  CDR3 for alpha chain variable domain of TCR clone 150635 (TRAV8-3, TRAJ54)
CAVSIQGAQKLVF

SEQ ID NO: 301270 - protein, 12 aa, Homo sapiens
  CDR3 for beta chain variable domain of TCR clone 150635 (TRBV5-1, TRBJ1-2)
CASSQDTYGYTF

SEQ ID NO: 301271 - protein, 13 aa, Homo sapiens
  CDR3 for alpha chain variable domain of TCR clone 150636 (TRAV2, TRAJ40)
CAVVTSGTYKYIF

SEQ ID NO: 301272 - protein, 15 aa, Homo sapiens
  CDR3 for beta chain variable domain of TCR clone 150636 (TRBV11-3, TRBJ1-5)
CASSQGHQPNQPQHF

SEQ ID NO: 301273 - protein, 14 aa, Homo sapiens
  CDR3 for alpha chain variable domain of TCR clone 150637 (TRAV2, TRAJ41)
CAVGTSNSGYALNF

SEQ ID NO: 301274 - protein, 20 aa, Homo sapiens
  CDR3 for beta chain variable domain of TCR clone 150637 (TRBV19, TRBJ2-1)
CASSISRTVTSTRLNNEQFF

SEQ ID NO: 301275 - protein, 22 aa, Homo sapiens
  CDR3 for alpha chain variable domain of TCR clone 150638 (TRAV2, TRAJ9)
CAVEDRSGGLKLSLEQEQDYLL

SEQ ID NO: 301276 - protein, 11 aa, Homo sapiens
  CDR3 for beta chain variable domain of TCR clone 150638 (TRBV7-9, TRBJ2-5)
CASSLGETQYF

SEQ ID NO: 301277 - protein, 15 aa, Homo sapiens
  CDR3 for alpha chain variable domain of TCR clone 150639 (TRAV38-1, TRAJ57)
CAFMKLQGGSEKLVF

SEQ ID NO: 301278 - protein, 14 aa, Homo sapiens
  CDR3 for beta chain variable domain of TCR clone 150639 (TRBV25-1, TRBJ1-1)
CASTHLGGNTEAFF

SEQ ID NO: 301279 - protein, 14 aa, Homo sapiens
  CDR3 for alpha chain variable domain of TCR clone 150640 (TRAV17, TRAJ15)
CATGPNQAGTALLF

SEQ ID NO: 301280 - protein, 15 aa, Homo sapiens
  CDR3 for beta chain variable domain of TCR clone 150640 (TRBV11-2, TRBJ2-2)
CASSSDRVNAGELFF

SEQ ID NO: 301281 - protein, 11 aa, Homo sapiens
  CDR3 for alpha chain variable domain of TCR clone 150641 (TRAV35, TRAJ30)
CAGPGDDKIIL

SEQ ID NO: 301282 - protein, 12 aa, Homo sapiens
  CDR3 for beta chain variable domain of TCR clone 150641 (TRBV27, TRBJ2-1)
CASRGFYNEQFF

SEQ ID NO: 301283 - protein, 15 aa, Homo sapiens
  CDR3 for alpha chain variable domain of TCR clone 150642 (TRAV29/DV5, TRAJ42)
CAAKTDGGSQGNLIF

SEQ ID NO: 301284 - protein, 15 aa, Homo sapiens
  CDR3 for beta chain variable domain of TCR clone 150642 (TRBV5-1, TRBJ2-2)
CASNSHGGNTGELFF

SEQ ID NO: 301285 - protein, 14 aa, Homo sapiens
  CDR3 for alpha chain variable domain of TCR clone 150643 (TRAV12-2, TRAJ13)
CAVKKTGGYQKVTF

SEQ ID NO: 301286 - protein, 15 aa, Homo sapiens
  CDR3 for beta chain variable domain of TCR clone 150643 (TRBV27, TRBJ2-1)
CASSNGDGPPMSSSS

SEQ ID NO: 301287 - protein, 13 aa, Homo sapiens
  CDR3 for alpha chain variable domain of TCR clone 150644 (TRAV2, TRAJ15)
CAVASQAGTALIF

SEQ ID NO: 301288 - protein, 16 aa, Homo sapiens
  CDR3 for beta chain variable domain of TCR clone 150644 (TRBV5-1, TRBJ1-1)
CANSSGGNSLNTEAFF

SEQ ID NO: 301289 - protein, 18 aa, Homo sapiens
  CDR3 for alpha chain variable domain of TCR clone 150645 (TRAV8-4, TRAJ52)
CAVASFNAGVTSYGKLTF

SEQ ID NO: 301290 - protein, 14 aa, Homo sapiens
  CDR3 for beta chain variable domain of TCR clone 150645 (TRBV18, TRBJ1-5)
CASSRQQRNQPQHF

SEQ ID NO: 301291 - protein, 13 aa, Homo sapiens
  CDR3 for alpha chain variable domain of TCR clone 150646 (TRAV23/DV6, TRAJ58)
CAASGIGGSRLTF

SEQ ID NO: 301292 - protein, 15 aa, Homo sapiens
  CDR3 for beta chain variable domain of TCR clone 150646 (TRBV19, TRBJ1-1)
CASTSGQIQNTEAFF

SEQ ID NO: 301293 - protein, 15 aa, Homo sapiens
  CDR3 for alpha chain variable domain of TCR clone 150647 (TRAV8-4, TRAJ47)
CAVSDPEEYGNKLDF

SEQ ID NO: 301294 - protein, 15 aa, Homo sapiens
  CDR3 for beta chain variable domain of TCR clone 150647 (TRBV11-2, TRBJ2-1)
CASSLGPDSYNEQFF

SEQ ID NO: 301295 - protein, 13 aa, Homo sapiens
  CDR3 for alpha chain variable domain of TCR clone 150648 (TRAV29/DV5, TRAJ29)
CAASAAGNTPLFF

SEQ ID NO: 301296 - protein, 14 aa, Homo sapiens
  CDR3 for beta chain variable domain of TCR clone 150648 (TRBV19, TRBJ2-3)
CASSAPRGTDTQYF

SEQ ID NO: 301297 - protein, 13 aa, Homo sapiens
  CDR3 for alpha chain variable domain of TCR clone 150649 (TRAV3, TRAJ15)
CAVRDQAGTALIF

SEQ ID NO: 301298 - protein, 17 aa, Homo sapiens
  CDR3 for beta chain variable domain of TCR clone 150649 (TRBV25-1, TRBJ2-5)
CASSRRGGRGGQETQYF

SEQ ID NO: 301299 - protein, 18 aa, Homo sapiens
  CDR3 for alpha chain variable domain of TCR clone 150650 (TRAV21, TRAJ52)
CAVRPSPAGGTSYGKLTF

SEQ ID NO: 301300 - protein, 15 aa, Homo sapiens
  CDR3 for beta chain variable domain of TCR clone 150650 (TRBV10-3, TRBJ1-3)
CAISDSQGAGNTIYF

SEQ ID NO: 301301 - protein, 13 aa, Homo sapiens
  CDR3 for alpha chain variable domain of TCR clone 150651 (TRAV12-1, TRAJ6)
CVVFPGGSYIPTF

SEQ ID NO: 301302 - protein, 13 aa, Homo sapiens
  CDR3 for beta chain variable domain of TCR clone 150651 (TRBV9, TRBJ2-1)
CASSPSGGNEQFF

SEQ ID NO: 301303 - protein, 15 aa, Homo sapiens
  CDR3 for alpha chain variable domain of TCR clone 150652 (TRAV1-1, TRAJ4)
CAVRAFSGGYNKLIF

SEQ ID NO: 301304 - protein, 13 aa, Homo sapiens
  CDR3 for beta chain variable domain of TCR clone 150652 (TRBV7-9, TRBJ1-2)
CASSLKQNYGYTF

SEQ ID NO: 301305 - protein, 14 aa, Homo sapiens
  CDR3 for alpha chain variable domain of TCR clone 150653 (TRAV9-2, TRAJ28)
CALTLGAGSYQLTF

SEQ ID NO: 301306 - protein, 15 aa, Homo sapiens
  CDR3 for beta chain variable domain of TCR clone 150653 (TRBV7-8, TRBJ2-3)
CASRKLRDHTDTQDF

SEQ ID NO: 301307 - protein, 13 aa, Homo sapiens
  CDR3 for alpha chain variable domain of TCR clone 150654 (TRAV21, TRAJ15)
CAVPNQAGTALIF

SEQ ID NO: 301308 - protein, 16 aa, Homo sapiens
  CDR3 for beta chain variable domain of TCR clone 150654 (TRBV12-4, TRBJ2-5)
CASSWRPSGDLETQYF

SEQ ID NO: 301309 - protein, 15 aa, Homo sapiens
  CDR3 for alpha chain variable domain of TCR clone 150655 (TRAV13-1, TRAJ32)
CAASIYGGATNKLIF

SEQ ID NO: 301310 - protein, 14 aa, Homo sapiens
  CDR3 for beta chain variable domain of TCR clone 150655 (TRBV7-9, TRBJ2-1)
CASSLASGSNEQVF

SEQ ID NO: 301311 - protein, 12 aa, Homo sapiens
  CDR3 for alpha chain variable domain of TCR clone 150656 (TRAV3, TRAJ43)
CAVRDPNNDMRF

SEQ ID NO: 301312 - protein, 11 aa, Homo sapiens
  CDR3 for beta chain variable domain of TCR clone 150656 (TRBV20-1, TRBJ2-7)
CSARTSYEQYF

SEQ ID NO: 301313 - protein, 14 aa, Homo sapiens
  CDR3 for alpha chain variable domain of TCR clone 150657 (TRAV38-1, TRAJ45)
CASHSGGGANGLTF

SEQ ID NO: 301314 - protein, 16 aa, Homo sapiens
  CDR3 for beta chain variable domain of TCR clone 150657 (TRBV27, TRBJ2-2)
CASSFRGLVRTGELFF

SEQ ID NO: 301315 - protein, 16 aa, Homo sapiens
  CDR3 for alpha chain variable domain of TCR clone 150658 (TRAV3, TRAJ37)
CSVRGKGSGNTGKLIF

SEQ ID NO: 301316 - protein, 21 aa, Homo sapiens
  CDR3 for beta chain variable domain of TCR clone 150658 (TRBV15, TRBJ2-1)
AWGTQPCTCVPPAEVDTARFF

SEQ ID NO: 301317 - protein, 12 aa, Homo sapiens
  CDR3 for alpha chain variable domain of TCR clone 150659 (TRAV20, TRAJ56)
CAVTGANSKLTF

SEQ ID NO: 301318 - protein, 16 aa, Homo sapiens
  CDR3 for beta chain variable domain of TCR clone 150659 (TRBV20-1, TRBJ1-4)
CSAPGQGLLTNEKLFF

SEQ ID NO: 301319 - protein, 15 aa, Homo sapiens
  CDR3 for alpha chain variable domain of TCR clone 150660 (TRAV38-1, TRAJ37)
CAFIHGSGNTCKLIF

SEQ ID NO: 301320 - protein, 14 aa, Homo sapiens
  CDR3 for beta chain variable domain of TCR clone 150660 (TRBV29-1, TRBJ2-5)
CSVETSGSGETQYF

SEQ ID NO: 301321 - protein, 17 aa, Homo sapiens
  CDR3 for alpha chain variable domain of TCR clone 150661 (TRAV27, TRAJ52)
CAGAGWAGGTGYGKLTF

SEQ ID NO: 301322 - protein, 16 aa, Homo sapiens
  CDR3 for beta chain variable domain of TCR clone 150661 (TRBV19, TRBJ2-1)
CASSKAGPSSYNEQFF

SEQ ID NO: 301323 - protein, 13 aa, Homo sapiens
  CDR3 for alpha chain variable domain of TCR clone 150662 (TRAV8-4, TRAJ10)
CAAFTGGGDTHTF

SEQ ID NO: 301324 - protein, 15 aa, Homo sapiens
  CDR3 for beta chain variable domain of TCR clone 150662 (TRBV2, TRBJ2-3)
CASSDFEKATDTQYF

SEQ ID NO: 301325 - protein, 14 aa, Homo sapiens
  CDR3 for alpha chain variable domain of TCR clone 150663 (TRAV29/DV5, TRAJ45)
CAASARGGADGLTF

SEQ ID NO: 301326 - protein, 16 aa, Homo sapiens
  CDR3 for beta chain variable domain of TCR clone 150663 (TRBV5-1, TRBJ2-3)
CASSLALAVVSDTQYF

SEQ ID NO: 301327 - protein, 12 aa, Homo sapiens
  CDR3 for alpha chain variable domain of TCR clone 150664 (TRAV1-2, TRAJ7)
CAVASGNNRLAF

SEQ ID NO: 301328 - protein, 16 aa, Homo sapiens
  CDR3 for beta chain variable domain of TCR clone 150664 (TRBV5-1, TRBJ2-7)
CASSPMTGALSYEQYF

SEQ ID NO: 301329 - protein, 11 aa, Homo sapiens
  CDR3 for alpha chain variable domain of TCR clone 150665 (TRAV3, TRAJ21)
RAVGTFNKFYF

SEQ ID NO: 301330 - protein, 16 aa, Homo sapiens
  CDR3 for beta chain variable domain of TCR clone 150665 (TRBV19, TRBJ2-1)
CASSKAGPSSYNEQFF

SEQ ID NO: 301331 - protein, 14 aa, Homo sapiens
  CDR3 for alpha chain variable domain of TCR clone 150666 (TRAV4, TRAJ43)
CLVGPVYNNNDMRF

SEQ ID NO: 301332 - protein, 21 aa, Homo sapiens
  CDR3 for beta chain variable domain of TCR clone 150666 (TRBV11-1, TRBJ2-1)
CASSARERLRPEGPSYNEQFF

SEQ ID NO: 301333 - protein, 12 aa, Homo sapiens
  CDR3 for alpha chain variable domain of TCR clone 150667 (TRAV38-1, TRAJ57)
CAFMKLPPTLVF

SEQ ID NO: 301334 - protein, 13 aa, Homo sapiens
  CDR3 for beta chain variable domain of TCR clone 150667 (TRBV19, TRBJ2-7)
CASRTSGSYEQYF

SEQ ID NO: 301335 - protein, 14 aa, Homo sapiens
  CDR3 for alpha chain variable domain of TCR clone 150668 (TRAV13-1, TRAJ35)
CAASKGGFGNVLHC

SEQ ID NO: 301336 - protein, 16 aa, Homo sapiens
  CDR3 for beta chain variable domain of TCR clone 150668 (TRBV4-2, TRBJ2-5)
CASSQELVGSQETQYF

SEQ ID NO: 301337 - protein, 16 aa, Homo sapiens
  CDR3 for alpha chain variable domain of TCR clone 150669 (TRAV23/DV6, TRAJ48)
CAASGVVNFGNEKLTF

SEQ ID NO: 301338 - protein, 15 aa, Homo sapiens
  CDR3 for beta chain variable domain of TCR clone 150669 (TRBV20-1, TRBJ2-5)
CSAGLAGVPQETQYF

SEQ ID NO: 301339 - protein, 14 aa, Homo sapiens
  CDR3 for alpha chain variable domain of TCR clone 150670 (TRAV8-1, TRAJ5)
CAVRTDSGRRALTF

SEQ ID NO: 301340 - protein, 15 aa, Homo sapiens
  CDR3 for beta chain variable domain of TCR clone 150670 (TRBV7-3, TRBJ2-1)
CASSPTGGGEVEQFF

SEQ ID NO: 301341 - protein, 18 aa, Homo sapiens
  CDR3 for alpha chain variable domain of TCR clone 150671 (TRAV21, TRAJ52)
CAVRPSPAGGTSYGKLTF

SEQ ID NO: 301342 - protein, 17 aa, Homo sapiens
  CDR3 for beta chain variable domain of TCR clone 150671 (TRBV13, TRBJ2-5)
CASSQDLTGGPIETQYF

SEQ ID NO: 301343 - protein, 12 aa, Homo sapiens
  CDR3 for alpha chain variable domain of TCR clone 150672 (TRAV12-2, TRAJ31)
CAVWGNNARLMF

SEQ ID NO: 301344 - protein, 14 aa, Homo sapiens
  CDR3 for beta chain variable domain of TCR clone 150672 (TRBV7-6, TRBJ2-3)
CASSLGTVTDTQYF

SEQ ID NO: 301345 - protein, 12 aa, Homo sapiens
  CDR3 for alpha chain variable domain of TCR clone 150673 (TRAV8-3, TRAJ26)
CAGDNYGQNFVF

SEQ ID NO: 301346 - protein, 15 aa, Homo sapiens
  CDR3 for beta chain variable domain of TCR clone 150673 (TRBV7-8, TRBJ2-1)
CASSLADSLYNEQFF

SEQ ID NO: 301347 - protein, 14 aa, Homo sapiens
  CDR3 for alpha chain variable domain of TCR clone 150674 (TRAV1-2, TRAJ8)
CAVREDTGLQKLVV

SEQ ID NO: 301348 - protein, 15 aa, Homo sapiens
  CDR3 for beta chain variable domain of TCR clone 150674 (TRBV6-3, TRBJ2-7)
CASSSPGTVFYEQYF

SEQ ID NO: 301349 - protein, 12 aa, Homo sapiens
  CDR3 for alpha chain variable domain of TCR clone 150675 (TRAV1-1, TRAJ39)
CAVPVVGNMLTF

SEQ ID NO: 301350 - protein, 18 aa, Homo sapiens
  CDR3 for beta chain variable domain of TCR clone 150675 (TRBV7-9, TRBJ2-7)
CASSLTARGSRTWYEQYF

SEQ ID NO: 301351 - protein, 13 aa, Homo sapiens
  CDR3 for alpha chain variable domain of TCR clone 150676 (TRAV8-1, TRAJ28)
CAVSGAGSYQLTF

SEQ ID NO: 301352 - protein, 12 aa, Homo sapiens
  CDR3 for beta chain variable domain of TCR clone 150676 (TRBV12-4, TRBJ2-7)
CASSLGGYEQYF

SEQ ID NO: 301353 - protein, 14 aa, Homo sapiens
  CDR3 for alpha chain variable domain of TCR clone 150677 (TRAV1-2, TRAJ16)
CAVNRFSDGQKLLF

SEQ ID NO: 301354 - protein, 17 aa, Homo sapiens
  CDR3 for beta chain variable domain of TCR clone 150677 (TRBV7-2, TRBJ2-1)
CASSLGPPWGGLDEQFF

SEQ ID NO: 301355 - protein, 14 aa, Homo sapiens
  CDR3 for alpha chain variable domain of TCR clone 150678 (TRAV13-1, TRAJ10)
CVAKEPGGGNKLTF

SEQ ID NO: 301356 - protein, 14 aa, Homo sapiens
  CDR3 for beta chain variable domain of TCR clone 150678 (TRBV6-6, TRBJ2-7)
CASSDSGAGYEQYF

SEQ ID NO: 301357 - protein, 15 aa, Homo sapiens
  CDR3 for alpha chain variable domain of TCR clone 150679 (TRAV26-1, TRAJ22)
CIVRVSFWFCKATDL

SEQ ID NO: 301358 - protein, 12 aa, Homo sapiens
  CDR3 for beta chain variable domain of TCR clone 150679 (TRBV11-3, TRBJ2-2)
CASSPGGGELFF

SEQ ID NO: 301359 - protein, 15 aa, Homo sapiens
  CDR3 for alpha chain variable domain of TCR clone 150680 (TRAV3, TRAJ20)
CAVSDIKLSDYKLSF

SEQ ID NO: 301360 - protein, 12 aa, Homo sapiens
  CDR3 for beta chain variable domain of TCR clone 150680 (TRBV12-4, TRBJ2-5)
CASSSAQETQYF

SEQ ID NO: 301361 - protein, 13 aa, Homo sapiens
  CDR3 for alpha chain variable domain of TCR clone 150681 (TRAV38-2/DV8, TRAJ34)
CAYRNYNTVKLIF

SEQ ID NO: 301362 - protein, 15 aa, Homo sapiens
  CDR3 for beta chain variable domain of TCR clone 150681 (TRBV20-1, TRBJ2-5)
CSAEGTGGLQETQYF

SEQ ID NO: 301363 - protein, 15 aa, Homo sapiens
  CDR3 for alpha chain variable domain of TCR clone 150682 (TRAV8-6, TRAJ10)
CAVSDQAGGGNKLTF

SEQ ID NO: 301364 - protein, 15 aa, Homo sapiens
  CDR3 for beta chain variable domain of TCR clone 150682 (TRBV3-1, TRBJ2-5)
CACSANLGGPETQYF

SEQ ID NO: 301365 - protein, 11 aa, Homo sapiens
  CDR3 for alpha chain variable domain of TCR clone 150683 (TRAV17, TRAJ9)
CFTTGGFKTIF

SEQ ID NO: 301366 - protein, 14 aa, Homo sapiens
  CDR3 for beta chain variable domain of TCR clone 150683 (TRBV7-9, TRBJ2-2)
CASSGLADTGELFF

SEQ ID NO: 301367 - protein, 15 aa, Homo sapiens
  CDR3 for alpha chain variable domain of TCR clone 150684 (TRAV14/DV4, TRAJ12)
CAMREGWDSSYKLIF

SEQ ID NO: 301368 - protein, 16 aa, Homo sapiens
  CDR3 for beta chain variable domain of TCR clone 150684 (TRBV2, TRBJ2-5)
CASSETQGAGEETQYF

SEQ ID NO: 301369 - protein, 13 aa, Homo sapiens
  CDR3 for alpha chain variable domain of TCR clone 150685 (TRAV8-3, TRAJ28)
CAVSAGGSYQLTF

SEQ ID NO: 301370 - protein, 14 aa, Homo sapiens
  CDR3 for beta chain variable domain of TCR clone 150685 (TRBV7-2, TRBJ2-7)
CASRSQGAAYEQYF

SEQ ID NO: 301371 - protein, 12 aa, Homo sapiens
  CDR3 for alpha chain variable domain of TCR clone 150686 (TRAV12-3, TRAJ17)
CAMTLTGNKLTF

SEQ ID NO: 301372 - protein, 20 aa, Homo sapiens
  CDR3 for beta chain variable domain of TCR clone 150686 (TRBV11-2, TRBJ2-7)
CASSPVGRERAGGPSYEQYF

SEQ ID NO: 301373 - protein, 13 aa, Homo sapiens
  CDR3 for alpha chain variable domain of TCR clone 150687 (TRAV21, TRAJ27)
CAARPGNAGKSTC

SEQ ID NO: 301374 - protein, 14 aa, Homo sapiens
  CDR3 for beta chain variable domain of TCR clone 150687 (TRBV7-9, TRBJ2-5)
CASSLDTAQETQYF

SEQ ID NO: 301375 - protein, 19 aa, Homo sapiens
  CDR3 for alpha chain variable domain of TCR clone 150688 (TRAV25, TRAJ43)
TATQTTDVGTYFCSVFMRF

SEQ ID NO: 301376 - protein, 13 aa, Homo sapiens
  CDR3 for beta chain variable domain of TCR clone 150688 (TRBV7-9, TRBJ1-2)
CASSLKQNYGYTF

SEQ ID NO: 301377 - protein, 15 aa, Homo sapiens
  CDR3 for alpha chain variable domain of TCR clone 150689 (TRAV4, TRAJ8)
CLVGEQHTGFQKLVF

SEQ ID NO: 301378 - protein, 15 aa, Homo sapiens
  CDR3 for beta chain variable domain of TCR clone 150689 (TRBV7-9, TRBJ2-5)
CASSNRDYLQATQYF

SEQ ID NO: 301379 - protein, 15 aa, Homo sapiens
  CDR3 for alpha chain variable domain of TCR clone 150690 (TRAV23/DV6, TRAJ18)
CAARYRGSTLGRLYF

SEQ ID NO: 301380 - protein, 13 aa, Homo sapiens
  CDR3 for beta chain variable domain of TCR clone 150690 (TRBV7-2, TRBJ2-7)
CASSSPSGSEHYF

SEQ ID NO: 301381 - protein, 21 aa, Homo sapiens
  CDR3 for alpha chain variable domain of TCR clone 150691 (TRAV3, TRAJ17)
CAVRARRGGRSCRQQANFWSR

SEQ ID NO: 301382 - protein, 14 aa, Homo sapiens
  CDR3 for beta chain variable domain of TCR clone 150691 (TRBV4-1, TRBJ2-2)
CASSQAVNTGELFF

SEQ ID NO: 301383 - protein, 13 aa, Homo sapiens
  CDR3 for alpha chain variable domain of TCR clone 150692 (TRAV3, TRAJ21)
CAVREPDFNKFYF

SEQ ID NO: 301384 - protein, 13 aa, Homo sapiens
  CDR3 for beta chain variable domain of TCR clone 150692 (TRBV7-2, TRBJ2-2)
CASSSVRAGELFF

SEQ ID NO: 301385 - protein, 13 aa, Homo sapiens
  CDR3 for alpha chain variable domain of TCR clone 150693 (TRAV3, TRAJ41)
FAVSSNSGYALNF

SEQ ID NO: 301386 - protein, 14 aa, Homo sapiens
  CDR3 for beta chain variable domain of TCR clone 150693 (TRBV7-2, TRBJ2-7)
CASSPKTSFYEQYF

SEQ ID NO: 301387 - protein, 13 aa, Homo sapiens
  CDR3 for alpha chain variable domain of TCR clone 150694 (TRAV8-4, TRAJ10)
CAAFTEGGNKLTF

SEQ ID NO: 301388 - protein, 15 aa, Homo sapiens
  CDR3 for beta chain variable domain of TCR clone 150694 (TRBV2, TRBJ2-3)
CASSDFEKATDTQYF

SEQ ID NO: 301389 - protein, 13 aa, Homo sapiens
  CDR3 for alpha chain variable domain of TCR clone 150695 (TRAV35, TRAJ36)
CAGPRIGANNLFF

SEQ ID NO: 301390 - protein, 12 aa, Homo sapiens
  CDR3 for beta chain variable domain of TCR clone 150695 (TRBV11-2, TRBJ2-2)
CASSLGGGELFF

SEQ ID NO: 301391 - protein, 15 aa, Homo sapiens
  CDR3 for alpha chain variable domain of TCR clone 150696 (TRAV17, TRAJ56)
CATDANTGDNSKLTF

SEQ ID NO: 301392 - protein, 14 aa, Homo sapiens
  CDR3 for beta chain variable domain of TCR clone 150696 (TRBV19, TRBJ1-5)
CASSLGTGGQPQHF

SEQ ID NO: 301393 - protein, 11 aa, Homo sapiens
  CDR3 for alpha chain variable domain of TCR clone 150697 (TRAV12-1, TRAJ30)
CVVNGQDKIIF

SEQ ID NO: 301394 - protein, 15 aa, Homo sapiens
  CDR3 for beta chain variable domain of TCR clone 150697 (TRBV28, TRBJ2-5)
CASSAGRTIQETQYF

SEQ ID NO: 301395 - protein, 16 aa, Homo sapiens
  CDR3 for alpha chain variable domain of TCR clone 150698 (TRAV20, TRAJ10)
CAVLRGLTGGGNKHTV

SEQ ID NO: 301396 - protein, 14 aa, Homo sapiens
  CDR3 for beta chain variable domain of TCR clone 150698 (TRBV19, TRBJ1-5)
WASIAPDSFLAQHF

SEQ ID NO: 301397 - protein, 17 aa, Homo sapiens
  CDR3 for alpha chain variable domain of TCR clone 150699 (TRAV8-6, TRAJ8)
CAVKEGIENTGFQKLVF

SEQ ID NO: 301398 - protein, 17 aa, Homo sapiens
  CDR3 for beta chain variable domain of TCR clone 150699 (TRBV20-1, TRBJ2-2)
CSASGSGQGGLTGELFF

SEQ ID NO: 301399 - protein, 13 aa, Homo sapiens
  CDR3 for alpha chain variable domain of TCR clone 150700 (TRAV17, TRAJ26)
CATVDNDGQNFVF

SEQ ID NO: 301400 - protein, 14 aa, Homo sapiens
  CDR3 for beta chain variable domain of TCR clone 150700 (TRBV6-1, TRBJ1-3)
CASVQGGGGNTIYF

SEQ ID NO: 301401 - protein, 13 aa, Homo sapiens
  CDR3 for alpha chain variable domain of TCR clone 150701 (TRAV22, TRAJ29)
CDVGGSGNTPLVF

SEQ ID NO: 301402 - protein, 13 aa, Homo sapiens
  CDR3 for beta chain variable domain of TCR clone 150701 (TRBV4-2, TRBJ1-1)
CASSQAGNTEAFF

SEQ ID NO: 301403 - protein, 14 aa, Homo sapiens
  CDR3 for alpha chain variable domain of TCR clone 150702 (TRAV1-2, TRAJ16)
CAVNRFSDCQKLLF

SEQ ID NO: 301404 - protein, 13 aa, Homo sapiens
  CDR3 for beta chain variable domain of TCR clone 150702 (TRBV10-3, TRBJ2-7)
CASKLAVNYGQYF

SEQ ID NO: 301405 - protein, 15 aa, Homo sapiens
  CDR3 for alpha chain variable domain of TCR clone 150703 (TRAV14/DV4, TRAJ33)
CAMREGRDSNYQLIW

SEQ ID NO: 301406 - protein, 14 aa, Homo sapiens
  CDR3 for beta chain variable domain of TCR clone 150703 (TRBV4-2, TRBJ2-1)
CASGLDRAYNEQFF

SEQ ID NO: 301407 - protein, 14 aa, Homo sapiens
  CDR3 for alpha chain variable domain of TCR clone 150704 (TRAV26-1, TRAJ38)
CIADNAGNNRKLIW

SEQ ID NO: 301408 - protein, 14 aa, Homo sapiens
  CDR3 for beta chain variable domain of TCR clone 150704 (TRBV28, TRBJ2-1)
CASSLNGRNNEQFF

SEQ ID NO: 301409 - protein, 14 aa, Homo sapiens
  CDR3 for alpha chain variable domain of TCR clone 150705 (TRAV1-2, TRAJ8)
CAVREDTGFQKLVF

SEQ ID NO: 301410 - protein, 14 aa, Homo sapiens
  CDR3 for beta chain variable domain of TCR clone 150705 (TRBV7-3, TRBJ2-1)
CASSSAGGTNEQFF

SEQ ID NO: 301411 - protein, 15 aa, Homo sapiens
  CDR3 for alpha chain variable domain of TCR clone 150706 (TRAV3, TRAJ47)
CAVRDIGKYGNKLVF

SEQ ID NO: 301412 - protein, 14 aa, Homo sapiens
  CDR3 for beta chain variable domain of TCR clone 150706 (TRBV13, TRBJ2-5)
CGSSLERVGETQYF

SEQ ID NO: 301413 - protein, 14 aa, Homo sapiens
  CDR3 for alpha chain variable domain of TCR clone 150707 (TRAV17, TRAJ31)
CATVLRNNNARLMF

SEQ ID NO: 301414 - protein, 10 aa, Homo sapiens
  CDR3 for beta chain variable domain of TCR clone 150707 (TRBV12-4, TRBJ2-2)
CASSLVAGTR

SEQ ID NO: 301415 - protein, 14 aa, Homo sapiens
  CDR3 for alpha chain variable domain of TCR clone 150708 (TRAV1-2, TRAJ16)
CAVNRFSDDQKLLF

SEQ ID NO: 301416 - protein, 13 aa, Homo sapiens
  CDR3 for beta chain variable domain of TCR clone 150708 (TRBV10-2, TRBJ2-7)
CASGASGGYEQYF

SEQ ID NO: 301417 - protein, 14 aa, Homo sapiens
  CDR3 for alpha chain variable domain of TCR clone 150709 (TRAV4, TRAJ17)
CLVGDMAAGNKLIF

SEQ ID NO: 301418 - protein, 13 aa, Homo sapiens
  CDR3 for beta chain variable domain of TCR clone 150709 (TRBV18, TRBJ2-7)
CASQSGGGYEQYF

SEQ ID NO: 301419 - protein, 13 aa, Homo sapiens
  CDR3 for alpha chain variable domain of TCR clone 150710 (TRAV8-6, TRAJ16)
CAVSSPDGQMLLF

SEQ ID NO: 301420 - protein, 16 aa, Homo sapiens
  CDR3 for beta chain variable domain of TCR clone 150710 (TRBV5-7, TRBJ2-3)
CASSSLGGAITDTQYF

SEQ ID NO: 301421 - protein, 11 aa, Homo sapiens
  CDR3 for alpha chain variable domain of TCR clone 150711 (TRAV1-1, TRAJ5)
CAVRVRRALTF

SEQ ID NO: 301422 - protein, 17 aa, Homo sapiens
  CDR3 for beta chain variable domain of TCR clone 150711 (TRBV19, TRBJ2-6)
CASSTGQVFSGANVLTF

SEQ ID NO: 301423 - protein, 15 aa, Homo sapiens
  CDR3 for alpha chain variable domain of TCR clone 150712 (TRAV26-1, TRAJ23)
CIVRVAGYQGGKLIF

SEQ ID NO: 301424 - protein, 16 aa, Homo sapiens
  CDR3 for beta chain variable domain of TCR clone 150712 (TRBV12-5, TRBJ2-5)
CASGPRTSGNQETQYF

SEQ ID NO: 301425 - protein, 14 aa, Homo sapiens
  CDR3 for alpha chain variable domain of TCR clone 150713 (TRAV12-2, TRAJ13)
CAVKKTGGYQKVTF

SEQ ID NO: 301426 - protein, 15 aa, Homo sapiens
  CDR3 for beta chain variable domain of TCR clone 150713 (TRBV20-1, TRBJ2-2)
CSAIPGHSNTGELFF

SEQ ID NO: 301427 - protein, 12 aa, Homo sapiens
  CDR3 for alpha chain variable domain of TCR clone 150714 (TRAV12-1, TRAJ16)
CVVIRDGQKLLF

SEQ ID NO: 301428 - protein, 16 aa, Homo sapiens
  CDR3 for beta chain variable domain of TCR clone 150714 (TRBV27, TRBJ2-5)
CASSYGPGGQKETQYF

SEQ ID NO: 301429 - protein, 13 aa, Homo sapiens
  CDR3 for alpha chain variable domain of TCR clone 150715 (TRAV13-2, TRAJ13)
CAERPGGYQKATF

SEQ ID NO: 301430 - protein, 18 aa, Homo sapiens
  CDR3 for beta chain variable domain of TCR clone 150715 (TRBV4-1, TRBJ2-3)
CASSQGGASGGATDTQYF

SEQ ID NO: 301431 - protein, 13 aa, Homo sapiens
  CDR3 for alpha chain variable domain of TCR clone 150716 (TRAV21, TRAJ27)
CAARPGNAGKSTF

SEQ ID NO: 301432 - protein, 14 aa, Homo sapiens
  CDR3 for beta chain variable domain of TCR clone 150716 (TRBV20-1, TRBJ2-1)
CRAAGSGEYNEQFF

SEQ ID NO: 301433 - protein, 14 aa, Homo sapiens
  CDR3 for alpha chain variable domain of TCR clone 150717 (TRAV16, TRAJ17)
CALSGRAAGDKLTF

SEQ ID NO: 301434 - protein, 17 aa, Homo sapiens
  CDR3 for beta chain variable domain of TCR clone 150717 (TRBV18, TRBJ2-6)
CASSPRQGAVGANVLTF

SEQ ID NO: 301435 - protein, 15 aa, Homo sapiens
  CDR3 for alpha chain variable domain of TCR clone 150718 (TRAV3, TRAJ5)
CALRDLDTGRRALTF

SEQ ID NO: 301436 - protein, 16 aa, Homo sapiens
  CDR3 for beta chain variable domain of TCR clone 150718 (TRBV20-1, TRBJ1-2)
CSASMGQGVANYGYTF

SEQ ID NO: 301437 - protein, 12 aa, Homo sapiens
  CDR3 for alpha chain variable domain of TCR clone 150719 (TRAV13-2, TRAJ23)
CAEHHRGGKLFF

SEQ ID NO: 301438 - protein, 16 aa, Homo sapiens
  CDR3 for beta chain variable domain of TCR clone 150719 (TRBV12-5, TRBJ2-5)
CASGPRTSGNQETQYF

SEQ ID NO: 301439 - protein, 12 aa, Homo sapiens
  CDR3 for alpha chain variable domain of TCR clone 150720 (TRAV29/DV5, TRAJ34)
CAASGNTDKLIF

SEQ ID NO: 301440 - protein, 15 aa, Homo sapiens
  CDR3 for beta chain variable domain of TCR clone 150720 (TRBV4-3, TRBJ2-2)
CASSQGTGGTGELFF

SEQ ID NO: 301441 - protein, 13 aa, Homo sapiens
  CDR3 for alpha chain variable domain of TCR clone 150721 (TRAV1-1, TRAJ9)
CAAKNTGGFKTIF

SEQ ID NO: 301442 - protein, 14 aa, Homo sapiens
  CDR3 for beta chain variable domain of TCR clone 150721 (TRBV7-2, TRBJ2-3)
CASSQTGSSYTQYF

SEQ ID NO: 301443 - protein, 11 aa, Homo sapiens
  CDR3 for alpha chain variable domain of TCR clone 150722 (TRAV17, TRAJ43)
CATLRSDDMRF

SEQ ID NO: 301444 - protein, 15 aa, Homo sapiens
  CDR3 for beta chain variable domain of TCR clone 150722 (TRBV11-2, TRBJ2-1)
CASSLGTSGLNEQFI

SEQ ID NO: 301445 - protein, 14 aa, Homo sapiens
  CDR3 for alpha chain variable domain of TCR clone 150723 (TRAV38-1, TRAJ45)
CASHSGGGADGLTF

SEQ ID NO: 301446 - protein, 14 aa, Homo sapiens
  CDR3 for beta chain variable domain of TCR clone 150723 (TRBV7-8, TRBJ2-3)
CASSLEAGTDTQYF

SEQ ID NO: 301447 - protein, 15 aa, Homo sapiens
  CDR3 for alpha chain variable domain of TCR clone 150724 (TRAV12-3, TRAJ6)
CAMSATTGGSYIPTF

SEQ ID NO: 301448 - protein, 11 aa, Homo sapiens
  CDR3 for beta chain variable domain of TCR clone 150724 (TRBV11-2, TRBJ1-1)
CASSINTEAFF

SEQ ID NO: 301449 - protein, 15 aa, Homo sapiens
  CDR3 for alpha chain variable domain of TCR clone 150725 (TRAV22, TRAJ24)
CAVPLSTDSWGKLQS

SEQ ID NO: 301450 - protein, 16 aa, Homo sapiens
  CDR3 for beta chain variable domain of TCR clone 150725 (TRBV28, TRBJ2-7)
CASSFPDRRLTYEQYF

SEQ ID NO: 301451 - protein, 12 aa, Homo sapiens
  CDR3 for alpha chain variable domain of TCR clone 150726 (TRAV10, TRAJ43)
CVVVRVGNDMRF

SEQ ID NO: 301452 - protein, 16 aa, Homo sapiens
  CDR3 for beta chain variable domain of TCR clone 150726 (TRBV2, TRBJ2-7)
CASSEGLARSYEQYFG

SEQ ID NO: 301453 - protein, 13 aa, Homo sapiens
  CDR3 for alpha chain variable domain of TCR clone 150727 (TRAV26-1, TRAJ30)
CIARVESNDKIIF

SEQ ID NO: 301454 - protein, 17 aa, Homo sapiens
  CDR3 for beta chain variable domain of TCR clone 150727 (TRBV13, TRBJ2-3)
CASSLSRVAGGRNTQYF

SEQ ID NO: 301455 - protein, 14 aa, Homo sapiens
  CDR3 for alpha chain variable domain of TCR clone 150728 (TRAV8-2, TRAJ4)
CVVSPSGGYNKLIF

SEQ ID NO: 301456 - protein, 11 aa, Homo sapiens
  CDR3 for beta chain variable domain of TCR clone 150728 (TRBV12-4, TRBJ2-3)
CASTATDTQYF

SEQ ID NO: 301457 - protein, 11 aa, Homo sapiens
  CDR3 for alpha chain variable domain of TCR clone 150729 (TRAV29/DV5, TRAJ47)
CAAQRGNKLVF

SEQ ID NO: 301458 - protein, 12 aa, Homo sapiens
  CDR3 for beta chain variable domain of TCR clone 150729 (TRBV11-2, TRBJ2-7)
CASSLPTYEQFF

SEQ ID NO: 301459 - protein, 13 aa, Homo sapiens
  CDR3 for alpha chain variable domain of TCR clone 150730 (TRAV12-3, TRAJ7)
CAMTPYGNNRLAF

SEQ ID NO: 301460 - protein, 16 aa, Homo sapiens
  CDR3 for beta chain variable domain of TCR clone 150730 (TRBV20-1, TRBJ1-4)
CSARPYGGELNEKLFI

SEQ ID NO: 301461 - protein, 15 aa, Homo sapiens
  CDR3 for alpha chain variable domain of TCR clone 150731 (TRAV8-2, TRAJ44)
DAAEYFDGTASKFTF

SEQ ID NO: 301462 - protein, 14 aa, Homo sapiens
  CDR3 for beta chain variable domain of TCR clone 150731 (TRBV7-8, TRBJ2-3)
CASSLDRGTDTQYF

SEQ ID NO: 301463 - protein, 11 aa, Homo sapiens
  CDR3 for alpha chain variable domain of TCR clone 150732 (TRAV22, TRAJ20)
CAPLHDYKLSF

SEQ ID NO: 301464 - protein, 13 aa, Homo sapiens
  CDR3 for beta chain variable domain of TCR clone 150732 (TRBV10-3, TRBJ2-7)
CASKLAVNYEQYF

SEQ ID NO: 301465 - protein, 15 aa, Homo sapiens
  CDR3 for alpha chain variable domain of TCR clone 150733 (TRAV25, TRAJ52)
CAGTSGGTSYGKLTF

SEQ ID NO: 301466 - protein, 16 aa, Homo sapiens
  CDR3 for beta chain variable domain of TCR clone 150733 (TRBV15, TRBJ1-2)
CATSRGPRTGGGGYTF

SEQ ID NO: 301467 - protein, 12 aa, Homo sapiens
  CDR3 for alpha chain variable domain of TCR clone 150734 (TRAV26-1, TRAJ13)
FIVSRGYQKVTF

SEQ ID NO: 301468 - protein, 16 aa, Homo sapiens
  CDR3 for beta chain variable domain of TCR clone 150734 (TRBV27, TRBJ2-1)
CASSVSKGFGLDEQFF

SEQ ID NO: 301469 - protein, 16 aa, Homo sapiens
  CDR3 for alpha chain variable domain of TCR clone 150735 (TRAV1-2, TRAJ10)
CAVRGVLTGGGNKLTF

SEQ ID NO: 301470 - protein, 16 aa, Homo sapiens
  CDR3 for beta chain variable domain of TCR clone 150735 (TRBV29-1, TRBJ2-6)
CSVEDITYSGANVLTF

SEQ ID NO: 301471 - protein, 14 aa, Homo sapiens
  CDR3 for alpha chain variable domain of TCR clone 150736 (TRAV12-2, TRAJ24)
CAVTPADSWVNCSL

SEQ ID NO: 301472 - protein, 15 aa, Homo sapiens
  CDR3 for beta chain variable domain of TCR clone 150736 (TRBV7-6, TRBJ2-1)
CASSSLAGEGNEQFF

SEQ ID NO: 301473 - protein, 13 aa, Homo sapiens
  CDR3 for alpha chain variable domain of TCR clone 150737 (TRAV21, TRAJ29)
CAAPNSGNTPLVF

SEQ ID NO: 301474 - protein, 12 aa, Homo sapiens
  CDR3 for beta chain variable domain of TCR clone 150737 (TRBV12-4, TRBJ2-1)
CASSPGRNEQFF

SEQ ID NO: 301475 - protein, 12 aa, Homo sapiens
  CDR3 for alpha chain variable domain of TCR clone 150738 (TRAV21, TRAJ39)
CAADNAGNMLTF

SEQ ID NO: 301476 - protein, 13 aa, Homo sapiens
  CDR3 for beta chain variable domain of TCR clone 150738 (TRBV12-4, TRBJ1-1)
CASSPGTGFEASF

SEQ ID NO: 301477 - protein, 11 aa, Homo sapiens
  CDR3 for alpha chain variable domain of TCR clone 150739 (TRAV12-2, TRAJ29)
CAVTLRSPLVF

SEQ ID NO: 301478 - protein, 14 aa, Homo sapiens
  CDR3 for beta chain variable domain of TCR clone 150739 (TRBV4-2, TRBJ2-1)
CASGLDRAYNEQFF

SEQ ID NO: 301479 - protein, 14 aa, Homo sapiens
  CDR3 for alpha chain variable domain of TCR clone 150740 (TRAV12-2, TRAJ24)
CAVTPADSWGKLQF

SEQ ID NO: 301480 - protein, 14 aa, Homo sapiens
  CDR3 for beta chain variable domain of TCR clone 150740 (TRBV7-8, TRBJ2-3)
CASSSRDSTDTQYF

SEQ ID NO: 301481 - protein, 13 aa, Homo sapiens
  CDR3 for alpha chain variable domain of TCR clone 150741 (TRAV2, TRAJ40)
CAVVTSGTYKYIF

SEQ ID NO: 301482 - protein, 14 aa, Homo sapiens
  CDR3 for beta chain variable domain of TCR clone 150741 (TRBV11-3, TRBJ2-3)
CQPEGRREGDTQYF

SEQ ID NO: 301483 - protein, 13 aa, Homo sapiens
  CDR3 for alpha chain variable domain of TCR clone 150742 (TRAV20, TRAJ37)
CAGCSSNTGKLIL

SEQ ID NO: 301484 - protein, 14 aa, Homo sapiens
  CDR3 for beta chain variable domain of TCR clone 150742 (TRBV18, TRBJ2-7)
CASSPRGGAYEQYF

SEQ ID NO: 301485 - protein, 17 aa, Homo sapiens
  CDR3 for alpha chain variable domain of TCR clone 150743 (TRAV26-1, TRAJ53)
CIVIVDDSGGSNYKLTF

SEQ ID NO: 301486 - protein, 16 aa, Homo sapiens
  CDR3 for beta chain variable domain of TCR clone 150743 (TRBV6-1, TRBJ2-5)
CASSETLDRGAETQYF

SEQ ID NO: 301487 - protein, 11 aa, Homo sapiens
  CDR3 for alpha chain variable domain of TCR clone 150744 (TRAV21, TRAJ48)
CAVGGNEKLTF

SEQ ID NO: 301488 - protein, 15 aa, Homo sapiens
  CDR3 for beta chain variable domain of TCR clone 150744 (TRBV7-2, TRBJ2-1)
CASRKTGSSYNEQFF

SEQ ID NO: 301489 - protein, 16 aa, Homo sapiens
  CDR3 for alpha chain variable domain of TCR clone 150745 (TRAV3, TRAJ21)
CAVRDIERGNFNKFYF

SEQ ID NO: 301490 - protein, 14 aa, Homo sapiens
  CDR3 for beta chain variable domain of TCR clone 150745 (TRBV12-4, TRBJ2-5)
CASSLSSGRETQCF

SEQ ID NO: 301491 - protein, 13 aa, Homo sapiens
  CDR3 for alpha chain variable domain of TCR clone 150746 (TRAV1-2, TRAJ9)
CAALNTGGFKTIF

SEQ ID NO: 301492 - protein, 14 aa, Homo sapiens
  CDR3 for beta chain variable domain of TCR clone 150746 (TRBV6-1, TRBJ1-3)
CASVQGGGGNTIYC

SEQ ID NO: 301493 - protein, 17 aa, Homo sapiens
  CDR3 for alpha chain variable domain of TCR clone 150747 (TRAV26-1, TRAJ58)
CIVRVGAEETSGSRLTF

SEQ ID NO: 301494 - protein, 14 aa, Homo sapiens
  CDR3 for beta chain variable domain of TCR clone 150747 (TRBV5-7, TRBJ1-1)
CASSLAGDWTEAFF

SEQ ID NO: 301495 - protein, 15 aa, Homo sapiens
  CDR3 for alpha chain variable domain of TCR clone 150748 (TRAV3, TRAJ9)
CAVRARNTGGFKTIF

SEQ ID NO: 301496 - protein, 12 aa, Homo sapiens
  CDR3 for beta chain variable domain of TCR clone 150748 (TRBV11-2, TRBJ2-1)
CASSPGNNEQFF

SEQ ID NO: 301497 - protein, 13 aa, Homo sapiens
  CDR3 for alpha chain variable domain of TCR clone 150749 (TRAV2, TRAJ29)
CAAQNSGNTPPVF

SEQ ID NO: 301498 - protein, 14 aa, Homo sapiens
  CDR3 for beta chain variable domain of TCR clone 150749 (TRBV7-9, TRBJ2-4)
CASSLAMGGNIQYF

SEQ ID NO: 301499 - protein, 10 aa, Homo sapiens
  CDR3 for alpha chain variable domain of TCR clone 150750 (TRAV30, TRAJ48)
CGIGNEKLTF

SEQ ID NO: 301500 - protein, 16 aa, Homo sapiens
  CDR3 for beta chain variable domain of TCR clone 150750 (TRBV19, TRBJ2-1)
YASSKAGPSSYNEQFF

SEQ ID NO: 301501 - protein, 13 aa, Homo sapiens
  CDR3 for alpha chain variable domain of TCR clone 150751 (TRAV21, TRAJ27)
CAARPGNAGKSTF

SEQ ID NO: 301502 - protein, 13 aa, Homo sapiens
  CDR3 for beta chain variable domain of TCR clone 150751 (TRBV14, TRBJ2-1)
CASSREGGTEQFF

SEQ ID NO: 301503 - protein, 15 aa, Homo sapiens
  CDR3 for alpha chain variable domain of TCR clone 150752 (TRAV27, TRAJ10)
CAGELLTGGGNKLTF

SEQ ID NO: 301504 - protein, 14 aa, Homo sapiens
  CDR3 for beta chain variable domain of TCR clone 150752 (TRBV7-6, TRBJ2-3)
CASSLGTVTDTQYF

SEQ ID NO: 301505 - protein, 15 aa, Homo sapiens
  CDR3 for alpha chain variable domain of TCR clone 150753 (TRAV23/DV6, TRAJ12)
CAAIDLGAMDSSYKL

SEQ ID NO: 301506 - protein, 16 aa, Homo sapiens
  CDR3 for beta chain variable domain of TCR clone 150753 (TRBV11-2, TRBJ2-3)
CASSSRTSGGAGTQYF

SEQ ID NO: 301507 - protein, 16 aa, Homo sapiens
  CDR3 for alpha chain variable domain of TCR clone 150754 (TRAV12-3, TRAJ53)
CAMRPWSGGSNYKLTF

SEQ ID NO: 301508 - protein, 11 aa, Homo sapiens
  CDR3 for beta chain variable domain of TCR clone 150754 (TRBV29-1, TRBJ2-5)
CSEDRTGTQYF

SEQ ID NO: 301509 - protein, 15 aa, Homo sapiens
  CDR3 for alpha chain variable domain of TCR clone 150755 (TRAV2, TRAJ22)
CAVPPRGGFARQLTF

SEQ ID NO: 301510 - protein, 11 aa, Homo sapiens
  CDR3 for beta chain variable domain of TCR clone 150755 (TRBV27, TRBJ2-3)
CASSLGDTQYF

SEQ ID NO: 301511 - protein, 12 aa, Homo sapiens
  CDR3 for alpha chain variable domain of TCR clone 150756 (TRAV12-3, TRAJ17)
CAMTLTGNKLTF

SEQ ID NO: 301512 - protein, 15 aa, Homo sapiens
  CDR3 for beta chain variable domain of TCR clone 150756 (TRBV7-3, TRBJ2-1)
CASSPTGGSRNEQFF

SEQ ID NO: 301513 - protein, 14 aa, Homo sapiens
  CDR3 for alpha chain variable domain of TCR clone 150757 (TRAV2, TRAJ37)
CAVDFTSNTGKLIF

SEQ ID NO: 301514 - protein, 17 aa, Homo sapiens
  CDR3 for beta chain variable domain of TCR clone 150757 (TRBV20-1, TRBJ2-7)
CSATRAGGVAGVEEQYF

SEQ ID NO: 301515 - protein, 14 aa, Homo sapiens
  CDR3 for alpha chain variable domain of TCR clone 150758 (TRAV3, TRAJ9)
CAVRGNTGDFKTIF

SEQ ID NO: 301516 - protein, 14 aa, Homo sapiens
  CDR3 for beta chain variable domain of TCR clone 150758 (TRBV15, TRBJ2-1)
CATSGVEDYNEQFF

SEQ ID NO: 301517 - protein, 14 aa, Homo sapiens
  CDR3 for alpha chain variable domain of TCR clone 150759 (TRAV14/DV4, TRAJ15)
CAMRRDHAGTALIF

SEQ ID NO: 301518 - protein, 11 aa, Homo sapiens
  CDR3 for beta chain variable domain of TCR clone 150759 (TRBV7-2, TRBJ2-7)
CASSSGLWQYF

SEQ ID NO: 301519 - protein, 11 aa, Homo sapiens
  CDR3 for alpha chain variable domain of TCR clone 150760 (TRAV3, TRAJ21)
CAVGNFNKFYF

SEQ ID NO: 301520 - protein, 16 aa, Homo sapiens
  CDR3 for beta chain variable domain of TCR clone 150760 (TRBV19, TRBJ2-1)
SASSKAGPSSYNEQFV

SEQ ID NO: 301521 - protein, 12 aa, Homo sapiens
  CDR3 for alpha chain variable domain of TCR clone 150761 (TRAV14/DV4, TRAJ9)
CAMNPGGFKTIF

SEQ ID NO: 301522 - protein, 16 aa, Homo sapiens
  CDR3 for beta chain variable domain of TCR clone 150761 (TRBV28, TRBJ2-5)
CASSFYPAGGWETQYF

SEQ ID NO: 301523 - protein, 16 aa, Homo sapiens
  CDR3 for alpha chain variable domain of TCR clone 150762 (TRAV8-3, TRAJ13)
CAVGAYPSGGYQKVTF

SEQ ID NO: 301524 - protein, 15 aa, Homo sapiens
  CDR3 for beta chain variable domain of TCR clone 150762 (TRBV18, TRBJ2-2)
CQLTPSGVNTGELFF

SEQ ID NO: 301525 - protein, 15 aa, Homo sapiens
  CDR3 for alpha chain variable domain of TCR clone 150763 (TRAV4, TRAJ12)
CLVGDLMDSSYKLIF

SEQ ID NO: 301526 - protein, 14 aa, Homo sapiens
  CDR3 for beta chain variable domain of TCR clone 150763 (TRBV7-2, TRBJ1-1)
CASRHRQGRTEAFF

SEQ ID NO: 301527 - protein, 12 aa, Homo sapiens
  CDR3 for alpha chain variable domain of TCR clone 150764 (TRAV13-1, TRAJ53)
AASGGSNYQLTF

SEQ ID NO: 301528 - protein, 16 aa, Homo sapiens
  CDR3 for beta chain variable domain of TCR clone 150764 (TRBV28, TRBJ2-6)
CASSNRRGSGANVLTF

SEQ ID NO: 301529 - protein, 15 aa, Homo sapiens
  CDR3 for alpha chain variable domain of TCR clone 150765 (TRAV2, TRAJ37)
CSVGDGSSNTGKLIF

SEQ ID NO: 301530 - protein, 13 aa, Homo sapiens
  CDR3 for beta chain variable domain of TCR clone 150765 (TRBV20-1, TRBJ2-7)
CSAQTGLSYEQYF

SEQ ID NO: 301531 - protein, 13 aa, Homo sapiens
  CDR3 for alpha chain variable domain of TCR clone 150766 (TRAV21, TRAJ27)
CAARPGNAGKSTF

SEQ ID NO: 301532 - protein, 14 aa, Homo sapiens
  CDR3 for beta chain variable domain of TCR clone 150766 (TRBV7-9, TRBJ2-3)
CASSLEDGTDAQYF

SEQ ID NO: 301533 - protein, 16 aa, Homo sapiens
  CDR3 for alpha chain variable domain of TCR clone 150767 (TRAV8-2, TRAJ50)
CVVSDNMKTSYDKVIF

SEQ ID NO: 301534 - protein, 15 aa, Homo sapiens
  CDR3 for beta chain variable domain of TCR clone 150767 (TRBV7-2, TRBJ2-1)
CASSFQADEYNEQFF

SEQ ID NO: 301535 - protein, 14 aa, Homo sapiens
  CDR3 for alpha chain variable domain of TCR clone 150768 (TRAV1-2, TRAJ16)
CAVNRFSDGQQLLF

SEQ ID NO: 301536 - protein, 11 aa, Homo sapiens
  CDR3 for beta chain variable domain of TCR clone 150768 (TRBV29-1, TRBJ2-5)
CSEDRTGTQYF

SEQ ID NO: 301537 - protein, 11 aa, Homo sapiens
  CDR3 for alpha chain variable domain of TCR clone 150769 (TRAV2, TRAJ33)
CAVDSNYQLIW

SEQ ID NO: 301538 - protein, 14 aa, Homo sapiens
  CDR3 for beta chain variable domain of TCR clone 150769 (TRBV10-2, TRBJ1-5)
CASSSTGRNQPQHF

SEQ ID NO: 301539 - protein, 13 aa, Homo sapiens
  CDR3 for alpha chain variable domain of TCR clone 150770 (TRAV30, TRAJ24)
CGTVTDSWGNCRL

SEQ ID NO: 301540 - protein, 16 aa, Homo sapiens
  CDR3 for beta chain variable domain of TCR clone 150770 (TRBV7-3, TRBJ2-2)
CASSLKRGTLSGELFF

SEQ ID NO: 301541 - protein, 12 aa, Homo sapiens
  CDR3 for alpha chain variable domain of TCR clone 150771 (TRAV13-2, TRAJ23)
CAERHRGGKLIF

SEQ ID NO: 301542 - protein, 13 aa, Homo sapiens
  CDR3 for beta chain variable domain of TCR clone 150771 (TRBV7-3, TRBJ2-1)
CASSLDSYNEQFF

SEQ ID NO: 301543 - protein, 13 aa, Homo sapiens
  CDR3 for alpha chain variable domain of TCR clone 150772 (TRAV22, TRAJ29)
CAVGGSGNTPLVF

SEQ ID NO: 301544 - protein, 14 aa, Homo sapiens
  CDR3 for beta chain variable domain of TCR clone 150772 (TRBV12-4, TRBJ2-5)
CASSLWQKQETQYF

SEQ ID NO: 301545 - protein, 10 aa, Homo sapiens
  CDR3 for alpha chain variable domain of TCR clone 150773 (TRAV26-1, TRAJ40)
CIAGTYKYIF

SEQ ID NO: 301546 - protein, 15 aa, Homo sapiens
  CDR3 for beta chain variable domain of TCR clone 150773 (TRBV19, TRBJ2-1)
CASSSPGGPLDEQFF

SEQ ID NO: 301547 - protein, 16 aa, Homo sapiens
  CDR3 for alpha chain variable domain of TCR clone 150774 (TRAV12-3, TRAJ53)
CAMSPGSGGSNYKLTF

SEQ ID NO: 301548 - protein, 11 aa, Homo sapiens
  CDR3 for beta chain variable domain of TCR clone 150774 (TRBV29-1, TRBJ2-5)
RSVDRTGTQYF

SEQ ID NO: 301549 - protein, 12 aa, Homo sapiens
  CDR3 for alpha chain variable domain of TCR clone 150775 (TRAV3, TRAJ27)
CAVRDGAGKSTF

SEQ ID NO: 301550 - protein, 15 aa, Homo sapiens
  CDR3 for beta chain variable domain of TCR clone 150775 (TRBV13, TRBJ2-2)
CASGYRGRRTGELFC

SEQ ID NO: 301551 - protein, 14 aa, Homo sapiens
  CDR3 for alpha chain variable domain of TCR clone 150776 (TRAV1-2, TRAJ16)
CAVNRFSDGQKLLS

SEQ ID NO: 301552 - protein, 14 aa, Homo sapiens
  CDR3 for beta chain variable domain of TCR clone 150776 (TRBV7-9, TRBJ2-2)
CASSLGHRTGELFF

SEQ ID NO: 301553 - protein, 14 aa, Homo sapiens
  CDR3 for alpha chain variable domain of TCR clone 150777 (TRAV23/DV6, TRAJ13)
RAASETGGYQKVTF

SEQ ID NO: 301554 - protein, 16 aa, Homo sapiens
  CDR3 for beta chain variable domain of TCR clone 150777 (TRBV5-1, TRBJ1-3)
CASSPWAPSSGNTIYF

SEQ ID NO: 301555 - protein, 18 aa, Homo sapiens
  CDR3 for alpha chain variable domain of TCR clone 150778 (TRAV38-1, TRAJ8)
CDVFLCFSMNTVFQKLVF

SEQ ID NO: 301556 - protein, 14 aa, Homo sapiens
  CDR3 for beta chain variable domain of TCR clone 150778 (TRBV4-1, TRBJ2-3)
CASSQEGSTDTQYF

SEQ ID NO: 301557 - protein, 12 aa, Homo sapiens
  CDR3 for alpha chain variable domain of TCR clone 150779 (TRAV12-3, TRAJ20)
CAMVRGDYKLSF

SEQ ID NO: 301558 - protein, 12 aa, Homo sapiens
  CDR3 for beta chain variable domain of TCR clone 150779 (TRBV6-1, TRBJ2-7)
CASSDYFYEQYF

SEQ ID NO: 301559 - protein, 21 aa, Homo sapiens
  CDR3 for alpha chain variable domain of TCR clone 150780 (TRAV1-1, TRAJ6)
CLLLLRCERLERTGGSYIPTF

SEQ ID NO: 301560 - protein, 17 aa, Homo sapiens
  CDR3 for beta chain variable domain of TCR clone 150780 (TRBV24-1, TRBJ2-1)
CATSDVSTSGTYNEQFF

SEQ ID NO: 301561 - protein, 15 aa, Homo sapiens
  CDR3 for alpha chain variable domain of TCR clone 150781 (TRAV8-4, TRAJ40)
CAVSSITSGPYKYIF

SEQ ID NO: 301562 - protein, 13 aa, Homo sapiens
  CDR3 for beta chain variable domain of TCR clone 150781 (TRBV2, TRBJ2-1)
CATSRGTDNEQFF

SEQ ID NO: 301563 - protein, 14 aa, Homo sapiens
  CDR3 for alpha chain variable domain of TCR clone 150782 (TRAV12-2, TRAJ45)
CAVNKGEGADGLTF

SEQ ID NO: 301564 - protein, 14 aa, Homo sapiens
  CDR3 for beta chain variable domain of TCR clone 150782 (TRBV20-1, TRBJ1-1)
CSAMGGTANTEAFF

SEQ ID NO: 301565 - protein, 13 aa, Homo sapiens
  CDR3 for alpha chain variable domain of TCR clone 150783 (TRAV29/DV5, TRAJ31)
CAASRNNNARLMF

SEQ ID NO: 301566 - protein, 12 aa, Homo sapiens
  CDR3 for beta chain variable domain of TCR clone 150783 (TRBV14, TRBJ2-5)
CASSQLKETHYF

SEQ ID NO: 301567 - protein, 13 aa, Homo sapiens
  CDR3 for alpha chain variable domain of TCR clone 150784 (TRAV12-3, TRAJ31)
CAMRANNNARIMF

SEQ ID NO: 301568 - protein, 16 aa, Homo sapiens
  CDR3 for beta chain variable domain of TCR clone 150784 (TRBV7-9, TRBJ1-2)
CASSLGFSSGEDGYTF

SEQ ID NO: 301569 - protein, 10 aa, Homo sapiens
  CDR3 for alpha chain variable domain of TCR clone 150785 (TRAV21, TRAJ31)
CAVDNARLMF

SEQ ID NO: 301570 - protein, 13 aa, Homo sapiens
  CDR3 for beta chain variable domain of TCR clone 150785 (TRBV4-1, TRBJ1-1)
CASSRKMNPEAFF

SEQ ID NO: 301571 - protein, 18 aa, Homo sapiens
  CDR3 for alpha chain variable domain of TCR clone 150786 (TRAV26-2, TRAJ32)
CILRAPLNYGGATNKLIF

SEQ ID NO: 301572 - protein, 13 aa, Homo sapiens
  CDR3 for beta chain variable domain of TCR clone 150786 (TRBV7-3, TRBJ2-1)
CASSVWPYNEQFF

SEQ ID NO: 301573 - protein, 15 aa, Homo sapiens
  CDR3 for alpha chain variable domain of TCR clone 150787 (TRAV27, TRAJ38)
CAGRFNAGDNRKLIW

SEQ ID NO: 301574 - protein, 13 aa, Homo sapiens
  CDR3 for beta chain variable domain of TCR clone 150787 (TRBV12-5, TRBJ2-3)
CASQNRGTDTQYF

SEQ ID NO: 301575 - protein, 16 aa, Homo sapiens
  CDR3 for alpha chain variable domain of TCR clone 150788 (TRAV12-1, TRAJ22)
CVVNTISSGSARQLTF

SEQ ID NO: 301576 - protein, 13 aa, Homo sapiens
  CDR3 for beta chain variable domain of TCR clone 150788 (TRBV19, TRBJ2-1)
CASSGGVFSEQFF

SEQ ID NO: 301577 - protein, 13 aa, Homo sapiens
  CDR3 for alpha chain variable domain of TCR clone 150789 (TRAV2, TRAJ40)
CAVVISGTYKYIF

SEQ ID NO: 301578 - protein, 13 aa, Homo sapiens
  CDR3 for beta chain variable domain of TCR clone 150789 (TRBV7-6, TRBJ1-2)
CASSLVADYGYTF

SEQ ID NO: 301579 - protein, 15 aa, Homo sapiens
  CDR3 for alpha chain variable domain of TCR clone 150790 (TRAV26-1, TRAJ22)
CIVRVSFWFCKANDL

SEQ ID NO: 301580 - protein, 14 aa, Homo sapiens
  CDR3 for beta chain variable domain of TCR clone 150790 (TRBV18, TRBJ2-7)
CASSPRGGAYEQYF

SEQ ID NO: 301581 - protein, 15 aa, Homo sapiens
  CDR3 for alpha chain variable domain of TCR clone 150791 (TRAV38-2/DV8, TRAJ48)
CAYRSGGFGNENLTF

SEQ ID NO: 301582 - protein, 16 aa, Homo sapiens
  CDR3 for beta chain variable domain of TCR clone 150791 (TRBV28, TRBJ2-7)
CASSPWVATGDLSQYF

SEQ ID NO: 301583 - protein, 15 aa, Homo sapiens
  CDR3 for alpha chain variable domain of TCR clone 150792 (TRAV25, TRAJ53)
CAATGGGGSNYKLTF

SEQ ID NO: 301584 - protein, 18 aa, Homo sapiens
  CDR3 for beta chain variable domain of TCR clone 150792 (TRBV11-2, TRBJ2-3)
CASSLGGASRGAPNTQYF

SEQ ID NO: 301585 - protein, 16 aa, Homo sapiens
  CDR3 for alpha chain variable domain of TCR clone 150793 (TRAV16, TRAJ57)
CAPYLITQGGSEKLVF

SEQ ID NO: 301586 - protein, 14 aa, Homo sapiens
  CDR3 for beta chain variable domain of TCR clone 150793 (TRBV4-2, TRBJ2-7)
CASSQGQTAYEQYF

SEQ ID NO: 301587 - protein, 13 aa, Homo sapiens
  CDR3 for alpha chain variable domain of TCR clone 150794 (TRAV21, TRAJ57)
CAVTQVGSVKLVF

SEQ ID NO: 301588 - protein, 16 aa, Homo sapiens
  CDR3 for beta chain variable domain of TCR clone 150794 (TRBV29-1, TRBJ2-7)
CSVEDAEDGTAYEQYF

SEQ ID NO: 301589 - protein, 19 aa, Homo sapiens
  CDR3 for alpha chain variable domain of TCR clone 150795 (TRAV16, )
CALSGDIQKPDPAVYQLRD

SEQ ID NO: 301590 - protein, 16 aa, Homo sapiens
  CDR3 for beta chain variable domain of TCR clone 150795 (TRBV12-5, TRBJ2-5)
CASGPRTSGNQETQYF

SEQ ID NO: 301591 - protein, 13 aa, Homo sapiens
  CDR3 for alpha chain variable domain of TCR clone 150796 (TRAV20, TRAJ37)
CAGCSSNTGKLIF

SEQ ID NO: 301592 - protein, 16 aa, Homo sapiens
  CDR3 for beta chain variable domain of TCR clone 150796 (TRBV28, TRBJ2-1)
CASRRSGRVVGNEQFF

SEQ ID NO: 301593 - protein, 21 aa, Homo sapiens
  CDR3 for alpha chain variable domain of TCR clone 150797 (TRAV6, TRAJ36)
CARQTTSSLGLERDSPVFPIS

SEQ ID NO: 301594 - protein, 14 aa, Homo sapiens
  CDR3 for beta chain variable domain of TCR clone 150797 (TRBV10-2, TRBJ1-5)
CASSSTGRNQPQHF

SEQ ID NO: 301595 - protein, 15 aa, Homo sapiens
  CDR3 for alpha chain variable domain of TCR clone 150798 (TRAV20, TRAJ6)
CAVRLRSGGSYIPTF

SEQ ID NO: 301596 - protein, 14 aa, Homo sapiens
  CDR3 for beta chain variable domain of TCR clone 150798 (TRBV12-4, TRBJ2-7)
CASSASGGWYEQYF

SEQ ID NO: 301597 - protein, 11 aa, Homo sapiens
  CDR3 for alpha chain variable domain of TCR clone 150799 (TRAV12-3, TRAJ43)
CAMSVSNDMRF

SEQ ID NO: 301598 - protein, 14 aa, Homo sapiens
  CDR3 for beta chain variable domain of TCR clone 150799 (TRBV7-9, TRBJ1-6)
CASSVMTDYSPLHF

SEQ ID NO: 301599 - protein, 12 aa, Homo sapiens
  CDR3 for alpha chain variable domain of TCR clone 150800 (TRAV21, TRAJ13)
PGPSGGYQQVTF

SEQ ID NO: 301600 - protein, 15 aa, Homo sapiens
  CDR3 for beta chain variable domain of TCR clone 150800 (TRBV11-2, TRBJ1-3)
CASSLDGTVGNTIYF

SEQ ID NO: 301601 - protein, 17 aa, Homo sapiens
  CDR3 for alpha chain variable domain of TCR clone 150801 (TRAV14/DV4, TRAJ4)
CALREASGRGGYNKLIF

SEQ ID NO: 301602 - protein, 14 aa, Homo sapiens
  CDR3 for beta chain variable domain of TCR clone 150801 (TRBV19, TRBJ2-7)
CASSMGQGAIEQYF

SEQ ID NO: 301603 - protein, 17 aa, Homo sapiens
  CDR3 for alpha chain variable domain of TCR clone 150802 (TRAV1-2, TRAJ27)
CAVRDKTGDTNAGKSTF

SEQ ID NO: 301604 - protein, 13 aa, Homo sapiens
  CDR3 for beta chain variable domain of TCR clone 150802 (TRBV7-3, TRBJ1-1)
CASSQDWGAEAFF

SEQ ID NO: 301605 - protein, 12 aa, Homo sapiens
  CDR3 for alpha chain variable domain of TCR clone 150803 (TRAV12-3, TRAJ17)
CAMTLTGNKLTF

SEQ ID NO: 301606 - protein, 15 aa, Homo sapiens
  CDR3 for beta chain variable domain of TCR clone 150803 (TRBV6-3, TRBJ2-7)
CASSSPGAVFYEQYF

SEQ ID NO: 301607 - protein, 15 aa, Homo sapiens
  CDR3 for alpha chain variable domain of TCR clone 150804 (TRAV26-1, TRAJ29)
CIVRVEGSGNTPLVF

SEQ ID NO: 301608 - protein, 14 aa, Homo sapiens
  CDR3 for beta chain variable domain of TCR clone 150804 (TRBV7-3, TRBJ2-3)
CASSLTGGTDTQYF

SEQ ID NO: 301609 - protein, 11 aa, Homo sapiens
  CDR3 for alpha chain variable domain of TCR clone 150805 (TRAV2, TRAJ13)
CASGGYQKVTF

SEQ ID NO: 301610 - protein, 15 aa, Homo sapiens
  CDR3 for beta chain variable domain of TCR clone 150805 (TRBV10-3, TRBJ2-1)
CHQWSGDGGGGEQFF

SEQ ID NO: 301611 - protein, 16 aa, Homo sapiens
  CDR3 for alpha chain variable domain of TCR clone 150806 (TRAV3, TRAJ5)
CAVRNLMDTGRRALTF

SEQ ID NO: 301612 - protein, 16 aa, Homo sapiens
  CDR3 for beta chain variable domain of TCR clone 150806 (TRBV4-2, TRBJ2-7)
CASSQEGLANSYEQDF

SEQ ID NO: 301613 - protein, 14 aa, Homo sapiens
  CDR3 for alpha chain variable domain of TCR clone 150807 (TRAV35, TRAJ13)
CACSPSGGYQKVTF

SEQ ID NO: 301614 - protein, 17 aa, Homo sapiens
  CDR3 for beta chain variable domain of TCR clone 150807 (TRBV18, TRBJ1-5)
CQLTTCRVRQNNQPQHF

SEQ ID NO: 301615 - protein, 11 aa, Homo sapiens
  CDR3 for alpha chain variable domain of TCR clone 150808 (TRAV21, TRAJ11)
CAVNGYSTLTF

SEQ ID NO: 301616 - protein, 20 aa, Homo sapiens
  CDR3 for beta chain variable domain of TCR clone 150808 (TRBV28, TRBJ2-1)
CASTPIGRSPGLAGGNEQLF

SEQ ID NO: 301617 - protein, 13 aa, Homo sapiens
  CDR3 for alpha chain variable domain of TCR clone 150809 (TRAV8-4, TRAJ30)
CAVSVNRDDKIIF

SEQ ID NO: 301618 - protein, 13 aa, Homo sapiens
  CDR3 for beta chain variable domain of TCR clone 150809 (TRBV3-1, TRBJ2-2)
CASLARGSGELFV

SEQ ID NO: 301619 - protein, 11 aa, Homo sapiens
  CDR3 for alpha chain variable domain of TCR clone 150810 (TRAV30, TRAJ23)
CGTEIAGKLIF

SEQ ID NO: 301620 - protein, 16 aa, Homo sapiens
  CDR3 for beta chain variable domain of TCR clone 150810 (TRBV7-2, TRBJ2-7)
CASTAQAASGGYEQYF

SEQ ID NO: 301621 - protein, 17 aa, Homo sapiens
  CDR3 for alpha chain variable domain of TCR clone 150811 (TRAV12-2, TRAJ52)
CAVNPYAGGTSYGKLTL

SEQ ID NO: 301622 - protein, 14 aa, Homo sapiens
  CDR3 for beta chain variable domain of TCR clone 150811 (TRBV12-4, TRBJ1-1)
CASTWTGHDTEDFC

SEQ ID NO: 301623 - protein, 14 aa, Homo sapiens
  CDR3 for alpha chain variable domain of TCR clone 150812 (TRAV12-2, TRAJ40)
CAVKIPSGTYKYIF

SEQ ID NO: 301624 - protein, 15 aa, Homo sapiens
  CDR3 for beta chain variable domain of TCR clone 150812 (TRBV7-2, TRBJ1-1)
CDSSFAGDRDTEAFF

SEQ ID NO: 301625 - protein, 21 aa, Homo sapiens
  CDR3 for alpha chain variable domain of TCR clone 150813 (TRAV1-2, TRAJ37)
CLLPLCCERLHGSGNTGKLIF

SEQ ID NO: 301626 - protein, 14 aa, Homo sapiens
  CDR3 for beta chain variable domain of TCR clone 150813 (TRBV2, TRBJ2-5)
CASSEVLAQETQYF

SEQ ID NO: 301627 - protein, 13 aa, Homo sapiens
  CDR3 for alpha chain variable domain of TCR clone 150814 (TRAV17, TRAJ9)
CATDYTGGFKTIF

SEQ ID NO: 301628 - protein, 14 aa, Homo sapiens
  CDR3 for beta chain variable domain of TCR clone 150814 (TRBV7-2, TRBJ2-2)
CASSLNSNTGELFF

SEQ ID NO: 301629 - protein, 14 aa, Homo sapiens
  CDR3 for alpha chain variable domain of TCR clone 150815 (TRAV12-3, TRAJ13)
CAMRNSGGYQKVTF

SEQ ID NO: 301630 - protein, 14 aa, Homo sapiens
  CDR3 for beta chain variable domain of TCR clone 150815 (TRBV4-1, TRBJ1-6)
CASSPGSDSSPLHC

SEQ ID NO: 301631 - protein, 15 aa, Homo sapiens
  CDR3 for alpha chain variable domain of TCR clone 150816 (TRAV12-2, TRAJ8)
CAVREENTGFQKLVF

SEQ ID NO: 301632 - protein, 16 aa, Homo sapiens
  CDR3 for beta chain variable domain of TCR clone 150816 (TRBV7-3, TRBJ2-2)
CASSLKRGTLSGELCF

SEQ ID NO: 301633 - protein, 14 aa, Homo sapiens
  CDR3 for alpha chain variable domain of TCR clone 150817 (TRAV12-2, TRAJ13)
CAVKKTGGYQKVTF

SEQ ID NO: 301634 - protein, 20 aa, Homo sapiens
  CDR3 for beta chain variable domain of TCR clone 150817 (TRBV3-1, TRBJ2-6)
CASSPRPGLEGGAGANVLTF

SEQ ID NO: 301635 - protein, 20 aa, Homo sapiens
  CDR3 for alpha chain variable domain of TCR clone 150818 (TRAV21, TRAJ30)
CAVRRRMTRSSSEKGHDFIF

SEQ ID NO: 301636 - protein, 12 aa, Homo sapiens
  CDR3 for beta chain variable domain of TCR clone 150818 (TRBV28, TRBJ2-1)
CASSVQINEQFF

SEQ ID NO: 301637 - protein, 12 aa, Homo sapiens
  CDR3 for alpha chain variable domain of TCR clone 150819 (TRAV8-6, TRAJ43)
CAVSNNSNDMRF

SEQ ID NO: 301638 - protein, 15 aa, Homo sapiens
  CDR3 for beta chain variable domain of TCR clone 150819 (TRBV7-3, TRBJ2-6)
CASSLGGSGANVLTF

SEQ ID NO: 301639 - protein, 14 aa, Homo sapiens
  CDR3 for alpha chain variable domain of TCR clone 150820 (TRAV12-1, TRAJ12)
RAVTRMDSSYKLIF

SEQ ID NO: 301640 - protein, 13 aa, Homo sapiens
  CDR3 for beta chain variable domain of TCR clone 150820 (TRBV20-1, TRBJ1-1)
CSARGGGNTEAFF

SEQ ID NO: 301641 - protein, 12 aa, Homo sapiens
  CDR3 for alpha chain variable domain of TCR clone 150821 (TRAV8-4, TRAJ43)
CAVSVNNNDVRF

SEQ ID NO: 301642 - protein, 12 aa, Homo sapiens
  CDR3 for beta chain variable domain of TCR clone 150821 (TRBV29-1, TRBJ2-3)
CSVTGGADTQYF

SEQ ID NO: 301643 - protein, 13 aa, Homo sapiens
  CDR3 for alpha chain variable domain of TCR clone 150822 (TRAV2, TRAJ40)
CAVVTSGTYKYIF

SEQ ID NO: 301644 - protein, 17 aa, Homo sapiens
  CDR3 for beta chain variable domain of TCR clone 150822 (TRBV19, TRBJ2-2)
CASSIGTGGANTGELFF

SEQ ID NO: 301645 - protein, 12 aa, Homo sapiens
  CDR3 for alpha chain variable domain of TCR clone 150823 (TRAV21, TRAJ31)
CVLAGNNARLMF

SEQ ID NO: 301646 - protein, 13 aa, Homo sapiens
  CDR3 for beta chain variable domain of TCR clone 150823 (TRBV20-1, TRBJ2-7)
CSASPFSSYEQYF

SEQ ID NO: 301647 - protein, 11 aa, Homo sapiens
  CDR3 for alpha chain variable domain of TCR clone 150824 (TRAV12-3, TRAJ43)
CAMSVSNDMRF

SEQ ID NO: 301648 - protein, 19 aa, Homo sapiens
  CDR3 for beta chain variable domain of TCR clone 150824 (TRBV28, TRBJ2-7)
CASSYSGTSRLGWVCEQYF

SEQ ID NO: 301649 - protein, 12 aa, Homo sapiens
  CDR3 for alpha chain variable domain of TCR clone 150825 (TRAV12-3, TRAJ29)
CAAREGNTPLVF

SEQ ID NO: 301650 - protein, 15 aa, Homo sapiens
  CDR3 for beta chain variable domain of TCR clone 150825 (TRBV11-2, TRBJ2-1)
CASSLGTSGLNEQFF

SEQ ID NO: 301651 - protein, 13 aa, Homo sapiens
  CDR3 for alpha chain variable domain of TCR clone 150826 (TRAV1-2, TRAJ30)
CAVRDPGDDKIIF

SEQ ID NO: 301652 - protein, 13 aa, Homo sapiens
  CDR3 for beta chain variable domain of TCR clone 150826 (TRBV15, TRBJ2-7)
CATSTTGHYEQYF

SEQ ID NO: 301653 - protein, 12 aa, Homo sapiens
  CDR3 for alpha chain variable domain of TCR clone 150827 (TRAV26-1, TRAJ17)
CIVRSAGNKLTF

SEQ ID NO: 301654 - protein, 14 aa, Homo sapiens
  CDR3 for beta chain variable domain of TCR clone 150827 (TRBV7-2, TRBJ2-7)
CASSLRDRTYEQYF

SEQ ID NO: 301655 - protein, 13 aa, Homo sapiens
  CDR3 for alpha chain variable domain of TCR clone 150828 (TRAV8-1, TRAJ41)
CAVNPGSGYALNF

SEQ ID NO: 301656 - protein, 15 aa, Homo sapiens
  CDR3 for beta chain variable domain of TCR clone 150828 (TRBV11-3, TRBJ2-1)
CASSLAGQTYNEQFF

SEQ ID NO: 301657 - protein, 14 aa, Homo sapiens
  CDR3 for alpha chain variable domain of TCR clone 150829 (TRAV16, TRAJ32)
CALKSGVATNKLIF

SEQ ID NO: 301658 - protein, 12 aa, Homo sapiens
  CDR3 for beta chain variable domain of TCR clone 150829 (TRBV2, TRBJ2-1)
CAYGPPGNEQFF

SEQ ID NO: 301659 - protein, 14 aa, Homo sapiens
  CDR3 for alpha chain variable domain of TCR clone 150830 (TRAV12-1, TRAJ12)
CVVTRMDSSYKLIF

SEQ ID NO: 301660 - protein, 15 aa, Homo sapiens
  CDR3 for beta chain variable domain of TCR clone 150830 (TRBV20-1, TRBJ2-7)
CSARDRVSGMDKQYF

SEQ ID NO: 301661 - protein, 14 aa, Homo sapiens
  CDR3 for alpha chain variable domain of TCR clone 150831 (TRAV12-2, TRAJ13)
CAVKKTGGYQKVTF

SEQ ID NO: 301662 - protein, 14 aa, Homo sapiens
  CDR3 for beta chain variable domain of TCR clone 150831 (TRBV18, TRBJ2-6)
CASSPQGTRGVLTF

SEQ ID NO: 301663 - protein, 21 aa, Homo sapiens
  CDR3 for alpha chain variable domain of TCR clone 150832 (TRAV25, TRAJ7)
TATQTTDVGTYFCPGNNRLAF

SEQ ID NO: 301664 - protein, 21 aa, Homo sapiens
  CDR3 for beta chain variable domain of TCR clone 150832 (TRBV12-4, TRBJ2-5)
CASSFFCQGAPRDPVLRARHA

SEQ ID NO: 301665 - protein, 17 aa, Homo sapiens
  CDR3 for alpha chain variable domain of TCR clone 150833 (TRAV1-2, TRAJ6)
CAVRDTTRTGGSYIPTF

SEQ ID NO: 301666 - protein, 15 aa, Homo sapiens
  CDR3 for beta chain variable domain of TCR clone 150833 (TRBV3-1, TRBJ2-5)
CASSANLGGPETQYF

SEQ ID NO: 301667 - protein, 12 aa, Homo sapiens
  CDR3 for alpha chain variable domain of TCR clone 150834 (TRAV1-2, TRAJ9)
CAGYTGGFKTIF

SEQ ID NO: 301668 - protein, 15 aa, Homo sapiens
  CDR3 for beta chain variable domain of TCR clone 150834 (TRBV11-2, TRBJ2-1)
CASGPAGQSLNEQFF

SEQ ID NO: 301669 - protein, 15 aa, Homo sapiens
  CDR3 for alpha chain variable domain of TCR clone 150835 (TRAV3, TRAJ32)
CAVSSYGGAKNKLIF

SEQ ID NO: 301670 - protein, 16 aa, Homo sapiens
  CDR3 for beta chain variable domain of TCR clone 150835 (TRBV5-1, TRBJ2-5)
CASSLSLAGAQETQYF

SEQ ID NO: 301671 - protein, 15 aa, Homo sapiens
  CDR3 for alpha chain variable domain of TCR clone 150836 (TRAV27, TRAJ38)
CAARRNADNNRTLIW

SEQ ID NO: 301672 - protein, 13 aa, Homo sapiens
  CDR3 for beta chain variable domain of TCR clone 150836 (TRBV12-5, TRBJ2-3)
CASGDRQSDTQYF

SEQ ID NO: 301673 - protein, 14 aa, Homo sapiens
  CDR3 for alpha chain variable domain of TCR clone 150837 (TRAV12-2, TRAJ40)
YAVKIPSGSYKYIF

SEQ ID NO: 301674 - protein, 13 aa, Homo sapiens
  CDR3 for beta chain variable domain of TCR clone 150837 (TRBV7-9, TRBJ1-2)
CASSLKQNYGYTF

SEQ ID NO: 301675 - protein, 16 aa, Homo sapiens
  CDR3 for alpha chain variable domain of TCR clone 150838 (TRAV36/DV7, TRAJ33)
WRPGNKVQDSNYQLIW

SEQ ID NO: 301676 - protein, 17 aa, Homo sapiens
  CDR3 for beta chain variable domain of TCR clone 150838 (TRBV13, TRBJ2-3)
CASSLSRVAGGRNTQYF

SEQ ID NO: 301677 - protein, 14 aa, Homo sapiens
  CDR3 for alpha chain variable domain of TCR clone 150839 (TRAV12-3, TRAJ29)
CAMSPYSGNTPLVF

SEQ ID NO: 301678 - protein, 14 aa, Homo sapiens
  CDR3 for beta chain variable domain of TCR clone 150839 (TRBV19, TRBJ2-1)
CASPTGVLSGEQFF

SEQ ID NO: 301679 - protein, 13 aa, Homo sapiens
  CDR3 for alpha chain variable domain of TCR clone 150840 (TRAV13-2, TRAJ13)
CAERQGGYQKVTF

SEQ ID NO: 301680 - protein, 16 aa, Homo sapiens
  CDR3 for beta chain variable domain of TCR clone 150840 (TRBV18, TRBJ2-5)
CASSPPSSGGAKTQYF

SEQ ID NO: 301681 - protein, 15 aa, Homo sapiens
  CDR3 for alpha chain variable domain of TCR clone 150841 (TRAV12-1, TRAJ42)
CVVTRAGGSQGNLIL

SEQ ID NO: 301682 - protein, 14 aa, Homo sapiens
  CDR3 for beta chain variable domain of TCR clone 150841 (TRBV11-2, TRBJ2-3)
CASSLGGGANTQYF

SEQ ID NO: 301683 - protein, 15 aa, Homo sapiens
  CDR3 for alpha chain variable domain of TCR clone 150842 (TRAV8-3, TRAJ40)
CAAPSLGSGTYKYIF

SEQ ID NO: 301684 - protein, 12 aa, Homo sapiens
  CDR3 for beta chain variable domain of TCR clone 150842 (TRBV11-2, TRBJ2-2)
CASSLGGGELVF

SEQ ID NO: 301685 - protein, 10 aa, Homo sapiens
  CDR3 for alpha chain variable domain of TCR clone 150843 (TRAV1-2, TRAJ31)
CAFFDARLVF

SEQ ID NO: 301686 - protein, 15 aa, Homo sapiens
  CDR3 for beta chain variable domain of TCR clone 150843 (TRBV4-1, TRBJ1-4)
CASSDTGGTNEKLFF

SEQ ID NO: 301687 - protein, 14 aa, Homo sapiens
  CDR3 for alpha chain variable domain of TCR clone 150844 (TRAV29/DV5, TRAJ13)
CAADDSGGYQKVTF

SEQ ID NO: 301688 - protein, 16 aa, Homo sapiens
  CDR3 for beta chain variable domain of TCR clone 150844 (TRBV5-1, TRBJ1-3)
CASSLERGRPGNTIDF

SEQ ID NO: 301689 - protein, 13 aa, Homo sapiens
  CDR3 for alpha chain variable domain of TCR clone 150845 (TRAV39, TRAJ48)
CAAVNFGNEKLTF

SEQ ID NO: 301690 - protein, 14 aa, Homo sapiens
  CDR3 for beta chain variable domain of TCR clone 150845 (TRBV19, TRBJ2-5)
CASSMTGQQETQYF

SEQ ID NO: 301691 - protein, 14 aa, Homo sapiens
  CDR3 for alpha chain variable domain of TCR clone 150846 (TRAV12-3, TRAJ10)
SHLPLTGGGNKLTF

SEQ ID NO: 301692 - protein, 13 aa, Homo sapiens
  CDR3 for beta chain variable domain of TCR clone 150846 (TRBV6-3, TRBJ2-5)
CASRRGIQETQYF

SEQ ID NO: 301693 - protein, 14 aa, Homo sapiens
  CDR3 for alpha chain variable domain of TCR clone 150847 (TRAV12-2, TRAJ13)
CAVKKTGGYQKVTF

SEQ ID NO: 301694 - protein, 14 aa, Homo sapiens
  CDR3 for beta chain variable domain of TCR clone 150847 (TRBV10-3, TRBJ2-1)
CAISSDLEYNEQFF

SEQ ID NO: 301695 - protein, 15 aa, Homo sapiens
  CDR3 for alpha chain variable domain of TCR clone 150848 (TRAV8-4, TRAJ31)
CAVSGEGHNNARLMF

SEQ ID NO: 301696 - protein, 16 aa, Homo sapiens
  CDR3 for beta chain variable domain of TCR clone 150848 (TRBV4-1, TRBJ1-2)
CASSQEGSSGIYGYTF

SEQ ID NO: 301697 - protein, 14 aa, Homo sapiens
  CDR3 for alpha chain variable domain of TCR clone 150849 (TRAV26-1, TRAJ40)
CIVRLLSGTYKYSF

SEQ ID NO: 301698 - protein, 13 aa, Homo sapiens
  CDR3 for beta chain variable domain of TCR clone 150849 (TRBV3-1, TRBJ1-1)
CASSQLQGAEAFF

SEQ ID NO: 301699 - protein, 13 aa, Homo sapiens
  CDR3 for alpha chain variable domain of TCR clone 150850 (TRAV8-3, TRAJ6)
CAVGSGGSYIPTF

SEQ ID NO: 301700 - protein, 14 aa, Homo sapiens
  CDR3 for beta chain variable domain of TCR clone 150850 (TRBV11-2, TRBJ1-1)
CASSTQRGRTDAFF

SEQ ID NO: 301701 - protein, 12 aa, Homo sapiens
  CDR3 for alpha chain variable domain of TCR clone 150851 (TRAV21, TRAJ33)
CGKMDSNYQLIW

SEQ ID NO: 301702 - protein, 16 aa, Homo sapiens
  CDR3 for beta chain variable domain of TCR clone 150851 (TRBV9, TRBJ2-7)
CASSVGLGGGTYEQYF

SEQ ID NO: 301703 - protein, 15 aa, Homo sapiens
  CDR3 for alpha chain variable domain of TCR clone 150852 (TRAV20, TRAJ43)
CAVQAGKSSNNDMRF

SEQ ID NO: 301704 - protein, 14 aa, Homo sapiens
  CDR3 for beta chain variable domain of TCR clone 150852 (TRBV27, TRBJ2-1)
CASRHLGGGKEQSF

SEQ ID NO: 301705 - protein, 14 aa, Homo sapiens
  CDR3 for alpha chain variable domain of TCR clone 150853 (TRAV8-2, TRAJ6)
CVVISVGGSYIPTF

SEQ ID NO: 301706 - protein, 16 aa, Homo sapiens
  CDR3 for beta chain variable domain of TCR clone 150853 (TRBV7-6, TRBJ2-6)
CASSLPGLSGANVLTF

SEQ ID NO: 301707 - protein, 13 aa, Homo sapiens
  CDR3 for alpha chain variable domain of TCR clone 150854 (TRAV1-1, TRAJ33)
CASHMDSNYQLIW

SEQ ID NO: 301708 - protein, 18 aa, Homo sapiens
  CDR3 for beta chain variable domain of TCR clone 150854 (TRBV20-1, TRBJ2-2)
CSARVQTAYPSGTGELFF

SEQ ID NO: 301709 - protein, 13 aa, Homo sapiens
  CDR3 for alpha chain variable domain of TCR clone 150855 (TRAV29/DV5, TRAJ31)
CAASRNNNPRLMF

SEQ ID NO: 301710 - protein, 12 aa, Homo sapiens
  CDR3 for beta chain variable domain of TCR clone 150855 (TRBV14, TRBJ1-1)
CASSQLKGLAFF

SEQ ID NO: 301711 - protein, 17 aa, Homo sapiens
  CDR3 for alpha chain variable domain of TCR clone 150856 (TRAV3, TRAJ38)
CAVRACLNSGNNRKLIW

SEQ ID NO: 301712 - protein, 14 aa, Homo sapiens
  CDR3 for beta chain variable domain of TCR clone 150856 (TRBV5-5, TRBJ1-5)
CASSGQGVDQPQHF

SEQ ID NO: 301713 - protein, 14 aa, Homo sapiens
  CDR3 for alpha chain variable domain of TCR clone 150857 (TRAV16, TRAJ32)
CALKSGGATNKLIF

SEQ ID NO: 301714 - protein, 13 aa, Homo sapiens
  CDR3 for beta chain variable domain of TCR clone 150857 (TRBV15, TRBJ1-6)
CATSGGLNSHLHF

SEQ ID NO: 301715 - protein, 14 aa, Homo sapiens
  CDR3 for alpha chain variable domain of TCR clone 150858 (TRAV27, TRAJ37)
CAGGPPSNTGKLIF

SEQ ID NO: 301716 - protein, 13 aa, Homo sapiens
  CDR3 for beta chain variable domain of TCR clone 150858 (TRBV7-3, TRBJ1-1)
CASSQDWGAEAFF

SEQ ID NO: 301717 - protein, 19 aa, Homo sapiens
  CDR3 for alpha chain variable domain of TCR clone 150859 (TRAV38-1, TRAJ53)
CAFMKHGLESGGSNYKLTF

SEQ ID NO: 301718 - protein, 13 aa, Homo sapiens
  CDR3 for beta chain variable domain of TCR clone 150859 (TRBV19, TRBJ2-7)
CANSPRQSYEQYF

SEQ ID NO: 301719 - protein, 11 aa, Homo sapiens
  CDR3 for alpha chain variable domain of TCR clone 150860 (TRAV27, TRAJ45)
CAGAQEEVLTD

SEQ ID NO: 301720 - protein, 17 aa, Homo sapiens
  CDR3 for beta chain variable domain of TCR clone 150860 (TRBV3-1, TRBJ2-3)
CASSQDSPGASTDTQYF

SEQ ID NO: 301721 - protein, 14 aa, Homo sapiens
  CDR3 for alpha chain variable domain of TCR clone 150861 (TRAV20, TRAJ42)
CAVQAGGSPGNLIF

SEQ ID NO: 301722 - protein, 14 aa, Homo sapiens
  CDR3 for beta chain variable domain of TCR clone 150861 (TRBV28, TRBJ1-2)
CASRIQWANYGYTF

SEQ ID NO: 301723 - protein, 13 aa, Homo sapiens
  CDR3 for alpha chain variable domain of TCR clone 150862 (TRAV2, TRAJ40)
CAVVTSGTYKYIF

SEQ ID NO: 301724 - protein, 13 aa, Homo sapiens
  CDR3 for beta chain variable domain of TCR clone 150862 (TRBV27, TRBJ2-5)
CASFSRGLETQYF

SEQ ID NO: 301725 - protein, 11 aa, Homo sapiens
  CDR3 for alpha chain variable domain of TCR clone 150863 (TRAV2, TRAJ33)
CAVDSNYQLIW

SEQ ID NO: 301726 - protein, 16 aa, Homo sapiens
  CDR3 for beta chain variable domain of TCR clone 150863 (TRBV27, TRBJ2-2)
CASSSSGVSNTGELFF

SEQ ID NO: 301727 - protein, 10 aa, Homo sapiens
  CDR3 for alpha chain variable domain of TCR clone 150864 (TRAV8-4, TRAJ43)
CAVSTDDMRF

SEQ ID NO: 301728 - protein, 15 aa, Homo sapiens
  CDR3 for beta chain variable domain of TCR clone 150864 (TRBV5-1, TRBJ2-3)
CASSVTSGSTDTQYF

SEQ ID NO: 301729 - protein, 17 aa, Homo sapiens
  CDR3 for alpha chain variable domain of TCR clone 150865 (TRAV4, TRAJ18)
CLVVAAGRGSTLGRLYF

SEQ ID NO: 301730 - protein, 11 aa, Homo sapiens
  CDR3 for beta chain variable domain of TCR clone 150865 (TRBV12-4, TRBJ2-3)
CASTATDTQYF

SEQ ID NO: 301731 - protein, 15 aa, Homo sapiens
  CDR3 for alpha chain variable domain of TCR clone 150866 (TRAV17, TRAJ28)
CATVDSGAGRYQLTL

SEQ ID NO: 301732 - protein, 13 aa, Homo sapiens
  CDR3 for beta chain variable domain of TCR clone 150866 (TRBV5-4, TRBJ2-5)
CASIRQEGETQYF

SEQ ID NO: 301733 - protein, 14 aa, Homo sapiens
  CDR3 for alpha chain variable domain of TCR clone 150867 (TRAV29/DV5, TRAJ5)
CAASGDTGRRALTF

SEQ ID NO: 301734 - protein, 16 aa, Homo sapiens
  CDR3 for beta chain variable domain of TCR clone 150867 (TRBV4-2, TRBJ1-1)
CASRPLDGGGDTEAFF

SEQ ID NO: 301735 - protein, 14 aa, Homo sapiens
  CDR3 for alpha chain variable domain of TCR clone 150868 (TRAV1-2, TRAJ16)
CAVNRFSDGQKLLF

SEQ ID NO: 301736 - protein, 13 aa, Homo sapiens
  CDR3 for beta chain variable domain of TCR clone 150868 (TRBV12-4, TRBJ2-2)
CASSWGEGGELFF

SEQ ID NO: 301737 - protein, 16 aa, Homo sapiens
  CDR3 for alpha chain variable domain of TCR clone 150869 (TRAV3, TRAJ21)
CAVRDIERGNFKKFYF

SEQ ID NO: 301738 - protein, 15 aa, Homo sapiens
  CDR3 for beta chain variable domain of TCR clone 150869 (TRBV11-2, TRBJ2-1)
CASSLGTSGLNEQFF

SEQ ID NO: 301739 - protein, 14 aa, Homo sapiens
  CDR3 for alpha chain variable domain of TCR clone 150870 (TRAV2, TRAJ22)
CAVGRGGSARQLTF

SEQ ID NO: 301740 - protein, 14 aa, Homo sapiens
  CDR3 for beta chain variable domain of TCR clone 150870 (TRBV6-1, TRBJ1-3)
CASVQGGGGNTIYF

SEQ ID NO: 301741 - protein, 15 aa, Homo sapiens
  CDR3 for alpha chain variable domain of TCR clone 150871 (TRAV26-1, TRAJ20)
CIVRVAGVNDYKLSF

SEQ ID NO: 301742 - protein, 17 aa, Homo sapiens
  CDR3 for beta chain variable domain of TCR clone 150871 (TRBV11-2, TRBJ2-1)
CASSLYPPGVEYNEQFF

SEQ ID NO: 301743 - protein, 15 aa, Homo sapiens
  CDR3 for alpha chain variable domain of TCR clone 150872 (TRAV8-3, TRAJ45)
CASSYSVGGADGLTF

SEQ ID NO: 301744 - protein, 17 aa, Homo sapiens
  CDR3 for beta chain variable domain of TCR clone 150872 (TRBV7-8, TRBJ1-2)
CASSLRPLQGHLYGDTF

SEQ ID NO: 301745 - protein, 12 aa, Homo sapiens
  CDR3 for alpha chain variable domain of TCR clone 150873 (TRAV12-1, TRAJ40)
CVVYSGTYKYIF

SEQ ID NO: 301746 - protein, 17 aa, Homo sapiens
  CDR3 for beta chain variable domain of TCR clone 150873 (TRBV11-2, TRBJ2-3)
CQQLRGDSRGAPNTQYF

SEQ ID NO: 301747 - protein, 12 aa, Homo sapiens
  CDR3 for alpha chain variable domain of TCR clone 150874 (TRAV12-1, TRAJ23)
FVVNIPGGKLIF

SEQ ID NO: 301748 - protein, 15 aa, Homo sapiens
  CDR3 for beta chain variable domain of TCR clone 150874 (TRBV7-2, TRBJ2-7)
CASSLVSSGSYEQYF

SEQ ID NO: 301749 - protein, 15 aa, Homo sapiens
  CDR3 for alpha chain variable domain of TCR clone 150875 (TRAV20, TRAJ43)
CAVQAGKSSNNDMRL

SEQ ID NO: 301750 - protein, 13 aa, Homo sapiens
  CDR3 for beta chain variable domain of TCR clone 150875 (TRBV27, TRBJ1-1)
CASSLSIGAEAFF

SEQ ID NO: 301751 - protein, 13 aa, Homo sapiens
  CDR3 for alpha chain variable domain of TCR clone 150876 (TRAV21, TRAJ15)
CAVANQAGTALIF

SEQ ID NO: 301752 - protein, 14 aa, Homo sapiens
  CDR3 for beta chain variable domain of TCR clone 150876 (TRBV27, TRBJ2-2)
CVSSLGAATGELFF

SEQ ID NO: 301753 - protein, 13 aa, Homo sapiens
  CDR3 for alpha chain variable domain of TCR clone 150877 (TRAV3, TRAJ21)
CAVREPDFNKCYF

SEQ ID NO: 301754 - protein, 13 aa, Homo sapiens
  CDR3 for beta chain variable domain of TCR clone 150877 (TRBV9, TRBJ2-1)
CASSPSGGNEQFF

SEQ ID NO: 301755 - protein, 13 aa, Homo sapiens
  CDR3 for alpha chain variable domain of TCR clone 150878 (TRAV29/DV5, TRAJ31)
CAASRNNNAIRMF

SEQ ID NO: 301756 - protein, 15 aa, Homo sapiens
  CDR3 for beta chain variable domain of TCR clone 150878 (TRBV2, TRBJ2-1)
CASSELAGSYNEQFF

SEQ ID NO: 301757 - protein, 14 aa, Homo sapiens
  CDR3 for alpha chain variable domain of TCR clone 150879 (TRAV9-2, TRAJ39)
CALYIYNAGNMLTF

SEQ ID NO: 301758 - protein, 14 aa, Homo sapiens
  CDR3 for beta chain variable domain of TCR clone 150879 (TRBV19, TRBJ2-1)
CASPTFVLSGEQFL

SEQ ID NO: 301759 - protein, 13 aa, Homo sapiens
  CDR3 for alpha chain variable domain of TCR clone 150880 (TRAV39, TRAJ58)
CAGEETSGSRLTF

SEQ ID NO: 301760 - protein, 15 aa, Homo sapiens
  CDR3 for beta chain variable domain of TCR clone 150880 (TRBV4-1, TRBJ2-7)
CASSQKTGRLYEQYF

SEQ ID NO: 301761 - protein, 13 aa, Homo sapiens
  CDR3 for alpha chain variable domain of TCR clone 150881 (TRAV8-1, TRAJ28)
CAVSGAGSYQLTF

SEQ ID NO: 301762 - protein, 16 aa, Homo sapiens
  CDR3 for beta chain variable domain of TCR clone 150881 (TRBV7-7, TRBJ2-3)
CASSPGTSGSTDTQYF

SEQ ID NO: 301763 - protein, 14 aa, Homo sapiens
  CDR3 for alpha chain variable domain of TCR clone 150882 (TRAV1-2, TRAJ16)
CAVNRFSDGQKLLF

SEQ ID NO: 301764 - protein, 14 aa, Homo sapiens
  CDR3 for beta chain variable domain of TCR clone 150882 (TRBV12-4, TRBJ2-5)
CASSLWLKQETQYF

SEQ ID NO: 301765 - protein, 12 aa, Homo sapiens
  CDR3 for alpha chain variable domain of TCR clone 150883 (TRAV9-2, TRAJ48)
CALTFGNEKLTF

SEQ ID NO: 301766 - protein, 14 aa, Homo sapiens
  CDR3 for beta chain variable domain of TCR clone 150883 (TRBV11-3, TRBJ2-3)
CASSPSIRADTQYF

SEQ ID NO: 301767 - protein, 13 aa, Homo sapiens
  CDR3 for alpha chain variable domain of TCR clone 150884 (TRAV8-4, TRAJ49)
CAVSDSTGNQFYF

SEQ ID NO: 301768 - protein, 12 aa, Homo sapiens
  CDR3 for beta chain variable domain of TCR clone 150884 (TRBV11-2, TRBJ2-2)
CASSLGGGELFF

SEQ ID NO: 301769 - protein, 15 aa, Homo sapiens
  CDR3 for alpha chain variable domain of TCR clone 150885 (TRAV8-6, TRAJ38)
CAVSSNAGNNRKLIW

SEQ ID NO: 301770 - protein, 13 aa, Homo sapiens
  CDR3 for beta chain variable domain of TCR clone 150885 (TRBV7-2, TRBJ2-5)
CASSQTSVETQYF

SEQ ID NO: 301771 - protein, 14 aa, Homo sapiens
  CDR3 for alpha chain variable domain of TCR clone 150886 (TRAV8-3, TRAJ17)
CAVGAQTAGNKLTC

SEQ ID NO: 301772 - protein, 11 aa, Homo sapiens
  CDR3 for beta chain variable domain of TCR clone 150886 (TRBV29-1, TRBJ1-4)
CSVSSGEKLFF

SEQ ID NO: 301773 - protein, 16 aa, Homo sapiens
  CDR3 for alpha chain variable domain of TCR clone 150887 (TRAV12-1, TRAJ42)
CVVTPYYGGSQGNLIF

SEQ ID NO: 301774 - protein, 15 aa, Homo sapiens
  CDR3 for beta chain variable domain of TCR clone 150887 (TRBV5-1, TRBJ2-3)
CASSVTSGSTDTQYF

SEQ ID NO: 301775 - protein, 14 aa, Homo sapiens
  CDR3 for alpha chain variable domain of TCR clone 150888 (TRAV6, TRAJ8)
CALDNDTGFQKLVF

SEQ ID NO: 301776 - protein, 14 aa, Homo sapiens
  CDR3 for beta chain variable domain of TCR clone 150888 (TRBV19, TRBJ2-1)
CASPTFVLSGEQFF

SEQ ID NO: 301777 - protein, 14 aa, Homo sapiens
  CDR3 for alpha chain variable domain of TCR clone 150889 (TRAV2, TRAJ20)
CAVEDGTNDYKLSF

SEQ ID NO: 301778 - protein, 15 aa, Homo sapiens
  CDR3 for beta chain variable domain of TCR clone 150889 (TRBV5-1, TRBJ2-1)
CASSPPRAPYNEQFF

SEQ ID NO: 301779 - protein, 13 aa, Homo sapiens
  CDR3 for alpha chain variable domain of TCR clone 150890 (TRAV12-1, TRAJ11)
CVVNRAGYSALTF

SEQ ID NO: 301780 - protein, 15 aa, Homo sapiens
  CDR3 for beta chain variable domain of TCR clone 150890 (TRBV7-3, TRBJ2-2)
CASSETGQGTGELFF

SEQ ID NO: 301781 - protein, 11 aa, Homo sapiens
  CDR3 for alpha chain variable domain of TCR clone 150891 (TRAV3, TRAJ21)
CALCNFNTFYF

SEQ ID NO: 301782 - protein, 16 aa, Homo sapiens
  CDR3 for beta chain variable domain of TCR clone 150891 (TRBV19, TRBJ2-1)
CASSKAGPSSYNEQFF

SEQ ID NO: 301783 - protein, 11 aa, Homo sapiens
  CDR3 for alpha chain variable domain of TCR clone 150892 (TRAV12-3, TRAJ43)
CAMSVSNDMRF

SEQ ID NO: 301784 - protein, 15 aa, Homo sapiens
  CDR3 for beta chain variable domain of TCR clone 150892 (TRBV7-9, TRBJ1-2)
CASSLDREPNCGYTF

SEQ ID NO: 301785 - protein, 15 aa, Homo sapiens
  CDR3 for alpha chain variable domain of TCR clone 150893 (TRAV3, TRAJ3)
CAVRDRDSSASKIIF

SEQ ID NO: 301786 - protein, 18 aa, Homo sapiens
  CDR3 for beta chain variable domain of TCR clone 150893 (TRBV25-1, TRBJ1-2)
CASSGLQNEQGLIFGYTL

SEQ ID NO: 301787 - protein, 13 aa, Homo sapiens
  CDR3 for alpha chain variable domain of TCR clone 150894 (TRAV12-1, TRAJ6)
CVVFPGGSYLPTF

SEQ ID NO: 301788 - protein, 14 aa, Homo sapiens
  CDR3 for beta chain variable domain of TCR clone 150894 (TRBV20-1, TRBJ1-3)
CSASPTGAGNTIYF

SEQ ID NO: 301789 - protein, 16 aa, Homo sapiens
  CDR3 for alpha chain variable domain of TCR clone 150895 (TRAV12-3, TRAJ45)
CAMGWGSGGGADGLTF

SEQ ID NO: 301790 - protein, 15 aa, Homo sapiens
  CDR3 for beta chain variable domain of TCR clone 150895 (TRBV3-1, TRBJ1-2)
YASSHPGTPGYGDTF

SEQ ID NO: 301791 - protein, 14 aa, Homo sapiens
  CDR3 for alpha chain variable domain of TCR clone 150896 (TRAV12-2, TRAJ53)
CAVKGGGSNYKLTF

SEQ ID NO: 301792 - protein, 15 aa, Homo sapiens
  CDR3 for beta chain variable domain of TCR clone 150896 (TRBV7-3, TRBJ2-1)
CASSLDGNSYNEQFF

SEQ ID NO: 301793 - protein, 17 aa, Homo sapiens
  CDR3 for alpha chain variable domain of TCR clone 150897 (TRAV3, TRAJ38)
CAVRDCLNAGNNRKLIW

SEQ ID NO: 301794 - protein, 15 aa, Homo sapiens
  CDR3 for beta chain variable domain of TCR clone 150897 (TRBV27, TRBJ2-1)
CASSNGGGSSNVQFF

SEQ ID NO: 301795 - protein, 17 aa, Homo sapiens
  CDR3 for alpha chain variable domain of TCR clone 150898 (TRAV16, TRAJ42)
CALSPKLYGGSQGNLIF

SEQ ID NO: 301796 - protein, 13 aa, Homo sapiens
  CDR3 for beta chain variable domain of TCR clone 150898 (TRBV19, TRBJ1-5)
CASSTRRDQPLHF

SEQ ID NO: 301797 - protein, 13 aa, Homo sapiens
  CDR3 for alpha chain variable domain of TCR clone 150899 (TRAV6, TRAJ45)
SPFSGGGADGLPF

SEQ ID NO: 301798 - protein, 13 aa, Homo sapiens
  CDR3 for beta chain variable domain of TCR clone 150899 (TRBV20-1, TRBJ1-1)
CSARGGGNTEAFF

SEQ ID NO: 301799 - protein, 13 aa, Homo sapiens
  CDR3 for alpha chain variable domain of TCR clone 150900 (TRAV13-2, TRAJ5)
CAVKDTGRRALTF

SEQ ID NO: 301800 - protein, 12 aa, Homo sapiens
  CDR3 for beta chain variable domain of TCR clone 150900 (TRBV28, TRBJ2-7)
CASSFSSYEQYF

SEQ ID NO: 301801 - protein, 14 aa, Homo sapiens
  CDR3 for alpha chain variable domain of TCR clone 150901 (TRAV17, TRAJ15)
CATTTNQAGTALIF

SEQ ID NO: 301802 - protein, 16 aa, Homo sapiens
  CDR3 for beta chain variable domain of TCR clone 150901 (TRBV4-1, TRBJ2-7)
CASSRGDILNSYEQYV

SEQ ID NO: 301803 - protein, 17 aa, Homo sapiens
  CDR3 for alpha chain variable domain of TCR clone 150902 (TRAV3, TRAJ12)
CAVGDGGRMDSSYKLIF

SEQ ID NO: 301804 - protein, 13 aa, Homo sapiens
  CDR3 for beta chain variable domain of TCR clone 150902 (TRBV7-2, TRBJ1-6)
CASSLVGSSPLHF

SEQ ID NO: 301805 - protein, 15 aa, Homo sapiens
  CDR3 for alpha chain variable domain of TCR clone 150903 (TRAV2, TRAJ9)
CAVAALNTGGFKTIF

SEQ ID NO: 301806 - protein, 12 aa, Homo sapiens
  CDR3 for beta chain variable domain of TCR clone 150903 (TRBV19, TRBJ1-5)
CASSIAQQPQHF

SEQ ID NO: 301807 - protein, 16 aa, Homo sapiens
  CDR3 for alpha chain variable domain of TCR clone 150904 (TRAV30, TRAJ24)
CGTEIVDADSWGKFQF

SEQ ID NO: 301808 - protein, 15 aa, Homo sapiens
  CDR3 for beta chain variable domain of TCR clone 150904 (TRBV6-3, TRBJ2-3)
CASSWRDGDADTQYF

SEQ ID NO: 301809 - protein, 13 aa, Homo sapiens
  CDR3 for alpha chain variable domain of TCR clone 150905 (TRAV21, TRAJ27)
CAARPGNAGKSTF

SEQ ID NO: 301810 - protein, 20 aa, Homo sapiens
  CDR3 for beta chain variable domain of TCR clone 150905 (TRBV7-8, TRBJ2-2)
CASSHLFPGPTIHITGELFV

SEQ ID NO: 301811 - protein, 15 aa, Homo sapiens
  CDR3 for alpha chain variable domain of TCR clone 150906 (TRAV12-2, TRAJ53)
CAVNGGGGSNYKLTF

SEQ ID NO: 301812 - protein, 15 aa, Homo sapiens
  CDR3 for beta chain variable domain of TCR clone 150906 (TRBV20-1, TRBJ2-7)
CSARDRVSGMDEQYS

SEQ ID NO: 301813 - protein, 17 aa, Homo sapiens
  CDR3 for alpha chain variable domain of TCR clone 150907 (TRAV12-2, TRAJ52)
CAVNPYAGGTSYGKLTF

SEQ ID NO: 301814 - protein, 13 aa, Homo sapiens
  CDR3 for beta chain variable domain of TCR clone 150907 (TRBV4-3, TRBJ1-5)
CASSQDYNGPQHF

SEQ ID NO: 301815 - protein, 13 aa, Homo sapiens
  CDR3 for alpha chain variable domain of TCR clone 150908 (TRAV13-1, TRAJ12)
CAASPGSSCKLIF

SEQ ID NO: 301816 - protein, 16 aa, Homo sapiens
  CDR3 for beta chain variable domain of TCR clone 150908 (TRBV15, TRBJ2-1)
CATSRERLAGAYEQFF

SEQ ID NO: 301817 - protein, 13 aa, Homo sapiens
  CDR3 for alpha chain variable domain of TCR clone 150909 (TRAV8-3, TRAJ36)
CAVGATGANNLFF

SEQ ID NO: 301818 - protein, 15 aa, Homo sapiens
  CDR3 for beta chain variable domain of TCR clone 150909 (TRBV7-2, TRBJ1-2)
CARSPRAGWNYGYTF

SEQ ID NO: 301819 - protein, 11 aa, Homo sapiens
  CDR3 for alpha chain variable domain of TCR clone 150910 (TRAV17, TRAJ31)
CATSNNARLMF

SEQ ID NO: 301820 - protein, 13 aa, Homo sapiens
  CDR3 for beta chain variable domain of TCR clone 150910 (TRBV28, TRBJ1-2)
CAGRDRGNYGYTF

SEQ ID NO: 301821 - protein, 13 aa, Homo sapiens
  CDR3 for alpha chain variable domain of TCR clone 150911 (TRAV8-3, TRAJ6)
CAARRGGRYIPTF

SEQ ID NO: 301822 - protein, 15 aa, Homo sapiens
  CDR3 for beta chain variable domain of TCR clone 150911 (TRBV4-1, TRBJ2-3)
CASSNLAGGRDTQYF

SEQ ID NO: 301823 - protein, 14 aa, Homo sapiens
  CDR3 for alpha chain variable domain of TCR clone 150912 (TRAV19, TRAJ5)
CALKKDTGRRALTF

SEQ ID NO: 301824 - protein, 14 aa, Homo sapiens
  CDR3 for beta chain variable domain of TCR clone 150912 (TRBV19, TRBJ2-1)
CASPTFVLSGEQFF

SEQ ID NO: 301825 - protein, 14 aa, Homo sapiens
  CDR3 for alpha chain variable domain of TCR clone 150913 (TRAV1-2, TRAJ16)
CAVNRFSDGQKLIF

SEQ ID NO: 301826 - protein, 15 aa, Homo sapiens
  CDR3 for beta chain variable domain of TCR clone 150913 (TRBV5-8, TRBJ1-1)
CASSFSGTSLKGAFF

SEQ ID NO: 301827 - protein, 23 aa, Homo sapiens
  CDR3 for alpha chain variable domain of TCR clone 150914 (TRAV26-1, )
CIADNADNNHIQNPDPAVYQLRH

SEQ ID NO: 301828 - protein, 13 aa, Homo sapiens
  CDR3 for beta chain variable domain of TCR clone 150914 (TRBV20-1, TRBJ1-1)
CSARGGGNTEAFF

SEQ ID NO: 301829 - protein, 15 aa, Homo sapiens
  CDR3 for alpha chain variable domain of TCR clone 150915 (TRAV17, TRAJ57)
CATGPSQGGSEKLVL

SEQ ID NO: 301830 - protein, 16 aa, Homo sapiens
  CDR3 for beta chain variable domain of TCR clone 150915 (TRBV12-4, TRBJ1-5)
CASSQPVGGSNQPQHF

SEQ ID NO: 301831 - protein, 17 aa, Homo sapiens
  CDR3 for alpha chain variable domain of TCR clone 150916 (TRAV3, TRAJ6)
FAVRDGPRAGGSYMPTF

SEQ ID NO: 301832 - protein, 14 aa, Homo sapiens
  CDR3 for beta chain variable domain of TCR clone 150916 (TRBV7-2, TRBJ2-7)
CASSPKTSFYEQYF

SEQ ID NO: 301833 - protein, 14 aa, Homo sapiens
  CDR3 for alpha chain variable domain of TCR clone 150917 (TRAV1-1, TRAJ35)
CAVRSIGSGNVLHC

SEQ ID NO: 301834 - protein, 13 aa, Homo sapiens
  CDR3 for beta chain variable domain of TCR clone 150917 (TRBV4-2, TRBJ1-1)
CASSQAGNTEAFF

SEQ ID NO: 301835 - protein, 15 aa, Homo sapiens
  CDR3 for alpha chain variable domain of TCR clone 150918 (TRAV27, TRAJ38)
CAGRFNAGNNRKLIW

SEQ ID NO: 301836 - protein, 15 aa, Homo sapiens
  CDR3 for beta chain variable domain of TCR clone 150918 (TRBV4-1, TRBJ1-1)
CASSQDEDQNTEAFF

SEQ ID NO: 301837 - protein, 13 aa, Homo sapiens
  CDR3 for alpha chain variable domain of TCR clone 150919 (TRAV13-1, TRAJ43)
CAASKNNNNDMRF

SEQ ID NO: 301838 - protein, 14 aa, Homo sapiens
  CDR3 for beta chain variable domain of TCR clone 150919 (TRBV18, TRBJ2-7)
CASSPRGGAYEQYF

SEQ ID NO: 301839 - protein, 18 aa, Homo sapiens
  CDR3 for alpha chain variable domain of TCR clone 150920 (TRAV21, TRAJ52)
CAVRPSPAGGTSYGKLTF

SEQ ID NO: 301840 - protein, 15 aa, Homo sapiens
  CDR3 for beta chain variable domain of TCR clone 150920 (TRBV28, TRBJ2-5)
CASSSGRMIQETQYF

SEQ ID NO: 301841 - protein, 16 aa, Homo sapiens
  CDR3 for alpha chain variable domain of TCR clone 150921 (TRAV3, TRAJ37)
CAVRVRGSGNSGKLIF

SEQ ID NO: 301842 - protein, 11 aa, Homo sapiens
  CDR3 for beta chain variable domain of TCR clone 150921 (TRBV11-2, TRBJ2-2)
CASSLPGELFF

SEQ ID NO: 301843 - protein, 13 aa, Homo sapiens
  CDR3 for alpha chain variable domain of TCR clone 150922 (TRAV8-6, TRAJ5)
CAVLDTVRRALTF

SEQ ID NO: 301844 - protein, 12 aa, Homo sapiens
  CDR3 for beta chain variable domain of TCR clone 150922 (TRBV7-9, TRBJ1-6)
CASSASESPLHF

SEQ ID NO: 301845 - protein, 14 aa, Homo sapiens
  CDR3 for alpha chain variable domain of TCR clone 150923 (TRAV1-2, TRAJ16)
CAVNRFSDGQKLLF

SEQ ID NO: 301846 - protein, 13 aa, Homo sapiens
  CDR3 for beta chain variable domain of TCR clone 150923 (TRBV7-7, TRBJ2-2)
CARSLTSAGELFF

SEQ ID NO: 301847 - protein, 21 aa, Homo sapiens
  CDR3 for alpha chain variable domain of TCR clone 150924 (TRAV12-1, TRAJ32)
SSVIQPPTSMNYGGATNKLIF

SEQ ID NO: 301848 - protein, 14 aa, Homo sapiens
  CDR3 for beta chain variable domain of TCR clone 150924 (TRBV7-9, TRBJ2-2)
CQRTLDTFPGELFF

SEQ ID NO: 301849 - protein, 10 aa, Homo sapiens
  CDR3 for alpha chain variable domain of TCR clone 150925 (TRAV2, TRAJ34)
CAVATDKPIF

SEQ ID NO: 301850 - protein, 15 aa, Homo sapiens
  CDR3 for beta chain variable domain of TCR clone 150925 (TRBV20-1, TRBJ2-7)
CSARDRVSGMDEQYF

SEQ ID NO: 301851 - protein, 15 aa, Homo sapiens
  CDR3 for alpha chain variable domain of TCR clone 150926 (TRAV27, TRAJ38)
CAARRNAGNNRKRSG

SEQ ID NO: 301852 - protein, 13 aa, Homo sapiens
  CDR3 for beta chain variable domain of TCR clone 150926 (TRBV7-9, TRBJ1-2)
CASSLKQNYGYTF

SEQ ID NO: 301853 - protein, 15 aa, Homo sapiens
  CDR3 for alpha chain variable domain of TCR clone 150927 (TRAV12-2, TRAJ53)
CATLNSGGSNYKLTF

SEQ ID NO: 301854 - protein, 16 aa, Homo sapiens
  CDR3 for beta chain variable domain of TCR clone 150927 (TRBV9, TRBJ2-1)
CASSVGGGGNYNEQFF

SEQ ID NO: 301855 - protein, 14 aa, Homo sapiens
  CDR3 for alpha chain variable domain of TCR clone 150928 (TRAV26-1, TRAJ39)
CIVFTNNAGNRLTF

SEQ ID NO: 301856 - protein, 15 aa, Homo sapiens
  CDR3 for beta chain variable domain of TCR clone 150928 (TRBV19, TRBJ2-4)
CASSLTGLTKNIQYF

SEQ ID NO: 301857 - protein, 15 aa, Homo sapiens
  CDR3 for alpha chain variable domain of TCR clone 150929 (TRAV1-2, TRAJ9)
CAVRDDGTGGFKTIF

SEQ ID NO: 301858 - protein, 14 aa, Homo sapiens
  CDR3 for beta chain variable domain of TCR clone 150929 (TRBV25-1, TRBJ1-1)
CASTHLGGNTEAFF

SEQ ID NO: 301859 - protein, 14 aa, Homo sapiens
  CDR3 for alpha chain variable domain of TCR clone 150930 (TRAV12-2, TRAJ13)
CAVKKTGGYQQVTF

SEQ ID NO: 301860 - protein, 14 aa, Homo sapiens
  CDR3 for beta chain variable domain of TCR clone 150930 (TRBV7-9, TRBJ2-1)
CASSPRDSLYEQFF

SEQ ID NO: 301861 - protein, 11 aa, Homo sapiens
  CDR3 for alpha chain variable domain of TCR clone 150931 (TRAV2, TRAJ13)
CASRGYQKVTF

SEQ ID NO: 301862 - protein, 13 aa, Homo sapiens
  CDR3 for beta chain variable domain of TCR clone 150931 (TRBV7-3, TRBJ1-1)
CASSQDWGAEAFF

SEQ ID NO: 301863 - protein, 16 aa, Homo sapiens
  CDR3 for alpha chain variable domain of TCR clone 150932 (TRAV1-2, TRAJ10)
CAVRGVLTGGGNKLTF

SEQ ID NO: 301864 - protein, 15 aa, Homo sapiens
  CDR3 for beta chain variable domain of TCR clone 150932 (TRBV5-1, TRBJ2-1)
CASSPPRATYNEQFF

SEQ ID NO: 301865 - protein, 13 aa, Homo sapiens
  CDR3 for alpha chain variable domain of TCR clone 150933 (TRAV13-1, TRAJ17)
CAASRAAGNKLTF

SEQ ID NO: 301866 - protein, 15 aa, Homo sapiens
  CDR3 for beta chain variable domain of TCR clone 150933 (TRBV7-9, TRBJ1-6)
CASSSPGRENSPLHF

SEQ ID NO: 301867 - protein, 18 aa, Homo sapiens
  CDR3 for alpha chain variable domain of TCR clone 150934 (TRAV21, TRAJ52)
CAVRPSPAGGTSYGKLTF

SEQ ID NO: 301868 - protein, 13 aa, Homo sapiens
  CDR3 for beta chain variable domain of TCR clone 150934 (TRBV12-4, TRBJ1-2)
CASSLDSNYGYTF

SEQ ID NO: 301869 - protein, 15 aa, Homo sapiens
  CDR3 for alpha chain variable domain of TCR clone 150935 (TRAV19, TRAJ23)
CALSEVGNQGGKLIF

SEQ ID NO: 301870 - protein, 15 aa, Homo sapiens
  CDR3 for beta chain variable domain of TCR clone 150935 (TRBV5-1, TRBJ2-3)
CASSVTAGSTDTQYF

SEQ ID NO: 301871 - protein, 15 aa, Homo sapiens
  CDR3 for alpha chain variable domain of TCR clone 150936 (TRAV8-4, TRAJ29)
CAVSEDFRGSTPLVF

SEQ ID NO: 301872 - protein, 18 aa, Homo sapiens
  CDR3 for beta chain variable domain of TCR clone 150936 (TRBV20-1, TRBJ2-6)
CSARTLAGGPSGANVLTF

SEQ ID NO: 301873 - protein, 11 aa, Homo sapiens
  CDR3 for alpha chain variable domain of TCR clone 150937 (TRAV29/DV5, TRAJ37)
CATSNTGNLIF

SEQ ID NO: 301874 - protein, 18 aa, Homo sapiens
  CDR3 for beta chain variable domain of TCR clone 150937 (TRBV20-1, TRBJ2-6)
CSARTLAGGPSGANVLTF

SEQ ID NO: 301875 - protein, 12 aa, Homo sapiens
  CDR3 for alpha chain variable domain of TCR clone 150938 (TRAV3, TRAJ7)
CADLLWEQQTRF

SEQ ID NO: 301876 - protein, 14 aa, Homo sapiens
  CDR3 for beta chain variable domain of TCR clone 150938 (TRBV7-3, TRBJ2-1)
CASSLAGGTNEQFF

SEQ ID NO: 301877 - protein, 12 aa, Homo sapiens
  CDR3 for alpha chain variable domain of TCR clone 150939 (TRAV12-1, TRAJ40)
CVVYSATYKYIF

SEQ ID NO: 301878 - protein, 15 aa, Homo sapiens
  CDR3 for beta chain variable domain of TCR clone 150939 (TRBV27, TRBJ1-6)
CASSFDRGLGSPLHF

SEQ ID NO: 301879 - protein, 13 aa, Homo sapiens
  CDR3 for alpha chain variable domain of TCR clone 150940 (TRAV17, TRAJ26)
CATVDNYGQNFVF

SEQ ID NO: 301880 - protein, 13 aa, Homo sapiens
  CDR3 for beta chain variable domain of TCR clone 150940 (TRBV2, TRBJ1-5)
CASQGGPNQPQHF

SEQ ID NO: 301881 - protein, 17 aa, Homo sapiens
  CDR3 for alpha chain variable domain of TCR clone 150941 (TRAV3, TRAJ6)
CAGSRRTDTGGSYIPTF

SEQ ID NO: 301882 - protein, 17 aa, Homo sapiens
  CDR3 for beta chain variable domain of TCR clone 150941 (TRBV7-2, TRBJ2-3)
CASSLDEPGPESRYAVF

SEQ ID NO: 301883 - protein, 14 aa, Homo sapiens
  CDR3 for alpha chain variable domain of TCR clone 150942 (TRAV1-2, TRAJ16)
CAVNRLSDGRKLLF

SEQ ID NO: 301884 - protein, 15 aa, Homo sapiens
  CDR3 for beta chain variable domain of TCR clone 150942 (TRBV6-6, TRBJ2-7)
CASSFSYGGSYEQYF

SEQ ID NO: 301885 - protein, 14 aa, Homo sapiens
  CDR3 for alpha chain variable domain of TCR clone 150943 (TRAV23/DV6, TRAJ11)
CAALIGGGYSTLTF

SEQ ID NO: 301886 - protein, 16 aa, Homo sapiens
  CDR3 for beta chain variable domain of TCR clone 150943 (TRBV2, TRBJ2-1)
CASSVGGSLSYNEQFF

SEQ ID NO: 301887 - protein, 11 aa, Homo sapiens
  CDR3 for alpha chain variable domain of TCR clone 150944 (TRAV17, TRAJ39)
FATNPYNMLTF

SEQ ID NO: 301888 - protein, 13 aa, Homo sapiens
  CDR3 for beta chain variable domain of TCR clone 150944 (TRBV7-8, TRBJ2-1)
CASTRDAVDEQFF

SEQ ID NO: 301889 - protein, 16 aa, Homo sapiens
  CDR3 for alpha chain variable domain of TCR clone 150945 (TRAV20, TRAJ10)
CAVLRGLTGGGNKLTF

SEQ ID NO: 301890 - protein, 12 aa, Homo sapiens
  CDR3 for beta chain variable domain of TCR clone 150945 (TRBV7-2, TRBJ2-5)
CASSQYQETQYF

SEQ ID NO: 301891 - protein, 12 aa, Homo sapiens
  CDR3 for alpha chain variable domain of TCR clone 150946 (TRAV12-3, TRAJ17)
CAMTLTGNKLTF

SEQ ID NO: 301892 - protein, 14 aa, Homo sapiens
  CDR3 for beta chain variable domain of TCR clone 150946 (TRBV20-1, TRBJ1-3)
CSASPTGPGNTIYF

SEQ ID NO: 301893 - protein, 13 aa, Homo sapiens
  CDR3 for alpha chain variable domain of TCR clone 150947 (TRAV8-6, TRAJ40)
CAVSVTGTYKYIF

SEQ ID NO: 301894 - protein, 15 aa, Homo sapiens
  CDR3 for beta chain variable domain of TCR clone 150947 (TRBV4-1, TRBJ2-3)
CSSSWVQGIPDTQYF

SEQ ID NO: 301895 - protein, 14 aa, Homo sapiens
  CDR3 for alpha chain variable domain of TCR clone 150948 (TRAV20, TRAJ56)
CAVQFGGANSKLTF

SEQ ID NO: 301896 - protein, 14 aa, Homo sapiens
  CDR3 for beta chain variable domain of TCR clone 150948 (TRBV20-1, TRBJ2-7)
CSAKRGTSSYEQYF

SEQ ID NO: 301897 - protein, 17 aa, Homo sapiens
  CDR3 for alpha chain variable domain of TCR clone 150949 (TRAV8-6, TRAJ58)
CAVSSWVGETSGSRLTF

SEQ ID NO: 301898 - protein, 13 aa, Homo sapiens
  CDR3 for beta chain variable domain of TCR clone 150949 (TRBV4-2, TRBJ1-1)
CASSQAGNTEAFF

SEQ ID NO: 301899 - protein, 12 aa, Homo sapiens
  CDR3 for alpha chain variable domain of TCR clone 150950 (TRAV1-1, TRAJ23)
CAVTNQGGKLIF

SEQ ID NO: 301900 - protein, 15 aa, Homo sapiens
  CDR3 for beta chain variable domain of TCR clone 150950 (TRBV7-8, TRBJ2-1)
CASSLAGGLYNEQFF

SEQ ID NO: 301901 - protein, 15 aa, Homo sapiens
  CDR3 for alpha chain variable domain of TCR clone 150951 (TRAV13-1, TRAJ44)
CAASRGGGTASKLTF

SEQ ID NO: 301902 - protein, 13 aa, Homo sapiens
  CDR3 for beta chain variable domain of TCR clone 150951 (TRBV29-1, TRBJ2-3)
CSATRGGRDTQYF

SEQ ID NO: 301903 - protein, 17 aa, Homo sapiens
  CDR3 for alpha chain variable domain of TCR clone 150952 (TRAV19, TRAJ38)
CALSEAEEAGNNRKLIW

SEQ ID NO: 301904 - protein, 14 aa, Homo sapiens
  CDR3 for beta chain variable domain of TCR clone 150952 (TRBV20-1, TRBJ2-7)
CSARWTGGSYEQYF

SEQ ID NO: 301905 - protein, 14 aa, Homo sapiens
  CDR3 for alpha chain variable domain of TCR clone 150953 (TRAV26-1, TRAJ45)
YIEVTGGGADGLTF

SEQ ID NO: 301906 - protein, 15 aa, Homo sapiens
  CDR3 for beta chain variable domain of TCR clone 150953 (TRBV5-1, TRBJ1-1)
CASSSTTGTNTEAFF

SEQ ID NO: 301907 - protein, 14 aa, Homo sapiens
  CDR3 for alpha chain variable domain of TCR clone 150954 (TRAV26-1, TRAJ8)
CIVRVDTGFQKLVF

SEQ ID NO: 301908 - protein, 17 aa, Homo sapiens
  CDR3 for beta chain variable domain of TCR clone 150954 (TRBV13, TRBJ2-3)
CASSLSRVAGGRNTQYF

SEQ ID NO: 301909 - protein, 14 aa, Homo sapiens
  CDR3 for alpha chain variable domain of TCR clone 150955 (TRAV17, TRAJ40)
CATALTSGTYKYIF

SEQ ID NO: 301910 - protein, 15 aa, Homo sapiens
  CDR3 for beta chain variable domain of TCR clone 150955 (TRBV5-1, TRBJ2-2)
CASSSQGGNTGELFF

SEQ ID NO: 301911 - protein, 15 aa, Homo sapiens
  CDR3 for alpha chain variable domain of TCR clone 150956 (TRAV41, TRAJ45)
CAASYSGGGADGLTF

SEQ ID NO: 301912 - protein, 20 aa, Homo sapiens
  CDR3 for beta chain variable domain of TCR clone 150956 (TRBV7-8, TRBJ2-2)
CASSHLFPGPTIHITGELFF

SEQ ID NO: 301913 - protein, 14 aa, Homo sapiens
  CDR3 for alpha chain variable domain of TCR clone 150957 (TRAV8-3, TRAJ4)
CAVGAAGGYNKLIF

SEQ ID NO: 301914 - protein, 12 aa, Homo sapiens
  CDR3 for beta chain variable domain of TCR clone 150957 (TRBV14, TRBJ2-5)
CASSHLKETQYF

SEQ ID NO: 301915 - protein, 15 aa, Homo sapiens
  CDR3 for alpha chain variable domain of TCR clone 150958 (TRAV16, TRAJ39)
CSLSPSNNAGNMLTF

SEQ ID NO: 301916 - protein, 14 aa, Homo sapiens
  CDR3 for beta chain variable domain of TCR clone 150958 (TRBV7-7, TRBJ2-7)
CASSPGGPTYEQYF

SEQ ID NO: 301917 - protein, 18 aa, Homo sapiens
  CDR3 for alpha chain variable domain of TCR clone 150959 (TRAV12-2, )
CAVEDIQNPDTAVYQLRD

SEQ ID NO: 301918 - protein, 16 aa, Homo sapiens
  CDR3 for beta chain variable domain of TCR clone 150959 (TRBV6-1, TRBJ1-2)
CASSGAWQGRSHGYTF

SEQ ID NO: 301919 - protein, 14 aa, Homo sapiens
  CDR3 for alpha chain variable domain of TCR clone 150960 (TRAV30, TRAJ33)
CGTVAPRSNYQLIW

SEQ ID NO: 301920 - protein, 12 aa, Homo sapiens
  CDR3 for beta chain variable domain of TCR clone 150960 (TRBV2, TRBJ1-5)
CASTGGDQPQHF

SEQ ID NO: 301921 - protein, 17 aa, Homo sapiens
  CDR3 for alpha chain variable domain of TCR clone 150961 (TRAV3, TRAJ6)
CAVRGGPRAGGSYKPTF

SEQ ID NO: 301922 - protein, 20 aa, Homo sapiens
  CDR3 for beta chain variable domain of TCR clone 150961 (TRBV28, TRBJ2-1)
CASTPIGRSPGLAGGNEQFF

SEQ ID NO: 301923 - protein, 15 aa, Homo sapiens
  CDR3 for alpha chain variable domain of TCR clone 150962 (TRAV3, TRAJ29)
CAVRDPISGNTPLVF

SEQ ID NO: 301924 - protein, 12 aa, Homo sapiens
  CDR3 for beta chain variable domain of TCR clone 150962 (TRBV12-4, TRBJ2-7)
CASSLGGYEQYF

SEQ ID NO: 301925 - protein, 13 aa, Homo sapiens
  CDR3 for alpha chain variable domain of TCR clone 150963 (TRAV3, TRAJ21)
CAVREPEFNKFYF

SEQ ID NO: 301926 - protein, 14 aa, Homo sapiens
  CDR3 for beta chain variable domain of TCR clone 150963 (TRBV4-1, TRBJ2-7)
CASSPVAGGDEQYF

SEQ ID NO: 301927 - protein, 15 aa, Homo sapiens
  CDR3 for alpha chain variable domain of TCR clone 150964 (TRAV8-1, TRAJ6)
CAVNTPSGGSYIPTF

SEQ ID NO: 301928 - protein, 14 aa, Homo sapiens
  CDR3 for beta chain variable domain of TCR clone 150964 (TRBV12-5, TRBJ2-5)
CASGSRTHQETQYF

SEQ ID NO: 301929 - protein, 11 aa, Homo sapiens
  CDR3 for alpha chain variable domain of TCR clone 150965 (TRAV3, TRAJ31)
CAVRPDARLMF

SEQ ID NO: 301930 - protein, 13 aa, Homo sapiens
  CDR3 for beta chain variable domain of TCR clone 150965 (TRBV12-4, TRBJ1-1)
CASSPGTGFEAFF

SEQ ID NO: 301931 - protein, 14 aa, Homo sapiens
  CDR3 for alpha chain variable domain of TCR clone 150966 (TRAV12-3, TRAJ10)
SHLPLTGGGNKLTF

SEQ ID NO: 301932 - protein, 14 aa, Homo sapiens
  CDR3 for beta chain variable domain of TCR clone 150966 (TRBV7-9, TRBJ1-4)
CAITEGEANEKLFF

SEQ ID NO: 301933 - protein, 14 aa, Homo sapiens
  CDR3 for alpha chain variable domain of TCR clone 150967 (TRAV13-2, TRAJ15)
CAENPNQAGTALIF

SEQ ID NO: 301934 - protein, 16 aa, Homo sapiens
  CDR3 for beta chain variable domain of TCR clone 150967 (TRBV12-4, TRBJ1-2)
CASIPTATGKTRGYTF

SEQ ID NO: 301935 - protein, 14 aa, Homo sapiens
  CDR3 for alpha chain variable domain of TCR clone 150968 (TRAV9-2, TRAJ39)
CALYIYNAGNMLTF

SEQ ID NO: 301936 - protein, 15 aa, Homo sapiens
  CDR3 for beta chain variable domain of TCR clone 150968 (TRBV6-1, TRBJ2-6)
CASSSRPSGANDLTF

SEQ ID NO: 301937 - protein, 10 aa, Homo sapiens
  CDR3 for alpha chain variable domain of TCR clone 150969 (TRAV23/DV6, TRAJ31)
CARGGARLMF

SEQ ID NO: 301938 - protein, 14 aa, Homo sapiens
  CDR3 for beta chain variable domain of TCR clone 150969 (TRBV7-8, TRBJ1-2)
CASSPDSLSYGYSF

SEQ ID NO: 301939 - protein, 15 aa, Homo sapiens
  CDR3 for alpha chain variable domain of TCR clone 150970 (TRAV21, TRAJ32)
CAVNSYGGATNKLIF

SEQ ID NO: 301940 - protein, 18 aa, Homo sapiens
  CDR3 for beta chain variable domain of TCR clone 150970 (TRBV7-9, TRBJ2-1)
CASSTGLAEGSSYNEQFY

SEQ ID NO: 301941 - protein, 17 aa, Homo sapiens
  CDR3 for alpha chain variable domain of TCR clone 150971 (TRAV4, TRAJ42)
CLVGVLNYGGSQGNLIF

SEQ ID NO: 301942 - protein, 15 aa, Homo sapiens
  CDR3 for beta chain variable domain of TCR clone 150971 (TRBV4-1, TRBJ2-5)
CASSQWDLYQETQYF

SEQ ID NO: 301943 - protein, 15 aa, Homo sapiens
  CDR3 for alpha chain variable domain of TCR clone 150972 (TRAV3, TRAJ9)
CAVRDINTGGFKTIF

SEQ ID NO: 301944 - protein, 13 aa, Homo sapiens
  CDR3 for beta chain variable domain of TCR clone 150972 (TRBV12-4, TRBJ1-2)
CASSLRQGKGYTF

SEQ ID NO: 301945 - protein, 15 aa, Homo sapiens
  CDR3 for alpha chain variable domain of TCR clone 150973 (TRAV8-3, TRAJ45)
CASSYSGGGADGLTF

SEQ ID NO: 301946 - protein, 13 aa, Homo sapiens
  CDR3 for beta chain variable domain of TCR clone 150973 (TRBV10-3, TRBJ2-7)
WASKLAVNYEQYF

SEQ ID NO: 301947 - protein, 12 aa, Homo sapiens
  CDR3 for alpha chain variable domain of TCR clone 150974 (TRAV12-1, TRAJ40)
CVVYSGTYNYIF

SEQ ID NO: 301948 - protein, 17 aa, Homo sapiens
  CDR3 for beta chain variable domain of TCR clone 150974 (TRBV11-2, TRBJ2-3)
CQQLRGASRGAPNTQYF

SEQ ID NO: 301949 - protein, 14 aa, Homo sapiens
  CDR3 for alpha chain variable domain of TCR clone 150975 (TRAV8-3, TRAJ4)
CAVGAAGGYNKLIF

SEQ ID NO: 301950 - protein, 15 aa, Homo sapiens
  CDR3 for beta chain variable domain of TCR clone 150975 (TRBV7-9, TRBJ2-5)
CASSLEGGSGETQYF

SEQ ID NO: 301951 - protein, 15 aa, Homo sapiens
  CDR3 for alpha chain variable domain of TCR clone 150976 (TRAV3, TRAJ36)
CAVRASQTGANNLFF

SEQ ID NO: 301952 - protein, 20 aa, Homo sapiens
  CDR3 for beta chain variable domain of TCR clone 150976 (TRBV7-8, TRBJ2-2)
CASSHLFPGPTIHITGELFF

SEQ ID NO: 301953 - protein, 13 aa, Homo sapiens
  CDR3 for alpha chain variable domain of TCR clone 150977 (TRAV13-1, TRAJ20)
CAARVSNYYKLSF

SEQ ID NO: 301954 - protein, 12 aa, Homo sapiens
  CDR3 for beta chain variable domain of TCR clone 150977 (TRBV20-1, TRBJ2-1)
CSARLGTDDQFF

SEQ ID NO: 301955 - protein, 15 aa, Homo sapiens
  CDR3 for alpha chain variable domain of TCR clone 150978 (TRAV27, TRAJ38)
CAARRNSGNNRKLIW

SEQ ID NO: 301956 - protein, 13 aa, Homo sapiens
  CDR3 for beta chain variable domain of TCR clone 150978 (TRBV20-1, TRBJ1-1)
CSARAGGNTEAFF

SEQ ID NO: 301957 - protein, 13 aa, Homo sapiens
  CDR3 for alpha chain variable domain of TCR clone 150979 (TRAV36/DV7, TRAJ29)
CAVEPSGNTPLVF

SEQ ID NO: 301958 - protein, 17 aa, Homo sapiens
  CDR3 for beta chain variable domain of TCR clone 150979 (TRBV13, TRBJ2-3)
CASSLSRVAGGRNTQYF

SEQ ID NO: 301959 - protein, 13 aa, Homo sapiens
  CDR3 for alpha chain variable domain of TCR clone 150980 (TRAV12-3, TRAJ33)
CAMSVNSNYQLIW

SEQ ID NO: 301960 - protein, 16 aa, Homo sapiens
  CDR3 for beta chain variable domain of TCR clone 150980 (TRBV7-2, TRBJ2-2)
CASSRGRRGITGELFF

SEQ ID NO: 301961 - protein, 15 aa, Homo sapiens
  CDR3 for alpha chain variable domain of TCR clone 150981 (TRAV26-1, TRAJ29)
GIVRVEGSGKTPLVF

SEQ ID NO: 301962 - protein, 14 aa, Homo sapiens
  CDR3 for beta chain variable domain of TCR clone 150981 (TRBV18, TRBJ2-5)
CASSPGVSQETQYF

SEQ ID NO: 301963 - protein, 14 aa, Homo sapiens
  CDR3 for alpha chain variable domain of TCR clone 150982 (TRAV35, TRAJ33)
CAGSSQDSNYQLIW

SEQ ID NO: 301964 - protein, 13 aa, Homo sapiens
  CDR3 for beta chain variable domain of TCR clone 150982 (TRBV11-2, TRBJ2-5)
CASSRGPSETQYF

SEQ ID NO: 301965 - protein, 15 aa, Homo sapiens
  CDR3 for alpha chain variable domain of TCR clone 150983 (TRAV17, TRAJ23)
CATDAEDNQGGKLIF

SEQ ID NO: 301966 - protein, 17 aa, Homo sapiens
  CDR3 for beta chain variable domain of TCR clone 150983 (TRBV11-2, TRBJ2-1)
CASSLYPPGVEYNEQFF

SEQ ID NO: 301967 - protein, 14 aa, Homo sapiens
  CDR3 for alpha chain variable domain of TCR clone 150984 (TRAV12-1, TRAJ23)
CVVIVYNQGGKLIF

SEQ ID NO: 301968 - protein, 13 aa, Homo sapiens
  CDR3 for beta chain variable domain of TCR clone 150984 (TRBV11-2, TRBJ2-5)
CASSFSSQETQYV

SEQ ID NO: 301969 - protein, 16 aa, Homo sapiens
  CDR3 for alpha chain variable domain of TCR clone 150985 (TRAV8-6, TRAJ42)
CAVSEGYGGSQGNRIF

SEQ ID NO: 301970 - protein, 16 aa, Homo sapiens
  CDR3 for beta chain variable domain of TCR clone 150985 (TRBV13, TRBJ2-2)
CASSPRTGEHTGELFF

SEQ ID NO: 301971 - protein, 17 aa, Homo sapiens
  CDR3 for alpha chain variable domain of TCR clone 150986 (TRAV16, TRAJ58)
CITVLSNGETGGSRLTF

SEQ ID NO: 301972 - protein, 13 aa, Homo sapiens
  CDR3 for beta chain variable domain of TCR clone 150986 (TRBV15, TRBJ1-6)
CATSGGLNSPLHF

SEQ ID NO: 301973 - protein, 16 aa, Homo sapiens
  CDR3 for alpha chain variable domain of TCR clone 150987 (TRAV17, TRAJ17)
CATALQEEAAGNKRTF

SEQ ID NO: 301974 - protein, 12 aa, Homo sapiens
  CDR3 for beta chain variable domain of TCR clone 150987 (TRBV4-2, TRBJ2-5)
CASGGAQETQYF

SEQ ID NO: 301975 - protein, 10 aa, Homo sapiens
  CDR3 for alpha chain variable domain of TCR clone 150988 (TRAV13-1, TRAJ15)
INQAGTALIF

SEQ ID NO: 301976 - protein, 14 aa, Homo sapiens
  CDR3 for beta chain variable domain of TCR clone 150988 (TRBV7-9, TRBJ2-1)
CASSDNSGYNKQFF

SEQ ID NO: 301977 - protein, 13 aa, Homo sapiens
  CDR3 for alpha chain variable domain of TCR clone 150989 (TRAV12-2, TRAJ17)
CAVLFKAANKLTF

SEQ ID NO: 301978 - protein, 17 aa, Homo sapiens
  CDR3 for beta chain variable domain of TCR clone 150989 (TRBV20-1, TRBJ2-2)
CSASGSGQGGLTGELFF

SEQ ID NO: 301979 - protein, 15 aa, Homo sapiens
  CDR3 for alpha chain variable domain of TCR clone 150990 (TRAV25, TRAJ10)
CAGPLLTGGGNKLTF

SEQ ID NO: 301980 - protein, 15 aa, Homo sapiens
  CDR3 for beta chain variable domain of TCR clone 150990 (TRBV18, TRBJ2-1)
CASLPDRGRDNEQFF

SEQ ID NO: 301981 - protein, 15 aa, Homo sapiens
  CDR3 for alpha chain variable domain of TCR clone 150991 (TRAV17, TRAJ52)
CATEAGGTSYGKLTF

SEQ ID NO: 301982 - protein, 14 aa, Homo sapiens
  CDR3 for beta chain variable domain of TCR clone 150991 (TRBV28, TRBJ1-5)
CASSLGVWVKPQHF

SEQ ID NO: 301983 - protein, 15 aa, Homo sapiens
  CDR3 for alpha chain variable domain of TCR clone 150992 (TRAV12-2, TRAJ53)
CAVDGGGGSTYKLTF

SEQ ID NO: 301984 - protein, 13 aa, Homo sapiens
  CDR3 for beta chain variable domain of TCR clone 150992 (TRBV3-1, TRBJ1-1)
CASSPGVITEAFF

SEQ ID NO: 301985 - protein, 12 aa, Homo sapiens
  CDR3 for alpha chain variable domain of TCR clone 150993 (TRAV12-3, TRAJ17)
CAMTLTGKKLTF

SEQ ID NO: 301986 - protein, 13 aa, Homo sapiens
  CDR3 for beta chain variable domain of TCR clone 150993 (TRBV7-9, TRBJ1-2)
CASSLKQNYGYTF

SEQ ID NO: 301987 - protein, 14 aa, Homo sapiens
  CDR3 for alpha chain variable domain of TCR clone 150994 (TRAV13-2, TRAJ17)
CAENGQAAGNKLTF

SEQ ID NO: 301988 - protein, 15 aa, Homo sapiens
  CDR3 for beta chain variable domain of TCR clone 150994 (TRBV14, TRBJ1-1)
CASSQEGMGFTEAFF

SEQ ID NO: 301989 - protein, 13 aa, Homo sapiens
  CDR3 for alpha chain variable domain of TCR clone 150995 (TRAV3, TRAJ50)
CAVIKTTYDKVIF

SEQ ID NO: 301990 - protein, 15 aa, Homo sapiens
  CDR3 for beta chain variable domain of TCR clone 150995 (TRBV7-2, TRBJ2-2)
CASRRPGQNTGELFF

SEQ ID NO: 301991 - protein, 14 aa, Homo sapiens
  CDR3 for alpha chain variable domain of TCR clone 150996 (TRAV8-2, TRAJ4)
CVVSPSGGYNKRIF

SEQ ID NO: 301992 - protein, 15 aa, Homo sapiens
  CDR3 for beta chain variable domain of TCR clone 150996 (TRBV6-6, TRBJ2-7)
CASSYSYGGSYEQYF

SEQ ID NO: 301993 - protein, 15 aa, Homo sapiens
  CDR3 for alpha chain variable domain of TCR clone 150997 (TRAV12-1, TRAJ45)
CVVLSGGGVADGLTF

SEQ ID NO: 301994 - protein, 14 aa, Homo sapiens
  CDR3 for beta chain variable domain of TCR clone 150997 (TRBV11-2, TRBJ2-5)
CASSRTGGIETQYF

SEQ ID NO: 301995 - protein, 15 aa, Homo sapiens
  CDR3 for alpha chain variable domain of TCR clone 150998 (TRAV4, TRAJ39)
WLVGPNNNAGNMLTF

SEQ ID NO: 301996 - protein, 12 aa, Homo sapiens
  CDR3 for beta chain variable domain of TCR clone 150998 (TRBV12-4, TRBJ2-7)
CASNPGGGEQYF

SEQ ID NO: 301997 - protein, 14 aa, Homo sapiens
  CDR3 for alpha chain variable domain of TCR clone 150999 (TRAV36/DV7, TRAJ44)
CCGANTGTASKLTF

SEQ ID NO: 301998 - protein, 14 aa, Homo sapiens
  CDR3 for beta chain variable domain of TCR clone 150999 (TRBV7-3, TRBJ2-2)
CASSLYPLTGELFF

SEQ ID NO: 301999 - protein, 14 aa, Homo sapiens
  CDR3 for alpha chain variable domain of TCR clone 151000 (TRAV26-2, TRAJ38)
CILYNAGNNRKLIL

SEQ ID NO: 302000 - protein, 13 aa, Homo sapiens
  CDR3 for beta chain variable domain of TCR clone 151000 (TRBV6-6, TRBJ2-3)
CASSQGGRDTQYF

SEQ ID NO: 302001 - protein, 17 aa, Homo sapiens
  CDR3 for alpha chain variable domain of TCR clone 151001 (TRAV3, TRAJ6)
CAVRDGPRAGGSYIPTF

SEQ ID NO: 302002 - protein, 17 aa, Homo sapiens
  CDR3 for beta chain variable domain of TCR clone 151001 (TRBV5-1, TRBJ1-6)
CASSPSLQGSDNSPLHF

SEQ ID NO: 302003 - protein, 17 aa, Homo sapiens
  CDR3 for alpha chain variable domain of TCR clone 151002 (TRAV13-1, TRAJ28)
CAASPPYSGAGSDQLTS

SEQ ID NO: 302004 - protein, 12 aa, Homo sapiens
  CDR3 for beta chain variable domain of TCR clone 151002 (TRBV11-2, TRBJ2-2)
CASSLPTGELFF

SEQ ID NO: 302005 - protein, 16 aa, Homo sapiens
  CDR3 for alpha chain variable domain of TCR clone 151003 (TRAV12-1, TRAJ48)
CVVNMVSNFGNEKLAF

SEQ ID NO: 302006 - protein, 18 aa, Homo sapiens
  CDR3 for beta chain variable domain of TCR clone 151003 (TRBV11-2, TRBJ2-6)
CAISLNPFLGTGANVLTF

SEQ ID NO: 302007 - protein, 10 aa, Homo sapiens
  CDR3 for alpha chain variable domain of TCR clone 151004 (TRAV12-2, TRAJ43)
CAVKVLSMRF

SEQ ID NO: 302008 - protein, 13 aa, Homo sapiens
  CDR3 for beta chain variable domain of TCR clone 151004 (TRBV7-9, TRBJ1-2)
CASSLKQNYGYTF

SEQ ID NO: 302009 - protein, 14 aa, Homo sapiens
  CDR3 for alpha chain variable domain of TCR clone 151005 (TRAV23/DV6, TRAJ22)
CAASVSGSARQLTF

SEQ ID NO: 302010 - protein, 16 aa, Homo sapiens
  CDR3 for beta chain variable domain of TCR clone 151005 (TRBV19, TRBJ2-2)
CASSFPGLGLAGELFF

SEQ ID NO: 302011 - protein, 15 aa, Homo sapiens
  CDR3 for alpha chain variable domain of TCR clone 151006 (TRAV25, TRAJ53)
CAAAGGGGSNYKLTF

SEQ ID NO: 302012 - protein, 13 aa, Homo sapiens
  CDR3 for beta chain variable domain of TCR clone 151006 (TRBV4-2, TRBJ1-1)
CASSQAGNTEAFF

SEQ ID NO: 302013 - protein, 11 aa, Homo sapiens
  CDR3 for alpha chain variable domain of TCR clone 151007 (TRAV1-2, TRAJ40)
FAVPGTYKYIF

SEQ ID NO: 302014 - protein, 15 aa, Homo sapiens
  CDR3 for beta chain variable domain of TCR clone 151007 (TRBV7-9, TRBJ2-7)
CASSLALAEAYEQYF

SEQ ID NO: 302015 - protein, 15 aa, Homo sapiens
  CDR3 for alpha chain variable domain of TCR clone 151008 (TRAV13-1, TRAJ32)
CAASNGWWCYKHAHL

SEQ ID NO: 302016 - protein, 17 aa, Homo sapiens
  CDR3 for beta chain variable domain of TCR clone 151008 (TRBV15, TRBJ1-2)
CATSGREIDVVNYGYTF

SEQ ID NO: 302017 - protein, 12 aa, Homo sapiens
  CDR3 for alpha chain variable domain of TCR clone 151009 (TRAV12-3, TRAJ17)
CAMTLTGNKLTF

SEQ ID NO: 302018 - protein, 15 aa, Homo sapiens
  CDR3 for beta chain variable domain of TCR clone 151009 (TRBV20-1, TRBJ2-7)
CSARGRVSGMDEKYF

SEQ ID NO: 302019 - protein, 15 aa, Homo sapiens
  CDR3 for alpha chain variable domain of TCR clone 151010 (TRAV3, TRAJ5)
CAVRDLDPRRRALTF

SEQ ID NO: 302020 - protein, 13 aa, Homo sapiens
  CDR3 for beta chain variable domain of TCR clone 151010 (TRBV12-4, TRBJ2-7)
CASSPTETYEQYF

SEQ ID NO: 302021 - protein, 13 aa, Homo sapiens
  CDR3 for alpha chain variable domain of TCR clone 151011 (TRAV2, TRAJ15)
CAVDSQAGTALIL

SEQ ID NO: 302022 - protein, 17 aa, Homo sapiens
  CDR3 for beta chain variable domain of TCR clone 151011 (TRBV20-1, TRBJ2-2)
CSASGSGQGGLTGELFF

SEQ ID NO: 302023 - protein, 14 aa, Homo sapiens
  CDR3 for alpha chain variable domain of TCR clone 151012 (TRAV1-2, TRAJ16)
CAVNRFSDGQELLF

SEQ ID NO: 302024 - protein, 16 aa, Homo sapiens
  CDR3 for beta chain variable domain of TCR clone 151012 (TRBV11-2, TRBJ1-2)
CASSLDTGGADYGYTF

SEQ ID NO: 302025 - protein, 13 aa, Homo sapiens
  CDR3 for alpha chain variable domain of TCR clone 151013 (TRAV27, TRAJ45)
CRSSGGGADGLTF

SEQ ID NO: 302026 - protein, 15 aa, Homo sapiens
  CDR3 for beta chain variable domain of TCR clone 151013 (TRBV7-3, TRBJ2-3)
CASSLGLTLGDTQYF

SEQ ID NO: 302027 - protein, 14 aa, Homo sapiens
  CDR3 for alpha chain variable domain of TCR clone 151014 (TRAV38-1, TRAJ45)
CSYYSGGGADGLSF

SEQ ID NO: 302028 - protein, 20 aa, Homo sapiens
  CDR3 for beta chain variable domain of TCR clone 151014 (TRBV28, TRBJ2-1)
CASTPIGRSPGLAGGNEQFF

SEQ ID NO: 302029 - protein, 13 aa, Homo sapiens
  CDR3 for alpha chain variable domain of TCR clone 151015 (TRAV2, TRAJ21)
CAVEDLNFNNFYF

SEQ ID NO: 302030 - protein, 12 aa, Homo sapiens
  CDR3 for beta chain variable domain of TCR clone 151015 (TRBV28, TRBJ2-1)
CDSSVQINEQFF

SEQ ID NO: 302031 - protein, 14 aa, Homo sapiens
  CDR3 for alpha chain variable domain of TCR clone 151016 (TRAV1-2, TRAJ16)
GAVNRFSDGQKLLF

SEQ ID NO: 302032 - protein, 13 aa, Homo sapiens
  CDR3 for beta chain variable domain of TCR clone 151016 (TRBV20-1, TRBJ1-6)
CSAPTGLGSPLHF

SEQ ID NO: 302033 - protein, 15 aa, Homo sapiens
  CDR3 for alpha chain variable domain of TCR clone 151017 (TRAV3, TRAJ22)
CAVRDRGGSARTLTF

SEQ ID NO: 302034 - protein, 13 aa, Homo sapiens
  CDR3 for beta chain variable domain of TCR clone 151017 (TRBV2, TRBJ1-5)
CATAGPGNQPQHF

SEQ ID NO: 302035 - protein, 12 aa, Homo sapiens
  CDR3 for alpha chain variable domain of TCR clone 151018 (TRAV2, TRAJ9)
CAVGAGGFKTIF

SEQ ID NO: 302036 - protein, 10 aa, Homo sapiens
  CDR3 for beta chain variable domain of TCR clone 151018 (TRBV20-1, TRBJ2-5)
CSARFETQYF

SEQ ID NO: 302037 - protein, 10 aa, Homo sapiens
  CDR3 for alpha chain variable domain of TCR clone 151019 (TRAV23/DV6, TRAJ9)
CASNYWRLQN

SEQ ID NO: 302038 - protein, 14 aa, Homo sapiens
  CDR3 for beta chain variable domain of TCR clone 151019 (TRBV6-1, TRBJ2-7)
CASTRTGDYYEQYF

SEQ ID NO: 302039 - protein, 16 aa, Homo sapiens
  CDR3 for alpha chain variable domain of TCR clone 151020 (TRAV12-3, TRAJ53)
CAMSTGSGGSNYKLTF

SEQ ID NO: 302040 - protein, 16 aa, Homo sapiens
  CDR3 for beta chain variable domain of TCR clone 151020 (TRBV4-2, TRBJ1-1)
CASSQAGFGMNTEAFV

SEQ ID NO: 302041 - protein, 23 aa, Homo sapiens
  CDR3 for alpha chain variable domain of TCR clone 151021 (TRAV12-2, TRAJ43)
SLLIRDSQPSDSATYLCAFYMRF

SEQ ID NO: 302042 - protein, 18 aa, Homo sapiens
  CDR3 for beta chain variable domain of TCR clone 151021 (TRBV20-1, TRBJ2-3)
CSASGLAGGPGTTDTQYF

SEQ ID NO: 302043 - protein, 12 aa, Homo sapiens
  CDR3 for alpha chain variable domain of TCR clone 151022 (TRAV8-6, TRAJ22)
CAVNPGTRQLTF

SEQ ID NO: 302044 - protein, 13 aa, Homo sapiens
  CDR3 for beta chain variable domain of TCR clone 151022 (TRBV19, TRBJ1-2)
CARSQGQVYGYTF

SEQ ID NO: 302045 - protein, 14 aa, Homo sapiens
  CDR3 for alpha chain variable domain of TCR clone 151023 (TRAV12-1, TRAJ17)
CVVNPKDAGNKLTF

SEQ ID NO: 302046 - protein, 15 aa, Homo sapiens
  CDR3 for beta chain variable domain of TCR clone 151023 (TRBV7-2, TRBJ2-3)
CASSLAGAFIDTQYF

SEQ ID NO: 302047 - protein, 11 aa, Homo sapiens
  CDR3 for alpha chain variable domain of TCR clone 151024 (TRAV2, TRAJ13)
CASGGYQKVTF

SEQ ID NO: 302048 - protein, 16 aa, Homo sapiens
  CDR3 for beta chain variable domain of TCR clone 151024 (TRBV15, TRBJ2-6)
CATSVNGGFLANVLTF

SEQ ID NO: 302049 - protein, 15 aa, Homo sapiens
  CDR3 for alpha chain variable domain of TCR clone 151025 (TRAV8-6, TRAJ45)
RAVSEQRGGADGLTF

SEQ ID NO: 302050 - protein, 14 aa, Homo sapiens
  CDR3 for beta chain variable domain of TCR clone 151025 (TRBV28, TRBJ2-5)
CASRGSSFWETQYF

SEQ ID NO: 302051 - protein, 18 aa, Homo sapiens
  CDR3 for alpha chain variable domain of TCR clone 151026 (TRAV13-1, TRAJ52)
CAASKRSAGGTSYGKLTF

SEQ ID NO: 302052 - protein, 16 aa, Homo sapiens
  CDR3 for beta chain variable domain of TCR clone 151026 (TRBV19, TRBJ2-2)
CASRSPGTGATGELFF

SEQ ID NO: 302053 - protein, 14 aa, Homo sapiens
  CDR3 for alpha chain variable domain of TCR clone 151027 (TRAV38-1, TRAJ43)
CAFMKHNNHNDMRF

SEQ ID NO: 302054 - protein, 17 aa, Homo sapiens
  CDR3 for beta chain variable domain of TCR clone 151027 (TRBV7-7, TRBJ1-4)
CASSLVGQGASNEKLFF

SEQ ID NO: 302055 - protein, 15 aa, Homo sapiens
  CDR3 for alpha chain variable domain of TCR clone 151028 (TRAV12-3, TRAJ11)
CAMSEENSGYSTLTF

SEQ ID NO: 302056 - protein, 16 aa, Homo sapiens
  CDR3 for beta chain variable domain of TCR clone 151028 (TRBV11-2, TRBJ2-7)
CASSPTTGGVSYEQYF

SEQ ID NO: 302057 - protein, 13 aa, Homo sapiens
  CDR3 for alpha chain variable domain of TCR clone 151029 (TRAV2, TRAJ15)
CAVASQAGTALIF

SEQ ID NO: 302058 - protein, 14 aa, Homo sapiens
  CDR3 for beta chain variable domain of TCR clone 151029 (TRBV6-1, TRBJ2-5)
CASGGAGIQETQYF

SEQ ID NO: 302059 - protein, 13 aa, Homo sapiens
  CDR3 for alpha chain variable domain of TCR clone 151030 (TRAV3, TRAJ21)
CAVREPDFNKFYF

SEQ ID NO: 302060 - protein, 14 aa, Homo sapiens
  CDR3 for beta chain variable domain of TCR clone 151030 (TRBV5-1, TRBJ1-2)
CASSVDSTNYGYTF

SEQ ID NO: 302061 - protein, 12 aa, Homo sapiens
  CDR3 for alpha chain variable domain of TCR clone 151031 (TRAV13-1, TRAJ15)
CAASQAGTALIF

SEQ ID NO: 302062 - protein, 14 aa, Homo sapiens
  CDR3 for beta chain variable domain of TCR clone 151031 (TRBV19, TRBJ2-2)
CDSSTLHRSGELFF

SEQ ID NO: 302063 - protein, 17 aa, Homo sapiens
  CDR3 for alpha chain variable domain of TCR clone 151032 (TRAV23/DV6, TRAJ9)
CAASLSPPNTGGFKTIL

SEQ ID NO: 302064 - protein, 14 aa, Homo sapiens
  CDR3 for beta chain variable domain of TCR clone 151032 (TRBV11-2, TRBJ2-5)
CASSRTGGIETQYF

SEQ ID NO: 302065 - protein, 18 aa, Homo sapiens
  CDR3 for alpha chain variable domain of TCR clone 151033 (TRAV26-1, TRAJ52)
CIVDPVGAGGTSYGKLTF

SEQ ID NO: 302066 - protein, 12 aa, Homo sapiens
  CDR3 for beta chain variable domain of TCR clone 151033 (TRBV6-3, TRBJ2-7)
CASSLTPYEQYF

SEQ ID NO: 302067 - protein, 14 aa, Homo sapiens
  CDR3 for alpha chain variable domain of TCR clone 151034 (TRAV12-2, TRAJ13)
CAVKKTGGYQKVTF

SEQ ID NO: 302068 - protein, 13 aa, Homo sapiens
  CDR3 for beta chain variable domain of TCR clone 151034 (TRBV3-1, TRBJ2-5)
CASSPVLSETQYF

SEQ ID NO: 302069 - protein, 16 aa, Homo sapiens
  CDR3 for alpha chain variable domain of TCR clone 151035 (TRAV3, TRAJ10)
CAVRDMKAGGGNKLTF

SEQ ID NO: 302070 - protein, 15 aa, Homo sapiens
  CDR3 for beta chain variable domain of TCR clone 151035 (TRBV5-1, TRBJ2-1)
CASSPPRAPYNEQFF

SEQ ID NO: 302071 - protein, 14 aa, Homo sapiens
  CDR3 for alpha chain variable domain of TCR clone 151036 (TRAV17, TRAJ22)
CATSPSGSARQLTF

SEQ ID NO: 302072 - protein, 16 aa, Homo sapiens
  CDR3 for beta chain variable domain of TCR clone 151036 (TRBV15, TRBJ2-5)
CATSRYLEAAQETQYF

SEQ ID NO: 302073 - protein, 12 aa, Homo sapiens
  CDR3 for alpha chain variable domain of TCR clone 151037 (TRAV20, TRAJ39)
CAVGNAGNMLTF

SEQ ID NO: 302074 - protein, 15 aa, Homo sapiens
  CDR3 for beta chain variable domain of TCR clone 151037 (TRBV28, TRBJ2-7)
CASSPGGRGFYEQYF

SEQ ID NO: 302075 - protein, 13 aa, Homo sapiens
  CDR3 for alpha chain variable domain of TCR clone 151038 (TRAV2, TRAJ40)
CAVVTSGTYKYIF

SEQ ID NO: 302076 - protein, 13 aa, Homo sapiens
  CDR3 for beta chain variable domain of TCR clone 151038 (TRBV19, TRBJ1-2)
CAWSVPGQDGYTF

SEQ ID NO: 302077 - protein, 10 aa, Homo sapiens
  CDR3 for alpha chain variable domain of TCR clone 151039 (TRAV2, TRAJ34)
CAVVNDKLIF

SEQ ID NO: 302078 - protein, 14 aa, Homo sapiens
  CDR3 for beta chain variable domain of TCR clone 151039 (TRBV7-8, TRBJ2-3)
CASSLEAGTDTQYF

SEQ ID NO: 302079 - protein, 14 aa, Homo sapiens
  CDR3 for alpha chain variable domain of TCR clone 151040 (TRAV12-2, TRAJ9)
CAGNMEGGDFKTIF

SEQ ID NO: 302080 - protein, 14 aa, Homo sapiens
  CDR3 for beta chain variable domain of TCR clone 151040 (TRBV27, TRBJ2-3)
CASRKGGRTDTQYF

SEQ ID NO: 302081 - protein, 13 aa, Homo sapiens
  CDR3 for alpha chain variable domain of TCR clone 151041 (TRAV3, TRAJ21)
CAVREPDFKKFYF

SEQ ID NO: 302082 - protein, 18 aa, Homo sapiens
  CDR3 for beta chain variable domain of TCR clone 151041 (TRBV11-2, TRBJ2-3)
CASSLGGASRGAPNTQYF

SEQ ID NO: 302083 - protein, 14 aa, Homo sapiens
  CDR3 for alpha chain variable domain of TCR clone 151042 (TRAV17, TRAJ6)
CATVFQGGSYIPTF

SEQ ID NO: 302084 - protein, 17 aa, Homo sapiens
  CDR3 for beta chain variable domain of TCR clone 151042 (TRBV7-8, TRBJ2-6)
GASSAGTGGAGANVLTF

SEQ ID NO: 302085 - protein, 13 aa, Homo sapiens
  CDR3 for alpha chain variable domain of TCR clone 151043 (TRAV1-2, TRAJ27)
CAVRSGTNGKSTF

SEQ ID NO: 302086 - protein, 15 aa, Homo sapiens
  CDR3 for beta chain variable domain of TCR clone 151043 (TRBV18, TRBJ2-7)
CAGSPLQGRTYEQYF

SEQ ID NO: 302087 - protein, 11 aa, Homo sapiens
  CDR3 for alpha chain variable domain of TCR clone 151044 (TRAV2, TRAJ13)
CASGGYQKVTF

SEQ ID NO: 302088 - protein, 15 aa, Homo sapiens
  CDR3 for beta chain variable domain of TCR clone 151044 (TRBV11-3, TRBJ2-3)
CASLKDRREGDTQYF

SEQ ID NO: 302089 - protein, 13 aa, Homo sapiens
  CDR3 for alpha chain variable domain of TCR clone 151045 (TRAV1-2, TRAJ16)
CAVNRFSDGEAAL

SEQ ID NO: 302090 - protein, 16 aa, Homo sapiens
  CDR3 for beta chain variable domain of TCR clone 151045 (TRBV7-3, TRBJ2-2)
CASSLKRGTLSGELFF

SEQ ID NO: 302091 - protein, 13 aa, Homo sapiens
  CDR3 for alpha chain variable domain of TCR clone 151046 (TRAV27, TRAJ56)
CAGLTGANSKLTF

SEQ ID NO: 302092 - protein, 11 aa, Homo sapiens
  CDR3 for beta chain variable domain of TCR clone 151046 (TRBV20-1, TRBJ2-3)
CSGTSSTTQYF

SEQ ID NO: 302093 - protein, 11 aa, Homo sapiens
  CDR3 for alpha chain variable domain of TCR clone 151047 (TRAV2, TRAJ33)
CAVESNYQLIW

SEQ ID NO: 302094 - protein, 15 aa, Homo sapiens
  CDR3 for beta chain variable domain of TCR clone 151047 (TRBV12-4, TRBJ1-2)
CASSPITGGGYGYTF

SEQ ID NO: 302095 - protein, 13 aa, Homo sapiens
  CDR3 for alpha chain variable domain of TCR clone 151048 (TRAV8-3, TRAJ43)
CAVVPYNNNDMRF

SEQ ID NO: 302096 - protein, 16 aa, Homo sapiens
  CDR3 for beta chain variable domain of TCR clone 151048 (TRBV28, TRBJ2-7)
CASSLFFETGGPEQYC

SEQ ID NO: 302097 - protein, 14 aa, Homo sapiens
  CDR3 for alpha chain variable domain of TCR clone 151049 (TRAV1-2, TRAJ8)
CAVREDTGFQKLVF

SEQ ID NO: 302098 - protein, 15 aa, Homo sapiens
  CDR3 for beta chain variable domain of TCR clone 151049 (TRBV27, TRBJ2-1)
CASSNGGGSSKEQFF

SEQ ID NO: 302099 - protein, 14 aa, Homo sapiens
  CDR3 for alpha chain variable domain of TCR clone 151050 (TRAV13-1, TRAJ40)
CAASMTSATYKYIF

SEQ ID NO: 302100 - protein, 15 aa, Homo sapiens
  CDR3 for beta chain variable domain of TCR clone 151050 (TRBV7-3, TRBJ2-1)
CASSPTGRGEVEQFF

SEQ ID NO: 302101 - protein, 13 aa, Homo sapiens
  CDR3 for alpha chain variable domain of TCR clone 151051 (TRAV16, TRAJ11)
CALTQSGYSTLTF

SEQ ID NO: 302102 - protein, 14 aa, Homo sapiens
  CDR3 for beta chain variable domain of TCR clone 151051 (TRBV19, TRBJ2-7)
CASSTTRSSYEQYI

SEQ ID NO: 302103 - protein, 16 aa, Homo sapiens
  CDR3 for alpha chain variable domain of TCR clone 151052 (TRAV27, TRAJ52)
RAGAGAGGTSYGKLTF

SEQ ID NO: 302104 - protein, 17 aa, Homo sapiens
  CDR3 for beta chain variable domain of TCR clone 151052 (TRBV24-1, TRBJ2-3)
CATSDLPSGEDTDTQYF

SEQ ID NO: 302105 - protein, 13 aa, Homo sapiens
  CDR3 for alpha chain variable domain of TCR clone 151053 (TRAV29/DV5, TRAJ49)
CAASTNTGNQFYF

SEQ ID NO: 302106 - protein, 13 aa, Homo sapiens
  CDR3 for beta chain variable domain of TCR clone 151053 (TRBV7-2, TRBJ1-4)
YASSLAGLEKLFF

SEQ ID NO: 302107 - protein, 10 aa, Homo sapiens
  CDR3 for alpha chain variable domain of TCR clone 151054 (TRAV1-2, TRAJ18)
CAVRGEAQPW

SEQ ID NO: 302108 - protein, 14 aa, Homo sapiens
  CDR3 for beta chain variable domain of TCR clone 151054 (TRBV7-2, TRBJ2-7)
CASSFKGQNHEQYF

SEQ ID NO: 302109 - protein, 15 aa, Homo sapiens
  CDR3 for alpha chain variable domain of TCR clone 151055 (TRAV26-1, TRAJ56)
CIVRDDTGANSKLTF

SEQ ID NO: 302110 - protein, 16 aa, Homo sapiens
  CDR3 for beta chain variable domain of TCR clone 151055 (TRBV2, TRBJ2-1)
CASSANPRDWQAEQFF

SEQ ID NO: 302111 - protein, 12 aa, Homo sapiens
  CDR3 for alpha chain variable domain of TCR clone 151056 (TRAV16, TRAJ26)
FALRSYVQNFVF

SEQ ID NO: 302112 - protein, 14 aa, Homo sapiens
  CDR3 for beta chain variable domain of TCR clone 151056 (TRBV10-3, TRBJ2-1)
CAISSDLAYNEQFF

SEQ ID NO: 302113 - protein, 15 aa, Homo sapiens
  CDR3 for alpha chain variable domain of TCR clone 151057 (TRAV21, TRAJ53)
CATLNRGGSNYKLKF

SEQ ID NO: 302114 - protein, 16 aa, Homo sapiens
  CDR3 for beta chain variable domain of TCR clone 151057 (TRBV12-4, TRBJ1-5)
CASSRPVGGSNQPQHF

SEQ ID NO: 302115 - protein, 15 aa, Homo sapiens
  CDR3 for alpha chain variable domain of TCR clone 151058 (TRAV17, TRAJ22)
CATVAPSGSARQLTF

SEQ ID NO: 302116 - protein, 16 aa, Homo sapiens
  CDR3 for beta chain variable domain of TCR clone 151058 (TRBV10-3, TRBJ2-7)
CAISADFAHRPYEHYF

SEQ ID NO: 302117 - protein, 14 aa, Homo sapiens
  CDR3 for alpha chain variable domain of TCR clone 151059 (TRAV17, TRAJ54)
CATDANQGAQKLVF

SEQ ID NO: 302118 - protein, 14 aa, Homo sapiens
  CDR3 for beta chain variable domain of TCR clone 151059 (TRBV25-1, TRBJ1-1)
CASAHLGGNTEAFF

SEQ ID NO: 302119 - protein, 14 aa, Homo sapiens
  CDR3 for alpha chain variable domain of TCR clone 151060 (TRAV38-1, TRAJ45)
FAYYSGGGADGLPF

SEQ ID NO: 302120 - protein, 20 aa, Homo sapiens
  CDR3 for beta chain variable domain of TCR clone 151060 (TRBV28, TRBJ2-1)
CASTPIGRSPGLAGGNEQFF

SEQ ID NO: 302121 - protein, 14 aa, Homo sapiens
  CDR3 for alpha chain variable domain of TCR clone 151061 (TRAV1-2, TRAJ8)
CAVGEDTGFQKLVF

SEQ ID NO: 302122 - protein, 15 aa, Homo sapiens
  CDR3 for beta chain variable domain of TCR clone 151061 (TRBV10-1, TRBJ2-1)
CASSTGTELYNEQFF

SEQ ID NO: 302123 - protein, 11 aa, Homo sapiens
  CDR3 for alpha chain variable domain of TCR clone 151062 (TRAV12-1, TRAJ30)
CVVNGQNKIIF

SEQ ID NO: 302124 - protein, 17 aa, Homo sapiens
  CDR3 for beta chain variable domain of TCR clone 151062 (TRBV13, TRBJ2-3)
CASSLSRVAGGRNTQYF

SEQ ID NO: 302125 - protein, 13 aa, Homo sapiens
  CDR3 for alpha chain variable domain of TCR clone 151063 (TRAV8-2, TRAJ47)
CVVSEREGNKLVF

SEQ ID NO: 302126 - protein, 15 aa, Homo sapiens
  CDR3 for beta chain variable domain of TCR clone 151063 (TRBV6-3, TRBJ2-7)
CASSSPGTVFYEQYV

SEQ ID NO: 302127 - protein, 14 aa, Homo sapiens
  CDR3 for alpha chain variable domain of TCR clone 151064 (TRAV8-3, TRAJ4)
CAVGASGGYNKLIF

SEQ ID NO: 302128 - protein, 15 aa, Homo sapiens
  CDR3 for beta chain variable domain of TCR clone 151064 (TRBV6-3, TRBJ2-7)
CASSSPGTVFYEQYF

SEQ ID NO: 302129 - protein, 15 aa, Homo sapiens
  CDR3 for alpha chain variable domain of TCR clone 151065 (TRAV16, TRAJ4)
CALEDPSGGYNKLIF

SEQ ID NO: 302130 - protein, 12 aa, Homo sapiens
  CDR3 for beta chain variable domain of TCR clone 151065 (TRBV7-8, TRBJ2-1)
CASSLGHNEQFF

SEQ ID NO: 302131 - protein, 14 aa, Homo sapiens
  CDR3 for alpha chain variable domain of TCR clone 151066 (TRAV1-2, TRAJ16)
CAVRSASDGQKLPF

SEQ ID NO: 302132 - protein, 17 aa, Homo sapiens
  CDR3 for beta chain variable domain of TCR clone 151066 (TRBV7-3, TRBJ2-3)
CASSLMKRMRGADTQYF

SEQ ID NO: 302133 - protein, 17 aa, Homo sapiens
  CDR3 for alpha chain variable domain of TCR clone 151067 (TRAV4, )
CLVDIQNPDPAVYQLRD

SEQ ID NO: 302134 - protein, 15 aa, Homo sapiens
  CDR3 for beta chain variable domain of TCR clone 151067 (TRBV5-1, TRBJ2-7)
CASSLMTSGSNEQYF

SEQ ID NO: 302135 - protein, 13 aa, Homo sapiens
  CDR3 for alpha chain variable domain of TCR clone 151068 (TRAV14/DV4, TRAJ23)
CAMREVKGGKLIF

SEQ ID NO: 302136 - protein, 11 aa, Homo sapiens
  CDR3 for beta chain variable domain of TCR clone 151068 (TRBV7-2, TRBJ2-7)
CASSSGLWQYF

SEQ ID NO: 302137 - protein, 16 aa, Homo sapiens
  CDR3 for alpha chain variable domain of TCR clone 151069 (TRAV3, TRAJ21)
CAVRDIERGNFNKFYF

SEQ ID NO: 302138 - protein, 13 aa, Homo sapiens
  CDR3 for beta chain variable domain of TCR clone 151069 (TRBV27, TRBJ2-7)
CASSLTTGDEQYF

SEQ ID NO: 302139 - protein, 13 aa, Homo sapiens
  CDR3 for alpha chain variable domain of TCR clone 151070 (TRAV2, TRAJ29)
CAAQNSGNTPLVF

SEQ ID NO: 302140 - protein, 14 aa, Homo sapiens
  CDR3 for beta chain variable domain of TCR clone 151070 (TRBV7-9, TRBJ2-4)
CASSLAMGGNSQYV

SEQ ID NO: 302141 - protein, 15 aa, Homo sapiens
  CDR3 for alpha chain variable domain of TCR clone 151071 (TRAV21, TRAJ24)
CAARSSTDSWGKLQF

SEQ ID NO: 302142 - protein, 16 aa, Homo sapiens
  CDR3 for beta chain variable domain of TCR clone 151071 (TRBV7-9, TRBJ2-3)
CASSLQGNPGTDTQYF

SEQ ID NO: 302143 - protein, 19 aa, Homo sapiens
  CDR3 for alpha chain variable domain of TCR clone 151072 (TRAV2, TRAJ20)
ILQVREADAAVYRDCKLSF

SEQ ID NO: 302144 - protein, 17 aa, Homo sapiens
  CDR3 for beta chain variable domain of TCR clone 151072 (TRBV20-1, TRBJ2-1)
CSARDRRRASSYNEQFF

SEQ ID NO: 302145 - protein, 13 aa, Homo sapiens
  CDR3 for alpha chain variable domain of TCR clone 151073 (TRAV17, TRAJ22)
CAHHSGSARQLTF

SEQ ID NO: 302146 - protein, 15 aa, Homo sapiens
  CDR3 for beta chain variable domain of TCR clone 151073 (TRBV2, TRBJ2-1)
CASSELAGSYNEQFF

SEQ ID NO: 302147 - protein, 13 aa, Homo sapiens
  CDR3 for alpha chain variable domain of TCR clone 151074 (TRAV23/DV6, TRAJ12)
CAPRVDSSYKLIF

SEQ ID NO: 302148 - protein, 12 aa, Homo sapiens
  CDR3 for beta chain variable domain of TCR clone 151074 (TRBV7-6, TRBJ2-5)
CARSLSQETQYF

SEQ ID NO: 302149 - protein, 15 aa, Homo sapiens
  CDR3 for alpha chain variable domain of TCR clone 151075 (TRAV21, TRAJ24)
CAARSSTDSWGKWQF

SEQ ID NO: 302150 - protein, 19 aa, Homo sapiens
  CDR3 for beta chain variable domain of TCR clone 151075 (TRBV14, TRBJ2-1)
CASSQDQLWEAPEYNEQFF

SEQ ID NO: 302151 - protein, 14 aa, Homo sapiens
  CDR3 for alpha chain variable domain of TCR clone 151076 (TRAV13-1, TRAJ20)
CAARPGSNDYNLSF

SEQ ID NO: 302152 - protein, 12 aa, Homo sapiens
  CDR3 for beta chain variable domain of TCR clone 151076 (TRBV7-8, TRBJ2-7)
CASSLGDREQYF

SEQ ID NO: 302153 - protein, 11 aa, Homo sapiens
  CDR3 for alpha chain variable domain of TCR clone 151077 (TRAV1-1, TRAJ23)
CAVRQGGKLIF

SEQ ID NO: 302154 - protein, 13 aa, Homo sapiens
  CDR3 for beta chain variable domain of TCR clone 151077 (TRBV15, TRBJ1-6)
CATSGGLNSPLHS

SEQ ID NO: 302155 - protein, 14 aa, Homo sapiens
  CDR3 for alpha chain variable domain of TCR clone 151078 (TRAV8-1, TRAJ5)
CAVRTDTGRRALTF

SEQ ID NO: 302156 - protein, 13 aa, Homo sapiens
  CDR3 for beta chain variable domain of TCR clone 151078 (TRBV14, TRBJ2-7)
CASSQDRRYEQYF

SEQ ID NO: 302157 - protein, 10 aa, Homo sapiens
  CDR3 for alpha chain variable domain of TCR clone 151079 (TRAV26-1, TRAJ22)
CIVSLNFFRF

SEQ ID NO: 302158 - protein, 15 aa, Homo sapiens
  CDR3 for beta chain variable domain of TCR clone 151079 (TRBV4-2, TRBJ1-2)
CASSQRTGGRDGYTF

SEQ ID NO: 302159 - protein, 12 aa, Homo sapiens
  CDR3 for alpha chain variable domain of TCR clone 151080 (TRAV12-1, TRAJ29)
RVADSGNTPPVF

SEQ ID NO: 302160 - protein, 12 aa, Homo sapiens
  CDR3 for beta chain variable domain of TCR clone 151080 (TRBV2, TRBJ2-7)
CASKRGSYEQYF

SEQ ID NO: 302161 - protein, 12 aa, Homo sapiens
  CDR3 for alpha chain variable domain of TCR clone 151081 (TRAV12-3, TRAJ17)
CVMTLTGNKLTF

SEQ ID NO: 302162 - protein, 13 aa, Homo sapiens
  CDR3 for beta chain variable domain of TCR clone 151081 (TRBV7-9, TRBJ1-2)
CASSLKQNYGYTF

SEQ ID NO: 302163 - protein, 14 aa, Homo sapiens
  CDR3 for alpha chain variable domain of TCR clone 151082 (TRAV29/DV5, TRAJ48)
CAAMALFGNEKLTF

SEQ ID NO: 302164 - protein, 15 aa, Homo sapiens
  CDR3 for beta chain variable domain of TCR clone 151082 (TRBV7-2, TRBJ2-1)
CASTRGTGIYNEQFL

SEQ ID NO: 302165 - protein, 17 aa, Homo sapiens
  CDR3 for alpha chain variable domain of TCR clone 151083 (TRAV24, TRAJ13)
CASSKAGGLPESYLWNW

SEQ ID NO: 302166 - protein, 13 aa, Homo sapiens
  CDR3 for beta chain variable domain of TCR clone 151083 (TRBV5-7, TRBJ2-6)
CASTSSGANVLTF

SEQ ID NO: 302167 - protein, 16 aa, Homo sapiens
  CDR3 for alpha chain variable domain of TCR clone 151084 (TRAV1-1, TRAJ29)
CAVRSTRNSGNTPLVF

SEQ ID NO: 302168 - protein, 15 aa, Homo sapiens
  CDR3 for beta chain variable domain of TCR clone 151084 (TRBV13, TRBJ1-2)
CASSSKIQGNYGYTF

SEQ ID NO: 302169 - protein, 16 aa, Homo sapiens
  CDR3 for alpha chain variable domain of TCR clone 151085 (TRAV22, TRAJ45)
CAVERGKRGGADGLTF

SEQ ID NO: 302170 - protein, 13 aa, Homo sapiens
  CDR3 for beta chain variable domain of TCR clone 151085 (TRBV11-3, TRBJ1-1)
CASSLSIGAEAFF

SEQ ID NO: 302171 - protein, 15 aa, Homo sapiens
  CDR3 for alpha chain variable domain of TCR clone 151086 (TRAV16, TRAJ48)
CALFISNFGNEKLTF

SEQ ID NO: 302172 - protein, 15 aa, Homo sapiens
  CDR3 for beta chain variable domain of TCR clone 151086 (TRBV20-1, TRBJ2-7)
CSARDRVSGMDEQYF

SEQ ID NO: 302173 - protein, 14 aa, Homo sapiens
  CDR3 for alpha chain variable domain of TCR clone 151087 (TRAV12-1, TRAJ17)
CVGNYKAAGNKLTF

SEQ ID NO: 302174 - protein, 17 aa, Homo sapiens
  CDR3 for beta chain variable domain of TCR clone 151087 (TRBV20-1, TRBJ2-1)
LSASSSGLAGSYNEQFF

SEQ ID NO: 302175 - protein, 11 aa, Homo sapiens
  CDR3 for alpha chain variable domain of TCR clone 151088 (TRAV2, TRAJ13)
CASGGYQKVTF

SEQ ID NO: 302176 - protein, 15 aa, Homo sapiens
  CDR3 for beta chain variable domain of TCR clone 151088 (TRBV5-4, TRBJ2-7)
CGSSRFGTGSYEQYF

SEQ ID NO: 302177 - protein, 14 aa, Homo sapiens
  CDR3 for alpha chain variable domain of TCR clone 151089 (TRAV8-3, TRAJ9)
CALVYNTGGFKTIF

SEQ ID NO: 302178 - protein, 16 aa, Homo sapiens
  CDR3 for beta chain variable domain of TCR clone 151089 (TRBV7-3, TRBJ2-2)
CASSLKRGTLSGELFF

SEQ ID NO: 302179 - protein, 12 aa, Homo sapiens
  CDR3 for alpha chain variable domain of TCR clone 151090 (TRAV1-1, TRAJ39)
CAVPVVGTMLTF

SEQ ID NO: 302180 - protein, 13 aa, Homo sapiens
  CDR3 for beta chain variable domain of TCR clone 151090 (TRBV4-1, TRBJ1-1)
CASSRKMNTEAFF

SEQ ID NO: 302181 - protein, 20 aa, Homo sapiens
  CDR3 for alpha chain variable domain of TCR clone 151091 (TRAV8-3, TRAJ44)
LSTSVLWVRLYTGTAIKLTF

SEQ ID NO: 302182 - protein, 16 aa, Homo sapiens
  CDR3 for beta chain variable domain of TCR clone 151091 (TRBV6-4, TRBJ1-2)
CASSEAVGDPNYGYTF

SEQ ID NO: 302183 - protein, 15 aa, Homo sapiens
  CDR3 for alpha chain variable domain of TCR clone 151092 (TRAV3, TRAJ42)
CAVRGGTGSKGNLIF

SEQ ID NO: 302184 - protein, 14 aa, Homo sapiens
  CDR3 for beta chain variable domain of TCR clone 151092 (TRBV19, TRBJ1-2)
CASSSLFARDVYTL

SEQ ID NO: 302185 - protein, 12 aa, Homo sapiens
  CDR3 for alpha chain variable domain of TCR clone 151093 (TRAV3, TRAJ26)
CAVRDYGQNFVF

SEQ ID NO: 302186 - protein, 16 aa, Homo sapiens
  CDR3 for beta chain variable domain of TCR clone 151093 (TRBV11-2, TRBJ1-2)
CASSPSGREANYGYTS

SEQ ID NO: 302187 - protein, 14 aa, Homo sapiens
  CDR3 for alpha chain variable domain of TCR clone 151094 (TRAV29/DV5, TRAJ36)
CAARRKTGATNLFL

SEQ ID NO: 302188 - protein, 14 aa, Homo sapiens
  CDR3 for beta chain variable domain of TCR clone 151094 (TRBV12-5, TRBJ2-5)
CASGSRTHQETQYF

SEQ ID NO: 302189 - protein, 14 aa, Homo sapiens
  CDR3 for alpha chain variable domain of TCR clone 151095 (TRAV12-2, TRAJ13)
CAVKKTGGYQKVTF

SEQ ID NO: 302190 - protein, 14 aa, Homo sapiens
  CDR3 for beta chain variable domain of TCR clone 151095 (TRBV6-1, TRBJ2-2)
CASVEHIESGELFF

SEQ ID NO: 302191 - protein, 20 aa, Homo sapiens
  CDR3 for alpha chain variable domain of TCR clone 151096 (TRAV2, TRAJ9)
CAVGAGGLKLSLEQEQDYLL

SEQ ID NO: 302192 - protein, 16 aa, Homo sapiens
  CDR3 for beta chain variable domain of TCR clone 151096 (TRBV13, TRBJ2-2)
CASSPRTGEHTGELFF

SEQ ID NO: 302193 - protein, 12 aa, Homo sapiens
  CDR3 for alpha chain variable domain of TCR clone 151097 (TRAV21, TRAJ49)
CAVTNTGNQFYF

SEQ ID NO: 302194 - protein, 16 aa, Homo sapiens
  CDR3 for beta chain variable domain of TCR clone 151097 (TRBV7-3, TRBJ2-1)
CASSLEGYRSYNEQFF

SEQ ID NO: 302195 - protein, 14 aa, Homo sapiens
  CDR3 for alpha chain variable domain of TCR clone 151098 (TRAV8-3, TRAJ6)
CAVGASGGSYIPTF

SEQ ID NO: 302196 - protein, 17 aa, Homo sapiens
  CDR3 for beta chain variable domain of TCR clone 151098 (TRBV18, TRBJ2-2)
CASSPSDPGQNTGELFF

SEQ ID NO: 302197 - protein, 17 aa, Homo sapiens
  CDR3 for alpha chain variable domain of TCR clone 151099 (TRAV13-1, TRAJ52)
CAASSGAGGTSYGQLTF

SEQ ID NO: 302198 - protein, 15 aa, Homo sapiens
  CDR3 for beta chain variable domain of TCR clone 151099 (TRBV2, TRBJ2-1)
CASSERAGSYNEQFF

SEQ ID NO: 302199 - protein, 15 aa, Homo sapiens
  CDR3 for alpha chain variable domain of TCR clone 151100 (TRAV3, TRAJ22)
CAVRDRGGSARQLTF

SEQ ID NO: 302200 - protein, 14 aa, Homo sapiens
  CDR3 for beta chain variable domain of TCR clone 151100 (TRBV19, TRBJ2-1)
CASSRLASINEQLF

SEQ ID NO: 302201 - protein, 12 aa, Homo sapiens
  CDR3 for alpha chain variable domain of TCR clone 151101 (TRAV16, TRAJ9)
CALSSGGFKTIF

SEQ ID NO: 302202 - protein, 15 aa, Homo sapiens
  CDR3 for beta chain variable domain of TCR clone 151101 (TRBV29-1, TRBJ2-7)
CSVEFFDRGSYEQYF

SEQ ID NO: 302203 - protein, 13 aa, Homo sapiens
  CDR3 for alpha chain variable domain of TCR clone 151102 (TRAV12-2, TRAJ4)
CAGFSGGYNKLIF

SEQ ID NO: 302204 - protein, 14 aa, Homo sapiens
  CDR3 for beta chain variable domain of TCR clone 151102 (TRBV24-1, TRBJ1-1)
CATSIRRGDTEAFF

SEQ ID NO: 302205 - protein, 14 aa, Homo sapiens
  CDR3 for alpha chain variable domain of TCR clone 151103 (TRAV20, TRAJ22)
CAVALGGSARQLTF

SEQ ID NO: 302206 - protein, 18 aa, Homo sapiens
  CDR3 for beta chain variable domain of TCR clone 151103 (TRBV20-1, TRBJ2-6)
CSAETTPTHGSGANVLTF

SEQ ID NO: 302207 - protein, 16 aa, Homo sapiens
  CDR3 for alpha chain variable domain of TCR clone 151104 (TRAV12-3, TRAJ53)
CAMSTGSGGSNYKLTF

SEQ ID NO: 302208 - protein, 11 aa, Homo sapiens
  CDR3 for beta chain variable domain of TCR clone 151104 (TRBV29-1, TRBJ2-5)
CSEDRTGTQCF

SEQ ID NO: 302209 - protein, 18 aa, Homo sapiens
  CDR3 for alpha chain variable domain of TCR clone 151105 (TRAV26-1, TRAJ5)
CIVRVVPPRDTGRRALTF

SEQ ID NO: 302210 - protein, 15 aa, Homo sapiens
  CDR3 for beta chain variable domain of TCR clone 151105 (TRBV24-1, TRBJ1-1)
CATSDSKTVNTEAFF

SEQ ID NO: 302211 - protein, 15 aa, Homo sapiens
  CDR3 for alpha chain variable domain of TCR clone 151106 (TRAV12-2, TRAJ53)
CAVNAGGVSNYKLTF

SEQ ID NO: 302212 - protein, 13 aa, Homo sapiens
  CDR3 for beta chain variable domain of TCR clone 151106 (TRBV3-1, TRBJ1-1)
CASSPGVITEAFF

SEQ ID NO: 302213 - protein, 13 aa, Homo sapiens
  CDR3 for alpha chain variable domain of TCR clone 151107 (TRAV29/DV5, TRAJ22)
CAHHSGSASQLTF

SEQ ID NO: 302214 - protein, 14 aa, Homo sapiens
  CDR3 for beta chain variable domain of TCR clone 151107 (TRBV16, TRBJ1-1)
CASSQAGPNTEAFF

SEQ ID NO: 302215 - protein, 10 aa, Homo sapiens
  CDR3 for alpha chain variable domain of TCR clone 151108 (TRAV12-2, TRAJ48)
CAVTSEKLTF

SEQ ID NO: 302216 - protein, 12 aa, Homo sapiens
  CDR3 for beta chain variable domain of TCR clone 151108 (TRBV29-1, TRBJ2-3)
CSVTGGADTQYF

SEQ ID NO: 302217 - protein, 12 aa, Homo sapiens
  CDR3 for alpha chain variable domain of TCR clone 151109 (TRAV8-3, TRAJ20)
CAVDFNVYKLSF

SEQ ID NO: 302218 - protein, 12 aa, Homo sapiens
  CDR3 for beta chain variable domain of TCR clone 151109 (TRBV29-1, TRBJ2-3)
CSVTGGADTQYF

SEQ ID NO: 302219 - protein, 16 aa, Homo sapiens
  CDR3 for alpha chain variable domain of TCR clone 151110 (TRAV26-1, TRAJ23)
CIVRVHPYNQGGKLIF

SEQ ID NO: 302220 - protein, 15 aa, Homo sapiens
  CDR3 for beta chain variable domain of TCR clone 151110 (TRBV5-7, TRBJ2-7)
CASSPYFEGSYEQFF

SEQ ID NO: 302221 - protein, 11 aa, Homo sapiens
  CDR3 for alpha chain variable domain of TCR clone 151111 (TRAV21, TRAJ23)
CAPQRRGKLIV

SEQ ID NO: 302222 - protein, 14 aa, Homo sapiens
  CDR3 for beta chain variable domain of TCR clone 151111 (TRBV12-4, TRBJ1-1)
CASTWTGHDTEAFF

SEQ ID NO: 302223 - protein, 11 aa, Homo sapiens
  CDR3 for alpha chain variable domain of TCR clone 151112 (TRAV12-1, TRAJ21)
CVVNNFNKFYF

SEQ ID NO: 302224 - protein, 14 aa, Homo sapiens
  CDR3 for beta chain variable domain of TCR clone 151112 (TRBV15, TRBJ1-5)
CATSSEQYNQPQHF

SEQ ID NO: 302225 - protein, 15 aa, Homo sapiens
  CDR3 for alpha chain variable domain of TCR clone 151113 (TRAV8-4, TRAJ12)
CAVSDRVYSSYKLIF

SEQ ID NO: 302226 - protein, 15 aa, Homo sapiens
  CDR3 for beta chain variable domain of TCR clone 151113 (TRBV11-3, TRBJ2-1)
CASSLAGQTYNEQFF

SEQ ID NO: 302227 - protein, 13 aa, Homo sapiens
  CDR3 for alpha chain variable domain of TCR clone 151114 (TRAV12-1, TRAJ49)
CVVNTNTGNQFYF

SEQ ID NO: 302228 - protein, 13 aa, Homo sapiens
  CDR3 for beta chain variable domain of TCR clone 151114 (TRBV7-9, TRBJ1-2)
CASSLKQNYGYTF

SEQ ID NO: 302229 - protein, 13 aa, Homo sapiens
  CDR3 for alpha chain variable domain of TCR clone 151115 (TRAV12-1, TRAJ16)
CVVNGPDGQKLLF

SEQ ID NO: 302230 - protein, 16 aa, Homo sapiens
  CDR3 for beta chain variable domain of TCR clone 151115 (TRBV5-4, TRBJ2-3)
CASSFGAGEGTDTQYF

SEQ ID NO: 302231 - protein, 16 aa, Homo sapiens
  CDR3 for alpha chain variable domain of TCR clone 151116 (TRAV16, TRAJ42)
CALSGLLGGSQGNLIF

SEQ ID NO: 302232 - protein, 15 aa, Homo sapiens
  CDR3 for beta chain variable domain of TCR clone 151116 (TRBV5-1, TRBJ2-1)
CASSPGRLAGNEQFF

SEQ ID NO: 302233 - protein, 14 aa, Homo sapiens
  CDR3 for alpha chain variable domain of TCR clone 151117 (TRAV17, TRAJ57)
CATDPQGGSEKLVF

SEQ ID NO: 302234 - protein, 16 aa, Homo sapiens
  CDR3 for beta chain variable domain of TCR clone 151117 (TRBV7-6, TRBJ2-1)
CASSAPGPSSYNEQFF

SEQ ID NO: 302235 - protein, 14 aa, Homo sapiens
  CDR3 for alpha chain variable domain of TCR clone 151118 (TRAV12-2, TRAJ17)
CAVLFKAAGNKLTF

SEQ ID NO: 302236 - protein, 17 aa, Homo sapiens
  CDR3 for beta chain variable domain of TCR clone 151118 (TRBV11-2, TRBJ2-1)
CASSLYPAGVEYNEQFF

SEQ ID NO: 302237 - protein, 15 aa, Homo sapiens
  CDR3 for alpha chain variable domain of TCR clone 151119 (TRAV26-1, TRAJ42)
FIVRVKGGSQGNLIF

SEQ ID NO: 302238 - protein, 14 aa, Homo sapiens
  CDR3 for beta chain variable domain of TCR clone 151119 (TRBV19, TRBJ2-2)
CSTTGHANTGELFF

SEQ ID NO: 302239 - protein, 12 aa, Homo sapiens
  CDR3 for alpha chain variable domain of TCR clone 151120 (TRAV12-2, TRAJ9)
CAGGTGGFKTIF

SEQ ID NO: 302240 - protein, 15 aa, Homo sapiens
  CDR3 for beta chain variable domain of TCR clone 151120 (TRBV19, TRBJ2-1)
CVSSTLAGGYNEQFF

SEQ ID NO: 302241 - protein, 12 aa, Homo sapiens
  CDR3 for alpha chain variable domain of TCR clone 151121 (TRAV13-1, TRAJ15)
CAASQAGTALIF

SEQ ID NO: 302242 - protein, 18 aa, Homo sapiens
  CDR3 for beta chain variable domain of TCR clone 151121 (TRBV7-9, TRBJ2-3)
SASSLPINGQISTDTQYF

SEQ ID NO: 302243 - protein, 20 aa, Homo sapiens
  CDR3 for alpha chain variable domain of TCR clone 151122 (TRAV12-3, TRAJ41)
SLFVRDSQPSDSATPEALNF

SEQ ID NO: 302244 - protein, 15 aa, Homo sapiens
  CDR3 for beta chain variable domain of TCR clone 151122 (TRBV5-1, TRBJ2-7)
CASSLDLTSSYEQYF

SEQ ID NO: 302245 - protein, 13 aa, Homo sapiens
  CDR3 for alpha chain variable domain of TCR clone 151123 (TRAV3, TRAJ27)
CAVRPLGAGKSTF

SEQ ID NO: 302246 - protein, 17 aa, Homo sapiens
  CDR3 for beta chain variable domain of TCR clone 151123 (TRBV5-1, TRBJ2-2)
CASSLAGLSGGTGELFF

SEQ ID NO: 302247 - protein, 12 aa, Homo sapiens
  CDR3 for alpha chain variable domain of TCR clone 151124 (TRAV12-3, TRAJ17)
CAMTLTGNELTF

SEQ ID NO: 302248 - protein, 18 aa, Homo sapiens
  CDR3 for beta chain variable domain of TCR clone 151124 (TRBV4-3, TRBJ1-6)
CASSRETPASSYNSPLHF

SEQ ID NO: 302249 - protein, 17 aa, Homo sapiens
  CDR3 for alpha chain variable domain of TCR clone 151125 (TRAV26-1, TRAJ53)
CIVRVDDSGGSNYKLTF

SEQ ID NO: 302250 - protein, 14 aa, Homo sapiens
  CDR3 for beta chain variable domain of TCR clone 151125 (TRBV28, TRBJ2-1)
CASSSVPSYNEQFF

SEQ ID NO: 302251 - protein, 14 aa, Homo sapiens
  CDR3 for alpha chain variable domain of TCR clone 151126 (TRAV13-1, TRAJ44)
CAAKATGTASKLTF

SEQ ID NO: 302252 - protein, 17 aa, Homo sapiens
  CDR3 for beta chain variable domain of TCR clone 151126 (TRBV19, TRBJ2-7)
CASSISFYDSYPYEQYF

SEQ ID NO: 302253 - protein, 13 aa, Homo sapiens
  CDR3 for alpha chain variable domain of TCR clone 151127 (TRAV12-3, TRAJ33)
CAMSVNSNYQLIW

SEQ ID NO: 302254 - protein, 13 aa, Homo sapiens
  CDR3 for beta chain variable domain of TCR clone 151127 (TRBV10-2, TRBJ1-1)
CASNDQMNTEDFF

SEQ ID NO: 302255 - protein, 11 aa, Homo sapiens
  CDR3 for alpha chain variable domain of TCR clone 151128 (TRAV13-1, TRAJ43)
CAAHNNNDMRF

SEQ ID NO: 302256 - protein, 16 aa, Homo sapiens
  CDR3 for beta chain variable domain of TCR clone 151128 (TRBV2, TRBJ2-1)
CASSVGGSLSYNEQFF

SEQ ID NO: 302257 - protein, 14 aa, Homo sapiens
  CDR3 for alpha chain variable domain of TCR clone 151129 (TRAV29/DV5, TRAJ36)
CAARCKTGANNLFF

SEQ ID NO: 302258 - protein, 15 aa, Homo sapiens
  CDR3 for beta chain variable domain of TCR clone 151129 (TRBV20-1, TRBJ2-7)
CSARDRVSGMDEQYF

SEQ ID NO: 302259 - protein, 10 aa, Homo sapiens
  CDR3 for alpha chain variable domain of TCR clone 151130 (TRAV1-2, TRAJ20)
CAWNDYKLSF

SEQ ID NO: 302260 - protein, 16 aa, Homo sapiens
  CDR3 for beta chain variable domain of TCR clone 151130 (TRBV20-1, TRBJ2-1)
CSARDLKQGMNNEQFF

SEQ ID NO: 302261 - protein, 15 aa, Homo sapiens
  CDR3 for alpha chain variable domain of TCR clone 151131 (TRAV12-3, TRAJ6)
CAMSATSGGSYIPTS

SEQ ID NO: 302262 - protein, 11 aa, Homo sapiens
  CDR3 for beta chain variable domain of TCR clone 151131 (TRBV20-1, TRBJ1-5)
CSAQGDQPQHF

SEQ ID NO: 302263 - protein, 18 aa, Homo sapiens
  CDR3 for alpha chain variable domain of TCR clone 151132 (TRAV26-1, TRAJ23)
CIVRVGLEVWNQGGKLIF

SEQ ID NO: 302264 - protein, 14 aa, Homo sapiens
  CDR3 for beta chain variable domain of TCR clone 151132 (TRBV12-4, TRBJ1-1)
CASSLGTGGTEAFF

SEQ ID NO: 302265 - protein, 11 aa, Homo sapiens
  CDR3 for alpha chain variable domain of TCR clone 151133 (TRAV26-1, TRAJ37)
CIVRVGRKLIF

SEQ ID NO: 302266 - protein, 13 aa, Homo sapiens
  CDR3 for beta chain variable domain of TCR clone 151133 (TRBV14, TRBJ1-2)
CASSEHRRYGYTF

SEQ ID NO: 302267 - protein, 14 aa, Homo sapiens
  CDR3 for alpha chain variable domain of TCR clone 151134 (TRAV8-2, TRAJ11)
CVVSEKAGSSNLTF

SEQ ID NO: 302268 - protein, 16 aa, Homo sapiens
  CDR3 for beta chain variable domain of TCR clone 151134 (TRBV28, TRBJ2-1)
CASSSPEYPRDNEQFF

SEQ ID NO: 302269 - protein, 14 aa, Homo sapiens
  CDR3 for alpha chain variable domain of TCR clone 151135 (TRAV38-1, TRAJ45)
CAYYSGGGTDGLTF

SEQ ID NO: 302270 - protein, 20 aa, Homo sapiens
  CDR3 for beta chain variable domain of TCR clone 151135 (TRBV28, TRBJ2-1)
CASTPIGRSPGLAGGNEQLF

SEQ ID NO: 302271 - protein, 10 aa, Homo sapiens
  CDR3 for alpha chain variable domain of TCR clone 151136 (TRAV23/DV6, TRAJ43)
CAAAVAALEQ

SEQ ID NO: 302272 - protein, 13 aa, Homo sapiens
  CDR3 for beta chain variable domain of TCR clone 151136 (TRBV12-4, TRBJ1-2)
CASRLRQGKGYTF

SEQ ID NO: 302273 - protein, 14 aa, Homo sapiens
  CDR3 for alpha chain variable domain of TCR clone 151137 (TRAV17, TRAJ11)
CATDTSRGYRPLTF

SEQ ID NO: 302274 - protein, 13 aa, Homo sapiens
  CDR3 for beta chain variable domain of TCR clone 151137 (TRBV19, TRBJ2-5)
CASRDSRRETQYF

SEQ ID NO: 302275 - protein, 11 aa, Homo sapiens
  CDR3 for alpha chain variable domain of TCR clone 151138 (TRAV2, TRAJ33)
CAVDSNYQLIW

SEQ ID NO: 302276 - protein, 15 aa, Homo sapiens
  CDR3 for beta chain variable domain of TCR clone 151138 (TRBV7-2, TRBJ2-1)
CASSLASGRVNEQFF

SEQ ID NO: 302277 - protein, 15 aa, Homo sapiens
  CDR3 for alpha chain variable domain of TCR clone 151139 (TRAV26-1, TRAJ22)
CIVGVSFWFCKATDL

SEQ ID NO: 302278 - protein, 12 aa, Homo sapiens
  CDR3 for beta chain variable domain of TCR clone 151139 (TRBV7-6, TRBJ2-3)
CASSTGTDTQYF

SEQ ID NO: 302279 - protein, 16 aa, Homo sapiens
  CDR3 for alpha chain variable domain of TCR clone 151140 (TRAV13-2, TRAJ22)
CAENRGSSGSARQLTF

SEQ ID NO: 302280 - protein, 17 aa, Homo sapiens
  CDR3 for beta chain variable domain of TCR clone 151140 (TRBV14, TRBJ2-1)
CASSQDRRVSSYNEQIF

SEQ ID NO: 302281 - protein, 12 aa, Homo sapiens
  CDR3 for alpha chain variable domain of TCR clone 151141 (TRAV27, TRAJ35)
CAGADFGNVLHC

SEQ ID NO: 302282 - protein, 13 aa, Homo sapiens
  CDR3 for beta chain variable domain of TCR clone 151141 (TRBV29-1, TRBJ2-2)
CSTTGVNTGELFF

SEQ ID NO: 302283 - protein, 12 aa, Homo sapiens
  CDR3 for alpha chain variable domain of TCR clone 151142 (TRAV1-1, TRAJ39)
CAVPVVGNMLTF

SEQ ID NO: 302284 - protein, 15 aa, Homo sapiens
  CDR3 for beta chain variable domain of TCR clone 151142 (TRBV19, TRBJ1-6)
SASSTQGAVGSPLHF

SEQ ID NO: 302285 - protein, 17 aa, Homo sapiens
  CDR3 for alpha chain variable domain of TCR clone 151143 (TRAV21, TRAJ52)
CAVGTNAGGTSYGKLTF

SEQ ID NO: 302286 - protein, 13 aa, Homo sapiens
  CDR3 for beta chain variable domain of TCR clone 151143 (TRBV5-1, TRBJ1-2)
CASSFAGNLGYTF

SEQ ID NO: 302287 - protein, 14 aa, Homo sapiens
  CDR3 for alpha chain variable domain of TCR clone 151144 (TRAV3, TRAJ21)
CAVRDAYNFNKFYF

SEQ ID NO: 302288 - protein, 15 aa, Homo sapiens
  CDR3 for beta chain variable domain of TCR clone 151144 (TRBV11-3, TRBJ2-7)
CASSLLSGSSYEQYF

SEQ ID NO: 302289 - protein, 12 aa, Homo sapiens
  CDR3 for alpha chain variable domain of TCR clone 151145 (TRAV2, TRAJ10)
RASTGGGNKLTF

SEQ ID NO: 302290 - protein, 14 aa, Homo sapiens
  CDR3 for beta chain variable domain of TCR clone 151145 (TRBV7-2, TRBJ2-2)
CASRGQGAAGELFF

SEQ ID NO: 302291 - protein, 13 aa, Homo sapiens
  CDR3 for alpha chain variable domain of TCR clone 151146 (TRAV27, TRAJ56)
CAGKPGANSKLTF

SEQ ID NO: 302292 - protein, 18 aa, Homo sapiens
  CDR3 for beta chain variable domain of TCR clone 151146 (TRBV11-2, TRBJ2-3)
CASSLGGVSRGDPNTQYF

SEQ ID NO: 302293 - protein, 11 aa, Homo sapiens
  CDR3 for alpha chain variable domain of TCR clone 151147 (TRAV2, TRAJ13)
CASGGYQKVTF

SEQ ID NO: 302294 - protein, 17 aa, Homo sapiens
  CDR3 for beta chain variable domain of TCR clone 151147 (TRBV24-1, TRBJ2-3)
CATSDWGLAESTDTQYF

SEQ ID NO: 302295 - protein, 15 aa, Homo sapiens
  CDR3 for alpha chain variable domain of TCR clone 151148 (TRAV13-1, TRAJ44)
CAASRNTGTASKLPF

SEQ ID NO: 302296 - protein, 14 aa, Homo sapiens
  CDR3 for beta chain variable domain of TCR clone 151148 (TRBV2, TRBJ2-7)
CASSLTSGGYEQYF

SEQ ID NO: 302297 - protein, 18 aa, Homo sapiens
  CDR3 for alpha chain variable domain of TCR clone 151149 (TRAV13-1, TRAJ10)
CAASKGRAVTGGGNKLTF

SEQ ID NO: 302298 - protein, 16 aa, Homo sapiens
  CDR3 for beta chain variable domain of TCR clone 151149 (TRBV11-2, TRBJ2-7)
CASSPTTGGVSYEQYF

SEQ ID NO: 302299 - protein, 13 aa, Homo sapiens
  CDR3 for alpha chain variable domain of TCR clone 151150 (TRAV38-1, TRAJ42)
CAFRSGSQGNLIF

SEQ ID NO: 302300 - protein, 17 aa, Homo sapiens
  CDR3 for beta chain variable domain of TCR clone 151150 (TRBV7-3, TRBJ2-3)
CASSLMKRMRGADTQYF

SEQ ID NO: 302301 - protein, 15 aa, Homo sapiens
  CDR3 for alpha chain variable domain of TCR clone 151151 (TRAV26-1, TRAJ44)
CIVRANTGTASKLTF

SEQ ID NO: 302302 - protein, 18 aa, Homo sapiens
  CDR3 for beta chain variable domain of TCR clone 151151 (TRBV15, TRBJ1-4)
CATSRDGWGATTNEKLFF

SEQ ID NO: 302303 - protein, 14 aa, Homo sapiens
  CDR3 for alpha chain variable domain of TCR clone 151152 (TRAV3, TRAJ8)
CAVSLNTGFQKLVF

SEQ ID NO: 302304 - protein, 13 aa, Homo sapiens
  CDR3 for beta chain variable domain of TCR clone 151152 (TRBV7-2, TRBJ2-2)
CASSSVLAGELFF

SEQ ID NO: 302305 - protein, 14 aa, Homo sapiens
  CDR3 for alpha chain variable domain of TCR clone 151153 (TRAV8-3, TRAJ4)
CAVGASGGYNKLIF

SEQ ID NO: 302306 - protein, 12 aa, Homo sapiens
  CDR3 for beta chain variable domain of TCR clone 151153 (TRBV3-1, TRBJ2-2)
CASSLFPGELFF

SEQ ID NO: 302307 - protein, 12 aa, Homo sapiens
  CDR3 for alpha chain variable domain of TCR clone 151154 (TRAV16, TRAJ10)
CSRTGGGNKLTF

SEQ ID NO: 302308 - protein, 15 aa, Homo sapiens
  CDR3 for beta chain variable domain of TCR clone 151154 (TRBV15, TRBJ1-1)
CATSLQGGRNTEAFF

SEQ ID NO: 302309 - protein, 12 aa, Homo sapiens
  CDR3 for alpha chain variable domain of TCR clone 151155 (TRAV35, TRAJ28)
GVEGAGSYQLTF

SEQ ID NO: 302310 - protein, 15 aa, Homo sapiens
  CDR3 for beta chain variable domain of TCR clone 151155 (TRBV6-1, TRBJ2-6)
CASSSRPSGANVLTF

SEQ ID NO: 302311 - protein, 14 aa, Homo sapiens
  CDR3 for alpha chain variable domain of TCR clone 151156 (TRAV2, TRAJ9)
CAVEDRSGGFKTIF

SEQ ID NO: 302312 - protein, 12 aa, Homo sapiens
  CDR3 for beta chain variable domain of TCR clone 151156 (TRBV14, TRBJ2-7)
CASSLNQRGQYF

SEQ ID NO: 302313 - protein, 13 aa, Homo sapiens
  CDR3 for alpha chain variable domain of TCR clone 151157 (TRAV27, TRAJ45)
CRSSGGGADGLTF

SEQ ID NO: 302314 - protein, 15 aa, Homo sapiens
  CDR3 for beta chain variable domain of TCR clone 151157 (TRBV20-1, TRBJ2-7)
CSARDRVSGKDEQYF

SEQ ID NO: 302315 - protein, 14 aa, Homo sapiens
  CDR3 for alpha chain variable domain of TCR clone 151158 (TRAV29/DV5, TRAJ36)
CAARRNTGANNLFF

SEQ ID NO: 302316 - protein, 16 aa, Homo sapiens
  CDR3 for beta chain variable domain of TCR clone 151158 (TRBV7-3, TRBJ2-2)
CASSLKRGTLSGELFF

SEQ ID NO: 302317 - protein, 15 aa, Homo sapiens
  CDR3 for alpha chain variable domain of TCR clone 151159 (TRAV1-2, TRAJ9)
CAGRDDGTGGFKTIF

SEQ ID NO: 302318 - protein, 16 aa, Homo sapiens
  CDR3 for beta chain variable domain of TCR clone 151159 (TRBV7-2, TRBJ1-6)
CASSSFESSYNSPLHF

SEQ ID NO: 302319 - protein, 18 aa, Homo sapiens
  CDR3 for alpha chain variable domain of TCR clone 151160 (TRAV8-3, TRAJ4)
WVRDPTSNDPGGCNKLIF

SEQ ID NO: 302320 - protein, 13 aa, Homo sapiens
  CDR3 for beta chain variable domain of TCR clone 151160 (TRBV20-1, TRBJ1-2)
CSATGIQGSGYTF

SEQ ID NO: 302321 - protein, 12 aa, Homo sapiens
  CDR3 for alpha chain variable domain of TCR clone 151161 (TRAV2, TRAJ33)
CAVPDSNYQLIW

SEQ ID NO: 302322 - protein, 16 aa, Homo sapiens
  CDR3 for beta chain variable domain of TCR clone 151161 (TRBV7-6, TRBJ2-1)
CASSVPGPSSYNEQFF

SEQ ID NO: 302323 - protein, 13 aa, Homo sapiens
  CDR3 for alpha chain variable domain of TCR clone 151162 (TRAV17, TRAJ22)
CAHHSGSARQLTF

SEQ ID NO: 302324 - protein, 14 aa, Homo sapiens
  CDR3 for beta chain variable domain of TCR clone 151162 (TRBV6-6, TRBJ2-3)
CASRLQREADTQYF

SEQ ID NO: 302325 - protein, 14 aa, Homo sapiens
  CDR3 for alpha chain variable domain of TCR clone 151163 (TRAV17, TRAJ57)
CATDPQGGSEKLVF

SEQ ID NO: 302326 - protein, 15 aa, Homo sapiens
  CDR3 for beta chain variable domain of TCR clone 151163 (TRBV5-1, TRBJ2-7)
CASSLDLTSSHEQYF

SEQ ID NO: 302327 - protein, 15 aa, Homo sapiens
  CDR3 for alpha chain variable domain of TCR clone 151164 (TRAV8-4, TRAJ53)
CAVSPLAGSNYKLTF

SEQ ID NO: 302328 - protein, 14 aa, Homo sapiens
  CDR3 for beta chain variable domain of TCR clone 151164 (TRBV4-1, TRBJ2-2)
CASSQAVNTGELFF

SEQ ID NO: 302329 - protein, 14 aa, Homo sapiens
  CDR3 for alpha chain variable domain of TCR clone 151165 (TRAV12-1, TRAJ9)
RVVTGDTGGFKTIF

SEQ ID NO: 302330 - protein, 16 aa, Homo sapiens
  CDR3 for beta chain variable domain of TCR clone 151165 (TRBV29-1, TRBJ1-2)
CSVEANRDIANYGYTF

SEQ ID NO: 302331 - protein, 21 aa, Homo sapiens
  CDR3 for alpha chain variable domain of TCR clone 151166 (TRAV2, TRAJ27)
ILQVREADAAVYSANAGKSTF

SEQ ID NO: 302332 - protein, 15 aa, Homo sapiens
  CDR3 for beta chain variable domain of TCR clone 151166 (TRBV7-7, TRBJ1-3)
CASSQGEHSGNTMYF

SEQ ID NO: 302333 - protein, 14 aa, Homo sapiens
  CDR3 for alpha chain variable domain of TCR clone 151167 (TRAV13-1, TRAJ13)
CAASREGGYQTVTF

SEQ ID NO: 302334 - protein, 17 aa, Homo sapiens
  CDR3 for beta chain variable domain of TCR clone 151167 (TRBV15, TRBJ1-5)
CATSRAPPGTRNQPQHF

SEQ ID NO: 302335 - protein, 12 aa, Homo sapiens
  CDR3 for alpha chain variable domain of TCR clone 151168 (TRAV35, TRAJ34)
CAGRGTPTSSSL

SEQ ID NO: 302336 - protein, 13 aa, Homo sapiens
  CDR3 for beta chain variable domain of TCR clone 151168 (TRBV19, TRBJ2-7)
CASSIDRTYEQYF

SEQ ID NO: 302337 - protein, 12 aa, Homo sapiens
  CDR3 for alpha chain variable domain of TCR clone 151169 (TRAV3, TRAJ20)
CAVRDPDYKLRF

SEQ ID NO: 302338 - protein, 15 aa, Homo sapiens
  CDR3 for beta chain variable domain of TCR clone 151169 (TRBV2, TRBJ2-2)
CASSRETVGTGELFF

SEQ ID NO: 302339 - protein, 11 aa, Homo sapiens
  CDR3 for alpha chain variable domain of TCR clone 151170 (TRAV26-1, TRAJ37)
CTVRVGRKLIF

SEQ ID NO: 302340 - protein, 13 aa, Homo sapiens
  CDR3 for beta chain variable domain of TCR clone 151170 (TRBV7-6, TRBJ1-2)
CASSLVADYGYTF

SEQ ID NO: 302341 - protein, 13 aa, Homo sapiens
  CDR3 for alpha chain variable domain of TCR clone 151171 (TRAV1-2, TRAJ9)
CAVLNTGGFKTIF

SEQ ID NO: 302342 - protein, 16 aa, Homo sapiens
  CDR3 for beta chain variable domain of TCR clone 151171 (TRBV12-4, TRBJ1-5)
CASSRPVGGSNQPQHF

SEQ ID NO: 302343 - protein, 12 aa, Homo sapiens
  CDR3 for alpha chain variable domain of TCR clone 151172 (TRAV12-2, TRAJ16)
CAVAPDGQKLLF

SEQ ID NO: 302344 - protein, 12 aa, Homo sapiens
  CDR3 for beta chain variable domain of TCR clone 151172 (TRBV2, TRBJ2-1)
CAYGPPGNEQFF

SEQ ID NO: 302345 - protein, 11 aa, Homo sapiens
  CDR3 for alpha chain variable domain of TCR clone 151173 (TRAV20, TRAJ23)
LACNQGGKLIF

SEQ ID NO: 302346 - protein, 16 aa, Homo sapiens
  CDR3 for beta chain variable domain of TCR clone 151173 (TRBV7-8, TRBJ2-5)
CASSFGGQPAQETQYF

SEQ ID NO: 302347 - protein, 15 aa, Homo sapiens
  CDR3 for alpha chain variable domain of TCR clone 151174 (TRAV2, TRAJ9)
CAVEDRGTGGFKTIP

SEQ ID NO: 302348 - protein, 16 aa, Homo sapiens
  CDR3 for beta chain variable domain of TCR clone 151174 (TRBV24-1, TRBJ2-3)
CATSDPGTGAKDTQYF

SEQ ID NO: 302349 - protein, 13 aa, Homo sapiens
  CDR3 for alpha chain variable domain of TCR clone 151175 (TRAV21, TRAJ20)
CAVGLRVDYKLSF

SEQ ID NO: 302350 - protein, 15 aa, Homo sapiens
  CDR3 for beta chain variable domain of TCR clone 151175 (TRBV7-3, TRBJ2-1)
CASSQRGGALIEQFF

SEQ ID NO: 302351 - protein, 18 aa, Homo sapiens
  CDR3 for alpha chain variable domain of TCR clone 151176 (TRAV13-1, TRAJ52)
CAAKNPNAGGTSYGKLTF

SEQ ID NO: 302352 - protein, 15 aa, Homo sapiens
  CDR3 for beta chain variable domain of TCR clone 151176 (TRBV27, TRBJ2-1)
CASINGGGSSNEQFF

SEQ ID NO: 302353 - protein, 14 aa, Homo sapiens
  CDR3 for alpha chain variable domain of TCR clone 151177 (TRAV1-2, TRAJ8)
CAVREDTGFQKLVL

SEQ ID NO: 302354 - protein, 12 aa, Homo sapiens
  CDR3 for beta chain variable domain of TCR clone 151177 (TRBV24-1, TRBJ1-1)
CATLYPDTEAFF

SEQ ID NO: 302355 - protein, 11 aa, Homo sapiens
  CDR3 for alpha chain variable domain of TCR clone 151178 (TRAV12-1, TRAJ33)
CVVNSNYQLIW

SEQ ID NO: 302356 - protein, 16 aa, Homo sapiens
  CDR3 for beta chain variable domain of TCR clone 151178 (TRBV15, TRBJ1-2)
CATSRGPRTGGGGYTF

SEQ ID NO: 302357 - protein, 11 aa, Homo sapiens
  CDR3 for alpha chain variable domain of TCR clone 151179 (TRAV35, TRAJ34)
CWARNTDKLIF

SEQ ID NO: 302358 - protein, 15 aa, Homo sapiens
  CDR3 for beta chain variable domain of TCR clone 151179 (TRBV28, TRBJ1-5)
CASSRTGGYVQPQHF

SEQ ID NO: 302359 - protein, 19 aa, Homo sapiens
  CDR3 for alpha chain variable domain of TCR clone 151180 (TRAV1-2, TRAJ26)
CLLPLCCQRPDNYGQNFVF

SEQ ID NO: 302360 - protein, 15 aa, Homo sapiens
  CDR3 for beta chain variable domain of TCR clone 151180 (TRBV9, TRBJ1-6)
CASSVAGTGDSPLHF

SEQ ID NO: 302361 - protein, 10 aa, Homo sapiens
  CDR3 for alpha chain variable domain of TCR clone 151181 (TRAV1-2, TRAJ20)
CALNDYKLSF

SEQ ID NO: 302362 - protein, 16 aa, Homo sapiens
  CDR3 for beta chain variable domain of TCR clone 151181 (TRBV20-1, TRBJ1-1)
SSARALTQGMNTEAFF

SEQ ID NO: 302363 - protein, 14 aa, Homo sapiens
  CDR3 for alpha chain variable domain of TCR clone 151182 (TRAV12-2, TRAJ11)
CAVNRESGYSTLTF

SEQ ID NO: 302364 - protein, 10 aa, Homo sapiens
  CDR3 for beta chain variable domain of TCR clone 151182 (TRBV20-1, TRBJ2-5)
CSARYETQYF

SEQ ID NO: 302365 - protein, 12 aa, Homo sapiens
  CDR3 for alpha chain variable domain of TCR clone 151183 (TRAV13-1, TRAJ53)
AASGGSNYKLTF

SEQ ID NO: 302366 - protein, 12 aa, Homo sapiens
  CDR3 for beta chain variable domain of TCR clone 151183 (TRBV11-2, TRBJ2-2)
CASSLGGGELFF

SEQ ID NO: 302367 - protein, 16 aa, Homo sapiens
  CDR3 for alpha chain variable domain of TCR clone 151184 (TRAV12-1, TRAJ53)
RVVTSVAGGSNYKLTF

SEQ ID NO: 302368 - protein, 17 aa, Homo sapiens
  CDR3 for beta chain variable domain of TCR clone 151184 (TRBV7-3, TRBJ2-3)
CASSPRGQGYGTDTQYF

SEQ ID NO: 302369 - protein, 15 aa, Homo sapiens
  CDR3 for alpha chain variable domain of TCR clone 151185 (TRAV13-1, TRAJ5)
CAVYIRDTGRRALTF

SEQ ID NO: 302370 - protein, 16 aa, Homo sapiens
  CDR3 for beta chain variable domain of TCR clone 151185 (TRBV12-4, TRBJ2-1)
CASTEQGMGRSNEQFF

SEQ ID NO: 302371 - protein, 12 aa, Homo sapiens
  CDR3 for alpha chain variable domain of TCR clone 151186 (TRAV20, TRAJ6)
CAGGGGSYIPTF

SEQ ID NO: 302372 - protein, 15 aa, Homo sapiens
  CDR3 for beta chain variable domain of TCR clone 151186 (TRBV28, TRBJ2-1)
CASSPMTSGSIEQFF

SEQ ID NO: 302373 - protein, 14 aa, Homo sapiens
  CDR3 for alpha chain variable domain of TCR clone 151187 (TRAV1-2, TRAJ16)
CAVNRFSDGQKLLF

SEQ ID NO: 302374 - protein, 10 aa, Homo sapiens
  CDR3 for beta chain variable domain of TCR clone 151187 (TRBV20-1, TRBJ1-4)
PQGANEELFF

SEQ ID NO: 302375 - protein, 21 aa, Homo sapiens
  CDR3 for alpha chain variable domain of TCR clone 151188 (TRAV2, TRAJ8)
CAVEDRGQAFRNLYLELAPNF

SEQ ID NO: 302376 - protein, 14 aa, Homo sapiens
  CDR3 for beta chain variable domain of TCR clone 151188 (TRBV10-3, TRBJ2-5)
CAISTDRQQETQYF

SEQ ID NO: 302377 - protein, 12 aa, Homo sapiens
  CDR3 for alpha chain variable domain of TCR clone 151189 (TRAV21, TRAJ49)
CAVRNTGNQFHF

SEQ ID NO: 302378 - protein, 12 aa, Homo sapiens
  CDR3 for beta chain variable domain of TCR clone 151189 (TRBV7-9, TRBJ2-7)
CGTRTDAYEQYF

SEQ ID NO: 302379 - protein, 11 aa, Homo sapiens
  CDR3 for alpha chain variable domain of TCR clone 151190 (TRAV12-2, TRAJ13)
CAEKKTGGYQK

SEQ ID NO: 302380 - protein, 15 aa, Homo sapiens
  CDR3 for beta chain variable domain of TCR clone 151190 (TRBV12-4, TRBJ2-5)
CASSPPTGLQETQYF

SEQ ID NO: 302381 - protein, 16 aa, Homo sapiens
  CDR3 for alpha chain variable domain of TCR clone 151191 (TRAV12-2, TRAJ10)
CAVNRVLTGGGNKLTF

SEQ ID NO: 302382 - protein, 14 aa, Homo sapiens
  CDR3 for beta chain variable domain of TCR clone 151191 (TRBV7-2, TRBJ2-7)
CASSAKTSFYEQYF

SEQ ID NO: 302383 - protein, 21 aa, Homo sapiens
  CDR3 for alpha chain variable domain of TCR clone 151192 (TRAV12-1, TRAJ32)
SSVIQPPTSMNYGGATNKLIF

SEQ ID NO: 302384 - protein, 13 aa, Homo sapiens
  CDR3 for beta chain variable domain of TCR clone 151192 (TRBV7-7, TRBJ1-1)
CASSLGANTEAFF

SEQ ID NO: 302385 - protein, 18 aa, Homo sapiens
  CDR3 for alpha chain variable domain of TCR clone 151193 (TRAV26-1, TRAJ56)
CIVRVASRVTGANSKLTI

SEQ ID NO: 302386 - protein, 15 aa, Homo sapiens
  CDR3 for beta chain variable domain of TCR clone 151193 (TRBV7-9, TRBJ2-5)
CASSDTGRGRETQYF

SEQ ID NO: 302387 - protein, 15 aa, Homo sapiens
  CDR3 for alpha chain variable domain of TCR clone 151194 (TRAV13-1, TRAJ57)
CTASNTQGGSETLVF

SEQ ID NO: 302388 - protein, 16 aa, Homo sapiens
  CDR3 for beta chain variable domain of TCR clone 151194 (TRBV19, TRBJ2-1)
CASSKAGPSSYNEQFF

SEQ ID NO: 302389 - protein, 16 aa, Homo sapiens
  CDR3 for alpha chain variable domain of TCR clone 151195 (TRAV30, TRAJ24)
CGTEIVDADSWGKFQF

SEQ ID NO: 302390 - protein, 14 aa, Homo sapiens
  CDR3 for beta chain variable domain of TCR clone 151195 (TRBV12-5, TRBJ2-5)
CASCSRTHQETQYC

SEQ ID NO: 302391 - protein, 13 aa, Homo sapiens
  CDR3 for alpha chain variable domain of TCR clone 151196 (TRAV8-4, TRAJ9)
CAVSETGGFKTIF

SEQ ID NO: 302392 - protein, 15 aa, Homo sapiens
  CDR3 for beta chain variable domain of TCR clone 151196 (TRBV4-3, TRBJ2-7)
CASSQGGRGIYEQYF

SEQ ID NO: 302393 - protein, 14 aa, Homo sapiens
  CDR3 for alpha chain variable domain of TCR clone 151197 (TRAV8-4, TRAJ16)
CAVSPVGRWPEAAL

SEQ ID NO: 302394 - protein, 14 aa, Homo sapiens
  CDR3 for beta chain variable domain of TCR clone 151197 (TRBV4-2, TRBJ2-1)
CASGLDRAYNEQFF

SEQ ID NO: 302395 - protein, 10 aa, Homo sapiens
  CDR3 for alpha chain variable domain of TCR clone 151198 (TRAV30, TRAJ48)
CGIGNEKLTF

SEQ ID NO: 302396 - protein, 17 aa, Homo sapiens
  CDR3 for beta chain variable domain of TCR clone 151198 (TRBV5-5, TRBJ1-1)
CASSLRFRGLMNTEAFF

SEQ ID NO: 302397 - protein, 12 aa, Homo sapiens
  CDR3 for alpha chain variable domain of TCR clone 151199 (TRAV1-1, TRAJ24)
CAATDSWGKLQF

SEQ ID NO: 302398 - protein, 15 aa, Homo sapiens
  CDR3 for beta chain variable domain of TCR clone 151199 (TRBV6-3, TRBJ2-7)
CASSSPGTVFYEQYF

SEQ ID NO: 302399 - protein, 14 aa, Homo sapiens
  CDR3 for alpha chain variable domain of TCR clone 151200 (TRAV26-1, TRAJ38)
CIADNAGNNRKLIW

SEQ ID NO: 302400 - protein, 14 aa, Homo sapiens
  CDR3 for beta chain variable domain of TCR clone 151200 (TRBV11-2, TRBJ1-5)
CASSLDRGRQPQHF

SEQ ID NO: 302401 - protein, 15 aa, Homo sapiens
  CDR3 for alpha chain variable domain of TCR clone 151201 (TRAV17, TRAJ22)
CATVAPSGSARQLTF

SEQ ID NO: 302402 - protein, 13 aa, Homo sapiens
  CDR3 for beta chain variable domain of TCR clone 151201 (TRBV18, TRBJ1-1)
CASSPETKPEAFF

SEQ ID NO: 302403 - protein, 14 aa, Homo sapiens
  CDR3 for alpha chain variable domain of TCR clone 151202 (TRAV1-1, TRAJ35)
CAVRSIGFGNVLHC

SEQ ID NO: 302404 - protein, 20 aa, Homo sapiens
  CDR3 for beta chain variable domain of TCR clone 151202 (TRBV7-8, TRBJ2-2)
CASSHLFPGPTIYITGELFF

SEQ ID NO: 302405 - protein, 14 aa, Homo sapiens
  CDR3 for alpha chain variable domain of TCR clone 151203 (TRAV35, TRAJ13)
CAGSPSGGYQKVTF

SEQ ID NO: 302406 - protein, 15 aa, Homo sapiens
  CDR3 for beta chain variable domain of TCR clone 151203 (TRBV5-1, TRBJ2-3)
CASSYTSGSTDTQYF

SEQ ID NO: 302407 - protein, 14 aa, Homo sapiens
  CDR3 for alpha chain variable domain of TCR clone 151204 (TRAV13-1, TRAJ35)
CAASNGGFGNVLHC

SEQ ID NO: 302408 - protein, 15 aa, Homo sapiens
  CDR3 for beta chain variable domain of TCR clone 151204 (TRBV7-9, TRBJ1-6)
CASSSPGRGNSPLHF

SEQ ID NO: 302409 - protein, 14 aa, Homo sapiens
  CDR3 for alpha chain variable domain of TCR clone 151205 (TRAV12-2, TRAJ5)
CAVNRSTGRRALTF

SEQ ID NO: 302410 - protein, 13 aa, Homo sapiens
  CDR3 for beta chain variable domain of TCR clone 151205 (TRBV9, TRBJ2-1)
CASSPSGGNEQFF

SEQ ID NO: 302411 - protein, 15 aa, Homo sapiens
  CDR3 for alpha chain variable domain of TCR clone 151206 (TRAV4, TRAJ42)
CLVGGYGGSQGNLIF

SEQ ID NO: 302412 - protein, 16 aa, Homo sapiens
  CDR3 for beta chain variable domain of TCR clone 151206 (TRBV27, TRBJ1-1)
CASSTRAGGVGTEAFF

SEQ ID NO: 302413 - protein, 11 aa, Homo sapiens
  CDR3 for alpha chain variable domain of TCR clone 151207 (TRAV2, TRAJ13)
CASGGYQKVTF

SEQ ID NO: 302414 - protein, 16 aa, Homo sapiens
  CDR3 for beta chain variable domain of TCR clone 151207 (TRBV14, TRBJ2-1)
CASSPRLAGEGNEQFF

SEQ ID NO: 302415 - protein, 14 aa, Homo sapiens
  CDR3 for alpha chain variable domain of TCR clone 151208 (TRAV1-2, TRAJ8)
CAVREDTGFQKLVF

SEQ ID NO: 302416 - protein, 17 aa, Homo sapiens
  CDR3 for beta chain variable domain of TCR clone 151208 (TRBV20-1, TRBJ2-1)
CSASSSGLAGSYNEKFF

SEQ ID NO: 302417 - protein, 12 aa, Homo sapiens
  CDR3 for alpha chain variable domain of TCR clone 151209 (TRAV12-3, TRAJ17)
CAITLTGNKLTF

SEQ ID NO: 302418 - protein, 15 aa, Homo sapiens
  CDR3 for beta chain variable domain of TCR clone 151209 (TRBV11-2, TRBJ2-2)
CASSSDRVNAGELFF

SEQ ID NO: 302419 - protein, 14 aa, Homo sapiens
  CDR3 for alpha chain variable domain of TCR clone 151210 (TRAV27, TRAJ22)
CAGIPSGSARQLTF

SEQ ID NO: 302420 - protein, 16 aa, Homo sapiens
  CDR3 for beta chain variable domain of TCR clone 151210 (TRBV7-3, TRBJ2-2)
CASSLKRGTLSGELFF

SEQ ID NO: 302421 - protein, 15 aa, Homo sapiens
  CDR3 for alpha chain variable domain of TCR clone 151211 (TRAV26-1, TRAJ29)
CVVRVEGTGNTPLVF

SEQ ID NO: 302422 - protein, 17 aa, Homo sapiens
  CDR3 for beta chain variable domain of TCR clone 151211 (TRBV7-9, TRBJ1-5)
CASSQGHQPNQPRHLVM

SEQ ID NO: 302423 - protein, 13 aa, Homo sapiens
  CDR3 for alpha chain variable domain of TCR clone 151212 (TRAV14/DV4, TRAJ23)
CAMREVKGGKLIF

SEQ ID NO: 302424 - protein, 16 aa, Homo sapiens
  CDR3 for beta chain variable domain of TCR clone 151212 (TRBV19, TRBJ1-1)
CASRPRSEALNTEAFF

SEQ ID NO: 302425 - protein, 14 aa, Homo sapiens
  CDR3 for alpha chain variable domain of TCR clone 151213 (TRAV9-2, TRAJ39)
CALYIYNAGNMLTF

SEQ ID NO: 302426 - protein, 16 aa, Homo sapiens
  CDR3 for beta chain variable domain of TCR clone 151213 (TRBV5-1, TRBJ2-3)
CASSLEGGSFTDTQYF

SEQ ID NO: 302427 - protein, 14 aa, Homo sapiens
  CDR3 for alpha chain variable domain of TCR clone 151214 (TRAV8-1, TRAJ49)
CAYSIANTGNQFYF

SEQ ID NO: 302428 - protein, 16 aa, Homo sapiens
  CDR3 for beta chain variable domain of TCR clone 151214 (TRBV15, TRBJ2-5)
CATSRYLEAAQETQYF

SEQ ID NO: 302429 - protein, 12 aa, Homo sapiens
  CDR3 for alpha chain variable domain of TCR clone 151215 (TRAV17, TRAJ48)
CALNFGNEKLTF

SEQ ID NO: 302430 - protein, 13 aa, Homo sapiens
  CDR3 for beta chain variable domain of TCR clone 151215 (TRBV6-5, TRBJ2-5)
CSSSSPGGETQYF

SEQ ID NO: 302431 - protein, 16 aa, Homo sapiens
  CDR3 for alpha chain variable domain of TCR clone 151216 (TRAV14/DV4, TRAJ53)
CAMREGGGGSNYKLTF

SEQ ID NO: 302432 - protein, 15 aa, Homo sapiens
  CDR3 for beta chain variable domain of TCR clone 151216 (TRBV10-1, TRBJ2-3)
CASSATSGGFDTQYF

SEQ ID NO: 302433 - protein, 13 aa, Homo sapiens
  CDR3 for alpha chain variable domain of TCR clone 151217 (TRAV36/DV7, TRAJ41)
CAVEANSGYALNF

SEQ ID NO: 302434 - protein, 15 aa, Homo sapiens
  CDR3 for beta chain variable domain of TCR clone 151217 (TRBV20-1, TRBJ2-1)
CSASSAGSSYNEQFF

SEQ ID NO: 302435 - protein, 16 aa, Homo sapiens
  CDR3 for alpha chain variable domain of TCR clone 151218 (TRAV30, TRAJ24)
CGTEIGDADSWGKFQF

SEQ ID NO: 302436 - protein, 14 aa, Homo sapiens
  CDR3 for beta chain variable domain of TCR clone 151218 (TRBV12-5, TRBJ2-5)
CASSSRTHQETQYF

SEQ ID NO: 302437 - protein, 13 aa, Homo sapiens
  CDR3 for alpha chain variable domain of TCR clone 151219 (TRAV20, TRAJ9)
CGVPDTGGFKTIF

SEQ ID NO: 302438 - protein, 15 aa, Homo sapiens
  CDR3 for beta chain variable domain of TCR clone 151219 (TRBV27, TRBJ2-7)
CASSKAGRGGYEQYF

SEQ ID NO: 302439 - protein, 17 aa, Homo sapiens
  CDR3 for alpha chain variable domain of TCR clone 151220 (TRAV27, TRAJ18)
CEGLHRGRGSTLWRLYF

SEQ ID NO: 302440 - protein, 14 aa, Homo sapiens
  CDR3 for beta chain variable domain of TCR clone 151220 (TRBV20-1, TRBJ1-5)
CSARGRGSNQPQHF

SEQ ID NO: 302441 - protein, 14 aa, Homo sapiens
  CDR3 for alpha chain variable domain of TCR clone 151221 (TRAV20, TRAJ56)
CAVQFGGANSKLTF

SEQ ID NO: 302442 - protein, 14 aa, Homo sapiens
  CDR3 for beta chain variable domain of TCR clone 151221 (TRBV20-1, TRBJ2-7)
CSSKRGRSSYEQYF

SEQ ID NO: 302443 - protein, 16 aa, Homo sapiens
  CDR3 for alpha chain variable domain of TCR clone 151222 (TRAV8-6, TRAJ9)
CAVSDALNTGGFKTIF

SEQ ID NO: 302444 - protein, 20 aa, Homo sapiens
  CDR3 for beta chain variable domain of TCR clone 151222 (TRBV7-8, TRBJ2-2)
CASSHLFPGPTIHITGELFF

SEQ ID NO: 302445 - protein, 14 aa, Homo sapiens
  CDR3 for alpha chain variable domain of TCR clone 151223 (TRAV23/DV6, TRAJ57)
CAAALKGGSEKLVF

SEQ ID NO: 302446 - protein, 12 aa, Homo sapiens
  CDR3 for beta chain variable domain of TCR clone 151223 (TRBV7-3, TRBJ2-1)
CASSFQSGPQVF

SEQ ID NO: 302447 - protein, 12 aa, Homo sapiens
  CDR3 for alpha chain variable domain of TCR clone 151224 (TRAV13-1, TRAJ40)
CAASWATYKYIF

SEQ ID NO: 302448 - protein, 15 aa, Homo sapiens
  CDR3 for beta chain variable domain of TCR clone 151224 (TRBV7-8, TRBJ2-1)
CAISSRLAAYNEQFF

SEQ ID NO: 302449 - protein, 17 aa, Homo sapiens
  CDR3 for alpha chain variable domain of TCR clone 151225 (TRAV22, TRAJ53)
CAVEFSNSGGSNYKLTF

SEQ ID NO: 302450 - protein, 17 aa, Homo sapiens
  CDR3 for beta chain variable domain of TCR clone 151225 (TRBV19, TRBJ2-6)
CASSTGQVFSGANVLTF

SEQ ID NO: 302451 - protein, 12 aa, Homo sapiens
  CDR3 for alpha chain variable domain of TCR clone 151226 (TRAV21, TRAJ12)
CAVMDSSYSLIF

SEQ ID NO: 302452 - protein, 16 aa, Homo sapiens
  CDR3 for beta chain variable domain of TCR clone 151226 (TRBV7-9, TRBJ2-5)
CASRLEIGTRKETQYF

SEQ ID NO: 302453 - protein, 16 aa, Homo sapiens
  CDR3 for alpha chain variable domain of TCR clone 151227 (TRAV17, TRAJ17)
CDTALQEEAAGNKLTF

SEQ ID NO: 302454 - protein, 12 aa, Homo sapiens
  CDR3 for beta chain variable domain of TCR clone 151227 (TRBV4-2, TRBJ2-5)
CASGGAQETQYF

SEQ ID NO: 302455 - protein, 14 aa, Homo sapiens
  CDR3 for alpha chain variable domain of TCR clone 151228 (TRAV13-1, TRAJ44)
CAAKATGTASKLTF

SEQ ID NO: 302456 - protein, 14 aa, Homo sapiens
  CDR3 for beta chain variable domain of TCR clone 151228 (TRBV9, TRBJ2-1)
CASSVDPRGKEQFF

SEQ ID NO: 302457 - protein, 12 aa, Homo sapiens
  CDR3 for alpha chain variable domain of TCR clone 151229 (TRAV25, TRAJ29)
CAGPRGNTPLVF

SEQ ID NO: 302458 - protein, 15 aa, Homo sapiens
  CDR3 for beta chain variable domain of TCR clone 151229 (TRBV29-1, TRBJ1-2)
CSVVLEAGSNYGYTF

SEQ ID NO: 302459 - protein, 16 aa, Homo sapiens
  CDR3 for alpha chain variable domain of TCR clone 151230 (TRAV12-2, TRAJ10)
CAVNRVLTGGGNKRTF

SEQ ID NO: 302460 - protein, 14 aa, Homo sapiens
  CDR3 for beta chain variable domain of TCR clone 151230 (TRBV9, TRBJ2-1)
CASSVAVAVNEQFF

SEQ ID NO: 302461 - protein, 17 aa, Homo sapiens
  CDR3 for alpha chain variable domain of TCR clone 151231 (TRAV12-2, TRAJ39)
CAVNNMLTFGGGTRLMV

SEQ ID NO: 302462 - protein, 16 aa, Homo sapiens
  CDR3 for beta chain variable domain of TCR clone 151231 (TRBV9, TRBJ2-7)
CASSTGPDRSPYEQYF

SEQ ID NO: 302463 - protein, 16 aa, Homo sapiens
  CDR3 for alpha chain variable domain of TCR clone 151232 (TRAV26-1, TRAJ37)
CIYARHGSSNTGKRIF

SEQ ID NO: 302464 - protein, 16 aa, Homo sapiens
  CDR3 for beta chain variable domain of TCR clone 151232 (TRBV19, TRBJ2-4)
CATGGLAGGTRNIQYF

SEQ ID NO: 302465 - protein, 17 aa, Homo sapiens
  CDR3 for alpha chain variable domain of TCR clone 151233 (TRAV13-1, TRAJ28)
CAASPPYSGPGSYQLTF

SEQ ID NO: 302466 - protein, 12 aa, Homo sapiens
  CDR3 for beta chain variable domain of TCR clone 151233 (TRBV11-2, TRBJ2-2)
CASSLPTGELFF

SEQ ID NO: 302467 - protein, 19 aa, Homo sapiens
  CDR3 for alpha chain variable domain of TCR clone 151234 (TRAV26-1, TRAJ52)
CIVRAHRNAGGTSYGKLTF

SEQ ID NO: 302468 - protein, 14 aa, Homo sapiens
  CDR3 for beta chain variable domain of TCR clone 151234 (TRBV7-9, TRBJ1-2)
CASSPNSRGYGYTF

SEQ ID NO: 302469 - protein, 16 aa, Homo sapiens
  CDR3 for alpha chain variable domain of TCR clone 151235 (TRAV12-3, TRAJ53)
CAMSPGSGGSHYKLTF

SEQ ID NO: 302470 - protein, 16 aa, Homo sapiens
  CDR3 for beta chain variable domain of TCR clone 151235 (TRBV4-2, TRBJ1-1)
CASSQAGFGMNTEAFF

SEQ ID NO: 302471 - protein, 15 aa, Homo sapiens
  CDR3 for alpha chain variable domain of TCR clone 151236 (TRAV3, TRAJ11)
CAVRDRGSGYSTLTF

SEQ ID NO: 302472 - protein, 13 aa, Homo sapiens
  CDR3 for beta chain variable domain of TCR clone 151236 (TRBV7-9, TRBJ1-2)
CASSSKQNYGYSF

SEQ ID NO: 302473 - protein, 14 aa, Homo sapiens
  CDR3 for alpha chain variable domain of TCR clone 151237 (TRAV17, TRAJ34)
CATDSLEGTDKLIF

SEQ ID NO: 302474 - protein, 15 aa, Homo sapiens
  CDR3 for beta chain variable domain of TCR clone 151237 (TRBV28, TRBJ2-1)
CASSIIAGGRSEQFF

SEQ ID NO: 302475 - protein, 11 aa, Homo sapiens
  CDR3 for alpha chain variable domain of TCR clone 151238 (TRAV29/DV5, TRAJ47)
CAAQRGNKMVF

SEQ ID NO: 302476 - protein, 12 aa, Homo sapiens
  CDR3 for beta chain variable domain of TCR clone 151238 (TRBV11-2, TRBJ2-7)
CASSLPTYEQYF

SEQ ID NO: 302477 - protein, 16 aa, Homo sapiens
  CDR3 for alpha chain variable domain of TCR clone 151239 (TRAV3, TRAJ6)
CAVRRTPSGGSYIPTF

SEQ ID NO: 302478 - protein, 15 aa, Homo sapiens
  CDR3 for beta chain variable domain of TCR clone 151239 (TRBV2, TRBJ2-1)
CASSELAGSYNEQFF

SEQ ID NO: 302479 - protein, 14 aa, Homo sapiens
  CDR3 for alpha chain variable domain of TCR clone 151240 (TRAV29/DV5, TRAJ36)
CAARRRTGANNLFP

SEQ ID NO: 302480 - protein, 14 aa, Homo sapiens
  CDR3 for beta chain variable domain of TCR clone 151240 (TRBV12-5, TRBJ2-5)
CASGSRTHQETQYF

SEQ ID NO: 302481 - protein, 15 aa, Homo sapiens
  CDR3 for alpha chain variable domain of TCR clone 151241 (TRAV3, TRAJ22)
CAVRDRGGSVRQLTF

SEQ ID NO: 302482 - protein, 19 aa, Homo sapiens
  CDR3 for beta chain variable domain of TCR clone 151241 (TRBV25-1, TRBJ2-2)
CAILVYRVDRGRKTGELFF

SEQ ID NO: 302483 - protein, 14 aa, Homo sapiens
  CDR3 for alpha chain variable domain of TCR clone 151242 (TRAV1-2, TRAJ33)
CAVRAPDSNDQLIW

SEQ ID NO: 302484 - protein, 14 aa, Homo sapiens
  CDR3 for beta chain variable domain of TCR clone 151242 (TRBV11-3, TRBJ1-6)
CASSFSGGDSPLHF

SEQ ID NO: 302485 - protein, 14 aa, Homo sapiens
  CDR3 for alpha chain variable domain of TCR clone 151243 (TRAV13-1, TRAJ48)
CAASRSFGNEKLTF

SEQ ID NO: 302486 - protein, 15 aa, Homo sapiens
  CDR3 for beta chain variable domain of TCR clone 151243 (TRBV28, TRBJ2-7)
CASSPGGRGFYEQYF

SEQ ID NO: 302487 - protein, 16 aa, Homo sapiens
  CDR3 for alpha chain variable domain of TCR clone 151244 (TRAV30, TRAJ24)
CGTEIVGADSWGKFQF

SEQ ID NO: 302488 - protein, 13 aa, Homo sapiens
  CDR3 for beta chain variable domain of TCR clone 151244 (TRBV20-1, TRBJ1-1)
CSAPPGGHTEAFF

SEQ ID NO: 302489 - protein, 11 aa, Homo sapiens
  CDR3 for alpha chain variable domain of TCR clone 151245 (TRAV12-1, TRAJ8)
CVVIGFQKLVF

SEQ ID NO: 302490 - protein, 14 aa, Homo sapiens
  CDR3 for beta chain variable domain of TCR clone 151245 (TRBV19, TRBJ2-1)
CASGKSTQYNEQFF

SEQ ID NO: 302491 - protein, 13 aa, Homo sapiens
  CDR3 for alpha chain variable domain of TCR clone 151246 (TRAV13-2, TRAJ48)
CAEMDFGNEKLTF

SEQ ID NO: 302492 - protein, 15 aa, Homo sapiens
  CDR3 for beta chain variable domain of TCR clone 151246 (TRBV7-9, TRBJ2-3)
CASLKDGREGDTQYF

SEQ ID NO: 302493 - protein, 14 aa, Homo sapiens
  CDR3 for alpha chain variable domain of TCR clone 151247 (TRAV13-1, TRAJ9)
CAASALTGGFKTIF

SEQ ID NO: 302494 - protein, 15 aa, Homo sapiens
  CDR3 for beta chain variable domain of TCR clone 151247 (TRBV18, TRBJ2-1)
CASSPPSASYNEQFF

SEQ ID NO: 302495 - protein, 14 aa, Homo sapiens
  CDR3 for alpha chain variable domain of TCR clone 151248 (TRAV26-2, TRAJ11)
CIPRLNSGYSTLTF

SEQ ID NO: 302496 - protein, 13 aa, Homo sapiens
  CDR3 for beta chain variable domain of TCR clone 151248 (TRBV7-9, TRBJ1-2)
CASSLKQNYGYTF

SEQ ID NO: 302497 - protein, 14 aa, Homo sapiens
  CDR3 for alpha chain variable domain of TCR clone 151249 (TRAV17, TRAJ35)
CATDRPGFGNVLHC

SEQ ID NO: 302498 - protein, 14 aa, Homo sapiens
  CDR3 for beta chain variable domain of TCR clone 151249 (TRBV19, TRBJ2-7)
CASSIFAGTYEQYF

SEQ ID NO: 302499 - protein, 14 aa, Homo sapiens
  CDR3 for alpha chain variable domain of TCR clone 151250 (TRAV1-2, TRAJ16)
CAVNRFSDGQKMLF

SEQ ID NO: 302500 - protein, 14 aa, Homo sapiens
  CDR3 for beta chain variable domain of TCR clone 151250 (TRBV7-9, TRBJ2-2)
CASSTVLGRGELFF

SEQ ID NO: 302501 - protein, 14 aa, Homo sapiens
  CDR3 for alpha chain variable domain of TCR clone 151251 (TRAV12-3, TRAJ33)
CAMSVPGSNYQLIW

SEQ ID NO: 302502 - protein, 12 aa, Homo sapiens
  CDR3 for beta chain variable domain of TCR clone 151251 (TRBV7-8, TRBJ2-7)
CASSLGGREQYF

SEQ ID NO: 302503 - protein, 14 aa, Homo sapiens
  CDR3 for alpha chain variable domain of TCR clone 151252 (TRAV8-3, TRAJ27)
CAGGRNTNAGKSTF

SEQ ID NO: 302504 - protein, 15 aa, Homo sapiens
  CDR3 for beta chain variable domain of TCR clone 151252 (TRBV11-3, TRBJ2-5)
CASSLRGRVQETQNF

SEQ ID NO: 302505 - protein, 14 aa, Homo sapiens
  CDR3 for alpha chain variable domain of TCR clone 151253 (TRAV12-1, TRAJ12)
CVVISMDSSYKLIF

SEQ ID NO: 302506 - protein, 16 aa, Homo sapiens
  CDR3 for beta chain variable domain of TCR clone 151253 (TRBV2, TRBJ2-7)
CASSEPWTGPSYEQYF

SEQ ID NO: 302507 - protein, 20 aa, Homo sapiens
  CDR3 for alpha chain variable domain of TCR clone 151254 (TRAV25, TRAJ52)
CRNLLLAGRPGGTSYGKLTF

SEQ ID NO: 302508 - protein, 17 aa, Homo sapiens
  CDR3 for beta chain variable domain of TCR clone 151254 (TRBV7-8, TRBJ2-6)
CASSAGTGGAGANVLTF

SEQ ID NO: 302509 - protein, 16 aa, Homo sapiens
  CDR3 for alpha chain variable domain of TCR clone 151255 (TRAV16, TRAJ4)
CALSRMFSGGYNKLIF

SEQ ID NO: 302510 - protein, 16 aa, Homo sapiens
  CDR3 for beta chain variable domain of TCR clone 151255 (TRBV24-1, TRBJ2-3)
CATSDPGTGASDTQYF

SEQ ID NO: 302511 - protein, 17 aa, Homo sapiens
  CDR3 for alpha chain variable domain of TCR clone 151256 (TRAV1-2, TRAJ8)
CAVRDPDENTGFQKLVF

SEQ ID NO: 302512 - protein, 15 aa, Homo sapiens
  CDR3 for beta chain variable domain of TCR clone 151256 (TRBV29-1, TRBJ2-1)
CSAAPQAGGRNEQFF

SEQ ID NO: 302513 - protein, 14 aa, Homo sapiens
  CDR3 for alpha chain variable domain of TCR clone 151257 (TRAV1-1, TRAJ27)
CAVIYNTNAGKSTF

SEQ ID NO: 302514 - protein, 14 aa, Homo sapiens
  CDR3 for beta chain variable domain of TCR clone 151257 (TRBV25-1, TRBJ1-1)
CASTRLGGNTEAFF

SEQ ID NO: 302515 - protein, 14 aa, Homo sapiens
  CDR3 for alpha chain variable domain of TCR clone 151258 (TRAV1-2, TRAJ16)
CAVNRFSDGQKLLF

SEQ ID NO: 302516 - protein, 21 aa, Homo sapiens
  CDR3 for beta chain variable domain of TCR clone 151258 (TRBV24-1, TRBJ2-5)
ESAIPNQTALYFCATRETQYF

SEQ ID NO: 302517 - protein, 14 aa, Homo sapiens
  CDR3 for alpha chain variable domain of TCR clone 151259 (TRAV3, TRAJ28)
CCEGPLAGSYQLTF

SEQ ID NO: 302518 - protein, 14 aa, Homo sapiens
  CDR3 for beta chain variable domain of TCR clone 151259 (TRBV9, TRBJ1-5)
CAGSGGDTNQPQHF

SEQ ID NO: 302519 - protein, 14 aa, Homo sapiens
  CDR3 for alpha chain variable domain of TCR clone 151260 (TRAV12-1, TRAJ8)
CVVNSNTGFQKLVF

SEQ ID NO: 302520 - protein, 15 aa, Homo sapiens
  CDR3 for beta chain variable domain of TCR clone 151260 (TRBV5-1, TRBJ2-3)
CASSVTSGSTDTQYF

SEQ ID NO: 302521 - protein, 16 aa, Homo sapiens
  CDR3 for alpha chain variable domain of TCR clone 151261 (TRAV3, TRAJ18)
CAVRDGRGSTLGRLYF

SEQ ID NO: 302522 - protein, 15 aa, Homo sapiens
  CDR3 for beta chain variable domain of TCR clone 151261 (TRBV7-9, TRBJ1-6)
CASSSPGRGNSPHHF

SEQ ID NO: 302523 - protein, 12 aa, Homo sapiens
  CDR3 for alpha chain variable domain of TCR clone 151262 (TRAV38-2/DV8, TRAJ43)
CAYTINNNDMRF

SEQ ID NO: 302524 - protein, 13 aa, Homo sapiens
  CDR3 for beta chain variable domain of TCR clone 151262 (TRBV2, TRBJ2-5)
CASGTPYQETQYF

SEQ ID NO: 302525 - protein, 15 aa, Homo sapiens
  CDR3 for alpha chain variable domain of TCR clone 151263 (TRAV38-2/DV8, TRAJ48)
CAYRSPESGNEKLTF

SEQ ID NO: 302526 - protein, 15 aa, Homo sapiens
  CDR3 for beta chain variable domain of TCR clone 151263 (TRBV7-2, TRBJ2-2)
CASRRPGQNTGELFF

SEQ ID NO: 302527 - protein, 16 aa, Homo sapiens
  CDR3 for alpha chain variable domain of TCR clone 151264 (TRAV30, TRAJ24)
CGPEIVDADSWGKFQF

SEQ ID NO: 302528 - protein, 14 aa, Homo sapiens
  CDR3 for beta chain variable domain of TCR clone 151264 (TRBV20-1, TRBJ1-3)
CSASPTGAGNTIYF

SEQ ID NO: 302529 - protein, 13 aa, Homo sapiens
  CDR3 for alpha chain variable domain of TCR clone 151265 (TRAV12-2, TRAJ18)
CAVRGSTLGRLYF

SEQ ID NO: 302530 - protein, 14 aa, Homo sapiens
  CDR3 for beta chain variable domain of TCR clone 151265 (TRBV12-5, TRBJ2-5)
CASGSRTHQETQYF

SEQ ID NO: 302531 - protein, 12 aa, Homo sapiens
  CDR3 for alpha chain variable domain of TCR clone 151266 (TRAV1-2, TRAJ8)
CAVRTGFQKLVF

SEQ ID NO: 302532 - protein, 15 aa, Homo sapiens
  CDR3 for beta chain variable domain of TCR clone 151266 (TRBV11-3, TRBJ2-3)
CASLKDGREGDTQYF

SEQ ID NO: 302533 - protein, 12 aa, Homo sapiens
  CDR3 for alpha chain variable domain of TCR clone 151267 (TRAV12-3, TRAJ17)
CALTLTGNKLTF

SEQ ID NO: 302534 - protein, 15 aa, Homo sapiens
  CDR3 for beta chain variable domain of TCR clone 151267 (TRBV20-1, TRBJ2-7)
CSARDRVAGMDEQYF

SEQ ID NO: 302535 - protein, 14 aa, Homo sapiens
  CDR3 for alpha chain variable domain of TCR clone 151268 (TRAV16, TRAJ37)
CALDISGNTGKLIL

SEQ ID NO: 302536 - protein, 11 aa, Homo sapiens
  CDR3 for beta chain variable domain of TCR clone 151268 (TRBV6-1, TRBJ2-1)
CASISSNEQFF

SEQ ID NO: 302537 - protein, 12 aa, Homo sapiens
  CDR3 for alpha chain variable domain of TCR clone 151269 (TRAV17, TRAJ21)
CALRYNFNKFYF

SEQ ID NO: 302538 - protein, 13 aa, Homo sapiens
  CDR3 for beta chain variable domain of TCR clone 151269 (TRBV24-1, TRBJ2-5)
RATSTGGTETQYF

SEQ ID NO: 302539 - protein, 17 aa, Homo sapiens
  CDR3 for alpha chain variable domain of TCR clone 151270 (TRAV3, TRAJ42)
CAVRDRDYGGSQGNLIF

SEQ ID NO: 302540 - protein, 17 aa, Homo sapiens
  CDR3 for beta chain variable domain of TCR clone 151270 (TRBV13, TRBJ2-3)
CASGLSRVAGGRNTQYF

SEQ ID NO: 302541 - protein, 12 aa, Homo sapiens
  CDR3 for alpha chain variable domain of TCR clone 151271 (TRAV1-2, TRAJ33)
CAALDSNYQLIW

SEQ ID NO: 302542 - protein, 16 aa, Homo sapiens
  CDR3 for beta chain variable domain of TCR clone 151271 (TRBV24-1, TRBJ2-3)
CATRDRRQDLTDTQYF

SEQ ID NO: 302543 - protein, 13 aa, Homo sapiens
  CDR3 for alpha chain variable domain of TCR clone 151272 (TRAV8-6, TRAJ50)
CAVIKTSYDKVIF

SEQ ID NO: 302544 - protein, 20 aa, Homo sapiens
  CDR3 for beta chain variable domain of TCR clone 151272 (TRBV7-8, TRBJ2-2)
CASSHLFPGPTIHITGELFF

SEQ ID NO: 302545 - protein, 13 aa, Homo sapiens
  CDR3 for alpha chain variable domain of TCR clone 151273 (TRAV8-3, TRAJ43)
CAVGPDNKNDMRF

SEQ ID NO: 302546 - protein, 15 aa, Homo sapiens
  CDR3 for beta chain variable domain of TCR clone 151273 (TRBV11-3, TRBJ2-3)
CASLKDGREGDTQYF

SEQ ID NO: 302547 - protein, 16 aa, Homo sapiens
  CDR3 for alpha chain variable domain of TCR clone 151274 (TRAV25, TRAJ53)
CAGPKGSGGSNYKLTF

SEQ ID NO: 302548 - protein, 14 aa, Homo sapiens
  CDR3 for beta chain variable domain of TCR clone 151274 (TRBV25-1, TRBJ1-1)
CASTHLGGNTEAFF

SEQ ID NO: 302549 - protein, 14 aa, Homo sapiens
  CDR3 for alpha chain variable domain of TCR clone 151275 (TRAV12-1, TRAJ23)
CVVIVYNQGGKLIF

SEQ ID NO: 302550 - protein, 15 aa, Homo sapiens
  CDR3 for beta chain variable domain of TCR clone 151275 (TRBV20-1, TRBJ1-5)
CSAKPPGQGPQPQHC

SEQ ID NO: 302551 - protein, 23 aa, Homo sapiens
  CDR3 for alpha chain variable domain of TCR clone 151276 (TRAV13-2, TRAJ6)
CAEEVHQEEATYRHLEEEPALLF

SEQ ID NO: 302552 - protein, 13 aa, Homo sapiens
  CDR3 for beta chain variable domain of TCR clone 151276 (TRBV9, TRBJ2-7)
CASSVAEYYEQYF

SEQ ID NO: 302553 - protein, 13 aa, Homo sapiens
  CDR3 for alpha chain variable domain of TCR clone 151277 (TRAV8-3, TRAJ36)
CAVGATGANNLFF

SEQ ID NO: 302554 - protein, 11 aa, Homo sapiens
  CDR3 for beta chain variable domain of TCR clone 151277 (TRBV19, TRBJ2-7)
CASSILGEQYF

SEQ ID NO: 302555 - protein, 15 aa, Homo sapiens
  CDR3 for alpha chain variable domain of TCR clone 151278 (TRAV13-2, TRAJ50)
CAEEPLKTSYDKVIS

SEQ ID NO: 302556 - protein, 15 aa, Homo sapiens
  CDR3 for beta chain variable domain of TCR clone 151278 (TRBV20-1, TRBJ1-5)
CSARGSVDSNQPQHF

SEQ ID NO: 302557 - protein, 14 aa, Homo sapiens
  CDR3 for alpha chain variable domain of TCR clone 151279 (TRAV13-1, TRAJ9)
CAASALTGGFKTIF

SEQ ID NO: 302558 - protein, 16 aa, Homo sapiens
  CDR3 for beta chain variable domain of TCR clone 151279 (TRBV7-8, TRBJ2-4)
CASSAERTLAKNIQCF

SEQ ID NO: 302559 - protein, 18 aa, Homo sapiens
  CDR3 for alpha chain variable domain of TCR clone 151280 (TRAV13-1, TRAJ52)
CVASKRSAGGTSYGKLTF

SEQ ID NO: 302560 - protein, 12 aa, Homo sapiens
  CDR3 for beta chain variable domain of TCR clone 151280 (TRBV12-4, TRBJ2-7)
CASSLGGYEQYF

SEQ ID NO: 302561 - protein, 14 aa, Homo sapiens
  CDR3 for alpha chain variable domain of TCR clone 151281 (TRAV23/DV6, TRAJ17)
CAARGRAAGNKLTF

SEQ ID NO: 302562 - protein, 13 aa, Homo sapiens
  CDR3 for beta chain variable domain of TCR clone 151281 (TRBV7-6, TRBJ1-2)
CASSLVADYGYTV

SEQ ID NO: 302563 - protein, 13 aa, Homo sapiens
  CDR3 for alpha chain variable domain of TCR clone 151282 (TRAV21, TRAJ27)
FAARPGHAGKSTF

SEQ ID NO: 302564 - protein, 16 aa, Homo sapiens
  CDR3 for beta chain variable domain of TCR clone 151282 (TRBV13, TRBJ2-2)
CASSPRTGEHTGELFF

SEQ ID NO: 302565 - protein, 13 aa, Homo sapiens
  CDR3 for alpha chain variable domain of TCR clone 151283 (TRAV21, TRAJ57)
CAVIEGGSEKLGF

SEQ ID NO: 302566 - protein, 15 aa, Homo sapiens
  CDR3 for beta chain variable domain of TCR clone 151283 (TRBV10-3, TRBJ2-5)
CAISEFGRGQETQYF

SEQ ID NO: 302567 - protein, 15 aa, Homo sapiens
  CDR3 for alpha chain variable domain of TCR clone 151284 (TRAV8-4, TRAJ3)
CAVTGENLVQQCFQD

SEQ ID NO: 302568 - protein, 15 aa, Homo sapiens
  CDR3 for beta chain variable domain of TCR clone 151284 (TRBV7-2, TRBJ2-3)
CASSLNLRDTDTQYF

SEQ ID NO: 302569 - protein, 15 aa, Homo sapiens
  CDR3 for alpha chain variable domain of TCR clone 151285 (TRAV21, TRAJ24)
CAARSSTGSWGKLQF

SEQ ID NO: 302570 - protein, 11 aa, Homo sapiens
  CDR3 for beta chain variable domain of TCR clone 151285 (TRBV11-2, TRBJ2-2)
CASSLPGELFF

SEQ ID NO: 302571 - protein, 17 aa, Homo sapiens
  CDR3 for alpha chain variable domain of TCR clone 151286 (TRAV26-1, TRAJ53)
CIVRVDDSGGSNYKLTF

SEQ ID NO: 302572 - protein, 15 aa, Homo sapiens
  CDR3 for beta chain variable domain of TCR clone 151286 (TRBV12-5, TRBJ2-2)
CASGFQGSGTGELFF

SEQ ID NO: 302573 - protein, 17 aa, Homo sapiens
  CDR3 for alpha chain variable domain of TCR clone 151287 (TRAV3, TRAJ38)
CAVRDCLNAGNNHIQTP

SEQ ID NO: 302574 - protein, 13 aa, Homo sapiens
  CDR3 for beta chain variable domain of TCR clone 151287 (TRBV23-1, TRBJ1-4)
CASRGKFNEKLFF

SEQ ID NO: 302575 - protein, 14 aa, Homo sapiens
  CDR3 for alpha chain variable domain of TCR clone 151288 (TRAV1-2, TRAJ8)
CAVREDTGFQKLGF

SEQ ID NO: 302576 - protein, 11 aa, Homo sapiens
  CDR3 for beta chain variable domain of TCR clone 151288 (TRBV11-3, TRBJ2-2)
CASSLPGELFL

SEQ ID NO: 302577 - protein, 14 aa, Homo sapiens
  CDR3 for alpha chain variable domain of TCR clone 151289 (TRAV12-2, TRAJ29)
CAVNWETGNTPLVF

SEQ ID NO: 302578 - protein, 14 aa, Homo sapiens
  CDR3 for beta chain variable domain of TCR clone 151289 (TRBV6-1, TRBJ1-3)
CASVQGGGGNTIYF

SEQ ID NO: 302579 - protein, 20 aa, Homo sapiens
  CDR3 for alpha chain variable domain of TCR clone 151290 (TRAV26-1, TRAJ42)
CCVLLHRQTYYGGSQGNLIF

SEQ ID NO: 302580 - protein, 14 aa, Homo sapiens
  CDR3 for beta chain variable domain of TCR clone 151290 (TRBV7-3, TRBJ2-2)
CASSLVQDTGELFF

SEQ ID NO: 302581 - protein, 13 aa, Homo sapiens
  CDR3 for alpha chain variable domain of TCR clone 151291 (TRAV27, TRAJ6)
CAGGTRGSYIPTF

SEQ ID NO: 302582 - protein, 14 aa, Homo sapiens
  CDR3 for beta chain variable domain of TCR clone 151291 (TRBV7-9, TRBJ2-7)
CASSLQQGGYEQYF

SEQ ID NO: 302583 - protein, 11 aa, Homo sapiens
  CDR3 for alpha chain variable domain of TCR clone 151292 (TRAV1-1, TRAJ23)
SAVRQGEKLIF

SEQ ID NO: 302584 - protein, 20 aa, Homo sapiens
  CDR3 for beta chain variable domain of TCR clone 151292 (TRBV7-8, TRBJ2-2)
CASSHLFPGPTIHITGELFF

SEQ ID NO: 302585 - protein, 10 aa, Homo sapiens
  CDR3 for alpha chain variable domain of TCR clone 151293 (TRAV12-2, TRAJ52)
RSTSYGKLTF

SEQ ID NO: 302586 - protein, 11 aa, Homo sapiens
  CDR3 for beta chain variable domain of TCR clone 151293 (TRBV11-2, TRBJ2-2)
CASSLPGELFC

SEQ ID NO: 302587 - protein, 10 aa, Homo sapiens
  CDR3 for alpha chain variable domain of TCR clone 151294 (TRAV5, TRAJ34)
CAEDTDKLIF

SEQ ID NO: 302588 - protein, 14 aa, Homo sapiens
  CDR3 for beta chain variable domain of TCR clone 151294 (TRBV28, TRBJ2-2)
CASRIRSGTGELFF

SEQ ID NO: 302589 - protein, 12 aa, Homo sapiens
  CDR3 for alpha chain variable domain of TCR clone 151295 (TRAV21, TRAJ20)
CCGLRVDYKLSF

SEQ ID NO: 302590 - protein, 15 aa, Homo sapiens
  CDR3 for beta chain variable domain of TCR clone 151295 (TRBV27, TRBJ2-1)
CASSNGGGSSNEQFF

SEQ ID NO: 302591 - protein, 14 aa, Homo sapiens
  CDR3 for alpha chain variable domain of TCR clone 151296 (TRAV26-1, TRAJ21)
CIVGPPYKFNKFYF

SEQ ID NO: 302592 - protein, 14 aa, Homo sapiens
  CDR3 for beta chain variable domain of TCR clone 151296 (TRBV11-3, TRBJ2-1)
CASSATTSGSIQFF

SEQ ID NO: 302593 - protein, 14 aa, Homo sapiens
  CDR3 for alpha chain variable domain of TCR clone 151297 (TRAV2, TRAJ8)
CAGRGNTGFQKLVF

SEQ ID NO: 302594 - protein, 13 aa, Homo sapiens
  CDR3 for beta chain variable domain of TCR clone 151297 (TRBV6-5, TRBJ2-7)
CASRTSGIHEQHF

SEQ ID NO: 302595 - protein, 15 aa, Homo sapiens
  CDR3 for alpha chain variable domain of TCR clone 151298 (TRAV20, TRAJ52)
CAVQAKGTSYGKLTF

SEQ ID NO: 302596 - protein, 15 aa, Homo sapiens
  CDR3 for beta chain variable domain of TCR clone 151298 (TRBV11-3, TRBJ2-3)
CASLKDGREGDTQYF

SEQ ID NO: 302597 - protein, 14 aa, Homo sapiens
  CDR3 for alpha chain variable domain of TCR clone 151299 (TRAV1-2, TRAJ16)
CAVNWFSDGQKLLF

SEQ ID NO: 302598 - protein, 15 aa, Homo sapiens
  CDR3 for beta chain variable domain of TCR clone 151299 (TRBV7-2, TRBJ2-1)
CASSSGLAGSNEQFF

SEQ ID NO: 302599 - protein, 16 aa, Homo sapiens
  CDR3 for alpha chain variable domain of TCR clone 151300 (TRAV12-2, TRAJ50)
CAVGTATKTSYEKVIF

SEQ ID NO: 302600 - protein, 12 aa, Homo sapiens
  CDR3 for beta chain variable domain of TCR clone 151300 (TRBV12-4, TRBJ1-5)
CASSLGRQPQHF

SEQ ID NO: 302601 - protein, 14 aa, Homo sapiens
  CDR3 for alpha chain variable domain of TCR clone 151301 (TRAV2, TRAJ9)
CAVEDRSGGFKTIF

SEQ ID NO: 302602 - protein, 11 aa, Homo sapiens
  CDR3 for beta chain variable domain of TCR clone 151301 (TRBV7-9, TRBJ2-5)
CASSLRETQYF

SEQ ID NO: 302603 - protein, 18 aa, Homo sapiens
  CDR3 for alpha chain variable domain of TCR clone 151302 (TRAV29/DV5, TRAJ52)
CAAGFRGAGGTSYGKLTF

SEQ ID NO: 302604 - protein, 16 aa, Homo sapiens
  CDR3 for beta chain variable domain of TCR clone 151302 (TRBV7-3, TRBJ2-2)
CASSLKRGALSGELFF

SEQ ID NO: 302605 - protein, 18 aa, Homo sapiens
  CDR3 for alpha chain variable domain of TCR clone 151303 (TRAV9-2, TRAJ52)
CALSRHNAGGTSYGKLTF

SEQ ID NO: 302606 - protein, 15 aa, Homo sapiens
  CDR3 for beta chain variable domain of TCR clone 151303 (TRBV5-1, TRBJ2-1)
CASSPPRAPYNEQFF

SEQ ID NO: 302607 - protein, 17 aa, Homo sapiens
  CDR3 for alpha chain variable domain of TCR clone 151304 (TRAV26-1, TRAJ11)
CIVRVGQSNSGYITLTF

SEQ ID NO: 302608 - protein, 13 aa, Homo sapiens
  CDR3 for beta chain variable domain of TCR clone 151304 (TRBV7-9, TRBJ1-2)
CASSLKQNYGYTF

SEQ ID NO: 302609 - protein, 17 aa, Homo sapiens
  CDR3 for alpha chain variable domain of TCR clone 151305 (TRAV2, TRAJ13)
TTVLWSLNSEGYQKVTF

SEQ ID NO: 302610 - protein, 14 aa, Homo sapiens
  CDR3 for beta chain variable domain of TCR clone 151305 (TRBV28, TRBJ1-5)
CVSSGQALYQPQHF

SEQ ID NO: 302611 - protein, 14 aa, Homo sapiens
  CDR3 for alpha chain variable domain of TCR clone 151306 (TRAV16, TRAJ33)
CALSAMDSYYQLIW

SEQ ID NO: 302612 - protein, 12 aa, Homo sapiens
  CDR3 for beta chain variable domain of TCR clone 151306 (TRBV28, TRBJ2-6)
CAIQAGANVLTF

SEQ ID NO: 302613 - protein, 14 aa, Homo sapiens
  CDR3 for alpha chain variable domain of TCR clone 151307 (TRAV8-3, TRAJ4)
CAVGAAGGYNKLIF

SEQ ID NO: 302614 - protein, 16 aa, Homo sapiens
  CDR3 for beta chain variable domain of TCR clone 151307 (TRBV6-5, TRBJ2-2)
CASSYDAGARTGELFF

SEQ ID NO: 302615 - protein, 16 aa, Homo sapiens
  CDR3 for alpha chain variable domain of TCR clone 151308 (TRAV30, TRAJ24)
CGTEIVDADSWEKFQF

SEQ ID NO: 302616 - protein, 13 aa, Homo sapiens
  CDR3 for beta chain variable domain of TCR clone 151308 (TRBV7-2, TRBJ1-4)
CASSLAGLEKLFF

SEQ ID NO: 302617 - protein, 13 aa, Homo sapiens
  CDR3 for alpha chain variable domain of TCR clone 151309 (TRAV2, TRAJ24)
CAVPTDSWGKLQF

SEQ ID NO: 302618 - protein, 15 aa, Homo sapiens
  CDR3 for beta chain variable domain of TCR clone 151309 (TRBV27, TRBJ2-1)
CASSNGGGSSNEQFF

SEQ ID NO: 302619 - protein, 14 aa, Homo sapiens
  CDR3 for alpha chain variable domain of TCR clone 151310 (TRAV3, TRAJ17)
CAVRDAAAGNKLTF

SEQ ID NO: 302620 - protein, 17 aa, Homo sapiens
  CDR3 for beta chain variable domain of TCR clone 151310 (TRBV13, TRBJ2-3)
CASSLSRVAGGRNTQYF

SEQ ID NO: 302621 - protein, 14 aa, Homo sapiens
  CDR3 for alpha chain variable domain of TCR clone 151311 (TRAV29/DV5, TRAJ20)
CAATIRSNDFKLSF

SEQ ID NO: 302622 - protein, 15 aa, Homo sapiens
  CDR3 for beta chain variable domain of TCR clone 151311 (TRBV20-1, TRBJ2-1)
CSASSAGSSYNEQFF

SEQ ID NO: 302623 - protein, 14 aa, Homo sapiens
  CDR3 for alpha chain variable domain of TCR clone 151312 (TRAV36/DV7, TRAJ57)
CCLSSQGGSEKLVF

SEQ ID NO: 302624 - protein, 14 aa, Homo sapiens
  CDR3 for beta chain variable domain of TCR clone 151312 (TRBV19, TRBJ2-1)
CASKDPSSYNEQFF

SEQ ID NO: 302625 - protein, 14 aa, Homo sapiens
  CDR3 for alpha chain variable domain of TCR clone 151313 (TRAV4, TRAJ32)
CLVNYGGATNKLIF

SEQ ID NO: 302626 - protein, 14 aa, Homo sapiens
  CDR3 for beta chain variable domain of TCR clone 151313 (TRBV15, TRBJ2-5)
CATSGGTRTENQYF

SEQ ID NO: 302627 - protein, 14 aa, Homo sapiens
  CDR3 for alpha chain variable domain of TCR clone 151314 (TRAV1-1, TRAJ27)
CAVIYNTNAGKSTF

SEQ ID NO: 302628 - protein, 20 aa, Homo sapiens
  CDR3 for beta chain variable domain of TCR clone 151314 (TRBV7-3, TRBJ2-1)
CASSLTLASGRAMVSSSSGR

SEQ ID NO: 302629 - protein, 12 aa, Homo sapiens
  CDR3 for alpha chain variable domain of TCR clone 151315 (TRAV12-3, TRAJ17)
CAMTLTGNKLTF

SEQ ID NO: 302630 - protein, 15 aa, Homo sapiens
  CDR3 for beta chain variable domain of TCR clone 151315 (TRBV20-1, TRBJ2-7)
CSARDQVSGMDVQYF

SEQ ID NO: 302631 - protein, 14 aa, Homo sapiens
  CDR3 for alpha chain variable domain of TCR clone 151316 (TRAV26-1, TRAJ45)
CIVRVVGGADGLTF

SEQ ID NO: 302632 - protein, 16 aa, Homo sapiens
  CDR3 for beta chain variable domain of TCR clone 151316 (TRBV7-9, TRBJ1-1)
CASSLTQVRSNTEAFR

SEQ ID NO: 302633 - protein, 16 aa, Homo sapiens
  CDR3 for alpha chain variable domain of TCR clone 151317 (TRAV3, TRAJ37)
CAVRVRGSGNTGKLIF

SEQ ID NO: 302634 - protein, 15 aa, Homo sapiens
  CDR3 for beta chain variable domain of TCR clone 151317 (TRBV3-1, TRBJ2-1)
CASSSRDSGFNEQFF

SEQ ID NO: 302635 - protein, 14 aa, Homo sapiens
  CDR3 for alpha chain variable domain of TCR clone 151318 (TRAV13-1, TRAJ23)
CAASRHGRGGKLIF

SEQ ID NO: 302636 - protein, 15 aa, Homo sapiens
  CDR3 for beta chain variable domain of TCR clone 151318 (TRBV7-2, TRBJ2-1)
CASSLVAGRYNEQFF

SEQ ID NO: 302637 - protein, 12 aa, Homo sapiens
  CDR3 for alpha chain variable domain of TCR clone 151319 (TRAV12-3, TRAJ17)
CAMTLTGNKLTF

SEQ ID NO: 302638 - protein, 17 aa, Homo sapiens
  CDR3 for beta chain variable domain of TCR clone 151319 (TRBV13, TRBJ2-3)
CASSLSRVAGGRNTQCF

SEQ ID NO: 302639 - protein, 18 aa, Homo sapiens
  CDR3 for alpha chain variable domain of TCR clone 151320 (TRAV21, TRAJ53)
CAVKGGENSGGSNYKLTF

SEQ ID NO: 302640 - protein, 15 aa, Homo sapiens
  CDR3 for beta chain variable domain of TCR clone 151320 (TRBV20-1, TRBJ2-5)
CSAPPRTGFGETQYF

SEQ ID NO: 302641 - protein, 11 aa, Homo sapiens
  CDR3 for alpha chain variable domain of TCR clone 151321 (TRAV1-2, TRAJ20)
CAVAKDYKLSF

SEQ ID NO: 302642 - protein, 11 aa, Homo sapiens
  CDR3 for beta chain variable domain of TCR clone 151321 (TRBV29-1, TRBJ2-5)
CSEDRTGTQYF

SEQ ID NO: 302643 - protein, 11 aa, Homo sapiens
  CDR3 for alpha chain variable domain of TCR clone 151322 (TRAV35, TRAJ34)
CWARNTDKLIF

SEQ ID NO: 302644 - protein, 16 aa, Homo sapiens
  CDR3 for beta chain variable domain of TCR clone 151322 (TRBV28, TRBJ1-4)
CASSPPYRGRSEKLFF

SEQ ID NO: 302645 - protein, 14 aa, Homo sapiens
  CDR3 for alpha chain variable domain of TCR clone 151323 (TRAV2, TRAJ9)
CAVEDRSGGFKTIF

SEQ ID NO: 302646 - protein, 16 aa, Homo sapiens
  CDR3 for beta chain variable domain of TCR clone 151323 (TRBV6-5, TRBJ2-3)
CASRFHRGGGSDTQYF

SEQ ID NO: 302647 - protein, 16 aa, Homo sapiens
  CDR3 for alpha chain variable domain of TCR clone 151324 (TRAV3, TRAJ37)
CAVRPHGSGNTGKLIF

SEQ ID NO: 302648 - protein, 16 aa, Homo sapiens
  CDR3 for beta chain variable domain of TCR clone 151324 (TRBV2, TRBJ2-1)
CASSVGGSLSYNEQLF

SEQ ID NO: 302649 - protein, 12 aa, Homo sapiens
  CDR3 for alpha chain variable domain of TCR clone 151325 (TRAV29/DV5, TRAJ31)
CVASSHNARFMF

SEQ ID NO: 302650 - protein, 17 aa, Homo sapiens
  CDR3 for beta chain variable domain of TCR clone 151325 (TRBV18, TRBJ2-6)
CASSPRQGAVGANVLTF

SEQ ID NO: 302651 - protein, 10 aa, Homo sapiens
  CDR3 for alpha chain variable domain of TCR clone 151326 (TRAV38-2/DV8, TRAJ40)
CASGTYKYIF

SEQ ID NO: 302652 - protein, 14 aa, Homo sapiens
  CDR3 for beta chain variable domain of TCR clone 151326 (TRBV7-2, TRBJ2-7)
CASRSQGAAYEQYF

SEQ ID NO: 302653 - protein, 14 aa, Homo sapiens
  CDR3 for alpha chain variable domain of TCR clone 151327 (TRAV1-2, TRAJ16)
CAVNRFSDGQKLLF

SEQ ID NO: 302654 - protein, 13 aa, Homo sapiens
  CDR3 for beta chain variable domain of TCR clone 151327 (TRBV4-1, TRBJ2-1)
CASSRSINNEQFF

SEQ ID NO: 302655 - protein, 13 aa, Homo sapiens
  CDR3 for alpha chain variable domain of TCR clone 151328 (TRAV2, TRAJ40)
CALVTSGTYKYIF

SEQ ID NO: 302656 - protein, 17 aa, Homo sapiens
  CDR3 for beta chain variable domain of TCR clone 151328 (TRBV7-3, TRBJ2-3)
CASSLMKRMRGADTQYF

SEQ ID NO: 302657 - protein, 12 aa, Homo sapiens
  CDR3 for alpha chain variable domain of TCR clone 151329 (TRAV12-3, TRAJ17)
CEMTLTGNKLTL

SEQ ID NO: 302658 - protein, 15 aa, Homo sapiens
  CDR3 for beta chain variable domain of TCR clone 151329 (TRBV20-1, TRBJ2-7)
CSARDRVSGMDEQYF

SEQ ID NO: 302659 - protein, 15 aa, Homo sapiens
  CDR3 for alpha chain variable domain of TCR clone 151330 (TRAV26-1, TRAJ23)
CIVRVLNNQGGKLIF

SEQ ID NO: 302660 - protein, 15 aa, Homo sapiens
  CDR3 for beta chain variable domain of TCR clone 151330 (TRBV11-2, TRBJ1-3)
CASSLDGTVGNTIYF

SEQ ID NO: 302661 - protein, 15 aa, Homo sapiens
  CDR3 for alpha chain variable domain of TCR clone 151331 (TRAV2, TRAJ22)
CAVSSRGGSARQLTF

SEQ ID NO: 302662 - protein, 16 aa, Homo sapiens
  CDR3 for beta chain variable domain of TCR clone 151331 (TRBV12-4, TRBJ1-5)
CASSRPVGGSNQPQHF

SEQ ID NO: 302663 - protein, 15 aa, Homo sapiens
  CDR3 for alpha chain variable domain of TCR clone 151332 (TRAV21, TRAJ53)
CATLNSGGSNYKLTF

SEQ ID NO: 302664 - protein, 13 aa, Homo sapiens
  CDR3 for beta chain variable domain of TCR clone 151332 (TRBV7-8, TRBJ2-7)
CASSLTGGREQYF

SEQ ID NO: 302665 - protein, 14 aa, Homo sapiens
  CDR3 for alpha chain variable domain of TCR clone 151333 (TRAV23/DV6, TRAJ6)
CAAIPSGGSYIPNL

SEQ ID NO: 302666 - protein, 17 aa, Homo sapiens
  CDR3 for beta chain variable domain of TCR clone 151333 (TRBV7-2, TRBJ2-3)
CASSLGGRAAWRDTQYF

SEQ ID NO: 302667 - protein, 16 aa, Homo sapiens
  CDR3 for alpha chain variable domain of TCR clone 151334 (TRAV26-1, TRAJ37)
CIVRGDGSGNTGKLIF

SEQ ID NO: 302668 - protein, 18 aa, Homo sapiens
  CDR3 for beta chain variable domain of TCR clone 151334 (TRBV11-2, TRBJ2-3)
CASSLGGASRGAPNTQYF

SEQ ID NO: 302669 - protein, 12 aa, Homo sapiens
  CDR3 for alpha chain variable domain of TCR clone 151335 (TRAV8-4, TRAJ33)
CAVSEGNYQLIR

SEQ ID NO: 302670 - protein, 13 aa, Homo sapiens
  CDR3 for beta chain variable domain of TCR clone 151335 (TRBV12-4, TRBJ1-2)
CASSLRQGKGYTF

SEQ ID NO: 302671 - protein, 14 aa, Homo sapiens
  CDR3 for alpha chain variable domain of TCR clone 151336 (TRAV12-2, TRAJ44)
CAVNPAGTASKLTF

SEQ ID NO: 302672 - protein, 13 aa, Homo sapiens
  CDR3 for beta chain variable domain of TCR clone 151336 (TRBV4-2, TRBJ1-1)
CASRQAGNTEAFF

SEQ ID NO: 302673 - protein, 14 aa, Homo sapiens
  CDR3 for alpha chain variable domain of TCR clone 151337 (TRAV12-3, TRAJ10)
SHLPLTGGGNRLTF

SEQ ID NO: 302674 - protein, 15 aa, Homo sapiens
  CDR3 for beta chain variable domain of TCR clone 151337 (TRBV11-2, TRBJ1-3)
CASSLDGTVGNTIYF

SEQ ID NO: 302675 - protein, 11 aa, Homo sapiens
  CDR3 for alpha chain variable domain of TCR clone 151338 (TRAV2, TRAJ33)
CAVDSNYQLIW

SEQ ID NO: 302676 - protein, 16 aa, Homo sapiens
  CDR3 for beta chain variable domain of TCR clone 151338 (TRBV7-9, TRBJ1-2)
CASSLSFSSGEDGYTF

SEQ ID NO: 302677 - protein, 14 aa, Homo sapiens
  CDR3 for alpha chain variable domain of TCR clone 151339 (TRAV12-2, TRAJ53)
CAVKGGGSNYKQTF

SEQ ID NO: 302678 - protein, 15 aa, Homo sapiens
  CDR3 for beta chain variable domain of TCR clone 151339 (TRBV10-3, TRBJ2-3)
CAISLTSGGTDTQYF

SEQ ID NO: 302679 - protein, 11 aa, Homo sapiens
  CDR3 for alpha chain variable domain of TCR clone 151340 (TRAV2, TRAJ33)
CAVDSNYQLIW

SEQ ID NO: 302680 - protein, 15 aa, Homo sapiens
  CDR3 for beta chain variable domain of TCR clone 151340 (TRBV5-1, TRBJ2-5)
CASSFKGGDQETQYF

SEQ ID NO: 302681 - protein, 19 aa, Homo sapiens
  CDR3 for alpha chain variable domain of TCR clone 151341 (TRAV3, TRAJ6)
CAVRDRNPSRSGGSYIPTF

SEQ ID NO: 302682 - protein, 16 aa, Homo sapiens
  CDR3 for beta chain variable domain of TCR clone 151341 (TRBV12-5, TRBJ2-5)
CASGPRTSGNQETQYF

SEQ ID NO: 302683 - protein, 13 aa, Homo sapiens
  CDR3 for alpha chain variable domain of TCR clone 151342 (TRAV3, TRAJ34)
CAVRDYNTDKLIF

SEQ ID NO: 302684 - protein, 14 aa, Homo sapiens
  CDR3 for beta chain variable domain of TCR clone 151342 (TRBV19, TRBJ2-1)
CASSPGLAPNEQFF

SEQ ID NO: 302685 - protein, 12 aa, Homo sapiens
  CDR3 for alpha chain variable domain of TCR clone 151343 (TRAV8-4, TRAJ37)
CAKSSNTGKLIF

SEQ ID NO: 302686 - protein, 14 aa, Homo sapiens
  CDR3 for beta chain variable domain of TCR clone 151343 (TRBV19, TRBJ2-1)
CASPTFVLSGGQFF

SEQ ID NO: 302687 - protein, 16 aa, Homo sapiens
  CDR3 for alpha chain variable domain of TCR clone 151344 (TRAV1-2, TRAJ16)
CAVNRFQMARSCSLQG

SEQ ID NO: 302688 - protein, 15 aa, Homo sapiens
  CDR3 for beta chain variable domain of TCR clone 151344 (TRBV10-2, TRBJ2-6)
CASSEQGTGANVLTF

SEQ ID NO: 302689 - protein, 15 aa, Homo sapiens
  CDR3 for alpha chain variable domain of TCR clone 151345 (TRAV8-3, TRAJ15)
CAVGAPNQAATALIF

SEQ ID NO: 302690 - protein, 14 aa, Homo sapiens
  CDR3 for beta chain variable domain of TCR clone 151345 (TRBV20-1, TRBJ2-1)
CSPNDEASYNEQFF

SEQ ID NO: 302691 - protein, 16 aa, Homo sapiens
  CDR3 for alpha chain variable domain of TCR clone 151346 (TRAV12-3, TRAJ53)
CAVSPGSGGSNYKLTF

SEQ ID NO: 302692 - protein, 17 aa, Homo sapiens
  CDR3 for beta chain variable domain of TCR clone 151346 (TRBV20-1, TRBJ2-2)
CSASGSGQGGLTGELFF

SEQ ID NO: 302693 - protein, 14 aa, Homo sapiens
  CDR3 for alpha chain variable domain of TCR clone 151347 (TRAV12-1, TRAJ23)
CVVIGYNQGGKIIF

SEQ ID NO: 302694 - protein, 15 aa, Homo sapiens
  CDR3 for beta chain variable domain of TCR clone 151347 (TRBV20-1, TRBJ1-5)
CSAKPPGQGPQPQHF

SEQ ID NO: 302695 - protein, 13 aa, Homo sapiens
  CDR3 for alpha chain variable domain of TCR clone 151348 (TRAV17, TRAJ5)
CAPMDTSRRALTF

SEQ ID NO: 302696 - protein, 14 aa, Homo sapiens
  CDR3 for beta chain variable domain of TCR clone 151348 (TRBV7-3, TRBJ2-1)
CASSVAGGTNEQFF

SEQ ID NO: 302697 - protein, 12 aa, Homo sapiens
  CDR3 for alpha chain variable domain of TCR clone 151349 (TRAV8-6, TRAJ36)
CAVSDWLGQTTP

SEQ ID NO: 302698 - protein, 13 aa, Homo sapiens
  CDR3 for beta chain variable domain of TCR clone 151349 (TRBV2, TRBJ2-5)
CASGTPYQETQYF

SEQ ID NO: 302699 - protein, 13 aa, Homo sapiens
  CDR3 for alpha chain variable domain of TCR clone 151350 (TRAV3, TRAJ21)
CAVGEPDFNKFYF

SEQ ID NO: 302700 - protein, 18 aa, Homo sapiens
  CDR3 for beta chain variable domain of TCR clone 151350 (TRBV11-2, TRBJ2-3)
CASSLGGASRGAPNTQYF

SEQ ID NO: 302701 - protein, 14 aa, Homo sapiens
  CDR3 for alpha chain variable domain of TCR clone 151351 (TRAV8-4, TRAJ13)
CALTLSAGYQKVTF

SEQ ID NO: 302702 - protein, 14 aa, Homo sapiens
  CDR3 for beta chain variable domain of TCR clone 151351 (TRBV7-2, TRBJ1-2)
CASSQTGSTYGYTF

SEQ ID NO: 302703 - protein, 14 aa, Homo sapiens
  CDR3 for alpha chain variable domain of TCR clone 151352 (TRAV13-2, TRAJ15)
CAENPNQAGTALIF

SEQ ID NO: 302704 - protein, 16 aa, Homo sapiens
  CDR3 for beta chain variable domain of TCR clone 151352 (TRBV12-4, TRBJ1-2)
CTSSPTATGKTRGYTF

SEQ ID NO: 302705 - protein, 13 aa, Homo sapiens
  CDR3 for alpha chain variable domain of TCR clone 151353 (TRAV8-6, TRAJ49)
CAVITNTGNQFYF

SEQ ID NO: 302706 - protein, 14 aa, Homo sapiens
  CDR3 for beta chain variable domain of TCR clone 151353 (TRBV5-5, TRBJ2-7)
CASSLGQGTYEQYF

SEQ ID NO: 302707 - protein, 21 aa, Homo sapiens
  CDR3 for alpha chain variable domain of TCR clone 151354 (TRAV26-1, TRAJ17)
CCVLLHRQSSGSKAAGKKLTF

SEQ ID NO: 302708 - protein, 14 aa, Homo sapiens
  CDR3 for beta chain variable domain of TCR clone 151354 (TRBV28, TRBJ1-2)
CASRIQGANYGYTF

SEQ ID NO: 302709 - protein, 15 aa, Homo sapiens
  CDR3 for alpha chain variable domain of TCR clone 151355 (TRAV27, TRAJ38)
CAARRNAGTNRTLIW

SEQ ID NO: 302710 - protein, 13 aa, Homo sapiens
  CDR3 for beta chain variable domain of TCR clone 151355 (TRBV12-5, TRBJ2-3)
CASGDRQSDTQYF

SEQ ID NO: 302711 - protein, 13 aa, Homo sapiens
  CDR3 for alpha chain variable domain of TCR clone 151356 (TRAV12-2, TRAJ10)
RAVPTGGGNKLTF

SEQ ID NO: 302712 - protein, 11 aa, Homo sapiens
  CDR3 for beta chain variable domain of TCR clone 151356 (TRBV6-1, TRBJ2-1)
CASISSNEQFF

SEQ ID NO: 302713 - protein, 14 aa, Homo sapiens
  CDR3 for alpha chain variable domain of TCR clone 151357 (TRAV23/DV6, TRAJ11)
CAASLGSGSSTLTF

SEQ ID NO: 302714 - protein, 13 aa, Homo sapiens
  CDR3 for beta chain variable domain of TCR clone 151357 (TRBV4-1, TRBJ2-5)
CASSLTRGETQYF

SEQ ID NO: 302715 - protein, 13 aa, Homo sapiens
  CDR3 for alpha chain variable domain of TCR clone 151358 (TRAV20, TRAJ48)
RAVQGVGNEKLTF

SEQ ID NO: 302716 - protein, 19 aa, Homo sapiens
  CDR3 for beta chain variable domain of TCR clone 151358 (TRBV2, TRBJ2-2)
CASSQPGLAGGGNTGELFF

SEQ ID NO: 302717 - protein, 18 aa, Homo sapiens
  CDR3 for alpha chain variable domain of TCR clone 151359 (TRAV21, TRAJ52)
CAVRPSPAGGTSYGKLTF

SEQ ID NO: 302718 - protein, 12 aa, Homo sapiens
  CDR3 for beta chain variable domain of TCR clone 151359 (TRBV11-2, TRBJ2-2)
CASSIGGGELFF

SEQ ID NO: 302719 - protein, 15 aa, Homo sapiens
  CDR3 for alpha chain variable domain of TCR clone 151360 (TRAV12-2, TRAJ30)
CAVNPAMDRDDKIIF

SEQ ID NO: 302720 - protein, 15 aa, Homo sapiens
  CDR3 for beta chain variable domain of TCR clone 151360 (TRBV19, TRBJ1-6)
CASSTQGAVGSPLHF

SEQ ID NO: 302721 - protein, 12 aa, Homo sapiens
  CDR3 for alpha chain variable domain of TCR clone 151361 (TRAV12-3, TRAJ17)
CAMTLTGNKLTF

SEQ ID NO: 302722 - protein, 13 aa, Homo sapiens
  CDR3 for beta chain variable domain of TCR clone 151361 (TRBV7-3, TRBJ2-1)
CQQLTGGTNEQFF

SEQ ID NO: 302723 - protein, 11 aa, Homo sapiens
  CDR3 for alpha chain variable domain of TCR clone 151362 (TRAV2, TRAJ33)
CAVDSNYQLIW

SEQ ID NO: 302724 - protein, 18 aa, Homo sapiens
  CDR3 for beta chain variable domain of TCR clone 151362 (TRBV20-1, TRBJ2-6)
CSASGSGTTRSGANVLTF

SEQ ID NO: 302725 - protein, 13 aa, Homo sapiens
  CDR3 for alpha chain variable domain of TCR clone 151363 (TRAV21, TRAJ37)
CAVSSGNTGKLIF

SEQ ID NO: 302726 - protein, 15 aa, Homo sapiens
  CDR3 for beta chain variable domain of TCR clone 151363 (TRBV7-2, TRBJ2-1)
CASTHGTGIYNEQFF

SEQ ID NO: 302727 - protein, 13 aa, Homo sapiens
  CDR3 for alpha chain variable domain of TCR clone 151364 (TRAV12-2, TRAJ20)
CTVYPSNDYKLSF

SEQ ID NO: 302728 - protein, 15 aa, Homo sapiens
  CDR3 for beta chain variable domain of TCR clone 151364 (TRBV27, TRBJ2-5)
CASSLYPRGGETQYF

SEQ ID NO: 302729 - protein, 15 aa, Homo sapiens
  CDR3 for alpha chain variable domain of TCR clone 151365 (TRAV21, TRAJ13)
CAVPRSFWGLPVSYL

SEQ ID NO: 302730 - protein, 13 aa, Homo sapiens
  CDR3 for beta chain variable domain of TCR clone 151365 (TRBV7-9, TRBJ1-2)
CASSLKQNYGYTF

SEQ ID NO: 302731 - protein, 14 aa, Homo sapiens
  CDR3 for alpha chain variable domain of TCR clone 151366 (TRAV17, TRAJ12)
CAILPMDSSYKLIL

SEQ ID NO: 302732 - protein, 11 aa, Homo sapiens
  CDR3 for beta chain variable domain of TCR clone 151366 (TRBV12-4, TRBJ2-3)
CASTATDTQYF

SEQ ID NO: 302733 - protein, 15 aa, Homo sapiens
  CDR3 for alpha chain variable domain of TCR clone 151367 (TRAV13-1, TRAJ44)
CAASRNTGNASKLTF

SEQ ID NO: 302734 - protein, 14 aa, Homo sapiens
  CDR3 for beta chain variable domain of TCR clone 151367 (TRBV2, TRBJ2-7)
CASSLTSGGYEQYF

SEQ ID NO: 302735 - protein, 23 aa, Homo sapiens
  CDR3 for alpha chain variable domain of TCR clone 151368 (TRAV1-1, TRAJ11)
LLQELQMNDSASYFCAGYSTLTF

SEQ ID NO: 302736 - protein, 15 aa, Homo sapiens
  CDR3 for beta chain variable domain of TCR clone 151368 (TRBV6-5, TRBJ2-1)
CASRGDFDSYNEQFF

SEQ ID NO: 302737 - protein, 15 aa, Homo sapiens
  CDR3 for alpha chain variable domain of TCR clone 151369 (TRAV2, TRAJ21)
CAVDFTTSTNFTLDL

SEQ ID NO: 302738 - protein, 16 aa, Homo sapiens
  CDR3 for beta chain variable domain of TCR clone 151369 (TRBV5-5, TRBJ2-7)
CASSVRTSGRPYEQYF

SEQ ID NO: 302739 - protein, 14 aa, Homo sapiens
  CDR3 for alpha chain variable domain of TCR clone 151370 (TRAV12-3, TRAJ10)
SHLPLTGGGNKLTF

SEQ ID NO: 302740 - protein, 17 aa, Homo sapiens
  CDR3 for beta chain variable domain of TCR clone 151370 (TRBV7-6, TRBJ2-5)
CASSPGLADPWGETQYF

SEQ ID NO: 302741 - protein, 14 aa, Homo sapiens
  CDR3 for alpha chain variable domain of TCR clone 151371 (TRAV2, TRAJ23)
CAVGLRNQGGELIF

SEQ ID NO: 302742 - protein, 15 aa, Homo sapiens
  CDR3 for beta chain variable domain of TCR clone 151371 (TRBV27, TRBJ2-1)
CASSNGGGSSNEQFF

SEQ ID NO: 302743 - protein, 11 aa, Homo sapiens
  CDR3 for alpha chain variable domain of TCR clone 151372 (TRAV16, TRAJ33)
CALHSNYQLIW

SEQ ID NO: 302744 - protein, 17 aa, Homo sapiens
  CDR3 for beta chain variable domain of TCR clone 151372 (TRBV5-1, TRBJ1-6)
CASSPSLQGSDNSPLHF

SEQ ID NO: 302745 - protein, 10 aa, Homo sapiens
  CDR3 for alpha chain variable domain of TCR clone 151373 (TRAV17, TRAJ36)
CATVAGNLFF

SEQ ID NO: 302746 - protein, 12 aa, Homo sapiens
  CDR3 for beta chain variable domain of TCR clone 151373 (TRBV11-2, TRBJ2-4)
CASSSASESEYF

SEQ ID NO: 302747 - protein, 18 aa, Homo sapiens
  CDR3 for alpha chain variable domain of TCR clone 151374 (TRAV3, TRAJ32)
CAVRDIRGYDGATNKLIF

SEQ ID NO: 302748 - protein, 15 aa, Homo sapiens
  CDR3 for beta chain variable domain of TCR clone 151374 (TRBV12-4, TRBJ2-2)
CASSLGVRHTGELFF

SEQ ID NO: 302749 - protein, 13 aa, Homo sapiens
  CDR3 for alpha chain variable domain of TCR clone 151375 (TRAV12-2, TRAJ39)
CAVNNNAGNMLTF

SEQ ID NO: 302750 - protein, 14 aa, Homo sapiens
  CDR3 for beta chain variable domain of TCR clone 151375 (TRBV19, TRBJ2-3)
CASSAPRGTDTQYF

SEQ ID NO: 302751 - protein, 11 aa, Homo sapiens
  CDR3 for alpha chain variable domain of TCR clone 151376 (TRAV2, TRAJ13)
CASGGYQKFTF

SEQ ID NO: 302752 - protein, 20 aa, Homo sapiens
  CDR3 for beta chain variable domain of TCR clone 151376 (TRBV28, TRBJ2-1)
CASTPIGRSPGLAGGNEQFF

SEQ ID NO: 302753 - protein, 14 aa, Homo sapiens
  CDR3 for alpha chain variable domain of TCR clone 151377 (TRAV12-2, TRAJ6)
CAVTVSGGSYIPTF

SEQ ID NO: 302754 - protein, 16 aa, Homo sapiens
  CDR3 for beta chain variable domain of TCR clone 151377 (TRBV7-3, TRBJ2-1)
CASSLEGYRSYNEQFF

SEQ ID NO: 302755 - protein, 15 aa, Homo sapiens
  CDR3 for alpha chain variable domain of TCR clone 151378 (TRAV8-1, TRAJ23)
CAVNSHYNQGGKLIF

SEQ ID NO: 302756 - protein, 14 aa, Homo sapiens
  CDR3 for beta chain variable domain of TCR clone 151378 (TRBV20-1, TRBJ2-1)
CSAQIGGSANEQFF

SEQ ID NO: 302757 - protein, 13 aa, Homo sapiens
  CDR3 for alpha chain variable domain of TCR clone 151379 (TRAV21, TRAJ57)
CAVTQGGSEKLVF

SEQ ID NO: 302758 - protein, 19 aa, Homo sapiens
  CDR3 for beta chain variable domain of TCR clone 151379 (TRBV29-1, TRBJ2-7)
SAALKMLRTVRPRSSTSGR

SEQ ID NO: 302759 - protein, 15 aa, Homo sapiens
  CDR3 for alpha chain variable domain of TCR clone 151380 (TRAV8-3, TRAJ13)
CAVAPNSGVTQKLPF

SEQ ID NO: 302760 - protein, 12 aa, Homo sapiens
  CDR3 for beta chain variable domain of TCR clone 151380 (TRBV19, TRBJ2-7)
CASTDRDYEQYF

SEQ ID NO: 302761 - protein, 16 aa, Homo sapiens
  CDR3 for alpha chain variable domain of TCR clone 151381 (TRAV30, TRAJ24)
CGTEIVDADSWGKFQF

SEQ ID NO: 302762 - protein, 11 aa, Homo sapiens
  CDR3 for beta chain variable domain of TCR clone 151381 (TRBV7-9, TRBJ2-3)
CASSYTDTQYF

SEQ ID NO: 302763 - protein, 17 aa, Homo sapiens
  CDR3 for alpha chain variable domain of TCR clone 151382 (TRAV3, TRAJ16)
CAVRDENQMARSCSLQG

SEQ ID NO: 302764 - protein, 15 aa, Homo sapiens
  CDR3 for beta chain variable domain of TCR clone 151382 (TRBV28, TRBJ2-7)
CASSPGGRGFYEQYF

SEQ ID NO: 302765 - protein, 13 aa, Homo sapiens
  CDR3 for alpha chain variable domain of TCR clone 151383 (TRAV27, TRAJ40)
CAGPPSGTDKYIF

SEQ ID NO: 302766 - protein, 13 aa, Homo sapiens
  CDR3 for beta chain variable domain of TCR clone 151383 (TRBV28, TRBJ1-2)
CAGRDRGNYGYTF

SEQ ID NO: 302767 - protein, 13 aa, Homo sapiens
  CDR3 for alpha chain variable domain of TCR clone 151384 (TRAV2, TRAJ20)
CAVEDTSEYKLSF

SEQ ID NO: 302768 - protein, 16 aa, Homo sapiens
  CDR3 for beta chain variable domain of TCR clone 151384 (TRBV25-1, TRBJ2-7)
CASSELTGGGIYEQYF

SEQ ID NO: 302769 - protein, 12 aa, Homo sapiens
  CDR3 for alpha chain variable domain of TCR clone 151385 (TRAV29/DV5, TRAJ34)
CAASGNTDKLIF

SEQ ID NO: 302770 - protein, 16 aa, Homo sapiens
  CDR3 for beta chain variable domain of TCR clone 151385 (TRBV11-2, TRBJ2-7)
CAGSPTTGGVSYKQYF

SEQ ID NO: 302771 - protein, 14 aa, Homo sapiens
  CDR3 for alpha chain variable domain of TCR clone 151386 (TRAV1-2, TRAJ8)
CAVREDTGFQKLVF

SEQ ID NO: 302772 - protein, 17 aa, Homo sapiens
  CDR3 for beta chain variable domain of TCR clone 151386 (TRBV6-3, TRBJ2-7)
CASSSPGTVFYSNTSGR

SEQ ID NO: 302773 - protein, 18 aa, Homo sapiens
  CDR3 for alpha chain variable domain of TCR clone 151387 (TRAV9-2, TRAJ52)
CALSRHIAGGTSYGKLTF

SEQ ID NO: 302774 - protein, 13 aa, Homo sapiens
  CDR3 for beta chain variable domain of TCR clone 151387 (TRBV7-9, TRBJ1-2)
CASSLKQNYGYTF

SEQ ID NO: 302775 - protein, 14 aa, Homo sapiens
  CDR3 for alpha chain variable domain of TCR clone 151388 (TRAV1-2, TRAJ8)
CAVREDTGFQKLVF

SEQ ID NO: 302776 - protein, 13 aa, Homo sapiens
  CDR3 for beta chain variable domain of TCR clone 151388 (TRBV19, TRBJ1-2)
CASSVPGQDGYSF

SEQ ID NO: 302777 - protein, 14 aa, Homo sapiens
  CDR3 for alpha chain variable domain of TCR clone 151389 (TRAV29/DV5, TRAJ36)
CAARRKTGANILFF

SEQ ID NO: 302778 - protein, 12 aa, Homo sapiens
  CDR3 for beta chain variable domain of TCR clone 151389 (TRBV12-5, TRBJ2-5)
CASGQGVETQYF

SEQ ID NO: 302779 - protein, 11 aa, Homo sapiens
  CDR3 for alpha chain variable domain of TCR clone 151390 (TRAV12-2, TRAJ49)
CAVHTGNQFYF

SEQ ID NO: 302780 - protein, 13 aa, Homo sapiens
  CDR3 for beta chain variable domain of TCR clone 151390 (TRBV11-2, TRBJ2-5)
CASSSTGEETQYF

SEQ ID NO: 302781 - protein, 14 aa, Homo sapiens
  CDR3 for alpha chain variable domain of TCR clone 151391 (TRAV29/DV5, TRAJ48)
CAAMALFGHEKLTF

SEQ ID NO: 302782 - protein, 15 aa, Homo sapiens
  CDR3 for beta chain variable domain of TCR clone 151391 (TRBV7-2, TRBJ2-1)
CASTHGTGIYNEQFL

SEQ ID NO: 302783 - protein, 13 aa, Homo sapiens
  CDR3 for alpha chain variable domain of TCR clone 151392 (TRAV21, TRAJ57)
GAVTQGGSEKLVF

SEQ ID NO: 302784 - protein, 17 aa, Homo sapiens
  CDR3 for beta chain variable domain of TCR clone 151392 (TRBV10-3, TRBJ2-6)
CAISERAESSGANVLTF

SEQ ID NO: 302785 - protein, 15 aa, Homo sapiens
  CDR3 for alpha chain variable domain of TCR clone 151393 (TRAV3, TRAJ22)
CSVRDRGGSARQLTF

SEQ ID NO: 302786 - protein, 13 aa, Homo sapiens
  CDR3 for beta chain variable domain of TCR clone 151393 (TRBV7-3, TRBJ2-1)
CASSPVAYNEQFF

SEQ ID NO: 302787 - protein, 13 aa, Homo sapiens
  CDR3 for alpha chain variable domain of TCR clone 151394 (TRAV8-3, TRAJ36)
CAVGATGANNLFF

SEQ ID NO: 302788 - protein, 15 aa, Homo sapiens
  CDR3 for beta chain variable domain of TCR clone 151394 (TRBV7-2, TRBJ2-1)
CASSSRTSREDEQFF

SEQ ID NO: 302789 - protein, 14 aa, Homo sapiens
  CDR3 for alpha chain variable domain of TCR clone 151395 (TRAV35, TRAJ50)
CAGHRKTSYDKVIF

SEQ ID NO: 302790 - protein, 11 aa, Homo sapiens
  CDR3 for beta chain variable domain of TCR clone 151395 (TRBV7-9, TRBJ2-5)
CASSLGETQYF

SEQ ID NO: 302791 - protein, 14 aa, Homo sapiens
  CDR3 for alpha chain variable domain of TCR clone 151396 (TRAV12-2, TRAJ5)
CAMNRSTGRRALTF

SEQ ID NO: 302792 - protein, 12 aa, Homo sapiens
  CDR3 for beta chain variable domain of TCR clone 151396 (TRBV19, TRBJ1-5)
CASSIAQQPQHF

SEQ ID NO: 302793 - protein, 16 aa, Homo sapiens
  CDR3 for alpha chain variable domain of TCR clone 151397 (TRAV4, TRAJ5)
CLVGPDHGHGQESTYF

SEQ ID NO: 302794 - protein, 13 aa, Homo sapiens
  CDR3 for beta chain variable domain of TCR clone 151397 (TRBV4-2, TRBJ1-2)
CASSLSASVGYTF

SEQ ID NO: 302795 - protein, 14 aa, Homo sapiens
  CDR3 for alpha chain variable domain of TCR clone 151398 (TRAV13-1, TRAJ35)
CAASKGGFGNVLHC

SEQ ID NO: 302796 - protein, 18 aa, Homo sapiens
  CDR3 for beta chain variable domain of TCR clone 151398 (TRBV7-3, TRBJ2-3)
CASSSTGTYPGSTDTQYF

SEQ ID NO: 302797 - protein, 12 aa, Homo sapiens
  CDR3 for alpha chain variable domain of TCR clone 151399 (TRAV13-2, TRAJ23)
CAERHRGGKLIF

SEQ ID NO: 302798 - protein, 13 aa, Homo sapiens
  CDR3 for beta chain variable domain of TCR clone 151399 (TRBV6-4, TRBJ1-5)
CASSADLNQPQHF

SEQ ID NO: 302799 - protein, 12 aa, Homo sapiens
  CDR3 for alpha chain variable domain of TCR clone 151400 (TRAV13-2, TRAJ23)
CAERHRGGKLIF

SEQ ID NO: 302800 - protein, 13 aa, Homo sapiens
  CDR3 for beta chain variable domain of TCR clone 151400 (TRBV19, TRBJ2-2)
CASSIWSTGELFF

SEQ ID NO: 302801 - protein, 17 aa, Homo sapiens
  CDR3 for alpha chain variable domain of TCR clone 151401 (TRAV4, TRAJ42)
CRVGVLNYGGSQGNLIF

SEQ ID NO: 302802 - protein, 12 aa, Homo sapiens
  CDR3 for beta chain variable domain of TCR clone 151401 (TRBV20-1, TRBJ2-1)
CSAQYTYNEQFF

SEQ ID NO: 302803 - protein, 12 aa, Homo sapiens
  CDR3 for alpha chain variable domain of TCR clone 151402 (TRAV13-1, TRAJ40)
CAANSGTYKYTF

SEQ ID NO: 302804 - protein, 13 aa, Homo sapiens
  CDR3 for beta chain variable domain of TCR clone 151402 (TRBV6-1, TRBJ1-2)
CASSELTGYGYTF

SEQ ID NO: 302805 - protein, 13 aa, Homo sapiens
  CDR3 for alpha chain variable domain of TCR clone 151403 (TRAV12-2, TRAJ18)
CAVRGSTLGRLYF

SEQ ID NO: 302806 - protein, 17 aa, Homo sapiens
  CDR3 for beta chain variable domain of TCR clone 151403 (TRBV5-1, TRBJ2-5)
CASSLLGLAANQETQYF

SEQ ID NO: 302807 - protein, 12 aa, Homo sapiens
  CDR3 for alpha chain variable domain of TCR clone 151404 (TRAV13-1, TRAJ21)
CAAKEGFNKFYF

SEQ ID NO: 302808 - protein, 15 aa, Homo sapiens
  CDR3 for beta chain variable domain of TCR clone 151404 (TRBV15, TRBJ1-5)
CATSRDPVSDQPQHF

SEQ ID NO: 302809 - protein, 16 aa, Homo sapiens
  CDR3 for alpha chain variable domain of TCR clone 151405 (TRAV30, TRAJ24)
CGTELVDADSWGEFPF

SEQ ID NO: 302810 - protein, 16 aa, Homo sapiens
  CDR3 for beta chain variable domain of TCR clone 151405 (TRBV4-1, TRBJ2-7)
CASSQEGTASSYEQYF

SEQ ID NO: 302811 - protein, 12 aa, Homo sapiens
  CDR3 for alpha chain variable domain of TCR clone 151406 (TRAV1-1, TRAJ9)
CAVDTGGFKTIF

SEQ ID NO: 302812 - protein, 16 aa, Homo sapiens
  CDR3 for beta chain variable domain of TCR clone 151406 (TRBV28, TRBJ2-7)
CASSRPRDRPSYEQYF

SEQ ID NO: 302813 - protein, 14 aa, Homo sapiens
  CDR3 for alpha chain variable domain of TCR clone 151407 (TRAV12-2, TRAJ40)
CAVKIPSGTYKYIF

SEQ ID NO: 302814 - protein, 16 aa, Homo sapiens
  CDR3 for beta chain variable domain of TCR clone 151407 (TRBV12-4, TRBJ2-3)
CTSVPAVEGSTDTQYF

SEQ ID NO: 302815 - protein, 15 aa, Homo sapiens
  CDR3 for alpha chain variable domain of TCR clone 151408 (TRAV12-1, TRAJ5)
CVVNMLETGRRALTF

SEQ ID NO: 302816 - protein, 16 aa, Homo sapiens
  CDR3 for beta chain variable domain of TCR clone 151408 (TRBV4-3, TRBJ2-1)
CASSPALDRGVNEQFF

SEQ ID NO: 302817 - protein, 15 aa, Homo sapiens
  CDR3 for alpha chain variable domain of TCR clone 151409 (TRAV12-3, TRAJ49)
CAMAVTPNTGNQFYF

SEQ ID NO: 302818 - protein, 18 aa, Homo sapiens
  CDR3 for beta chain variable domain of TCR clone 151409 (TRBV4-1, TRBJ1-5)
CASSQDPQGQGLNQPQHF

SEQ ID NO: 302819 - protein, 17 aa, Homo sapiens
  CDR3 for alpha chain variable domain of TCR clone 151410 (TRAV3, TRAJ38)
CAVRDCLNAGNNRKLLW

SEQ ID NO: 302820 - protein, 14 aa, Homo sapiens
  CDR3 for beta chain variable domain of TCR clone 151410 (TRBV5-5, TRBJ1-5)
CASSGQGVDQPQHF

SEQ ID NO: 302821 - protein, 20 aa, Homo sapiens
  CDR3 for alpha chain variable domain of TCR clone 151411 (TRAV8-3, TRAJ45)
LSTSVRWGSYSGGGADGLTF

SEQ ID NO: 302822 - protein, 11 aa, Homo sapiens
  CDR3 for beta chain variable domain of TCR clone 151411 (TRBV20-1, TRBJ2-5)
CSADRAETQYF

SEQ ID NO: 302823 - protein, 18 aa, Homo sapiens
  CDR3 for alpha chain variable domain of TCR clone 151412 (TRAV16, TRAJ45)
CAQASYPSSGGGADGLTF

SEQ ID NO: 302824 - protein, 14 aa, Homo sapiens
  CDR3 for beta chain variable domain of TCR clone 151412 (TRBV20-1, TRBJ2-2)
CSAPDTANTGELFF

SEQ ID NO: 302825 - protein, 14 aa, Homo sapiens
  CDR3 for alpha chain variable domain of TCR clone 151413 (TRAV21, TRAJ21)
CAVKGFGNFNKFYF

SEQ ID NO: 302826 - protein, 13 aa, Homo sapiens
  CDR3 for beta chain variable domain of TCR clone 151413 (TRBV18, TRBJ1-1)
CGSSPETKPEAFF

SEQ ID NO: 302827 - protein, 16 aa, Homo sapiens
  CDR3 for alpha chain variable domain of TCR clone 151414 (TRAV4, TRAJ22)
CLVGDLYSGSARQLTF

SEQ ID NO: 302828 - protein, 16 aa, Homo sapiens
  CDR3 for beta chain variable domain of TCR clone 151414 (TRBV7-9, TRBJ2-1)
CASSDVAGGSSNEQFF

SEQ ID NO: 302829 - protein, 16 aa, Homo sapiens
  CDR3 for alpha chain variable domain of TCR clone 151415 (TRAV23/DV6, TRAJ9)
CAASIGGNTGGFKTIF

SEQ ID NO: 302830 - protein, 16 aa, Homo sapiens
  CDR3 for beta chain variable domain of TCR clone 151415 (TRBV9, TRBJ2-3)
CASSGTSGKDTDTQYF

SEQ ID NO: 302831 - protein, 15 aa, Homo sapiens
  CDR3 for alpha chain variable domain of TCR clone 151416 (TRAV26-1, TRAJ29)
CIVRVEGSGNTPLVF

SEQ ID NO: 302832 - protein, 12 aa, Homo sapiens
  CDR3 for beta chain variable domain of TCR clone 151416 (TRBV11-2, TRBJ2-7)
CASSLPTYEQYF

SEQ ID NO: 302833 - protein, 16 aa, Homo sapiens
  CDR3 for alpha chain variable domain of TCR clone 151417 (TRAV13-1, TRAJ18)
CAASRMRGSTLGRLYF

SEQ ID NO: 302834 - protein, 16 aa, Homo sapiens
  CDR3 for beta chain variable domain of TCR clone 151417 (TRBV27, TRBJ1-1)
CASSSRGRTGYTESFF

SEQ ID NO: 302835 - protein, 15 aa, Homo sapiens
  CDR3 for alpha chain variable domain of TCR clone 151418 (TRAV3, TRAJ20)
CAVRDIKLSDYKLSF

SEQ ID NO: 302836 - protein, 12 aa, Homo sapiens
  CDR3 for beta chain variable domain of TCR clone 151418 (TRBV5-1, TRBJ1-1)
CASSLTGAEAFF

SEQ ID NO: 302837 - protein, 10 aa, Homo sapiens
  CDR3 for alpha chain variable domain of TCR clone 151419 (TRAV23/DV6, TRAJ45)
TGGGSDGLTF

SEQ ID NO: 302838 - protein, 15 aa, Homo sapiens
  CDR3 for beta chain variable domain of TCR clone 151419 (TRBV27, TRBJ2-1)
CASSNGGGSSNEQFF

SEQ ID NO: 302839 - protein, 14 aa, Homo sapiens
  CDR3 for alpha chain variable domain of TCR clone 151420 (TRAV8-4, TRAJ9)
CAVRINTGGFKTIF

SEQ ID NO: 302840 - protein, 10 aa, Homo sapiens
  CDR3 for beta chain variable domain of TCR clone 151420 (TRBV2, TRBJ2-5)
CASSAATQYF

SEQ ID NO: 302841 - protein, 15 aa, Homo sapiens
  CDR3 for alpha chain variable domain of TCR clone 151421 (TRAV2, TRAJ44)
CAVEAYTGTASNLTF

SEQ ID NO: 302842 - protein, 17 aa, Homo sapiens
  CDR3 for beta chain variable domain of TCR clone 151421 (TRBV12-4, TRBJ2-1)
CASSPGLAGGRINEQFF

SEQ ID NO: 302843 - protein, 15 aa, Homo sapiens
  CDR3 for alpha chain variable domain of TCR clone 151422 (TRAV23/DV6, TRAJ28)
CAASQGGAGSYQLTF

SEQ ID NO: 302844 - protein, 15 aa, Homo sapiens
  CDR3 for beta chain variable domain of TCR clone 151422 (TRBV7-9, TRBJ2-7)
CASSSSGLAVYEQYF

SEQ ID NO: 302845 - protein, 13 aa, Homo sapiens
  CDR3 for alpha chain variable domain of TCR clone 151423 (TRAV16, TRAJ9)
CALLNTGGFKTIF

SEQ ID NO: 302846 - protein, 12 aa, Homo sapiens
  CDR3 for beta chain variable domain of TCR clone 151423 (TRBV7-8, TRBJ2-7)
CASSLGDREQYF

SEQ ID NO: 302847 - protein, 14 aa, Homo sapiens
  CDR3 for alpha chain variable domain of TCR clone 151424 (TRAV8-3, TRAJ42)
CALGAWGSQGNLIF

SEQ ID NO: 302848 - protein, 15 aa, Homo sapiens
  CDR3 for beta chain variable domain of TCR clone 151424 (TRBV29-1, TRBJ1-2)
CSVVLEAGSNYGYTF

SEQ ID NO: 302849 - protein, 15 aa, Homo sapiens
  CDR3 for alpha chain variable domain of TCR clone 151425 (TRAV19, TRAJ45)
CALSALGGGADGLTF

SEQ ID NO: 302850 - protein, 15 aa, Homo sapiens
  CDR3 for beta chain variable domain of TCR clone 151425 (TRBV13, TRBJ1-5)
CASSLTGRGHQPQHF

SEQ ID NO: 302851 - protein, 16 aa, Homo sapiens
  CDR3 for alpha chain variable domain of TCR clone 151426 (TRAV4, TRAJ22)
CLVGDLYSGSARQLTF

SEQ ID NO: 302852 - protein, 16 aa, Homo sapiens
  CDR3 for beta chain variable domain of TCR clone 151426 (TRBV7-9, TRBJ2-1)
CASSDLAGGSYNEQFF

SEQ ID NO: 302853 - protein, 13 aa, Homo sapiens
  CDR3 for alpha chain variable domain of TCR clone 151427 (TRAV1-2, TRAJ9)
CAALNTGGFKTIF

SEQ ID NO: 302854 - protein, 12 aa, Homo sapiens
  CDR3 for beta chain variable domain of TCR clone 151427 (TRBV11-3, TRBJ1-1)
CARSHRQGEAFF

SEQ ID NO: 302855 - protein, 13 aa, Homo sapiens
  CDR3 for alpha chain variable domain of TCR clone 151428 (TRAV13-1, TRAJ5)
CAARVTGRRALTF

SEQ ID NO: 302856 - protein, 15 aa, Homo sapiens
  CDR3 for beta chain variable domain of TCR clone 151428 (TRBV7-9, TRBJ2-7)
CASSPGGGSTYEQYF

SEQ ID NO: 302857 - protein, 14 aa, Homo sapiens
  CDR3 for alpha chain variable domain of TCR clone 151429 (TRAV17, TRAJ22)
CATSPSGSARQLTF

SEQ ID NO: 302858 - protein, 13 aa, Homo sapiens
  CDR3 for beta chain variable domain of TCR clone 151429 (TRBV27, TRBJ1-1)
CASSLSIGAEAFF

SEQ ID NO: 302859 - protein, 12 aa, Homo sapiens
  CDR3 for alpha chain variable domain of TCR clone 151430 (TRAV12-1, TRAJ40)
CVVPSGTYKYIF

SEQ ID NO: 302860 - protein, 15 aa, Homo sapiens
  CDR3 for beta chain variable domain of TCR clone 151430 (TRBV12-4, TRBJ2-1)
CAGSPLSGGNSEQFF

SEQ ID NO: 302861 - protein, 21 aa, Homo sapiens
  CDR3 for alpha chain variable domain of TCR clone 151431 (TRAV4, TRAJ42)
CCVLLPVGVLNYGGSQGNLIF

SEQ ID NO: 302862 - protein, 12 aa, Homo sapiens
  CDR3 for beta chain variable domain of TCR clone 151431 (TRBV20-1, TRBJ2-1)
CSAQYAYNEQFF

SEQ ID NO: 302863 - protein, 22 aa, Homo sapiens
  CDR3 for alpha chain variable domain of TCR clone 151432 (TRAV8-2, TRAJ45)
HLTKPSAHMSDAAEYSADGLTF

SEQ ID NO: 302864 - protein, 13 aa, Homo sapiens
  CDR3 for beta chain variable domain of TCR clone 151432 (TRBV27, TRBJ2-1)
CASRTLGVGEQFF

SEQ ID NO: 302865 - protein, 11 aa, Homo sapiens
  CDR3 for alpha chain variable domain of TCR clone 151433 (TRAV29/DV5, TRAJ31)
CSASYRDRLMF

SEQ ID NO: 302866 - protein, 19 aa, Homo sapiens
  CDR3 for beta chain variable domain of TCR clone 151433 (TRBV19, TRBJ2-5)
CASSIGQVTDFFLGETQYF

SEQ ID NO: 302867 - protein, 13 aa, Homo sapiens
  CDR3 for alpha chain variable domain of TCR clone 151434 (TRAV8-3, TRAJ28)
CAVGAVGSYKLTF

SEQ ID NO: 302868 - protein, 14 aa, Homo sapiens
  CDR3 for beta chain variable domain of TCR clone 151434 (TRBV7-2, TRBJ2-7)
CASRSQGAGYEQYF

SEQ ID NO: 302869 - protein, 13 aa, Homo sapiens
  CDR3 for alpha chain variable domain of TCR clone 151435 (TRAV35, TRAJ40)
CAGQLSGPYKYIF

SEQ ID NO: 302870 - protein, 14 aa, Homo sapiens
  CDR3 for beta chain variable domain of TCR clone 151435 (TRBV3-1, TRBJ2-5)
CASSLQLAGETQYF

SEQ ID NO: 302871 - protein, 13 aa, Homo sapiens
  CDR3 for alpha chain variable domain of TCR clone 151436 (TRAV29/DV5, TRAJ44)
CAANTGTASKLTF

SEQ ID NO: 302872 - protein, 11 aa, Homo sapiens
  CDR3 for beta chain variable domain of TCR clone 151436 (TRBV12-4, TRBJ2-3)
CASTATDTQYF

SEQ ID NO: 302873 - protein, 13 aa, Homo sapiens
  CDR3 for alpha chain variable domain of TCR clone 151437 (TRAV12-3, TRAJ33)
CAMSVNSNYQLIW

SEQ ID NO: 302874 - protein, 15 aa, Homo sapiens
  CDR3 for beta chain variable domain of TCR clone 151437 (TRBV20-1, TRBJ2-7)
CSARGFRPQTYEQYF

SEQ ID NO: 302875 - protein, 14 aa, Homo sapiens
  CDR3 for alpha chain variable domain of TCR clone 151438 (TRAV9-2, TRAJ39)
CALYIYNAGNMLTF

SEQ ID NO: 302876 - protein, 14 aa, Homo sapiens
  CDR3 for beta chain variable domain of TCR clone 151438 (TRBV10-3, TRBJ1-2)
CAISAGGRVDGYTF

SEQ ID NO: 302877 - protein, 22 aa, Homo sapiens
  CDR3 for alpha chain variable domain of TCR clone 151439 (TRAV27, TRAJ38)
CAARRNAGNNPIQNPDPAVYQL

SEQ ID NO: 302878 - protein, 13 aa, Homo sapiens
  CDR3 for beta chain variable domain of TCR clone 151439 (TRBV12-5, TRBJ2-3)
CASGDRQSDTQYF

SEQ ID NO: 302879 - protein, 21 aa, Homo sapiens
  CDR3 for alpha chain variable domain of TCR clone 151440 (TRAV1-1, TRAJ6)
CLLLLRCERLERTGGSCIPTF

SEQ ID NO: 302880 - protein, 15 aa, Homo sapiens
  CDR3 for beta chain variable domain of TCR clone 151440 (TRBV7-2, TRBJ2-3)
CASSLVVRGPDTQYF

SEQ ID NO: 302881 - protein, 12 aa, Homo sapiens
  CDR3 for alpha chain variable domain of TCR clone 151441 (TRAV2, TRAJ9)
CAVGAGGFKTIF

SEQ ID NO: 302882 - protein, 14 aa, Homo sapiens
  CDR3 for beta chain variable domain of TCR clone 151441 (TRBV28, TRBJ1-5)
CASSGQALYQPQHF

SEQ ID NO: 302883 - protein, 14 aa, Homo sapiens
  CDR3 for alpha chain variable domain of TCR clone 151442 (TRAV12-2, TRAJ48)
FAVNAFFGDEKLTF

SEQ ID NO: 302884 - protein, 13 aa, Homo sapiens
  CDR3 for beta chain variable domain of TCR clone 151442 (TRBV28, TRBJ2-7)
CAGAQQGLDEQYF

SEQ ID NO: 302885 - protein, 13 aa, Homo sapiens
  CDR3 for alpha chain variable domain of TCR clone 151443 (TRAV39, TRAJ48)
CAAANFGNEKLTF

SEQ ID NO: 302886 - protein, 12 aa, Homo sapiens
  CDR3 for beta chain variable domain of TCR clone 151443 (TRBV12-4, TRBJ2-1)
CASSLQGSEQFF

SEQ ID NO: 302887 - protein, 15 aa, Homo sapiens
  CDR3 for alpha chain variable domain of TCR clone 151444 (TRAV12-3, TRAJ6)
CAMSATTGGSYIPTF

SEQ ID NO: 302888 - protein, 13 aa, Homo sapiens
  CDR3 for beta chain variable domain of TCR clone 151444 (TRBV2, TRBJ2-7)
CASSVGGSGEQYF

SEQ ID NO: 302889 - protein, 14 aa, Homo sapiens
  CDR3 for alpha chain variable domain of TCR clone 151445 (TRAV23/DV6, TRAJ40)
CAASLTSGTYKYIF

SEQ ID NO: 302890 - protein, 14 aa, Homo sapiens
  CDR3 for beta chain variable domain of TCR clone 151445 (TRBV5-1, TRBJ2-3)
CGSSRGQGGGTQYF

SEQ ID NO: 302891 - protein, 19 aa, Homo sapiens
  CDR3 for alpha chain variable domain of TCR clone 151446 (TRAV27, TRAJ53)
PLPLCRAINSGGSNYKLTF

SEQ ID NO: 302892 - protein, 14 aa, Homo sapiens
  CDR3 for beta chain variable domain of TCR clone 151446 (TRBV7-3, TRBJ2-1)
CASSLAGGTNEQFF

SEQ ID NO: 302893 - protein, 13 aa, Homo sapiens
  CDR3 for alpha chain variable domain of TCR clone 151447 (TRAV13-2, TRAJ40)
CAEFTSGTYKYIF

SEQ ID NO: 302894 - protein, 12 aa, Homo sapiens
  CDR3 for beta chain variable domain of TCR clone 151447 (TRBV11-2, TRBJ2-2)
CASSLGGGELFC

SEQ ID NO: 302895 - protein, 16 aa, Homo sapiens
  CDR3 for alpha chain variable domain of TCR clone 151448 (TRAV30, TRAJ24)
CGTEIVDADSWGKFQF

SEQ ID NO: 302896 - protein, 14 aa, Homo sapiens
  CDR3 for beta chain variable domain of TCR clone 151448 (TRBV7-7, TRBJ2-7)
CASSLGRGVGEQYF

SEQ ID NO: 302897 - protein, 15 aa, Homo sapiens
  CDR3 for alpha chain variable domain of TCR clone 151449 (TRAV35, TRAJ50)
CAGELRKTSYDKVIF

SEQ ID NO: 302898 - protein, 12 aa, Homo sapiens
  CDR3 for beta chain variable domain of TCR clone 151449 (TRBV5-1, TRBJ2-5)
CASSLGLETQYF

SEQ ID NO: 302899 - protein, 14 aa, Homo sapiens
  CDR3 for alpha chain variable domain of TCR clone 151450 (TRAV17, TRAJ32)
CATDPGGATNKLIF

SEQ ID NO: 302900 - protein, 17 aa, Homo sapiens
  CDR3 for beta chain variable domain of TCR clone 151450 (TRBV11-2, TRBJ2-1)
CASSLYPPGVEYNEQFF

SEQ ID NO: 302901 - protein, 15 aa, Homo sapiens
  CDR3 for alpha chain variable domain of TCR clone 151451 (TRAV2, TRAJ13)
CATPSYSGGYQIVTF

SEQ ID NO: 302902 - protein, 14 aa, Homo sapiens
  CDR3 for beta chain variable domain of TCR clone 151451 (TRBV27, TRBJ2-2)
CASSLGAAAGELFF

SEQ ID NO: 302903 - protein, 12 aa, Homo sapiens
  CDR3 for alpha chain variable domain of TCR clone 151452 (TRAV20, TRAJ39)
CAVGNAGNMLTF

SEQ ID NO: 302904 - protein, 17 aa, Homo sapiens
  CDR3 for beta chain variable domain of TCR clone 151452 (TRBV4-1, TRBJ2-3)
CASSQRYVSGGTDTQYF

SEQ ID NO: 302905 - protein, 13 aa, Homo sapiens
  CDR3 for alpha chain variable domain of TCR clone 151453 (TRAV13-1, TRAJ5)
CAASDTGRRALTF

SEQ ID NO: 302906 - protein, 16 aa, Homo sapiens
  CDR3 for beta chain variable domain of TCR clone 151453 (TRBV12-4, TRBJ1-5)
CASSRPVGGSNQPQHF

SEQ ID NO: 302907 - protein, 15 aa, Homo sapiens
  CDR3 for alpha chain variable domain of TCR clone 151454 (TRAV3, TRAJ5)
GAGRDLDTGRRALTF

SEQ ID NO: 302908 - protein, 13 aa, Homo sapiens
  CDR3 for beta chain variable domain of TCR clone 151454 (TRBV12-4, TRBJ2-7)
CASSPTETYEQYF

SEQ ID NO: 302909 - protein, 11 aa, Homo sapiens
  CDR3 for alpha chain variable domain of TCR clone 151455 (TRAV3, TRAJ21)
CAVGNFNKFYF

SEQ ID NO: 302910 - protein, 16 aa, Homo sapiens
  CDR3 for beta chain variable domain of TCR clone 151455 (TRBV19, TRBJ2-1)
CASSKAGPSSTMSSPS

SEQ ID NO: 302911 - protein, 16 aa, Homo sapiens
  CDR3 for alpha chain variable domain of TCR clone 151456 (TRAV8-3, TRAJ8)
CAVPRDGNTGFQKLVF

SEQ ID NO: 302912 - protein, 14 aa, Homo sapiens
  CDR3 for beta chain variable domain of TCR clone 151456 (TRBV28, TRBJ1-5)
CASSLFPGVQPQHF

SEQ ID NO: 302913 - protein, 17 aa, Homo sapiens
  CDR3 for alpha chain variable domain of TCR clone 151457 (TRAV3, TRAJ6)
CAVRDGPRAGGSYIPTF

SEQ ID NO: 302914 - protein, 15 aa, Homo sapiens
  CDR3 for beta chain variable domain of TCR clone 151457 (TRBV11-3, TRBJ2-7)
CPSSPGPASSYEQYF

SEQ ID NO: 302915 - protein, 14 aa, Homo sapiens
  CDR3 for alpha chain variable domain of TCR clone 151458 (TRAV2, TRAJ37)
SAVDFTSNTGKLIF

SEQ ID NO: 302916 - protein, 16 aa, Homo sapiens
  CDR3 for beta chain variable domain of TCR clone 151458 (TRBV7-9, TRBJ2-3)
CASSLDYPDLTDTQYF

SEQ ID NO: 302917 - protein, 13 aa, Homo sapiens
  CDR3 for alpha chain variable domain of TCR clone 151459 (TRAV2, TRAJ40)
CAVVTSGTYKYIF

SEQ ID NO: 302918 - protein, 16 aa, Homo sapiens
  CDR3 for beta chain variable domain of TCR clone 151459 (TRBV7-3, TRBJ2-1)
CASSLSSGGGAKEQFF

SEQ ID NO: 302919 - protein, 13 aa, Homo sapiens
  CDR3 for alpha chain variable domain of TCR clone 151460 (TRAV20, TRAJ29)
CAVQAVGNTPLVF

SEQ ID NO: 302920 - protein, 19 aa, Homo sapiens
  CDR3 for beta chain variable domain of TCR clone 151460 (TRBV10-2, TRBJ2-5)
CASRGSGASRDPVLRARHA

SEQ ID NO: 302921 - protein, 17 aa, Homo sapiens
  CDR3 for alpha chain variable domain of TCR clone 151461 (TRAV29/DV5, TRAJ40)
YAASVIYTTSGTYKYIF

SEQ ID NO: 302922 - protein, 13 aa, Homo sapiens
  CDR3 for beta chain variable domain of TCR clone 151461 (TRBV6-1, TRBJ2-1)
CASSHDRNNEQFF

SEQ ID NO: 302923 - protein, 12 aa, Homo sapiens
  CDR3 for alpha chain variable domain of TCR clone 151462 (TRAV13-1, TRAJ48)
CAANFGNEKLTF

SEQ ID NO: 302924 - protein, 15 aa, Homo sapiens
  CDR3 for beta chain variable domain of TCR clone 151462 (TRBV7-6, TRBJ2-7)
CASSGRRDTFGEQYF

SEQ ID NO: 302925 - protein, 11 aa, Homo sapiens
  CDR3 for alpha chain variable domain of TCR clone 151463 (TRAV1-2, TRAJ31)
CAVYNNARLMF

SEQ ID NO: 302926 - protein, 14 aa, Homo sapiens
  CDR3 for beta chain variable domain of TCR clone 151463 (TRBV19, TRBJ2-1)
CASPTFVLSGEQFF

SEQ ID NO: 302927 - protein, 13 aa, Homo sapiens
  CDR3 for alpha chain variable domain of TCR clone 151464 (TRAV12-1, TRAJ26)
CVVIRNYGQNFVF

SEQ ID NO: 302928 - protein, 14 aa, Homo sapiens
  CDR3 for beta chain variable domain of TCR clone 151464 (TRBV7-2, TRBJ2-7)
CASRSQGAAYEQYF

SEQ ID NO: 302929 - protein, 14 aa, Homo sapiens
  CDR3 for alpha chain variable domain of TCR clone 151465 (TRAV14/DV4, TRAJ49)
CAMREGVNGNPFYF

SEQ ID NO: 302930 - protein, 14 aa, Homo sapiens
  CDR3 for beta chain variable domain of TCR clone 151465 (TRBV5-5, TRBJ2-7)
CASSLGLAVYEQYF

SEQ ID NO: 302931 - protein, 16 aa, Homo sapiens
  CDR3 for alpha chain variable domain of TCR clone 151466 (TRAV26-1, TRAJ48)
IASSDLSNFGNEKLTF

SEQ ID NO: 302932 - protein, 14 aa, Homo sapiens
  CDR3 for beta chain variable domain of TCR clone 151466 (TRBV5-1, TRBJ2-1)
CASSALWAGNEQFF

SEQ ID NO: 302933 - protein, 15 aa, Homo sapiens
  CDR3 for alpha chain variable domain of TCR clone 151467 (TRAV12-1, TRAJ44)
CVADLPTGTASKLTF

SEQ ID NO: 302934 - protein, 13 aa, Homo sapiens
  CDR3 for beta chain variable domain of TCR clone 151467 (TRBV6-1, TRBJ1-1)
CASSRQGNTEAFF

SEQ ID NO: 302935 - protein, 11 aa, Homo sapiens
  CDR3 for alpha chain variable domain of TCR clone 151468 (TRAV1-2, TRAJ40)
CAVPGTYKYIF

SEQ ID NO: 302936 - protein, 16 aa, Homo sapiens
  CDR3 for beta chain variable domain of TCR clone 151468 (TRBV29-1, TRBJ2-7)
CSVEVVGTSGCYEQYF

SEQ ID NO: 302937 - protein, 15 aa, Homo sapiens
  CDR3 for alpha chain variable domain of TCR clone 151469 (TRAV12-2, TRAJ23)
CAVKPIYNQGGKLIF

SEQ ID NO: 302938 - protein, 14 aa, Homo sapiens
  CDR3 for beta chain variable domain of TCR clone 151469 (TRBV7-2, TRBJ2-7)
CASSPKTSFYEQYF

SEQ ID NO: 302939 - protein, 14 aa, Homo sapiens
  CDR3 for alpha chain variable domain of TCR clone 151470 (TRAV1-2, TRAJ16)
CAVNRFSDGQKLLF

SEQ ID NO: 302940 - protein, 16 aa, Homo sapiens
  CDR3 for beta chain variable domain of TCR clone 151470 (TRBV7-2, TRBJ2-7)
CASSLDVSGGAYEQYF

SEQ ID NO: 302941 - protein, 23 aa, Homo sapiens
  CDR3 for alpha chain variable domain of TCR clone 151471 (TRAV1-1, TRAJ11)
LLQELQMKDSASYFCAGYSTLTF

SEQ ID NO: 302942 - protein, 15 aa, Homo sapiens
  CDR3 for beta chain variable domain of TCR clone 151471 (TRBV6-5, TRBJ2-1)
CASRGDFDSYNQQFF

SEQ ID NO: 302943 - protein, 14 aa, Homo sapiens
  CDR3 for alpha chain variable domain of TCR clone 151472 (TRAV23/DV6, TRAJ37)
CAASTSSNTGNLIF

SEQ ID NO: 302944 - protein, 15 aa, Homo sapiens
  CDR3 for beta chain variable domain of TCR clone 151472 (TRBV20-1, TRBJ2-7)
CSARDRVSGMDEQYF

SEQ ID NO: 302945 - protein, 16 aa, Homo sapiens
  CDR3 for alpha chain variable domain of TCR clone 151473 (TRAV17, TRAJ28)
CATASVSGAGSYQLTF

SEQ ID NO: 302946 - protein, 11 aa, Homo sapiens
  CDR3 for beta chain variable domain of TCR clone 151473 (TRBV7-9, TRBJ2-5)
RASSLGEAQYF

SEQ ID NO: 302947 - protein, 16 aa, Homo sapiens
  CDR3 for alpha chain variable domain of TCR clone 151474 (TRAV12-3, TRAJ53)
CAMSPGSGGSNYKLTF

SEQ ID NO: 302948 - protein, 13 aa, Homo sapiens
  CDR3 for beta chain variable domain of TCR clone 151474 (TRBV5-1, TRBJ2-1)
CASRPFGYNEQFF

SEQ ID NO: 302949 - protein, 15 aa, Homo sapiens
  CDR3 for alpha chain variable domain of TCR clone 151475 (TRAV38-2/DV8, TRAJ48)
CAYRSGGFGNEKLTF

SEQ ID NO: 302950 - protein, 16 aa, Homo sapiens
  CDR3 for beta chain variable domain of TCR clone 151475 (TRBV28, TRBJ2-7)
CASSPWVATGDHSQYF

SEQ ID NO: 302951 - protein, 15 aa, Homo sapiens
  CDR3 for alpha chain variable domain of TCR clone 151476 (TRAV13-2, TRAJ5)
CAENSHWTGRRALTF

SEQ ID NO: 302952 - protein, 16 aa, Homo sapiens
  CDR3 for beta chain variable domain of TCR clone 151476 (TRBV7-9, TRBJ1-3)
CASSQTSGLRMGTMYF

SEQ ID NO: 302953 - protein, 13 aa, Homo sapiens
  CDR3 for alpha chain variable domain of TCR clone 151477 (TRAV8-4, TRAJ39)
STPPSEAGNMLTF

SEQ ID NO: 302954 - protein, 13 aa, Homo sapiens
  CDR3 for beta chain variable domain of TCR clone 151477 (TRBV12-4, TRBJ2-7)
CASSPTETYEQYF

SEQ ID NO: 302955 - protein, 12 aa, Homo sapiens
  CDR3 for alpha chain variable domain of TCR clone 151478 (TRAV13-2, TRAJ23)
CAERHRGGKLIF

SEQ ID NO: 302956 - protein, 15 aa, Homo sapiens
  CDR3 for beta chain variable domain of TCR clone 151478 (TRBV9, TRBJ1-6)
CASSVAGTGDSPFHF

SEQ ID NO: 302957 - protein, 14 aa, Homo sapiens
  CDR3 for alpha chain variable domain of TCR clone 151479 (TRAV12-3, TRAJ11)
CAMTTNSGYSTLTF

SEQ ID NO: 302958 - protein, 13 aa, Homo sapiens
  CDR3 for beta chain variable domain of TCR clone 151479 (TRBV19, TRBJ2-7)
CASSIDRTYEQYF

SEQ ID NO: 302959 - protein, 13 aa, Homo sapiens
  CDR3 for alpha chain variable domain of TCR clone 151480 (TRAV12-3, TRAJ43)
CAMIRPNNNDMRF

SEQ ID NO: 302960 - protein, 11 aa, Homo sapiens
  CDR3 for beta chain variable domain of TCR clone 151480 (TRBV11-2, TRBJ2-5)
CSSLGQETQYF

SEQ ID NO: 302961 - protein, 16 aa, Homo sapiens
  CDR3 for alpha chain variable domain of TCR clone 151481 (TRAV26-1, TRAJ36)
CIVRVSYQTGANNLFF

SEQ ID NO: 302962 - protein, 17 aa, Homo sapiens
  CDR3 for beta chain variable domain of TCR clone 151481 (TRBV7-6, TRBJ2-1)
CASSFGLAGGTYNEQFF

SEQ ID NO: 302963 - protein, 14 aa, Homo sapiens
  CDR3 for alpha chain variable domain of TCR clone 151482 (TRAV8-4, TRAJ16)
CAVSPVGRWPEAGL

SEQ ID NO: 302964 - protein, 14 aa, Homo sapiens
  CDR3 for beta chain variable domain of TCR clone 151482 (TRBV23-1, TRBJ2-5)
CASSFLRSQETQYF

SEQ ID NO: 302965 - protein, 14 aa, Homo sapiens
  CDR3 for alpha chain variable domain of TCR clone 151483 (TRAV12-2, TRAJ13)
CAVKKTCVDQKVTF

SEQ ID NO: 302966 - protein, 16 aa, Homo sapiens
  CDR3 for beta chain variable domain of TCR clone 151483 (TRBV4-2, TRBJ2-4)
CASSQELRRAKNIQYF

SEQ ID NO: 302967 - protein, 14 aa, Homo sapiens
  CDR3 for alpha chain variable domain of TCR clone 151484 (TRAV1-2, TRAJ16)
CAVNRCSDGQKLLF

SEQ ID NO: 302968 - protein, 13 aa, Homo sapiens
  CDR3 for beta chain variable domain of TCR clone 151484 (TRBV19, TRBJ2-7)
CASSTSGSYEQYF

SEQ ID NO: 302969 - protein, 14 aa, Homo sapiens
  CDR3 for alpha chain variable domain of TCR clone 151485 (TRAV17, TRAJ34)
CATDSLEGTDKLIF

SEQ ID NO: 302970 - protein, 14 aa, Homo sapiens
  CDR3 for beta chain variable domain of TCR clone 151485 (TRBV7-2, TRBJ2-7)
CASRSQGAAYEQYI

SEQ ID NO: 302971 - protein, 16 aa, Homo sapiens
  CDR3 for alpha chain variable domain of TCR clone 151486 (TRAV27, TRAJ53)
CAAPEGSGGSNYKLTF

SEQ ID NO: 302972 - protein, 15 aa, Homo sapiens
  CDR3 for beta chain variable domain of TCR clone 151486 (TRBV25-1, TRBJ1-4)
CASSPGDSTNEKLFF

SEQ ID NO: 302973 - protein, 14 aa, Homo sapiens
  CDR3 for alpha chain variable domain of TCR clone 151487 (TRAV26-1, TRAJ22)
CIVRVYGFARQLTF

SEQ ID NO: 302974 - protein, 17 aa, Homo sapiens
  CDR3 for beta chain variable domain of TCR clone 151487 (TRBV7-3, TRBJ2-3)
CASSPGGLAGFGDTQYF

SEQ ID NO: 302975 - protein, 23 aa, Homo sapiens
  CDR3 for alpha chain variable domain of TCR clone 151488 (TRAV30, TRAJ43)
CTLRPPSSVTQEPTSAALSDMRF

SEQ ID NO: 302976 - protein, 13 aa, Homo sapiens
  CDR3 for beta chain variable domain of TCR clone 151488 (TRBV15, TRBJ1-6)
CATSGGLNSPLHF

SEQ ID NO: 302977 - protein, 11 aa, Homo sapiens
  CDR3 for alpha chain variable domain of TCR clone 151489 (TRAV38-1, TRAJ43)
CAFMKHNTGRH

SEQ ID NO: 302978 - protein, 11 aa, Homo sapiens
  CDR3 for beta chain variable domain of TCR clone 151489 (TRBV7-9, TRBJ2-3)
CASSYTDTQYF

SEQ ID NO: 302979 - protein, 11 aa, Homo sapiens
  CDR3 for alpha chain variable domain of TCR clone 151490 (TRAV8-3, TRAJ3)
CAATLKQCFQD

SEQ ID NO: 302980 - protein, 12 aa, Homo sapiens
  CDR3 for beta chain variable domain of TCR clone 151490 (TRBV5-1, TRBJ1-2)
CASSQDTYGYAF

SEQ ID NO: 302981 - protein, 16 aa, Homo sapiens
  CDR3 for alpha chain variable domain of TCR clone 151491 (TRAV26-1, TRAJ48)
IASSDLSNFGNEELTF

SEQ ID NO: 302982 - protein, 14 aa, Homo sapiens
  CDR3 for beta chain variable domain of TCR clone 151491 (TRBV13, TRBJ2-7)
CASSLKGASYEQYF

SEQ ID NO: 302983 - protein, 13 aa, Homo sapiens
  CDR3 for alpha chain variable domain of TCR clone 151492 (TRAV8-3, TRAJ12)
WVLRMDSSYKLIF

SEQ ID NO: 302984 - protein, 14 aa, Homo sapiens
  CDR3 for beta chain variable domain of TCR clone 151492 (TRBV28, TRBJ2-1)
CASSLNGRNNEQFF

SEQ ID NO: 302985 - protein, 10 aa, Homo sapiens
  CDR3 for alpha chain variable domain of TCR clone 151493 (TRAV23/DV6, TRAJ57)
CAASSTLSQG

SEQ ID NO: 302986 - protein, 11 aa, Homo sapiens
  CDR3 for beta chain variable domain of TCR clone 151493 (TRBV29-1, TRBJ2-5)
CSEDRTGTQYF

SEQ ID NO: 302987 - protein, 12 aa, Homo sapiens
  CDR3 for alpha chain variable domain of TCR clone 151494 (TRAV8-3, TRAJ20)
CAVGANDYKLSF

SEQ ID NO: 302988 - protein, 13 aa, Homo sapiens
  CDR3 for beta chain variable domain of TCR clone 151494 (TRBV6-1, TRBJ1-1)
CASSRQGNTEAFF

SEQ ID NO: 302989 - protein, 15 aa, Homo sapiens
  CDR3 for alpha chain variable domain of TCR clone 151495 (TRAV13-1, TRAJ15)
CAASIERQAGTALIF

SEQ ID NO: 302990 - protein, 13 aa, Homo sapiens
  CDR3 for beta chain variable domain of TCR clone 151495 (TRBV27, TRBJ2-7)
CASSLTTGYEQYF

SEQ ID NO: 302991 - protein, 14 aa, Homo sapiens
  CDR3 for alpha chain variable domain of TCR clone 151496 (TRAV12-3, TRAJ9)
CAMSPNTGGFKTIF

SEQ ID NO: 302992 - protein, 15 aa, Homo sapiens
  CDR3 for beta chain variable domain of TCR clone 151496 (TRBV18, TRBJ2-1)
CASSPPSASYNEQFF

SEQ ID NO: 302993 - protein, 22 aa, Homo sapiens
  CDR3 for alpha chain variable domain of TCR clone 151497 (TRAV1-1, TRAJ11)
CLLLLRCERLQLMNSGYSTLTF

SEQ ID NO: 302994 - protein, 12 aa, Homo sapiens
  CDR3 for beta chain variable domain of TCR clone 151497 (TRBV11-2, TRBJ2-2)
CASSLGGGELFF

SEQ ID NO: 302995 - protein, 14 aa, Homo sapiens
  CDR3 for alpha chain variable domain of TCR clone 151498 (TRAV1-2, TRAJ16)
CAVNRFSDGQKLLF

SEQ ID NO: 302996 - protein, 16 aa, Homo sapiens
  CDR3 for beta chain variable domain of TCR clone 151498 (TRBV7-3, TRBJ2-2)
GASSLKRGTLSEELFF

SEQ ID NO: 302997 - protein, 15 aa, Homo sapiens
  CDR3 for alpha chain variable domain of TCR clone 151499 (TRAV2, TRAJ9)
CAVEDRGTGGFKTIF

SEQ ID NO: 302998 - protein, 14 aa, Homo sapiens
  CDR3 for beta chain variable domain of TCR clone 151499 (TRBV19, TRBJ2-1)
CASPTFVSSGEQFF

SEQ ID NO: 302999 - protein, 13 aa, Homo sapiens
  CDR3 for alpha chain variable domain of TCR clone 151500 (TRAV8-3, TRAJ36)
CAVGATGANNLFF

SEQ ID NO: 303000 - protein, 14 aa, Homo sapiens
  CDR3 for beta chain variable domain of TCR clone 151500 (TRBV25-1, TRBJ1-1)
CASTHLGGNTEDFF

SEQ ID NO: 303001 - protein, 12 aa, Homo sapiens
  CDR3 for alpha chain variable domain of TCR clone 151501 (TRAV26-1, TRAJ36)
CIVRVRADNLFF

SEQ ID NO: 303002 - protein, 14 aa, Homo sapiens
  CDR3 for beta chain variable domain of TCR clone 151501 (TRBV14, TRBJ2-3)
CASSRKLDADTQYF

SEQ ID NO: 303003 - protein, 16 aa, Homo sapiens
  CDR3 for alpha chain variable domain of TCR clone 151502 (TRAV8-3, TRAJ44)
CALGTLMTGTASKLTF

SEQ ID NO: 303004 - protein, 13 aa, Homo sapiens
  CDR3 for beta chain variable domain of TCR clone 151502 (TRBV11-2, TRBJ2-1)
CASSLRLTHEQFF

SEQ ID NO: 303005 - protein, 14 aa, Homo sapiens
  CDR3 for alpha chain variable domain of TCR clone 151503 (TRAV3, TRAJ9)
CAVRDDTGGFKTIF

SEQ ID NO: 303006 - protein, 18 aa, Homo sapiens
  CDR3 for beta chain variable domain of TCR clone 151503 (TRBV20-1, TRBJ2-6)
CSAETTPTYGSGANVLAF

SEQ ID NO: 303007 - protein, 15 aa, Homo sapiens
  CDR3 for alpha chain variable domain of TCR clone 151504 (TRAV8-4, TRAJ8)
CAVSDLNTGFQNLVF

SEQ ID NO: 303008 - protein, 14 aa, Homo sapiens
  CDR3 for beta chain variable domain of TCR clone 151504 (TRBV7-2, TRBJ2-3)
CASSQTGSSYTQYF

SEQ ID NO: 303009 - protein, 13 aa, Homo sapiens
  CDR3 for alpha chain variable domain of TCR clone 151505 (TRAV26-1, TRAJ48)
CIVRVVGDEKLTF

SEQ ID NO: 303010 - protein, 16 aa, Homo sapiens
  CDR3 for beta chain variable domain of TCR clone 151505 (TRBV5-1, TRBJ2-2)
CASSSRTGGRTGELVF

SEQ ID NO: 303011 - protein, 13 aa, Homo sapiens
  CDR3 for alpha chain variable domain of TCR clone 151506 (TRAV6, TRAJ20)
CALAVSNDYKLSF

SEQ ID NO: 303012 - protein, 16 aa, Homo sapiens
  CDR3 for beta chain variable domain of TCR clone 151506 (TRBV7-9, TRBJ2-1)
CASSDVSGGSYNEQFF

SEQ ID NO: 303013 - protein, 13 aa, Homo sapiens
  CDR3 for alpha chain variable domain of TCR clone 151507 (TRAV3, TRAJ43)
CAVRDTRGGDMRF

SEQ ID NO: 303014 - protein, 15 aa, Homo sapiens
  CDR3 for beta chain variable domain of TCR clone 151507 (TRBV6-5, TRBJ1-5)
CASSYSRRSNQPPHF

SEQ ID NO: 303015 - protein, 15 aa, Homo sapiens
  CDR3 for alpha chain variable domain of TCR clone 151508 (TRAV27, TRAJ45)
CAPVDSGGGADGLTF

SEQ ID NO: 303016 - protein, 14 aa, Homo sapiens
  CDR3 for beta chain variable domain of TCR clone 151508 (TRBV11-2, TRBJ2-7)
CASSLGAGAYEQYF

SEQ ID NO: 303017 - protein, 17 aa, Homo sapiens
  CDR3 for alpha chain variable domain of TCR clone 151509 (TRAV14/DV4, TRAJ28)
CGMREVSSGAGSYQLTF

SEQ ID NO: 303018 - protein, 15 aa, Homo sapiens
  CDR3 for beta chain variable domain of TCR clone 151509 (TRBV11-2, TRBJ1-6)
CASTLRETGNSPLHF

SEQ ID NO: 303019 - protein, 12 aa, Homo sapiens
  CDR3 for alpha chain variable domain of TCR clone 151510 (TRAV3, TRAJ39)
CAVIEWSNMLTF

SEQ ID NO: 303020 - protein, 16 aa, Homo sapiens
  CDR3 for beta chain variable domain of TCR clone 151510 (TRBV7-6, TRBJ1-6)
CASSLSSRIGDSPLHF

SEQ ID NO: 303021 - protein, 12 aa, Homo sapiens
  CDR3 for alpha chain variable domain of TCR clone 151511 (TRAV12-3, TRAJ17)
CAMTLTANKLTF

SEQ ID NO: 303022 - protein, 14 aa, Homo sapiens
  CDR3 for beta chain variable domain of TCR clone 151511 (TRBV20-1, TRBJ1-3)
CSASPTGAGNTIYF

SEQ ID NO: 303023 - protein, 13 aa, Homo sapiens
  CDR3 for alpha chain variable domain of TCR clone 151512 (TRAV21, TRAJ56)
CAVSTGANSKLTF

SEQ ID NO: 303024 - protein, 15 aa, Homo sapiens
  CDR3 for beta chain variable domain of TCR clone 151512 (TRBV7-9, TRBJ1-1)
CASSHRGTVNTEAFF

SEQ ID NO: 303025 - protein, 14 aa, Homo sapiens
  CDR3 for alpha chain variable domain of TCR clone 151513 (TRAV27, TRAJ17)
CRSTIRAAGNKLTL

SEQ ID NO: 303026 - protein, 15 aa, Homo sapiens
  CDR3 for beta chain variable domain of TCR clone 151513 (TRBV27, TRBJ2-5)
CASSLYPRGGETQYF

SEQ ID NO: 303027 - protein, 13 aa, Homo sapiens
  CDR3 for alpha chain variable domain of TCR clone 151514 (TRAV1-1, TRAJ33)
FASHMDSNYQLIW

SEQ ID NO: 303028 - protein, 18 aa, Homo sapiens
  CDR3 for beta chain variable domain of TCR clone 151514 (TRBV20-1, TRBJ2-2)
CSARVQTARPSGTGELFF

SEQ ID NO: 303029 - protein, 10 aa, Homo sapiens
  CDR3 for alpha chain variable domain of TCR clone 151515 (TRAV26-1, TRAJ40)
CIAGTYKYIF

SEQ ID NO: 303030 - protein, 15 aa, Homo sapiens
  CDR3 for beta chain variable domain of TCR clone 151515 (TRBV19, TRBJ2-1)
CASSAPGVPLDEQFF

SEQ ID NO: 303031 - protein, 12 aa, Homo sapiens
  CDR3 for alpha chain variable domain of TCR clone 151516 (TRAV13-1, TRAJ48)
CAANFGNEKLTF

SEQ ID NO: 303032 - protein, 14 aa, Homo sapiens
  CDR3 for beta chain variable domain of TCR clone 151516 (TRBV5-1, TRBJ1-1)
CASSSGTLKLSLDK

SEQ ID NO: 303033 - protein, 12 aa, Homo sapiens
  CDR3 for alpha chain variable domain of TCR clone 151517 (TRAV27, TRAJ35)
CAGADFGNVLHC

SEQ ID NO: 303034 - protein, 10 aa, Homo sapiens
  CDR3 for beta chain variable domain of TCR clone 151517 (TRBV28, TRBJ1-2)
CASSSDRAVF

SEQ ID NO: 303035 - protein, 12 aa, Homo sapiens
  CDR3 for alpha chain variable domain of TCR clone 151518 (TRAV1-1, TRAJ9)
CAVDTGGFKTIF

SEQ ID NO: 303036 - protein, 19 aa, Homo sapiens
  CDR3 for beta chain variable domain of TCR clone 151518 (TRBV11-2, TRBJ1-3)
CASRKEFGTGRTPGNTIYF

SEQ ID NO: 303037 - protein, 12 aa, Homo sapiens
  CDR3 for alpha chain variable domain of TCR clone 151519 (TRAV13-1, TRAJ21)
WAAKEGFNKFYF

SEQ ID NO: 303038 - protein, 14 aa, Homo sapiens
  CDR3 for beta chain variable domain of TCR clone 151519 (TRBV5-1, TRBJ2-7)
CASSRGESLYEQYF

SEQ ID NO: 303039 - protein, 20 aa, Homo sapiens
  CDR3 for alpha chain variable domain of TCR clone 151520 (TRAV12-3, TRAJ17)
SPVIQPPTSAMTLTGNKLTF

SEQ ID NO: 303040 - protein, 16 aa, Homo sapiens
  CDR3 for beta chain variable domain of TCR clone 151520 (TRBV12-4, TRBJ2-5)
CASSFFVRGRQETQYF

SEQ ID NO: 303041 - protein, 14 aa, Homo sapiens
  CDR3 for alpha chain variable domain of TCR clone 151521 (TRAV8-6, TRAJ54)
CAVSPALGAQKLVF

SEQ ID NO: 303042 - protein, 16 aa, Homo sapiens
  CDR3 for beta chain variable domain of TCR clone 151521 (TRBV18, TRBJ1-3)
CASSLGILNGENTIYF

SEQ ID NO: 303043 - protein, 14 aa, Homo sapiens
  CDR3 for alpha chain variable domain of TCR clone 151522 (TRAV1-2, TRAJ8)
CAVREDTGFQKLVF

SEQ ID NO: 303044 - protein, 14 aa, Homo sapiens
  CDR3 for beta chain variable domain of TCR clone 151522 (TRBV7-2, TRBJ2-5)
CASSLSGGGETQYF

SEQ ID NO: 303045 - protein, 14 aa, Homo sapiens
  CDR3 for alpha chain variable domain of TCR clone 151523 (TRAV27, TRAJ12)
CAGARMDSSYKLIF

SEQ ID NO: 303046 - protein, 20 aa, Homo sapiens
  CDR3 for beta chain variable domain of TCR clone 151523 (TRBV10-3, TRBJ2-7)
CTSVPSVNGRPSGGRVEQYF

SEQ ID NO: 303047 - protein, 15 aa, Homo sapiens
  CDR3 for alpha chain variable domain of TCR clone 151524 (TRAV26-1, TRAJ38)
CIVRAEGGNNRKLIR

SEQ ID NO: 303048 - protein, 14 aa, Homo sapiens
  CDR3 for beta chain variable domain of TCR clone 151524 (TRBV7-6, TRBJ2-5)
CASSSPSGSETQYF

SEQ ID NO: 303049 - protein, 14 aa, Homo sapiens
  CDR3 for alpha chain variable domain of TCR clone 151525 (TRAV36/DV7, TRAJ40)
CAVETTSGTYKYIF

SEQ ID NO: 303050 - protein, 13 aa, Homo sapiens
  CDR3 for beta chain variable domain of TCR clone 151525 (TRBV4-1, TRBJ2-2)
CASSQENTGELFF

SEQ ID NO: 303051 - protein, 12 aa, Homo sapiens
  CDR3 for alpha chain variable domain of TCR clone 151526 (TRAV17, TRAJ39)
CATGAAGNMLTF

SEQ ID NO: 303052 - protein, 14 aa, Homo sapiens
  CDR3 for beta chain variable domain of TCR clone 151526 (TRBV7-9, TRBJ1-2)
CASSRQVANYGYTF

SEQ ID NO: 303053 - protein, 14 aa, Homo sapiens
  CDR3 for alpha chain variable domain of TCR clone 151527 (TRAV23/DV6, TRAJ39)
CAASIGNAGNMLTF

SEQ ID NO: 303054 - protein, 14 aa, Homo sapiens
  CDR3 for beta chain variable domain of TCR clone 151527 (TRBV7-3, TRBJ1-1)
CASSFKGGNTEAVF

SEQ ID NO: 303055 - protein, 14 aa, Homo sapiens
  CDR3 for alpha chain variable domain of TCR clone 151528 (TRAV36/DV7, TRAJ13)
WGAGENGGYQKVTF

SEQ ID NO: 303056 - protein, 15 aa, Homo sapiens
  CDR3 for beta chain variable domain of TCR clone 151528 (TRBV19, TRBJ2-1)
CASSTGTSSYNEQFF

SEQ ID NO: 303057 - protein, 18 aa, Homo sapiens
  CDR3 for alpha chain variable domain of TCR clone 151529 (TRAV26-1, TRAJ5)
CIVRVVPPRDTGWRALTF

SEQ ID NO: 303058 - protein, 11 aa, Homo sapiens
  CDR3 for beta chain variable domain of TCR clone 151529 (TRBV7-9, TRBJ2-5)
CASSLSATQYF

SEQ ID NO: 303059 - protein, 16 aa, Homo sapiens
  CDR3 for alpha chain variable domain of TCR clone 151530 (TRAV3, TRAJ10)
CAVRDMRAGGGNKLTF

SEQ ID NO: 303060 - protein, 15 aa, Homo sapiens
  CDR3 for beta chain variable domain of TCR clone 151530 (TRBV9, TRBJ1-6)
CASSVAETGDSPLHF

SEQ ID NO: 303061 - protein, 12 aa, Homo sapiens
  CDR3 for alpha chain variable domain of TCR clone 151531 (TRAV12-1, TRAJ40)
CVVPSGTYKYIF

SEQ ID NO: 303062 - protein, 15 aa, Homo sapiens
  CDR3 for beta chain variable domain of TCR clone 151531 (TRBV12-4, TRBJ2-1)
YASSPLSGRNNEQFF

SEQ ID NO: 303063 - protein, 15 aa, Homo sapiens
  CDR3 for alpha chain variable domain of TCR clone 151532 (TRAV2, TRAJ22)
CAVPSRGGSARQLTF

SEQ ID NO: 303064 - protein, 16 aa, Homo sapiens
  CDR3 for beta chain variable domain of TCR clone 151532 (TRBV7-2, TRBJ2-5)
CASSYKTGISLETQYF

SEQ ID NO: 303065 - protein, 14 aa, Homo sapiens
  CDR3 for alpha chain variable domain of TCR clone 151533 (TRAV23/DV6, TRAJ49)
CAASKSFVGNQFYF

SEQ ID NO: 303066 - protein, 13 aa, Homo sapiens
  CDR3 for beta chain variable domain of TCR clone 151533 (TRBV9, TRBJ2-1)
CASSPSGGSEQFF

SEQ ID NO: 303067 - protein, 18 aa, Homo sapiens
  CDR3 for alpha chain variable domain of TCR clone 151534 (TRAV12-1, TRAJ26)
SSVIQPPTSVPYGQNFVF

SEQ ID NO: 303068 - protein, 13 aa, Homo sapiens
  CDR3 for beta chain variable domain of TCR clone 151534 (TRBV7-9, TRBJ2-1)
CASSWESYNEQFF

SEQ ID NO: 303069 - protein, 12 aa, Homo sapiens
  CDR3 for alpha chain variable domain of TCR clone 151535 (TRAV30, TRAJ49)
CGTLGVSNQFYF

SEQ ID NO: 303070 - protein, 13 aa, Homo sapiens
  CDR3 for beta chain variable domain of TCR clone 151535 (TRBV4-1, TRBJ2-1)
CASSQAGDDEQFF

SEQ ID NO: 303071 - protein, 17 aa, Homo sapiens
  CDR3 for alpha chain variable domain of TCR clone 151536 (TRAV13-1, TRAJ28)
CAASPPYSGAGSYQLTF

SEQ ID NO: 303072 - protein, 13 aa, Homo sapiens
  CDR3 for beta chain variable domain of TCR clone 151536 (TRBV7-3, TRBJ1-1)
CASSLTQGTEAFF

SEQ ID NO: 303073 - protein, 11 aa, Homo sapiens
  CDR3 for alpha chain variable domain of TCR clone 151537 (TRAV1-1, TRAJ23)
CAVRQGGKLIF

SEQ ID NO: 303074 - protein, 14 aa, Homo sapiens
  CDR3 for beta chain variable domain of TCR clone 151537 (TRBV5-7, TRBJ1-2)
CASSLVGGDYGYTF

SEQ ID NO: 303075 - protein, 13 aa, Homo sapiens
  CDR3 for alpha chain variable domain of TCR clone 151538 (TRAV17, TRAJ9)
CATDYTGGFKTIF

SEQ ID NO: 303076 - protein, 12 aa, Homo sapiens
  CDR3 for beta chain variable domain of TCR clone 151538 (TRBV19, TRBJ1-5)
CASSIAQQPQHF

SEQ ID NO: 303077 - protein, 15 aa, Homo sapiens
  CDR3 for alpha chain variable domain of TCR clone 151539 (TRAV8-4, TRAJ53)
WAVSDGGGSNYKLTF

SEQ ID NO: 303078 - protein, 15 aa, Homo sapiens
  CDR3 for beta chain variable domain of TCR clone 151539 (TRBV19, TRBJ2-5)
CASHGLAGAKETQYF

SEQ ID NO: 303079 - protein, 15 aa, Homo sapiens
  CDR3 for alpha chain variable domain of TCR clone 151540 (TRAV17, TRAJ56)
CATDANTGSNSKLTF

SEQ ID NO: 303080 - protein, 14 aa, Homo sapiens
  CDR3 for beta chain variable domain of TCR clone 151540 (TRBV19, TRBJ1-5)
CASSLGTGGQPQHF

SEQ ID NO: 303081 - protein, 14 aa, Homo sapiens
  CDR3 for alpha chain variable domain of TCR clone 151541 (TRAV12-2, TRAJ13)
CAVKKTGGYQKVTF

SEQ ID NO: 303082 - protein, 14 aa, Homo sapiens
  CDR3 for beta chain variable domain of TCR clone 151541 (TRBV27, TRBJ1-5)
CASSPRGGPQPQHF

SEQ ID NO: 303083 - protein, 13 aa, Homo sapiens
  CDR3 for alpha chain variable domain of TCR clone 151542 (TRAV25, TRAJ40)
CAGSASGTYKYIF

SEQ ID NO: 303084 - protein, 14 aa, Homo sapiens
  CDR3 for beta chain variable domain of TCR clone 151542 (TRBV7-2, TRBJ2-7)
CASRSQGAAYEQYC

SEQ ID NO: 303085 - protein, 18 aa, Homo sapiens
  CDR3 for alpha chain variable domain of TCR clone 151543 (TRAV26-1, TRAJ52)
CSVRVEGAGGTSYGKLTF

SEQ ID NO: 303086 - protein, 13 aa, Homo sapiens
  CDR3 for beta chain variable domain of TCR clone 151543 (TRBV7-3, TRBJ1-2)
CASSLKRGYGYTF

SEQ ID NO: 303087 - protein, 14 aa, Homo sapiens
  CDR3 for alpha chain variable domain of TCR clone 151544 (TRAV13-2, TRAJ17)
CAENSKAAGNKLTF

SEQ ID NO: 303088 - protein, 15 aa, Homo sapiens
  CDR3 for beta chain variable domain of TCR clone 151544 (TRBV11-3, TRBJ2-3)
CASLKDGREGDTQYF

SEQ ID NO: 303089 - protein, 16 aa, Homo sapiens
  CDR3 for alpha chain variable domain of TCR clone 151545 (TRAV3, TRAJ37)
RAVRPHGSGNTGKLIF

SEQ ID NO: 303090 - protein, 15 aa, Homo sapiens
  CDR3 for beta chain variable domain of TCR clone 151545 (TRBV9, TRBJ1-6)
CASSVAGTGDSPLHF

SEQ ID NO: 303091 - protein, 14 aa, Homo sapiens
  CDR3 for alpha chain variable domain of TCR clone 151546 (TRAV12-1, TRAJ43)
CVVNGRSNNNDMRF

SEQ ID NO: 303092 - protein, 13 aa, Homo sapiens
  CDR3 for beta chain variable domain of TCR clone 151546 (TRBV10-3, TRBJ2-7)
CASKLAVNYEQYV

SEQ ID NO: 303093 - protein, 15 aa, Homo sapiens
  CDR3 for alpha chain variable domain of TCR clone 151547 (TRAV27, TRAJ38)
CAARRNAGNNRKLIW

SEQ ID NO: 303094 - protein, 16 aa, Homo sapiens
  CDR3 for beta chain variable domain of TCR clone 151547 (TRBV10-3, TRBJ2-1)
CAIRGGGRGDYNEQFF

SEQ ID NO: 303095 - protein, 13 aa, Homo sapiens
  CDR3 for alpha chain variable domain of TCR clone 151548 (TRAV38-1, TRAJ30)
CAFISSGDDKIIF

SEQ ID NO: 303096 - protein, 13 aa, Homo sapiens
  CDR3 for beta chain variable domain of TCR clone 151548 (TRBV14, TRBJ2-7)
CASSQDRRYEQYF

SEQ ID NO: 303097 - protein, 14 aa, Homo sapiens
  CDR3 for alpha chain variable domain of TCR clone 151549 (TRAV12-1, TRAJ26)
CVVKGSNYGQNFVF

SEQ ID NO: 303098 - protein, 15 aa, Homo sapiens
  CDR3 for beta chain variable domain of TCR clone 151549 (TRBV10-2, TRBJ2-6)
CASSEQGTGANVLTV

SEQ ID NO: 303099 - protein, 13 aa, Homo sapiens
  CDR3 for alpha chain variable domain of TCR clone 151550 (TRAV13-2, TRAJ54)
CAETFQGAQKMVF

SEQ ID NO: 303100 - protein, 13 aa, Homo sapiens
  CDR3 for beta chain variable domain of TCR clone 151550 (TRBV29-1, TRBJ2-1)
CSVEGGRVNEQFF

SEQ ID NO: 303101 - protein, 14 aa, Homo sapiens
  CDR3 for alpha chain variable domain of TCR clone 151551 (TRAV12-3, TRAJ58)
CAMSTESSGSRLTF

SEQ ID NO: 303102 - protein, 15 aa, Homo sapiens
  CDR3 for beta chain variable domain of TCR clone 151551 (TRBV11-3, TRBJ1-1)
CASSLGGPGDTEAFF

SEQ ID NO: 303103 - protein, 14 aa, Homo sapiens
  CDR3 for alpha chain variable domain of TCR clone 151552 (TRAV12-1, TRAJ27)
CGEHIRTNAGKSTF

SEQ ID NO: 303104 - protein, 14 aa, Homo sapiens
  CDR3 for beta chain variable domain of TCR clone 151552 (TRBV7-9, TRBJ2-3)
CASSLEQGTNTQYF

SEQ ID NO: 303105 - protein, 15 aa, Homo sapiens
  CDR3 for alpha chain variable domain of TCR clone 151553 (TRAV4, TRAJ10)
CVVGDGSGGGNKLTF

SEQ ID NO: 303106 - protein, 11 aa, Homo sapiens
  CDR3 for beta chain variable domain of TCR clone 151553 (TRBV5-1, TRBJ2-2)
CASSPSRCEHR

SEQ ID NO: 303107 - protein, 15 aa, Homo sapiens
  CDR3 for alpha chain variable domain of TCR clone 151554 (TRAV25, TRAJ52)
CARRPGGTSYGRLTF

SEQ ID NO: 303108 - protein, 17 aa, Homo sapiens
  CDR3 for beta chain variable domain of TCR clone 151554 (TRBV7-8, TRBJ2-6)
CASSAGTGGAGANVLTF

SEQ ID NO: 303109 - protein, 11 aa, Homo sapiens
  CDR3 for alpha chain variable domain of TCR clone 151555 (TRAV22, TRAJ27)
CAGVNAGKSTF

SEQ ID NO: 303110 - protein, 13 aa, Homo sapiens
  CDR3 for beta chain variable domain of TCR clone 151555 (TRBV7-9, TRBJ1-2)
CASSLKQNYGYTF

SEQ ID NO: 303111 - protein, 16 aa, Homo sapiens
  CDR3 for alpha chain variable domain of TCR clone 151556 (TRAV30, TRAJ24)
CGTEIVDADSWGKFQF

SEQ ID NO: 303112 - protein, 21 aa, Homo sapiens
  CDR3 for beta chain variable domain of TCR clone 151556 (TRBV7-2, TRBJ2-7)
RRTRPCISVPAALRLVSKQYF

SEQ ID NO: 303113 - protein, 15 aa, Homo sapiens
  CDR3 for alpha chain variable domain of TCR clone 151557 (TRAV8-4, TRAJ13)
CAVSDWGGGYQKVTF

SEQ ID NO: 303114 - protein, 15 aa, Homo sapiens
  CDR3 for beta chain variable domain of TCR clone 151557 (TRBV25-1, TRBJ1-4)
CASSPWDSTNEKLFF

SEQ ID NO: 303115 - protein, 12 aa, Homo sapiens
  CDR3 for alpha chain variable domain of TCR clone 151558 (TRAV12-3, TRAJ5)
CAMDTGRRSLTF

SEQ ID NO: 303116 - protein, 20 aa, Homo sapiens
  CDR3 for beta chain variable domain of TCR clone 151558 (TRBV7-8, TRBJ2-2)
CASSHLFPGPTIHITGELFF

SEQ ID NO: 303117 - protein, 11 aa, Homo sapiens
  CDR3 for alpha chain variable domain of TCR clone 151559 (TRAV2, TRAJ23)
CAVETRGKLIF

SEQ ID NO: 303118 - protein, 13 aa, Homo sapiens
  CDR3 for beta chain variable domain of TCR clone 151559 (TRBV7-9, TRBJ2-3)
CASSPGSTDTQYF

SEQ ID NO: 303119 - protein, 14 aa, Homo sapiens
  CDR3 for alpha chain variable domain of TCR clone 151560 (TRAV8-4, TRAJ34)
GAVSDPGDTDKLIF

SEQ ID NO: 303120 - protein, 13 aa, Homo sapiens
  CDR3 for beta chain variable domain of TCR clone 151560 (TRBV7-9, TRBJ2-5)
CASLSPGQETQYF

SEQ ID NO: 303121 - protein, 15 aa, Homo sapiens
  CDR3 for alpha chain variable domain of TCR clone 151561 (TRAV21, TRAJ45)
CAVSYSGGGAVGPTF

SEQ ID NO: 303122 - protein, 13 aa, Homo sapiens
  CDR3 for beta chain variable domain of TCR clone 151561 (TRBV20-1, TRBJ2-5)
CSAATELQETQYF

SEQ ID NO: 303123 - protein, 13 aa, Homo sapiens
  CDR3 for alpha chain variable domain of TCR clone 151562 (TRAV3, TRAJ21)
CAVREPDFDKFYF

SEQ ID NO: 303124 - protein, 14 aa, Homo sapiens
  CDR3 for beta chain variable domain of TCR clone 151562 (TRBV20-1, TRBJ2-3)
CSARGGTSTDTQYF

SEQ ID NO: 303125 - protein, 11 aa, Homo sapiens
  CDR3 for alpha chain variable domain of TCR clone 151563 (TRAV23/DV6, TRAJ48)
CAPRWGEKLTF

SEQ ID NO: 303126 - protein, 12 aa, Homo sapiens
  CDR3 for beta chain variable domain of TCR clone 151563 (TRBV12-4, TRBJ2-5)
CQQSRDRRDQYF

SEQ ID NO: 303127 - protein, 14 aa, Homo sapiens
  CDR3 for alpha chain variable domain of TCR clone 151564 (TRAV29/DV5, TRAJ48)
CAAMPLFGNEKLTF

SEQ ID NO: 303128 - protein, 15 aa, Homo sapiens
  CDR3 for beta chain variable domain of TCR clone 151564 (TRBV7-2, TRBJ2-1)
CASTHGTGIYNEQFF

SEQ ID NO: 303129 - protein, 19 aa, Homo sapiens
  CDR3 for alpha chain variable domain of TCR clone 151565 (TRAV12-1, TRAJ31)
SLLIRDSKLSDSATPRLMF

SEQ ID NO: 303130 - protein, 14 aa, Homo sapiens
  CDR3 for beta chain variable domain of TCR clone 151565 (TRBV19, TRBJ1-2)
CASSIGAGSYGYTF

SEQ ID NO: 303131 - protein, 15 aa, Homo sapiens
  CDR3 for alpha chain variable domain of TCR clone 151566 (TRAV21, TRAJ53)
CATLNSGGSNYKLTF

SEQ ID NO: 303132 - protein, 14 aa, Homo sapiens
  CDR3 for beta chain variable domain of TCR clone 151566 (TRBV18, TRBJ2-2)
CASSPPTATGELFF

SEQ ID NO: 303133 - protein, 15 aa, Homo sapiens
  CDR3 for alpha chain variable domain of TCR clone 151567 (TRAV35, TRAJ50)
CAGQLRKTSYEKVIF

SEQ ID NO: 303134 - protein, 12 aa, Homo sapiens
  CDR3 for beta chain variable domain of TCR clone 151567 (TRBV5-1, TRBJ2-5)
CASSLGLETQFF

SEQ ID NO: 303135 - protein, 14 aa, Homo sapiens
  CDR3 for alpha chain variable domain of TCR clone 151568 (TRAV1-2, TRAJ8)
CAVREDTGFQELVF

SEQ ID NO: 303136 - protein, 17 aa, Homo sapiens
  CDR3 for beta chain variable domain of TCR clone 151568 (TRBV7-8, TRBJ2-6)
CASSAGTGGAGANVLTF

SEQ ID NO: 303137 - protein, 15 aa, Homo sapiens
  CDR3 for alpha chain variable domain of TCR clone 151569 (TRAV29/DV5, TRAJ48)
CAASLGGLGNAKLTF

SEQ ID NO: 303138 - protein, 11 aa, Homo sapiens
  CDR3 for beta chain variable domain of TCR clone 151569 (TRBV20-1, TRBJ2-3)
CSGTSSTTQYF

SEQ ID NO: 303139 - protein, 13 aa, Homo sapiens
  CDR3 for alpha chain variable domain of TCR clone 151570 (TRAV1-2, TRAJ20)
CAVRDGNDYKLSF

SEQ ID NO: 303140 - protein, 13 aa, Homo sapiens
  CDR3 for beta chain variable domain of TCR clone 151570 (TRBV4-2, TRBJ1-1)
CASSQAGNTEAFC

SEQ ID NO: 303141 - protein, 12 aa, Homo sapiens
  CDR3 for alpha chain variable domain of TCR clone 151571 (TRAV12-3, TRAJ40)
CAMSSGTYKYIF

SEQ ID NO: 303142 - protein, 13 aa, Homo sapiens
  CDR3 for beta chain variable domain of TCR clone 151571 (TRBV12-4, TRBJ2-7)
CASSFVPTAEQYF

SEQ ID NO: 303143 - protein, 15 aa, Homo sapiens
  CDR3 for alpha chain variable domain of TCR clone 151572 (TRAV26-2, TRAJ39)
CSLRGNNNACNMLTF

SEQ ID NO: 303144 - protein, 15 aa, Homo sapiens
  CDR3 for beta chain variable domain of TCR clone 151572 (TRBV5-4, TRBJ1-1)
CASSSLGWANTEAFF

SEQ ID NO: 303145 - protein, 12 aa, Homo sapiens
  CDR3 for alpha chain variable domain of TCR clone 151573 (TRAV13-1, TRAJ16)
CAASNDGQKLLF

SEQ ID NO: 303146 - protein, 14 aa, Homo sapiens
  CDR3 for beta chain variable domain of TCR clone 151573 (TRBV20-1, TRBJ2-7)
CSARDPTGLDEQYF

SEQ ID NO: 303147 - protein, 11 aa, Homo sapiens
  CDR3 for alpha chain variable domain of TCR clone 151574 (TRAV27, TRAJ20)
CAGAGDYKPSF

SEQ ID NO: 303148 - protein, 13 aa, Homo sapiens
  CDR3 for beta chain variable domain of TCR clone 151574 (TRBV11-3, TRBJ1-2)
CASSQRTSRGYTF

SEQ ID NO: 303149 - protein, 17 aa, Homo sapiens
  CDR3 for alpha chain variable domain of TCR clone 151575 (TRAV8-6, TRAJ8)
CAVKEGIENTGFQKLVF

SEQ ID NO: 303150 - protein, 15 aa, Homo sapiens
  CDR3 for beta chain variable domain of TCR clone 151575 (TRBV7-2, TRBJ2-1)
CASSSGRAGGNEQFF

SEQ ID NO: 303151 - protein, 23 aa, Homo sapiens
  CDR3 for alpha chain variable domain of TCR clone 151576 (TRAV26-1, TRAJ38)
CIADNAGNNHIQNPDPPVNQLRA

SEQ ID NO: 303152 - protein, 16 aa, Homo sapiens
  CDR3 for beta chain variable domain of TCR clone 151576 (TRBV13, TRBJ2-2)
CASSPRTGEHTGELFF

SEQ ID NO: 303153 - protein, 13 aa, Homo sapiens
  CDR3 for alpha chain variable domain of TCR clone 151577 (TRAV23/DV6, TRAJ58)
CAARLIRGSMLTF

SEQ ID NO: 303154 - protein, 13 aa, Homo sapiens
  CDR3 for beta chain variable domain of TCR clone 151577 (TRBV2, TRBJ1-6)
CADSGSYNSPLHF

SEQ ID NO: 303155 - protein, 16 aa, Homo sapiens
  CDR3 for alpha chain variable domain of TCR clone 151578 (TRAV16, TRAJ4)
CALRRMFSGGYNKLIF

SEQ ID NO: 303156 - protein, 19 aa, Homo sapiens
  CDR3 for beta chain variable domain of TCR clone 151578 (TRBV28, TRBJ2-7)
CASSYSGTSRLGWVYEQYF

SEQ ID NO: 303157 - protein, 11 aa, Homo sapiens
  CDR3 for alpha chain variable domain of TCR clone 151579 (TRAV2, TRAJ13)
CASGGYQKVTF

SEQ ID NO: 303158 - protein, 14 aa, Homo sapiens
  CDR3 for beta chain variable domain of TCR clone 151579 (TRBV7-3, TRBJ2-1)
CASSLAGGANEQFF

SEQ ID NO: 303159 - protein, 12 aa, Homo sapiens
  CDR3 for alpha chain variable domain of TCR clone 151580 (TRAV3, TRAJ43)
CAVRDPNNDMRF

SEQ ID NO: 303160 - protein, 15 aa, Homo sapiens
  CDR3 for beta chain variable domain of TCR clone 151580 (TRBV20-1, TRBJ2-7)
CSARDPTEVGHEQYF

SEQ ID NO: 303161 - protein, 14 aa, Homo sapiens
  CDR3 for alpha chain variable domain of TCR clone 151581 (TRAV20, TRAJ34)
CAVSYARNTDKLIF

SEQ ID NO: 303162 - protein, 14 aa, Homo sapiens
  CDR3 for beta chain variable domain of TCR clone 151581 (TRBV28, TRBJ2-4)
CASSLSPGRNIQYF

SEQ ID NO: 303163 - protein, 13 aa, Homo sapiens
  CDR3 for alpha chain variable domain of TCR clone 151582 (TRAV17, TRAJ5)
CAPMDTARRALTF

SEQ ID NO: 303164 - protein, 11 aa, Homo sapiens
  CDR3 for beta chain variable domain of TCR clone 151582 (TRBV19, TRBJ1-1)
CASSIGSEAFF

SEQ ID NO: 303165 - protein, 13 aa, Homo sapiens
  CDR3 for alpha chain variable domain of TCR clone 151583 (TRAV36/DV7, TRAJ37)
CAVFSSNTGKLIF

SEQ ID NO: 303166 - protein, 18 aa, Homo sapiens
  CDR3 for beta chain variable domain of TCR clone 151583 (TRBV11-2, TRBJ2-3)
CASTLGGASRGAPNTQYF

SEQ ID NO: 303167 - protein, 18 aa, Homo sapiens
  CDR3 for alpha chain variable domain of TCR clone 151584 (TRAV21, TRAJ52)
CAVRPSPAGGTSYGKLTF

SEQ ID NO: 303168 - protein, 14 aa, Homo sapiens
  CDR3 for beta chain variable domain of TCR clone 151584 (TRBV4-1, TRBJ2-2)
CARSQAVNTGELFF

SEQ ID NO: 303169 - protein, 14 aa, Homo sapiens
  CDR3 for alpha chain variable domain of TCR clone 151585 (TRAV26-1, TRAJ21)
CIVRPPYNFNKFYF

SEQ ID NO: 303170 - protein, 14 aa, Homo sapiens
  CDR3 for beta chain variable domain of TCR clone 151585 (TRBV11-3, TRBJ2-1)
CASSATTRGSIQFF

SEQ ID NO: 303171 - protein, 14 aa, Homo sapiens
  CDR3 for alpha chain variable domain of TCR clone 151586 (TRAV1-2, TRAJ33)
CAVRAPDRNYQLIW

SEQ ID NO: 303172 - protein, 13 aa, Homo sapiens
  CDR3 for beta chain variable domain of TCR clone 151586 (TRBV4-2, TRBJ1-1)
CASSQAGNTEAFF

SEQ ID NO: 303173 - protein, 12 aa, Homo sapiens
  CDR3 for alpha chain variable domain of TCR clone 151587 (TRAV22, TRAJ22)
CAPGGSARQLTF

SEQ ID NO: 303174 - protein, 16 aa, Homo sapiens
  CDR3 for beta chain variable domain of TCR clone 151587 (TRBV7-3, TRBJ2-1)
CASSLEGYRSYNEQFF

SEQ ID NO: 303175 - protein, 11 aa, Homo sapiens
  CDR3 for alpha chain variable domain of TCR clone 151588 (TRAV13-2, TRAJ20)
CADSNDYKLSF

SEQ ID NO: 303176 - protein, 13 aa, Homo sapiens
  CDR3 for beta chain variable domain of TCR clone 151588 (TRBV19, TRBJ1-5)
CASSMRGYQPQHF

SEQ ID NO: 303177 - protein, 13 aa, Homo sapiens
  CDR3 for alpha chain variable domain of TCR clone 151589 (TRAV1-2, TRAJ9)
CAVLNTGGCKTIF

SEQ ID NO: 303178 - protein, 17 aa, Homo sapiens
  CDR3 for beta chain variable domain of TCR clone 151589 (TRBV13, TRBJ2-3)
CASSLSRVAGGRNTQYF

SEQ ID NO: 303179 - protein, 14 aa, Homo sapiens
  CDR3 for alpha chain variable domain of TCR clone 151590 (TRAV12-2, TRAJ13)
CAVKKTGGYQKVTF

SEQ ID NO: 303180 - protein, 16 aa, Homo sapiens
  CDR3 for beta chain variable domain of TCR clone 151590 (TRBV11-3, TRBJ2-2)
CASSSRTSPGTGGLFF

SEQ ID NO: 303181 - protein, 13 aa, Homo sapiens
  CDR3 for alpha chain variable domain of TCR clone 151591 (TRAV2, TRAJ40)
CAVVTSGTYKYIF

SEQ ID NO: 303182 - protein, 14 aa, Homo sapiens
  CDR3 for beta chain variable domain of TCR clone 151591 (TRBV28, TRBJ2-1)
CASSPSTGYNEQFF

SEQ ID NO: 303183 - protein, 11 aa, Homo sapiens
  CDR3 for alpha chain variable domain of TCR clone 151592 (TRAV12-1, TRAJ8)
CVVTGFQKLVF

SEQ ID NO: 303184 - protein, 14 aa, Homo sapiens
  CDR3 for beta chain variable domain of TCR clone 151592 (TRBV19, TRBJ2-1)
CASGKPTQYNEQFF

SEQ ID NO: 303185 - protein, 11 aa, Homo sapiens
  CDR3 for alpha chain variable domain of TCR clone 151593 (TRAV21, TRAJ41)
CAVRSGYALNF

SEQ ID NO: 303186 - protein, 13 aa, Homo sapiens
  CDR3 for beta chain variable domain of TCR clone 151593 (TRBV7-9, TRBJ1-2)
SASSLKQNYGYTF

SEQ ID NO: 303187 - protein, 18 aa, Homo sapiens
  CDR3 for alpha chain variable domain of TCR clone 151594 (TRAV26-1, TRAJ23)
CIVRVGLEVWNQGGKIIF

SEQ ID NO: 303188 - protein, 13 aa, Homo sapiens
  CDR3 for beta chain variable domain of TCR clone 151594 (TRBV7-2, TRBJ2-2)
CASSLAVTGELFF

SEQ ID NO: 303189 - protein, 15 aa, Homo sapiens
  CDR3 for alpha chain variable domain of TCR clone 151595 (TRAV3, TRAJ5)
CAVRGLDTGRRALTF

SEQ ID NO: 303190 - protein, 13 aa, Homo sapiens
  CDR3 for beta chain variable domain of TCR clone 151595 (TRBV12-4, TRBJ2-7)
CASSPTGTYEQYF

SEQ ID NO: 303191 - protein, 19 aa, Homo sapiens
  CDR3 for alpha chain variable domain of TCR clone 151596 (TRAV29/DV5, TRAJ49)
CSVLLCSKLTVDTGNQFYF

SEQ ID NO: 303192 - protein, 16 aa, Homo sapiens
  CDR3 for beta chain variable domain of TCR clone 151596 (TRBV19, TRBJ2-2)
CASRSPGTGATGELFF

SEQ ID NO: 303193 - protein, 12 aa, Homo sapiens
  CDR3 for alpha chain variable domain of TCR clone 151597 (TRAV10, TRAJ20)
CVVSASDYKLRF

SEQ ID NO: 303194 - protein, 15 aa, Homo sapiens
  CDR3 for beta chain variable domain of TCR clone 151597 (TRBV3-1, TRBJ2-1)
CASSQDYTPRGEQFF

SEQ ID NO: 303195 - protein, 13 aa, Homo sapiens
  CDR3 for alpha chain variable domain of TCR clone 151598 (TRAV13-1, TRAJ41)
CADDPNSGYALNF

SEQ ID NO: 303196 - protein, 13 aa, Homo sapiens
  CDR3 for beta chain variable domain of TCR clone 151598 (TRBV19, TRBJ2-7)
CASEGTTTYEQYF

SEQ ID NO: 303197 - protein, 14 aa, Homo sapiens
  CDR3 for alpha chain variable domain of TCR clone 151599 (TRAV13-1, TRAJ44)
CAARATGTASKLTF

SEQ ID NO: 303198 - protein, 14 aa, Homo sapiens
  CDR3 for beta chain variable domain of TCR clone 151599 (TRBV7-2, TRBJ2-7)
CASRSQGAAYEQYF

SEQ ID NO: 303199 - protein, 16 aa, Homo sapiens
  CDR3 for alpha chain variable domain of TCR clone 151600 (TRAV30, TRAJ24)
CGTEIVDADSWGKFQF

SEQ ID NO: 303200 - protein, 14 aa, Homo sapiens
  CDR3 for beta chain variable domain of TCR clone 151600 (TRBV19, TRBJ2-1)
CASPTFVLSGEQFV

SEQ ID NO: 303201 - protein, 19 aa, Homo sapiens
  CDR3 for alpha chain variable domain of TCR clone 151601 (TRAV8-3, TRAJ8)
LSTSVLWDPMNTGFQKLVF

SEQ ID NO: 303202 - protein, 13 aa, Homo sapiens
  CDR3 for beta chain variable domain of TCR clone 151601 (TRBV10-2, TRBJ2-3)
CASSESGDHTHYF

SEQ ID NO: 303203 - protein, 11 aa, Homo sapiens
  CDR3 for alpha chain variable domain of TCR clone 151602 (TRAV23/DV6, TRAJ58)
CAARLLRGETS

SEQ ID NO: 303204 - protein, 15 aa, Homo sapiens
  CDR3 for beta chain variable domain of TCR clone 151602 (TRBV28, TRBJ2-5)
CASSSGRTIQETQYF

SEQ ID NO: 303205 - protein, 13 aa, Homo sapiens
  CDR3 for alpha chain variable domain of TCR clone 151603 (TRAV21, TRAJ27)
CAARPGNAGQSTF

SEQ ID NO: 303206 - protein, 15 aa, Homo sapiens
  CDR3 for beta chain variable domain of TCR clone 151603 (TRBV6-3, TRBJ2-7)
CASSSPGTVFYEQYF

SEQ ID NO: 303207 - protein, 11 aa, Homo sapiens
  CDR3 for alpha chain variable domain of TCR clone 151604 (TRAV12-1, TRAJ30)
CVVNGQDKIIF

SEQ ID NO: 303208 - protein, 12 aa, Homo sapiens
  CDR3 for beta chain variable domain of TCR clone 151604 (TRBV27, TRBJ2-2)
CASKLFTGELIF

SEQ ID NO: 303209 - protein, 13 aa, Homo sapiens
  CDR3 for alpha chain variable domain of TCR clone 151605 (TRAV5, TRAJ30)
CAEIANRDDTIIF

SEQ ID NO: 303210 - protein, 14 aa, Homo sapiens
  CDR3 for beta chain variable domain of TCR clone 151605 (TRBV4-1, TRBJ2-2)
CASSQAVNTGELFF

SEQ ID NO: 303211 - protein, 14 aa, Homo sapiens
  CDR3 for alpha chain variable domain of TCR clone 151606 (TRAV1-2, TRAJ8)
CAVREDTGFQKLVF

SEQ ID NO: 303212 - protein, 16 aa, Homo sapiens
  CDR3 for beta chain variable domain of TCR clone 151606 (TRBV28, TRBJ1-5)
CASSFRGGYSNQPQHF

SEQ ID NO: 303213 - protein, 14 aa, Homo sapiens
  CDR3 for alpha chain variable domain of TCR clone 151607 (TRAV8-1, TRAJ5)
CAVRTDTGRRALTF

SEQ ID NO: 303214 - protein, 14 aa, Homo sapiens
  CDR3 for beta chain variable domain of TCR clone 151607 (TRBV7-8, TRBJ2-3)
CASSFPDGQDTQYC

SEQ ID NO: 303215 - protein, 15 aa, Homo sapiens
  CDR3 for alpha chain variable domain of TCR clone 151608 (TRAV3, TRAJ22)
CAVRDRSGFARQLTF

SEQ ID NO: 303216 - protein, 13 aa, Homo sapiens
  CDR3 for beta chain variable domain of TCR clone 151608 (TRBV20-1, TRBJ1-1)
CSARVGGNTEAFF

SEQ ID NO: 303217 - protein, 18 aa, Homo sapiens
  CDR3 for alpha chain variable domain of TCR clone 151609 (TRAV21, TRAJ52)
CAVRPSPAGGTSYVTLTF

SEQ ID NO: 303218 - protein, 17 aa, Homo sapiens
  CDR3 for beta chain variable domain of TCR clone 151609 (TRBV13, TRBJ2-3)
CASSLSSVAGGRNTQYF

SEQ ID NO: 303219 - protein, 12 aa, Homo sapiens
  CDR3 for alpha chain variable domain of TCR clone 151610 (TRAV23/DV6, TRAJ16)
CTARGRGQKLLF

SEQ ID NO: 303220 - protein, 15 aa, Homo sapiens
  CDR3 for beta chain variable domain of TCR clone 151610 (TRBV15, TRBJ2-1)
CATSRPGQGLHEQFF

SEQ ID NO: 303221 - protein, 15 aa, Homo sapiens
  CDR3 for alpha chain variable domain of TCR clone 151611 (TRAV23/DV6, TRAJ13)
CAAWPGGGGYQKVTF

SEQ ID NO: 303222 - protein, 13 aa, Homo sapiens
  CDR3 for beta chain variable domain of TCR clone 151611 (TRBV12-4, TRBJ1-2)
CASSLRQGKGYTF

SEQ ID NO: 303223 - protein, 13 aa, Homo sapiens
  CDR3 for alpha chain variable domain of TCR clone 151612 (TRAV21, TRAJ37)
CAVSSGNTAKLIF

SEQ ID NO: 303224 - protein, 18 aa, Homo sapiens
  CDR3 for beta chain variable domain of TCR clone 151612 (TRBV23-1, TRBJ2-3)
CISAPAVNRPASTDTQYF

SEQ ID NO: 303225 - protein, 15 aa, Homo sapiens
  CDR3 for alpha chain variable domain of TCR clone 151613 (TRAV13-1, TRAJ45)
CAASGSGGGADGLPF

SEQ ID NO: 303226 - protein, 17 aa, Homo sapiens
  CDR3 for beta chain variable domain of TCR clone 151613 (TRBV20-1, TRBJ2-2)
CSASGSGQGGLTGELFC

SEQ ID NO: 303227 - protein, 12 aa, Homo sapiens
  CDR3 for alpha chain variable domain of TCR clone 151614 (TRAV12-2, TRAJ52)
IGGGTSYGKLTF

SEQ ID NO: 303228 - protein, 17 aa, Homo sapiens
  CDR3 for beta chain variable domain of TCR clone 151614 (TRBV12-4, TRBJ1-1)
CASSLWGRGIQNTEAFF

SEQ ID NO: 303229 - protein, 15 aa, Homo sapiens
  CDR3 for alpha chain variable domain of TCR clone 151615 (TRAV17, TRAJ4)
CATDPFSGGYNKLIF

SEQ ID NO: 303230 - protein, 13 aa, Homo sapiens
  CDR3 for beta chain variable domain of TCR clone 151615 (TRBV7-9, TRBJ1-2)
CASSLKQNYGYTF

SEQ ID NO: 303231 - protein, 13 aa, Homo sapiens
  CDR3 for alpha chain variable domain of TCR clone 151616 (TRAV1-1, TRAJ9)
CAAKNTGGFKTIF

SEQ ID NO: 303232 - protein, 15 aa, Homo sapiens
  CDR3 for beta chain variable domain of TCR clone 151616 (TRBV6-3, TRBJ2-7)
CASSSPGTVFYEQYF

SEQ ID NO: 303233 - protein, 13 aa, Homo sapiens
  CDR3 for alpha chain variable domain of TCR clone 151617 (TRAV17, TRAJ9)
CATDYTGGFKTIF

SEQ ID NO: 303234 - protein, 13 aa, Homo sapiens
  CDR3 for beta chain variable domain of TCR clone 151617 (TRBV12-4, TRBJ2-5)
CASRKRGKETQYF

SEQ ID NO: 303235 - protein, 14 aa, Homo sapiens
  CDR3 for alpha chain variable domain of TCR clone 151618 (TRAV13-1, TRAJ9)
CAASALTGGFKTIF

SEQ ID NO: 303236 - protein, 15 aa, Homo sapiens
  CDR3 for beta chain variable domain of TCR clone 151618 (TRBV6-3, TRBJ2-2)
CASSFLATLTGELFF

SEQ ID NO: 303237 - protein, 19 aa, Homo sapiens
  CDR3 for alpha chain variable domain of TCR clone 151619 (TRAV8-3, TRAJ8)
LSTSVLWDPMNTGFQKLVF

SEQ ID NO: 303238 - protein, 13 aa, Homo sapiens
  CDR3 for beta chain variable domain of TCR clone 151619 (TRBV10-2, TRBJ2-3)
CASSESGDPTQYF

SEQ ID NO: 303239 - protein, 11 aa, Homo sapiens
  CDR3 for alpha chain variable domain of TCR clone 151620 (TRAV3, TRAJ21)
CAVGNFNKFYF

SEQ ID NO: 303240 - protein, 13 aa, Homo sapiens
  CDR3 for beta chain variable domain of TCR clone 151620 (TRBV7-9, TRBJ1-2)
CASSLKQDYGYTF

SEQ ID NO: 303241 - protein, 16 aa, Homo sapiens
  CDR3 for alpha chain variable domain of TCR clone 151621 (TRAV17, TRAJ53)
CATDALSGGRNDKLTF

SEQ ID NO: 303242 - protein, 12 aa, Homo sapiens
  CDR3 for beta chain variable domain of TCR clone 151621 (TRBV5-1, TRBJ2-7)
CASSFRGYEQYF

SEQ ID NO: 303243 - protein, 13 aa, Homo sapiens
  CDR3 for alpha chain variable domain of TCR clone 151622 (TRAV13-1, TRAJ13)
CAASKGGYQKGTF

SEQ ID NO: 303244 - protein, 16 aa, Homo sapiens
  CDR3 for beta chain variable domain of TCR clone 151622 (TRBV18, TRBJ1-2)
CASSPPERVTIYGYTF

SEQ ID NO: 303245 - protein, 16 aa, Homo sapiens
  CDR3 for alpha chain variable domain of TCR clone 151623 (TRAV8-2, TRAJ7)
CVVSEGPYYGNNRLAF

SEQ ID NO: 303246 - protein, 11 aa, Homo sapiens
  CDR3 for beta chain variable domain of TCR clone 151623 (TRBV7-9, TRBJ2-3)
CASSGPDTQYF

SEQ ID NO: 303247 - protein, 23 aa, Homo sapiens
  CDR3 for alpha chain variable domain of TCR clone 151624 (TRAV1-1, TRAJ6)
CAVRREEATYLHLEEEPALLLIR

SEQ ID NO: 303248 - protein, 15 aa, Homo sapiens
  CDR3 for beta chain variable domain of TCR clone 151624 (TRBV6-6, TRBJ2-1)
CATRQGVSSYNEQFF

SEQ ID NO: 303249 - protein, 12 aa, Homo sapiens
  CDR3 for alpha chain variable domain of TCR clone 151625 (TRAV13-1, TRAJ21)
CAAKEGFNKFYF

SEQ ID NO: 303250 - protein, 13 aa, Homo sapiens
  CDR3 for beta chain variable domain of TCR clone 151625 (TRBV5-8, TRBJ1-2)
CASSLGGNYGYTF

SEQ ID NO: 303251 - protein, 13 aa, Homo sapiens
  CDR3 for alpha chain variable domain of TCR clone 151626 (TRAV2, TRAJ40)
CAVVTSGTYKYIF

SEQ ID NO: 303252 - protein, 15 aa, Homo sapiens
  CDR3 for beta chain variable domain of TCR clone 151626 (TRBV2, TRBJ2-1)
CASGELAGSYNEQFF

SEQ ID NO: 303253 - protein, 16 aa, Homo sapiens
  CDR3 for alpha chain variable domain of TCR clone 151627 (TRAV12-3, TRAJ53)
CAMSPGSGGSNYKPTF

SEQ ID NO: 303254 - protein, 14 aa, Homo sapiens
  CDR3 for beta chain variable domain of TCR clone 151627 (TRBV12-5, TRBJ2-5)
CASGSRTHQETQYF

SEQ ID NO: 303255 - protein, 11 aa, Homo sapiens
  CDR3 for alpha chain variable domain of TCR clone 151628 (TRAV4, TRAJ31)
CLVGDNARLMF

SEQ ID NO: 303256 - protein, 13 aa, Homo sapiens
  CDR3 for beta chain variable domain of TCR clone 151628 (TRBV28, TRBJ1-2)
CAGRDRGNYGYTF

SEQ ID NO: 303257 - protein, 13 aa, Homo sapiens
  CDR3 for alpha chain variable domain of TCR clone 151629 (TRAV3, TRAJ20)
CAVRDTGDYKLSF

SEQ ID NO: 303258 - protein, 14 aa, Homo sapiens
  CDR3 for beta chain variable domain of TCR clone 151629 (TRBV7-3, TRBJ2-1)
CASSLAGGTNEQFF

SEQ ID NO: 303259 - protein, 13 aa, Homo sapiens
  CDR3 for alpha chain variable domain of TCR clone 151630 (TRAV17, TRAJ30)
CATDADRDDKIIF

SEQ ID NO: 303260 - protein, 15 aa, Homo sapiens
  CDR3 for beta chain variable domain of TCR clone 151630 (TRBV9, TRBJ1-6)
CASSVAGTGDSPLHF

SEQ ID NO: 303261 - protein, 15 aa, Homo sapiens
  CDR3 for alpha chain variable domain of TCR clone 151631 (TRAV12-1, TRAJ44)
CVVDEYTGTASKLTF

SEQ ID NO: 303262 - protein, 16 aa, Homo sapiens
  CDR3 for beta chain variable domain of TCR clone 151631 (TRBV12-4, TRBJ1-5)
CASSRPVGGSNQPQHF

SEQ ID NO: 303263 - protein, 14 aa, Homo sapiens
  CDR3 for alpha chain variable domain of TCR clone 151632 (TRAV12-1, TRAJ23)
CVVTVYNQGGKLIF

SEQ ID NO: 303264 - protein, 13 aa, Homo sapiens
  CDR3 for beta chain variable domain of TCR clone 151632 (TRBV11-2, TRBJ2-5)
CASSFSGQETQYF

SEQ ID NO: 303265 - protein, 15 aa, Homo sapiens
  CDR3 for alpha chain variable domain of TCR clone 151633 (TRAV3, TRAJ3)
CAVRDGHSSASKIIF

SEQ ID NO: 303266 - protein, 17 aa, Homo sapiens
  CDR3 for beta chain variable domain of TCR clone 151633 (TRBV25-1, TRBJ2-7)
CASSDARVVFSSYDQYF

SEQ ID NO: 303267 - protein, 14 aa, Homo sapiens
  CDR3 for alpha chain variable domain of TCR clone 151634 (TRAV8-6, TRAJ4)
CAVSGSGGYNKLIF

SEQ ID NO: 303268 - protein, 13 aa, Homo sapiens
  CDR3 for beta chain variable domain of TCR clone 151634 (TRBV3-1, TRBJ2-5)
CASSPVLQETQYF

SEQ ID NO: 303269 - protein, 13 aa, Homo sapiens
  CDR3 for alpha chain variable domain of TCR clone 151635 (TRAV27, TRAJ41)
CAGEGNSGYALNF

SEQ ID NO: 303270 - protein, 17 aa, Homo sapiens
  CDR3 for beta chain variable domain of TCR clone 151635 (TRBV29-1, TRBJ2-7)
SAALRSWGLAVNYEQYF

SEQ ID NO: 303271 - protein, 20 aa, Homo sapiens
  CDR3 for alpha chain variable domain of TCR clone 151636 (TRAV26-2, TRAJ48)
CCVLLHPETPLNFGNEKLTF

SEQ ID NO: 303272 - protein, 15 aa, Homo sapiens
  CDR3 for beta chain variable domain of TCR clone 151636 (TRBV20-1, TRBJ2-3)
CSARVEGTYTDTQYF

SEQ ID NO: 303273 - protein, 11 aa, Homo sapiens
  CDR3 for alpha chain variable domain of TCR clone 151637 (TRAV21, TRAJ31)
CAVRNNARLMF

SEQ ID NO: 303274 - protein, 13 aa, Homo sapiens
  CDR3 for beta chain variable domain of TCR clone 151637 (TRBV19, TRBJ1-2)
CASSVPGQDGYTF

SEQ ID NO: 303275 - protein, 17 aa, Homo sapiens
  CDR3 for alpha chain variable domain of TCR clone 151638 (TRAV17, TRAJ28)
GATDPRRGGAGSDQLTF

SEQ ID NO: 303276 - protein, 16 aa, Homo sapiens
  CDR3 for beta chain variable domain of TCR clone 151638 (TRBV25-1, TRBJ1-1)
CASSGDRDRGRIEAFF

SEQ ID NO: 303277 - protein, 13 aa, Homo sapiens
  CDR3 for alpha chain variable domain of TCR clone 151639 (TRAV12-3, TRAJ33)
CAMSVNSNYQLIW

SEQ ID NO: 303278 - protein, 16 aa, Homo sapiens
  CDR3 for beta chain variable domain of TCR clone 151639 (TRBV5-1, TRBJ2-2)
CASSSRTGGRTVELFF

SEQ ID NO: 303279 - protein, 15 aa, Homo sapiens
  CDR3 for alpha chain variable domain of TCR clone 151640 (TRAV2, TRAJ44)
CAVEAYTGTASKLTF

SEQ ID NO: 303280 - protein, 14 aa, Homo sapiens
  CDR3 for beta chain variable domain of TCR clone 151640 (TRBV7-3, TRBJ2-1)
CASSLSGSYNEQFF

SEQ ID NO: 303281 - protein, 12 aa, Homo sapiens
  CDR3 for alpha chain variable domain of TCR clone 151641 (TRAV12-3, TRAJ17)
CAMTLTGNKLTS

SEQ ID NO: 303282 - protein, 11 aa, Homo sapiens
  CDR3 for beta chain variable domain of TCR clone 151641 (TRBV28, TRBJ2-1)
CASRRVNEQFF

SEQ ID NO: 303283 - protein, 16 aa, Homo sapiens
  CDR3 for alpha chain variable domain of TCR clone 151642 (TRAV3, TRAJ37)
RAVRPHGSGNTGKLIF

SEQ ID NO: 303284 - protein, 15 aa, Homo sapiens
  CDR3 for beta chain variable domain of TCR clone 151642 (TRBV5-5, TRBJ2-7)
CASSLAAPLTYEQYF

SEQ ID NO: 303285 - protein, 14 aa, Homo sapiens
  CDR3 for alpha chain variable domain of TCR clone 151643 (TRAV1-2, TRAJ16)
CALNRFSDGQKLLF

SEQ ID NO: 303286 - protein, 15 aa, Homo sapiens
  CDR3 for beta chain variable domain of TCR clone 151643 (TRBV7-9, TRBJ1-6)
CASSSPGRGNSPLHF

SEQ ID NO: 303287 - protein, 13 aa, Homo sapiens
  CDR3 for alpha chain variable domain of TCR clone 151644 (TRAV16, TRAJ34)
CALSPYNTDTLIF

SEQ ID NO: 303288 - protein, 17 aa, Homo sapiens
  CDR3 for beta chain variable domain of TCR clone 151644 (TRBV5-1, TRBJ2-1)
CASSTGTSGYSYNEQFF

SEQ ID NO: 303289 - protein, 14 aa, Homo sapiens
  CDR3 for alpha chain variable domain of TCR clone 151645 (TRAV12-2, TRAJ13)
CAVKKTGGYQKVTF

SEQ ID NO: 303290 - protein, 15 aa, Homo sapiens
  CDR3 for beta chain variable domain of TCR clone 151645 (TRBV5-1, TRBJ1-1)
CASSWTGRGNTEAFF

SEQ ID NO: 303291 - protein, 12 aa, Homo sapiens
  CDR3 for alpha chain variable domain of TCR clone 151646 (TRAV8-3, TRAJ20)
CAVGANDYKLSF

SEQ ID NO: 303292 - protein, 15 aa, Homo sapiens
  CDR3 for beta chain variable domain of TCR clone 151646 (TRBV7-9, TRBJ2-7)
CASSLALAEAYEQYF

SEQ ID NO: 303293 - protein, 14 aa, Homo sapiens
  CDR3 for alpha chain variable domain of TCR clone 151647 (TRAV26-1, TRAJ38)
CIADNGGNNRKLIW

SEQ ID NO: 303294 - protein, 13 aa, Homo sapiens
  CDR3 for beta chain variable domain of TCR clone 151647 (TRBV19, TRBJ1-2)
CASSVPGQDGYTF

SEQ ID NO: 303295 - protein, 10 aa, Homo sapiens
  CDR3 for alpha chain variable domain of TCR clone 151648 (TRAV12-2, TRAJ52)
RSTSYGKLTF

SEQ ID NO: 303296 - protein, 13 aa, Homo sapiens
  CDR3 for beta chain variable domain of TCR clone 151648 (TRBV13, TRBJ2-5)
CASSPEVGETQYF

SEQ ID NO: 303297 - protein, 13 aa, Homo sapiens
  CDR3 for alpha chain variable domain of TCR clone 151649 (TRAV21, TRAJ57)
CAVIEGGSEKLVF

SEQ ID NO: 303298 - protein, 14 aa, Homo sapiens
  CDR3 for beta chain variable domain of TCR clone 151649 (TRBV4-1, TRBJ2-2)
CASSQAVNTGELFF

SEQ ID NO: 303299 - protein, 12 aa, Homo sapiens
  CDR3 for alpha chain variable domain of TCR clone 151650 (TRAV27, TRAJ9)
CAGESGGFKTIF

SEQ ID NO: 303300 - protein, 11 aa, Homo sapiens
  CDR3 for beta chain variable domain of TCR clone 151650 (TRBV10-2, TRBJ2-2)
CASSAPTSRCR

SEQ ID NO: 303301 - protein, 18 aa, Homo sapiens
  CDR3 for alpha chain variable domain of TCR clone 151651 (TRAV12-2, )
CAVEDIQNPDPAVYQLRD

SEQ ID NO: 303302 - protein, 18 aa, Homo sapiens
  CDR3 for beta chain variable domain of TCR clone 151651 (TRBV20-1, TRBJ2-6)
CSAETTPTHGSGANVLTF

SEQ ID NO: 303303 - protein, 14 aa, Homo sapiens
  CDR3 for alpha chain variable domain of TCR clone 151652 (TRAV30, TRAJ33)
CGTVAPRTNYQLIW

SEQ ID NO: 303304 - protein, 14 aa, Homo sapiens
  CDR3 for beta chain variable domain of TCR clone 151652 (TRBV7-2, TRBJ2-7)
CASRSQGAAYEQYF

SEQ ID NO: 303305 - protein, 12 aa, Homo sapiens
  CDR3 for alpha chain variable domain of TCR clone 151653 (TRAV12-1, TRAJ40)
CVFYSGTYKYIF

SEQ ID NO: 303306 - protein, 15 aa, Homo sapiens
  CDR3 for beta chain variable domain of TCR clone 151653 (TRBV7-9, TRBJ1-5)
CASSQGHQPNQPQHF

SEQ ID NO: 303307 - protein, 18 aa, Homo sapiens
  CDR3 for alpha chain variable domain of TCR clone 151654 (TRAV21, TRAJ52)
CAVRASPAGGTSYGKLTF

SEQ ID NO: 303308 - protein, 13 aa, Homo sapiens
  CDR3 for beta chain variable domain of TCR clone 151654 (TRBV12-5, TRBJ2-3)
CASSDRQSDTQYF

SEQ ID NO: 303309 - protein, 17 aa, Homo sapiens
  CDR3 for alpha chain variable domain of TCR clone 151655 (TRAV3, TRAJ6)
CAVRDGPRAGGSYISTF

SEQ ID NO: 303310 - protein, 15 aa, Homo sapiens
  CDR3 for beta chain variable domain of TCR clone 151655 (TRBV20-1, TRBJ1-1)
CSASWDRFLNTEAFF

SEQ ID NO: 303311 - protein, 14 aa, Homo sapiens
  CDR3 for alpha chain variable domain of TCR clone 151656 (TRAV13-1, TRAJ9)
CAASALTGGFKTIF

SEQ ID NO: 303312 - protein, 16 aa, Homo sapiens
  CDR3 for beta chain variable domain of TCR clone 151656 (TRBV10-3, TRBJ2-1)
CAIRGGGRGDYNEQFF

SEQ ID NO: 303313 - protein, 11 aa, Homo sapiens
  CDR3 for alpha chain variable domain of TCR clone 151657 (TRAV16, TRAJ42)
CALASQGNLIF

SEQ ID NO: 303314 - protein, 20 aa, Homo sapiens
  CDR3 for beta chain variable domain of TCR clone 151657 (TRBV28, TRBJ2-1)
CASTPIGRSPGLAGGNEQFF

SEQ ID NO: 303315 - protein, 12 aa, Homo sapiens
  CDR3 for alpha chain variable domain of TCR clone 151658 (TRAV12-3, TRAJ17)
CAMTLTGNKLTF

SEQ ID NO: 303316 - protein, 17 aa, Homo sapiens
  CDR3 for beta chain variable domain of TCR clone 151658 (TRBV20-1, TRBJ2-2)
CSASGSGRGGLTGELFF

SEQ ID NO: 303317 - protein, 14 aa, Homo sapiens
  CDR3 for alpha chain variable domain of TCR clone 151659 (TRAV30, TRAJ33)
CGTERRFSDYQLIW

SEQ ID NO: 303318 - protein, 16 aa, Homo sapiens
  CDR3 for beta chain variable domain of TCR clone 151659 (TRBV7-3, TRBJ2-2)
CASSLKRGTLSGELFF

SEQ ID NO: 303319 - protein, 13 aa, Homo sapiens
  CDR3 for alpha chain variable domain of TCR clone 151660 (TRAV3, TRAJ21)
CALREPNFNKFYF

SEQ ID NO: 303320 - protein, 16 aa, Homo sapiens
  CDR3 for beta chain variable domain of TCR clone 151660 (TRBV20-1, TRBJ2-2)
CSASASGIPGAGELFF

SEQ ID NO: 303321 - protein, 12 aa, Homo sapiens
  CDR3 for alpha chain variable domain of TCR clone 151661 (TRAV30, TRAJ39)
CGRGNAGNMLTF

SEQ ID NO: 303322 - protein, 14 aa, Homo sapiens
  CDR3 for beta chain variable domain of TCR clone 151661 (TRBV11-2, TRBJ2-3)
CASSLYAGRDTQYF

SEQ ID NO: 303323 - protein, 13 aa, Homo sapiens
  CDR3 for alpha chain variable domain of TCR clone 151662 (TRAV25, TRAJ35)
CAGGGGFGNGLHC

SEQ ID NO: 303324 - protein, 14 aa, Homo sapiens
  CDR3 for beta chain variable domain of TCR clone 151662 (TRBV6-1, TRBJ2-1)
CASAGGAIKNEQFF

SEQ ID NO: 303325 - protein, 16 aa, Homo sapiens
  CDR3 for alpha chain variable domain of TCR clone 151663 (TRAV3, TRAJ37)
CAVRFRGSGNTGKLIF

SEQ ID NO: 303326 - protein, 16 aa, Homo sapiens
  CDR3 for beta chain variable domain of TCR clone 151663 (TRBV9, TRBJ2-1)
CASSVGGGGNYNEQFF

SEQ ID NO: 303327 - protein, 12 aa, Homo sapiens
  CDR3 for alpha chain variable domain of TCR clone 151664 (TRAV2, TRAJ31)
CAVEYNNARLMF

SEQ ID NO: 303328 - protein, 12 aa, Homo sapiens
  CDR3 for beta chain variable domain of TCR clone 151664 (TRBV5-5, TRBJ2-5)
CASSYFGETQYF

SEQ ID NO: 303329 - protein, 12 aa, Homo sapiens
  CDR3 for alpha chain variable domain of TCR clone 151665 (TRAV24, TRAJ41)
CAPYDSGYTLNF

SEQ ID NO: 303330 - protein, 13 aa, Homo sapiens
  CDR3 for beta chain variable domain of TCR clone 151665 (TRBV6-5, TRBJ2-1)
CASSYELSNEQFF

SEQ ID NO: 303331 - protein, 13 aa, Homo sapiens
  CDR3 for alpha chain variable domain of TCR clone 151666 (TRAV1-2, TRAJ9)
CAALNTGGFKTIF

SEQ ID NO: 303332 - protein, 15 aa, Homo sapiens
  CDR3 for beta chain variable domain of TCR clone 151666 (TRBV10-3, TRBJ1-2)
CAISESRESNYGYTF

SEQ ID NO: 303333 - protein, 16 aa, Homo sapiens
  CDR3 for alpha chain variable domain of TCR clone 151667 (TRAV27, TRAJ52)
CAGAPAGGTSYGKLTF

SEQ ID NO: 303334 - protein, 15 aa, Homo sapiens
  CDR3 for beta chain variable domain of TCR clone 151667 (TRBV6-1, TRBJ2-5)
CASSEGWGIQETQYF

SEQ ID NO: 303335 - protein, 11 aa, Homo sapiens
  CDR3 for alpha chain variable domain of TCR clone 151668 (TRAV13-2, TRAJ23)
CAESPRGKLIF

SEQ ID NO: 303336 - protein, 18 aa, Homo sapiens
  CDR3 for beta chain variable domain of TCR clone 151668 (TRBV11-2, TRBJ2-3)
CASSLGGASRGAPNTQYF

SEQ ID NO: 303337 - protein, 14 aa, Homo sapiens
  CDR3 for alpha chain variable domain of TCR clone 151669 (TRAV12-2, TRAJ17)
RGVLFKAAGNKLTF

SEQ ID NO: 303338 - protein, 17 aa, Homo sapiens
  CDR3 for beta chain variable domain of TCR clone 151669 (TRBV20-1, TRBJ2-2)
CSASGSGQGGLTGELFF

SEQ ID NO: 303339 - protein, 13 aa, Homo sapiens
  CDR3 for alpha chain variable domain of TCR clone 151670 (TRAV13-1, TRAJ21)
CAASIYNFNKFYF

SEQ ID NO: 303340 - protein, 16 aa, Homo sapiens
  CDR3 for beta chain variable domain of TCR clone 151670 (TRBV2, TRBJ2-1)
CASSVGGSLSYNEQFF

SEQ ID NO: 303341 - protein, 14 aa, Homo sapiens
  CDR3 for alpha chain variable domain of TCR clone 151671 (TRAV13-1, TRAJ35)
CAASKGGVGNVLHC

SEQ ID NO: 303342 - protein, 13 aa, Homo sapiens
  CDR3 for beta chain variable domain of TCR clone 151671 (TRBV7-3, TRBJ1-1)
CAISQDWGAEAFF

SEQ ID NO: 303343 - protein, 16 aa, Homo sapiens
  CDR3 for alpha chain variable domain of TCR clone 151672 (TRAV3, TRAJ10)
CAARDMRAGGGNKLTF

SEQ ID NO: 303344 - protein, 17 aa, Homo sapiens
  CDR3 for beta chain variable domain of TCR clone 151672 (TRBV28, TRBJ2-5)
CASSTPEGDALQETQYF

SEQ ID NO: 303345 - protein, 14 aa, Homo sapiens
  CDR3 for alpha chain variable domain of TCR clone 151673 (TRAV2, TRAJ29)
CAVTPPSGNTPLGF

SEQ ID NO: 303346 - protein, 13 aa, Homo sapiens
  CDR3 for beta chain variable domain of TCR clone 151673 (TRBV11-2, TRBJ2-1)
CASSLGLAGGRFF

SEQ ID NO: 303347 - protein, 15 aa, Homo sapiens
  CDR3 for alpha chain variable domain of TCR clone 151674 (TRAV2, TRAJ9)
CAVAALNTGGFRTIF

SEQ ID NO: 303348 - protein, 13 aa, Homo sapiens
  CDR3 for beta chain variable domain of TCR clone 151674 (TRBV11-2, TRBJ2-5)
CASSSTGEETQYF

SEQ ID NO: 303349 - protein, 11 aa, Homo sapiens
  CDR3 for alpha chain variable domain of TCR clone 151675 (TRAV35, TRAJ30)
CAGERDVKIIF

SEQ ID NO: 303350 - protein, 14 aa, Homo sapiens
  CDR3 for beta chain variable domain of TCR clone 151675 (TRBV15, TRBJ2-5)
CATSGDRGQETQYF

SEQ ID NO: 303351 - protein, 15 aa, Homo sapiens
  CDR3 for alpha chain variable domain of TCR clone 151676 (TRAV10, TRAJ39)
CVVSASGNAGNMLTF

SEQ ID NO: 303352 - protein, 13 aa, Homo sapiens
  CDR3 for beta chain variable domain of TCR clone 151676 (TRBV18, TRBJ2-7)
CASQSGGGYEQYC

SEQ ID NO: 303353 - protein, 14 aa, Homo sapiens
  CDR3 for alpha chain variable domain of TCR clone 151677 (TRAV1-2, TRAJ16)
CAVNRFSDGKKLLF

SEQ ID NO: 303354 - protein, 15 aa, Homo sapiens
  CDR3 for beta chain variable domain of TCR clone 151677 (TRBV7-9, TRBJ1-6)
CASSSPGRGNSPLHV

SEQ ID NO: 303355 - protein, 12 aa, Homo sapiens
  CDR3 for alpha chain variable domain of TCR clone 151678 (TRAV2, TRAJ9)
CAVGAGGFKTIF

SEQ ID NO: 303356 - protein, 14 aa, Homo sapiens
  CDR3 for beta chain variable domain of TCR clone 151678 (TRBV20-1, TRBJ1-1)
CSAETRIGGTEAFF

SEQ ID NO: 303357 - protein, 14 aa, Homo sapiens
  CDR3 for alpha chain variable domain of TCR clone 151679 (TRAV26-1, TRAJ38)
CIADNAGNNRKLIW

SEQ ID NO: 303358 - protein, 14 aa, Homo sapiens
  CDR3 for beta chain variable domain of TCR clone 151679 (TRBV20-1, TRBJ1-4)
CSARSGQSNEKLFF

SEQ ID NO: 303359 - protein, 19 aa, Homo sapiens
  CDR3 for alpha chain variable domain of TCR clone 151680 (TRAV26-1, TRAJ28)
CIVRVAHAYSGAGSYQLTF

SEQ ID NO: 303360 - protein, 16 aa, Homo sapiens
  CDR3 for beta chain variable domain of TCR clone 151680 (TRBV5-1, TRBJ2-1)
CASSIRSGGSYNEQFF

SEQ ID NO: 303361 - protein, 12 aa, Homo sapiens
  CDR3 for alpha chain variable domain of TCR clone 151681 (TRAV12-3, TRAJ17)
CAMTLTGNKLTF

SEQ ID NO: 303362 - protein, 14 aa, Homo sapiens
  CDR3 for beta chain variable domain of TCR clone 151681 (TRBV7-2, TRBJ2-7)
CASRSLGAAYEQHF

SEQ ID NO: 303363 - protein, 14 aa, Homo sapiens
  CDR3 for alpha chain variable domain of TCR clone 151682 (TRAV26-1, TRAJ48)
CIVRVGFGNEKLTF

SEQ ID NO: 303364 - protein, 13 aa, Homo sapiens
  CDR3 for beta chain variable domain of TCR clone 151682 (TRBV11-3, TRBJ2-3)
CASSHDAKDTQYF

SEQ ID NO: 303365 - protein, 18 aa, Homo sapiens
  CDR3 for alpha chain variable domain of TCR clone 151683 (TRAV21, TRAJ52)
CAVMPSPAGGTSYGKLTF

SEQ ID NO: 303366 - protein, 12 aa, Homo sapiens
  CDR3 for beta chain variable domain of TCR clone 151683 (TRBV7-9, TRBJ2-7)
CASSLEGYEQYF

SEQ ID NO: 303367 - protein, 13 aa, Homo sapiens
  CDR3 for alpha chain variable domain of TCR clone 151684 (TRAV13-1, TRAJ20)
CVARVSNDYKLSF

SEQ ID NO: 303368 - protein, 16 aa, Homo sapiens
  CDR3 for beta chain variable domain of TCR clone 151684 (TRBV11-1, TRBJ1-1)
CATNTRDRAFNTEAFF

SEQ ID NO: 303369 - protein, 10 aa, Homo sapiens
  CDR3 for alpha chain variable domain of TCR clone 151685 (TRAV29/DV5, TRAJ54)
LIQGAQKLVF

SEQ ID NO: 303370 - protein, 18 aa, Homo sapiens
  CDR3 for beta chain variable domain of TCR clone 151685 (TRBV3-1, TRBJ1-2)
CASSQDVIGWIGDYGYTF

SEQ ID NO: 303371 - protein, 14 aa, Homo sapiens
  CDR3 for alpha chain variable domain of TCR clone 151686 (TRAV8-3, TRAJ10)
CAVGNAGGGNKITF

SEQ ID NO: 303372 - protein, 17 aa, Homo sapiens
  CDR3 for beta chain variable domain of TCR clone 151686 (TRBV27, TRBJ2-7)
CASSTKRPGTGPYEQYF

SEQ ID NO: 303373 - protein, 13 aa, Homo sapiens
  CDR3 for alpha chain variable domain of TCR clone 151687 (TRAV17, TRAJ54)
CAAGIQGAQKLAF

SEQ ID NO: 303374 - protein, 14 aa, Homo sapiens
  CDR3 for beta chain variable domain of TCR clone 151687 (TRBV11-2, TRBJ1-2)
CASSLGTANYGYTF

SEQ ID NO: 303375 - protein, 11 aa, Homo sapiens
  CDR3 for alpha chain variable domain of TCR clone 151688 (TRAV35, TRAJ49)
CAGLFGNQFYF

SEQ ID NO: 303376 - protein, 14 aa, Homo sapiens
  CDR3 for beta chain variable domain of TCR clone 151688 (TRBV6-1, TRBJ1-3)
CASVQGGGGNTIYF

SEQ ID NO: 303377 - protein, 13 aa, Homo sapiens
  CDR3 for alpha chain variable domain of TCR clone 151689 (TRAV2, TRAJ29)
CAEQSSGNTPLVF

SEQ ID NO: 303378 - protein, 13 aa, Homo sapiens
  CDR3 for beta chain variable domain of TCR clone 151689 (TRBV28, TRBJ1-2)
CASSPGSRNGDTF

SEQ ID NO: 303379 - protein, 13 aa, Homo sapiens
  CDR3 for alpha chain variable domain of TCR clone 151690 (TRAV8-3, TRAJ36)
CAVGATGANNLFF

SEQ ID NO: 303380 - protein, 12 aa, Homo sapiens
  CDR3 for beta chain variable domain of TCR clone 151690 (TRBV5-1, TRBJ1-2)
CASSQDTYGYTF

SEQ ID NO: 303381 - protein, 21 aa, Homo sapiens
  CDR3 for alpha chain variable domain of TCR clone 151691 (TRAV8-3, TRAJ6)
CAVGGEESTYLQLEEEPALLF

SEQ ID NO: 303382 - protein, 17 aa, Homo sapiens
  CDR3 for beta chain variable domain of TCR clone 151691 (TRBV20-1, TRBJ2-1)
CSASSSGLAGSYNEQFF

SEQ ID NO: 303383 - protein, 11 aa, Homo sapiens
  CDR3 for alpha chain variable domain of TCR clone 151692 (TRAV13-1, TRAJ15)
CTATPGTALIF

SEQ ID NO: 303384 - protein, 13 aa, Homo sapiens
  CDR3 for beta chain variable domain of TCR clone 151692 (TRBV7-2, TRBJ2-1)
CASSLGVYNEQFF

SEQ ID NO: 303385 - protein, 12 aa, Homo sapiens
  CDR3 for alpha chain variable domain of TCR clone 151693 (TRAV8-3, TRAJ20)
CPVGANDYKLSF

SEQ ID NO: 303386 - protein, 18 aa, Homo sapiens
  CDR3 for beta chain variable domain of TCR clone 151693 (TRBV11-2, TRBJ2-3)
CASSLGGASRGAPNTQYF

SEQ ID NO: 303387 - protein, 14 aa, Homo sapiens
  CDR3 for alpha chain variable domain of TCR clone 151694 (TRAV8-6, TRAJ8)
CAVNENTGFQKLVF

SEQ ID NO: 303388 - protein, 12 aa, Homo sapiens
  CDR3 for beta chain variable domain of TCR clone 151694 (TRBV7-9, TRBJ1-5)
CASSPQGQPQHF

SEQ ID NO: 303389 - protein, 14 aa, Homo sapiens
  CDR3 for alpha chain variable domain of TCR clone 151695 (TRAV12-3, TRAJ12)
CAMSRMDSSYKLIF

SEQ ID NO: 303390 - protein, 14 aa, Homo sapiens
  CDR3 for beta chain variable domain of TCR clone 151695 (TRBV20-1, TRBJ1-4)
CSARSGQSNEKLSF

SEQ ID NO: 303391 - protein, 15 aa, Homo sapiens
  CDR3 for alpha chain variable domain of TCR clone 151696 (TRAV12-3, TRAJ6)
CAMSATTGGSYIPTF

SEQ ID NO: 303392 - protein, 12 aa, Homo sapiens
  CDR3 for beta chain variable domain of TCR clone 151696 (TRBV6-3, TRBJ2-7)
CASSEPGFEQYF

SEQ ID NO: 303393 - protein, 11 aa, Homo sapiens
  CDR3 for alpha chain variable domain of TCR clone 151697 (TRAV12-3, TRAJ49)
CAANTGNQFYF

SEQ ID NO: 303394 - protein, 12 aa, Homo sapiens
  CDR3 for beta chain variable domain of TCR clone 151697 (TRBV6-3, TRBJ2-7)
CASSEPGSEQYF

SEQ ID NO: 303395 - protein, 16 aa, Homo sapiens
  CDR3 for alpha chain variable domain of TCR clone 151698 (TRAV16, TRAJ57)
CAPYLITQVGSEKLVF

SEQ ID NO: 303396 - protein, 17 aa, Homo sapiens
  CDR3 for beta chain variable domain of TCR clone 151698 (TRBV24-1, TRBJ2-4)
CATSDAEARGVRNIQYF

SEQ ID NO: 303397 - protein, 16 aa, Homo sapiens
  CDR3 for alpha chain variable domain of TCR clone 151699 (TRAV12-1, TRAJ42)
CVVNRGYGGSQGNLIF

SEQ ID NO: 303398 - protein, 15 aa, Homo sapiens
  CDR3 for beta chain variable domain of TCR clone 151699 (TRBV12-5, TRBJ2-1)
CASGLPSVGNNEQFF

SEQ ID NO: 303399 - protein, 14 aa, Homo sapiens
  CDR3 for alpha chain variable domain of TCR clone 151700 (TRAV12-3, TRAJ28)
CATNSGAGSYQLTF

SEQ ID NO: 303400 - protein, 14 aa, Homo sapiens
  CDR3 for beta chain variable domain of TCR clone 151700 (TRBV7-3, TRBJ2-2)
CASSSGGYTGELFF

SEQ ID NO: 303401 - protein, 14 aa, Homo sapiens
  CDR3 for alpha chain variable domain of TCR clone 151701 (TRAV13-1, TRAJ13)
CAASRVGGYQKVTF

SEQ ID NO: 303402 - protein, 14 aa, Homo sapiens
  CDR3 for beta chain variable domain of TCR clone 151701 (TRBV19, TRBJ2-1)
CASSPGLAPNEQFF

SEQ ID NO: 303403 - protein, 15 aa, Homo sapiens
  CDR3 for alpha chain variable domain of TCR clone 151702 (TRAV2, TRAJ13)
CATPSYSGGYQKVTF

SEQ ID NO: 303404 - protein, 14 aa, Homo sapiens
  CDR3 for beta chain variable domain of TCR clone 151702 (TRBV4-2, TRBJ2-1)
CASGLGRAYNEQFF

SEQ ID NO: 303405 - protein, 14 aa, Homo sapiens
  CDR3 for alpha chain variable domain of TCR clone 151703 (TRAV2, TRAJ37)
CAVDFTSNTGKLIF

SEQ ID NO: 303406 - protein, 17 aa, Homo sapiens
  CDR3 for beta chain variable domain of TCR clone 151703 (TRBV5-1, TRBJ2-5)
CASSLLGLAANQETQYF

SEQ ID NO: 303407 - protein, 13 aa, Homo sapiens
  CDR3 for alpha chain variable domain of TCR clone 151704 (TRAV2, TRAJ15)
CAVASQAGTALIF

SEQ ID NO: 303408 - protein, 14 aa, Homo sapiens
  CDR3 for beta chain variable domain of TCR clone 151704 (TRBV20-1, TRBJ1-1)
CSAPTRIGGTEAFF

SEQ ID NO: 303409 - protein, 17 aa, Homo sapiens
  CDR3 for alpha chain variable domain of TCR clone 151705 (TRAV3, TRAJ42)
CAVRDWDYGGSQGNLIF

SEQ ID NO: 303410 - protein, 13 aa, Homo sapiens
  CDR3 for beta chain variable domain of TCR clone 151705 (TRBV4-1, TRBJ2-3)
CASSQPPTDTQYF

SEQ ID NO: 303411 - protein, 11 aa, Homo sapiens
  CDR3 for alpha chain variable domain of TCR clone 151706 (TRAV12-3, TRAJ43)
CAMSVSNDMRF

SEQ ID NO: 303412 - protein, 17 aa, Homo sapiens
  CDR3 for beta chain variable domain of TCR clone 151706 (TRBV11-3, TRBJ2-7)
CASSPDQRAPTSSTSGR

SEQ ID NO: 303413 - protein, 14 aa, Homo sapiens
  CDR3 for alpha chain variable domain of TCR clone 151707 (TRAV8-4, TRAJ8)
CAVSVTTGFQKLVF

SEQ ID NO: 303414 - protein, 15 aa, Homo sapiens
  CDR3 for beta chain variable domain of TCR clone 151707 (TRBV20-1, TRBJ2-3)
CSARRTGLSTDTQYF

SEQ ID NO: 303415 - protein, 14 aa, Homo sapiens
  CDR3 for alpha chain variable domain of TCR clone 151708 (TRAV13-1, TRAJ40)
CAARSTSGTYKYIF

SEQ ID NO: 303416 - protein, 15 aa, Homo sapiens
  CDR3 for beta chain variable domain of TCR clone 151708 (TRBV18, TRBJ1-5)
CASSETGGKNQPQHF

SEQ ID NO: 303417 - protein, 14 aa, Homo sapiens
  CDR3 for alpha chain variable domain of TCR clone 151709 (TRAV12-2, TRAJ17)
CAVLFKDAGNKLPF

SEQ ID NO: 303418 - protein, 17 aa, Homo sapiens
  CDR3 for beta chain variable domain of TCR clone 151709 (TRBV20-1, TRBJ2-2)
CSASGSGQGGLTGELFF

SEQ ID NO: 303419 - protein, 14 aa, Homo sapiens
  CDR3 for alpha chain variable domain of TCR clone 151710 (TRAV13-1, TRAJ35)
CAASKGGFGNVLHC

SEQ ID NO: 303420 - protein, 14 aa, Homo sapiens
  CDR3 for beta chain variable domain of TCR clone 151710 (TRBV4-1, TRBJ2-2)
CAGSQAVNTGELFF

SEQ ID NO: 303421 - protein, 12 aa, Homo sapiens
  CDR3 for alpha chain variable domain of TCR clone 151711 (TRAV12-1, TRAJ40)
CVVYSGTYKYIF

SEQ ID NO: 303422 - protein, 14 aa, Homo sapiens
  CDR3 for beta chain variable domain of TCR clone 151711 (TRBV5-1, TRBJ2-3)
CASSLFGPTDTQYF

SEQ ID NO: 303423 - protein, 15 aa, Homo sapiens
  CDR3 for alpha chain variable domain of TCR clone 151712 (TRAV3, TRAJ3)
CALRDGHSRASKIIF

SEQ ID NO: 303424 - protein, 17 aa, Homo sapiens
  CDR3 for beta chain variable domain of TCR clone 151712 (TRBV25-1, TRBJ2-7)
CASSDARVVFSSYEQYF

SEQ ID NO: 303425 - protein, 13 aa, Homo sapiens
  CDR3 for alpha chain variable domain of TCR clone 151713 (TRAV3, TRAJ41)
CAVSSNSGYALNF

SEQ ID NO: 303426 - protein, 13 aa, Homo sapiens
  CDR3 for beta chain variable domain of TCR clone 151713 (TRBV20-1, TRBJ2-2)
CSALSGGTGELFF

SEQ ID NO: 303427 - protein, 11 aa, Homo sapiens
  CDR3 for alpha chain variable domain of TCR clone 151714 (TRAV1-2, TRAJ34)
CAGYNTDKLIF

SEQ ID NO: 303428 - protein, 14 aa, Homo sapiens
  CDR3 for beta chain variable domain of TCR clone 151714 (TRBV25-1, TRBJ1-1)
CASTHLGGNTEAFF

SEQ ID NO: 303429 - protein, 15 aa, Homo sapiens
  CDR3 for alpha chain variable domain of TCR clone 151715 (TRAV38-2/DV8, TRAJ45)
WAYWDSGGGADGLTF

SEQ ID NO: 303430 - protein, 16 aa, Homo sapiens
  CDR3 for beta chain variable domain of TCR clone 151715 (TRBV19, TRBJ1-1)
CASSPTRFWPGTEAFF

SEQ ID NO: 303431 - protein, 20 aa, Homo sapiens
  CDR3 for alpha chain variable domain of TCR clone 151716 (TRAV1-2, TRAJ10)
CLLPLCCERGTHGGGHKLTF

SEQ ID NO: 303432 - protein, 12 aa, Homo sapiens
  CDR3 for beta chain variable domain of TCR clone 151716 (TRBV7-8, TRBJ2-7)
CASSLGDREQYF

SEQ ID NO: 303433 - protein, 12 aa, Homo sapiens
  CDR3 for alpha chain variable domain of TCR clone 151717 (TRAV13-1, TRAJ17)
CAALTAGNKLTF

SEQ ID NO: 303434 - protein, 15 aa, Homo sapiens
  CDR3 for beta chain variable domain of TCR clone 151717 (TRBV7-6, TRBJ1-1)
CASSPPGGANTEAFF

SEQ ID NO: 303435 - protein, 13 aa, Homo sapiens
  CDR3 for alpha chain variable domain of TCR clone 151718 (TRAV12-1, TRAJ22)
CVASGGSARQLTF

SEQ ID NO: 303436 - protein, 14 aa, Homo sapiens
  CDR3 for beta chain variable domain of TCR clone 151718 (TRBV6-1, TRBJ2-6)
CASQPGAGANVLTF

SEQ ID NO: 303437 - protein, 16 aa, Homo sapiens
  CDR3 for alpha chain variable domain of TCR clone 151719 (TRAV21, TRAJ52)
CAVTNAGGTSYGKLTF

SEQ ID NO: 303438 - protein, 16 aa, Homo sapiens
  CDR3 for beta chain variable domain of TCR clone 151719 (TRBV6-1, TRBJ2-5)
CASSETLDRGAETQYF

SEQ ID NO: 303439 - protein, 11 aa, Homo sapiens
  CDR3 for alpha chain variable domain of TCR clone 151720 (TRAV12-1, TRAJ15)
CVVNAGTALIF

SEQ ID NO: 303440 - protein, 16 aa, Homo sapiens
  CDR3 for beta chain variable domain of TCR clone 151720 (TRBV28, TRBJ2-1)
CASSSQVRDSYNEQFF

SEQ ID NO: 303441 - protein, 14 aa, Homo sapiens
  CDR3 for alpha chain variable domain of TCR clone 151721 (TRAV23/DV6, TRAJ6)
CAASSSGGSYIPTF

SEQ ID NO: 303442 - protein, 17 aa, Homo sapiens
  CDR3 for beta chain variable domain of TCR clone 151721 (TRBV20-1, TRBJ2-1)
CSASASGLAGSYNEQFF

SEQ ID NO: 303443 - protein, 14 aa, Homo sapiens
  CDR3 for alpha chain variable domain of TCR clone 151722 (TRAV12-3, TRAJ10)
SHLPLTGGGNKLTF

SEQ ID NO: 303444 - protein, 14 aa, Homo sapiens
  CDR3 for beta chain variable domain of TCR clone 151722 (TRBV19, TRBJ2-1)
CASSIGGDYNEQFF

SEQ ID NO: 303445 - protein, 10 aa, Homo sapiens
  CDR3 for alpha chain variable domain of TCR clone 151723 (TRAV1-2, TRAJ31)
CAFFDARLMF

SEQ ID NO: 303446 - protein, 15 aa, Homo sapiens
  CDR3 for beta chain variable domain of TCR clone 151723 (TRBV4-1, TRBJ2-3)
CASRSTRAGTDTQYF

SEQ ID NO: 303447 - protein, 15 aa, Homo sapiens
  CDR3 for alpha chain variable domain of TCR clone 151724 (TRAV12-3, TRAJ6)
CATSAASGGSYIPTF

SEQ ID NO: 303448 - protein, 13 aa, Homo sapiens
  CDR3 for beta chain variable domain of TCR clone 151724 (TRBV20-1, TRBJ1-2)
CSASTERIYGYTF

SEQ ID NO: 303449 - protein, 14 aa, Homo sapiens
  CDR3 for alpha chain variable domain of TCR clone 151725 (TRAV12-2, TRAJ17)
CAAQFKAAGNKLTF

SEQ ID NO: 303450 - protein, 16 aa, Homo sapiens
  CDR3 for beta chain variable domain of TCR clone 151725 (TRBV20-1, TRBJ2-2)
CIASASGIPGAGELFF

SEQ ID NO: 303451 - protein, 12 aa, Homo sapiens
  CDR3 for alpha chain variable domain of TCR clone 151726 (TRAV36/DV7, TRAJ54)
CAVVRGAQKLVF

SEQ ID NO: 303452 - protein, 14 aa, Homo sapiens
  CDR3 for beta chain variable domain of TCR clone 151726 (TRBV7-3, TRBJ1-1)
CASILKGGNTEAFF

SEQ ID NO: 303453 - protein, 14 aa, Homo sapiens
  CDR3 for alpha chain variable domain of TCR clone 151727 (TRAV1-2, TRAJ6)
CTVSLSGGSYIPKF

SEQ ID NO: 303454 - protein, 14 aa, Homo sapiens
  CDR3 for beta chain variable domain of TCR clone 151727 (TRBV13, TRBJ2-7)
CASSLSRISYEQYF

SEQ ID NO: 303455 - protein, 13 aa, Homo sapiens
  CDR3 for alpha chain variable domain of TCR clone 151728 (TRAV12-1, TRAJ42)
CVVNDPRQGNPIF

SEQ ID NO: 303456 - protein, 15 aa, Homo sapiens
  CDR3 for beta chain variable domain of TCR clone 151728 (TRBV20-1, TRBJ2-3)
CSARESRGQGYTQYF

SEQ ID NO: 303457 - protein, 13 aa, Homo sapiens
  CDR3 for alpha chain variable domain of TCR clone 151729 (TRAV12-2, TRAJ10)
CAVPTGGGNKLTF

SEQ ID NO: 303458 - protein, 11 aa, Homo sapiens
  CDR3 for beta chain variable domain of TCR clone 151729 (TRBV6-1, TRBJ2-1)
CASISSNEQFF

SEQ ID NO: 303459 - protein, 13 aa, Homo sapiens
  CDR3 for alpha chain variable domain of TCR clone 151730 (TRAV27, TRAJ56)
CAGKTGANSKLTF

SEQ ID NO: 303460 - protein, 13 aa, Homo sapiens
  CDR3 for beta chain variable domain of TCR clone 151730 (TRBV2, TRBJ2-7)
CASSGGQANEQYF

SEQ ID NO: 303461 - protein, 15 aa, Homo sapiens
  CDR3 for alpha chain variable domain of TCR clone 151731 (TRAV14/DV4, TRAJ12)
CAMREERDSSYKLNF

SEQ ID NO: 303462 - protein, 16 aa, Homo sapiens
  CDR3 for beta chain variable domain of TCR clone 151731 (TRBV11-2, TRBJ1-2)
CASSLDTGGADYGYTF

SEQ ID NO: 303463 - protein, 14 aa, Homo sapiens
  CDR3 for alpha chain variable domain of TCR clone 151732 (TRAV17, TRAJ22)
CATSPSGSARQLTL

SEQ ID NO: 303464 - protein, 15 aa, Homo sapiens
  CDR3 for beta chain variable domain of TCR clone 151732 (TRBV4-1, TRBJ2-5)
CASSQWDLYQGTQYF

SEQ ID NO: 303465 - protein, 14 aa, Homo sapiens
  CDR3 for alpha chain variable domain of TCR clone 151733 (TRAV12-2, TRAJ24)
CAVTPADSWGKLQF

SEQ ID NO: 303466 - protein, 13 aa, Homo sapiens
  CDR3 for beta chain variable domain of TCR clone 151733 (TRBV19, TRBJ2-7)
CASRKAGGSEKYF

SEQ ID NO: 303467 - protein, 14 aa, Homo sapiens
  CDR3 for alpha chain variable domain of TCR clone 151734 (TRAV8-2, TRAJ23)
CVVSDANQGGKLIF

SEQ ID NO: 303468 - protein, 16 aa, Homo sapiens
  CDR3 for beta chain variable domain of TCR clone 151734 (TRBV4-2, TRBJ2-5)
CASSQELVGSQETQYF

SEQ ID NO: 303469 - protein, 13 aa, Homo sapiens
  CDR3 for alpha chain variable domain of TCR clone 151735 (TRAV13-2, TRAJ40)
CAEFTSGTYKYIF

SEQ ID NO: 303470 - protein, 14 aa, Homo sapiens
  CDR3 for beta chain variable domain of TCR clone 151735 (TRBV25-1, TRBJ1-1)
CASTHLGGNTEAFF

SEQ ID NO: 303471 - protein, 12 aa, Homo sapiens
  CDR3 for alpha chain variable domain of TCR clone 151736 (TRAV27, TRAJ9)
CAGESGGFKTIF

SEQ ID NO: 303472 - protein, 14 aa, Homo sapiens
  CDR3 for beta chain variable domain of TCR clone 151736 (TRBV13, TRBJ2-5)
CASSLERVGETQYF

SEQ ID NO: 303473 - protein, 12 aa, Homo sapiens
  CDR3 for alpha chain variable domain of TCR clone 151737 (TRAV12-1, TRAJ40)
CVVYSGTYKCIF

SEQ ID NO: 303474 - protein, 14 aa, Homo sapiens
  CDR3 for beta chain variable domain of TCR clone 151737 (TRBV7-9, TRBJ2-5)
CASSLDTAQETQYF

SEQ ID NO: 303475 - protein, 14 aa, Homo sapiens
  CDR3 for alpha chain variable domain of TCR clone 151738 (TRAV1-2, TRAJ8)
CAVREDKGFQKLVF

SEQ ID NO: 303476 - protein, 15 aa, Homo sapiens
  CDR3 for beta chain variable domain of TCR clone 151738 (TRBV6-3, TRBJ2-7)
CASSSPGTVLYEQYF

SEQ ID NO: 303477 - protein, 14 aa, Homo sapiens
  CDR3 for alpha chain variable domain of TCR clone 151739 (TRAV12-1, TRAJ17)
CVVNYKAAGNKLTF

SEQ ID NO: 303478 - protein, 12 aa, Homo sapiens
  CDR3 for beta chain variable domain of TCR clone 151739 (TRBV12-5, TRBJ2-5)
CASGQGVETQYF

SEQ ID NO: 303479 - protein, 14 aa, Homo sapiens
  CDR3 for alpha chain variable domain of TCR clone 151740 (TRAV8-3, TRAJ13)
CAVGGTFGYQKVTF

SEQ ID NO: 303480 - protein, 17 aa, Homo sapiens
  CDR3 for beta chain variable domain of TCR clone 151740 (TRBV7-9, TRBJ2-1)
CASSAGTMGRSYNEQFF

SEQ ID NO: 303481 - protein, 12 aa, Homo sapiens
  CDR3 for alpha chain variable domain of TCR clone 151741 (TRAV38-1, TRAJ42)
CSVGRKPRNLIF

SEQ ID NO: 303482 - protein, 17 aa, Homo sapiens
  CDR3 for beta chain variable domain of TCR clone 151741 (TRBV20-1, TRBJ2-1)
CSARDPLAGVWDNEQFF

SEQ ID NO: 303483 - protein, 13 aa, Homo sapiens
  CDR3 for alpha chain variable domain of TCR clone 151742 (TRAV30, TRAJ16)
CGTFGGDGQKLLF

SEQ ID NO: 303484 - protein, 14 aa, Homo sapiens
  CDR3 for beta chain variable domain of TCR clone 151742 (TRBV7-8, TRBJ2-3)
CASSLEAGTDTQYF

SEQ ID NO: 303485 - protein, 12 aa, Homo sapiens
  CDR3 for alpha chain variable domain of TCR clone 151743 (TRAV27, TRAJ9)
CAGESGGFKTIF

SEQ ID NO: 303486 - protein, 14 aa, Homo sapiens
  CDR3 for beta chain variable domain of TCR clone 151743 (TRBV6-1, TRBJ2-1)
CAAAKDGFYNEQFF

SEQ ID NO: 303487 - protein, 13 aa, Homo sapiens
  CDR3 for alpha chain variable domain of TCR clone 151744 (TRAV8-3, TRAJ47)
CAVSMEYGNKLVF

SEQ ID NO: 303488 - protein, 14 aa, Homo sapiens
  CDR3 for beta chain variable domain of TCR clone 151744 (TRBV2, TRBJ1-5)
CASSGTGFNQTQHF

SEQ ID NO: 303489 - protein, 15 aa, Homo sapiens
  CDR3 for alpha chain variable domain of TCR clone 151745 (TRAV34, TRAJ38)
CGADFTPGNNRKLIW

SEQ ID NO: 303490 - protein, 15 aa, Homo sapiens
  CDR3 for beta chain variable domain of TCR clone 151745 (TRBV7-2, TRBJ2-1)
CASRKTGSSYNEQFF

SEQ ID NO: 303491 - protein, 18 aa, Homo sapiens
  CDR3 for alpha chain variable domain of TCR clone 151746 (TRAV12-2, )
CDVEDIQNLDPAVYQLRD

SEQ ID NO: 303492 - protein, 16 aa, Homo sapiens
  CDR3 for beta chain variable domain of TCR clone 151746 (TRBV6-1, TRBJ1-2)
CASSGAWQGRSHGYTF

SEQ ID NO: 303493 - protein, 14 aa, Homo sapiens
  CDR3 for alpha chain variable domain of TCR clone 151747 (TRAV8-2, TRAJ26)
CVVSEWNYGQNFVF

SEQ ID NO: 303494 - protein, 12 aa, Homo sapiens
  CDR3 for beta chain variable domain of TCR clone 151747 (TRBV5-4, TRBJ2-5)
CASNRAGETQYF

SEQ ID NO: 303495 - protein, 15 aa, Homo sapiens
  CDR3 for alpha chain variable domain of TCR clone 151748 (TRAV25, TRAJ53)
CAATGGGGSNYKLTF

SEQ ID NO: 303496 - protein, 18 aa, Homo sapiens
  CDR3 for beta chain variable domain of TCR clone 151748 (TRBV7-9, TRBJ2-7)
CASSLTTSGSRTWYEQYF

SEQ ID NO: 303497 - protein, 12 aa, Homo sapiens
  CDR3 for alpha chain variable domain of TCR clone 151749 (TRAV1-1, TRAJ39)
CAVPVVGNMLTF

SEQ ID NO: 303498 - protein, 18 aa, Homo sapiens
  CDR3 for beta chain variable domain of TCR clone 151749 (TRBV18, TRBJ1-3)
CASSPRGGAGPSGNTIYF

SEQ ID NO: 303499 - protein, 13 aa, Homo sapiens
  CDR3 for alpha chain variable domain of TCR clone 151750 (TRAV8-3, TRAJ44)
CAVVPGTASKLTF

SEQ ID NO: 303500 - protein, 15 aa, Homo sapiens
  CDR3 for beta chain variable domain of TCR clone 151750 (TRBV5-1, TRBJ1-1)
CASSSTTGTNTEAFF

SEQ ID NO: 303501 - protein, 12 aa, Homo sapiens
  CDR3 for alpha chain variable domain of TCR clone 151751 (TRAV21, TRAJ49)
CAVTNTGNQFYF

SEQ ID NO: 303502 - protein, 15 aa, Homo sapiens
  CDR3 for beta chain variable domain of TCR clone 151751 (TRBV5-7, TRBJ2-7)
CASSLGPGRGHEQYF

SEQ ID NO: 303503 - protein, 15 aa, Homo sapiens
  CDR3 for alpha chain variable domain of TCR clone 151752 (TRAV12-3, TRAJ6)
CAMSATTGGSYIPTF

SEQ ID NO: 303504 - protein, 16 aa, Homo sapiens
  CDR3 for beta chain variable domain of TCR clone 151752 (TRBV20-1, TRBJ1-2)
CSASMGQCVANYDYSF

SEQ ID NO: 303505 - protein, 16 aa, Homo sapiens
  CDR3 for alpha chain variable domain of TCR clone 151753 (TRAV12-3, TRAJ28)
CAMMANSGAGSYQLTF

SEQ ID NO: 303506 - protein, 15 aa, Homo sapiens
  CDR3 for beta chain variable domain of TCR clone 151753 (TRBV6-3, TRBJ2-7)
CASSSPGTVFYEQYF

SEQ ID NO: 303507 - protein, 13 aa, Homo sapiens
  CDR3 for alpha chain variable domain of TCR clone 151754 (TRAV2, TRAJ29)
CAAGTSGNTPLVF

SEQ ID NO: 303508 - protein, 16 aa, Homo sapiens
  CDR3 for beta chain variable domain of TCR clone 151754 (TRBV7-9, TRBJ1-2)
CASSPGGGAINYGYTF

SEQ ID NO: 303509 - protein, 13 aa, Homo sapiens
  CDR3 for alpha chain variable domain of TCR clone 151755 (TRAV13-1, TRAJ43)
CAASKNNNNDMRF

SEQ ID NO: 303510 - protein, 14 aa, Homo sapiens
  CDR3 for beta chain variable domain of TCR clone 151755 (TRBV14, TRBJ2-1)
CAGSQVRGRGEQFF

SEQ ID NO: 303511 - protein, 13 aa, Homo sapiens
  CDR3 for alpha chain variable domain of TCR clone 151756 (TRAV2, TRAJ40)
CAVVTSGTYNYIF

SEQ ID NO: 303512 - protein, 16 aa, Homo sapiens
  CDR3 for beta chain variable domain of TCR clone 151756 (TRBV7-3, TRBJ2-1)
CASSLEGYRSYNEQFF

SEQ ID NO: 303513 - protein, 12 aa, Homo sapiens
  CDR3 for alpha chain variable domain of TCR clone 151757 (TRAV2, TRAJ9)
CAVGAGGFKTIF

SEQ ID NO: 303514 - protein, 16 aa, Homo sapiens
  CDR3 for beta chain variable domain of TCR clone 151757 (TRBV5-1, TRBJ2-2)
CASSSRTGGRTGELFF

SEQ ID NO: 303515 - protein, 16 aa, Homo sapiens
  CDR3 for alpha chain variable domain of TCR clone 151758 (TRAV16, TRAJ4)
CALSRMFSGGYNKLIF

SEQ ID NO: 303516 - protein, 16 aa, Homo sapiens
  CDR3 for beta chain variable domain of TCR clone 151758 (TRBV19, TRBJ1-1)
CASSIAEGRMNTEAFF

SEQ ID NO: 303517 - protein, 13 aa, Homo sapiens
  CDR3 for alpha chain variable domain of TCR clone 151759 (TRAV29/DV5, TRAJ31)
CAASRNNKARLMF

SEQ ID NO: 303518 - protein, 16 aa, Homo sapiens
  CDR3 for beta chain variable domain of TCR clone 151759 (TRBV20-1, TRBJ1-4)
CSAPGQGLLTNEKLFF

SEQ ID NO: 303519 - protein, 14 aa, Homo sapiens
  CDR3 for alpha chain variable domain of TCR clone 151760 (TRAV1-2, TRAJ16)
CAVNRFSDGQKLLF

SEQ ID NO: 303520 - protein, 12 aa, Homo sapiens
  CDR3 for beta chain variable domain of TCR clone 151760 (TRBV5-1, TRBJ2-7)
CTSSSTTYEQYF

SEQ ID NO: 303521 - protein, 16 aa, Homo sapiens
  CDR3 for alpha chain variable domain of TCR clone 151761 (TRAV26-1, TRAJ56)
CIVRVAETGANSKLTF

SEQ ID NO: 303522 - protein, 15 aa, Homo sapiens
  CDR3 for beta chain variable domain of TCR clone 151761 (TRBV28, TRBJ1-3)
CASSMGWASGNTIYF

SEQ ID NO: 303523 - protein, 14 aa, Homo sapiens
  CDR3 for alpha chain variable domain of TCR clone 151762 (TRAV13-1, TRAJ44)
CAAKATGTASKLTF

SEQ ID NO: 303524 - protein, 16 aa, Homo sapiens
  CDR3 for beta chain variable domain of TCR clone 151762 (TRBV19, TRBJ2-1)
CASSKAGPSAYNEQFF

SEQ ID NO: 303525 - protein, 12 aa, Homo sapiens
  CDR3 for alpha chain variable domain of TCR clone 151763 (TRAV12-3, TRAJ40)
CAMSSGTYKYTF

SEQ ID NO: 303526 - protein, 13 aa, Homo sapiens
  CDR3 for beta chain variable domain of TCR clone 151763 (TRBV7-3, TRBJ1-1)
CASSQDWGAEAFF

SEQ ID NO: 303527 - protein, 16 aa, Homo sapiens
  CDR3 for alpha chain variable domain of TCR clone 151764 (TRAV17, TRAJ29)
CFLLLCYGATDTPLVF

SEQ ID NO: 303528 - protein, 12 aa, Homo sapiens
  CDR3 for beta chain variable domain of TCR clone 151764 (TRBV7-9, TRBJ2-7)
CASSIKREEQYF

SEQ ID NO: 303529 - protein, 13 aa, Homo sapiens
  CDR3 for alpha chain variable domain of TCR clone 151765 (TRAV21, TRAJ20)
CAVGVFAGYKLSF

SEQ ID NO: 303530 - protein, 13 aa, Homo sapiens
  CDR3 for beta chain variable domain of TCR clone 151765 (TRBV7-2, TRBJ2-2)
CASSLAVTGELFF

SEQ ID NO: 303531 - protein, 12 aa, Homo sapiens
  CDR3 for alpha chain variable domain of TCR clone 151766 (TRAV35, TRAJ39)
LAPNNAGNMLTF

SEQ ID NO: 303532 - protein, 13 aa, Homo sapiens
  CDR3 for beta chain variable domain of TCR clone 151766 (TRBV20-1, TRBJ2-2)
CSASAAGTGELFF

SEQ ID NO: 303533 - protein, 14 aa, Homo sapiens
  CDR3 for alpha chain variable domain of TCR clone 151767 (TRAV12-2, TRAJ4)
CAEDLSCGYNKLIF

SEQ ID NO: 303534 - protein, 13 aa, Homo sapiens
  CDR3 for beta chain variable domain of TCR clone 151767 (TRBV7-9, TRBJ1-2)
CASSLKQNYGYTF

SEQ ID NO: 303535 - protein, 14 aa, Homo sapiens
  CDR3 for alpha chain variable domain of TCR clone 151768 (TRAV12-2, TRAJ48)
CAGNASFGNEKLTF

SEQ ID NO: 303536 - protein, 13 aa, Homo sapiens
  CDR3 for beta chain variable domain of TCR clone 151768 (TRBV28, TRBJ2-7)
CAGAQQGLDEQYF

SEQ ID NO: 303537 - protein, 12 aa, Homo sapiens
  CDR3 for alpha chain variable domain of TCR clone 151769 (TRAV2, TRAJ34)
CAVERNTDKLIF

SEQ ID NO: 303538 - protein, 20 aa, Homo sapiens
  CDR3 for beta chain variable domain of TCR clone 151769 (TRBV7-2, TRBJ2-5)
CGSSFLRGGGRDPVLRARHA

SEQ ID NO: 303539 - protein, 14 aa, Homo sapiens
  CDR3 for alpha chain variable domain of TCR clone 151770 (TRAV23/DV6, TRAJ40)
CAASLTSGTYKYIF

SEQ ID NO: 303540 - protein, 14 aa, Homo sapiens
  CDR3 for beta chain variable domain of TCR clone 151770 (TRBV5-1, TRBJ2-3)
CASSRGQGGGTQYV

SEQ ID NO: 303541 - protein, 12 aa, Homo sapiens
  CDR3 for alpha chain variable domain of TCR clone 151771 (TRAV12-3, TRAJ17)
CAMTLTGNKLTF

SEQ ID NO: 303542 - protein, 15 aa, Homo sapiens
  CDR3 for beta chain variable domain of TCR clone 151771 (TRBV20-1, TRBJ2-7)
CRARDRVSGKDEQYF

SEQ ID NO: 303543 - protein, 14 aa, Homo sapiens
  CDR3 for alpha chain variable domain of TCR clone 151772 (TRAV12-3, TRAJ10)
SHLPLTGGGNKLTF

SEQ ID NO: 303544 - protein, 11 aa, Homo sapiens
  CDR3 for beta chain variable domain of TCR clone 151772 (TRBV27, TRBJ2-3)
CASSLGDTQYF

SEQ ID NO: 303545 - protein, 10 aa, Homo sapiens
  CDR3 for alpha chain variable domain of TCR clone 151773 (TRAV23/DV6, TRAJ57)
GAASSTLSQG

SEQ ID NO: 303546 - protein, 14 aa, Homo sapiens
  CDR3 for beta chain variable domain of TCR clone 151773 (TRBV25-1, TRBJ1-1)
CASTHLGGNTEAFF

SEQ ID NO: 303547 - protein, 16 aa, Homo sapiens
  CDR3 for alpha chain variable domain of TCR clone 151774 (TRAV3, TRAJ37)
CAVRPHGSGNPGQLIF

SEQ ID NO: 303548 - protein, 14 aa, Homo sapiens
  CDR3 for beta chain variable domain of TCR clone 151774 (TRBV25-1, TRBJ1-1)
RASTHLGGNTEAFF

SEQ ID NO: 303549 - protein, 13 aa, Homo sapiens
  CDR3 for alpha chain variable domain of TCR clone 151775 (TRAV13-1, TRAJ40)
CAARTSGTYKYIF

SEQ ID NO: 303550 - protein, 17 aa, Homo sapiens
  CDR3 for beta chain variable domain of TCR clone 151775 (TRBV4-1, TRBJ2-3)
CASSQGYVSGCTDTQYF

SEQ ID NO: 303551 - protein, 15 aa, Homo sapiens
  CDR3 for alpha chain variable domain of TCR clone 151776 (TRAV8-3, TRAJ40)
CAAPYLGSGTYRYIF

SEQ ID NO: 303552 - protein, 16 aa, Homo sapiens
  CDR3 for beta chain variable domain of TCR clone 151776 (TRBV7-3, TRBJ2-3)
CASSLSGYRPEDTQYF

SEQ ID NO: 303553 - protein, 16 aa, Homo sapiens
  CDR3 for alpha chain variable domain of TCR clone 151777 (TRAV20, TRAJ28)
CAVRDPSGAGSYQLTF

SEQ ID NO: 303554 - protein, 12 aa, Homo sapiens
  CDR3 for beta chain variable domain of TCR clone 151777 (TRBV19, TRBJ2-1)
CASSMQDTEQFF

SEQ ID NO: 303555 - protein, 15 aa, Homo sapiens
  CDR3 for alpha chain variable domain of TCR clone 151778 (TRAV26-1, TRAJ40)
CIVRVTTSGTCKYIF

SEQ ID NO: 303556 - protein, 13 aa, Homo sapiens
  CDR3 for beta chain variable domain of TCR clone 151778 (TRBV19, TRBJ2-1)
CASMEFRSNEQFF

SEQ ID NO: 303557 - protein, 14 aa, Homo sapiens
  CDR3 for alpha chain variable domain of TCR clone 151779 (TRAV8-1, TRAJ15)
CAVNGQQAGTALIF

SEQ ID NO: 303558 - protein, 13 aa, Homo sapiens
  CDR3 for beta chain variable domain of TCR clone 151779 (TRBV19, TRBJ1-1)
CASSPSNGGEAFF

SEQ ID NO: 303559 - protein, 14 aa, Homo sapiens
  CDR3 for alpha chain variable domain of TCR clone 151780 (TRAV26-1, TRAJ22)
CIVRVYGSARQLTF

SEQ ID NO: 303560 - protein, 17 aa, Homo sapiens
  CDR3 for beta chain variable domain of TCR clone 151780 (TRBV7-3, TRBJ2-3)
CVSSPGGLAGFGDTQYF

SEQ ID NO: 303561 - protein, 16 aa, Homo sapiens
  CDR3 for alpha chain variable domain of TCR clone 151781 (TRAV12-2, TRAJ43)
CAGDDMRFGAGTRLTV

SEQ ID NO: 303562 - protein, 16 aa, Homo sapiens
  CDR3 for beta chain variable domain of TCR clone 151781 (TRBV2, TRBJ2-4)
CASSEEPGGEQNIQYF

SEQ ID NO: 303563 - protein, 15 aa, Homo sapiens
  CDR3 for alpha chain variable domain of TCR clone 151782 (TRAV17, TRAJ35)
CATAFVIGFGNVLHC

SEQ ID NO: 303564 - protein, 16 aa, Homo sapiens
  CDR3 for beta chain variable domain of TCR clone 151782 (TRBV11-2, TRBJ2-7)
CASSPLAGGPRYEQYL

SEQ ID NO: 303565 - protein, 22 aa, Homo sapiens
  CDR3 for alpha chain variable domain of TCR clone 151783 (TRAV21, TRAJ35)
CALMPIGFGNVLHCVSCTQVIF

SEQ ID NO: 303566 - protein, 12 aa, Homo sapiens
  CDR3 for beta chain variable domain of TCR clone 151783 (TRBV7-9, TRBJ2-7)
CASSIKREEQYF

SEQ ID NO: 303567 - protein, 15 aa, Homo sapiens
  CDR3 for alpha chain variable domain of TCR clone 151784 (TRAV13-1, TRAJ32)
CAASIYGGATNKLIF

SEQ ID NO: 303568 - protein, 17 aa, Homo sapiens
  CDR3 for beta chain variable domain of TCR clone 151784 (TRBV7-3, TRBJ2-5)
CASSLGSGRSGSETQSF

SEQ ID NO: 303569 - protein, 13 aa, Homo sapiens
  CDR3 for alpha chain variable domain of TCR clone 151785 (TRAV25, TRAJ26)
CAGMDNYGQNFVF

SEQ ID NO: 303570 - protein, 15 aa, Homo sapiens
  CDR3 for beta chain variable domain of TCR clone 151785 (TRBV6-1, TRBJ2-1)
CASSELRGQYNEQFL

SEQ ID NO: 303571 - protein, 17 aa, Homo sapiens
  CDR3 for alpha chain variable domain of TCR clone 151786 (TRAV8-2, TRAJ17)
CVGSDRRFKAAGNKLTF

SEQ ID NO: 303572 - protein, 18 aa, Homo sapiens
  CDR3 for beta chain variable domain of TCR clone 151786 (TRBV7-9, TRBJ2-7)
CASSLTTSGSRTWYEQYF

SEQ ID NO: 303573 - protein, 15 aa, Homo sapiens
  CDR3 for alpha chain variable domain of TCR clone 151787 (TRAV26-1, TRAJ40)
CIVRAVPSGTYKYIF

SEQ ID NO: 303574 - protein, 15 aa, Homo sapiens
  CDR3 for beta chain variable domain of TCR clone 151787 (TRBV7-9, TRBJ1-1)
CASSLLEQGGTEAFF

SEQ ID NO: 303575 - protein, 12 aa, Homo sapiens
  CDR3 for alpha chain variable domain of TCR clone 151788 (TRAV27, TRAJ22)
CAGDGAGVEIWF

SEQ ID NO: 303576 - protein, 17 aa, Homo sapiens
  CDR3 for beta chain variable domain of TCR clone 151788 (TRBV5-5, TRBJ1-1)
CTSSLRFRGLMNTEAFF

SEQ ID NO: 303577 - protein, 15 aa, Homo sapiens
  CDR3 for alpha chain variable domain of TCR clone 151789 (TRAV13-2, TRAJ4)
CADPQERGGYNKLIF

SEQ ID NO: 303578 - protein, 14 aa, Homo sapiens
  CDR3 for beta chain variable domain of TCR clone 151789 (TRBV19, TRBJ2-1)
CASPTFVLSGEQFF

SEQ ID NO: 303579 - protein, 15 aa, Homo sapiens
  CDR3 for alpha chain variable domain of TCR clone 151790 (TRAV12-3, TRAJ42)
CAMSGHGGSQGNLIF

SEQ ID NO: 303580 - protein, 13 aa, Homo sapiens
  CDR3 for beta chain variable domain of TCR clone 151790 (TRBV19, TRBJ2-5)
CASSVRAGETQYF

SEQ ID NO: 303581 - protein, 13 aa, Homo sapiens
  CDR3 for alpha chain variable domain of TCR clone 151791 (TRAV2, TRAJ40)
FAVVPSGTYKYIF

SEQ ID NO: 303582 - protein, 14 aa, Homo sapiens
  CDR3 for beta chain variable domain of TCR clone 151791 (TRBV19, TRBJ2-1)
CASPTFVLSGEQFF

SEQ ID NO: 303583 - protein, 14 aa, Homo sapiens
  CDR3 for alpha chain variable domain of TCR clone 151792 (TRAV12-2, TRAJ17)
CAVLFKAAGNKLTF

SEQ ID NO: 303584 - protein, 16 aa, Homo sapiens
  CDR3 for beta chain variable domain of TCR clone 151792 (TRBV12-4, TRBJ2-7)
CASSLIGGTGTYEQYF

SEQ ID NO: 303585 - protein, 16 aa, Homo sapiens
  CDR3 for alpha chain variable domain of TCR clone 151793 (TRAV16, TRAJ4)
CALSRMFSGGYNKLIF

SEQ ID NO: 303586 - protein, 16 aa, Homo sapiens
  CDR3 for beta chain variable domain of TCR clone 151793 (TRBV24-1, TRBJ2-3)
CATSDPGTGATDTQYL

SEQ ID NO: 303587 - protein, 14 aa, Homo sapiens
  CDR3 for alpha chain variable domain of TCR clone 151794 (TRAV35, TRAJ38)
CAGSNAGNNRKLIW

SEQ ID NO: 303588 - protein, 15 aa, Homo sapiens
  CDR3 for beta chain variable domain of TCR clone 151794 (TRBV6-1, TRBJ2-1)
CASSELRGQYNEQFF

SEQ ID NO: 303589 - protein, 14 aa, Homo sapiens
  CDR3 for alpha chain variable domain of TCR clone 151795 (TRAV1-1, TRAJ27)
CAVIYNTNAGKSTF

SEQ ID NO: 303590 - protein, 18 aa, Homo sapiens
  CDR3 for beta chain variable domain of TCR clone 151795 (TRBV7-3, TRBJ2-1)
CASSLTLASGGSMVSSSS

SEQ ID NO: 303591 - protein, 15 aa, Homo sapiens
  CDR3 for alpha chain variable domain of TCR clone 151796 (TRAV17, TRAJ16)
CATARRFADGQKLLF

SEQ ID NO: 303592 - protein, 12 aa, Homo sapiens
  CDR3 for beta chain variable domain of TCR clone 151796 (TRBV2, TRBJ2-7)
CASSDPDYEQYF

SEQ ID NO: 303593 - protein, 15 aa, Homo sapiens
  CDR3 for alpha chain variable domain of TCR clone 151797 (TRAV8-3, TRAJ40)
CAVGPYTSGTYKYIL

SEQ ID NO: 303594 - protein, 16 aa, Homo sapiens
  CDR3 for beta chain variable domain of TCR clone 151797 (TRBV7-2, TRBJ2-7)
CASSLDPGGGSGGQYF

SEQ ID NO: 303595 - protein, 13 aa, Homo sapiens
  CDR3 for alpha chain variable domain of TCR clone 151798 (TRAV2, TRAJ40)
CAVVTSGTYKYIF

SEQ ID NO: 303596 - protein, 16 aa, Homo sapiens
  CDR3 for beta chain variable domain of TCR clone 151798 (TRBV29-1, TRBJ2-6)
CSVEDMTYSGANVLTF

SEQ ID NO: 303597 - protein, 21 aa, Homo sapiens
  CDR3 for alpha chain variable domain of TCR clone 151799 (TRAV8-3, TRAJ6)
CAVGGEEATYLHLEEEPALFF

SEQ ID NO: 303598 - protein, 14 aa, Homo sapiens
  CDR3 for beta chain variable domain of TCR clone 151799 (TRBV5-1, TRBJ2-7)
CASSRGESLYEQYF

SEQ ID NO: 303599 - protein, 16 aa, Homo sapiens
  CDR3 for alpha chain variable domain of TCR clone 151800 (TRAV27, TRAJ52)
CAGAGAGGTSYGKLTF

SEQ ID NO: 303600 - protein, 17 aa, Homo sapiens
  CDR3 for beta chain variable domain of TCR clone 151800 (TRBV24-1, TRBJ2-3)
RATSDLPSGEDTDTQYF

SEQ ID NO: 303601 - protein, 13 aa, Homo sapiens
  CDR3 for alpha chain variable domain of TCR clone 151801 (TRAV12-3, TRAJ33)
CAMSVNSNYQLIW

SEQ ID NO: 303602 - protein, 16 aa, Homo sapiens
  CDR3 for beta chain variable domain of TCR clone 151801 (TRBV4-2, TRBJ1-1)
CASSQAGFGMNTEAFF

SEQ ID NO: 303603 - protein, 13 aa, Homo sapiens
  CDR3 for alpha chain variable domain of TCR clone 151802 (TRAV21, TRAJ27)
CAARPGNAGISTF

SEQ ID NO: 303604 - protein, 14 aa, Homo sapiens
  CDR3 for beta chain variable domain of TCR clone 151802 (TRBV7-6, TRBJ2-3)
CASSLRTVTDTQYF

SEQ ID NO: 303605 - protein, 15 aa, Homo sapiens
  CDR3 for alpha chain variable domain of TCR clone 151803 (TRAV8-3, TRAJ7)
CAVGSISYGNNRLAF

SEQ ID NO: 303606 - protein, 15 aa, Homo sapiens
  CDR3 for beta chain variable domain of TCR clone 151803 (TRBV4-2, TRBJ1-1)
CAGSQEDLPRTEAFF

SEQ ID NO: 303607 - protein, 15 aa, Homo sapiens
  CDR3 for alpha chain variable domain of TCR clone 151804 (TRAV38-1, TRAJ37)
CAFIHGSGNTGKLIF

SEQ ID NO: 303608 - protein, 16 aa, Homo sapiens
  CDR3 for beta chain variable domain of TCR clone 151804 (TRBV2, TRBJ2-7)
CASKSPPGQGPYEQYF

SEQ ID NO: 303609 - protein, 14 aa, Homo sapiens
  CDR3 for alpha chain variable domain of TCR clone 151805 (TRAV12-2, TRAJ40)
CAVKIPSGTYKYIF

SEQ ID NO: 303610 - protein, 16 aa, Homo sapiens
  CDR3 for beta chain variable domain of TCR clone 151805 (TRBV28, TRBJ2-5)
CASSCSPAGGWETQYF

SEQ ID NO: 303611 - protein, 14 aa, Homo sapiens
  CDR3 for alpha chain variable domain of TCR clone 151806 (TRAV1-2, TRAJ16)
CAVNRFSDGQQLLF

SEQ ID NO: 303612 - protein, 15 aa, Homo sapiens
  CDR3 for beta chain variable domain of TCR clone 151806 (TRBV9, TRBJ2-1)
CASSLAGSSYNEQFF

SEQ ID NO: 303613 - protein, 15 aa, Homo sapiens
  CDR3 for alpha chain variable domain of TCR clone 151807 (TRAV8-3, TRAJ15)
CAVGPPNQAGTALIF

SEQ ID NO: 303614 - protein, 14 aa, Homo sapiens
  CDR3 for beta chain variable domain of TCR clone 151807 (TRBV20-1, TRBJ2-1)
CSPNDEASYNEQFF

SEQ ID NO: 303615 - protein, 18 aa, Homo sapiens
  CDR3 for alpha chain variable domain of TCR clone 151808 (TRAV3, TRAJ17)
CAVRARRGGRSCGNKLTF

SEQ ID NO: 303616 - protein, 14 aa, Homo sapiens
  CDR3 for beta chain variable domain of TCR clone 151808 (TRBV4-1, TRBJ2-2)
CASSQAVNTGELFF

SEQ ID NO: 303617 - protein, 11 aa, Homo sapiens
  CDR3 for alpha chain variable domain of TCR clone 151809 (TRAV3, TRAJ21)
CAVGNCNKFYF

SEQ ID NO: 303618 - protein, 16 aa, Homo sapiens
  CDR3 for beta chain variable domain of TCR clone 151809 (TRBV19, TRBJ2-1)
CASSNAGPSSYNEQFF

SEQ ID NO: 303619 - protein, 13 aa, Homo sapiens
  CDR3 for alpha chain variable domain of TCR clone 151810 (TRAV26-2, TRAJ43)
CILRAVNNNDMRF

SEQ ID NO: 303620 - protein, 13 aa, Homo sapiens
  CDR3 for beta chain variable domain of TCR clone 151810 (TRBV12-4, TRBJ1-2)
CASSLRQGKGYTF

SEQ ID NO: 303621 - protein, 14 aa, Homo sapiens
  CDR3 for alpha chain variable domain of TCR clone 151811 (TRAV1-2, TRAJ16)
CAVNRFSDGPKLLF

SEQ ID NO: 303622 - protein, 15 aa, Homo sapiens
  CDR3 for beta chain variable domain of TCR clone 151811 (TRBV9, TRBJ1-6)
CASSVAGTGDSPVHF

SEQ ID NO: 303623 - protein, 15 aa, Homo sapiens
  CDR3 for alpha chain variable domain of TCR clone 151812 (TRAV3, TRAJ11)
CAVRDRGSGYSTLTF

SEQ ID NO: 303624 - protein, 14 aa, Homo sapiens
  CDR3 for beta chain variable domain of TCR clone 151812 (TRBV25-1, TRBJ1-1)
CASTHLGGNTEAFF

SEQ ID NO: 303625 - protein, 12 aa, Homo sapiens
  CDR3 for alpha chain variable domain of TCR clone 151813 (TRAV12-2, TRAJ31)
CAVNTPDARLMF

SEQ ID NO: 303626 - protein, 15 aa, Homo sapiens
  CDR3 for beta chain variable domain of TCR clone 151813 (TRBV4-2, TRBJ1-1)
CASSQDQGLNTEVFF

SEQ ID NO: 303627 - protein, 12 aa, Homo sapiens
  CDR3 for alpha chain variable domain of TCR clone 151814 (TRAV12-3, TRAJ17)
CAMTLTGNKLTF

SEQ ID NO: 303628 - protein, 13 aa, Homo sapiens
  CDR3 for beta chain variable domain of TCR clone 151814 (TRBV12-4, TRBJ1-1)
CASSPGTGFKAFF

SEQ ID NO: 303629 - protein, 15 aa, Homo sapiens
  CDR3 for alpha chain variable domain of TCR clone 151815 (TRAV21, TRAJ53)
CATLNSGGSNYKLTF

SEQ ID NO: 303630 - protein, 12 aa, Homo sapiens
  CDR3 for beta chain variable domain of TCR clone 151815 (TRBV14, TRBJ2-4)
CASSNLNSIQYF

SEQ ID NO: 303631 - protein, 10 aa, Homo sapiens
  CDR3 for alpha chain variable domain of TCR clone 151816 (TRAV13-2, TRAJ49)
CADTGNQFYF

SEQ ID NO: 303632 - protein, 15 aa, Homo sapiens
  CDR3 for beta chain variable domain of TCR clone 151816 (TRBV20-1, TRBJ2-7)
CSARVPAAYFYEQYF

SEQ ID NO: 303633 - protein, 14 aa, Homo sapiens
  CDR3 for alpha chain variable domain of TCR clone 151817 (TRAV21, TRAJ21)
CAVGVEDNFNKFYF

SEQ ID NO: 303634 - protein, 17 aa, Homo sapiens
  CDR3 for beta chain variable domain of TCR clone 151817 (TRBV20-1, TRBJ2-2)
GSASGSGQGGLTGELFF

SEQ ID NO: 303635 - protein, 15 aa, Homo sapiens
  CDR3 for alpha chain variable domain of TCR clone 151818 (TRAV21, TRAJ24)
CAARSSTDSWGILQF

SEQ ID NO: 303636 - protein, 14 aa, Homo sapiens
  CDR3 for beta chain variable domain of TCR clone 151818 (TRBV11-2, TRBJ2-5)
CASSRTGGIETQYF

SEQ ID NO: 303637 - protein, 17 aa, Homo sapiens
  CDR3 for alpha chain variable domain of TCR clone 151819 (TRAV3, TRAJ38)
CAVRDCLNAGNNRKLIW

SEQ ID NO: 303638 - protein, 14 aa, Homo sapiens
  CDR3 for beta chain variable domain of TCR clone 151819 (TRBV6-3, TRBJ1-1)
CASSNLLPGAEAFF

SEQ ID NO: 303639 - protein, 13 aa, Homo sapiens
  CDR3 for alpha chain variable domain of TCR clone 151820 (TRAV8-6, TRAJ49)
CAVITNTGNQFYF

SEQ ID NO: 303640 - protein, 19 aa, Homo sapiens
  CDR3 for beta chain variable domain of TCR clone 151820 (TRBV28, TRBJ2-7)
CASSYSGTSRLGWVYEQYF

SEQ ID NO: 303641 - protein, 14 aa, Homo sapiens
  CDR3 for alpha chain variable domain of TCR clone 151821 (TRAV1-2, TRAJ16)
WAVNRFSDGQKLLF

SEQ ID NO: 303642 - protein, 15 aa, Homo sapiens
  CDR3 for beta chain variable domain of TCR clone 151821 (TRBV7-9, TRBJ1-6)
CASSSPGRGNSTLHF

SEQ ID NO: 303643 - protein, 14 aa, Homo sapiens
  CDR3 for alpha chain variable domain of TCR clone 151822 (TRAV9-2, TRAJ39)
CALYIYNTGNMLTF

SEQ ID NO: 303644 - protein, 15 aa, Homo sapiens
  CDR3 for beta chain variable domain of TCR clone 151822 (TRBV10-1, TRBJ2-3)
CASSATSGGFDTQYF

SEQ ID NO: 303645 - protein, 14 aa, Homo sapiens
  CDR3 for alpha chain variable domain of TCR clone 151823 (TRAV23/DV6, TRAJ58)
CAGMRETIGSRLTF

SEQ ID NO: 303646 - protein, 13 aa, Homo sapiens
  CDR3 for beta chain variable domain of TCR clone 151823 (TRBV28, TRBJ2-7)
CASRSSGVYEQYF

SEQ ID NO: 303647 - protein, 23 aa, Homo sapiens
  CDR3 for alpha chain variable domain of TCR clone 151824 (TRAV26-1, TRAJ38)
CIADNAGNNHIQNPDPALYQLRD

SEQ ID NO: 303648 - protein, 15 aa, Homo sapiens
  CDR3 for beta chain variable domain of TCR clone 151824 (TRBV27, TRBJ2-1)
CASSNGGGSSNEQFF

SEQ ID NO: 303649 - protein, 15 aa, Homo sapiens
  CDR3 for alpha chain variable domain of TCR clone 151825 (TRAV3, TRAJ13)
CAVRDIAGGYQNVTF

SEQ ID NO: 303650 - protein, 13 aa, Homo sapiens
  CDR3 for beta chain variable domain of TCR clone 151825 (TRBV2, TRBJ2-2)
CASSKKNTGELFF

SEQ ID NO: 303651 - protein, 13 aa, Homo sapiens
  CDR3 for alpha chain variable domain of TCR clone 151826 (TRAV3, TRAJ21)
CDVREPDFNKFYF

SEQ ID NO: 303652 - protein, 15 aa, Homo sapiens
  CDR3 for beta chain variable domain of TCR clone 151826 (TRBV2, TRBJ2-1)
CASSELAGGYNEQFF

SEQ ID NO: 303653 - protein, 14 aa, Homo sapiens
  CDR3 for alpha chain variable domain of TCR clone 151827 (TRAV13-1, TRAJ35)
CAASKGGFGNVLHC

SEQ ID NO: 303654 - protein, 13 aa, Homo sapiens
  CDR3 for beta chain variable domain of TCR clone 151827 (TRBV12-3, TRBJ2-7)
CASSPTETYEQYF

SEQ ID NO: 303655 - protein, 12 aa, Homo sapiens
  CDR3 for alpha chain variable domain of TCR clone 151828 (TRAV21, TRAJ35)
CAVVGFGNVLHC

SEQ ID NO: 303656 - protein, 17 aa, Homo sapiens
  CDR3 for beta chain variable domain of TCR clone 151828 (TRBV13, TRBJ2-3)
CASSLSRVAGGRNTQYF

SEQ ID NO: 303657 - protein, 12 aa, Homo sapiens
  CDR3 for alpha chain variable domain of TCR clone 151829 (TRAV12-2, TRAJ10)
WGVTGGGNKLTF

SEQ ID NO: 303658 - protein, 14 aa, Homo sapiens
  CDR3 for beta chain variable domain of TCR clone 151829 (TRBV11-3, TRBJ2-3)
CASSLDPATDTQYF

SEQ ID NO: 303659 - protein, 13 aa, Homo sapiens
  CDR3 for alpha chain variable domain of TCR clone 151830 (TRAV13-1, TRAJ10)
CAALEGGGNKLTF

SEQ ID NO: 303660 - protein, 15 aa, Homo sapiens
  CDR3 for beta chain variable domain of TCR clone 151830 (TRBV6-1, TRBJ2-6)
CASSSRPSGANVLTF

SEQ ID NO: 303661 - protein, 19 aa, Homo sapiens
  CDR3 for alpha chain variable domain of TCR clone 151831 (TRAV1-2, TRAJ26)
CLLPLCCERPDNYGQNFVF

SEQ ID NO: 303662 - protein, 15 aa, Homo sapiens
  CDR3 for beta chain variable domain of TCR clone 151831 (TRBV6-1, TRBJ1-1)
CASSEYPRMNTEAFF

SEQ ID NO: 303663 - protein, 16 aa, Homo sapiens
  CDR3 for alpha chain variable domain of TCR clone 151832 (TRAV4, TRAJ9)
CFVGDPNRPGGFKTIF

SEQ ID NO: 303664 - protein, 16 aa, Homo sapiens
  CDR3 for beta chain variable domain of TCR clone 151832 (TRBV28, TRBJ1-4)
CASSPPYRGRSGKLFF

SEQ ID NO: 303665 - protein, 13 aa, Homo sapiens
  CDR3 for alpha chain variable domain of TCR clone 151833 (TRAV22, TRAJ37)
CAVPSSNTGKLIF

SEQ ID NO: 303666 - protein, 14 aa, Homo sapiens
  CDR3 for beta chain variable domain of TCR clone 151833 (TRBV2, TRBJ2-1)
CSSELAGSYNEQFF

SEQ ID NO: 303667 - protein, 12 aa, Homo sapiens
  CDR3 for alpha chain variable domain of TCR clone 151834 (TRAV12-3, TRAJ17)
RAMTLTGNKPTF

SEQ ID NO: 303668 - protein, 14 aa, Homo sapiens
  CDR3 for beta chain variable domain of TCR clone 151834 (TRBV9, TRBJ2-1)
CASSVVEAYNEQFF

SEQ ID NO: 303669 - protein, 13 aa, Homo sapiens
  CDR3 for alpha chain variable domain of TCR clone 151835 (TRAV20, TRAJ37)
CAGCSSNTGKLIF

SEQ ID NO: 303670 - protein, 18 aa, Homo sapiens
  CDR3 for beta chain variable domain of TCR clone 151835 (TRBV4-1, TRBJ1-5)
CASSQDPRGQGLNQPQHF

SEQ ID NO: 303671 - protein, 12 aa, Homo sapiens
  CDR3 for alpha chain variable domain of TCR clone 151836 (TRAV21, TRAJ31)
CAVWGNNARLMF

SEQ ID NO: 303672 - protein, 12 aa, Homo sapiens
  CDR3 for beta chain variable domain of TCR clone 151836 (TRBV11-2, TRBJ2-2)
CASSLGGGELFF

SEQ ID NO: 303673 - protein, 11 aa, Homo sapiens
  CDR3 for alpha chain variable domain of TCR clone 151837 (TRAV12-3, TRAJ26)
CAMSHGQNLVF

SEQ ID NO: 303674 - protein, 15 aa, Homo sapiens
  CDR3 for beta chain variable domain of TCR clone 151837 (TRBV15, TRBJ1-3)
CATSRDRGPGNTIYF

SEQ ID NO: 303675 - protein, 10 aa, Homo sapiens
  CDR3 for alpha chain variable domain of TCR clone 151838 (TRAV12-1, TRAJ6)
CVVARIRRKL

SEQ ID NO: 303676 - protein, 15 aa, Homo sapiens
  CDR3 for beta chain variable domain of TCR clone 151838 (TRBV7-3, TRBJ2-1)
CASSLKASEYNERFF

SEQ ID NO: 303677 - protein, 13 aa, Homo sapiens
  CDR3 for alpha chain variable domain of TCR clone 151839 (TRAV13-1, TRAJ10)
CAALEGGRNKLTF

SEQ ID NO: 303678 - protein, 17 aa, Homo sapiens
  CDR3 for beta chain variable domain of TCR clone 151839 (TRBV7-3, TRBJ2-2)
CASSLSGTSGGTGELFS

SEQ ID NO: 303679 - protein, 16 aa, Homo sapiens
  CDR3 for alpha chain variable domain of TCR clone 151840 (TRAV3, TRAJ37)
CAVRGKGSGNTGKLIF

SEQ ID NO: 303680 - protein, 13 aa, Homo sapiens
  CDR3 for beta chain variable domain of TCR clone 151840 (TRBV7-9, TRBJ1-2)
CASSLKQNYGYTL

SEQ ID NO: 303681 - protein, 11 aa, Homo sapiens
  CDR3 for alpha chain variable domain of TCR clone 151841 (TRAV23/DV6, TRAJ29)
CAASRNTPLVF

SEQ ID NO: 303682 - protein, 15 aa, Homo sapiens
  CDR3 for beta chain variable domain of TCR clone 151841 (TRBV7-3, TRBJ2-2)
CASSETGQGTGELFC

SEQ ID NO: 303683 - protein, 10 aa, Homo sapiens
  CDR3 for alpha chain variable domain of TCR clone 151842 (TRAV8-2, TRAJ35)
CVGGGGGLWE

SEQ ID NO: 303684 - protein, 14 aa, Homo sapiens
  CDR3 for beta chain variable domain of TCR clone 151842 (TRBV2, TRBJ2-5)
CASSEVLAQETQYF

SEQ ID NO: 303685 - protein, 15 aa, Homo sapiens
  CDR3 for alpha chain variable domain of TCR clone 151843 (TRAV13-1, TRAJ10)
CAATILTGGGNKLTF

SEQ ID NO: 303686 - protein, 17 aa, Homo sapiens
  CDR3 for beta chain variable domain of TCR clone 151843 (TRBV6-6, TRBJ2-6)
CASGYSMEGAGANVLTF

SEQ ID NO: 303687 - protein, 16 aa, Homo sapiens
  CDR3 for alpha chain variable domain of TCR clone 151844 (TRAV3, TRAJ37)
CAVRGKGSGNTGNIIF

SEQ ID NO: 303688 - protein, 13 aa, Homo sapiens
  CDR3 for beta chain variable domain of TCR clone 151844 (TRBV14, TRBJ2-7)
CASSQDRRYEQYF

SEQ ID NO: 303689 - protein, 16 aa, Homo sapiens
  CDR3 for alpha chain variable domain of TCR clone 151845 (TRAV30, TRAJ24)
CGTEIVEADSWGKFQF

SEQ ID NO: 303690 - protein, 15 aa, Homo sapiens
  CDR3 for beta chain variable domain of TCR clone 151845 (TRBV15, TRBJ1-5)
CATSRDPVSNQPQHF

SEQ ID NO: 303691 - protein, 11 aa, Homo sapiens
  CDR3 for alpha chain variable domain of TCR clone 151846 (TRAV29/DV5, TRAJ49)
CAAVPGNQFYF

SEQ ID NO: 303692 - protein, 14 aa, Homo sapiens
  CDR3 for beta chain variable domain of TCR clone 151846 (TRBV7-2, TRBJ1-5)
CASSTQGAGQPQHF

SEQ ID NO: 303693 - protein, 10 aa, Homo sapiens
  CDR3 for alpha chain variable domain of TCR clone 151847 (TRAV8-3, TRAJ33)
CAVGAIATIS

SEQ ID NO: 303694 - protein, 14 aa, Homo sapiens
  CDR3 for beta chain variable domain of TCR clone 151847 (TRBV7-8, TRBJ2-3)
CASSLEAGTDTQYF

SEQ ID NO: 303695 - protein, 14 aa, Homo sapiens
  CDR3 for alpha chain variable domain of TCR clone 151848 (TRAV12-3, TRAJ10)
SHLPLPGGGNKLTF

SEQ ID NO: 303696 - protein, 13 aa, Homo sapiens
  CDR3 for beta chain variable domain of TCR clone 151848 (TRBV7-9, TRBJ1-2)
CASSLKQNYGYTF

SEQ ID NO: 303697 - protein, 15 aa, Homo sapiens
  CDR3 for alpha chain variable domain of TCR clone 151849 (TRAV8-3, TRAJ45)
CASSYSGGGADGLTF

SEQ ID NO: 303698 - protein, 17 aa, Homo sapiens
  CDR3 for beta chain variable domain of TCR clone 151849 (TRBV7-2, TRBJ1-4)
CASSFKAGPTTNEKLFF

SEQ ID NO: 303699 - protein, 18 aa, Homo sapiens
  CDR3 for alpha chain variable domain of TCR clone 151850 (TRAV21, TRAJ52)
CAVRPSPAGGTSYGRLTF

SEQ ID NO: 303700 - protein, 12 aa, Homo sapiens
  CDR3 for beta chain variable domain of TCR clone 151850 (TRBV11-2, TRBJ2-2)
CASSLGGGELFF

SEQ ID NO: 303701 - protein, 12 aa, Homo sapiens
  CDR3 for alpha chain variable domain of TCR clone 151851 (TRAV13-1, TRAJ49)
CAASIRSNQFYF

SEQ ID NO: 303702 - protein, 14 aa, Homo sapiens
  CDR3 for beta chain variable domain of TCR clone 151851 (TRBV7-2, TRBJ2-1)
CASRPGLAGNEQFF

SEQ ID NO: 303703 - protein, 12 aa, Homo sapiens
  CDR3 for alpha chain variable domain of TCR clone 151852 (TRAV13-1, TRAJ48)
CAANFGNEKLTF

SEQ ID NO: 303704 - protein, 17 aa, Homo sapiens
  CDR3 for beta chain variable domain of TCR clone 151852 (TRBV20-1, TRBJ2-1)
CSAPPRLAGTRYNEQFF

SEQ ID NO: 303705 - protein, 14 aa, Homo sapiens
  CDR3 for alpha chain variable domain of TCR clone 151853 (TRAV8-4, TRAJ13)
CAVTLPGGYQKVTF

SEQ ID NO: 303706 - protein, 14 aa, Homo sapiens
  CDR3 for beta chain variable domain of TCR clone 151853 (TRBV7-2, TRBJ1-2)
RASSQTGSTYGCTF

SEQ ID NO: 303707 - protein, 16 aa, Homo sapiens
  CDR3 for alpha chain variable domain of TCR clone 151854 (TRAV3, TRAJ10)
CAVRDMRAGGGNKLTV

SEQ ID NO: 303708 - protein, 15 aa, Homo sapiens
  CDR3 for beta chain variable domain of TCR clone 151854 (TRBV20-1, TRBJ2-1)
CSAEGGLLAGDEQFF

SEQ ID NO: 303709 - protein, 13 aa, Homo sapiens
  CDR3 for alpha chain variable domain of TCR clone 151855 (TRAV26-2, TRAJ43)
CILRAVNNNDMRF

SEQ ID NO: 303710 - protein, 14 aa, Homo sapiens
  CDR3 for beta chain variable domain of TCR clone 151855 (TRBV4-1, TRBJ2-2)
CASSQAVNTGELFF

SEQ ID NO: 303711 - protein, 11 aa, Homo sapiens
  CDR3 for alpha chain variable domain of TCR clone 151856 (TRAV3, TRAJ21)
CPVGNFNKFYF

SEQ ID NO: 303712 - protein, 16 aa, Homo sapiens
  CDR3 for beta chain variable domain of TCR clone 151856 (TRBV19, TRBJ2-1)
CASSRAGPSSYNEQFF

SEQ ID NO: 303713 - protein, 12 aa, Homo sapiens
  CDR3 for alpha chain variable domain of TCR clone 151857 (TRAV12-2, TRAJ45)
CTSGGGADGLTF

SEQ ID NO: 303714 - protein, 16 aa, Homo sapiens
  CDR3 for beta chain variable domain of TCR clone 151857 (TRBV19, TRBJ2-3)
CASSPGLLASTDTQYF

SEQ ID NO: 303715 - protein, 19 aa, Homo sapiens
  CDR3 for alpha chain variable domain of TCR clone 151858 (TRAV3, TRAJ6)
CAVRDRNPSRSGGSYIPTF

SEQ ID NO: 303716 - protein, 18 aa, Homo sapiens
  CDR3 for beta chain variable domain of TCR clone 151858 (TRBV7-6, TRBJ2-1)
CASSPRTSGMSSYNEQFF

SEQ ID NO: 303717 - protein, 12 aa, Homo sapiens
  CDR3 for alpha chain variable domain of TCR clone 151859 (TRAV12-2, TRAJ10)
WGVTGGGNKLTF

SEQ ID NO: 303718 - protein, 14 aa, Homo sapiens
  CDR3 for beta chain variable domain of TCR clone 151859 (TRBV7-8, TRBJ2-5)
CASSATGGQETQYF

SEQ ID NO: 303719 - protein, 13 aa, Homo sapiens
  CDR3 for alpha chain variable domain of TCR clone 151860 (TRAV20, TRAJ37)
CAGCSSNTGKLIF

SEQ ID NO: 303720 - protein, 13 aa, Homo sapiens
  CDR3 for beta chain variable domain of TCR clone 151860 (TRBV25-1, TRBJ2-6)
CASRGPGANVLTF

SEQ ID NO: 303721 - protein, 13 aa, Homo sapiens
  CDR3 for alpha chain variable domain of TCR clone 151861 (TRAV27, TRAJ37)
CAGGPSNTGKLIF

SEQ ID NO: 303722 - protein, 14 aa, Homo sapiens
  CDR3 for beta chain variable domain of TCR clone 151861 (TRBV7-8, TRBJ1-5)
CASSLGAFNQPQHL

SEQ ID NO: 303723 - protein, 10 aa, Homo sapiens
  CDR3 for alpha chain variable domain of TCR clone 151862 (TRAV30, TRAJ48)
CGVGNEKLTF

SEQ ID NO: 303724 - protein, 15 aa, Homo sapiens
  CDR3 for beta chain variable domain of TCR clone 151862 (TRBV6-1, TRBJ2-1)
CASSELRGQYNEQFF

SEQ ID NO: 303725 - protein, 12 aa, Homo sapiens
  CDR3 for alpha chain variable domain of TCR clone 151863 (TRAV3, TRAJ7)
CADLLWEQQTRF

SEQ ID NO: 303726 - protein, 13 aa, Homo sapiens
  CDR3 for beta chain variable domain of TCR clone 151863 (TRBV7-3, TRBJ2-5)
CANSFRGGETQYF

SEQ ID NO: 303727 - protein, 12 aa, Homo sapiens
  CDR3 for alpha chain variable domain of TCR clone 151864 (TRAV17, TRAJ53)
CATEGSNYKLTF

SEQ ID NO: 303728 - protein, 12 aa, Homo sapiens
  CDR3 for beta chain variable domain of TCR clone 151864 (TRBV5-5, TRBJ2-5)
CASSYFGETQYF

SEQ ID NO: 303729 - protein, 12 aa, Homo sapiens
  CDR3 for alpha chain variable domain of TCR clone 151865 (TRAV12-2, TRAJ34)
CAVSYNTDKRIF

SEQ ID NO: 303730 - protein, 16 aa, Homo sapiens
  CDR3 for beta chain variable domain of TCR clone 151865 (TRBV27, TRBJ2-5)
CASSYGPGGQKETQYF

SEQ ID NO: 303731 - protein, 15 aa, Homo sapiens
  CDR3 for alpha chain variable domain of TCR clone 151866 (TRAV2, TRAJ15)
CAVEDRKKAGTALIF

SEQ ID NO: 303732 - protein, 17 aa, Homo sapiens
  CDR3 for beta chain variable domain of TCR clone 151866 (TRBV11-2, TRBJ2-1)
CASSLYPPGVEYNEQFF

SEQ ID NO: 303733 - protein, 14 aa, Homo sapiens
  CDR3 for alpha chain variable domain of TCR clone 151867 (TRAV12-3, TRAJ57)
CAMSAWGGSEKLVF

SEQ ID NO: 303734 - protein, 15 aa, Homo sapiens
  CDR3 for beta chain variable domain of TCR clone 151867 (TRBV7-9, TRBJ1-5)
CASSQGHQPNQPQHF

SEQ ID NO: 303735 - protein, 12 aa, Homo sapiens
  CDR3 for alpha chain variable domain of TCR clone 151868 (TRAV2, TRAJ31)
CAVEDNNARLMF

SEQ ID NO: 303736 - protein, 14 aa, Homo sapiens
  CDR3 for beta chain variable domain of TCR clone 151868 (TRBV20-1, TRBJ2-5)
CSAHRQGLWETQYF

SEQ ID NO: 303737 - protein, 14 aa, Homo sapiens
  CDR3 for alpha chain variable domain of TCR clone 151869 (TRAV16, TRAJ33)
CALSAMDSNYQLIW

SEQ ID NO: 303738 - protein, 16 aa, Homo sapiens
  CDR3 for beta chain variable domain of TCR clone 151869 (TRBV12-4, TRBJ2-3)
CASSFPSNTNTDSQYF

SEQ ID NO: 303739 - protein, 13 aa, Homo sapiens
  CDR3 for alpha chain variable domain of TCR clone 151870 (TRAV20, TRAJ20)
CAVRWVRDYKLSF

SEQ ID NO: 303740 - protein, 14 aa, Homo sapiens
  CDR3 for beta chain variable domain of TCR clone 151870 (TRBV19, TRBJ2-2)
CASTVTASTGELFF

SEQ ID NO: 303741 - protein, 18 aa, Homo sapiens
  CDR3 for alpha chain variable domain of TCR clone 151871 (TRAV12-2, )
CAVEDIQNPDPAGYQLRD

SEQ ID NO: 303742 - protein, 15 aa, Homo sapiens
  CDR3 for beta chain variable domain of TCR clone 151871 (TRBV20-1, TRBJ2-7)
CSARDRVSGMDEQYF

SEQ ID NO: 303743 - protein, 13 aa, Homo sapiens
  CDR3 for alpha chain variable domain of TCR clone 151872 (TRAV39, TRAJ58)
CAGEETSGSRLTF

SEQ ID NO: 303744 - protein, 13 aa, Homo sapiens
  CDR3 for beta chain variable domain of TCR clone 151872 (TRBV15, TRBJ2-7)
CATSTKGHYEQYF

SEQ ID NO: 303745 - protein, 15 aa, Homo sapiens
  CDR3 for alpha chain variable domain of TCR clone 151873 (TRAV36/DV7, TRAJ54)
CAVEKPVQGAQKLVF

SEQ ID NO: 303746 - protein, 17 aa, Homo sapiens
  CDR3 for beta chain variable domain of TCR clone 151873 (TRBV6-5, TRBJ1-2)
CASNSPWEGAFDYGYTF

SEQ ID NO: 303747 - protein, 14 aa, Homo sapiens
  CDR3 for alpha chain variable domain of TCR clone 151874 (TRAV1-2, TRAJ8)
CAVREDTGLQKLVF

SEQ ID NO: 303748 - protein, 17 aa, Homo sapiens
  CDR3 for beta chain variable domain of TCR clone 151874 (TRBV20-1, TRBJ2-2)
CSASGSGQGGLTGELFF

SEQ ID NO: 303749 - protein, 12 aa, Homo sapiens
  CDR3 for alpha chain variable domain of TCR clone 151875 (TRAV17, TRAJ30)
CATDPRDDKIIF

SEQ ID NO: 303750 - protein, 15 aa, Homo sapiens
  CDR3 for beta chain variable domain of TCR clone 151875 (TRBV4-1, TRBJ2-1)
CASSQGGELYNEQFF

SEQ ID NO: 303751 - protein, 15 aa, Homo sapiens
  CDR3 for alpha chain variable domain of TCR clone 151876 (TRAV13-1, TRAJ42)
CAAPNYGGSQGNLIF

SEQ ID NO: 303752 - protein, 13 aa, Homo sapiens
  CDR3 for beta chain variable domain of TCR clone 151876 (TRBV4-2, TRBJ1-1)
CASSQAGNTEAFF

SEQ ID NO: 303753 - protein, 16 aa, Homo sapiens
  CDR3 for alpha chain variable domain of TCR clone 151877 (TRAV3, )
CAVRDCLNAGDNHIQN

SEQ ID NO: 303754 - protein, 14 aa, Homo sapiens
  CDR3 for beta chain variable domain of TCR clone 151877 (TRBV5-5, TRBJ1-5)
CASSGQGVDQTQYF

SEQ ID NO: 303755 - protein, 15 aa, Homo sapiens
  CDR3 for alpha chain variable domain of TCR clone 151878 (TRAV14/DV4, TRAJ49)
CAMREGRDTGNQFYF

SEQ ID NO: 303756 - protein, 17 aa, Homo sapiens
  CDR3 for beta chain variable domain of TCR clone 151878 (TRBV12-4, TRBJ1-5)
CASSLRGDRGANQPQHF

SEQ ID NO: 303757 - protein, 15 aa, Homo sapiens
  CDR3 for alpha chain variable domain of TCR clone 151879 (TRAV8-3, TRAJ11)
CAVGLLNSGYSTLTF

SEQ ID NO: 303758 - protein, 12 aa, Homo sapiens
  CDR3 for beta chain variable domain of TCR clone 151879 (TRBV12-4, TRBJ1-1)
CASSFGRAEAFF

SEQ ID NO: 303759 - protein, 14 aa, Homo sapiens
  CDR3 for alpha chain variable domain of TCR clone 151880 (TRAV4, TRAJ20)
CLVGDFINDYKLSF

SEQ ID NO: 303760 - protein, 15 aa, Homo sapiens
  CDR3 for beta chain variable domain of TCR clone 151880 (TRBV19, TRBJ1-1)
CASTSGQIQNTEAFF

SEQ ID NO: 303761 - protein, 14 aa, Homo sapiens
  CDR3 for alpha chain variable domain of TCR clone 151881 (TRAV17, TRAJ4)
SATAPLGGYNKLIF

SEQ ID NO: 303762 - protein, 15 aa, Homo sapiens
  CDR3 for beta chain variable domain of TCR clone 151881 (TRBV7-2, TRBJ2-7)
CASSLVSSGSYEQYF

SEQ ID NO: 303763 - protein, 11 aa, Homo sapiens
  CDR3 for alpha chain variable domain of TCR clone 151882 (TRAV3, TRAJ21)
CAVGNFNKFYF

SEQ ID NO: 303764 - protein, 17 aa, Homo sapiens
  CDR3 for beta chain variable domain of TCR clone 151882 (TRBV7-9, TRBJ2-6)
CASSFGAGYSGANVLTF

SEQ ID NO: 303765 - protein, 15 aa, Homo sapiens
  CDR3 for alpha chain variable domain of TCR clone 151883 (TRAV8-3, TRAJ45)
CASSYSGGGADGLTF

SEQ ID NO: 303766 - protein, 14 aa, Homo sapiens
  CDR3 for beta chain variable domain of TCR clone 151883 (TRBV19, TRBJ2-1)
CASGRAGPGNEQFF

SEQ ID NO: 303767 - protein, 10 aa, Homo sapiens
  CDR3 for alpha chain variable domain of TCR clone 151884 (TRAV23/DV6, TRAJ43)
CAAAVAALEQ

SEQ ID NO: 303768 - protein, 12 aa, Homo sapiens
  CDR3 for beta chain variable domain of TCR clone 151884 (TRBV12-4, TRBJ1-2)
CQQFTKGKGYTF

SEQ ID NO: 303769 - protein, 16 aa, Homo sapiens
  CDR3 for alpha chain variable domain of TCR clone 151885 (TRAV8-1, TRAJ42)
CAVTSRYGGSKGDLIF

SEQ ID NO: 303770 - protein, 12 aa, Homo sapiens
  CDR3 for beta chain variable domain of TCR clone 151885 (TRBV6-3, TRBJ2-7)
CASSLGRRGLYF

SEQ ID NO: 303771 - protein, 18 aa, Homo sapiens
  CDR3 for alpha chain variable domain of TCR clone 151886 (TRAV4, TRAJ17)
CCVLLPRGLVAAGNKLTF

SEQ ID NO: 303772 - protein, 16 aa, Homo sapiens
  CDR3 for beta chain variable domain of TCR clone 151886 (TRBV10-3, TRBJ2-1)
CAISGVGDGGGGEQFF

SEQ ID NO: 303773 - protein, 17 aa, Homo sapiens
  CDR3 for alpha chain variable domain of TCR clone 151887 (TRAV16, TRAJ58)
CITVLSNGETSGSRLTV

SEQ ID NO: 303774 - protein, 17 aa, Homo sapiens
  CDR3 for beta chain variable domain of TCR clone 151887 (TRBV18, TRBJ2-1)
CASSKGLSGGADNEQFF

SEQ ID NO: 303775 - protein, 15 aa, Homo sapiens
  CDR3 for alpha chain variable domain of TCR clone 151888 (TRAV12-3, TRAJ6)
CAMSPAPGGSYIPTF

SEQ ID NO: 303776 - protein, 15 aa, Homo sapiens
  CDR3 for beta chain variable domain of TCR clone 151888 (TRBV11-3, TRBJ2-1)
CASSPGDREGNEQFF

SEQ ID NO: 303777 - protein, 11 aa, Homo sapiens
  CDR3 for alpha chain variable domain of TCR clone 151889 (TRAV3, TRAJ22)
CAVGNFNKFYF

SEQ ID NO: 303778 - protein, 14 aa, Homo sapiens
  CDR3 for beta chain variable domain of TCR clone 151889 (TRBV18, TRBJ2-7)
CASSPTSGGYEQYF

SEQ ID NO: 303779 - protein, 15 aa, Homo sapiens
  CDR3 for alpha chain variable domain of TCR clone 151890 (TRAV1-2, TRAJ32)
CAVRGYDGATNKLIF

SEQ ID NO: 303780 - protein, 15 aa, Homo sapiens
  CDR3 for beta chain variable domain of TCR clone 151890 (TRBV25-1, TRBJ2-5)
CASSDTGTHQETQYF

SEQ ID NO: 303781 - protein, 16 aa, Homo sapiens
  CDR3 for alpha chain variable domain of TCR clone 151891 (TRAV35, TRAJ28)
CAGVAYSGAGSYQLTF

SEQ ID NO: 303782 - protein, 12 aa, Homo sapiens
  CDR3 for beta chain variable domain of TCR clone 151891 (TRBV11-2, TRBJ2-2)
CASSLGGGELFF

SEQ ID NO: 303783 - protein, 15 aa, Homo sapiens
  CDR3 for alpha chain variable domain of TCR clone 151892 (TRAV17, TRAJ54)
SATTRSEQGAQKLVF

SEQ ID NO: 303784 - protein, 16 aa, Homo sapiens
  CDR3 for beta chain variable domain of TCR clone 151892 (TRBV12-4, TRBJ2-3)
CASSLRLAETTDTQYF

SEQ ID NO: 303785 - protein, 14 aa, Homo sapiens
  CDR3 for alpha chain variable domain of TCR clone 151893 (TRAV29/DV5, TRAJ36)
CAARRKTGANNLFF

SEQ ID NO: 303786 - protein, 11 aa, Homo sapiens
  CDR3 for beta chain variable domain of TCR clone 151893 (TRBV12-4, TRBJ2-3)
CASSSVRGRYF

SEQ ID NO: 303787 - protein, 15 aa, Homo sapiens
  CDR3 for alpha chain variable domain of TCR clone 151894 (TRAV29/DV5, TRAJ29)
CAASERSSGNTPLVF

SEQ ID NO: 303788 - protein, 16 aa, Homo sapiens
  CDR3 for beta chain variable domain of TCR clone 151894 (TRBV4-2, TRBJ1-1)
CASSQAGFGMNTEAFF

SEQ ID NO: 303789 - protein, 12 aa, Homo sapiens
  CDR3 for alpha chain variable domain of TCR clone 151895 (TRAV1-2, TRAJ42)
CVAGGSQGNLIF

SEQ ID NO: 303790 - protein, 12 aa, Homo sapiens
  CDR3 for beta chain variable domain of TCR clone 151895 (TRBV11-2, TRBJ2-2)
CASSLPTGELFF

SEQ ID NO: 303791 - protein, 13 aa, Homo sapiens
  CDR3 for alpha chain variable domain of TCR clone 151896 (TRAV8-6, TRAJ49)
CAVITNTGNQFYF

SEQ ID NO: 303792 - protein, 17 aa, Homo sapiens
  CDR3 for beta chain variable domain of TCR clone 151896 (TRBV7-9, TRBJ2-1)
CASSLVASYPSYNEQFF

SEQ ID NO: 303793 - protein, 11 aa, Homo sapiens
  CDR3 for alpha chain variable domain of TCR clone 151897 (TRAV12-1, TRAJ34)
CVVNKGRELIF

SEQ ID NO: 303794 - protein, 15 aa, Homo sapiens
  CDR3 for beta chain variable domain of TCR clone 151897 (TRBV12-4, TRBJ2-1)
CASSLLATGNNEQFF

SEQ ID NO: 303795 - protein, 16 aa, Homo sapiens
  CDR3 for alpha chain variable domain of TCR clone 151898 (TRAV1-2, TRAJ36)
CAASADQTGKQPLLWD

SEQ ID NO: 303796 - protein, 15 aa, Homo sapiens
  CDR3 for beta chain variable domain of TCR clone 151898 (TRBV5-1, TRBJ2-7)
CASSFSTDSVYEQYF

SEQ ID NO: 303797 - protein, 14 aa, Homo sapiens
  CDR3 for alpha chain variable domain of TCR clone 151899 (TRAV12-2, TRAJ17)
CAALFKAAGNKLTF

SEQ ID NO: 303798 - protein, 13 aa, Homo sapiens
  CDR3 for beta chain variable domain of TCR clone 151899 (TRBV9, TRBJ2-1)
CASSVGQGGEQFF

SEQ ID NO: 303799 - protein, 15 aa, Homo sapiens
  CDR3 for alpha chain variable domain of TCR clone 151900 (TRAV3, TRAJ22)
CAVRDRGGSARQLTF

SEQ ID NO: 303800 - protein, 15 aa, Homo sapiens
  CDR3 for beta chain variable domain of TCR clone 151900 (TRBV10-3, TRBJ2-3)
CAISLTSEGTDTQYF

SEQ ID NO: 303801 - protein, 16 aa, Homo sapiens
  CDR3 for alpha chain variable domain of TCR clone 151901 (TRAV20, TRAJ53)
CAVQGNSGSSNYKLTF

SEQ ID NO: 303802 - protein, 16 aa, Homo sapiens
  CDR3 for beta chain variable domain of TCR clone 151901 (TRBV29-1, TRBJ2-6)
CSVEDITYSGANVLTF

SEQ ID NO: 303803 - protein, 14 aa, Homo sapiens
  CDR3 for alpha chain variable domain of TCR clone 151902 (TRAV14/DV4, TRAJ32)
SNVLPLTPTNKLIF

SEQ ID NO: 303804 - protein, 16 aa, Homo sapiens
  CDR3 for beta chain variable domain of TCR clone 151902 (TRBV5-1, TRBJ2-7)
CASSLEGLAGLYEQYF

SEQ ID NO: 303805 - protein, 15 aa, Homo sapiens
  CDR3 for alpha chain variable domain of TCR clone 151903 (TRAV16, TRAJ17)
CALSGQEAAGNKLTF

SEQ ID NO: 303806 - protein, 15 aa, Homo sapiens
  CDR3 for beta chain variable domain of TCR clone 151903 (TRBV19, TRBJ2-1)
CASSLETSGYNEQFF

SEQ ID NO: 303807 - protein, 14 aa, Homo sapiens
  CDR3 for alpha chain variable domain of TCR clone 151904 (TRAV13-1, TRAJ44)
CAAKATGTASKLTF

SEQ ID NO: 303808 - protein, 13 aa, Homo sapiens
  CDR3 for beta chain variable domain of TCR clone 151904 (TRBV5-5, TRBJ1-2)
CASSFWRGEDYPF

SEQ ID NO: 303809 - protein, 18 aa, Homo sapiens
  CDR3 for alpha chain variable domain of TCR clone 151905 (TRAV13-1, TRAJ52)
CAAKNPNAGGTSYGELTF

SEQ ID NO: 303810 - protein, 11 aa, Homo sapiens
  CDR3 for beta chain variable domain of TCR clone 151905 (TRBV29-1, TRBJ2-5)
CSEDRTGTQYF

SEQ ID NO: 303811 - protein, 11 aa, Homo sapiens
  CDR3 for alpha chain variable domain of TCR clone 151906 (TRAV21, TRAJ9)
CAVPGGSKTIF

SEQ ID NO: 303812 - protein, 12 aa, Homo sapiens
  CDR3 for beta chain variable domain of TCR clone 151906 (TRBV20-1, TRBJ2-3)
CSARVGTDTQYF

SEQ ID NO: 303813 - protein, 15 aa, Homo sapiens
  CDR3 for alpha chain variable domain of TCR clone 151907 (TRAV8-3, TRAJ41)
CAVGSNSNSGYALNF

SEQ ID NO: 303814 - protein, 14 aa, Homo sapiens
  CDR3 for beta chain variable domain of TCR clone 151907 (TRBV5-1, TRBJ2-5)
CASSLAGKQETQYF

SEQ ID NO: 303815 - protein, 13 aa, Homo sapiens
  CDR3 for alpha chain variable domain of TCR clone 151908 (TRAV21, TRAJ6)
CAGGSGGSYIPTF

SEQ ID NO: 303816 - protein, 15 aa, Homo sapiens
  CDR3 for beta chain variable domain of TCR clone 151908 (TRBV20-1, TRBJ2-7)
CSARDRVSGMDEQYF

SEQ ID NO: 303817 - protein, 11 aa, Homo sapiens
  CDR3 for alpha chain variable domain of TCR clone 151909 (TRAV2, TRAJ33)
CAVDSNYQLIW

SEQ ID NO: 303818 - protein, 17 aa, Homo sapiens
  CDR3 for beta chain variable domain of TCR clone 151909 (TRBV5-1, TRBJ1-6)
CASSFGEVSSYNSPLHF

SEQ ID NO: 303819 - protein, 11 aa, Homo sapiens
  CDR3 for alpha chain variable domain of TCR clone 151910 (TRAV2, TRAJ3)
CAVESASKIIF

SEQ ID NO: 303820 - protein, 17 aa, Homo sapiens
  CDR3 for beta chain variable domain of TCR clone 151910 (TRBV11-2, TRBJ2-1)
CASSLYPPGVEYNEQFF

SEQ ID NO: 303821 - protein, 14 aa, Homo sapiens
  CDR3 for alpha chain variable domain of TCR clone 151911 (TRAV4, TRAJ30)
CLVGDMNRDDKIIF

SEQ ID NO: 303822 - protein, 14 aa, Homo sapiens
  CDR3 for beta chain variable domain of TCR clone 151911 (TRBV19, TRBJ2-7)
CASSSQEWSYEQYF

SEQ ID NO: 303823 - protein, 15 aa, Homo sapiens
  CDR3 for alpha chain variable domain of TCR clone 151912 (TRAV38-1, TRAJ37)
CALIHGSGNTGKLIF

SEQ ID NO: 303824 - protein, 13 aa, Homo sapiens
  CDR3 for beta chain variable domain of TCR clone 151912 (TRBV7-9, TRBJ1-2)
CASSLVADYGYTF

SEQ ID NO: 303825 - protein, 14 aa, Homo sapiens
  CDR3 for alpha chain variable domain of TCR clone 151913 (TRAV23/DV6, TRAJ57)
FTASNQGGSEKLVF

SEQ ID NO: 303826 - protein, 13 aa, Homo sapiens
  CDR3 for beta chain variable domain of TCR clone 151913 (TRBV11-2, TRBJ2-7)
CASSSYPSYEQYF

SEQ ID NO: 303827 - protein, 14 aa, Homo sapiens
  CDR3 for alpha chain variable domain of TCR clone 151914 (TRAV3, TRAJ7)
CAVREEEREQQTRF

SEQ ID NO: 303828 - protein, 12 aa, Homo sapiens
  CDR3 for beta chain variable domain of TCR clone 151914 (TRBV28, TRBJ2-6)
CAIQAGANVLTF

SEQ ID NO: 303829 - protein, 15 aa, Homo sapiens
  CDR3 for alpha chain variable domain of TCR clone 151915 (TRAV13-1, TRAJ20)
CAASTVRSNDYKLSF

SEQ ID NO: 303830 - protein, 13 aa, Homo sapiens
  CDR3 for beta chain variable domain of TCR clone 151915 (TRBV7-3, TRBJ2-5)
CASSSDREETQYF

SEQ ID NO: 303831 - protein, 13 aa, Homo sapiens
  CDR3 for alpha chain variable domain of TCR clone 151916 (TRAV12-1, TRAJ34)
CVVTGYNNDKLIF

SEQ ID NO: 303832 - protein, 15 aa, Homo sapiens
  CDR3 for beta chain variable domain of TCR clone 151916 (TRBV28, TRBJ2-7)
CASKAGGYTSSTSGR

SEQ ID NO: 303833 - protein, 14 aa, Homo sapiens
  CDR3 for alpha chain variable domain of TCR clone 151917 (TRAV16, TRAJ39)
CALSKNNAGNMLTF

SEQ ID NO: 303834 - protein, 16 aa, Homo sapiens
  CDR3 for beta chain variable domain of TCR clone 151917 (TRBV6-6, TRBJ2-1)
CASSYSFSGYYNEQFF

SEQ ID NO: 303835 - protein, 16 aa, Homo sapiens
  CDR3 for alpha chain variable domain of TCR clone 151918 (TRAV3, TRAJ13)
CAVRDFESGGYKKVTF

SEQ ID NO: 303836 - protein, 16 aa, Homo sapiens
  CDR3 for beta chain variable domain of TCR clone 151918 (TRBV27, TRBJ2-5)
CASSYGPGGQKETQYF

SEQ ID NO: 303837 - protein, 16 aa, Homo sapiens
  CDR3 for alpha chain variable domain of TCR clone 151919 (TRAV30, TRAJ24)
CGTEIVDADSWGKFQF

SEQ ID NO: 303838 - protein, 15 aa, Homo sapiens
  CDR3 for beta chain variable domain of TCR clone 151919 (TRBV6-3, TRBJ2-7)
CASSAPGTVFYEQYF

SEQ ID NO: 303839 - protein, 11 aa, Homo sapiens
  CDR3 for alpha chain variable domain of TCR clone 151920 (TRAV17, TRAJ29)
CYVATDTPLVF

SEQ ID NO: 303840 - protein, 12 aa, Homo sapiens
  CDR3 for beta chain variable domain of TCR clone 151920 (TRBV7-9, TRBJ2-7)
CASSIKREEQYS

SEQ ID NO: 303841 - protein, 14 aa, Homo sapiens
  CDR3 for alpha chain variable domain of TCR clone 151921 (TRAV1-2, TRAJ16)
CAVNRFSDGQKLLL

SEQ ID NO: 303842 - protein, 16 aa, Homo sapiens
  CDR3 for beta chain variable domain of TCR clone 151921 (TRBV20-1, TRBJ1-4)
CSARPYGGELNEKLFF

SEQ ID NO: 303843 - protein, 14 aa, Homo sapiens
  CDR3 for alpha chain variable domain of TCR clone 151922 (TRAV29/DV5, TRAJ20)
CAASAPIEDYKLSV

SEQ ID NO: 303844 - protein, 15 aa, Homo sapiens
  CDR3 for beta chain variable domain of TCR clone 151922 (TRBV6-1, TRBJ2-1)
CASSEAAYSYNEQFF

SEQ ID NO: 303845 - protein, 16 aa, Homo sapiens
  CDR3 for alpha chain variable domain of TCR clone 151923 (TRAV30, TRAJ24)
CGTEIVDADSWGKFRF

SEQ ID NO: 303846 - protein, 15 aa, Homo sapiens
  CDR3 for beta chain variable domain of TCR clone 151923 (TRBV20-1, TRBJ2-7)
CSARDQVSGMDEQYF

SEQ ID NO: 303847 - protein, 10 aa, Homo sapiens
  CDR3 for alpha chain variable domain of TCR clone 151924 (TRAV23/DV6, TRAJ31)
CARGGARLMF

SEQ ID NO: 303848 - protein, 12 aa, Homo sapiens
  CDR3 for beta chain variable domain of TCR clone 151924 (TRBV6-3, TRBJ2-7)
CASSLTPYEQYF

SEQ ID NO: 303849 - protein, 14 aa, Homo sapiens
  CDR3 for alpha chain variable domain of TCR clone 151925 (TRAV13-1, TRAJ5)
CAASPDTCRRALTF

SEQ ID NO: 303850 - protein, 15 aa, Homo sapiens
  CDR3 for beta chain variable domain of TCR clone 151925 (TRBV7-2, TRBJ2-7)
CASSLTGQGTYEQYF

SEQ ID NO: 303851 - protein, 14 aa, Homo sapiens
  CDR3 for alpha chain variable domain of TCR clone 151926 (TRAV1-2, TRAJ8)
CAVREDTGFQELVF

SEQ ID NO: 303852 - protein, 16 aa, Homo sapiens
  CDR3 for beta chain variable domain of TCR clone 151926 (TRBV7-3, TRBJ2-2)
CASSLKRGTLSWELFF

SEQ ID NO: 303853 - protein, 15 aa, Homo sapiens
  CDR3 for alpha chain variable domain of TCR clone 151927 (TRAV3, TRAJ40)
CAVRDVTSGSYKYIF

SEQ ID NO: 303854 - protein, 13 aa, Homo sapiens
  CDR3 for beta chain variable domain of TCR clone 151927 (TRBV7-9, TRBJ1-2)
CASSLKQNYGYTF

SEQ ID NO: 303855 - protein, 15 aa, Homo sapiens
  CDR3 for alpha chain variable domain of TCR clone 151928 (TRAV36/DV7, TRAJ54)
CAVEKPVQGAQKLVF

SEQ ID NO: 303856 - protein, 14 aa, Homo sapiens
  CDR3 for beta chain variable domain of TCR clone 151928 (TRBV4-3, TRBJ2-2)
YASSQGHVTGELFF

SEQ ID NO: 303857 - protein, 12 aa, Homo sapiens
  CDR3 for alpha chain variable domain of TCR clone 151929 (TRAV23/DV6, TRAJ53)
CAASKLGRGGSN

SEQ ID NO: 303858 - protein, 14 aa, Homo sapiens
  CDR3 for beta chain variable domain of TCR clone 151929 (TRBV7-9, TRBJ2-3)
CASSLEQGTNTQYF

SEQ ID NO: 303859 - protein, 14 aa, Homo sapiens
  CDR3 for alpha chain variable domain of TCR clone 151930 (TRAV8-6, TRAJ12)
CAVKAADSSYKLIL

SEQ ID NO: 303860 - protein, 15 aa, Homo sapiens
  CDR3 for beta chain variable domain of TCR clone 151930 (TRBV5-1, TRBJ2-5)
CASSLGLAEQETQYF

SEQ ID NO: 303861 - protein, 13 aa, Homo sapiens
  CDR3 for alpha chain variable domain of TCR clone 151931 (TRAV27, TRAJ49)
CAPRPYTGNQFYF

SEQ ID NO: 303862 - protein, 17 aa, Homo sapiens
  CDR3 for beta chain variable domain of TCR clone 151931 (TRBV19, TRBJ2-6)
CASSTGQVFSGANVLTF

SEQ ID NO: 303863 - protein, 11 aa, Homo sapiens
  CDR3 for alpha chain variable domain of TCR clone 151932 (TRAV12-2, TRAJ49)
CAVWAGNQFYF

SEQ ID NO: 303864 - protein, 14 aa, Homo sapiens
  CDR3 for beta chain variable domain of TCR clone 151932 (TRBV7-2, TRBJ1-2)
CASSQTGSTYGYTF

SEQ ID NO: 303865 - protein, 10 aa, Homo sapiens
  CDR3 for alpha chain variable domain of TCR clone 151933 (TRAV5, TRAJ34)
CAEDTDKLIF

SEQ ID NO: 303866 - protein, 12 aa, Homo sapiens
  CDR3 for beta chain variable domain of TCR clone 151933 (TRBV11-2, TRBJ2-2)
CASRLGGGELFF

SEQ ID NO: 303867 - protein, 14 aa, Homo sapiens
  CDR3 for alpha chain variable domain of TCR clone 151934 (TRAV1-2, TRAJ8)
CAVRADTGFQKLVF

SEQ ID NO: 303868 - protein, 13 aa, Homo sapiens
  CDR3 for beta chain variable domain of TCR clone 151934 (TRBV19, TRBJ2-7)
CASRKAGGSEQYF

SEQ ID NO: 303869 - protein, 13 aa, Homo sapiens
  CDR3 for alpha chain variable domain of TCR clone 151935 (TRAV26-1, TRAJ40)
CIVRVEGTYKYIF

SEQ ID NO: 303870 - protein, 15 aa, Homo sapiens
  CDR3 for beta chain variable domain of TCR clone 151935 (TRBV12-4, TRBJ1-2)
CASSLSHRDGQAYTF

SEQ ID NO: 303871 - protein, 16 aa, Homo sapiens
  CDR3 for alpha chain variable domain of TCR clone 151936 (TRAV16, TRAJ4)
CALSRMFPGGYNKLIF

SEQ ID NO: 303872 - protein, 16 aa, Homo sapiens
  CDR3 for beta chain variable domain of TCR clone 151936 (TRBV12-4, TRBJ1-5)
CASSRPVGGSNQPQHF

SEQ ID NO: 303873 - protein, 15 aa, Homo sapiens
  CDR3 for alpha chain variable domain of TCR clone 151937 (TRAV3, TRAJ5)
CALRDLDTGRRALTF

SEQ ID NO: 303874 - protein, 13 aa, Homo sapiens
  CDR3 for beta chain variable domain of TCR clone 151937 (TRBV12-4, TRBJ2-7)
CASSPTETYEHYF

SEQ ID NO: 303875 - protein, 14 aa, Homo sapiens
  CDR3 for alpha chain variable domain of TCR clone 151938 (TRAV9-2, TRAJ39)
CALYIYNAGNMLTF

SEQ ID NO: 303876 - protein, 13 aa, Homo sapiens
  CDR3 for beta chain variable domain of TCR clone 151938 (TRBV12-4, TRBJ2-7)
CASTSGARGEQYF

SEQ ID NO: 303877 - protein, 14 aa, Homo sapiens
  CDR3 for alpha chain variable domain of TCR clone 151939 (TRAV1-2, TRAJ16)
CAVNRFSDGQKLLF

SEQ ID NO: 303878 - protein, 15 aa, Homo sapiens
  CDR3 for beta chain variable domain of TCR clone 151939 (TRBV5-5, TRBJ1-5)
CASSSTPGSKQPQHF

SEQ ID NO: 303879 - protein, 12 aa, Homo sapiens
  CDR3 for alpha chain variable domain of TCR clone 151940 (TRAV8-3, TRAJ22)
FGGQSSARQLTF

SEQ ID NO: 303880 - protein, 16 aa, Homo sapiens
  CDR3 for beta chain variable domain of TCR clone 151940 (TRBV7-8, TRBJ2-2)
CASSLARTGVTGELFF

SEQ ID NO: 303881 - protein, 15 aa, Homo sapiens
  CDR3 for alpha chain variable domain of TCR clone 151941 (TRAV6, TRAJ13)
CALGGASGGYQKVTF

SEQ ID NO: 303882 - protein, 13 aa, Homo sapiens
  CDR3 for beta chain variable domain of TCR clone 151941 (TRBV4-2, TRBJ1-1)
CASSQAGNTEAFF

SEQ ID NO: 303883 - protein, 11 aa, Homo sapiens
  CDR3 for alpha chain variable domain of TCR clone 151942 (TRAV13-1, TRAJ52)
PGGTSYGKLTF

SEQ ID NO: 303884 - protein, 16 aa, Homo sapiens
  CDR3 for beta chain variable domain of TCR clone 151942 (TRBV28, TRBJ2-7)
CDSSPWVETGDLSQYF

SEQ ID NO: 303885 - protein, 11 aa, Homo sapiens
  CDR3 for alpha chain variable domain of TCR clone 151943 (TRAV12-2, TRAJ23)
RAYNQGGKLIF

SEQ ID NO: 303886 - protein, 16 aa, Homo sapiens
  CDR3 for beta chain variable domain of TCR clone 151943 (TRBV7-2, TRBJ2-3)
CASSLARASGISTQYF

SEQ ID NO: 303887 - protein, 11 aa, Homo sapiens
  CDR3 for alpha chain variable domain of TCR clone 151944 (TRAV35, TRAJ12)
RRMDSSYKLVF

SEQ ID NO: 303888 - protein, 14 aa, Homo sapiens
  CDR3 for beta chain variable domain of TCR clone 151944 (TRBV19, TRBJ1-1)
CASSPNRGDTEAFF

SEQ ID NO: 303889 - protein, 19 aa, Homo sapiens
  CDR3 for alpha chain variable domain of TCR clone 151945 (TRAV26-1, TRAJ42)
CVLLRLQTYYGGSQGNLIF

SEQ ID NO: 303890 - protein, 16 aa, Homo sapiens
  CDR3 for beta chain variable domain of TCR clone 151945 (TRBV7-3, TRBJ2-2)
CASSLKRGTLFGELFF

SEQ ID NO: 303891 - protein, 10 aa, Homo sapiens
  CDR3 for alpha chain variable domain of TCR clone 151946 (TRAV23/DV6, TRAJ57)
CAASSTLSQG

SEQ ID NO: 303892 - protein, 14 aa, Homo sapiens
  CDR3 for beta chain variable domain of TCR clone 151946 (TRBV25-1, TRBJ1-1)
CASSHLGGNTEAVF

SEQ ID NO: 303893 - protein, 11 aa, Homo sapiens
  CDR3 for alpha chain variable domain of TCR clone 151947 (TRAV29/DV5, TRAJ37)
CATSNTGKLIF

SEQ ID NO: 303894 - protein, 13 aa, Homo sapiens
  CDR3 for beta chain variable domain of TCR clone 151947 (TRBV20-1, TRBJ1-1)
CSAGTVGNTEAFF

SEQ ID NO: 303895 - protein, 14 aa, Homo sapiens
  CDR3 for alpha chain variable domain of TCR clone 151948 (TRAV16, TRAJ40)
CALHESYYLRNLQI

SEQ ID NO: 303896 - protein, 12 aa, Homo sapiens
  CDR3 for beta chain variable domain of TCR clone 151948 (TRBV7-3, TRBJ2-3)
CASSSLTDTQNF

SEQ ID NO: 303897 - protein, 14 aa, Homo sapiens
  CDR3 for alpha chain variable domain of TCR clone 151949 (TRAV16, TRAJ33)
CALSAMDSNYQIIW

SEQ ID NO: 303898 - protein, 15 aa, Homo sapiens
  CDR3 for beta chain variable domain of TCR clone 151949 (TRBV9, TRBJ1-6)
CASSVAGTGDSPLHF

SEQ ID NO: 303899 - protein, 14 aa, Homo sapiens
  CDR3 for alpha chain variable domain of TCR clone 151950 (TRAV1-2, TRAJ16)
CAVNRFSDGLKLLF

SEQ ID NO: 303900 - protein, 13 aa, Homo sapiens
  CDR3 for beta chain variable domain of TCR clone 151950 (TRBV14, TRBJ1-1)
CASSREFGTEAFF

SEQ ID NO: 303901 - protein, 14 aa, Homo sapiens
  CDR3 for alpha chain variable domain of TCR clone 151951 (TRAV26-1, TRAJ49)
CIVRLTNTGNEFYF

SEQ ID NO: 303902 - protein, 13 aa, Homo sapiens
  CDR3 for beta chain variable domain of TCR clone 151951 (TRBV10-1, TRBJ1-1)
CASQGQTNTEAFF

SEQ ID NO: 303903 - protein, 13 aa, Homo sapiens
  CDR3 for alpha chain variable domain of TCR clone 151952 (TRAV27, TRAJ41)
CAGEGNSGYALNF

SEQ ID NO: 303904 - protein, 13 aa, Homo sapiens
  CDR3 for beta chain variable domain of TCR clone 151952 (TRBV7-2, TRBJ1-1)
CASSQAGNTEAFF

SEQ ID NO: 303905 - protein, 13 aa, Homo sapiens
  CDR3 for alpha chain variable domain of TCR clone 151953 (TRAV8-3, TRAJ36)
CAVGATGANNLFF

SEQ ID NO: 303906 - protein, 14 aa, Homo sapiens
  CDR3 for beta chain variable domain of TCR clone 151953 (TRBV19, TRBJ2-5)
CASSMTGQQETQYF

SEQ ID NO: 303907 - protein, 12 aa, Homo sapiens
  CDR3 for alpha chain variable domain of TCR clone 151954 (TRAV8-3, TRAJ26)
CAGDKYGQNFVF

SEQ ID NO: 303908 - protein, 13 aa, Homo sapiens
  CDR3 for beta chain variable domain of TCR clone 151954 (TRBV20-1, TRBJ1-1)
CSAGTVGNTEAFF

SEQ ID NO: 303909 - protein, 12 aa, Homo sapiens
  CDR3 for alpha chain variable domain of TCR clone 151955 (TRAV1-1, TRAJ43)
CAPRVSSNDMRF

SEQ ID NO: 303910 - protein, 15 aa, Homo sapiens
  CDR3 for beta chain variable domain of TCR clone 151955 (TRBV27, TRBJ2-3)
CASSLGLAATDTQYF

SEQ ID NO: 303911 - protein, 12 aa, Homo sapiens
  CDR3 for alpha chain variable domain of TCR clone 151956 (TRAV12-1, TRAJ23)
CVVNWGGGKLIF

SEQ ID NO: 303912 - protein, 14 aa, Homo sapiens
  CDR3 for beta chain variable domain of TCR clone 151956 (TRBV27, TRBJ2-7)
CASSSQRGTYEQYF

SEQ ID NO: 303913 - protein, 13 aa, Homo sapiens
  CDR3 for alpha chain variable domain of TCR clone 151957 (TRAV38-1, TRAJ42)
CARWGGSQGNLIF

SEQ ID NO: 303914 - protein, 17 aa, Homo sapiens
  CDR3 for beta chain variable domain of TCR clone 151957 (TRBV20-1, TRBJ2-1)
CSARDPLEGVWDNEQFF

SEQ ID NO: 303915 - protein, 12 aa, Homo sapiens
  CDR3 for alpha chain variable domain of TCR clone 151958 (TRAV8-6, TRAJ8)
CAVTPGFQKLVL

SEQ ID NO: 303916 - protein, 16 aa, Homo sapiens
  CDR3 for beta chain variable domain of TCR clone 151958 (TRBV7-3, TRBJ2-2)
CASSLKRGTLSGELFF

SEQ ID NO: 303917 - protein, 14 aa, Homo sapiens
  CDR3 for alpha chain variable domain of TCR clone 151959 (TRAV8-3, TRAJ9)
CAVFYNTGGFKTIF

SEQ ID NO: 303918 - protein, 16 aa, Homo sapiens
  CDR3 for beta chain variable domain of TCR clone 151959 (TRBV7-3, TRBJ2-2)
CASSLKRGTLSGELFF

SEQ ID NO: 303919 - protein, 15 aa, Homo sapiens
  CDR3 for alpha chain variable domain of TCR clone 151960 (TRAV8-4, TRAJ10)
CAVSDGPGGGNKITF

SEQ ID NO: 303920 - protein, 13 aa, Homo sapiens
  CDR3 for beta chain variable domain of TCR clone 151960 (TRBV28, TRBJ1-3)
CASSVLGSGTIYF

SEQ ID NO: 303921 - protein, 16 aa, Homo sapiens
  CDR3 for alpha chain variable domain of TCR clone 151961 (TRAV21, TRAJ37)
CAVRTAGSSNTGKLIF

SEQ ID NO: 303922 - protein, 13 aa, Homo sapiens
  CDR3 for beta chain variable domain of TCR clone 151961 (TRBV7-9, TRBJ2-5)
CASLPSERETQYL

SEQ ID NO: 303923 - protein, 13 aa, Homo sapiens
  CDR3 for alpha chain variable domain of TCR clone 151962 (TRAV3, TRAJ3)
CAVADSSASKIIF

SEQ ID NO: 303924 - protein, 14 aa, Homo sapiens
  CDR3 for beta chain variable domain of TCR clone 151962 (TRBV7-8, TRBJ2-3)
CASSLEAGTDTQYF

SEQ ID NO: 303925 - protein, 14 aa, Homo sapiens
  CDR3 for alpha chain variable domain of TCR clone 151963 (TRAV1-2, TRAJ8)
CAVREDTGFQKLVF

SEQ ID NO: 303926 - protein, 16 aa, Homo sapiens
  CDR3 for beta chain variable domain of TCR clone 151963 (TRBV13, TRBJ2-2)
CASSPRTGGHTGELFF

SEQ ID NO: 303927 - protein, 15 aa, Homo sapiens
  CDR3 for alpha chain variable domain of TCR clone 151964 (TRAV8-4, TRAJ3)
CAVTGENLVQQCFKD

SEQ ID NO: 303928 - protein, 16 aa, Homo sapiens
  CDR3 for beta chain variable domain of TCR clone 151964 (TRBV4-2, TRBJ1-1)
CASSQAGFGMNTEAFF

SEQ ID NO: 303929 - protein, 11 aa, Homo sapiens
  CDR3 for alpha chain variable domain of TCR clone 151965 (TRAV35, TRAJ17)
SIKAAGNRLTF

SEQ ID NO: 303930 - protein, 18 aa, Homo sapiens
  CDR3 for beta chain variable domain of TCR clone 151965 (TRBV20-1, TRBJ2-6)
CSARGSGTTRSGANVLTF

SEQ ID NO: 303931 - protein, 15 aa, Homo sapiens
  CDR3 for alpha chain variable domain of TCR clone 151966 (TRAV3, TRAJ5)
CAVRDLDTGRRALTF

SEQ ID NO: 303932 - protein, 19 aa, Homo sapiens
  CDR3 for beta chain variable domain of TCR clone 151966 (TRBV25-1, TRBJ2-2)
CAILVYRVDRGRKTGELFF

SEQ ID NO: 303933 - protein, 17 aa, Homo sapiens
  CDR3 for alpha chain variable domain of TCR clone 151967 (TRAV3, TRAJ28)
CAVRPLYSGAGSYQLTF

SEQ ID NO: 303934 - protein, 16 aa, Homo sapiens
  CDR3 for beta chain variable domain of TCR clone 151967 (TRBV4-2, TRBJ1-4)
CASSRARGPTNEKLFF

SEQ ID NO: 303935 - protein, 15 aa, Homo sapiens
  CDR3 for alpha chain variable domain of TCR clone 151968 (TRAV8-3, TRAJ11)
CAVGLLNSGYSTLTF

SEQ ID NO: 303936 - protein, 16 aa, Homo sapiens
  CDR3 for beta chain variable domain of TCR clone 151968 (TRBV7-2, TRBJ2-7)
CASSLDPGGGSGEQYF

SEQ ID NO: 303937 - protein, 14 aa, Homo sapiens
  CDR3 for alpha chain variable domain of TCR clone 151969 (TRAV14/DV4, TRAJ49)
CAFNRYLTGNQFNF

SEQ ID NO: 303938 - protein, 15 aa, Homo sapiens
  CDR3 for beta chain variable domain of TCR clone 151969 (TRBV5-1, TRBJ1-1)
CASSSTTGTNTEAFF

SEQ ID NO: 303939 - protein, 15 aa, Homo sapiens
  CDR3 for alpha chain variable domain of TCR clone 151970 (TRAV3, TRAJ20)
FAVRDIKLSDYKLSF

SEQ ID NO: 303940 - protein, 13 aa, Homo sapiens
  CDR3 for beta chain variable domain of TCR clone 151970 (TRBV10-3, TRBJ2-7)
CASKLAVNYEQYF

SEQ ID NO: 303941 - protein, 14 aa, Homo sapiens
  CDR3 for alpha chain variable domain of TCR clone 151971 (TRAV12-2, TRAJ13)
CAVKKTRGYQKVTF

SEQ ID NO: 303942 - protein, 17 aa, Homo sapiens
  CDR3 for beta chain variable domain of TCR clone 151971 (TRBV10-3, TRBJ2-4)
CTSVPSVNKGSKNIQYF

SEQ ID NO: 303943 - protein, 10 aa, Homo sapiens
  CDR3 for alpha chain variable domain of TCR clone 151972 (TRAV13-1, TRAJ41)
CAASGPRRTQ

SEQ ID NO: 303944 - protein, 14 aa, Homo sapiens
  CDR3 for beta chain variable domain of TCR clone 151972 (TRBV7-3, TRBJ2-1)
CASSLAGGTNEQFF

SEQ ID NO: 303945 - protein, 13 aa, Homo sapiens
  CDR3 for alpha chain variable domain of TCR clone 151973 (TRAV13-1, TRAJ5)
CAAGVTGRRALTF

SEQ ID NO: 303946 - protein, 12 aa, Homo sapiens
  CDR3 for beta chain variable domain of TCR clone 151973 (TRBV3-1, TRBJ2-5)
CASSQRGETQYF

SEQ ID NO: 303947 - protein, 14 aa, Homo sapiens
  CDR3 for alpha chain variable domain of TCR clone 151974 (TRAV8-4, TRAJ9)
CAVSDRTGGFKTTF

SEQ ID NO: 303948 - protein, 13 aa, Homo sapiens
  CDR3 for beta chain variable domain of TCR clone 151974 (TRBV11-2, TRBJ2-7)
CASSLGDSYEQYF

SEQ ID NO: 303949 - protein, 14 aa, Homo sapiens
  CDR3 for alpha chain variable domain of TCR clone 151975 (TRAV26-1, TRAJ34)
CIVRVAYNTDKLIF

SEQ ID NO: 303950 - protein, 15 aa, Homo sapiens
  CDR3 for beta chain variable domain of TCR clone 151975 (TRBV20-1, TRBJ2-7)
CSARVPAAYCYEQYY

SEQ ID NO: 303951 - protein, 13 aa, Homo sapiens
  CDR3 for alpha chain variable domain of TCR clone 151976 (TRAV1-1, TRAJ9)
CAAKNTGGFKTIF

SEQ ID NO: 303952 - protein, 16 aa, Homo sapiens
  CDR3 for beta chain variable domain of TCR clone 151976 (TRBV12-4, TRBJ1-5)
CQQCRDREYSNQPQHF

SEQ ID NO: 303953 - protein, 13 aa, Homo sapiens
  CDR3 for alpha chain variable domain of TCR clone 151977 (TRAV8-3, TRAJ41)
CAVGADSGYALNC

SEQ ID NO: 303954 - protein, 14 aa, Homo sapiens
  CDR3 for beta chain variable domain of TCR clone 151977 (TRBV2, TRBJ1-1)
CASRALLMNTEAFF

SEQ ID NO: 303955 - protein, 15 aa, Homo sapiens
  CDR3 for alpha chain variable domain of TCR clone 151978 (TRAV8-1, TRAJ6)
CAVNTPPGGSYIPTF

SEQ ID NO: 303956 - protein, 12 aa, Homo sapiens
  CDR3 for beta chain variable domain of TCR clone 151978 (TRBV11-2, TRBJ2-1)
CASSPGNNEQFF

SEQ ID NO: 303957 - protein, 12 aa, Homo sapiens
  CDR3 for alpha chain variable domain of TCR clone 151979 (TRAV1-1, TRAJ8)
CAGGTGFQKLVI

SEQ ID NO: 303958 - protein, 15 aa, Homo sapiens
  CDR3 for beta chain variable domain of TCR clone 151979 (TRBV7-9, TRBJ1-4)
CASSRTGGFNEKLFF

SEQ ID NO: 303959 - protein, 15 aa, Homo sapiens
  CDR3 for alpha chain variable domain of TCR clone 151980 (TRAV27, TRAJ38)
CAARRNAGNNRKLIW

SEQ ID NO: 303960 - protein, 13 aa, Homo sapiens
  CDR3 for beta chain variable domain of TCR clone 151980 (TRBV28, TRBJ2-5)
CAGVRRGEETQYF

SEQ ID NO: 303961 - protein, 15 aa, Homo sapiens
  CDR3 for alpha chain variable domain of TCR clone 151981 (TRAV21, TRAJ53)
CATLNSGGSSYKLTF

SEQ ID NO: 303962 - protein, 17 aa, Homo sapiens
  CDR3 for beta chain variable domain of TCR clone 151981 (TRBV11-2, TRBJ2-1)
CASSLYPPGVEYNEQFF

SEQ ID NO: 303963 - protein, 10 aa, Homo sapiens
  CDR3 for alpha chain variable domain of TCR clone 151982 (TRAV23/DV6, TRAJ57)
CAESSTPSQG

SEQ ID NO: 303964 - protein, 13 aa, Homo sapiens
  CDR3 for beta chain variable domain of TCR clone 151982 (TRBV25-1, TRBJ1-1)
CQHPPGGNTEAFF

SEQ ID NO: 303965 - protein, 16 aa, Homo sapiens
  CDR3 for alpha chain variable domain of TCR clone 151983 (TRAV3, TRAJ28)
CAVLPRSGAGSYQLTF

SEQ ID NO: 303966 - protein, 13 aa, Homo sapiens
  CDR3 for beta chain variable domain of TCR clone 151983 (TRBV12-4, TRBJ2-5)
CASRLVVQETQYF

SEQ ID NO: 303967 - protein, 13 aa, Homo sapiens
  CDR3 for alpha chain variable domain of TCR clone 151984 (TRAV13-1, TRAJ39)
CAASIWAGNMLTF

SEQ ID NO: 303968 - protein, 15 aa, Homo sapiens
  CDR3 for beta chain variable domain of TCR clone 151984 (TRBV7-6, TRBJ1-5)
CASSQSSGINQPQHF

SEQ ID NO: 303969 - protein, 14 aa, Homo sapiens
  CDR3 for alpha chain variable domain of TCR clone 151985 (TRAV35, TRAJ33)
CAGSSQDSNYQLIW

SEQ ID NO: 303970 - protein, 15 aa, Homo sapiens
  CDR3 for beta chain variable domain of TCR clone 151985 (TRBV20-1, TRBJ2-7)
CSAESGTSGPYEQYF

SEQ ID NO: 303971 - protein, 14 aa, Homo sapiens
  CDR3 for alpha chain variable domain of TCR clone 151986 (TRAV23/DV6, TRAJ8)
CAASKATGFQNLVL

SEQ ID NO: 303972 - protein, 15 aa, Homo sapiens
  CDR3 for beta chain variable domain of TCR clone 151986 (TRBV28, TRBJ2-3)
CASSPDRQGANTQYV

SEQ ID NO: 303973 - protein, 14 aa, Homo sapiens
  CDR3 for alpha chain variable domain of TCR clone 151987 (TRAV13-1, TRAJ26)
CAASSAHYGLNFVF

SEQ ID NO: 303974 - protein, 17 aa, Homo sapiens
  CDR3 for beta chain variable domain of TCR clone 151987 (TRBV25-1, TRBJ2-5)
CASSRRGGRGGKETQYF

SEQ ID NO: 303975 - protein, 14 aa, Homo sapiens
  CDR3 for alpha chain variable domain of TCR clone 151988 (TRAV13-1, TRAJ44)
CAAKATGTASKLTF

SEQ ID NO: 303976 - protein, 15 aa, Homo sapiens
  CDR3 for beta chain variable domain of TCR clone 151988 (TRBV2, TRBJ2-1)
CANSEARSAYNEQFF

SEQ ID NO: 303977 - protein, 16 aa, Homo sapiens
  CDR3 for alpha chain variable domain of TCR clone 151989 (TRAV3, TRAJ10)
CAVRDMRAGGGNKLTF

SEQ ID NO: 303978 - protein, 18 aa, Homo sapiens
  CDR3 for beta chain variable domain of TCR clone 151989 (TRBV7-2, TRBJ2-3)
CASSLETSRGRKADTQYF

SEQ ID NO: 303979 - protein, 18 aa, Homo sapiens
  CDR3 for alpha chain variable domain of TCR clone 151990 (TRAV13-1, TRAJ52)
CAASKRSAGGTSYGKLTF

SEQ ID NO: 303980 - protein, 13 aa, Homo sapiens
  CDR3 for beta chain variable domain of TCR clone 151990 (TRBV12-4, TRBJ1-2)
CASSLRQGKGETF

SEQ ID NO: 303981 - protein, 16 aa, Homo sapiens
  CDR3 for alpha chain variable domain of TCR clone 151991 (TRAV35, TRAJ28)
CAGQRYSGAGSYQLTF

SEQ ID NO: 303982 - protein, 14 aa, Homo sapiens
  CDR3 for beta chain variable domain of TCR clone 151991 (TRBV18, TRBJ2-7)
CASSPRGGAYEPYF

SEQ ID NO: 303983 - protein, 13 aa, Homo sapiens
  CDR3 for alpha chain variable domain of TCR clone 151992 (TRAV13-1, TRAJ5)
CAASDTGRRALTF

SEQ ID NO: 303984 - protein, 15 aa, Homo sapiens
  CDR3 for beta chain variable domain of TCR clone 151992 (TRBV7-3, TRBJ2-2)
CASSLTGQGTGELFF

SEQ ID NO: 303985 - protein, 15 aa, Homo sapiens
  CDR3 for alpha chain variable domain of TCR clone 151993 (TRAV21, TRAJ24)
CAARSSTNSWGKLQF

SEQ ID NO: 303986 - protein, 16 aa, Homo sapiens
  CDR3 for beta chain variable domain of TCR clone 151993 (TRBV12-4, TRBJ2-7)
CASSPEGQGSSYEQYF

SEQ ID NO: 303987 - protein, 14 aa, Homo sapiens
  CDR3 for alpha chain variable domain of TCR clone 151994 (TRAV2, TRAJ9)
CAVEDRSGGFATIF

SEQ ID NO: 303988 - protein, 16 aa, Homo sapiens
  CDR3 for beta chain variable domain of TCR clone 151994 (TRBV7-3, TRBJ2-1)
CASSLEGYRSYNEQFF

SEQ ID NO: 303989 - protein, 14 aa, Homo sapiens
  CDR3 for alpha chain variable domain of TCR clone 151995 (TRAV2, TRAJ9)
CAVEDRSGGFTTIF

SEQ ID NO: 303990 - protein, 15 aa, Homo sapiens
  CDR3 for beta chain variable domain of TCR clone 151995 (TRBV28, TRBJ2-5)
CASSPPWSYQETQYF

SEQ ID NO: 303991 - protein, 16 aa, Homo sapiens
  CDR3 for alpha chain variable domain of TCR clone 151996 (TRAV3, TRAJ37)
CAVRGKGSGNTGKLIF

SEQ ID NO: 303992 - protein, 15 aa, Homo sapiens
  CDR3 for beta chain variable domain of TCR clone 151996 (TRBV20-1, TRBJ1-5)
CSATSDRGLGQPQHF

SEQ ID NO: 303993 - protein, 13 aa, Homo sapiens
  CDR3 for alpha chain variable domain of TCR clone 151997 (TRAV8-4, TRAJ48)
CAVSLFGNEKLTF

SEQ ID NO: 303994 - protein, 15 aa, Homo sapiens
  CDR3 for beta chain variable domain of TCR clone 151997 (TRBV20-1, TRBJ2-7)
CSARTGLAESYEQYF

SEQ ID NO: 303995 - protein, 13 aa, Homo sapiens
  CDR3 for alpha chain variable domain of TCR clone 151998 (TRAV12-2, TRAJ18)
CAVRGSTLGRLYF

SEQ ID NO: 303996 - protein, 20 aa, Homo sapiens
  CDR3 for beta chain variable domain of TCR clone 151998 (TRBV7-8, TRBJ2-2)
CASSHLFPGPTIHITGELFV

SEQ ID NO: 303997 - protein, 21 aa, Homo sapiens
  CDR3 for alpha chain variable domain of TCR clone 151999 (TRAV1-1, TRAJ6)
CAVRREEATYLHLEEEPALLF

SEQ ID NO: 303998 - protein, 15 aa, Homo sapiens
  CDR3 for beta chain variable domain of TCR clone 151999 (TRBV6-6, TRBJ2-1)
CATRQGVSSYNEQYF

SEQ ID NO: 303999 - protein, 14 aa, Homo sapiens
  CDR3 for alpha chain variable domain of TCR clone 152000 (TRAV8-3, TRAJ4)
CAVGAAGGYNKLIF

SEQ ID NO: 304000 - protein, 14 aa, Homo sapiens
  CDR3 for beta chain variable domain of TCR clone 152000 (TRBV6-5, TRBJ2-1)
CASSYDAGGNEQFF

SEQ ID NO: 304001 - protein, 14 aa, Homo sapiens
  CDR3 for alpha chain variable domain of TCR clone 152001 (TRAV2, TRAJ37)
CAVDFTSNTGKLIF

SEQ ID NO: 304002 - protein, 15 aa, Homo sapiens
  CDR3 for beta chain variable domain of TCR clone 152001 (TRBV4-3, TRBJ1-1)
CASSQELGRETEAFF

SEQ ID NO: 304003 - protein, 10 aa, Homo sapiens
  CDR3 for alpha chain variable domain of TCR clone 152002 (TRAV26-1, TRAJ22)
CSVSARQLTF

SEQ ID NO: 304004 - protein, 13 aa, Homo sapiens
  CDR3 for beta chain variable domain of TCR clone 152002 (TRBV7-9, TRBJ1-2)
CASSLKQNYGYTF

SEQ ID NO: 304005 - protein, 16 aa, Homo sapiens
  CDR3 for alpha chain variable domain of TCR clone 152003 (TRAV8-3, TRAJ8)
CAVPRDGNTGFQKLVF

SEQ ID NO: 304006 - protein, 14 aa, Homo sapiens
  CDR3 for beta chain variable domain of TCR clone 152003 (TRBV19, TRBJ2-1)
CASPTFVLSGEQFF

SEQ ID NO: 304007 - protein, 14 aa, Homo sapiens
  CDR3 for alpha chain variable domain of TCR clone 152004 (TRAV34, TRAJ44)
CGADGTGTASKLTF

SEQ ID NO: 304008 - protein, 15 aa, Homo sapiens
  CDR3 for beta chain variable domain of TCR clone 152004 (TRBV5-1, TRBJ2-1)
WASSPPRAPYNEQFF

SEQ ID NO: 304009 - protein, 16 aa, Homo sapiens
  CDR3 for alpha chain variable domain of TCR clone 152005 (TRAV30, TRAJ24)
CGTEIVDADSWGKFQF

SEQ ID NO: 304010 - protein, 17 aa, Homo sapiens
  CDR3 for beta chain variable domain of TCR clone 152005 (TRBV11-2, TRBJ2-1)
CASSLYPPGAEYNDQFF

SEQ ID NO: 304011 - protein, 14 aa, Homo sapiens
  CDR3 for alpha chain variable domain of TCR clone 152006 (TRAV8-4, TRAJ13)
CAVTPSGGYQKVTF

SEQ ID NO: 304012 - protein, 14 aa, Homo sapiens
  CDR3 for beta chain variable domain of TCR clone 152006 (TRBV7-2, TRBJ1-2)
CASSQTGSTYGYAF

SEQ ID NO: 304013 - protein, 18 aa, Homo sapiens
  CDR3 for alpha chain variable domain of TCR clone 152007 (TRAV21, TRAJ45)
CCGGPQGGSGGGADGLTF

SEQ ID NO: 304014 - protein, 14 aa, Homo sapiens
  CDR3 for beta chain variable domain of TCR clone 152007 (TRBV20-1, TRBJ2-3)
CSARGGTSTDTQYF

SEQ ID NO: 304015 - protein, 14 aa, Homo sapiens
  CDR3 for alpha chain variable domain of TCR clone 152008 (TRAV13-1, TRAJ35)
CAASKGGFGNVLHC

SEQ ID NO: 304016 - protein, 16 aa, Homo sapiens
  CDR3 for beta chain variable domain of TCR clone 152008 (TRBV29-1, TRBJ2-7)
CSVEVVGTSGSYEQYF

SEQ ID NO: 304017 - protein, 20 aa, Homo sapiens
  CDR3 for alpha chain variable domain of TCR clone 152009 (TRAV21, TRAJ22)
SLVTQPPTLKSSGSERQLTF

SEQ ID NO: 304018 - protein, 16 aa, Homo sapiens
  CDR3 for beta chain variable domain of TCR clone 152009 (TRBV7-3, TRBJ2-2)
CASSLKRGTLSGELFF

SEQ ID NO: 304019 - protein, 12 aa, Homo sapiens
  CDR3 for alpha chain variable domain of TCR clone 152010 (TRAV17, TRAJ57)
CATDGGSEKLVF

SEQ ID NO: 304020 - protein, 15 aa, Homo sapiens
  CDR3 for beta chain variable domain of TCR clone 152010 (TRBV7-9, TRBJ2-2)
CASSPETGAGGELFF

SEQ ID NO: 304021 - protein, 23 aa, Homo sapiens
  CDR3 for alpha chain variable domain of TCR clone 152011 (TRAV8-3, TRAJ32)
CAVGSLVVLQTSSSLELALCLLS

SEQ ID NO: 304022 - protein, 16 aa, Homo sapiens
  CDR3 for beta chain variable domain of TCR clone 152011 (TRBV24-1, TRBJ2-3)
CATSDPGTGATDTQYF

SEQ ID NO: 304023 - protein, 12 aa, Homo sapiens
  CDR3 for alpha chain variable domain of TCR clone 152012 (TRAV2, TRAJ36)
CAGLTGANNLFF

SEQ ID NO: 304024 - protein, 14 aa, Homo sapiens
  CDR3 for beta chain variable domain of TCR clone 152012 (TRBV18, TRBJ2-7)
CASSPRGGAYEQYF

SEQ ID NO: 304025 - protein, 14 aa, Homo sapiens
  CDR3 for alpha chain variable domain of TCR clone 152013 (TRAV12-3, TRAJ10)
SHLPLTGGGNKITF

SEQ ID NO: 304026 - protein, 13 aa, Homo sapiens
  CDR3 for beta chain variable domain of TCR clone 152013 (TRBV27, TRBJ1-1)
CASSLSIGAEAFF

SEQ ID NO: 304027 - protein, 14 aa, Homo sapiens
  CDR3 for alpha chain variable domain of TCR clone 152014 (TRAV13-1, TRAJ44)
CAAKATGTASKLTF

SEQ ID NO: 304028 - protein, 14 aa, Homo sapiens
  CDR3 for beta chain variable domain of TCR clone 152014 (TRBV5-1, TRBJ1-2)
CASSLEPVNYGYTF

SEQ ID NO: 304029 - protein, 17 aa, Homo sapiens
  CDR3 for alpha chain variable domain of TCR clone 152015 (TRAV27, TRAJ26)
CAGARAPLDNYGQNFVF

SEQ ID NO: 304030 - protein, 16 aa, Homo sapiens
  CDR3 for beta chain variable domain of TCR clone 152015 (TRBV11-2, TRBJ1-2)
CASSLDTGGADYGYTF

SEQ ID NO: 304031 - protein, 16 aa, Homo sapiens
  CDR3 for alpha chain variable domain of TCR clone 152016 (TRAV38-1, TRAJ32)
CAFMKGGGGSTNKPIF

SEQ ID NO: 304032 - protein, 13 aa, Homo sapiens
  CDR3 for beta chain variable domain of TCR clone 152016 (TRBV20-1, TRBJ2-5)
CSAREAFQETQYF

SEQ ID NO: 304033 - protein, 11 aa, Homo sapiens
  CDR3 for alpha chain variable domain of TCR clone 152017 (TRAV17, TRAJ9)
CGFTGGFKTIF

SEQ ID NO: 304034 - protein, 14 aa, Homo sapiens
  CDR3 for beta chain variable domain of TCR clone 152017 (TRBV13, TRBJ2-5)
CASSLERVGETQYF

SEQ ID NO: 304035 - protein, 14 aa, Homo sapiens
  CDR3 for alpha chain variable domain of TCR clone 152018 (TRAV12-3, TRAJ22)
CAMILFGSARQLTF

SEQ ID NO: 304036 - protein, 11 aa, Homo sapiens
  CDR3 for beta chain variable domain of TCR clone 152018 (TRBV12-4, TRBJ2-2)
CASSSAGELFF

SEQ ID NO: 304037 - protein, 14 aa, Homo sapiens
  CDR3 for alpha chain variable domain of TCR clone 152019 (TRAV12-1, TRAJ43)
CVVNGRSNNNDMRF

SEQ ID NO: 304038 - protein, 17 aa, Homo sapiens
  CDR3 for beta chain variable domain of TCR clone 152019 (TRBV4-1, TRBJ2-7)
CASSPFLTSGGVVEQYF

SEQ ID NO: 304039 - protein, 20 aa, Homo sapiens
  CDR3 for alpha chain variable domain of TCR clone 152020 (TRAV13-1, )
CAASPMDIQNPDPAVYPLRD

SEQ ID NO: 304040 - protein, 13 aa, Homo sapiens
  CDR3 for beta chain variable domain of TCR clone 152020 (TRBV20-1, TRBJ2-2)
CSASAAGTGELFF

SEQ ID NO: 304041 - protein, 12 aa, Homo sapiens
  CDR3 for alpha chain variable domain of TCR clone 152021 (TRAV12-3, TRAJ17)
CAVTLTGNKLTF

SEQ ID NO: 304042 - protein, 15 aa, Homo sapiens
  CDR3 for beta chain variable domain of TCR clone 152021 (TRBV20-1, TRBJ2-7)
CSARDRVSGIDEQYF

SEQ ID NO: 304043 - protein, 13 aa, Homo sapiens
  CDR3 for alpha chain variable domain of TCR clone 152022 (TRAV4, TRAJ34)
CLVGAYNTDKLIF

SEQ ID NO: 304044 - protein, 23 aa, Homo sapiens
  CDR3 for beta chain variable domain of TCR clone 152022 (TRBV4-2, TRBJ2-3)
CASSQDPPRASSISGGRGDTQYF

SEQ ID NO: 304045 - protein, 14 aa, Homo sapiens
  CDR3 for alpha chain variable domain of TCR clone 152023 (TRAV12-2, TRAJ9)
CAVNMEGGGFKTIF

SEQ ID NO: 304046 - protein, 15 aa, Homo sapiens
  CDR3 for beta chain variable domain of TCR clone 152023 (TRBV20-1, TRBJ2-7)
CSAESGTSGAYEQYF

SEQ ID NO: 304047 - protein, 13 aa, Homo sapiens
  CDR3 for alpha chain variable domain of TCR clone 152024 (TRAV16, TRAJ48)
SSPLNFGNEKLTF

SEQ ID NO: 304048 - protein, 11 aa, Homo sapiens
  CDR3 for beta chain variable domain of TCR clone 152024 (TRBV7-9, TRBJ2-3)
CASSPTDTQYF

SEQ ID NO: 304049 - protein, 13 aa, Homo sapiens
  CDR3 for alpha chain variable domain of TCR clone 152025 (TRAV2, TRAJ11)
CAVVEIGYSTLTF

SEQ ID NO: 304050 - protein, 17 aa, Homo sapiens
  CDR3 for beta chain variable domain of TCR clone 152025 (TRBV7-2, TRBJ2-1)
CASSRGTSGAVGWEQFF

SEQ ID NO: 304051 - protein, 12 aa, Homo sapiens
  CDR3 for alpha chain variable domain of TCR clone 152026 (TRAV13-2, TRAJ8)
CAPWLGFQKLVF

SEQ ID NO: 304052 - protein, 18 aa, Homo sapiens
  CDR3 for beta chain variable domain of TCR clone 152026 (TRBV11-2, TRBJ2-3)
CASSLGGASRGAPNSQYF

SEQ ID NO: 304053 - protein, 14 aa, Homo sapiens
  CDR3 for alpha chain variable domain of TCR clone 152027 (TRAV3, TRAJ9)
CAVRLNTGGFKTIF

SEQ ID NO: 304054 - protein, 15 aa, Homo sapiens
  CDR3 for beta chain variable domain of TCR clone 152027 (TRBV7-2, TRBJ2-1)
CASSLASGRVKEQFF

SEQ ID NO: 304055 - protein, 13 aa, Homo sapiens
  CDR3 for alpha chain variable domain of TCR clone 152028 (TRAV3, TRAJ40)
CAVRGSGAYKYIF

SEQ ID NO: 304056 - protein, 13 aa, Homo sapiens
  CDR3 for beta chain variable domain of TCR clone 152028 (TRBV10-3, TRBJ2-7)
CASKLAVNYEQYF

SEQ ID NO: 304057 - protein, 12 aa, Homo sapiens
  CDR3 for alpha chain variable domain of TCR clone 152029 (TRAV25, TRAJ11)
CAGASGYSTLTF

SEQ ID NO: 304058 - protein, 13 aa, Homo sapiens
  CDR3 for beta chain variable domain of TCR clone 152029 (TRBV10-3, TRBJ1-2)
CAISERDSYGYTF

SEQ ID NO: 304059 - protein, 15 aa, Homo sapiens
  CDR3 for alpha chain variable domain of TCR clone 152030 (TRAV3, TRAJ5)
CAARDFDTGRRALTF

SEQ ID NO: 304060 - protein, 13 aa, Homo sapiens
  CDR3 for beta chain variable domain of TCR clone 152030 (TRBV12-4, TRBJ2-7)
CASSPTETYEQYF

SEQ ID NO: 304061 - protein, 15 aa, Homo sapiens
  CDR3 for alpha chain variable domain of TCR clone 152031 (TRAV21, TRAJ24)
CAARSSTDSWGKLQF

SEQ ID NO: 304062 - protein, 15 aa, Homo sapiens
  CDR3 for beta chain variable domain of TCR clone 152031 (TRBV5-1, TRBJ2-1)
CASSPARAPYNEQFF

SEQ ID NO: 304063 - protein, 12 aa, Homo sapiens
  CDR3 for alpha chain variable domain of TCR clone 152032 (TRAV17, TRAJ20)
CAMDRYDYKLSF

SEQ ID NO: 304064 - protein, 14 aa, Homo sapiens
  CDR3 for beta chain variable domain of TCR clone 152032 (TRBV19, TRBJ2-1)
CASPTFVLSGEQFF

SEQ ID NO: 304065 - protein, 15 aa, Homo sapiens
  CDR3 for alpha chain variable domain of TCR clone 152033 (TRAV8-3, TRAJ45)
CASSYSGGGADGLTF

SEQ ID NO: 304066 - protein, 14 aa, Homo sapiens
  CDR3 for beta chain variable domain of TCR clone 152033 (TRBV19, TRBJ1-2)
CASSRQGSSIGYTF

SEQ ID NO: 304067 - protein, 14 aa, Homo sapiens
  CDR3 for alpha chain variable domain of TCR clone 152034 (TRAV8-6, TRAJ5)
CAVSVDTVRRALTF

SEQ ID NO: 304068 - protein, 14 aa, Homo sapiens
  CDR3 for beta chain variable domain of TCR clone 152034 (TRBV6-1, TRBJ1-3)
CASVQGGGGNTIYF

SEQ ID NO: 304069 - protein, 11 aa, Homo sapiens
  CDR3 for alpha chain variable domain of TCR clone 152035 (TRAV23/DV6, TRAJ48)
CAPRWGEKLTF

SEQ ID NO: 304070 - protein, 13 aa, Homo sapiens
  CDR3 for beta chain variable domain of TCR clone 152035 (TRBV12-4, TRBJ2-7)
CASSPTETYEQYF

SEQ ID NO: 304071 - protein, 16 aa, Homo sapiens
  CDR3 for alpha chain variable domain of TCR clone 152036 (TRAV3, TRAJ21)
CAVRDTERGNFNKFYF

SEQ ID NO: 304072 - protein, 20 aa, Homo sapiens
  CDR3 for beta chain variable domain of TCR clone 152036 (TRBV7-8, TRBJ2-2)
CASSHLFPGPTIHITGELFF

SEQ ID NO: 304073 - protein, 16 aa, Homo sapiens
  CDR3 for alpha chain variable domain of TCR clone 152037 (TRAV12-3, TRAJ53)
CAMSPGSGGSNYKLTL

SEQ ID NO: 304074 - protein, 18 aa, Homo sapiens
  CDR3 for beta chain variable domain of TCR clone 152037 (TRBV11-2, TRBJ2-3)
CASSLGGASRGAPNTQYF

SEQ ID NO: 304075 - protein, 13 aa, Homo sapiens
  CDR3 for alpha chain variable domain of TCR clone 152038 (TRAV8-6, TRAJ54)
CAVSDQGAQKLVF

SEQ ID NO: 304076 - protein, 14 aa, Homo sapiens
  CDR3 for beta chain variable domain of TCR clone 152038 (TRBV7-6, TRBJ2-3)
CASSLGTVTDTQYF

SEQ ID NO: 304077 - protein, 14 aa, Homo sapiens
  CDR3 for alpha chain variable domain of TCR clone 152039 (TRAV23/DV6, TRAJ13)
CAAMYSGGYQKVTF

SEQ ID NO: 304078 - protein, 14 aa, Homo sapiens
  CDR3 for beta chain variable domain of TCR clone 152039 (TRBV7-9, TRBJ2-1)
CASSPRDSIYEQFF

SEQ ID NO: 304079 - protein, 12 aa, Homo sapiens
  CDR3 for alpha chain variable domain of TCR clone 152040 (TRAV3, TRAJ20)
CAVRDGDYKLSF

SEQ ID NO: 304080 - protein, 15 aa, Homo sapiens
  CDR3 for beta chain variable domain of TCR clone 152040 (TRBV5-1, TRBJ2-1)
CASSPPRAPYNEQFF

SEQ ID NO: 304081 - protein, 13 aa, Homo sapiens
  CDR3 for alpha chain variable domain of TCR clone 152041 (TRAV13-2, TRAJ22)
CLGWINSARQLTF

SEQ ID NO: 304082 - protein, 15 aa, Homo sapiens
  CDR3 for beta chain variable domain of TCR clone 152041 (TRBV7-2, TRBJ2-3)
CASSSTGLETDTQYF

SEQ ID NO: 304083 - protein, 14 aa, Homo sapiens
  CDR3 for alpha chain variable domain of TCR clone 152042 (TRAV2, TRAJ9)
CAVEDRSGGFNTIF

SEQ ID NO: 304084 - protein, 13 aa, Homo sapiens
  CDR3 for beta chain variable domain of TCR clone 152042 (TRBV27, TRBJ1-1)
CASSLSIGAEAFF

SEQ ID NO: 304085 - protein, 14 aa, Homo sapiens
  CDR3 for alpha chain variable domain of TCR clone 152043 (TRAV22, TRAJ6)
CAGVGPGGSYIPTF

SEQ ID NO: 304086 - protein, 19 aa, Homo sapiens
  CDR3 for beta chain variable domain of TCR clone 152043 (TRBV4-2, TRBJ2-6)
CASSQIRDRYISGANVLTF

SEQ ID NO: 304087 - protein, 13 aa, Homo sapiens
  CDR3 for alpha chain variable domain of TCR clone 152044 (TRAV2, TRAJ34)
CAVEEDNTDKLIF

SEQ ID NO: 304088 - protein, 16 aa, Homo sapiens
  CDR3 for beta chain variable domain of TCR clone 152044 (TRBV7-9, TRBJ1-2)
CASSLGFSSGEDGYTF

SEQ ID NO: 304089 - protein, 15 aa, Homo sapiens
  CDR3 for alpha chain variable domain of TCR clone 152045 (TRAV10, TRAJ34)
PTSAWVAVNTDKLIF

SEQ ID NO: 304090 - protein, 14 aa, Homo sapiens
  CDR3 for beta chain variable domain of TCR clone 152045 (TRBV19, TRBJ2-1)
CASPTFVLSGEQFF

SEQ ID NO: 304091 - protein, 19 aa, Homo sapiens
  CDR3 for alpha chain variable domain of TCR clone 152046 (TRAV2, TRAJ20)
ILQVREADAAVYRDCKLSI

SEQ ID NO: 304092 - protein, 16 aa, Homo sapiens
  CDR3 for beta chain variable domain of TCR clone 152046 (TRBV5-1, TRBJ2-5)
CASSLALLRAGETQYF

SEQ ID NO: 304093 - protein, 16 aa, Homo sapiens
  CDR3 for alpha chain variable domain of TCR clone 152047 (TRAV27, TRAJ13)
CAGAKSDSGGYQKVTF

SEQ ID NO: 304094 - protein, 13 aa, Homo sapiens
  CDR3 for beta chain variable domain of TCR clone 152047 (TRBV4-1, TRBJ2-7)
CASSQGQAYEQYF

SEQ ID NO: 304095 - protein, 12 aa, Homo sapiens
  CDR3 for alpha chain variable domain of TCR clone 152048 (TRAV12-3, TRAJ42)
CAPGGSQGNLIF

SEQ ID NO: 304096 - protein, 14 aa, Homo sapiens
  CDR3 for beta chain variable domain of TCR clone 152048 (TRBV7-2, TRBJ1-6)
CASSLQGAKSPLHF

SEQ ID NO: 304097 - protein, 16 aa, Homo sapiens
  CDR3 for alpha chain variable domain of TCR clone 152049 (TRAV8-3, TRAJ8)
WAVPRDGNKGFQKLVF

SEQ ID NO: 304098 - protein, 15 aa, Homo sapiens
  CDR3 for beta chain variable domain of TCR clone 152049 (TRBV19, TRBJ1-5)
CASSIVWADNQPQHF

SEQ ID NO: 304099 - protein, 12 aa, Homo sapiens
  CDR3 for alpha chain variable domain of TCR clone 152050 (TRAV17, TRAJ12)
CATLRSSYKLIS

SEQ ID NO: 304100 - protein, 16 aa, Homo sapiens
  CDR3 for beta chain variable domain of TCR clone 152050 (TRBV28, TRBJ2-7)
CASSLFFETGGPEQYF

SEQ ID NO: 304101 - protein, 13 aa, Homo sapiens
  CDR3 for alpha chain variable domain of TCR clone 152051 (TRAV17, TRAJ21)
CATDGGNFNKFYF

SEQ ID NO: 304102 - protein, 15 aa, Homo sapiens
  CDR3 for beta chain variable domain of TCR clone 152051 (TRBV2, TRBJ2-7)
CASSEGLARSYEQYF

SEQ ID NO: 304103 - protein, 13 aa, Homo sapiens
  CDR3 for alpha chain variable domain of TCR clone 152052 (TRAV13-2, TRAJ48)
CAEMDFGNEKLNF

SEQ ID NO: 304104 - protein, 15 aa, Homo sapiens
  CDR3 for beta chain variable domain of TCR clone 152052 (TRBV7-3, TRBJ2-1)
CASSQRGGALIEQFF

SEQ ID NO: 304105 - protein, 14 aa, Homo sapiens
  CDR3 for alpha chain variable domain of TCR clone 152053 (TRAV8-4, TRAJ9)
CAVRINTGRFKTIF

SEQ ID NO: 304106 - protein, 15 aa, Homo sapiens
  CDR3 for beta chain variable domain of TCR clone 152053 (TRBV10-2, TRBJ2-6)
CASSEQGTGANGLTF

SEQ ID NO: 304107 - protein, 17 aa, Homo sapiens
  CDR3 for alpha chain variable domain of TCR clone 152054 (TRAV3, TRAJ38)
CAVRDCLNAGNNRQLIW

SEQ ID NO: 304108 - protein, 13 aa, Homo sapiens
  CDR3 for beta chain variable domain of TCR clone 152054 (TRBV23-1, TRBJ1-4)
CASRGKFNEKLFF

SEQ ID NO: 304109 - protein, 14 aa, Homo sapiens
  CDR3 for alpha chain variable domain of TCR clone 152055 (TRAV23/DV6, TRAJ57)
CAAALKGGSEKLVF

SEQ ID NO: 304110 - protein, 14 aa, Homo sapiens
  CDR3 for beta chain variable domain of TCR clone 152055 (TRBV18, TRBJ2-5)
CASSPGVSQETQYF

SEQ ID NO: 304111 - protein, 14 aa, Homo sapiens
  CDR3 for alpha chain variable domain of TCR clone 152056 (TRAV9-2, TRAJ39)
CALYIYNAGNMLTF

SEQ ID NO: 304112 - protein, 15 aa, Homo sapiens
  CDR3 for beta chain variable domain of TCR clone 152056 (TRBV6-1, TRBJ2-5)
CASSEFPLMGETQYF

SEQ ID NO: 304113 - protein, 15 aa, Homo sapiens
  CDR3 for alpha chain variable domain of TCR clone 152057 (TRAV13-2, TRAJ32)
CAENTHGGATNKLIF

SEQ ID NO: 304114 - protein, 13 aa, Homo sapiens
  CDR3 for beta chain variable domain of TCR clone 152057 (TRBV10-3, TRBJ2-7)
CASKLAVNYEQYF

SEQ ID NO: 304115 - protein, 14 aa, Homo sapiens
  CDR3 for alpha chain variable domain of TCR clone 152058 (TRAV9-2, TRAJ6)
YALSEPGGSYIPTF

SEQ ID NO: 304116 - protein, 16 aa, Homo sapiens
  CDR3 for beta chain variable domain of TCR clone 152058 (TRBV28, TRBJ2-3)
CASSLFTGVSTDTQYF

SEQ ID NO: 304117 - protein, 14 aa, Homo sapiens
  CDR3 for alpha chain variable domain of TCR clone 152059 (TRAV20, TRAJ42)
CAVQAGGSQGNLIF

SEQ ID NO: 304118 - protein, 14 aa, Homo sapiens
  CDR3 for beta chain variable domain of TCR clone 152059 (TRBV6-3, TRBJ2-1)
CASSYTDQGSEQFF

SEQ ID NO: 304119 - protein, 14 aa, Homo sapiens
  CDR3 for alpha chain variable domain of TCR clone 152060 (TRAV1-2, TRAJ16)
CAVNRFSDGQKPLF

SEQ ID NO: 304120 - protein, 14 aa, Homo sapiens
  CDR3 for beta chain variable domain of TCR clone 152060 (TRBV7-3, TRBJ1-1)
CASSLKGGNTEAFF

SEQ ID NO: 304121 - protein, 15 aa, Homo sapiens
  CDR3 for alpha chain variable domain of TCR clone 152061 (TRAV14/DV4, TRAJ33)
CVMREGRDSNYQLIW

SEQ ID NO: 304122 - protein, 15 aa, Homo sapiens
  CDR3 for beta chain variable domain of TCR clone 152061 (TRBV5-5, TRBJ1-5)
CASSSTPGSNQPQHF

SEQ ID NO: 304123 - protein, 19 aa, Homo sapiens
  CDR3 for alpha chain variable domain of TCR clone 152062 (TRAV1-1, TRAJ30)
CAGSEMTRSSLEKGHDLIF

SEQ ID NO: 304124 - protein, 14 aa, Homo sapiens
  CDR3 for beta chain variable domain of TCR clone 152062 (TRBV11-3, TRBJ1-6)
CASSFSGGDSPLHF

SEQ ID NO: 304125 - protein, 17 aa, Homo sapiens
  CDR3 for alpha chain variable domain of TCR clone 152063 (TRAV21, TRAJ52)
CAVGVNAGGTRYGKLTF

SEQ ID NO: 304126 - protein, 13 aa, Homo sapiens
  CDR3 for beta chain variable domain of TCR clone 152063 (TRBV5-1, TRBJ1-2)
CASSFQGNYGYTF

SEQ ID NO: 304127 - protein, 15 aa, Homo sapiens
  CDR3 for alpha chain variable domain of TCR clone 152064 (TRAV21, TRAJ24)
CAARSSTDSCGKLQF

SEQ ID NO: 304128 - protein, 13 aa, Homo sapiens
  CDR3 for beta chain variable domain of TCR clone 152064 (TRBV11-2, TRBJ2-5)
CASSSTGDETQYF

SEQ ID NO: 304129 - protein, 13 aa, Homo sapiens
  CDR3 for alpha chain variable domain of TCR clone 152065 (TRAV12-2, TRAJ4)
CAVFSGGYNKLIF

SEQ ID NO: 304130 - protein, 13 aa, Homo sapiens
  CDR3 for beta chain variable domain of TCR clone 152065 (TRBV19, TRBJ1-5)
CASSIDRDQTQHF

SEQ ID NO: 304131 - protein, 16 aa, Homo sapiens
  CDR3 for alpha chain variable domain of TCR clone 152066 (TRAV30, TRAJ24)
CGTEIVDADSWGKFQF

SEQ ID NO: 304132 - protein, 12 aa, Homo sapiens
  CDR3 for beta chain variable domain of TCR clone 152066 (TRBV11-2, TRBJ2-2)
CSSSLPTGELFF

SEQ ID NO: 304133 - protein, 16 aa, Homo sapiens
  CDR3 for alpha chain variable domain of TCR clone 152067 (TRAV17, TRAJ52)
CATDGAGGTSYGKLTF

SEQ ID NO: 304134 - protein, 12 aa, Homo sapiens
  CDR3 for beta chain variable domain of TCR clone 152067 (TRBV7-8, TRBJ2-7)
CASSLGDREQYF

SEQ ID NO: 304135 - protein, 12 aa, Homo sapiens
  CDR3 for alpha chain variable domain of TCR clone 152068 (TRAV1-2, TRAJ26)
CSVRYYGQNFVF

SEQ ID NO: 304136 - protein, 14 aa, Homo sapiens
  CDR3 for beta chain variable domain of TCR clone 152068 (TRBV11-1, TRBJ2-7)
CASSFRQGSYEQYF

SEQ ID NO: 304137 - protein, 13 aa, Homo sapiens
  CDR3 for alpha chain variable domain of TCR clone 152069 (TRAV13-1, TRAJ20)
CAARVSNDYKLSF

SEQ ID NO: 304138 - protein, 16 aa, Homo sapiens
  CDR3 for beta chain variable domain of TCR clone 152069 (TRBV11-1, TRBJ1-1)
CATNPRNRAFNTEAFF

SEQ ID NO: 304139 - protein, 14 aa, Homo sapiens
  CDR3 for alpha chain variable domain of TCR clone 152070 (TRAV41, TRAJ48)
CAVISNFGNEKLTF

SEQ ID NO: 304140 - protein, 15 aa, Homo sapiens
  CDR3 for beta chain variable domain of TCR clone 152070 (TRBV25-1, TRBJ1-4)
CASSPGDSTNEKLFF

SEQ ID NO: 304141 - protein, 15 aa, Homo sapiens
  CDR3 for alpha chain variable domain of TCR clone 152071 (TRAV12-1, TRAJ44)
CVVDEYTGTASKLSF

SEQ ID NO: 304142 - protein, 14 aa, Homo sapiens
  CDR3 for beta chain variable domain of TCR clone 152071 (TRBV5-1, TRBJ1-2)
CASSLEPVNYGYTF

SEQ ID NO: 304143 - protein, 16 aa, Homo sapiens
  CDR3 for alpha chain variable domain of TCR clone 152072 (TRAV3, TRAJ3)
CAVRDRAKSSASKIIF

SEQ ID NO: 304144 - protein, 16 aa, Homo sapiens
  CDR3 for beta chain variable domain of TCR clone 152072 (TRBV20-1, TRBJ2-4)
CSATSLAELAKNIQYC

SEQ ID NO: 304145 - protein, 16 aa, Homo sapiens
  CDR3 for alpha chain variable domain of TCR clone 152073 (TRAV3, TRAJ10)
FAVRDMRAGGGNKLTL

SEQ ID NO: 304146 - protein, 16 aa, Homo sapiens
  CDR3 for beta chain variable domain of TCR clone 152073 (TRBV5-7, TRBJ1-5)
CASSLQQDREYQPQHF

SEQ ID NO: 304147 - protein, 16 aa, Homo sapiens
  CDR3 for alpha chain variable domain of TCR clone 152074 (TRAV3, TRAJ10)
CAVRDMRAGGGNKLTF

SEQ ID NO: 304148 - protein, 17 aa, Homo sapiens
  CDR3 for beta chain variable domain of TCR clone 152074 (TRBV28, TRBJ2-7)
CASSPLHRASGVYEQYF

SEQ ID NO: 304149 - protein, 14 aa, Homo sapiens
  CDR3 for alpha chain variable domain of TCR clone 152075 (TRAV1-2, TRAJ16)
CAVNRFSDGQKLLF

SEQ ID NO: 304150 - protein, 16 aa, Homo sapiens
  CDR3 for beta chain variable domain of TCR clone 152075 (TRBV28, TRBJ2-7)
CASSSPQGRDVYEQYF

SEQ ID NO: 304151 - protein, 16 aa, Homo sapiens
  CDR3 for alpha chain variable domain of TCR clone 152076 (TRAV30, TRAJ24)
CGTEIVDADSWGKFQF

SEQ ID NO: 304152 - protein, 19 aa, Homo sapiens
  CDR3 for beta chain variable domain of TCR clone 152076 (TRBV12-4, TRBJ2-6)
CASSLSLGQGGSGANVLTF

SEQ ID NO: 304153 - protein, 17 aa, Homo sapiens
  CDR3 for alpha chain variable domain of TCR clone 152077 (TRAV1-1, TRAJ15)
CLLLLRCPNQAGTALIF

SEQ ID NO: 304154 - protein, 13 aa, Homo sapiens
  CDR3 for beta chain variable domain of TCR clone 152077 (TRBV4-3, TRBJ2-1)
QPSPGQGVNEQFF

SEQ ID NO: 304155 - protein, 14 aa, Homo sapiens
  CDR3 for alpha chain variable domain of TCR clone 152078 (TRAV13-1, TRAJ35)
CADSKGGFGNVMHC

SEQ ID NO: 304156 - protein, 13 aa, Homo sapiens
  CDR3 for beta chain variable domain of TCR clone 152078 (TRBV7-3, TRBJ1-1)
CASSQDWGAEAFF

SEQ ID NO: 304157 - protein, 13 aa, Homo sapiens
  CDR3 for alpha chain variable domain of TCR clone 152079 (TRAV12-2, TRAJ52)
CAVSGTSYGKLTF

SEQ ID NO: 304158 - protein, 14 aa, Homo sapiens
  CDR3 for beta chain variable domain of TCR clone 152079 (TRBV7-8, TRBJ2-3)
CASSSRDSTDTQYF

SEQ ID NO: 304159 - protein, 13 aa, Homo sapiens
  CDR3 for alpha chain variable domain of TCR clone 152080 (TRAV13-2, TRAJ15)
CAESNQAGTALIF

SEQ ID NO: 304160 - protein, 13 aa, Homo sapiens
  CDR3 for beta chain variable domain of TCR clone 152080 (TRBV7-2, TRBJ2-5)
CASSRGGLETQYF

SEQ ID NO: 304161 - protein, 14 aa, Homo sapiens
  CDR3 for alpha chain variable domain of TCR clone 152081 (TRAV20, TRAJ40)
CCAGLDSGTYKYIF

SEQ ID NO: 304162 - protein, 14 aa, Homo sapiens
  CDR3 for beta chain variable domain of TCR clone 152081 (TRBV13, TRBJ2-7)
CASSLKGASYEQYF

SEQ ID NO: 304163 - protein, 14 aa, Homo sapiens
  CDR3 for alpha chain variable domain of TCR clone 152082 (TRAV38-1, TRAJ39)
CAFAYNNAGNMLTF

SEQ ID NO: 304164 - protein, 15 aa, Homo sapiens
  CDR3 for beta chain variable domain of TCR clone 152082 (TRBV19, TRBJ2-6)
CASSIGPSGANVPTF

SEQ ID NO: 304165 - protein, 14 aa, Homo sapiens
  CDR3 for alpha chain variable domain of TCR clone 152083 (TRAV38-1, TRAJ54)
CAFMSPSGAQKLVF

SEQ ID NO: 304166 - protein, 16 aa, Homo sapiens
  CDR3 for beta chain variable domain of TCR clone 152083 (TRBV28, TRBJ2-1)
CASSLGGSGSYNVQFF

SEQ ID NO: 304167 - protein, 13 aa, Homo sapiens
  CDR3 for alpha chain variable domain of TCR clone 152084 (TRAV8-3, TRAJ15)
CAVGIQAGTGLIF

SEQ ID NO: 304168 - protein, 17 aa, Homo sapiens
  CDR3 for beta chain variable domain of TCR clone 152084 (TRBV20-1, TRBJ2-1)
CSARDPLAGVSYNEQFF

SEQ ID NO: 304169 - protein, 14 aa, Homo sapiens
  CDR3 for alpha chain variable domain of TCR clone 152085 (TRAV26-1, TRAJ39)
CIVRGSRAGNILTF

SEQ ID NO: 304170 - protein, 13 aa, Homo sapiens
  CDR3 for beta chain variable domain of TCR clone 152085 (TRBV12-4, TRBJ1-2)
CASSLRQGKGYTF

SEQ ID NO: 304171 - protein, 16 aa, Homo sapiens
  CDR3 for alpha chain variable domain of TCR clone 152086 (TRAV21, TRAJ37)
CAVRTAGSSNTGKLIF

SEQ ID NO: 304172 - protein, 12 aa, Homo sapiens
  CDR3 for beta chain variable domain of TCR clone 152086 (TRBV11-2, TRBJ2-2)
CASSLPTGELFF

SEQ ID NO: 304173 - protein, 14 aa, Homo sapiens
  CDR3 for alpha chain variable domain of TCR clone 152087 (TRAV13-1, TRAJ44)
CAAKATGTASKLTF

SEQ ID NO: 304174 - protein, 16 aa, Homo sapiens
  CDR3 for beta chain variable domain of TCR clone 152087 (TRBV11-2, TRBJ1-2)
CASSPSGREANYGYTF

SEQ ID NO: 304175 - protein, 14 aa, Homo sapiens
  CDR3 for alpha chain variable domain of TCR clone 152088 (TRAV1-2, TRAJ8)
CAVREDTGFQKLVF

SEQ ID NO: 304176 - protein, 14 aa, Homo sapiens
  CDR3 for beta chain variable domain of TCR clone 152088 (TRBV15, TRBJ2-3)
CATRSGTSTYTQYF

SEQ ID NO: 304177 - protein, 16 aa, Homo sapiens
  CDR3 for alpha chain variable domain of TCR clone 152089 (TRAV30, TRAJ24)
CGTEIVDADSWGKFQF

SEQ ID NO: 304178 - protein, 15 aa, Homo sapiens
  CDR3 for beta chain variable domain of TCR clone 152089 (TRBV11-2, TRBJ2-7)
CASSLMVGGSYEQYF

SEQ ID NO: 304179 - protein, 16 aa, Homo sapiens
  CDR3 for alpha chain variable domain of TCR clone 152090 (TRAV26-1, TRAJ33)
CIVPFWGEDSNYQLIW

SEQ ID NO: 304180 - protein, 15 aa, Homo sapiens
  CDR3 for beta chain variable domain of TCR clone 152090 (TRBV12-4, TRBJ2-5)
CASSPPTGLQETQYF

SEQ ID NO: 304181 - protein, 14 aa, Homo sapiens
  CDR3 for alpha chain variable domain of TCR clone 152091 (TRAV17, TRAJ42)
CATSPPGSQGNLIF

SEQ ID NO: 304182 - protein, 15 aa, Homo sapiens
  CDR3 for beta chain variable domain of TCR clone 152091 (TRBV5-4, TRBJ2-1)
CASSLAGTGEEEQFF

SEQ ID NO: 304183 - protein, 12 aa, Homo sapiens
  CDR3 for alpha chain variable domain of TCR clone 152092 (TRAV20, TRAJ4)
CRAYGGYNKLLF

SEQ ID NO: 304184 - protein, 18 aa, Homo sapiens
  CDR3 for beta chain variable domain of TCR clone 152092 (TRBV19, TRBJ1-5)
CASSKGQVSIHSNQPQHF

SEQ ID NO: 304185 - protein, 14 aa, Homo sapiens
  CDR3 for alpha chain variable domain of TCR clone 152093 (TRAV12-3, TRAJ57)
CAMSAWGGSEKLVF

SEQ ID NO: 304186 - protein, 12 aa, Homo sapiens
  CDR3 for beta chain variable domain of TCR clone 152093 (TRBV7-8, TRBJ2-7)
CASSLGDREQYF

SEQ ID NO: 304187 - protein, 16 aa, Homo sapiens
  CDR3 for alpha chain variable domain of TCR clone 152094 (TRAV12-2, TRAJ6)
CAAPLAGPGGSSIPTF

SEQ ID NO: 304188 - protein, 13 aa, Homo sapiens
  CDR3 for beta chain variable domain of TCR clone 152094 (TRBV6-9, TRBJ2-5)
CASKGDGRRTQYF

SEQ ID NO: 304189 - protein, 10 aa, Homo sapiens
  CDR3 for alpha chain variable domain of TCR clone 152095 (TRAV13-1, TRAJ43)
CAASKNDMRF

SEQ ID NO: 304190 - protein, 15 aa, Homo sapiens
  CDR3 for beta chain variable domain of TCR clone 152095 (TRBV7-9, TRBJ1-2)
CASSSFGDTNYGYTF

SEQ ID NO: 304191 - protein, 12 aa, Homo sapiens
  CDR3 for alpha chain variable domain of TCR clone 152096 (TRAV21, TRAJ33)
CAKMDSNYQLIW

SEQ ID NO: 304192 - protein, 13 aa, Homo sapiens
  CDR3 for beta chain variable domain of TCR clone 152096 (TRBV12-4, TRBJ2-5)
CASSPGAEETQYF

SEQ ID NO: 304193 - protein, 15 aa, Homo sapiens
  CDR3 for alpha chain variable domain of TCR clone 152097 (TRAV12-1, TRAJ9)
CVVSFGDNGGFKTIF

SEQ ID NO: 304194 - protein, 13 aa, Homo sapiens
  CDR3 for beta chain variable domain of TCR clone 152097 (TRBV2, TRBJ1-4)
CASSERAGEKLFF

SEQ ID NO: 304195 - protein, 15 aa, Homo sapiens
  CDR3 for alpha chain variable domain of TCR clone 152098 (TRAV17, TRAJ17)
CATDASIIRRQQANF

SEQ ID NO: 304196 - protein, 17 aa, Homo sapiens
  CDR3 for beta chain variable domain of TCR clone 152098 (TRBV29-1, TRBJ2-3)
CSVNAFRASGGVDTQYF

SEQ ID NO: 304197 - protein, 14 aa, Homo sapiens
  CDR3 for alpha chain variable domain of TCR clone 152099 (TRAV9-2, TRAJ39)
CALYIYNAGNMLTF

SEQ ID NO: 304198 - protein, 16 aa, Homo sapiens
  CDR3 for beta chain variable domain of TCR clone 152099 (TRBV12-5, TRBJ2-5)
CASGPRTSGNQVTQYF

SEQ ID NO: 304199 - protein, 14 aa, Homo sapiens
  CDR3 for alpha chain variable domain of TCR clone 152100 (TRAV13-1, TRAJ44)
CAAKATGTASKLTV

SEQ ID NO: 304200 - protein, 16 aa, Homo sapiens
  CDR3 for beta chain variable domain of TCR clone 152100 (TRBV7-3, TRBJ2-2)
CASSLKRGTLSGELFF

SEQ ID NO: 304201 - protein, 13 aa, Homo sapiens
  CDR3 for alpha chain variable domain of TCR clone 152101 (TRAV13-1, TRAJ5)
CAAKHTGRRALTF

SEQ ID NO: 304202 - protein, 15 aa, Homo sapiens
  CDR3 for beta chain variable domain of TCR clone 152101 (TRBV6-1, TRBJ2-1)
CASSELRGQYNEQFF

SEQ ID NO: 304203 - protein, 13 aa, Homo sapiens
  CDR3 for alpha chain variable domain of TCR clone 152102 (TRAV38-2/DV8, TRAJ34)
CAYRNFNTAKLIF

SEQ ID NO: 304204 - protein, 15 aa, Homo sapiens
  CDR3 for beta chain variable domain of TCR clone 152102 (TRBV20-1, TRBJ2-5)
CSAEGTGGLQETQYF

SEQ ID NO: 304205 - protein, 10 aa, Homo sapiens
  CDR3 for alpha chain variable domain of TCR clone 152103 (TRAV16, TRAJ22)
SAMYLRQLTF

SEQ ID NO: 304206 - protein, 15 aa, Homo sapiens
  CDR3 for beta chain variable domain of TCR clone 152103 (TRBV7-3, TRBJ2-2)
CASKANGANTGELFF

SEQ ID NO: 304207 - protein, 16 aa, Homo sapiens
  CDR3 for alpha chain variable domain of TCR clone 152104 (TRAV8-2, TRAJ50)
CVVSDHMKTSYDKVIF

SEQ ID NO: 304208 - protein, 12 aa, Homo sapiens
  CDR3 for beta chain variable domain of TCR clone 152104 (TRBV24-1, TRBJ2-3)
CATSDSTDTQYF

SEQ ID NO: 304209 - protein, 16 aa, Homo sapiens
  CDR3 for alpha chain variable domain of TCR clone 152105 (TRAV13-1, TRAJ22)
CAAKGGRSGSARQLTF

SEQ ID NO: 304210 - protein, 15 aa, Homo sapiens
  CDR3 for beta chain variable domain of TCR clone 152105 (TRBV9, TRBJ1-6)
CASSVDGTGDSPLHF

SEQ ID NO: 304211 - protein, 20 aa, Homo sapiens
  CDR3 for alpha chain variable domain of TCR clone 152106 (TRAV12-3, TRAJ41)
SLFIRDSQPSDSATPEALNF

SEQ ID NO: 304212 - protein, 14 aa, Homo sapiens
  CDR3 for beta chain variable domain of TCR clone 152106 (TRBV19, TRBJ2-2)
CASSGQGIAGELFF

SEQ ID NO: 304213 - protein, 13 aa, Homo sapiens
  CDR3 for alpha chain variable domain of TCR clone 152107 (TRAV12-1, TRAJ40)
CVVPTSGTYKYIF

SEQ ID NO: 304214 - protein, 14 aa, Homo sapiens
  CDR3 for beta chain variable domain of TCR clone 152107 (TRBV25-1, TRBJ1-1)
CASTHLGGNTEAFF

SEQ ID NO: 304215 - protein, 14 aa, Homo sapiens
  CDR3 for alpha chain variable domain of TCR clone 152108 (TRAV13-1, TRAJ13)
CAASRVGGYQTVTF

SEQ ID NO: 304216 - protein, 15 aa, Homo sapiens
  CDR3 for beta chain variable domain of TCR clone 152108 (TRBV28, TRBJ2-1)
CASSIIAGGRSERFF

SEQ ID NO: 304217 - protein, 13 aa, Homo sapiens
  CDR3 for alpha chain variable domain of TCR clone 152109 (TRAV36/DV7, TRAJ38)
CVANAGNNRKLIW

SEQ ID NO: 304218 - protein, 14 aa, Homo sapiens
  CDR3 for beta chain variable domain of TCR clone 152109 (TRBV7-2, TRBJ2-7)
CASSLRWEVNKQYF

SEQ ID NO: 304219 - protein, 13 aa, Homo sapiens
  CDR3 for alpha chain variable domain of TCR clone 152110 (TRAV12-1, TRAJ7)
CVVNMRGNNRLAF

SEQ ID NO: 304220 - protein, 14 aa, Homo sapiens
  CDR3 for beta chain variable domain of TCR clone 152110 (TRBV27, TRBJ2-3)
CQQFGLAATDTQYF

SEQ ID NO: 304221 - protein, 17 aa, Homo sapiens
  CDR3 for alpha chain variable domain of TCR clone 152111 (TRAV29/DV5, TRAJ52)
CAASARAGGTSYGKLTF

SEQ ID NO: 304222 - protein, 12 aa, Homo sapiens
  CDR3 for beta chain variable domain of TCR clone 152111 (TRBV11-2, TRBJ2-2)
CASSLGGGELLF

SEQ ID NO: 304223 - protein, 13 aa, Homo sapiens
  CDR3 for alpha chain variable domain of TCR clone 152112 (TRAV29/DV5, TRAJ31)
CAAGRNNNARLMF

SEQ ID NO: 304224 - protein, 13 aa, Homo sapiens
  CDR3 for beta chain variable domain of TCR clone 152112 (TRBV7-2, TRBJ2-4)
CASSREHANIQYF

SEQ ID NO: 304225 - protein, 16 aa, Homo sapiens
  CDR3 for alpha chain variable domain of TCR clone 152113 (TRAV3, TRAJ10)
CAVRDMRAGGGNKLTF

SEQ ID NO: 304226 - protein, 17 aa, Homo sapiens
  CDR3 for beta chain variable domain of TCR clone 152113 (TRBV28, TRBJ2-5)
CASSTPEGEALQETQYF

SEQ ID NO: 304227 - protein, 17 aa, Homo sapiens
  CDR3 for alpha chain variable domain of TCR clone 152114 (TRAV26-1, TRAJ21)
CVAKGKFYFGSGTKLNV

SEQ ID NO: 304228 - protein, 13 aa, Homo sapiens
  CDR3 for beta chain variable domain of TCR clone 152114 (TRBV11-2, TRBJ2-5)
CASSFSSQETQYF

SEQ ID NO: 304229 - protein, 17 aa, Homo sapiens
  CDR3 for alpha chain variable domain of TCR clone 152115 (TRAV12-2, TRAJ48)
CASNEKLTFGTGTRLTI

SEQ ID NO: 304230 - protein, 15 aa, Homo sapiens
  CDR3 for beta chain variable domain of TCR clone 152115 (TRBV5-1, TRBJ2-1)
CTSSQAGYWWNEQFF

SEQ ID NO: 304231 - protein, 14 aa, Homo sapiens
  CDR3 for alpha chain variable domain of TCR clone 152116 (TRAV26-1, TRAJ49)
CIVRPSNTGNQFYF

SEQ ID NO: 304232 - protein, 15 aa, Homo sapiens
  CDR3 for beta chain variable domain of TCR clone 152116 (TRBV19, TRBJ1-1)
CASMGFRDVNTEDFF

SEQ ID NO: 304233 - protein, 21 aa, Homo sapiens
  CDR3 for alpha chain variable domain of TCR clone 152117 (TRAV3, )
CAVRPTPDIQNPDPAVYQLRD

SEQ ID NO: 304234 - protein, 14 aa, Homo sapiens
  CDR3 for beta chain variable domain of TCR clone 152117 (TRBV7-8, TRBJ2-3)
CASSLEAGTDTQYF

SEQ ID NO: 304235 - protein, 13 aa, Homo sapiens
  CDR3 for alpha chain variable domain of TCR clone 152118 (TRAV8-6, TRAJ24)
CAVSSDSWGKLQF

SEQ ID NO: 304236 - protein, 14 aa, Homo sapiens
  CDR3 for beta chain variable domain of TCR clone 152118 (TRBV7-6, TRBJ2-3)
CASSLGTVTDTQYF

SEQ ID NO: 304237 - protein, 13 aa, Homo sapiens
  CDR3 for alpha chain variable domain of TCR clone 152119 (TRAV8-3, TRAJ21)
CAVGLDNFNKFYF

SEQ ID NO: 304238 - protein, 15 aa, Homo sapiens
  CDR3 for beta chain variable domain of TCR clone 152119 (TRBV7-9, TRBJ1-5)
CASSQGHQPNQPQHF

SEQ ID NO: 304239 - protein, 14 aa, Homo sapiens
  CDR3 for alpha chain variable domain of TCR clone 152120 (TRAV20, TRAJ18)
CAVGRGSTLGRLYF

SEQ ID NO: 304240 - protein, 14 aa, Homo sapiens
  CDR3 for beta chain variable domain of TCR clone 152120 (TRBV28, TRBJ2-4)
CASAQVTGVNIQYF

SEQ ID NO: 304241 - protein, 13 aa, Homo sapiens
  CDR3 for alpha chain variable domain of TCR clone 152121 (TRAV8-3, TRAJ28)
CAVGAGGSYQLIF

SEQ ID NO: 304242 - protein, 14 aa, Homo sapiens
  CDR3 for beta chain variable domain of TCR clone 152121 (TRBV7-2, TRBJ2-7)
CASRSQGAAYEQYF

SEQ ID NO: 304243 - protein, 15 aa, Homo sapiens
  CDR3 for alpha chain variable domain of TCR clone 152122 (TRAV21, TRAJ24)
CAARSSNDSWGKLQF

SEQ ID NO: 304244 - protein, 15 aa, Homo sapiens
  CDR3 for beta chain variable domain of TCR clone 152122 (TRBV5-1, TRBJ2-1)
CASSPPRAPYNEQFF

SEQ ID NO: 304245 - protein, 15 aa, Homo sapiens
  CDR3 for alpha chain variable domain of TCR clone 152123 (TRAV2, TRAJ37)
CAVGDGSSKTGKLIF

SEQ ID NO: 304246 - protein, 13 aa, Homo sapiens
  CDR3 for beta chain variable domain of TCR clone 152123 (TRBV20-1, TRBJ2-7)
CSAQTGLSYEQYF

SEQ ID NO: 304247 - protein, 14 aa, Homo sapiens
  CDR3 for alpha chain variable domain of TCR clone 152124 (TRAV12-3, TRAJ10)
SHLPLTGGGNKLTF

SEQ ID NO: 304248 - protein, 13 aa, Homo sapiens
  CDR3 for beta chain variable domain of TCR clone 152124 (TRBV7-2, TRBJ2-2)
CASSSVLAGELFF

SEQ ID NO: 304249 - protein, 15 aa, Homo sapiens
  CDR3 for alpha chain variable domain of TCR clone 152125 (TRAV13-2, TRAJ50)
CAEEPLKTSYDKVIF

SEQ ID NO: 304250 - protein, 14 aa, Homo sapiens
  CDR3 for beta chain variable domain of TCR clone 152125 (TRBV4-2, TRBJ1-2)
CASSQVGQNYGYTF

SEQ ID NO: 304251 - protein, 14 aa, Homo sapiens
  CDR3 for alpha chain variable domain of TCR clone 152126 (TRAV12-1, TRAJ17)
CVVNPKAAGNKLTF

SEQ ID NO: 304252 - protein, 14 aa, Homo sapiens
  CDR3 for beta chain variable domain of TCR clone 152126 (TRBV20-1, TRBJ2-1)
CSAQIGGSANEQFS

SEQ ID NO: 304253 - protein, 10 aa, Homo sapiens
  CDR3 for alpha chain variable domain of TCR clone 152127 (TRAV38-1, TRAJ34)
CAFMDDKLIL

SEQ ID NO: 304254 - protein, 14 aa, Homo sapiens
  CDR3 for beta chain variable domain of TCR clone 152127 (TRBV7-2, TRBJ2-2)
CASSLNSNTGELVF

SEQ ID NO: 304255 - protein, 13 aa, Homo sapiens
  CDR3 for alpha chain variable domain of TCR clone 152128 (TRAV12-3, TRAJ35)
CAMVIGFGNVLHC

SEQ ID NO: 304256 - protein, 15 aa, Homo sapiens
  CDR3 for beta chain variable domain of TCR clone 152128 (TRBV20-1, TRBJ2-1)
CSARGSGTYYNEQFF

SEQ ID NO: 304257 - protein, 12 aa, Homo sapiens
  CDR3 for alpha chain variable domain of TCR clone 152129 (TRAV12-1, TRAJ23)
CVVNNQGGKLIF

SEQ ID NO: 304258 - protein, 16 aa, Homo sapiens
  CDR3 for beta chain variable domain of TCR clone 152129 (TRBV11-1, TRBJ2-7)
CASSAQTGTLYYEQYF

SEQ ID NO: 304259 - protein, 13 aa, Homo sapiens
  CDR3 for alpha chain variable domain of TCR clone 152130 (TRAV13-1, TRAJ20)
CAARVSNDYKLIF

SEQ ID NO: 304260 - protein, 16 aa, Homo sapiens
  CDR3 for beta chain variable domain of TCR clone 152130 (TRBV11-1, TRBJ1-1)
CATNPRDRAFNTEAFF

SEQ ID NO: 304261 - protein, 13 aa, Homo sapiens
  CDR3 for alpha chain variable domain of TCR clone 152131 (TRAV29/DV5, TRAJ47)
CAASAEYGNKLVF

SEQ ID NO: 304262 - protein, 15 aa, Homo sapiens
  CDR3 for beta chain variable domain of TCR clone 152131 (TRBV11-3, TRBJ2-3)
CASSAGTVVTNTQYF

SEQ ID NO: 304263 - protein, 11 aa, Homo sapiens
  CDR3 for alpha chain variable domain of TCR clone 152132 (TRAV1-2, TRAJ40)
CASPGTYKYIF

SEQ ID NO: 304264 - protein, 16 aa, Homo sapiens
  CDR3 for beta chain variable domain of TCR clone 152132 (TRBV29-1, TRBJ2-7)
CSVEVVGTSGSYEQYF

SEQ ID NO: 304265 - protein, 14 aa, Homo sapiens
  CDR3 for alpha chain variable domain of TCR clone 152133 (TRAV1-2, TRAJ16)
CAVNRFSDGQTLLF

SEQ ID NO: 304266 - protein, 15 aa, Homo sapiens
  CDR3 for beta chain variable domain of TCR clone 152133 (TRBV20-1, TRBJ2-7)
CSARDRVSGMDEQYF

SEQ ID NO: 304267 - protein, 14 aa, Homo sapiens
  CDR3 for alpha chain variable domain of TCR clone 152134 (TRAV16, TRAJ29)
CALTLNSGNTPLVF

SEQ ID NO: 304268 - protein, 12 aa, Homo sapiens
  CDR3 for beta chain variable domain of TCR clone 152134 (TRBV2, TRBJ2-1)
CAKREGYNEQFF

SEQ ID NO: 304269 - protein, 15 aa, Homo sapiens
  CDR3 for alpha chain variable domain of TCR clone 152135 (TRAV13-1, TRAJ11)
CAASNRNSGYSTLTF

SEQ ID NO: 304270 - protein, 14 aa, Homo sapiens
  CDR3 for beta chain variable domain of TCR clone 152135 (TRBV25-1, TRBJ1-1)
CASTHLGGNTEAFF

SEQ ID NO: 304271 - protein, 19 aa, Homo sapiens
  CDR3 for alpha chain variable domain of TCR clone 152136 (TRAV26-1, TRAJ52)
CIVRAHRNAGGTSYGKLTS

SEQ ID NO: 304272 - protein, 13 aa, Homo sapiens
  CDR3 for beta chain variable domain of TCR clone 152136 (TRBV19, TRBJ2-7)
CASRKAGGSEQYF

SEQ ID NO: 304273 - protein, 17 aa, Homo sapiens
  CDR3 for alpha chain variable domain of TCR clone 152137 (TRAV26-1, TRAJ53)
CIVRVDDSGGSNYKLTF

SEQ ID NO: 304274 - protein, 15 aa, Homo sapiens
  CDR3 for beta chain variable domain of TCR clone 152137 (TRBV20-1, TRBJ1-6)
CSARAASSYNSPLHF

SEQ ID NO: 304275 - protein, 16 aa, Homo sapiens
  CDR3 for alpha chain variable domain of TCR clone 152138 (TRAV8-3, TRAJ10)
CAVGPILTGGGNKLTF

SEQ ID NO: 304276 - protein, 13 aa, Homo sapiens
  CDR3 for beta chain variable domain of TCR clone 152138 (TRBV15, TRBJ1-6)
CATSGGLNSPLHF

SEQ ID NO: 304277 - protein, 14 aa, Homo sapiens
  CDR3 for alpha chain variable domain of TCR clone 152139 (TRAV1-2, TRAJ16)
CAVNRFSDGLKLLF

SEQ ID NO: 304278 - protein, 15 aa, Homo sapiens
  CDR3 for beta chain variable domain of TCR clone 152139 (TRBV20-1, TRBJ2-2)
SAVPRTPRTPGSCFF

SEQ ID NO: 304279 - protein, 16 aa, Homo sapiens
  CDR3 for alpha chain variable domain of TCR clone 152140 (TRAV12-3, TRAJ53)
CAMSPGSGGSNYKLTF

SEQ ID NO: 304280 - protein, 11 aa, Homo sapiens
  CDR3 for beta chain variable domain of TCR clone 152140 (TRBV29-1, TRBJ2-5)
CSDDRTGNQYF

SEQ ID NO: 304281 - protein, 13 aa, Homo sapiens
  CDR3 for alpha chain variable domain of TCR clone 152141 (TRAV12-3, TRAJ53)
CAMRGGSNYKLTF

SEQ ID NO: 304282 - protein, 13 aa, Homo sapiens
  CDR3 for beta chain variable domain of TCR clone 152141 (TRBV18, TRBJ2-5)
CASSLQGKETQYF

SEQ ID NO: 304283 - protein, 13 aa, Homo sapiens
  CDR3 for alpha chain variable domain of TCR clone 152142 (TRAV8-3, TRAJ36)
CAVGATGANNLSF

SEQ ID NO: 304284 - protein, 13 aa, Homo sapiens
  CDR3 for beta chain variable domain of TCR clone 152142 (TRBV6-1, TRBJ1-1)
CASSRQGNTEAFF

SEQ ID NO: 304285 - protein, 15 aa, Homo sapiens
  CDR3 for alpha chain variable domain of TCR clone 152143 (TRAV8-4, TRAJ39)
CAVSHHRGAGHMLTF

SEQ ID NO: 304286 - protein, 15 aa, Homo sapiens
  CDR3 for beta chain variable domain of TCR clone 152143 (TRBV20-1, TRBJ1-1)
CSARPRQGAPTEAFF

SEQ ID NO: 304287 - protein, 15 aa, Homo sapiens
  CDR3 for alpha chain variable domain of TCR clone 152144 (TRAV12-1, TRAJ44)
CVVDEYTGTAMKLTF

SEQ ID NO: 304288 - protein, 14 aa, Homo sapiens
  CDR3 for beta chain variable domain of TCR clone 152144 (TRBV5-1, TRBJ1-2)
CASSLEPVNYGYTF

SEQ ID NO: 304289 - protein, 13 aa, Homo sapiens
  CDR3 for alpha chain variable domain of TCR clone 152145 (TRAV30, TRAJ31)
CGTETRNNARLMF

SEQ ID NO: 304290 - protein, 15 aa, Homo sapiens
  CDR3 for beta chain variable domain of TCR clone 152145 (TRBV20-1, TRBJ2-7)
CSARDRVSGMDEQYF

SEQ ID NO: 304291 - protein, 17 aa, Homo sapiens
  CDR3 for alpha chain variable domain of TCR clone 152146 (TRAV3, TRAJ6)
GALRDGPRAGGSYIPTF

SEQ ID NO: 304292 - protein, 14 aa, Homo sapiens
  CDR3 for beta chain variable domain of TCR clone 152146 (TRBV7-2, TRBJ2-7)
CASSPKTSFYEQYF

SEQ ID NO: 304293 - protein, 13 aa, Homo sapiens
  CDR3 for alpha chain variable domain of TCR clone 152147 (TRAV8-4, TRAJ10)
CAAFTGGGNKLTF

SEQ ID NO: 304294 - protein, 16 aa, Homo sapiens
  CDR3 for beta chain variable domain of TCR clone 152147 (TRBV19, TRBJ2-1)
CASSKAGPSSYNEQFF

SEQ ID NO: 304295 - protein, 15 aa, Homo sapiens
  CDR3 for alpha chain variable domain of TCR clone 152148 (TRAV3, TRAJ20)
CAVRDIKLSDYKLSF

SEQ ID NO: 304296 - protein, 18 aa, Homo sapiens
  CDR3 for beta chain variable domain of TCR clone 152148 (TRBV20-1, TRBJ2-5)
CSQAGDSGRLGGKETQYF

SEQ ID NO: 304297 - protein, 13 aa, Homo sapiens
  CDR3 for alpha chain variable domain of TCR clone 152149 (TRAV12-1, TRAJ16)
RVVNGPDGQKLLF

SEQ ID NO: 304298 - protein, 13 aa, Homo sapiens
  CDR3 for beta chain variable domain of TCR clone 152149 (TRBV2, TRBJ1-1)
CARNPTGGFHAFF

SEQ ID NO: 304299 - protein, 11 aa, Homo sapiens
  CDR3 for alpha chain variable domain of TCR clone 152150 (TRAV2, TRAJ20)
CAVLNDYKLSF

SEQ ID NO: 304300 - protein, 16 aa, Homo sapiens
  CDR3 for beta chain variable domain of TCR clone 152150 (TRBV11-1, TRBJ2-2)
CASSAEGLKKTGELFF

SEQ ID NO: 304301 - protein, 14 aa, Homo sapiens
  CDR3 for alpha chain variable domain of TCR clone 152151 (TRAV12-1, TRAJ28)
CVSHSGAGSYQLTF

SEQ ID NO: 304302 - protein, 15 aa, Homo sapiens
  CDR3 for beta chain variable domain of TCR clone 152151 (TRBV4-1, TRBJ2-7)
CASSQQGQGFDEQYF

SEQ ID NO: 304303 - protein, 13 aa, Homo sapiens
  CDR3 for alpha chain variable domain of TCR clone 152152 (TRAV38-1, TRAJ42)
CARWGGSQGNLIF

SEQ ID NO: 304304 - protein, 17 aa, Homo sapiens
  CDR3 for beta chain variable domain of TCR clone 152152 (TRBV20-1, TRBJ2-1)
CSDRDPLAGVWDNEQFF

SEQ ID NO: 304305 - protein, 14 aa, Homo sapiens
  CDR3 for alpha chain variable domain of TCR clone 152153 (TRAV1-1, TRAJ27)
CAVIYNTNAGKSTF

SEQ ID NO: 304306 - protein, 15 aa, Homo sapiens
  CDR3 for beta chain variable domain of TCR clone 152153 (TRBV19, TRBJ1-2)
CASSVGQVLNYGDTF

SEQ ID NO: 304307 - protein, 16 aa, Homo sapiens
  CDR3 for alpha chain variable domain of TCR clone 152154 (TRAV2, TRAJ10)
CCGGSTVTGGGKKLTF

SEQ ID NO: 304308 - protein, 16 aa, Homo sapiens
  CDR3 for beta chain variable domain of TCR clone 152154 (TRBV18, TRBJ1-5)
CASSPSTGNSNQPQHF

SEQ ID NO: 304309 - protein, 13 aa, Homo sapiens
  CDR3 for alpha chain variable domain of TCR clone 152155 (TRAV12-1, TRAJ20)
CVVNVPNDYKLSF

SEQ ID NO: 304310 - protein, 12 aa, Homo sapiens
  CDR3 for beta chain variable domain of TCR clone 152155 (TRBV11-2, TRBJ2-1)
CASSVQREEQFF

SEQ ID NO: 304311 - protein, 14 aa, Homo sapiens
  CDR3 for alpha chain variable domain of TCR clone 152156 (TRAV13-1, TRAJ20)
CAARPGSNDYKLSF

SEQ ID NO: 304312 - protein, 11 aa, Homo sapiens
  CDR3 for beta chain variable domain of TCR clone 152156 (TRBV12-4, TRBJ2-3)
CASTATDTQYF

SEQ ID NO: 304313 - protein, 14 aa, Homo sapiens
  CDR3 for alpha chain variable domain of TCR clone 152157 (TRAV12-1, TRAJ34)
CVVNLDYNTDKLIF

SEQ ID NO: 304314 - protein, 17 aa, Homo sapiens
  CDR3 for beta chain variable domain of TCR clone 152157 (TRBV20-1, TRBJ2-7)
CSAAGTSGGGSSHEQYF

SEQ ID NO: 304315 - protein, 13 aa, Homo sapiens
  CDR3 for alpha chain variable domain of TCR clone 152158 (TRAV12-2, TRAJ10)
CAVPTGGGNKLTF

SEQ ID NO: 304316 - protein, 15 aa, Homo sapiens
  CDR3 for beta chain variable domain of TCR clone 152158 (TRBV12-4, TRBJ2-1)
CASSLLATGNNEQFF

SEQ ID NO: 304317 - protein, 12 aa, Homo sapiens
  CDR3 for alpha chain variable domain of TCR clone 152159 (TRAV8-3, TRAJ26)
CAGDNYGRILSL

SEQ ID NO: 304318 - protein, 14 aa, Homo sapiens
  CDR3 for beta chain variable domain of TCR clone 152159 (TRBV7-2, TRBJ2-7)
CASRSQGAAYEQYF

SEQ ID NO: 304319 - protein, 14 aa, Homo sapiens
  CDR3 for alpha chain variable domain of TCR clone 152160 (TRAV8-2, TRAJ4)
CVVSPSGGYNKLIF

SEQ ID NO: 304320 - protein, 14 aa, Homo sapiens
  CDR3 for beta chain variable domain of TCR clone 152160 (TRBV19, TRBJ2-5)
CTSSSSGIQETQYF

SEQ ID NO: 304321 - protein, 16 aa, Homo sapiens
  CDR3 for alpha chain variable domain of TCR clone 152161 (TRAV30, TRAJ24)
CGTGIVDADSWGKFQF

SEQ ID NO: 304322 - protein, 15 aa, Homo sapiens
  CDR3 for beta chain variable domain of TCR clone 152161 (TRBV5-7, TRBJ2-7)
CASSGGRPVPYEQYF

SEQ ID NO: 304323 - protein, 15 aa, Homo sapiens
  CDR3 for alpha chain variable domain of TCR clone 152162 (TRAV12-3, TRAJ54)
CAMSPPFQGAQKLVF

SEQ ID NO: 304324 - protein, 14 aa, Homo sapiens
  CDR3 for beta chain variable domain of TCR clone 152162 (TRBV18, TRBJ2-3)
CASSGLADTDTQYF

SEQ ID NO: 304325 - protein, 15 aa, Homo sapiens
  CDR3 for alpha chain variable domain of TCR clone 152163 (TRAV8-3, TRAJ6)
CAVGSAGGGSYIPTF

SEQ ID NO: 304326 - protein, 15 aa, Homo sapiens
  CDR3 for beta chain variable domain of TCR clone 152163 (TRBV7-9, TRBJ2-7)
CASSSSGLAVYEQYF

SEQ ID NO: 304327 - protein, 16 aa, Homo sapiens
  CDR3 for alpha chain variable domain of TCR clone 152164 (TRAV3, TRAJ37)
CAVRVRGSGNTGKLIF

SEQ ID NO: 304328 - protein, 13 aa, Homo sapiens
  CDR3 for beta chain variable domain of TCR clone 152164 (TRBV12-4, TRBJ1-5)
CASSPDRAQPQHF

SEQ ID NO: 304329 - protein, 14 aa, Homo sapiens
  CDR3 for alpha chain variable domain of TCR clone 152165 (TRAV13-1, TRAJ40)
CAASMTSGTYKYLF

SEQ ID NO: 304330 - protein, 15 aa, Homo sapiens
  CDR3 for beta chain variable domain of TCR clone 152165 (TRBV7-3, TRBJ2-1)
CASSPTGGGEVEQFF

SEQ ID NO: 304331 - protein, 15 aa, Homo sapiens
  CDR3 for alpha chain variable domain of TCR clone 152166 (TRAV1-2, TRAJ28)
CAVQYSGAGSYQLTF

SEQ ID NO: 304332 - protein, 13 aa, Homo sapiens
  CDR3 for beta chain variable domain of TCR clone 152166 (TRBV20-1, TRBJ2-7)
CSTTHTSGYEQYF

SEQ ID NO: 304333 - protein, 15 aa, Homo sapiens
  CDR3 for alpha chain variable domain of TCR clone 152167 (TRAV35, TRAJ38)
CAGFSNAGNNRKLIW

SEQ ID NO: 304334 - protein, 16 aa, Homo sapiens
  CDR3 for beta chain variable domain of TCR clone 152167 (TRBV20-1, TRBJ2-1)
CSARDLKQGMNNEQFF

SEQ ID NO: 304335 - protein, 13 aa, Homo sapiens
  CDR3 for alpha chain variable domain of TCR clone 152168 (TRAV13-2, TRAJ48)
CAEMDFGNEKLTF

SEQ ID NO: 304336 - protein, 15 aa, Homo sapiens
  CDR3 for beta chain variable domain of TCR clone 152168 (TRBV7-9, TRBJ1-6)
CASSSPGRGNSALLF

SEQ ID NO: 304337 - protein, 13 aa, Homo sapiens
  CDR3 for alpha chain variable domain of TCR clone 152169 (TRAV21, TRAJ20)
CAVGLRVDYKLRF

SEQ ID NO: 304338 - protein, 14 aa, Homo sapiens
  CDR3 for beta chain variable domain of TCR clone 152169 (TRBV18, TRBJ2-7)
CASSPRGGAYEQYF

SEQ ID NO: 304339 - protein, 14 aa, Homo sapiens
  CDR3 for alpha chain variable domain of TCR clone 152170 (TRAV27, TRAJ41)
CAVRTQIPGMHSTS

SEQ ID NO: 304340 - protein, 15 aa, Homo sapiens
  CDR3 for beta chain variable domain of TCR clone 152170 (TRBV9, TRBJ1-6)
CASSVAGTGDSPLHC

SEQ ID NO: 304341 - protein, 21 aa, Homo sapiens
  CDR3 for alpha chain variable domain of TCR clone 152171 (TRAV8-3, TRAJ6)
CAMGGEEATYLHLEEEPALLF

SEQ ID NO: 304342 - protein, 14 aa, Homo sapiens
  CDR3 for beta chain variable domain of TCR clone 152171 (TRBV5-1, TRBJ2-7)
CASSRGESLYEQYF

SEQ ID NO: 304343 - protein, 14 aa, Homo sapiens
  CDR3 for alpha chain variable domain of TCR clone 152172 (TRAV12-2, TRAJ40)
CAVKIPSGTYKYIF

SEQ ID NO: 304344 - protein, 12 aa, Homo sapiens
  CDR3 for beta chain variable domain of TCR clone 152172 (TRBV12-4, TRBJ2-4)
CASSSSGNIQYF

SEQ ID NO: 304345 - protein, 13 aa, Homo sapiens
  CDR3 for alpha chain variable domain of TCR clone 152173 (TRAV12-1, TRAJ16)
CVVNGADGQKLLF

SEQ ID NO: 304346 - protein, 13 aa, Homo sapiens
  CDR3 for beta chain variable domain of TCR clone 152173 (TRBV2, TRBJ1-1)
CARNPTGGFHAFF

SEQ ID NO: 304347 - protein, 11 aa, Homo sapiens
  CDR3 for alpha chain variable domain of TCR clone 152174 (TRAV12-2, TRAJ33)
CAVGSNYQLIW

SEQ ID NO: 304348 - protein, 15 aa, Homo sapiens
  CDR3 for beta chain variable domain of TCR clone 152174 (TRBV11-3, TRBJ2-7)
CASSPGPASSYEQYF

SEQ ID NO: 304349 - protein, 11 aa, Homo sapiens
  CDR3 for alpha chain variable domain of TCR clone 152175 (TRAV29/DV5, TRAJ31)
CAASYRDILMF

SEQ ID NO: 304350 - protein, 19 aa, Homo sapiens
  CDR3 for beta chain variable domain of TCR clone 152175 (TRBV19, TRBJ2-5)
CASSIGQVTDFFLGETQYF

SEQ ID NO: 304351 - protein, 12 aa, Homo sapiens
  CDR3 for alpha chain variable domain of TCR clone 152176 (TRAV12-1, TRAJ23)
CVVNNQGGKLIF

SEQ ID NO: 304352 - protein, 16 aa, Homo sapiens
  CDR3 for beta chain variable domain of TCR clone 152176 (TRBV11-1, TRBJ2-7)
CASGAQTGTLSYKQYF

SEQ ID NO: 304353 - protein, 13 aa, Homo sapiens
  CDR3 for alpha chain variable domain of TCR clone 152177 (TRAV3, TRAJ27)
CAVRPLGAGKSTF

SEQ ID NO: 304354 - protein, 15 aa, Homo sapiens
  CDR3 for beta chain variable domain of TCR clone 152177 (TRBV7-9, TRBJ1-5)
CASSQGHQPNQPQHF

SEQ ID NO: 304355 - protein, 14 aa, Homo sapiens
  CDR3 for alpha chain variable domain of TCR clone 152178 (TRAV12-1, TRAJ24)
CVVRSTDSWGKFQF

SEQ ID NO: 304356 - protein, 15 aa, Homo sapiens
  CDR3 for beta chain variable domain of TCR clone 152178 (TRBV5-1, TRBJ2-3)
CASSLGQGGGDTQYF

SEQ ID NO: 304357 - protein, 10 aa, Homo sapiens
  CDR3 for alpha chain variable domain of TCR clone 152179 (TRAV23/DV6, TRAJ57)
CAASSTLSQG

SEQ ID NO: 304358 - protein, 14 aa, Homo sapiens
  CDR3 for beta chain variable domain of TCR clone 152179 (TRBV7-3, TRBJ1-1)
CASSLGTGYTEAFF

SEQ ID NO: 304359 - protein, 15 aa, Homo sapiens
  CDR3 for alpha chain variable domain of TCR clone 152180 (TRAV27, TRAJ38)
CAARRNAGNNRKSIW

SEQ ID NO: 304360 - protein, 13 aa, Homo sapiens
  CDR3 for beta chain variable domain of TCR clone 152180 (TRBV12-5, TRBJ2-3)
CASGDRQSDTQYF

SEQ ID NO: 304361 - protein, 10 aa, Homo sapiens
  CDR3 for alpha chain variable domain of TCR clone 152181 (TRAV36/DV7, TRAJ31)
CAVGEARLMF

SEQ ID NO: 304362 - protein, 12 aa, Homo sapiens
  CDR3 for beta chain variable domain of TCR clone 152181 (TRBV7-8, TRBJ2-7)
CASSLGDREQYF

SEQ ID NO: 304363 - protein, 15 aa, Homo sapiens
  CDR3 for alpha chain variable domain of TCR clone 152182 (TRAV21, TRAJ13)
CAVRPTSGGYQKVTF

SEQ ID NO: 304364 - protein, 18 aa, Homo sapiens
  CDR3 for beta chain variable domain of TCR clone 152182 (TRBV11-3, TRBJ2-1)
CASSSYAGGRDSYNEQFF

SEQ ID NO: 304365 - protein, 14 aa, Homo sapiens
  CDR3 for alpha chain variable domain of TCR clone 152183 (TRAV4, TRAJ17)
CLVGDMTAGNKLTF

SEQ ID NO: 304366 - protein, 14 aa, Homo sapiens
  CDR3 for beta chain variable domain of TCR clone 152183 (TRBV4-1, TRBJ2-7)
CASSPVAGGDEQYF

SEQ ID NO: 304367 - protein, 13 aa, Homo sapiens
  CDR3 for alpha chain variable domain of TCR clone 152184 (TRAV27, TRAJ6)
CAGGTRGSYILTF

SEQ ID NO: 304368 - protein, 14 aa, Homo sapiens
  CDR3 for beta chain variable domain of TCR clone 152184 (TRBV6-3, TRBJ1-1)
CASSYQRRDTEAFF

SEQ ID NO: 304369 - protein, 14 aa, Homo sapiens
  CDR3 for alpha chain variable domain of TCR clone 152185 (TRAV8-3, TRAJ4)
CAVGAAGGYNKLIF

SEQ ID NO: 304370 - protein, 14 aa, Homo sapiens
  CDR3 for beta chain variable domain of TCR clone 152185 (TRBV7-3, TRBJ2-1)
CASSLSGSYNEQFF

SEQ ID NO: 304371 - protein, 14 aa, Homo sapiens
  CDR3 for alpha chain variable domain of TCR clone 152186 (TRAV12-3, TRAJ10)
SHLPLTGGGNKLTF

SEQ ID NO: 304372 - protein, 16 aa, Homo sapiens
  CDR3 for beta chain variable domain of TCR clone 152186 (TRBV12-4, TRBJ2-5)
CPSSWRPSGDLETQYF

SEQ ID NO: 304373 - protein, 15 aa, Homo sapiens
  CDR3 for alpha chain variable domain of TCR clone 152187 (TRAV38-2/DV8, TRAJ57)
CASARAQGGSEKLVF

SEQ ID NO: 304374 - protein, 17 aa, Homo sapiens
  CDR3 for beta chain variable domain of TCR clone 152187 (TRBV18, TRBJ1-5)
CASSPPMGQGTNQPQHF

SEQ ID NO: 304375 - protein, 11 aa, Homo sapiens
  CDR3 for alpha chain variable domain of TCR clone 152188 (TRAV13-1, TRAJ24)
CAASGWGKLQF

SEQ ID NO: 304376 - protein, 13 aa, Homo sapiens
  CDR3 for beta chain variable domain of TCR clone 152188 (TRBV6-1, TRBJ1-1)
CASSRQGNTEAFF

SEQ ID NO: 304377 - protein, 11 aa, Homo sapiens
  CDR3 for alpha chain variable domain of TCR clone 152189 (TRAV12-1, TRAJ21)
CVVNNFNKFYF

SEQ ID NO: 304378 - protein, 14 aa, Homo sapiens
  CDR3 for beta chain variable domain of TCR clone 152189 (TRBV6-6, TRBJ1-6)
CASSFEGTTSPLHF

SEQ ID NO: 304379 - protein, 14 aa, Homo sapiens
  CDR3 for alpha chain variable domain of TCR clone 152190 (TRAV8-3, TRAJ13)
CALGARGVYQKVTF

SEQ ID NO: 304380 - protein, 16 aa, Homo sapiens
  CDR3 for beta chain variable domain of TCR clone 152190 (TRBV27, TRBJ2-7)
CASSLGSGTGPYEQYF

SEQ ID NO: 304381 - protein, 13 aa, Homo sapiens
  CDR3 for alpha chain variable domain of TCR clone 152191 (TRAV27, TRAJ41)
CAGEGNSGYALNF

SEQ ID NO: 304382 - protein, 14 aa, Homo sapiens
  CDR3 for beta chain variable domain of TCR clone 152191 (TRBV25-1, TRBJ1-1)
CASTHLGGKTEAFF

SEQ ID NO: 304383 - protein, 13 aa, Homo sapiens
  CDR3 for alpha chain variable domain of TCR clone 152192 (TRAV17, TRAJ7)
CATDNYGNNRLAF

SEQ ID NO: 304384 - protein, 16 aa, Homo sapiens
  CDR3 for beta chain variable domain of TCR clone 152192 (TRBV4-1, TRBJ2-5)
CASSRAIAASSATQYF

SEQ ID NO: 304385 - protein, 12 aa, Homo sapiens
  CDR3 for alpha chain variable domain of TCR clone 152193 (TRAV29/DV5, TRAJ31)
CAASSHNARLMF

SEQ ID NO: 304386 - protein, 17 aa, Homo sapiens
  CDR3 for beta chain variable domain of TCR clone 152193 (TRBV18, TRBJ2-6)
CASSPRQGAVGANDLTF

SEQ ID NO: 304387 - protein, 13 aa, Homo sapiens
  CDR3 for alpha chain variable domain of TCR clone 152194 (TRAV13-2, TRAJ13)
CAERPGGNQKVNF

SEQ ID NO: 304388 - protein, 16 aa, Homo sapiens
  CDR3 for beta chain variable domain of TCR clone 152194 (TRBV18, TRBJ2-5)
CASSPPSSGGAKTQYF

SEQ ID NO: 304389 - protein, 11 aa, Homo sapiens
  CDR3 for alpha chain variable domain of TCR clone 152195 (TRAV13-1, TRAJ49)
CACVEGNQFYF

SEQ ID NO: 304390 - protein, 16 aa, Homo sapiens
  CDR3 for beta chain variable domain of TCR clone 152195 (TRBV11-2, TRBJ2-2)
CASSLRTGNLIGELFF

SEQ ID NO: 304391 - protein, 15 aa, Homo sapiens
  CDR3 for alpha chain variable domain of TCR clone 152196 (TRAV21, TRAJ53)
CATLNSGGSNYKLTF

SEQ ID NO: 304392 - protein, 12 aa, Homo sapiens
  CDR3 for beta chain variable domain of TCR clone 152196 (TRBV7-8, TRBJ2-7)
CASSLVDREQYF

SEQ ID NO: 304393 - protein, 11 aa, Homo sapiens
  CDR3 for alpha chain variable domain of TCR clone 152197 (TRAV17, TRAJ9)
CATTGGFKIIF

SEQ ID NO: 304394 - protein, 14 aa, Homo sapiens
  CDR3 for beta chain variable domain of TCR clone 152197 (TRBV7-9, TRBJ2-2)
CASSGLADTGELFF

SEQ ID NO: 304395 - protein, 14 aa, Homo sapiens
  CDR3 for alpha chain variable domain of TCR clone 152198 (TRAV13-1, TRAJ35)
CAASKGGFGNVLPC

SEQ ID NO: 304396 - protein, 13 aa, Homo sapiens
  CDR3 for beta chain variable domain of TCR clone 152198 (TRBV7-3, TRBJ1-1)
RASSQDWGAEAFF

SEQ ID NO: 304397 - protein, 11 aa, Homo sapiens
  CDR3 for alpha chain variable domain of TCR clone 152199 (TRAV2, TRAJ31)
CAVYNNARLMF

SEQ ID NO: 304398 - protein, 16 aa, Homo sapiens
  CDR3 for beta chain variable domain of TCR clone 152199 (TRBV28, TRBJ1-6)
CASSALLEGDNSPLHF

SEQ ID NO: 304399 - protein, 14 aa, Homo sapiens
  CDR3 for alpha chain variable domain of TCR clone 152200 (TRAV8-2, TRAJ4)
CVVSPSGGDNKLIF

SEQ ID NO: 304400 - protein, 14 aa, Homo sapiens
  CDR3 for beta chain variable domain of TCR clone 152200 (TRBV10-3, TRBJ2-2)
CAISEVSHSGELFF

SEQ ID NO: 304401 - protein, 12 aa, Homo sapiens
  CDR3 for alpha chain variable domain of TCR clone 152201 (TRAV1-2, TRAJ42)
CVAGGSQGNHIF

SEQ ID NO: 304402 - protein, 14 aa, Homo sapiens
  CDR3 for beta chain variable domain of TCR clone 152201 (TRBV25-1, TRBJ1-1)
CASTHLGGNTEAFF

SEQ ID NO: 304403 - protein, 12 aa, Homo sapiens
  CDR3 for alpha chain variable domain of TCR clone 152202 (TRAV12-3, TRAJ17)
CAMTLTGNKLTF

SEQ ID NO: 304404 - protein, 14 aa, Homo sapiens
  CDR3 for beta chain variable domain of TCR clone 152202 (TRBV7-2, TRBJ1-2)
CASSQAGSTYGYTF

SEQ ID NO: 304405 - protein, 11 aa, Homo sapiens
  CDR3 for alpha chain variable domain of TCR clone 152203 (TRAV16, TRAJ31)
CALFNNARLMF

SEQ ID NO: 304406 - protein, 15 aa, Homo sapiens
  CDR3 for beta chain variable domain of TCR clone 152203 (TRBV18, TRBJ1-1)
CASSPRQVENTEAFF

SEQ ID NO: 304407 - protein, 18 aa, Homo sapiens
  CDR3 for alpha chain variable domain of TCR clone 152204 (TRAV38-2/DV8, TRAJ52)
CAYRGAVAGGTSYGKLTF

SEQ ID NO: 304408 - protein, 18 aa, Homo sapiens
  CDR3 for beta chain variable domain of TCR clone 152204 (TRBV7-3, TRBJ2-6)
CASSFNRDRDSGANVLTF

SEQ ID NO: 304409 - protein, 12 aa, Homo sapiens
  CDR3 for alpha chain variable domain of TCR clone 152205 (TRAV35, TRAJ16)
CAGPSDGQKLLF

SEQ ID NO: 304410 - protein, 11 aa, Homo sapiens
  CDR3 for beta chain variable domain of TCR clone 152205 (TRBV7-9, TRBJ2-3)
CAGSFRDTQYF

SEQ ID NO: 304411 - protein, 12 aa, Homo sapiens
  CDR3 for alpha chain variable domain of TCR clone 152206 (TRAV17, TRAJ20)
CATQANDYTLSF

SEQ ID NO: 304412 - protein, 12 aa, Homo sapiens
  CDR3 for beta chain variable domain of TCR clone 152206 (TRBV6-1, TRBJ1-1)
CASNSPTAEAFF

SEQ ID NO: 304413 - protein, 13 aa, Homo sapiens
  CDR3 for alpha chain variable domain of TCR clone 152207 (TRAV2, TRAJ15)
CAVASQAGTALFF

SEQ ID NO: 304414 - protein, 14 aa, Homo sapiens
  CDR3 for beta chain variable domain of TCR clone 152207 (TRBV5-1, TRBJ2-7)
CASSRGESLYEQYF

SEQ ID NO: 304415 - protein, 23 aa, Homo sapiens
  CDR3 for alpha chain variable domain of TCR clone 152208 (TRAV13-1, )
CAASTRRAQIPDIQNPDPAVYQL

SEQ ID NO: 304416 - protein, 12 aa, Homo sapiens
  CDR3 for beta chain variable domain of TCR clone 152208 (TRBV11-2, TRBJ2-5)
CASSLGQETQYF

SEQ ID NO: 304417 - protein, 15 aa, Homo sapiens
  CDR3 for alpha chain variable domain of TCR clone 152209 (TRAV17, TRAJ42)
CATDHYGGSQGNLIF

SEQ ID NO: 304418 - protein, 14 aa, Homo sapiens
  CDR3 for beta chain variable domain of TCR clone 152209 (TRBV19, TRBJ2-7)
CASNFRDTFTGMYF

SEQ ID NO: 304419 - protein, 14 aa, Homo sapiens
  CDR3 for alpha chain variable domain of TCR clone 152210 (TRAV12-1, TRAJ17)
CVVNYKAAGNKLTF

SEQ ID NO: 304420 - protein, 15 aa, Homo sapiens
  CDR3 for beta chain variable domain of TCR clone 152210 (TRBV20-1, TRBJ2-7)
CSARDRVSGMDEQHF

SEQ ID NO: 304421 - protein, 12 aa, Homo sapiens
  CDR3 for alpha chain variable domain of TCR clone 152211 (TRAV2, TRAJ9)
CAVGAGGFKTIF

SEQ ID NO: 304422 - protein, 16 aa, Homo sapiens
  CDR3 for beta chain variable domain of TCR clone 152211 (TRBV19, TRBJ2-7)
CASSLTGTSELGEQYF

SEQ ID NO: 304423 - protein, 13 aa, Homo sapiens
  CDR3 for alpha chain variable domain of TCR clone 152212 (TRAV9-2, TRAJ49)
CALIQIGGNQLYF

SEQ ID NO: 304424 - protein, 15 aa, Homo sapiens
  CDR3 for beta chain variable domain of TCR clone 152212 (TRBV9, TRBJ1-6)
CASSVAGTGDSPLHF

SEQ ID NO: 304425 - protein, 15 aa, Homo sapiens
  CDR3 for alpha chain variable domain of TCR clone 152213 (TRAV26-1, TRAJ44)
CIVRANTGTASKLTF

SEQ ID NO: 304426 - protein, 16 aa, Homo sapiens
  CDR3 for beta chain variable domain of TCR clone 152213 (TRBV7-7, TRBJ2-1)
CASSVASRTSYNEQFF

SEQ ID NO: 304427 - protein, 15 aa, Homo sapiens
  CDR3 for alpha chain variable domain of TCR clone 152214 (TRAV3, TRAJ5)
CAVIDLYTGRRSLTF

SEQ ID NO: 304428 - protein, 16 aa, Homo sapiens
  CDR3 for beta chain variable domain of TCR clone 152214 (TRBV20-1, TRBJ1-4)
CSAPGQGLLTNEKLFF

SEQ ID NO: 304429 - protein, 14 aa, Homo sapiens
  CDR3 for alpha chain variable domain of TCR clone 152215 (TRAV12-2, TRAJ40)
CDVKIPSGTYKYIF

SEQ ID NO: 304430 - protein, 15 aa, Homo sapiens
  CDR3 for beta chain variable domain of TCR clone 152215 (TRBV6-3, TRBJ2-7)
CASSSPGTVFYEQYF

SEQ ID NO: 304431 - protein, 13 aa, Homo sapiens
  CDR3 for alpha chain variable domain of TCR clone 152216 (TRAV3, TRAJ21)
CAVATSTNFTLDL

SEQ ID NO: 304432 - protein, 12 aa, Homo sapiens
  CDR3 for beta chain variable domain of TCR clone 152216 (TRBV2, TRBJ2-7)
CASSDPDYEQYF

SEQ ID NO: 304433 - protein, 17 aa, Homo sapiens
  CDR3 for alpha chain variable domain of TCR clone 152217 (TRAV26-1, TRAJ28)
CIVRVPDSGAGSYQLTF

SEQ ID NO: 304434 - protein, 17 aa, Homo sapiens
  CDR3 for beta chain variable domain of TCR clone 152217 (TRBV28, TRBJ2-7)
CASSPLPAGGKTYEQYF

SEQ ID NO: 304435 - protein, 13 aa, Homo sapiens
  CDR3 for alpha chain variable domain of TCR clone 152218 (TRAV12-2, TRAJ15)
CAVFNQAGTALIF

SEQ ID NO: 304436 - protein, 14 aa, Homo sapiens
  CDR3 for beta chain variable domain of TCR clone 152218 (TRBV7-2, TRBJ2-7)
CASSPKTSFYEQYF

SEQ ID NO: 304437 - protein, 18 aa, Homo sapiens
  CDR3 for alpha chain variable domain of TCR clone 152219 (TRAV13-1, TRAJ52)
CAAKNPNAGGTSYGKLTF

SEQ ID NO: 304438 - protein, 13 aa, Homo sapiens
  CDR3 for beta chain variable domain of TCR clone 152219 (TRBV12-4, TRBJ1-5)
CASGKGFNQPQHF

SEQ ID NO: 304439 - protein, 14 aa, Homo sapiens
  CDR3 for alpha chain variable domain of TCR clone 152220 (TRAV1-2, TRAJ8)
CAVREDTGFQKLVL

SEQ ID NO: 304440 - protein, 14 aa, Homo sapiens
  CDR3 for beta chain variable domain of TCR clone 152220 (TRBV7-2, TRBJ1-2)
CASSQTGSTYGYTF

SEQ ID NO: 304441 - protein, 15 aa, Homo sapiens
  CDR3 for alpha chain variable domain of TCR clone 152221 (TRAV21, TRAJ45)
CAVSYSGGGADGLTF

SEQ ID NO: 304442 - protein, 14 aa, Homo sapiens
  CDR3 for beta chain variable domain of TCR clone 152221 (TRBV4-2, TRBJ2-1)
CASGLDRAYNEQFF

SEQ ID NO: 304443 - protein, 15 aa, Homo sapiens
  CDR3 for alpha chain variable domain of TCR clone 152222 (TRAV12-1, TRAJ5)
CVVNMLEAGRRALTS

SEQ ID NO: 304444 - protein, 12 aa, Homo sapiens
  CDR3 for beta chain variable domain of TCR clone 152222 (TRBV11-2, TRBJ2-2)
CASSLGGGELFF

SEQ ID NO: 304445 - protein, 11 aa, Homo sapiens
  CDR3 for alpha chain variable domain of TCR clone 152223 (TRAV2, TRAJ13)
CASGGYQKVTF

SEQ ID NO: 304446 - protein, 11 aa, Homo sapiens
  CDR3 for beta chain variable domain of TCR clone 152223 (TRBV20-1, TRBJ2-7)
CSARLSYEQYF

SEQ ID NO: 304447 - protein, 14 aa, Homo sapiens
  CDR3 for alpha chain variable domain of TCR clone 152224 (TRAV13-2, TRAJ16)
CAANNWEDGQKLLF

SEQ ID NO: 304448 - protein, 17 aa, Homo sapiens
  CDR3 for beta chain variable domain of TCR clone 152224 (TRBV20-1, TRBJ1-6)
CSARGGYTFSYNSPLHF

SEQ ID NO: 304449 - protein, 19 aa, Homo sapiens
  CDR3 for alpha chain variable domain of TCR clone 152225 (TRAV17, TRAJ17)
CATDGRPGWIKAAGNKLTF

SEQ ID NO: 304450 - protein, 17 aa, Homo sapiens
  CDR3 for beta chain variable domain of TCR clone 152225 (TRBV12-4, TRBJ1-1)
CASSLSGFRTMNTEAFF

SEQ ID NO: 304451 - protein, 15 aa, Homo sapiens
  CDR3 for alpha chain variable domain of TCR clone 152226 (TRAV21, TRAJ38)
CAVRQDAGTNRKLIW

SEQ ID NO: 304452 - protein, 14 aa, Homo sapiens
  CDR3 for beta chain variable domain of TCR clone 152226 (TRBV12-4, TRBJ1-1)
CASSPIRRTGEAFF

SEQ ID NO: 304453 - protein, 13 aa, Homo sapiens
  CDR3 for alpha chain variable domain of TCR clone 152227 (TRAV3, TRAJ43)
CAVKARNNNDMRF

SEQ ID NO: 304454 - protein, 16 aa, Homo sapiens
  CDR3 for beta chain variable domain of TCR clone 152227 (TRBV7-6, TRBJ1-4)
CASSLEQAATNEKLFF

SEQ ID NO: 304455 - protein, 12 aa, Homo sapiens
  CDR3 for alpha chain variable domain of TCR clone 152228 (TRAV29/DV5, TRAJ41)
CAAISSGYALNF

SEQ ID NO: 304456 - protein, 14 aa, Homo sapiens
  CDR3 for beta chain variable domain of TCR clone 152228 (TRBV4-1, TRBJ2-2)
CASSQAVNTGELFF

SEQ ID NO: 304457 - protein, 12 aa, Homo sapiens
  CDR3 for alpha chain variable domain of TCR clone 152229 (TRAV21, TRAJ42)
CAVGGSQGNLIV

SEQ ID NO: 304458 - protein, 14 aa, Homo sapiens
  CDR3 for beta chain variable domain of TCR clone 152229 (TRBV12-4, TRBJ1-1)
CASSLGTGGTEAFF

SEQ ID NO: 304459 - protein, 14 aa, Homo sapiens
  CDR3 for alpha chain variable domain of TCR clone 152230 (TRAV3, TRAJ34)
CAVRDTNNTDKLIF

SEQ ID NO: 304460 - protein, 14 aa, Homo sapiens
  CDR3 for beta chain variable domain of TCR clone 152230 (TRBV7-2, TRBJ2-2)
CASSLGQNTGELFF

SEQ ID NO: 304461 - protein, 11 aa, Homo sapiens
  CDR3 for alpha chain variable domain of TCR clone 152231 (TRAV21, TRAJ31)
CSVRNNARLMF

SEQ ID NO: 304462 - protein, 11 aa, Homo sapiens
  CDR3 for beta chain variable domain of TCR clone 152231 (TRBV29-1, TRBJ2-5)
CSEDRTGTQYF

SEQ ID NO: 304463 - protein, 14 aa, Homo sapiens
  CDR3 for alpha chain variable domain of TCR clone 152232 (TRAV1-2, TRAJ16)
CSVNRFSDGQKLLF

SEQ ID NO: 304464 - protein, 15 aa, Homo sapiens
  CDR3 for beta chain variable domain of TCR clone 152232 (TRBV9, TRBJ1-6)
CASSVAGTGDSPLYF

SEQ ID NO: 304465 - protein, 14 aa, Homo sapiens
  CDR3 for alpha chain variable domain of TCR clone 152233 (TRAV1-2, TRAJ16)
CAVNRFSDGQKLLF

SEQ ID NO: 304466 - protein, 18 aa, Homo sapiens
  CDR3 for beta chain variable domain of TCR clone 152233 (TRBV4-1, TRBJ2-3)
CASSHQLAGGRSTDTQYF

SEQ ID NO: 304467 - protein, 19 aa, Homo sapiens
  CDR3 for alpha chain variable domain of TCR clone 152234 (TRAV26-1, TRAJ28)
CIVRVAHAYSGAGSYQLIF

SEQ ID NO: 304468 - protein, 12 aa, Homo sapiens
  CDR3 for beta chain variable domain of TCR clone 152234 (TRBV27, TRBJ2-2)
CASKLFTGELFF

SEQ ID NO: 304469 - protein, 15 aa, Homo sapiens
  CDR3 for alpha chain variable domain of TCR clone 152235 (TRAV4, TRAJ48)
CLVGDIDFGNEKLTF

SEQ ID NO: 304470 - protein, 17 aa, Homo sapiens
  CDR3 for beta chain variable domain of TCR clone 152235 (TRBV13, TRBJ2-3)
CASSLSRVAGGRNTQYF

SEQ ID NO: 304471 - protein, 13 aa, Homo sapiens
  CDR3 for alpha chain variable domain of TCR clone 152236 (TRAV29/DV5, TRAJ31)
CAASRNNNARLMF

SEQ ID NO: 304472 - protein, 16 aa, Homo sapiens
  CDR3 for beta chain variable domain of TCR clone 152236 (TRBV20-1, TRBJ1-4)
CSAPVQGLLTNEKLFF

SEQ ID NO: 304473 - protein, 14 aa, Homo sapiens
  CDR3 for alpha chain variable domain of TCR clone 152237 (TRAV8-3, TRAJ6)
CAVGSSGGSYIPTF

SEQ ID NO: 304474 - protein, 14 aa, Homo sapiens
  CDR3 for beta chain variable domain of TCR clone 152237 (TRBV7-3, TRBJ2-1)
CASSLAGGTNEQFF

SEQ ID NO: 304475 - protein, 14 aa, Homo sapiens
  CDR3 for alpha chain variable domain of TCR clone 152238 (TRAV12-2, TRAJ40)
CAVKITSGTYKYIF

SEQ ID NO: 304476 - protein, 12 aa, Homo sapiens
  CDR3 for beta chain variable domain of TCR clone 152238 (TRBV11-2, TRBJ2-1)
CAGSPGNNEQFF

SEQ ID NO: 304477 - protein, 18 aa, Homo sapiens
  CDR3 for alpha chain variable domain of TCR clone 152239 (TRAV13-1, TRAJ52)
CAAKNPNAGGTSYGKLTF

SEQ ID NO: 304478 - protein, 15 aa, Homo sapiens
  CDR3 for beta chain variable domain of TCR clone 152239 (TRBV7-9, TRBJ1-4)
CASSRTGGFNEKLFF

SEQ ID NO: 304479 - protein, 12 aa, Homo sapiens
  CDR3 for alpha chain variable domain of TCR clone 152240 (TRAV1-2, TRAJ39)
CAAPSAGNMLTF

SEQ ID NO: 304480 - protein, 13 aa, Homo sapiens
  CDR3 for beta chain variable domain of TCR clone 152240 (TRBV7-7, TRBJ1-1)
CASSLGANTEAFF

SEQ ID NO: 304481 - protein, 12 aa, Homo sapiens
  CDR3 for alpha chain variable domain of TCR clone 152241 (TRAV10, TRAJ34)
CVVSGKHRQAHL

SEQ ID NO: 304482 - protein, 14 aa, Homo sapiens
  CDR3 for beta chain variable domain of TCR clone 152241 (TRBV19, TRBJ2-1)
CASPTFVLSGSSSS

SEQ ID NO: 304483 - protein, 16 aa, Homo sapiens
  CDR3 for alpha chain variable domain of TCR clone 152242 (TRAV16, TRAJ52)
CSLSAAGGASYGKLTF

SEQ ID NO: 304484 - protein, 12 aa, Homo sapiens
  CDR3 for beta chain variable domain of TCR clone 152242 (TRBV12-4, TRBJ1-3)
CASSFSGNTIYF

SEQ ID NO: 304485 - protein, 13 aa, Homo sapiens
  CDR3 for alpha chain variable domain of TCR clone 152243 (TRAV12-2, TRAJ15)
CAVFNQAETALIF

SEQ ID NO: 304486 - protein, 14 aa, Homo sapiens
  CDR3 for beta chain variable domain of TCR clone 152243 (TRBV7-8, TRBJ1-5)
CQQPGGGADQPQHF

SEQ ID NO: 304487 - protein, 15 aa, Homo sapiens
  CDR3 for alpha chain variable domain of TCR clone 152244 (TRAV3, TRAJ17)
CAVRDTGAPGNKLTF

SEQ ID NO: 304488 - protein, 15 aa, Homo sapiens
  CDR3 for beta chain variable domain of TCR clone 152244 (TRBV20-1, TRBJ2-7)
CSARDRVSGMDEQYF

SEQ ID NO: 304489 - protein, 14 aa, Homo sapiens
  CDR3 for alpha chain variable domain of TCR clone 152245 (TRAV1-2, TRAJ8)
CAVRDPPGFPKLVF

SEQ ID NO: 304490 - protein, 14 aa, Homo sapiens
  CDR3 for beta chain variable domain of TCR clone 152245 (TRBV5-1, TRBJ2-7)
CASSRGESLYEQYF

SEQ ID NO: 304491 - protein, 15 aa, Homo sapiens
  CDR3 for alpha chain variable domain of TCR clone 152246 (TRAV38-2/DV8, TRAJ57)
CAYKSGLGGSEKLVF

SEQ ID NO: 304492 - protein, 14 aa, Homo sapiens
  CDR3 for beta chain variable domain of TCR clone 152246 (TRBV19, TRBJ2-1)
CARGARSFQWEQFF

SEQ ID NO: 304493 - protein, 14 aa, Homo sapiens
  CDR3 for alpha chain variable domain of TCR clone 152247 (TRAV13-1, TRAJ24)
CAASPADSWGKFQF

SEQ ID NO: 304494 - protein, 14 aa, Homo sapiens
  CDR3 for beta chain variable domain of TCR clone 152247 (TRBV2, TRBJ1-1)
CASRSGTMNAEAFF

SEQ ID NO: 304495 - protein, 14 aa, Homo sapiens
  CDR3 for alpha chain variable domain of TCR clone 152248 (TRAV12-2, TRAJ11)
CAVEGGSGYSTLTF

SEQ ID NO: 304496 - protein, 14 aa, Homo sapiens
  CDR3 for beta chain variable domain of TCR clone 152248 (TRBV19, TRBJ2-1)
CASPTFVLSGEQFF

SEQ ID NO: 304497 - protein, 15 aa, Homo sapiens
  CDR3 for alpha chain variable domain of TCR clone 152249 (TRAV2, TRAJ13)
CATPSYSGGYQKVTF

SEQ ID NO: 304498 - protein, 16 aa, Homo sapiens
  CDR3 for beta chain variable domain of TCR clone 152249 (TRBV7-3, TRBJ2-2)
CASSLKRGTLSGELFF

SEQ ID NO: 304499 - protein, 13 aa, Homo sapiens
  CDR3 for alpha chain variable domain of TCR clone 152250 (TRAV12-3, TRAJ56)
CALTTGANSKLTF

SEQ ID NO: 304500 - protein, 12 aa, Homo sapiens
  CDR3 for beta chain variable domain of TCR clone 152250 (TRBV10-2, TRBJ2-3)
CASSPESDTQYF

SEQ ID NO: 304501 - protein, 17 aa, Homo sapiens
  CDR3 for alpha chain variable domain of TCR clone 152251 (TRAV13-1, TRAJ52)
CAASSGAGGTSYGKLTF

SEQ ID NO: 304502 - protein, 14 aa, Homo sapiens
  CDR3 for beta chain variable domain of TCR clone 152251 (TRBV7-2, TRBJ2-5)
CASSPRGSSETQYF

SEQ ID NO: 304503 - protein, 13 aa, Homo sapiens
  CDR3 for alpha chain variable domain of TCR clone 152252 (TRAV16, TRAJ28)
CALTGAGSYQLTF

SEQ ID NO: 304504 - protein, 14 aa, Homo sapiens
  CDR3 for beta chain variable domain of TCR clone 152252 (TRBV23-1, TRBJ2-7)
CASSPTVTSSTSGR

SEQ ID NO: 304505 - protein, 15 aa, Homo sapiens
  CDR3 for alpha chain variable domain of TCR clone 152253 (TRAV27, TRAJ38)
CAARRNAGNNRKLIW

SEQ ID NO: 304506 - protein, 16 aa, Homo sapiens
  CDR3 for beta chain variable domain of TCR clone 152253 (TRBV28, TRBJ2-7)
CASSPWVATGDLSQYF

SEQ ID NO: 304507 - protein, 14 aa, Homo sapiens
  CDR3 for alpha chain variable domain of TCR clone 152254 (TRAV16, TRAJ17)
CALSGRAAGNKLNF

SEQ ID NO: 304508 - protein, 15 aa, Homo sapiens
  CDR3 for beta chain variable domain of TCR clone 152254 (TRBV3-1, TRBJ1-2)
CASSPTRLPEGGYTF

SEQ ID NO: 304509 - protein, 17 aa, Homo sapiens
  CDR3 for alpha chain variable domain of TCR clone 152255 (TRAV26-1, TRAJ53)
CIVRVDDSGGSKYKLNF

SEQ ID NO: 304510 - protein, 15 aa, Homo sapiens
  CDR3 for beta chain variable domain of TCR clone 152255 (TRBV20-1, TRBJ2-7)
CSARVPAAYFYEQYF

SEQ ID NO: 304511 - protein, 14 aa, Homo sapiens
  CDR3 for alpha chain variable domain of TCR clone 152256 (TRAV29/DV5, TRAJ32)
CAAAYGGSTNKLIF

SEQ ID NO: 304512 - protein, 15 aa, Homo sapiens
  CDR3 for beta chain variable domain of TCR clone 152256 (TRBV27, TRBJ2-7)
CASSTAGTGSYEQYF

SEQ ID NO: 304513 - protein, 15 aa, Homo sapiens
  CDR3 for alpha chain variable domain of TCR clone 152257 (TRAV16, TRAJ42)
CALRRGGGSQGNLIF

SEQ ID NO: 304514 - protein, 13 aa, Homo sapiens
  CDR3 for beta chain variable domain of TCR clone 152257 (TRBV7-2, TRBJ1-2)
CASSSRGAYGYTF

SEQ ID NO: 304515 - protein, 18 aa, Homo sapiens
  CDR3 for alpha chain variable domain of TCR clone 152258 (TRAV21, TRAJ52)
CAVRPAPAGGTSHGKLTF

SEQ ID NO: 304516 - protein, 17 aa, Homo sapiens
  CDR3 for beta chain variable domain of TCR clone 152258 (TRBV13, TRBJ2-3)
CASSLSRVAGGRNTQYF

SEQ ID NO: 304517 - protein, 13 aa, Homo sapiens
  CDR3 for alpha chain variable domain of TCR clone 152259 (TRAV20, TRAJ20)
CAVRWVRDYKLSF

SEQ ID NO: 304518 - protein, 14 aa, Homo sapiens
  CDR3 for beta chain variable domain of TCR clone 152259 (TRBV20-1, TRBJ2-3)
CSASSGGSTDTQYF

SEQ ID NO: 304519 - protein, 18 aa, Homo sapiens
  CDR3 for alpha chain variable domain of TCR clone 152260 (TRAV26-1, TRAJ45)
CIVRPGGYSGGGADGLTF

SEQ ID NO: 304520 - protein, 13 aa, Homo sapiens
  CDR3 for beta chain variable domain of TCR clone 152260 (TRBV12-4, TRBJ1-2)
CASSLRQGKGYTF

SEQ ID NO: 304521 - protein, 13 aa, Homo sapiens
  CDR3 for alpha chain variable domain of TCR clone 152261 (TRAV12-1, TRAJ7)
CVVNMRGNNRLAF

SEQ ID NO: 304522 - protein, 15 aa, Homo sapiens
  CDR3 for beta chain variable domain of TCR clone 152261 (TRBV27, TRBJ2-3)
CASSLGLAATDTKYF

SEQ ID NO: 304523 - protein, 13 aa, Homo sapiens
  CDR3 for alpha chain variable domain of TCR clone 152262 (TRAV17, TRAJ39)
CATEDNAGNMLTF

SEQ ID NO: 304524 - protein, 14 aa, Homo sapiens
  CDR3 for beta chain variable domain of TCR clone 152262 (TRBV19, TRBJ1-2)
CTSSPTGGAGGYTF

SEQ ID NO: 304525 - protein, 15 aa, Homo sapiens
  CDR3 for alpha chain variable domain of TCR clone 152263 (TRAV25, TRAJ52)
CAGRPGGTSYGKLTF

SEQ ID NO: 304526 - protein, 14 aa, Homo sapiens
  CDR3 for beta chain variable domain of TCR clone 152263 (TRBV12-4, TRBJ1-1)
CASSLGTGGTAAFF

SEQ ID NO: 304527 - protein, 13 aa, Homo sapiens
  CDR3 for alpha chain variable domain of TCR clone 152264 (TRAV36/DV7, TRAJ54)
CAVDIQVAQKLVF

SEQ ID NO: 304528 - protein, 14 aa, Homo sapiens
  CDR3 for beta chain variable domain of TCR clone 152264 (TRBV19, TRBJ2-7)
CASNFRDTFTGMYF

SEQ ID NO: 304529 - protein, 14 aa, Homo sapiens
  CDR3 for alpha chain variable domain of TCR clone 152265 (TRAV13-1, TRAJ40)
CAASMTSGTYKYIF

SEQ ID NO: 304530 - protein, 16 aa, Homo sapiens
  CDR3 for beta chain variable domain of TCR clone 152265 (TRBV19, TRBJ2-1)
CASSKAGPSSYNEQFF

SEQ ID NO: 304531 - protein, 12 aa, Homo sapiens
  CDR3 for alpha chain variable domain of TCR clone 152266 (TRAV12-3, TRAJ17)
CAMTLTGNKRTF

SEQ ID NO: 304532 - protein, 15 aa, Homo sapiens
  CDR3 for beta chain variable domain of TCR clone 152266 (TRBV12-4, TRBJ2-5)
CASSPPTGLQETQYF

SEQ ID NO: 304533 - protein, 15 aa, Homo sapiens
  CDR3 for alpha chain variable domain of TCR clone 152267 (TRAV40, TRAJ45)
CLLGDLGGGADGLTF

SEQ ID NO: 304534 - protein, 13 aa, Homo sapiens
  CDR3 for beta chain variable domain of TCR clone 152267 (TRBV12-4, TRBJ2-5)
CASSLGGSRTQYF

SEQ ID NO: 304535 - protein, 12 aa, Homo sapiens
  CDR3 for alpha chain variable domain of TCR clone 152268 (TRAV3, TRAJ43)
CAVRDPNNDMRF

SEQ ID NO: 304536 - protein, 14 aa, Homo sapiens
  CDR3 for beta chain variable domain of TCR clone 152268 (TRBV5-1, TRBJ2-3)
CASSLFGPTDAQYF

SEQ ID NO: 304537 - protein, 14 aa, Homo sapiens
  CDR3 for alpha chain variable domain of TCR clone 152269 (TRAV12-1, TRAJ30)
CVVNIGGRDDKIIF

SEQ ID NO: 304538 - protein, 13 aa, Homo sapiens
  CDR3 for beta chain variable domain of TCR clone 152269 (TRBV12-5, TRBJ2-1)
CASSVGRGNEQFF

SEQ ID NO: 304539 - protein, 15 aa, Homo sapiens
  CDR3 for alpha chain variable domain of TCR clone 152270 (TRAV13-1, TRAJ8)
CAASIPNTGFQKLVF

SEQ ID NO: 304540 - protein, 14 aa, Homo sapiens
  CDR3 for beta chain variable domain of TCR clone 152270 (TRBV12-5, TRBJ2-5)
CASGSRTHQETQYF

SEQ ID NO: 304541 - protein, 14 aa, Homo sapiens
  CDR3 for alpha chain variable domain of TCR clone 152271 (TRAV1-2, TRAJ16)
CAVNRFSDGQKLLF

SEQ ID NO: 304542 - protein, 14 aa, Homo sapiens
  CDR3 for beta chain variable domain of TCR clone 152271 (TRBV7-2, TRBJ1-2)
CASSQTGSTYDYTF

SEQ ID NO: 304543 - protein, 13 aa, Homo sapiens
  CDR3 for alpha chain variable domain of TCR clone 152272 (TRAV21, TRAJ27)
CAALNTNAGKSTF

SEQ ID NO: 304544 - protein, 12 aa, Homo sapiens
  CDR3 for beta chain variable domain of TCR clone 152272 (TRBV12-5, TRBJ2-5)
CASGQGVETQYF

SEQ ID NO: 304545 - protein, 13 aa, Homo sapiens
  CDR3 for alpha chain variable domain of TCR clone 152273 (TRAV2, TRAJ40)
CAVVTSGTYKYIF

SEQ ID NO: 304546 - protein, 12 aa, Homo sapiens
  CDR3 for beta chain variable domain of TCR clone 152273 (TRBV11-2, TRBJ2-2)
CASSLGGGELFL

SEQ ID NO: 304547 - protein, 16 aa, Homo sapiens
  CDR3 for alpha chain variable domain of TCR clone 152274 (TRAV30, TRAJ24)
CGTEIVDADSWGKFQF

SEQ ID NO: 304548 - protein, 13 aa, Homo sapiens
  CDR3 for beta chain variable domain of TCR clone 152274 (TRBV20-1, TRBJ2-5)
CSAREAFQETQYF

SEQ ID NO: 304549 - protein, 17 aa, Homo sapiens
  CDR3 for alpha chain variable domain of TCR clone 152275 (TRAV8-6, TRAJ58)
CAVSSWVGETSGSRLTF

SEQ ID NO: 304550 - protein, 14 aa, Homo sapiens
  CDR3 for beta chain variable domain of TCR clone 152275 (TRBV11-2, TRBJ1-2)
CASSLYRGNYGYTF

SEQ ID NO: 304551 - protein, 14 aa, Homo sapiens
  CDR3 for alpha chain variable domain of TCR clone 152276 (TRAV1-2, TRAJ16)
CAANRFSDGQKLLF

SEQ ID NO: 304552 - protein, 16 aa, Homo sapiens
  CDR3 for beta chain variable domain of TCR clone 152276 (TRBV19, TRBJ2-1)
CASSEILVGDGNEQFF

SEQ ID NO: 304553 - protein, 15 aa, Homo sapiens
  CDR3 for alpha chain variable domain of TCR clone 152277 (TRAV2, TRAJ15)
CAVEDREQAGTALLF

SEQ ID NO: 304554 - protein, 13 aa, Homo sapiens
  CDR3 for beta chain variable domain of TCR clone 152277 (TRBV10-2, TRBJ2-3)
CASSESGDHTQYF

SEQ ID NO: 304555 - protein, 15 aa, Homo sapiens
  CDR3 for alpha chain variable domain of TCR clone 152278 (TRAV3, TRAJ3)
CAVRDGHSSASRIIF

SEQ ID NO: 304556 - protein, 17 aa, Homo sapiens
  CDR3 for beta chain variable domain of TCR clone 152278 (TRBV25-1, TRBJ2-7)
CASSDARVVFSSYEQYF

SEQ ID NO: 304557 - protein, 12 aa, Homo sapiens
  CDR3 for alpha chain variable domain of TCR clone 152279 (TRAV3, TRAJ20)
CAVRDGDYKLSF

SEQ ID NO: 304558 - protein, 17 aa, Homo sapiens
  CDR3 for beta chain variable domain of TCR clone 152279 (TRBV7-3, TRBJ2-3)
CASSLMKRMRGADTQYV

SEQ ID NO: 304559 - protein, 13 aa, Homo sapiens
  CDR3 for alpha chain variable domain of TCR clone 152280 (TRAV12-3, TRAJ7)
CAMSASGNNRLTF

SEQ ID NO: 304560 - protein, 14 aa, Homo sapiens
  CDR3 for beta chain variable domain of TCR clone 152280 (TRBV13, TRBJ2-5)
CASSLGPRGETQYF

SEQ ID NO: 304561 - protein, 13 aa, Homo sapiens
  CDR3 for alpha chain variable domain of TCR clone 152281 (TRAV16, TRAJ10)
CAPAREEETNTPL

SEQ ID NO: 304562 - protein, 14 aa, Homo sapiens
  CDR3 for beta chain variable domain of TCR clone 152281 (TRBV7-2, TRBJ1-2)
CASSQTGSTYGYTF

SEQ ID NO: 304563 - protein, 14 aa, Homo sapiens
  CDR3 for alpha chain variable domain of TCR clone 152282 (TRAV13-2, TRAJ22)
CADGTLGSARQLTF

SEQ ID NO: 304564 - protein, 15 aa, Homo sapiens
  CDR3 for beta chain variable domain of TCR clone 152282 (TRBV6-3, TRBJ2-7)
CASSSPGTVFYEQFF

SEQ ID NO: 304565 - protein, 15 aa, Homo sapiens
  CDR3 for alpha chain variable domain of TCR clone 152283 (TRAV16, TRAJ17)
CALSGKKAAGNKLTF

SEQ ID NO: 304566 - protein, 16 aa, Homo sapiens
  CDR3 for beta chain variable domain of TCR clone 152283 (TRBV7-6, TRBJ1-6)
CASSSLPAGEYSPLHF

SEQ ID NO: 304567 - protein, 14 aa, Homo sapiens
  CDR3 for alpha chain variable domain of TCR clone 152284 (TRAV12-2, TRAJ40)
CAVKIPSGTYKYIF

SEQ ID NO: 304568 - protein, 17 aa, Homo sapiens
  CDR3 for beta chain variable domain of TCR clone 152284 (TRBV13, TRBJ2-3)
CASSLSRVAGRRNTQYF

SEQ ID NO: 304569 - protein, 13 aa, Homo sapiens
  CDR3 for alpha chain variable domain of TCR clone 152285 (TRAV2, TRAJ40)
CAVVTSGAYKYIF

SEQ ID NO: 304570 - protein, 14 aa, Homo sapiens
  CDR3 for beta chain variable domain of TCR clone 152285 (TRBV7-2, TRBJ2-7)
CASSPKTSFYEQYF

SEQ ID NO: 304571 - protein, 14 aa, Homo sapiens
  CDR3 for alpha chain variable domain of TCR clone 152286 (TRAV29/DV5, TRAJ36)
CAARRKTGANNLFF

SEQ ID NO: 304572 - protein, 14 aa, Homo sapiens
  CDR3 for beta chain variable domain of TCR clone 152286 (TRBV19, TRBJ2-1)
CASLTFVLSGEQFF

SEQ ID NO: 304573 - protein, 16 aa, Homo sapiens
  CDR3 for alpha chain variable domain of TCR clone 152287 (TRAV30, TRAJ24)
CGTELVDADSWGKFQF

SEQ ID NO: 304574 - protein, 16 aa, Homo sapiens
  CDR3 for beta chain variable domain of TCR clone 152287 (TRBV7-3, TRBJ2-3)
ELSLMKRMRGADTQYF

SEQ ID NO: 304575 - protein, 13 aa, Homo sapiens
  CDR3 for alpha chain variable domain of TCR clone 152288 (TRAV12-1, TRAJ37)
CVVNAGNTGKLIF

SEQ ID NO: 304576 - protein, 15 aa, Homo sapiens
  CDR3 for beta chain variable domain of TCR clone 152288 (TRBV7-3, TRBJ2-2)
CASSETGRGTGELFF

SEQ ID NO: 304577 - protein, 16 aa, Homo sapiens
  CDR3 for alpha chain variable domain of TCR clone 152289 (TRAV39, TRAJ32)
CAVDLEYGGATNKLIF

SEQ ID NO: 304578 - protein, 15 aa, Homo sapiens
  CDR3 for beta chain variable domain of TCR clone 152289 (TRBV11-3, TRBJ2-3)
CASLKDGREGDTQYF

SEQ ID NO: 304579 - protein, 15 aa, Homo sapiens
  CDR3 for alpha chain variable domain of TCR clone 152290 (TRAV26-1, TRAJ15)
CIVRAANQAGTALIF

SEQ ID NO: 304580 - protein, 15 aa, Homo sapiens
  CDR3 for beta chain variable domain of TCR clone 152290 (TRBV20-1, TRBJ1-1)
CSARSAATSDTGAFF

SEQ ID NO: 304581 - protein, 10 aa, Homo sapiens
  CDR3 for alpha chain variable domain of TCR clone 152291 (TRAV1-2, TRAJ18)
CAVRGEAQPW

SEQ ID NO: 304582 - protein, 19 aa, Homo sapiens
  CDR3 for beta chain variable domain of TCR clone 152291 (TRBV6-3, TRBJ1-2)
CASSYSKGRTGPPNYGYTF

SEQ ID NO: 304583 - protein, 13 aa, Homo sapiens
  CDR3 for alpha chain variable domain of TCR clone 152292 (TRAV17, TRAJ9)
CATFLTGGFKPIF

SEQ ID NO: 304584 - protein, 15 aa, Homo sapiens
  CDR3 for beta chain variable domain of TCR clone 152292 (TRBV4-1, TRBJ2-7)
CASSQQGQGFDEQYF

SEQ ID NO: 304585 - protein, 12 aa, Homo sapiens
  CDR3 for alpha chain variable domain of TCR clone 152293 (TRAV2, TRAJ31)
CAVEDNNARLMF

SEQ ID NO: 304586 - protein, 13 aa, Homo sapiens
  CDR3 for beta chain variable domain of TCR clone 152293 (TRBV2, TRBJ1-5)
CATAGPGNQPQHF

SEQ ID NO: 304587 - protein, 13 aa, Homo sapiens
  CDR3 for alpha chain variable domain of TCR clone 152294 (TRAV12-1, TRAJ40)
CVVPTPGTYKYIF

SEQ ID NO: 304588 - protein, 16 aa, Homo sapiens
  CDR3 for beta chain variable domain of TCR clone 152294 (TRBV7-9, TRBJ1-2)
CASSLGFSSGEDGYTF

SEQ ID NO: 304589 - protein, 17 aa, Homo sapiens
  CDR3 for alpha chain variable domain of TCR clone 152295 (TRAV3, TRAJ42)
RAVRDRDYGGRQGNLIF

SEQ ID NO: 304590 - protein, 15 aa, Homo sapiens
  CDR3 for beta chain variable domain of TCR clone 152295 (TRBV2, TRBJ2-7)
CASSEGLARSYEQYF

SEQ ID NO: 304591 - protein, 13 aa, Homo sapiens
  CDR3 for alpha chain variable domain of TCR clone 152296 (TRAV12-2, TRAJ9)
CAVPGAGGFKTIF

SEQ ID NO: 304592 - protein, 14 aa, Homo sapiens
  CDR3 for beta chain variable domain of TCR clone 152296 (TRBV9, TRBJ2-1)
CASSYSGARNEQFF

SEQ ID NO: 304593 - protein, 14 aa, Homo sapiens
  CDR3 for alpha chain variable domain of TCR clone 152297 (TRAV35, TRAJ33)
CAGSSQDSHYQLIW

SEQ ID NO: 304594 - protein, 15 aa, Homo sapiens
  CDR3 for beta chain variable domain of TCR clone 152297 (TRBV28, TRBJ2-5)
CASSPGQGSIETQYF

SEQ ID NO: 304595 - protein, 16 aa, Homo sapiens
  CDR3 for alpha chain variable domain of TCR clone 152298 (TRAV30, TRAJ24)
CGSEIVDADSWGKFQF

SEQ ID NO: 304596 - protein, 13 aa, Homo sapiens
  CDR3 for beta chain variable domain of TCR clone 152298 (TRBV20-1, TRBJ1-1)
CSAPPGGHTEAFF

SEQ ID NO: 304597 - protein, 14 aa, Homo sapiens
  CDR3 for alpha chain variable domain of TCR clone 152299 (TRAV12-3, TRAJ10)
SHLPLTGGGNKLTF

SEQ ID NO: 304598 - protein, 16 aa, Homo sapiens
  CDR3 for beta chain variable domain of TCR clone 152299 (TRBV5-1, TRBJ2-3)
CASSVFPMSSTDTQYF

SEQ ID NO: 304599 - protein, 15 aa, Homo sapiens
  CDR3 for alpha chain variable domain of TCR clone 152300 (TRAV2, TRAJ9)
CAVEDRGTGGFKTIF

SEQ ID NO: 304600 - protein, 14 aa, Homo sapiens
  CDR3 for beta chain variable domain of TCR clone 152300 (TRBV19, TRBJ2-2)
CASSTLHRSGELFF

SEQ ID NO: 304601 - protein, 17 aa, Homo sapiens
  CDR3 for alpha chain variable domain of TCR clone 152301 (TRAV26-2, TRAJ42)
CILRDVGYGGSQGNLIF

SEQ ID NO: 304602 - protein, 16 aa, Homo sapiens
  CDR3 for beta chain variable domain of TCR clone 152301 (TRBV12-4, TRBJ2-7)
CASSLIGGTGTYELYF

SEQ ID NO: 304603 - protein, 13 aa, Homo sapiens
  CDR3 for alpha chain variable domain of TCR clone 152302 (TRAV21, TRAJ34)
CAVSEGDTDKLIF

SEQ ID NO: 304604 - protein, 17 aa, Homo sapiens
  CDR3 for beta chain variable domain of TCR clone 152302 (TRBV20-1, TRBJ1-5)
CSARDRSAQGFNQPQHF

SEQ ID NO: 304605 - protein, 15 aa, Homo sapiens
  CDR3 for alpha chain variable domain of TCR clone 152303 (TRAV12-1, TRAJ44)
CVVDEYTGTASKLTF

SEQ ID NO: 304606 - protein, 17 aa, Homo sapiens
  CDR3 for beta chain variable domain of TCR clone 152303 (TRBV13, TRBJ2-3)
CASSLSRVAGGRNTQYF

SEQ ID NO: 304607 - protein, 15 aa, Homo sapiens
  CDR3 for alpha chain variable domain of TCR clone 152304 (TRAV23/DV6, TRAJ37)
CAAGEGSSNTGKLIF

SEQ ID NO: 304608 - protein, 15 aa, Homo sapiens
  CDR3 for beta chain variable domain of TCR clone 152304 (TRBV10-2, TRBJ2-6)
CASSEQGTGANVLTF

SEQ ID NO: 304609 - protein, 17 aa, Homo sapiens
  CDR3 for alpha chain variable domain of TCR clone 152305 (TRAV3, TRAJ28)
CAVREAYSGAGSYQLTF

SEQ ID NO: 304610 - protein, 13 aa, Homo sapiens
  CDR3 for beta chain variable domain of TCR clone 152305 (TRBV7-3, TRBJ1-1)
CASSQDWGAEAFF

SEQ ID NO: 304611 - protein, 13 aa, Homo sapiens
  CDR3 for alpha chain variable domain of TCR clone 152306 (TRAV12-1, TRAJ6)
CVVFPGGSYIPTF

SEQ ID NO: 304612 - protein, 14 aa, Homo sapiens
  CDR3 for beta chain variable domain of TCR clone 152306 (TRBV20-1, TRBJ1-3)
CSASPTGAGNTIYY

SEQ ID NO: 304613 - protein, 15 aa, Homo sapiens
  CDR3 for alpha chain variable domain of TCR clone 152307 (TRAV8-3, TRAJ27)
CSVGPSKTNAGKSTF

SEQ ID NO: 304614 - protein, 15 aa, Homo sapiens
  CDR3 for beta chain variable domain of TCR clone 152307 (TRBV7-2, TRBJ2-1)
CASSSGLAGGNEHFF

SEQ ID NO: 304615 - protein, 15 aa, Homo sapiens
  CDR3 for alpha chain variable domain of TCR clone 152308 (TRAV8-3, TRAJ45)
CASSYSGGGADGLPF

SEQ ID NO: 304616 - protein, 16 aa, Homo sapiens
  CDR3 for beta chain variable domain of TCR clone 152308 (TRBV5-1, TRBJ2-3)
CASSLQGRVGADTQYF

SEQ ID NO: 304617 - protein, 15 aa, Homo sapiens
  CDR3 for alpha chain variable domain of TCR clone 152309 (TRAV3, TRAJ20)
CAVRDIKLSDNKLSF

SEQ ID NO: 304618 - protein, 15 aa, Homo sapiens
  CDR3 for beta chain variable domain of TCR clone 152309 (TRBV7-9, TRBJ1-6)
CASSSPGRGNSPLHF

SEQ ID NO: 304619 - protein, 10 aa, Homo sapiens
  CDR3 for alpha chain variable domain of TCR clone 152310 (TRAV36/DV7, TRAJ54)
CAVDIQGAQA

SEQ ID NO: 304620 - protein, 14 aa, Homo sapiens
  CDR3 for beta chain variable domain of TCR clone 152310 (TRBV19, TRBJ2-7)
CASNFRDTFTGMYF

SEQ ID NO: 304621 - protein, 20 aa, Homo sapiens
  CDR3 for alpha chain variable domain of TCR clone 152311 (TRAV26-1, TRAJ42)
CCVLLHRQTYYGGSQGNLIF

SEQ ID NO: 304622 - protein, 17 aa, Homo sapiens
  CDR3 for beta chain variable domain of TCR clone 152311 (TRBV20-1, TRBJ2-1)
CSASSSGLAGSYNEQFF

SEQ ID NO: 304623 - protein, 16 aa, Homo sapiens
  CDR3 for alpha chain variable domain of TCR clone 152312 (TRAV16, TRAJ52)
CALSAAGGTSYGKLTF

SEQ ID NO: 304624 - protein, 12 aa, Homo sapiens
  CDR3 for beta chain variable domain of TCR clone 152312 (TRBV12-4, TRBJ1-3)
CASSFSGNTIHF

SEQ ID NO: 304625 - protein, 14 aa, Homo sapiens
  CDR3 for alpha chain variable domain of TCR clone 152313 (TRAV12-3, TRAJ10)
SHLPLTGGGNKLTF

SEQ ID NO: 304626 - protein, 13 aa, Homo sapiens
  CDR3 for beta chain variable domain of TCR clone 152313 (TRBV10-3, TRBJ2-7)
CASKLAVDYEQYF

SEQ ID NO: 304627 - protein, 13 aa, Homo sapiens
  CDR3 for alpha chain variable domain of TCR clone 152314 (TRAV23/DV6, TRAJ47)
CAASSKYGNKLVF

SEQ ID NO: 304628 - protein, 15 aa, Homo sapiens
  CDR3 for beta chain variable domain of TCR clone 152314 (TRBV7-3, TRBJ2-1)
CASSLDGNSYNEQFF

SEQ ID NO: 304629 - protein, 15 aa, Homo sapiens
  CDR3 for alpha chain variable domain of TCR clone 152315 (TRAV12-2, TRAJ53)
CAVNGGGGGNYKPTF

SEQ ID NO: 304630 - protein, 14 aa, Homo sapiens
  CDR3 for beta chain variable domain of TCR clone 152315 (TRBV19, TRBJ2-1)
CASPTFVLSGEQFF

SEQ ID NO: 304631 - protein, 16 aa, Homo sapiens
  CDR3 for alpha chain variable domain of TCR clone 152316 (TRAV12-1, TRAJ48)
CVVNMGSNFGNEKLTF

SEQ ID NO: 304632 - protein, 18 aa, Homo sapiens
  CDR3 for beta chain variable domain of TCR clone 152316 (TRBV11-2, TRBJ2-6)
CASSLNPFLGTGANVLPF

SEQ ID NO: 304633 - protein, 15 aa, Homo sapiens
  CDR3 for alpha chain variable domain of TCR clone 152317 (TRAV12-3, TRAJ6)
CAMSATTGGRYIPTF

SEQ ID NO: 304634 - protein, 16 aa, Homo sapiens
  CDR3 for beta chain variable domain of TCR clone 152317 (TRBV20-1, TRBJ1-2)
CSASMGQGVANYGYAF

SEQ ID NO: 304635 - protein, 14 aa, Homo sapiens
  CDR3 for alpha chain variable domain of TCR clone 152318 (TRAV12-3, TRAJ10)
SHLHLTGGGNKLTF

SEQ ID NO: 304636 - protein, 14 aa, Homo sapiens
  CDR3 for beta chain variable domain of TCR clone 152318 (TRBV7-6, TRBJ2-3)
CASSLGTVTDTQYF

SEQ ID NO: 304637 - protein, 11 aa, Homo sapiens
  CDR3 for alpha chain variable domain of TCR clone 152319 (TRAV26-1, TRAJ37)
CIVSVGRKLIF

SEQ ID NO: 304638 - protein, 13 aa, Homo sapiens
  CDR3 for beta chain variable domain of TCR clone 152319 (TRBV14, TRBJ1-2)
CASSEDRRYGYTF

SEQ ID NO: 304639 - protein, 15 aa, Homo sapiens
  CDR3 for alpha chain variable domain of TCR clone 152320 (TRAV26-1, TRAJ29)
CIVRVEGSGNTPRVF

SEQ ID NO: 304640 - protein, 15 aa, Homo sapiens
  CDR3 for beta chain variable domain of TCR clone 152320 (TRBV12-4, TRBJ1-1)
CQQQDRVVANTEAFF

SEQ ID NO: 304641 - protein, 15 aa, Homo sapiens
  CDR3 for alpha chain variable domain of TCR clone 152321 (TRAV4, TRAJ39)
CLVRPNNNAGNMLTF

SEQ ID NO: 304642 - protein, 13 aa, Homo sapiens
  CDR3 for beta chain variable domain of TCR clone 152321 (TRBV11-2, TRBJ2-5)
CASSSTGEETQYF

SEQ ID NO: 304643 - protein, 18 aa, Homo sapiens
  CDR3 for alpha chain variable domain of TCR clone 152322 (TRAV21, TRAJ45)
CCGGPQGGSGGGADGLTF

SEQ ID NO: 304644 - protein, 10 aa, Homo sapiens
  CDR3 for beta chain variable domain of TCR clone 152322 (TRBV4-1, TRBJ2-7)
SRGNRHEQYF

SEQ ID NO: 304645 - protein, 13 aa, Homo sapiens
  CDR3 for alpha chain variable domain of TCR clone 152323 (TRAV27, TRAJ13)
CAGEPGGYQKVTF

SEQ ID NO: 304646 - protein, 16 aa, Homo sapiens
  CDR3 for beta chain variable domain of TCR clone 152323 (TRBV20-1, TRBJ2-2)
CSARSAGGLGTGELFF

SEQ ID NO: 304647 - protein, 14 aa, Homo sapiens
  CDR3 for alpha chain variable domain of TCR clone 152324 (TRAV13-1, TRAJ24)
CAASRTDSWGKLQF

SEQ ID NO: 304648 - protein, 20 aa, Homo sapiens
  CDR3 for beta chain variable domain of TCR clone 152324 (TRBV28, TRBJ2-1)
CASTPIGRSPGLAGGNEQFF

SEQ ID NO: 304649 - protein, 15 aa, Homo sapiens
  CDR3 for alpha chain variable domain of TCR clone 152325 (TRAV4, TRAJ36)
CLVGDRQTGANNLFF

SEQ ID NO: 304650 - protein, 20 aa, Homo sapiens
  CDR3 for beta chain variable domain of TCR clone 152325 (TRBV7-8, TRBJ2-2)
CASSHLFPGPTIHITGELFF

SEQ ID NO: 304651 - protein, 11 aa, Homo sapiens
  CDR3 for alpha chain variable domain of TCR clone 152326 (TRAV1-1, TRAJ23)
CAVRQGGKLIF

SEQ ID NO: 304652 - protein, 13 aa, Homo sapiens
  CDR3 for beta chain variable domain of TCR clone 152326 (TRBV5-4, TRBJ1-4)
CASSLAGLEKLFF

SEQ ID NO: 304653 - protein, 10 aa, Homo sapiens
  CDR3 for alpha chain variable domain of TCR clone 152327 (TRAV25, TRAJ20)
FAVNDYKLSF

SEQ ID NO: 304654 - protein, 13 aa, Homo sapiens
  CDR3 for beta chain variable domain of TCR clone 152327 (TRBV6-3, TRBJ2-7)
CASSFSGGYEQYF

SEQ ID NO: 304655 - protein, 13 aa, Homo sapiens
  CDR3 for alpha chain variable domain of TCR clone 152328 (TRAV27, TRAJ29)
CAGAHSGNTPLVF

SEQ ID NO: 304656 - protein, 15 aa, Homo sapiens
  CDR3 for beta chain variable domain of TCR clone 152328 (TRBV2, TRBJ2-5)
CASSSSVAGGETQYF

SEQ ID NO: 304657 - protein, 12 aa, Homo sapiens
  CDR3 for alpha chain variable domain of TCR clone 152329 (TRAV2, TRAJ32)
CAVGGATTKLIF

SEQ ID NO: 304658 - protein, 15 aa, Homo sapiens
  CDR3 for beta chain variable domain of TCR clone 152329 (TRBV7-2, TRBJ2-1)
CASSSRTSREDEQFF

SEQ ID NO: 304659 - protein, 15 aa, Homo sapiens
  CDR3 for alpha chain variable domain of TCR clone 152330 (TRAV12-1, TRAJ45)
CVVLSGGGGTDGLTF

SEQ ID NO: 304660 - protein, 14 aa, Homo sapiens
  CDR3 for beta chain variable domain of TCR clone 152330 (TRBV11-2, TRBJ2-5)
CASSRTGGIETQYF

SEQ ID NO: 304661 - protein, 18 aa, Homo sapiens
  CDR3 for alpha chain variable domain of TCR clone 152331 (TRAV35, TRAJ28)
CAGHNYPLSGAGSYQFTF

SEQ ID NO: 304662 - protein, 12 aa, Homo sapiens
  CDR3 for beta chain variable domain of TCR clone 152331 (TRBV7-9, TRBJ1-1)
CASSLEGTEAFF

SEQ ID NO: 304663 - protein, 13 aa, Homo sapiens
  CDR3 for alpha chain variable domain of TCR clone 152332 (TRAV13-1, TRAJ49)
CAAMLYTSNQFYF

SEQ ID NO: 304664 - protein, 15 aa, Homo sapiens
  CDR3 for beta chain variable domain of TCR clone 152332 (TRBV12-4, TRBJ1-5)
CASTRGSGFGQPQHF

SEQ ID NO: 304665 - protein, 12 aa, Homo sapiens
  CDR3 for alpha chain variable domain of TCR clone 152333 (TRAV35, TRAJ49)
CAGWNTGNQFYF

SEQ ID NO: 304666 - protein, 16 aa, Homo sapiens
  CDR3 for beta chain variable domain of TCR clone 152333 (TRBV5-1, TRBJ2-2)
CASSRWDTTNTGEPFF

SEQ ID NO: 304667 - protein, 13 aa, Homo sapiens
  CDR3 for alpha chain variable domain of TCR clone 152334 (TRAV21, TRAJ20)
CAVGLRVDYKLSF

SEQ ID NO: 304668 - protein, 13 aa, Homo sapiens
  CDR3 for beta chain variable domain of TCR clone 152334 (TRBV29-1, TRBJ2-1)
CSVEGGRVNEQLF

SEQ ID NO: 304669 - protein, 16 aa, Homo sapiens
  CDR3 for alpha chain variable domain of TCR clone 152335 (TRAV38-1, TRAJ32)
YAFMKGGGGATNKLIF

SEQ ID NO: 304670 - protein, 13 aa, Homo sapiens
  CDR3 for beta chain variable domain of TCR clone 152335 (TRBV20-1, TRBJ2-5)
CSAREAFQETQYF

SEQ ID NO: 304671 - protein, 12 aa, Homo sapiens
  CDR3 for alpha chain variable domain of TCR clone 152336 (TRAV13-1, TRAJ9)
CAAETGGFKTIF

SEQ ID NO: 304672 - protein, 17 aa, Homo sapiens
  CDR3 for beta chain variable domain of TCR clone 152336 (TRBV19, TRBJ2-3)
CASSTLGVAGVKDTQYF

SEQ ID NO: 304673 - protein, 14 aa, Homo sapiens
  CDR3 for alpha chain variable domain of TCR clone 152337 (TRAV12-2, TRAJ40)
CAVKIPSGTYKYIF

SEQ ID NO: 304674 - protein, 13 aa, Homo sapiens
  CDR3 for beta chain variable domain of TCR clone 152337 (TRBV5-4, TRBJ2-5)
CASSPVSQETQYV

SEQ ID NO: 304675 - protein, 14 aa, Homo sapiens
  CDR3 for alpha chain variable domain of TCR clone 152338 (TRAV35, TRAJ13)
CAGSPSGGYQKVTF

SEQ ID NO: 304676 - protein, 17 aa, Homo sapiens
  CDR3 for beta chain variable domain of TCR clone 152338 (TRBV7-6, TRBJ2-5)
CASSPGLADPWGEIQYF

SEQ ID NO: 304677 - protein, 12 aa, Homo sapiens
  CDR3 for alpha chain variable domain of TCR clone 152339 (TRAV17, TRAJ20)
CATDGDDYKLSF

SEQ ID NO: 304678 - protein, 14 aa, Homo sapiens
  CDR3 for beta chain variable domain of TCR clone 152339 (TRBV27, TRBJ1-1)
CASSPQGKRAEAFF

SEQ ID NO: 304679 - protein, 11 aa, Homo sapiens
  CDR3 for alpha chain variable domain of TCR clone 152340 (TRAV12-2, TRAJ31)
CAILNNARLMF

SEQ ID NO: 304680 - protein, 13 aa, Homo sapiens
  CDR3 for beta chain variable domain of TCR clone 152340 (TRBV20-1, TRBJ1-1)
CSSRLGQGTEAFF

SEQ ID NO: 304681 - protein, 12 aa, Homo sapiens
  CDR3 for alpha chain variable domain of TCR clone 152341 (TRAV8-3, TRAJ20)
CAVGANDYKLSF

SEQ ID NO: 304682 - protein, 12 aa, Homo sapiens
  CDR3 for beta chain variable domain of TCR clone 152341 (TRBV3-1, TRBJ2-3)
CASSQDRDTQYF

SEQ ID NO: 304683 - protein, 14 aa, Homo sapiens
  CDR3 for alpha chain variable domain of TCR clone 152342 (TRAV2, TRAJ9)
CAVEDRCGGFKNIF

SEQ ID NO: 304684 - protein, 16 aa, Homo sapiens
  CDR3 for beta chain variable domain of TCR clone 152342 (TRBV28, TRBJ1-5)
CASSLTGQGWNQPQHF

SEQ ID NO: 304685 - protein, 12 aa, Homo sapiens
  CDR3 for alpha chain variable domain of TCR clone 152343 (TRAV8-3, TRAJ26)
CAGDNYGQNFVF

SEQ ID NO: 304686 - protein, 18 aa, Homo sapiens
  CDR3 for beta chain variable domain of TCR clone 152343 (TRBV7-6, TRBJ2-1)
CASSPRTSGMSSYNEQFF

SEQ ID NO: 304687 - protein, 13 aa, Homo sapiens
  CDR3 for alpha chain variable domain of TCR clone 152344 (TRAV30, TRAJ20)
CGTEDRSDYKLSF

SEQ ID NO: 304688 - protein, 15 aa, Homo sapiens
  CDR3 for beta chain variable domain of TCR clone 152344 (TRBV11-3, TRBJ2-3)
CASLKDGREGDTQYF

SEQ ID NO: 304689 - protein, 14 aa, Homo sapiens
  CDR3 for alpha chain variable domain of TCR clone 152345 (TRAV35, TRAJ33)
CAGSSQDSNYQLIW

SEQ ID NO: 304690 - protein, 21 aa, Homo sapiens
  CDR3 for beta chain variable domain of TCR clone 152345 (TRBV5-1, TRBJ1-4)
CASSLEGRKSKTVFWQWNPAL

SEQ ID NO: 304691 - protein, 14 aa, Homo sapiens
  CDR3 for alpha chain variable domain of TCR clone 152346 (TRAV12-2, TRAJ13)
CAGKKPGGYQKVTF

SEQ ID NO: 304692 - protein, 15 aa, Homo sapiens
  CDR3 for beta chain variable domain of TCR clone 152346 (TRBV27, TRBJ2-1)
CASSNGGGSSNEQFF

SEQ ID NO: 304693 - protein, 16 aa, Homo sapiens
  CDR3 for alpha chain variable domain of TCR clone 152347 (TRAV8-3, TRAJ8)
CAVPRDENTGFQKLVF

SEQ ID NO: 304694 - protein, 14 aa, Homo sapiens
  CDR3 for beta chain variable domain of TCR clone 152347 (TRBV28, TRBJ1-1)
CASSESGRGTEAFF

SEQ ID NO: 304695 - protein, 13 aa, Homo sapiens
  CDR3 for alpha chain variable domain of TCR clone 152348 (TRAV12-2, TRAJ20)
CAVYPSNDYKLSF

SEQ ID NO: 304696 - protein, 14 aa, Homo sapiens
  CDR3 for beta chain variable domain of TCR clone 152348 (TRBV4-2, TRBJ2-1)
CASGLDRAYNEQFF

SEQ ID NO: 304697 - protein, 14 aa, Homo sapiens
  CDR3 for alpha chain variable domain of TCR clone 152349 (TRAV13-1, TRAJ9)
CAASVLTGGFKTIF

SEQ ID NO: 304698 - protein, 16 aa, Homo sapiens
  CDR3 for beta chain variable domain of TCR clone 152349 (TRBV12-4, TRBJ2-3)
CASSFGTGGISDTQYF

SEQ ID NO: 304699 - protein, 15 aa, Homo sapiens
  CDR3 for alpha chain variable domain of TCR clone 152350 (TRAV8-6, TRAJ10)
CAVRDQAGGGNKLTF

SEQ ID NO: 304700 - protein, 16 aa, Homo sapiens
  CDR3 for beta chain variable domain of TCR clone 152350 (TRBV27, TRBJ2-7)
CASSSERRDSAYDQYF

SEQ ID NO: 304701 - protein, 18 aa, Homo sapiens
  CDR3 for alpha chain variable domain of TCR clone 152351 (TRAV29/DV5, TRAJ26)
CSVLLCSKRKPEGQNFVF

SEQ ID NO: 304702 - protein, 17 aa, Homo sapiens
  CDR3 for beta chain variable domain of TCR clone 152351 (TRBV20-1, TRBJ2-2)
CCASGSGQGGLTGELFF

SEQ ID NO: 304703 - protein, 18 aa, Homo sapiens
  CDR3 for alpha chain variable domain of TCR clone 152352 (TRAV13-1, TRAJ52)
CAAKNPTAGGTSYGKLTF

SEQ ID NO: 304704 - protein, 15 aa, Homo sapiens
  CDR3 for beta chain variable domain of TCR clone 152352 (TRBV27, TRBJ2-1)
CASSNGGGSSNEQFF

SEQ ID NO: 304705 - protein, 17 aa, Homo sapiens
  CDR3 for alpha chain variable domain of TCR clone 152353 (TRAV4, TRAJ18)
CLVGERSVGSTLGGPYF

SEQ ID NO: 304706 - protein, 14 aa, Homo sapiens
  CDR3 for beta chain variable domain of TCR clone 152353 (TRBV6-5, TRBJ1-2)
CASSYDGTGGGYTF

SEQ ID NO: 304707 - protein, 16 aa, Homo sapiens
  CDR3 for alpha chain variable domain of TCR clone 152354 (TRAV38-1, TRAJ39)
CAFMKHYLGAGNMLTF

SEQ ID NO: 304708 - protein, 20 aa, Homo sapiens
  CDR3 for beta chain variable domain of TCR clone 152354 (TRBV6-7, TRBJ2-1)
TSVPAAPLRERGGGVNEQFF

SEQ ID NO: 304709 - protein, 13 aa, Homo sapiens
  CDR3 for alpha chain variable domain of TCR clone 152355 (TRAV13-1, TRAJ47)
CAATLTGGNKLVF

SEQ ID NO: 304710 - protein, 13 aa, Homo sapiens
  CDR3 for beta chain variable domain of TCR clone 152355 (TRBV7-3, TRBJ1-1)
CASSQDWGAEAFF

SEQ ID NO: 304711 - protein, 15 aa, Homo sapiens
  CDR3 for alpha chain variable domain of TCR clone 152356 (TRAV8-3, TRAJ11)
CAVGLLNPGYSTLTF

SEQ ID NO: 304712 - protein, 13 aa, Homo sapiens
  CDR3 for beta chain variable domain of TCR clone 152356 (TRBV11-2, TRBJ2-5)
CASSSTGEETQYF

SEQ ID NO: 304713 - protein, 14 aa, Homo sapiens
  CDR3 for alpha chain variable domain of TCR clone 152357 (TRAV1-2, TRAJ8)
CAVREDTGFQKLVF

SEQ ID NO: 304714 - protein, 15 aa, Homo sapiens
  CDR3 for beta chain variable domain of TCR clone 152357 (TRBV6-1, TRBJ2-6)
CASSSRPSGANVLTF

SEQ ID NO: 304715 - protein, 13 aa, Homo sapiens
  CDR3 for alpha chain variable domain of TCR clone 152358 (TRAV1-2, TRAJ9)
CAALNTGGFKTIF

SEQ ID NO: 304716 - protein, 14 aa, Homo sapiens
  CDR3 for beta chain variable domain of TCR clone 152358 (TRBV28, TRBJ1-1)
CASSESGRGTEAFF

SEQ ID NO: 304717 - protein, 14 aa, Homo sapiens
  CDR3 for alpha chain variable domain of TCR clone 152359 (TRAV12-3, TRAJ10)
SHLPLTGGRNKLTF

SEQ ID NO: 304718 - protein, 17 aa, Homo sapiens
  CDR3 for beta chain variable domain of TCR clone 152359 (TRBV28, TRBJ2-5)
CASSTPEGDALQETQYF

SEQ ID NO: 304719 - protein, 13 aa, Homo sapiens
  CDR3 for alpha chain variable domain of TCR clone 152360 (TRAV27, TRAJ3)
ASLRGSSASKIIF

SEQ ID NO: 304720 - protein, 15 aa, Homo sapiens
  CDR3 for beta chain variable domain of TCR clone 152360 (TRBV28, TRBJ1-3)
CASSMGWASGNTIYY

SEQ ID NO: 304721 - protein, 15 aa, Homo sapiens
  CDR3 for alpha chain variable domain of TCR clone 152361 (TRAV14/DV4, TRAJ12)
CAMREERESSYKLIF

SEQ ID NO: 304722 - protein, 16 aa, Homo sapiens
  CDR3 for beta chain variable domain of TCR clone 152361 (TRBV11-2, TRBJ1-2)
CASSLDTGGADYGYTF

SEQ ID NO: 304723 - protein, 15 aa, Homo sapiens
  CDR3 for alpha chain variable domain of TCR clone 152362 (TRAV8-2, TRAJ44)
DAAEYFDGTASKLTF

SEQ ID NO: 304724 - protein, 14 aa, Homo sapiens
  CDR3 for beta chain variable domain of TCR clone 152362 (TRBV7-8, TRBJ2-3)
CASSVDRGTDTQYF

SEQ ID NO: 304725 - protein, 15 aa, Homo sapiens
  CDR3 for alpha chain variable domain of TCR clone 152363 (TRAV12-3, TRAJ6)
CAMSASTGGSYIPTF

SEQ ID NO: 304726 - protein, 16 aa, Homo sapiens
  CDR3 for beta chain variable domain of TCR clone 152363 (TRBV20-1, TRBJ1-2)
CSASMGHGVANYGYTF

SEQ ID NO: 304727 - protein, 14 aa, Homo sapiens
  CDR3 for alpha chain variable domain of TCR clone 152364 (TRAV1-2, TRAJ8)
CAVREDTGFKKLVF

SEQ ID NO: 304728 - protein, 15 aa, Homo sapiens
  CDR3 for beta chain variable domain of TCR clone 152364 (TRBV7-9, TRBJ2-2)
CASGPLDTFPGELFF

SEQ ID NO: 304729 - protein, 14 aa, Homo sapiens
  CDR3 for alpha chain variable domain of TCR clone 152365 (TRAV17, TRAJ6)
CATDASGGGYIPTF

SEQ ID NO: 304730 - protein, 13 aa, Homo sapiens
  CDR3 for beta chain variable domain of TCR clone 152365 (TRBV7-6, TRBJ2-3)
CASSLRSDNTQYF

SEQ ID NO: 304731 - protein, 11 aa, Homo sapiens
  CDR3 for alpha chain variable domain of TCR clone 152366 (TRAV12-1, TRAJ30)
CVVNGQDKIIF

SEQ ID NO: 304732 - protein, 12 aa, Homo sapiens
  CDR3 for beta chain variable domain of TCR clone 152366 (TRBV7-9, TRBJ2-7)
CASSFGSYEQYF

SEQ ID NO: 304733 - protein, 15 aa, Homo sapiens
  CDR3 for alpha chain variable domain of TCR clone 152367 (TRAV17, TRAJ57)
CATGPFQGGSEKLVL

SEQ ID NO: 304734 - protein, 16 aa, Homo sapiens
  CDR3 for beta chain variable domain of TCR clone 152367 (TRBV12-4, TRBJ1-5)
CASSRPVGGSNQPQHF

SEQ ID NO: 304735 - protein, 15 aa, Homo sapiens
  CDR3 for alpha chain variable domain of TCR clone 152368 (TRAV3, TRAJ7)
CAVRDKDNGNNRLAF

SEQ ID NO: 304736 - protein, 19 aa, Homo sapiens
  CDR3 for beta chain variable domain of TCR clone 152368 (TRBV5-8, TRBJ2-3)
CASSFLGTSGSHRTDTQYL

SEQ ID NO: 304737 - protein, 16 aa, Homo sapiens
  CDR3 for alpha chain variable domain of TCR clone 152369 (TRAV30, TRAJ24)
FGTEIVDADSWGKLQF

SEQ ID NO: 304738 - protein, 15 aa, Homo sapiens
  CDR3 for beta chain variable domain of TCR clone 152369 (TRBV7-9, TRBJ1-4)
CASSARTGGNEKLFF

SEQ ID NO: 304739 - protein, 15 aa, Homo sapiens
  CDR3 for alpha chain variable domain of TCR clone 152370 (TRAV16, TRAJ12)
CSKWPLRDSSYKLIF

SEQ ID NO: 304740 - protein, 13 aa, Homo sapiens
  CDR3 for beta chain variable domain of TCR clone 152370 (TRBV4-2, TRBJ1-1)
CASSQVGNTEAFF

SEQ ID NO: 304741 - protein, 14 aa, Homo sapiens
  CDR3 for alpha chain variable domain of TCR clone 152371 (TRAV27, TRAJ36)
CAGPPKRGANNLFF

SEQ ID NO: 304742 - protein, 15 aa, Homo sapiens
  CDR3 for beta chain variable domain of TCR clone 152371 (TRBV5-1, TRBJ2-7)
CASSLMTSGSNEQYF

SEQ ID NO: 304743 - protein, 12 aa, Homo sapiens
  CDR3 for alpha chain variable domain of TCR clone 152372 (TRAV16, TRAJ10)
CSRTGGGNKLTF

SEQ ID NO: 304744 - protein, 15 aa, Homo sapiens
  CDR3 for beta chain variable domain of TCR clone 152372 (TRBV10-3, TRBJ2-1)
CAISLGLVGGNEQFF

SEQ ID NO: 304745 - protein, 14 aa, Homo sapiens
  CDR3 for alpha chain variable domain of TCR clone 152373 (TRAV8-4, TRAJ15)
CAVTILEAGTALIF

SEQ ID NO: 304746 - protein, 16 aa, Homo sapiens
  CDR3 for beta chain variable domain of TCR clone 152373 (TRBV29-1, TRBJ2-6)
CSVEDITYSGANVLTF

SEQ ID NO: 304747 - protein, 12 aa, Homo sapiens
  CDR3 for alpha chain variable domain of TCR clone 152374 (TRAV2, TRAJ31)
CAVEAGNARLMF

SEQ ID NO: 304748 - protein, 18 aa, Homo sapiens
  CDR3 for beta chain variable domain of TCR clone 152374 (TRBV7-9, TRBJ2-3)
CASSLDLAGLATPDTQYF

SEQ ID NO: 304749 - protein, 13 aa, Homo sapiens
  CDR3 for alpha chain variable domain of TCR clone 152375 (TRAV3, TRAJ43)
CAVRDTRGGDMRF

SEQ ID NO: 304750 - protein, 15 aa, Homo sapiens
  CDR3 for beta chain variable domain of TCR clone 152375 (TRBV6-5, TRBJ1-5)
CASSSSRRSNQTQHF

SEQ ID NO: 304751 - protein, 14 aa, Homo sapiens
  CDR3 for alpha chain variable domain of TCR clone 152376 (TRAV12-2, TRAJ40)
CAVKIPTGTYKYTF

SEQ ID NO: 304752 - protein, 14 aa, Homo sapiens
  CDR3 for beta chain variable domain of TCR clone 152376 (TRBV20-1, TRBJ1-1)
CSAQTRIGGTEAFF

SEQ ID NO: 304753 - protein, 14 aa, Homo sapiens
  CDR3 for alpha chain variable domain of TCR clone 152377 (TRAV17, TRAJ57)
CATDPQGGSEKLVF

SEQ ID NO: 304754 - protein, 13 aa, Homo sapiens
  CDR3 for beta chain variable domain of TCR clone 152377 (TRBV20-1, TRBJ2-2)
CSASAAGTGELFF

SEQ ID NO: 304755 - protein, 15 aa, Homo sapiens
  CDR3 for alpha chain variable domain of TCR clone 152378 (TRAV3, TRAJ5)
CAVRDLYTGRRALPF

SEQ ID NO: 304756 - protein, 16 aa, Homo sapiens
  CDR3 for beta chain variable domain of TCR clone 152378 (TRBV20-1, TRBJ1-4)
CSAPGQGLLTNDKLFF

SEQ ID NO: 304757 - protein, 16 aa, Homo sapiens
  CDR3 for alpha chain variable domain of TCR clone 152379 (TRAV21, TRAJ52)
CAVTNDGGTSYGKLTF

SEQ ID NO: 304758 - protein, 11 aa, Homo sapiens
  CDR3 for beta chain variable domain of TCR clone 152379 (TRBV2, TRBJ1-1)
CASREGTEAFF

SEQ ID NO: 304759 - protein, 15 aa, Homo sapiens
  CDR3 for alpha chain variable domain of TCR clone 152380 (TRAV13-1, TRAJ8)
CAASIPNTGFQTLVF

SEQ ID NO: 304760 - protein, 13 aa, Homo sapiens
  CDR3 for beta chain variable domain of TCR clone 152380 (TRBV5-4, TRBJ1-1)
CASSFQVNTEAFF

SEQ ID NO: 304761 - protein, 16 aa, Homo sapiens
  CDR3 for alpha chain variable domain of TCR clone 152381 (TRAV30, TRAJ24)
CGTEIADADSWGKFQF

SEQ ID NO: 304762 - protein, 15 aa, Homo sapiens
  CDR3 for beta chain variable domain of TCR clone 152381 (TRBV28, TRBJ2-1)
CASSIIAGGRSEQFF

SEQ ID NO: 304763 - protein, 14 aa, Homo sapiens
  CDR3 for alpha chain variable domain of TCR clone 152382 (TRAV23/DV6, TRAJ24)
CAASLSDSWGQLQF

SEQ ID NO: 304764 - protein, 15 aa, Homo sapiens
  CDR3 for beta chain variable domain of TCR clone 152382 (TRBV9, TRBJ1-6)
CASSVAGTGDSPLHF

SEQ ID NO: 304765 - protein, 14 aa, Homo sapiens
  CDR3 for alpha chain variable domain of TCR clone 152383 (TRAV12-2, TRAJ17)
CAVLFKAAGNKLTF

SEQ ID NO: 304766 - protein, 14 aa, Homo sapiens
  CDR3 for beta chain variable domain of TCR clone 152383 (TRBV11-2, TRBJ2-2)
CASSLLADTGELFF

SEQ ID NO: 304767 - protein, 13 aa, Homo sapiens
  CDR3 for alpha chain variable domain of TCR clone 152384 (TRAV8-3, TRAJ36)
CAVGATGANNLFF

SEQ ID NO: 304768 - protein, 15 aa, Homo sapiens
  CDR3 for beta chain variable domain of TCR clone 152384 (TRBV28, TRBJ2-5)
CASSSGRTIQETQYF

SEQ ID NO: 304769 - protein, 15 aa, Homo sapiens
  CDR3 for alpha chain variable domain of TCR clone 152385 (TRAV13-1, TRAJ18)
CAASGGGSTLGRLYF

SEQ ID NO: 304770 - protein, 15 aa, Homo sapiens
  CDR3 for beta chain variable domain of TCR clone 152385 (TRBV28, TRBJ2-7)
CASSQLGAGGHEQYF

SEQ ID NO: 304771 - protein, 18 aa, Homo sapiens
  CDR3 for alpha chain variable domain of TCR clone 152386 (TRAV29/DV5, TRAJ26)
CSVLLCCKRKPEGQNFVF

SEQ ID NO: 304772 - protein, 17 aa, Homo sapiens
  CDR3 for beta chain variable domain of TCR clone 152386 (TRBV20-1, TRBJ2-2)
CSASGSGQGGLSGELFF

SEQ ID NO: 304773 - protein, 21 aa, Homo sapiens
  CDR3 for alpha chain variable domain of TCR clone 152387 (TRAV29/DV5, TRAJ52)
CSVLLCSKREAGGTSHGKLTF

SEQ ID NO: 304774 - protein, 13 aa, Homo sapiens
  CDR3 for beta chain variable domain of TCR clone 152387 (TRBV27, TRBJ1-4)
CASSLMGDEKLFF

SEQ ID NO: 304775 - protein, 17 aa, Homo sapiens
  CDR3 for alpha chain variable domain of TCR clone 152388 (TRAV8-3, TRAJ10)
EASNTVILTGGGNKLTF

SEQ ID NO: 304776 - protein, 16 aa, Homo sapiens
  CDR3 for beta chain variable domain of TCR clone 152388 (TRBV7-9, TRBJ1-2)
CASILGFSSGEDGYTF

SEQ ID NO: 304777 - protein, 22 aa, Homo sapiens
  CDR3 for alpha chain variable domain of TCR clone 152389 (TRAV12-2, TRAJ53)
SPVIQPPTSVPPILSSNYKMTF

SEQ ID NO: 304778 - protein, 13 aa, Homo sapiens
  CDR3 for beta chain variable domain of TCR clone 152389 (TRBV7-7, TRBJ2-3)
CASSLSRADTQYF

SEQ ID NO: 304779 - protein, 18 aa, Homo sapiens
  CDR3 for alpha chain variable domain of TCR clone 152390 (TRAV29/DV5, TRAJ52)
CAAGFRGAGGTSYGKLTF

SEQ ID NO: 304780 - protein, 13 aa, Homo sapiens
  CDR3 for beta chain variable domain of TCR clone 152390 (TRBV19, TRBJ1-2)
CASSQGQVYGYTF

SEQ ID NO: 304781 - protein, 15 aa, Homo sapiens
  CDR3 for alpha chain variable domain of TCR clone 152391 (TRAV12-1, TRAJ9)
CVVSVGDTGGFKTIF

SEQ ID NO: 304782 - protein, 19 aa, Homo sapiens
  CDR3 for beta chain variable domain of TCR clone 152391 (TRBV25-1, TRBJ2-2)
CAILVYRVDRGRKTGELFF

SEQ ID NO: 304783 - protein, 10 aa, Homo sapiens
  CDR3 for alpha chain variable domain of TCR clone 152392 (TRAV1-2, TRAJ31)
CAFFDARLMF

SEQ ID NO: 304784 - protein, 15 aa, Homo sapiens
  CDR3 for beta chain variable domain of TCR clone 152392 (TRBV4-1, TRBJ1-4)
CASSDTGGTNEILFF

SEQ ID NO: 304785 - protein, 14 aa, Homo sapiens
  CDR3 for alpha chain variable domain of TCR clone 152393 (TRAV12-3, TRAJ9)
YAMSPNTGGFKTIF

SEQ ID NO: 304786 - protein, 12 aa, Homo sapiens
  CDR3 for beta chain variable domain of TCR clone 152393 (TRBV19, TRBJ1-5)
CASSIAQQPQHF

SEQ ID NO: 304787 - protein, 15 aa, Homo sapiens
  CDR3 for alpha chain variable domain of TCR clone 152394 (TRAV12-1, TRAJ36)
CVVNEHQTGAKNLFF

SEQ ID NO: 304788 - protein, 14 aa, Homo sapiens
  CDR3 for beta chain variable domain of TCR clone 152394 (TRBV10-3, TRBJ2-5)
CAIRTSGGQETQYF

SEQ ID NO: 304789 - protein, 16 aa, Homo sapiens
  CDR3 for alpha chain variable domain of TCR clone 152395 (TRAV13-1, TRAJ48)
CAASIFGNFGNEKLTF

SEQ ID NO: 304790 - protein, 14 aa, Homo sapiens
  CDR3 for beta chain variable domain of TCR clone 152395 (TRBV7-3, TRBJ1-1)
CASSSKGGNTEAFF

SEQ ID NO: 304791 - protein, 15 aa, Homo sapiens
  CDR3 for alpha chain variable domain of TCR clone 152396 (TRAV8-4, TRAJ3)
CAVSEPYSSASKLIF

SEQ ID NO: 304792 - protein, 14 aa, Homo sapiens
  CDR3 for beta chain variable domain of TCR clone 152396 (TRBV7-2, TRBJ2-5)
CQQLKEQGRETQYF

SEQ ID NO: 304793 - protein, 13 aa, Homo sapiens
  CDR3 for alpha chain variable domain of TCR clone 152397 (TRAV27, TRAJ49)
CAPRPYTGNQFCF

SEQ ID NO: 304794 - protein, 16 aa, Homo sapiens
  CDR3 for beta chain variable domain of TCR clone 152397 (TRBV4-1, TRBJ1-2)
CASSQDAGQVLYGYNF

SEQ ID NO: 304795 - protein, 15 aa, Homo sapiens
  CDR3 for alpha chain variable domain of TCR clone 152398 (TRAV12-2, TRAJ53)
CAVNGEGGSNYKLTF

SEQ ID NO: 304796 - protein, 17 aa, Homo sapiens
  CDR3 for beta chain variable domain of TCR clone 152398 (TRBV20-1, TRBJ2-1)
CSARDPLAGVWDNEQFF

SEQ ID NO: 304797 - protein, 13 aa, Homo sapiens
  CDR3 for alpha chain variable domain of TCR clone 152399 (TRAV13-1, TRAJ37)
CAAISGNTGKLIF

SEQ ID NO: 304798 - protein, 17 aa, Homo sapiens
  CDR3 for beta chain variable domain of TCR clone 152399 (TRBV10-2, TRBJ1-6)
CASSENRGSSYNSPLHF

SEQ ID NO: 304799 - protein, 13 aa, Homo sapiens
  CDR3 for alpha chain variable domain of TCR clone 152400 (TRAV13-1, TRAJ20)
CAARVSNAYKLSF

SEQ ID NO: 304800 - protein, 16 aa, Homo sapiens
  CDR3 for beta chain variable domain of TCR clone 152400 (TRBV11-1, TRBJ1-1)
CAANPRDRAFNTEAFF

SEQ ID NO: 304801 - protein, 16 aa, Homo sapiens
  CDR3 for alpha chain variable domain of TCR clone 152401 (TRAV24, TRAJ53)
CAFNMGGGGSNYKLTF

SEQ ID NO: 304802 - protein, 15 aa, Homo sapiens
  CDR3 for beta chain variable domain of TCR clone 152401 (TRBV9, TRBJ1-6)
CASSVAGTGDSPLHF

SEQ ID NO: 304803 - protein, 13 aa, Homo sapiens
  CDR3 for alpha chain variable domain of TCR clone 152402 (TRAV12-2, TRAJ52)
CAVGGTSYGKLTF

SEQ ID NO: 304804 - protein, 14 aa, Homo sapiens
  CDR3 for beta chain variable domain of TCR clone 152402 (TRBV19, TRBJ2-1)
CASPTFVLSGKQFF

SEQ ID NO: 304805 - protein, 22 aa, Homo sapiens
  CDR3 for alpha chain variable domain of TCR clone 152403 (TRAV26-1, TRAJ30)
CIVRVRTEMTRSSLEKGHDFIF

SEQ ID NO: 304806 - protein, 18 aa, Homo sapiens
  CDR3 for beta chain variable domain of TCR clone 152403 (TRBV4-1, TRBJ1-5)
CASSQDPRGQGLNQPQHS

SEQ ID NO: 304807 - protein, 15 aa, Homo sapiens
  CDR3 for alpha chain variable domain of TCR clone 152404 (TRAV21, TRAJ37)
CAVRTTLSNTGKLIF

SEQ ID NO: 304808 - protein, 16 aa, Homo sapiens
  CDR3 for beta chain variable domain of TCR clone 152404 (TRBV24-1, TRBJ2-3)
CAPRDRRQDLTDTQYF

SEQ ID NO: 304809 - protein, 16 aa, Homo sapiens
  CDR3 for alpha chain variable domain of TCR clone 152405 (TRAV20, TRAJ22)
CAVQASSSGSARQLTF

SEQ ID NO: 304810 - protein, 15 aa, Homo sapiens
  CDR3 for beta chain variable domain of TCR clone 152405 (TRBV3-1, TRBJ2-7)
CASSQVRQGAYEQYF

SEQ ID NO: 304811 - protein, 12 aa, Homo sapiens
  CDR3 for alpha chain variable domain of TCR clone 152406 (TRAV13-2, TRAJ23)
CAERHRGGKLIF

SEQ ID NO: 304812 - protein, 16 aa, Homo sapiens
  CDR3 for beta chain variable domain of TCR clone 152406 (TRBV13, TRBJ2-2)
CASSPRTGEHTGELFF

SEQ ID NO: 304813 - protein, 16 aa, Homo sapiens
  CDR3 for alpha chain variable domain of TCR clone 152407 (TRAV16, TRAJ52)
SALSGVGGTSYGKLTF

SEQ ID NO: 304814 - protein, 14 aa, Homo sapiens
  CDR3 for beta chain variable domain of TCR clone 152407 (TRBV19, TRBJ1-2)
CASSLQGQAYGDTF

SEQ ID NO: 304815 - protein, 15 aa, Homo sapiens
  CDR3 for alpha chain variable domain of TCR clone 152408 (TRAV8-3, TRAJ45)
CASSYSGGGADGLAF

SEQ ID NO: 304816 - protein, 15 aa, Homo sapiens
  CDR3 for beta chain variable domain of TCR clone 152408 (TRBV7-2, TRBJ2-1)
CASSFSGGIYNEQFF

SEQ ID NO: 304817 - protein, 17 aa, Homo sapiens
  CDR3 for alpha chain variable domain of TCR clone 152409 (TRAV3, TRAJ6)
CAARDGPRAGGSYIPTF

SEQ ID NO: 304818 - protein, 14 aa, Homo sapiens
  CDR3 for beta chain variable domain of TCR clone 152409 (TRBV7-2, TRBJ2-7)
CASSPKTSVYEQYF

SEQ ID NO: 304819 - protein, 14 aa, Homo sapiens
  CDR3 for alpha chain variable domain of TCR clone 152410 (TRAV12-3, TRAJ9)
CALSPNTGGFKTNF

SEQ ID NO: 304820 - protein, 12 aa, Homo sapiens
  CDR3 for beta chain variable domain of TCR clone 152410 (TRBV11-2, TRBJ2-2)
CASSLGGGELFF

SEQ ID NO: 304821 - protein, 13 aa, Homo sapiens
  CDR3 for alpha chain variable domain of TCR clone 152411 (TRAV12-1, TRAJ39)
CVVPQRAGNMLTF

SEQ ID NO: 304822 - protein, 14 aa, Homo sapiens
  CDR3 for beta chain variable domain of TCR clone 152411 (TRBV4-1, TRBJ2-2)
CASSQAVNTGELFF

SEQ ID NO: 304823 - protein, 12 aa, Homo sapiens
  CDR3 for alpha chain variable domain of TCR clone 152412 (TRAV2, TRAJ31)
CAVEDNIARLMF

SEQ ID NO: 304824 - protein, 16 aa, Homo sapiens
  CDR3 for beta chain variable domain of TCR clone 152412 (TRBV10-3, TRBJ2-1)
CAISGVGDGGGGEQFF

SEQ ID NO: 304825 - protein, 11 aa, Homo sapiens
  CDR3 for alpha chain variable domain of TCR clone 152413 (TRAV12-3, TRAJ43)
CAMSVSDDMRF

SEQ ID NO: 304826 - protein, 16 aa, Homo sapiens
  CDR3 for beta chain variable domain of TCR clone 152413 (TRBV20-1, TRBJ2-1)
CSARDSLGAVYNEQFF

SEQ ID NO: 304827 - protein, 15 aa, Homo sapiens
  CDR3 for alpha chain variable domain of TCR clone 152414 (TRAV17, TRAJ57)
CATGPSQGGSEKLVF

SEQ ID NO: 304828 - protein, 15 aa, Homo sapiens
  CDR3 for beta chain variable domain of TCR clone 152414 (TRBV25-1, TRBJ1-4)
CASSPGDSTNEILFF

SEQ ID NO: 304829 - protein, 13 aa, Homo sapiens
  CDR3 for alpha chain variable domain of TCR clone 152415 (TRAV12-3, TRAJ33)
CAMSLNSNYQLIW

SEQ ID NO: 304830 - protein, 18 aa, Homo sapiens
  CDR3 for beta chain variable domain of TCR clone 152415 (TRBV11-2, TRBJ2-3)
CASSLGGASRGAPNTQYF

SEQ ID NO: 304831 - protein, 13 aa, Homo sapiens
  CDR3 for alpha chain variable domain of TCR clone 152416 (TRAV1-1, TRAJ23)
CAVVANQGGKLIF

SEQ ID NO: 304832 - protein, 13 aa, Homo sapiens
  CDR3 for beta chain variable domain of TCR clone 152416 (TRBV12-4, TRBJ2-5)
CASTGRSQETQYF

SEQ ID NO: 304833 - protein, 15 aa, Homo sapiens
  CDR3 for alpha chain variable domain of TCR clone 152417 (TRAV8-4, TRAJ47)
CAVSDLLGYGNKLVF

SEQ ID NO: 304834 - protein, 16 aa, Homo sapiens
  CDR3 for beta chain variable domain of TCR clone 152417 (TRBV20-1, TRBJ1-4)
CSAPGQGLLTNEKLFF

SEQ ID NO: 304835 - protein, 14 aa, Homo sapiens
  CDR3 for alpha chain variable domain of TCR clone 152418 (TRAV12-3, TRAJ6)
CAMSATGGSYIPTF

SEQ ID NO: 304836 - protein, 15 aa, Homo sapiens
  CDR3 for beta chain variable domain of TCR clone 152418 (TRBV12-4, TRBJ2-5)
CASSPPTGLQETQYF

SEQ ID NO: 304837 - protein, 13 aa, Homo sapiens
  CDR3 for alpha chain variable domain of TCR clone 152419 (TRAV2, TRAJ40)
CAVVTSGTYKYIF

SEQ ID NO: 304838 - protein, 15 aa, Homo sapiens
  CDR3 for beta chain variable domain of TCR clone 152419 (TRBV6-6, TRBJ2-6)
CASRNGQSGANVLTF

SEQ ID NO: 304839 - protein, 14 aa, Homo sapiens
  CDR3 for alpha chain variable domain of TCR clone 152420 (TRAV35, TRAJ50)
CAGHRKTSYDKVIF

SEQ ID NO: 304840 - protein, 13 aa, Homo sapiens
  CDR3 for beta chain variable domain of TCR clone 152420 (TRBV7-3, TRBJ1-1)
CASSQDWGAEAFF

SEQ ID NO: 304841 - protein, 11 aa, Homo sapiens
  CDR3 for alpha chain variable domain of TCR clone 152421 (TRAV12-1, TRAJ21)
CVVNNFNKFYF

SEQ ID NO: 304842 - protein, 14 aa, Homo sapiens
  CDR3 for beta chain variable domain of TCR clone 152421 (TRBV18, TRBJ2-7)
CASSPRGRAYEQYF

SEQ ID NO: 304843 - protein, 14 aa, Homo sapiens
  CDR3 for alpha chain variable domain of TCR clone 152422 (TRAV1-2, TRAJ8)
CAVREDTGFRKLVF

SEQ ID NO: 304844 - protein, 15 aa, Homo sapiens
  CDR3 for beta chain variable domain of TCR clone 152422 (TRBV20-1, TRBJ2-7)
CSARERVSGMDEQYF

SEQ ID NO: 304845 - protein, 13 aa, Homo sapiens
  CDR3 for alpha chain variable domain of TCR clone 152423 (TRAV13-1, TRAJ5)
CAASDTGRRALTF

SEQ ID NO: 304846 - protein, 11 aa, Homo sapiens
  CDR3 for beta chain variable domain of TCR clone 152423 (TRBV24-1, TRBJ2-5)
CATSIGETQYF

SEQ ID NO: 304847 - protein, 10 aa, Homo sapiens
  CDR3 for alpha chain variable domain of TCR clone 152424 (TRAV1-2, TRAJ31)
CAFFDARLMF

SEQ ID NO: 304848 - protein, 16 aa, Homo sapiens
  CDR3 for beta chain variable domain of TCR clone 152424 (TRBV25-1, TRBJ1-1)
CASSGDRDRGRIEAFF

SEQ ID NO: 304849 - protein, 15 aa, Homo sapiens
  CDR3 for alpha chain variable domain of TCR clone 152425 (TRAV3, TRAJ4)
CAQNMFSGGYTKLIF

SEQ ID NO: 304850 - protein, 16 aa, Homo sapiens
  CDR3 for beta chain variable domain of TCR clone 152425 (TRBV3-1, TRBJ1-6)
CASSQEFQGSYSPLHF

SEQ ID NO: 304851 - protein, 12 aa, Homo sapiens
  CDR3 for alpha chain variable domain of TCR clone 152426 (TRAV13-2, TRAJ23)
CAERHRGGKLIL

SEQ ID NO: 304852 - protein, 15 aa, Homo sapiens
  CDR3 for beta chain variable domain of TCR clone 152426 (TRBV7-9, TRBJ1-6)
CASSSPGRGNSPLHF

SEQ ID NO: 304853 - protein, 12 aa, Homo sapiens
  CDR3 for alpha chain variable domain of TCR clone 152427 (TRAV17, TRAJ4)
CATDGGYNKLIF

SEQ ID NO: 304854 - protein, 13 aa, Homo sapiens
  CDR3 for beta chain variable domain of TCR clone 152427 (TRBV29-1, TRBJ2-2)
CSTTGGNTGELVF

SEQ ID NO: 304855 - protein, 17 aa, Homo sapiens
  CDR3 for alpha chain variable domain of TCR clone 152428 (TRAV26-1, TRAJ22)
CIVRVPSHSGSARQLTF

SEQ ID NO: 304856 - protein, 15 aa, Homo sapiens
  CDR3 for beta chain variable domain of TCR clone 152428 (TRBV28, TRBJ2-1)
CASRRSGRVVGNEQF

SEQ ID NO: 304857 - protein, 13 aa, Homo sapiens
  CDR3 for alpha chain variable domain of TCR clone 152429 (TRAV3, TRAJ21)
CAVREPDFNKFYF

SEQ ID NO: 304858 - protein, 11 aa, Homo sapiens
  CDR3 for beta chain variable domain of TCR clone 152429 (TRBV29-1, TRBJ1-2)
CSGGARDGYTF

SEQ ID NO: 304859 - protein, 14 aa, Homo sapiens
  CDR3 for alpha chain variable domain of TCR clone 152430 (TRAV13-2, TRAJ43)
CAEIPTCNNNDMRF

SEQ ID NO: 304860 - protein, 15 aa, Homo sapiens
  CDR3 for beta chain variable domain of TCR clone 152430 (TRBV7-9, TRBJ2-2)
CASGPLDTFPGELFF

SEQ ID NO: 304861 - protein, 11 aa, Homo sapiens
  CDR3 for alpha chain variable domain of TCR clone 152431 (TRAV12-1, TRAJ15)
CVVNAGTALIF

SEQ ID NO: 304862 - protein, 16 aa, Homo sapiens
  CDR3 for beta chain variable domain of TCR clone 152431 (TRBV28, TRBJ2-1)
CVSSSRVRDSYNEQFF

SEQ ID NO: 304863 - protein, 15 aa, Homo sapiens
  CDR3 for alpha chain variable domain of TCR clone 152432 (TRAV26-1, TRAJ38)
CIVRAKGGNNRKLIW

SEQ ID NO: 304864 - protein, 14 aa, Homo sapiens
  CDR3 for beta chain variable domain of TCR clone 152432 (TRBV7-6, TRBJ2-5)
CASSSPSGSETQYF

SEQ ID NO: 304865 - protein, 13 aa, Homo sapiens
  CDR3 for alpha chain variable domain of TCR clone 152433 (TRAV35, TRAJ36)
CAGPRIGANNLFF

SEQ ID NO: 304866 - protein, 15 aa, Homo sapiens
  CDR3 for beta chain variable domain of TCR clone 152433 (TRBV28, TRBJ2-5)
CSSSPPWSYQETQYF

SEQ ID NO: 304867 - protein, 13 aa, Homo sapiens
  CDR3 for alpha chain variable domain of TCR clone 152434 (TRAV12-2, TRAJ6)
CAVNVSRKLHTYI

SEQ ID NO: 304868 - protein, 16 aa, Homo sapiens
  CDR3 for beta chain variable domain of TCR clone 152434 (TRBV11-2, TRBJ2-7)
CASSLAPTGVNYEQYF

SEQ ID NO: 304869 - protein, 14 aa, Homo sapiens
  CDR3 for alpha chain variable domain of TCR clone 152435 (TRAV17, TRAJ57)
CATDPQGGSDKLVF

SEQ ID NO: 304870 - protein, 14 aa, Homo sapiens
  CDR3 for beta chain variable domain of TCR clone 152435 (TRBV11-2, TRBJ2-7)
CASSLGAGAYEQYF

SEQ ID NO: 304871 - protein, 15 aa, Homo sapiens
  CDR3 for alpha chain variable domain of TCR clone 152436 (TRAV35, TRAJ41)
CAGQLFSNSGYALNF

SEQ ID NO: 304872 - protein, 16 aa, Homo sapiens
  CDR3 for beta chain variable domain of TCR clone 152436 (TRBV7-9, TRBJ2-1)
CASSDVAGGSYNEQFF

SEQ ID NO: 304873 - protein, 13 aa, Homo sapiens
  CDR3 for alpha chain variable domain of TCR clone 152437 (TRAV22, TRAJ29)
CSVGGSGNTPLVF

SEQ ID NO: 304874 - protein, 13 aa, Homo sapiens
  CDR3 for beta chain variable domain of TCR clone 152437 (TRBV4-2, TRBJ1-1)
CASGQAGNTEAFF

SEQ ID NO: 304875 - protein, 15 aa, Homo sapiens
  CDR3 for alpha chain variable domain of TCR clone 152438 (TRAV1-1, TRAJ23)
CAVREGDNQGGKLIF

SEQ ID NO: 304876 - protein, 13 aa, Homo sapiens
  CDR3 for beta chain variable domain of TCR clone 152438 (TRBV7-9, TRBJ1-5)
CASSLRNDQPQHF

SEQ ID NO: 304877 - protein, 15 aa, Homo sapiens
  CDR3 for alpha chain variable domain of TCR clone 152439 (TRAV3, TRAJ22)
CAVRDRGGSATQLTF

SEQ ID NO: 304878 - protein, 16 aa, Homo sapiens
  CDR3 for beta chain variable domain of TCR clone 152439 (TRBV11-2, TRBJ2-1)
CASARGSDSHHNEQFF

SEQ ID NO: 304879 - protein, 15 aa, Homo sapiens
  CDR3 for alpha chain variable domain of TCR clone 152440 (TRAV12-1, TRAJ44)
CVVFVNTGTASKLTF

SEQ ID NO: 304880 - protein, 16 aa, Homo sapiens
  CDR3 for beta chain variable domain of TCR clone 152440 (TRBV4-1, TRBJ2-1)
CASSQEAGQGSDEQFF

SEQ ID NO: 304881 - protein, 14 aa, Homo sapiens
  CDR3 for alpha chain variable domain of TCR clone 152441 (TRAV17, TRAJ11)
CATDTSRGYSTLTF

SEQ ID NO: 304882 - protein, 16 aa, Homo sapiens
  CDR3 for beta chain variable domain of TCR clone 152441 (TRBV7-6, TRBJ2-3)
CASSARTSRGTDTQYF

SEQ ID NO: 304883 - protein, 13 aa, Homo sapiens
  CDR3 for alpha chain variable domain of TCR clone 152442 (TRAV1-2, TRAJ9)
CAALNTGGFKTIF

SEQ ID NO: 304884 - protein, 13 aa, Homo sapiens
  CDR3 for beta chain variable domain of TCR clone 152442 (TRBV19, TRBJ2-7)
CASRKAGGSEQYF

SEQ ID NO: 304885 - protein, 13 aa, Homo sapiens
  CDR3 for alpha chain variable domain of TCR clone 152443 (TRAV2, TRAJ40)
RAVVTSGTYKYIF

SEQ ID NO: 304886 - protein, 12 aa, Homo sapiens
  CDR3 for beta chain variable domain of TCR clone 152443 (TRBV3-1, TRBJ2-3)
CASSQDRDTQYF

SEQ ID NO: 304887 - protein, 11 aa, Homo sapiens
  CDR3 for alpha chain variable domain of TCR clone 152444 (TRAV12-3, TRAJ11)
CNATGYSTLTF

SEQ ID NO: 304888 - protein, 15 aa, Homo sapiens
  CDR3 for beta chain variable domain of TCR clone 152444 (TRBV24-1, TRBJ2-4)
CATSDPRDRANIQYF

SEQ ID NO: 304889 - protein, 13 aa, Homo sapiens
  CDR3 for alpha chain variable domain of TCR clone 152445 (TRAV13-1, TRAJ5)
CAASDTGRRALTL

SEQ ID NO: 304890 - protein, 14 aa, Homo sapiens
  CDR3 for beta chain variable domain of TCR clone 152445 (TRBV19, TRBJ2-1)
CASPPFVLGGEQFF

SEQ ID NO: 304891 - protein, 13 aa, Homo sapiens
  CDR3 for alpha chain variable domain of TCR clone 152446 (TRAV3, TRAJ41)
CSVSSNYGYALNF

SEQ ID NO: 304892 - protein, 12 aa, Homo sapiens
  CDR3 for beta chain variable domain of TCR clone 152446 (TRBV2, TRBJ2-1)
CASRPGPREQFF

SEQ ID NO: 304893 - protein, 15 aa, Homo sapiens
  CDR3 for alpha chain variable domain of TCR clone 152447 (TRAV12-3, TRAJ10)
CASYILTGGGNKLTF

SEQ ID NO: 304894 - protein, 15 aa, Homo sapiens
  CDR3 for beta chain variable domain of TCR clone 152447 (TRBV7-2, TRBJ1-6)
CASSLGPDRVMPLHF

SEQ ID NO: 304895 - protein, 13 aa, Homo sapiens
  CDR3 for alpha chain variable domain of TCR clone 152448 (TRAV13-1, TRAJ10)
CAALEEGGNKLTF

SEQ ID NO: 304896 - protein, 17 aa, Homo sapiens
  CDR3 for beta chain variable domain of TCR clone 152448 (TRBV7-3, TRBJ2-2)
CASSLSGTSGGTGELFF

SEQ ID NO: 304897 - protein, 15 aa, Homo sapiens
  CDR3 for alpha chain variable domain of TCR clone 152449 (TRAV3, TRAJ22)
CAVRDRGGSASQLTF

SEQ ID NO: 304898 - protein, 15 aa, Homo sapiens
  CDR3 for beta chain variable domain of TCR clone 152449 (TRBV27, TRBJ2-1)
CASSNGGGSSNEQFF

SEQ ID NO: 304899 - protein, 13 aa, Homo sapiens
  CDR3 for alpha chain variable domain of TCR clone 152450 (TRAV26-1, TRAJ36)
CIVLGTGANNLFF

SEQ ID NO: 304900 - protein, 13 aa, Homo sapiens
  CDR3 for beta chain variable domain of TCR clone 152450 (TRBV6-5, TRBJ2-6)
CASSTSGPRRLDF

SEQ ID NO: 304901 - protein, 16 aa, Homo sapiens
  CDR3 for alpha chain variable domain of TCR clone 152451 (TRAV38-1, TRAJ43)
CISVLSLSITAGDMRF

SEQ ID NO: 304902 - protein, 11 aa, Homo sapiens
  CDR3 for beta chain variable domain of TCR clone 152451 (TRBV7-9, TRBJ2-3)
CASSYTDTQYF

SEQ ID NO: 304903 - protein, 14 aa, Homo sapiens
  CDR3 for alpha chain variable domain of TCR clone 152452 (TRAV2, TRAJ37)
CAVDFTSNTGKLIF

SEQ ID NO: 304904 - protein, 17 aa, Homo sapiens
  CDR3 for beta chain variable domain of TCR clone 152452 (TRBV28, TRBJ2-5)
CASSRQGGLAGAETQYF

SEQ ID NO: 304905 - protein, 11 aa, Homo sapiens
  CDR3 for alpha chain variable domain of TCR clone 152453 (TRAV1-1, TRAJ23)
CAVRQGGKLIF

SEQ ID NO: 304906 - protein, 14 aa, Homo sapiens
  CDR3 for beta chain variable domain of TCR clone 152453 (TRBV13, TRBJ2-5)
CASYRRLAEETQYF

SEQ ID NO: 304907 - protein, 16 aa, Homo sapiens
  CDR3 for alpha chain variable domain of TCR clone 152454 (TRAV14/DV4, TRAJ54)
CAMREGRIQGAQKLVF

SEQ ID NO: 304908 - protein, 12 aa, Homo sapiens
  CDR3 for beta chain variable domain of TCR clone 152454 (TRBV11-2, TRBJ2-2)
CASSLGGGELFL

SEQ ID NO: 304909 - protein, 10 aa, Homo sapiens
  CDR3 for alpha chain variable domain of TCR clone 152455 (TRAV30, TRAJ24)
CAQRLWMLTA

SEQ ID NO: 304910 - protein, 12 aa, Homo sapiens
  CDR3 for beta chain variable domain of TCR clone 152455 (TRBV27, TRBJ2-1)
CASRGFYNEQFF

SEQ ID NO: 304911 - protein, 11 aa, Homo sapiens
  CDR3 for alpha chain variable domain of TCR clone 152456 (TRAV21, TRAJ31)
CAVRNNARLMF

SEQ ID NO: 304912 - protein, 13 aa, Homo sapiens
  CDR3 for beta chain variable domain of TCR clone 152456 (TRBV7-6, TRBJ1-2)
CASSLVADYGYTF

SEQ ID NO: 304913 - protein, 14 aa, Homo sapiens
  CDR3 for alpha chain variable domain of TCR clone 152457 (TRAV8-4, TRAJ45)
CASGGGGGADELTF

SEQ ID NO: 304914 - protein, 20 aa, Homo sapiens
  CDR3 for beta chain variable domain of TCR clone 152457 (TRBV4-3, TRBJ2-3)
CASSPRVEMRASGRPDTQYF

SEQ ID NO: 304915 - protein, 12 aa, Homo sapiens
  CDR3 for alpha chain variable domain of TCR clone 152458 (TRAV26-1, TRAJ17)
CIVRSAGNKLTF

SEQ ID NO: 304916 - protein, 15 aa, Homo sapiens
  CDR3 for beta chain variable domain of TCR clone 152458 (TRBV11-2, TRBJ2-1)
CASCTGTSGYNEQFF

SEQ ID NO: 304917 - protein, 12 aa, Homo sapiens
  CDR3 for alpha chain variable domain of TCR clone 152459 (TRAV21, TRAJ3)
CCFYSSASKIIF

SEQ ID NO: 304918 - protein, 16 aa, Homo sapiens
  CDR3 for beta chain variable domain of TCR clone 152459 (TRBV19, TRBJ2-1)
CASSKAGPSSYKEQFF

SEQ ID NO: 304919 - protein, 16 aa, Homo sapiens
  CDR3 for alpha chain variable domain of TCR clone 152460 (TRAV30, TRAJ24)
CGTEIVDADSWGKFQF

SEQ ID NO: 304920 - protein, 13 aa, Homo sapiens
  CDR3 for beta chain variable domain of TCR clone 152460 (TRBV20-1, TRBJ1-1)
CSAPPRGHTEAFF

SEQ ID NO: 304921 - protein, 14 aa, Homo sapiens
  CDR3 for alpha chain variable domain of TCR clone 152461 (TRAV13-1, TRAJ35)
CAASKVGFGDVLHC

SEQ ID NO: 304922 - protein, 13 aa, Homo sapiens
  CDR3 for beta chain variable domain of TCR clone 152461 (TRBV7-3, TRBJ1-1)
CASSQDWGAEAFF

SEQ ID NO: 304923 - protein, 16 aa, Homo sapiens
  CDR3 for alpha chain variable domain of TCR clone 152462 (TRAV30, TRAJ24)
CGPEIVDADSWGKFQF

SEQ ID NO: 304924 - protein, 13 aa, Homo sapiens
  CDR3 for beta chain variable domain of TCR clone 152462 (TRBV7-3, TRBJ1-1)
CASSQDWGAEAFF

SEQ ID NO: 304925 - protein, 11 aa, Homo sapiens
  CDR3 for alpha chain variable domain of TCR clone 152463 (TRAV2, TRAJ13)
CASGGYQKVTF

SEQ ID NO: 304926 - protein, 14 aa, Homo sapiens
  CDR3 for beta chain variable domain of TCR clone 152463 (TRBV12-5, TRBJ2-5)
CASGSRTNQETQYF

SEQ ID NO: 304927 - protein, 11 aa, Homo sapiens
  CDR3 for alpha chain variable domain of TCR clone 152464 (TRAV12-2, TRAJ23)
CARGRGGKLTF

SEQ ID NO: 304928 - protein, 14 aa, Homo sapiens
  CDR3 for beta chain variable domain of TCR clone 152464 (TRBV28, TRBJ2-5)
CASSLGDRAETQYF

SEQ ID NO: 304929 - protein, 11 aa, Homo sapiens
  CDR3 for alpha chain variable domain of TCR clone 152465 (TRAV12-2, TRAJ31)
CAILNNARIMF

SEQ ID NO: 304930 - protein, 18 aa, Homo sapiens
  CDR3 for beta chain variable domain of TCR clone 152465 (TRBV11-2, TRBJ2-3)
CASSLGGASRGAPNTQYF

SEQ ID NO: 304931 - protein, 15 aa, Homo sapiens
  CDR3 for alpha chain variable domain of TCR clone 152466 (TRAV16, TRAJ12)
CSTWPLRDSSSKSIF

SEQ ID NO: 304932 - protein, 13 aa, Homo sapiens
  CDR3 for beta chain variable domain of TCR clone 152466 (TRBV4-2, TRBJ1-1)
CASSQAGNTEAFF

SEQ ID NO: 304933 - protein, 13 aa, Homo sapiens
  CDR3 for alpha chain variable domain of TCR clone 152467 (TRAV3, TRAJ4)
CAVRDGGYKKLIF

SEQ ID NO: 304934 - protein, 14 aa, Homo sapiens
  CDR3 for beta chain variable domain of TCR clone 152467 (TRBV12-4, TRBJ1-2)
CASTSSAAGSSYTF

SEQ ID NO: 304935 - protein, 15 aa, Homo sapiens
  CDR3 for alpha chain variable domain of TCR clone 152468 (TRAV26-1, TRAJ52)
CIVGEGGTSYGKLTF

SEQ ID NO: 304936 - protein, 16 aa, Homo sapiens
  CDR3 for beta chain variable domain of TCR clone 152468 (TRBV6-5, TRBJ2-7)
CASSSLAVTFSYEQYF

SEQ ID NO: 304937 - protein, 16 aa, Homo sapiens
  CDR3 for alpha chain variable domain of TCR clone 152469 (TRAV23/DV6, TRAJ9)
CAASIGGNTGGFNTIF

SEQ ID NO: 304938 - protein, 12 aa, Homo sapiens
  CDR3 for beta chain variable domain of TCR clone 152469 (TRBV6-3, TRBJ2-7)
CASSEPRFEQYF

SEQ ID NO: 304939 - protein, 14 aa, Homo sapiens
  CDR3 for alpha chain variable domain of TCR clone 152470 (TRAV1-2, TRAJ16)
CAVNRFSDGQKPLF

SEQ ID NO: 304940 - protein, 15 aa, Homo sapiens
  CDR3 for beta chain variable domain of TCR clone 152470 (TRBV20-1, TRBJ2-7)
CSARDRVSGMDEQYF

SEQ ID NO: 304941 - protein, 16 aa, Homo sapiens
  CDR3 for alpha chain variable domain of TCR clone 152471 (TRAV16, TRAJ52)
FALSAAGGTSYGKLTF

SEQ ID NO: 304942 - protein, 15 aa, Homo sapiens
  CDR3 for beta chain variable domain of TCR clone 152471 (TRBV7-2, TRBJ2-2)
CASSPTGANTGELFF

SEQ ID NO: 304943 - protein, 11 aa, Homo sapiens
  CDR3 for alpha chain variable domain of TCR clone 152472 (TRAV1-2, TRAJ20)
CAVSNDYKLSF

SEQ ID NO: 304944 - protein, 16 aa, Homo sapiens
  CDR3 for beta chain variable domain of TCR clone 152472 (TRBV29-1, TRBJ2-6)
CSVADITYSGANVLTF

SEQ ID NO: 304945 - protein, 17 aa, Homo sapiens
  CDR3 for alpha chain variable domain of TCR clone 152473 (TRAV12-2, TRAJ52)
CAVNPYAGGTSYGKLTF

SEQ ID NO: 304946 - protein, 16 aa, Homo sapiens
  CDR3 for beta chain variable domain of TCR clone 152473 (TRBV5-5, TRBJ2-2)
CASSGRREGANGELFF

SEQ ID NO: 304947 - protein, 16 aa, Homo sapiens
  CDR3 for alpha chain variable domain of TCR clone 152474 (TRAV16, TRAJ57)
CAPYLITQGGSAKLVF

SEQ ID NO: 304948 - protein, 15 aa, Homo sapiens
  CDR3 for beta chain variable domain of TCR clone 152474 (TRBV13, TRBJ1-1)
CASSPPTGGVGKAFF

SEQ ID NO: 304949 - protein, 12 aa, Homo sapiens
  CDR3 for alpha chain variable domain of TCR clone 152475 (TRAV12-2, TRAJ36)
CAVRIGANDLFF

SEQ ID NO: 304950 - protein, 16 aa, Homo sapiens
  CDR3 for beta chain variable domain of TCR clone 152475 (TRBV18, TRBJ2-7)
CASSPLPGGLSYEQYF

SEQ ID NO: 304951 - protein, 14 aa, Homo sapiens
  CDR3 for alpha chain variable domain of TCR clone 152476 (TRAV12-1, TRAJ12)
CVVTRMDNSYKLIF

SEQ ID NO: 304952 - protein, 15 aa, Homo sapiens
  CDR3 for beta chain variable domain of TCR clone 152476 (TRBV20-1, TRBJ1-1)
CSARGGGKLKLSLDK

SEQ ID NO: 304953 - protein, 13 aa, Homo sapiens
  CDR3 for alpha chain variable domain of TCR clone 152477 (TRAV21, TRAJ27)
CAALNTNTGKSTF

SEQ ID NO: 304954 - protein, 17 aa, Homo sapiens
  CDR3 for beta chain variable domain of TCR clone 152477 (TRBV13, TRBJ2-3)
CASSLSRVAGGRNTQYF

SEQ ID NO: 304955 - protein, 12 aa, Homo sapiens
  CDR3 for alpha chain variable domain of TCR clone 152478 (TRAV35, TRAJ39)
LAPNNAGNMLTF

SEQ ID NO: 304956 - protein, 14 aa, Homo sapiens
  CDR3 for beta chain variable domain of TCR clone 152478 (TRBV7-3, TRBJ2-1)
CASSLAGGTNEQFF

SEQ ID NO: 304957 - protein, 14 aa, Homo sapiens
  CDR3 for alpha chain variable domain of TCR clone 152479 (TRAV12-1, TRAJ17)
CVVNYKAAGNKLTF

SEQ ID NO: 304958 - protein, 11 aa, Homo sapiens
  CDR3 for beta chain variable domain of TCR clone 152479 (TRBV6-3, TRBJ2-3)
CATGQADTQYF

SEQ ID NO: 304959 - protein, 13 aa, Homo sapiens
  CDR3 for alpha chain variable domain of TCR clone 152480 (TRAV27, TRAJ41)
CAGEGNSGYALNF

SEQ ID NO: 304960 - protein, 14 aa, Homo sapiens
  CDR3 for beta chain variable domain of TCR clone 152480 (TRBV7-2, TRBJ2-2)
CASRGQGAAGELFF

SEQ ID NO: 304961 - protein, 11 aa, Homo sapiens
  CDR3 for alpha chain variable domain of TCR clone 152481 (TRAV21, TRAJ11)
CAVNGYSTLTF

SEQ ID NO: 304962 - protein, 16 aa, Homo sapiens
  CDR3 for beta chain variable domain of TCR clone 152481 (TRBV4-3, TRBJ2-2)
CASSNLQGSGTGELFF

SEQ ID NO: 304963 - protein, 13 aa, Homo sapiens
  CDR3 for alpha chain variable domain of TCR clone 152482 (TRAV2, TRAJ23)
CAVMGNQGGKLIF

SEQ ID NO: 304964 - protein, 14 aa, Homo sapiens
  CDR3 for beta chain variable domain of TCR clone 152482 (TRBV11-2, TRBJ2-1)
CASSRATFYNDQFF

SEQ ID NO: 304965 - protein, 16 aa, Homo sapiens
  CDR3 for alpha chain variable domain of TCR clone 152483 (TRAV36/DV7, TRAJ30)
CAVETYGLDRDDKIIF

SEQ ID NO: 304966 - protein, 14 aa, Homo sapiens
  CDR3 for beta chain variable domain of TCR clone 152483 (TRBV12-5, TRBJ2-5)
CASGSRTHQETQYF

SEQ ID NO: 304967 - protein, 16 aa, Homo sapiens
  CDR3 for alpha chain variable domain of TCR clone 152484 (TRAV26-1, TRAJ23)
CIVRPRFYNQGGKLIF

SEQ ID NO: 304968 - protein, 13 aa, Homo sapiens
  CDR3 for beta chain variable domain of TCR clone 152484 (TRBV10-3, TRBJ2-7)
CASKLAVNYEQYF

SEQ ID NO: 304969 - protein, 16 aa, Homo sapiens
  CDR3 for alpha chain variable domain of TCR clone 152485 (TRAV23/DV6, TRAJ9)
CAASIGGNTGGFKTIF

SEQ ID NO: 304970 - protein, 15 aa, Homo sapiens
  CDR3 for beta chain variable domain of TCR clone 152485 (TRBV28, TRBJ2-1)
CASSIIAGGRSEQFF

SEQ ID NO: 304971 - protein, 14 aa, Homo sapiens
  CDR3 for alpha chain variable domain of TCR clone 152486 (TRAV14/DV4, TRAJ32)
SNVLPLTPTNKLIF

SEQ ID NO: 304972 - protein, 17 aa, Homo sapiens
  CDR3 for beta chain variable domain of TCR clone 152486 (TRBV13, TRBJ2-3)
CASSLSRVAGGRDTQYF

SEQ ID NO: 304973 - protein, 17 aa, Homo sapiens
  CDR3 for alpha chain variable domain of TCR clone 152487 (TRAV36/DV7, TRAJ52)
CAVAQRAGGTSYGKLTF

SEQ ID NO: 304974 - protein, 14 aa, Homo sapiens
  CDR3 for beta chain variable domain of TCR clone 152487 (TRBV7-9, TRBJ2-1)
CASSPRDSLYEQFF

SEQ ID NO: 304975 - protein, 14 aa, Homo sapiens
  CDR3 for alpha chain variable domain of TCR clone 152488 (TRAV17, TRAJ35)
CATDRPGFGNVLHC

SEQ ID NO: 304976 - protein, 15 aa, Homo sapiens
  CDR3 for beta chain variable domain of TCR clone 152488 (TRBV28, TRBJ2-5)
CASSSGRVIQETQCF

SEQ ID NO: 304977 - protein, 12 aa, Homo sapiens
  CDR3 for alpha chain variable domain of TCR clone 152489 (TRAV17, TRAJ53)
CAGGGSNYKLRF

SEQ ID NO: 304978 - protein, 16 aa, Homo sapiens
  CDR3 for beta chain variable domain of TCR clone 152489 (TRBV11-2, TRBJ2-3)
CASSFQGRGALDTQYF

SEQ ID NO: 304979 - protein, 14 aa, Homo sapiens
  CDR3 for alpha chain variable domain of TCR clone 152490 (TRAV12-2, TRAJ45)
CAVNKGGGTDGLTF

SEQ ID NO: 304980 - protein, 14 aa, Homo sapiens
  CDR3 for beta chain variable domain of TCR clone 152490 (TRBV20-1, TRBJ1-1)
CSAMGGTANTEAFF

SEQ ID NO: 304981 - protein, 18 aa, Homo sapiens
  CDR3 for alpha chain variable domain of TCR clone 152491 (TRAV9-2, TRAJ52)
CALSRDNAGGTSYGKLTF

SEQ ID NO: 304982 - protein, 13 aa, Homo sapiens
  CDR3 for beta chain variable domain of TCR clone 152491 (TRBV7-9, TRBJ1-2)
CASSLKQNYGYTF

SEQ ID NO: 304983 - protein, 13 aa, Homo sapiens
  CDR3 for alpha chain variable domain of TCR clone 152492 (TRAV23/DV6, TRAJ58)
CASSEIGGSRLPV

SEQ ID NO: 304984 - protein, 13 aa, Homo sapiens
  CDR3 for beta chain variable domain of TCR clone 152492 (TRBV3-1, TRBJ1-5)
CASSQFGDQPQHF

SEQ ID NO: 304985 - protein, 15 aa, Homo sapiens
  CDR3 for alpha chain variable domain of TCR clone 152493 (TRAV13-1, TRAJ27)
CAARELNTNAGKSTF

SEQ ID NO: 304986 - protein, 12 aa, Homo sapiens
  CDR3 for beta chain variable domain of TCR clone 152493 (TRBV24-1, TRBJ2-3)
CATSDSTDTQYF

SEQ ID NO: 304987 - protein, 16 aa, Homo sapiens
  CDR3 for alpha chain variable domain of TCR clone 152494 (TRAV3, TRAJ37)
CAVRRHGSGNTGKLIF

SEQ ID NO: 304988 - protein, 14 aa, Homo sapiens
  CDR3 for beta chain variable domain of TCR clone 152494 (TRBV25-1, TRBJ1-1)
CASTHLGGNTEAFF

SEQ ID NO: 304989 - protein, 12 aa, Homo sapiens
  CDR3 for alpha chain variable domain of TCR clone 152495 (TRAV10, TRAJ31)
CVVRMNNARLMF

SEQ ID NO: 304990 - protein, 12 aa, Homo sapiens
  CDR3 for beta chain variable domain of TCR clone 152495 (TRBV7-9, TRBJ1-1)
CASSLVRGEAFF

SEQ ID NO: 304991 - protein, 16 aa, Homo sapiens
  CDR3 for alpha chain variable domain of TCR clone 152496 (TRAV3, TRAJ21)
CAVRDIERGNFNKFYF

SEQ ID NO: 304992 - protein, 16 aa, Homo sapiens
  CDR3 for beta chain variable domain of TCR clone 152496 (TRBV12-4, TRBJ1-5)
CASSRPVGGSKQPQHF

SEQ ID NO: 304993 - protein, 14 aa, Homo sapiens
  CDR3 for alpha chain variable domain of TCR clone 152497 (TRAV8-3, TRAJ9)
CAVVYNTGGFKTIF

SEQ ID NO: 304994 - protein, 16 aa, Homo sapiens
  CDR3 for beta chain variable domain of TCR clone 152497 (TRBV6-1, TRBJ2-5)
CASSETLDRGAETQYF

SEQ ID NO: 304995 - protein, 15 aa, Homo sapiens
  CDR3 for alpha chain variable domain of TCR clone 152498 (TRAV3, TRAJ13)
CAVRVYSGGYKKVTF

SEQ ID NO: 304996 - protein, 15 aa, Homo sapiens
  CDR3 for beta chain variable domain of TCR clone 152498 (TRBV5-7, TRBJ1-2)
CASSLGVAANYGYTF

SEQ ID NO: 304997 - protein, 11 aa, Homo sapiens
  CDR3 for alpha chain variable domain of TCR clone 152499 (TRAV4, TRAJ23)
CPVAPGGKLTF

SEQ ID NO: 304998 - protein, 15 aa, Homo sapiens
  CDR3 for beta chain variable domain of TCR clone 152499 (TRBV7-2, TRBJ2-1)
CASSFQADEYNEQFF

SEQ ID NO: 304999 - protein, 14 aa, Homo sapiens
  CDR3 for alpha chain variable domain of TCR clone 152500 (TRAV12-1, TRAJ38)
CGELKAGNNRKLIW

SEQ ID NO: 305000 - protein, 12 aa, Homo sapiens
  CDR3 for beta chain variable domain of TCR clone 152500 (TRBV11-2, TRBJ2-2)
CASSLGGGELFF

SEQ ID NO: 305001 - protein, 13 aa, Homo sapiens
  CDR3 for alpha chain variable domain of TCR clone 152501 (TRAV35, TRAJ42)
CAGFPGSQGNLIF

SEQ ID NO: 305002 - protein, 15 aa, Homo sapiens
  CDR3 for beta chain variable domain of TCR clone 152501 (TRBV12-4, TRBJ2-2)
CASRFKSANTGELFF

SEQ ID NO: 305003 - protein, 12 aa, Homo sapiens
  CDR3 for alpha chain variable domain of TCR clone 152502 (TRAV12-3, TRAJ17)
CAMTLTGNKLTF

SEQ ID NO: 305004 - protein, 19 aa, Homo sapiens
  CDR3 for beta chain variable domain of TCR clone 152502 (TRBV4-1, TRBJ2-7)
CASSPVAGGGRAVLRAGHQ

SEQ ID NO: 305005 - protein, 12 aa, Homo sapiens
  CDR3 for alpha chain variable domain of TCR clone 152503 (TRAV8-3, TRAJ26)
CSGDNYGQNFVF

SEQ ID NO: 305006 - protein, 18 aa, Homo sapiens
  CDR3 for beta chain variable domain of TCR clone 152503 (TRBV12-4, TRBJ2-2)
CASSLVAGTRGRTGELFF

SEQ ID NO: 305007 - protein, 17 aa, Homo sapiens
  CDR3 for alpha chain variable domain of TCR clone 152504 (TRAV3, TRAJ6)
CAVRDGPRAGGSYIPTF

SEQ ID NO: 305008 - protein, 16 aa, Homo sapiens
  CDR3 for beta chain variable domain of TCR clone 152504 (TRBV7-2, TRBJ2-7)
CASSPKTSFSSSTSGR

SEQ ID NO: 305009 - protein, 11 aa, Homo sapiens
  CDR3 for alpha chain variable domain of TCR clone 152505 (TRAV21, TRAJ34)
CAVTNTDKLIF

SEQ ID NO: 305010 - protein, 17 aa, Homo sapiens
  CDR3 for beta chain variable domain of TCR clone 152505 (TRBV20-1, TRBJ2-1)
CSDRSPSGGPPTMSSSS

SEQ ID NO: 305011 - protein, 12 aa, Homo sapiens
  CDR3 for alpha chain variable domain of TCR clone 152506 (TRAV29/DV5, TRAJ43)
CAAPYNNNDMRF

SEQ ID NO: 305012 - protein, 15 aa, Homo sapiens
  CDR3 for beta chain variable domain of TCR clone 152506 (TRBV18, TRBJ2-1)
CASSPPSASYNEQFF

SEQ ID NO: 305013 - protein, 19 aa, Homo sapiens
  CDR3 for alpha chain variable domain of TCR clone 152507 (TRAV4, TRAJ3)
PRVSLSDTAVSLSASKIIF

SEQ ID NO: 305014 - protein, 17 aa, Homo sapiens
  CDR3 for beta chain variable domain of TCR clone 152507 (TRBV6-5, TRBJ2-3)
CASSYTTGTGRGDTQYF

SEQ ID NO: 305015 - protein, 13 aa, Homo sapiens
  CDR3 for alpha chain variable domain of TCR clone 152508 (TRAV3, TRAJ21)
CAVREPDFNKFYF

SEQ ID NO: 305016 - protein, 12 aa, Homo sapiens
  CDR3 for beta chain variable domain of TCR clone 152508 (TRBV11-2, TRBJ2-5)
CASSLGQETQYF

SEQ ID NO: 305017 - protein, 11 aa, Homo sapiens
  CDR3 for alpha chain variable domain of TCR clone 152509 (TRAV2, TRAJ13)
CASGGYQKVTF

SEQ ID NO: 305018 - protein, 15 aa, Homo sapiens
  CDR3 for beta chain variable domain of TCR clone 152509 (TRBV12-4, TRBJ2-1)
CASSLLATGNNEQFF

SEQ ID NO: 305019 - protein, 11 aa, Homo sapiens
  CDR3 for alpha chain variable domain of TCR clone 152510 (TRAV3, TRAJ21)
CAVGNFNKFYF

SEQ ID NO: 305020 - protein, 15 aa, Homo sapiens
  CDR3 for beta chain variable domain of TCR clone 152510 (TRBV5-1, TRBJ2-1)
CASSLVANAYNEQFF

SEQ ID NO: 305021 - protein, 19 aa, Homo sapiens
  CDR3 for alpha chain variable domain of TCR clone 152511 (TRAV21, TRAJ41)
CAVREFRVCTQLRQRHLAV

SEQ ID NO: 305022 - protein, 15 aa, Homo sapiens
  CDR3 for beta chain variable domain of TCR clone 152511 (TRBV18, TRBJ1-5)
CASSPQARSNQLQHF

SEQ ID NO: 305023 - protein, 14 aa, Homo sapiens
  CDR3 for alpha chain variable domain of TCR clone 152512 (TRAV8-3, TRAJ4)
CAVGAAGGYNKLIF

SEQ ID NO: 305024 - protein, 15 aa, Homo sapiens
  CDR3 for beta chain variable domain of TCR clone 152512 (TRBV6-5, TRBJ2-1)
CASSYDAGPGNEQFF

SEQ ID NO: 305025 - protein, 13 aa, Homo sapiens
  CDR3 for alpha chain variable domain of TCR clone 152513 (TRAV30, TRAJ24)
CGTVTDSWGKLQF

SEQ ID NO: 305026 - protein, 14 aa, Homo sapiens
  CDR3 for beta chain variable domain of TCR clone 152513 (TRBV6-3, TRBJ2-2)
CASTYTPDNGELFF

SEQ ID NO: 305027 - protein, 15 aa, Homo sapiens
  CDR3 for alpha chain variable domain of TCR clone 152514 (TRAV17, TRAJ57)
CATGPSQGGSEKLVF

SEQ ID NO: 305028 - protein, 15 aa, Homo sapiens
  CDR3 for beta chain variable domain of TCR clone 152514 (TRBV9, TRBJ1-6)
CASSVAGTGDSPLHI

SEQ ID NO: 305029 - protein, 14 aa, Homo sapiens
  CDR3 for alpha chain variable domain of TCR clone 152515 (TRAV1-2, TRAJ8)
CAVREDTGFKKLVF

SEQ ID NO: 305030 - protein, 12 aa, Homo sapiens
  CDR3 for beta chain variable domain of TCR clone 152515 (TRBV2, TRBJ2-1)
CAYGPPGNEQFF

SEQ ID NO: 305031 - protein, 13 aa, Homo sapiens
  CDR3 for alpha chain variable domain of TCR clone 152516 (TRAV3, TRAJ27)
CAVRPLGAVKSTF

SEQ ID NO: 305032 - protein, 13 aa, Homo sapiens
  CDR3 for beta chain variable domain of TCR clone 152516 (TRBV7-9, TRBJ2-3)
CASSPGSTDTQYF

SEQ ID NO: 305033 - protein, 15 aa, Homo sapiens
  CDR3 for alpha chain variable domain of TCR clone 152517 (TRAV2, TRAJ32)
CVVANYGGATNKLIF

SEQ ID NO: 305034 - protein, 15 aa, Homo sapiens
  CDR3 for beta chain variable domain of TCR clone 152517 (TRBV7-7, TRBJ2-5)
CASSQLERAEETQYF

SEQ ID NO: 305035 - protein, 16 aa, Homo sapiens
  CDR3 for alpha chain variable domain of TCR clone 152518 (TRAV23/DV6, TRAJ9)
CAASIGGNTGGFKTIF

SEQ ID NO: 305036 - protein, 15 aa, Homo sapiens
  CDR3 for beta chain variable domain of TCR clone 152518 (TRBV19, TRBJ1-1)
CASSKTGSTNTEAFF

SEQ ID NO: 305037 - protein, 12 aa, Homo sapiens
  CDR3 for alpha chain variable domain of TCR clone 152519 (TRAV13-1, TRAJ15)
CAASQAGIALIF

SEQ ID NO: 305038 - protein, 13 aa, Homo sapiens
  CDR3 for beta chain variable domain of TCR clone 152519 (TRBV10-3, TRBJ1-2)
CAISERDSYGYTF

SEQ ID NO: 305039 - protein, 14 aa, Homo sapiens
  CDR3 for alpha chain variable domain of TCR clone 152520 (TRAV1-2, TRAJ16)
CAVNRFSDGQKLLF

SEQ ID NO: 305040 - protein, 19 aa, Homo sapiens
  CDR3 for beta chain variable domain of TCR clone 152520 (TRBV2, TRBJ2-7)
CASSDDETSGRANDYEQYF

SEQ ID NO: 305041 - protein, 11 aa, Homo sapiens
  CDR3 for alpha chain variable domain of TCR clone 152521 (TRAV9-2, TRAJ13)
CAQGGYQKVTF

SEQ ID NO: 305042 - protein, 13 aa, Homo sapiens
  CDR3 for beta chain variable domain of TCR clone 152521 (TRBV7-3, TRBJ1-1)
CASSQDWGAEAFF

SEQ ID NO: 305043 - protein, 12 aa, Homo sapiens
  CDR3 for alpha chain variable domain of TCR clone 152522 (TRAV35, TRAJ49)
CAGWNTGNSSIL

SEQ ID NO: 305044 - protein, 16 aa, Homo sapiens
  CDR3 for beta chain variable domain of TCR clone 152522 (TRBV5-1, TRBJ2-2)
CASSLWDTTNTGELFF

SEQ ID NO: 305045 - protein, 16 aa, Homo sapiens
  CDR3 for alpha chain variable domain of TCR clone 152523 (TRAV8-1, TRAJ18)
CAVNAGRGSTLGRLYF

SEQ ID NO: 305046 - protein, 11 aa, Homo sapiens
  CDR3 for beta chain variable domain of TCR clone 152523 (TRBV7-9, TRBJ2-5)
CASSLSATQYF

SEQ ID NO: 305047 - protein, 14 aa, Homo sapiens
  CDR3 for alpha chain variable domain of TCR clone 152524 (TRAV13-1, TRAJ44)
CAAKATGTASKLTF

SEQ ID NO: 305048 - protein, 16 aa, Homo sapiens
  CDR3 for beta chain variable domain of TCR clone 152524 (TRBV15, TRBJ1-2)
CATSRVPRTGGGGYTF

SEQ ID NO: 305049 - protein, 14 aa, Homo sapiens
  CDR3 for alpha chain variable domain of TCR clone 152525 (TRAV35, TRAJ22)
CAGLRPGSARQLTF

SEQ ID NO: 305050 - protein, 15 aa, Homo sapiens
  CDR3 for beta chain variable domain of TCR clone 152525 (TRBV12-4, TRBJ2-5)
CASSPPTGLQEIQYF

SEQ ID NO: 305051 - protein, 16 aa, Homo sapiens
  CDR3 for alpha chain variable domain of TCR clone 152526 (TRAV8-3, TRAJ44)
CAVGTLMTGTASKLTF

SEQ ID NO: 305052 - protein, 13 aa, Homo sapiens
  CDR3 for beta chain variable domain of TCR clone 152526 (TRBV11-2, TRBJ2-1)
CASSLRLAHEQFF

SEQ ID NO: 305053 - protein, 14 aa, Homo sapiens
  CDR3 for alpha chain variable domain of TCR clone 152527 (TRAV12-2, TRAJ17)
CAVLFKAAGNKLTF

SEQ ID NO: 305054 - protein, 11 aa, Homo sapiens
  CDR3 for beta chain variable domain of TCR clone 152527 (TRBV29-1, TRBJ2-5)
CSEDRTETQYF

SEQ ID NO: 305055 - protein, 12 aa, Homo sapiens
  CDR3 for alpha chain variable domain of TCR clone 152528 (TRAV12-2, TRAJ43)
YAVNVNNNDMRF

SEQ ID NO: 305056 - protein, 14 aa, Homo sapiens
  CDR3 for beta chain variable domain of TCR clone 152528 (TRBV12-5, TRBJ2-5)
CASGSRTHQETQYF

SEQ ID NO: 305057 - protein, 15 aa, Homo sapiens
  CDR3 for alpha chain variable domain of TCR clone 152529 (TRAV4, TRAJ39)
CLVGPNNNAGNMLTF

SEQ ID NO: 305058 - protein, 16 aa, Homo sapiens
  CDR3 for beta chain variable domain of TCR clone 152529 (TRBV13, TRBJ2-2)
CASSPRTGEHTVELFF

SEQ ID NO: 305059 - protein, 15 aa, Homo sapiens
  CDR3 for alpha chain variable domain of TCR clone 152530 (TRAV29/DV5, TRAJ29)
CAASERSSGNTPLVF

SEQ ID NO: 305060 - protein, 16 aa, Homo sapiens
  CDR3 for beta chain variable domain of TCR clone 152530 (TRBV12-4, TRBJ1-5)
CASSRPVGGSNQPQHF

SEQ ID NO: 305061 - protein, 14 aa, Homo sapiens
  CDR3 for alpha chain variable domain of TCR clone 152531 (TRAV2, TRAJ41)
CAVGTSTSGYALNF

SEQ ID NO: 305062 - protein, 13 aa, Homo sapiens
  CDR3 for beta chain variable domain of TCR clone 152531 (TRBV4-1, TRBJ2-1)
CASSQEVQYEQFF

SEQ ID NO: 305063 - protein, 18 aa, Homo sapiens
  CDR3 for alpha chain variable domain of TCR clone 152532 (TRAV21, TRAJ45)
CAVRPSPAGGTSYGKLTF

SEQ ID NO: 305064 - protein, 14 aa, Homo sapiens
  CDR3 for beta chain variable domain of TCR clone 152532 (TRBV25-1, TRBJ1-1)
CASTHLGGNTEAFF

SEQ ID NO: 305065 - protein, 13 aa, Homo sapiens
  CDR3 for alpha chain variable domain of TCR clone 152533 (TRAV13-2, TRAJ13)
CAERPGGYQKVTF

SEQ ID NO: 305066 - protein, 13 aa, Homo sapiens
  CDR3 for beta chain variable domain of TCR clone 152533 (TRBV19, TRBJ1-2)
CASSVPGQDGYTF

SEQ ID NO: 305067 - protein, 12 aa, Homo sapiens
  CDR3 for alpha chain variable domain of TCR clone 152534 (TRAV12-2, TRAJ10)
WGVTGGGNKLTF

SEQ ID NO: 305068 - protein, 14 aa, Homo sapiens
  CDR3 for beta chain variable domain of TCR clone 152534 (TRBV7-9, TRBJ2-1)
CASSLVVGADEQFF

SEQ ID NO: 305069 - protein, 14 aa, Homo sapiens
  CDR3 for alpha chain variable domain of TCR clone 152535 (TRAV8-4, TRAJ57)
CAVSTQGGSEKLVF

SEQ ID NO: 305070 - protein, 15 aa, Homo sapiens
  CDR3 for beta chain variable domain of TCR clone 152535 (TRBV6-1, TRBJ1-1)
CASRRGEGQLSEAFF

SEQ ID NO: 305071 - protein, 15 aa, Homo sapiens
  CDR3 for alpha chain variable domain of TCR clone 152536 (TRAV3, TRAJ4)
CAVRDGTGGYNKLIF

SEQ ID NO: 305072 - protein, 13 aa, Homo sapiens
  CDR3 for beta chain variable domain of TCR clone 152536 (TRBV7-2, TRBJ2-4)
CASSREHANIQYF

SEQ ID NO: 305073 - protein, 14 aa, Homo sapiens
  CDR3 for alpha chain variable domain of TCR clone 152537 (TRAV12-2, TRAJ44)
CAAKATGTASKLTF

SEQ ID NO: 305074 - protein, 17 aa, Homo sapiens
  CDR3 for beta chain variable domain of TCR clone 152537 (TRBV7-3, TRBJ2-3)
RASSLMKRMRGADTQYF

SEQ ID NO: 305075 - protein, 11 aa, Homo sapiens
  CDR3 for alpha chain variable domain of TCR clone 152538 (TRAV12-2, TRAJ39)
CAVNNMLTFGG

SEQ ID NO: 305076 - protein, 15 aa, Homo sapiens
  CDR3 for beta chain variable domain of TCR clone 152538 (TRBV6-5, TRBJ2-7)
CASSRTSGFSYEQYF

SEQ ID NO: 305077 - protein, 18 aa, Homo sapiens
  CDR3 for alpha chain variable domain of TCR clone 152539 (TRAV13-1, TRAJ52)
CAAKNPNAGGTSYGRLTF

SEQ ID NO: 305078 - protein, 15 aa, Homo sapiens
  CDR3 for beta chain variable domain of TCR clone 152539 (TRBV5-1, TRBJ2-1)
CASSPPRAPYNEQFF

SEQ ID NO: 305079 - protein, 16 aa, Homo sapiens
  CDR3 for alpha chain variable domain of TCR clone 152540 (TRAV14/DV4, TRAJ21)
CAMREGPENNFNKFYF

SEQ ID NO: 305080 - protein, 12 aa, Homo sapiens
  CDR3 for beta chain variable domain of TCR clone 152540 (TRBV29-1, TRBJ2-2)
CSVDKHTGELFF

SEQ ID NO: 305081 - protein, 18 aa, Homo sapiens
  CDR3 for alpha chain variable domain of TCR clone 152541 (TRAV26-1, TRAJ22)
CIVRVALISSGSARQLTL

SEQ ID NO: 305082 - protein, 13 aa, Homo sapiens
  CDR3 for beta chain variable domain of TCR clone 152541 (TRBV13, TRBJ2-5)
CASSPEVGETQYF

SEQ ID NO: 305083 - protein, 11 aa, Homo sapiens
  CDR3 for alpha chain variable domain of TCR clone 152542 (TRAV2, TRAJ33)
CAVDSNYQLIW

SEQ ID NO: 305084 - protein, 16 aa, Homo sapiens
  CDR3 for beta chain variable domain of TCR clone 152542 (TRBV20-1, TRBJ1-2)
CSASMGQGVANYGYTF

SEQ ID NO: 305085 - protein, 11 aa, Homo sapiens
  CDR3 for alpha chain variable domain of TCR clone 152543 (TRAV2, TRAJ33)
CAVDSNDQLIC

SEQ ID NO: 305086 - protein, 15 aa, Homo sapiens
  CDR3 for beta chain variable domain of TCR clone 152543 (TRBV19, TRBJ1-1)
CASTSGQIQNTEAFF

SEQ ID NO: 305087 - protein, 14 aa, Homo sapiens
  CDR3 for alpha chain variable domain of TCR clone 152544 (TRAV1-2, TRAJ16)
CAVNRFSDGKKLLF

SEQ ID NO: 305088 - protein, 15 aa, Homo sapiens
  CDR3 for beta chain variable domain of TCR clone 152544 (TRBV20-1, TRBJ2-7)
CSARREAGAPREQYF

SEQ ID NO: 305089 - protein, 13 aa, Homo sapiens
  CDR3 for alpha chain variable domain of TCR clone 152545 (TRAV13-2, TRAJ13)
CAETAGGYQKVTF

SEQ ID NO: 305090 - protein, 15 aa, Homo sapiens
  CDR3 for beta chain variable domain of TCR clone 152545 (TRBV20-1, TRBJ1-5)
CSARVGRVVSQPQHF

SEQ ID NO: 305091 - protein, 20 aa, Homo sapiens
  CDR3 for alpha chain variable domain of TCR clone 152546 (TRAV12-2, TRAJ52)
SPVIQPPTSFRNTSYGKLTF

SEQ ID NO: 305092 - protein, 11 aa, Homo sapiens
  CDR3 for beta chain variable domain of TCR clone 152546 (TRBV11-2, TRBJ2-2)
CASSLPGELFF

SEQ ID NO: 305093 - protein, 12 aa, Homo sapiens
  CDR3 for alpha chain variable domain of TCR clone 152547 (TRAV8-3, TRAJ26)
CAGDNYGQNFVL

SEQ ID NO: 305094 - protein, 12 aa, Homo sapiens
  CDR3 for beta chain variable domain of TCR clone 152547 (TRBV11-2, TRBJ2-2)
CASSLGGGELFF

SEQ ID NO: 305095 - protein, 15 aa, Homo sapiens
  CDR3 for alpha chain variable domain of TCR clone 152548 (TRAV8-2, TRAJ24)
CVVSDRTDSWGKLQF

SEQ ID NO: 305096 - protein, 13 aa, Homo sapiens
  CDR3 for beta chain variable domain of TCR clone 152548 (TRBV7-2, TRBJ2-7)
CASSSPSGGEQYF

SEQ ID NO: 305097 - protein, 14 aa, Homo sapiens
  CDR3 for alpha chain variable domain of TCR clone 152549 (TRAV12-2, TRAJ13)
CAVKKTGGYQKVTF

SEQ ID NO: 305098 - protein, 14 aa, Homo sapiens
  CDR3 for beta chain variable domain of TCR clone 152549 (TRBV7-2, TRBJ2-5)
CASSFTQGQETQYF

SEQ ID NO: 305099 - protein, 14 aa, Homo sapiens
  CDR3 for alpha chain variable domain of TCR clone 152550 (TRAV38-1, TRAJ40)
CALRPTSGTYKYIF

SEQ ID NO: 305100 - protein, 14 aa, Homo sapiens
  CDR3 for beta chain variable domain of TCR clone 152550 (TRBV7-7, TRBJ2-7)
CASSLGRGVGEQYF

SEQ ID NO: 305101 - protein, 12 aa, Homo sapiens
  CDR3 for alpha chain variable domain of TCR clone 152551 (TRAV12-3, TRAJ17)
CAMTLTGNKLTF

SEQ ID NO: 305102 - protein, 16 aa, Homo sapiens
  CDR3 for beta chain variable domain of TCR clone 152551 (TRBV4-2, TRBJ1-1)
CASRPLDGGGDTEAFF

SEQ ID NO: 305103 - protein, 13 aa, Homo sapiens
  CDR3 for alpha chain variable domain of TCR clone 152552 (TRAV21, TRAJ27)
CAARPGNAGKSTF

SEQ ID NO: 305104 - protein, 13 aa, Homo sapiens
  CDR3 for beta chain variable domain of TCR clone 152552 (TRBV7-9, TRBJ2-5)
CASLPSGRETQYF

SEQ ID NO: 305105 - protein, 14 aa, Homo sapiens
  CDR3 for alpha chain variable domain of TCR clone 152553 (TRAV8-4, TRAJ9)
CAVRINTGGFKTIF

SEQ ID NO: 305106 - protein, 15 aa, Homo sapiens
  CDR3 for beta chain variable domain of TCR clone 152553 (TRBV3-1, TRBJ2-1)
CASSQDYTPRGEQFF

SEQ ID NO: 305107 - protein, 14 aa, Homo sapiens
  CDR3 for alpha chain variable domain of TCR clone 152554 (TRAV16, TRAJ15)
CSLSGPQAGTALLF

SEQ ID NO: 305108 - protein, 12 aa, Homo sapiens
  CDR3 for beta chain variable domain of TCR clone 152554 (TRBV18, TRBJ2-5)
CASSPSKETQYF

SEQ ID NO: 305109 - protein, 14 aa, Homo sapiens
  CDR3 for alpha chain variable domain of TCR clone 152555 (TRAV1-2, TRAJ8)
CAVREDTGFQKLVF

SEQ ID NO: 305110 - protein, 17 aa, Homo sapiens
  CDR3 for beta chain variable domain of TCR clone 152555 (TRBV4-1, TRBJ2-5)
CASSQDLTGGPIETQYF

SEQ ID NO: 305111 - protein, 14 aa, Homo sapiens
  CDR3 for alpha chain variable domain of TCR clone 152556 (TRAV3, TRAJ9)
CAVRLNTGGFKTIF

SEQ ID NO: 305112 - protein, 11 aa, Homo sapiens
  CDR3 for beta chain variable domain of TCR clone 152556 (TRBV7-2, TRBJ2-1)
LASGRVNEQFF

SEQ ID NO: 305113 - protein, 13 aa, Homo sapiens
  CDR3 for alpha chain variable domain of TCR clone 152557 (TRAV8-6, TRAJ41)
CAVSENSGYALNF

SEQ ID NO: 305114 - protein, 16 aa, Homo sapiens
  CDR3 for beta chain variable domain of TCR clone 152557 (TRBV27, TRBJ2-2)
CASSFRGLFRTGELFF

SEQ ID NO: 305115 - protein, 15 aa, Homo sapiens
  CDR3 for alpha chain variable domain of TCR clone 152558 (TRAV25, TRAJ10)
RAGPLLTGGGNKLTF

SEQ ID NO: 305116 - protein, 15 aa, Homo sapiens
  CDR3 for beta chain variable domain of TCR clone 152558 (TRBV12-5, TRBJ2-2)
CASGRLGGNTGELFF

SEQ ID NO: 305117 - protein, 14 aa, Homo sapiens
  CDR3 for alpha chain variable domain of TCR clone 152559 (TRAV8-2, TRAJ5)
CVVDMDTGRRALTF

SEQ ID NO: 305118 - protein, 15 aa, Homo sapiens
  CDR3 for beta chain variable domain of TCR clone 152559 (TRBV20-1, TRBJ2-7)
CSARDRVSGMDEQYF

SEQ ID NO: 305119 - protein, 15 aa, Homo sapiens
  CDR3 for alpha chain variable domain of TCR clone 152560 (TRAV12-3, TRAJ11)
CAMSEENSRYSTLTF

SEQ ID NO: 305120 - protein, 13 aa, Homo sapiens
  CDR3 for beta chain variable domain of TCR clone 152560 (TRBV12-4, TRBJ2-1)
CASSFHSGSEQFF

SEQ ID NO: 305121 - protein, 10 aa, Homo sapiens
  CDR3 for alpha chain variable domain of TCR clone 152561 (TRAV16, TRAJ33)
CALHSNYQLM

SEQ ID NO: 305122 - protein, 15 aa, Homo sapiens
  CDR3 for beta chain variable domain of TCR clone 152561 (TRBV4-1, TRBJ2-7)
CASSQQGQGFDEQYF

SEQ ID NO: 305123 - protein, 13 aa, Homo sapiens
  CDR3 for alpha chain variable domain of TCR clone 152562 (TRAV1-2, TRAJ36)
CAVDQTGANNLFF

SEQ ID NO: 305124 - protein, 12 aa, Homo sapiens
  CDR3 for beta chain variable domain of TCR clone 152562 (TRBV11-2, TRBJ2-2)
CASSLGGGELFF

SEQ ID NO: 305125 - protein, 14 aa, Homo sapiens
  CDR3 for alpha chain variable domain of TCR clone 152563 (TRAV12-2, TRAJ17)
CAVLFNAAGNELTF

SEQ ID NO: 305126 - protein, 14 aa, Homo sapiens
  CDR3 for beta chain variable domain of TCR clone 152563 (TRBV7-8, TRBJ2-5)
CASSATGGQETQYF

SEQ ID NO: 305127 - protein, 13 aa, Homo sapiens
  CDR3 for alpha chain variable domain of TCR clone 152564 (TRAV21, TRAJ15)
CAVANQAGTALIF

SEQ ID NO: 305128 - protein, 13 aa, Homo sapiens
  CDR3 for beta chain variable domain of TCR clone 152564 (TRBV7-2, TRBJ2-4)
CASSREHANIQYF

SEQ ID NO: 305129 - protein, 14 aa, Homo sapiens
  CDR3 for alpha chain variable domain of TCR clone 152565 (TRAV17, TRAJ22)
CATSPSCSARQLTF

SEQ ID NO: 305130 - protein, 13 aa, Homo sapiens
  CDR3 for beta chain variable domain of TCR clone 152565 (TRBV12-4, TRBJ1-2)
CASSLRQGKGDTF

SEQ ID NO: 305131 - protein, 16 aa, Homo sapiens
  CDR3 for alpha chain variable domain of TCR clone 152566 (TRAV4, TRAJ22)
GLVGDLYSGSARQLTF

SEQ ID NO: 305132 - protein, 16 aa, Homo sapiens
  CDR3 for beta chain variable domain of TCR clone 152566 (TRBV7-9, TRBJ2-1)
CASSDVAGGSYNEQFF

SEQ ID NO: 305133 - protein, 12 aa, Homo sapiens
  CDR3 for alpha chain variable domain of TCR clone 152567 (TRAV3, TRAJ20)
CAVRDGDYKLSF

SEQ ID NO: 305134 - protein, 17 aa, Homo sapiens
  CDR3 for beta chain variable domain of TCR clone 152567 (TRBV19, TRBJ2-7)
CASSISFYDSYPYEQYF

SEQ ID NO: 305135 - protein, 16 aa, Homo sapiens
  CDR3 for alpha chain variable domain of TCR clone 152568 (TRAV30, TRAJ24)
CGTEIVDAVSWWKFQF

SEQ ID NO: 305136 - protein, 14 aa, Homo sapiens
  CDR3 for beta chain variable domain of TCR clone 152568 (TRBV12-5, TRBJ2-5)
CASGSRTHQETQYF

SEQ ID NO: 305137 - protein, 14 aa, Homo sapiens
  CDR3 for alpha chain variable domain of TCR clone 152569 (TRAV12-3, TRAJ10)
SHLPLTGGGNKLTF

SEQ ID NO: 305138 - protein, 13 aa, Homo sapiens
  CDR3 for beta chain variable domain of TCR clone 152569 (TRBV14, TRBJ1-1)
CASSQEAGTEAFF

SEQ ID NO: 305139 - protein, 14 aa, Homo sapiens
  CDR3 for alpha chain variable domain of TCR clone 152570 (TRAV35, TRAJ22)
CAGLRPGSARQLTF

SEQ ID NO: 305140 - protein, 14 aa, Homo sapiens
  CDR3 for beta chain variable domain of TCR clone 152570 (TRBV13, TRBJ2-5)
CASSLGPRGETQYF

SEQ ID NO: 305141 - protein, 22 aa, Homo sapiens
  CDR3 for alpha chain variable domain of TCR clone 152571 (TRAV4, )
CLVGPHNYDIQNPDPAVYQLRD

SEQ ID NO: 305142 - protein, 17 aa, Homo sapiens
  CDR3 for beta chain variable domain of TCR clone 152571 (TRBV7-8, TRBJ2-6)
CASSAGTGGAGANVLTF

SEQ ID NO: 305143 - protein, 13 aa, Homo sapiens
  CDR3 for alpha chain variable domain of TCR clone 152572 (TRAV16, TRAJ54)
CALKVRGAQKLVF

SEQ ID NO: 305144 - protein, 13 aa, Homo sapiens
  CDR3 for beta chain variable domain of TCR clone 152572 (TRBV2, TRBJ1-2)
CASRETRSDGYTF

SEQ ID NO: 305145 - protein, 11 aa, Homo sapiens
  CDR3 for alpha chain variable domain of TCR clone 152573 (TRAV1-2, TRAJ31)
CAVNNNARIMF

SEQ ID NO: 305146 - protein, 18 aa, Homo sapiens
  CDR3 for beta chain variable domain of TCR clone 152573 (TRBV25-1, TRBJ1-2)
CASSGLQNGQGLIFGYTF

SEQ ID NO: 305147 - protein, 16 aa, Homo sapiens
  CDR3 for alpha chain variable domain of TCR clone 152574 (TRAV38-1, TRAJ45)
CAFMMGSGGGADGLTF

SEQ ID NO: 305148 - protein, 15 aa, Homo sapiens
  CDR3 for beta chain variable domain of TCR clone 152574 (TRBV20-1, TRBJ2-7)
CSAREGRDSLYEQYF

SEQ ID NO: 305149 - protein, 15 aa, Homo sapiens
  CDR3 for alpha chain variable domain of TCR clone 152575 (TRAV12-3, TRAJ6)
CAMSSTTGGSYIPTI

SEQ ID NO: 305150 - protein, 16 aa, Homo sapiens
  CDR3 for beta chain variable domain of TCR clone 152575 (TRBV20-1, TRBJ1-2)
CSASMGQGVANYGYTF

SEQ ID NO: 305151 - protein, 14 aa, Homo sapiens
  CDR3 for alpha chain variable domain of TCR clone 152576 (TRAV2, TRAJ9)
CAVEDRSGGFKTIF

SEQ ID NO: 305152 - protein, 12 aa, Homo sapiens
  CDR3 for beta chain variable domain of TCR clone 152576 (TRBV7-9, TRBJ1-5)
CASSPQGQPQHF

SEQ ID NO: 305153 - protein, 12 aa, Homo sapiens
  CDR3 for alpha chain variable domain of TCR clone 152577 (TRAV12-3, TRAJ17)
CAMTLTGNKLTF

SEQ ID NO: 305154 - protein, 18 aa, Homo sapiens
  CDR3 for beta chain variable domain of TCR clone 152577 (TRBV18, TRBJ2-2)
CAISPRLTAGGPTGELFF

SEQ ID NO: 305155 - protein, 13 aa, Homo sapiens
  CDR3 for alpha chain variable domain of TCR clone 152578 (TRAV26-1, TRAJ48)
CIVRVVGDEKLTF

SEQ ID NO: 305156 - protein, 14 aa, Homo sapiens
  CDR3 for beta chain variable domain of TCR clone 152578 (TRBV7-2, TRBJ2-7)
CASSSISGFSEQYF

SEQ ID NO: 305157 - protein, 18 aa, Homo sapiens
  CDR3 for alpha chain variable domain of TCR clone 152579 (TRAV26-1, TRAJ52)
CIDRVEGAGGTSDGKLTF

SEQ ID NO: 305158 - protein, 13 aa, Homo sapiens
  CDR3 for beta chain variable domain of TCR clone 152579 (TRBV7-3, TRBJ1-2)
CASSLERGYGYTF

SEQ ID NO: 305159 - protein, 14 aa, Homo sapiens
  CDR3 for alpha chain variable domain of TCR clone 152580 (TRAV35, TRAJ22)
CAGLRPGSARQLTF

SEQ ID NO: 305160 - protein, 15 aa, Homo sapiens
  CDR3 for beta chain variable domain of TCR clone 152580 (TRBV12-4, TRBJ2-5)
CASSPRTGVQETQYF

SEQ ID NO: 305161 - protein, 14 aa, Homo sapiens
  CDR3 for alpha chain variable domain of TCR clone 152581 (TRAV29/DV5, TRAJ20)
CAATIRSNDYKLSF

SEQ ID NO: 305162 - protein, 15 aa, Homo sapiens
  CDR3 for beta chain variable domain of TCR clone 152581 (TRBV20-1, TRBJ2-1)
CSASSAGISYNEQFF

SEQ ID NO: 305163 - protein, 14 aa, Homo sapiens
  CDR3 for alpha chain variable domain of TCR clone 152582 (TRAV23/DV6, TRAJ8)
CAASKATGFQKLVF

SEQ ID NO: 305164 - protein, 15 aa, Homo sapiens
  CDR3 for beta chain variable domain of TCR clone 152582 (TRBV28, TRBJ2-3)
CASSPDRQGANTQDF

SEQ ID NO: 305165 - protein, 16 aa, Homo sapiens
  CDR3 for alpha chain variable domain of TCR clone 152583 (TRAV8-4, TRAJ7)
CVVSEGPYHGNNRLAF

SEQ ID NO: 305166 - protein, 13 aa, Homo sapiens
  CDR3 for beta chain variable domain of TCR clone 152583 (TRBV19, TRBJ2-1)
CASSMYRVNVQFF

SEQ ID NO: 305167 - protein, 13 aa, Homo sapiens
  CDR3 for alpha chain variable domain of TCR clone 152584 (TRAV36/DV7, TRAJ54)
CAVLIQGAQKLVV

SEQ ID NO: 305168 - protein, 13 aa, Homo sapiens
  CDR3 for beta chain variable domain of TCR clone 152584 (TRBV29-1, TRBJ2-4)
CSVGEGTKNIQYF

SEQ ID NO: 305169 - protein, 16 aa, Homo sapiens
  CDR3 for alpha chain variable domain of TCR clone 152585 (TRAV3, TRAJ5)
CAVRTSTRAGEHFLLG

SEQ ID NO: 305170 - protein, 13 aa, Homo sapiens
  CDR3 for beta chain variable domain of TCR clone 152585 (TRBV12-4, TRBJ2-7)
CASSPTETYEQYF

SEQ ID NO: 305171 - protein, 13 aa, Homo sapiens
  CDR3 for alpha chain variable domain of TCR clone 152586 (TRAV27, TRAJ6)
CAGGTRGSYIPTF

SEQ ID NO: 305172 - protein, 15 aa, Homo sapiens
  CDR3 for beta chain variable domain of TCR clone 152586 (TRBV11-3, TRBJ2-3)
CASLKDGREGDTQYF

SEQ ID NO: 305173 - protein, 15 aa, Homo sapiens
  CDR3 for alpha chain variable domain of TCR clone 152587 (TRAV12-3, TRAJ6)
CAMSATTGGSYIPTF

SEQ ID NO: 305174 - protein, 14 aa, Homo sapiens
  CDR3 for beta chain variable domain of TCR clone 152587 (TRBV18, TRBJ2-5)
CANSPGVSQETQYF

SEQ ID NO: 305175 - protein, 13 aa, Homo sapiens
  CDR3 for alpha chain variable domain of TCR clone 152588 (TRAV1-2, TRAJ9)
CAALNTGGFKTIF

SEQ ID NO: 305176 - protein, 20 aa, Homo sapiens
  CDR3 for beta chain variable domain of TCR clone 152588 (TRBV28, TRBJ2-1)
CASTPVGRSPGLAGGNEQFF

SEQ ID NO: 305177 - protein, 11 aa, Homo sapiens
  CDR3 for alpha chain variable domain of TCR clone 152589 (TRAV12-2, TRAJ23)
CARGRGGKLIF

SEQ ID NO: 305178 - protein, 14 aa, Homo sapiens
  CDR3 for beta chain variable domain of TCR clone 152589 (TRBV28, TRBJ2-5)
CASSLGDRSETQYF

SEQ ID NO: 305179 - protein, 14 aa, Homo sapiens
  CDR3 for alpha chain variable domain of TCR clone 152590 (TRAV12-1, TRAJ30)
CVVNIGGRDDKIIF

SEQ ID NO: 305180 - protein, 15 aa, Homo sapiens
  CDR3 for beta chain variable domain of TCR clone 152590 (TRBV18, TRBJ1-2)
CAGSPSNTPNYGYTF

SEQ ID NO: 305181 - protein, 19 aa, Homo sapiens
  CDR3 for alpha chain variable domain of TCR clone 152591 (TRAV13-1, TRAJ52)
CAASSSPNAGGTSYGKLTF

SEQ ID NO: 305182 - protein, 15 aa, Homo sapiens
  CDR3 for beta chain variable domain of TCR clone 152591 (TRBV9, TRBJ1-6)
CASSTGGGGDSPLHF

SEQ ID NO: 305183 - protein, 15 aa, Homo sapiens
  CDR3 for alpha chain variable domain of TCR clone 152592 (TRAV14/DV4, TRAJ26)
CAIREGQNYGQNFVF

SEQ ID NO: 305184 - protein, 13 aa, Homo sapiens
  CDR3 for beta chain variable domain of TCR clone 152592 (TRBV24-1, TRBJ2-2)
CATSDWSTGELFF

SEQ ID NO: 305185 - protein, 11 aa, Homo sapiens
  CDR3 for alpha chain variable domain of TCR clone 152593 (TRAV3, TRAJ21)
CAVGNFNKFYF

SEQ ID NO: 305186 - protein, 15 aa, Homo sapiens
  CDR3 for beta chain variable domain of TCR clone 152593 (TRBV5-4, TRBJ1-4)
CASSHGDGENEKLFF

SEQ ID NO: 305187 - protein, 18 aa, Homo sapiens
  CDR3 for alpha chain variable domain of TCR clone 152594 (TRAV21, TRAJ52)
CAVRPSPAGGTSCGKLTF

SEQ ID NO: 305188 - protein, 15 aa, Homo sapiens
  CDR3 for beta chain variable domain of TCR clone 152594 (TRBV7-9, TRBJ2-7)
CASSSSGLAVYEQYF

SEQ ID NO: 305189 - protein, 15 aa, Homo sapiens
  CDR3 for alpha chain variable domain of TCR clone 152595 (TRAV12-1, TRAJ44)
CVVFVNTGTASKLTF

SEQ ID NO: 305190 - protein, 16 aa, Homo sapiens
  CDR3 for beta chain variable domain of TCR clone 152595 (TRBV20-1, TRBJ2-5)
CSPGGTSGGYMETQYC

SEQ ID NO: 305191 - protein, 14 aa, Homo sapiens
  CDR3 for alpha chain variable domain of TCR clone 152596 (TRAV21, TRAJ35)
CAVMPIGFGYVLHC

SEQ ID NO: 305192 - protein, 12 aa, Homo sapiens
  CDR3 for beta chain variable domain of TCR clone 152596 (TRBV7-9, TRBJ2-7)
CASSTKREEQYF

SEQ ID NO: 305193 - protein, 14 aa, Homo sapiens
  CDR3 for alpha chain variable domain of TCR clone 152597 (TRAV4, TRAJ22)
CLARLSGSARQLTF

SEQ ID NO: 305194 - protein, 13 aa, Homo sapiens
  CDR3 for beta chain variable domain of TCR clone 152597 (TRBV19, TRBJ1-2)
CASSVPGQDGYTF

SEQ ID NO: 305195 - protein, 12 aa, Homo sapiens
  CDR3 for alpha chain variable domain of TCR clone 152598 (TRAV26-1, TRAJ31)
CIVRNNNARLMF

SEQ ID NO: 305196 - protein, 15 aa, Homo sapiens
  CDR3 for beta chain variable domain of TCR clone 152598 (TRBV20-1, TRBJ2-4)
CSARDLTGGPNKQYF

SEQ ID NO: 305197 - protein, 13 aa, Homo sapiens
  CDR3 for alpha chain variable domain of TCR clone 152599 (TRAV26-1, TRAJ29)
CLVRRSGNTPLVF

SEQ ID NO: 305198 - protein, 16 aa, Homo sapiens
  CDR3 for beta chain variable domain of TCR clone 152599 (TRBV11-2, TRBJ2-7)
CASSLAPTGVNYEQYF

SEQ ID NO: 305199 - protein, 15 aa, Homo sapiens
  CDR3 for alpha chain variable domain of TCR clone 152600 (TRAV3, TRAJ5)
RAVRDLDTGRRALTF

SEQ ID NO: 305200 - protein, 13 aa, Homo sapiens
  CDR3 for beta chain variable domain of TCR clone 152600 (TRBV12-4, TRBJ2-7)
CASSPTATYAQYF

SEQ ID NO: 305201 - protein, 14 aa, Homo sapiens
  CDR3 for alpha chain variable domain of TCR clone 152601 (TRAV12-3, TRAJ21)
CAMEGHQGFNKFYF

SEQ ID NO: 305202 - protein, 16 aa, Homo sapiens
  CDR3 for beta chain variable domain of TCR clone 152601 (TRBV19, TRBJ2-1)
CASSKAGPSAYNEQFF

SEQ ID NO: 305203 - protein, 16 aa, Homo sapiens
  CDR3 for alpha chain variable domain of TCR clone 152602 (TRAV3, TRAJ37)
CAVRPHGSGNTGKLIF

SEQ ID NO: 305204 - protein, 16 aa, Homo sapiens
  CDR3 for beta chain variable domain of TCR clone 152602 (TRBV9, TRBJ1-2)
CGSSVEEKVSPYGYTF

SEQ ID NO: 305205 - protein, 14 aa, Homo sapiens
  CDR3 for alpha chain variable domain of TCR clone 152603 (TRAV12-1, TRAJ43)
CVVNGRINNNDMRF

SEQ ID NO: 305206 - protein, 13 aa, Homo sapiens
  CDR3 for beta chain variable domain of TCR clone 152603 (TRBV10-3, TRBJ2-7)
CASKLAVNYEQYF

SEQ ID NO: 305207 - protein, 15 aa, Homo sapiens
  CDR3 for alpha chain variable domain of TCR clone 152604 (TRAV8-3, TRAJ17)
CAVAFLQSCRQQANF

SEQ ID NO: 305208 - protein, 13 aa, Homo sapiens
  CDR3 for beta chain variable domain of TCR clone 152604 (TRBV5-7, TRBJ1-2)
CASSLIRAPGYAL

SEQ ID NO: 305209 - protein, 14 aa, Homo sapiens
  CDR3 for alpha chain variable domain of TCR clone 152605 (TRAV17, TRAJ22)
CATVLSVSARQLTF

SEQ ID NO: 305210 - protein, 14 aa, Homo sapiens
  CDR3 for beta chain variable domain of TCR clone 152605 (TRBV12-4, TRBJ2-5)
CASSFGDRGETQYF

SEQ ID NO: 305211 - protein, 14 aa, Homo sapiens
  CDR3 for alpha chain variable domain of TCR clone 152606 (TRAV13-2, TRAJ17)
CAENSKATGNKLTS

SEQ ID NO: 305212 - protein, 11 aa, Homo sapiens
  CDR3 for beta chain variable domain of TCR clone 152606 (TRBV6-3, TRBJ2-3)
CATGQADTQYF

SEQ ID NO: 305213 - protein, 15 aa, Homo sapiens
  CDR3 for alpha chain variable domain of TCR clone 152607 (TRAV21, TRAJ53)
CATLNSGGSNYKPTF

SEQ ID NO: 305214 - protein, 14 aa, Homo sapiens
  CDR3 for beta chain variable domain of TCR clone 152607 (TRBV19, TRBJ2-1)
CASPTFVLSGEQFF

SEQ ID NO: 305215 - protein, 15 aa, Homo sapiens
  CDR3 for alpha chain variable domain of TCR clone 152608 (TRAV17, TRAJ16)
CATDRRFSDGQKLLF

SEQ ID NO: 305216 - protein, 14 aa, Homo sapiens
  CDR3 for beta chain variable domain of TCR clone 152608 (TRBV5-4, TRBJ1-1)
CASSLDSRRDEAFF

SEQ ID NO: 305217 - protein, 13 aa, Homo sapiens
  CDR3 for alpha chain variable domain of TCR clone 152609 (TRAV3, TRAJ20)
CAVRDTPRYNLTF

SEQ ID NO: 305218 - protein, 16 aa, Homo sapiens
  CDR3 for beta chain variable domain of TCR clone 152609 (TRBV20-1, TRBJ2-7)
CSARAPGLALSYEQYF

SEQ ID NO: 305219 - protein, 14 aa, Homo sapiens
  CDR3 for alpha chain variable domain of TCR clone 152610 (TRAV30, TRAJ33)
CGTERRFSNHQLIW

SEQ ID NO: 305220 - protein, 16 aa, Homo sapiens
  CDR3 for beta chain variable domain of TCR clone 152610 (TRBV7-3, TRBJ2-2)
CASSLKRGTLSGELFF

SEQ ID NO: 305221 - protein, 14 aa, Homo sapiens
  CDR3 for alpha chain variable domain of TCR clone 152611 (TRAV8-6, TRAJ10)
CAVTSTGGGNKLTF

SEQ ID NO: 305222 - protein, 13 aa, Homo sapiens
  CDR3 for beta chain variable domain of TCR clone 152611 (TRBV5-7, TRBJ2-5)
CASRASGGGTQYF

SEQ ID NO: 305223 - protein, 10 aa, Homo sapiens
  CDR3 for alpha chain variable domain of TCR clone 152612 (TRAV13-1, TRAJ21)
CAASLNKFYF

SEQ ID NO: 305224 - protein, 13 aa, Homo sapiens
  CDR3 for beta chain variable domain of TCR clone 152612 (TRBV7-9, TRBJ2-7)
CASGCYGSYEQYF

SEQ ID NO: 305225 - protein, 11 aa, Homo sapiens
  CDR3 for alpha chain variable domain of TCR clone 152613 (TRAV3, TRAJ21)
CALGNFNKFYF

SEQ ID NO: 305226 - protein, 16 aa, Homo sapiens
  CDR3 for beta chain variable domain of TCR clone 152613 (TRBV20-1, TRBJ1-2)
CSASMGQGVANYGYTF

SEQ ID NO: 305227 - protein, 16 aa, Homo sapiens
  CDR3 for alpha chain variable domain of TCR clone 152614 (TRAV23/DV6, TRAJ48)
CAASGVVNFGNEKLTF

SEQ ID NO: 305228 - protein, 15 aa, Homo sapiens
  CDR3 for beta chain variable domain of TCR clone 152614 (TRBV20-1, TRBJ2-5)
RSAGLAGVSQETQYF

SEQ ID NO: 305229 - protein, 11 aa, Homo sapiens
  CDR3 for alpha chain variable domain of TCR clone 152615 (TRAV2, TRAJ13)
CASGGYQKVTF

SEQ ID NO: 305230 - protein, 13 aa, Homo sapiens
  CDR3 for beta chain variable domain of TCR clone 152615 (TRBV27, TRBJ1-4)
CASSVMGDEKLFF

SEQ ID NO: 305231 - protein, 14 aa, Homo sapiens
  CDR3 for alpha chain variable domain of TCR clone 152616 (TRAV8-6, TRAJ8)
CAVNENTGFQKLVF

SEQ ID NO: 305232 - protein, 17 aa, Homo sapiens
  CDR3 for beta chain variable domain of TCR clone 152616 (TRBV7-3, TRBJ2-3)
CASSLMKRMRGADTQYF

SEQ ID NO: 305233 - protein, 13 aa, Homo sapiens
  CDR3 for alpha chain variable domain of TCR clone 152617 (TRAV12-2, TRAJ27)
CAARPGNAGKSTF

SEQ ID NO: 305234 - protein, 13 aa, Homo sapiens
  CDR3 for beta chain variable domain of TCR clone 152617 (TRBV7-6, TRBJ2-1)
CQQLGGGADEQFF

SEQ ID NO: 305235 - protein, 16 aa, Homo sapiens
  CDR3 for alpha chain variable domain of TCR clone 152618 (TRAV1-2, TRAJ10)
CAVRGVLTGGGNRLTF

SEQ ID NO: 305236 - protein, 15 aa, Homo sapiens
  CDR3 for beta chain variable domain of TCR clone 152618 (TRBV7-2, TRBJ2-1)
CASSSGLAGGNEQFF

SEQ ID NO: 305237 - protein, 14 aa, Homo sapiens
  CDR3 for alpha chain variable domain of TCR clone 152619 (TRAV1-2, TRAJ16)
CAVNRFSDDQKLLF

SEQ ID NO: 305238 - protein, 14 aa, Homo sapiens
  CDR3 for beta chain variable domain of TCR clone 152619 (TRBV13, TRBJ2-5)
CASSLGRGQETQYF

SEQ ID NO: 305239 - protein, 18 aa, Homo sapiens
  CDR3 for alpha chain variable domain of TCR clone 152620 (TRAV29/DV5, TRAJ52)
CAAGFRGAGGTSYGKLTF

SEQ ID NO: 305240 - protein, 15 aa, Homo sapiens
  CDR3 for beta chain variable domain of TCR clone 152620 (TRBV7-3, TRBJ2-2)
CQQLKGGTLSGELFF

SEQ ID NO: 305241 - protein, 14 aa, Homo sapiens
  CDR3 for alpha chain variable domain of TCR clone 152621 (TRAV12-2, TRAJ17)
CAVLFKAAGNKLTF

SEQ ID NO: 305242 - protein, 14 aa, Homo sapiens
  CDR3 for beta chain variable domain of TCR clone 152621 (TRBV20-1, TRBJ2-5)
CSAHRQGLWETQYF

SEQ ID NO: 305243 - protein, 12 aa, Homo sapiens
  CDR3 for alpha chain variable domain of TCR clone 152622 (TRAV1-1, TRAJ12)
CAVGDSSYKLIF

SEQ ID NO: 305244 - protein, 14 aa, Homo sapiens
  CDR3 for beta chain variable domain of TCR clone 152622 (TRBV20-1, TRBJ2-7)
CSATELAGVGEQYF

SEQ ID NO: 305245 - protein, 14 aa, Homo sapiens
  CDR3 for alpha chain variable domain of TCR clone 152623 (TRAV36/DV7, TRAJ44)
CCGANTGTASKLTF

SEQ ID NO: 305246 - protein, 13 aa, Homo sapiens
  CDR3 for beta chain variable domain of TCR clone 152623 (TRBV4-2, TRBJ1-1)
CASSQAGNTEAFF

SEQ ID NO: 305247 - protein, 13 aa, Homo sapiens
  CDR3 for alpha chain variable domain of TCR clone 152624 (TRAV3, TRAJ21)
CAVREPDFNKFYF

SEQ ID NO: 305248 - protein, 14 aa, Homo sapiens
  CDR3 for beta chain variable domain of TCR clone 152624 (TRBV4-1, TRBJ2-2)
CASSQAANTGELFF

SEQ ID NO: 305249 - protein, 15 aa, Homo sapiens
  CDR3 for alpha chain variable domain of TCR clone 152625 (TRAV35, TRAJ40)
CAGQLGTSGTYKYIF

SEQ ID NO: 305250 - protein, 19 aa, Homo sapiens
  CDR3 for beta chain variable domain of TCR clone 152625 (TRBV23-1, TRBJ2-7)
CASILLRDRARAVRRAGHQ

SEQ ID NO: 305251 - protein, 14 aa, Homo sapiens
  CDR3 for alpha chain variable domain of TCR clone 152626 (TRAV17, TRAJ12)
CATDEKDSSYKLIF

SEQ ID NO: 305252 - protein, 16 aa, Homo sapiens
  CDR3 for beta chain variable domain of TCR clone 152626 (TRBV11-2, TRBJ2-1)
CASSPRLEGVYNEQFF

SEQ ID NO: 305253 - protein, 17 aa, Homo sapiens
  CDR3 for alpha chain variable domain of TCR clone 152627 (TRAV26-1, TRAJ10)
CIVSFRGLTGGGNKLTF

SEQ ID NO: 305254 - protein, 13 aa, Homo sapiens
  CDR3 for beta chain variable domain of TCR clone 152627 (TRBV20-1, TRBJ2-3)
CSASSQAADTQYF

SEQ ID NO: 305255 - protein, 17 aa, Homo sapiens
  CDR3 for alpha chain variable domain of TCR clone 152628 (TRAV8-3, TRAJ42)
CAVGNPEERRSQGNLIF

SEQ ID NO: 305256 - protein, 17 aa, Homo sapiens
  CDR3 for beta chain variable domain of TCR clone 152628 (TRBV20-1, TRBJ2-1)
CSASSSGLAGSYNEQFF

SEQ ID NO: 305257 - protein, 15 aa, Homo sapiens
  CDR3 for alpha chain variable domain of TCR clone 152629 (TRAV2, TRAJ9)
CAVEDRGTGCFKTIF

SEQ ID NO: 305258 - protein, 16 aa, Homo sapiens
  CDR3 for beta chain variable domain of TCR clone 152629 (TRBV24-1, TRBJ2-3)
CATSDPGTGATDTQYC

SEQ ID NO: 305259 - protein, 17 aa, Homo sapiens
  CDR3 for alpha chain variable domain of TCR clone 152630 (TRAV17, TRAJ28)
CATDPRRGGAGSYQLTF

SEQ ID NO: 305260 - protein, 13 aa, Homo sapiens
  CDR3 for beta chain variable domain of TCR clone 152630 (TRBV6-1, TRBJ1-1)
CASSRQGNTEAFF

SEQ ID NO: 305261 - protein, 12 aa, Homo sapiens
  CDR3 for alpha chain variable domain of TCR clone 152631 (TRAV12-3, TRAJ21)
CAIFNNFNKFYF

SEQ ID NO: 305262 - protein, 14 aa, Homo sapiens
  CDR3 for beta chain variable domain of TCR clone 152631 (TRBV28, TRBJ2-1)
CASSIQGTVGEQFF

SEQ ID NO: 305263 - protein, 15 aa, Homo sapiens
  CDR3 for alpha chain variable domain of TCR clone 152632 (TRAV13-2, TRAJ50)
CAEEPLKTSYDKVIF

SEQ ID NO: 305264 - protein, 13 aa, Homo sapiens
  CDR3 for beta chain variable domain of TCR clone 152632 (TRBV6-6, TRBJ2-1)
CASSLHQGDEQFF

SEQ ID NO: 305265 - protein, 12 aa, Homo sapiens
  CDR3 for alpha chain variable domain of TCR clone 152633 (TRAV16, TRAJ10)
CSRTGGGNKLTF

SEQ ID NO: 305266 - protein, 13 aa, Homo sapiens
  CDR3 for beta chain variable domain of TCR clone 152633 (TRBV11-3, TRBJ1-1)
CASTGSLNTEAFF

SEQ ID NO: 305267 - protein, 12 aa, Homo sapiens
  CDR3 for alpha chain variable domain of TCR clone 152634 (TRAV12-2, TRAJ21)
CAVRYNFNRFYF

SEQ ID NO: 305268 - protein, 14 aa, Homo sapiens
  CDR3 for beta chain variable domain of TCR clone 152634 (TRBV28, TRBJ2-1)
CASSYYTAYNEQFF

SEQ ID NO: 305269 - protein, 19 aa, Homo sapiens
  CDR3 for alpha chain variable domain of TCR clone 152635 (TRAV26-1, TRAJ52)
CIVRTHRNAGGTGYGKLTF

SEQ ID NO: 305270 - protein, 15 aa, Homo sapiens
  CDR3 for beta chain variable domain of TCR clone 152635 (TRBV12-4, TRBJ2-5)
CASSPPTGLQETQYF

SEQ ID NO: 305271 - protein, 11 aa, Homo sapiens
  CDR3 for alpha chain variable domain of TCR clone 152636 (TRAV26-1, )
CIADMLATTIS

SEQ ID NO: 305272 - protein, 12 aa, Homo sapiens
  CDR3 for beta chain variable domain of TCR clone 152636 (TRBV11-2, TRBJ2-2)
CASSLGGGELFF

SEQ ID NO: 305273 - protein, 11 aa, Homo sapiens
  CDR3 for alpha chain variable domain of TCR clone 152637 (TRAV17, TRAJ31)
CATTNNARLMF

SEQ ID NO: 305274 - protein, 16 aa, Homo sapiens
  CDR3 for beta chain variable domain of TCR clone 152637 (TRBV7-8, TRBJ2-4)
CASSAERTLAKNIQYF

SEQ ID NO: 305275 - protein, 14 aa, Homo sapiens
  CDR3 for alpha chain variable domain of TCR clone 152638 (TRAV26-1, TRAJ49)
CIVRPSNTGNQFYF

SEQ ID NO: 305276 - protein, 15 aa, Homo sapiens
  CDR3 for beta chain variable domain of TCR clone 152638 (TRBV19, TRBJ1-1)
CASRGFRDVNTEAFF

SEQ ID NO: 305277 - protein, 16 aa, Homo sapiens
  CDR3 for alpha chain variable domain of TCR clone 152639 (TRAV30, TRAJ24)
CGTEIVDAASWGKFEF

SEQ ID NO: 305278 - protein, 12 aa, Homo sapiens
  CDR3 for beta chain variable domain of TCR clone 152639 (TRBV11-2, TRBJ2-2)
CASSLGGGELFF

SEQ ID NO: 305279 - protein, 17 aa, Homo sapiens
  CDR3 for alpha chain variable domain of TCR clone 152640 (TRAV3, TRAJ42)
CAVRDRDSGGSQGNLIF

SEQ ID NO: 305280 - protein, 15 aa, Homo sapiens
  CDR3 for beta chain variable domain of TCR clone 152640 (TRBV7-2, TRBJ2-1)
CASSSRTSREDEQFF

SEQ ID NO: 305281 - protein, 15 aa, Homo sapiens
  CDR3 for alpha chain variable domain of TCR clone 152641 (TRAV13-1, TRAJ44)
CAASRGGGPASKLTF

SEQ ID NO: 305282 - protein, 14 aa, Homo sapiens
  CDR3 for beta chain variable domain of TCR clone 152641 (TRBV7-2, TRBJ2-5)
CASSPRGGSETQYF

SEQ ID NO: 305283 - protein, 16 aa, Homo sapiens
  CDR3 for alpha chain variable domain of TCR clone 152642 (TRAV23/DV6, TRAJ9)
CAASIGGNTGGFKTIF

SEQ ID NO: 305284 - protein, 12 aa, Homo sapiens
  CDR3 for beta chain variable domain of TCR clone 152642 (TRBV19, TRBJ2-1)
CASSRQGAEQFF

SEQ ID NO: 305285 - protein, 14 aa, Homo sapiens
  CDR3 for alpha chain variable domain of TCR clone 152643 (TRAV2, TRAJ9)
CAVEDRSGGFKTIF

SEQ ID NO: 305286 - protein, 14 aa, Homo sapiens
  CDR3 for beta chain variable domain of TCR clone 152643 (TRBV4-1, TRBJ2-2)
CASSQAVNTGELFV

SEQ ID NO: 305287 - protein, 13 aa, Homo sapiens
  CDR3 for alpha chain variable domain of TCR clone 152644 (TRAV38-1, TRAJ42)
CAQWGGSQGNLIF

SEQ ID NO: 305288 - protein, 10 aa, Homo sapiens
  CDR3 for beta chain variable domain of TCR clone 152644 (TRBV2, TRBJ2-5)
CASSAATQYF

SEQ ID NO: 305289 - protein, 10 aa, Homo sapiens
  CDR3 for alpha chain variable domain of TCR clone 152645 (TRAV12-2, TRAJ10)
CAAWTGVETH

SEQ ID NO: 305290 - protein, 17 aa, Homo sapiens
  CDR3 for beta chain variable domain of TCR clone 152645 (TRBV13, TRBJ2-3)
CASSLSRVAGGRNQQYF

SEQ ID NO: 305291 - protein, 11 aa, Homo sapiens
  CDR3 for alpha chain variable domain of TCR clone 152646 (TRAV13-1, TRAJ20)
CAASKDYKHSF

SEQ ID NO: 305292 - protein, 16 aa, Homo sapiens
  CDR3 for beta chain variable domain of TCR clone 152646 (TRBV27, TRBJ2-1)
CASSLSKGFGLDEQFF

SEQ ID NO: 305293 - protein, 15 aa, Homo sapiens
  CDR3 for alpha chain variable domain of TCR clone 152647 (TRAV38-2/DV8, TRAJ47)
CAYRSAKGYGNKLVF

SEQ ID NO: 305294 - protein, 13 aa, Homo sapiens
  CDR3 for beta chain variable domain of TCR clone 152647 (TRBV10-3, TRBJ2-7)
CASKLAVNYEQYF

SEQ ID NO: 305295 - protein, 15 aa, Homo sapiens
  CDR3 for alpha chain variable domain of TCR clone 152648 (TRAV25, TRAJ53)
CAATGGGGSNYKLTF

SEQ ID NO: 305296 - protein, 16 aa, Homo sapiens
  CDR3 for beta chain variable domain of TCR clone 152648 (TRBV6-5, TRBJ2-7)
CASSTRTSGAPYEQYF

SEQ ID NO: 305297 - protein, 14 aa, Homo sapiens
  CDR3 for alpha chain variable domain of TCR clone 152649 (TRAV29/DV5, TRAJ34)
CAASASRETDKLIF

SEQ ID NO: 305298 - protein, 15 aa, Homo sapiens
  CDR3 for beta chain variable domain of TCR clone 152649 (TRBV7-8, TRBJ2-7)
CAGSLERAGSYEQYF

SEQ ID NO: 305299 - protein, 11 aa, Homo sapiens
  CDR3 for alpha chain variable domain of TCR clone 152650 (TRAV2, TRAJ13)
CASGGYQKVTF

SEQ ID NO: 305300 - protein, 16 aa, Homo sapiens
  CDR3 for beta chain variable domain of TCR clone 152650 (TRBV7-2, TRBJ1-4)
CASSLAPGRRDEKLFF

SEQ ID NO: 305301 - protein, 12 aa, Homo sapiens
  CDR3 for alpha chain variable domain of TCR clone 152651 (TRAV16, TRAJ10)
CSRTGGGNKLTF

SEQ ID NO: 305302 - protein, 14 aa, Homo sapiens
  CDR3 for beta chain variable domain of TCR clone 152651 (TRBV28, TRBJ2-7)
CASSLGTATYEQYF

SEQ ID NO: 305303 - protein, 15 aa, Homo sapiens
  CDR3 for alpha chain variable domain of TCR clone 152652 (TRAV3, TRAJ9)
CAVRARNTGGFKTIF

SEQ ID NO: 305304 - protein, 12 aa, Homo sapiens
  CDR3 for beta chain variable domain of TCR clone 152652 (TRBV11-2, TRBJ2-7)
CASSSPTYEQYF

SEQ ID NO: 305305 - protein, 14 aa, Homo sapiens
  CDR3 for alpha chain variable domain of TCR clone 152653 (TRAV19, TRAJ5)
CALKKYTGRRALTF

SEQ ID NO: 305306 - protein, 15 aa, Homo sapiens
  CDR3 for beta chain variable domain of TCR clone 152653 (TRBV2, TRBJ2-5)
CASSEAGTRQETQYF

SEQ ID NO: 305307 - protein, 14 aa, Homo sapiens
  CDR3 for alpha chain variable domain of TCR clone 152654 (TRAV36/DV7, TRAJ53)
CAFVDGGSNYKQTF

SEQ ID NO: 305308 - protein, 16 aa, Homo sapiens
  CDR3 for beta chain variable domain of TCR clone 152654 (TRBV12-5, TRBJ2-5)
CASGPRTSGNQETQYF

SEQ ID NO: 305309 - protein, 16 aa, Homo sapiens
  CDR3 for alpha chain variable domain of TCR clone 152655 (TRAV3, TRAJ21)
CAVRDVERGNFTKFYF

SEQ ID NO: 305310 - protein, 13 aa, Homo sapiens
  CDR3 for beta chain variable domain of TCR clone 152655 (TRBV27, TRBJ2-7)
CASSLTTGYEQYF

SEQ ID NO: 305311 - protein, 15 aa, Homo sapiens
  CDR3 for alpha chain variable domain of TCR clone 152656 (TRAV2, TRAJ15)
CAAEDREQAGTAQIF

SEQ ID NO: 305312 - protein, 13 aa, Homo sapiens
  CDR3 for beta chain variable domain of TCR clone 152656 (TRBV10-2, TRBJ2-7)
CASGTSGGYEQYF

SEQ ID NO: 305313 - protein, 16 aa, Homo sapiens
  CDR3 for alpha chain variable domain of TCR clone 152657 (TRAV27, TRAJ13)
CAGAKSDSGGYQKVNF

SEQ ID NO: 305314 - protein, 15 aa, Homo sapiens
  CDR3 for beta chain variable domain of TCR clone 152657 (TRBV29-1, TRBJ2-1)
CSVGRHALFYNEQIF

SEQ ID NO: 305315 - protein, 12 aa, Homo sapiens
  CDR3 for alpha chain variable domain of TCR clone 152658 (TRAV9-2, TRAJ26)
CALRGDGQTFVF

SEQ ID NO: 305316 - protein, 12 aa, Homo sapiens
  CDR3 for beta chain variable domain of TCR clone 152658 (TRBV29-1, TRBJ2-3)
CSVTGGADTQYF

SEQ ID NO: 305317 - protein, 11 aa, Homo sapiens
  CDR3 for alpha chain variable domain of TCR clone 152659 (TRAV23/DV6, TRAJ49)
CAVAPVTSSIL

SEQ ID NO: 305318 - protein, 13 aa, Homo sapiens
  CDR3 for beta chain variable domain of TCR clone 152659 (TRBV6-1, TRBJ1-1)
CDSSRQGNTEAFF

SEQ ID NO: 305319 - protein, 15 aa, Homo sapiens
  CDR3 for alpha chain variable domain of TCR clone 152660 (TRAV38-2/DV8, TRAJ48)
CAYRSGGFGNWKLTF

SEQ ID NO: 305320 - protein, 16 aa, Homo sapiens
  CDR3 for beta chain variable domain of TCR clone 152660 (TRBV28, TRBJ2-7)
CASSPWVATGDLSQYS

SEQ ID NO: 305321 - protein, 18 aa, Homo sapiens
  CDR3 for alpha chain variable domain of TCR clone 152661 (TRAV21, TRAJ52)
CAVRPSPAGGTSYGKLTF

SEQ ID NO: 305322 - protein, 11 aa, Homo sapiens
  CDR3 for beta chain variable domain of TCR clone 152661 (TRBV12-4, TRBJ2-3)
CGSTATDTQNF

SEQ ID NO: 305323 - protein, 13 aa, Homo sapiens
  CDR3 for alpha chain variable domain of TCR clone 152662 (TRAV27, TRAJ6)
CAGGTRGSYIPTF

SEQ ID NO: 305324 - protein, 12 aa, Homo sapiens
  CDR3 for beta chain variable domain of TCR clone 152662 (TRBV3-1, TRBJ2-1)
CASSQGSSGQFF

SEQ ID NO: 305325 - protein, 14 aa, Homo sapiens
  CDR3 for alpha chain variable domain of TCR clone 152663 (TRAV1-2, TRAJ16)
CAVNRFSDGQKLLF

SEQ ID NO: 305326 - protein, 13 aa, Homo sapiens
  CDR3 for beta chain variable domain of TCR clone 152663 (TRBV7-2, TRBJ1-5)
CASSLAPDQTQHF

SEQ ID NO: 305327 - protein, 13 aa, Homo sapiens
  CDR3 for alpha chain variable domain of TCR clone 152664 (TRAV21, TRAJ27)
CAARPGNAGKSTF

SEQ ID NO: 305328 - protein, 12 aa, Homo sapiens
  CDR3 for beta chain variable domain of TCR clone 152664 (TRBV11-2, TRBJ2-7)
CASSPPADEQYF

SEQ ID NO: 305329 - protein, 14 aa, Homo sapiens
  CDR3 for alpha chain variable domain of TCR clone 152665 (TRAV38-1, TRAJ45)
CAYYSGGGADGLTF

SEQ ID NO: 305330 - protein, 14 aa, Homo sapiens
  CDR3 for beta chain variable domain of TCR clone 152665 (TRBV7-2, TRBJ2-7)
CASSPKTSFYEQYF

SEQ ID NO: 305331 - protein, 16 aa, Homo sapiens
  CDR3 for alpha chain variable domain of TCR clone 152666 (TRAV14/DV4, TRAJ20)
CAMREGRSRDDCKHSF

SEQ ID NO: 305332 - protein, 17 aa, Homo sapiens
  CDR3 for beta chain variable domain of TCR clone 152666 (TRBV13, TRBJ2-3)
CASSLSRVAGGRNTQYF

SEQ ID NO: 305333 - protein, 15 aa, Homo sapiens
  CDR3 for alpha chain variable domain of TCR clone 152667 (TRAV34, TRAJ38)
CGADFTPGNNRKLIW

SEQ ID NO: 305334 - protein, 13 aa, Homo sapiens
  CDR3 for beta chain variable domain of TCR clone 152667 (TRBV7-8, TRBJ2-7)
CASSLGTTYEQYF

SEQ ID NO: 305335 - protein, 13 aa, Homo sapiens
  CDR3 for alpha chain variable domain of TCR clone 152668 (TRAV8-3, TRAJ40)
CAVGAQYLRNLQI

SEQ ID NO: 305336 - protein, 14 aa, Homo sapiens
  CDR3 for beta chain variable domain of TCR clone 152668 (TRBV28, TRBJ2-7)
CASRAAGLGYEQYF

SEQ ID NO: 305337 - protein, 15 aa, Homo sapiens
  CDR3 for alpha chain variable domain of TCR clone 152669 (TRAV27, TRAJ38)
CAGRFNAGNNRKLIW

SEQ ID NO: 305338 - protein, 15 aa, Homo sapiens
  CDR3 for beta chain variable domain of TCR clone 152669 (TRBV4-3, TRBJ2-3)
CASSPSLLSTDTQYF

SEQ ID NO: 305339 - protein, 12 aa, Homo sapiens
  CDR3 for alpha chain variable domain of TCR clone 152670 (TRAV1-2, TRAJ17)
CAVRAAGNKLTF

SEQ ID NO: 305340 - protein, 16 aa, Homo sapiens
  CDR3 for beta chain variable domain of TCR clone 152670 (TRBV20-1, TRBJ2-1)
CSAPGLAGSYSDSSSS

SEQ ID NO: 305341 - protein, 18 aa, Homo sapiens
  CDR3 for alpha chain variable domain of TCR clone 152671 (TRAV29/DV5, TRAJ26)
CSVLLFSKRKPEGQNFVF

SEQ ID NO: 305342 - protein, 17 aa, Homo sapiens
  CDR3 for beta chain variable domain of TCR clone 152671 (TRBV20-1, TRBJ2-2)
CSASGSGQGGLTGELFL

SEQ ID NO: 305343 - protein, 13 aa, Homo sapiens
  CDR3 for alpha chain variable domain of TCR clone 152672 (TRAV23/DV6, TRAJ58)
CAATGTSGSRLTL

SEQ ID NO: 305344 - protein, 13 aa, Homo sapiens
  CDR3 for beta chain variable domain of TCR clone 152672 (TRBV5-5, TRBJ1-2)
CASSFWRGEDYTF

SEQ ID NO: 305345 - protein, 14 aa, Homo sapiens
  CDR3 for alpha chain variable domain of TCR clone 152673 (TRAV35, TRAJ33)
CAGSSQDSNYQLIW

SEQ ID NO: 305346 - protein, 15 aa, Homo sapiens
  CDR3 for beta chain variable domain of TCR clone 152673 (TRBV6-1, TRBJ2-3)
CASSERGGITDTQYF

SEQ ID NO: 305347 - protein, 15 aa, Homo sapiens
  CDR3 for alpha chain variable domain of TCR clone 152674 (TRAV26-2, TRAJ57)
CILRDIRGGSEKLVF

SEQ ID NO: 305348 - protein, 17 aa, Homo sapiens
  CDR3 for beta chain variable domain of TCR clone 152674 (TRBV7-3, TRBJ2-3)
RASSLMKRMRGADTQYF

SEQ ID NO: 305349 - protein, 13 aa, Homo sapiens
  CDR3 for alpha chain variable domain of TCR clone 152675 (TRAV25, TRAJ54)
CAGTIQGAQKLVF

SEQ ID NO: 305350 - protein, 15 aa, Homo sapiens
  CDR3 for beta chain variable domain of TCR clone 152675 (TRBV19, TRBJ1-5)
CASSILTGESQPQHF

SEQ ID NO: 305351 - protein, 17 aa, Homo sapiens
  CDR3 for alpha chain variable domain of TCR clone 152676 (TRAV3, TRAJ42)
CAVRDRGYGGSKGNLIF

SEQ ID NO: 305352 - protein, 14 aa, Homo sapiens
  CDR3 for beta chain variable domain of TCR clone 152676 (TRBV25-1, TRBJ1-1)
CASTHLGGNTEAFF

SEQ ID NO: 305353 - protein, 15 aa, Homo sapiens
  CDR3 for alpha chain variable domain of TCR clone 152677 (TRAV26-2, TRAJ45)
CILRDRVDQAEVLTD

SEQ ID NO: 305354 - protein, 15 aa, Homo sapiens
  CDR3 for beta chain variable domain of TCR clone 152677 (TRBV7-6, TRBJ2-5)
CASSKPTGPQETQYF

SEQ ID NO: 305355 - protein, 14 aa, Homo sapiens
  CDR3 for alpha chain variable domain of TCR clone 152678 (TRAV13-1, TRAJ40)
CAAHPTSGTYKYLF

SEQ ID NO: 305356 - protein, 16 aa, Homo sapiens
  CDR3 for beta chain variable domain of TCR clone 152678 (TRBV7-9, TRBJ2-6)
CASSLKGPLRANVLTA

SEQ ID NO: 305357 - protein, 11 aa, Homo sapiens
  CDR3 for alpha chain variable domain of TCR clone 152679 (TRAV4, TRAJ31)
CLVGDDARLMF

SEQ ID NO: 305358 - protein, 16 aa, Homo sapiens
  CDR3 for beta chain variable domain of TCR clone 152679 (TRBV7-2, TRBJ2-5)
CASSSKWLSGQETQYF

SEQ ID NO: 305359 - protein, 13 aa, Homo sapiens
  CDR3 for alpha chain variable domain of TCR clone 152680 (TRAV26-1, TRAJ36)
CIVVGTGANNLFF

SEQ ID NO: 305360 - protein, 15 aa, Homo sapiens
  CDR3 for beta chain variable domain of TCR clone 152680 (TRBV4-1, TRBJ2-7)
CASSQNTGRLYEQYF

SEQ ID NO: 305361 - protein, 14 aa, Homo sapiens
  CDR3 for alpha chain variable domain of TCR clone 152681 (TRAV26-1, TRAJ34)
CNVRVAYNTDKLIF

SEQ ID NO: 305362 - protein, 16 aa, Homo sapiens
  CDR3 for beta chain variable domain of TCR clone 152681 (TRBV7-3, TRBJ2-2)
CASSLKRGTLSGELFF

SEQ ID NO: 305363 - protein, 13 aa, Homo sapiens
  CDR3 for alpha chain variable domain of TCR clone 152682 (TRAV16, TRAJ31)
CALSAHNNARLMF

SEQ ID NO: 305364 - protein, 12 aa, Homo sapiens
  CDR3 for beta chain variable domain of TCR clone 152682 (TRBV7-2, TRBJ2-2)
CASSLEGGELFF

SEQ ID NO: 305365 - protein, 13 aa, Homo sapiens
  CDR3 for alpha chain variable domain of TCR clone 152683 (TRAV8-3, TRAJ6)
CAVGSGGSYIPTF

SEQ ID NO: 305366 - protein, 15 aa, Homo sapiens
  CDR3 for beta chain variable domain of TCR clone 152683 (TRBV25-1, TRBJ1-4)
CASSPGDSTNEKLFF

SEQ ID NO: 305367 - protein, 14 aa, Homo sapiens
  CDR3 for alpha chain variable domain of TCR clone 152684 (TRAV17, TRAJ23)
CATALGGQGGKLIF

SEQ ID NO: 305368 - protein, 17 aa, Homo sapiens
  CDR3 for beta chain variable domain of TCR clone 152684 (TRBV7-8, TRBJ2-6)
CASSAGTGGAGANVLTF

SEQ ID NO: 305369 - protein, 14 aa, Homo sapiens
  CDR3 for alpha chain variable domain of TCR clone 152685 (TRAV13-1, TRAJ44)
CAAKATGSASKPTF

SEQ ID NO: 305370 - protein, 13 aa, Homo sapiens
  CDR3 for beta chain variable domain of TCR clone 152685 (TRBV5-5, TRBJ1-2)
CASSFWRGEDYTF

SEQ ID NO: 305371 - protein, 16 aa, Homo sapiens
  CDR3 for alpha chain variable domain of TCR clone 152686 (TRAV12-2, TRAJ45)
CAVKRNPGGGPDGLTF

SEQ ID NO: 305372 - protein, 12 aa, Homo sapiens
  CDR3 for beta chain variable domain of TCR clone 152686 (TRBV6-1, TRBJ2-5)
CASSEGQETQYF

SEQ ID NO: 305373 - protein, 12 aa, Homo sapiens
  CDR3 for alpha chain variable domain of TCR clone 152687 (TRAV26-1, TRAJ17)
CIVRSAGNKLTF

SEQ ID NO: 305374 - protein, 16 aa, Homo sapiens
  CDR3 for beta chain variable domain of TCR clone 152687 (TRBV12-5, TRBJ2-5)
CASGPRTSGNQETQYF

SEQ ID NO: 305375 - protein, 12 aa, Homo sapiens
  CDR3 for alpha chain variable domain of TCR clone 152688 (TRAV8-6, TRAJ36)
CAVSDWLGQTTS

SEQ ID NO: 305376 - protein, 15 aa, Homo sapiens
  CDR3 for beta chain variable domain of TCR clone 152688 (TRBV6-1, TRBJ2-3)
CASSERGGSTDTQYF

SEQ ID NO: 305377 - protein, 17 aa, Homo sapiens
  CDR3 for alpha chain variable domain of TCR clone 152689 (TRAV26-1, TRAJ37)
CIVRVITVSSNTGKLIF

SEQ ID NO: 305378 - protein, 15 aa, Homo sapiens
  CDR3 for beta chain variable domain of TCR clone 152689 (TRBV6-1, TRBJ2-3)
CASSERGGITDTQYF

SEQ ID NO: 305379 - protein, 16 aa, Homo sapiens
  CDR3 for alpha chain variable domain of TCR clone 152690 (TRAV3, TRAJ21)
CAGRDIERGNFNKFYF

SEQ ID NO: 305380 - protein, 20 aa, Homo sapiens
  CDR3 for beta chain variable domain of TCR clone 152690 (TRBV4-1, TRBJ2-2)
CASSQASPPGLASNTGELFF

SEQ ID NO: 305381 - protein, 14 aa, Homo sapiens
  CDR3 for alpha chain variable domain of TCR clone 152691 (TRAV13-1, TRAJ44)
CAAKATGTASKLAF

SEQ ID NO: 305382 - protein, 16 aa, Homo sapiens
  CDR3 for beta chain variable domain of TCR clone 152691 (TRBV7-3, TRBJ2-3)
CQQLNEKDAGADTQYF

SEQ ID NO: 305383 - protein, 12 aa, Homo sapiens
  CDR3 for alpha chain variable domain of TCR clone 152692 (TRAV26-1, TRAJ36)
CIVETGANNLFF

SEQ ID NO: 305384 - protein, 14 aa, Homo sapiens
  CDR3 for beta chain variable domain of TCR clone 152692 (TRBV12-4, TRBJ1-1)
CASSLGTGGTEAFF

SEQ ID NO: 305385 - protein, 16 aa, Homo sapiens
  CDR3 for alpha chain variable domain of TCR clone 152693 (TRAV30, TRAJ24)
CGIEIVGADSWGKSQF

SEQ ID NO: 305386 - protein, 14 aa, Homo sapiens
  CDR3 for beta chain variable domain of TCR clone 152693 (TRBV12-5, TRBJ2-5)
CASGSRTHQETQYF

SEQ ID NO: 305387 - protein, 12 aa, Homo sapiens
  CDR3 for alpha chain variable domain of TCR clone 152694 (TRAV21, TRAJ30)
CAVMNRDDKIIF

SEQ ID NO: 305388 - protein, 17 aa, Homo sapiens
  CDR3 for beta chain variable domain of TCR clone 152694 (TRBV5-1, TRBJ1-1)
CATRPIRTGGVNTEAFF

SEQ ID NO: 305389 - protein, 14 aa, Homo sapiens
  CDR3 for alpha chain variable domain of TCR clone 152695 (TRAV9-2, TRAJ39)
CALYIYNAGNMLTF

SEQ ID NO: 305390 - protein, 13 aa, Homo sapiens
  CDR3 for beta chain variable domain of TCR clone 152695 (TRBV7-3, TRBJ2-7)
CASSKRRGGEQYL

SEQ ID NO: 305391 - protein, 14 aa, Homo sapiens
  CDR3 for alpha chain variable domain of TCR clone 152696 (TRAV1-2, TRAJ16)
CAVNRFSDGQKLLF

SEQ ID NO: 305392 - protein, 14 aa, Homo sapiens
  CDR3 for beta chain variable domain of TCR clone 152696 (TRBV7-3, TRBJ1-1)
CASSLKGGNTEAVF

SEQ ID NO: 305393 - protein, 14 aa, Homo sapiens
  CDR3 for alpha chain variable domain of TCR clone 152697 (TRAV26-1, TRAJ21)
CIVRPPYNFNKFYF

SEQ ID NO: 305394 - protein, 14 aa, Homo sapiens
  CDR3 for beta chain variable domain of TCR clone 152697 (TRBV19, TRBJ2-2)
CASSTLHRSGELFF

SEQ ID NO: 305395 - protein, 14 aa, Homo sapiens
  CDR3 for alpha chain variable domain of TCR clone 152698 (TRAV12-3, TRAJ42)
CEMNYGGSQGNLIF

SEQ ID NO: 305396 - protein, 15 aa, Homo sapiens
  CDR3 for beta chain variable domain of TCR clone 152698 (TRBV5-7, TRBJ1-5)
CVSSYGKLWDQPQHF

SEQ ID NO: 305397 - protein, 10 aa, Homo sapiens
  CDR3 for alpha chain variable domain of TCR clone 152699 (TRAV30, TRAJ24)
WMLTAGKFQF

SEQ ID NO: 305398 - protein, 14 aa, Homo sapiens
  CDR3 for beta chain variable domain of TCR clone 152699 (TRBV12-5, TRBJ2-5)
CASGSRTHQGTQYF

SEQ ID NO: 305399 - protein, 12 aa, Homo sapiens
  CDR3 for alpha chain variable domain of TCR clone 152700 (TRAV26-1, TRAJ35)
CIGLSFGNVLHF

SEQ ID NO: 305400 - protein, 14 aa, Homo sapiens
  CDR3 for beta chain variable domain of TCR clone 152700 (TRBV19, TRBJ2-1)
CASPTFVLRSEQFF

SEQ ID NO: 305401 - protein, 10 aa, Homo sapiens
  CDR3 for alpha chain variable domain of TCR clone 152701 (TRAV13-2, TRAJ20)
CARRDYKLSF

SEQ ID NO: 305402 - protein, 15 aa, Homo sapiens
  CDR3 for beta chain variable domain of TCR clone 152701 (TRBV2, TRBJ2-1)
CASSELAGSYNEQFF

SEQ ID NO: 305403 - protein, 17 aa, Homo sapiens
  CDR3 for alpha chain variable domain of TCR clone 152702 (TRAV26-1, TRAJ36)
CIVRPPGDQTRANNLFF

SEQ ID NO: 305404 - protein, 13 aa, Homo sapiens
  CDR3 for beta chain variable domain of TCR clone 152702 (TRBV7-3, TRBJ1-1)
CASSQDWGAEAFF

SEQ ID NO: 305405 - protein, 13 aa, Homo sapiens
  CDR3 for alpha chain variable domain of TCR clone 152703 (TRAV16, TRAJ10)
CDLAREEETNSPL

SEQ ID NO: 305406 - protein, 15 aa, Homo sapiens
  CDR3 for beta chain variable domain of TCR clone 152703 (TRBV6-3, TRBJ2-7)
CASSSPGTVFYEQYF

SEQ ID NO: 305407 - protein, 14 aa, Homo sapiens
  CDR3 for alpha chain variable domain of TCR clone 152704 (TRAV16, TRAJ37)
CALDISVNTGKLIF

SEQ ID NO: 305408 - protein, 14 aa, Homo sapiens
  CDR3 for beta chain variable domain of TCR clone 152704 (TRBV7-6, TRBJ2-7)
CASSCRQGADEQYF

SEQ ID NO: 305409 - protein, 16 aa, Homo sapiens
  CDR3 for alpha chain variable domain of TCR clone 152705 (TRAV3, TRAJ37)
CAVRPHGSGNTGKLIF

SEQ ID NO: 305410 - protein, 14 aa, Homo sapiens
  CDR3 for beta chain variable domain of TCR clone 152705 (TRBV28, TRBJ1-2)
CASRIQGANYGYTF

SEQ ID NO: 305411 - protein, 12 aa, Homo sapiens
  CDR3 for alpha chain variable domain of TCR clone 152706 (TRAV27, TRAJ9)
CAGESGGFKTIF

SEQ ID NO: 305412 - protein, 15 aa, Homo sapiens
  CDR3 for beta chain variable domain of TCR clone 152706 (TRBV19, TRBJ1-1)
CASTSGQIQNTEAFF

SEQ ID NO: 305413 - protein, 15 aa, Homo sapiens
  CDR3 for alpha chain variable domain of TCR clone 152707 (TRAV17, TRAJ4)
CATGTWSGGYNKLFF

SEQ ID NO: 305414 - protein, 15 aa, Homo sapiens
  CDR3 for beta chain variable domain of TCR clone 152707 (TRBV20-1, TRBJ2-7)
CSARDRVSGMDEQYF

SEQ ID NO: 305415 - protein, 12 aa, Homo sapiens
  CDR3 for alpha chain variable domain of TCR clone 152708 (TRAV21, TRAJ37)
CAVRGNTGKLIF

SEQ ID NO: 305416 - protein, 15 aa, Homo sapiens
  CDR3 for beta chain variable domain of TCR clone 152708 (TRBV23-1, TRBJ1-5)
CASSPTYEVPSILVM

SEQ ID NO: 305417 - protein, 12 aa, Homo sapiens
  CDR3 for alpha chain variable domain of TCR clone 152709 (TRAV13-1, TRAJ15)
CAASQAGTALIF

SEQ ID NO: 305418 - protein, 14 aa, Homo sapiens
  CDR3 for beta chain variable domain of TCR clone 152709 (TRBV19, TRBJ2-2)
CASSTLHRSAELFF

SEQ ID NO: 305419 - protein, 16 aa, Homo sapiens
  CDR3 for alpha chain variable domain of TCR clone 152710 (TRAV26-1, TRAJ45)
CIVEKYSGGGADGLTF

SEQ ID NO: 305420 - protein, 12 aa, Homo sapiens
  CDR3 for beta chain variable domain of TCR clone 152710 (TRBV12-4, TRBJ2-7)
CASSLGGYEQYF

SEQ ID NO: 305421 - protein, 14 aa, Homo sapiens
  CDR3 for alpha chain variable domain of TCR clone 152711 (TRAV21, TRAJ21)
CAVQGFGNFNKFYF

SEQ ID NO: 305422 - protein, 13 aa, Homo sapiens
  CDR3 for beta chain variable domain of TCR clone 152711 (TRBV18, TRBJ1-1)
CASSPETKPEAFF

SEQ ID NO: 305423 - protein, 18 aa, Homo sapiens
  CDR3 for alpha chain variable domain of TCR clone 152712 (TRAV26-2, TRAJ54)
CILRDVEVGIQGAQKLVF

SEQ ID NO: 305424 - protein, 14 aa, Homo sapiens
  CDR3 for beta chain variable domain of TCR clone 152712 (TRBV28, TRBJ1-5)
CASSLGVLVKPQHF

SEQ ID NO: 305425 - protein, 12 aa, Homo sapiens
  CDR3 for alpha chain variable domain of TCR clone 152713 (TRAV16, TRAJ56)
CAPTGANSKLRF

SEQ ID NO: 305426 - protein, 16 aa, Homo sapiens
  CDR3 for beta chain variable domain of TCR clone 152713 (TRBV7-9, TRBJ1-2)
CASSLGFSSGEDGYTF

SEQ ID NO: 305427 - protein, 15 aa, Homo sapiens
  CDR3 for alpha chain variable domain of TCR clone 152714 (TRAV16, TRAJ16)
CALQGGGSDGQKLLF

SEQ ID NO: 305428 - protein, 12 aa, Homo sapiens
  CDR3 for beta chain variable domain of TCR clone 152714 (TRBV12-4, TRBJ2-7)
CASSLGGYEQYF

SEQ ID NO: 305429 - protein, 12 aa, Homo sapiens
  CDR3 for alpha chain variable domain of TCR clone 152715 (TRAV21, TRAJ11)
CAATSGYSTLTS

SEQ ID NO: 305430 - protein, 14 aa, Homo sapiens
  CDR3 for beta chain variable domain of TCR clone 152715 (TRBV20-1, TRBJ2-7)
CGAPELAGVGEQYF

SEQ ID NO: 305431 - protein, 12 aa, Homo sapiens
  CDR3 for alpha chain variable domain of TCR clone 152716 (TRAV13-1, TRAJ21)
CAAKEGFNKFYF

SEQ ID NO: 305432 - protein, 12 aa, Homo sapiens
  CDR3 for beta chain variable domain of TCR clone 152716 (TRBV7-9, TRBJ2-7)
CASSLARDEQYF

SEQ ID NO: 305433 - protein, 15 aa, Homo sapiens
  CDR3 for alpha chain variable domain of TCR clone 152717 (TRAV26-1, TRAJ29)
CIVRVEGSGKTPLVF

SEQ ID NO: 305434 - protein, 11 aa, Homo sapiens
  CDR3 for beta chain variable domain of TCR clone 152717 (TRBV6-3, TRBJ2-3)
CATGQADTQYF

SEQ ID NO: 305435 - protein, 11 aa, Homo sapiens
  CDR3 for alpha chain variable domain of TCR clone 152718 (TRAV2, TRAJ33)
CAVESNYQLIW

SEQ ID NO: 305436 - protein, 14 aa, Homo sapiens
  CDR3 for beta chain variable domain of TCR clone 152718 (TRBV28, TRBJ1-4)
CASSFGTFDEKLFF

SEQ ID NO: 305437 - protein, 12 aa, Homo sapiens
  CDR3 for alpha chain variable domain of TCR clone 152719 (TRAV21, TRAJ33)
CAKMDSNYQLIW

SEQ ID NO: 305438 - protein, 16 aa, Homo sapiens
  CDR3 for beta chain variable domain of TCR clone 152719 (TRBV27, TRBJ2-2)
CASSFRGLVRTGELFF

SEQ ID NO: 305439 - protein, 14 aa, Homo sapiens
  CDR3 for alpha chain variable domain of TCR clone 152720 (TRAV12-2, TRAJ13)
CAVKKTGGYQKVTF

SEQ ID NO: 305440 - protein, 15 aa, Homo sapiens
  CDR3 for beta chain variable domain of TCR clone 152720 (TRBV20-1, TRBJ2-1)
CSARGVGGTYNEQFF

SEQ ID NO: 305441 - protein, 18 aa, Homo sapiens
  CDR3 for alpha chain variable domain of TCR clone 152721 (TRAV12-3, TRAJ52)
CAMSVGGAGGTSYGKLTF

SEQ ID NO: 305442 - protein, 17 aa, Homo sapiens
  CDR3 for beta chain variable domain of TCR clone 152721 (TRBV13, TRBJ2-3)
CASSLCRVAGGRNTQYF

SEQ ID NO: 305443 - protein, 17 aa, Homo sapiens
  CDR3 for alpha chain variable domain of TCR clone 152722 (TRAV3, TRAJ6)
CAVRDGPRSVGSYIPTF

SEQ ID NO: 305444 - protein, 14 aa, Homo sapiens
  CDR3 for beta chain variable domain of TCR clone 152722 (TRBV7-2, TRBJ2-7)
CASSPKTSFYEQYF

SEQ ID NO: 305445 - protein, 13 aa, Homo sapiens
  CDR3 for alpha chain variable domain of TCR clone 152723 (TRAV27, TRAJ54)
CAGAGQGVQKLVF

SEQ ID NO: 305446 - protein, 15 aa, Homo sapiens
  CDR3 for beta chain variable domain of TCR clone 152723 (TRBV18, TRBJ2-6)
CASSPSYAGANVLTF

SEQ ID NO: 305447 - protein, 13 aa, Homo sapiens
  CDR3 for alpha chain variable domain of TCR clone 152724 (TRAV8-6, TRAJ49)
CAVITNTGNQLYF

SEQ ID NO: 305448 - protein, 14 aa, Homo sapiens
  CDR3 for beta chain variable domain of TCR clone 152724 (TRBV5-1, TRBJ2-7)
CASSKGESVYEQYF

SEQ ID NO: 305449 - protein, 11 aa, Homo sapiens
  CDR3 for alpha chain variable domain of TCR clone 152725 (TRAV2, TRAJ13)
CASGGYQKVTF

SEQ ID NO: 305450 - protein, 12 aa, Homo sapiens
  CDR3 for beta chain variable domain of TCR clone 152725 (TRBV5-1, TRBJ2-7)
CASSLRGYEQYF

SEQ ID NO: 305451 - protein, 13 aa, Homo sapiens
  CDR3 for alpha chain variable domain of TCR clone 152726 (TRAV23/DV6, TRAJ58)
CAATGTSGSRLTF

SEQ ID NO: 305452 - protein, 17 aa, Homo sapiens
  CDR3 for beta chain variable domain of TCR clone 152726 (TRBV13, TRBJ2-3)
CASSLSRVAGGRNTQYF

SEQ ID NO: 305453 - protein, 15 aa, Homo sapiens
  CDR3 for alpha chain variable domain of TCR clone 152727 (TRAV12-2, TRAJ53)
CAVNGGGGSNYKLTF

SEQ ID NO: 305454 - protein, 12 aa, Homo sapiens
  CDR3 for beta chain variable domain of TCR clone 152727 (TRBV11-2, TRBJ2-2)
CASSFGGGELFF

SEQ ID NO: 305455 - protein, 15 aa, Homo sapiens
  CDR3 for alpha chain variable domain of TCR clone 152728 (TRAV1-2, TRAJ35)
CAVRDPGGFGNVLHC

SEQ ID NO: 305456 - protein, 14 aa, Homo sapiens
  CDR3 for beta chain variable domain of TCR clone 152728 (TRBV5-1, TRBJ2-1)
CASSLDDRFDEQYF

SEQ ID NO: 305457 - protein, 12 aa, Homo sapiens
  CDR3 for alpha chain variable domain of TCR clone 152729 (TRAV21, TRAJ20)
CAVRGNDNKLSF

SEQ ID NO: 305458 - protein, 14 aa, Homo sapiens
  CDR3 for beta chain variable domain of TCR clone 152729 (TRBV7-8, TRBJ2-7)
CASSQTQGADEQYF

SEQ ID NO: 305459 - protein, 11 aa, Homo sapiens
  CDR3 for alpha chain variable domain of TCR clone 152730 (TRAV21, TRAJ11)
CAVNGYSTLTF

SEQ ID NO: 305460 - protein, 16 aa, Homo sapiens
  CDR3 for beta chain variable domain of TCR clone 152730 (TRBV19, TRBJ2-1)
CASSKADRAPTMSSSS

SEQ ID NO: 305461 - protein, 14 aa, Homo sapiens
  CDR3 for alpha chain variable domain of TCR clone 152731 (TRAV27, TRAJ36)
CAGPPKRWANNLFF

SEQ ID NO: 305462 - protein, 15 aa, Homo sapiens
  CDR3 for beta chain variable domain of TCR clone 152731 (TRBV18, TRBJ2-7)
CASSPASTPNYEQYF

SEQ ID NO: 305463 - protein, 15 aa, Homo sapiens
  CDR3 for alpha chain variable domain of TCR clone 152732 (TRAV3, TRAJ5)
CAVRDLDTGRRALTF

SEQ ID NO: 305464 - protein, 14 aa, Homo sapiens
  CDR3 for beta chain variable domain of TCR clone 152732 (TRBV4-1, TRBJ2-7)
CASSRTGVAFEQYF

SEQ ID NO: 305465 - protein, 13 aa, Homo sapiens
  CDR3 for alpha chain variable domain of TCR clone 152733 (TRAV27, TRAJ56)
CAGKPGANSKVTF

SEQ ID NO: 305466 - protein, 18 aa, Homo sapiens
  CDR3 for beta chain variable domain of TCR clone 152733 (TRBV11-2, TRBJ2-3)
CASSLGGASRGAPNTQYF

SEQ ID NO: 305467 - protein, 17 aa, Homo sapiens
  CDR3 for alpha chain variable domain of TCR clone 152734 (TRAV3, TRAJ12)
CAVRDGGRMDSSYKLIF

SEQ ID NO: 305468 - protein, 13 aa, Homo sapiens
  CDR3 for beta chain variable domain of TCR clone 152734 (TRBV12-5, TRBJ2-3)
CASGDRQSDTQYF

SEQ ID NO: 305469 - protein, 15 aa, Homo sapiens
  CDR3 for alpha chain variable domain of TCR clone 152735 (TRAV3, TRAJ5)
CAVRDLDTGRRALTF

SEQ ID NO: 305470 - protein, 12 aa, Homo sapiens
  CDR3 for beta chain variable domain of TCR clone 152735 (TRBV7-9, TRBJ2-7)
CATRTDAYEQYF

SEQ ID NO: 305471 - protein, 15 aa, Homo sapiens
  CDR3 for alpha chain variable domain of TCR clone 152736 (TRAV12-1, TRAJ45)
CVVLSGGGGADGLIF

SEQ ID NO: 305472 - protein, 13 aa, Homo sapiens
  CDR3 for beta chain variable domain of TCR clone 152736 (TRBV7-3, TRBJ1-1)
CASSQDWGAEAFF

SEQ ID NO: 305473 - protein, 14 aa, Homo sapiens
  CDR3 for alpha chain variable domain of TCR clone 152737 (TRAV1-2, TRAJ8)
CAVREDTGFQKIVF

SEQ ID NO: 305474 - protein, 12 aa, Homo sapiens
  CDR3 for beta chain variable domain of TCR clone 152737 (TRBV7-8, TRBJ2-7)
CASSLGDREQYF

SEQ ID NO: 305475 - protein, 12 aa, Homo sapiens
  CDR3 for alpha chain variable domain of TCR clone 152738 (TRAV8-3, TRAJ20)
CAVGANDYKLRF

SEQ ID NO: 305476 - protein, 16 aa, Homo sapiens
  CDR3 for beta chain variable domain of TCR clone 152738 (TRBV19, TRBJ2-2)
CASRSPGTGATGELIF

SEQ ID NO: 305477 - protein, 14 aa, Homo sapiens
  CDR3 for alpha chain variable domain of TCR clone 152739 (TRAV12-2, TRAJ13)
CAVKKTGGYQNVTF

SEQ ID NO: 305478 - protein, 14 aa, Homo sapiens
  CDR3 for beta chain variable domain of TCR clone 152739 (TRBV5-5, TRBJ2-7)
CASSLGQGTYEQYF

SEQ ID NO: 305479 - protein, 14 aa, Homo sapiens
  CDR3 for alpha chain variable domain of TCR clone 152740 (TRAV2, TRAJ9)
CAVKDRSGGFKTIF

SEQ ID NO: 305480 - protein, 13 aa, Homo sapiens
  CDR3 for beta chain variable domain of TCR clone 152740 (TRBV7-3, TRBJ1-1)
CASSQDWGAEAFF

SEQ ID NO: 305481 - protein, 15 aa, Homo sapiens
  CDR3 for alpha chain variable domain of TCR clone 152741 (TRAV2, TRAJ11)
CAVGGRNSGYSTLTF

SEQ ID NO: 305482 - protein, 12 aa, Homo sapiens
  CDR3 for beta chain variable domain of TCR clone 152741 (TRBV12-5, TRBJ2-5)
CASGQGVETQYF

SEQ ID NO: 305483 - protein, 13 aa, Homo sapiens
  CDR3 for alpha chain variable domain of TCR clone 152742 (TRAV38-1, TRAJ42)
CTRWGGSQGNLIF

SEQ ID NO: 305484 - protein, 10 aa, Homo sapiens
  CDR3 for beta chain variable domain of TCR clone 152742 (TRBV2, TRBJ2-5)
CASSAATQYF

SEQ ID NO: 305485 - protein, 13 aa, Homo sapiens
  CDR3 for alpha chain variable domain of TCR clone 152743 (TRAV23/DV6, TRAJ44)
CSINTGTASKLTF

SEQ ID NO: 305486 - protein, 14 aa, Homo sapiens
  CDR3 for beta chain variable domain of TCR clone 152743 (TRBV2, TRBJ2-1)
CASSEALDGNEKFF

SEQ ID NO: 305487 - protein, 14 aa, Homo sapiens
  CDR3 for alpha chain variable domain of TCR clone 152744 (TRAV1-2, TRAJ8)
CAVREDTGFQKLVF

SEQ ID NO: 305488 - protein, 16 aa, Homo sapiens
  CDR3 for beta chain variable domain of TCR clone 152744 (TRBV7-3, TRBJ2-2)
CASSLKRGTLAGELFF

SEQ ID NO: 305489 - protein, 14 aa, Homo sapiens
  CDR3 for alpha chain variable domain of TCR clone 152745 (TRAV12-3, TRAJ42)
CAMNYGGSQGNLIF

SEQ ID NO: 305490 - protein, 14 aa, Homo sapiens
  CDR3 for beta chain variable domain of TCR clone 152745 (TRBV7-2, TRBJ2-5)
SASSFTQGQETQYF

SEQ ID NO: 305491 - protein, 14 aa, Homo sapiens
  CDR3 for alpha chain variable domain of TCR clone 152746 (TRAV29/DV5, TRAJ44)
CAASATGPASKLTF

SEQ ID NO: 305492 - protein, 16 aa, Homo sapiens
  CDR3 for beta chain variable domain of TCR clone 152746 (TRBV7-9, TRBJ1-3)
CASSQTSGLRMGTIYF

SEQ ID NO: 305493 - protein, 12 aa, Homo sapiens
  CDR3 for alpha chain variable domain of TCR clone 152747 (TRAV20, TRAJ33)
CAVRGSNYQLIR

SEQ ID NO: 305494 - protein, 13 aa, Homo sapiens
  CDR3 for beta chain variable domain of TCR clone 152747 (TRBV4-3, TRBJ1-1)
CASSPTGNTEAFF

SEQ ID NO: 305495 - protein, 13 aa, Homo sapiens
  CDR3 for alpha chain variable domain of TCR clone 152748 (TRAV12-1, TRAJ6)
CVVFPGGSYIPTF

SEQ ID NO: 305496 - protein, 11 aa, Homo sapiens
  CDR3 for beta chain variable domain of TCR clone 152748 (TRBV6-3, TRBJ2-3)
CATGQADTQYF

SEQ ID NO: 305497 - protein, 15 aa, Homo sapiens
  CDR3 for alpha chain variable domain of TCR clone 152749 (TRAV2, TRAJ15)
CAVEDRGQAGTALIF

SEQ ID NO: 305498 - protein, 13 aa, Homo sapiens
  CDR3 for beta chain variable domain of TCR clone 152749 (TRBV4-2, TRBJ1-1)
CASSQAGNTEAFF

SEQ ID NO: 305499 - protein, 13 aa, Homo sapiens
  CDR3 for alpha chain variable domain of TCR clone 152750 (TRAV3, TRAJ30)
CAVRDRGDDKIIF

SEQ ID NO: 305500 - protein, 14 aa, Homo sapiens
  CDR3 for beta chain variable domain of TCR clone 152750 (TRBV18, TRBJ2-7)
CASSPRGGAYEQYF

SEQ ID NO: 305501 - protein, 12 aa, Homo sapiens
  CDR3 for alpha chain variable domain of TCR clone 152751 (TRAV8-3, TRAJ34)
WASAYNTDKLIF

SEQ ID NO: 305502 - protein, 13 aa, Homo sapiens
  CDR3 for beta chain variable domain of TCR clone 152751 (TRBV6-4, TRBJ2-3)
CASSVSWADTQYF

SEQ ID NO: 305503 - protein, 18 aa, Homo sapiens
  CDR3 for alpha chain variable domain of TCR clone 152752 (TRAV26-1, TRAJ52)
CIVRVAGAGGTSYGKLTF

SEQ ID NO: 305504 - protein, 13 aa, Homo sapiens
  CDR3 for beta chain variable domain of TCR clone 152752 (TRBV7-8, TRBJ1-2)
CASSAQSYYGYAF

SEQ ID NO: 305505 - protein, 13 aa, Homo sapiens
  CDR3 for alpha chain variable domain of TCR clone 152753 (TRAV12-2, TRAJ42)
CAVKRGSQGNLIF

SEQ ID NO: 305506 - protein, 14 aa, Homo sapiens
  CDR3 for beta chain variable domain of TCR clone 152753 (TRBV7-6, TRBJ2-3)
CASSLGTVTDTQYF

SEQ ID NO: 305507 - protein, 13 aa, Homo sapiens
  CDR3 for alpha chain variable domain of TCR clone 152754 (TRAV8-3, TRAJ28)
CAVGAVGSYQLTF

SEQ ID NO: 305508 - protein, 12 aa, Homo sapiens
  CDR3 for beta chain variable domain of TCR clone 152754 (TRBV7-3, TRBJ2-1)
CASSLGFNEQFF

SEQ ID NO: 305509 - protein, 15 aa, Homo sapiens
  CDR3 for alpha chain variable domain of TCR clone 152755 (TRAV12-3, TRAJ6)
CAMSAASGGSYIPTF

SEQ ID NO: 305510 - protein, 13 aa, Homo sapiens
  CDR3 for beta chain variable domain of TCR clone 152755 (TRBV20-1, TRBJ1-2)
FSASTERIYSYTF

SEQ ID NO: 305511 - protein, 15 aa, Homo sapiens
  CDR3 for alpha chain variable domain of TCR clone 152756 (TRAV17, TRAJ57)
CATGPSQGGSEKLVF

SEQ ID NO: 305512 - protein, 17 aa, Homo sapiens
  CDR3 for beta chain variable domain of TCR clone 152756 (TRBV24-1, TRBJ2-1)
CATSDGSTSGAYNEQFF

SEQ ID NO: 305513 - protein, 14 aa, Homo sapiens
  CDR3 for alpha chain variable domain of TCR clone 152757 (TRAV12-3, TRAJ42)
CAMNYGGSQGNLIF

SEQ ID NO: 305514 - protein, 15 aa, Homo sapiens
  CDR3 for beta chain variable domain of TCR clone 152757 (TRBV5-7, TRBJ1-5)
CASSYGKLWDQPHHF

SEQ ID NO: 305515 - protein, 21 aa, Homo sapiens
  CDR3 for alpha chain variable domain of TCR clone 152758 (TRAV30, TRAJ48)
TASQLSYSGTYFCIGNEKLTF

SEQ ID NO: 305516 - protein, 14 aa, Homo sapiens
  CDR3 for beta chain variable domain of TCR clone 152758 (TRBV7-6, TRBJ2-3)
CASSVAGGTDTQYF

SEQ ID NO: 305517 - protein, 12 aa, Homo sapiens
  CDR3 for alpha chain variable domain of TCR clone 152759 (TRAV13-1, TRAJ27)
CAAHTNAGKSTF

SEQ ID NO: 305518 - protein, 14 aa, Homo sapiens
  CDR3 for beta chain variable domain of TCR clone 152759 (TRBV19, TRBJ2-2)
CASSAQGIAGELFF

SEQ ID NO: 305519 - protein, 14 aa, Homo sapiens
  CDR3 for alpha chain variable domain of TCR clone 152760 (TRAV2, TRAJ9)
CAVEDRCGGFKTIF

SEQ ID NO: 305520 - protein, 17 aa, Homo sapiens
  CDR3 for beta chain variable domain of TCR clone 152760 (TRBV24-1, TRBJ2-1)
CATSDVSTSGTYNEQFF

SEQ ID NO: 305521 - protein, 17 aa, Homo sapiens
  CDR3 for alpha chain variable domain of TCR clone 152761 (TRAV3, TRAJ6)
CAVRDGPRAGGSYIPTF

SEQ ID NO: 305522 - protein, 14 aa, Homo sapiens
  CDR3 for beta chain variable domain of TCR clone 152761 (TRBV7-2, TRBJ2-5)
CASSLVGREETQYF

SEQ ID NO: 305523 - protein, 14 aa, Homo sapiens
  CDR3 for alpha chain variable domain of TCR clone 152762 (TRAV14/DV4, TRAJ26)
CAMREGTYGQNFVF

SEQ ID NO: 305524 - protein, 13 aa, Homo sapiens
  CDR3 for beta chain variable domain of TCR clone 152762 (TRBV7-3, TRBJ1-2)
CASSLKRGYGYTF

SEQ ID NO: 305525 - protein, 13 aa, Homo sapiens
  CDR3 for alpha chain variable domain of TCR clone 152763 (TRAV12-2, TRAJ40)
CAVTTSGTYKYIF

SEQ ID NO: 305526 - protein, 12 aa, Homo sapiens
  CDR3 for beta chain variable domain of TCR clone 152763 (TRBV7-6, TRBJ2-5)
CASSLSQETQYF

SEQ ID NO: 305527 - protein, 14 aa, Homo sapiens
  CDR3 for alpha chain variable domain of TCR clone 152764 (TRAV12-3, TRAJ10)
SHLPLTGGGNKLTF

SEQ ID NO: 305528 - protein, 15 aa, Homo sapiens
  CDR3 for beta chain variable domain of TCR clone 152764 (TRBV19, TRBJ2-1)
CASSSPGVPLDEQFL

SEQ ID NO: 305529 - protein, 14 aa, Homo sapiens
  CDR3 for alpha chain variable domain of TCR clone 152765 (TRAV13-1, TRAJ35)
CAASKGGFGNVLHF

SEQ ID NO: 305530 - protein, 13 aa, Homo sapiens
  CDR3 for beta chain variable domain of TCR clone 152765 (TRBV7-3, TRBJ1-1)
CACSQDWGAEAFF

SEQ ID NO: 305531 - protein, 16 aa, Homo sapiens
  CDR3 for alpha chain variable domain of TCR clone 152766 (TRAV30, TRAJ24)
CGTEMVDADSWGKFQF

SEQ ID NO: 305532 - protein, 15 aa, Homo sapiens
  CDR3 for beta chain variable domain of TCR clone 152766 (TRBV12-4, TRBJ2-2)
CASSPNDSGTGELFF

SEQ ID NO: 305533 - protein, 14 aa, Homo sapiens
  CDR3 for alpha chain variable domain of TCR clone 152767 (TRAV21, TRAJ15)
CAVSLNQAGTALIF

SEQ ID NO: 305534 - protein, 15 aa, Homo sapiens
  CDR3 for beta chain variable domain of TCR clone 152767 (TRBV7-9, TRBJ2-7)
CASSPGGGLTYEQYF

SEQ ID NO: 305535 - protein, 13 aa, Homo sapiens
  CDR3 for alpha chain variable domain of TCR clone 152768 (TRAV26-2, TRAJ43)
CILRAVNNNDMRF

SEQ ID NO: 305536 - protein, 15 aa, Homo sapiens
  CDR3 for beta chain variable domain of TCR clone 152768 (TRBV7-2, TRBJ2-1)
CASTHWTGIYNEQFF

SEQ ID NO: 305537 - protein, 13 aa, Homo sapiens
  CDR3 for alpha chain variable domain of TCR clone 152769 (TRAV13-2, TRAJ53)
CAENMGSNYKLTF

SEQ ID NO: 305538 - protein, 20 aa, Homo sapiens
  CDR3 for beta chain variable domain of TCR clone 152769 (TRBV7-8, TRBJ2-2)
CASSHLFPGPTIHITGELFF

SEQ ID NO: 305539 - protein, 18 aa, Homo sapiens
  CDR3 for alpha chain variable domain of TCR clone 152770 (TRAV12-3, TRAJ52)
CAMSAGGAGGASYGKLTF

SEQ ID NO: 305540 - protein, 15 aa, Homo sapiens
  CDR3 for beta chain variable domain of TCR clone 152770 (TRBV27, TRBJ1-6)
CASSFGRGLGSPLHF

SEQ ID NO: 305541 - protein, 14 aa, Homo sapiens
  CDR3 for alpha chain variable domain of TCR clone 152771 (TRAV12-3, TRAJ54)
CAMSALQGAQKLEF

SEQ ID NO: 305542 - protein, 15 aa, Homo sapiens
  CDR3 for beta chain variable domain of TCR clone 152771 (TRBV19, TRBJ2-4)
CASSTPGIAKNIQYF

SEQ ID NO: 305543 - protein, 12 aa, Homo sapiens
  CDR3 for alpha chain variable domain of TCR clone 152772 (TRAV17, TRAJ4)
SATYGGYNKLIF

SEQ ID NO: 305544 - protein, 13 aa, Homo sapiens
  CDR3 for beta chain variable domain of TCR clone 152772 (TRBV29-1, TRBJ2-2)
CSTTGVDTGELFF

SEQ ID NO: 305545 - protein, 16 aa, Homo sapiens
  CDR3 for alpha chain variable domain of TCR clone 152773 (TRAV3, TRAJ10)
CAVRDMRAGGGNKLTF

SEQ ID NO: 305546 - protein, 17 aa, Homo sapiens
  CDR3 for beta chain variable domain of TCR clone 152773 (TRBV25-1, TRBJ2-1)
CAGSVYGQGRGVYEQFF

SEQ ID NO: 305547 - protein, 13 aa, Homo sapiens
  CDR3 for alpha chain variable domain of TCR clone 152774 (TRAV13-1, TRAJ12)
CAASPDSSYKLIF

SEQ ID NO: 305548 - protein, 16 aa, Homo sapiens
  CDR3 for beta chain variable domain of TCR clone 152774 (TRBV15, TRBJ2-1)
CATSSERLAGAYEQFF

SEQ ID NO: 305549 - protein, 23 aa, Homo sapiens
  CDR3 for alpha chain variable domain of TCR clone 152775 (TRAV26-1, )
CIADNAGNNTIQNPDPAVYQLRD

SEQ ID NO: 305550 - protein, 13 aa, Homo sapiens
  CDR3 for beta chain variable domain of TCR clone 152775 (TRBV20-1, TRBJ1-1)
CSARGGGNTEAFF

SEQ ID NO: 305551 - protein, 17 aa, Homo sapiens
  CDR3 for alpha chain variable domain of TCR clone 152776 (TRAV16, TRAJ37)
CAFWPKNGPSNTGKLIF

SEQ ID NO: 305552 - protein, 17 aa, Homo sapiens
  CDR3 for beta chain variable domain of TCR clone 152776 (TRBV6-5, TRBJ2-7)
CASSYSFWGQGSYEQYF

SEQ ID NO: 305553 - protein, 14 aa, Homo sapiens
  CDR3 for alpha chain variable domain of TCR clone 152777 (TRAV12-2, TRAJ13)
CAVKKTGGYQKFTF

SEQ ID NO: 305554 - protein, 15 aa, Homo sapiens
  CDR3 for beta chain variable domain of TCR clone 152777 (TRBV27, TRBJ2-1)
RASSNGGGSSNEQFF

SEQ ID NO: 305555 - protein, 16 aa, Homo sapiens
  CDR3 for alpha chain variable domain of TCR clone 152778 (TRAV3, TRAJ37)
CAVRGKGSGNTGKLIF

SEQ ID NO: 305556 - protein, 15 aa, Homo sapiens
  CDR3 for beta chain variable domain of TCR clone 152778 (TRBV7-9, TRBJ2-2)
GASGPLDTFPGELFF

SEQ ID NO: 305557 - protein, 16 aa, Homo sapiens
  CDR3 for alpha chain variable domain of TCR clone 152779 (TRAV8-3, TRAJ42)
CAVGEGNGGSQGNLIF

SEQ ID NO: 305558 - protein, 15 aa, Homo sapiens
  CDR3 for beta chain variable domain of TCR clone 152779 (TRBV9, TRBJ1-6)
CASSVAGTGDSPLHF

SEQ ID NO: 305559 - protein, 14 aa, Homo sapiens
  CDR3 for alpha chain variable domain of TCR clone 152780 (TRAV12-2, TRAJ40)
CAVKIPSGTYKYIF

SEQ ID NO: 305560 - protein, 15 aa, Homo sapiens
  CDR3 for beta chain variable domain of TCR clone 152780 (TRBV12-4, TRBJ2-1)
CASSGSGGTLGEQFF

SEQ ID NO: 305561 - protein, 11 aa, Homo sapiens
  CDR3 for alpha chain variable domain of TCR clone 152781 (TRAV1-1, TRAJ5)
CAVRVRRALTF

SEQ ID NO: 305562 - protein, 13 aa, Homo sapiens
  CDR3 for beta chain variable domain of TCR clone 152781 (TRBV28, TRBJ2-7)
CASKAGGVYEQYF

SEQ ID NO: 305563 - protein, 18 aa, Homo sapiens
  CDR3 for alpha chain variable domain of TCR clone 152782 (TRAV13-1, TRAJ52)
CAASKRSAGGTSYGKQTF

SEQ ID NO: 305564 - protein, 14 aa, Homo sapiens
  CDR3 for beta chain variable domain of TCR clone 152782 (TRBV19, TRBJ2-7)
CASTVQGRPYEQYF

SEQ ID NO: 305565 - protein, 16 aa, Homo sapiens
  CDR3 for alpha chain variable domain of TCR clone 152783 (TRAV3, TRAJ10)
CAVRDRLTGGGNKLTL

SEQ ID NO: 305566 - protein, 17 aa, Homo sapiens
  CDR3 for beta chain variable domain of TCR clone 152783 (TRBV11-2, TRBJ2-1)
CASSLYPPGVEYNEQFF

SEQ ID NO: 305567 - protein, 10 aa, Homo sapiens
  CDR3 for alpha chain variable domain of TCR clone 152784 (TRAV23/DV6, TRAJ57)
CAASSTLSQG

SEQ ID NO: 305568 - protein, 16 aa, Homo sapiens
  CDR3 for beta chain variable domain of TCR clone 152784 (TRBV20-1, TRBJ2-7)
CSARGSVVADIYEQYF

SEQ ID NO: 305569 - protein, 12 aa, Homo sapiens
  CDR3 for alpha chain variable domain of TCR clone 152785 (TRAV3, TRAJ43)
CAVRDPNNDMRF

SEQ ID NO: 305570 - protein, 14 aa, Homo sapiens
  CDR3 for beta chain variable domain of TCR clone 152785 (TRBV7-9, TRBJ2-2)
CASSLGHRTGELFF

SEQ ID NO: 305571 - protein, 16 aa, Homo sapiens
  CDR3 for alpha chain variable domain of TCR clone 152786 (TRAV3, TRAJ23)
CAVKIGIYNQGGKLIF

SEQ ID NO: 305572 - protein, 13 aa, Homo sapiens
  CDR3 for beta chain variable domain of TCR clone 152786 (TRBV7-3, TRBJ1-2)
CASSLKRGYGYTF

SEQ ID NO: 305573 - protein, 15 aa, Homo sapiens
  CDR3 for alpha chain variable domain of TCR clone 152787 (TRAV3, TRAJ22)
CAVRDRGGSARQLTF

SEQ ID NO: 305574 - protein, 13 aa, Homo sapiens
  CDR3 for beta chain variable domain of TCR clone 152787 (TRBV20-1, TRBJ1-1)
CSARAGGNTEAFF

SEQ ID NO: 305575 - protein, 15 aa, Homo sapiens
  CDR3 for alpha chain variable domain of TCR clone 152788 (TRAV8-3, TRAJ27)
CAVGPSKTNAGKSTF

SEQ ID NO: 305576 - protein, 15 aa, Homo sapiens
  CDR3 for beta chain variable domain of TCR clone 152788 (TRBV7-6, TRBJ2-5)
CASSKPTGPEETQYF

SEQ ID NO: 305577 - protein, 13 aa, Homo sapiens
  CDR3 for alpha chain variable domain of TCR clone 152789 (TRAV13-2, TRAJ48)
CAEMDFGNENLTF

SEQ ID NO: 305578 - protein, 14 aa, Homo sapiens
  CDR3 for beta chain variable domain of TCR clone 152789 (TRBV19, TRBJ2-7)
CASSMGQGAIEQYF

SEQ ID NO: 305579 - protein, 15 aa, Homo sapiens
  CDR3 for alpha chain variable domain of TCR clone 152790 (TRAV8-3, TRAJ27)
CAVGPSKTNAGKSTS

SEQ ID NO: 305580 - protein, 15 aa, Homo sapiens
  CDR3 for beta chain variable domain of TCR clone 152790 (TRBV7-2, TRBJ2-1)
CASSSRLAGGNEQFF

SEQ ID NO: 305581 - protein, 14 aa, Homo sapiens
  CDR3 for alpha chain variable domain of TCR clone 152791 (TRAV2, TRAJ37)
CAADFTSNTGKLIF

SEQ ID NO: 305582 - protein, 14 aa, Homo sapiens
  CDR3 for beta chain variable domain of TCR clone 152791 (TRBV7-2, TRBJ2-7)
CASSPKTSFYEQYF

SEQ ID NO: 305583 - protein, 14 aa, Homo sapiens
  CDR3 for alpha chain variable domain of TCR clone 152792 (TRAV8-4, TRAJ13)
CAVTLSGGYQKVTF

SEQ ID NO: 305584 - protein, 16 aa, Homo sapiens
  CDR3 for beta chain variable domain of TCR clone 152792 (TRBV19, TRBJ2-2)
CASSTARASNTGELFF

SEQ ID NO: 305585 - protein, 14 aa, Homo sapiens
  CDR3 for alpha chain variable domain of TCR clone 152793 (TRAV16, TRAJ54)
CSLSDGQGAQKLVF

SEQ ID NO: 305586 - protein, 13 aa, Homo sapiens
  CDR3 for beta chain variable domain of TCR clone 152793 (TRBV20-1, TRBJ2-4)
CSAPTWAGNIQYF

SEQ ID NO: 305587 - protein, 14 aa, Homo sapiens
  CDR3 for alpha chain variable domain of TCR clone 152794 (TRAV9-2, TRAJ39)
CALYIYNAGNMLTF

SEQ ID NO: 305588 - protein, 15 aa, Homo sapiens
  CDR3 for beta chain variable domain of TCR clone 152794 (TRBV29-1, TRBJ2-1)
CSGRDRKSSYNEQFF

SEQ ID NO: 305589 - protein, 13 aa, Homo sapiens
  CDR3 for alpha chain variable domain of TCR clone 152795 (TRAV8-1, TRAJ30)
CAVIMNRDDKIIF

SEQ ID NO: 305590 - protein, 14 aa, Homo sapiens
  CDR3 for beta chain variable domain of TCR clone 152795 (TRBV2, TRBJ2-7)
CASSLTSGGYEQYF

SEQ ID NO: 305591 - protein, 13 aa, Homo sapiens
  CDR3 for alpha chain variable domain of TCR clone 152796 (TRAV8-4, TRAJ47)
CAVTALYGNKLGF

SEQ ID NO: 305592 - protein, 14 aa, Homo sapiens
  CDR3 for beta chain variable domain of TCR clone 152796 (TRBV19, TRBJ2-7)
CASSIGGAVAEQYF

SEQ ID NO: 305593 - protein, 21 aa, Homo sapiens
  CDR3 for alpha chain variable domain of TCR clone 152797 (TRAV29/DV5, TRAJ52)
CSVLLCSKREAGGTSYGKLTF

SEQ ID NO: 305594 - protein, 17 aa, Homo sapiens
  CDR3 for beta chain variable domain of TCR clone 152797 (TRBV13, TRBJ2-3)
CASSLSRVAGGRNTQYF

SEQ ID NO: 305595 - protein, 15 aa, Homo sapiens
  CDR3 for alpha chain variable domain of TCR clone 152798 (TRAV8-4, TRAJ11)
CAVSRALSGYSTLTF

SEQ ID NO: 305596 - protein, 14 aa, Homo sapiens
  CDR3 for beta chain variable domain of TCR clone 152798 (TRBV28, TRBJ1-4)
CASSLSRTNEKLFF

SEQ ID NO: 305597 - protein, 12 aa, Homo sapiens
  CDR3 for alpha chain variable domain of TCR clone 152799 (TRAV12-2, TRAJ10)
WGVTGGGNKLTF

SEQ ID NO: 305598 - protein, 12 aa, Homo sapiens
  CDR3 for beta chain variable domain of TCR clone 152799 (TRBV11-2, TRBJ2-2)
CASSLPTGELFF

SEQ ID NO: 305599 - protein, 12 aa, Homo sapiens
  CDR3 for alpha chain variable domain of TCR clone 152800 (TRAV17, TRAJ49)
CATVTTGNQFYF

SEQ ID NO: 305600 - protein, 12 aa, Homo sapiens
  CDR3 for beta chain variable domain of TCR clone 152800 (TRBV18, TRBJ2-1)
CASSSDEDEQFF

SEQ ID NO: 305601 - protein, 12 aa, Homo sapiens
  CDR3 for alpha chain variable domain of TCR clone 152801 (TRAV22, TRAJ29)
CAPPSGNTPLVF

SEQ ID NO: 305602 - protein, 14 aa, Homo sapiens
  CDR3 for beta chain variable domain of TCR clone 152801 (TRBV11-2, TRBJ2-3)
CASSRLARTDTQYF

SEQ ID NO: 305603 - protein, 14 aa, Homo sapiens
  CDR3 for alpha chain variable domain of TCR clone 152802 (TRAV2, TRAJ9)
CAVEDRSGGFKTIF

SEQ ID NO: 305604 - protein, 17 aa, Homo sapiens
  CDR3 for beta chain variable domain of TCR clone 152802 (TRBV11-2, TRBJ2-1)
CVSSLYPPGVEYNEQFF

SEQ ID NO: 305605 - protein, 12 aa, Homo sapiens
  CDR3 for alpha chain variable domain of TCR clone 152803 (TRAV12-3, TRAJ17)
CAMTLTGNKLAF

SEQ ID NO: 305606 - protein, 15 aa, Homo sapiens
  CDR3 for beta chain variable domain of TCR clone 152803 (TRBV20-1, TRBJ2-7)
CGARDRVSGMDEQYF

SEQ ID NO: 305607 - protein, 18 aa, Homo sapiens
  CDR3 for alpha chain variable domain of TCR clone 152804 (TRAV21, TRAJ52)
CAVRRSPAGGTSYGKLTF

SEQ ID NO: 305608 - protein, 13 aa, Homo sapiens
  CDR3 for beta chain variable domain of TCR clone 152804 (TRBV7-3, TRBJ1-1)
CASSQDWGAEAFF

SEQ ID NO: 305609 - protein, 17 aa, Homo sapiens
  CDR3 for alpha chain variable domain of TCR clone 152805 (TRAV4, TRAJ28)
CLVGDRALGLGVTNSLS

SEQ ID NO: 305610 - protein, 20 aa, Homo sapiens
  CDR3 for beta chain variable domain of TCR clone 152805 (TRBV19, TRBJ2-1)
CASSISRTVTSTRLNNEQFF

SEQ ID NO: 305611 - protein, 16 aa, Homo sapiens
  CDR3 for alpha chain variable domain of TCR clone 152806 (TRAV17, TRAJ52)
CATSNAGGTSYGKLTF

SEQ ID NO: 305612 - protein, 16 aa, Homo sapiens
  CDR3 for beta chain variable domain of TCR clone 152806 (TRBV7-9, TRBJ2-3)
CASSFSVAGGTDTQYF

SEQ ID NO: 305613 - protein, 13 aa, Homo sapiens
  CDR3 for alpha chain variable domain of TCR clone 152807 (TRAV13-1, TRAJ12)
CAASPDSIYKLIF

SEQ ID NO: 305614 - protein, 16 aa, Homo sapiens
  CDR3 for beta chain variable domain of TCR clone 152807 (TRBV15, TRBJ2-1)
CATSRERLAGAYEQFF

SEQ ID NO: 305615 - protein, 17 aa, Homo sapiens
  CDR3 for alpha chain variable domain of TCR clone 152808 (TRAV26-2, TRAJ37)
CILRELVGSSNTGKLIF

SEQ ID NO: 305616 - protein, 14 aa, Homo sapiens
  CDR3 for beta chain variable domain of TCR clone 152808 (TRBV19, TRBJ2-1)
CASPTFVLSGEQFF

SEQ ID NO: 305617 - protein, 14 aa, Homo sapiens
  CDR3 for alpha chain variable domain of TCR clone 152809 (TRAV20, TRAJ56)
CAVQFGGATSKLTF

SEQ ID NO: 305618 - protein, 14 aa, Homo sapiens
  CDR3 for beta chain variable domain of TCR clone 152809 (TRBV20-1, TRBJ2-7)
CSAKRGRSAYEQYF

SEQ ID NO: 305619 - protein, 17 aa, Homo sapiens
  CDR3 for alpha chain variable domain of TCR clone 152810 (TRAV12-2, TRAJ52)
CAVNPYAGGTSYGKLTV

SEQ ID NO: 305620 - protein, 16 aa, Homo sapiens
  CDR3 for beta chain variable domain of TCR clone 152810 (TRBV5-5, TRBJ2-2)
CASSGRREGATGELFF

SEQ ID NO: 305621 - protein, 13 aa, Homo sapiens
  CDR3 for alpha chain variable domain of TCR clone 152811 (TRAV14/DV4, TRAJ4)
CAMKAGGYNKLLF

SEQ ID NO: 305622 - protein, 15 aa, Homo sapiens
  CDR3 for beta chain variable domain of TCR clone 152811 (TRBV11-3, TRBJ1-1)
CASSLGGPGDTEAFF

SEQ ID NO: 305623 - protein, 17 aa, Homo sapiens
  CDR3 for alpha chain variable domain of TCR clone 152812 (TRAV3, TRAJ6)
CAVRDGPRAGGSYIPTF

SEQ ID NO: 305624 - protein, 19 aa, Homo sapiens
  CDR3 for beta chain variable domain of TCR clone 152812 (TRBV7-2, TRBJ2-3)
CASSFLSRNWGGGTDTHYF

SEQ ID NO: 305625 - protein, 14 aa, Homo sapiens
  CDR3 for alpha chain variable domain of TCR clone 152813 (TRAV2, TRAJ37)
CAVDFTSNTGKLIF

SEQ ID NO: 305626 - protein, 13 aa, Homo sapiens
  CDR3 for beta chain variable domain of TCR clone 152813 (TRBV7-3, TRBJ1-1)
CASSQDWGAEVFF

SEQ ID NO: 305627 - protein, 13 aa, Homo sapiens
  CDR3 for alpha chain variable domain of TCR clone 152814 (TRAV13-1, TRAJ39)
CAASIVMQATCSP

SEQ ID NO: 305628 - protein, 15 aa, Homo sapiens
  CDR3 for beta chain variable domain of TCR clone 152814 (TRBV7-2, TRBJ1-2)
CASSLVSGGDYGYTF

SEQ ID NO: 305629 - protein, 13 aa, Homo sapiens
  CDR3 for alpha chain variable domain of TCR clone 152815 (TRAV3, TRAJ20)
CAVRSLNDYKLSF

SEQ ID NO: 305630 - protein, 12 aa, Homo sapiens
  CDR3 for beta chain variable domain of TCR clone 152815 (TRBV6-1, TRBJ2-1)
CASYSTYKEQFF

SEQ ID NO: 305631 - protein, 18 aa, Homo sapiens
  CDR3 for alpha chain variable domain of TCR clone 152816 (TRAV13-1, TRAJ52)
CAAKNPNAGGTSYGNLTF

SEQ ID NO: 305632 - protein, 15 aa, Homo sapiens
  CDR3 for beta chain variable domain of TCR clone 152816 (TRBV6-1, TRBJ2-3)
CASSERGGITDTQHF

SEQ ID NO: 305633 - protein, 14 aa, Homo sapiens
  CDR3 for alpha chain variable domain of TCR clone 152817 (TRAV12-2, TRAJ40)
CAVKIPSGTNKYIF

SEQ ID NO: 305634 - protein, 12 aa, Homo sapiens
  CDR3 for beta chain variable domain of TCR clone 152817 (TRBV11-2, TRBJ2-2)
CASSLGGGELFF

SEQ ID NO: 305635 - protein, 14 aa, Homo sapiens
  CDR3 for alpha chain variable domain of TCR clone 152818 (TRAV12-2, TRAJ9)
CAMSPNTGGFKTIF

SEQ ID NO: 305636 - protein, 12 aa, Homo sapiens
  CDR3 for beta chain variable domain of TCR clone 152818 (TRBV19, TRBJ1-5)
CASSIDQQPQHF

SEQ ID NO: 305637 - protein, 15 aa, Homo sapiens
  CDR3 for alpha chain variable domain of TCR clone 152819 (TRAV8-3, TRAJ11)
CAVGLLNSGYSTFTF

SEQ ID NO: 305638 - protein, 16 aa, Homo sapiens
  CDR3 for beta chain variable domain of TCR clone 152819 (TRBV28, TRBJ2-1)
CASSLWGRTSGTLQFF

SEQ ID NO: 305639 - protein, 18 aa, Homo sapiens
  CDR3 for alpha chain variable domain of TCR clone 152820 (TRAV12-3, TRAJ52)
CAMSVGGAGGTSYGKLTF

SEQ ID NO: 305640 - protein, 13 aa, Homo sapiens
  CDR3 for beta chain variable domain of TCR clone 152820 (TRBV7-6, TRBJ1-2)
CASSLVADYGYTF

SEQ ID NO: 305641 - protein, 16 aa, Homo sapiens
  CDR3 for alpha chain variable domain of TCR clone 152821 (TRAV3, TRAJ21)
CAVRAIERGNFNKFYF

SEQ ID NO: 305642 - protein, 16 aa, Homo sapiens
  CDR3 for beta chain variable domain of TCR clone 152821 (TRBV12-4, TRBJ1-5)
CASSRPVGGSNQPQHF

SEQ ID NO: 305643 - protein, 11 aa, Homo sapiens
  CDR3 for alpha chain variable domain of TCR clone 152822 (TRAV17, TRAJ9)
CGFTVGFKTIF

SEQ ID NO: 305644 - protein, 16 aa, Homo sapiens
  CDR3 for beta chain variable domain of TCR clone 152822 (TRBV28, TRBJ2-7)
CASSPWVATGDLSQYF

SEQ ID NO: 305645 - protein, 14 aa, Homo sapiens
  CDR3 for alpha chain variable domain of TCR clone 152823 (TRAV35, TRAJ40)
CAGSTTSGTYKYIF

SEQ ID NO: 305646 - protein, 15 aa, Homo sapiens
  CDR3 for beta chain variable domain of TCR clone 152823 (TRBV6-6, TRBJ2-7)
CASSYSYVGSYEQYF

SEQ ID NO: 305647 - protein, 14 aa, Homo sapiens
  CDR3 for alpha chain variable domain of TCR clone 152824 (TRAV29/DV5, TRAJ57)
CAASEMGGSEKLVF

SEQ ID NO: 305648 - protein, 13 aa, Homo sapiens
  CDR3 for beta chain variable domain of TCR clone 152824 (TRBV23-1, TRBJ1-4)
CASRGKFNEKLFF

SEQ ID NO: 305649 - protein, 15 aa, Homo sapiens
  CDR3 for alpha chain variable domain of TCR clone 152825 (TRAV4, TRAJ10)
CLVGDGSGGGNKLNF

SEQ ID NO: 305650 - protein, 15 aa, Homo sapiens
  CDR3 for beta chain variable domain of TCR clone 152825 (TRBV27, TRBJ2-3)
CASSSLAGVIDTQYF

SEQ ID NO: 305651 - protein, 14 aa, Homo sapiens
  CDR3 for alpha chain variable domain of TCR clone 152826 (TRAV1-2, TRAJ8)
CAVREDTGFQKLVF

SEQ ID NO: 305652 - protein, 10 aa, Homo sapiens
  CDR3 for beta chain variable domain of TCR clone 152826 (TRBV20-1, TRBJ2-7)
CSEGYYEQYF

SEQ ID NO: 305653 - protein, 15 aa, Homo sapiens
  CDR3 for alpha chain variable domain of TCR clone 152827 (TRAV3, TRAJ17)
CAVRDTGAAGSKLTF

SEQ ID NO: 305654 - protein, 14 aa, Homo sapiens
  CDR3 for beta chain variable domain of TCR clone 152827 (TRBV6-3, TRBJ1-1)
CASSNLLPGAEAFF

SEQ ID NO: 305655 - protein, 14 aa, Homo sapiens
  CDR3 for alpha chain variable domain of TCR clone 152828 (TRAV26-1, TRAJ34)
CIVIVAYNTDKLIF

SEQ ID NO: 305656 - protein, 15 aa, Homo sapiens
  CDR3 for beta chain variable domain of TCR clone 152828 (TRBV20-1, TRBJ2-7)
CSARVPAACFYKQYF

SEQ ID NO: 305657 - protein, 15 aa, Homo sapiens
  CDR3 for alpha chain variable domain of TCR clone 152829 (TRAV17, TRAJ57)
CATGPSQGGSEKPVS

SEQ ID NO: 305658 - protein, 16 aa, Homo sapiens
  CDR3 for beta chain variable domain of TCR clone 152829 (TRBV12-4, TRBJ1-5)
CASSRPVGGSNQPQHF

SEQ ID NO: 305659 - protein, 14 aa, Homo sapiens
  CDR3 for alpha chain variable domain of TCR clone 152830 (TRAV12-3, TRAJ7)
CAMSEIGGNNRLAL

SEQ ID NO: 305660 - protein, 14 aa, Homo sapiens
  CDR3 for beta chain variable domain of TCR clone 152830 (TRBV6-1, TRBJ2-6)
CASQQGAGANVLTF

SEQ ID NO: 305661 - protein, 16 aa, Homo sapiens
  CDR3 for alpha chain variable domain of TCR clone 152831 (TRAV13-2, TRAJ53)
CAENANSGGSNYKLTF

SEQ ID NO: 305662 - protein, 19 aa, Homo sapiens
  CDR3 for beta chain variable domain of TCR clone 152831 (TRBV28, TRBJ2-7)
CASSYSGTSRLGWVYEQYY

SEQ ID NO: 305663 - protein, 10 aa, Homo sapiens
  CDR3 for alpha chain variable domain of TCR clone 152832 (TRAV12-3, TRAJ49)
CAMNDDQFYF

SEQ ID NO: 305664 - protein, 13 aa, Homo sapiens
  CDR3 for beta chain variable domain of TCR clone 152832 (TRBV12-4, TRBJ1-1)
CAISPGTGFEAFF

SEQ ID NO: 305665 - protein, 18 aa, Homo sapiens
  CDR3 for alpha chain variable domain of TCR clone 152833 (TRAV21, TRAJ52)
CAVRSSPAGGTSYGKLTF

SEQ ID NO: 305666 - protein, 14 aa, Homo sapiens
  CDR3 for beta chain variable domain of TCR clone 152833 (TRBV4-1, TRBJ2-2)
CASSQAVNTGELFF

SEQ ID NO: 305667 - protein, 17 aa, Homo sapiens
  CDR3 for alpha chain variable domain of TCR clone 152834 (TRAV38-2/DV8, TRAJ56)
FSYRSEVGTGANSKLTF

SEQ ID NO: 305668 - protein, 14 aa, Homo sapiens
  CDR3 for beta chain variable domain of TCR clone 152834 (TRBV11-1, TRBJ1-1)
CASSLEHPNTEAFF

SEQ ID NO: 305669 - protein, 12 aa, Homo sapiens
  CDR3 for alpha chain variable domain of TCR clone 152835 (TRAV20, TRAJ45)
CAVRGGAEGLTF

SEQ ID NO: 305670 - protein, 12 aa, Homo sapiens
  CDR3 for beta chain variable domain of TCR clone 152835 (TRBV11-2, TRBJ2-2)
CASSLGGGELFF

SEQ ID NO: 305671 - protein, 15 aa, Homo sapiens
  CDR3 for alpha chain variable domain of TCR clone 152836 (TRAV26-1, TRAJ29)
CIVIVEGSGNTPLVF

SEQ ID NO: 305672 - protein, 15 aa, Homo sapiens
  CDR3 for beta chain variable domain of TCR clone 152836 (TRBV7-9, TRBJ1-5)
CASSQRHLPNQPQHF

SEQ ID NO: 305673 - protein, 12 aa, Homo sapiens
  CDR3 for alpha chain variable domain of TCR clone 152837 (TRAV21, TRAJ29)
CAVTSGNTHLVF

SEQ ID NO: 305674 - protein, 13 aa, Homo sapiens
  CDR3 for beta chain variable domain of TCR clone 152837 (TRBV4-2, TRBJ1-1)
CASSQAGNTEAFF

SEQ ID NO: 305675 - protein, 14 aa, Homo sapiens
  CDR3 for alpha chain variable domain of TCR clone 152838 (TRAV12-1, TRAJ13)
CVVIDSGGYQKVTF

SEQ ID NO: 305676 - protein, 13 aa, Homo sapiens
  CDR3 for beta chain variable domain of TCR clone 152838 (TRBV20-1, TRBJ1-1)
CSAPPGGRTEAFF

SEQ ID NO: 305677 - protein, 11 aa, Homo sapiens
  CDR3 for alpha chain variable domain of TCR clone 152839 (TRAV12-1, TRAJ30)
CVVNGQDKIIF

SEQ ID NO: 305678 - protein, 11 aa, Homo sapiens
  CDR3 for beta chain variable domain of TCR clone 152839 (TRBV27, TRBJ2-2)
CQQTLHRELFF

SEQ ID NO: 305679 - protein, 14 aa, Homo sapiens
  CDR3 for alpha chain variable domain of TCR clone 152840 (TRAV8-3, TRAJ16)
CAVDRFSDGQKRLS

SEQ ID NO: 305680 - protein, 15 aa, Homo sapiens
  CDR3 for beta chain variable domain of TCR clone 152840 (TRBV7-6, TRBJ2-1)
CASSPGQGPYNEQFF

SEQ ID NO: 305681 - protein, 11 aa, Homo sapiens
  CDR3 for alpha chain variable domain of TCR clone 152841 (TRAV35, TRAJ30)
CAGERDDKIIF

SEQ ID NO: 305682 - protein, 14 aa, Homo sapiens
  CDR3 for beta chain variable domain of TCR clone 152841 (TRBV15, TRBJ2-5)
CATSGDGGQETQYF

SEQ ID NO: 305683 - protein, 15 aa, Homo sapiens
  CDR3 for alpha chain variable domain of TCR clone 152842 (TRAV13-1, TRAJ42)
CAASIAGGSQGKLIF

SEQ ID NO: 305684 - protein, 15 aa, Homo sapiens
  CDR3 for beta chain variable domain of TCR clone 152842 (TRBV19, TRBJ2-1)
CASSIVRGEGREQFF

SEQ ID NO: 305685 - protein, 13 aa, Homo sapiens
  CDR3 for alpha chain variable domain of TCR clone 152843 (TRAV12-3, TRAJ33)
CSMSVNSNYQLIW

SEQ ID NO: 305686 - protein, 16 aa, Homo sapiens
  CDR3 for beta chain variable domain of TCR clone 152843 (TRBV7-9, TRBJ2-3)
CASSLGAGGPTDTQYF

SEQ ID NO: 305687 - protein, 13 aa, Homo sapiens
  CDR3 for alpha chain variable domain of TCR clone 152844 (TRAV8-2, TRAJ49)
CVVTPNTGNQFYF

SEQ ID NO: 305688 - protein, 13 aa, Homo sapiens
  CDR3 for beta chain variable domain of TCR clone 152844 (TRBV7-9, TRBJ1-2)
CASSLKQNYGYTF

SEQ ID NO: 305689 - protein, 13 aa, Homo sapiens
  CDR3 for alpha chain variable domain of TCR clone 152845 (TRAV30, TRAJ49)
CGTEPNTGNQYYF

SEQ ID NO: 305690 - protein, 14 aa, Homo sapiens
  CDR3 for beta chain variable domain of TCR clone 152845 (TRBV29-1, TRBJ2-1)
CSVEFRGIPFEQFF

SEQ ID NO: 305691 - protein, 16 aa, Homo sapiens
  CDR3 for alpha chain variable domain of TCR clone 152846 (TRAV3, TRAJ37)
CAVRFRGSGNTGKIIF

SEQ ID NO: 305692 - protein, 11 aa, Homo sapiens
  CDR3 for beta chain variable domain of TCR clone 152846 (TRBV11-2, TRBJ2-2)
CASSLPGELFF

SEQ ID NO: 305693 - protein, 14 aa, Homo sapiens
  CDR3 for alpha chain variable domain of TCR clone 152847 (TRAV13-1, TRAJ39)
YAAPPNNAGNMLTF

SEQ ID NO: 305694 - protein, 14 aa, Homo sapiens
  CDR3 for beta chain variable domain of TCR clone 152847 (TRBV12-4, TRBJ1-1)
CASNSGDLNTEAFF

SEQ ID NO: 305695 - protein, 14 aa, Homo sapiens
  CDR3 for alpha chain variable domain of TCR clone 152848 (TRAV35, TRAJ22)
CAGLRPGSTRQLTF

SEQ ID NO: 305696 - protein, 14 aa, Homo sapiens
  CDR3 for beta chain variable domain of TCR clone 152848 (TRBV11-3, TRBJ2-3)
CASSSGQGPDTQYF

SEQ ID NO: 305697 - protein, 13 aa, Homo sapiens
  CDR3 for alpha chain variable domain of TCR clone 152849 (TRAV8-1, TRAJ30)
CAVIMNRDDKIIF

SEQ ID NO: 305698 - protein, 14 aa, Homo sapiens
  CDR3 for beta chain variable domain of TCR clone 152849 (TRBV7-2, TRBJ1-6)
CASSIQGANSPLHF

SEQ ID NO: 305699 - protein, 13 aa, Homo sapiens
  CDR3 for alpha chain variable domain of TCR clone 152850 (TRAV20, TRAJ37)
CAGCSSNTGKLIF

SEQ ID NO: 305700 - protein, 15 aa, Homo sapiens
  CDR3 for beta chain variable domain of TCR clone 152850 (TRBV7-2, TRBJ2-1)
RASSFQADEYNEQFF

SEQ ID NO: 305701 - protein, 15 aa, Homo sapiens
  CDR3 for alpha chain variable domain of TCR clone 152851 (TRAV4, TRAJ31)
CLVGGFLNNNARLMF

SEQ ID NO: 305702 - protein, 14 aa, Homo sapiens
  CDR3 for beta chain variable domain of TCR clone 152851 (TRBV6-1, TRBJ2-7)
CASRAGYQTGEQYF

SEQ ID NO: 305703 - protein, 12 aa, Homo sapiens
  CDR3 for alpha chain variable domain of TCR clone 152852 (TRAV12-3, TRAJ17)
CAMTLTGNKLTF

SEQ ID NO: 305704 - protein, 16 aa, Homo sapiens
  CDR3 for beta chain variable domain of TCR clone 152852 (TRBV7-2, TRBJ2-3)
WASSLAGAGSGDTQHF

SEQ ID NO: 305705 - protein, 13 aa, Homo sapiens
  CDR3 for alpha chain variable domain of TCR clone 152853 (TRAV12-3, TRAJ43)
CAMRQYNNNDMRF

SEQ ID NO: 305706 - protein, 16 aa, Homo sapiens
  CDR3 for beta chain variable domain of TCR clone 152853 (TRBV11-2, TRBJ2-1)
CASSLLLLSSYNEQFF

SEQ ID NO: 305707 - protein, 15 aa, Homo sapiens
  CDR3 for alpha chain variable domain of TCR clone 152854 (TRAV3, TRAJ22)
CAVGDRGGSARQLTF

SEQ ID NO: 305708 - protein, 14 aa, Homo sapiens
  CDR3 for beta chain variable domain of TCR clone 152854 (TRBV19, TRBJ1-5)
CASSLGLIGQPQHF

SEQ ID NO: 305709 - protein, 13 aa, Homo sapiens
  CDR3 for alpha chain variable domain of TCR clone 152855 (TRAV12-3, TRAJ13)
CAMGTGGYQKGTF

SEQ ID NO: 305710 - protein, 16 aa, Homo sapiens
  CDR3 for beta chain variable domain of TCR clone 152855 (TRBV9, TRBJ2-1)
CASSVGGGGNYNEQFL

SEQ ID NO: 305711 - protein, 22 aa, Homo sapiens
  CDR3 for alpha chain variable domain of TCR clone 152856 (TRAV12-1, TRAJ10)
CVWGRYTHGRMKQTHLWDRHSA

SEQ ID NO: 305712 - protein, 16 aa, Homo sapiens
  CDR3 for beta chain variable domain of TCR clone 152856 (TRBV20-1, TRBJ2-1)
CSARSTSESSYNEQFF

SEQ ID NO: 305713 - protein, 12 aa, Homo sapiens
  CDR3 for alpha chain variable domain of TCR clone 152857 (TRAV8-4, TRAJ49)
CAVKGTGNQFYF

SEQ ID NO: 305714 - protein, 15 aa, Homo sapiens
  CDR3 for beta chain variable domain of TCR clone 152857 (TRBV28, TRBJ2-3)
CASGFGTRLADTQYF

SEQ ID NO: 305715 - protein, 15 aa, Homo sapiens
  CDR3 for alpha chain variable domain of TCR clone 152858 (TRAV4, TRAJ10)
CLVGDEEGGGNKLNF

SEQ ID NO: 305716 - protein, 15 aa, Homo sapiens
  CDR3 for beta chain variable domain of TCR clone 152858 (TRBV7-2, TRBJ2-7)
CASSLTGQGTYEQYF

SEQ ID NO: 305717 - protein, 16 aa, Homo sapiens
  CDR3 for alpha chain variable domain of TCR clone 152859 (TRAV13-1, TRAJ18)
CAASRMRGSTLGRLYF

SEQ ID NO: 305718 - protein, 15 aa, Homo sapiens
  CDR3 for beta chain variable domain of TCR clone 152859 (TRBV29-1, TRBJ2-1)
CSVGRHAFFYNEQFF

SEQ ID NO: 305719 - protein, 15 aa, Homo sapiens
  CDR3 for alpha chain variable domain of TCR clone 152860 (TRAV13-2, TRAJ10)
CAENRDTGGGNKLTF

SEQ ID NO: 305720 - protein, 13 aa, Homo sapiens
  CDR3 for beta chain variable domain of TCR clone 152860 (TRBV4-2, TRBJ1-1)
CASSQAGNTEAFF

SEQ ID NO: 305721 - protein, 16 aa, Homo sapiens
  CDR3 for alpha chain variable domain of TCR clone 152861 (TRAV12-2, TRAJ10)
CAVNRVLTAGGNKLTF

SEQ ID NO: 305722 - protein, 12 aa, Homo sapiens
  CDR3 for beta chain variable domain of TCR clone 152861 (TRBV28, TRBJ2-7)
CASSFSSYEQYF

SEQ ID NO: 305723 - protein, 21 aa, Homo sapiens
  CDR3 for alpha chain variable domain of TCR clone 152862 (TRAV8-3, )
CAVVTTRIPAIQNPDPAVYQL

SEQ ID NO: 305724 - protein, 14 aa, Homo sapiens
  CDR3 for beta chain variable domain of TCR clone 152862 (TRBV11-2, TRBJ2-7)
CASSPSTTSYEQYF

SEQ ID NO: 305725 - protein, 23 aa, Homo sapiens
  CDR3 for alpha chain variable domain of TCR clone 152863 (TRAV13-2, TRAJ6)
CAEEVHQEEATYLHLEEEPALLF

SEQ ID NO: 305726 - protein, 20 aa, Homo sapiens
  CDR3 for beta chain variable domain of TCR clone 152863 (TRBV28, TRBJ2-1)
CASTPIGRSPGLAGGNEQFF

SEQ ID NO: 305727 - protein, 14 aa, Homo sapiens
  CDR3 for alpha chain variable domain of TCR clone 152864 (TRAV9-2, TRAJ22)
CALTGASSARQLTF

SEQ ID NO: 305728 - protein, 13 aa, Homo sapiens
  CDR3 for beta chain variable domain of TCR clone 152864 (TRBV20-1, TRBJ1-1)
CSARGGGNTEAFF

SEQ ID NO: 305729 - protein, 13 aa, Homo sapiens
  CDR3 for alpha chain variable domain of TCR clone 152865 (TRAV30, TRAJ6)
CGFIEGGSYIPPF

SEQ ID NO: 305730 - protein, 16 aa, Homo sapiens
  CDR3 for beta chain variable domain of TCR clone 152865 (TRBV7-6, TRBJ2-3)
CASSARTSRGTDTQYF

SEQ ID NO: 305731 - protein, 12 aa, Homo sapiens
  CDR3 for alpha chain variable domain of TCR clone 152866 (TRAV3, TRAJ20)
CAVRDHDYKLSF

SEQ ID NO: 305732 - protein, 15 aa, Homo sapiens
  CDR3 for beta chain variable domain of TCR clone 152866 (TRBV9, TRBJ1-6)
CASSVAGTGESPLHF

SEQ ID NO: 305733 - protein, 13 aa, Homo sapiens
  CDR3 for alpha chain variable domain of TCR clone 152867 (TRAV1-2, TRAJ12)
CAVSMDSSYKLIF

SEQ ID NO: 305734 - protein, 15 aa, Homo sapiens
  CDR3 for beta chain variable domain of TCR clone 152867 (TRBV27, TRBJ2-7)
CASSTAGTGSYEQYF

SEQ ID NO: 305735 - protein, 15 aa, Homo sapiens
  CDR3 for alpha chain variable domain of TCR clone 152868 (TRAV25, TRAJ52)
CAGRPGGTSYGKLPF

SEQ ID NO: 305736 - protein, 15 aa, Homo sapiens
  CDR3 for beta chain variable domain of TCR clone 152868 (TRBV19, TRBJ2-5)
CASHGLAGAQETQYF

SEQ ID NO: 305737 - protein, 12 aa, Homo sapiens
  CDR3 for alpha chain variable domain of TCR clone 152869 (TRAV12-2, TRAJ10)
WGVTGGGNKLTF

SEQ ID NO: 305738 - protein, 14 aa, Homo sapiens
  CDR3 for beta chain variable domain of TCR clone 152869 (TRBV7-9, TRBJ2-5)
CASSLVGGEETQYF

SEQ ID NO: 305739 - protein, 13 aa, Homo sapiens
  CDR3 for alpha chain variable domain of TCR clone 152870 (TRAV38-2/DV8, TRAJ34)
CAYRTWNTDKLIF

SEQ ID NO: 305740 - protein, 13 aa, Homo sapiens
  CDR3 for beta chain variable domain of TCR clone 152870 (TRBV15, TRBJ1-6)
CATSGGLNSPLHF

SEQ ID NO: 305741 - protein, 16 aa, Homo sapiens
  CDR3 for alpha chain variable domain of TCR clone 152871 (TRAV12-2, TRAJ10)
CSVNRVLTGGGNKLTF

SEQ ID NO: 305742 - protein, 12 aa, Homo sapiens
  CDR3 for beta chain variable domain of TCR clone 152871 (TRBV28, TRBJ2-7)
CASSFSSYEQYF

SEQ ID NO: 305743 - protein, 12 aa, Homo sapiens
  CDR3 for alpha chain variable domain of TCR clone 152872 (TRAV3, TRAJ43)
CAVRDPNNDMRF

SEQ ID NO: 305744 - protein, 17 aa, Homo sapiens
  CDR3 for beta chain variable domain of TCR clone 152872 (TRBV7-8, TRBJ2-6)
CASGAGTGGAGANVLTF

SEQ ID NO: 305745 - protein, 14 aa, Homo sapiens
  CDR3 for alpha chain variable domain of TCR clone 152873 (TRAV21, TRAJ35)
CAVMPIGLRNVLHC

SEQ ID NO: 305746 - protein, 12 aa, Homo sapiens
  CDR3 for beta chain variable domain of TCR clone 152873 (TRBV7-9, TRBJ2-7)
CASSIKREEQYF

SEQ ID NO: 305747 - protein, 14 aa, Homo sapiens
  CDR3 for alpha chain variable domain of TCR clone 152874 (TRAV1-2, TRAJ16)
RAVNRFSDGQKLLF

SEQ ID NO: 305748 - protein, 11 aa, Homo sapiens
  CDR3 for beta chain variable domain of TCR clone 152874 (TRBV11-2, TRBJ2-2)
CASSLPGELFF

SEQ ID NO: 305749 - protein, 15 aa, Homo sapiens
  CDR3 for alpha chain variable domain of TCR clone 152875 (TRAV34, TRAJ38)
CGADFTPGNNRKLIW

SEQ ID NO: 305750 - protein, 14 aa, Homo sapiens
  CDR3 for beta chain variable domain of TCR clone 152875 (TRBV20-1, TRBJ2-3)
CSARGGTSTDTQYF

SEQ ID NO: 305751 - protein, 13 aa, Homo sapiens
  CDR3 for alpha chain variable domain of TCR clone 152876 (TRAV35, TRAJ33)
CAGSSQDSNYQLI

SEQ ID NO: 305752 - protein, 15 aa, Homo sapiens
  CDR3 for beta chain variable domain of TCR clone 152876 (TRBV6-5, TRBJ2-1)
CASSYDAGAGNEQFF

SEQ ID NO: 305753 - protein, 14 aa, Homo sapiens
  CDR3 for alpha chain variable domain of TCR clone 152877 (TRAV1-2, TRAJ33)
CAVRAPDSNYQLIW

SEQ ID NO: 305754 - protein, 16 aa, Homo sapiens
  CDR3 for beta chain variable domain of TCR clone 152877 (TRBV12-4, TRBJ1-5)
CASSRPVGGSNQPQHF

SEQ ID NO: 305755 - protein, 15 aa, Homo sapiens
  CDR3 for alpha chain variable domain of TCR clone 152878 (TRAV36/DV7, TRAJ53)
CAVEGSGGSNYKLTF

SEQ ID NO: 305756 - protein, 12 aa, Homo sapiens
  CDR3 for beta chain variable domain of TCR clone 152878 (TRBV11-2, TRBJ2-1)
CASSPGNNEQFF

SEQ ID NO: 305757 - protein, 18 aa, Homo sapiens
  CDR3 for alpha chain variable domain of TCR clone 152879 (TRAV29/DV5, TRAJ52)
CAAGFRGAGGTRYGKLKF

SEQ ID NO: 305758 - protein, 14 aa, Homo sapiens
  CDR3 for beta chain variable domain of TCR clone 152879 (TRBV5-1, TRBJ2-5)
CASSLAGKQETQYF

SEQ ID NO: 305759 - protein, 17 aa, Homo sapiens
  CDR3 for alpha chain variable domain of TCR clone 152880 (TRAV27, TRAJ26)
WAGARAPLDNYGQNFVF

SEQ ID NO: 305760 - protein, 15 aa, Homo sapiens
  CDR3 for beta chain variable domain of TCR clone 152880 (TRBV11-2, TRBJ2-5)
CASSPRSGGLETQYF

SEQ ID NO: 305761 - protein, 11 aa, Homo sapiens
  CDR3 for alpha chain variable domain of TCR clone 152881 (TRAV17, TRAJ31)
CATSNTARLMF

SEQ ID NO: 305762 - protein, 16 aa, Homo sapiens
  CDR3 for beta chain variable domain of TCR clone 152881 (TRBV7-8, TRBJ2-4)
CASSAEMTLAKNMQYF

SEQ ID NO: 305763 - protein, 15 aa, Homo sapiens
  CDR3 for alpha chain variable domain of TCR clone 152882 (TRAV3, TRAJ29)
CAVRDPLSGNTPLVF

SEQ ID NO: 305764 - protein, 12 aa, Homo sapiens
  CDR3 for beta chain variable domain of TCR clone 152882 (TRBV12-4, TRBJ2-7)
CASSLGGYEQYF

SEQ ID NO: 305765 - protein, 13 aa, Homo sapiens
  CDR3 for alpha chain variable domain of TCR clone 152883 (TRAV21, TRAJ27)
CAQWGGNAVKSTF

SEQ ID NO: 305766 - protein, 14 aa, Homo sapiens
  CDR3 for beta chain variable domain of TCR clone 152883 (TRBV2, TRBJ2-3)
CAVGGTISTDTQYF

SEQ ID NO: 305767 - protein, 11 aa, Homo sapiens
  CDR3 for alpha chain variable domain of TCR clone 152884 (TRAV2, TRAJ33)
CAVDSNYQLIW

SEQ ID NO: 305768 - protein, 16 aa, Homo sapiens
  CDR3 for beta chain variable domain of TCR clone 152884 (TRBV11-2, TRBJ2-2)
CASSLKRGTLSGELFF

SEQ ID NO: 305769 - protein, 15 aa, Homo sapiens
  CDR3 for alpha chain variable domain of TCR clone 152885 (TRAV8-3, TRAJ45)
RAVEGSGGGVDGLTF

SEQ ID NO: 305770 - protein, 16 aa, Homo sapiens
  CDR3 for beta chain variable domain of TCR clone 152885 (TRBV6-5, TRBJ2-6)
CASSYPLSSGANVLTF

SEQ ID NO: 305771 - protein, 14 aa, Homo sapiens
  CDR3 for alpha chain variable domain of TCR clone 152886 (TRAV2, TRAJ9)
CAVEDRSGGFKTIF

SEQ ID NO: 305772 - protein, 15 aa, Homo sapiens
  CDR3 for beta chain variable domain of TCR clone 152886 (TRBV7-8, TRBJ2-1)
CASSLADSLYNEQFF

SEQ ID NO: 305773 - protein, 12 aa, Homo sapiens
  CDR3 for alpha chain variable domain of TCR clone 152887 (TRAV4, TRAJ26)
CLVGDYGQNFVF

SEQ ID NO: 305774 - protein, 11 aa, Homo sapiens
  CDR3 for beta chain variable domain of TCR clone 152887 (TRBV7-9, TRBJ2-3)
CASSPTDTQYS

SEQ ID NO: 305775 - protein, 14 aa, Homo sapiens
  CDR3 for alpha chain variable domain of TCR clone 152888 (TRAV23/DV6, TRAJ24)
CSASLSDSWGKLQF

SEQ ID NO: 305776 - protein, 16 aa, Homo sapiens
  CDR3 for beta chain variable domain of TCR clone 152888 (TRBV7-9, TRBJ2-6)
CASSLKGPLRANVLTF

SEQ ID NO: 305777 - protein, 18 aa, Homo sapiens
  CDR3 for alpha chain variable domain of TCR clone 152889 (TRAV8-3, TRAJ52)
CAVGPRYAGGTSYGKLTF

SEQ ID NO: 305778 - protein, 14 aa, Homo sapiens
  CDR3 for beta chain variable domain of TCR clone 152889 (TRBV25-1, TRBJ1-1)
CASTHLGGNTEAFF

SEQ ID NO: 305779 - protein, 14 aa, Homo sapiens
  CDR3 for alpha chain variable domain of TCR clone 152890 (TRAV38-1, TRAJ45)
CASHSGGGADGLTF

SEQ ID NO: 305780 - protein, 13 aa, Homo sapiens
  CDR3 for beta chain variable domain of TCR clone 152890 (TRBV10-3, TRBJ1-2)
CAISEPDSYGYTF

SEQ ID NO: 305781 - protein, 15 aa, Homo sapiens
  CDR3 for alpha chain variable domain of TCR clone 152891 (TRAV13-1, TRAJ17)
CAASIERAAGKKLTF

SEQ ID NO: 305782 - protein, 14 aa, Homo sapiens
  CDR3 for beta chain variable domain of TCR clone 152891 (TRBV7-9, TRBJ2-1)
CASSPRDSLYEQFF

SEQ ID NO: 305783 - protein, 13 aa, Homo sapiens
  CDR3 for alpha chain variable domain of TCR clone 152892 (TRAV27, TRAJ45)
CRSSGGGADRLTF

SEQ ID NO: 305784 - protein, 11 aa, Homo sapiens
  CDR3 for beta chain variable domain of TCR clone 152892 (TRBV19, TRBJ1-1)
CASSIGSEAFF

SEQ ID NO: 305785 - protein, 14 aa, Homo sapiens
  CDR3 for alpha chain variable domain of TCR clone 152893 (TRAV16, TRAJ33)
CALSAMDSNYQLIW

SEQ ID NO: 305786 - protein, 15 aa, Homo sapiens
  CDR3 for beta chain variable domain of TCR clone 152893 (TRBV7-3, TRBJ2-3)
CASSLGLTLGDTQYF

SEQ ID NO: 305787 - protein, 12 aa, Homo sapiens
  CDR3 for alpha chain variable domain of TCR clone 152894 (TRAV21, TRAJ13)
PGPSGGYQKVTF

SEQ ID NO: 305788 - protein, 15 aa, Homo sapiens
  CDR3 for beta chain variable domain of TCR clone 152894 (TRBV7-9, TRBJ1-6)
CASSSPGRGNTPLHF

SEQ ID NO: 305789 - protein, 14 aa, Homo sapiens
  CDR3 for alpha chain variable domain of TCR clone 152895 (TRAV12-2, TRAJ13)
CAVKNTGGYQKVTF

SEQ ID NO: 305790 - protein, 14 aa, Homo sapiens
  CDR3 for beta chain variable domain of TCR clone 152895 (TRBV25-1, TRBJ1-1)
CASTHLGGNTEAFF

SEQ ID NO: 305791 - protein, 13 aa, Homo sapiens
  CDR3 for alpha chain variable domain of TCR clone 152896 (TRAV21, TRAJ27)
CAARPGNAGKSTF

SEQ ID NO: 305792 - protein, 14 aa, Homo sapiens
  CDR3 for beta chain variable domain of TCR clone 152896 (TRBV7-6, TRBJ2-3)
CASSLGAVADTQYF

SEQ ID NO: 305793 - protein, 14 aa, Homo sapiens
  CDR3 for alpha chain variable domain of TCR clone 152897 (TRAV23/DV6, TRAJ8)
CSASKATGFQKLAF

SEQ ID NO: 305794 - protein, 15 aa, Homo sapiens
  CDR3 for beta chain variable domain of TCR clone 152897 (TRBV28, TRBJ2-3)
CASSPDRQGANTQYF

SEQ ID NO: 305795 - protein, 13 aa, Homo sapiens
  CDR3 for alpha chain variable domain of TCR clone 152898 (TRAV27, TRAJ29)
CAGAHSGNTPLVF

SEQ ID NO: 305796 - protein, 15 aa, Homo sapiens
  CDR3 for beta chain variable domain of TCR clone 152898 (TRBV3-1, TRBJ2-7)
CASSQVRQGAYEQYF

SEQ ID NO: 305797 - protein, 10 aa, Homo sapiens
  CDR3 for alpha chain variable domain of TCR clone 152899 (TRAV21, TRAJ31)
CAVDNARLMF

SEQ ID NO: 305798 - protein, 13 aa, Homo sapiens
  CDR3 for beta chain variable domain of TCR clone 152899 (TRBV4-1, TRBJ1-1)
CASSRKMKTEAFF

SEQ ID NO: 305799 - protein, 15 aa, Homo sapiens
  CDR3 for alpha chain variable domain of TCR clone 152900 (TRAV17, TRAJ57)
CATGPSQGGSEKLVF

SEQ ID NO: 305800 - protein, 14 aa, Homo sapiens
  CDR3 for beta chain variable domain of TCR clone 152900 (TRBV12-5, TRBJ2-5)
CASGSRTNQETQYF

SEQ ID NO: 305801 - protein, 10 aa, Homo sapiens
  CDR3 for alpha chain variable domain of TCR clone 152901 (TRAV1-2, TRAJ18)
CAVRGEAQPW

SEQ ID NO: 305802 - protein, 17 aa, Homo sapiens
  CDR3 for beta chain variable domain of TCR clone 152901 (TRBV25-1, TRBJ2-1)
CASSAYGQGRGVYEQFF

SEQ ID NO: 305803 - protein, 16 aa, Homo sapiens
  CDR3 for alpha chain variable domain of TCR clone 152902 (TRAV23/DV6, TRAJ9)
CAASIGGNTGGFKTLF

SEQ ID NO: 305804 - protein, 17 aa, Homo sapiens
  CDR3 for beta chain variable domain of TCR clone 152902 (TRBV13, TRBJ2-3)
CASSLSRVAGGRNTQYF

SEQ ID NO: 305805 - protein, 18 aa, Homo sapiens
  CDR3 for alpha chain variable domain of TCR clone 152903 (TRAV21, TRAJ52)
CAVMPSPAGGTRYGKLTF

SEQ ID NO: 305806 - protein, 17 aa, Homo sapiens
  CDR3 for beta chain variable domain of TCR clone 152903 (TRBV13, TRBJ2-3)
CSSSLSRVAGGRNTQYF

SEQ ID NO: 305807 - protein, 16 aa, Homo sapiens
  CDR3 for alpha chain variable domain of TCR clone 152904 (TRAV23/DV6, TRAJ9)
CAASLGGNTGGFKTIF

SEQ ID NO: 305808 - protein, 13 aa, Homo sapiens
  CDR3 for beta chain variable domain of TCR clone 152904 (TRBV12-4, TRBJ1-1)
CASSPGTGFEAFF

SEQ ID NO: 305809 - protein, 14 aa, Homo sapiens
  CDR3 for alpha chain variable domain of TCR clone 152905 (TRAV38-1, TRAJ40)
CALRPTSGTYKYIF

SEQ ID NO: 305810 - protein, 16 aa, Homo sapiens
  CDR3 for beta chain variable domain of TCR clone 152905 (TRBV7-9, TRBJ2-1)
CASSDVAGGSYNEQFF

SEQ ID NO: 305811 - protein, 12 aa, Homo sapiens
  CDR3 for alpha chain variable domain of TCR clone 152906 (TRAV1-1, TRAJ9)
CAVDTGGFKTIF

SEQ ID NO: 305812 - protein, 15 aa, Homo sapiens
  CDR3 for beta chain variable domain of TCR clone 152906 (TRBV7-2, TRBJ2-3)
CASSLRGGSTDTQYF

SEQ ID NO: 305813 - protein, 14 aa, Homo sapiens
  CDR3 for alpha chain variable domain of TCR clone 152907 (TRAV8-4, TRAJ13)
CAVTLSGGYQKVTF

SEQ ID NO: 305814 - protein, 14 aa, Homo sapiens
  CDR3 for beta chain variable domain of TCR clone 152907 (TRBV7-2, TRBJ1-2)
CASSETGSTYGYTF

SEQ ID NO: 305815 - protein, 14 aa, Homo sapiens
  CDR3 for alpha chain variable domain of TCR clone 152908 (TRAV17, TRAJ57)
CAKDPQGGSEKLVF

SEQ ID NO: 305816 - protein, 17 aa, Homo sapiens
  CDR3 for beta chain variable domain of TCR clone 152908 (TRBV5-1, TRBJ2-2)
CASSLAGLSGGTGELFF

SEQ ID NO: 305817 - protein, 11 aa, Homo sapiens
  CDR3 for alpha chain variable domain of TCR clone 152909 (TRAV2, TRAJ21)
CAVFNFNKFYF

SEQ ID NO: 305818 - protein, 13 aa, Homo sapiens
  CDR3 for beta chain variable domain of TCR clone 152909 (TRBV15, TRBJ1-6)
CATSGGLNSPLHS

SEQ ID NO: 305819 - protein, 11 aa, Homo sapiens
  CDR3 for alpha chain variable domain of TCR clone 152910 (TRAV35, TRAJ30)
CAPGGDDKIIF

SEQ ID NO: 305820 - protein, 22 aa, Homo sapiens
  CDR3 for beta chain variable domain of TCR clone 152910 (TRBV7-6, TRBJ2-1)
GGTRPCIAGPAAWGGGADEQFF

SEQ ID NO: 305821 - protein, 12 aa, Homo sapiens
  CDR3 for alpha chain variable domain of TCR clone 152911 (TRAV26-2, TRAJ21)
CILKGNFNKFYF

SEQ ID NO: 305822 - protein, 14 aa, Homo sapiens
  CDR3 for beta chain variable domain of TCR clone 152911 (TRBV12-4, TRBJ1-1)
CASSLGTGVTEAFF

SEQ ID NO: 305823 - protein, 18 aa, Homo sapiens
  CDR3 for alpha chain variable domain of TCR clone 152912 (TRAV21, TRAJ52)
CAVRPSPAGGTSYGKLTF

SEQ ID NO: 305824 - protein, 16 aa, Homo sapiens
  CDR3 for beta chain variable domain of TCR clone 152912 (TRBV10-2, TRBJ1-5)
CASSVRDRASNQPQHF

SEQ ID NO: 305825 - protein, 13 aa, Homo sapiens
  CDR3 for alpha chain variable domain of TCR clone 152913 (TRAV25, TRAJ30)
CAGRVDRDDKIIF

SEQ ID NO: 305826 - protein, 17 aa, Homo sapiens
  CDR3 for beta chain variable domain of TCR clone 152913 (TRBV7-9, TRBJ2-6)
CASSFGAGYSGASVLTF

SEQ ID NO: 305827 - protein, 13 aa, Homo sapiens
  CDR3 for alpha chain variable domain of TCR clone 152914 (TRAV8-6, TRAJ21)
CAVSPSSLNKFYF

SEQ ID NO: 305828 - protein, 14 aa, Homo sapiens
  CDR3 for beta chain variable domain of TCR clone 152914 (TRBV7-9, TRBJ2-5)
CASSLDTAHETQYF

SEQ ID NO: 305829 - protein, 12 aa, Homo sapiens
  CDR3 for alpha chain variable domain of TCR clone 152915 (TRAV26-2, TRAJ48)
CIPRKGNEKLTF

SEQ ID NO: 305830 - protein, 14 aa, Homo sapiens
  CDR3 for beta chain variable domain of TCR clone 152915 (TRBV28, TRBJ2-7)
CASSTLRGRFEQYF

SEQ ID NO: 305831 - protein, 13 aa, Homo sapiens
  CDR3 for alpha chain variable domain of TCR clone 152916 (TRAV12-3, TRAJ13)
CAMTSGGYQKVTF

SEQ ID NO: 305832 - protein, 13 aa, Homo sapiens
  CDR3 for beta chain variable domain of TCR clone 152916 (TRBV20-1, TRBJ2-2)
CCALSGGAGELFF

SEQ ID NO: 305833 - protein, 11 aa, Homo sapiens
  CDR3 for alpha chain variable domain of TCR clone 152917 (TRAV2, TRAJ31)
CAAGPPARLMF

SEQ ID NO: 305834 - protein, 12 aa, Homo sapiens
  CDR3 for beta chain variable domain of TCR clone 152917 (TRBV7-8, TRBJ2-7)
CASSIGDREQYF

SEQ ID NO: 305835 - protein, 11 aa, Homo sapiens
  CDR3 for alpha chain variable domain of TCR clone 152918 (TRAV3, TRAJ21)
CAFGNFNKFYF

SEQ ID NO: 305836 - protein, 16 aa, Homo sapiens
  CDR3 for beta chain variable domain of TCR clone 152918 (TRBV19, TRBJ2-1)
CASSKAGPGSYNEQFF

SEQ ID NO: 305837 - protein, 13 aa, Homo sapiens
  CDR3 for alpha chain variable domain of TCR clone 152919 (TRAV20, TRAJ12)
CAVRLDSSYKLIF

SEQ ID NO: 305838 - protein, 13 aa, Homo sapiens
  CDR3 for beta chain variable domain of TCR clone 152919 (TRBV6-1, TRBJ1-1)
CASSWTVDTEAFF

SEQ ID NO: 305839 - protein, 11 aa, Homo sapiens
  CDR3 for alpha chain variable domain of TCR clone 152920 (TRAV21, TRAJ48)
CAVDGNEKLTF

SEQ ID NO: 305840 - protein, 19 aa, Homo sapiens
  CDR3 for beta chain variable domain of TCR clone 152920 (TRBV7-2, TRBJ2-3)
CASSSQGGPRLAGADTQYF

SEQ ID NO: 305841 - protein, 14 aa, Homo sapiens
  CDR3 for alpha chain variable domain of TCR clone 152921 (TRAV26-1, TRAJ38)
CIADNAGNNRKLIW

SEQ ID NO: 305842 - protein, 15 aa, Homo sapiens
  CDR3 for beta chain variable domain of TCR clone 152921 (TRBV7-9, TRBJ2-2)
CASGPLDTFPGELFF

SEQ ID NO: 305843 - protein, 13 aa, Homo sapiens
  CDR3 for alpha chain variable domain of TCR clone 152922 (TRAV13-1, TRAJ49)
CAAMLYTGNQFYF

SEQ ID NO: 305844 - protein, 17 aa, Homo sapiens
  CDR3 for beta chain variable domain of TCR clone 152922 (TRBV11-2, TRBJ2-1)
CASSLYPPGVEYNEQFF

SEQ ID NO: 305845 - protein, 14 aa, Homo sapiens
  CDR3 for alpha chain variable domain of TCR clone 152923 (TRAV12-3, TRAJ15)
CAMIPPQAGTALIF

SEQ ID NO: 305846 - protein, 12 aa, Homo sapiens
  CDR3 for beta chain variable domain of TCR clone 152923 (TRBV11-3, TRBJ2-2)
CASSFGGGELFF

SEQ ID NO: 305847 - protein, 12 aa, Homo sapiens
  CDR3 for alpha chain variable domain of TCR clone 152924 (TRAV12-3, TRAJ17)
WAMTLTGNKLTF

SEQ ID NO: 305848 - protein, 11 aa, Homo sapiens
  CDR3 for beta chain variable domain of TCR clone 152924 (TRBV11-2, TRBJ1-1)
CASSINTEAFF

SEQ ID NO: 305849 - protein, 14 aa, Homo sapiens
  CDR3 for alpha chain variable domain of TCR clone 152925 (TRAV12-3, TRAJ58)
CAMSTETSGSRLTF

SEQ ID NO: 305850 - protein, 13 aa, Homo sapiens
  CDR3 for beta chain variable domain of TCR clone 152925 (TRBV27, TRBJ2-3)
CASSWVRTDTQYF

SEQ ID NO: 305851 - protein, 15 aa, Homo sapiens
  CDR3 for alpha chain variable domain of TCR clone 152926 (TRAV12-2, TRAJ20)
CAVKGGFGAGNTVTV

SEQ ID NO: 305852 - protein, 13 aa, Homo sapiens
  CDR3 for beta chain variable domain of TCR clone 152926 (TRBV12-4, TRBJ2-7)
CASSPGQLYEQYF

SEQ ID NO: 305853 - protein, 16 aa, Homo sapiens
  CDR3 for alpha chain variable domain of TCR clone 152927 (TRAV3, TRAJ37)
CAVRVRGSGNTGKLFF

SEQ ID NO: 305854 - protein, 11 aa, Homo sapiens
  CDR3 for beta chain variable domain of TCR clone 152927 (TRBV11-2, TRBJ2-2)
CASSLPGELFF

SEQ ID NO: 305855 - protein, 13 aa, Homo sapiens
  CDR3 for alpha chain variable domain of TCR clone 152928 (TRAV13-2, TRAJ48)
CAEMDFGNEKLTF

SEQ ID NO: 305856 - protein, 15 aa, Homo sapiens
  CDR3 for beta chain variable domain of TCR clone 152928 (TRBV11-2, TRBJ1-2)
CASSLEGVQRNGYTF

SEQ ID NO: 305857 - protein, 15 aa, Homo sapiens
  CDR3 for alpha chain variable domain of TCR clone 152929 (TRAV26-1, TRAJ40)
CIVRVTTSGTYRYIF

SEQ ID NO: 305858 - protein, 12 aa, Homo sapiens
  CDR3 for beta chain variable domain of TCR clone 152929 (TRBV7-9, TRBJ1-4)
CASSTDREKLFF

SEQ ID NO: 305859 - protein, 13 aa, Homo sapiens
  CDR3 for alpha chain variable domain of TCR clone 152930 (TRAV8-6, TRAJ49)
CAVITNTGNQFYF

SEQ ID NO: 305860 - protein, 13 aa, Homo sapiens
  CDR3 for beta chain variable domain of TCR clone 152930 (TRBV4-1, TRBJ1-1)
CASSQLGTGEAFF

SEQ ID NO: 305861 - protein, 14 aa, Homo sapiens
  CDR3 for alpha chain variable domain of TCR clone 152931 (TRAV12-2, TRAJ45)
CAVNIGGGADGLTF

SEQ ID NO: 305862 - protein, 19 aa, Homo sapiens
  CDR3 for beta chain variable domain of TCR clone 152931 (TRBV28, TRBJ2-1)
CASSFSIRGSGRTRYEQFF

SEQ ID NO: 305863 - protein, 16 aa, Homo sapiens
  CDR3 for alpha chain variable domain of TCR clone 152932 (TRAV4, TRAJ22)
CLVGDLYSGSARQLPF

SEQ ID NO: 305864 - protein, 14 aa, Homo sapiens
  CDR3 for beta chain variable domain of TCR clone 152932 (TRBV28, TRBJ2-3)
CASSWRGRADTQYF

SEQ ID NO: 305865 - protein, 20 aa, Homo sapiens
  CDR3 for alpha chain variable domain of TCR clone 152933 (TRAV12-1, TRAJ42)
SSVIQPPTSVKGGSQGNLIF

SEQ ID NO: 305866 - protein, 16 aa, Homo sapiens
  CDR3 for beta chain variable domain of TCR clone 152933 (TRBV11-2, TRBJ2-7)
CASSPTTGGVSYEQYF

SEQ ID NO: 305867 - protein, 16 aa, Homo sapiens
  CDR3 for alpha chain variable domain of TCR clone 152934 (TRAV3, TRAJ5)
CAVRNLMDTGRRALTF

SEQ ID NO: 305868 - protein, 15 aa, Homo sapiens
  CDR3 for beta chain variable domain of TCR clone 152934 (TRBV5-4, TRBJ2-2)
CASSLTSRGTGELFF

SEQ ID NO: 305869 - protein, 14 aa, Homo sapiens
  CDR3 for alpha chain variable domain of TCR clone 152935 (TRAV9-2, TRAJ39)
CALYNYNAGNMLTF

SEQ ID NO: 305870 - protein, 14 aa, Homo sapiens
  CDR3 for beta chain variable domain of TCR clone 152935 (TRBV7-2, TRBJ2-7)
CASRSQGAAYEQYF

SEQ ID NO: 305871 - protein, 11 aa, Homo sapiens
  CDR3 for alpha chain variable domain of TCR clone 152936 (TRAV12-2, TRAJ42)
CAPGSQANLIF

SEQ ID NO: 305872 - protein, 14 aa, Homo sapiens
  CDR3 for beta chain variable domain of TCR clone 152936 (TRBV7-2, TRBJ1-1)
CASSFLTGTTEAFF

SEQ ID NO: 305873 - protein, 16 aa, Homo sapiens
  CDR3 for alpha chain variable domain of TCR clone 152937 (TRAV13-1, TRAJ18)
CAASRMRGSTLGRLCF

SEQ ID NO: 305874 - protein, 16 aa, Homo sapiens
  CDR3 for beta chain variable domain of TCR clone 152937 (TRBV27, TRBJ1-1)
CASSSRGRTGYTEAFF

SEQ ID NO: 305875 - protein, 12 aa, Homo sapiens
  CDR3 for alpha chain variable domain of TCR clone 152938 (TRAV13-2, TRAJ23)
CAERHRGGKLIF

SEQ ID NO: 305876 - protein, 13 aa, Homo sapiens
  CDR3 for beta chain variable domain of TCR clone 152938 (TRBV19, TRBJ2-1)
CASSMYRVNEQFF

SEQ ID NO: 305877 - protein, 14 aa, Homo sapiens
  CDR3 for alpha chain variable domain of TCR clone 152939 (TRAV13-1, TRAJ17)
LSSRSKAAGNKLTF

SEQ ID NO: 305878 - protein, 16 aa, Homo sapiens
  CDR3 for beta chain variable domain of TCR clone 152939 (TRBV7-9, TRBJ2-1)
CASSDVAGGSYNEQFF

SEQ ID NO: 305879 - protein, 18 aa, Homo sapiens
  CDR3 for alpha chain variable domain of TCR clone 152940 (TRAV26-2, TRAJ54)
CILRDVEVGIQGAQKLVF

SEQ ID NO: 305880 - protein, 14 aa, Homo sapiens
  CDR3 for beta chain variable domain of TCR clone 152940 (TRBV5-1, TRBJ1-5)
CASSLGQGAQPQHF

SEQ ID NO: 305881 - protein, 14 aa, Homo sapiens
  CDR3 for alpha chain variable domain of TCR clone 152941 (TRAV8-3, TRAJ47)
CAVGAQGYGNKLVF

SEQ ID NO: 305882 - protein, 16 aa, Homo sapiens
  CDR3 for beta chain variable domain of TCR clone 152941 (TRBV19, TRBJ2-1)
CASSKAGPSSYNEQFF

SEQ ID NO: 305883 - protein, 12 aa, Homo sapiens
  CDR3 for alpha chain variable domain of TCR clone 152942 (TRAV12-3, TRAJ17)
CAMTLTGNKLPF

SEQ ID NO: 305884 - protein, 13 aa, Homo sapiens
  CDR3 for beta chain variable domain of TCR clone 152942 (TRBV5-1, TRBJ1-2)
CASSSTGVYGYTF

SEQ ID NO: 305885 - protein, 13 aa, Homo sapiens
  CDR3 for alpha chain variable domain of TCR clone 152943 (TRAV21, TRAJ36)
CAVIKTGANNLFF

SEQ ID NO: 305886 - protein, 13 aa, Homo sapiens
  CDR3 for beta chain variable domain of TCR clone 152943 (TRBV29-1, TRBJ2-3)
CTATRGGRDTQYF

SEQ ID NO: 305887 - protein, 14 aa, Homo sapiens
  CDR3 for alpha chain variable domain of TCR clone 152944 (TRAV27, TRAJ44)
CASSFTGTASKLTF

SEQ ID NO: 305888 - protein, 13 aa, Homo sapiens
  CDR3 for beta chain variable domain of TCR clone 152944 (TRBV27, TRBJ2-3)
CATSRGGLYTQYF

SEQ ID NO: 305889 - protein, 10 aa, Homo sapiens
  CDR3 for alpha chain variable domain of TCR clone 152945 (TRAV23/DV6, TRAJ43)
CAAAVAALEQ

SEQ ID NO: 305890 - protein, 12 aa, Homo sapiens
  CDR3 for beta chain variable domain of TCR clone 152945 (TRBV5-1, TRBJ1-1)
CASSQGNTEAFF

SEQ ID NO: 305891 - protein, 16 aa, Homo sapiens
  CDR3 for alpha chain variable domain of TCR clone 152946 (TRAV12-2, TRAJ28)
CAVITDSGAGSYQLTF

SEQ ID NO: 305892 - protein, 14 aa, Homo sapiens
  CDR3 for beta chain variable domain of TCR clone 152946 (TRBV25-1, TRBJ1-1)
CASTHLVGNTEAFF

SEQ ID NO: 305893 - protein, 14 aa, Homo sapiens
  CDR3 for alpha chain variable domain of TCR clone 152947 (TRAV1-2, TRAJ8)
CAVREDTGFQKLVF

SEQ ID NO: 305894 - protein, 14 aa, Homo sapiens
  CDR3 for beta chain variable domain of TCR clone 152947 (TRBV7-8, TRBJ1-5)
CASSSHGSNQPQHF

SEQ ID NO: 305895 - protein, 16 aa, Homo sapiens
  CDR3 for alpha chain variable domain of TCR clone 152948 (TRAV30, TRAJ24)
CGAEIVDADSWGKFQF

SEQ ID NO: 305896 - protein, 13 aa, Homo sapiens
  CDR3 for beta chain variable domain of TCR clone 152948 (TRBV11-2, TRBJ2-5)
CASSSTGEETQYF

SEQ ID NO: 305897 - protein, 13 aa, Homo sapiens
  CDR3 for alpha chain variable domain of TCR clone 152949 (TRAV12-2, TRAJ13)
CVKKTGGYQKVTF

SEQ ID NO: 305898 - protein, 15 aa, Homo sapiens
  CDR3 for beta chain variable domain of TCR clone 152949 (TRBV27, TRBJ2-1)
CASSNGGGSSNEQFF

SEQ ID NO: 305899 - protein, 14 aa, Homo sapiens
  CDR3 for alpha chain variable domain of TCR clone 152950 (TRAV12-1, TRAJ3)
CGAARYSSASTIIF

SEQ ID NO: 305900 - protein, 15 aa, Homo sapiens
  CDR3 for beta chain variable domain of TCR clone 152950 (TRBV7-8, TRBJ2-6)
CASSREGSGANVLTF

SEQ ID NO: 305901 - protein, 16 aa, Homo sapiens
  CDR3 for alpha chain variable domain of TCR clone 152951 (TRAV14/DV4, TRAJ54)
CAMREGRIQGAQKLVF

SEQ ID NO: 305902 - protein, 13 aa, Homo sapiens
  CDR3 for beta chain variable domain of TCR clone 152951 (TRBV7-9, TRBJ1-2)
CASSLKQNYGYAF

SEQ ID NO: 305903 - protein, 14 aa, Homo sapiens
  CDR3 for alpha chain variable domain of TCR clone 152952 (TRAV30, TRAJ39)
CGTEKVNAGNMLTF

SEQ ID NO: 305904 - protein, 19 aa, Homo sapiens
  CDR3 for beta chain variable domain of TCR clone 152952 (TRBV19, TRBJ2-5)
CASSIGQVTDFFLGETQYF

SEQ ID NO: 305905 - protein, 15 aa, Homo sapiens
  CDR3 for alpha chain variable domain of TCR clone 152953 (TRAV27, TRAJ33)
CAGADIMDSDYQLIW

SEQ ID NO: 305906 - protein, 13 aa, Homo sapiens
  CDR3 for beta chain variable domain of TCR clone 152953 (TRBV28, TRBJ1-2)
CASSLQGRGGYAF

SEQ ID NO: 305907 - protein, 15 aa, Homo sapiens
  CDR3 for alpha chain variable domain of TCR clone 152954 (TRAV20, TRAJ41)
CAVQANSNSGYALNF

SEQ ID NO: 305908 - protein, 14 aa, Homo sapiens
  CDR3 for beta chain variable domain of TCR clone 152954 (TRBV9, TRBJ2-7)
CASSVGVGSYEQYF

SEQ ID NO: 305909 - protein, 14 aa, Homo sapiens
  CDR3 for alpha chain variable domain of TCR clone 152955 (TRAV12-2, TRAJ40)
YAVKIPSGTYKYIF

SEQ ID NO: 305910 - protein, 13 aa, Homo sapiens
  CDR3 for beta chain variable domain of TCR clone 152955 (TRBV7-9, TRBJ1-2)
CASSLKQNYGYTF

SEQ ID NO: 305911 - protein, 15 aa, Homo sapiens
  CDR3 for alpha chain variable domain of TCR clone 152956 (TRAV8-3, TRAJ45)
CASSYSGGGADGLTF

SEQ ID NO: 305912 - protein, 15 aa, Homo sapiens
  CDR3 for beta chain variable domain of TCR clone 152956 (TRBV11-2, TRBJ2-2)
CASSSDRVNAGELFF

SEQ ID NO: 305913 - protein, 15 aa, Homo sapiens
  CDR3 for alpha chain variable domain of TCR clone 152957 (TRAV27, TRAJ38)
CAGRFNAGNNRKLIW

SEQ ID NO: 305914 - protein, 15 aa, Homo sapiens
  CDR3 for beta chain variable domain of TCR clone 152957 (TRBV4-1, TRBJ2-7)
CASSQNTGRLYEQYF

SEQ ID NO: 305915 - protein, 15 aa, Homo sapiens
  CDR3 for alpha chain variable domain of TCR clone 152958 (TRAV2, TRAJ9)
CAVAALYTGGFKTSF

SEQ ID NO: 305916 - protein, 15 aa, Homo sapiens
  CDR3 for beta chain variable domain of TCR clone 152958 (TRBV6-3, TRBJ2-7)
CASSSPGTVFYEQYF
